United States Patent Application Publication US 2014/0325702 A1 - sequence listing, part 31

SEQ ID NO: 52574 - DNA, 993 bp, Heterodera glycines
atgggactcaaacggccaggccccggatggatggatcagcaagtggtcgaactgatcgccggcggcggaatgctcggttagtgccagctgatttggcccacccagcggcggcggcggctggcagcaacggccgcccgccggcggctgaccaattggaggatgtccgtccgtccgtccgtccgaccgagcgggggccaatgccccaaatcacacatttttggtgcccccgccgccgaaggccaccgaatccattaatttttgggaggattttggacgccgtccgccggcaaaggatttacggatttaatgaccgcccgacgaacaattaactaaaatgtccccccccccccaatctctgtcaatctttcgccccgtctcccctttatcccaataattcaaaaatagccgttttttattttgctgtaaaaataaatatgtgcttcttcctaatgctgcgatgcttcgatgaataaaactttcccggaattttttaaaatttttttgtctttaattgaatctgagaattttcaaattttttgtccggtttattgggttttaatctcgagaaattctccgctttttaaatttaatgataaaaaattatgaatttttcattctcattctcagcactggctcattaaatatattttcgaacccattcatgaacaaaaggaaatttttgtttttgtaaaatttctatggctttttaacccgatcttggatgtggaactgaatttacctgaccctgacgtaagatttttgccgaaaattctttaaaatctcgggaaatcgcattaattttttctcccttaattcaaaaattttcttattttctagccccatttacggctcatgaaccaataaatctcaagcgcaaataaattattttctttttacccagtctcctcttatgtcatcgcgaaattttcgattttttatgattttcctctcattagtccctttttttttgcaaattcacttcggccaattaaa

SEQ ID NO: 52575 - DNA, 853 bp, Heterodera glycines
  unsure (1)..(853): unsure at all n locations
atgtcctggcgacgtcttaatttttcaatttctcaaagtaagtgtatacacttgtcaaatgtgatttgttaataatatatgaaattttattgaaatcagcgcgaatttaatagattataaaaatattaaatttaacggttctcctttttgttacccccctgaaatttttttttaaatcatttttccggggtaattttatgcgctgacacatatgtgacgtttatttttagctcttatgctttttacgtttgttacgtgaaattttttgatttaaaagtcgtataaaacaccttccctaagaagcgtattattagaattttccgaaagtttttttttttgttcaggaccagtaaatgaaatgcttgtcgaaattttattgaaatcaacatgaattttaagttataaaaataatttaatttcactccttttctaagaatgttacattggctgtctgaagacaatttttgtgatcaccttcatcttggcggtggtctttgttgttgtgttccgaggtatttaccttgatcaaaaaaaatcaattgcggaaatgtcgcagatcgtcaatgaagtgatcgcaaattttagtcgaccgccggtataatcagaacaacattgaccaatataagatgtacatatttttattccttttagcgcttggcaaaagcctgctgttcatgttgtggcaaaggctaatgaattcaaatgtcgctggattttgaagttttaatgtaaataggtggtagcctctttttgaaatttttttttctcatttaataatccgagacattagaatccgaaggacatanggtatggcgagtatttttttttcttttgattgattttggcgaataaa

SEQ ID NO: 52576 - DNA, 150 bp, Heterodera glycines
acttttggcacaaggcaacgaactgttgctggtgtccgccccgaaaatgaggccaattgtttgctggccgatggcgaagaagaacacggaggaggaggagaatgattaaatgataaatgaatgcctcaacaaatgtgtcttatttattta

SEQ ID NO: 52577 - DNA, 243 bp, Heterodera glycines
atggccaaatatggaccaaaatatggactaaacactgccaaaatctatgttttaaaccctcaaaaattccaaaaaaggtatatatattcaatatttgcttaaataaacttaaaaaatacaataaacaaccaaaaaatgaatttaaaaacataaaaatgaaaatttttattaaattctagcttcacaattgcaaaccaaatacgtctcaaaatttttgtaataatctcattctgttgccagtaa

SEQ ID NO: 52578 - DNA, 155 bp, Heterodera glycines
atgtcacaatcaccgcaaatggcgactttcagcggtctgacagcaaatatttaccacgaaaaacagaagaggcaactttgcctgctccacacactgaacaaccttttccaacgtgaagaatttgtacgggatgaattggacgaaatttgtgaaag

SEQ ID NO: 52579 - DNA, 280 bp, Heterodera glycines
atggctgaattgttgcggcccaaagccaccagcattgctacgcgtaaaattcttattgccgaatatgtaataaatggcatttgatcatttttaataatataataatttttttttacaattttcagtctgaagttcgagctgttattgatccgctaattagtctgaaatttgcaaaattaaagagcgaacagagtgaccgaagttgtaagttttttgccaaatttaggcatgtgacccaaaaccggcaatgttaaagaacattggtcccggaaaaaataaa

SEQ ID NO: 52580 - DNA, 829 bp, Heterodera glycines
ggggactgcccgaaaccaaaaaaatcgatttttcaagtgtccgtttgggtactcaaacatttatgggagcaaaatccaacgcagaattaaagtacaggctataggaagctatcccgaaggattcggtctccccataaatctgggcgcatcggttcggggggactgccccgaaaacaaaaaaatcgattttttcaagtgtccgtttggggtactcaaacaattatggggagcaaaaatccaacgcagaattaaagtacaggctatagggaagctattcccgaaggattcggtctccccataaatctgggcgcatcggttcggggggactgccccgaaaacaaaaataaatcgattttttcaagtgtccgtttggggtactcaaacaattatggggagcaaaaatccaacgcagaattaaagtacaggctatagtgaagctattccggaaggattcggtctccccataaatctgggcgcatcggttcagggggactgccccgaaaacccaaaaaaaaattttttggataaaaattatttaaatgaactgactagataatatttaaaataggttatttctcttcctttcagtatccctgcaaagtttggtgcgcttctgatcagtttctgaaaaaaaagttaagcctaaactttttggcctgtttaaaaaggaattaaaaatttttaaaaattttattcatctccctttttgatagaaaaagcatcagagtgcctaaactaacatgtaaataaaatttggtgcgtttcagaaccctttctgaaaaaatatttaagaattaattttgcaaaaaataaataaaaacgaaagact

SEQ ID NO: 52581 - DNA, 1331 bp, Heterodera glycines
atgaaaatgttctttgatggcaacatcttattatttgtaatattggcactttgtccaaaccgcatttcatctgcaagtactcgttcagtcgcaagcacggatgatgaagttgagcgtaagatgaaattagacctggctactcatcaaatgaagaaaaagcttggcaaatatgtagatgctattgaaaacccgtttcaagccacttcttcctcagaagtgcaacaaacaccaccagttaccgattcaaaacggaatgagacgtaaaattaaatttaaaaaatttaaacaaataaatttttagaatcaaaactcggactaacgctagcaatagtacatcgaaatgcgttaacaccaatgttgccagaactctttcacaaaataatggggaggacaagcagctgacaataggaacaaaattcccatgggaaaatgttagaagaaatttggctgaagaaaaaccggaccgagagcgtgagaaaaaagtacgcgaaccgaagcagcagcaaccacgtgaaagcacttcaagtaaaattgtgccattggaagaaaagcagcaaaagcaaagcatggataaaagcgcttacgaagagccggaacagtacgagcaacaaccagcaagaaaaagcaactcaatgagtgaaatgcttgcactagaaaaatacgaagcaagaagcaaaagcaggcaaattcgtgaggagagcagtggacaaagaaaccatcgaagatcatcagcaaggagaagcaactttgatgagcaaatgaaatatgaaaagccaagaaagagtcggtattctaaggaagagagtttgcgagagcatcgaccaaggaaaagtcacgcaaaagaaaagcagaaacagagagaagctccaaggaaaagcaactatgtggaggatgaatcgaaagactctcatgcggcaagaacaagcagttcaactgcgatagagagcttacgaaaattaaggcgccaaaaaagtagcagacgatcaggagggatgatcgaagcccaagagttgtcaagattattgacaatgacgagcgatacacgacaatcatcagggaggagaagcttttcaaaatcgagaacgatgatgaccgatcgagaattgtcaaaatggagggacggcggtgccattggcgaagaattggccacaaggagcagcagaccaatagtagctatgccagttgctcagaaaagaaaagaaaatagcattgctgacatgcaaaatttgcaagacgaaatgagggcgattaggctacgagaattggcccttaatgcatctaacaagaaaagagaggaggctgtcgcgctgtttcgtaaccaaatcgagtaa

SEQ ID NO: 52582 - DNA, 87 bp, Heterodera glycines
caacaaaatttgaataacgggcgcgaagcgcccgtccaaggccaacaaatttaaaaacgggcgcgaagcgcccgtcttgagcctcga

SEQ ID NO: 52583 - DNA, 899 bp, Heterodera glycines
ataaaagtcgattggactcataaactgcaatagagccaaaatccgttccctaatcatgacacataaacaaaaagatacaaaaacattcatcaatcccttttcatggctataaaaatgtttgttttttcgctttgtcttgcatttgaaaaaaaaataaaaatttctaacgcaattaattattctgctctttgttgtgtgatatcattcggaactcggccaaaattgtgctaattgccacaaaaatgaaccgacggtaagcaatttgaaaagtcacacaaattcatcatttatttaactaaactttttcccatttcagttggatttgcaacgacgtttggatggacattttcccctcttttgaccgtgctcaactcggcctcaaaatggcacttctttcgccacgtttcaatgcgttggtggacaaacatttcgatggcaaaagcgaattgacaatttggagatcaatcgaaattcgtcgcaaggacaaaggacctgaaccgaagctgtctgtacgaatcgatgacaaatttgtgccatttccattgcccgaccgtccgttgcccagcaaaatccgttttaagcatcttcggattgagtacttaaaaatcagagctatcgcaataaaagcattcatcccatttttaggtacatcgatcactccgtcatcgcttttcttcgttcaaatcaccaaattttcgacaaaagaggcaccaatttacatttgtggcttccttcttcacataccacgaatggccaacaaatttgggacatttttgttcgtgaaatttggccaattttttctgaaaacattcgccacttgggcttttacgatggttatcatttggacaatttgcttcgtcgcacttcgccaacaattttcaccgatctcaaccaattga

SEQ ID NO: 52584 - DNA, 1140 bp, Heterodera glycines
atggaccatacgccgtggcgagtcgtcctttacgtcatcgacgactttcggattcatttgtgagttagtgagttgcatttaaatttctttatttcccttttttgctatattttatttccgctacttttgttttcttcagaaatcgtcgttttgatcatttggaacagtggcaaattgtcctttacactctgtcgttcgtcctttttgttcaatgggttcgcaaagtgttgaaattcgaagagttcgtctcatttcgccaattggtgtcgactgtctgttttttgtttttattttcattttcagtggaatgattcgttgctcagtttttccacgtacaaacacaaatgggaagagaacaaagaaaacgcgtacaaagaattggagggtggccaactgacggagatgaggtgcattcggaaatattttaaatttcagatcggatgcatcgcgccgatcggctgagggaattttacaaatatttgcccgaccgtggactgccccccgacgacatcattcgcgaggcgaccgcctacaaaacgatgagcgacattctcttcgagaggggccgactgtgcgggtcgctgtacgcggtggaggacgaagacagcaattaccagcggatgatcaaacaggtcgagggaggaggggggggggcgaaggattatttggaaaacttgtgtttgaacaggttttcgagctgtactctcatacaaatgccgctttccccgaagcgtgcccttccattaggaaaatggaggtcggtcctcttttgtgtgccatcattggatttagggtaaaacggcacttttaggccgaatgtatccggattttgtgcagtctttttcacggaggtgccaaaagttgtggagtggttaccaccagcgggtccgagtcgatcattttggcatgcctcggtttcacatttaaatttcccatttaatttatccgtcttttacagcttatcggaactctgcccacaaaaatggcattcgaagaccggaaattattgtgcccctcaacgcccatgtcggattttttaaagcagcgaaactattggggtaaatgaaaagacttcaatttttgtttatgtttttttccagaatgcgtttggtccgcgtcggcaccaacagcaaaggccaa

SEQ ID NO: 52585 - DNA, 456 bp, Heterodera glycines
atgaatgttagattcgttatctgcgaccctaaaaaccccataaaacgtgttttcacgacttttaaaaacttacaagaaaatttttgtcaaaaaggtgtggcaccatctaaactattaccgcggcttttactctctgaatttctccctaaatttgtcaatttcagggcgttgtcgttgaaattgaatatgccgcctccaacattctccatcaatgcaaggcccttctcgaagagattgttgaattcttttttggacagtcgaaagtgccggagccggaggtgttcaaacggcacagtgaacagctggacaattatatggcaatcgacactttgagccaatatttggatattttcactgcaattcgaaaacggtcatcctgacgaagagacttaaactttattatttttaaacttgcctaatttattgataaattatttcccatacgactttaataaa

SEQ ID NO: 52586 - DNA, 1044 bp, Heterodera glycines
aggtatatggtgagcctgatttaattattggaaacgattattataatcgtttgaacattagtgtcttagaggaattacaatcgggactgtatatcaatgactcaaatattggtcaatttttgagtggacaaggaaaggttcaattctttaagtcattaaacggatctcaatccgacatatcatcatcagtcattcaccatactgtaaaccaaaagtgtggtaatgatattcaatggattattggtcaacagtaacgaaggttcagtagaatgggaactgaatagcgaccaactgagtcggaattatttcaataaaatgattatggactggaatggtctagaacatgtcggtatgtctgatctcaattcagataagcaaaacgtgagacaaagaatgattgataaaatatcattcaatggggataggtatcaaacagaattgttatgggatgaagaattggctgctcaattgccaacaaattatgatatggcatttagacagttaatgtcaaatttgggcagacttagaaaaacaccggatttgcttcgacaaatccatgaaatcataatggaacaagtcgaaaccgggtttattgaagaatgtgagccattacctattgaagaaaggtatttggttggaagtaaggttcattatttaccacatcacccagtggtaaaggaaacgagtgaacatactaaggttcgaattgtgtataatgcgtccgctagatgcagaggaggtctcaccctcaaccaagtgttagaaaagggagaaaatgactataatgatttagcaggcattttaattcgaagtcgaattaaaccaattctcttgacatgtgacatagccaaggcatttcaccagattttgatacatcctaaggataggaatgcgatgcgattcttgtgggttagagacccatacgtggacgattctcccctcgtggagtatcggtttactagagtaacgtttggagtcatctgttcaccggcgcatctctccttgactatcaaacttcatttgtccaaatatactgacaaaaag

SEQ ID NO: 52587 - DNA, 6575 bp, Heterodera glycines
gtgctttccttcactttgtcccagtggaaaatctccaagtcgaccattctgcagcccacccacaaccaccagcatctgctggttgccggcaatgagttggcgcccgactgtgtgaggcgccaaacaattttaaatttaaaaatgagaattttttttaaaattaatttcttggcgtatcgtcgttcattttatttcagatttatatgtttcacattgcctcacaattgcttgttcgcacattctcttcatctgaccagaaacaagtttatacataattagtcattaattaaaaataattaagaaatcaaaaaattaattttaatggaaattattttaataaaaaaaacaattttagcatttaaacaacataatttaagaatcccgatttgaattcaattcgctctttaaaccaatactcttttttttaaataaatttaaaaaactaataaatttttcaattttgaggaattattttgtttataataataaatactaataatattatgaatttgaaaaaattttaatgcatttaaaaatccgatttaaaaatttaaattaaatctttaattattaaaactagctctttattttttctttttttaaaaatattattagtaaatcttttaaaataattaatttccccccaaaggtcacttcgttgtgcgcatcgaaatggcgcgacggcggcgacacggttcagcaacacaaccaacaccatttctttgtcagcacatcagcagacggagcagttcgagtgtggagcttcacacaggtggaaaaatgtggaatttcataattaaatattaatttatttttaaaatttcaaatgggcaacaactaaattattaattaattggcgcataattattttgttcgtttttctgtaaaaagaaaaaaatctcaaaaagtttggctggagagaaatcctgcttctaatataggttattttaaaagccacatttgccatttacaaattgacattaaaaagaattttgccaattttcaaaattgccgagaaaattgggtgtcaaaaattgttgtttttttttgaggcttcggttgtgaatttttaaaaagtcataaaaattcaatgaattaacggatccggatgcggttttttgaattcaatgtagcataaaggcttgtctaaaatacaggcactggtgttgaacatcgaactcttgcttaaatcaggtttataacacgggaaacccggttttggccattttaacccaaaccgatccatgattttttctcgcattattttaaaattggcaacaatctttttaatgtcattttgttgtagataaatatggcttttaactaatataattagcagctttctctccagccagggtataattaattcatttctaattagttaattaactattaatatttaattaataaactaataatattttaattaattaggcgcaatgtttgaaaacgctgcacgcctgcagcgcgcgcattctgtgctccgtgctcagcagtgacgaccaatggattgcggtcggcagcgcggattcgtgtgcacgcgtgctgctgctggacagcgggcaggtgacgcgcacattcaaagagcacacaggtggaatttaaaaataaagaaaaatagttatttaattagtaattaaaattcattaaaaattaattaattaattaaattttacatatattttcaaagcaataaaattattaaattttaatttaaatattacaaagtaaaaatattgattttatataaatgttttgacttaattaattttataattattttatttaaattaaaatacaaaaataaataaaaataaaatttgcccataggccctgtggtcggtttgcaactgtcttctgacaacactcttctcgtcaccggttccggcgaatttgtcgtcatggtaaggccataattagctatacttttattattatttttttacaaatttcttaaggtttgggacattgaaaaaggcgaaattgttgtccgattacaaggtgtttattgtctagaattaaatttcactatttaattaatttaattacttcaccaattagttggctaattatccaattatactttttttcattatttagttaattaattagtggtaatttaactaagcaattgcatttttaaattcattaatcaattacattattgtttaattaattagttcattaattagttggctaattaattcattacttttttcaatcgcttttttaagggctgatggcaccggtcacttgcttggcattgacaaggtgttctaattaaattacaccccatttaaattttatttttttctccttttcaaaaattaatgatttacattttaaatttaaaattaaaaattcttttaagcaatgacgcctttctggccgttgcatgcgaggacgagacgctgcgcgtcttctctcttgtttctgcgcaagagctgcacgaactaaccgggcatgagtgagtacgcacgcaacacaatgcgtgcgcgcatattttatgcgcaaaaaatcccaatttttctagcaatttttgaaatttgatcataaaaatttccaatttaattttgtgttctatcgcaataaatgccattttttggcattctgcctctgttgcactttatcatcacattcgcatgcacctaggtcacgcatcaacgcgttggttgcgtccggcgacgactgcaagctgttcgcgggcacgcgcgggcgcgtcattgtctacgacatacacaacggccagctgctggaggtgctgcagtgcgcgctggagcgccaaccggtaggcatttattggtcgtgcagaaatttcaaaaaaaaaagttttaaaaaattttgtaggtctcctctgtgcggattagtgatgatgattcgttcgtgctggtcgcatgcggcgatcgcatgtgaaaattaaattaaattttttatctttaatatataaatttaaaatttataaaaataattttaaaagattaacgataaataatattttaaaatttaaattaattagaaaaataaaataaaagttatattaataataatattattaaaatgaattatggctaaattaaaattctgcataatttaatttaaaataataataactgttttcctaattaaatataattaattaccactaattgctttttataaaaatgatattaaaaacaatttttcatttaaaataaataaaacaaatagtattaaaatgaaaaaaattaaattaaattaaagttctattaaataacaataattattttttcctaattaataataattaccgctaattgcctctaagtcacatgtgggcgctggacagcattgagcgcgacgtcgccgcggtgcagcagcacaaaatggcggccgtgacggtggcgccgccggagtcgccgtcctccgcggaaccagcggcggcggaggcggaacaaaccgcgacggggggcggcaccgcgttgacaagcgtttcatgtgtgcaaattgcaccggacgaaaaggtggcacgcgaaagcaattaagaaattaattgatgcttgatttcatggtcgagaaatttctcgaggattatttggtgtctcggtatcgagacgcgtgggtttttctcaattttgagagtgcttttagaggaagcagctcgttccaccaccctctccctgaaattaaaaaaaacttaaacttagaaatttttcattaaaaaaatcttagaatattttttataagaaagtttgaagaaatttttttttttgacatatttgttttgaagaatgtagcagcgattcatcaataatgctgaaaaattttcaaaaaaatttttataaaaatttttctgagatttttcttgaaatttcggttaagaaacggcgacgggcggggagggggcataacgctatttacgactcttgaaaccaattattgatcacacttctgtgtgtgtgtgtttgtcagtctcgagatcaattatggtcacgagactcgattttttgaaaaagtttcaatttgatcaaaatccccgcgcgcatttcagagtgccggctgcgggacggcggatggcatcgtggcattttgggacttggacgtgtgccaatgcatgtggacaagcaatgcgcagcgcaacggtgccgtgagcgcgctgtgcttcagttccgactcctttctgttgctcagcggcagtgaacagggtgaacagcttgccaaggctgggaccaatatatctgatcactgatcaggccttgaagctttctttatgcagggattggatcgaaaatttttccaaatcagaacatcggccccaaaaatcagatttaggggtaaaaaatcagaacattttgcaaattaatgtagtatcaaatttcgtatttttggtctcccattatcgatcgatcttaaacaattttcttaaggaaattagcaaatcataaattttagtgcattcgggataaaaaaaatcagatttttaacaattttttgcggtgcgtttttccaaaaaacttttgggaagtgcgaggggggagatggtccggtggcgccggccgataggcacctccgagaaaattttgtaatttttaatgcgatttgttaacagattttgtccaaaaatgaccaaaatttgccacaaattctttattttcttgtaaaatagtgacattatgccataaaatttcaaatttctgaagaattttaagaaatcagaacaaaattgggtcactaccctccagctcaaaacatttttcagcaattttctggaaatttttttttgaaaacaattcgtaattcatcaaaatttcggaaaattgctagaaacattaaaaaaaaatttttccttgaaatttattgtgaaaaaattactaagatttaaattttctaaaatttaaaatattttttgcttagttgtgtggtcgggtctgattgtttactagacttgtccctaatcactttggtccattgggtctgatcaactcactcataggcattgtgcctgatcacctgaatggccagaccccgctttgatcattcaaactcggggactgatcagtacgcgccgataacatttttaaggtgccgtctcgttgtgggagaccaacaacggacaattgctgaagcaggtccaattgcatgccgaagcggttgtggcgttgtgcacatttgcggatgggtagaaaatttaaaatttgatttcgaaattttttgaattttgaaatttttagggttcgtgtgctgagctgcgattcgtcggacaatgcttatctgtggagtttggcatcgcttgacgaatcttctggcggaaaacggatggaagtgggcaaaagatggaaatactttaaaaatgaaactaaaaattagagaccgacctggacatggatccaggcctggatttttcctggatccaggtccaggccatttttcggcaacctggatttttcctggacttggattttcctggatttttgtccaggaaatcaaggtccaggtcaaatgtggaaaaaaaaatccaggtccaggctttttcaaaatgtcgatctctactaaaaatgtataaataaataatatttaaattaataataaaaaaatttaataaatatctaattaaaattgaaaaaagaaattatatttattcttcttttataattaatttttatttatttgaaaaaaatattaattaaacaaatgaaatatataataaaattccagaaactatctaatagcaaaataaaattaaattaacaatattttattaattaaaaaaaaattcataattcaaaaattttaaataaaaaaaatcttctaaatttcatatacaaaattgttgtaaaataaaataaaatatcaaaagaagattcaaaaatacaacgaaaatcaatttagttgaatatttgagtaattaatcgtcatgttttataacgaataatgccaattaatttaatttaattgaattgaattaattaattctttcatatttatttaaataattaaattttttaaaaagaattaaatccaaatttcaattttaacaattttcttagctgatcgcctccattgcgttcatgcatccgccactgtatgtgcgactgtcggataccgtactcatcgcgcagcatggcgccaacccgcgggagttcgttgcgatacccacaaaatctgaacaaaattcaaatgcaaattttcttttttttctccagaatgaatgtttggtcagtgtccggcgatcggctgtttacgcgatcgaaggtctttttgttttccaatgcaaaattttaccccgtagtgcgtcgacatttgcggaccaaatgtctgggttgaattttcgaataaagaaaaaaatacgaatgcattttcaataaattttaatacatcaaaattaaattaatgaaggtagctcatacaagtctacttttgcatttttttcttttttcttgatgggagagattggctagaataagatatttctaacctataattgaactgtgataaaaaaatttgctttattttataaaagtcttcaagaattttataccaaggaaagttttggtgtttcacttccatgctttggtagaccaagagcttaaatttttatc

SEQ ID NO: 52588 - DNA, 341 bp, Heterodera glycines
atttgccttcacaacacaccagccaatttgcattccacttctgccagccggtacgaacgcgtcacaatgccatcgccgtcgtcgtcgtccaaaaatcagccggaggcccaagcgagggcaccgccggcacgcggcggtgccggcggcgggtcattcgcattggaactcagtgccacaaccaccggagcagcaagtgaacaaattggggaggagagggagaagcaatagaaatggcatttttgaaatgattagaattccattcccgagtgatctgaaagttttcggcgggattagttaacggacaattgtttgggattaatataatggattctctaaagtga

SEQ ID NO: 52589 - DNA, 760 bp, Heterodera glycines
atgggcgacagaattccgcccgcaaacggtgcagacaaagagccggtgacaagtcgggtaagcgcatgcacatatggggaaattgcaaattttcaaaaaattaaatttaaaaataaaatttttaaaataaattttggcatttttttcgcgcgcaggcgtccgaagtcgaagcgcacgcgaaccgactgcgcgcggtggcggagcaagagcagaaacggcaagcggaacaacaggcactatgccaaaaaaaaaagaatttttaatttaaaaattcaaaaaaatttcaggcgacaaattccgccatcgccgcccctgcggaacgcgacgcggcgaccgcgtcagcgaccgccgcgcagtcgccggacgccgccgcctccaccgctcaacagtcgcagaaggagcggcggacgcggcgctccaaactttgtacaataatgtgatcggtggttggtcaccgcctgggccggcgagcgacggtgcgcacgattacggtattggtgcaacagcgacgcggcccgataccgtaaccatgaaagtgatttgtacagttcatactgtgtatatttttgttatgtttcatatacggtatcttttttttatttcagtaaacgtacagaaggaactttctattttttgtttttgggaagttgttggttttaatgggaccacttcttttttgaaattattgaacagaatttatccaacaatttttaggtaaaattggttaaccgtttacggggtgaagaatttgaaaatataa

SEQ ID NO: 52590 - DNA, 1396 bp, Heterodera glycines
atgaccaacgagcttgccagcacagagacgcagactgaaccagaagagaagcccaaaacatttgcttttggattgcaaactgatcaaaccggtttgatcgattcggagatgcaaacagtttcagaagagaagccgaaaacggtcacttttgcaatgcaaactgttcaaaccgatctggtcaattcggagatgcaaacactgtctgaagaggaaccgaagattaccaacaagttaatcactacagaggcgcagactgaacctgaagagaagcccaaaacatttgcttttggattgcaaactgatcaaaccggtttgatcgattcggagatgcaaacagtttcagaagagaagccgaaaacggtcacttttgcaatgcaaactgttcaaaccgatctggtcaattcggagatgcaaatactgtctgaagagaaaccgaagatgaccaacgacgaggttcttgaactcaatgtctcggttagtttattttaaaaatgtttatttggtcttcatatattttcttgttgtcattttattctttgagactaattttatttttcgatgttgcagaaattgcctatggatgctgattcgtcatttctcagtaatcaaggacggagttcccctttgttggacgaatcattgcgccgtaaatacaatgaaaagtgtgaagaaatggcagaattacgttatgtaatttatctttttcttaaaatcttttctaaacattttctacaggcatatgagtttcaacagtcaatcatttctaatcaactggacgaaattgcgcggctaaagcaacaacaacaactacgaaatggcgttcaaaaaaatgggtgagcgaagaaatagattcttacactgacaatgagtacgtttaaaagcgtgttacttttttgaattaaatgatgcttaccgattacaatacaagtcattgttcagaagtccgtcctcgactcgtcactcagccattactgctgctgcttcgccgtcgtccgttttccccagcggtgctctgcccaccatttcgggtcgaccacgcgctgcaaggcgaacttattgcgaacattgcgaaatgtttgacgcacacgactcgtcagagtgtccaaaagaagaggcaaaaagagcagaacgacgcgaccatgaggcactttcaccgcagaagtgggacgaacgggaacgcaccttctggcattaatattgacgatgcatttagacccaccctttttctctttatttttgtccattcgtttgtatgatcttttgactttaaacccgtgtgcctttttctcttttttttgtctcattgagtttaattattttcatcagctgcctttcatattcttggttcggtttcctctttgacttttctttttacattaaaaatcgtaaaaactaa

SEQ ID NO: 52591 - DNA, 223 bp, Heterodera glycines
cagagtgccgaaaaatcgcatgtgatctaagccgtagcaaaaaatggtgtaagtaaaaatcgtaattacgctcaaaaagctttgcaaacaattttagcgcttccaattccttctacaatcgcctttatacatcccattatgagcgctaaaattatcagagtgccgaaaatcgcatgtgatctaagcctagcaaaaaatggtgtaagtaaaaatcgtaattacg

SEQ ID NO: 52592 - DNA, 185 bp, Heterodera glycines
ggtcaaatccgggtcctcccttctgatcagcttttatcatcgccctgatcaccacagatgccgcttctctgttgctgctgatcgcattgctgtgctgtaccgtgcccgcaccggtggccgcaatccgtggcgcatttttccgttccgggcattcgtcggccgctttgtcttgtctaccgatgcca

SEQ ID NO: 52593 - DNA, 317 bp, Heterodera glycines
atggctgttcgccgaagagtagcacaccacgaagccgggcacattatggcaaatcacctaaataaggatggggctgagtgcttagcagtaaaattttgaattgaaaaattaaaaattcattaattttagtcagatatagtggaagatcagtttaatgatggacacacttgggtttctcttcgcgaaaaatatacacttgcgcaagtaacggcaacactacagtattttttaggttggtttttcaagcttaacccaaaatttgttttgcacattaaggaggtgcggcatcggagaaaacaatatttggtgtttacgac

SEQ ID NO: 52594 - DNA, 204 bp, Heterodera glycines
atgacatgcataatttatatatttgattctccattattttatattaatgtaagactccgtttatttgattctttgttaaaaagtttttcttaaattcacgataattggttattgatttcagagaaaacaaccggattcaaagaacaacttaaattaaaatgcccattttctttataaattaagaagcataattacaaaaataaa

SEQ ID NO: 52595 - DNA, 2106 bp, Heterodera glycines
atggccgagccaaaagcaaaagctggaaaagggccgggaccctacacagcggagatggcatggaaaatctgggaggagcgcttcgaattcttcatcaaactccgagcagtcactgatgccgacacaaaaaagctgctgttcttcacagaaattgggccgatctacgaggaattacgacagatggcactaccggatgatgtcagagatatgcccttggataaaatcaaggcattgatgagagatcaatatggagagacaaagactgtggccgcgaaacgacacgaattgtttgctgcgaaacaaacgcaaggacaaaccatccgcgactatgcgattaaattgcgcactctgatcgccaacgcagaatggcacagagattcggtggacatgtgcctgacagcgttgttcatcaatggactcgcagatgattcaattcgagcggaactgatcaaaaaaggcgacaatgctctgaagttcaaagacgcaatagaaactgcggtgcttttggaacaatcatcattggacgcacagcgaatcggtggacatgggccaagagaaatagtggccaaggtttcatctcaatgaaaagagaagaaagccggcggcaacagcacaccagggaaatgtcatcgatgcggacggaacggtcattgggcgagtgaatgccccagcaaaaacaccgaatgccgaaaatgtggaaggattggacattgggcagtggcctgcaaagcaaagcagagcacggtatcaaatgccgcaaaaggaaggcaaggctcttcctactacaaaggaaagcctgtgcatcaaatcagcgcacaaaagcgtgattcttccgcggatgttgcgagcgtcgtcaagtcaaaacaagttaaatcactcacagctccaccagcattcgttcaattacaattgcaaaaagaggaagcagactttgaattggacagtggcgccgacgtttcgctggtctccgaagatgattggattgcaaatggcgagccaaaattttcaacatgttcgggattacacgcgtacggaggaaagccaatcaatgtccttggattcttcgagtcaaaagtaaagtacttggggagagaaaccacgacggacttgtatgtggtcaaggacaatgtgaagaatctgtgtggacgtgatttgatcaaaaagctgcagatcgacttgaacaaagcgtttggaattggaatggtgcaacaaattcgggacaccaaattcggcagtaaattggacgaagtgctccaaaattacgccgaagtctttagtgaaggacttggccgctgcacaaggcacatcgcgttaaaatttaaaacggatgtacagccgaaaagatgcaagcctcgtcccgtgccattcgcgttgcgttccgaggtggagaaggttataaaccaatgggaaaaggaaggagtcctcgagcctgtggcgacatctgaatgggcaactccgcttgtcattgtgccaaagcccggcaacaaaattcgtttgtgctgcgactataaggtcacagtcaatccgtgcctggacatccatcagtacccgctccctcgaccggaagaattgttcagcgctctcaataacggcgacaaattctcaaaattggacctgaaagaggcctatttgcagcttccgttggacgatcaggcgaaggaatgcctcacaatctgcacccataaagggctgtaccgattctcacgcatgccctacggagtggcatcggcaccagcgatattccagcaggtgatggaagaaattctctgcggaattgacggagtggcagtatatttggacgacatcgtcgtcactgctacaaacaatgccgaacatttgaagagattggatgcagttctccaaagacttcaaaaggcaggactacgagtaaaaaaggaaaaatgctcgttcatgcaagaaagcattgtctatctgggacacattatcgaccatcaaggaattcgaacttcgccagagaaggtggaagcgattcgaaaaatgccggcgccggaaaacttgaaagaattgcagtcgttttctcgggatggttggctattacgggaaaatcatcccttcattggcgacggcctcggaacctttgaatga

SEQ ID NO: 52596 - DNA, 220 bp, Heterodera glycines
atggatttccatataattggactctctagttatagcacaaattgttcgatgttgtcatatgatattttctcttcgatcccaatctgttttcattctgctcaattcgtggcagcatcgtcatgcttttccgtgcaaagaaccgattgcacatccaaaataacaatttccggacggtcagcaccgttcactgaaatgccggcagaagcgaatgatttgccgg

SEQ ID NO: 52597 - DNA, 101 bp, Heterodera glycines
ctgagaatcgccatttcaagcgaagtatcttcagtctctccggaataaagccacttatcccagtgtgtccatcaaaggcgggatgggatccctgggcttga

SEQ ID NO: 52598 - DNA, 471 bp, Heterodera glycines
atgaaattgtgtctatttttatttttatttatgtttttaattgttgaaattgcaaaagttggatcagaagagaaaaagctgcaacaaaagtcatttgatgaaatatttggagaaaaatggcaagaaaaagaagaaaaacaacgaaatgagcagaaaaaaagagaaataattagaacattcaacaaaataaaagagaaaataaaggaaaaaggaagaaaatatccaagaaaagaatggaacaaaattgatcagaaaatagcgaaaaaattggagacaaatccaatgaaaatttataaatgtattaaggaattaggacttaatcaaaagaattcttacaaatcaaaaactgatgaacaaaaaattgaaattgtacagaaatttattgaaatgacaaatgaatataagcaaaaaagaaaatattcatcaaaggaatgggagcaaaattatgaagaaattggcaagaaaattgga

SEQ ID NO: 52599 - DNA, 564 bp, Heterodera glycines
atgccaaactcggccctgtatgtacccgagtatttgggcaaaaccgggtccaaaaagctgggttctctgcaaaaatttctcaaaatcgaatttgaaaattgtaatttgttcataattaaaaaataataatattttccgtcaaaaaaagatcaaaataaaacaaaaatatttagctaaaaaagatcaattatgaagcaaataatgttaaattttttattaaaaaataatcaatcaaaaatggagctctcattaatcacgaaatatggcaaattataggaatattagttataatatatattttttatttatattttatatgtcataaataaaaatattttaataaaataaatatcatcgtttttacataatatttttatttttatttcagatttagaagataatccatgaaattgactcataataataataataattttaggcaaagtatcattacaagaatgaaattgtgccaaataatggagctctcattaatcgcgaaatatggcaaattataggaatattagttataatatatattttttatttatattttatatgtcataa

SEQ ID NO: 52600 - DNA, 886 bp, Heterodera glycines
atgattagaagaggtacaacagtgattggaagaggtacaacagtaattagtaaattcattaaattaaaatgaaaatattttttaacaaatttaatttaaaacatacatgaaattctatcaattaaaaaaataattcatttaaacttataaaatttattcattaaaaaaaaattaatttaaatataattttttatttattaactcaaaaaatattttaaatgaataaaaattgaaaaacacgaaaaaaatggtagaaaaataatgtacaccgcccggcttcgaacttcgccccccccccctcaaaatgatgcctcagaatccccaatcacacggggattctgagggcttaacgatgtcataattgaaatctgatcacgtattcgtgatcagcggcccaaataacccctaaaatcatatttttggaatatttttttgaaaaaattttttcactcaaaaatcctgtccaccccctttggtcccgaaccccaaaatcacttttatttctataacttttttcaaaaaagtgataaaaatgtaaaataaaatttataaaatagagcaaaaaattgcggatttttatattattttacttttccaaaatatcttttcagaaccgagttatgaattttttactgaaaattcgaatttttccagaacttctggaataactttttttagtttcatgaaagaaaatctaaataaaacccataaaattctcctgatttttctctatttttagagctttaattcacttaaattgactgtgatcagaagaggtacaaaattgttagaagaggtacaaaagtgtttagaagaggtacaactgtgattgattagaagaggtacaaaaattgaatgcaatttattataaattttaaaaaataaa

SEQ ID NO: 52601 - DNA, 109 bp, Heterodera glycines
atggcgcagcagaggcaaaacgttggcggacaaaagccagcggtgggaacagcgcatgtcgacgatggacgtgctgtggaacgagccggtggtggtgaaggtgccgcgg

SEQ ID NO: 52602 - DNA, 100 bp, Heterodera glycines
atggcacaatcgctggacccaaaagtccgtcgacggcgtccgatgggaccgatgaaagtgccggcaattggcagcagaatcggtcgttggccgaccaaat

SEQ ID NO: 52603 - DNA, 410 bp, Heterodera glycines
atggaccaaattgaacacttttcagtttgtgaagagacaccaccgaaagagccaagtgttgttgacatcacttatgatcctggtaaaaattaatgcaaaaaaagtaaaaaaaaaaaaattcccagaatttttcacctctttattgggcaattaaaatactaatcatgtatgttgttccagcaattgtctcagtgtcaaagccgccggtcgccgcagatgcgtctgcaccacagcaacctgttcaacaaccatctgttgctgaacagttgcaacgaattgctgacgataaaagtaaagagattggaactcgacattttgaaaaagactggaaatagatctggaccttgatttcctggacaaaaatccaatgcttgtcatggctttgacttggattgtttctggaaattaaa

SEQ ID NO: 52604 - DNA, 1887 bp, Heterodera glycines
ttccaactggtgtgttaacaattgaagaagtgaacagcgtgtatcagcattattcccatcaaaatttaagtgatgccactgggcttttcccattgaaatttccaacgcaccgacggaacaaaaacaaaggcacaattgagatggaaattgaaaaagtgtctgaatttgtgctggagcctgtgggaagtggccgatttagcgatgccatggacattgggggatttccatggaaaataatggcacaaatcagaacgaaaaacgaaagcaatgagaaatggttgggcttttgcctttccaacgatggccttgaaaatggtaaaaaaaagtctttttcataatctgtccgaatttaaattcaccaaaactaaatatgtataataaacgattatgcagacaaattagacaaagtgtaaacaataaaagaatgcaaaaataagggaaattgaaaatgtaggtgaaaagtacccaccctttcaacttaaataagtatcgtatttaaataaaatggtaattttattaaatatttatttattgtgcagaaaattggtcttgtaaaagttcggcaacacttcgaattgtttcacaaaagaatggcacggaggatttaattggaacattcaatgaccgcatttttaataaggaatggagcatttatggaaaatatttcattagttttgcggtgagtgggattcaaataaatttaataaacttcatattttgaaattaaaatttttaaaattttaaaaaagaaagtgacaaaaaattgaatagaattttttgaaattttttggttataactctttgtaaatttttttctagattttaaaaaattaaataaatataggatttgataggatatgtaatgcatcgcttaataccaatttttattaatttaactaaatttaagctaagttatggtttcttattagcaataaaattgaactaataataaatttaaatgtttctatcattgacacttttgtaactttggctcaccatgattttatattacataattgatttaaaattaaagttataatcggaaacattgctgattttcatgttaaaaaaattaattacaatatttgtcaaatttttgcatctccaaattcaaaattaaggaattgttggatccgggcaaaggattttacgacaaaagcgaggacaaagtaaaattggccattgatgtcattgtggatgagccaaaaacggagaaaagcatttccgatccgaacaaatccaacggcacactttcgacggaaattgaaaaactatcggaatttgctcgagaaatcgaaggaagtgaacgtaaaagtgaaactgctgtgtacataaagggaatgccatggaaaatattggcatatatcaaaatgaaaaatgaaagcactgagaaatggttgggctttttgcttttgtgcgatgcttctaaaaaaggtttgcttatcaaattatataatagaaataataattattttttgtataaaattggtgtaattaattattgaaaagactcatgtaaacattttaacataaaattagaagtgattttttaaaggaaatgagttaaaatataaatttgattattatttaatttgctttaaggtggaaattggagccgcaaatgttcgacaacacttcgaattgtatctcaaaaaaacggtgtggaggattttaagagagaatccagtgaaaaaagaatttttaacaatgcaaagccgagttggggttggaactatttcatttcttttgcggtgagtggaaattaattagttaatttacattttaatattgtaatggcaaattaaggaattaatggacccaagcaaagggttgtacaacaaagacgaggacagcgtcaccttggcaattgattttacatgtgaatag

SEQ ID NO: 52605 - DNA, 167 bp, Heterodera glycines
gcgatcagaaaaatactcaaaatgttaacgtcgaatgtaattgtccaattttgaattcaggcattggtcgttgaggagaaaaatcgtccaaagttttcgctgaccgaaccggaattgagccctgaacagcttcgtcaactttttccggaattgtccgaccactggag

SEQ ID NO: 52606 - DNA, 737 bp, Heterodera glycines
atgcctccggggattagtcgtgagaatattaaaaagcgaaagacgagcacttccgaagggtcggatgaggaggattcggggcaagaggagcaacaggcgccggagttgaacattgcgagtcggcagcgcagaacggcggcaatgaaatcgcacaaagtgtgggacgtgttgaaaccgggggcgaagatgcacgccgaaggggagacggagccgaacgaagcgccgacgacgggtgagcaaatgaatactttttgatggttgaaaaacaaaatttttttttaatctaaatattttagacgtttaacaaatagcaattccttgaattcttgaggtgttttcggcactgaaggaaccaattccttataaacaaaaaagatttaaaaaaactaagtcttcgaattccctcccgaaattttctgtaaaaataattcattttagcaccaaaagttgggcgcccatcactaaaacgaaaaacgccatcttcgtcatttacgtcgccactcgaagacaatgccaaaatggaaacagaatttcctaccgaaatagtaaaggaacaaatggatgaaaaaactgatgatcatctgccaacccaaaggggaattcagcgcattattgtgaacagaaagatggccgcaacttcgctttcgacaacaaatttatggcctcagcctcaacctgccaaagacaaaggacaattgcaactgatcgaggcaaatcggaggaaaaataaaagttaa

SEQ ID NO: 52607 - DNA, 1750 bp, Heterodera glycines
atgttcaacaatcacgccaaccacttcatgccgaatttttgcattcccccacctccgccaccacaacttcctcaacctttgaattcggctgtaaattcatttggtgttgatttttgtgatccctgttctttagcgagttttctttccgccggttcctcatcaccatcatccggcttactaccttcaacctcaacatgcacatcctcatatgaaccctcagttcttcaatttaagcgttccgcctcctccaattacgcaaaatatcagcagtttgatcgcagcaaatattaacaactgtaactgattattcctattaatattagtctttgttgtcttgtttttcaatttaaaattaggtagtcattattggtcatgatcctattcacttctatttcccttttgttttgtcagatccaactcgtcatccgctcaatggcacacatcaaataaccacatcggaaaggttcagcaaaacgttccatactgggcatgcgaatggtttcacatcgaaaggcaatggagcgccgctcagcaggtcaagaaagcgatttcttgaacaaattaccaacgaagaagggtggatttaattttaattaaatacatgtttgaaagattcagcacctcgggagaacttcgaattgaattggacacagcgcccagaaatcgtccactttcgggacaaagttctactgaagtcgaccaggaagccggttgttgtaacacattgtaggataaacctaaattcatctgcagccgacgaatcaccaaacagcaaagagtcgggttgcagtgaaaattcacaggaaagtctccgtttggtgcccacggacaatgacagcgacggcgaacaccccgaaatgggccgcaactggcggatattgatgctgttcaatgggctcgtcagggatgaggatttggccccgaattgcgaacggcctcaggcagaagatggacgaacttaccctgacattcagaagaaagtgttcacacaaaatggtgtggagcaaaaggaacagcatgaacaacacaaacttttgaaactgatgtcacttaaacttccactggacacaaaccatgaagttgtgccggcttcgagtagcagcaggctaggatatggcatgcgcacaagcaatgtgtgggtcagcactgatttgatggccaaaatgatacagcagcagcaaaccgtttcatttacgacgaaaagttctgcggcgagtgataattccattcctccccctccgattgtacacgacaagaataacctccaaccgaacacgagagaaactgtcgacgctcgacatcccggcactcgaaagcgtttacaccacaatcggagtctaatcattcttaaaactggacaacgtgtctatcagggctccaaagattgcttccaatttttggaaacagggaattgtcttaatggggttttctgtgaatatgagcacgaggagtcgacggaacattcggctaaaaaagtctgtccattgtaagcgacgggtgttggctaactatttttaaactttttccatgttgaagtttgatgcgcggacaatgtcggaacatcgatgacaactgctcacatgggccccactccacgttaaaagcacaccaaatgcccgtttgcgactactacttgaggatgtgttgcagcaaaggcaaggaccaatgcgcttatcttcatgtgaagcacacggacggcatggagccttgtgaagagttcaacaggggatgctgccagcagggagttatg

SEQ ID NO: 52608 - DNA, 793 bp, Heterodera glycines
gtttttatgtgccaaaacgccaaaatatgtgtttttatgtttttataagtcgctctaaaacaaaaattgttcggagaaaatgctatttttgggcttctctcgccataactaagccgcaaaaaaaatatgttaaaacataaaaatcccagccctacctatgaccaatattttccaaaaataaaagatatggaagtttaaactttaaagtgaaaattttcagtttttaattacgcaatccgcgaccgtgggatttttctgtcctccccgctccaaactgattttttttagtttaagttttaatttttatttgaaatgacttcaataataaaattagaagcattgtccggtgttcaagatgatggtcctttgtgttacctattgcaggtatttttgcattgctttgtttttgtcgtcatttacgcatacacaagttgctttcattttgggtcgaccaagtgtattttttgctcgattgtggctgggatgagcaattcgatttggcgtacattgaagctataaaaatgcggataccgcaaataaatgctgtgcttctcagttacggagatgttccccacatcggtgctttgccttatctgttcaaaaatgggctgaattgtcccgtttatgcgacggttggtggtcatctccatatttaattcctttttagtatataaaaatcccgtatgttctcaggttcctgtttacaaaatgggccaactttttctctacgattggataaatggccatatgactggaaaggatttctcgctgttcaatttcgacgacatcgatt

SEQ ID NO: 52609 - DNA, 615 bp, Heterodera glycines
atgtacttaaccgaaaaatttgaaattttgctggctgttaagtcttatcttaaggtaattttatctgcaaaattaagcatttgttaattacgaactaaagaaaattgatttttcaaacttacaaatagaggatgttatatgacttcttagaaattagtgcatttttgttaaaaataatacttatttaggaattggaaggccaaatttgcttatcaccgacgcatttaactcactctatacgcaaccgaagcaaaagcagcgggacgaaaatttggtgtccaaacttctcgccacagttcgggacgggggcgacgtaatgatagtgagttggagggggtgaggggcagaaatgggacataaagtgattggaatcacattttgttaacaaggcaacattccgagctctgactaagaaattacatataaacgatataccattggatagagcagggtcgacttctagtgtgaatttttaattttagcggtgcattttgcctgcttcaaaagttagaaggcctcaaaaattgaaattttggctgtgtttttacataaaattggtggctcagttggttaaattcctaattttgggagtccgtgttcgaatccaacgtaaaa

SEQ ID NO: 52610 - DNA, 1051 bp, Heterodera glycines
atgatagtgttgctgagcacggccaaaggcgccgatgcgcattttttggttggcaaaagtgacaaaaaagaggtgagcgagtgacattaattagtcaattaattattaaaagggaatatttttaggctctacaaacagccaaaataggctataaaatggaaaataagcgctaaaaacctcatttttaggggtgcaaaatgacataatgtattcaaaaaagtaaaaaaattaggcaaaatcaatattgaaataaataatttttaaatctaaaattctttcaagaaaaaataaaatttggaaatgaattttaataaatttttcatctttaggggttcttttttgaaaaaatttgggtcgattcttaggggtgaatttttcgtttttttattgcatttttattaataattttgggtaaaaggccaaaataggtcaaaatatgtttttctctaaattttgtagtttaacaatccaccaaaaaaaaaaacaagttttcgttgcatttcagtccatgatgaactcaagaataaataagcaaaacataaaaatatcatccctaatatggcacaattaaagaagcaattggttttggtaatgaattttttcagcttgttcatgctcataaaggcattcttatgatttcatccaatgtttttgaggcaatgtttcaaaaggaagcagaaaattcgaataaccgcacaacagacggaaagggtgggcaaaaaaaaaaagattttttttttttagaaattttgcctcaatgttttgcatgaatactaccgagtttttataaaaatattagtgattcaatgtgaaaactgctcttaattaatgcaaataaattggcttaaaaacttaatttttttttcatttattgaaaataaaattgaaatttaaattttcattttatcatcagttgtaaaggatggccctttgttgatttctgatgctgatgcagaagctttcaaagtgatgttgcgcttcatttattcggacgatttgagcgaattaaatggacaaaacgcagtcgaaattatttaaattttcatttcaa

SEQ ID NO: 52611 - DNA, 1345 bp, Heterodera glycines
atggcacaacatacggcaacgtggctcgagtacgaagatgggttctgctccctggccttggcaaaaggcggaaagggcaaagtcctagtcatgccattcgcggaatccgatgtctcggaccagggatttctcacggaatccggagtgtccaaaacagtggacgaattggagcgcatacttcgaggcaaaaaagaagaagcgtccagcagccttgacatccgactacagcgatttgtcgaagcaaggacccaccaagcagatgaggtaaacacaaacatgctcgatgtcgacacgtcaaagccaatggtggtgttagcagcatgcacatcggcagcgcaacatccgattgaacaccaggaagaagtccatatcgcaatgcctcaagcggaagaagtcccttggacttggggaacgaagcactattttgtgaacgacgtcaaaatcagcgcaacaaaaatgcgggagctggacgaagcactggaagcactgattctgtcccaagtgccaccacctgaagaaagggagctaaagcagctgaccttcgaggccgtcaaacgcattctgcgcagggacacatgggaagacttcgaaatgcgcatcgccggttctacaagggcaaacacggccctcagaaatggagacttggacatcatcctgatgcccaagtccggcgagccattgagccatgagcgaaagctccgcgagctcaaattcttggtaagggaattccgcctgatgaagcgccaatacccttaccgccactgtgtcgccatcaccaaaacgaaggcaccattgatcaaaatcagaacttcggaggacgtcgacattgacatcacaatggacaacaccgaagctttgagaaacagcaattggctagccgagcagacgaacgacagcaaattgtggcggctctatatgaccgtaaagatctttgccaaacataacggcattggcgatgcgagttgcggcggcctcaactccttggcatgggcagttctgacaacgcatttcgccgcctcacggggacaggagcgttgtgaaacgccactgctcgacttcttgcagatggcggagtacttctccgagttccccttcgagggctacaccatcaccaccacgggatggcgggagcggaaatcgtcgtctgtgcccatctacgtcgaggacccgcacaatagagaggacaattgcgccaggaaccgacaagcgcaagacgtctgccgggtcaaaaacaagctgacgcaggcatggagtcagttcatccgaaagaaggacaaatgccgactcgccgacctcggctttccatgtccgagggacgaagacgtcggctggccatcagcgaggg

SEQ ID NO: 52612 - DNA, 346 bp, Heterodera glycines
gggcggattgatgcgtagcacctgcgaggggagtcgtcagtcccccgaccgtcggtcgtatagcaactctccgctttacctgggtcctcctcccacacgactttgtccaccgtctcgtggagttcgggcgcttcaaatcggatccatcgctccgtgtacattggcaaaatgtctttgcgtcgcaccacctcttttccctcacggcgccggtcgttcagtccgatctccaggaaggaagtgccgctgagaaaggccaaacagaacagacggacgcgggcgcgctgattgctcacattgccctctttgtccaccgaagcctcgtactcgtcgtagcaatgaatctgca

SEQ ID NO: 52613 - DNA, 912 bp, Heterodera glycines
ctaattgggttcacgaccaatgaatttatatgctatgtttgttcaccgatcacttccgttgtgccaaattcaggccaattattcgctgtcggacattgtgctgcaaccgtacgacgttttcaccaaaattcacaccgtaaaattgcaacacattctgtacaaagaacgcattggcattcgccccggccaaatttcgcgcctcgtcgaaggccatctgaccaaatatggccttcctcttgagcacgcggcccagtgcacagtgctggccaagttcgggtcattgaacgaacggaccatcgccagtttcactgacgcattggaaaatgtgctgttccattgtccggcaaagcgcgagacggcgccgacttacaaacaggacgaagtgcaggtgaaaaaaaagaacggaggacaaagcgagagtgaatgagcaatagtcgagaatagacacgctggtcaagagtttacgacgggaaaaattgacactttgaaaagggagggacagagagtaattagtcggcaatggacatttagtacgggaatggcactttgaatgtcgtacatttgcatgcagattcattgctacgacgagtacgaggcttcggtggacaaagagggcaatgtgagcaatcagcgcgcccgcgtccgtctgttctgtttggcctttctcagcggcacttccttcctggagatcggactgaacgaccggcgccgtgagggaaaagaggtggtgcgacgcaaagacattttgccaatgtacacggagcgatggatccgatttgaagcgcccgaactccacgagacggtggacaaagtcgtgtgggaggaggacccaggtaaagcggagagttgctatacgaccgacggtcgggggactgacgactcccctcgcaggtgctacgcatcaatccgccc

SEQ ID NO: 52614 - DNA, 1956 bp, Heterodera glycines
atgtaccgccccagtcaaactccccgcctgacactgtcatcggcgcgggtcgccgggccaccgggtggcccgacttaacaccaaaatggacaccctttcgggcgcactcccgttttaccgattaagtaaggaatcgatgaaagtagtggtatttcactggcgccttgcggctcccacttatgctacacctctcatgattcttcacaaagtcagactagagtcaagctcaacagggtcttctttccccgctaaatttgccaagcccgttcccttggctgtggtttcgctagatagtagatagggacagtgggaatctcgttgatccattcgtgcgcgtcggtagttagccgacgaggcatttggctaccttaagagagtcatagttactcccgccgtttacccgcgcttaatcaagtttccttggcttaacattcagagcactgggcagaaatcagacacggtcaacgtccacaaggaccatccgtctcctctgttttaattagacagtcggattccccgagttcgtgccagttctaaactggtcgttcagcgccaaccgaagtgcataccctgacgagcatacacgcagctgaagcgctccacaagcagctctcaccactagtccacgcaccatccccgaaagaacagcacgcagccacgggcaaaagccgcctgtttcacgcaacagcccggctgacccgacctttagagccaattcttttcccgaagttacgaatctaatttgccgacttcccttacctacattattctatcgactagaggctgttcaccttggagacctgctgcggatatcggtacgatcaggcaggagattcaaatagcttccctcgcattttcaagggccgtgtggagcgcacgagacacacagggaaccgcggtgctttacgggcgcaacatccctatctcaggctgagccacttccaggcacgcacaccctaaaccagaaaagagaactctggctcggactccacacgacgtctgcgagttcatttgcgttaccgcgcaaaacagctcttgcgaaccgtcatttccctagcctggcgtgggaatgttaacccacttccctttcggcaaccggatggaccaactgcgcaagcacagaaaagtcgtcatccgtagtgtgttacggcgttagccggtgccttaggatcggctgacccacattcaactgctgttcacgtggaacccttctccacttcagtcttcaaggatctcacttgaatatttgctactaccaccaagatctgcactggtggaagctccggccgggcccacgcccaaagccttcaacgcaaccaccacgaccctcctacacgtcatggccagactacgcgacaagcacgtgtacaagccaatgacggtggagtataggtggcccgctccagcgccatccattttcagggctagttgattcggcaggtgagttgttacacactccttagcggattccgacttccatggccaccgtcctgctgtctatatcaaccaacaccttttatggggtctaatgagcgggcactttggcaccttaactccacgtttggttcatcccacatcgccagttctgcttaccaaaaatggcccacttggagctcaaacattcaacgcctgggttcagagtcaagcaaccctggcttcatacccatttagagtttgagaataggttaaggacatttcgtccccaagtcctctaatcattcgctttaccgagtataactgcttaacgagctccagctatcctgggggaaacttcggagggaccagctactagatggttcgattagtctttcgcccctatacccaagtcagacgatcgatttgcacgtcagaatcgcttcggacttccaccagagtttcctctggcttcatcctgctcaggaaatagtcaccatctttcgggtctcagcgcatacgctctgtctcgccccatcgcat

SEQ ID NO: 52615 - DNA, 2155 bp, Heterodera glycines
atgaaagtgaggaagcagaagcggcgaaatccaaacgtggtcttccgggactcattcaatttaatgccctgctcattggcagctctgatcccatcctacggccttgacgtcgaggacaaaccattcttcccccatttggccaaccgaccggagaattatggtagagcgattcatccaactcctgaggactatttggccaatgggatgatgccaggcaaaaggcggcaattcgacatgtggtatgagcagcaccgtgaggaggcatttgttttggatgaggcattagcaaggcacaaatttttaatatttttttcaatttttattttattttgttcagctattgcaccaacgacgttgaaattctgatggccgcactcgtcgcattccgtcgggaattcttcgaaataacgcgacgacaggagtatgtggaagggattgacgaccgcgagaaccatgacggaatagatgctctgcgtgaatgcatgacaattgcgggtgcctgcatgcgccatttccgtacaaaccatctgccagctgagcatctggcaattgtacccgagcgcgggtatgacaacgcgcagaatcaaagtctcctggcacttcgcttcttctactggtactcggaggagtacgatgtagaagtgcaaaccgcacactctgccggcggagaaaagcggattggtccctattccttggacggatggattgaggcggagggtcgagcaattgaagtcaatggtaggctttaatttgttcaaatttgaaaatcatgactttaaggttgtacatggcacggctgtaaaaaatgttaccccaacgacaacatggtacttcccagtggaaaaacggcagggcaaatacgggaacgtgatggtaaacgaatggaatacctaagcgcacgggtcaatcgcatagacgtgttttgggagtgtaaaattgacgagatgttggcgagaagcaaagcgatgcgtaaatgttttgctaactacgtggacgacggacctctggtgatacgcgacgctttcatgggagggcggacggggccaatgaagctgtatcacaaggcggccaggggcgaaaaaatttcttattacgattttacttctctgtacccctatgtgaagtgagttttttattattaaataaaacataaatatttaaaactttagcttcaccacccgttatccgattggacacccaaaagtccatgttttcaaccaacaagtggtgtggaccaaagagtacccgaccggcggtgtggacgacgactaccactgccaacacaatgatcaacagcgaggttgggtcagcacctgcacgtccatcgagctgaacgctgcgctggacgagggctatcgcgtcacccgtctgttccgtgtgttggaatatgaggacagtgacgaccaacttttccgcccgtacatcgcagagttcatggcgcaaaagatccaggccagcggatttgacaacgaaatcaaagggaatgccgccatggaggaacagtttgtgcgagagtgtgcggaaatgtttggcatcaacgtggacccaaccaagatggcgataaacaagggaaaacgttccatcgcaaagttgcgcttgaataacttatgtaagccatttgtttttcaatggattttaaattttaaatttaggggggcgcttttcattgcgaaactttggactttgtcagactctgattacggacagtcctgttgtgcttgccgaatatctggacaacaaatccgttgaagtcgcgtcaattgatcagctggatgagaagcacatcctcatcagctatcagcacaagaaggactgggtggatgagcatgcctgctcaaacattggtgagaattttctttaaatattaccgtaatcaaaaaaaaactacagtaatatctttgtggacaacttccacggcgcgacttgtcttgttgaaggcaatgcaaaaagtagtcaggtcggaacggtgcgagctactgtacacaggtaattgaaaaaaaatattgtttaataatatttttaaattttagacaccgatagtctcgtccttgtccacccggaggggcgttgccctctcaaaactggcccacacctgggccagttcacggatgagtaccccgatcacgacatcgttgagtactgcagcggcggatga

SEQ ID NO: 52616 - DNA, 411 bp, Heterodera glycines
atggcatttctgtgccattttcagcgttttttcggcacaaatttgtcaattgatacgaaaaatggccaaatttcggatttcactattcgcaatgcttggccaatgatcaaagacaacgtttgcacagtgcggtggttctcatcaaaacactccaaagatttgggacaatttgtcccaaccgatctgaacgaatgcaaatctctccgatatttatacagcgatggcaattttattgaattgcctgtccatgatggcaccggtgctctttcgatagggcaagcagtggctaaatggttgtttacgcctcgtcccggcggcgttccgaaaaatgtttcattgctattgtccaaatcaatggcagttcgtttaaagaaattcatacaatggcatttcgtacaaaaaagcgtttaa

SEQ ID NO: 52617 - DNA, 422 bp, Heterodera glycines
  unsure (1)..(422): unsure at all n locations
ttcttttntaatcattttgttttaaattttaccttccccaacggtggccttggacacttagttttgtgaaaaaacgttccccagtttttttagattggtcaagttaaacggcaccctcaaatgacgattatgtggaacagcgatgatgaaactgacaggggaagaagcaatggaaaaagcctaagggaggggaaaacaaattaatgaaaatcaattaaataaactgcttaaacaacacctctttggccctttgaacttgtgtttcaatttgcctaagaatcaatgcgtaaatggcactttgtacaaatgcaaattcgtacaattagccgcgtttcgtacaaaagcatttcaaataaatttgaaaaaagctaacctatttttggcttttttctaaatgctttaaatattatattaaacgcttt

SEQ ID NO: 52618 - DNA, 179 bp, Heterodera glycines
atgtcggacaacggaaaagaagcgaacaagcaaatagaaaaggaaacgtaaatttaattataataataaaatttacagaataaagcctaagcttaagcctaaagcttagggctaagcttaaagcctaggcatagcctaaggcattgtacgataattaaaagcaattatgaaaaaataaa

SEQ ID NO: 52619 - DNA, 628 bp, Heterodera glycines
atgggcatgcccaccgcattcaccaacagcgccaattttgagggcatttccggcaagaaaacgttgctgctcagcgaagtggtgcagaaggcggtcattgaggtacggtgattgcccacaattagtgcccttatttttgtggattccatttatacaaatttgccaccatcgaattgcaaaataaaaaaaagtcaccagccggtccaaagaaaatttatatatttttgaccagttttagctcaattctcaaaaaaaaaactaatttaaacaacgaaatttaggtgaatgaggagggcactgtcgctgcggcagtcacagaagaagaagtggagtgttgttcgagcaaagaataccgttttgtcgccgaccgtccgttctgtgcctttctgattcgcgatgacactgtgcttttcagtgtgattttccgcaaatgattccattccatttgtattaaatgcattttattttatgattttaaaaatattatttctaacttgtatttttttgatgggaattatatgtaagaaaatacacaaaatatatacataaaatatgaatgaaaaaaaatcatgaaatatgtaagaaaaatactcaaaaccccaatgtaagtattacatacctaaataaa

SEQ ID NO: 52620 - DNA, 559 bp, Heterodera glycines
atggataacattttattagaaattttcatttgttgtttttgtataacgacatattcagttagtttcatattttaaaagtttcgattaaattattggtttatttataagtaaaaaatcagttatttaaaaattataaaaatcaaactatttttataaaatgttttgaagtttcagtaaaaaatttaattttaagcatactccaaaatttatttagacattctttatcaaaataacactttagaatttttagaaattaaaatttaaaatttgaaattaattttgaagaatttaataaatatattttggtttttagagggcaattgtaaccaactatcctcctcgggaggaggctaaggattttcatctgcagatacactagccaataccctatcattagcattgtgaatatgcaatgaggatagagttagagatggggatttttttgctagttcagaatatggataccttatccttatcattgtgaatatggatttatctgcagctagcgaatttaaaattcaacaaaatcacagttttattataaaatccattactagta

SEQ ID NO: 52621 - DNA, 4266 bp, Heterodera glycines
atggacgcacaacaacttcagcaaattttggacgcggctctaaaaaaatcagccgaagtttttgccgccgcactcaacattcaaaatcaaaacccaaacccagggtcatccacaacggcatcacttgcggcatcaatcaatgtccgcctcgaaaaattcaattataatccagaggttggacagacttacgacgcttggctgaatcgatatggcaaaatcgttcaacaagacggcgcttcgctcccagagcagtccaaagtccaacttttggtcggaaaattagacgaggaggaatacaaacggtatattgacagcattgcaccaaaagccacagaacaattcaactggctcgaaaccgtggcaaatctgaaaaagatttttggtgagacgaggtcgctcttcctccgccgtttcgattgttttcaaattcgccaatgccaaaaccaagacctttcgagtcttttggcacaaatcaattcatcgtgtgaaaacgccgaattggatttgaagaaagaagagctaaagtgcatgattctcatcatctctttacgcgacgaattttcggatttgaaacagcgatgtctccagcgaatggaagaagcccgaaccaatgggaaaagcatcaccctacaggaattgggcgaagaatgcaaaaagtaccaaattttgaaggaaagcacattggcactcagcacaaaacagtacaatgccaatgccattcgtgccaagccacaacaagtaaaggacaaggcagacgcaacaaagcaatatgccaaaccaaaagcggttccaaaaccgtatgagagcaagcacaaattgccaaaccgtccatgccaatcatgcggaagcacaaatcattggcgctccgattgtgggcacagagatgccaaatgcccaaaatgtggtaaaatcggacatctcggcaaagtttgccgaagcaattcttcaattcgccacatccaaacggtgaatacaactgaaaggcatgcacaaatcaacacagtcatcatcgacttaaattgcatggaaatcaaagcagaccatccaaaatggtggaaaataccaatcaaagtgaatggctcagattatccaatgcatgttgattccggcgcacaaatcacattgttcacaatccaaacatggattcaaatgggcaaaccgcctttgacgtcagcaaatattcgcgtcaaaaattgcaatgaccaaacatttgcaattaatggacaattcatgtgcaaagtgcaatacatggatcgtccaccaatgaaattgttggcatatgtgagccccgaaatcagtcataatttattgggcatgccatggatagaagctttggaggtgatcccaaaagagattatgcatccaaatcttcatccaaaaatcaatacaatttcaacgaaaaccaacgaaatcaaagacacggagacattaatttcggcgctcaaatcaacccactccgatgtcttcagcccagaattaggtcattgcaccaaattcaaggccaatctcattctgaaaaacggtgcaaagcctatctattgcaaggcaagaccagttccacatggcgctttggacgacgtaaatgccgaaattgaccgtctattgaaaatggaggcaataaagcccattgaatttagccattgggccgcgccaattctggcagttaaaaaaaggaatggcagaacacgcgtgtgtatcgatttttccacgggattaaacgacgcacttgagctacaccgccatccgctgccacgtccagaggacatttacaatgcaatcgcaggctctaaatatttctcacgcctcgatttgcgcgacgcttatctgcaattggaattgtctgatgagtctaaaaagctgtgtacaatcaacacacaccgcggactcttccaatgccagcgtttaccgttcggcgtaaaatcagcgcccgcaatttttcaaagtttgatggacaaaatcattacacccatcaatggcgcatttgtctatctcgatgatgtgattatcgccaacacaactctcgaccaacacgtcaaaacaattaccaaagtttttgacaaaatcaaacaatttggtttccaaattcaacaggaaaagtgcagttttctacaaaaagaaaccattttccttggccacataatttctgaaaatggcattcgcccggacccatcaagagccgaggctattcgaaaaatgccagcgccacacgacaagtcaactctacggtctttccttggagcactcacatactacggcaaattcatcaaacaaatgcgcgaaataagaagcccattagatgaattgcttaaaaaggatgtaccgtggaattgggaaactgatcaacaaaaatccttcgaaaaagctaaagaaattatgctttcagatttattgctgacgcatttcgaccccaaattgccgatcattgtggccgctgatgcttcaaaaggaggaattggtgcaacaatcagccatcaatttcccgacaaaagtgaacgtgtcattgaacacgcatcatgcactttcacggctgcgcaacaaaattacagccaaatcgaaaaagaggctttaggattggtttttgcggtacaaaaatttcaccgcatgctctacggcagaaaattcattctgttgaccgatcacaagcccctactggccatcttcggatcaacaaaaggcattccaatatattcagccagccgacttcagcgctgggcgttaattttgtcaaattacgaatttgatattaaatacgtcaacacaaaagcattcggaaatgccgacgtactttcgaggctcatcgctaattacccaaggccatcagaagacattctcatcgcaaatatctgcaacgatactgattgctgtgttaattttgtgtttgaggccaaaatagagcaactcccgatcaccgcaaaaataatagcggatgaaacagcaaaagacgaaattttacaacaaatcagtgccttcaccaaacaaggatggccgcaaaaatttgacaacattaaattgtctccttttcttccaaaaaaggcacaaatatccgaaatcgaaggatgtctcgcctacggtgaacgaattataatcccttcgacgctccggaacaacatcctcaaatcattgcatttcgcgcatcccggcattgtgcgaatgaaagccattgccaggaaccatgtttactggcccggaattgactccgaaattgaacgactggtgaagcaatgcgaggaatgtcactcagcagccaaaaatcctacaaaagcgaatcttcagccatggaaagcagcaaacggagtttttgagcgaattcacattgatttcgccggcccgtgtgctgacggccaaacatacctggttttggtcgacgcttactcaaaatggccagaagtatggcaaatggaaaggacatccagccaactcaccatttcaatgctgaaatcattcgtgcatcggcttggaattcccaaagaaattgtctccgacaatggaagccaatttcgatccgccgaatttgcacaattctgtaaagaattcgacataaaacacaccttcacgccgccgttccacccaatgtcgaatggggccgctgaacggtttgtcgacatttttaaaaggtcaatgaaaaagtgccgtcaagaaggcaaagattggcttcaaaaagtgcttttggcgtatcgcacgacaccaaacacggcactcaacggtcattcgccagacgaacttttccttggccgacgcatgcgcacaagaatgacacttgtccatcccgaaaaacaaaaactccagccaacaaatttggaaaattttcaacaattccaagggcaatacatcaaaaagatggaaaatcaattcaacaaaaaacatggagccaaatcaaccattttccaaaatgaggaaccaatttatttttggaatttgaaaaacaataaagccatttggctcccgggaaaaattatagagaaattcggcacatctccgacgtatcgcattttggcaccgacgcttggccgagccattcatcgtcatgccaaccaaatcaggcgacgtttcccaattgaattggaagacaatgatcaagttgtagaaaatgatcaaacccaggcacaaaatccgcaacaatcgccgatcgcgcacaaaccgcaaacaaatcgtcagcaatcgcctgctcaaccagttcttttgcgccgatcaggaagagccaaacaagcacctcaacgactggtcctggatccgacaaagccaaaatatggcttaatccgatcttaa

SEQ ID NO: 52622 - DNA, 1014 bp, Heterodera glycines
atggggcgtccacccaagaaattgttggcatatgtgagccccgaaattacccataatttattgggcatgccatggattgaagctttggaagtgattccgaaagagattatgcacccaaatcttcatccaaaaatcaatacaatttcaacgaaaataaacgaaatcaaagacacggagacattaatttcggcgctcaaaacaacacattccgatgtcttcagcccagaattaggtcattgcaccaaattcaaggccaatctcattctgaaaaacggtgcaaagcctatctattgcaaggcaagaccagttccacatggcgctttggacgacgtaaatgccgaaattgaccgtctattgaaaatggaggcaataaagcccattgaatttagccattgggccgcgccaattctggcagttaaaaaaaggaatggcagaacacgcgtgtgtatcgatttttccacgggattaaacgacgcacttgagctacaccgccatccgctgccacgtccagaggacatttacaatgcaatcgcaggctctaaatatttctcacgcctcgatttgcgcgacgcttatctgcaattggaattgtctgatgagtctaaaaagctgtgtacaatcaacacacaccgcggactcttccaatgccagcgtttaccgttcggcgtaaaatcagcgcccgcaatttttcaaagtttgatggacaaaatcattacacccatcaatggcgcattcgtctatctcgatgatgtgattatcgccaacacgactctcgaccaacacgtcaaaacgattaccaaagttttcgacaaaatcaaacaattcggtctccgaattcaactggaaaagtgcagttttcttcaaaaagaaaccgttttccttggccacataatttctgaaaatggcatccgcccggacccatcaagagccgaggctattcgaaaaatgccagcgccgcacgacaagtcaactctacggtctttccttggagcgctcacatactacggcaaatag

SEQ ID NO: 52623 - DNA, 204 bp, Heterodera glycines
atgaatttgaagaggtaaaatcaataatgatcttatcaattagcaattaaattttaaaaaattaaaaaattatttcagaaaaataaatctttttatattcaaatcggaaacggagtgcccaaaaaagacaaaaatgatgatgaatgtgcctgagaaacatttcggaaaatgaaagatgcacatactcatgaccttgattgttaa

SEQ ID NO: 52624 - DNA, 1094 bp, Heterodera glycines
atgcaaacttattattattttttaatttgtttgtcgtgcttcttggccaacaaaattgaacggaacaattcagacgacgaagaagattattggcctaacgaaactgtagaaagctacatagacgacactgacagtgtggtaaagtaagttaattttttcgtagcaggacggttcagtgccaggacggagagaggagagagagagagtgagaatgaaagataatagtaaaaaaagagagagacaaagtgataaggagaaagagcgagagggtgaaataaggaaagagagagagagggaaagagaaaagagagagtagggaaaaaagagagagagataaaatggaaagagagagagagagaaaaagtgaaagagagagtgagaaagtcaaaaagaaaaagagagaggagagagagagaatgaaagagagtatttaaaaaagagagagacaaagtgagagggagagagataaccgaaagagagagagagagagatagaaagaatgaaagggcgaatgcgacaaaagagagagaaagagagagataaaatgaaaaaagagagagagagggaaaaagtgaaagagagagtgagaaaaaaagagagagagataaagagcgacaaaaacaaaagcgtgagagagatacagaaaaattgagggaaagagcgaatgagagcgttagagtgagacaaagtgagaggaagatcgaattcagcaaaactagactgactgttgagacaatgcgatgaaaactttcttttttggggtaattgggggatgggttaaaagcgggcacatcaggggaattaagaaaacaaaagaaaatgaatgagaaaaaatacgcgaaaaatgatgaattttgggttttctcattccaatctttttcttaatataaatatttgttcttttcttgtgtttataaattccctaatctctaagctttctagtgataccaataattgatggtcatttttttatattggactaattaaaagtgaatttttagattatgaattttcgacttttttcgagtccagatacgacaaatcgaaacgcatgttatattcgtgatcatcaacccagaaaatcccacaagaca

SEQ ID NO: 52625 - DNA, 274 bp, Heterodera glycines
atgaatttgaagaggtaaaatcaataatgatcttatcaattagcaattaaattttaaaaaatttaaaattaatttcagaaaaagaaatctttttatattcaaatcggaaacggagtgcccaaaaaagacaaaaatgatgatgaatgtgcctgagaaacatttcggaacaaaagggataggttgtggcacagatgaacggcataaatgtgaaaaatgtgacggacgacggaaagagcaacagaatggaaatggtcggtggacacgacacttttga

SEQ ID NO: 52626 - DNA, 1547 bp, Heterodera glycines
atgcaaacttattattattttttaatttgtttgtcgtgcttcttggccaacaaaattgaacggaacaattcagacgacgaagaagattattggcctaacgaaactgtagaaagctacatagacgacactgacagtgtggtaaagtgagttaattttttcgtagcaggacggttcagtgccagaaaggagagaggagagagagagtgagaatgaaagataatagtaaaaaaagagagagacaaagtgataaggagaaagagcgagagggtgaaataaggaaagagagagagagggaaagagaaaagagagagtagggaaaaaagagagagagataaaatggaaagagagagagagagaaaaagtgaaagagagagtgagaaagtcagaaagaaaaagagagaggagagagagagaatgaaagaatgaaagggcgaatgcgacaaaagagagagaaagagagagataaaatgaaaaaagagagagagggaaaaagtgaaagagagagtgagaaaaaaaagagagagagagataaagagcgacaaaaacaaaagcgtgagagagatacagaaaaattgagggaaagagcgaatgagagagttagacaaagagagaggaagagatagagaaaggagaagagataacagagagatagaaagagagcgggataaaaacgaaatagagagggaaagagtgaaagagcgacagggtgagataaggaaagagagagagagggaaagagaaaagatagaatagaaaaactctctgatctttctcattatctctgaaaccggtttaatcttagaatgcctttaaaccaataaatttttttagtttaccgccaaacgtaaaagagaaacttcgcgacttcaattttattccaatgacgccagcacctccaccgatggggttggtagtggggggggcgtcaaaaattttgtagttttgggtgcacacaaattccgctgcccgttagctcggatcgtgcaacctctctttccaaggacgggtataccagtttacaaggacataaggggaaagttccattaaattcaaggacatttaaaaattttgtcatatgcaatgaaaatgattaaattttacccaaatggtttatatttttcgccggaatgaagttttgattaattttgatgaccatattttacttttcacaacacttcttgcgggcgcttttcgacgactttctgggaatggggggggggggaaactgtaataggtttttcataattgataatttttaacgctttttgggtgtctttggaatcaaatcattgcccaaaagcgattagagaattttgtatttatattttgcaatttaagaagaatttttttcaccgttggagttatggttgccatttccattctctttggaattattatttttctgatatacaaaaaaaggaacaccaacggcacgcataccgaagcgccagcagatgaatttgaaatggaaactttagtctgatatcaatttttcgagatattttacttgatgaaattgctttgtctttttcagcattaatattcaa

SEQ ID NO: 52627 - DNA, 896 bp, Heterodera glycines
atgcaggaagtggcattggccaacgactcggcacaatttgccgagaagagcatgtcaatggcagcgaccaaatccaacggttgggtattgttgatgaaggtggtgatcattcttgaacaaaataaatttgtttcatttaacaatgaaagtaagaaaattaaaaaaccccgaagggtacggcgattttttcaatgtttcgcaaaaagtgccaattatttcggcattcattgtcggataggccggaaacgatcttaaaatggcaaaaattattcaatttaaagttcgatctgttgatatttgcagccataatttctttcaaaaggaatccttgtcgagtattttgaaaaaatagtgaaattttaaacaaattgtatagccaaaacccgaaatattcatagataccgaagtgagtcccgtctgaaccatttccgtcttaataattaagagccgattttgtctcaaatattattggaccatttttagagttcaagtgccaaggcggggggtcaatgtaattactattttgactttatttaaaatatttttcattaatcattcgctgatggggtggacgggattcaaaaaaacaatttgaattttataggagcaaaaattaatttaaaagcgattaattctgggccaaaaaacgcgcaccaattggcacatcgcggacgcgaaatcgtcgcagccgtacattttcagcgcgaagtcccacgagggtattttgccctcattatgcgcaattgcttcgggcgtcagcagatcaaggaacactttctgcagaatctcttcgctggtgttgtgcgctacgcaagtgaactccaaccggcgcggctcttccggagtgccgcgcgaccaactgaacgtgaaaattgaacaaatcattggccggtgga

SEQ ID NO: 52628 - DNA, 496 bp, Heterodera glycines
atgcctggacctggacctggacctggattccatgttggacctggacctggatttcctggacaaaaatccaggaaaatccaggtccaggaaaaatccaggctcctcgagacctggatccaggcctggacctggatttttttaaactcattttaaaaatcaaaaaaatgtttgaaaaattcaattaattgcttgggaacatctaaaaatatctaatttacaataataatttgtttttaaatatatttaatcattttttgaaaacttgaaaaaatatcggtcacttgaaataataaattctaaaattttgtccaggaaaatccaggtttttcgtgttttgcttggctttaatatgagtataaaaagattaaaattggttttttacattaaaaatgggacattacttattttgtcaccatgtaaaaaaataatttaatttatttgtttttacaaaactttgtcagtcacataactcggcattcatgcttatttagaagaa

SEQ ID NO: 52629 - DNA, 112 bp, Heterodera glycines
atggatgtgctgcaaacaaagagaattgcatttatcgaatttgcgaggaacggcgaagcggaaaatgcaatttcgaaaatggacggacgaacaattgacggatttgtgttaa

SEQ ID NO: 52630 - DNA, 730 bp, Heterodera glycines
ggcggattgtcagaagcaaagctcatttcgcaaatggcacttttggagttgggcaattacgacacaatcccggaaacattgagcaaattaatgcagaaaaaactggccaatgttagtggggcgggtgccattgtccatttcggcatcgtttaggtcgttggccccggccgttggattgtgcccacttccgaaggccttcaaaggctcgaggcaactttccaatctgttttaaataaacacggattactaattaagtcttttcggcaagatggcgttgacacggacgggaacactgagcaagtgtcggacgacgttctagaaggttgtaattgccacacttctttaaataaaatgaaaattcgcagaaagggacgaagatgacggcagcgatgtcagagaagtgaagcagcacagcgacagaagggcgagaaaacgcgtccgttttgatttgaccgtccccacttcggcgctgttgcgaagtcggtcgatgggaccgatgagaagcctcgattttaacactggtggggtccatttgggtggaattgggttaatggcgattcaattgttagatcggtctcctccaattcggcgacatcgccgggctccttcgcccgaaattagtcgcaaaaatttcaatgacttttctccgacggaccgttctcatcaccctactcttcggacttctttcagccgtcattccatgcaggaaattggcaaacaacagcaaaga

SEQ ID NO: 52631 - DNA, 643 bp, Heterodera glycines; identical to SEQ ID NO: 21989

SEQ ID NO: 52632 - DNA, 1075 bp, Heterodera glycines
atgcgagtggcattaattgtggagtcgggggaagtcaaacaggtgattcgctaaatgttatagtcctttagacttggccatcaatgtttgtcattttccaggtccacgacttttgcgtgttgctcggttacggtgcggatgccgtttgtccttacatggtgtacgagacaaggtaccgactgcgcagcatgggtctcatcgacaagtctctgacggacgacgatgtcttccaggggtacaaagcgggcatcgaacggggcatttacaaagtgatggccaaaatgggcatcagcacgttgcactcgtacaaggcgagacaataatatttttacagatcgttccaacaaaaatattgtttcagggtgctcaaatcttcgaaattgtcggcctcgcgcaagaggtggtggacaagtgagcacatttttgagcaattattacttaatagcatcaggtcaacgcacttttcgcgacttaacttttgcgacgattcgtaatttatctctctgtctgtttgtctttcattaacattcgctttcgtggctatttcttccctcttcggtgttcaggtgcttcaccaattccgtgtcccgtttgggcggtgccgacttcgagacgttggccatggaggcatgcagaaggcaccgaattggctatccgaatgtgctgaacagtgacttgtatttgtatggtgagcaaatttgttcagagttttctgtctatgactgtattaccgtaacactctgcaggagacagcaaagtgttggtcagtccgggcgtttaccattggcgcgacgggggcgaaaaacatgtcaacgaacccgtgaacatagccaagctgcaggcggcggcgcgactgaacgacgctaaaagttaccaggaattttcacgggcgtcgaatttggcccaaagactctgcactttacgaggccaattggagatcaaaacaaatgtgaagttgcagattccgttggaggaggtgctgtgacaattcatccgatctcacaaaacataaaatatataatatatgtggtttaggtggagccggccgcagaaattgtcaaacgtttcgtcactg

SEQ ID NO: 52633 - DNA, 645 bp, Heterodera glycines
  unsure (1)..(645): unsure at all n locations
atgnccttcaacccgggtctccgtctgatcgccaagactttggcgaactctctatggtattttatttttctacgatatattaaaaaaatgattggaaggggaaagctcgcgcagcgcgtcggccacactgagatacagtacacgcgcacgcctgccgaattccacaagctcctcgacgacccgacttacgacaaactggactttgtccacgtctccgaccacatggaccgtgtcgtcgtccggaagcgacccgagttcgccaaagcaccattgaccaactgccttccagtggccatcttcgtcacttcgtatgcacgtctccatctgtacggatacatggagcaagtgttgacattgaacaacgctgagcttctctactgtggtttgtcttttaccgtttaatgttttagtgacggtaatttagacacggactccatctattacgtcaacaagattggagctccgtgcgtaccggagggcgaagcgtttatgtagagaagaaaatggacacaatgacgataagtcggattctaacgggaaacacaaagaccagagaacactacttgggatgcttcccttgcgacaagctccccgacaaaatcatcaggtacccttcagcattggtggcgaacaatgacccatcca

SEQ ID NO: 52634 - DNA, 645 bp, Heterodera glycines
atgcatcgtctctcggctgaacttcctttttctcaagttttgtcgccgtccgggaagctgatgagtgccaatgccaatgccttcccgcttttgcacaacaacaacaacaatttgcaaattttttcatcgccaactaaaagtggcattctcgccgccgacagtccctccgcttcgcctggtaaacaatcggaagatgacgagttggcaaagcagaaaatacgttctacggaactgaacgggcgaatgaaacagttggagaaggccaacgagcagctgaacgaccaattgaacatggcacaggaggaatacaacaatttggaagtcaaattcgaggagatgcgggtcgtaaacatcaaattggtaagtttgttacttgttttgaaggaaattgatatgagctggacaagaaaaatgttaaaagcattggcacactttcagcaagaaaccatacgcaatttgaatggacgactgaaggaagcgcaggacgagtcggagttgcggcggtacgaatttgaacagttgaagagggagcaaagaaatgccaacgaacgaaatacaaaggcatcgggcaaaatggacaaacacgcgaaggaagtggaggaaaaggagagggaattgcagcttctacacaaacggtggatttga

SEQ ID NO: 52635 - DNA, 655 bp, Heterodera glycines
atgacaggcagtggaccaatacaattcggactgcattcgccacaaccttcaactccaaccattccattgtcagaagaaagcagcttgcagcttattccacgctgggaacaagacatcgtctgtcctccacgtttcccgatctcgttttggaatgtatacaccagggctcaaatggcaattgagcgaacgaacaacggcatggaagccgcgcatggacaatttgcagtaaaaaatttcatcggaaaacattattttttggtattttcagcgtgagctcaaccatcatccatcattgagcgacttcattgctgcattcacgaaggacatcaacaaacagttggacatcggacgcgcagaacagctccagaaaagcactaaacgacgacaacggtacgtcatcaaagaacaaaatgtggtgcggatccttgacgaggccgactttgaatcggaagaaggattgacaaacgccttgcacctgctcgggatcgtgatgcaaggctttgcggagggacttcacgtccgtggaaattcagagagtggtgaagaaactgaggccgatgaaaattgattttaaacattttcatattattgtttttttattgatattttatatattttatgaagatttctttgcttgaagcacttttataataaa

SEQ ID NO: 52636 - DNA, 1070 bp, Heterodera glycines
atgccaactgtacgcgaaatacttgagagtctgcaaaagccaattaaaagaccccgaattccaacaaatgaagacagcgtactgaatgctgagaggacagacgcagaacaacaaatggaagacacttcaaccaggaatgatttggacgtcgctgcaagcgatgatgaagaaaactgtgagcctgttcaattccaacgtggcgaaacaatccggggagcgctttgtctttggcaccaaggtgttaatagttttttgattatttatttatttatttttcaggctttcgctttctgaaaatcagaaaagatggcagctggtttaggtgcgaacagcgtaattgtcctgcgacagcaaaattggaagacaacggtttggtgacaggcattttgggcccaaaagaacatcaccatggttgtgcaccatcgcgttttgatgcagagacgaaacgaaatcagatgaagcgcctgatcaaggagaagccaaaaacgaaaccatgtcaactccgtgcacaaattcggactgacattgacgatgaagtcttagaattgctcggcaccaatgaagcgctcgaccaaatgacgaacaggtagaaaaaattcagagaaaataatgatacaatatttagaacaaagaacaaatcgttggtggtgtcaactgtgccgacccactgaacatacaaattccgtcaggtcttttaatgaagaatgatgagtccgtcctcatttatgacagccgtaatatgaggactggacaatctgatgtcgtcctgattttcagccatagcaaggcaagtctaccttcgtccgttttgcgcgagtcgcattccaatttcacgtccaccgaaaacaaacgtgtaagtataaatttaacggatcgatcgggagggggggggaagtcagaagtgaaaaatacgaatgaaatgcacaatttttttttaaatttttttgaaattaaaaaaaattttttttaagctggtgcgcgttgtgattgacgaagactcgtcaacagatgatcaatcaccggcaacttgcagcgttgggacacagacaaagatgagctttgcaaataaa

SEQ ID NO: 52637 - DNA, 474 bp, Heterodera glycines
atggccaaaaatgtcggggttcggggtgggggcccaaccctagttttgaagtaacccacaaataaccataaaaacaacgggggagggttaaaggttattcccatttctaaaataaattaatcggcctacgaatcagaaagttaaatacctattagactgatattttttcaaataattagatatgtaggtatataactttaaaattctaattttttcctttaaaaattatttattttatttcagtgacgaaaagtttagtgacgaaaggtgtaccgacatttcgccaacttgacatctcgccaactgacatctcgccaactgacattttgccaactcagccaaaaacattcatttcgccaactcaaccaaaaacattcatttcgccaactcagccaaaaacattcatttcgcctactaagccaaaatctgacatttcgccaactgacatttcgccaaatagttaaaaaaattaaa

SEQ ID NO: 52638 - DNA, 204 bp, Heterodera glycines
atggctgcaactgtagcagaagttgccgccgaggccgccgaaccgccggtgggcgagcaggacgcggacgacgaggcggacgacgcgttcgccgctcctgcggcgggcgttgcggcactcgctgccaacgacgacagtgtgccaccattctcgaccatgccgccgatgccattgttgacggatgaagccggcacgcgctcgtaa

SEQ ID NO: 52639 - DNA, 977 bp, Heterodera glycines
gggacagagggaaggagaaatgttaacaaatttaaaaaagcaaaaaaatgagttattaataattaacaaaattaaaaagtaatgattgccgtggtggcacacgtgaaaaaagaacggacttttaggaggaattggaaccaaatagaaggaaggaaaacacaaatgtacatatataatgttgtcgtaacgtaatgagaatttgatcggaagcataaggaaaaggaaaggaaagaaaataaaagaaaaggagagaaaaggagagatttatgaaagagagcgacagacggcggaaggagggacaactgacaaacgatcacagagcagaagcagacaacggaccaatggtacacaaatgggaaaggaatgaatgagagaaagtgaaggagaagggttaggacggaaagggccaaatttggtgccattccaaaaaaaaagaaaaagatggcattttgaaatcgcgaatctcttatctggcacagaacaaaaagccaaaacaaagcgatgaaatttgaaacaaacggcaggcagaatagcaaaaataatttaaattttttgacaaaaaagcagcgccaattaaattaagttatccctcggaagccaatttgtgggtttgttaagccacgcatttgtgcatctgtggagatgaagcctccccccccattttcaccaacagcagagaaggcagcggaaaaagcattgcccccctccctctctctccaccccaattggcgtgcctttcactgggtctggggctgtttttcaaaatatttttttaagcagtggaaatagtaatggaagaagtaaaattttgaagaaatagtgcgataataatatttttggttgagaaaaagagaggagagagagtgagagtgagagaggaaagcctagtgagagaggggagagagagtatgaggattttaaaggggaagagaatgagaatatggaggaaaagatatgaagcgaacgaagagagaagg

SEQ ID NO: 52640 - DNA, 828 bp, Heterodera glycines
atggcctatcgacggctaacgacaatgcttcaacggctgcagaagactcccgaggtgctcaagctgtacaccacagtgatcaccgatcagctcaatgcagcaataatcgaggaaacgacgatcggagctggtaaacacgaacacttcatccctcaccaagcagtgatcacgcctaaaaagttgcgggtcgtctacgatgcgagcgcacacacacgaggggcaccttccctcaacgactgcctactcagaggcccagtttggctgccggatttggccggcatgctcattcggttccgagcatgccgagtaccagtgatcgccgatgtcgagaaagcatttctcatggtcgggattgaagaggacgacagagatgtgtgcaaatttttgtgggtgcgcgacccatttcggccagtgacaacggacaatttggtgacataccgatttcgacgcctcgcatttgggctcacgccaagccccttttgtctcgccgcagttgtacgacaccatctgcgcaaatacgactccaacttcgcggaagaactcattcgggacacatacgtggataatgtgctcatcccggcggacactgcggaagaagcagccattaaaggacgagaagcgaaacgaatgtttgcggacgcgaggatgaaccttcgggaattcttgagcaatgacgagacactcaacagcagcttttcggacgcggaattcctcggcaagacgacggccaaagtcttgggactcgaatggaatgcggagacggacaaaatacgaatgaagtaccccgggagcgaacccggcactccgatcagcaccacacgcagaacg

SEQ ID NO: 52641 - DNA, 251 bp, Heterodera glycines
gttctgtccgcgaatgcggaagcgtttgcgcaagtggagtgtgtgtttgaggaccgcgacttccgcgtcaaagtcactcgggacgagttggaggcgatgttccgcgactttgaacagcgtcacatggaacccatcaatgttgctttgacaatggcacaactgacgctggacaaattggaccgtgttgtgttgatgggtgccggcacacggatgccacgcctacagaccgtcctcgacatattcctccaggg

SEQ ID NO: 52642 - DNA, 381 bp, Heterodera glycines
atgaacagacggtaaggaaaatttttaaaaattacaaattttcattttccatgcaattttttccatgtttcagttggctttgtagcgacgtgtggatggacattctcccatcttttgaccgtcctcaactcggcctcaaaatggcattgctttccgaccgtttcgatgttttggtggacaaacattttgatggaaaaagcgaattggcaatttggagaatgatcagaattgacaaggacaaaggacccaaagccgaaattatctgtgcggatcgacggcacttttgtggaatttccgttccccgaccgtccgctgcccaacaaaatccgatttaaggaccttcagatttagtaatttcaaacattttttgtttatattaaa

SEQ ID NO: 52643 - DNA, 79 bp, Heterodera glycines; identical to SEQ ID NO: 52291

SEQ ID NO: 52644 - DNA, 379 bp, Heterodera glycines
gcttaaaagcattgtacagcataattaaaaccgaaaataattttcgtatatttttcacaatttatttcaaaaagccaaaaaaaatgattcaattttgaaacgaaatagtgcacaaaagggagggatggttagacgaaaagaggaatttttagaaaagagcgcaccccatctgatattcccatttttccgttccacaactggccaaaggcgactgtgctcattgacacgtagttgtccaataaggtacttggactttccacagtaaaatgtggtacaaaattttggaactgtcccgcctcacggcggggcttaaaagcattgtactgcataattaaaaccgaaaataattttcgtatatttttcacaatttatttcaaaa

SEQ ID NO: 52645 - DNA, 673 bp, Heterodera glycines
atggcacctcctcccattagacagtcttccacctcatcatccgtcgaattggacgacgaaagggacgaacttccgccaccaccgccgccgatggttcagcaaaagttgcggaacggaatgcagcgggaggagagagaagaagcccatcgccattctcagcctctgcccctcccctcccttcctccgaccacggcacaactcccccatcaccagcagcagcaacagtcccttcctccgcttcgttcccatcttccgcttccctcccgcgtccatccgttacgtcctccgcctcctccgccaccgtccgttccgcccgtgtcaaagccatcggtgactccgttatggggccgtaatgagcgattggttaattatttgcacggatatggcactttgttgggcaagaacatggaggagaaggagaacatcatcgtcggaccacgaagagacgccaaattggaggaggaagaacgccgaagggcggacgaatgggctgtgcatccgataatgctgaaggagcagaggggccgacccgaggaacgagtgattcccatccaacgcagaacgacagcgcaggagacgacgccatggcgcgggtcgccgctgctcagatcgccacgacggatcagcacggaatggacgagcggaccaacgcaaaacggacaccgaagaaatg

SEQ ID NO: 52646 - DNA, 708 bp, Heterodera glycines
atgaaacaagacgaactcctcgcaaattttctcagcagccctctaccaccattgccaccaagaaaaaattcatcaacgaatacccgaaagagcacatcggtcaatgatcaacatgaaacgaactttcacaaacaatttggtcaaaatatttttaacagtaaggacggatcaactgaatctgaaaaacgatctaatcagcagacaaaaaaaaatccaattagcatatatggacgagaaggacaagaagtttccggcaaccaaagtgatcagaatactaaaaagacatcatctgataagcaaaggaacgaaaagaataaagacatttcatttgctaagaaagtagtcaaatatttatctgggcattcatctgacacccagaaagatcaaaagccaaaaaatggcaagaacgaagctggatcaactggaaagaatactaatcagtcgaatgatgtcccttctataaataaccagcgtgatcaaatttctcaaaaagcaaccaatgatttatatggacaaccatctgaaaccccaagttatcaaaagaaagcaaatcgcatgaacggagccggaccatcggagaagaaaagcgatcagaatgacaaaagcgagctgaatgaagggacaccatcagaaaatcaaattgacaaaaccaaaacaaatcgcttgttaaaagcaaaagaaattttgccctttcaacagaaagagtag

SEQ ID NO: 52647 - DNA, 461 bp, Heterodera glycines
aaactgtccacacgttgaaaatgttatcgggtgatttcgaatacgaagaccctaagtcggaagaagaagtggtcaacataacctacgtgacaagagatggaacggagaaaaaaatacgtggaaaagtcggcgacaatgccatgtatcttgctcaccggtactcttgaataaggtaattagctcatcttttttttaggtataacattgaaattgagggagcttgtgaggcatcgttggcgtgttgcacttgtcatgtttatgtggatgaaaaatactacgacaaattgccagctgcagtggaagatgaagaagacatgctcgacatggccccattgctgaagcccaactcgaggctctcctgtcagattattctaaacaaagatttggagggcatcagagtgacactcccgaaaatcacgaggaatttttatgtcgatggccatgttccagagcctcactga

SEQ ID NO: 52648 - DNA, 1040 bp, Heterodera glycines
atgcagcttctggctgacccgcttgtgaagcagattgccaacaaaactgcatttgttccaactgaggtggttacttttttgtataaaaatggcaaaaacggaaaaataataaaatttgttaactacctttgccatttttacgatttttgttaaaattattattttgttttttgcatttaaatttaatattttaatttaatattttttggacttgtttacagttttggtcagttctagaaatgctgtagcgtactttttagaaatttgcaattctcttcaaaaacattcgcatgaactgttcaatggaaattggcaataaatgtgcgtctggcaccaagctgatcatgttggcaatgtcgggcagggactcatttgagaggcgaacgggcgcgagagagacatggatgaaagaagcggtagggaacaatttaattgattttattattattaatttaataatttattggcgaaataacgggggaaacaatttaaagcactaattaagttggtttcatcattttattgatgaaacacgttgtgtaaattatttaattgggttaatcaattttgaattttaaggaattcaattaatgagaaatgtcgaataaattaatagtgagaaaaaaataattgaaatattcaattaaaaaaaaatttgatcataattaaagaatataacgaaaaagaacgggctgcacttatttgaatttaaaatttgagcaaaattgacattaatttttttttggattggataaatataaacttgcatttaattaggccccgggcgaaatacaacgattttttatcgccgacccatcgggaggagaagcggcagatgtaaaacaaaaattaaaagaagagcagaaaaagcatggagacattgtgtttttgcacggttttgtggataagtacaagcatttacatctcaaagtgatcagcaaatgacaattatttaattaattaataataattaatctgttttcaaatgatagaaacggagaaaaaaagcatttattttgacaattctttgacaaattaaa

SEQ ID NO: 52649 - DNA, 477 bp, Heterodera glycines
atgatcagcataaaagcattaaccgatgccaactttaaaagcattttggtggaacttttgaatgccaaaagtggtaaatgaaacattggcattattttattaatttatgaattttgacaaaattatttttagatggttcaacacaaactgaagtgagcttcaaaattggcactgacagtgattttgaagtagcattccccggagtaataattaatttattaaattatcaccatttgaatattttttatgtttcagtcaaagtcaatgccaggcaaaggcgtacggctgcccccaggcagttacctgctcaatttggacatcgtgcttaacgagcactgttctattatgctcaaattgaatggcacacaatttggagaatttatttgtccaaccgatgtcaaaatgccattgggggctatcagttggatcaaggtgaagccaatgggcgagaacagctttttgggtgtcgaagactaa

SEQ ID NO: 52650 - DNA, 1388 bp, Heterodera glycines
atgtctaccgtgcgtacgtctggccgctgtattgtgactggagtaacggcctcttccactcctacctcaacaaattcctgcgcatcaaatttgagggtaagtagtaaattgatcaatcaatcaattaatcaataatcatttagccagcggtttccctgctgactgtgccgctgatgacattgacgaggaggagagggagcgcagaaagcagcaatacatcaacaacccctggaagggctgtacggtgcggctcgacgcaaacaacatcaagccgaatccgggcatgcggtacctttcgaagctgtgcctcaactcgctgtggggccgctttgcgttgcggaatcggctgacgaagacggaaatcatcgactgccacgccgacctggcgaagcttctgaacgacgtcaaaatcgacatcagcagcatcgaccaactgacggagaaattctggatggtgtgctacaaggcgaaggatgagcacgtggtggagcacgacaccagcaacgtcgccattgccctatggactacggcagcggccagagtgcacttgctcaactcactgcaattggtctacaggcaggaaaatctggttcagcgctacgacacgcgcattttatacatggtaagagtgtgacaataaaatattcataataaaatatttttttttcaggacaccgacagtatcttctacgacttcaagactgcactgggagacccgctgaagggaggcaacaagcttggggagctcgcggacgagtaccacagccataccatcgtcgagttcatctgtggtaaggactttgtccaaaataatttgaataaatttcaatcgatttttagctggacccaaggcctacgctctttggcttcggaacaacgcaaccggcgaggacgagtacaagctgaagctgcgaggcatcacgctggactcgaacgcctgcacccgcatcaactttgagaagatgaaagaaatggtgctggagaagtggggcacgcccggcaaccatgtgcggttcgactaccctacgaagaacttccgaatcacgaagcagggcgacattctgacggtgcccatcaccaagcagttcaaccccaccgtgaataagggggtgctccgggaccgtgggcttaaggttgtcccctttgggtatagctcatgggagtactgtaaggcccataacccctacgattgtctctgtaagcgcgaataatttattcattttgtacttttatttttcaaaatcctcatctgtgacccaatatttttccggaaatccgataaatttcaccaatatttccttttttccatccctcattcgttctttgtactttttctcgatcctatacattgtgttttcgtccacttgtacttttgttagctctggcaa

SEQ ID NO: 52651 - DNA, 573 bp, Heterodera glycines
gcggacttggctgacttccaagccctttcgcgaaagaacagcggctatcggtacctactgttggcggtggatgtgttgtcgcggcgtatgttcggctcacccgtaaagagtaagaggccggcggacgttaaaagggcatttgaggaggtgttgggccaaatgccaaggcttccggaaacactgtacacggaccgtgggctggagtttgtggccaagcccatgaaggagttcttcgctgagaatggcattaagaagtatgagaccagctcaaagaagaaggctgccgtcgcagagagagccatccgtacggtgaagactcggctgtacaaatatttctctgccaaaaacacctctgcgtgggtggatgtgttgcccaagtttttgtctgcaattaacaattctgtgtgccgcgcagacttaggccaaacgaaatcagtgacgtcaatgcgagagaggtgtggaagagggtctatggcgaaggacttgtaccagcggagaagagaccaaagatcaaagcgggagaaactgtcagaatcccagagctcaaacacatattcgagaagggtacagtga

SEQ ID NO: 52652 - DNA, 1296 bp, Heterodera glycines
atggagatgggcgtggaggaacagcaaacggacaataatccccagcagcaacaaaaacacgtgccatctttgacatcaaaccctgtggacaatgccgtgggaggagtggaaacggcgacgactgcacatttcgacgggcatggggagagggcggcgacggcatcaccggcttcgtcatttgaggaagctttgccggcggagacaaccaggagcaacagtggcagtgggggcgaagacgaacatgacggggcacgccacggaaatgttgatggagatgaacatgatggacatggacgacaacacagccggcactaccaacaacagcaggagcaacagcagcgaccccaacgacagcagaagcggtgcagtcggcacttcttcagccaggagccgcccaagctgtgcagcatcatttatgccgagtttgacaacgacattggacgtgtgatacgctatcaagtgaatgtgtggcgtgaaaaaaatattcaaaatttttctataagtaattttaagaaaaaggttacaaatttttgcagggttttttttgaaagttttttggaaaatagtagtaattcattggaatctttaaaaaaatttcgagggggaagaacctgctccggcaaaatataaacgttgcccagaaactttgttggtatgaatttcaccaaataaactattttttcatggaatatttagaaaacggaaaagattttatttttaaattcgagcgattgtcgtttggccaaacattttaaacgcctagtcttccttattttttacaaaaaaaaatgaaaaagttattaataaatttgccgtgccgagttttttattaacaaagaaagtaatttataaagaacttcaaatttttattttgaaatatccaatataaaaaaaatttgcctctaaatttaatacaaaaaaaaataaatgaaaaataaaaatttaaggtgcccgatgagatttttgacaagcaacgcttcgacaccatttcgtccgcaataattccgtcggaggaaatgcgcgatcgtatgatcaagatcaacatgtacgactacaaaatcacgggccatcccgtcggcatcagtgagcactaaaaaatgttttttctcctagcagtaagccaaaaaattaaaaaaaaaaatttttttaaaacattagaaaagcaagaaaattcttgataatctgggaaattcactactttttcgagttttaagcagttgtcatttctttggcttacaaaaaaaatctcaaagaaaaaaatttctcgcggaaaaaaacaaaattgggggaaataaa

SEQ ID NO: 52653 - DNA, 105 bp, Heterodera glycines
ggtccgtttgggggactcaaacaattatggggagcaaaaatccaacgcagaattaaagtacaggctatagggaagctattcccgaaggattcggtctccccataa

SEQ ID NO: 52654 - DNA, 664 bp, Heterodera glycines
gttttcggggcagtccccctgaaccgatgcgcccagatttatggggagaccgaatccttccggaatagcttcactatagcctgtactttaattctgcgttggatttttgctccccataattgtttgagtaccccaaacggacacttgaaaaaatcgattttttttgttttcggggcagtccccccgaaccgatgcgcccagatttatggggagaccgaatccttcgggaatagcttccctatagcctgtactttaattctgcgttggatttttgctccccataattgtttgagtaccccaaacggacacttgaaaaaatcgatttttttgttttcggggcagtccccccgaaccgatgcgcccagatttatggggagaccgaatccttcgggaatagcttccctatagcctgtactttaattctgcgttggatttttgctccccataattgtttgagtaccccaaacggacacttgaaaaaatcgatttttttgttttcggggcagtccccccgaaccgatgcgcccagatttatggggagaccgaatccttccggaatagcttccctatagcctgtactttaattctgcgttggatttttgctccccataattgtttgagtaccccaaacggacacttgaaaaaatcgatttttttttgtttc

SEQ ID NO: 52655 - DNA, 959 bp, Heterodera glycines
atgcgtgtggcaatcggacgacggaagctgttcggacagtcaatttggtgtccagatggaacgccaacagtggcatttgctgacgcggaggagcggaaagttcatgttgaccggaaggccgagaagggcacacgcgactgcacagaaacgggtgagtaattagcaagggtgtgccatgttgatggataagttgggatggcatttcaaaggtccgtctctgtgcctattggactccgcctgcggcgcccttccatcgtcccgtcgcgccccccgcggactgtgccaatgcgtacgacccggtgcccatcggttcggctgagttggcccaacttcgcgtctattgcgtcctcgacactgcgatgggtgtgcagaatgttcggcagcaggaggagcagcagttgggcggacttttactggccgaaacgcacaattttctgctggcgctcaaagggccgttgtgctgttgccttgagcaaattgcgttccccggggggtgaaggccaccccaacgggggcagccagtacttggtgaggagaggagccactgataggagccgccaggaaaaactttggaattttcagtcgaacagttaacacattttggctattttaaatccacaaacccctaaaataccgaaatcctcaattctaaaaaaatcttcatcgttctagcaaaagccaataaggatgataaatcctcaaatatcggagggatcgaaaccaaagccccgccgggaaaagagaccaatatacaaaaaaacctggaacctaaagactctcacatatctctcaaattctcgtgttcaggagattccggaccacgtgcatcggtggtgtgctcagaacggattgcacttccaactgattgtgtccggcgtgccgtcgtccgccccctccccggcacttccgcgttcgctgtccggacgcatcgttctgtaccaaaagggcaacgcagctga

SEQ ID NO: 52656 - DNA, 2064 bp, Heterodera glycines
atgtcaaatttattttacgttcttttacctagtgactctcctggttatgacaataagcctaataaatttagggttcatttgcctaggaccctaacttttggaggtcaatggttgtgtgggttgcacagtataatttatacaaattcttggcccgccattggtaccacagagaaccaatggattaaagtgcatttaaaaaatggtgataaaataaaaattgatattcccgctgggtcataccaaaatgagcaagaattggaaaatgctataaatgagtcgataaaaaatggtataaaacaaccagcaacaagaatgaaaagacaaacggaaaatggagtggatttgttttttcattataatccggatgactattgggataaaattgaggaagaaaggcagcgatacaacgaattgttaaaattaatagagacaaagtcaagtgaacgtgacaatgagatggacacacataggaagagaaaaatacaggaggaaaaaattactcctcttcaaaatcaatcattgactaagaaagcaagaatagaggcgttagaagaagcagcaaggcaaagagatgacggaaaggaggaaaaggaggagagaactggtcaagaatttctcaaaatgtatccagtaaactatagagagaagctaaatgaagttcgattagaattaataagagatttattcaacattcaagaccatatgaaaaaataccaaggagtaacagatggtagaacaattcaagaactaaatgaaatagcaataaagatgagaacagcaatgaaacacagaagaaaaaatttgaatgcttttaacaaggctgtattgaaaaatgatttacaaatatcagctgaagaatatgagaggacgagctatgaacaaaataaggattacgttgagccattttttgatagtcatccaacagattactgggaacatattcataaaaaatatgaaggccttcaagacgattacaaaaaaattcgcgaattaagagaacaacaacaatttttgactgatgaacagaaaaaacagtcaattcaggatgaaattgatcaacttcgtcgtcttgtcgattataggaaaaaaagatttgcagcgctagagtatgaagctaaaaagagggacgcactccaacaacaaccaatggctttagccttgactcatggtgaagcactgaaggaacgaataggaaaaattgagggaactaccaccacagcagacggggaagagacaaaaactcatggaaaatctttggttgagttaatagaacaggtacagaaagaaagagatgatagcaaggccaaaactgagggtaagacacgaggagaaattttaggagataaattaaaagccaaaattgatgaacaagacagtagtgcagatggtgcaacccatggtgaagcactaaaaaataaaccagaaacaactattggtgaaaaagtaatgacaagaggagaaattttaggcgaaaagttaaaatctaaagatgaagaaaagaaagaagaaagaataacccatggcgaagcattgaaaaatagaattgaacaaattcccgaagaagaaaaaacaaaaggaaaaataagaggcgaaatattaaaagaaaaaattggggctagtaaaccaatagaagaagaaaaaaaagaaggaaaaacaagaggcgaaatattaaaagaaaaaattggggctagtaaaccaatagaagaagaaaaaaaagaaggaaaaacaagaggagaactattaaaagaaaaaattggagttgataaaccaataagacaagaagaaattgaaggtgtgaaaacacgtggagaatcattaaaggatataattgtttcgaaacaaattgaagcagtattattcaaatatttgaatgagcgtaggaaattttcgatttattttaatgaccgaagaattgaatttattgaattatcagcacaattaggatacattcttgggtttgaagacacgacaaaaattaagaatggagatatagcaaagtattattgtgatttgaagggagggattgatagtctttgtgtttacattaatggaattactgagaat

SEQ ID NO: 52657 - DNA, 1113 bp, Heterodera glycines
atgcaaaaatggatatttaaaagtgcaaatctgttagcaaaacatgcaaatgtttagttttcgttttttttctcaggaattgcctgtcgacaaagtttgattcttcatatttattttaaattgacaattttttatcattttttaagaaaacgcgttaagaatttgagcctagtaatcgccaaatctggtcatttttggacaaaatctgttgacaaattgcactcaattttcaaaattttcccgggcccggcgcaccgcccccccccctttttcttctcgaaattttttcttggaaaaagcgttccgcgaaaaaagtggtgaaaagcaaaaaaaaaaaaaagggtcgtcgaccagcagcagggcgatggtttcccctccaaggcaaaaaatcccgttgaccgtccctgactgctggacaaacaaaacatctcccttattcttaaaaaacgactcaaaacccaaaagtttggcgattttttggataaattctgtcaacaaatttttattaaaagttcaaagattttttacggcggtgccgaaaggcactgcctcccccacttacattggatttttggaaaataccgaagttatgaagttgtcgacaaaattttttcgattttccaaatcggtgttaccttctgatcagattaaggttgaaattctgaatttttaataatattctgattaattgtttggaaaaaatgaagtaaatttgatttggaaatattattaaatatatttattttaatttaattttgctttaacttttagcttttataaaataatgaagatttttgatacatattaaatatgaaattttcgattataaaacgatattcaattttcggtccttaacttttttcatcaaaaaaaatttaatatacgcaatggaaagtgcttattataattagggctccaatttatagttttttcactatttttttcctgagctctccgtggcctaaaacatacgaaaaacaagtttttttcggttgttgttaagctacttttcgagttattagcaactattttctagttttttatttttagcaactaaaaaactataaaatttttgaaaaaaactattttcaactatttttgcttgtgaataaa

SEQ ID NO: 52658 - DNA, 382 bp, Heterodera glycines
atggccaaagaatgcacaagtcggaaacggccaaattgcaaggatggccacaacaatttaatcgaaggacggaccgatcggagcagtaattgaaattattttaaaaatttatttgctaattatcattaattataattatactcagtctatagaaggtcatcctgtaaccatcaaattccttcggggcactgtgtacaggtcggacagtacgccgtcctgctaccgtaacaaacctaccgtactccttccaggcgttggtcgtctcgttgaaggttcaaaaattaaaaaaaatttgttttttcttggcatttttttatcaaattattaagaaattttgtacaaaaaatgacaatgttttgtggttttgagccgatttttgaaa

SEQ ID NO: 52659 - DNA, 63 bp, Heterodera glycines
atgaaggaggagaaagggtggggggagtatgagtatgatggtcaatatggagaaaaagaaaga

SEQ ID NO: 52660 - DNA, 805 bp, Heterodera glycines
atggcggtaggggccaattccgtatcagcaaagttcaaaaagcttacacttttttctttgttgataaaattaacaaacatggtatcattcgaaagctttaaatcttttgaagatatttctagctatttttaaatggttaagcggctcacaaaaaaagtcgtcgcttgaaaaccgcaaaaaggcagaattttcgaagtttttttaaaatttttttttttataattcgacattctcagtaattatagtaggctattagagcctgtaaagagctttcgtttgatgaaaagtgttggattctgtcaaacaacttaaaaagttatattgactcaagttagctcagcagacggagttggcccgtttcgcccaatagaataatttgctccgccacgtttcatttcgccaacaatctctccgatctcgactcttcggttgaatacttttctgctcatgacttttttaaaacttaaattctttgaaattttacagctaatagaagactcttgtggctatcgaaagataccaagaatgttgaatttggatagtgtttaaaatttaaaatattttaagtgcctttacgatgtaactctctataggtctgagtagagcagcgcgggaccaggaattttgcccaaaaccgggacttgccgggacctgagaagccgggaccggaacctcgattttcgtgcgggaaccgggaatttttaaagataaaaaaaaaattcaaatttaatttattcaagtgaaaaaaatacaaaattaaatttttacacaaccagaacaagatttaaaaaaagaacaaacatta

SEQ ID NO: 52661 - DNA, 718 bp, Heterodera glycines
atgaactcagtaagaaggatgagtgtggcggcaaaggcagaaaatgtttttgttgggcacatacgaagatcagctcgtgaatctgctggcggctggtgttatatttatgttctgggacaagacacaatgatctcgatgtgaaacggtagccatggataatgacaataatttgattaattaacgagaatttaattgtcattcttttgcattggtcataattctttcattcagactggctttcgaatgataccaattttgaagaaatcaaccgacgaacaaaaaagttatggccattcccattcaaattgtacgaaacgccattgtacgaactgccttgaccccagtttccttcattgtttttaagtggtgttatgtcgctgaaaaattcgtttgctcttttttgatgcaattttattgaatttttaaatttttatttcatctacattagattaaaacattttgatatctattaatttttattttttaagatatctcataatgggtcaacatttttgcaattattattataatatatataaacttttttaactgaatttatgttttttatgatctgaaaacgaaaactttcatttttttctttaaatgctcaatattcaatgtaatttttgtaataatttatattatatgacccctcatgataagcagggctgcaaaaaagtatgcacgaaatggccaaaatatgtgtataaatatgcaa

SEQ ID NO: 52662 - DNA, 2850 bp, Heterodera glycines
atggttaatcttccttttggtctaagaaatgcaaccagtgcgtttgccagatgcatggcgcatgtcctcacaggtttggacgattgtgtaatcgcatatgtcgatgatatattggtatacacaagggatgataattttggtgagcatctcaatgctttgagaagtgtctttgaaagatttaggagattcaacttaaaattaagccctaagaaatgcacattcgctgcggcgaccatgaattttctcggatacttagtcaatgctgttggctacactcctagtctaagcaaagtggaaataattaaaaatcttccagacccaaaaaccattcgagaagtgaaacacgtagtaggaatggcttcattctttcgtaaacatgtccctaatttttctacaatcgtagaaccattgaccagactaactaaaaaggagagcaatttcgagtggggtacagaacaggctgcggccttcaatgaagtaaaaagaattttgagtgagaaaccaatattggtgtttcccaattatgataaaccctttcacatattcacagatgcctctaatgttggccaaggtggggcactcatgcagtggaatgagttggcggaagcatatgaagttattgcttattgcagcagaacgctgtcagcatctgaacgcaaatggcctgctgtacaagcggaattgggagcaataatttttgctctgcgaaatttcaaaccctatatttttctgacagaaattgaattacattgtgatcataaacccctcgccttcctacttaaaaaggcagaagcgcatccacaccttgcgcgttggttaattgagttacagaattacaatattaaaataattcatgtagcggggaagcagaatcttttagctgacggtttgtcacggtacccacatgaaagaacccaagagattgccattagagatttggctgaattggaagacatagcaaattttcccgtctgtcttgcgctgaatatgaagccaagaatggttcatgagcattctcttttaaccatcactgctcgtgatatagaaggaaaaacattcgccattgatgttcggaaagaacaaaatgacgattctgaggttaggaaattaattgaatttgtaaattttggttcattccctgaggggaccacagaagttgaaaaggaagatattgcatcaagagcggaaaatttgagtctttcctcaggcatattataccaacacttaccagatcaaaatgctcgaatgtacattccgctttctcttcgaccactaatttttgaagcttttcatacttcacaaataaatggtggtcacatgaatatcaaaaagacattagggaaatgtagaaagttttattggccgatgatgcaccgtgatataaccaattggaccagacaatgcatcacatgtcaactaagacattcacccaatccttcatatcgtgcagaaatgcaaatgccaccaaaaaatactctcttcgctcaaattgcacttgatttggcaggtcctcttcccctcacgcagaaaggtaacaaacatatccttaacataatttgcacatttaccaaatatgtaatctctgtacctgtccctgatgctaaatctcaaacaatagcactagcattttttaaacactgctatttaaagtttggaggctgtacgagtcttttaactgataatgccacggcatttacctctgatttttttaagtccttctgttcgcttctctatattaataaatgttatgctattccccattggagccaaggcaatgcagtagttgagcgatcttttaggacatttcacaatatacttgcgaaatatatttcaagtgaagaaccagattttgatgaatttcttgaatgtgccaacttctgctataacacatcaattcactcttccacaaaggagacccccttctttttggtctttgggcgagacccaatattttgcattgagcaaattttgaatcccaacaccgaacccgaaaatatcactgaggttgacaatgtaaagcagaaattagttaagtctcttagaaaagcttgggaatccgctgcggcggtcattaaagaagctcagttacggtcaaaagtacaatatgacaagttagtacgaaatcagaccgtccaaataggagatagggtcctattacgcaattacgcaggaaaagtcaaaacatccaagaaatttcaattaccctggaagggactttatcgagtcattgagattaatggtgtccttatcacaatcgtcagctgcacatctcctcaaacaaacccaagaattgtacacattaatcaaattaaaaagtattttgagtactcaggacccccttgcaccacgaaaaatcttcaaaaagatgaagaacaagcactaaaggaattagaatcaagagaacagaccaatgtacctggctattctcatgattcctatcaaaatatctctgataacacagtattaatagaaaacgcacctgcactcacccctaatccctcaccctcttcacagtccaataatcaggtaaaagaaaaagaactaaatagaaatctttgctcaaaacataatctccgtgaaaatcccaggaaaaagaagcattttggtaacttttctgaggactaatcacctgggatagccaaattcaatcatttttcttttcttttaatcatactgtattttaagtatgtggaccggtctcgagaagtcgtttcagcttgaaaatgccaacagaaattggacaggctttcgtaatttttaaatttgttaaacaataagtcccgcgggactgtttattgcttatctctcttttatcagttctgaggaactcatcaatcattatctaataaa

SEQ ID NO: 52663 - DNA, 225 bp, Heterodera glycines; identical to SEQ ID NO: 50965

SEQ ID NO: 52664 - DNA, 487 bp, Heterodera glycines
ctaacttgtcatattgtacttttgaccgtaactgagcttctttaatgaccgccgcagcggattcccaagcttttctaagagacttaactaatttctgctttacattgtcaacctcagtgatattttcgggttcggtgttgggattcaaaatttgctcaatgcaaaatattgggtctcgcccaaagaccaaaaagaagggggtctcctttgtggaagagtgaattgatgtgttatagcagaagttggcacattcaagaaattcatcaaaatctggttcttcacttgaaatatatttcgcaagtatattgtgaaatgtcctaaaagatcgctcaactactgcattgccttggctccaatggggaatagcataacatttattaatatagagaagcgaacagaaggacttaaaaaaatcagaggtaaatgccgtggcattatcagttaaaagactcgtacagcctccaaactttaaatagcagtgtttaaa

SEQ ID NO: 52665 - DNA, 957 bp, Heterodera glycines
atgcctttatcgccagcgccgtccgtccatttccttcgaaccgaagtggaagaaagggtaggcatgggagggactgacctagtgtaatttccatttgatcattttcagcaattctagttgtcctccttgtctctggtgttattgttttgataatactggtttgttcgcatttgtttccttaaatttgacccctaatatctttaggaggccagatcgaatttggcgaccgacgaagagggagaaggtttggaggagcaccggcgaatgaaggaggagaatcggaggggccgccaggagcggatggaagctaatcggctgcctccggcagagccggaagccgaggaagagccggtggaggttattccatggcaaggtaaaagtttatgccttttaaactaaatcgcgtaacacaattcagcgcggatgacgatgatgataataatgatgatcctgatgcgcccgaccattggcgaagtatgctatttatttgagtgctgtttcaaattgaataaatttagaccagacaaactgaataaaatacgttgttgtggacagccattttttgaatgttatgtggatctctcgcataaattgtttttgttttttaatatttgtccaacaaaatgtctaaacgaaattacctaattatttaccttttcttaaattattaattatataaaaagtgcacttttgacgatgacacagcagcaaggcgcaacagacactgaccaactgaagaacgaaacaaatcagaattatttaatttatagacgtcgcctggaatttcaaattcgagcacattcgttaacagattttaaggaaaattgttatttttgaatagggcagtcaaattgtaactctcgcaatatggaactaaattgcaaaatgtagggctttctctattgcacaaagcaactcaatttgggtctgttcgacaattattattttttcaataaa

SEQ ID NO: 52666 - DNA, 228 bp, Heterodera glycines
aaaaaggccattacgcaaatcgttgtacgaagggaattttggcctttttgtccaacaccgccacagcgagcgaccagcagagagaacagccgcgagacaatcaacagaagaaatacgccggcggagaggggggacgaaaacgcaaaatgacggacaggaaaatttcgattgatattttgttttgcaaatttatttgttgctatttccccctaagtgagaagaactgaa

SEQ ID NO: 52667 - DNA, 1159 bp, Heterodera glycines
atgccgactgatgttgttgttcgcaaaactgttgaagaaagggagccgagaacgggcgcaaaaattagagaatcagtgattaaggcggcctcggggagtgtcaacgagatgggagagaacgtcctcaaatttgggttctttcaaatcaatttttttcatgaaggaaatttgaaaaatttgatgaacaaccgccacgaatttgccaaattggtcaataaacgggacaacgaccaacacggaaaaggggcggagacagtttcaaaactgatcgcttacttaaaggagaagcgggatccggtgatcaatgaaattattgccgaagttttagaggaaagtgccatcttcggggataactctcagaaaggccaaaagcacattctgttgttcacttacattcgcctgtatcgcaaattggccaatgctttgcggtgggctttgatcagcgacagcggagacaacgaaaccttcgtgcaagaaacgaacactctgttgaaatggcttaatgagatgggtgacacacttctgaacgccctgtcaaaatccccaattgtaatgaattttgaaaattaaaaagtttgaaaacccggaaaagggacttggaaggaccggaacagcgttaaaatcctttttccgaattttccaatcacaatccactaaaaccattaaaattgtgccaatctccaatttttttctttttgatccaatataatcaagatttgctgaacctattttgcaccagaaaaagtatttttggcttttagatggcaagataaaagccgaaaaattcgagattttttgtgttgttaactgccgaccccggtctttccttccggaggctggggaaatcccgacgatctaccgatccggtccaggcccctaatgaatatgtattttggttgtttggaattttttcaatttcctcagacggcgagatgggtgaaaaatttgtgccgaatggaagcggcggttgaactgacaaactttggcatttttctgattttgccaagccacacttggcaaagtgtcggggccgaacgtccaacagcggtgaatgacttattcgaaacaattggcaccacagaaattttggaacaaattaacgatccctgcgacacaaattgcattgatcagatggtgaagcaaaagttggagctgatga

SEQ ID NO: 52668 - DNA, 1656 bp, Heterodera glycines
atgcgtgccgttctcttcctggctatggtttgtctggtgatggctgttattttggagactggtaataaaaattatttaaaaataaacaataataaaatatatctattttagcgaactcaaaagcagtgaaaaaggacggtaaaaaaggtgaatataattgttgaaaataacaatatattaaaatttaaggagctgttgcatcgcctgccaaaggaaaagcttcgccaaaaggtgccagcccagcaaaaggaaaagctgcaaagggtaacgaatttaatatgtttttaattatattaaataataatttaaattaataaggtgggaaaaaagatgcaaaaaaagcgggcaaaaaggacggaaaagtgaaaaagggttagttggtatttgaaaaagattttttgaaaatgtttttgaaatctagaaaagaaagaaaagccggcaaagaaggcaggcaaagggaaagatgcagctaagaaaggtaatattgtaagaataatttaatttaaaaaatgaaatttagacaaaacaaaggacaaaaaggtaccagcagcaggtaaactcattaaattctaacttaatgaatggcattgtgccaatttggcgatttaagccaagccaaaggctgagcctgtagagactgaaccatccagtgcacaagttgtagcttgaaatagaaaattgtataattgaaaaaatataagaagattttatataaatgcgtacggagcaacggtgtactcaaattgtaaatattattattgatacattttcattaaaaatgagaaaattataaaataaatattataaattgaatgaaaattacttttcctttggcaggcgatgcaacagcttttttttaattaatattatatttttagtcctcgttttatttcgcgtgcgaattccactttttacttgggtttatgcccaattttttggacctacagcagttattaattctttcataatctgttttggataagtattgatcgattggtggcattggcattccccgttttgtaattatttaatatttaaataaaatttgtctttgtatttttagtttccgtaacagctccagatcagccggcaaatatgtcatatttaccaatgttttttcatcgtcaattaccttttatatcctttatttgtgttttaaatttgccctacaacatcccaaatgtaattatgcttggttctcatataacggttatttttactttggctacaattgtcatttatattgtcatgggaattatactaaagggtaaatttaattacacaattaaaaatatttcatataaatttaaattaaaacaatgccttttcagatttttgtttgcactgatcaacaagattttggcacgaggactgatcaccagtgatacttaactgcagtttctaatcaatcgattagcagcacaattgatcacaattgctggtgcgattaatgcaccaattctatacatttgcatgcgttgtggaaatggaaaagccataaaaacactaaaaatattttttattcgttctgaatatcttgagataatcaaaagtgaattcgcatggatcaaatttgtgctgtgcttaaataataataatatcgatgttatatctgtcgttgtcggaccaaaaattctcaattcttcgggtgtataa

SEQ ID NO: 52669 - DNA, 343 bp, Heterodera glycines
atgtgggaaaaattgaagaatatgtgtacctcaccgaattggacgaatgatatatcatttgacgcctctcggtctgtaatgcaggaatctgaaagaattttttggcgaatttgaaaattggtcaaagggttcttcgattacattaaatcataaatcccttacttctctttcagatttctcgccatgtcgaatactgattttaaatgtttgatagtcaaagctatcaaaaaattaaaaaatttttcgatcaatccaatgactgtttgttctgggtattgaattttaaatgtctttataattttcaaatgcgggtaaaagttgaagtttgacagcattaattaaa

SEQ ID NO: 52670 - DNA, 481 bp, Heterodera glycines
atgctaatttcaccacagtattggcagaactccaacggttaccgagcggaggacgaagcgctgacagtggcattcgatgtgagcacaccgtgagaagtggcggcggcaccacccaaattggtgattaatggcactaatggaaggaaacggactgaacttgggaggagtttcgagggtttcactgaataaaacaccaaatattgcaatcaaacattttgaaatcaacgccaaaatttcagatttttttttgcataccaacaaaaaattgtggcaaatcaaaaatttaaatggaatttcatggtaaaagaaatctcgtttattttttgttgttgtgcaaaattcgctaactgattaattaattattgttcgattgtccaaagcctagctaatatatatgtaaatgtgttttgtttgttatttaccaaaattaagttccattatgtggttgttttattttcatgctttgtcgattaataataaa

SEQ ID NO: 52671 - DNA, 697 bp, Heterodera glycines
atggaccacaaatatttcaatgattcggagaaaatgcggttgaacaatttttacgacagatttcgccacaacttaagcattgaccaatttttcaacgaattttttgataattttggcttatcatgcaagcaattttttcaattctgccaactcggcgacacagttttggactgttgcaaggtgaaatatttttcttcaataaccttggaaaattatgaaactaagttccaaagtcgaacgcataaattttgcccaacaaaatatttaaccgatttcaatgacagaaaatcattttaaacaaaaaaatttcgattcttattcgttttatggtggaattttcagcccaattttttttcaaaaaatattaaaagtcaaattttaatgaattaccaattgcacgctttaagaatttttttaagaaaaaaaaaaacttttgcttttttccttttcggacaatttataaaatattattaaattaaacaatttaaagatttttgagccaatttatctgatcagacggggccgttgctttcgtagcatcaaattgtaccaaagcaattttgatgagcttggaaaattgcgtgttcaacttcggcagccctacaaaatggacccacaaatgaaagaccaagaagtaataaaaatgctaaaatgcctttcaaataataaataaaatatacaaaaactaaaattttta

SEQ ID NO: 52672 - DNA, 650 bp, Heterodera glycines
atggcatttattgccgaatataagccccaacttgcgccattcccacgccattatctgcagcagggaacatggacaaaaatgcggttgaatgccaagcatatcagtctgtttccggcagaagaagtggggacccaaaaaaaatcaataaatatttgaaaaaattatcgattgaatttacaaaccttttcgcctgttattgattaaaggtgtgcagtcagacaaatgatcaattgggcaaggacacatgctatgttgaaaattggctacaaacacatgtggaaggcccactaaattgcacttttccgtatgtgcaagaaattacaaaggataggcaattagagaggtaattaacggcaattaatttttaattaaaaaatttgagtgttcaatttaatgaagttgtgagccattgaaattggttgacaattatataaatgctgtgcagacaacaaattacacaattcattcggtgagttagagaaaatttaaaggtttttttgtggattattcaataaaaattaatttatttatggattaaagtaatataaaataaatttaattgttgcgttttttagtgtgtgttggcttgtgaccgttgggagtacatggtttccatagaagtaattaaagattgtatacattttttaaaa

SEQ ID NO: 52673 - DNA, 468 bp, Heterodera glycines
ttccatccgaagtgttatcagaagatgaagtgatcgacatttatcagttccatgcccttccaaattgtcatggaatatccgacggatttttcccaatgcaattttcgacaaatgaacggtttatgaacacgggcacacttttgctggacattgaaaaagtgtcggaatttgggcaagaggaagatagtagtcggtgcagcaaaaaaatgtacataaatggactgtcatggaaaatattggcacaaattggaacgagaattgaatccgatgagagacgtatctacatttatctgttgtgcgatgctccaaatgaaggtgcaaattaagggctaattaatattaattaaccaattaatttaaattgagcagaaaattggagttgcaaatgttcggcaaccattcgaattatctcacaaaagtgtgatgtggcggatgtacggaaagaatacgatgtcgattttggaaaaa

SEQ ID NO: 52674 - DNA, 2744 bp, Heterodera glycines
ttctgttccatcgccatcactcatcatcagctcattcaattatcacttggtgttctgctgctgatcattccttggccattcattatcaattttttcttcccatttttccctctttttgtcaatgatctccaaattcatccgtctgctcctccattttgtaccgcttcacaacgcttgggccgatcaacgccattttttatcggtttgttttgttcacttttccatccctctccttttggctgatcaaaattctatatcctctaaacccctaaaaatgtctgatcattgtcaaaaatgttcaaaaggtgcgcaattcgatgttttcctcctctgccggtgattcatccgtttcttccgctggtggtgccgttgcgcaacttttgtccaattcgccgtcagttgcgttcaattcttacgggggaaattttgacgatggcggagcaaaacgggtggacgacattcagcgcccgaatggaccaccaactgatcagaaaaacaaacaaatcattcccgactcaattccgatcacttccgaatcccatcggaatttgccgacagatcaattaaaaagttccgcagaaagctccgcttctatagaagtttatgaagagatgaacccaattccggcatcaactgccattgtcagagagccggcttggcttcgatcgggtcagcaatttcaaatgcgttcctttccaaaccattgacattgtaaatataatttggcacttcattttcgcttatttttaattgaaacactttcctattttaactgatcaaattaactcattaattactttctgtgtatagaaaaattaagcataaacaaataaaataaaacaaatttaagggaaattccaaggcgacatcgatggcgttgatgagcatttgctgcgccaagtaaataaaataattggcaaaatgatgacattttggcaaatttccctgaactttgaagctgcaaaacccggccatacaattcaacgcattgcgaaatcggcagctgatttggtaattgatgaagagaattgtggaacagattagatcagaaaatttaatcaccaacaggggagaaaagggcggtgccttcttagaaagagtcccgaaaaaattggcattggcactatgaaaaatggtaaaaattggcacaaaaagtcagggcacagcggtaaataatcagcagatctgatcggaacattttgaataaaacgtcacacatgtgtgctatcaaatacattgatcgcctttccccggttcaggcccaaaggcgttgtaccgtacgaattggacgtggcattctgtacgtaagtctataccgtatttgctctcctccgaccgtaccccgacaattgccttgggcacacacacagcactgagtgaggctcgtcttctgcagcgcgtctttcgcacgtaccgccgccgcaccttcggctgcatccgtttcagaccgaggcgaagcggcgaaacggactatttaagcattgtgaagggcaacgggtgagctgggacagaagaaaactgggaccgaaatggcaatgcttatgtggcccaaaaacggacgggacatttgggcacggccgaaagcggaccgagatgtttgggcacggccgcttgggtgccaggaaattcagaatgctttatacaaatgattccaacccgatcgaagatttgaaattaggcctaaaagaatgaggggtaattgtcgaaaaacactcacagaactcaaagcggcatttcccctgcgtacatcgctcaaaaagtggcatttgtgccgtgccaattccattcccttcccctcccctcccggatcagatgctattcacaggtgggcagaacaggcggaaagcaggagctgtcgctgggacgcggctgtctgttcaacgaaacgataacacacgaagtgaaaaacggaggggcactattatgattattatataacattgacaaatgagcaattaattttgtccgaccattttcgattaattaccttgtaattaggttcaaaaagtgttggcctaaattcacggagttttgaggtctcattccaattcttgaaattttcagctcaaataacacctaaccataaattctaacaaaaaatatttctctttcttagttaatgcattcactgggcttttggcacgaacatagccgggcaggtacggtagtggtgggcgtacggtaacactgtaaaagcaaatgaagacagagacgaacacattgtcatccgatgggagaacattttgcccggcatgtttaaaggaataatcattaaaaaaataaattaaatatctagttaatccatagtttttaattgtttctttcccagggatggactcgcagtttgacatcgtttcctcggcaattcaggacacacttggcgagccgtacgattacaggtctatttgatatgctttaactgataagttatcatggcattattaaactctttgctgtcatctttcaggtcaattatgcattacgggtcgtcggcattcagtcgaaacggtcggaacacattggaagcagttgttgaccaagtgagcaagcagcacagtcataaaattaatggcttttttaaatttcatttaaaaaattaataaacggattttaaaatgatttattgaaaatgattatgcaacggattcataatgcgaatgtttacagttcacaaatgtaatcggaacagcgatggaactcagtgaaatggacgtggcaaaggtaaatgaggggggagggactaa

SEQ ID NO: 52675 - DNA, 1911 bp, Heterodera glycines
atggctaccaagcccatctccgtaatggttcgatcggaggactgctcaagatcggcggaaggactgaaatgcgcgggaacagcggcgacagtgctagcactactgccatcggatcagacgaactcattcgtcattcgaacccaacaggacgagctgctcggagccgtccgacttcgcctcgcctcaatcacgatgatgtgtgtgccaaaaacggaaagttggctgcgttcctactccatctcaacgacagccgtgaagcgatgcccatcggcaggatcgtgtcgcggaaacacatgcagtgccattcgcaaccgggagacgattcccgaacttattgccctcaatcatcggccggggcattcattctgtatgcgcagcaccagtttttggcagaattcgtgtgggctgccctcggcttcatgcctcttctaccgatgggctgcggtgccaacaacgaccacagtcttcgaggagttcacgtgtctcgaatgggacatgcagatcagcgcttgggtggaattggaaaccaacaacggccaaattgactcacaacgactgacactacacccgggagtatcggagccgtggggaaacatgaccatctcagtcatacccacctctctcccgccaatgccggcactttcagcacatttcgtcaccgatggacgagctgtggccatggggagacccatgccgtcagacctgcactgccccgacgaagagacagcacggggtttcgacaaatgccaactctccattggggcgtgccaaaaatgcgcccccgatcacgacaatggcacggtacactgtcactgcagagacctcgacattggacgggtgttgaacaacccggaacaacgattgccattggacgtggcacgattgcaccttcacaatcacggctcttcgatccgagctgaatttcagtattcacccgttcaggtacatatccaactcaatggcctggagctgatcagcgagtacagcaatacaaaatgttgggtgtcctcacccacactcagtgggtgctacagatgcacatcgggcgcaacattcaacgcaacatgccgcacggatcacggcactgctttggccaaagtcaagtgcgctgatgggacactgtttgcccttcactgcggcggaaatgactcaacaagggaggcgattcccttcgaccgtgcagaaatattcacggaatgcaaagtgaagtgccccgctggcaccacgacttttcggttaaagggagagctgatcttcctccctaaggagcagcaatttggatttcatcggcgggattcgagcggagggaaaattgagcccgggatcacctttaattttcccgactggcagattgacccattcccgctgctaaaccttctcagcagttggcaatggatgctaatggcagcgggagcagcagcgatcggatttgtggcacttttcctttttatcaaatttaacccccattttcgtctctaccgggctctgatggccacaattctgcttgtaatactgatcggaaagactgaagcaaaagattcgaggggagagatctcccccgccacgtttgatcgatggactaatggagaaaaaataagcgttacaaccgggacagatttcgtggcacttgggcctcaacgactgactgaaacgccacaaacgactgccaaaggagatccgaacaatttttcagagggagcattctccctcatcatttgtgccatttacttgtacttcaccatcattagccttttttgccgcctgctttggacaccccgacatcgcatctcacctttgtttgcccctcccccattgaccgttgtcattttgggggcgatctgcgctgctaattcattaacgggggccagagagccgaaatggagagagggagacaatttccctacgtccctg

SEQ ID NO: 52676 - DNA, 3492 bp, Heterodera glycines
atggctgcgctcatccaacgccgctcaaataccccatcagtggccagtgttcgggtgaacaacccggtcagggaatggatggcaaggaaccgagggggagagaacgaacccccggcgcaacagcagccacaagctcagcaaccgctgcaagccgagcagcaacgatttgagcgacttacgctcaatgaccagggacaagcattccctcgggcatcccatcatgcccgtattcgaagggaggagcatcccagtcgggaacgcctccgaactcagggagcagctccctcacatcaccatcgttcggaaactcgagcagacacattgacgactttcgaaacggttcgattgcagccaccgacgttttccgggaaaccggaggattggaccaccttttgggcctacttccaacgggcggtggacgacaaaccaatcccgggattcgaaaagcagcttcatctgctgcggtgcctaaaagaaggatcgccggcgcgaagagcggtggaggtgtacccaccgtcggatggaaattacccagttgtggtacaactgctgaaggagcgattcggcgacaccaacgatttgcaacgagcaattcgtgctcagctgctgcatttgccaccagctaaagacaacgtggccagtctgacggcaatgatcgacgagttcgagaggggagtgtgccaactcgagcagctgggagccaacgtggacgacgagtcattcggtccgctgttggaagccaaactcccagtgagcatcctgactgagctgaggattcgggagagcatgatgggagcgaaatggacggtgagggagttccgaaaagcagtcgcggcacaagtcaaatgcatgagggccgcccaatcggcgctcgcagcaatgaaggaacccgaacgccgacatgagcagcgatcagaggcagaccgaggcggacgaaatgcacggacgggacaaggattcaatcgagcattcatgataagggagaaccctcccgaacgacatggtacggtgggggccggaaatcatgggagtgtgcacacacctccgcgatcgggttttctaccgcccgggagcaactcccgccaaacggaatcacgacgaatgggacaaggcgggagtggttgctcgctgtgtggacaagcaggccaccagccgagccgctgcatcaaatatgggtcggcccaagccaaacggcggagactgatcgagcaacgccggtgcctgaagtgcttggggtcggaccacacggcttcgcagtgcacccgagcgcatccttgccgaaagtgccagcgaccagaccatcattggctgatttgttgggaaggagggaaaaaggatgaacctcaaattcaggcgaaagcggaagagccgcgggcaaacaggaccatggtcattcaaagaatggagccgacagaggagcgaacattcgccgccaattcaggaatggaaggcagaggggagagtccctccccgcaccaagaaccaaggaccttcacgacagtcggtcagcaactcccggcatatttgatgatttgccaggtggtggtagcggcggatgatgaaaagggtgaatgtcagaccaccctgctgctcgaccccgccagtcacggggattatgtggacacggaactcatcagacagctgggtcttgagaagtccgaaagcgaaacgctcaccattcaagtctttggcgggaagaaagtgaaagtgccatcggggagatacaaagccaaaatcaagcggacggatggcgaatgggagagcatcgagttgtcggaagtcccgaccatctgtactcccatcaagacggaatttgtgctcccgggagtggctcccgagcagattagaacgacaacggacacagttcaaccgcagctgctgatcggaattcgacgtttttgggatttcgtgcgagcattccggaagaccgacgaaggcacttatctgatcgacacagtattcggcacagtgatctgcggagaacaatttcaagtgtccacgggagttcctcccgactcatcagtcttcgcaattccgccatgcggggaagacgaacgggatcaaatgccatcggtcaaggcgatcgagcaattttggtcagtcgaagcgatcggaattcgagacgacccaacacaggacgcggacagtgcggcgatcatccaatttgagcagtcagtgcgacagcaagacgacgggcggtacaatattcgtttaccatggagggaggagcaccccgaactccctaacaactacgctgtggcctatcgaaggctgatcgggctgctgcaacggcttcagaggacaccggaaatcctcaagcagtaccagcaagtgatcgaagagcagtcccgaatgggcgtgattgaggaagcaacgatcggcacgggaaaatgcgaatatttcatccctcatcaagcggtgatcacgccgaagaagctgagagtcgtctacgatgcgagtgcacacgccaagggagtcccttccctcaacgattgtttgttgagagggccggtttggctgccggacctggccggaatgcttatccgttttcgggcatgccaagtgcccgtgattgccgatgtggagaaagcatttctgatggttggaatcgaagaagccgatcgagaagtgtgcaagtttttgtgggtgcgcgacccactcgggccgctaacgacggcaaatttggtgccctaccgatttcggcgattggcgttcggcttaacgcccagcccgttctgcttggctgcggtggtgcggcaccacctacgcaagtacggctcggattttgcggagcagctcatcagggacacatacgtcgacaatgtgctcataccggcggacacagtcgaagaagcatcgcaaaaggctcgggaagccaaacgaatgttcacggaagcgaaaatgaacctgcgcgagttcctgacaaatgatcaaaacctgaacagcagcttttcagaggcggacgccctgggcaaaacgacggcgaagatgctgggactcgaatgggacgcggagaaagactcaattcggatggtctttccgggagtgactcccgccggtgccggaggccacagttcaaggcgggcggtgctgaagactattgcccgactgtttgacccactgggactgcttgcgccggcaactctcccagccaagcaattcttccaacgattgtgggagtccacacacagctgggatgccccgctggacgcggacgatgcgcgagaatggaacagaattatggcaagttgggacggggaattcatcactatccccagagtcgcccgagcggacggggccgaatcttgccagctgcacgtgttcaccgacgcatcggaaaacgcatatgccgctgcagcatatctccgatcagaaggagtggacgggagcattctctcccgtctcatcatggccaaatcccgacttaagccaaagaaggcttcggggacgttcacaatccccagaatggagctgatgggcctcgttttaagc

SEQ ID NO: 52677 - DNA, 66 bp, Heterodera glycines
gcctaggcatccctgaacgatgtctcccactctggcatgcttcgtcttgccatggtgcgtgggagc

SEQ ID NO: 52678 - DNA, 565 bp, Heterodera glycines
  unsure (1)..(565): unsure at all n locations
cctcggtgtcgactgatctgcttcgatcgggagatgctctgctccctttcttcgtctcaaaatgtttgcctcatcgcctgcagatcacggaaaaggctcagcgcaaattggagcagtcggcaggagttggatgctcccgcagtgncagatacttcgtcgaaggctggcaagggggcggccacgaaatcatacaaganatcctgccgctcctcgggtgccgcacccgctttctgctattcccttatcgaaatgcccttcaaaaatccgagtgacctgtccaagtccccgttccattgccatcagccgcgcggcgtgctcgggcgcttcgcccctcgtgaaatccgagtccatcagctcccgcgcttctgcgattcgcgacgagagtgtgtcagccgctctctcaatccgatctcgggccgacctcaccgtcattgctccgctgcgcaaattcttcgatgccgcgggtgtaacacccgtttggcttgtccccaggccttgcgcgtccatccctttctttgttttggtctgctgcgccgcattcgctcgttccccgtcctgtcggtcg

SEQ ID NO: 52679 - DNA, 648 bp, Heterodera glycines
aaaattttatgctaatagagtaagtcaagagctatcgtatggtatcaagataatttctggttgtgtttaagaaaagctatgacgggttttcctcgaaaatctgtaaaattggcagtttttacgaaacgacccagcacgaaatgagagagacctatagataagaaaatctttttaattctttaaattttctaaaattacaatatcaatattggtaaatttgttcaaatcagttgcatgatacctggttcaaaattcaatccttcagaaaaacaaaaagcgggaacaaattgcaagtgaattgggtgtgacgattcatcaaattaaaaattggacaaggaaatttggcttgggtaagacatatttttttcttaaaatttttcacgcacccacaaaaatagcagaattcagcattacgtttttaggcaatcaaaaatggttgacagatcgccaacgaaaaatgcttattaaaaaatttgacaaaatcaaagaaaagcgcactcaaaacggtttaccagctggtgaaattcgagaattggaagaaaaaatcgcagaagaaataggcataaacattcggacaatttacaaatggagaaagaaatttggcatctcaggaagttggcaaaaataaacaaaaaatattaaaaatta

SEQ ID NO: 52680 - DNA, 443 bp, Heterodera glycines
atgtttaatagtgcaaagttgaaaaggtaaaactttaatttttccaaggatttaaaaaagatttctattcatttaagagaaacaacaatgcattcaaaaactatcaaaataaaatttaggatggcaaaaatacgtaaatacatatttttcctgggttaatatttttgactttttctaaggaatatttttgagaaagatttgaatgtgccatgaccaacttttgtttggctttaaatattcttcgaaattcagccaatcaaaagatatgtttttcaggaaaaagcattttttgggaaataacaagaataaatcccaagtaaatctgtcacatttatcgaaaaatgctgacaataacaaacgaattaataaaattgatcggatttgtaataccaatcccacatagtttaaaaaaagcaaagaatttactttttttaacaaataaa

SEQ ID NO: 52681 - DNA, 836 bp, Heterodera glycines
atgtttcaatttgagcctctgaacaatgtggcaagtacaagtagtacgacaaacattggtacacattttttggggggacttaggggaaatcttatttatcttttcattaaatgggccttggtatttttctagtaaaaacgggcaaagttttggaaaatttcataatttcttttcatattaattcaaattctcagaaaacacatcggcacagttggacctcctacaataaaaaaggtgcttaatccgggtacccgatttttattgacctgattttgagacaaaatccttctgtggcttcataaactatcgaaataggtaatctaattttctttaaagaaccattgcaacatcaaaatgttgcattctctgaaatttccgaaacgccagtgcttgaaattgccgaaagtgaatcgttcccggtggagacaaccgtaatgcggagcattttggacgtaataaaaatagaattttgtcgcaaaaattatattctcttttagcaactcgatagcgacaaatcgcagcgatctacctattcacaaaaaagcacttccacacagaaacaaacacagcaacacgtacgacgagcgtacagccgactaggaatcgaaaggcctgaagagcgtgaaactgctcgacaagccatcacggcatcaacgagtgccgcaagctccagtgcctcctcacaagggtcaaaacgtgagagaggagaaactacaaaggcagacaaaatgaagaaggaagttgtgagaaaattaaaaggcaaatgcgaagatgactgcgatatttgctcaaattttttgaaaaaatatctgcaaaaatgtttcgttttgggctaa

SEQ ID NO: 52682 - DNA, 767 bp, Heterodera glycines
atgataaacagaagagacagtgagtagaggaatgtaatgagattttagctacccaaagcatacgatgattggcttctacgcgttggcatttgtatgtttcactttcattaagtgtactcattaattcctttactagtcaatggaggagtttaaataataattacccacttttggcaccgccgtcctcgacagatttaagtgccattaaaccaatgtatcaaactttcgttttattccttcatagaaaagtttgttgtgcgaaatggcatagtttttatgaattttttagtttaaagatgcttataaaaatattaattagcaaattggttgtttagcttcataataaatatttgattaagtgatataattgacaaaatcttaaaatctatttttacagaatttaaaaacgaaaattcgataaggcggattcggccgaaaaaaatttcgaagtgttggcagcatctttgtatgacatcaaagaatgtgccgtctgtagggaagagcgcaaatgttatataattaccttcaaacaagtcggaaaaatgtcctcacgacccgttggtcaaacgtctacctccttgatgaagatgtttgggaacacgtaaataatgagcaagaaacaattgatttttaatttagagcggctttttgttgggaaacctcctggcaacaatttatgctcgagcgctggtttataacatgttggacattgcccgagcccggcaaatgtatttcataactatttttataaactttgcaagaataaa

SEQ ID NO: 52683 - DNA, 576 bp, Heterodera glycines
agcaagaatattgctatcttgcctaggcgggattctgacttagaggcgttcagtcataatccctcagatggtagcttcgcaccattggtctatcgaccaagcacatgaaccaaatgtctgaacctgcggttcctctcgtactaagcaggattactatcatagcaacaggtctttagtagggtaaaactaacctgtctcacgacggtctaaacccagctcacgttccctattggtgggtgaacaatccaacgcttggcgaattctgcttcgcaatgataggaagagccgacatcgaaggatcaaaaagcgacgtcgctatggacgcttggccgccacaagccagttatccctgtggtaacttttctgacacctcttgctggaaactttacacattcaaaaggatcgataagccacgctttcgcggtccgtattcgtactgaaaatcaggatcaagtaagcatttgcctttttgctctacgagaggtttccgtcctctctgagcttgccttaggacacctgcgttacgctttgacagatgtaccgccccagtcaaactccccgcctgacactgtcatc

SEQ ID NO: 52684 - DNA, 2070 bp, Heterodera glycines
atggccgccaaattcaatttgtgcctgctgctggagcgcggccatttcaactacattggccgcgttgaacaactgttcgatgtccaacgctactgcatcgactgtgaacggcgagcacacctgcgctaccacttctccggttgtaaggttgtgtgccgcctttgtttacggtttgggcccgaatatccgtgccaagcacaacaggtacttttcgaaataaaattaaatagaaaaacgtactaaaaaattaagcttccaaacggcgcaagtactgcccgacgttgtgctgcgtgccagttcatctttccaaacgatgactgctacgactaccacctgatcgaacatgctccagctccaatggatgcccgtggacagcgtcagcgtcagccaatctgtcaatggcgccgagtgtgtcgtgattgcgggcgtatcgcctaccagggcaagcatcaatgcccatgccaacaccctgatggcaacaggaactgcaaacgttgtgacgggccacacacgaccgacgagccctgcttcatccagccaatttgcgatgcgtctgctcgacaacgcgcatcaattgctgtcgataacgatgacgacaactccgatgacaacgacgaagacaacgacgaggacaaagacgacgttttgccgcttcgactttgcttcttcgatgcagagacgtcgcaggacagcccgctccagctgaacaaccgattggtgcagaagcacgtgccgctgctgatcgtcgctgaagtcatctgtgaacgttgtatccaggcaggcatcagcgttaacgatgggcttggaagaagagcgccggattgtgtttgtctgtgtcgtatggtgaggggacaacagttgcgccagtggtcttcaccaccgtttgccaacgcacccggagacaacacagctgtgccagtggaggcgccgacattcaaccagcgccgcttctacttccactcattcgacaacgacggcaacgacccagtggaccaatttttggattttttgactcatcatgggccaaaaaaggcccacacggtgtgcgtcgcgcacaacggtggcaagtacgacttccatctaatccttgaggcactacatcgccgaaatatgccaccaaagcgcctgtgcacaacggggctcaagatttactccatgcgtctgtcgggacgtaaccaacgacgagtcaccttcaaagactccatcaattacttcttctgtgaattggatgcgttggtgaagagctttgaactgcccgaacatcaggcgatggttaagcccttcttcccctacctctacattcagcgacaacatctgtcgcagcgcctcaacggtctaccggctcaagagttttactcaccagacacgatgaaagcggacaaacgggccaaatttttgcgttggcatgccaacaacaacggcaacagatttcaactgcgcgaacaactcatcatgtactgcgccaacgacgtggccattttgagggagtcggttatccgatttcggcagctcatcgccgacaacacgcagggcctcgaccccttcctcaacgcatccacggctgccggtcttgcgctcgccacgcttcgtcgttgttttctggccccaaatcgcctggtgcactcacccgagggcggctacctgcgcggacgtcgtgcttcagctgagtcgcagcgctacatacgcttcttcgagctggagaaccccggagcgcaagtgcaatgtgcaagctggtccgtcggggaggcgcacattgaggacaccggctaccgcgtggatggtctttggcgacgcgatgcgcctctccgtcccctggccattgaatggctcggctgttactatcatggtaatttttttttccttaaccaaaataaataaaaattaaggctgcccaaagtgcttccccgaccgacaacagcgacttgcggcgggacgcaccgcagaagacctgtatgaacggacggagcggcgcctatttgagctggagcatgactatggttgtgagatccacaaggtgtgggcatgccagtggagtgaacgaatgcgccacgacccggagctgaagcgacg

SEQ ID NO: 52685 - DNA, 1238 bp, Heterodera glycines
atgatggcacctccccatttgggtggacaaaatgcacaaccccaaaaagagacagaaatggctttttcggatgaagcgccgccctgcccacaaccgacatggaaggaagcgatggaaaaagtgaaataattataaaaaaatttaaaaattaatttaaatatatatgttttttcccaaaggcaatcacaaaaaacccaaatgaatcgaccaacaaagtgcaaacggtaaacattttcctatttatttttgttcaaagttttaaattgtattaaaaattaaagaattattttctatatttgtttggtctaaacaagaatgactaattctgtgccaattaaagaaaaatgaaaaattaattattttgcttattttctaaaaaattaaaagcattcacgtccattgaaattaaagattaaaaaaatgtaagagaaaattgtgtacatttttgaatttgaaacaatttttacctatatattatagtaaaaataagttaaaaattttaaagctttttcccaatgccgccaatcgacacattgattttttctggatacgggatacggcgctgatttgaaatcccaaagtttttctcattttttaggcattgtcgcgtgccgtgcgcggaactttcattgttgcatgttcgccagccgatcgccgcgaggctttccagaaaaagatgcggctgtcagcaaccggggacaatttttgccatgtgattaaagacggcgtctggtgccaagcggtggcaatgaacatgggcggcggcaagggcatttcaattgggatgggtcgtcgataagtaaaagttgatgaattttttttgataatttttaaaattagaaccaatgcttattataaaggataaaatgtgatcagggtaaaaaagcggaaaacataatgattaatgaaaattgataataaaaaaaataaatcttgtggatgtcttaccactaaatttaataaacaaaattttaattaatattactttactcattttcgtagaattcagaataaattaaaaaaacaaacaaacaaatttcctctcaaacatccgatcatcaaagcatgaatataaattatgcactattttaaaattccttttttatttgatacaaatttgcatttgtatacattgaaaataatttcaaaagaaaataataattaaaatctattaatttaagggccattccggattggccccgttccaaaaattccgactatcctttgaagacagtcaa

SEQ ID NO: 52686 - DNA, 1074 bp, Heterodera glycines
  unsure (1)..(1074): unsure at all n locations
atgggaaaattgaaaaaattcgaagacgccgacaaacgtcccaaatatgagaacaaaacggttggacgctttgtgaaacatgcgctctttgaactgaactcatcatccgattgtgtaaatacaacatctgaacagaccgaatgcgaagtgagttgatgccattttttaactgctacagattagagatcgacattttggcgctactttaaaagtggccgtttttgaaattttttttacttttgcataatttttgtttttttgactcataatgatgaatattaagtattaacagcataattatggcgaataaaaaatatcacgattttttatctcaaaaaaattttgcaaaacaatagggtcccccctttggtttttgataaaactcaaaatttgtgaatttttaactagcgctaaattttcttttaaaatgtttttttcagtttattaaatagtatgcaatacgttccatgttaaaaaaacaaattctgcataaaaaaacaaaaaaaaaattgaccaaaaaaagtgaaaaaaaatttcaaaaggtttgctctttgcaaatagcgccncagattttcgtttcaattttttgtccttttttcagacttctcgacgattcccatgcgccgagggctcggaatcagaataaagtgaatgatggaattaattaattaattgatgcaaagtgtttgtgatcccgaaatattgccatttcactattattgtatatgtatgtatatgcggttgtatgttgtacttattttacttttttcttgcccacaaattcactatcaattatgtaattggtgttatgctttgatatgataaaatggtaaaaagtatgataattatttttttcagaaattcttagggcctacggatgtatgaaaaacgaaaatttatttgactgtcaaaaagtggcaaaactgaattttaagattttaggtcatcatttttacgaaaatacaatatgcatatgaaactgtatttcactattttggcgttttctcactattttaaacatttttttgaaaatttggatagatctgtaacagagtttgtccaaaaaataataaa

SEQ ID NO: 52687 - DNA, 1076 bp, Heterodera glycines
atgggcaccaccaaattggaagtgtttgtggatgcaattgatacggatgtccaaccgatttgggatgtttttatccgtcaaatttggcctatttttgcaaaaagcattcgccatttgagcttcgaagatggcaatcatttggacaatttgcgtcgccgcatttcaccgacacttctcactgatcttgatcaattgatttcaatcgattccggttatctgtgccccgatggaattgctgatgatgggccaaatggaattgctggtcaagcgttgaccaaatggcttcacactccgacaaaaaatgggcaaccgaagcaattacatcgctataattgttttggtccacagaatctcgaatgggtcaacaacttcaaagaggtggccggccatattttttttaatctctttgtttgggtcaatatggcaactcgtacaaaaaaaaattttctaagaattttcaactaaaacttagtatttatgaaaaacatgaaaattgcgaaaaggtcgaaattatgaagttttttcttaataaaattttttccaggctagaaaatcatttcattttttgtaaggctaatagagcatatgaagagctttcgaatgataccaacaatcttggatttggatgccaaagaaaaaagttatagcgaaaaacataaaaatttttaaaatctgcccacagataacacacaagtacctttttttgtacgagttgccatgaaaccttttgttttacaaattttgtttagacatttcgccgtgccaccacttcggtcagttaccatattcaactgttttttcttgtggaaccaatgccaattgaaccatttgaattggtgaatgaacggacgaatgaaaagctgacactgaaacaggagatcgacgaattcgacttaaatgcgtataattggctgttgcaacggtgcccaattggggagacggcgacggcgccagcaattaaatggaaagacagcgtaaatccgagtgccaatttgaacaatgtcacttttgatctgtggagtttcgataaatccattgggtgagcagcagccgatagcgtttgattttgccgaaaa

SEQ ID NO: 52688 - DNA, 376 bp, Heterodera glycines
atgtccttgatcattttggttttcattgggaccatgtgcgataacaagccttcgtattgcctgatcattaagcggcggattgactacactgtgctcgcatttctccgttccaacaagccaatttgggacagaatgggcaccaaattggaattgtggccatacagaaccgagaaagatcagtcaatttgggatgtttttgtccgtgaaatttggaaggaattgccgatgccaccacttctgtcactgaaacaggagaaaccgcgaaaattcggatgccattttgaacaatatccaatttattttttggggcggcagtaattgtatttggtgagcagatcaattggtaccaagaaattctcacttaaaaaagaagcaa

SEQ ID NO: 52689 - DNA, 1415 bp, Heterodera glycines
tgtgcactgggctttaccagtggcgatgctttggacaatttgcgtcgccgcacttcaccgacaattctcactgatcttgatcagttgtattcgatcgatttcgctcttatgtgctccggcacgattgacaatcaaattctgtccaaatggttgcacacgccgagcaaagatggtcaaccaaagcgattgcgtttccgtgcttatgtgggcccaccaaatctcgaatggctcaacaatttccgagaggtgatcactgatcagccatattttcattaaacgacgactaattgatttaattgtccttgattttgacgagcagacaacggaaaatccacaaaattgccaccaatcgatacattgccatcgattagtaaagacattttctgttctggtccattatcgtttgcttttggtacttcgtccttgattgattggatcaataacttcaaagaggtgtctcgccatttttctcaaattgtttttgtttttcccaattttgtttagacatttcaccgtgccacctcttcggccagttacactgttcgaattatttttcgttaaacgacgaccaattgcgccatttgaattgatgaacgcttgattttgacgagcagacactgattaagggtggaaaatccacaaaattgccaccaatcgatacattgccatcgattagtaaagacattttctgttctggtccattatcgtttgcttttggtacttcgtccttgccaattctgatcatccttcaaattaccaaattggatttgtatgtgcctttatatatgaccgaaacttgggatgtttttgcccgtcacatttggccaatttttgcgacaagcattcgccatttgagctttgccgatggcgatgatttggataatttgcgtcgtttggtttcccctacaattctcactgattgcgaccaattcaaaatcaaacttctggccaatcattgaccaaatggttgcacactccgacaactgatggtcaaccgaagagattgtttgcagtgattatttggatccaccaaaaattgattggatcaacaatttcaaagaggtgtctcgccatttttctcaaatttttttgtttttcccaattttgtttagacatttcaccgtgccacctcttcggccagttacactgttcgaattatttttcgtgtgaaaccaatgccaattgcgccatttgaattgatgaacgaagtgacaaatgagaagctgacactgattaagggtggaacttttcgttggctgttgaaacggtgcccaattgttggggagacggcggcggtggttcagaaacagcagaagaaagacgagaaattggaccgtttgaacggagtctacttctgtctttatgatgccattttctcgactcccgggcacattgatcagcggaagaaaaagtga

SEQ ID NO: 52690 - DNA, 387 bp, Heterodera glycines
atgccaaaacaaaacgaaatcgttttaaaatattcctttctggacttgacttggtttcttgatatcgaagctgttttctacgctatttctaaaacggttataccaaaccccagatttttgaatccggttttcagaaaaaatgccttgtggtgaaaacaatatttcacatttcactccataactttgtgagttcggcacggatcgagaccgggataagaccattggaaagagcagctcgagctctacaagaaggtatggaaagaaaaaatagttatttctgggactttttcagaaatcagaattaattctccaatgtggcccaaattttaggccccagccacagccccttgcttctcccagttttaagtcttggatttgtcaaataaa

SEQ ID NO: 52691 - DNA, 845 bp, Heterodera glycines
tgaaccgttcagtgcaatcaaacggagacgaaggaatggaaatggttgaaatgaccggtaagaatggacgaagcattgaaaccgttgaaaaacgattgacaattttcattttcagagattcgctacgaacagaagcaacaggtcgccgccgggggtctctgctgctgctgcataccgtgtggctttttcaacgaatcgtcaaacgaggaaccgccgaaaatcttcaaattcttcatgacaaaaaagaagactccacaaccgcctccagcagcagaagtcgtgcaaccgcaaaactccgttccatcgccaaaggcccttcctgtcgaaaactacacactcaacgcgacgtttaggaaggaagaggcgcgtggatacgcaaaaagtgaaaaataatgtctaaattgaatgtttcccaattattactcattttcagtgacttttaagaagagcaaaaagcgtgcagcacagaccaaacagccgaaactcgtcagaatttcaattttcttcgctttcccctgcaaaatttccacttcttttaggtttcggcctccagtcagcccagcgaaacttcggtgttgggtacggcttccgcatttgcagcaggtgtcgttgctccgcataaaaaacaacaaatatttttttcagcaagcatcagaacccctcagtcagtgggaagccatgtcggtccgtcgaaaagcaaacacgaaatggattctccctccgtaagacactcattacccacttatcgtccgctattatatttaaaattgtttagaatccgacttcaaagggcagcgcatacttttaagaaggaaggcccatcccatttcaactgtgagagatga

SEQ ID NO: 52692 - DNA, 68 bp, Heterodera glycines
gacataaacatttatttgatttattttaccatattcacaatttgatcaaaatataggtggacaaaagt

SEQ ID NO: 52693 - DNA, 240 bp, Heterodera glycines
atggcccgtcaatttgatcaacaccaaggatcaaaatcggttgagtttttgccaaaagatcccgttttgcttttgaatttcaaccgtggaaagagattttggctaaatggaaagatcatcgaaagattggaaaagtccccgacgtatcgtgtccacgtcccggctctcggaagaaacgtccaccggcacgcaaaccaactgcgacgccgttatcctcttgaggaggacggtaatgatacg

SEQ ID NO: 52694 - DNA, 484 bp, Heterodera glycines
atgctgaggcctttgtttgattgcattttacgacttttaaggtttttgtctggctaatgaggcttttgaaactctgattaattttatttgtttcggtgatttcaatgtcctctgatcattcattgttgctcctttaaaattttccaatttggattacatcgtattcatctctgttttaattatcactttttggcatttcattttttatttttagacaattttaccgaaaaatttggttggtcggaatagaattagaggacaacatttttacggaagagcattcatcagcagagggaaaaaagcataatcagcagacgaattggacagaatggagccaaagactaaattcaatgctttcatcgctattcgacgcggacattgtgagggcttatcgaattaagaaaaatttgatggatgcagcatcattaaacattcaattgagttcaaattatgagaaaagggggtgaaaaaaatgaaaattaaa

SEQ ID NO: 52695 - DNA, 101 bp, Heterodera glycines
ataaaagtcaacgtagaagcctcaaaccaagtggaaaatgcgttttttatgcttaatatatcgaaactagtgcgtagaaaaaaaggcatatgcctcaaaat

SEQ ID NO: 52696 - DNA, 580 bp, Heterodera glycines
ttggagaacgcattttgcaatactccaagaaggatggcaagcaatcaaaagattctttctttgtgggaatggccatgacgtttgtcgtgcgttcttctgcgtagcgagtaattaaaaaaattattcaaaaagattagtgatgaacgatgctttagaaatttactggccaaattaaccctaaccatcaatcggaaactgcttcttacattgacattagcagttttagtttatattttgccgattttctgtcatacgtattgattgggctgatcatttggacacgatcaacacaaagtctttccttttattaaaaccaaattttaacgagtttttggcattgacgcgttaaataatgtaaatttaaataattagtttcggcacaaacgaaaaaattgacagtttctgtcagtgttctcatggcaattgaactcatctgctttattttggtcagcatattaaatgtttaataattaaacttaaatattaatcatttcagaatacactctttgctcgtttcatatttccattgctcaattttgacgcatttgcaattggatttttcgttatccaattagtagag

SEQ ID NO: 52697 - DNA, 812 bp, Heterodera glycines
atgttccgtttggtgataatgcaactgtacgtgcctccaaccatgatgtttacttatggccaaggtgagttttttttctttttattttctgctgtcattgagagaaaatttgaaattatggcatagttttgcaacagattttgacaaaaataaatttcaacgaactttggaattttagtttggatgaccgtgagaaggaacttatccgttcggcttttgaacaaattcatcggcgaacatgcctaaggcaattttattatggatttgttgattttgagtttttattttttagagatcgacctggacttggatccaggcctggatttttccaggatccaggtacaggccatttttcggcaacctggatttttcctggacctggattttcctggatttttgtccaggaaatcaaggtccaagtcaaatgtgaaaaaaatccaggtccaggcaaaacaggaaaaaacctggattttcctggacaaaattttagaatttattttttcaagtgaccgatgttttttcaagttttcaaaaacagattaaataaatttaaaaacacattattattattattattaattagatatttttagatgcttctaagcaaataattaattttttcaaacattttttttttgatttttaaaataatttcaaaaaatccaggtccaggcctggatccagatctcaaggagcctggatttttcctggacctggattttcctggattttgtccaggaaatcaaggtccagctccaacatggaatccaggtccaggcttttttcaaaatgtcgatctctattatttttaa

SEQ ID NO: 52698 - DNA, 553 bp, Heterodera glycines
atggcaaaaaagaagaacataaatttggattttatttggagcattaaaactgtaagaaaataattatttgtattttcatataaaataatattataaaataataaatttggaattaattagtcaccactgatcagattcgatttactcggataaacgaataaaacatgtttcgatcatttcattcaaccgcttctgatcaataattatccactattaattaatctattaggtgacgtacccggaaaagcagcgcaattaattgaagcttcatagccaaaataaaacataaatatatttttcagacattggaaaaaataacactttcaaaacttttaaatgaaccctttgtattagatattaatataatttgtataagaagtataattatttgtgtgaaaaagaggatgaaaagtttctaattttcttaacaatctcacattagaaatccattttttccagcggcgtttctcggcatcgccggatccaaaattacccgagaattttataaaagattgaagtgtcaaacccagccgggactgaactgagcgcccta

SEQ ID NO: 52699 - DNA, 64 bp, Heterodera glycines
atgttccgtttggtgataatgcaactgtacgtgcctccaaccatgatgtttacttatggccaag

SEQ ID NO: 52700 - DNA, 799 bp, Heterodera glycines
atggcaaaaaagaagaacataaatttggattttatttggagcattaaaactgtaagaaaataattatttgtattttcatataaaataataaatttggaattaattagtcaccactgatcagattcgatttactcggataaacgaataaaacatgtttcgatcatttcattcaaccgcttctgatcaataattatccacaattaatttatctattaggtgacgtacccggaaaagcagcgcaattaattgaagcttcatagccaaaataaaacataattatatttttcagacattggaaaaaataacactttcaaaacttttaaatgaaccctttgtattagatattaatataatttgtataagaagtataattatttgtgtgaaaaagaggatgaaaagtttctaattttcttaacaatctcacattagaaatccattttttccagcggcgtttatcggcatcgccggagccaaaattacccgagaattttataaaagattgaagtgccaaacccagccgggactgaactgatcgccctattaaagtgctcaaagacaatttatgatttttattgcttttatatttatatatccttctagataaaaggaatttcaatctaaagtttttttatgtaagaaatcctctgaaaaaatccaaaattctaatattatgccgggtttatgcagcggaaaggcctcagtttttgaaaatgatagaaatgcgttttttgtttttaaaaaaaagctccacatggatcgacacccatcagaaaattggccattgtttactgaatgaaaa

SEQ ID NO: 52701 - DNA, 2937 bp, Heterodera glycines
attaaaattcttaccctttttgcctttggcgtccttttttccttttccctttgattttgcgtcttttttaattccttaattaattaattagttaattaattaatttgtattaattagtccctctcttttttctgctttacctcctttcgctgctcctttcggcgccgcttttccttttgctggcgttgtaattgctcctttaaaagcatattccaattaatatttattatcaatttatttatacctttcttattgtcttttttcactgcctttgagttggctaaaataataaaatatttttaaatttttaattaatttggccacctgtctcaagaataacagccatcaccaagcaaaccatggccaggaagagaacggcgcgcattttgaatgtttgggaaagggaattaattaatttaattaaaataatttcgaatatgattttcgcttggctttcttttggcttttatattcctccaaaaaacgtctattttctttgaaattggaaatgtttttccaaaattttttgccggaaattatgccaatgccaaccatttttccattgatttgtctatgccatttttatgttcggtttctttcctgtgatttcaacattttttatttcttcatcaatatgttttgttgaaatattcttttattggtaaatatcggtttgaggtcccaaactcagaattgcttacggtcagaattaatgtaaaaaggtttgaaaaaaagcatttgtgaagaattcaaaacggtcaaaaaaatcataaattaatttatataaattaatcattttttacagagcaatggcattggcaccattctcaaagacattgcgccgcaaatgttcaacggcactttggcaaaaaatgattcattttgtgccgccatgggatgatgacaaaatgcacgcgtttttccaaattgaaaggccaatattttcaaaacgcataatcaacgacgcggatttattgccctataaaaatgatccaaacagattcagtcagtaaaaaataaattgaatttttaaaaaaattaatttcggcactttttaagacagtctagacccatgtgatgaatacggcgcagattgtgtgccgatcagaaatttgttgttgaaaattgaggcattggcaacctgtggaaagaacgaaagcaaaacaaatgcggtaaaaaatagaaaaaacagtttaaaaatatttaaaaatatttttagatttctaaaatgccaccatgggccccaccacttccgccaccgatgccatggaaaaagccatccgaaacaatgctatgcgatggggatatgttttgtgataaacgaaagctgcgagaacagtacaaccgattgagggagagtgagtcattttacaaatattaattaattaagtaatgaaattaattaaattaaaattcagtttgtgggcttaagcccgaaaaagtggaaaccagcgcaaaaaacgacaataccatccaaaagagacattcatttatatttctcattgataattcattcataaaatttggcacaatttatttatttatttttattaattttacctatttttgtagcctgtggcgcatccccgttgggccgtgacagcggatggcaatcccttatgctgggaatgactaacgactggtgcatcgatgtaatttttgcatcatttattcattgcttattttcaaatccggcctcagtcgggattgaaaagtcgggactgggtataagagctatttgaaagactgtgatcggttttagaaaagcctggattatagggatccggaaactttggttttaatttgaaactgattaagaattttaacatgtccgtcgctgctggccatgaattgatgcacgcgattggctttcatcatgagcaaagccgaagtgatgtccgaaattacgtgattttacgggaagatgacggagtaattaacacaaataatttaaatataattttccatgtgctaattttaaagcaatcggaaattgacccatacacaaaaaactttgacttcccttacgatttcgggtcggtgatgcattatcaatctgggggcgatcatgaacagtaagaaaaagttggatttaataacgtaaaattggaattaaaggggcttatacaatctgatcactttgccacgcttttaccaacaaacgattggccaaagcgaacgaatctctttcaaagacgcggccataattaaccgaatttattgcgaaggcaaatcaattaaatataattaagtgatttcccatttgttcagactcatgcaaaggccatgaggacaagtgccaaaacgggggctatttgaatccgaatgattgcacaaaatgccattgtccggacggatacggtggcaaatactgtaaagaactcgaagagagtgagcaattaattaattcaattaaattcaaattaaattttgtaaatttttagatttgaattgcgaggatttgagtggaattccgagagaattggtggccaatcagtcagcagtgttactgaagacgaaggccaaatgtggggggaatgggccgtgccgatgccattggcgaattaaggcaataaataatatttttgaatttttagtttttttaattaatgcaaattttaattgctttcagcctgaagcggggaaaaaggtacgaattcagttcaaaagtttgagcaatttgtttgaatgcacatacaactgctcatcggcgtatgtcgaggtcaaataccgagacgacaaaagggcccaaggcaaaaagacaaataattaattactgattaattagcaaaaggatcgtttataaggtgccaaactttgctgtccccgtgcactcactgatctgaacgccaatgaatacaaaatattggattgatgcggaaaagccggacatggacatagtcatttctgcgctcctttcaacaaaatggaccatac

SEQ ID NO: 52702 - DNA, 959 bp, Heterodera glycines
atgcgcgccgttctcttcctggccatggtttgcttggtgatggctgttattcttgagacaggtggccaaattaattaaaaatttaaaaatattttattattttagccaactcaaaggcagtgaaaaaagacaataagaaaggtataaataaattgataataaatattaattggaatatgcttttaaaggagcaattacaacgccagcaaaaggaaaagcggcgccgaaaggagcagcgaaaggaggtaaagcagaaaaaagagagggactaattaatacaaattaattaattaactaattaattaattaaggaattaaaaaagacgcaaaatcaaagggaaaaggaaaaaaggacgccaaaggcaaaaagggtaagaattttaatataaaaagaaatttaaaaagttaatttttgaattttagacaaaaaagctaagccagccaaagggaaaggagtgcctaaaaatggtaaataatattattaaacaaataataataatgaaaattgaataaatttagacaaaaaatccccagcggcaaaagcaactgacaaaaagagcccaagtaaataattaattatatttaatattgtgccaaaattgccaatttgaagccaaaccaatggcagcagtgaaagccgtgccaaaggcggcggagaatgctcagaagggaccgtcgagtgcggaagtggtggcggaggaaaacaacttggacactgaggcggtcgacgacttgggggcggaagagtcggactttgaccaattggcagaggacgaactgctcgaggacgacgccatggacggcgaggcggacgaatgggaaggcatgggggaggagacggagatggacagccaaatggcactctgatggccaactaattggacaaatggcaaacggaacaaaacgggacaaatgacacaaaatatcatttttggcatttcattttcagaaaaaataaa

SEQ ID NO: 52703 - DNA, 563 bp, Heterodera glycines
atgataaaaactccatctacatataattttacttataaattcaaggtcaatggaattcaaatccaaggaaaaaggcaaacggtgtttactgacccaaataatgaaaaatacaattggactaaaattgatgttgattgttatgtgagttgtgtcttctaatttcgaaaagcctatttaattgacttaattcacagaaagccgaagggggtaccgtaaacttttggggctacagtaagccggagactaacgaaatcattcgggtggacgaaatccactgcttgatggatgatgcagttgctgaagtgccaaaacagtccaaaagcttacaaaccgatgaacagccgccgatgaaattgagtccaagtccattcttggccaataatgtttcatcacttatccatgtgttcgtgccatttgttggcaatccatgagagaaaatggggagaccagtgatcagttggggatctgtcttctactgcgatcagttggccaatttccaatcagcaaatttttatttttttttaaatttgacaaaatttgatttatatacgtcgaaaaaatta

SEQ ID NO: 52704 - DNA, 1187 bp, Heterodera glycines
atgctcgacggcggctcccaaatttctttgatttcggtcaaattcttcttagaaatcatggacaaagtaagccaaaaggacatcgtcacccgctctgaaagccggatcatcgacataaatggaaaggaagtgaaatgtttttgaattgttgctttgccaattcagagaggaccattagaaacgaaaatccgtgtttttgtggcccaatctacatttggctatgatttgcttttcggcacaaatgccatggaccaattaggtttcaaaatgcttgacgcagtgaactgccgcattgtagacttttcgccagcttcgaagcccgaaaattcgcctctgatcactttcaaagccttcgtgtgccatggcaacaccagtaccaacagagaagggcagaaaaaggggaataaacataggtcggacccaaaaaatgacactggtaccaagaaaggtaaagtggtggagaagaaatcaaatcgaaatgctgtggacaataaaaggaggccattattcaacaaaacatttgtgccccaactgaaaaccaaagaaattccgatcaaaaattctgaaagttttggagaaagtgcggcaaacaaacagcgattgaattcggttcaagtgaaagtgggcgtgccaaacgaaaagccgatgaagtgtgtttggaaaaggaaaaatttgggccaaattcagttagggacaactgaaaagttgggtagggggaaggtcaacccaacaacgtgcaataaaacaaaaaataaacagaaaatataaaccttgaatttgtcccgctgtgcttcctgtgtgaagtttgagaattttgaaccaaaagcatttaaaatgtttgttgctctttttgattcaatttgaaaaaattgaacagaaaaaattttgttgaaattttttcgtggtttttgaattttcgtattttatatattttcattattggcttaaatttctacttaattaagcaatctctctttcatttaagagctttttgggatccttccccgctggccaaagaaaagaaccattttttgaaaattccaattttttcattgaaaattaaaaaaaaatccattgatcagcctgcttctcatatttatactgatggctttattccaaagctttgcatgtttatttaatttttaagattgaacagcaattaaacaacacaaaaagtgaataataaa

SEQ ID NO: 52705 - DNA, 822 bp, Heterodera glycines
  unsure (1)..(822): unsure at all n locations
atgcctgtgcttcggtctccaccattaacccggacgagggcactcaaccagggaatcattgttgaccgcgatggaaacgcatttagggctgaaaattttggagttttggggggcagaccgatctcgcccttagcgaacaacgaaaatcagcgactggacgacaatcatgaaaatgttttagcagagactgagattcgtcgtcgcctgctttacggaggaatggatcaaagcgcgccggacgaacaattggagtacgacgaaatggaaaacggcgacgaacaaaatgtcaacggtatggtgcaacaaaatttggaaaatggagttgaagctggggatagagggagttttggaaacgatgcgttggacgcacatggattgcgagccttttcaacaccgcttaacgaacaaaacctaagcgccctgcagcgagaccgaatgcaacttccagaaaatttgagcgtcatccaaaaccaaattagggttatgaatttcatgcaaaatcaaatgccaaacccagtcgcgcataatttccctgcattgaatcacccacaagcagtcaatccgattgcttgccgacccaatggtcagttgtacgaaaatgctgncggtaattttgagcggcagagagaacagcagataaggctcacacagcaaccggttgttgaggaccaacaatcacacgttcggcgaattctcccgcacatgcctatacacaaggacaccgccggtcccaagacgaaggatttgagtttcaccaaggacagcaacacccaaatttcaaaaaaacctacctatnaagagcnatcaacaanatcgtcttga

SEQ ID NO: 52706 - DNA, 94 bp, Heterodera glycines
atggataagcgcactgagaaggagccgaaccgaccgaccgatggacggacggagacgaaaactgaggacaaaatgccaagaatatatgtgatca

SEQ ID NO: 52707 - DNA, 1759 bp, Heterodera glycines
atgataatcaattctgcaaaagatatgttccatcaagaaatggatcaacaaatattggaatcattctcgaacagtgcagatcacaacttgactgagcactcaacaaatggtataaatcaagaaaaattacaaaattaattactatttatttaatcgcattgtaatggatactctgaaaacttattaaaaatagtattttagaaattaatttttgagaattttttgttctcactcttacagataggacgtatactgtaaagaattttttgtaatatcgctgaagtcaacttaaattattaaatttttatatttttatttaatttgttataaccattaaagatggcatgactgatgaggagatacaattaatgtttgaatataaagacaattggactaagcaatatgagcaaatgctgagtagattaacgccagaaaaacaggtaataaattaatatttttttttacaaacattttgcatttttttaaaattaattttattacaatggaaaattcattttctgaaaattccttacacaaacgcaataaaaaacgaaaaaccactcttaataagttgaactaaaaaaatttcgtacaacaacaaataggcatccgttttttgtgattttgtacctaatttgtgcctgttttgacattgccgatttatgcctttactggcgattttttgtgtaatatgtataaaatatcaatttattcataaaaaattgaaatttaatttaatttaactttttgaaatttttttaggaaatggttataaattatgttatcacacaagaaaatgatattgaattattgaaacgattcttgaaaactgatcgttacgaattgcttcgggggttaaagagtgagtttaagttgcttatttgtgccatgacaaaatgaacataaaattgagcataaaaaaaataagaagccaagctacagtaggacgagaacggattcgtttttcgctaattagtttttaattacaatgattttttttttgtttgaaaatatgaaactctaataatttttgtctaatttcgtttttcgatggaaacaatacttttttaaatttgaaaacttgcttcgggggtttcaaggccttggccatgattatgatatcctattttttatcgaaaatgaataagtacgaattgaaaaatccgtttttttaatctaaaaaattgtaaaataaaaatttataagtttattgaatttaaattatttttaagccaaatttaaattgctttttgtagatatttataacgaaaaacgtcatttcataaaaaatttaaaagtgacatctaatcaaatgaacatatgaatattttatgataattaaataaaggaaaattcaatttttttttttttgttaaatgaatttataaatttaaatttagataatcggcttaaaaaaaagctaattgaagagatgcttggcaaaatggagcttgaagagtttaaaattcaaattgcacaagcgattgcgattaacgaatcaaacaacccaccaacagatcttagaaaggaatcaaaaacaaaaccaaaaattcgagttggtagaaaaaaaattatttttttaaataataaatttataatttaaaactaattagatatttaaagtaaaatggaacattttttacattattttaaggaacttaaaattgatgcccatcaatcatcacaaaatttggcaacaaatcttcgtgataaaggcaaagcgaaactggaagacggacataaatctccaaacattcgg

SEQ ID NO: 52708 - DNA, 1942 bp, Heterodera glycines
atggctaccacccatcagcataatcccacgcccgaggtgtccatttttgtccatgtttttttcaacacatttaattttttttcgtccaggtgaaggagctgtgcaagtgcctggcgctggacgacaatcagctgcgcgacattatggcaaagttcgagatggaatacaaaaaaggccttgacccagtgaccggtggagaattttgaccatttttacccccttcgtaacctccctctcccattttcagctccgacagcttgcgtcaaaatgcttccgacgtacatccgcgcgattgctgttggcgaagaaaagggcgaattcctggcactggacctcggcggaaccaattttcgtgtcctgcgcatcaccttggagggcggctgccgttctacgatgcacaacaaaatctacagcatgcccgacagtgttcagcaaggcaccggcacggaggtgagttttgcggatgattcagaatttgttcaattttaatgtttcaacaattttttcagctgttcgaccacatcgctgcgtgtctggccgactacatgcgtgagcagaatctgacgagccattcgaagatgccgctcggcttcaccttttccttcccgtgccaacagaatgggctcaccaatgccgtcctgacaaactggacgaagggatttacggttagaaaattgatttctgaatatttagtaaactccatttttcaggcttctggcgttgttggggagaacgtcgtccatatgctgcacgacgcgttcaagcgacggggcgacgtggacatcgacgtagtcgcagtgctcaacgacaccacgggaacgatgctcgcctgctccttcattgaacaacattgctacgtcggggtcattgtcgggacgggtaaagaaacctaattttttgtttgattttcaattaattcccctttttttcttttcaggttgcaatgccgcatacatggagcgactggagaatgtgccgaaactcaagggaattgtcaactccgcggaaggtaaaaatgggaggtgacgggagcccgtaaacggcattaatttttgaaacaattcagatggtctgccggcggagatgtgcgtcaacacggaatggggaggattcggcgacgacggagcactggaccaattcctcaccatctacgaccagcagttggaccagcagagcctcaaccccggccgtcaacgcttcgagaagaccatctccggcatgtacatggtgggaaattttcaaatttaacaacaaattatgttaaagaaagttttcagggtgagatcgtccgtcttgcgctggaggacttggcacgtcgcgggctgttgttcagcggcgactccactcgaatttccgaacgcggctgcatctccaccaagatggtgtccgacatcgaagggtaaaactctgctctaaaaagtgcttaatttcccttcatttgcaggtttatgcacagcaccgacgggaacccattcgccaaagtcggcgagatgctgcgcgccattggtgagttgtcatttgatcactttagccattcaacatcccaatatcccattttaggcatttcgaactcatcggccgccgactgtgcaaatgtcgcctacatcagctcgttgattggcacgcgcgccgctcatctctgcgcctgtgggcttgccgccatcctcaaccgcatgcagaggccccgcgtgactatcggcgtcgacggctccgtgttccgcttccatccaaccttcaaattcaacctcgaccagaagatcaaggcgctgttggccgtcaaatgcgaagtgagttacatagtttctaatatcgtttcggaatgatatgaataaatctcctctaatttcagttcttcatggtgctcagcgaggacggaagtggacgaggcgcagcagtcgcagcagcagtcgcattgcggatgaatcgccttgtgggagcgtga

SEQ ID NO: 52709 - DNA, 814 bp, Heterodera glycines
atgaaaatttcttccagtttttaatttgaaaaaaaacaataagatttaccaatgcagttatatatacaaaaaggcagaaatttttcattgcacatttaaagattttcaaaaattttaatagttttttatgtgttttttgaaggattttatgcgtaaaatatttaatggcctccaagtaggcaagtttttttgtttttttttgtgtgtaaaaatgagaatgtttcaattttttaaattatttttttaggatttttttccaaaaaaccgaacttcaattttcagaatatcaaagtggcggacattctcccctttttgaccgtcgttatcttaagagaacatttttttcttaaaattaaaaaatctttttttttggaaattttacatttttaatttaattttttggccctttttattcattaaaaaatctttttttgtgatttgtacctcttctaatcactgttgtacctcttctgatcactgttatagcttttttcccattttttaaataactagagcgcaaaaaaccttttttttcagcgacgaatattgattatattttattattcattttctcagtatcaacattgctttcgccccgtttcaatgctctggtggacaaacatttcaatggaaaaagcggattgaagtcgtaagtttcattttttcaaattggcaatgaaaatatttctaagctctaaaattttgattggattcggtgcttaaaaaggaatttgtaaatattttttaagaaatttgcgattttacttatgtttcagcatattttatctatgttttaaattattttatttgataa

SEQ ID NO: 52710 - DNA, 152 bp, Heterodera glycines
gaggcggacgaacaccgtagggacggatgaccaccgtacgagcccgaagccgtggcaggagccgagcgggcatcagccgacttcgtccgcgtccggcgccgcccatgcgttgcccccgtcttcctccaaccgacccatccgctcgcaacgga

SEQ ID NO: 52711 - DNA, 1801 bp, Heterodera glycines
atggttttctgtccgactttcagatattgggaacaacaccccgaacttcacgacatccccgtttactgtgagtatttatcatttttgagttggaatgtgctttcatttgcttattttgtacagatgccagttcattggccaagaaatgtatggcggtctatcagacatttgtcagcggaatgaatcagaacatcaaacgccaaatttcgatcaacaatcccttcgtgtttaaacacgtctctaacctaaaggtaggtatcaaacatggcgcaataaattaaatttctttgagagcatcgaccatttcgacgatgttggcccatgcgtggtgttggccagccccggaatgttgcagaacggactcagtcgggaattgttcgagacttggtgcacggactcaaaggtacgactgacaatggtgcagagggagccccgatatttgcggccccgacatttgcggtccgacttttgcggccccgacatttgcgcctatgtccaaaatcggactcaaagttgaattttttcaacccctgatagcctaatatgcattaaaattaagaaagcacggttttatggttcattatgatcaataattttttgtttgaaaattttattattttttcaaaatttttttgaagatcaaatgatcatgtacaatcacttttaatcgcttatttaaagctatttatgcgatcagtgattgaaaaaacttagttttgaaccagattttggacaaaggcgcaaaggtcgggacactggtattatatattaccctccggttttaacattttttctgacatttcaaatgcattttatatgggtaatgttgagtttttgggcaatgaaattgctccaaaaaaagttgaaaaatttcgcaatttcttaaaattttccatttcaataacgccattaaattaggtagttcaaattctttaaaattttttaatttcccaggtccgtctctttcatacgcccaaattgcgcggcctcctcaaaagtgcgctgcccgaactgaccaacgaaattgtggggttacagcacatgaaattcttcgtcttcgacgactctgtgctcatcaccgggttcgtttttttgtgttataaatagggctataaattatatgcactaaaaaatgccaaatatgcgcataaaatatgcactaaaaatcccttaaatatgccttaaaaacccgaaaaatgcccaaacatgcactaaaacatgtcttaaaaactgccaaaaatggctttagccctcaaaaaaaaatgccaaaaattgtgtaaaaatttagaattgactttaaaacatccaaaacaatggctaatgagcgtttttagacaattgcaaaaaattttgaatttcaaaatttatttatgcaattttgaattttttttttttcaaatttttttgtttatgctcaaacaaaattactttttttgtatcttttgcatcaaaattttttcaaaagttcttacaagaagttcaaaatttttcgattttcaagggtgtattttttaaattcccaaaaaagtcgacccttagggtgtatttttcgtttttattgcatttttcttatgaaaatttgacaaaaatgatcgaaatattgactaaaaaggcaaaagtatcaaaatataatcactcggaaaatgccaaaacaatgacacacctcaaatgtttcagacggggaggggagttcagacaaaaataggcaaaaccctcaaaattcatcccttcttcagatagacacataagggcgtgtaaagaaactgttttttttatttttagtttttatttaatgaataaa

SEQ ID NO: 52712 - DNA, 2499 bp, Heterodera glycines
tgccgaagaacggtcagtttggcgatgatggcatttgtgccattcccctaaccaagggaaggcacagagttcgataaaagccgaagaatttggagagttttagtaagttttttaaggaagcgggccgaaacgatcgttggcgtctccgccaacctcagtgtgctgctgtccgtgctgctctatcctttcatgcccaacatcagcgcacaaatccaacaacagtgcaatctgccgaaaaacattgtcatgcccgagcacttcgttttgtttctgaaagctggacacaaacacaacaaggtgacaatgatgcagcagcagcagcagcaacataattccgattcattttgacggatttaaaggggagaaaagggaaattccattggcacaaagaacagcacgggtttcatttttttatttgcccattgtttattataattctcaaaatcatttttaatttcctgcagccgtgaaaatgatagcgaaacattgaccaaaatgcgtaatcatttttcattaattttgcgactaaatcgctcctttctctctcactctctctttttgctctttctcgctttctcccttctcttttcctttttgtcttttctcacattttttctttcctcattctctcaccctttctctctattttatagtcacaggtcaatccgatgaaaatagagtgtaaaaagggggaggcaaattgattatttgatgaattgcatttgggtgggttgaaacggcgcaaaagcccattaaggaattcgtacgctaattgactatcacataatggttctcttagagcagcagtgattgcttctcccctccctttcttagcctttcgctttgttcaccaaaattgaaccggcgaaggtggccgagtggaaagaactctttggcagtgggaaacagcagcaaaatcagccgaagaacaacggaccaacggcgatgagcagtagcagcagcaaaaaggcaccaaacacgacggagaagcagcagcagaagaagaaaaaggaaaacatggcggaagagcggggcgaagtgggccaaatttacgcggaagtgatggccaaattcgaaaaagcgagtgagcggcctcttcttttatccatttggcattctgcccacaatggtctttttgcaacaatgggaaataacaaaaaattacttggctaaattggattttttaatttctgtcaatggttgctcatatttccaaattctagaagcacttttcgtcacaaatgaatctgaaaaattggacaccgaaattgccgcattgaaagaacaaataacggagcagaaggcgcgcctgggcttcaccggcgcattgttctcaccgccgatgccaaaagcaacgccggcaatcgttgtgccaccagcaggtgaatctccctttctttcgtactctctctccctttctttttctctccctctctcatcctttgtacggcgattggactttttgttcaattttaaaattaattatttattttttactcaaaaaatttttactataccttacccccccccccccctctttttttgcattcattgcatttttttcctttaattcgttttgtaattcatatggcctcattttctgcttcagttaaatgaactattaaaaaataagcaatttatttcatttggacagtttcttccccgcaaacaccgcccaaattgacagcagcgtcaaatgcgagcaaagaacaaacgcaacagaaacagcagccgaaacagaagaagccgcagcaacagcaagcgactgccccggccgatgacaccgtcgacgtcggttgcctcgacctccgtgtcggccgtatcattgaggcacagaaacacccggacgcggacgcactgtacgtggaacagattgacctcggggaggagaagccgcggacggtggtgtccggcctggtccgatttgtcccacttgagcaggtcagcagcagagtttcatgatttagatgggtgtatgtacatcattccccaccccacctcccgtgatttcctctcctattctttcgaaattttatgatgaattactaatttttccacaaaaaaaatttttaagtttaaaaattaacagctcaaaaaccgtcttgttgtctgtctgtgcaatttgaagccggccaaaatgcgtggcgttgagtcccaggcgatggtaatgtgtgcgtcgacgcctgaaaaggtggaagtgttggaagtgagcccggacagtgtgcccggtgatctcgtcgtctgtgaaccgttcgtacgccgtccgcctcagcaattaaatccgaagaagaaaatttgggagacagttgcaccggtaaggaaagaattaatccaatattaataaattgcactttcaaaatggtcatggcatagaaatgacacgtcttttgaaaaagagcaaaaatgggacccggtcaaagatactaattatttcttaattacaaaaatattttaggatttgagcgtctctgaaacgggcgaatgcatttacaaaggaca

SEQ ID NO: 52713 - DNA, 1135 bp, Heterodera glycines
  unsure (1)..(1135): unsure at all n locations
atgatgatggcgttggacgccgccggcggggcgacggcagcggccgccgactcggcccaactgatctccaccgactcgttggacatggaacagttgcgggtccgctgcgagtgcaccaagcacaacgccaactacaagctgacctttgacgaggacagcggccagtggaccaccagcggcattggcggctcgttcaccaccacggcgactgcgagtccgccggcggcgcaacaacagaaacaacagcaccagagacggttgaagcaacaccagcagttgaagcagttgctggcgatgaacaccaccgccactgccatgaataacaacaacaatagccatgaggaggaggacagggatggtcatggagatgaggtacggtgcctactatactaatattcgctacagagcaccaattttatttcgggagggacacccgaagagttttgtttttttgctccccatcctaaaatttttgtacaatataatttcttaaaaattttttggcgccctggaaaaaacgaggaattttggcctttttgagaccaaattttggcaaaaaatacatatatttttttatcccaacaattttcaccaccaaaaacaatattaacagtaaaaaatctttattccattgcagcatcaacaacagcagcagcagttgtacaccgccatcatggacaacaacggtgcactggggctgcaactgttggagcagttgaacaacgctgatgacgacgaccaagacaacgacaccagcgcgtacagcggcggcgtgttcaatgccaccgccgagaaacgaagcggcgtacgtcgtcgtccggcaacgagtgttggccatggcacaacgacgacggcaacggatggttggcgaaagaacagtttcatggacgcgctgttgaacaacaacccaaaccacaacgccaacacgtcttcttccgcatcgtcgactttccatggcaataatttccgtggcgacgcggcgacgaaaaaaggggacggcggaggcatgggaatgatgaccacttggggacgactgcaccagcagagcgacgacatgggtggaggacagcagccgcccttcaattccgagaaggttcacaggtcagtatttcggaaggngagggggcgagggtga

SEQ ID NO: 52714 - DNA, 723 bp, Heterodera glycines
atggccacatatcaacagcagcaacctcaacaacaccgtcatgttcaaccagtacacggctcagtttcgtcgtcatcgtcgtcggctggactcagacggccgacctcctcaagtttgctggacaatttcatcgccacgcaacgccaacaacaacagcaatggaacggcggcccgcaaatggtggactacgcctactcggagacgtatctgggcaacggacgctacattgacatgaacgaaaatggtagggattttgtttttacggggttttctcggtttctgtcctcacaaatcaagggtatccgagtcttaaaggatgcctaactcggactattattacttattttccaaatactaaaatggattttccgtcatttggcctgacggccctgacttttcttaaatcacaatgaaaaattctggaaaataccaatttctcaaaacaaaaaaaaaaaaatccaagcaaattttccgttttcgtaatataattcttttccgttttcgtaatataattcaattgcatgaaaaccggaggggcaagcaacagcaaaaaaaacggatttttttctccgaaaactttaatttcaaataatcacgcgttttgattaaatttgacaactttaatgatacaagaaatgttttgagaagtttttcagttttcaaagccacaaagtccgtccatttttgtcagtttcagagtcccctccattcattattgactaa

SEQ ID NO: 52715 - DNA, 1088 bp, Heterodera glycines
atgacggagacggcaccgctggggcacaaattgggcaacgacaaccaactgcaacacaatgccaacgccaaccagcaacgacaacagcaacagcaaaggcggcagagccaccaccaaatgggtgcaaccaaaacaaaggcagcggcgacaatggcaatgccaacaacggcgaccatgccgcaacagcaacggcgcacgtttgccgacctgtccgccagtcggacagtgcccgacctgaagttcatcgcgttggcacacaatgtaagttgggacaggcaatagtgacggactttcgttggcaccggaagttggtcttacaatgggggactgattcaaaattgaaaaaagaaagttcgtgaggaaaaccatcggtcaaaaattatattgttttattttctttctttttcatttcacaaaatgagggatttcattcctcccatttcgttaggtcctccaataatctgacaatgaacaattttttttaatggattttactataaaaataaggcattcgtaatggcccaatttttcgagagtcactctcgaaaatactcaaaataattcgctctgtttgctttccgattactaaaaaattacattttcccgtctttcaggtgccaacaatttgtcccccctcctccgtgtcgttggacaatttgttgtgccgcgtgcgaaacagtgccaccgccgctgacggcaacggcggcattggtggtgccaatgccgcggccattgacgagctgatcgactgctgtgccagttcaatgcgcatcctttcggagccggacggcggcggggccagcgacgggcccgactcgggcctcggctcgtcccattccgacggtgagccaaaaaagcgaagaaaaaaatggaaaccgtcgtcaaaattttaatatgttaaatttttctggggattggctcttccgacgggataaactgcacggagaagggaaatgaagcacatcccattttttcatgttacatttatttacaaatattcaggcccctcgcacatcgaagattggtcttcactgtccgtgttgttgccaaggttggattcatttttatttttcaattttgagtgttga

SEQ ID NO: 52716 - DNA, 1256 bp, Heterodera glycines
atggcaactaggacgatgatggcatggtgcggcggcagtgccgcccgtcttcccaaggattcgcgagtgccgaagagttcttcaatgccgaccaaactggtggcagcagcagcatcatcaacaaaattgtcaacggattgcattgaggaggaggagcaagaagttgaagttgttcactgccagcaggacaaacaacaacaccacaatagcatcaaattggagggtgagaaacaaaatgatgagtggtggaaggctaaatttaccagaatgacccggaaactttttttggatgctctcggcccatttttcgagtgtaacaggatcaggttcgggtttttcaaaatcccggtctctcgctctttaacattcatttgttagcagactcaatttccatttttcagatgtcaaatgggtcgaagtgcagcagcgcgagcaggaggaggacaaaacggcggaaaatgagcgaccaaactcaatggcggacaacgacaacgtcgttcagtcaaggaacactgatgctgttggtggtgctgctgacactgttgtgcacgccggtttgagaccgtccagttccaggatcccaatactacggtaaggttgattttaaaaaattaatccaaaattatgagccaaaaaaggcattcggtagaagtactgcttgaacatgctggacaaaacaacaacaatttgttgtttttccgtttagcacgcgaagtcgttcgtcaataatgcacagcgacgggggcagtccaattgcagcgcaacaacgccactctccgacgacgctttcccgtcgttcgtccagtgctcgccctacaccgtcgttgtcgcccgtttacatttgtccggtccgcgaggcgatcactggcgagcacacagaccaacagtcggcatcgctaccacatgggagcgccgctggcggtggcacgctgctgtacccgttgcgcaagggcgagcgcgtgcgagtgttggccatccgtggcgagtacacgcgttgcagtcgcttgcctgctgctgaacatcgccagcaacaactacaacaacagcggttggcgttgcagaacggcctggtgccgaccaggacgctccagtttggcgccaataatggcactacggcattaaacgacgagcggatgacggaactgtgactgatgattgacttgctgatcagtgtggtgatcggagtttgctgtgtgccatgaacggacaaagaaaagtgaacgaaacgatggaaacgtacaaaaaaggacaattaa

SEQ ID NO: 52717 - DNA, 319 bp, Heterodera glycines
gcgaatcggtccaccgtcagttctcgcgccgtgtgctcatcccggagggcatccaaaaggagagcatcaagtgcgagttggacggcggtcgcctgttcatcagcggaatgaaaacggctgacaaaggcggacgaaccattcccattgaaatgaagaagaaggcggccgtggaccagcagaaggaggaggagaagcagcagtagaaaaggacggcggaagtgaagacggactgactgtcggtcgaccgaatgatccattgacattgatctttttattttgatacttttgcaaagtgatctataaattatttttccttcaa

SEQ ID NO: 52718 - DNA, 370 bp, Heterodera glycines
acattttggaaagttagaagagaatgaattggtgtggctgtggtgtttggggaggaaagggacgccggggggggggggggggagaggacggggaagggtcgaataaaacgctatgaaaaagacggagaggagcaaacacaacagcagcagcatcaacaggaagaggggggaatcaaagaatggacgtacgtttgaggatttgacatttgtaagtgcaaaatttcaaaataaatgtagacatacaacacagtaagtgaaggaaactcgacaaatttagaaaaaaatttttcgtcgggacatcaattcttaatgattgccgaaaaaacctcctaacaaataagtagacaatacagaagaacattttgtaaat

SEQ ID NO: 52719 - DNA, 374 bp, Heterodera glycines
atgccatacattggggagacaaatgatttcaaatttgagcaaaaggatgttgaacaatcattggtgctgatggacgatgatggggccacagatgtggccaaatcgtcatttgatgtggaggataaaagtgcaatttaattttaaataatttaattaaaattaatatttaaaaggaaaaaaattgaaaatatggaatcattaacatcaatagaaagcagtacaatggaaacatcttcagttgaaataattatgacttcacaaaatttaaaaattggaaaattaaagtaaatattaaaaatttttaattttctttcttaaattgggtttatttatgagaaattttttagattattctataaaaatgctaaaattaa

SEQ ID NO: 52720 - DNA, 61 bp, Heterodera glycines
atgaaatgcgctcaaagacgcgcccttcaagtgattggtactgacttccattatatccatt

SEQ ID NO: 52721 - DNA, 537 bp, Heterodera glycines
atggtcatcgacggactgcgcgactgtctcctgcaagtactccgcgattatgcgcttcgcgtcggactgttggagcattcgaattccgtcgcttcgtctgacacttttgcgctgtttcagcgacggctgaggccggagcctttcgttgctggcacccatggaatggtcaccgagctgagatgcgagatttgcttgtaagcattttctaatgattttctttaattattggtgatggatcgcattaattcagcgatccattagtcagtccttccgcctctgccccggtcggagatgttcgtttgttggtcaacggaagtgcggtccacgagaaatgccatggacaaaagcaaatgccaaacgcaaaagcactttacgaggaaaggagaaatgagtgaggcaaagactggagaaaaaagaaaagcgaagaaaacaaatcaaacgggtttattatcagtcatcaccaaacatatatatcacttatatgcctttaaagctcaaattttgttcacaattttgattttttatagtttaaataaa

SEQ ID NO: 52722 - DNA, 1667 bp, Heterodera glycines
atggctgtccctcaggaagtaattgacaaaattgaggctggctacaaaaagcttcaggtgcacacaatgtgtgtgttaactattctaattttgaactaactttcaggcggcggctgattgcaaatcgttgttgaagaagtacctcaccaaggacgtcgtcgatgcatgcaaggacaagcgtaccaagctcggagcgacttttttggacgtcatccagtcgggggttgccaacttggacagtggtgtcggcgtgtatgcgccagatggtcagtaaattgctacgcataatcacaaccataaatattcattcagccgaggcttacacactcttcaaaccattgttcgacccgatcatcaacgactatcatggtggctttggaccgagcagcaagcaaccggcaacggaccttggtgaggggaagactcaactgctgacggacttggacccggaggggaaattcatcaattcgactcgcgttcgttgcggccgctctcttcaggtgtttgtttgaatttaacataccaaaaaacagtcgtattcaggggtatccattcaacccatgcttgaccaaggagaattacgtcgagatggaatcaaaggtcaaagcggtcttcgagcagctgaagagcggtaggcaaccgctaattattttctttgtaacattaatgttttagatgccgagttgggaggcacctactatccgctccagggcatgaccaaggacgtccagaaccaggttcggtccaacaaataataagtcattaatttttggaatatttagctgattgccgaccacttcttgtttaaagagggcgaccgttttctgcaggaggccaatgcttgccgttattggcccaccggacgcggaattttccataacgccaagaaaacctttttggtgtgggtcaacgaggaagatgtatgtttgtttgtttcattccatcttgatatcgattttcaattaagcacctccgtatcatttcgatgcaaaatggcggcaatgttggacaagtgctggagcgtctcataaagggagtcaaggccatcgaatcgaaagttccgttttcgcgtgacgaccgtcttggctggctgactttctgtcctaccaacttgggaacgactgttcgcgcgagtgtgcatattcgacttccgaagatcagcgcaaaacccgacttcaagtccatctgcgacggcctgaaattgcaaatccgcgggattcacggcgaacattccgagaggtaattgtttattgttctgtttttgaaacaattgtcctttacttagcgctggcggcgtttatgacatcagcaacaaggcccgtcttggtctcacggagttcgaagcggtgaagcagatgtacgacggagtgaaacacctgatcgaattggagaagaaagcataatgggaggaccgatctatgatgatgactttatattgcataatgtggagatttatagttgttctgaatctcttaggccttagctatttgtatatatgtgatattcctatattgttcatatcgcgcttgtgtgtaaatcagagttcccaagtgtgcttattttgaggggtcggatcttagaaagtaaaaatgtgcttatttctaagatttgtgcttatttcagcgttacgtgcttattttgtgcttatttttggatttgaaaataaa

SEQ ID NO: 52723 - DNA, 1054 bp, Heterodera glycines
atgagccgatcattttcgaagcgcacgatcacagaacgagtgagtgttgttgatgaatgttttagcatggattttcgagtgtcactgtgttaacaaatccggcaccatttcgaccaatttcgaattctttttctcgaaaaatgaaatttggatattttcttcgaattcttatccaggattcggaattggtcgaaatacggattccggcgatcaatttgtttggacataatatttttgttttccccatttgtgcagatatgacgcctcttttccttgctgtccgccatgccaatttgccgctgtgccgtgtgctggtcgcgcgtggtgccaacattgacttgggcacggactttgccacaacgccgctgatgcacgcttgcaaaagatcgcaaacggaaattggtagagagacgaaattttgaaaaaatgcgtaattttttcccgtcattttttcccccacagtcacatttcttgtcgagaatggtgccaacatcaatctgcagaatggtgatggggcaacagcactgatgtacgcgtgttacacgggaaatgtagggaaaaatttccattggtgaaatgttttccaacatttccatttgaattcaggtggacattgtgcgcttgttgctgacacatggtgcaaatgtcgagcaaatggatttcgaaggtgggggattactgttacagtacccaaaaataccatgccacaaatgttgtcctaatttcaggattccatttcgcacttaagagcgctgccattggcggcagtttggaggtgtgccgtctgctggtggaggagtgggccgcagatgtcaaccaacaaaccatccaagagcgatacactccagtgatttgcgctgccagtataggacatttggccatcggtgggaagaaaattgggttctagtgatgaatgacgcggtccctggtattagctagattcagtctctgcaacttaactgagagaatgaacttatacaacctcatctagatcaacattttttccattttatataacacattttagctagttaaatacaacgagcaaaataaa

SEQ ID NO: 52724 - DNA, 789 bp, Heterodera glycines
atggctgttttgtctttcctaagctggtcatggtcaagggcgcttgatcaggggttgcgtgcgcctacctcaggtgcaagcgagcgaagggttgcgtgcgcctacctcaggcgcaagctagcggagagttgcgtgcgcctacctcaggcgcgagcgagcaaagagttgcgtacgcctatctcaagcgcaagcgagcggagagttgcgtgcgcctacgtcaagcgcaagcgagcggagagttgcgtgcgcctacctcaggcgcaagcgagcaaagagttgcgtacgcctatctcaagcgcaagcgagcggagagttgcgtgcgcctatctcaagcgcaagcgaggggagagttgcgtgcgcctacctcaagcgcaagcgagcggagagttgcgtgcgcctacctcaggcgcgagcgagcaaagagttgcgtacgcctatctcaagcgcaagcgagcggagagttgcgtgcgcctacgtcaagcgcaagcgagcggagagttgcgtgcgcctacctcaggcgcgagcgagcggagagttgcgtgcgcctacctcaggcgcaagcgagcaaagagttgtgtgcgcctacctcaagcgcaagcgagcggagagttgcgtgcgcctacctcaggcgcaagcgagcaaagagttgcgtacgcctacctcaagcgcaagcgagcggagagttgcgtgcgcctacctcaggcgcgagcgagcggagagttgcgtgcgcctacctcaggcgcaagcgagcaaagagttgcgtacgcctacctcaagcgcaagcgagcg

SEQ ID NO: 52725 - DNA, 738 bp, Heterodera glycines
atgagcagtttaagaaagggatggaggcaaaacaatgcgaatgatggagaagaactcgaggtcggcggtggcaccgaaacgcgttgtgagaagcaaatcgatgtaaaaggtgagagtggcgaccaagtcgatgatgttcacgggggccttgaaatagtcgacctttgacggacacgcgacgaacctaagggagaaggacggacagaaatggcaaaacgagcgattggccaatgcccaagagtaacggttcagtctcgagtcgatcccaacccaaccccacctgattataatctcgatggtgaaccaaacattgcaaatcgtttcaattatctaaaaaaaggattccaacgatccattgtcacattggcatttcgtaaataatgttttgacttgccaagaagctcgggtgcggttttgagttgcgtttgtccactccgatggactccgtgcgatatttgaagaagggttttgtgggagggggcggagggtcggccggccttttggcggcggaatgattcataaacagcgaatggttcagcagagggccaatctcttccaagtcggccactgcaaagaaaattaatgaatgacatataatcttaaataataaacatttaaaataattaattattttcagccccccccctccgcccacctcttaagccggggtgcgttttgaggcaaaacacgagaatggcacagatcagaaagaacaccgaaatgacggccacaatctga

SEQ ID NO: 52726 - DNA, 1556 bp, Heterodera glycines
atgacattcacgcaacatcgggacacacaagaagtgttgcaaacgctggacaaattggagttggacgacgaagcgatgcgtaacgaagtgggacaaaataagggggaggcgaggggggaagtgatcgaattgatcagacaaatgcagggggcagacatcggtcatcaacaacaacagatggctcgataatgattagaccggtcgggccaattcaccattttcgaaaagggttgggtagtcagcatgaccgcccatcggcaggggggagagggtgattgattgaactgattggtaccagggccggagggacggtcggactgatcagccaattcaggaagaactttacaagcgcttcggtttcgaggaacagtacaaaaacaaagagttgaactgttggcagaggacgaagccgaaactgtggcgaatgtttgacgagccgagctcatcgacaggggcaaaagtgaggccaaccgctaaactcgggagcaattgttggcattggctcagattgtggccgtcatttcggtgttctttctgatctgtgccattctcgtgttttgcctcaaaacgcaccccggcttaagaggtgggcggagggggggggctgaaaataattaattattttaaatgtttattatttaagattatatgtcattcattaattttctttgcagtggccgacttggaagagattggccctctgctgaaccattcgctgtttatgaatcattccgccgccaaaaggccggccgaccctccgccccctcccacaaaacccttcttcaaatatcgcacggagtccatcggagtggacaaacgcaactcaaaaccgcacccgagcttcttggcaagtcaaaacattatttacgaaatgccaatgtgacaatggatcgttggaatcctttttttagataattgaaacgatttgcaatgtttggttcaccatcgagattataatcaggtggggttgggttgggatcgactcgagactgaaccgttactcttgggcattggccaatcgctcgttttgccatttctgtccgtccttctcccttaggttcgtcgcgtgtccgtcaaaggtcgactatttcaaggcccccgtgaacatcatcgacttggtcgccactctcaccttttacatcgatttgcttctcacaacgcgtttcggtgccaccgccgacctcgagttcttctccatcattcgcattgttttgcctccatccctttcttaaactgctcatcgtcaccctttcccttaagcttcgtctgttcaaactcacccaacactctcaaggcctcaaaatccttctctacacgttcaggtgacaatggcattgtgggaactgtcgtcttcttctccccttttggcattccttccaaattggccaatttcctttccctgcagggcatcggccaaagaattaatgctgctggtctttttccttctgctcggaattgttgtattcgcttccttaatttattacgccgaacggatggaagacaatccggagaatcaggtgaagaagcacaacaaccgaatcgaccatgtcggatga

SEQ ID NO: 52727 - DNA, 1200 bp, Heterodera glycines
atatcttggactttacacggaagaaaattataatagagaaacggttcgtcttttggcgagtgcggctgacacggcaaaggacggattgatttcatacgaggaattcagtgcttttgaaggtggttttgccggaacgactcaatttccatatttttaattgaaatcggttttaattgttcgttttagccagtctctgtgccccagatgctttgtaccttactgcctttgaaatttttgacaataatgcgtccgaatcaattactgccgatgaatttgagaaggtggaatttgttttgtttgtatttgcaattgaattctcaggtcatccgccacacaacccctctggtcgaattggattttgattttaacagcgaatttatcaagaaatatttcggcgcgttagttcttatgtttttcccaattcattaattaatttctttttgatttagcaaaaagcagcgctccattggttaccacgctttctgtcaattgcttcacgacttttacgaagaacaaggattacaagcatttaaaaagtaagacttgcagaatttaatttctgagttaatttcatattcagatttgacacgcaaaatgatgggagtattacagccactgacttttttcaacttatgacaacggtcaaaggccatttgctgacggatttttcgagaaacaatttgattgccgttgctggaggcacttcaagtgcgcataaagtgagaacctccgaaaaccgtgcatttgtactcatgcatattccattttctgtgcctttaattgagtgtctttttaggtgcgttttcccttttaccaagcattcaattcgctgttggccaaaatggaactgatcaaacgcgtttatcagagcattgcccgcgggaacattgacctgaaagtgactcgtgaagagtttttgcaggtgttttagcactccatttggtcatttatttataattagtaaaacaatccttttttgaaccatttttaggctacgcaatcctacgctcaaataacgccttatgaggtgagctattgcaattcaaatttgatgctaatcacaagtaaaccttattgtttgcaggtcgaaatactcttccacttggccgagctcaatcacccgggccatcggacagtcgatttgaccgacttggacaaaattgaccctgaacggctgaagcgcgtttcgcatatgatccg

SEQ ID NO: 52728 - DNA, 496 bp, Heterodera glycines
atgtccgtgtttagcagttcggatggttcatgcaaaaggttcttatttttagtttagcgattaattgtgctctatctctattataatcgtattttaatttcgatataccaatgaatgaatatggggatcaatttcgatttttttttcttgcaaaaaaattcataatctgcgacttggtgaaattgattaaaatataataaatcgttaccaagttatggtttttcagcggggtacctaaaactatgaatgtgccatacctttgtctcaacaaataaaaaaaatttttgtttctagcatcaacagtgaggcggttttcgagactgctgaagatctcggggaagcattgaatctcgacgccggtgttgttgagtggctaaaggaagcgccgcgttcggatgaggacccgattttggtgcttgattacaccgatttgttccatgctcttccaggaactctcaattacaacaaaacctgggtggcgaatctcttggtatga

SEQ ID NO: 52729 - DNA, 340 bp, Heterodera glycines
atggtcgattatttttttgcacaaatgcactttatgagtccaatcgacttttatgagcccaaaggtatttttatgagtccaatcaattgaaaatacttcgtttttatacaataactttgttcatgttcgagctaaacctatctttttggtatcattcgaaagcaccaagtgtaacgaagctaaaatatataaaatcgcagcgttcatgcaattaccaaaaaagctatggattgagtgatgctgattatttccatttgtaactttctttaaatgttataattctcttgttttctcgtataattacattattaagactatgggctttcgaatgataccaaaa

SEQ ID NO: 52730 - DNA, 823 bp, Heterodera glycines
atggaatctttgcttgaagtccaacgaaattgtcatgaggagcgagaacggtgcatcgatctgatggttaaagaatttatgatggataaaaaatcagtatgtttttttggtacttatatgttagctgtgcggagattttccaaaaatttttgaaaataaatttgttttatgccgattctgacatccattttgacccaattcgaaccccgaacccggattcgaaaaaaagtcgaaaattcttttttcaccaaaattcacgttaattgctcaaaattgatttttaggggttttccgggtcgggaaaaccgatctgacatccatttaaccaatttgaaataattgaagcgattttgtggataaaatatgaatttttctgaaaaatggaatttgacttttttgttcgaatccgggttaggggttcgaattgggtcaaaacagatgctagaatcgggtttcccgaccccgaaaacctataaaacaaatttattttccaaaaatttttttttgaaaaaataaatttagtaattggaatttttttttagcaacgcgaaagaattaattccgatcaacgcataaaacggttgattgaggtaatttgtggtttaattcttaataggtaatgtcaaaactgtgtgttaagagaaaccaattggctacggaaaagctaatcaatgcctacaaagacgaacacggggaacgcagcaaagaagtccaatccattggcggtccaaacgaattcgccgagttttattctcgtttaaaaacgtttgaaggatgttcatcgaaaaaacccgaacgacactgctcgaacactgacaattga

SEQ ID NO: 52731 - DNA, 230 bp, Heterodera glycines
atgtatatttgggcatatttcagtgagttacagtgcatattttatgcgtttattgaccaaaaaaaaaagattattaaattaaatatatatatttaagagaatcctgaagtagcggcactcccatgggaatgcacttgtgaaattggcgaaaagtacgaaagttttgcagtttcagcgccaagtttgttgttaaacgattattatttttaattaattaaccatttaaaata

SEQ ID NO: 52732 - DNA, 1344 bp, Heterodera glycines
atgagcaattcaaagtcattagcggatttctgtaacgatgaggaagaagaagaagaagaagaggaatacggtggaggggaaacaaaggaaagcagtgaagaggaggaggagaaagaggaggagaaagaggaggaggaagaggaagaggaggaagataggaaaaagggaaacaaagagggaaaagagaaattgagagagaaaggaaaagagaaagaatcaatgggaaaaagtgatcaaaatcaagcagaggacgacaatgttgatcatgatcatgatcagcagcagatggatgatgatccatttgatcaaacacaaaagcaagctgatcaaactgatggccaagcaaaaagcgagcaatgtgaagctgatcagactgattccgagcaaacagaggaagaaacaatgttgtccgacttgaatgaagatgatggaaacggtggggaagaaaatccgaattctcttggatttggatacacggtatttcagggaaataatttttaaaacgatttttttaaatgtttgatttggctagtttcagtcagccgaatgcccgccaaaggaaatgccattaaaaatgctgcaggaaatagaccgaaagaatgttattggtaaatcgtaatttagtaaaaatataaataaaatcaattattttgtaaatcgaaattaaaaattatttttcaatcgaaaattaaaaagaatttaaaacatttaatattttcaatcggaaaatttattacctgtattaacaaattaggcaatgaaaaaatgtaattatgagaattgattggcatatgaaaattgagtatttggcagtttttgaatagaatttttaataaaatttgttaagaagatccttttcagacccggagcaacaccatctgatgggcaattatctccaattgttttggcatgacaatgaaaattttcttccattgtctccacaaaattcggttataatgaaagtcacccaaattttggccaccattgccttttatcgaaattgtgccatggaattgttcgcattgcccgatttgtacacggagaatggcactttttccgccaaaattggcgattatcggcaaaaatgggccgtgacacaaatgacggaaagtgaaacaatgggcgaaaacatttgcaaaatttaccaattcatttacgaaatggtgaacgatgaggagttgaaggccgccggggcggtgtgggagcagtatttggcacggaatgtggtgaaaattggccaaatggaagcgaaggaacaacttaaaaaagtggaaattttaaattggaaaatttaaaaaatggaattaaattgaaattagaaaaaaaacatattttattatggaa

SEQ ID NO: 52733 - DNA, 56 bp, Heterodera glycines
gctatagggaagctattcccgaaggattcggtctccccataaatctgggcgcatcg

SEQ ID NO: 52734 - DNA, 223 bp, Heterodera glycines
atgggggcggaaacaatagcaaagccaacggcaccaccgcaaaaaatgaacacgcattttttgaacagcagtaccacgccacagcaaacgcaccaccgcaacaacagcaagcagccgccgcaaccgcaacaacaaccgcagacggcgcgccgcaactccgctgctcgacggcacacgacaccggacatggcggcttcggccgcatacggaatgggtaagcgaa

SEQ ID NO: 52735 - DNA, 542 bp, Heterodera glycines
gaaaatggcccttttccgttttaatgagactaaaacaaatcgtggaagaagtttgatttcatgtcacaactttgattactgctttgaacgagatgcgcgaatcgcggagggctttgagtattggagatgcccaaggcgtcctccatattgcccaggaagagcaacagtccaaagtgcttggcaaattgatcccgacggcaaccgcttcaaaatggggcgagtgacagcaccccataatcatccacctatttttggccaacacaatgtattaaatatttaatttgtaatcgaaattatcctatagttagccgggatggaatttctatgtcaaacaatacactaaatgatatttaaaagcgaaaagacccaaaactaacaaagtgtttgtcttcagcgtataagccaaaaagtttttgggattgcctaaatagcccatccctgctgatcagataagggaggcgaatgaacgagttcgtgaagaagcgcgcagcgactttcctacgactagccgtaacattgtacgtgatgttcgatcagaaatg

SEQ ID NO: 52736 - DNA, 321 bp, Heterodera glycines
atgagcgtcatcattgatcactcagcagttccggtggtctatgggttgatgccgaataaggagttaggatcatacaccagcttttttgaaacaatccggaaccgaattggaaacaattggttccccacccgcatcatgagtgattttgagttggctgccatgaatgctgctggcattgtttttccaaattcggtcagaactggatgccttttccactttggccaagcgttataccgtcgtgtccaacgccttcctaatttgcacacacaatatttgcagaacagggatttacaaacgtctatccgatcattgcaagtataa

SEQ ID NO: 52737 - DNA, 909 bp, Heterodera glycines
atggcaaaacgaaagcagcacttcttcagggtcgaactcagtgccggagtgatgcgaaggcgaaaacacacggaaggcattggccgagaactaaagggagagagagaaggtaagaaataacataacagaaagagagggagaggagacgggagagagaaagggggcagagaaagagagggaagaggggggaggaggggaacagagtaaaggaaatgagtaagcaaaagaaagcaaaagatacagaccatttcgaagactgtccgataaacatcgaaactgaatttgtcctttctgatagccaagaaatcgatgcattcattcagtgacactcttttttcctcaataaaatatgttgtatgtgagacaattggaatttgtaaatgcataaatcttaaaatttaagttttccataacagcccacaaaacccacttctttcaaccgcaattccgacaaagggtcattggcaaaatcaaaaaccacggcacactgttttagcttctcgacgagcagaagttgtgctccccgttcgtccttaacctctaaaatggctgtcttatagaagcaaaaatggggacggaccgtcgaaatttgccaaattcggcccgccttctatcgaatgaatttccttctcctggggagattcgtccgtcctttccttcgccgatttaaaaggctgacaaagtgtacctgaagaaaaaggaacggttccaccatttgcggttatttttccaaactgaaacagacttgacacggggaccccctcatctgcagaaacacagccacagccaaagtccttcccgacattttcatcgtttaattccatcggaacaaatgttatttaatagacacgtattatttggtttaaagtaaagaattcgaaatagttatctttttgcaatttggagaga

SEQ ID NO: 52738 - DNA, 872 bp, Heterodera glycines
atgttcattactgaactcgaagagattttggatgtcatcgacccgatcgaggtgttttgtatttggttgcttctgcttaattgttcagttctattttagttcaaaaatgtcatggtccctctcttttaccaactttcccgttgcgtttcttcaccgcatttccacgtctttctccccccccccccttttcccctttttaaattcctcttttttgttaaggttgcggaaaggacgctttatttctggaacaacgagtgcattctcgccctgataaggtctttttccaccggtcttttaaccttagatagtgcctattttcatattcagtgaaaatgtcgagaccattttgccaattatgttcccatcgctgtataaaaattccaggaatcattggagcaagtaatcaatcactgctcatggggtgcaacttaaattattgaaaatctatcatttttcgggtttcaaagaaagttttcttttatataaatttttcgaggtggagaacaacgcggggggatttggttaactgcttcggtcctcaagtatattcgataaaaatattccttttaggacgatccacggattgatttacaatgtctgttctgttctgtccggtcactcattttgccattttaccgatttttaaggcattgaaacttttcatggaagagaatcagaagttgttcgacctgtgcgtacagaacttcaacaaacagaaggagcaggagcaactgaagcagcagaacaaccgcagacggtgggaactgctcgaaaaagcggccatggaaaacgcacgcgcaattcgacagcaacagacggacggagaggcggagccgtactcaattggcgagggagagaagaagccaaagtga

SEQ ID NO: 52739 - DNA, 848 bp, Heterodera glycines
atggacttcattgaatgtcgccattttaaggccagcaaaatcgaggctgtattggaaacagcacgaattaatttggacgtggacaattcggactgccaaattcctaatatgcaacatttgttctccaatttctttttgcaaacaattttggctctgatgcaccattactttagcatggcatttcaaatgcgtttggtccagccttatgagttccattacatttattggtttgtttgtttttgatgaatatttggcctttttccgttttttttttagcacttttagagagtaggagtcgacaaaacaaaaaaagggacccttttgatttccaaaatatatttgtcggctcctattctataaaagtgcccttatttgtttaggtatttcggggaattcgtattgaaaaatttgagcaatatgtgcgagcaaaagtgcaattctttgataattgactttagcaaaagtaattgctcgaaatcagtgcataaaatttagtcataatcaaaattaaggttcacttcaccagctaaaaaaggtgtcgggtaaaaggcagctgcaaaagaccaaaatggacaatgagtttcgcaagacgctttcgctcatcaaagcgcggtcgcttcatcacaggttgaaatccgacagccaatctccacgcttttcgtctcaaaatttcatttttttaagggcagagactctgatgtgtcaggcaatgtgcagcatgaatttggatcttataatctcacaaagaatggctgtgcccccgggggaaggccttcgctacacaaaaagagtcgaactcttttcatcgataccgcctttgctcttttattcgtacgaagagtatttga

SEQ ID NO: 52740 - DNA, 195 bp, Heterodera glycines
atgtcaaaggcgatgaagaaggtgggcgaacagaggtcgaaggcacgacttaattgctgccaaaatgtgtttacgttttgtttttttcagctggtcgaaatggacgccaagttggacgaagaagagctcaatttgttgttcactggatacagaaaggcgattaaaattcttcagaaccagttgctcaaaaagtaa

SEQ ID NO: 52741 - DNA, 559 bp, Heterodera glycines
atgacggtaaaaaacgatcaaacaaatttttggattgtaaagtcttcccattttagatctccagaaggcaaagcagtcgtacgaggaggcgtgggacattgctcagcagaagatccggccatcgcatccgattcgcgttggagtggcgctcaattttgccgttttcctccacgaattcatgaaagggtcgcaaattggctcaaaaggtggtggacggagccgaacaaaactcattttaatcaccaatttattaacatatcccaattttttgcaggctcatgacgacggaaatgctgatctgctggcggagacgacctgcgattcgttcgaagtgtcaatggaaatcctcgagaaaattaacgcgaaattgaacgaatgggcccgtaaacagtaggataattgcgtcccatgtcacatatgtacaaatattgtaaatattaggcatttgtatcccatgtctgtgtatattgtattgttgtggaatcacgctgatatgtaaatgtttgcctattatatatgtatgtacagattcgttgttcattaattcgttcagttgtta

SEQ ID NO: 52742 - DNA, 1188 bp, Heterodera glycines
atggcggccgagacgaaggaagagctgttgtttctcatcaatctgtgcgacacgtcggagtgcttcaacgaaatggtcgacgcagtgaaaaaggtgacaattttggatacattcagcagcttctaatgcttttccttccttttcagttggtcagcatttgccccgaattgtcctacgaggagcgctatttgctgtgggtggctttcaaaggcgcgatgtcgtcgattcgtcagccgtggcgtgccctctgcgccatcgaacaacgctctttttcggacataacggaggcgcaacggagcaattcgcatctgctggtgcttctcaaccattctttttttagtgttttaactgttttcattttccaggtcatagagacgtatcgcgaggagttggaatctgagctgcttgtcaattgccgtggagttttggtccgtttcgtgccttcatttttgatatcaatccaaataccatcgcttttcaggagttcctcgactcaactctgattccaaatgcgacgaccaacctggaggccaaggtgttctacctcaagatgaagggcgactacaaccgctacatttccgaaattgcgctgggcgaggacagaacgagtagggaatttgttttgatgttgctaacaaataattcgccattttttcatttcagccgccatcgaagaggcgaagcagtcctacaaccaagcggcagaacacgcagcgcagctgaccccgtccgacccgactcgtcttgctgtcgcactcaacatgtccgtgttctaccaccagctcctgaaagacgtggaccaagcgattcaaatgacggaacgagtgagttttgggctcacaacttaatttattcacagtgaaatttcctttgttcaggctcttaagagcgcgaaggcaatccctgcgacgcacatcgacagcaagaacattatcattcaaatgaagaagaacttggagctgtggaagccggtgaaccccaaacatgccgagacgaaatagggcagcaaagcaaggagatgttgagaagaagaccgaccgatcagatggataatattacaattgtatattccaattatgtatgtcacaaccattgtaaatatatataaattgtatattgttgtgattgtgataaataagggcacttttgtcacaaattttccagaaaagtgtcaaagacagaaataaa

SEQ ID NO: 52743 - DNA, 142 bp, Heterodera glycines
aatgaataaaaataattcaatcaaatgttaaaaattcacaggtgataaaaatatagtgtaaatatggcaacatggaaaatcctactcagaactcattgcttttagtaaacccctgaattcctttgccttattaatttgcacc

SEQ ID NO: 52744 - DNA, 729 bp, Heterodera glycines
atgtacataataccgtcctgtattttaccgtcctcttatattataaaaacatacaaggtgataatgcatttctgcaaccagctgcaacacgccgaggtgctgttcgcattgttgaaccattcaaaaagttctgccatttcaatgcgacgagccgctggtgtacaggtttgtggttgcccacgcgcacattgcactttctgaattttcctgcatctgcgggctctcggtatacccgtcggtgcatgcagaatatcatcttaaaaggcgagctttgctaatcgaggatttctcgcagtgtaaccgattcctggacctcgagatttaaatatttagaatagacaaaacgatgagtaagaatatccaaatatagtgcatcatatttgaaggcggattggaagacaccctcccgcatttgagcaagtcttgcttccgcctctttgttttggtctccactgtgtcgaatgtatctgctaaaatgtgttaaaaattaaaaaaatcaagtgtgttttgcataaaaattccaaaaatcctcattcattatcattttcgcctgcacagtcgcaaatcaaatacattgtgaagtgttctgggtaaaatggtcctttttcagataaattgttttgtaagttgtcagtcagttgaataagtctcagcagtgaacttcaaaaaccaatgacgaattaatgaaaacatctacagtaatttgcatctttagtcattcgaaataaa

SEQ ID NO: 52745 - DNA, 115 bp, Heterodera glycines
atgaaccagcagcaagtaattaaaacaaaacgaaataatgataaattggtgcatgatggtgcactttatgtgttccacaaattcagtaacgatggacttaagaaattttggcggt

SEQ ID NO: 52746 - DNA, 1484 bp, Heterodera glycines
atgcctaagaaaaaatggctttgccctgaaggaattcgtggtgatcatgcccacaatgaaacggtgcacaaatgccggattctaaaatttgccaacaaagcattgcgcaattatttgagatttcacgcattaagagtttttaatgaagaaacaaacggaatggaaaagttggcatttatacaaaaagaaggtaaataattaatgcatgcgggacgtgagatttgacttggaaattaaaaatagttagattataggttcttaaaaagtggtttattgtttgcgttggggtagtgcgctggtctcaattttttcggtcacaggttctaacccactgcatgcaaaaaccatttaacaatttttatttttgcttttttttatgcaaagtcaattatcgaaaatatttttatgaaaccaaatttttattttttattattttaacaccataagatacgcaatgaagaatgttagacaaaatcaatttattttaacttaaaggagatttactgcttctttacctttaatgaattttttgattttaatgaaataattaaaaataaaggttttattgataaataatttttttgataattgacgttgcataaaaaagcaaaaataaaaattccgcaaaaaataaatgctctatccacccaccaagtttcattcagaaaccccacggatacctggggaccttcctttgttagataaatcctaaaatagagaaatacttattaattttgcaactcagggggctgaaatttttggaagtcggaaatgtgagcccaaaaattctgaagttggaacttagactttatcggagtttacaaaattttattggttcttaaaatttaattttatttaaaaatttattgaaaaattgcctataagcggtatccgttttgagttatttttttaaatatatgagttttggtccactgttaagttgcatagagtgtcattctgaattggcaaaatatatatatatatatatattttttaatttgaaaaagccgaaaatttaaaaaatttttagaccttttggagaatttggcgttgaagccatcatttctctcgagttcgaacgacaacatttcggagataaaaatcatattgttgaaagcgtacaaacattttaacattacacctgaagaggaaaaccttaatgaatttgaaaaaattacgcaaaattttgctaataaagaaaattatgaaaaagtgcagaaactggtcaaggcatttaaaatgagcagagtattggaacgtaattttattctaaagattttttaaaattaaaaaatatatttgtccattaaatattcaattaatgaataatttattttttctatggattattaagaatgacaagtagtgtctaaaattgacataagaaagataaaatttaaccaaaattccttcaaaacccattaaaaatttaatttacaaatttaaacaccatacgccaaactaaacggataaaaattaataaa

SEQ ID NO: 52747 - DNA, 395 bp, Heterodera glycines
atgagaggaaaaaggaggaagaggagacgaaaggaggaagagatgaggaggaggaagaggaaaagtgagaagatgaagagaaagggtggggaagcggagaacgatgaagaagaaaggaaggaggaagaggagaagaaagaagagggaagagaaagaggaagaatgggaggaaaaaggacgaattggggacgaaagaagagggcagtagaaagaggaagagatgaggaggaggaagaggaaaagtgagaagatgaaaagagaacggcggggggaagaggagaagaaataagagggaggaaggcaagggtggaggggggctcaaaaatacacaaaatttggatgggattttctaattaatgaggtctttctcattactttgcagttatccattctag

SEQ ID NO: 52748 - DNA, 996 bp, Heterodera glycines
atgacccattttcccccaaattttctccccaccattttcacccgcctcctcctaatcattttcataattattattattatcgacgaaactttgctgtccaaaggtggtgaggcagcaccacaagcagatcacaacgaaagcatcaccataaaagcctattttttgagagaaagctctctagcctagtcccagtctctgccaatgccaaaaaatgtttcgctgattgcgcaaagcttggacatacccttttaagtcaaggtgaagcataacataaagctcagaacaatcaattaattatttggccctatagaatttagcaccacattttttcatttttcaaaaaaataccaattaatatttaagggtcgctgatcacgaatccgacatccgtttgggacccttttgccagaaaaaaaggtggagcgtaaactgtataagggacaattattttcaaagaaagactctgcgaattcccatcctgctgtggattttcatggaaaaaagagcttccaaactaggcctggttccggaggcctacaaaaaatttcgcaaacattgagaattgaaaaatatatattaaagcgtcaaaaattatgttttgcaaaaactatgaaaattgggaactttttcagttttctggccaaatttagaacttttaaaaaatcaacagaaggcgcttataagtgcaaaagcaaagcaaaaaaaaaaaaaaacggcggcataagtgccaatttttaacaatttccttcactcttttcagaagtggaagcagaaaaaaacgacacttattacacatttcccttttcattgaaaaatgatcaaaaaatttctactaatgaaggagctgaatgtaaagattataaagataaagaagataaggaattggaaaaactgttgttggcattgatggatcgaaaaaggaactatgagaacgcgaagaatgagttggagaagaagcaaacggcacaggacagtgtgtcgaaaaatgaaaaataa

SEQ ID NO: 52749 - DNA, 534 bp, Heterodera glycines
cggggcagtccccccgaaccgatgcgcctagatttatggggagaccgaatccttcgggaatagcttccctatagcctgtactttaattctgcgttggatttttgctccccataattgtttgagtaccccaaacggacacttgaaaaaatcgatttttttgttttcggggcagtccccccgaaccgatgcgcccagatttatggggagaccgaatccttcgggaatagcttccctatagcctgtactttaattctgcgttggatttttgctccccataattgtttgagtaccccaaacggacacttgaaaaaatcgatttttttgttttcggggcagtccccccgaaccgatgcgcccagatttatggggagaccgaatccttcgggaatagcttccctatagcctgtactttaattctgcattggatttttgctccccataattgtttgagtaccccaaacggacacttgaaaaaatcgatttttttgttttcggggcagtccccccgaaccgatgcgcccagatttatgggga

SEQ ID NO: 52750 - DNA, 274 bp, Heterodera glycines
atggcaattttgtgcattttattgatgcatatgtaagtcagaggaaagagaaaaggctcaaacaaacaaacaaaaaaataacaaaataacaaagaaccaaagattacggcgggggaggacgggagggggaagtatcagctggaaatcacgcgaacaaagaagcgggtggcagaaagaaaagaaagaagggcacaagaaaagaaaagaaaatgccagaattatttaagaaaatttaaagaatttcataattattgtgatagaatttgagctctca

SEQ ID NO: 52751 - DNA, 1172 bp, Heterodera glycines
atgtccgccaattttgcgacgaaaaaattgaaccaaatttcggagttatggcaacacatggcttttggagaggacagatttaacgaattggacatttacaatttggtatttttaattttaaataaattgcaaaatgaattatttatttagaaaaatgaaattgcaaagggaaataattatctgatttttgatgtaaatcaaaaagccatggttgaaaatataatcagagaaatggatgaacttctcaaaaattgggtaaatatttaataaatttgttgattttttaaaacttgatttttagtcatcaaaaataaattgccatttctccgacgaatggctgtttagacccaaagaagaagcgaaactcagtgccatttgcataatgccatttgaatttgacatttcgtcctttttgggcacttatttttcgagtaattcgtcagttttccatgaccaatcgctgttctgtcgactgtccaaagtaaataatttattttttcaaataaattttaaattctattttttcaatttccagaaggaaaatctattggcactccaaagaattcaaaaagattatttcaactccgtgccacaaattcatttcacttaccaaactctgcctgtaaccattatggccattttggtaccaaaccttggccaagaagtgccaaatgggccattggatgaccaaaaaatcaaaacaatcgcacaaaaatttggcgatgaaatcgaaaaattgatcagagctgatcatctttttgacgaaggccaatttcgaatcagccaaagagtgaacgaccaaacaatggagcagttggccaattcaattgttcacgcaggtaaaagggcggacaatcaaaatgaagagataattaggtaattaactgagtgttaagtgccaaaagaagcggccaaaattatgcaccaatgggtaatgttcgatcagttaaaagacctgctgttgaaggaccgacaaaaagcaatgaacctgagggaatctgtgaaaactcatttggccatgataaaggcatttgcaagtgcgaaaaatgccaaataaagtttaaaacccaatttttgaaattttagactttacaactcatgcaaaaatttcattggtttttattggacaaattggacacaacacaaaaagaagcagccagcactgtgcttaa

SEQ ID NO: 52752 - DNA, 605 bp, Heterodera glycines
atgataattttagcattgaaaactctgcgaaatgaatctgagaaaaatgcgctaattgggccattaatcaacaaaacattcagccaaatggtaaaataaaaattaatttcataaattgttccattaagtatgagcacttcattgttgtcatttgcgctgctccgaattatcaaattgaaacttttgctaattttgttggcattcgaattgggcacgaattgccagaaataatcgaaaatccgttggaaagatggattaagttttgccatctgtttgcccgtccaatttcacttggcgaatgtaataataataataataatgcaccatctccaaaatcatcgtcgacgtaaaaacatttttatgcttttaatttaatatatataaatttaaaaaaagatttatttttcagttattgtaaaaagatttggctggtcggaattgaagtgaatgagaagcaaaaagaattgagcaaatttcaggacaaaatgcgagaaaagcttaaaaagaaattggccaaaaaaatcatcagcaatttcgagggaagctttgttgaaattgaaacggactatgtcaatgagcgggaacagctccaaaaattgtggtga

SEQ ID NO: 52753 - DNA, 493 bp, Heterodera glycines
atggcgagtcattccgatgaatacgaaattgatgaattttggttggataacattgcctatgatgacggcgagccacgtccaaagtcgaaaaaatgcgaaattattgcagggattgaccttcaaagtcacagacaacggcgagagtgggctgaaagtcgaatcttccgtcaatactacgatattattttggatggaaatggaaatttgactaattatgtaatatgcaaatcctgcgtgccacctgcgaaacctgttacatttaattatgccgggtttcataatttgcggtatattaaagactttaatttaaatatttttggatttgaggagacatttgaaaaattggcatgggataaaatttggcacaaatgacaaatatgacaaaatggaattagcattggttgaattttgtgttgctgatggacgtcccttttcaattatcaagggcgaaggattcaagcatttcatggatgcttatgccgaattaatgtaa

SEQ ID NO: 52754 - DNA, 783 bp, Heterodera glycines
atggcatacaaatgcattgatatgggcataaggttattgggaaattggtttggagaagaataaagaatatattgttgattgaattcgaaattgtaatttaaatttaaaaaggcacttttggaaaagcaaattcgattttttttttttttgattatttaattgatttctattttttcttatagatttataaaataaaaattatgcatttatttttataatcatttttcttttgtttaaatattttattttaaaaattatttcaatgaaaattatttataaaatatttaaagaattaaaaaattttagctccaatcatttcaaattagcatcataaaattggaaaatgaatgtgagttaagttaattttaaattttcaattaattaaaataaatttaaaagatttctcttaaaaacaatgaatgtattaaatgtatttataaaaataaaatttaaatttattttgaagctaaatttaatttgactaaaatttgtattaaacaatgaattaaattaaattttaaaagaaaaaaaagtattccagaggaaattcgaaaaaaataatttataattggaaaatggcaatgaaattaatcataaactcttttaaaacattgaagaattgcatcaaattttaccagggatacctagataacaggagactattttaatctgtaatttaatactcatatattagaaataacaatttattcgatttttaaattttaaaaattcatgtttaatttataactcttcaaaaatgctcagaagtctcatcaattaata

SEQ ID NO: 52755 - DNA, 824 bp, Heterodera glycines
cccgtttaatccataaattccgtttattgtggtactttcgccttgctgcaattccctcatttcagaccctcaaattgacgccgtttgttgtgttgggatggagcgaagggggcagaacatcgatacacgtggcaggccaagggaagggcctggtcagccacatggtactgctttcgtccggctcccaagtggacatgcggggagacttggcattcaaaggtgttggaattcctatttaaaggaaacgtattctttaactcattgaaaggcatgcgaaacacggaccaatggatgcccgcggcaaaggcaccctatttggagcattattccaacgaatttctcaaggaacaatgggccggactttgcgatgttgtagcaaagtgtgtgcacatgaatttttgaaattcgacctaatagtcaattaatttatcaaattcctttttatttttgaattaaaagggaaaaaataatcgaaacaaaaaagcggttaaatctttttaaatctgctcatttagagtgtacaaggacctcggaggaagttttccatgcgaccgcgttctaaacacactgaagatccccgttttgatcgtcaacggtaacatggaccggttcgtccttgacccgagcttgatgagcaagaaattggaaaatgccaggttttcgccatttcatttcttacaattagcaggaatgtaatttttaggattgaaatacatgcccagggagggcacgaccttcacatcaaatacccacgttggtttgctttaaaagtgactagttttgtgaaggaatcggcgaaaagtgatgtgaaagcgaataggaaa

SEQ ID NO: 52756 - DNA, 631 bp, Heterodera glycines
atgggcgctgaattcgtcaaacggcacggagaaaaagctaacaaccgaacattacacgaattgcagcgtctcgccatgcttctcaaccccggccctgagaacaaacagtgcactcccatccagcggtgcagtgacgttgcggtgtcggcgaggccccagttccccagcaaatgtccgttggatcggctcgccactcgtctgatggattcattccccaccataacgctaaagtagcgagtccttctaaccacattttcaagtgtaaaatctgtttttcccagaaacaatgaaccgcttactctcactgatgccactttttccatggccaaacgggcactgctggcggcgcaggagcgccattcgttgggagtgaataacacacgcggggactctttggcctccgaagctcccatcgaattggtgtgtattgtctattaatacattcaattgctttaccttctcacaatcaacaaaatttcagaacccgcttagatcgatcagtgaccaaaccatgtgctttttccgcgcatcggaggacgaagcggcgaattattcggatgaccaaaacggagaaatttcgatggacgagtcgccaaccgctgacatttatgtgcgtaacacaactcattaa

SEQ ID NO: 52757 - DNA, 769 bp, Heterodera glycines
atgatcttttccaacaattcttcatccaattcaaaatgtctcttttgtatttcatcgttgttcgttctttttgctgttctgcgtgagttgtttttagtgtgtattgctttctgaatttgcttctttctttttcagtatttccctcctctgaatattcgtcggtcgatgccactcgaattcgcttcaggccgaaagatttgcagccggcgattataaatcagacggagttatggaaacaaagtgtgttcgcttcttttttgctttttcattccaccgttaattcacacattactttcagaattgaagcgtcacgcaatcaaccgggcaagaaaactcgccaaacttgacaaattgccaccaattccggaggtcaaggtcaagcgtgtgatcagaaatgccaagggcgagtacaacccttgcagtgttgttgataatctctgtctgaatggtggcacatgctactccgataacgaagagtgagtgcgctggcagactagaaagcttcaacaaatatatgcagttttgctcaattttttttaaagatagtcatgtcttttagggcgtcgtataatgctgcataagtcgcgttcaatcgaagtcgaaattcgtacgtcttccccagtgcgacatcgactgcacttctcctcaatatcgccctaattgataagtgacgccttggatcaactgattcaataataatatcactatttgactgactaataatttttgatagtaatttgggtcgtttttaacctttttgtatttttaa

SEQ ID NO: 52758 - DNA, 1026 bp, Heterodera glycines
gaaacgagtttttggatctatgatttttgacattttcttttatttcttaaaatattgctctctttattccaagaatccccttcaaaattctccgtgttttcaaatctcccgttttatttgctcctttttttgcagttacgtggagtattcgctggcccagttcctttactatgccatgaaagagggtgcgaccagtgaacaggcgtcgcggatgaccgcaatggacggggcgagcaaaaacgcaggcaaaaaatcattgattagcttggctaatagccatcccacccgaaaagggcgcttatgcggaatatttcgaacttgatgaaatgcttataaatgctgtgtcattggacctctgtttatagtctgaattcataattttagagatattgtggctaattaaaaagtaaaactctaattttattaagggaatttcagtaacaaaaaatgtaggaattttttcccctttttagaaaatccgcaaattttttattttcagtaacacataaaaataagaatttttacggcaacattatgtccggtgacgttttgagtgcactttgtttcgaaaaaaacttaactaccaaaaaaaaacttccaaaaattgctcttccgaatatttttggtcgtaattattttgaaactaacgaattattcgaaattttttgctatggaaaaagatatcccaaaacaggcccgggtcccagtttatccccagcgacggaatcgactttttaatccaatgatatcgcatttacatgcagttccgaaagttaccattttaggcaacatttgaatttttggcctaatttgcgctgagatttacccacaccggcgcctctttacgcttccctttttcaaaaagaaaaaactgaaatacaaaagaaaatgtatttcataataataaactgatttgaccaatgttaaggcgagatgattgacaaactgacgctgcaattcaatcggacgcgtcaagcggtgatcaccagggaactgatcgaaatcatttccggcgccgctgccgtt

SEQ ID NO: 52759 - DNA, 628 bp, Heterodera glycines
atgcttaaaggatgtctgtacattatcttagtgctgattgctgttagtttgattcggttgggcaaatgttagaggcgatttaagccttttggcccttaatttctcctgaaaacttagaaattcaacataactctgcctaaaagacatatttctattcgcaaaataaacagaaatgtgaaaaaagatttgttctttcttatttagcttattttatcagtttctttttggtagttgttgagattttgttcggttttcaaaagtgtccttattttaatgcaacaccccaattttgaaaaaaaatcgtaaaacttttttccgtcatcatttcggtttctcactttcagaatcttaatattttcagaatttctacgtacagttaaaaattcagctcgatcggttcatgggaagtggtcaaactcccaaaaaacagggtgtccttattctaatgcaaaacagtgtacaaataaaatatgtgacacgaaaagcaaatgatcaatcaaatcattatttttttcgtcaattcaaataaattgataacaataattgtaaaatgaaaacaaattattaagaaatataatatatgtaagggatgccagtcgtttttagccttgtaaactacacgaataaa

SEQ ID NO: 52760 - DNA, 894 bp, Heterodera glycines
atgtcacaaaaattaactgatcaaggcgcggaaaaaagaaagtcctctggaccacaaaatttgctcaagggagaggcgcaggactatgaggagatattgagttggttataatttctttataatttaagtttttggaaaagctttcaattataaaccaacgggcagattatattgtgtttaacaatattttacactataatatctattttttaaattgtagtggatggatttttctggttgtatgaaacgtgttacttcgatggaacctcttcgagcagttccgcagcatctgtaagttttggaaattgaattgaaagcatgcttttaaaatgttatttaatacatcgaaattttgaaggctgcacttctgccaatcgctccgcaagtggcgccgccgattgacccaccagtggctctgccaatcgctccgcccattgctcctccaatggcaccgcccattgctttgtcaattggcccggtaatcccctaatacaaaaaattcatcagaaagtataaaggaatcaaaaaaaaaccttttggaaattgaattgaaagcatgcttttaaaatgttattaatacatcgaaattttgaaggctgcacttctgccaatcgctccgcaagtggcgccgccgatcgctttgccaattgacccgccacagccgccaaacaatgctgagcgtattgatgagcttatcaaattagcgagtcaaatgcgtaggatggatcggcggattcgtcgcctcgagcgtatcgccagtatcgccatcggcgcacttttgacgacggcgcttggaactgttctttcgttatttaggaaataatctatatattgtgaaatggtgtttatgcattgatttgttctttacttttcctcgctttgtgacaaaataaa

SEQ ID NO: 52761 - DNA, 408 bp, Heterodera glycines
atggctcatcccccgctcaatcactacgtaatgccaacgccaatcccattattcggcgggcgacgatttgcccctcgggcgaacttcccgcggtgcgacgaatgactgaaagtgaaatgaatgaaaaaggggggggggggggggagaccatcgcaggcaaaggcattgttcgtctgtccctctcctcccaatagcccggggattgcatggatttgatggcttcacaggtggcgcagtgccaaagaaaggggccaattcgaaggagggaaattccttcgtcggctcaattttaagaagaaactgaggaaataattattgtcctgaagataaagcataaaactttcagagaaacgcagaggaaatttgaacacaaatgttaggacaaattggaaaagcaattcaaattca

SEQ ID NO: 52762 - DNA, 90 bp, Heterodera glycines
ctttgcacccatacttcccccggaaccggaagactttcgtttccgggaagctccccaccagggcgaataaatccgccggcggatcgctag

SEQ ID NO: 52763 - DNA, 78 bp, Heterodera glycines
cttatcttccccccggtgcccgcacttacagttgcgcccattgccgtgccaatttggcccatcacaatgagctgatct

SEQ ID NO: 52764 - DNA, 1002 bp, Heterodera glycines
atgggagaattgctcggcatttatcagttcaattcccatccttataatcttcgtggagaccccgggctgtactcgttgaaattcccaagccatggccgaatttttgattggaacatagccaaggacaaccgaagggggacacttgcattgcaaattgaagaagtgtcggaatttgcgggagagtctgtctggagtagacgattaagtgatgccgtggagataaaaggattggcattgaaaattagagcactaataagagaaaagagtgaaggcactgatgagaagaaatgcttgggattttacttatggtgcgatccaaaagaaggtcatattttaataaatattaaaaaaaaaaattttgatcaatgataggagggccgaggaacagcgttttttcggcaacatttcgaattgtatcggaaaagatcaaagtggaaaattccattgggaaactttatgataatgttattgaccctgtatatcaatttggattcggaaattttattacttttttagtgagtgagaatttaactttgccttaattggtctaattatggttacttaaggaattaatggacccaagaaatggtttttacgacagagaagaggacaaagtgatattggctattgatgtcattctgaaagatgaacaaatggagaaatttatttccgatccgaacaaatccaatggaacaattttaatggacattgaaaaagtgtcggaatttgcgcgagaaatcattgggagtgaacgcaaaagtgaagctgtgcacatcaaaggattcccatggaaaataagggcagaagtagaaaagaaaaatgacaatgagaaatggttgggcttttaccttttgtgtgccgctccaaaaaaaggtgcaaaattaaagttaattgataataatagtaattaatttgcattgtttagaaaattggagttacgaatgttcttcaacttttcgaattgtgtcgcaaaagagtggcataaaagattctaagagagaa

SEQ ID NO: 52765 - DNA, 895 bp, Heterodera glycines
atggcgaaccaattctccttgttctttttgctcatcattttcaatggaatcatgagttacgtttttgttccggtagcattttttattattttgctaaatatttaatttctatttatataaaaaaatatttttgtgggttttaggtgaagttttagggaaaaaggaatattaattattaattttgaagatagaatactactagtaattttattttaattatataaatcttttttttgaaatattaaaaaaaaatacaaaatttttctattcatttgcatggaagagggagcaaaataatttttttgctcacaaatcaaattccagtagggagggtgctccaaattgctatttgctttgcccttaataatatttgttcagtgacaaatgagcaacttttccattaacgtttaaccactatttttgtgtggtgaaatgtaaaattttcaaaaaatttatttaaatttgatcaaattcatttcttcggtggctatttgacaaagaatatttcttctttagaaatgtgttgttttttaattgaaattgatctgccctttttaaaaatttttagagacgctgctatcaattctacacgactgatgatgatgaaattgttggtgaagaacaaaaatggtcccgcacagattgtcaataccaagttggatttacgttcgtgcagcttaagtctaaatgctattttatgaactgctcaaatggtattttttcgaataaaattttaacaattataatgtatttatttataatttattctaatatacttaatttaaatcaaggagatactaaccagaaaacatatgggtgcgccactgatttcgattcttcctataatgacaaatgctttccctatgaaaaggatggtaatgcttgctggatttga

SEQ ID NO: 52766 - DNA, 1056 bp, Heterodera glycines
atgtgccgaacccttcgcagcgagcgcatccgaacgccgtccgaaatggaaaactcactgatgctgctgcacagttacaatttggtcaaagttttgttgaaaaaaggcgacaattacgcgggcgggcgattgctgtgccgagtggtggccgacatcggccaatttcccgcacgtccgtgggaagggagtgaatgccaatcgcaaaaggttggaccattcagatgccgtgccgattctgaccagtgccgtgatcacgtgcacaaaaggtttctgctgttagtgctgagttcggcggatgattcccccaattttaacaattgaagccggcttcaaaaagtccgccttcaaatttgcttcccaattgatgcagccgacgaaccgacaaaaaattgacgagaaatacaaaaagaaaatcgagctggtgatcaggtggctgggctcgggcggcactgatcagccaataaatgcctttttgtgcacagaaaattcggccaaaatgcgcccgacgttgaggagcacagcgcgccctgtcccttctgcgacggtcccgtgaaagaatttgcgctgagctgcacggaatgtcaggcgaccattccctactgtattttaacggtaaatgctgaatttattcgatttaacgacaattcggaaaaggggcgacacattgtgaagacggactttgccctttgtccgcactgccaattcccgggaagtttcaccgaatttaacaagtcagtgatgagtgaatttatggtaaaaatgaagcaacatcagctcaacatattacgtattaagcatcaattattggtattagtgtagcttcatttaagtgcaatagaatcacaaatattttaaaaagcgtttagtcagaataattcaatgttaattttaataattgtaatttttaggtatttaaattcaagttgcccaatgtgctacgaaacgataaccgagcaaataatgccaagcaaattcgaacaatttatcaaagacaattctttttaaaataatgtgtaaaatcatgcacgcatttattatttaacgacaatagtacaa

SEQ ID NO: 52767 - DNA, 58 bp, Heterodera glycines
tatatatgttatataggttttgagtttcgtttcaaaaaacaaaatctcccggccgaag

SEQ ID NO: 52768 - DNA, 1452 bp, Heterodera glycines
atgaaatccctaaaagtgatgtggattcactgaacgttgctttggatattttaaaatccgtcataaacgaatgggtaaagttgaaaatgattgaaatattttgacataaatacgttcgaaagattaggtctcgaaaaaagtttctttgccaaagtctttttataagttcactcaaattcccgaaatttcgttacaaaacgaaatctttcactttttaagaagaaaataatgaaaattgttttttaatttttttttatataaaaacaaaaatttattcgaaaatgactaattgtaaggtataattattagttttacttgatatattttttggtaagttgatgaaagttttgaaattttacagattactaaagaacacatatatcaatctatcaatgttaaatttagttggttctgggcaagagttaatcattttaaatccatttggcggcgttcttatgaaaagtcccacccaatagcacagttctgctgttaatagagggaaattaattagtaaatgaatcatttgctcattttcagtccaatggcactgctcgtctcgtcgtttcgggctcacattttcttggcacgcgctcttccgactcggacattgacaccatttgcgtggtgccacaaaaagggtcaattggggaggaaaaggctaaattttccggcactttcacctgtgttttggcaattccattggaacagcgaatttgtgaggacaattcgctgtactgccgactttgcaaagtgagcaaaaataattaggagacagaatgaggagaaaatcaatttaatttaaaatataaataaaataaattaaattttcaaattttacattttggcattttttagcaccccaaaataaggcatttgagcaaatttccaagtgcctatctccatttgatacagctgaagctgttcggtgttgagttcgatctttctttggtctctgtgccggacatggaatttctgccggacgaaccgttagaaccgatcgacgtggaattgatgatggaagtgctggccaatcaaaggatgccgtccgaagttatgatcaaatcattagccggtagggaattcaaatggaatagcctaaaaaaaaatcaattattaaatttatatttggaaattattcaccttcaggctatttggccaaccatcaaatgattgggctaattgccgaaagaaacagaccaaagttcagacgttttgtcgtggccctaaaacattgggcaaagagtgaacttttgcgcagaatattttttgaaaatgaatttatttattttagggtctcatatttacggaaacatttttggctttttcaatgggacaattttgtgcattttggcggcaaaagtcattctgtggtacccaaacggatcagtgcaattcttattccaaaagttcatgttgatctacgcgacttggtggctttatccattcatttaa

SEQ ID NO: 52769 - DNA, 804 bp, Heterodera glycines
atgtatttggagcaaaagacgggcagtgagcagcacataatcacagggacgcgacttgctttgccaatgcttctcattttcgtaaagtgccaaactaagcaaatgccgcaatctgtcggcaccaatcaaaaaacgcttcagcaatcattaaaagagaagctgaaacaaattcgggctcaaatttacccgaaaatggggcaagcccatcacagaatttgggcgttgtgcattttgcaacagtttatcaattttattagggaaataaaaaatgaagaagtgatcaaaatgaaagagtataaaatccagcggtgggacggagaagaaaaatgtgccgatgttaatgagcaaatgcgggcattcaatgtgcgaatgaatgaataaatggcttattaattaatatttatatgggtaattagagggcgggagttgagccggtagaacactggaccggaaagccagaagagacgccggttcaagtccggtccgcccattgtttttcaagtacttagtttaccctacctaaaaaatcagaaattttagagattcgagacatttttagggctaaataatttatctgtattgttaataggaacaacactttatgctcatggcttttcaccataaacatttgggcagtttaatgaaaatcgatttgtacgaagtcaaagaattcatcgcggaaaagcgtggggcgcggacccgactgaagaaattaattggggaaaagcaattagcactcattagtgttgagcatggagaaaaaatgagaaacaaagaaggtaatcatttggagcacagaataaa

SEQ ID NO: 52770 - DNA, 526 bp, Heterodera glycines
atgacttcggaacgaataaatcgaaaaatcatctctctaattttatttttatttattattttaatttcgtcaaatttcgttctcagtggaaaaaacaaaagggcaaaagtgagtaaaagtgagaagcaagcgataacagcagaacgaaaatcagtggcaaatgagcaatttaaaggcattcgaaactcagtgaaattgacgcaccaatgcccaaaaaaggaaaaaggcggtgaaaattggccaccggaagaaacggaagaaaatttaggttttataaataaatcagcagaaattagagaataaactatgagcattttaagggtatgaaagaatcgaccagttcaaaaatttcattcgacaattgggcaatgtttcgtctgaaacaaatttgagattgcgagtgaacttggccaaatggaatttgcagagaaaaattgatggaatgttcgcatttgccggggaattgggcgagaaaatgaacgaaaaagaatttttggaagaaatggaaaagcaaaaaagcgaatga

SEQ ID NO: 52771 - DNA, 2120 bp, Heterodera glycines
  unsure (1)..(2120): unsure at all n locations
atgacagtgccgggaaaaagaataagaccatcgggtacacctcagcagttgggcgctcatgtttgggcgccagcatgtttttggctaacattattggtatcatttttaaattttttcttaataattaacttacttcaaaagccaaaaattcttttttattttttgtaaggctaatagcgtttgttaagagcttatcgaatgatgccaagaatgttggatttggatgacaaataaaaaaaagttatagtggaaaaacgtgctggcgcccaactgacaaatgagcgagtccgatactagagaccggcgcgggacggaatcccgcgcgggattttgcgggatcccagtccgcaatggatttgcgggattaatcccgcgggatcccgtcccgcaaaaaattttggattccaatcccgcagcgggatccgcaaatttgaaatttccggtctctatccgataccaccacaattttcaattttaaaaaatattctttgactcttctaaaacaaaaaaatatccatatgctttttctttcttcgtttcccattcgtcaaaccaataaaattctttccttcgtgagtccccttacaaattaatcatttatttcgcctcccccaaatttttttttctttctgatcgatcggctggtcacacatatgtaataaagagtttactttattctttgttcacacattgcttacttaatatattcttttatctttcatggttcttattcctttttttatttgtagtatttggagaaaaatggcttattttgaacggtggcatcgttttcaggcgctaagaattatttattattcttgcatgcccaccaattttataaaactggtatcattcaaaagagcttaacattgggttgcagttttgaatttaaactcattatgcggttttttacaagtcaaatgtaataaatttattttttctcattttaaaaaatgcttctcaaattaacaattagagaaaccaaatattttatttatttcagcaaaccgcaaggcaacataatttttaaaaatggtcccgtcccaaaccacggaatagttgaaatttggaaaaaaaggtattttttatagttttttgacttttttcatccttcttcagcacacattttgctttttttgcttttgtattttaatgttttttttttattagttttctggtttttagcacataaatcccatctctgctgataagttatgtattatcacttacattcatttggggaatctttttcaaattcatagggaagttgatcaatgaatgaatgaatgataataataataataattccaattgcttattcgtcaacaataaatgaaaagccccaatagtttttcggcaactccaagcagttcacggtcatcggttggcgatgaacacgaacggtgtgagtgacacctcttttgagtccgcattttctgttcgttcttgctaaattaggttctgtgtttgttggccatgttccactagaaatgaacgaattccgacttggcaacatttttagccgatcaattgggcatgttaggtgattaataatgtcatttaattttttgattcctcagttttttccagaaaagttacaattttgcgcgactttcacactggacggagtcgggaatgtgccttcattcgctttgattccgaagattttgccaaaaaagcgatgaaaattcgctatgtttacgtaagtttgtctaacctgcagaaatttttttaaataataaaattagcatttttatgacccaattacggaccatcagctgattgtcaattcttacgacgcaaaattggcgaaaagaaaagcggaggagcaaaatttgaagaaaggagcaaaaaggacgaacgatgtgtggcaaagtcctcccaattttgtgcaagtcgacgacatttcgtcaacagttgaaatggcaggaaatgaggacaaagtgccagaaaaggtgggcaaaatgcgaagcaaaaaattcaaaccgatttttcagaaatttttctattcttacatttgaatccattttgggcaaaaaatatacctttttganattttttcaactttttgttcggtttcctggatcgaatttggttggattgggtttcatattcgttga

SEQ ID NO: 52772 - DNA, 504 bp, Heterodera glycines
gaccaaccgacaattggtcgccattgttatgttggcaatttcgaatctgtgcagcactgtggtggtcagttgcataggaccaatttacccgggcgaagctaaacgaagagggtcacttttgaattcacatgcaaaaagctaacaattacggggcttcagaatgtcagaggctcaaatcgggttggtcttcggtttgttccaattggtgatgttcatttctgcacctcttcttggcaaatacgtaaacatttttttttgatttttttgccattttactaattgaaaacaaaattcagatgcatgtgattggctctaaatggatgtgtatcgctggccttcagatagccagtttggctgcaattgcatttgggtacgttgtttcttgaattcagcagaatatctttagttgggggttctgttttgcagttgggttccttcctaatagtcatcattgtttaaaattttgaactgcttcaacttcctaaaccttatccatgctgaatg

SEQ ID NO: 52773 - DNA, 800 bp, Heterodera glycines
atgataccaaaattttcaaattgttgtcaatttctaaaaacttttacaagagctcattttcgggatggtgtgttaagtgaaatatcacaccacttaacacaaatttaatgctttttggtttaaaaattttattaagtatatggcatagtgtttatttttatttttttaatttcagtgacgaaaagtttagtgacgaaagggttcagtgatgaaacatcagcagggagccttacgagttggcatagcacgagttatgtatgattttccattttaatcgtttagatagtttgacttttatcataactagggatggtaaaaatatggactaaaaatcgcgaaatatggacataaaatggtaaaaatctcaaaatatggacataaatttttctaaattgaggggtaaattttcaaaaaaacccgaccaaaaaaccgaaattttccattttttgcttatctttcacataaattaaccaatttttaagaaaatttaaatttaatcaattttttgacaaaattttgctaaaaaatgtctttttcggaaaattttccggtctttggggttaaaacggccaatttagctgatgggggccgttctaataggggtttttttggaaaatgccaaaatatggacataaatcgcaaaatatggaaaaatatggaaaatatggatatagaaatccatcttaaaagcttcaaaccaagctaaaggcccccagcagctaaattagcctttttgagcccaaaacccgaaaaatttttcaaaaaatcattttttcgccaaaatttctcgagaatattga

SEQ ID NO: 52774 - DNA, 137 bp, Heterodera glycines
attttctaagaaaaaataggagttttgggggcgcggcggtgccgataggcgccgccggggaaaaaattggaaattttgatcatttataaacagtttttcactgaaaattagccaatttataggtaaaattttgaaaa

SEQ ID NO: 52775 - DNA, 552 bp, Heterodera glycines
atgagtccagcagtgattagaagaggtacaacagtgattagaagaggtacaacagtaattagaagaggtacaactgtgattagaagaggtacaacagtgattaaaagaggtacaactgtgattagaagaggtacaactgtgattagaagaggtacaacagtgattagaagaggtgtaacagtgattagaagaggtacaacagtaattagaagaggtacaactgtgattagaagaggtacaccagtgattagaagaggtacaactgtgattagaagaggtacaccagtgattagaagaggtacaagtgattaaaatttgaacaaaagtgattagaagaggtacaatcatggtttaaaatgaaataaataagaaaattgtattattggatgtattataaatttatcaaattaaaaaaatccttttacttattaaaaataaagttagaaatttataatatattgtagaatatttattgaaattgaaaggaattaatttctcgaaaattcaaattaaataaaacatttattcatcagaaataatttaaaataatta

SEQ ID NO: 52776 - DNA, 768 bp, Heterodera glycines
atggcaatggttggagttttgaaacgaattcttttttgcgttatgttttgtcttttgggccagtgctacggtaagattatcaatttgttgtaaaaaatacgtgctgggacgttttataaatccgctaatgggttcgaaaataaaaaaaaattaacaaattaaaattcataacatggctcaaactcaaccaaattaatagggagccggaaaatccgacactggaaaatccgacacaagcggtaaatccgacattggaaaaactgacaccaactttaaattttaaaaataattttgattgtttgagttagtaaatatttaaaatatattaaaagttgaatacttaagttctttaaaataaataatttatggctataaaatagatttaaggtaagcatataataatcatattatttcaatgccctttttgatcatctcaaaaaaattgtaaacaatgcggcaaatggaatcagaggaaagggcatgaagcataagaaagtgtacgtggacaaatgacagagatttatgcgaatcgcatcaaccgacaaccctttattatttgccatcaatatcccatcgaatggcacaaccaattagttttttaaatccaattcgaaaacttgataaacttagccagatattaactcaaattacatttaaagttggtgtcgtgtcggattttcctagagccattaatatcccatagtatccttcaaaagctttaagtgttctttattagaaaattattattctttacatttttactaaaga

SEQ ID NO: 52777 - DNA, 1090 bp, Heterodera glycines
atgtccgacatttttggagtcggaattccggtttccgacatttttggagtcggaattccgatgtccgacatttttggagtcggaattccgatgtccgacatttttggagtcggaattccggtttccgacatttttggagtcggaattccgatgtccgacatttttggagtcggaattccgatgtccgacatttttggagtcggaattccgatgtccgacatttttggagtcggaattccgatgtccgacatttttggagtcggaattccgatgtccgacatttttggagtcggaattccgatgtccgacatttttggagtcggaattccgatgtccgacatttttggagtcggaattccgatgtccgacatttttggagtcggaattccaatgtccgacatttttggagtcggaattccgatgtccgacatttttggagtcggaattcagatgtccgacatttttggagtcggaattccgatgtccgacatttttggagtcggaattccgatgtccgacatttttggagtcggaattcagatgtccgacatttttggagtcggaattccgatgtccgacatttttggagtcggaattcagatgtccgacatttttggagtcggaattccgatgtccgacatttttggagtcggaattccgatgtccgacatttttggagtcggaattccgatgtccgacatttttggagtcggaattcagatgtccgacatttttggagtcggaattccgatgtccgacatttttggagtcggaattccgatgtccgacatttttggagtcggaattccgatgtccgacatttttggagtcggaatttcgatgtccgacatttttggagtcggaattccgatgtccgacgatgtgggagattcaattcccatattgcaattgctcggattttccatgtgtgggttagtgccttccttggagcataattactataaaaacggtatcaaaagcaagaatcctacgaaataggtaacgctttcattatgatcttatttcttaattaaatttatgagattcaaaaatcatgcaaatgagggagaagagctaaaatgcaaataaa

SEQ ID NO: 52778 - DNA, 878 bp, Heterodera glycines
gaattccgactccaaaaatgtcggacatcgaaattccgactccaaaaatgtcggacatcggaattccgactccaaaaatgtcggacatcggaattccgactccaaaaatgtcggacatcggaattccgactccaaaaatgtcggacatctgaattccgactccaaaaatgtcggacatcggaattccgactccaaaaatgtcggacatcggaattccgactccaaaaatgtcggacatcggaattccgactccaaaaatgtcggacatctgaattccgactccaaaaatgtcggacatcggaattccgactccaaaaatgtcggacatctgaattccgactccaaaaatgtcggacatcggaattccgactccaaaaatgtcggacatcggaattccgactccaaaaatgtcggacatctgaattccgactccaaaaatgtcggacatcggaattccgactccaaaaatgtcggacattggaattccgactccaaaaatgtcggacatcggaattccgactccaaaaatgtcggacatcggaattccgactccaaaaatgtcggacatcggaattccgactccaaaaatgtcggacatcggaattccgactccaaaaatgtcggacatcggaattccgactccaaaaatgtcggacatcggaattccgactccaaaaatgtcggacatcggaattccgactccaaaaatgtcggacatcggaattccgactccaaaaatgtcggaaaccggaattccgactccaaaaatgtcggacatcggaattccgactccaaaaatgtcggacatcggaattccgactccaaaaatgtcggaaaccggaattccgactccaaaaatgtcggacatcggaattccg

SEQ ID NO: 52779 - DNA, 1612 bp, Heterodera glycines
  unsure (1)..(1612): unsure at all n locations
atgaaggagcagcagcaggcaatgaacaacaaattgaataacggattcaacatcgtcactcgcaaccagcacaagctttataagaagatggcaaaaattgagaagaaccagcaccaactgaagaagaaccagcaccaactgaagaagcagcagcaggaaatgaacaacaaattagacgtcctcatgtccatcaatcagcagcaacaacaggagcagccgcagcagaacgtggtgagttagtggcagggataaatgcattttaaattttctcccattttaagggtccaaatggagcgcgcaacttgtttgatgccttggcaaataagtgcaggaacgtgtgaaagaacatgcgatggacaaagctgtggaactcctcgccaatggattcgatgcacctacacacaaagttctccccaaaaagtgatgctcctataacctgatctattcaatgtgtatgatgctcctatacctgatctattcattgtatatgtttgtatgatgctcctataacctgatctaatcattgtgcatatttgtatatatattgttttacagtataaccgtcacttgcaatgaatattcaactcgttgtataaaatgaaaatgaattggcattctaattcgactcatttaactatgctagatctgtgtcaaaccaaatttctgataacgaaaaacaaacgcttttcaatgaaccgatcaaaactaattctttaacatttgcttagaaaaagcttcaattctagtcggttttacgcgtcccattacattttacgcgtaccatgatactttacccgtaccattatttactcgtcacaaaaacagttttttcaaaccgtcaatcgaaacattggtaattctgtcaatggtacccccccccttttttgagaaaaattatttttgttttcaaaaacatgaaaacacgttttcagggttttcggggtcgctgatcacgaatccggcatttattccgaccaatttcgaacccagacctgaattcgaaccaaagttcgaaaattaaaatttttcgaattttgtatttgtcgaaaccctaggaaacatgctttcatgtcttttgaaaacaaaaaaactttttctcaaaaaaaggngggggggggttaccatcgacagtattaccgaaactttatacctttcgaatctctaattgttcttgattgtatactttgattattanaatatgcaaaagcaaccctaagcacacttaatgatatcattagaaactaaaatttaaaaaaattacaaaaaagaaagcctaagattaagcctaaagcttangcctagtctaagcggtaggggtcagttgcgtctggccagttgcgtctggccgattgcgtctggccagttgcgtctggggccggttgcgtcttggccagttgcgtctggccagttgcgtctggcgccggttgcgtcttggccagttgcgtctggcgccggttgcgtcttggccagttgcgtcttagtgattaaagggccagttgcgtctggccagttgcgtcttagtgattaaagggccagttgcgtcttaaatatttggtaaccaaaaataccttttttgtattttttcgttttgtgaccccaaagaaattatcaa

SEQ ID NO: 52780 - DNA, 455 bp, Heterodera glycines
  unsure (1)..(455): unsure at all n locations
atgancancaaanttagacgtccctcatggtccatcaatcancagcacaaccagggagcagccgcagcagaacgtggtgagttagtggcagggataaatgcattttaaattttctcccattntaagggtccaaatggagcgcgcaatcagatcaaaatgcaggacaaattgcacgtcgacgtggacaatcaggacgaatcggacggtgccatgaccgataactgaacgctggtgatgaaccgagtgacgtgccgcgaggacgctgatctatttgctcattatattgtatcgtgtcgatgacgttgatctatttgctcgttatattgtatataattcaccatttgtcctttcacccccacgcattcatttcggcacttattgtatactgaacacactcccaatttcctcctgattgatatgtatgtattattgtgcttatgtcgacagaaaataaa

SEQ ID NO: 52781 - DNA, 1188 bp, Heterodera glycines
atgcaggacaaatggcacgtcgacgtggacaatcaggacgaatcggacggtgccatgcgcattcagggcaaattggacgtcgtcaatcgcaaccagcacaagctttacaagaagatggcaaaaattgagaagaaccagcaccaactgaagaagcagcagcaggaaatgaacaacaaattagacgtcctcatgtccatcaatcaacagcaacaacaggagcagccgcagcagaacgtggtgagttagtggcagggataaatgcattttaaattttctcccattttaagggtccaaatggagcgcgcaatcagatcaaaatgcaggacaaattgcacgtcgacgtggacaatcaggacgaatcggacggtgccatgcgcattcagggcaaattggacgtcgtcaatcgcaaccagcacaagctttacaagaagatggcaaaaattgagaagaaccagcaccaactgaagaagcagcagcaggaaatgaacaacaaattagacgtcctcatgtccatcaatcaacagcaacaacaggagcagccgcagcagaacgtggtgagttagtggcagggataaatgcattttaaattttctcccattttaagggtccaaatggagcgcgcaatcagatcaaaatgcaggacaaattgcacgtcgacgtggacaatcaggacgaatcggacggtgccatgcgcattcagggcaaattggacgtcgtcaatcgcaaccagcacaagctttacaagaagatggcaaaaattgagaagaaccagcaccaactgaagaagcagcagcaggaaatgaacaacaaattagacgtcctcatgtccatcaatcaacagcaacaacaggagcagccgcagcagaacgtggtgagttagtggcagggataaatgcattttaaattttctcccattttaagggtccaaatggagcgcgcaatcagatcaaaatgcaggacaaattgcacgtcgacgtggacaatcaggacgaatcggacggtgccatgcgcattcagggcaaattggacgtcgtcaatcgcaaccagcacaagctttacaagaagatggcaaaaattgagaagaaccagcaccaactgaagaagcagcagcaggaaatgaacaacaaattagacgtcctcatgtccatcaatcaacagcaacaacaggagcagccgcagcagaacgtg

SEQ ID NO: 52782 - DNA, 761 bp, Heterodera glycines
atggcttggattgctcttttgttgcaatttgagcatctttttggccacaatatacagcactttcgcttgaccttgggcatcgatctcccttttgggagcatgcacacggacattgttgccgtccgttgcccgagagaaggccgtgtataattgaccatgggtaaatacttccctttccaggtcaatgccgacagtgcggattgtttgaccttgacctttttgaatggtcatagcgaatgcaggcttaattgggaattgcaaacgcgcgtattttagcccaccaggcgttttgtcctcgaagatattgtgagatctttcaaggaaaaacctcacttgaccaccaatagcattgctattgattgattacacgaccgacaaggcgatcatcgccaagttcttcgaggacaatgcgtgtgccattgatcagcacttccctatcacttttgttgataaggaggacaacaacgcttccgacctttagttgcagacagtggggaggcatcccagagtctgtgcgtctgtttaatgctgccacttcggactcgatctcatcgatgtccaatgggcgatcgtcaagaggtttgtccgtggacaaatattcccgcacttgacctgtcacattcgccatcatcatttcgttgatctcgtcgcacgtatcaatgtgctgggcgagtatcaaacggttgagcagctccttgtcattgccaaggagttgttgaaagtttggataaacaaagtttatcagctcttccctgctcttt

SEQ ID NO: 52783 - DNA, 1407 bp, Heterodera glycines
ttttttagatcatttcttaggggtatattttctggaaattttttagatcatttcttagggtatattttctgaaattttttagatcaatttttaggggtatattttctgaaattttttagatcatttcttaggggtatattttctgaaattttttagatcatttcttagggtatattttctgaaattttttagatcaatttttaggggtatattttctgaaattttttagatcatttcttaggggtatattttctgaaatttaaggcgattgcggaaggccccatacaatcacaaagtgcttgccacgccatccactgggtgtgcagctattttgctgccgtatgggaagacagcccattccaccttcagactgggcagagatgtgtcactggacaagtttccaagcattccacttgagagcttctttgcccgacggattcgtgcggcacaactcatcatcagaaagacggttaaccgcacaagttacggcctgctttcaaacttctccgttgtttcgtcaattcaccacgatgaaattgaccatcaaccagagattaggccaaggccagcaagcttacttgcaaatgtgccgccaaattgggctcggagagaccggagaacacttctggattcctccgcagttcatcgtaaagagcagggaagagctgataaactttgtttatccaaactttcaacaactccttggcaatgacaaggagctgctcaaccgtttgatactcgcccagcacattgatacgtgcgacgagatcaacgaaatgatgatggcgaatgtgacaggtcaagtgcgggaatatttgtccacggacaaacctcttgacgatcgcccattggacatcgatgagatcgagtccgaagtggcagcattaaacagacgcacagactctgggatgcctccccactgtctgcaactaaaggtcggaagcgttgttgtcctccttatcaacaaaagtgatagggaagtgctgatcaatggcacacgcattgtcctcgaagaacttggcgatgatcgccttgtcggtcgtgtaatcaatcaatagcaatgctattggtggtcaagtgaggtttttccttgaaagatctcacaatatcttcgaggacaaaacgcctggtgggctaaaatacgcgcgtttgcaattcccaattaagcctgcattcgctatgaccattcaaaaaggtcaaggtcaaacaatccgcactgtcggcattgacctggaaagggaagtatttacccatggtcaattatacacggccttctctcgggcaacggacggcaacaatgtccgtgtgcatgctcccaaaagggagatcgatgcccaaggtcaagcgaaagtgctgtatattgtggccaaaaagatgctcaaattgcaacaaaagagcaatccaagc

SEQ ID NO: 52784 - DNA, 1323 bp, Heterodera glycines
atgtctttgtggaaaaacatctcggatgatgacgatttgcttcagtgcgaatggaaagcatttattgtgcgtttcatttccaatttttatttttaattgccatttaattgcatttttaaggacgatgtcgtggttcttctgaacaaggcggaaagcggtgctgaattgttggttgagcagtgttggcaaaagggcggcattttgaacacgaaggatttgcttttctacgccctcctcgggtgcgttcatttgttttttctttaaaatggcacacatttttcccccaactttcagaggcggtctcatcattttggctgccgttctgaccattgtcattgtgctggtggttcgtcgacaaagaaagtctgcttctcatacggttgggggtgatgatgacatggatgacaaacggacgaagaaaatggggagaccagcagcaacaagaattgtggtgcacaattgtcgcatggaacaaccggcgggaaatcagagtcaaatgtcacacgaaggtgatggatgattcgtcgtatacgatgaatatttggagaaatttctcattcaatgcatttcacaggctattcggcaagggcgtctgaattcggcgtggaagtgcctgaatcattgctctcggacagggaggacggcggacgcgggccatttatcaggaaagcgatgatcgcacccaaatttggagtggaagtgccggaatcattgcgctcggacgcgtcaagagatgtgacgatgccgcataaattcggagtggaagtgccggaatcgttgcgctcgaacgggtcggacgacggcagcggacgtttgctactcgttactgcaaccgcacggcctaaatctgcaccaaagaaaccgatgccaacagatgacatgtacgcgccacctaagaaatcggctcgctatggcaccggaaaattgcagcaaaaggaaatttatgctccccttccgccaatttaatgttcagactaggatatgtgtacactgttaagcctaaggcgtgacaaagataggcttatttatgccattattgtgtattgtaacaagcgccattattgttgttgctgcctttctgtttgtttaaagtgtcatttatgttatgataaagcctagtgttgaatgcggtaattattttgttaaccttcccccttacatccctgaagagaaggatcggataaaagataactattatcactcgactttattaattacaattttaacccgtcaaagagagacattcaaaatttatggccctttcaggcaacttaaactttgcagtacctattgctccaattttaagaaaagtcaaaaaataaa

SEQ ID NO: 52785 - DNA, 138 bp, Heterodera glycines
cacatatttaatatttatttggtttaataattgtgctaacatttctctgtctaatgtctctgatcagcgtccaacggtcgccctcgccgattgacgaaccttcggctgtgaacgattctgtgcgttttcgtctcctta

SEQ ID NO: 52786 - DNA, 538 bp, Heterodera glycines
atggtaaccgaaagtacgaaccgaactacaaatgaacagattttttatttatgcattcgataaattataattgtgaatttacaaatgtcaaaaggataaataatgcgaatagacaacaaatttaaataacaaaaattatgatgtgaaatgagatgaaagggagagcaaatggcgaagaaataatcgtcgaatgaattgaatttaagtgtcatcaataatttagtaaaagtttcgctacaaaagggtaaatatttcagtgactgaaagcaaaaaatgaaagtgagaagaaatttaataattaaagtgtttaaaagtgggtaattatggtcatgtccgtttcaaggatttctgagttcgttgtttttctcggccccaattcgttcacaaatttcgtacatatattcggagaaaacggagatcagactcagttcttgttcggattcacctcgcaaaaatttaagcaggaaaacgtgactttcgggaaggatggaatagccgacgatggcggaccatttcagaaaaagggtcctcgtcttaa

SEQ ID NO: 52787 - DNA, 1407 bp, Heterodera glycines
atggtgagtttttcaatttctatgtactttattaagtaaacaataataatcaaacatttttctatgattgcaaagcatttaaaaaatcataggcttgtttattttcattatgttttggaaaaggtcaattaaataaacaatttttttttgtaattttattaattgtataaatcttatgcaattttctataagcaatcgatagtgtaacaaatagagaagataagtgctgatcaaacacacacctttcattatttccggttaaatatgtgttcatattttaacaaaaagcagtcttgaatgtcgtcgaaatttgtggtaattccatggctatagccccgaccaattgcgctggaattttgccatgaggcttattttttgtgctggtttcgaatttacaggcgcccatgcaattggagcgcattaaattttttgtcgatttttcttcaatacccactttaaacgataagcatttcctcgcacaccgctctatttgctctgttttaaacaacaaaattttcccaagcattcatacctactttcttaattgcactgggatcacatctaaacgactatgctaaaaacggggaactaaactgtattaatatttttaacaaattgcagtccttttcgcctaccctgttaagagaaatcttaatttcactaataatttctcaattttcttctataacagattatctcttctatggtgagtttttcaatttctatgtactttattaagtaaacaataattatcaaacatttttctatgattgcaaagcatttaaaaaatcataggcttgtttattttcattatgttttggaaaaggtcaattaaataaacaatttttttttgtaattttattaattgtataaatcttatgcaattttctataagcaatcgatagtaacaaatagagaagataaagtctgatcaagcacacacctttcattatttccggttaaatatgtgttcatattttaacaaaaagcagtcttgaatgtcgtcgaaatttgtggtaattccatggctatagccccgaccaattgcgctggaattttgccatgaggcttattttttgtgctggtttcgaatttacaggcgcccatgcaattggagcgcattaaattttttgtcgatttttcttcaatacccactttaaacgataagcatttcctcgcacaccgctctatttgctctgttttaaacaacaaaattttcccaagcattcatacctactttcttaattgcactgggatcacatctaaacgactatgctaaaaacggggaactaaactgtattaatatttttaacaaattgcagtccttttcgcctaccctgttaagagaaatcttaatttcactaataatttctcaattgtcttctataacagattatctcttctatg

SEQ ID NO: 52788 - DNA, 597 bp, Heterodera glycines
aaattttttgaatattatacaatcgtgctttttgctctctatcaatttattataaaaaaattcacttcccttcgaaattgaaggcagaatgctcatttgaagctacgcaaatataaattaatatttgctataagaactgactatttagtcaacagaaaacaaataaatcataaaattagaacaaaaattgattttattttagaatgcacactgaagatgcataataagctaatatattcgaatttattttgaaataactgttcaacagattattagttgtttctaagaaataatgataggaagcttatctgaaatgtgtgctcacccaggttggaatttgtcatttcctgcaataaatgttttcatataaaggtttaaaaaattcgatcgggtttagaaacgttcaacaaatgcatagataaattttttgaatattatacaatcgtgctttttgctctctatcaatttattataaaaaaattcacttcccttcgaaattgaaggcagaatgctcatttgaagctacgcaaatataaattaatatttgctataagaaccgactatttagtcaacagaaaacaaataaatcataaaatt

SEQ ID NO: 52789 - DNA, 1062 bp, Heterodera glycines
atggcaattacgttttggttgttttataggaaattttctgaatttttcgatgtttaccaattgccaaaagagtccaattttgcattccaacttcggattttacacataaataatgccaaagtgaaattgactcaaatcaaaaaggaaatgaagcaattgcttgacggaaaacattggaccattctcgaattcgaggctctcacttatttggccccgggtttgttatgaaaagtattgacagaggcattttataaatcctttaaaaaaactaggtagggtcaaaggtcgatttattaattgaagttttcgtttttcgggtccccggctttgtctttggctcagaagcgccgcttttcggtttaagttaaaagaccgtgacgaaccctaataaaaaaacgaaaaaatgaaagcaattaaaagcatttttaattttatttaaatttatattattattattttctttcgttctttagaactattagatgagcaatcacttgcaatgaaatatttaccaattatttcaatggggcacaacgaaatatttacagttgttgaggcaggcgtaagaatttattttggaagaatttggaaaatttttttggcattcaaaaggcaagaaaaagactccgttcaaagaagtgattgggcagcgattagcaaaaaattggaaaacaaattaaaaatatttttcggagaacaagtgaaaaaacattcgttgtcattttcccacaaaatttggttagatttggccaaaatgtacaacgaaacttttgcgttgaatgaaaatgaaaaaatggcaataaaaaattttgatttttcaaatttggaattgattgaacaagaaatagtcgaggatcattgccaaaatatggagcaactgatcggtgggaaaaatgaattcagtgaagtcatcaaaggggcgagtaacttggccaaatttcgagtgaagcaattcattacggcgagattaaatcgggaaaatttggacgaagaaaacgaattgatggcgaaattccctgcccttgggcaaatgcttcaatttggtattttaacttaatttca

SEQ ID NO: 52790 - DNA, 274 bp, Heterodera glycines
atgcttgagactgctctgtccggcgccgacttggacaccttcaacacaaatgtgctttattatgtatttagacaaatgttgattgaaaaagtggatgctagacaattagtcaaattaggtgcacaaaatgcgcaattgggacgaaaagtcgccgaattaatgcacgcaaatgccgacggccgattggaaggcgaggcggagaagcgcaaacaaatttgccacttggaacgctttatgaaatggtatgtgaaaaacaatgaaaaacaagacgaaa

SEQ ID NO: 52791 - DNA, 1348 bp, Heterodera glycines
atgattttttcgccttacaacgacgataatcaaatgtatgcagaaataatgctcgcattaagatatgccatgattcgcatttatgggctaaaggaccaaattaaggggtcgcattcggaggatttggaaagagagacaattcgaattttgatagtgttgcgaatcattgaactgtttgacgacagaatgccaaatgtgcgaatgctttgcgttgcgatgtcatttttgaaaatgataatagacaaaagaaaaaccaaacggtaatttatttccccgggaaagcttcataaatttgttcatcaaaattttaaaataaattgcattttaagtctttcgtgggacccatccgccgtggtcgctcagtgcctggagacagaagctgagccaatttttgctgaacagcgattttatatggtgccgtaccatcaggaatatttcaaacagtttttggcgttgtgcaaacgtgatgatgcactgaccacaattattcgggaaggattgtgcaaactcagcctgttgagtcggctgatcggcgacgattcgctctttaggctgtttaatttcacactaattcgcgagaaattaattgaccgaaattgtaagtggaaaatatggaatataaattaattcaacttttaatttatatatatgataattagaggtgccgagaattcattttattgcacgtaacaaaaattaacaggcatttaaatttgatttatgatttatttttaaaaaattgggaaattgcaacaaattctatacttttctctcagttttcaacaacaaaaaatttttgctgtcgcaaaattatcttggattattgatcggtcgaactgacgaagaacgacagaccaacagagtgttggccgatctgatcgtgctaacgaccaattattttgaagtcgacaaattcgggcattcggaagcgatcagaaaaattgtggattttcagtggttgcactgtcgctttttgtacgaatcggtcgttgaaaatgtcgaagagtcgcggaaaatttcgttttttgtcggcatttttataccgggtaaaaaagttaataataataaaaattgggaatttttataaaaaactcaattcatttttcgctgaatttcatgaatttagaattaataaaatttttggaagccaataaaatgttggcaaataactcaaagaaattcactaacgctttgcaagtaacggaaagagaagcggttgcggagatggacacgcaatggttcaactcgaaaaatgagtatgcaaagccaagcgaaattgtccaaaaaatgcattttgatcagctaatgatgctgcgaaatgacgaaaattttacagaaatttacaaag

SEQ ID NO: 52792 - DNA, 412 bp, Heterodera glycines
atgaacgtttatgaggatttgcgaaaagaaggcctccgaaaaatgtattatgggcttcaaaaagtgaaaagcacacctaaagctgataagagaatacacagcaatacgaagccaaatttgaagagaaaaaagaggcggaaaatgtggaagaggaaaaagaaaatgaaaatagagaaaatggaaagaagaaaaatgatgaaaatgctaatgaaaatgatgaaaatgttaatgaaacaagggaatttttaacaggagagattgtgcccccaaaaaatgaccatggaaaagtattagctcctacagaaagttacagtaacaaattatcaggtttctaactgacaatcataattattttttacattaattcagcattatgtaaataaggctgagaattttagtcacgaaaaatcaa

SEQ ID NO: 52793 - DNA, 1529 bp, Heterodera glycines
atgaacatgcttacattgggtggctttataaatgaaatagaggatcgtttcaaaatggttgaaaacatcagcaaaatggaaaatttaagcgattttatgtgcaaagaaaaagcacaaaatttgctagaaaaatgggaagaatttaagaatgaaatggaccaattcaaaaaagtgaataaaaaagaatttgaaaatttggaagaaaaattatacgaaaaactgcgaaatttattgctttttatcgatggagaaggccaactgagcggacttaacgtgaaaaacaattttgcgaaggcaaatttgaaagtacaaattcatttaaaaaatattttgtgggcattaattagcgacaaaaaaatggggaaaaattggcagaaatttgacaatgagacgaagaaaatgaaattgtttaagctccttcaaactcaaatggagcaatttaaaattgaacaatcaatggagaaaatggaaaaaatgatggaacaaaatgaaattggtaattaaaatgtttatttttttaaattaaattaaattttagacaatgaattgttcgagaaaagcgcaattaaagaagacgaacaacaaaaatatttgctcactattttccccttgcattcacaacaaattaccattgtaaatcgcgattatttggtgaagaagttcaacgaaaatgtttgagatttattggattaaaattaattaattcattcattcattcattaattattgcttaatttagtttgacaattacttgacaaatgtattgtatcaaaatatttactacaaaaaggagtttgagcgtaaaagagaagctgcgcttggccaaataaatgcaattgtcgataattgggcatgttaatccgatttaattactcaattacacttaattaattgccacatttgtgccttttccagtccaataagcatgcccgactgctcatttcgggctcacttttgctcgatgtgcacacaattggctcggatgtgaatttgttttgtgtagcgcccggcgaacggctgaaactaagcgattttatgggaagcgataaaaatgggaaatgcatggaaaataaatgcaaaagcgaagaagcggacgatgcaaaatcacttttttgccaaatttgtgaggtaaaaagtgaaacattattatttgtttgggttaaatggcaaaaaataaaaataaataaatgaattaataaatgaataaatgctcgttaatcctattctatatattaaataaagctaaaaacttaatatttttaaacgaattaatatatttaataggataaaagcaccgccaatctgattaaaattgagtcagccagcattttacttattcgatttgccttcgatggcatcgaatttgacatttcattcgttgtcgtcccaaaagtgaaaactttggcacataaaatggatgacaacgaattaaaaagtttattggaacactttgattggtcggtcaacgaacaaaagcatatgctacgcagtctttcgagtaaaaaataaataaaaattttaatttttaa

SEQ ID NO: 52794 - DNA, 1149 bp, Heterodera glycines
atgctgctcgactcgtcacacattcaaatgcaaaagtcatccgtcgccaaatgtttgatggtaaataattaaaaaattgtataaaaaatttaattaatttaatttttattttaaatatggaatttatttttaatattaaatgtttttgctaatattttgtaataataacatattacagccactaaaccaaatcagctcaatgaaaaataaacaatttgaattggacgcactgctgaaaaattcgattccattctctcaaaaagtacaaataaaattaaagaaaaatggcaaattaattcaaatttaaattttgtatttattttttcagtttggcaatttcatcgtcattaattgtgttgccgaagacaaagaagaagccgacgcattttgtgactttgttgaatggcgaatgcgcctccaaatcattttcgacattgacaaaaaggggggaggaggcattgagacgcatttgtacccaaatgtttaccaagaaaattgcattttaacacaaaaattggtgaaattttcctttcggtatgcatggattattccttaaacgaacacttttattatacctattttcccacattgaataattcaaatttgttcagggccaatcactgcaaaatttggcttctcggaatttacggaaaaaacgcaattagcgaaagaattacggcgatggcacaaagtttcgacacgaccattaaaaggcattatttcttgaagaaagttgaaaatggcaacattcgaaagatcgacgactttttcaacacaacgaaaattgaacttaagtcgataatggccaaaaaggaagaactaatttgaattttcaatgctttttgtttttatggacttgtattcttttcctagaaatgctaagctgtttactattttattgtgtataagattattatttttatatgttattatcacatatattgaccaaatttgatataaatattaccaattggcaaccatttggttgatgttgtaattgtttgtgagtaatttatgcttaaatcatttctaggccatatttgtaaaaatctaaaaattgatgttttgtgatttttaaaaacgaaaatatgatgtaaaaaagtgggactatcttatgaagttaccaatattttttttatcggccactaa

SEQ ID NO: 52795 - DNA, 1154 bp, Heterodera glycines
atgcgtcatttccacataaaaatttcagatcgattggtccatgggaagtaggttaagcagcaaaaaaaacaaaattcttggcgctataattttggaacagactgtaagggcaaaatttattttgggcagaaattcaaaaatagggatttctaaggttcgaataggagcgttaaaaagaagaattagtcgtgacgctgacgtagtgcgacatttgcggaccactatttcccgattgaactgtcaaaataaagaaaataatttttttttaattttcacttaattaaatactcccaaaattgaaattagtgaaggtaagctgatgcaaggcgatctgtttcaattggagaattttattttatcttagaagtcccaaaacaagtgtaaatttttttcttgcttctcctctacacgtttagtgaaattagcgaaaaaatttgctattttaatacatataaaagtcagttcaggattttataccaaggaaaattttttcgtgtttcacttccatgctttggttaaccgagagcttaaaatttttatatggcataccaaacaattaaattaacaaacaaaaactaaaaatagttctatctttttcccaaaaatagcccatatttgctgttctaaaaccatcacaaaaaactaatttggtcactcaatttttataaatttattttttttttgttttttagacagttcaacccataaataatggtccgcaaatgtcggctaaccgatcaaacagtcaaatcactgcgtgcggtcgattatcctcttgccactgacccctgggcttttcctcggctttttctcctcgctgtgccgctttctgttccggtggctcggtttgcgtctccatcgttcgcctccccccaaaagtgccgtcctcgtcttgcggctgttccggcaccgtctgttttggtcgaaccttctcatagtccacccattgcatgtcccttatatcaagaaggcactattagtcgaccaatataagatgctcaccacccgcccttgctgatgtccaaatcgatcgaaatgccgcgcaattctgccattttccctcgcgcatttatcgccgaaatgtccaattttggtaatctcactttcaaaagcattgccttttttcgtccgcagctaataacgaaactaataaa

SEQ ID NO: 52796 - DNA, 198 bp, Heterodera glycines
atgcaatgggtggactatgagaaggttcgaccaaaacagacggtgccggaacagccgcaagacgaggacggcacttttggggggaggcgaacgatggagacgcaaaccgagccaccggaacagaaagcggcacagcgaggagaaaaagccgaggaaaagcccaggggtcagtggcaagaggataatcgaccgcacgca

SEQ ID NO: 52797 - DNA, 272 bp, Heterodera glycines
atggattttacgacaatcgaagttaattatgtgagaaaaatgccatacttttttccattaatcatttttttctaatttcagaaatcgccgttttttgccctccctttttaccactctgagcctggagtaaaaaaggaatcctgggccactttccatgtcgaatttttcgacccaccggaaaatgagtttaacatttctcttctgcacgactcacccgaacacagcgaaaaaggcaagacaaaactttgaaaagctgagcaattaatggatta

SEQ ID NO: 52798 - DNA, 1273 bp, Heterodera glycines
  unsure (1)..(1273): unsure at all n locations
atgggaatgaatgtgaagccgaaggataagcgagtcgacgtcattttttggaactgttttgtgagaaaaatataaaatgttttaaatatttataataaggaaacgatttttagaaaaaacttccgggaaacaaagacagttgcgatgagacggaaacgaaaagttacaaaaatgaaaatcttggcaaagcagccgaatttcacatcgaagtgctaaacgacagtttttctgtgataatcaatggggatcagaagaagcctttggagtacaacagcacattgccagtttgggcaacaaactttttcagggtgagaaatgagaaaaacggagttttacgaaatcgccaggtttaaagactcggaatagacccggaacccgtactgacaaatgaacattttggccggtntagagtntaaaaatgaagtgaaattcatattaattttttagaagaaatatgattttatatgagaaaaatagagaaattacattaggaaaatattgattattttatttaaagatttttaaaatttgctttctttgaccaataatgaggctcgaatttttaattatttaataattatctaaacaaatttattttgaaatttttttcaaatgctcgaacgacccattctttgcttaatgataattttcgtaaatttaaataaaaataattgttgtttaatttgcattaaattttatttattttttataaaggttgaaggaaatgtcagactgttggggaggccactttggaaagaatgggaagtcgtaagtgcacaataattgcaaaattaaatatattttgtcattttcattcaattttaagtatggagacgaaaaaggctactttcacaacttttcaattccattgaaaactttgctgaattacggagaccaaatcattctgaggacactgatcattggcagcgagacggaattcccgcaaccgtttaacattacgctgttgcacgaagcggcggaatggaacgaaaaaagtcagtctatggcacaaaaatggaccaaagaatggcattagcggaattgggtcgattttgttaagttggcgatgtgattttgcaaatggcattcacattcggagatgatagtagcccgggcaaagcaaatcaattcatctgccgaaatttcatacacgaggtaacaaatttatgttggcaaatggtggccaaaaaattgttaattaaaatttgattaattattatttatatatttatttcggtcgaatgattgagtaccgatgatgaaaggctgttta

SEQ ID NO: 52799 - DNA, 811 bp, Heterodera glycines
  unsure (1)..(811): unsure at all n locations
atgggaagacttgacaaaaatacccaaccgattgaacaaatttggccaagagttcacgatgaagatcacggccaacacggnatcggtttgacattgagattgaaactctggccactatggagaaaatcgaatgcaaatatccgattttggacaatgtgcaaattccaccgtgggcaattgacaacattcgggtaaaaatattcacgggctcctaattgaaaatgaatatttttgtaatgatgtagcttttgggaaattttgtgctttttgaaatcgtccaaaaaatacatccctttttaatcaaaatctgtttttaaaaatcgcattacaaattccaaaattattcccggcaacgcctttcggcacctctggaccattccttcccagaaatttttcaaaaaaatacagctatggttgaaaaaaatttaacaacgttttttattgctcacgattacgtcagtaattgaattttaaaaataaagtttatgtagccttaattattgtaatacaaaggtcaaaattgtatatgaacctcgttctggattagtaatactagtccccccccccctcccgccccaaataaactagcttatcagtgaagaaaatcaaagactctaaatcttgacgaccataatcgtcgagtgtcttcaatatttttagctttttgtgttctaatcctttatgtgtttttaataattaaaaattgcttctttaacagtttgatggcgatgagttcagagtgattgacttcaacatatcccatccatcccccaaggctttaattacgaatcggatcaattacatcgcacaa

SEQ ID NO: 52800 - DNA, 654 bp, Heterodera glycines
ggtcgtgattgtcaaaaacggcaaataattgcccaggggcaacaacggtgcattttcttttgtttaaaatccaaatcattttcgcctcaaaaatcgagaccgaaacgccgtcctcccctccccccccgtaggtattcgttctccaacgacccaacggcacacgccgaagtgacggctcttcggggggcaagcaaagtgttggacagcttcgacctgagcgggtgcataccgtacacgagctcgttacccatcgtactcgtaaaagtgattactcgtacccttttcgctaatttaaatttaactttctcttccttcaccctataattgcttatccattttccaaggtcccatgtgtttgggcgctgttttgtggtcacggattagcaatgttttctatgctgctgcgcctaccgatgtttttccctcttttttattttgaatttttcggaatgttttaggccgcttcggtcggtttcgatgatcagaatttccacgaatttgtctctaatccgaaggttaattatttttatttgcatattttgcaattaaaaaattcagaaatacgaaaaactgatggcattggaacatttgccagtcgaagggcatatgaaagtgttcaaaatgtgggaacagagggacgagaagagaatgtac

SEQ ID NO: 52801 - DNA, 244 bp, Heterodera glycines
aatcgcaatggttcgtatcggtcggttgaagcgcgaattggagaacgcacaacagtcaggcgacgatcagctgctgttccgctgttgtgatgcgttgatggaccgtatgccggaccaattgcagttggactcggatgagtgtactgtggcattcgatctcgacaaatttgacgagggcgccgtgcagactttggagcaacttctgctgatcgatccgctgactcctctcaatggcaatagctga

SEQ ID NO: 52802 - DNA, 1293 bp, Heterodera glycines
caggcaacaacagtgcaaaaaacgttcactcaacaacaacaacaacaacaacaaccatcacaactccaacaacagcaacaattcaaatttgcacagcaacaacggcacatggatttgatggcacaacaacagcaaggtcggcaacttcatgccgcaatcgctttacaacaacatccagttgctgctcaagttgttacagatggttgtgtttttgttggtggtcagcaacttgccaatgctgcaactgttgctgcttctgcatcagatagccgtccgacaacaatgcttcccgtatcgacggcggcggcatttgcacaacaacaatttattggcgcaaatggattgcaacatcaacaacaactacagcaagattttcaggcagctacagtataccagcatcatcaacaacagtatcagcagcagcaaatgaaatatcatagtcagcatgctgaagcagtacaacagcaacaacaacaacatcagtatggacgcgagggagctgttgcggctcaagcagcaccggtatgtttagagatcggctcgatcaaatttttatcataaaatgtctcccaaaaaataacggaatgccaaattcaaataaatgccattttttattttaaagcagcaaatggcggtagacaaagccgaacaacaacaccaacggcacctgcaaaggcacatgccaacgatggtgggaccaccaaagagtgcgccagccatttcaacaatgccgccccatcagccgcacttttggcacaatatgccaccaccatcgcagcacagcgagtcagttcagttccacattcattggtcccgcgggttttcaaaaaaaggcaaaatccccccccccttcgaaatcaaaatgccagagtataaaaaaaaacttagaaaatttccaagttggatttccaagaccgcaaaattaaaaaaaaactcacagttccttattaatagtacagtaatcattcaaggatgggcaaatttctatgctctcctccaccatatcctgctgctgctggtggtggcgttgtcctccctctgcatgcatacggtggtgcaccatacagtatgcttcatcatgccaacgccgctggtggtgccgccgaaagtggagggaaagaattgttgtttttgcaaaactctccggcgatggcaccgccgctgccgattacggtgaaattagaagaagacggcggaggagacggtcaacaacagaagcaacagcaaaatgatgaaaaagtgccgcaaaagaaacaacagcaacaaattggcaaatgccaaccgccgaaaagg

SEQ ID NO: 52803 - DNA, 1719 bp, Heterodera glycines
atggacactctctccacaagacttgaccaagttgtagagaaagttgaatctctggaaagccaagtggagaattgggatgaccctaatgctgataaattatcacaaaacgggaatgccactgtggtgctaaggggccgcgtggggttacttgaagaagaggacgatgaagacgaatttctaaacgttttgacaactgtggacccatttgctagtcaacttccggcatgcagggatgaaaatcttacctctttcgataactgggcccaaaaatttagagaccttttggattatgcgggcacaacatggtcagaaaaagaaaaattaggccgactcaaattttctcttgaagggcaaatcagaaagctctttgataagcttccggacaataaaaaggacactgtagataaggcattaaatgccattagggacaaattagattcccctgaacgccgggaaatgtcaaaaagggcactggtgacatgcaaacaacgagaaaccgaaacagtccgggaatttttgtcaagactttcgccattggttactactgtgtgtgccggtcaaagtgaggcacaaatacagtcacgactaagggatgaatttttggaaagggtcaagcccaatttaacctttcttatccgactgactggtgtcactaagaaccaagattttgaggctgtgttttcccaggcacaagaattagaacttcttttgactaataccaatgaaaataacgttttggacccgctcaaattcactgtccaagctataacccaatctccggtaaaccaatcgggttatcgtactaaccaattttcttcctccaatgtgaattcatgggcacccgctggacaaagatatacgaataaccgtcaggttaatcagcaaacacaaaataatcaaccaaatggttcaggaagaggctattttcggggtaaccacggtgaatccaacaggcctcaatttcaaagaaatagggctaatcaataccggtcgaaccgaggccgaggggaccgcaattggactggccgtccaaaatgccatcactgcggtagattgggacatgttgcgtacaactgtagggacaggcgctcacaatttcaaatgaatggtcccaataacaactcaaatagacctacctattacaccccggttaacatggtacagcctaattatccattccaagctaatgatgtcgtacctcagacatcttccaatcctcaaaacgtgactgttgatttaagtgccttagctgatcaactaattcaaaggatgaatgtacgagacggtctgcctcctgatcaaccaatttcatcgaatatgcagcacaatgcctgcaacgctctaatgccggaagaacatcttaatgatcaatcttcaacttctgaatgggcttctaatgaggttgactcttcagttcctcctctaaaagtttcaaattggggatttcctactactggaccacaattaagccgcatcctaatgctaacattgacactcatagcctcaatgctaattagtactaacgctgatcaattgttggttcctgaacatccactaatctgtcaaaccgcttttcatgctgccacttggggtcttcccaaattcaatggatgctcctctattgcagttaatctatctcacactcctaaatcacaacgaaagcgaatctatacccctattttttttgaatcagaactgaagaatgggcatgtaagatag

SEQ ID NO: 52804 - DNA, 1551 bp, Heterodera glycines
cccagctattggaacttttcaaagtttttgtggttggcacgaatgaaacatctgccgcatcggctgatttcttgtgcccatgcacttcaaatcctgaactcattgttcccttggatcgtcgtgtatattcagaccttttggttggtactgtcgatgcggcacaggggaaggaattcgactacgtgatagtatctggtaagacaattttgtgacttattaaggcacattccatttataaacaaatttaaagagacatatattttttttaaatctagtcacaaccgattattaaaaattttgatcctaaattttttacttaattatgtgtctcattaaatgctgagccacattaatgtgtccattaatgtgagccacattaatgtgtccattaaagtgagctactttaatgtgtccactaacatgatcaaaatcatttgaataccctattaaagttggccgcaataacacctctacgcttggttttctggccgattcatatcatccgacacttcgaatgtggaagaatggtcgagttaatgtgatgttttcgcttcaccgaaaagcactgattgttctgtgtgacgcagcgtcattccttgcggttagtctgcatgcttttaaaaggaacttattaatcacgagcccgagtcacaagccctagcattcaattggaaccgcttgttagacacatatatgttaaatatacattaaaggacacattattcattctcagcatttcggggcagtattaggaaaaaggatagtgtgtctccttatatgattattatcataaatctgtctcacaaatcctgagtaacaaatgtcgttgcggtttagaattacaatgaaaatgtgtctcataatttgttccatgaattcttgaaagattgttggaatcattatgtttagaatcctctgctgacgacaaatactgctcctgaaggaactgaggccgttgaattcgagtcaggcatcgaagctggtcgctttatgccctacaccaaacaaagcttcatggttttcttgaaagaagcaagacgtgaagggctcattttcgatgccaaggacctcgagctctaagacagagctgaatatcactaatgtatatatacgttcccaaaaaattaaatcccacccccactcatatttttctcttttttatgtataagacacaatagtgtcttttttaaactcacccactcatatatgtttctcttttttatgcacaagacacatttatgtcctttttattttaacggcttaaatgacatttactcaagaaacacatcagtttatttcatcacaaaaacaaaaaacacttgatcagaaggaatattttagaatgaccgatccgattacctattggggacccatcctcgacccgcgtagagcttatgcatggttgcatcaaaatcaatgtcatcttccaattgcctaagaaagagataacttgaatacgaacgcagcattttgctagtggagtcttgataacgattagcgcaaactttccttaatgaaatacgcgttatttgtataaatttgctaaataaa

SEQ ID NO: 52805 - DNA, 2164 bp, Heterodera glycines
atgtgtttaaacattgtaaaaacaccattgatgagagtttgcaaatttgataggccaaccacgccgaatgggcaccaaatttcgccaattcccgaggagaacgacgagttagaccaacttgtgtctgcactggtcgacaaccacaaccagcaacagaagcaaggcacagctgccacaaccgcctacgaccagagggcggtgaaaagtttggtcacacagctgcgcgatgtcatcgcccagtgggactgggcccaagcacggcacagacacgtggccaaaattgtaaaactatgcaatttgaaaaaaaatgaaaaatttgcgtggtagaagcaagggtgtagccagacccttggcttcgggaaggggggggggctgaattaaaaattcgattttaggggtgtattttttaggaatctcgagttttgagaggtgtatttttacaggattttctagccgtttttcgctaaaaaaaattattttttttgagtattttgaacgccaaaatgacgaattgaatgccaaatgggagcagctgaacgcggaggtggccaaattcaatgaaacaaaagcggacgaatgggcacagattgccaaagtgcgtaccgcactgcgtgcggagcgcgagaagcgactgggcaaaaaggaggcggaccgaatcatccaactggaaaaggaggtgaacagggaggcaattgggacaacaatttggagccggtttttccaaaaaccaacattttttcttggtgctcaaaaaatttacaatttttgcttggatttgacttatttttttacaaaaattttcaacttttacccccccccccccaatttcagttggccgatttcaaggccaaagatgcgcgtgcttctcggttggcctccgaattgcgcacccaaaaccgcgagttgcaaggcgttgttcgggtgcgtgagcagtcgtacaccgacaacatgatgaggctcaaacggctggagagtcagctcgtttctgctgaggtttgtttgcacctgttttttttgtcagggtttattggtcttacgaaaccctgagaaatccaataaattaagcgctggggtgaaaaagcaggaattgttagcggttttgcgccaagaattttttgcaattttcgggtcaaatattcaacaaaaaaaaaaaagcgaacaattgagtccggcggtgcctatgggcgccccctccccgagtgcaccgcaaaaattcgcgctgaaattacgccgggacaaacttccgctgccgaaatatttccggcgacgaaaattagtcctgttccagaattcccccctcactttccgtcctgtctgcggttttactttgaatgtattatttatttgtttgtttgttttaagcaagaaaactccaggctgcgcactcggcttaaactgatccgacaggaaccggcggcaacaaaagtgccgcaacatccgaaccaccaccagcagcaaaaacaatcacaacagcagctgccacagcaacaacatcgtcatcattcggaacaacaacgcggtgtcactttctctacggctgcccctgctgtgtttccgccatcaagttcaagcagttcaacaacaacagcaacaaccgtctcagctggtcgacagcagcagcagcaacatgtgcgacatcagcaagttggtgtttgaaaaatggaaatttgaatcttaccaaaaacccgaaggaaccaacaagcaattttcactgggatagcaacgcttgtggctgtgttatggcatcgcatgggacagctgctgagaatgttcaggtgatggtggtggtgtggtggtcaacaaattgaacgcgttcactccctcccactcccaaaattttatccatttttaatcgacagattgactatttgcatgacgatcgtgtttacgaagtgcgaatgccccgtgggcattcaatgcgttacatgttgaccggccaccttgacctgcgctgggccaacggcgatcggacactgatccgtccggatggcgaacgtcgcgagctgtacagcccggaaaagccgaactttggcattgaaatgtaatggcagtaaattaaaaacagcgtaaattttttaattttcagtttcctgccctcgggggtcgcctatcgcctaaacgctcagtcgcaatggcagcgcgaggaacttttaaaatgcgttaa

SEQ ID NO: 52806 - DNA, 164 bp, Heterodera glycines
atggatgaggagcaatcaaacaaggaacggaatgccaactttggacaaatggaattagtgccaaaaaaggcggcattacagcagcaaaaggagccaatcgaggcgatgatcatcaaacacagaaccatggcggacgaagaggaggccggcacggggatggacga

SEQ ID NO: 52807 - DNA, 590 bp, Heterodera glycines
accatttacgtcaatgatgcactttttgacgagttcatcgagctgttcagtcgacactgcattcgttcaccagctacggttaaggaagcgactgagagcggttcgctgatacggcctttccttccctcaatctctcagttattttttccagtttacatgtggcttttggccgattatttgcaatatctgttgcccgtcgatgaacagaagctgaacttgctgaagaactctacctggatttctgctcctttctcctctttaccaacgtcggcagtgacgagtccgcgcagattgctgcgccccgaagtgttggcccaatgtgccccacttgagcacgtttctcttcggtcgggcgccttcaaaacgctttacccgcgactcctccaatttgttggcacaatgttaagccatgtcgcttctctgtcaagtttgacacttcaaattcatcatttataaaatcgtttcaaagaacaataaaattttgaaaggcatggcatttgttttagattggccaagtgttgcccagttccaagtccttcgcattattctcgaccattacctcacttttttgttctctgaaacggaagacg

SEQ ID NO: 52808 - DNA, 1043 bp, Heterodera glycines
atgacacggaggtgcaccacatcaatggcgagggcaaggtggcctcatttatccgccaccaaaaaataaaaagaaaaattacaataaatttcagaaattcgggggttgtctacagcgagatgcaggcgcgagactccgaaatggactcgatgttggacaaaaaaagaaaagagctgttctaccccgcgggaagcagctacagagcgatgacggggcggttggtttcgactcaaaaatcaaaaaaataaaataaaaaacaaaaaagaaaaattcgtagcaaaaagaatagaggatgacttcgaaacacactcaaccataaaaaattccggcaatcatcaagaatttgtgtctcgacgaaaaaaaaatatggcaggcgtttttttctaggcttaaaaaagcgctgattacgaatttgattataaggttttgttcaaaatatgagaaatttgaaggtttttgaacctttaagttcagcgaaatctgttaaaaaataacaaaaattttcaaaaacaatccttttaggcaccctctctgacatccgcgaactgtgctcgctggaacgggtgcgaaactttcacaagaagaaaaaagacgggaaacgggaacgggattcccgggttttcccgcggcattcccgttcccgtccaactctagttttttgataggtcaatgaggctagattttcaaaatgaggctttttgtggtttttgagaaaacccgcaaaataaagaattttttaatgaaaaacggaatggaaaatcatcaaaataaaattttgaagcacaaatttgaaaaaaaagtgtcagattttggtttcgttttagagcttttgcttagtttgaaaaattagatttgtcttgcaattgccgattatcccatggtgagtgttctttgcttacccgcgcctcccatggcatttcacgagtgtccccacaaaatccgaaaccgttgaatatcctatcaaatgtagtaggccccaaaacattttatttttcagtctcaaaaatgctatttggacgcttaaaatgccacaggacgaatga

SEQ ID NO: 52809 - DNA, 96 bp, Heterodera glycines
atggccaacgcaatgtacgcggcacgggcgcgcgcggccaaggcggaaaagcgtcaagcgcagctgcgcaaggcggccagagcaagggcaggaaac

SEQ ID NO: 52810 - DNA, 633 bp, Heterodera glycines
ggtgcagcggatggtggcagcccatcgtggtacgcgtgattcggctcagtcggcccaggcaaattgaacagcgctcggctcgtcgcgatttggcggtctgtggggaaaacaattggggaaaattattttcggtttaaaatttttttttaatctaaacttacgtttcctgcccttgctctggccgccttgcgcagctgcgcttgacgcttttccgccttggccgcgcgcgcccgtgccgcgtacattgcgttggccattcgctgaaaaatggggggggggggcaattagcacaatgaaaatgcacataacaaaacaattaattacctaaataaactgacgatttaagtggcggtggaggaggacgaataattaagtggatggaatgaatgaacggaatgaacgtggataagcaaaatgtgtgggccttaaatagcaaattttttagtcggaagagtcaaatttttcggataaattcatatataaaaggcacaaaaaattcatttggttgccattattttcatcattcattaattatcggcaattcatcttcatcaatcatcccttctctgtgtacaacgaaaacgacgacaattgagcaatgtcggaccatccaaatgttgcgctggccgacct

SEQ ID NO: 52811 - DNA, 264 bp, Heterodera glycines
taattaaatccattccttcgggggaccgtgccgggtgccgcggggtaagcagtgctggttcgtttcatcacggcaccgaaccttttggctagtcagcaatcgttgcttaacttgccagatcggacgggtgcgcatgattccactgttccaagcaccccaccaaaagcaaaacgatataaccaaaatataaggaaaaattttttctccatcttcctttttgatactagagcatcagagtgctaaaattaagttgtaaataaaatt

SEQ ID NO: 52812 - DNA, 663 bp, Heterodera glycines
atgtctttgaccgcacagaactcttccgtgccttccagcacttcggtggcggagaggcgcgaacgtcggcggcagaaaatccttcagaatgcggaggatcgaatctcgaaaattttgacagcgcatggtggcgaaagaagacaggcgccaacgattgatggaatgtacggggaagaaagggcggacagtggtggcgaaactgcaccggtggaactgacgagcaacgaggggtcgtcagtgatggatgacggtgacgtggtacggtattttgaaccgtaccgacacaaacaactaccgtacccaattcaccatcattgagtacgatagttggtttatatcggtgcatatcataggaccaatgagcgaacactgccttaaagatgtccaatattttctcttttcagcagtgccgcctggtcaattgccgcgagcgtttcgactgccaccgtttgtccgccgccgcttcgtttggcgttttgttgcgtttgctcgtccactttgacttggtccgatccgttccattgacttttctccccgcgttcatcgcttgccaatttttcctgcgcttccgtttttcaaatggcgtcacactcaatgcccaggattcgctgatgacaaattttttgctcgtctgtggcctcaatgaacgcagtgtccgtttgg

SEQ ID NO: 52813 - DNA, 522 bp, Heterodera glycines
atgttgaaggcaaagcctcatgttctgttcgtccaatgtcggtttttgcgaatgatgaaaagcattcctaaggacagcaaattcactgccaaatttggtgacacttccatggtgggcttttctaccgtcttttttcaatggtcgatggttggaattgtagttcgattttggcgaggttcggacgagtctgctgaggaaggggcaagcgccggaagagaagtgcaagcagttgttcccgacggaccccgacgcaccgatccaattgggcttcaacccattccaacgggccgaccgaaagtgtctgttgtgcgagctgggcatccaattggactacaaaaacggacggctgctccaacagttcgtctccaacttcagcgggcgcgtgtacgaccagcacgtgaccgggctgtgcaaaaaacagtaccagactctgttggccaccatcgcgaccagtcgcaaggctggctacatgccggtgctggtgaaggacgccaaatatttgcgagacccgagactgtttga

SEQ ID NO: 52814 - DNA, 89 bp, Heterodera glycines
atgcgaaaagcgaaatgcgaaacgccaaaaaatgcgaataatgcgaaaggcgaaatgcgaaaagcgaaacctcggcccatccctggagt

SEQ ID NO: 52815 - DNA, 621 bp, Heterodera glycines
atgaaatttgttctcctcccattgtctctcttctgctgcttcgcttttccgtgcatttgctacggtaattttaaaactttaaataattaaaatataaatttatttcacagggattcattgcaaagttggaatgtacgacacattgggcaatgctgcgattgttatttctgaatgctggatggaccagcacttctgttcggccatcggttgcgcaatcggtgggccacaattacttaatcaacataatttgattatataattgccacgttttaggcactgatcagatcacagttgtgtgggcttgtgagcagcaaaatgaccccaaagtgctcgtcaaaagaacatcattcaaaaactatacgtgctttgcaaagattggccagaagggtgccaacatgtccaatgaagagtttgctttccccgagttggccgaattggtcaaatgaatggtaattagccaaaaaaatagttattaaattaaaattagaaaatttccagttttatcgacagaaagtgcgaatgattgtccaacggatgtttagtcattttctaaccgtcttaaaatttatgatccaaaaaaatttgatcgaattcttctaatgtattgtatttgatagaata

SEQ ID NO: 52816 - DNA, 151 bp, Heterodera glycines
tacacaaaatgccccaggcgatcccctgctgaccacccttatgctgcgagcgcgcgaccggcacagcatgcaccggctccgctggctggacgaatgcgttcggatgcacgactttttgcgccggaacatttccgccaccgttgggggacag

SEQ ID NO: 52817 - DNA, 1147 bp, Heterodera glycines
atggtactgttggtcagtgcactgtacgccgtctgttggctgccccaaaatttgttgatgaacatttttgttacgtacgacccgtccattctctctcatccgtacattctgtacatttggtgagttttcaaagatcattacagtactctgttctattgtcacctaatatttactggcatacagtatataagtaccgtattcaatttttttttgttttcaggtggggcagccattcccttgcaatgttccattctgcggtcaacccattcgtgtactatgtgacaaatcggcgcattcacgcagcagtgaaggtaccatattcacattctgtacagtacctcatataattatgatcgatactgtactaaaaattacacaactttttatctgtactgtgatacaaaattaaaaaaaaaatctaaggcactaacttggtactgtatgcggtacggtcggtactcgaattctttctcccattgaattatatgatagcaaattaagtctaattatttcctcaaatttacagcacttgctccgctggatgccatgctttcggaatgcgcgaaatttggcactggccgagtttgatgtgaagaagcggcttgcctcctccttccgctacacatccgcggatcaccaacagcagcgccggacaacactgtacaagaccgtatcgaacagtttacattaggcgcaattttgatggcattttgttcaaatgtgatcactgatcagccccggggtatatgtagacaaaaacttaatttatctgattttttgctcataaaatattgttttttcgttttgtgttcgactaattttaggtgtactttagaagtggtcccgttaaaaaaacgcccaaaacgtgttccaatcaatctctaaggacctctaatcatcgtaaaaaatattgccgaggtgcggaaaaatcaaaaaaccggtttttgagccggtttaaatcacgaaaaattgcaccaaaaatcagccaaaaacccatttaaattaaaaatttccaaacaaatttggtatcattcgaaagctcttgacgagctaagtctaaaaatttgggatggagttaagacgaggccacctgagcactggggcaactgagtgtcccaatgaaaatggacacttaagtaacaaagaa

SEQ ID NO: 52818 - DNA, 938 bp, Heterodera glycines
atgacgacggcattgttgccaaggtcactgtcctcgttgagcgtgttgacgacggcgacatcagcagcagcgaatgccaacaacaacaggcatggagatgatggtggcggtggtgccaacaatggacgcgccggtggggacgattccgccgccgcttcggctgcaatagctgcggctgaactgctcgcgccgccttcacctttggcaccgccaactgttgcgtcagaaaaggacgacgagaaagtaatcaaatgatgatggggatgggattaatccgaaattttttttcaaaatttagaacatcaatggcaaaaccgccgactttgtggtgcctcccccgtcgaccaacgatggaagggaagacgacggagctacagcaacaatgccgccattcaaaccatcgccagttgccgaaggggccgtgacggttgccgcttcgtctccggccacctccgtggactcgggcgttgcgtcgccgggcgctgccgctgactatttgctgttgaacgggtcgtcgtcgtcactgcgcgccaaggagtcgactgcggccgacaagtcggagcagtacaacaacaccaacaacagcgcgaacagtccatgctgggccactgtgccacgcacgcggcgccgcattttcaactttggcacaatcatcgccggcgacaccaacagcacgggcagcaacgagtctccgctgattgacgcgctgacactgtcctcgaccatgtccagcagcagcagcatttgcacgacaactacgggcgcatcaacgaaaccacaaaaaacgggacaacattcgtcgacgtcatcgatggcaccgatgccgtcgttgacactgcagaggccaccattgaaaaaggtgggtgatgtcggtttcagttagatcgccatttttggttttaaatttcaattaaaaaactaatgaccctactaataaa

SEQ ID NO: 52819 - DNA, 324 bp, Heterodera glycines
atgcacaacggcgaccgcttggcggtggcgctgttcaacgacgccgcagcggcagccattttcagcgaccggtccaactcggcacgcaacagttcaacccgttggatgcgctccacgatggcaccaccgccaatggcactttgggaagaggatgacgaagaggtggtggacgaagaggacatgatcattttgagaataagtcaaaggttatatgggggaatgaatatgtgttgtacttctaatttatatgctaacctgaaaatggagaaaacattgaaaatggcattttttggaaaattggggaaatgaaatttaacaatggca

SEQ ID NO: 52820 - DNA, 1320 bp, Heterodera glycines
  unsure (1)..(1320): unsure at all n locations
atgaacaatcgcacatttgttctgcctgatttatccatcaattatgaaaaaaagcgcattttatggcacattaacgagctgtatggctctgataatgtgccatatcatccaagggaaggggtgccaactccttgcccaattgtctatcggcatacggatgaagcgcagtcgacatccaaggccgctgagctaatggaagttgatgaacatgatgatataatgatcatcgaaccacagacaagtggacaggcagttggtgccattctcacccaagctcaagtggccggtgaaaaccaagctgacacgcttggtttggtgtcggagtcttgcatcccgcaagagccaattgcgcaggcagatgatgtaattttcatcagacctaagacgccaccaaggcgatcactgcgcgtgcaaaaaaggctttcagcttctgttagccgttcgccttcaccggcgccaaaacgacccccgccagcaaattcgctgggaatggcaacgccgatcacacggcgttgctctgcatttcacaaggggtggcaatgcgctgcagcagcagccaaacatttcccggaatattgtgactccgggaaactcggtgacaaaaaatgcgccgattgcggtgcacatctcttctcacatgaagacagtaacatttgctgccggaagggaagagttgtgctgccaatgcttaacccgcatcctgatgagctcaaagagctgattgtggggaataagcaatcccgtgaagggaaagaatttgtgcgacacatgtcgcgttataacaacctgttccaatttgcgagcgtttccgctggcaacaaaccaagccctgctggcggtccgatggccgttattcttaacggagaattccatcgccgcataagcagcatgcaggctggtacaactcagattcctggctttggccagttgtacattctggacccagtcgaggctatggaacagcgtcgaaacaaccccaggtttactggggagaaaatcacaaacgaagatgagtttgtgcagggtcaccagctaaatgagcagactcttgagatcttagaaaaaatgatccaagtgcatcatcctgctgtgcaggcatataagcaggcgcgtgagcagctcactgagcttctccaacaacaaaatcaggaagagcttcgtttcttccgcatgactttgttggatagccgcagggctccagctggtcttanagacccaaaattgcacccacaccaaataatcaccccttctacgggtgaagggatgttcgctattcatgcggaccccactggtgctcctccgccccaagaatttgngtag

SEQ ID NO: 52821 - DNA, 1437 bp, Heterodera glycines
tttccgcccccctcccccttcagtgctttaccatcagctcctcctcccaccgtcggtggacaaagccaattccatcggacgacaaatgccaaacaatcggtgccgaagcgcagacgaaaagtcattttgcgacggaaacttttgcgaaaaggcgccaccgccggcgatttgcagcagaaaaagaaaagcggaaatggtggggcacaaaaaaaggagggaaaaccaattaaaatttgaaaatgtgcagcaaaaagcggtgccgtccgccgcgtcgtttggcgcgttgtgccgttgcagcgattgccgccgtcagaggacggcgcgggacaaatggctgaaggcggaagtgccgaggagcgacagagcaatccatggaacacttttcccttcgaaaatgagtttggcgtgccatcgacgggagggacggagaagggagcgacgatgaggacgaagacgggcactgtggtggtgagggggacggacagaggagaaggcgtacagctgggaagacgaatggcacgacggagaacgacggcaccaaacgacggacaaaagccaacgcatgatgtggacggtaagcaacgaaatagtaaattgtgaacgtaacaaataggagggggcgggaagagtagtgctgttcgagagtctcgaatcgagaaaagtctcgggtttttttaattacggcataattgaactgtctcccctttccagcaactgcttcttctgctgatgattctctgtccgttgtcgattttcttgccccaaatcccatcgctttccgccgtttgccaccgtttaatcggtcgtcggcggttccgccgccgtccctcgcccaccaattggtcgccctgttcagtgtcggcctttgtctgtgccgtgccgttttcggtgccttttgtgccctttttgcccctctcattttcctccctcagattgttgggcccttctccaatgcttttgctgtgccctgtttctgctcggcctttgccttcgccgtcgtcccctttcgctgctgcccttggcctttgacgttttgtccgtccttttggcccttttcttttggtcagtctcttttttttggcattttggctaattaactatcctctccattgtccccatttttccaaattgcttcatcttccttccccctcctctctcttcagtctgtccctggttgttcttctgctcgtcctgtcactgctcgccccctccgtccctccgccgcctttgtcccttttccgctgctttcttttcatcgcctccctgtgctttgccgtcattctcttcaccttttgtacattttgtgaacagagcgcagtggccgaaatgactaaaaagaggaaaagacggaaaacggaggacaaaagggaggaggaggaggaagaggaagaggaagaaaaggaagaggaaaaggacagaagagaaaggagagtatga

SEQ ID NO: 52822 - DNA, 853 bp, Heterodera glycines
atgccgaaggcgctgtccgcccgtgtgccgccgccgttcagttttgtggagccgccggccgaggtggtggaccgtcgatggggtgccggcgacagcagcagtgaggacatgcgccagggcaacggcacggaggaggccgaacctgtaccgccgcttgtgccgttctgctgtgtcgtatggaaatgggacgacaagggttggaacatgggcctcgagggcagtgccgaggccgagtgccgatgccgcaacgcttccgtgccgtttctgctgagcgggggaggaaacaaaagttggtttttggtccgaatgccgacaaacaaatggcaattggcactttttatggatttttagtgcccgcattaagcaagctccgtccatggcatttttacatgccggtggtactgctaggcaaagccggtaaatatttttgaaatttttccggaattgtaacaatagcagtactgcactcaccgtgcgtggtggtggttgtcctgctggtgctgctgctgtccccccatttgccgacttcccccgccccccaccaattggactgggattagtgtggcggtggcgcgtgcgttggccgcgttcgtctcccgctgctgctcgcgctccctctgccgcctttgaagtgccacaatctgcgggtcgtgctgcggtgggcccgggttggacagaatgtgcccgcgcaagtcggacgagtaaacgtcggggaagggcagcgccgacccttctgccggcaccatggtcacggtgttgtgccctgagacggggagaggtgtgaaaaagccggggaaaatcgggggaaaattggcatttcttaaaggggggggggaagacaatagcatcaaga

SEQ ID NO: 52823 - DNA, 2152 bp, Heterodera glycines
  unsure (1)..(2152): unsure at all n locations
atggcaaaacattggtggcatttccaactcattccacaggcattgacagcgtccgaattcgcatcgaagactcgccattcgcccgattggaccattactttgaccaaacggcggacaaaatcaaatcagtcaaggtgggctgattggtggacaaattctatcgagtgngggcatacaaaagatgccatggatttccgatttccgaaaatttttgaggcatcagaatgccatccatcccctggggcataccccaagggggggggggggaaggtgtttgcgcgttggcattttgcgtcccatcaaacaattttttttaattcctctcctttttgatgcgtttttatgcagaattcatccgattgcttttccctttgttcaccgattcaaataaattatttattatttaaatttatttttaactcatcaaaaactctgaactcatttttcaattcaaattcaaagtcctccccttttctgtttcgctttttggcatcttttgcccccccttccgttcacttcccatttctattaattatttcggcatgaccttctttaacttttgtctgtactgctccaggaacgcggtggcaatacgctcgtccattgcgtcgccggtgtttcccgctccgccaccctttgcatcgcttagtaagcaaattgatgttgtttttgttgtagtgtttaatttttatattagggctgaccaccaaaaagcgtttttaaatatatttttacaattaaattaattaattatgttattttaatggtaattcaatgggtttttttttgtccattttcagtctgatgaaacacgagcgaatgtcccttcgtcaggcttaccattacgtgaagtccgcccgtccaatcattcggccaaacctcggcttctggcagcagctggtggaatacgagcggaaattgagaggttcgttctttatgtttgccttttggtgactatctaatggtccccattcgttgggcactttggtgtagttggttatcacgtctgcttcacacgcagaaggtcggcggttcgagtccgccaagtgtcaacttgtttttttctaatttttagggttcaaaagtaattataaaaatagtgctaattaaacaattatggaaattggtttttttatttatatttatttatttattggtgtgcacaaaatgatttcaataaatcactttatcgttgggcactttggtgtagttggttatcacgtctgcttcacacgcagaaggtcggcggttcgagtccgccaagtgtcaacttccttttttctaatttttagggttcaaaagtaattataaaaatagtgctaattaaacaattatggaaattggtttttttatttatatttatttatttattggtgtgcacaaaatgctttcaataaatcactttatcgttgggcactttggtgtagttggttatcacgtctgcttcacacgcagaaggtcggcggttcgagtccgccaagtgtcaactcccttttttgtctcccgttttaatgtaatttaaaaaggcataattaaacaattaatagtttttttaaatttaattatttttacgaatattctctggtttcaactaaatccgagtttgaattaatatataattttttattattgccttttacctatttttaaattctattttatcctccaacaaaaaatttattaaacattttttggcggcattggcaccgccggaccttccttcgcttttaaattttcaaatatttactaaactttcatgtctttattcttgatgctattgtcttcccccccccctttaagaaatgccaattttcccccgattttccccggctttttcacacctctccccgtctcagggcacaacaccgtgaccatggtgccggcagaagggtcggcgctgcccttccccgacgtttactcgtccgacttgcgcgggcacattctgtccaacccgggcccaccgcagcacgacccgcagattgtggcacttcaaaggcggcagagggagcgcgagcagcagcgggagacgaacgcggccaacgcacgcgccaccgccacactaatcccagtccaattggtggggggcgggggaagtcggcaaatggggggacagcagcagcaccagcaggacaaccaccaccacgcacggtga

SEQ ID NO: 52824 - DNA, 323 bp, Heterodera glycines
atggcaagaaaattcatcggattgttgttggtgctgaagcttgtgcatgcccagtgggacggtggcatgaacggtggtgcaccgatgggcggcggaatgggtggaggaggtaaaataattaattgatttaaataaaataaaaatatagttttaaattcagtccctcttttttttttattaaattggtcatttcaaagtttatgcttttaaaaaattttttaggcttattattaataagatctaattaattaatttttataaaaaatgtgaatttttttttttttggtcaaattcatagattcaaaatattttatcctttagga

SEQ ID NO: 52825 - DNA, 706 bp, Heterodera glycines
atgtcgtctttgatcaccttcataaggaaattgagtaacaaagcaaaaggagcatttggtcattgcctcggcaatttcatcagaaacgggttcaatgttctggcaaagccacttgaagaaggtttgttcctcgcttccagtcccattagccaactgaaaatgtaaatgatttgtaagaaaactttcgaagcgcaaattaaaagaatatatgattaaattctcaaagttggggtggtacacgtcaggggtgtaaccggatgagtcaaaagtaaacccagattctaaatttcaaaattcattagggattataacggacaagggggtggtcaaaatttatttacgaaatatccccccacctgggagtccgagccaggaaaaattttgaaatttgagtaatttctgacaagttttgtccaaaaatgaacatttgttatttttagccaattttcaagaaaatacttactttattttttccttgcttccatttgatttcagttgtcacactgttcggttctgctgcagtccaattgaattctttgactatttcagaattctcgaagaatggatttgggtcgaaagaaaactaaatgaaagaatttatttgttttgatggtccaacttttcagcgtctgtcccttaattactttcaacttataaccggccttgatgtcttcattttcctcaatcttgaaatgaaagtaataaa

SEQ ID NO: 52826 - DNA, 911 bp, Heterodera glycines
caatatcctcgaggaagaagaggaagaatgcttgcactatttgacgaaagtcgaggttatcaagcccaaaacattaaatttattactttcatttcaagattgaggaaaatgaagacatcaaggccggttataagttgaaagtaattaagggacagacgctgaaaagttggaccatcaaaacaaataaattctttcatttagttttctttcgacccaaatccattcttcgagaattctgaaatagtcaaagaattcaattggactgcagcagaaccgaacagtgtgacaactgaaatcaaatggaagcaaggaaaaaataaagtaagtattttcttgaaaattggctaaaaataacaaatgttcatttttggacaaaacttgtcagaaattactcaaatttcaaaatttttcctggctcggactcccaggtggggggatatttcgtaaataaattttgaccacccccttgtccgttataatccctaatgaattttgaaatttagaatctgggtttacttttgactcatccggttacacccctgacgtgtaccaccccaactttgagaatttaatcatatattcttttaatttgcgcttcgaaagttttcttacaaatcatttacattttcagttggctaatgggactggaagcgaggaacaaaccttcttcaagtggctttgccagaacattgaacccgtttctgatgaaattgccgaggcaatgaccaaatgctccttttgctttgttactcaatttccttatgaaggtgatcaaagacgacatttggccaaatccgctgcaatattttcttgcgcctgacgtggaagcactcgacgatgaagaaaatgaggaggaggacgatggtggggatgaggaggaggaagaggagaaggaaggggagggccaatga

SEQ ID NO: 52827 - DNA, 474 bp, Heterodera glycines
atgcttgcctatctgagtcccatcaccccgcttctcgtcttcattctgcccaattttcgtccatcactcttccaatgctttgtcatccaaagtgtgccattggtggcaaatttctatatttattcactgatccttgtgattgggcttgaccgtttgctcagcgcattctgcccaatttggttagttagtgcttggtagagaccggcgcaggacaggatcctgcgcaggattttgcaggatcacagtccgcaatcctgcatatttttgaaaatacaggatttacaggatttgcaggattaatcctgccggatcctgtcctgtaaaaaattttgaattccaatcctgcaacaggacccgcaaatttgatttatgcaggattcagcaggatcctgcattgattttttgaaaatttttaaaaatagaatgccaaatattcagaaactttcttttttcaaaaatttttttcttaataaa

SEQ ID NO: 52828 - DNA, 339 bp, Heterodera glycines
attatgagctacccaatttggcaaatcggtctttttaaacgcattaaagaagattcagtcaattgcttggagtgtaagcaaaaaacttattaatttttcatcttcatcattttttggtttaaaaatatatttgaatactttttttactttgaaagacttttttattaatacagaattttttgaaatttcataaaatccgcaatcctgcgcaggatcctgcagattttaaatgcaggattgcaggatttgcaggattaatcctgccggatcctgtcctgtaaaaaattttgaattccaatcctgcaacaggatccgcaaatttgaaatttccggtctcta

SEQ ID NO: 52829 - DNA, 817 bp, Heterodera glycines
atgccgtctaccgctattccaactgcgaccattctatttttccaagatgaaatagataaagaaccgaaaaaccgtgactttagcagagttaaagatgatgcattctgggcttttttacgtggatatcatccgctggacagtcttcgaaaagtacgttagcttagggctctatctccaaagtcccgaattgaaaaagaagggaccgagtttggcatcaggccggtataggattaccggaattcaaagcccgattttaaatttaggtaaataattattggaaattttcacaattttgaaaaaaagcccagtcgaaattttgacctggcccgggatgtccggtaaaacgggctttttttgaacgggcggaccggtcaactgtcaaagcccggtccgggtactttcaaaattccggtctctaataggtatgatattgccctttgccttcaaaaataataaccttcagcggagattggaacaaatcatcgatctgattcaagaatatggtgtgagtaggccacgagatgtgggcaagtcaattttgcttaacacgctcaatgaatgttaccgcaggatttatcacattaatttgtttaatggaaaaatggtgagagtttcatattaatttctattaatcaacactaaaccctttttccagttaactgcaatttttgggacccaaactggcaacaaagatctcgacgtgttcaatttcatacggaaatggtgtggcgcaatttttcgagcagaacagcaaagcggccattcgatcataagttatgtgcttgaggattatcctggtgaagcaaaggatattttt

SEQ ID NO: 52830 - DNA, 1215 bp, Heterodera glycines
  unsure (1)..(1215): unsure at all n locations
tctagagtnncggtgaaatnntgaattggaaataaaatgccaaagcaaaaaaacggagcacggcattttacacagtatgaaatcaacccgtggatgaagcggggtacggtagtggacgaacggaaagcgatggaccaatggacgcaactcaaaagggccattgagggggagggagtcgaagtgagtaaaacgaaagcatagaaaggcacggggaaagcccaactgaatattgttgccccttttggtgctgacgctggaccaagtgaacggactgccggacatggtcttcgcctgcaacagcggtcagtccgcacagagacggcactttcgcaatgccaaaaagcgttaaatgaaccaatgaatgaattccaacaaactctttgccaggccttttctaccgcaataagctttacctttcccactttcgccacgctcaacgaatcggagagcagcggcacttcgccgacttttacaaagggctcggcttggagctgtacggcgccgattgcgcggaagtattcgaaggcggcggcgatgcgtttttctccgacgagcgaacgctttgggccggctggggagggccgaggacgaacagaaaggccgggcaaagccaacgaatgcatcgtgacgagggatttcggtcactttaggcctacgaacacatccgaaagatgggcgacttcgaaacagtgccctgcgaattggtcgacccgcgcttttaccatttggacacgtgcctttgcccggttggcattgactcggcggtaagttttttggcatttttcaattttatttcatttttcagctttggttccctcccgctttttctgagaacaccaaaaaagaagtgaaaatatttcgatattcattacttttacgcgttccaatttatttaattattccatttttaattaatttttaggttttttaatcccccccccccttcttttggtcctacggcgtttgccgcgggcgatcgcagtttcggagaaagaagcaatgacgtttgtgtgcaatgccatcacaatccgacgccgagtgatcagtccgaagggaattagcgaagaaacacatgcgaaattggcctctattggctatgcagtcaaagaattggaaatgggcgaatttatgaaagtggggagagggattttaaatggtggcgatttaatcttttagtccggtggtgcatgccaatgtttggtgatgaaattgtga

SEQ ID NO: 52831 - DNA, 254 bp, Heterodera glycines
ctggcaaattgttacgctggctccggctttgccaactcctgttcgtcaggctaaagaattggctaagcgtggtcgtgccaattttggggaattgaagcggtattatttaactgccttttaagagtttttcttgcttttgcagcactccacaatatatcccgcgcgccgagaaccagcaaatcgactaccagcagttgaacagacgcctctgctacaatggacatattttcgcggacactcgctttaatgcatga

SEQ ID NO: 52832 - DNA, 527 bp, Heterodera glycines
atggtcattgattggacgcgtaaaatggaatagaccctttttaaaacacttaaatttgttcagaatgtgcttcaactaaagccggacaaacgcttatcagcaaaaggaattgtgcaatatttaaatggagaatgcgaattggaagaatttttgagccttgaggggaatgatgcacggaaaattgtcatttttaatgacttaaaaatgcaaaatttggagcaattaatttcaaatttgtgtggcgaagaatcaaatttattcagggagttgaaaaatgtgatcgaaaaacagcagaaggaattattggcagggaatgagaaattggagaaatgtgacacaaaaggcacaaattttgatgagtgatttgagaaaaaagcaaagggtgtgattgatttgctttgtttccacttttgtatttaatttgtacacaccaaacggattcaaaccgctgacccacaaagtgtccaagccacgaaatgtccacaagagtaaaaatccatgaaatgcccagaaaaaatataattaaa

SEQ ID NO: 52833 - DNA, 719 bp, Heterodera glycines
ctaaaacgaattttgaatgacatgttgagcgtgtaccaagtgatttccggaaacctgaacaaagctgtgaacgagcagggcgaacaggcgctgaaatggccgttggtgaagcaaatgcgaattgtgaagaaggagattctgacccttctgtccacttggatttcgcgtgcttttgagccccgtgtcgctattcccgtaaaatccaagcgaattgttttaatctttttgtcttctttgaggatcctttgttcgtgccagttcagctggtcatcgagaatgtgattaagcctctgttcagcaccgttctcgtcgattatgaaatgaatattccgcaagcgcgagaaccgaaagtgctttccctcctttcgattaccattgtgtctctgaaggtttcacaccgtcattttgaatttgcaattgttggtttcttgaaggaggacgcgtcggcacaggtccccgctattctcgacgcggtgttcacgtgcactctcgaaatgatcaacaaagatatggaagccttcccggaacaccgcacgaatttcttccaactgctgaaggccatcaaccaacactgcttcgacgtgctgatcactcttcccgacgaagtttttggcctgctcatccaagccatcgtttgggcagtgaaacacacaatgagaaatgttgcggaaaatggcaagaaatttgcattaatgaatgagtgttttaatttacgatga

SEQ ID NO: 52834 - DNA, 1336 bp, Heterodera glycines
atgctctttctgctcgtcctcctccccctgctgcccctctcttctcaaagtgatccctattcgtcgtctcccgctgcttcgcccgctttctctccgccttatccgccgcccattgccaatgcttttcccatttcccctcaattcccttcgtttttgtgcgttccgtgctccgccaaagaaaattctctacaaatccctccaccttttgtcggacaacaatatcccgttcaaaacgacgccaatttttcgccttttggttacggcacagtcgccggatacagtaatcaacagttatacggcaacgcacacggcactccaccgatagttagtgaaatagcatatgataatcagcaactgtacaacaatggggcgtatagtaatcctcgaccttatgccaacggaatatacggtaacgtgcatcaaattatttatatattgtaaagagaatttgaaaagatctttttgaaggatacagcaatgagcctgtgtatggaagaatgttcccggggtacggtagaacccccggatacggtgacgagaatgtgccgaatgcggcgggggcgtacattcaaacggaaatgccattgggaaaactgggaaaaggagtctttgggagggcaaaaggtaatgtgaaggggaaaagcaatggaagcagggctggacgtactggactttacttttaattacggaaaaccgtaattacgtggggttaaaaaacgccgtaattagcgaaacccgcaatcaataatctaaaaatgaaaaaaaaaacatcatcacattagcgtagttgagtcatatgacattttttctgcttctcttcctaaaattgagtccattcctgaaaaattagtgaaagtgatggaacaatttgcagaaggacgacggagaaacgaacgcaaagcggcgaaggaaacggatcgaacggaggaaaacacgaagaaattgggaagagatgaagggaatgcgaaatggaaagaaaggaatgcccgggggaatgaatcaacgcactcattaattaattagtcaattcattagttaatccttttgtattttatcacttttacaacgggccattggaacataaacactcgcaatgacatgaggaggatttgtcggattggtcaacaataatcgtcattcgttggcaattaattgcctttccttcatccgcccattagcaaagcgccgtatcccaacggcacacagcgacagtcgcgcaacagcgcaccgccgagcgaaaagtcggcacagccgcccttacaaatgcccagcaaatcgacgcaagtcgcttggctcggctcccatccgcagccacgtgcctttttaggaaaataaa

SEQ ID NO: 52835 - DNA, 638 bp, Heterodera glycines
gttaggcccgcaaattcgagtcacagtcaaagggttcttcagctttaaccgcacagttacaaagatgcgtgaacacatccgagacttcctcgtccagatcagggtttctctctcttcgaaattgaaaaaatgattttccattttgtccttaggaagaagccggcgacgacactgcggaccttttcttggaagagaaagaggctgagatccagcgcattcaatcgttaaaacaagcgattcccggggttagaaatccgaacgaattgttggaggaggacatggtctgacaatgcgtccgtcgggtgggctcggccctgccttccccgtttttgttttttccatttgtccatcctgacattaaacgatcgttcgtattttttctctgcgcccatttgaattcctttcgtctgtttttgctctccttttcatgttttgtgtccgttctgctgagctttcccctgcttcttctaatggagtttgtttctttgcttctgattgtctctactcgtctgttttggtgagagatttgattgtttctgagtgtgttcctccatccgttttgctttatgaattcgaccattgtcgaccctccattattcacagtctgtcatctcttttttaaatattttttgtctgaa

SEQ ID NO: 52836 - DNA, 288 bp, Heterodera glycines
aatttgaggaacgacggaagccatcagagaagggaaatgatgccaaaattggaatttggggcggggaattgcgattggttgccatagtgattagcaccaaaaatgttttggattattatggtattttagctaccatttgcttttgtctccttttttggtcgcccatttgtccgtccatccgacagataattccctttgtcagcgttccgcgtcaaattccctcccattcggcttcccgccggtgcttttaaagtgcgcttcgcccctccgcccattcattccgccgtg

SEQ ID NO: 52837 - DNA, 836 bp, Heterodera glycines
cttcgaactgacgaaaagttttttacgccgtcttctgctgttgtcacccaaataatccttccgacgatcgctttttgcgtcggaatggtcgtggccatgctgatcggaatcaacaaatgtaagcaatgggagctggacaaagtgatcgaaatcagacgaacccgacggatcatccaaaggctaacggcacgactccgcgaacgcaatttcaaagccattcaaagtattgtaaaggaatggtggcggaaaggcatttgaacgaattgcagaagcaagggacgtccgtaagagagccattgcggcgaaggaagcgcggggcgaacctacgccgcccgaaccgtccgccgtccccccgccgttttatcgtcaaagtcccccgacgggcaattcgcctccccccacttacgaagactctctcctgcaccaattcttcatggaatgcgtctcagtgaacgaaaatggccccacaatttgaaaactggttaagcttaaggccaagaagtacgtgaaaaggggtgcattgttggccaattcactggtgactcagacaattagcagaacgatctcatagtccaaagtttggttagtcataatattttgtacaattcttatgaaatattttctctgctttatacaaatatttgaagcaataaattcacaatttttggatttgcgacgattaaaagccggggaagagaatgaaagggacgcgggcgcagtgctgagcccacaattggccgtacaaagcgaagcagcgcaattcgtcccttttgattcggacccaaaaaagtgccagcagaaaggccaaagggagaaatgccattggccgtgtccat

SEQ ID NO: 52838 - DNA, 266 bp, Heterodera glycines
aaatgaaccagcagaaaagtgcgaagcgggcgacgcgcggacaacgccaaatttatgaagaaaacaagcagactttgttatgctatgtgctggccagcatttgctcttccgttttggtgttctctctcaattactttctttttctgccgcaaaagggcgcgtgggtaaagcgaaaatgctaaagaggcggacgaaccttttttcagattggactcgcgtcctgtgtggagcagtcaagcattttctgtgattcttatgtctatgat

SEQ ID NO: 52839 - DNA, 132 bp, Heterodera glycines
atggctgcattacattatgcagaatttttttctcaatcgattgcaaaatttggtgcaacttgtatgcatagaaaaaaagttatatggagagaagtaaatgtagttttttacattattaagaatgaagagata

SEQ ID NO: 52840 - DNA, 1064 bp, Heterodera glycines
atggtcagtcccaagaccatgattctcgacttgactttgggtctaggcattaatttgccgagtaagttttatttcgaggcgacaaattcctgaattttttatgcctcgttaaccgattaaggttctgtaatatttactaattaattaagggctctgaatttggctaatccaaaaggttattaaaaagcctcttaaaaagtttaaggttaaagtctcaagaatttgttcaaaaatttttttttatatatttgggtttaatttcggcattttccacatatttggctatgaatctatttaaatgacgggactttgtttttgcacgttcttttctacatgcttgcagtttctgtctggcaattaattaattatttaataagtgctacttaattatttggtaattaattcattggcaccaattaatcgggcgcacaattggttgtctaaattgtcattctggcgtccggcacacatatgttttccgctgtttttcagggcaagcacctcggctgaacccgggcgtttggcacagtgtgccaattccgttggtcggctccgtgtcaatgattttcaccgaggtggtggccgccaccaatgccaatttggtggccaatgttatggccgagacgggccatcccgtccaatttgtccaagctgtctaatgcagcagcaagtagcataatgctgaagatgtgattgaagatgttaccgatgattgatttaaaatgaattataattaatgatgaagataaatcccccccccccctattttttggcattttacaatttttttataaatccggcaaattccattactgtaaaatgattgataatgatgatgatgacttttccatatatttcattaaaatttgaacataattttgtttttttaattcagaaaaaagtatcactagtgttatacaagggcccaggcatttggacaaaaactgtgtctgagtattgccaggatccagaaaagccgggctcgggcccgggtcaaagtttttaaaccggcccctttcctggaaaaaatattcataattgaaaaaaatgattattagaataaa

SEQ ID NO: 52841 - DNA, 702 bp, Heterodera glycines
atcatttgcagggacttaaagccggccaatttgatgttcagcgacccccaaacattgcaactgatcgattttggctcggccactgagtgtccgctgcgcattttggacgcacgcgacagccgacgcattttggacgaggcggccgaactttgcacaatgtgagcattttgtagtaccaaaaacgaacggcggaagtcgaactttttgtttacttttaggccttatagagcacctgagttattcacgtgtgaaattggagcgatgattggggaaagcgtggacatttgggtgggtgccattggttttggtaaaaccaattaattagggacggaaatgccattaacgactgactactattaatcggtctattactcccccccccccaatttgccattttgtcttcagtctctcggctgtgtgttgttcgccctgtgttactttcgctcgccttttgacggcgttcatgaaaggggcgacagcgtcgctttggcggtacaatcggcgaagataaacttcgacacggcggtgccgtaagttctaatctcattaagcgagcagtaataaagcctatttttgagagttgatcggcacattgccgaactgatccaatcgatggttttaatacggccctcggaaaggccgcacatatcgcagattaaaaaacgggtcgaccaaatgcaaactttggatgaagtgaaggac

SEQ ID NO: 52842 - DNA, 380 bp, Heterodera glycines
acattgtcacttctttcctccggctgagatctcctcgaagttacgtcggttcccttcgggcagcaccaggtattgcatgtgcgcgtcacaggtggcctttgtcttctctgggattgacacaacaggcacaagtgctccatacagtgccacttgacccgtgattgtgcagttgggacgtattttggcccctctttccagtgagatgaaggccatccctcctgccaggccgccggatggcccagacctgttgtagccggcctttacttaaataaacaaaaatttcaggtgcgtgtgctcttcgaaacatggaagagggaacatttgaacggagtgctgcagcaattaagaggcatgaaaccaaggaggtcccaggattttag

SEQ ID NO: 52843 - DNA, 855 bp, Heterodera glycines
ttcctctctctctctcgctctctctctctctcatttctctgtctttttctgtcagttttttggtccttcttaagcggaataacagaagcggccgttttctgacttatttggccgacctttgtatgtgccgaggggaggccaacaaaaagattcaagaattgatttgcaacaccgtgctcaagtaaccacctgctgaaataaataattattttaaatttaattcgaattcgagagtttatgccattttcccagtgaacgaaatcgcgacatttttatgcggacgatgatgaagccaatgggagcaaaagtggacaaagaggtgatcaaacgatttgggccttttaaatccattttattcagcgcaaattcgaagtgttcgtctgttggaattacgccggcaccaactgtcgcactttggtggcatgcgccgagtcgtgccgagaggaggacagagaaatgatcgactattatcggcatcagctcgaactgcttgcgcaggttggtggaccgaagtctaagcaagaaaatataagaaagcatttatcattttggagatgtgccaagaccaacaatatttggccattgatcctccccccgagcggaaactttggaacatcagccgcgaattgccagccgacctcgtcctccagtgcttctcccgccccccccccttccctcattctcattctctctcctttcaggtgtatgtccgaccatcgccttccgtttgacataagtccgttttggcattattctttttgcttttggcactttttttctccttttccgttaggggcttctttcactcgagttatggttcatattcacatgattcgttgggaataattattcatt

SEQ ID NO: 52844 - DNA, 1133 bp, Heterodera glycines
atggcaaatttaggcaaatgccatttaaatgagattttaagcagttttaactgttatctttttatttttcaaattaaatatttaattcttagttatatttttattttggtttatttaaataaatattctcatgctggtattcacaatgctaacatccgtatgaacaatgctaaggtaatcagcgtttttataaattctaaggaattaatctttttaaatttatgtttcagttattttatgttatttggttttttatataccataacgagatggtaatttcattcaaatgagtcatttttttgttgctatattaaggtacaatgtttttccagtttttataattataatttaagaaacgagaaaaaatataattaagaatttaaaaattttataataacatgaaatttttttagaatttaccttttggatttttctattatatatattagctgtttttataagtaattgtttttgtttatataaaaagggatttttaatgcgctttttgttggctactaatattttacaattcatataatttttaaaatttttaataatatttatttattctttataatataatttatgcttattctaacaggctataataatttaaatttgcagtataagtaaaaattattttttgtaaatttatttttgattaattagcaaaacaatttccttttttatttcattaatttattcaattaataatattattttttcatattgtatcaatgaaaatgattcatgagtagttttaatatttttgtgcatatttatttttctattataatttataattttataaaatattatttaattatttggaaaacattatttttatttttcgaatgaaatttttttagcaaatctaaatgattcatattttattgagttctgaattatttatttattttttacaggattttaccggcaaatttttgcaattagtaatcttatttaatatttttatataatttgtgatttaattatagatttttgttttatttgatctcttgattggagatcatcgccatctcgcacattaggaattttgttctttgctaatttatttgcttattattattttaattcttaaaattttttatgttcaaaaatatttctttata

SEQ ID NO: 52845 - DNA, 332 bp, Heterodera glycines
gaacggaaccaccggagactatttctcaagtaaaatttatttatatttataggattaaaatttatttattgataattatttatattttttaataattttaaatttttatttatgcttcatttaaatagtatcatcaattaattttttcatttaataaaaatttaattgttttaattaataatttatttctagctactttccgttgaatcattgaacccatttttcgatgcactgctctttgcagcaaatattacttcatcatcttcgtcaatcataaaaaataattcaaaaaaccgtaaaaattaaattaaatttaaaaatttattattaaa

SEQ ID NO: 52846 - DNA, 2216 bp, Heterodera glycines
atggacacaaccaatgataataataaagtatttgtccatcaacaaaagcggggcatacgacgagaaatgagtgtttccattgcatcccaacggcctttaaacgatttgttttggcacagggtaattaattaataaattaaaattagagtattcaacaactaatcaatgctaattgcttttaggtgttggtcgaagtatttcgtggtgaaattcgtttttctgtcgaccgtttgaatgcatttcaaccactttcatttccattcgcaacatccacgaaatttagcattggaggcgatgaaaagtaaaaccataaaaatcatttttaaaaatttaatataaattttattttcagagggaatggctttgtcggatgcattggcaacttccaaattgatcaaatgctgcatgattggacccagcaattagcacagaaggacagggatgaagatggtaataaatagcccgacacatgacagtatcctatacagggtactgtacttttctgaaaaacgggattcatagggcttcgcaggactagtccagaaaaagcattatttcattgtaaactttaaaaactgaatcctaaaacaggactcggaaattcgaagtaaacccggcttttaaaatgcgtattttacagaaatgttttacaagtgtaatataatttacgaaaaaatgcggattttactatgttattttacaattgtaatttatcaccggaaaaaagcacatttatgttaatattttacaattgtgtattactggaaaatacattttatgaaacattttgtttaaataatcacctataacaaaaaacttttaaaatgattaaataatattttatccaaacattttatcttccaatttacaatccaacatttgacccaaacatgaaaagcacattttatgataatattttacatttgtaattgattaccggaaaaatgcgcattttacgatgacaaaatggcccttggaataaaaagattattatgtaaaagcattctctgaaagaattggccaaataataataattatataaataataatattttatttttttaacttagttcgtgttgtttctggttgtcttgagttatgtgctgagaataaatgtgaacaaggtcaaataattaattttttaaattttcattttattaattaaaattaaaactaattacccaatgaattaattaattactccccaaataaggctccaaatgtgtggaacattttgacacagaaacaacttcgtgtgcatgtaaattaccacgaattcattatggcgagcattgtgagaaaagtgagagaggaaaattaaaaattaaattaaaattaataaattaaattaatttttaaaattattatttttagatatcaatgaaaattcttccgctacttttcgtggtggatcttctggatttttacgcttttttaaccttcctatcagtgcccttcattcggacgtcatttttagcattcggactgatcagaggagggcattggtgggaaattgttgactttaattaccctagttaattagtattaattagttgttatgatacacaaataatatgtaattgtttcagctactttatgaacatgatcaggccgataattttgtgcaggtgaatgcaattaaatgtttttctaaatatatttttttacttaattttattttactcttaaaattttattttattttgtgtaaaacactaattattataaatgttttttacaaagattattttaaatttttattttttaaatatttaataaattcataaaatttttaagattcatttggctgatgactaccgaattgttctcacaatgaataatttgtcctccattgtcagctgctctgtttttgctccaccaataaaaagtcaattaaaaacaacaaaaattattttaaataaaattaaattctttataaaagcccaaattagtgtattttacctactctatttttattatttatttttaattcattttcagcatttaatgacatgcgttggcttcagctaattttggagcgcagcaatgagccgggcgcgacggcaccacaaacagtggtgcttcatgttgacgatgatcagtgtcaaattggacctgttctattgaatgatccggattcaaccgatcaccaaaatggattatcattaatggatgatgaagaaaagacggtggaggagggtaaaaatgttaattaa

SEQ ID NO: 52847 - DNA, 3000 bp, Heterodera glycines
  unsure (1)..(3000): unsure at all n locations
atgcgcgaaattttggcgcgtcgcagtgccaacgctaatgagcagaacgaaaatgggcaacaaaggcatatggacaaaattgggacagcgacagtaaaagtgccaaatgcaaagtcaacaacggcgtcaacagaatttttatggccacaacaaattgtccattttgtgggatgcatttcgagtgaatttttgcaaaatttaataattttttattaataacaatttttattaatttcggatgtgttggttgtgttcgagaatgacctgaatctgatcacttttacgccatttttgtattatttacaaaaaagtgaactgttgcatcgcaatgttttcgttgtgccatccgatgatcagccaaaacaacaccaaaaacaaaaactgttggcaccgatggcatgtggccaatttaaagtgccagaaatggcaaaaagtaggccttttaaacaatttaattttttaaatttaaaaattatttttcgtaaatgtatgtaaataaatttaattataaagttttttgaacagaaaaattatcatttttatctttctgtcagaaaataatttcgtttcattaaaacagtaattgacatgtttatgtgatttgaaaaaattaattgttttatcagattataatttgaaaaacgggaaggaaaccgtttaccgcaatttaaattggaaaagggacgattgaatcaaaagttgtaaaattaattaaaattttctaattatatgtcttttttaatatttcataaaaataacattaaaattattttaaatttcatatattttataatagtatcataaaaatcattaaatattttaattcaaattttaatttaatatggttaataaaaattaattaaataatatctttttttgaaaattcttaaataattaattcaaatgttgaattaataagtttttgtcattgcaaatattttaatatctttattgaaaattaattaaaaaaacaattagttaatttaaattttcattaatatttttctttttggaaaattatttaataatttattttcatcatttaaaaataattaatccacttcacttttagccatttcaaattaaaaatgcatttagagtcacgccgaaatgtgacttttcccgtttgngaggcaccctttggaccaattgcattccatgagaacgatgttagctctgagaagctgatcaaaactgatcaaacagatgaggcaattaatgaaaaaggcattttaaaatgaaatttctaaaatttaatattttaatttttaaggaaattcatttgtccattggcttttcctcatttttctgctgctcattttgttggcattttgtctgtttctgatcagtttgatctgccgacggaaaattcgtcaacgaatcggtcgaacttattatgtgctccaaaaatcggaaccaaaaaatggagggccaacatttgaaggtgtgcaatattcaaataaatttaatggttttgtgacagaaatttttcgagaccgaattttggtccttgagacgagtcgccaaggcttcaaaaattcgagacttgtcgagatctgcatatagactatcgccatcgctaacaggacccttggcaattcgttcaaaaaactcgaaaataaaattttaaaaattcgaaaaaaataaaaaaacaaaaatgaaaatacagttcttaaaacaactggtccaataaagaagcgacggtttgggagcagaaccgattcaatggaacccattcagctggctcaacataaaagtaaaaattatttttttttaacttaaaatttatttttacatttaaattttcaattttttaggattttttcccctggagggctctttttcggccactccaccggtcacgccaacggcaccgctactttttgctgaacaaaagcctatactaaggccaattttacggcatttgcctcctcccaggctaccgtcatcatccattacggtaaaaaaagggaggagaaattaaagaatgggaatattttttaaaatttttgttttgccagaaatcccctaaacacccaattttcttggttttttaagaaatttgtagaaattctaaaattctcaaaaattagtaggaaagtttgtattttttataatttttcgaaaattactatttttttttgttttacagaatatattttcaatacaaatagccatttaagcggataaaatttaataatttttttttcaaaggatgcttctcctcacactcagtcggctaatgaaaatgatggcatcgcaacttcgtcgtcctccacaatttattacacggcgcaagaagaacagtttgcggcggaggaggacaattcgtcaacaacaatttcgtttaaaagcttaggtcacagaaaagaaaggaaatattaaaaattttcaaaaatttccaatttaaattttctcgaaagttttcttcactttttttgatttagttggtgctatgacgttagtcaaaaaccatcaaatgaaaataatttttgatataactttgctcaaaggcaataaaatttttaattcttgatatcattagataggcctaggtgttttctattagcctataaaatttcaaaaagtttcgttaagtttcaagaaagttatgactgaaaatgttcaaaaaaacacggctgagggccaatagggctgactgatgttctcaagagtcttgacaatggattagaaaagtcacggattttttggaatcttgcaacgaaatccgaaaattaaatttttaataattaagcattttcttcataaaaatttgtttatagttttaaaaacattgcctgcagaggcaccttttccaaaaattttctgggatttttgaaaaatttcacaccaaaaaaatcatagaaaaaaccgaaaaatccccaaatgtgcaactttttttacttaagatgaaaagcagacgagcagtggggacgaagattcgacaacaattggccaagcttttgaagagaatgcgcccgaattgatggacgagcgcac

SEQ ID NO: 52848 - DNA, 107 bp, Heterodera glycines
ccgaattacgcgctgaaggaaatgaagtgctctgtctggagacaccgccgaatttcagtgcagttggactccattaccaacgcttcgatcaaaccagcgacgaagag

SEQ ID NO: 52849 - DNA, 60 bp, Heterodera glycines
ggattgctggggtcgtgggttcgagtcccaccgggcgagttaccttttatgttctacaaa

SEQ ID NO: 52850 - DNA, 1999 bp, Heterodera glycines
caggccattttggcaatgtgttccgtgcccaactgtccgacccattttcgggccaaattgtgccggtggcagtcaaaacgctgaaggctggtgccaacaacatgcacacatttgagcagtttttgcgcgaggcgtcaatcatgaggcgattaagccatcgaaatgtaattaattaattaggcgagaggaagggggggggggggtaattaaaaattggaatttttttaaacagtagtcaattttttcttttctcgaagcaattaaaaaatatccataagattgactaaaaaatgtaattacatcatttgaaaatggtcacaaaaagtcatttcctaataacagttaatttttgtattcattttttcattaaaaaaaattcttagaaattttattcattttttctaaatttcctaaaagttttgtcaaaaagatgctaatttttgattctgcaatttcggttttgagtctttgtaggaaaacaaagagaatttttagtgaagtttattaagaaatttgtcaaaaattttgcaaaactatgaataactgaaaataaaaaatgcaaattttcaagcatcggaaaaattttttacaataattttttaaggatttttggttaaaaattccatttacggaccaaaaattacgggaaaatcgcaaaaatccgtaaccagtaattacgtaattggctcaagtaatgaatgaggtttcatcactcgttcgtttgttcattaagcagagcgattttacactactgtattgattgaatacagtacattatatgcagggaaaatcacccgaaatttgcgtttcgtacggtaaaatacttatcgaattcgggtcgtccgagtccgagttcgagacgagactataaacttcataaaacggacattttcatgcaacagattcttcgcatttatggcgtctcatttttggcccagtcgcccgccgacgacggcgccgctgcgccgtccgttgtgatgccgttcatgcactttggcgaccttcggacattcgtcggcgactcatttcgagtgccaaaagcatttttagaaaacatttagcagtctaagaaatttattattttttcttaatgccatgggggaatcgcccacttttgcgccagccactttggcgccaaacgctataacatttttatttaaaaaagttacggccaaaaaccctcaaaaacttggtttttttggccattttggtgtcgcgcgccataatttgttttgtaacctaaggttattttttgaaattatgcaggctaatcgagaactcttaggcctatcgattgacattaagtttgtcttatttggctgcatatgaaaaaagttagaacattttaaatttggcggcgccaaattgtccggcgccaaagtgacaacccgaccctgggccataataaattttttaaaaatttattttttggacaaaatcttcttaaattagcagaacaataattgtttatgagttgtcagcaatttttgcaaatgtgcacagtacgataaaaacacaatgcaggtgattacggtaatggagttggcatggttcgcccttcaaattgccacgggcatggcctacttggccgaccaaggctttgtgcaccgtgacctggccgcgcgcaattgcatgtactgtattattttgtctaccatatccaagggcaattcagatcaggaaattttaaaaatagaaaattcaaaagactaaaagcccttttgaatttttgttccgaaaaaatccaataatttttttttgttgccaaagccctttttattttaatttacataataaattgttcgctgaatttttttgctttgtttctatagaaaatttatgggtcaagtccatgaaataaaaattcagattaaaaaatggctgctaatattttcattttttttcctgccaactctcattcacaggcttactgaacggggcatcgtcaaagtggccgattttgggcttgccgttgacctcaatgacgcaacgctatggg

SEQ ID NO: 52851 - DNA, 762 bp, Heterodera glycines
atggcatgctcagagtcttactgtattgactttatcttgtttactgtatcgaaaaagaaaaaaaggagaaaatttaaagaaaaaactattttctaatttcgtttttaatatatttaaaagaaaattaatatcaaaagattaattttaaatttaaagaaatataataaaaaataataattttttattttaaaagaaaatttaaataccatcacaaaaaaaatattaattttttaatttctattttaaataattaaaagataataaaataacaaaactttagatgaatgatggataaagccgattttttattgtttattaatttagctattttagtattttattgattaattattttgaaaacatacattttttattattaaattattggaataattgcattattttttcttttttcattcttaaattttcattttcaactatttttaaattcttttcacattcgattaatttttttttgtaaattatttaaattaacattaatatttatgttaatttaaattaaatttcttattttttccagggacaattgttgtgtgtgagggtgggctcgcttcattgcattgtccggcccaacatggaattgtcatccatgaagcaaattttggacgctttacactgcttgagtgcaatccgaacagactgaccaacatcacagaccaatgcgcaaacaatcggaccaaagaattgatgcaggccaggtatacggtggaatcaattactaccgtaattataacggaataa

SEQ ID NO: 52852 - DNA, 531 bp, Heterodera glycines
atggcgatgatcagcagggtaggggtgaaaacgaggagcacaaaacaattatgatttgttgttgaaaaacatttgattaaacatgcctaaaaatacgaaataataaaggaacaaactttgggagaataaaatgaatcgtttaaggagtggggaaattgggggggggggggctcattaaggaagcacaaaagtccatcaaaatgaaaaaatgacccgccaaaaattctcttttaaaactcaaatatttgtccaattttgcaggtgggcaaacgtaacgaacggatgagagaaaaaagtgacgggggaggggaaaaagcggggaaaagagagagagagagagagagcagcagagaaggaaagaacaaagataaagtggatgaagagaaaaacagaaaaaatccctcgcggggcgaaagtaacaaattttttaaaatttgaaaaatatgcattaaaatatggatgaaaatttacagtaaaatatgctgaaaatggaccaaaacactgaaatatgactaaagtattacaaataaa

SEQ ID NO: 52853 - DNA, 1432 bp, Heterodera glycines
atgccactgtcagttacaataatccgatacggtgggcaatgcctttttcaccgtatcagactcactaatcaatcattatttccatttccatctgctgaagacagtctttgttcactttcgacgattgctcctccaaagattgcatttcgaaggcggaggcggcagcggaagcccttaaagtgttttttcctcttttcttttactttttaccttttgtgtttatttttagcgcatttatccccttgttgacgccaagggaattcacatgaaaattccgatgcccggctatccctactcaaaagacggtggattttggagtgggtggggtaaactaaaacccaaattatttttgcaggcaaagcgcaagtggcggaggagtgccgtcgtctcgaggaatgcgtgcgcaattgtgacgtggtgagtgaatgtctgccagattctggcgatttccgtggcatcgttcgcctttctctcagctttttctggtgatggacagtcgcgagtcgcggtggctccccactcttttggctgctgtgcataacaaagtaaagccgaccattttttgattcgcttaatggaaattaagtttgctcttttgacctgttttagttggcctttacagttgccctcggtttttccgaatttgtgatcattcgtcacggtgccaaccctctccatgttgcccattctcgtgctgctggtgaggacaccgaaacttcgtcttccgtcactgatttttcgctctcgaagaggacagaagtgactggtgccgagttgggctgctatttttgtaatgatgtgaccgccccgggcaattcgaccaacggtagttccaatttggcaatcatttgcaattgctccgttcttagacagggcacttgaccagcaatgcaccatttcacgttcgggcatttcaatgattgcttccggtgggttaaatttggcatttcgattatcaattacattatttaatattattttatttgttaggaattgccaccgaactgttggcttctgtccttcaacacgaattgggcgcagaagcgcccgcccttttggccgaagtggacgaaaacgcgagtcaattgggcgccactccgcaccaaatccgcggttttatgtcacgctttcatctgatgatgcccaccgtacgacggtacgaccgatgcacagcgtgtgggcatacggtactgtttggtttggtttactgtctttgtatttttctccatttaatttttaaaaaatgcttcattttatccttacattctctcaggtcaaacagttctaccggactgagggatttgaatttttgaaccgaatcttccaaagtcctgccgagttggagcaaatcaccggattagccgagttacagagacaagcggacgcatttcaatcggaagttatcgaaatggacgacagtgaaagcatttaa

SEQ ID NO: 52854 - DNA, 216 bp, Heterodera glycines
agacaaagtgatcagagggaagagcacgatgagtttgatcaaccggaaaaagaaactgacgaaatttcgcttatcaatgtcattgattgatggtgatttagcaaaaagaaattggtgatcgacgggagacggacgaagaaaacaatggagaagaagagcaattcgattttgaatagacacagttcgataaaaggtttttcttcgtttttacaggaa

SEQ ID NO: 52855 - DNA, 1315 bp, Heterodera glycines
acccaacaatcttaatttattttacgggacagaacgttttgctgacggacactgccgaggtgaaattggtcgactttggagtcagcgcacagcttgacaggacagtgggcaaacggaacactttcatcggcacgccttattggatggtggggagagaggggcaaaggatagcatttatggggggagggaggggcaacagatggcatttatgggaaggattgcatggattttaggcccccgaagtgatcgcttgtgacgagaatcccgagtccacctacgactcgcgcagtgatttggttggtttgagacttcccatttgcaattggcaatctttcatttgcttttcagtggtcacttggcatcaccgcgttggaaatggccgaggggcacccgccgttgtgcgacatgcatcccatggcaattcccccccccccccgccgaaatgcccttcctaatttggagcttttccttcagcgcgctcttttcctcattccgcgaaatcctccgcctcgcctcagcagaaaatcgtccaaaaaatggtcgaaaaagttcgaggcattcattgaggtcagttttgattttggcgtttcgcctttcaaagcgttcgaatttttaagtgcgttttggaaaaggactacacgagaaggccattcacagaaaatctgataaagttggcaggccaaaagatgggtttctaatggcgaagaatactttttagacacacattcattagggaccaaatttcggaccgaattgtacgaaatgcaattagagaacacgtggaaaggcatcggaaagtgcagaaaaagggtaaaaggggagaaaaagcgacggacaaaaggacgacggacatttgcagaagtggacgattacttttcgttcagtggaagcgacgaggaagaagtgcaaatcaacaacaatttggacagactaagcgacaacaaaagcaatgccaaaagtgagaaaggaaaagccaaagcgaaggggcgggggagggagacaccaccacctccagtgacaaaggaaggtcctccccaagttgggatcgccaagcgcaaaagactgcaattggaaatcataacttactgcattagttggttggcttttgatcagcctttgtttgattagattctgcgattagtggcgtcgccgtcactcccttcgccgccgcgggcggtggccgtcgcgtcgcagcgaccgccgccggaggggcggaagagacggaaacgatcaaagggggcggcgacctgcgcaaagagttccagcgcattcaggagaacaaccgaagcgcattcgaaaacgagaagccaatgaa

SEQ ID NO: 52856 - DNA, 103 bp, Heterodera glycines
aaaattttaattattttttccgtttgacgcacatccgaccaaactgaccaattattgtagaagatactagccgcaagaaacaaaaaaattaaaaagttaataa

SEQ ID NO: 52857 - DNA, 2840 bp, Heterodera glycines
atgcgatccctaaataataagcttaacgaatttactgcgattatagccctaaaagattttgaattagtttttgtaactgaaacgtgggcaaaagaaaaaatacctttccaaccatttattactaacaattacaaaatatatgaagctagcagaagcggaaaaaatggtggtggagtaatgattttgacaaaaacgagcgtaaattcgttttctgtcttatcctgctctaaattcaattgtgaaatccaaattattcagataaatggagcaaaaaaattaagaatagtattactttacagaccaccgaacacttctgctaatttcacaaaaaagattctgaacctcattggtaactattttgaagaaaattttatattaatgggagactttaacctaaatgcaaaggacataacttggaccagtggaacgccttatgctaagtcggaaaaaggaaatattttttgtgaattttttaataagtatggcttattccttatgactaatggacccactcgtggtagtgcttggcttgatctgattctctcttctaaacctgattttgttaataatgttttaattgaggacatttttagttctgatcatctatccactaatttttcattgtcatttcctcagaataagagtaaggcaaatacatttacagtacgcaattataattctactaaacttaatctattaaatttaaacttatcttcaattttaccctacaaattactacaaaaatttaccattgaagataagtttaaccatttttaccttctttttagagaatatgtagaattatacttgcctaaaatcactgtcggtcaaaaatccagaaagcctaactacccattgagtcttaaactgtcaattaaggaaaaagccagactttataaactacaaaaaataaaccgtgataaatataggcatttgtatgatagcatttcattacatataaaaattcaaataaataactttgttactaaaaatgaaaataattttctgaataaaggaaaaaatgctatctacaaatatataaataaatttacaaaaaattttgaacaaatccactctcttagttacgagaaccaaattatttttgatgattatttaaaagcagaaacttttgcaaaaattttccaagaatccttttcaaattcagatgttccacaaattagcagttgtccttccaatcccaatggaccatctatttctgatgttgaatttaatgccgatgaaatttctaaaattttaaaaaatttaccgaatcgagaatccacatcccccgatgaaatttcctttagaatcttacgtaattgccaccttactctttctcctgtaatttccgaacttttcagaatatcaatggacacaggcaaaattcctgaaatttggaaaaaatctattgttatacctctctttaaaaaaggtgaccgaaatgatccacataattacagacccatttctcttacttgctgtctatgtagagttatggaaaaaataattgcaaaaagcatttataacttccttcatctgaataatttaatatccgaacatcagttcggttttgttaaacaccgatctactaatactcaactaattacagtattagaagattggtacgacagcatatacggtaagaaaaatattgactgtatctatgtggactttcggaaagcttttgattcccttcctattaatattttaataaataaacttcataacattggcattaggggaaaactgctaagttggttatctgaatttttaaaggatagattttacagagttaaaattaacaacaaattttctaatttatatccgattcagtctggtgttccacagggttctgttcttggccctctgttgtttttaatatacattaatgacctcccgcaggtaatccctccgggagttagcatcaagctttttgctgatgatgtcaaaatttatgtttcttacaaaactcgtgatgaaagaagcaaattaaatgttgctttagacaatattggaaaatgggctaatgcatttggtttaaacatctcccaaaataaaacatttatattatttctcggcaaaaataattcaaaacaacaatataaattttgcaacaatattattaatgaggttgaatctattagtgatttaggcattttaattgataataaattaagattttcaaatcattatactaaaattattaaagctgcttatttaaggattcgcaatattgccaaaattttaaaaacccgctctatacgtatttggaccaaagtattcaagacatacattcgtcctcttttagaatatgcgcccgaaatttggaatcctacatacaaaaaagatataaataaattggaaagatgccaaaaatattttacaaaaattgctttatttaaatgtaggcttccgtatataccttacgaacaaagacttgatttattcaaacttcaaactttagaagaaaggagaaaaacaattgatttagttcaggcattcaaaatcatcaatggtctcactcatcttaaaaaagacatattcccacaattttctggtcacatcccttataatcttagacgtaaagttgtgttaaaaccacaatccagtaaaacttcaaattcttttatcaacagaacggccttaatatggtctaaactcaacaaagatataacagatgctccatctgttgacagtttcaaaaaacgaataaataaatggattgagttaaacaaaaatttagtctgtaaaagagctccttggacttgatattactttactaaaatctaacgtgtaagtggtcaccccttcgttggatatttttatttcttctgaataaa

SEQ ID NO: 52858 - DNA, 151 bp, Heterodera glycines
actttgtgaggaagaacgccgactccactctgtcgtggtcttgaacctgccggaaagtgaagaaactgtgccctctgctcgtgtcaactccgattttgtggatgctcaatcaatgctcgacacctgtgagatcgaatgccggccatgtcag

SEQ ID NO: 52859 - DNA, 1762 bp, Heterodera glycines
  unsure (1)..(1762): unsure at all n locations
atgttttttgtagagcttgttaatagctttcgaatgataccaagactgttggatctggataacaaagaaaaaagttatagccaaaaacatgctggggtcaaacttgtggggccaaccgtggtaggaagaaaaagaaattgaggaaaagaagcgagcagaggaagagtaagaaagggggagaatgaagagcgggaggaagaggaagaaaagaaaggaggaaaagaagcggagggatggggaagaaaagaagcggaggagcgagaaaggaggatgaagagagggaggaagaggaagaaaaaaagcgaggaaaagaaattacgtagaaagagtaagaacggaggaggatgaagagagggaggaaaaggaagaaaagaaaggaggaaaagaagcggaggagcgagaaaggaggatgaagagagggaggaagaggaagaaaacaaagggaggaaaagaagcggaggaggaagaggaaaaaggaggataatgcagtagggctgtgcgagaagtgatttttaccgggaaccgagaaacgagaccgagaaatgaccccgagaaacgatacgagaacctagaccccaaaaaacccgagaaatttctcgactcgggaatcgagaaccgagaaatctaaagtgacggcatttttttgcttttaaaaacgtttttgctgtttttccaaaaaatttttgtaatttctttctgattgttaacagattttcaccanaaactgataattttttgcgttttgagacaattagcgactatttttacattcaaaatggctttttttgcgcattctttcaaaaactttttttaggcggaggaagtccggcgccagaaaattttttggtatttttagtgcgacttgataacagattttaaccaaaaaggctacgctaattttttcatggcaaattttaggtaaactttgaaatctttggggaattttgtggcacggcggtgccgataggcgccgccgggaaaattttttgggatttttaaggaattttgttaagaaaatttgttcaaaattttggtagggggtcgagtccgttttaggtcgattcttaggggcgtattttttgaattttttggcatcggaaccggaaaatttaaaaaatagttaaatcactaaaagttatgaccaccttggaactgtttatcatttgcagttctcttgttaatggatgtataatgatcataatttttgaaagatattttccttttaccacccattaaaattttattagggaaaattggcttttgaaaatttggaagtttttggaagcagttttaggataaaccagcaaattttctcaaaaagcagcacaaacattggttgtttgtttgactcgaattttttatcgagaatattgaacaatttattttcttaaaaattgataaatcaatgtcaaaataagcaaaaatgtgaaaatttcgatttggtttttttttgctaaaagtaagtaattttcaaaatgatttaaataccatacatattcagcaatttttggcagttttattttttctagtcctaataataatagtaataataatttgtgcgtatgatatgggggaaaaatgccgaaccgagagcggaaatttgaagaaaaatatgggatacaaatttcagtataaattcgaatttttaaagactcgtgaaaacacctcccctgcggtatacatgatcgctgatcactcgggatcggatttttatgtgctaaaaaatgctgaaatatgtgctaaaaagcccaaaaaatgctaa

SEQ ID NO: 52860 - DNA, 920 bp, Heterodera glycines
atggctgaaaacaaaaagcacaatgaaacggatggctgtgctttttctgtttctccctccaaatcattgtctaatcttttgcttgacgacagtccgtcggatgaaagcgccgatgaacgcgatgatcagactgacttttgtgggcagcgtcagcaggtgggataatttgacactgtgattcgcatttggagttcagttcagattggtgacactcacagtcattcgtcatttgttgccgaagttgtcgattcccttcagggggctttggaggacggttttttgagagagaatgaaaaggcgaaactgagtggggatttgctgaacaaaataaaattggaagtcaatgcctccaaattggcctacaatattcccgcagaagaagtgccgggccttctcttcactgcttttcttagtctccctggcgttgtcgacaaattttcggagttcacaaaggtgtcaattactcataattatttatcttgcatttataattatctttctccgttagatgtacaaccattggcgtggactttggaaaatgttttacagaaccacttttgctcaatcacaaatgctttttgctattgaggtaaaaaattaaaaaattgtttttcaaacgatgtaatattttttggtcttttatactacaacaattatgcaaattattttgctctaattataatttgaaaaagatttaggagaaagcgtctgattctgaccgcttccgtcgtgttctgccaaaagtgctttactttttgagtcaggaagttaaggcaatggacgatgctttaattgttgattggtactccaatttggaagaaaagtcgcaactgaagaaagaagagaaactggctgaattggtcacgtggcttcaaaatgcggaggaatccagtgaaacggacgacgaaggagaggattaa

SEQ ID NO: 52861 - DNA, 672 bp, Heterodera glycines
gatatgatggaagcaaagcatgtggttcgtgttgggccatttccgctgcggcggtgctcaccgatcgaatttgcattgaacgactcaaaaagggcattcactcgtacaccaatcacgcgtcgtccttcgcttccgcgcaagacattttggattcgcatttggacaataaatgtccgtcatttaatgttgctttgcttaaaaataaattgataacaaaggttcctgttcgaccgaaagttcgacagcaattgtatggaaatggttcgccgagacgggcgtcgtcacaggcacaaattactcaatgggcttgggctgcaagccgtacatttatcccccaacaaaagaattgcctgtgaaggccaatggttgccgaaaacaatgcgacaagcaattgacgttcaattacagagagggcagagtgttcagtgagtgaaacggggaaaaagcggataattagagtacatatcagggatggcacggaattccgatttccgtttttgaaaaaagcgcgccgtaaaaaacgtgtaaattagtcactccttttcccaaaaatgttctaaaataatgcaaaatgacataaaaaaagattttgataaaatcattgaataatttttcaagcaaaatattcaaataaccaaaaacatttttgaaacaccttttactaggtaataa

SEQ ID NO: 52862 - DNA, 990 bp, Heterodera glycines
atgaaaaacggaaagtgagcaccggtgcggacggagtttcgttcccaacgggtcaaacaagcgaaatgttacgcagtccgacctttgccgacttttccctgactcctttcacttccggcgacactttggcattcaatttggtcgctaccatcaacgccgaaaatggtattttcgagtgccccatttactctttgttcgcgtcctttgtcagattgttttcttgtcccttctttggacggttccctgtcaaacaatgagaaaaggaacagtcagaggattttttccgttcattggctcaacaacaaagagcaccgcttcatcttgagcactttgcaacttttgatggacgcactgccattttcgggctctgaaaatggcgttagaggtaacactgacagtcgatgttcggactctttgcttggctttctgtaaatttcagatttccaagcgcttcattctctgcactcgtcgacgagcagtgccggaattgccgccgcatctgcggtcgacctgctcgacgtctcccaccaccccccgccccactcagtcacatcgccaaacctttcaaaaacaatcgcagcaacaattgtaaaaacaaaaattaaaacagtaaatggcttgttacaattcaactttttcgttaaggaggaagcatcgtatgcgaaggatttgctcgactacaaattggaaatgcttcttcgtcaatggaataagtccagcgaccttttgtttgccattcatccgttggacggaagtcttatgacttggttcttattctttctcacatccgcagttccttccatgcgtttcttgcttaattcaggactctcgagtggcttgatgacgcgtggaaacagccgaccgtaagtttcgcttcgcgccttcccgacgcctttccgctggccgacgtcgcgtcaatgtcaatttggctgcacatttggcaccccttctctcagcatggctttaacgcgttgtacttttctcagcata

SEQ ID NO: 52863 - DNA, 649 bp, Heterodera glycines
actgtcaacgacagcagaatgtacgaattcttccgtgaggattttaaacttgaaaagtggagaaaaggcgctttgaaaaatgccttcgttttgatgagcaaacaacggtttcagcatgcggcggctttctttctgctgggcggctcactgaaagatgcaattcaggtaaaccgaggtcaatgggggtggggacgtgtccggcacttttgtgccatgatttgctcacccatccttaccttttcagaccattctcagccgtattggcgatcttcaattggcattggttgttcttcgtttttacgagtctgatccggaaagacaattcgaattgcttacggaattgctgtgcagagagattttgggctgcgagccgtcgcaattccattcgctggtcaaagaaggcaaagtgcactttccctccgccagcaggtgcaactgacaatgagacggcgaattgaacctttttgttttgttcagagaccctttcaagcggtcgatggctttttggttgataaacgaatacgcactttctgccgccacattgcttgaagagccatcgacggcacaaaacgacggcgaagacgagcagaggaggggcagtcttgtgaaggcacgccctttcctatttgactgtttttgcgttgagtga

SEQ ID NO: 52864 - DNA, 639 bp, Heterodera glycines
atgtctgatagtcaacaaagcgatcagcggaatgaacgtgttactcgccgatcgctgtttggttctgggcgaccaaatgacgcggatgaatggctgaaaagtaatctctttatttttttctcaaattaaaggtgcagggtcgttccttaaaaaccatcataatgggcgttatttaaaaaaccatacattatgaaaatttttgtcgaacaaaatatttataactttgctcgaaagcaacctttcaaaaaagttatagctcgaggaactcaaaaagccttgattttcgtacatttttggccataacttttttaaacttaataaaattttttgaaattttacaggctcataaagaacatttagatctatcgaatgacagcaaggattaaaaatttggtctttttagagcaaagttataagcaaaaattttcattatgatggttttttaagtaacgcccatttatgatggtttttaagtaatgacatagcaccaaattaaattgttcaggcctggaaaataacgcaatggaggagaaagtgcgaaaatggagcttcgatttccgaattggatgtccattgaaaaaggcgggtgccgagtcgccatcatcaagccatgtttacgaagcaatcgacgaacgcgag

SEQ ID NO: 52865 - DNA, 172 bp, Heterodera glycines
gttgccaaattgccgcaattgtcccaatcgtttgccaaggaattgaagccgttaagtgacgccgattcggtggcatttgcaccgtacggccaattggttgccgactttgtgcaccacgtggaacagtccacggaggtgcaatggccgggcgtgccggagggcgaaatgagcg

SEQ ID NO: 52866 - DNA, 1265 bp, Heterodera glycines
atgtgccggttcaccacctgtctgctcaaatttgtcctgttaagtccgttggcaagcgaatcctttcaatcgattggcaccatttactcatttttcatcttcgagcgcaacacaatggcccacgttctgatcattgaacgcgttttggccacggtaacggccaaaagttatgagcgcagacggaagcccttcttcactttgggttggctgatcattgtggtcagcagttaatttttaaataattattttaacattgtttaaaaaagacttttttggagaattccgagatcaacaagcttttgtaactgtttaattttaatttttgtattaaacgaatcaatggccctggagctgatctcatgacaagatccaaatcttcaatctcacattaaaaaactgcgagatgatttactgaacacagatttatatatttttagcattttttgaattttagcacttatttttgtgtgttgcaaaaatgttaagaaagacactaaaacttgaaaatattaatttttcaaggcaattttttgatgagatcacgaaaatttaaaataattaaacaatttttttcacactagtgattaatttgacaaaattgtctaaaaatatatagaattttttttataaataaaaaatccttatttttcgaattataggcagcagaataattttaaaacaaatttaagcatattggagaataatttgatttaaaattttttttaaagcatttttcgtctagtctttagcacattttcataacttaaccgattttttaattttttcagatttccttgggccttttcaatgcaattggctacaaagaaaatggtttttccattgttttgacgaattttgcgctgcttttctccgctggcattgaattgtgtgtgttttcactgcttcgatggcacaatgaaaaagcgtactttcggacattgcacagttcgaacggacacaatttgtcagaacgataccaagtagggaaacggagccaaaaatgaacaaagttttaacagaacaccccgtaaatttaaatggaatttccctatttacgcctccataattgcttttgagcccaatttgggcaaaaacgcattaattatttagggcagctttcatttataattagggataggatttttaagggccaaaaagtcaaaagtttttatataaaataattttaaattaaggcaaacaattattcattgattacagttgcaaataattatatatatttgaaattttgaatacattttttttaa

SEQ ID NO: 52867 - DNA, 357 bp, Heterodera glycines
atggacacacattacgcggacattctgttcaacgaccatttgtcattgtccgatcggtccaatttggcctatcgaataggtggcgcaattgtacatttgaatgttgaacgaagtctcgacttaatgggaaatatgtgccataaaacgggcctgaaaattcaaaacgcttcgcttttaattgtgggattaatgagggaacaatttggccaaatgatcgaagattttggcaaggagcagctgcagaaagacattttctcgcttccacttgtgccttttgtggaaaatggagctgagtttggacaacatgaaaaaattgctgatgagcaaagcaaagctggacaaactgctggaccctga

SEQ ID NO: 52868 - DNA, 275 bp, Heterodera glycines
atggaaatggggcaattaagcagtgagaaaaaattctccaaatttttacatccttaacagctaatttttatcaagttaattttgaattagtgaaataatatgttaattggacaaaagaaaaagaatttttattgcagagacaaaatcatgcaattatgaatatattttaacctctttcaggctttttctaccgatatctaggttcctatcctatttttgtgcctatttcgcggttatttgttgtaccttttaaaaggcatcttccggagatttaa

SEQ ID NO: 52869 - DNA, 3717 bp, Heterodera glycines
atgtttaatttggtcgactttaacaaaaggtaagaccatattttgtcgaaaaacagtacgagttgggtttcgtccgaaaaatatgtatttacataaaaatgggcaattttttgtcaaatttttaaaagtttagtggagttttggggccccaggaaaaatatttggaatttttaagaaaattagctaataacatcattattatttttaatttacatatttttatttgctaattgtaaggttttacgaagaaaattgaattttttcgaaaaattatcgtggctttaatcccgcgggatcccgcgggattggtaaaatggtcgggagggatcccggttcgggatcccgatgaaatcccgatcccgatcaatcccgatgaatttaaaaaatcgctcgggacggatcccgaggtcgggatcccgaatttaatcccgcgggatcccgaagaaatcccgcgggatcccgatcacgtccggtctctaatataggtagaaaaagcctgaaagaggttaaaatatattcataattgcatgattttgtctctgcaataaaaattctttttcttttgtccaattaacatattatttcactaattcaaaattaacttgataaaaattagctgttaaggatgtaaaaatttggagaattttttctcactgcttaattgccccatttccattttgaacccaaaaattgtttcaaatttattaatttaatttaagttggtttatttaatataatttcatttacatttaatttaatttattaagggactcaatcaactgcgatgagctggaaaatgtgctgtcacaagcacaacggaaaggcaacaaaattgaattgccatcatgggccaaagattttggcaattatttttcggatttacatttttacgggttgcatttgtccctaaatgcggaggggaccgaaaaagggttcaaaatgtccgattggctgggccaaaacaaattggacggcgaaacgacaattgcgcattcattacggacaatgcatttgcgcggagaaatgggccgcattaaggagataaagcggcgaatggtgcgccatttgattagccattttcaattggagcggttggagatgattcacccgatcagaatggcagcaggtcagcaaaagggttgcatttgatggcattttggtgccattgagaccgaactctaattggaaagacggcaaagtgttgagagtctcgaccctggggaaaaggcattttcaatgtgtaagcgtctagaccttgacgacataaatgccctttgacttggaaaatgttgatccgcagactgggccaaaaaaaaatttgaataaatgaaaaaaaattggctaaatttaaatgcgccaaagataattataaatttgttctaagaccataaatcagtttttcgtaatgttttaagtttttcaacaaaactctgtaagaatatagtaaatttctttgcctactgatcgattaacgcttaaatttcacattaatattatctatcgtatctcatgcatactgtatcacagacgcatttcagctgtcgcattttccggtcgcattccctcggctcttcccaacgagtccacaaatatatagtttttcgaatcaaaaaacatggccaatttgcggcatttttccaggtcatgttgatgaacaaacaatgagcacatattatgagatgatgttctgccaaaacattcgtctgacagaagagttgttggaatatgccattctgtgcagccaaatttttgcctatttcctccaccaaaagggtgccaaaacggaagagaatgatgccaattggtggcaaaagtttgtacattcgacccgacaaatcattttgttcactaatgacgccggtgccacggagaaactggcaaaaaaagaggacgttttgggcactttgcacgagctttggcacaacataaaagacggagacaattttgacgagaaagcattgcgaaagggcagcaaaatgggacgggaattggtggaaaatttggcaaaatgtttggtggaaatttatgccgggaacgaagagtttaggaaatgttttggagagcaaagagaacggagaagaaagctggaacaaatgcttagaatagccgaaaaggaattgggcggaagaagtgccgtgccggaacaattttggcacatttttgagggtaaagtcaaacataaatttataaattatattgttattattaaggctgggaatttaagtcacgaaaaatatccaaaagtcgaccaaaaaagtcataaaaaatgcaaaaaacttataaaaatcccaaaaagtataaaaagcaaaaaaagtcacaaaaatgcatgttaaaagcttcaaacaaagtgtagaacactgtttaagtcattttaaggttatattcaatgatggggttctaaccgagtaaatacggtattttaattttaaaaattagacagtgaagcagagaaaacgacggagccgacgaaagagcaaaagcagcagctgcaacaggggggaacctttgctgatgattcctcaatgattctgttgaaaattaatgacatttgtcccaacaaaaaaattcccctgaaagaaatagaaactgaacatttgaacaaagaaggtgggcaaaacaatgctcggcttaaacagggttagccgaataccaggctaaactggtgctgggacgttagtcaaaaaccatcaaaatgggtgaaaaaaccatcaaatgaaaaattttgacagaaaatcattcataacttcgcctaaaattaaccaaattttagaatcttcatatcattcgatagccctaagtgttatctattatcttgcaaaatttcaataaaattcattaagttttaaaaaagttatgtcaatttggttgcttttaaaaaattgtttcatttgatggttttttgactaacgtcatagcaccgctaaaacccattttgtgactcagttggaggcttttgccaaaatacgccgagtccggcaaaccccgctttaaaatgccgacccaaacaattaaatttggacaattaaaaattgaaatcatttagagcttttttcctacactctgatgaagcagtatgttgagctgctgctggccgatcgccaatcggtggacaaagagttggaaacgatcgaaagcaaagcgatcattttttattatcgagaacgcgttagggcgctgttcagaaaggcaatcattgcgcaaccaaagatggaaaatgaacaatttatggccgtaattaacaattatttgacccaatgggagtcattaatggacgaatggcaacaaaatgccaaagggacagcaaatgggtggccccaattagtgtgcaaatgttaccaattcacttacaaattggtgacggacaaacagctgaaggaactgaacgcggaatggcacaaattggtgggaatgaatgtgaaggaatggaacggcacaatgctaacagaactgatcagcgagaatatgatgagctggtttggggtcggttgtttgctcatatgtagtgatcgagttttgttcatgggcttccaatttgttattaagcgatgacaagtttttattttaaaatttttcaaaattttaagtccccaaaaatttgaaagtttcgtggtgagccgaaatgacaaaagtatcaataatcggaatatttaagtttaataattattttaattttatttgctaaaaaatcataacttagcttaaacttagtctaattaa

SEQ ID NO: 52870 - DNA, 2187 bp, Heterodera glycines
  unsure (1)..(2187): unsure at all n locations
atggcggattttacgaaacgacccagcaccgtttttgactaacgtcatagcaccttcgaaaccatcaaattatttatttttagttggatttgttcatttttgtccgatggatcgactcccaagtgaccgcccttctcattttgggcaattcgttttcggcacaacggtgcgccaaattttgggttcgatgcaaagttttgattctccaactgtacgaccgctactttgatgagcaaatggaggaaatgccaagcttacaaatattccaataccattttttgagtcatttgaatttgtattttgaaaaaattttggacagaaaaattggggcgaaaaaaagtgaaaaagcgatgaacgacgaactgagaaaaatcgtgcaaaacagccaaaaagtgtatgaggaggacaaattgatggacagttttgtgtcggaggagagggagcagtacgaacgttttgagatggtattgacggaattgcgcatcaaaacagtgaacgaattggcgaatcgaaacgaagtcttcaaagaggcattgggacattgtgagagagacagagagaaaaagagaaacttaaaataattacctaattaaattatcaataaacaaacttaatgtataattaattagggaagggattccgggatttatgtctaaaaaccccggaataagtaccgaaatttggtaaaaaccctcaaaatatgtgactaactcggacataaaagtgaaaaaatttgtttaatacgggccatttttctccaaaatggttaaattgagcttaaaaattattctattccattcaattacacaaaaaattgagtttttgtggttttgtcagaaaaaaaagttaaaattttctaccacgacaaaatttttcatttttcttaataaaatcttgtccatatgccaaaaatgtacgaactcccgaatttttggcttatgtgccaaaacttcaaaacacttatgtgaatttatgtgttaaaagaaaagtcgttaaagttcaaaaactgtttagagaaaatatattttttgggttcccctgcgataaaaattagagaaaaagataaatttgattttttaaatattttaattattaactctcacaatctctcacattgaatttctcgaaaatgactttttcgcaaacaatgtgttcatttgaatctataatttttttaaaatccttcaaaaaattgctcacaattaaaacggtttaaaatttattttaatttgtttttaaatttgtgatttttttttgcgaattggtaaaacaattattatttatattttaaacatttttatttataaaattttagtcttatcaaaaatgaaagaattgcccgattttgtgggcaaagacacaataatagaaacatggagggcaattgcatcggaacattttgaagaattgggcaaaaaattggaagaaaaatacggcaaaaaaacagcggaaacgaagccgaaaaagaaaaaggcgaaaagaacaaagaacaaaaatggaaaaaacaatgcgaaaaaagaggacggcgaaaaggaaacggaagtagcaatggatacggtatttacggaagagggaaatacagtaagcggagtggggacgaatgaagaagcgaaagaagatgctgaaatgagtactgttgatgtggatacggtaggggacaaaatggaaagtgcaaacaccgaagaagaagcattcaaaaatgaaaatgcttgcgaaatgaatggagcggaaaaagcaattaacaatggacataatgagtcattagcaccggtcggcggcgaagatcaaagaaatgaggaagacaaaagtcaacaagagaacactgatgagggcagcgaatcgactgctgttgctgatagagcgacaaagctcaaagagtttgccgacgatgactttttggcacaaaaatatgccgaatttgtgcacacttttatgatggaagaacaacaaaatggggatggcattggccaactgatcagaatgctcacaatcggagcatttgtcaacgaaatttcccatcgattggatgcgatcgaatggatgggcggtgatcagtggcaaaatgtgaagaaaaaacgcacatttttgtggtggaaaagcattttggctgatcaacaatattcagcagatttagttgatcaactttatgangttttgaaggaaatttggagtgaaagggagaaataa

SEQ ID NO: 52871 - DNA, 1870 bp, Heterodera glycines
atggaagtagcaatggatacggtatttacggaagagggaaatacagtaagcggagtggggacgaaagaagaagcgaaagaggatgctgaaatgagtactgttgatgtggatacggtaggggacaaaatggaaagggcaaacaccgaagaagaagcactcaaaaatgaaaatgcttgcgaaatgaatggagcggaaaatgcaattagcaacggacataatgagtcattagcaccggtcggcggcgacgatcaaagagatgaggaagacaaaagccagcaagagaacactgatgagggcagcgaatcgactgctgttgctgatagagcgtcaaagctcaaagagtttgccgacgatgactttttggcacaaaaatatgccgaatttgtgcacacttttatgatggaagaacaacaaaatggggatggcattggccaactgatcagaatgctcacaatcggagcatttgtcaacgaaatttcgcatcgattggatgcgatcgaatggatgggcggtgatcagtggcaaaatatgaagaaaaaacgcacatttttgtggtggaaaagcattttggctgatcaacaatattcagcagatttagttgaacaactttatgagtttttgagggaaatttggagtgaaaaggagcaaataattgggacaaatttggagaaattaacgggaaacaaaaaggagcaaatggaaagtgatcagagaagaggcattgagttgatcagcagacaaattcacagcagaaaatttggaagagcaatcattggaggaaaagtaaaaaattgggccaaaatgccaaaaaagcagaaggaaaaggcacttttgagcctttttggaagccacgaagatggcactaaaaatgccgaaaatggaaataatattgttggcaattttgagcgaaaattggaattgctggaaaaagcatttgcacagcaaaaattgggtaggagaagatgaattttaaaagataaatttttattattagaccaaatgttatttgaacaatacaaaaacaatgagaatttgtcactttttattgaaatgaaagacaaaataaattttaatggaaaaaatgcgcaaatatttccaaccgaaaattggcaagaattgaaatttacggaagaagaaaatgatggaaaattgaaagaaatcgaaaaagtaattttaaaatttgacaaataacaataataaaattttaagttgaaagacgcattaaaattgagagatggcgagcaaaaagttgcccaaaaactgatgattaaattgaatgaaatttttaacggatgggtaattaaatatttatttaaataaaattttaaaaaaatattcaatatttttctgatcagtcggcggaagcacaatttcaaccttcggctttacattttctgatgaactcagttgcaaaattggagccgatttgcattttgccggacggctttgatcagaaattgatttttggacaagcgacggaatgcgatcagtcgaagcgagagcagtgcagtgatcagtcactgtactgcaccctgtgcaaagttattctttattataattttaaattaagattaatcatttttcgggggggggggggagatttgtccttgaaaatggcgggaaaaggacaattgttgttgtccttatttaaaaaaagattgtttctgagcattttttccaattttgcgtaatcggattcgggattttgataaaattctgaataaatcctgaatttttacttgtaaaaagcaaatctaaatttttaaaataaatcggaacgcagcaaaaatgaaatttttaacgttattttaattttttgaaaaaaattaatttaaatttcagtaaatttttgagctaaacggtagcctaa

SEQ ID NO: 52872 - DNA, 451 bp, Heterodera glycines
atgcgtttaaaattgttggaattgttattgccaaaaaccgattatttgtcaatgttcagcaacaagcaaaataaattggacggacaatttgctgttggcattttggacaaatttcgaacaatttttgcctttttggagagatgggcacaaagtaaaaaaaaaacaacgcataaattaattttttgggagaattttagccaaaagtctacttggattccgacttttaaatctgagtctttttggcaaaaattctccaaaataaataaataaataaagataattaaaaaattgtacaaattaattttaagataattttatttactgcgaagatttgggctatttgaatggcgaaatgcttttgataatgttgaccaaagtatttcttctgttccccgactcgtcagtgtcttttcttgtcgacaaattctttctcatttactcaaaatggtaa

SEQ ID NO: 52873 - DNA, 715 bp, Heterodera glycines
atggacagacttggattgtcggactccatcagaaatggtctgaaggacaaattccgaaatgaggcttccaaagagaacggagcgagccaaaagaaaaagaagaaattcttcagaaaagacggacgtggcaaaaagaagaatttcttcgctgtgggagcgaatgtgatcgccagcttgggtgatgagccatggcgtgccggacgtgtgatcagccgaaaagaaggcacttacgacgttcaatttttggacggcacgatcccggcaaaaggtgtacaaccgtacaagccggatgaagatgaaaatttgaattttcttcttgacgggtttggtctgaagagagcctcatccggtggatctatcgggaagcacggcagcgatggccgacgagatcaaacgaaagatgatcttcgagaagcttccgactgtggacacaaggcataagaacgccgacctgaggatgcggatgatggacggaggcccggcacttttcaaggggggagatgttagggttgggacccaattgtccggtgcccattttgaccctttgtttcatttgtatttcccttctcccttcgttaagtcacgcccacttttccgcccataaatacccgcgatgttgacccttcctcatcattcttttgcttcttctccatttatttgttccctttgctcccaatcgatatttgaccccgttcgccctgtcccttctttttga

SEQ ID NO: 52874 - DNA, 1044 bp, Heterodera glycines
atgagtgacgatatttgcacttatttgaatatcacctcggcaaggaaattcgattcaaataatttgactaaaaaattttcggctttggattcatcgaaaaatgtgaccatttttgaatggtttttcagttcaattatccatcaatttgttgccgccaaatgtgctttccagtacaatttgaacaaagttgtggtaattatctttatattaattagtaaaataaaataaattgcaagcgatttaaaggaggcattaaggagttttaattttaaaattaaaatcaattttcttattaatttcttaaattaaagtctgatgattaccgtgacaccatactcgtgttgtccgacaagttcaattgcatttcacaaactgcagcatggattgtgttgcccagtctttttacagccatttccattgtcctcaacatttcgctgatcagtgtcacaattatcaaaaggtgcttattcggttttttaaaaaattcattagtaattgagcaataaaaacaaaaataaattaaaaatgaatttttttggcgatatttcgaagaaagagagcccagagatgcgaaaagttctttcaaatactgtacttagtgaaaagagcccccgggggctctaattttcaaccccctcaagggggggggaggttctaattcagggggttttattttcaaccctaatttttacaaaaatccaaccaaaaagcgaaaaatgaggaccaattccaaaaatggcattaaatgcccatcaaaagggagccaaaataataaccccttttctcagggagcaccacaaagtgtgcaattggttgatcgcctacgacgcactgttccaacttttcgttgtcgcaccgttcgccctcaatttggttgacgtcatttttcagtacagtccaatagactaccgtatctgtctggccactcttatggcatctaccgtagcatcgtatggctcaattttggcattgtatctgatctcaattgaacgattgttgatcgtcctttttccgttgcagtaaaataatttattaccaattaaa

SEQ ID NO: 52875 - DNA, 525 bp, Heterodera glycines
atgctcaaatatgcacataaaaatatgaacgaaatgccaaaatatgcacataaatcgcgaaatatgcacaaatatgcaaaatatgcatatggaagtacggcctagaagctcaaaccaagctaaaaacatgttttcgtgcgtttcaggcctcccgcagttcaggaaaaaatatgcatgtgcatataattttacaccctattcatcagtgtcagcttctcattggtcctcgttcaccaattcaaatggcacaattgacggcgttgacacggcggaattaaagtgaacagtgtaactgacagaagaagcgatggtggcacggagaaatgtctaaaggcaatccaaccaattaattaattagtcagtcgtttaatgaaaacatgatcactagggatgtgaattttaggaacaaaaaatcgcaaaataggcacataaaaggcagaaaaaatctttttattaacactttggttatatatttcaattgtaaattaaaattaattcaatattttaaaaaaattttcgaataaa

SEQ ID NO: 52876 - DNA, 874 bp, Heterodera glycines
atgcctgggtcaaaatttaaaatttggcatactgtaaaatgccggtttggtatgtgtcggactgagactattaatgtatgcacgctattttatttttcgcgctattttaacggcacaggatgtgaaatctcattcatttcggagtcatttgcgcgcaaggccaaccttttgggcaatattgaccgttccaattgtcagacaatatacgtgccggtttttggaggtggcaaattgcttggctggtgagtggtgtcaaaaacagaatcattgctttttaggaggggacggaagtcgaccaggaatggtcccaggatttcatcttggagagggtaccccacccacgaaaattttttttgaaaaattaatgattttttcaaagttttatgaagaactaataagttttttcaaaattttccaaaaaatcgctgaaaatttttaaaataatttttttgtttaattttttttatgaaaaagacatttgcgcctttgtccccccaaatcgtgttcaaaattaacttcttttttttccaagctttgatagcctaaacagctttaagtaagcgatagaaaggattgtaaaaattaaaaaaaatttttcgaaggcatgacttaaaaaattgggcaattaattctcttatttttacacttattttctttgcacgttttgcagggtcaacgatgttgaaattagaattgatgagctcaaattgaaatttgggcaccgtttgggggtgatggaggacaagcatttgccgatgtgagtttggcgtatttttttttattttgtaaaattcaattaattaaaaaatgcccttttttgtttaaacatttttctattttaaggtattgccaggagaaattcgacatgctgtaa

SEQ ID NO: 52877 - DNA, 601 bp, Heterodera glycines
atgtctttttttaaccatttaacaaatgatacatttacagctgatcagggtaattaataaattgggttcaatataattaaatagcaaaatgattttgtcggttaataaattttgatattttaagcaccattttaaaattaaaatttgacgctgaagcattacgactttatatttccatatttttatacatttgtatattgcttttttagcctctacataaaatttttttcatttacctaattaatatttgtatcgtaataaaattttcgtgtgaattttttaaatttattttttccttatcccccaagtcaaattaaaaacaacatagatttctgaaaatttattttaaaataaatataagtcaaagcggctcaaatttatcaaaattatcgaatggcatatttaactatttattaaaaatatatattttttcagtccttcggcttttaattactctaaagaatttttgatttttgttttaattgatttaatgaatttatttttgcaagttctttatctaattgattccacagtttggaacagctttcgccaagcctcaaaattttttttcatttaatctgcgcgtctgtgaggaaataaa

SEQ ID NO: 52878 - DNA, 534 bp, Heterodera glycines
  unsure (1)..(534): unsure at all n locations
atggcatcgcccgctaaaaacgagaaaaaactttcctccgccgaccattgcttaatttcatctgccacaattggtgaaaatcagcagcaatcgttgggttcatcatttgagacagcatttggagaacatcaaatgaaaatggaaaagcgaattttgcggaaaatgtgagaaatttaatgaatgtgaattttagggttaaaaccatttcccaaccatgaaaaaatgtactaatggccctacataacatttttgcatatttttagcaaattttcatcaaaaattgcattttgttgattttttggacaaatttagcaaactttttcggaaatcgtcggatttccaacccgaaaaagtcctaaattcttaattctgtgccatacttttacattttaagctggatttgcagcgatgtttggatggacatattccccttatttggacgtgttgaactcggcctcaaattggcaatgctttccgaccgtttcgatgctttggttgacgcgcatttcgatggcaaaagcgaatggnccattt

SEQ ID NO: 52879 - DNA, 1130 bp, Heterodera glycines
atggaatcgaccagctccaacaacagcagcagcagtcgtccagtttcttcgcatcggccacctccacgacggcacaacaacacccaagcagtgccggcaacagcacggaatggcaccgccaggaaaaggccaccaacggcaacaacggcggcggggacgacacttgaccatcaccagcagcaacagcatcagttgcaacagttgcagaccaaccgacagcaacaggcgcaacatttgttcattgaccccggcggttagtccctccgttcggcggcattcgtttgcttttgtgtgtttttactgtttttgcagatcgactcgtgctcagccaccaccaccaacagtcgtcgtcgtcggcaccgcttttggcccaccatcagcaacagccgccgattgggcccaattcgtcgcctcattcggtgggcattttgtcgtgggcggccgctttcaaagattttgccgacgacttcgcccttccccctcccctaattatcactaaataaaagtgccgtttttaagtctgccaatttgacggggttttggcaattccttcccgccatctccccctaccttccaagaaaaaatctgagaattttttataagaaaatttcatgaatataaatttttcaaaaaattttcttgaaatttttttccggtggggtgtcttggcacacacactgttattccgtggcactcccacattgtttgagactgattcttatcacaattctccaaagggtccacatgtcgtcaattcggcgtccaccagcggcacaaatcggagcggcacttcagcatcctttcggcaacatcaaatggtcggcgtcggcactccgtcctcctcgtcttcctcctcgctgatgatggcatcggcacaacaacagcccctgccgcagtacattctgtccaccgctacggccgcagcagcacaacaccattcccaacaacaacagcagcaagcagttcatcagcaacagcagcaccaactgcaacaattgcaacaccaccaccaacagcaacaacagcaccacgcccagcaacagcagcagcaacaacaacaattgtacgaagtcgagtcggaaatcatcgacctgctcgtccgccacttgggcaacctcaacgacgacgag

SEQ ID NO: 52880 - DNA, 860 bp, Heterodera glycines
atgtgttccccccatggccatggctacgaatgccctgcaaatatgcaatgcatgaaactgtcgttgaaagccaaccaaattggcttctacggcatgtttaacgatttcggtaccattgttggccttcgttaattctacccaattagcacattccgcaatgaaggcttcagtctgtttacggtgtatttggccgcttctcaagagggttgggtgttcgtcctctacgacactttggacacttttccctcctattgcggctttttttatttcctcactttgattttctttttggcttggcttgttaaggtttgtcatcatttgttgtattaaacaacatttcatttgcttttgaacagaatgttttcatcgctgtaattaccgaaacattcgccgaaattcgcgttcagttcagcgaaatgtggcaaagcagagaaatggcgcaggacgaagacgcaaatcaaacggtaaaactcagacaaaacattaatttaaatttcagaattattttcgacagaaattggaacgcgacgacgacggcgagtggcgactgcgcgagttcgacccgaaggtgaacgacttggacaccatcgaccagtgccgcgtgcgccgttggctgtccgcattggtccgctccacttccttccacacattcatgctctgtttagtgtaattaatcaattatttgactttttaaatttaattttttgagtgttttcaatgccctcatcaacgcatcattcgtttatcggcacaacagaagcgatgcgagacgaaagcgcatttatcatgccattgaggtgcagctaaaatgccaagcaaacccatcccaccattctttaattgcttcattaattggttaa

SEQ ID NO: 52881 - DNA, 236 bp, Heterodera glycines
  unsure (1)..(236): unsure at all n locations
atgtttttaatttggtcgaccttaacaaaagttatgacatttttttgtcgaaaaacagtacgagttgaagctgtacgagttgagcagtacgagttggagcagtacgagttggagcagtacgagttggagcagtacgagttggagcagtacgagttggagcagtacgagntggagcagtacgagttggagcagtacgagntggagcagtacgaggtggagcagtacgagttggagca

SEQ ID NO: 52882 - DNA, 329 bp, Heterodera glycines
atggtgccatttgaatttcttaacgaatggacaaaggaaaagctgacattggccaaagcaaaggaattgggcaaccgatggataatgaaacgatgcaaaattattggggagaccgcggcggttcagcagcagaagaaagatgacaattgtaacaaagtggccatttggctttacatttgcaatgattgcattgggtgagcaattaaaaaagcatttgattttgtttaaataattcaaatttcgcttaattaaggccattgtctccgccaccattcgcagaagaatccggacaaagcatcacaaaagggccgtcttctgctgacaaatga

SEQ ID NO: 52883 - DNA, 378 bp, Heterodera glycines
atgttggaaaatattttcaaacaaaaaggaatttacttgagagagggaaaacattcgcgaaaagaatggcaagaatttaaagcagaaattaataaaggttttggataatttcaaaatgggtcaagtaatttgacaaaagaaattttaaatgacaatttttgaaaaattttaattaataattgttgtttaaaattcagagagtaaaattttaaaactgccgaaaaatgaagaatgtgaagcaatattggcaaatgaaaaagaaaaaggcaaaaatagcgacagaaaaattgcaaaattttgagcattgacagaaaagtttgaaaagaaaaacaaatataaaatttaatgagaaataattttaaaatactaatttgtaaa

SEQ ID NO: 52884 - DNA, 677 bp, Heterodera glycines
  unsure (1)..(677): unsure at all n locations
atgaagtaaatttagggggaaaaatataaaattgtaaattagaatatttagaattttttttctcttgaaaaaattgacgtgagaaatataaaatagtgtataatatttttttagtctactttnaacaatgactaaaattaataataaactcattaaccaaattaaatttttactcataaaaaaattgtaatttcgataaattgcaatgaactagagcttgtcggaaccgggactggttctgaaaaaaacgggtacaactgagtacccagtcccggttttgaccagttttgaccgggaccgggactagtccggttttttcccggttttcccagccaaaaaatcccggcttttcaatccgaaaattcccggtcccggtttttgtcaaaaatcccggtcccgaccagcactacaatgaactcttaagtgccttattaattattacatgataaattaacttttttttaagcatggaatatcggaatgcatttcaaaaagtgttcaagtttcttcaaccaaccaattacaacacaacaatcatcggaacgcaacaacaacaatgggcaattcgcgtagcaacagagaatgttcagaattgaatttatacgattaaatttaatttccaaatttccaatttaaaaattgtttttcatttttatatttttgccatttaaaataaa

SEQ ID NO: 52885 - DNA, 1273 bp, Heterodera glycines
atggcagcatcaattagcaaacaagcaacagtgccacctgccgtgccaagaaagccagtgccgccaactgagaccaaaacagcgccgaaaacaatgccaaactcaacgccgaagacaatgccaaacagccaaaaaatgccaaaaagtgaaacaacgccaaaggaaatgccaaaaagtgaaacagcgccaaaggaaatgccaaaaagtgaaacagcaccaaaggaaatgccaaaaaatgaaacagcgccaaaggaaatgaacgaagcaataaaatcgaaaacaaataaaacaacgcctccggggacaaaaaaggggaataaatcggtggcacctccagtattttgtttgtcatttgttgcaaaatgaaagatgaatgaattatttatattgagaatgaaaaaaaaaattaattttataaattttactcaatgattaattaggcccttgataaaaaaaaaccaaacaaaaatgtcctaaaattcccaaaggcaaccaaaatatgtcacaaaaactgaaaaaaatcatcaaaaaatagtttaagtttcccaaaaagtctcatttttttccatttctctagcataacgcaaatcaaaatctttcaatgctttttggcgtacattttttctcgccttcaaagatttacttattttaacggaatttcttcgtcaaaattcaaattttgccttaaaagcgaaaaactcataaaaaaggtcaaaaaatacaaaaaaaaatttaaaatttcggacattttgccaagaattgggtgccaaaaaagctacttttgtaaaaaattcatttttttccaaaaatcgccaaaatatgtaccaaaaactaccaaaacccccaaactatgttttaatgacccaaaatattacgtacatagaattattggctaattggttgagtaattttgccatgccaatttttgtttactgtgccaaaaaatattttcgcaaaaattatcactttcaaaattaatcgcttgaagtcgaaaaaattgtcgatcgaattcgaaacgattcctgctgctgctcaatatctgtggttatgctgcaccataatgttacggttgcgaataccgtacatttgcgtcggatgctgctgctgttgcagttgctgctgctggcggagttaccgccgttgttccgccggcccatcgtatacggtacgcagtgcgcgacggtagtccgtgctaaaaagcacgtcgtaaaccactttttgttcaaaaaatttaaaacaaagtctatggaatgaaaaagtgcacttcaataaa

SEQ ID NO: 52886 - DNA, 1700 bp, Heterodera glycines
atggccaaaacacagtattatggtcagtcgctgatggacaccggcacagcggcgttcatttttgtgaatgctatcgccgaccatgatggaatggcacgcggacaaagcccacggcagagggcggccaaggcgacaatgtcagtggacgggcggagggtttggaatgccgtggcacaatgccacactgggaaaattattgtgggcatttgtttcatttccttcgacagaaaaatttaaaaaaattttttttttttattttcagtgctttttttgtaaaaatttagaaaaacttgatagttcatcataaaatttttaaaaattgctaaaatctttcaaaaaaaatttgttttcagtaaattttcttacaattagaaaacattttttggactaactaatttaaattattattttgaattttaggcaactgttcgccttccgagtgcccacccttttggcactgtttctgatcggagttggccgttccgtgttcatccgtttcagcggctatggccaagacgtgacggagtacggcgtccactggaacttcttcctcaccctcttttgtgtcagggtccgtccgtttctattgggtttccaaatttgatgattttatctgatatatttgttccccagctgttcgtcatcggtgtgcccaatgcgctgcttatgccgctcggtgtgctgctcggcctcgtctaccaaattgcgcttcggcttacaacgcttgagcaatggattttacggcccgacttcggggagtcacggcacggctttctcgaccagaacagagagggaattttctcgctgttcggctactgcttcatctacgcgctgtcgctgatgtacgcgcggtgcagcgccaaactgacgctaaggcaatgaaagcgactcaattttttgggtggaggggcggcaaaattcttagaagaaacctctggtaaaatggatggtcgtttgatatttctttattcataaccttgaacctccatcatcactccatggattaaagcaaaaaccgaattttcgtatattcacaatttgaacatttgcagagacaagaagctgtccccgctgaatgtcgcgggcgaactcggtttcagcctgtgctgctactgctcgcagagggtgctcgaggcacactttggcttgagcgcctcccgaaggttggccaacttggcctactcgttcgccatggtacgcggcggtcgggaaaagctttttgccaataattgccacccttctcttggcacagttgaccctgttcagcaccacctgtgccctgttccagctcattcagctcgtcgttccgttgccgcaggatgcgcgccggggtggacttgtggcagcaatcagccgaaacgcactgctccattttctgtgtgccaatctgatgactggcttcgtcaatctgttggcaatggcatcgccgcaccttgaaatccatggccaccagattggcgaaactgttgccatgctgacgtactcattgctcacctctttgctcatctacggcattcacttggccaaaaaacagactcgctgatgctcaattattggatgaacgcatgcagtgatttcagaaaaagtgctttacccacgactcgatctctctttcccattttgaaattctgattttaatttttataatttatggttaattaaatgtcttaaatccaacgtttgctttgtgtcctaataaa

SEQ ID NO: 52887 - DNA, 3697 bp, Heterodera glycines
ccaaatgcgtgcggtccatttgtgccatgcccgccacaaaatgtccacctcgccttttccttgcccacaagtccaacagttacatcttcgccgttgagcacaatgccattcaaacgccgctcagtccgtcgccattgtgcgtctccgagctgttcagcgacgactttcgcggctccggcaccaccgggcagctgttgctcatccccggcaaacaacggccccctctgtcagtggaacagatcgaacgctatcgcaacgaggaaaagtggcgcaggaaaaggtcagcaatcaattcggcaatggtaaagaattgtggtccctatttaattttcctgctccaaatcagttttcgagggtgctgttcacgaacctgaactcgggtttgagccaatttcaaatcccggacccgtacaaaaagttgaaattcttccaaataatatgtcgttgagatcaatcaaatctgacgaaaattgtgaaattttatccaattatcaattgacattagtgcagtttgcgcaaatcgtcttccaattttctttccgtttgtctatgtcagattgactttctattcggtgttgtggctcggctggctgttctcgttgatgtttgcccttttgcttgtccatgtccatccaaagtgtgcgccgtcgtcgtccctttcgctggaatggtggaagggcacactgatttatgaggcattgcttaaatttattttctttttaagtgagtaaattttcagatttggactctctccttccatggtaatttattttccgaatgattgaaatggtctttaaaacattggattttgtcatgggagttgatttggattttcggtgaattagacccgaaaaatgcgctaaaatatctaaaaaaatttgtttattaatgaattgtatgaatttttccgagatcccttctaaccagtatcatcttattttaattatctttcccattttcgactcggacggcaacggcgtcggcgatttggccggcattcagctcaaacttggccacttgcgccgaattggcgtgggcgctgtgttccttcgtccaattttgcgcacagaaagcacgggaatgggcgtcattgacttcacggcattgagccaacaaattgacgcgacaatggaccaattcgacgcatttgttgatgcagcgcacagaaaaggcatgggaaatttttaaaactgagcccttgatactcagatatgatcaaaatatttgaattttatgattttttttactcatatgagcgaaaaattcggcggaaattaatttaaaaaaattatcgaaaatagtctttgcccgtgtcattcttttaaatttccattttaaatttccgtcctttatttctttttatggcccttccattctcttcaggcatccgcattctgctcgaccttccgcttgccgtcacttccgttgcccacccgtggttccgtcgcagtgcgttggctgcacgacccgaaaatgcgccgtttgccgacttttaccactggcgacgaagtgccgtcccttccaactcagcgttcgtttcggctttcgacggttccatgcttaaggcactaccgcttctctgctcgaatattaaattaattccttttttagtatttccatgtggccaatcgtgccgatttgccggtactgaactggcaaaacgcaaatgtttcgagtgccgtgcgggcagcgctcagtttttggcttggccacggcgtggacggcttccatttggcgggcattgactatttgcaccggacagctgacggacggagaccgtcgtgggacgaggtcctaaccaaaaccacccaaataatgaaattaatgtacattagtcgaaaaacttgaggaatcagaggtccatcccatctgtcaattaactgataggacgtcaccgaaatcattggaactgattttaaaaattcatttgcttctgttttagattgtcgcgattctcaaatcgtttaaaacgaatgcggaggagcagtggcgcatcagacgaagagacggggaagggaaaatgtaaggggacagaccgatccaagggcgtagccttggaggggctgacaaaggataggtacccaagtaaattttttgagaattttaagcaattctcttaaaaaaatcacaccaaaatcattttttggcgaaaacggctatagattcccctaaaacacaccccctaattaattttggatttccaaaaaaagaaaaaacaaacctaagaatcgaatttttgaattcagccccccccccgaatagtgtttcatattttttcccatgtttcagctttctcttcacttcccatgagcatttgtccgaggcgttaaaggtgcgtctggtggatgaggtcggcctggacgcggtggtgaacacggaactgcgcgacttggcactcggcaaccgcgtctgtgccaacaaaaccgcacacgcagtgccggcgatgagtgtggccgagtgcgccaacgaaattttagcagatttgttgctgttccaccaatcgttcagtgagtgccttcaatttcaataccactcataaaagaaatattcggagcataacttttttttgatctgcgtatactcgggtttttattgactatctaattcaaaaatgaaagcaaaacaaattctaaaaatttggaactccttttttaaaacatttgtccatgcatattttttcgaaattgaaaattttcttaattcctctggataagctcttggctcatcactcattttgtattttttcttaattggccgtttagccaatgtttggcccctttggagtgtcggcggttcgttcgcccgtcggttggcctcgcgcgtggacggcaaagtgtacgcggagttgatcatgctgctccaactcgcgctgcccggcactccgattatttactatggcgacgagttgggactgcatgacgtgttgaacttgaaggcatattttttcatagatttgaaatcaatctaagcatgggtttttcagtttccgcaacgcggcccaatgccttgggattcgtcatcgccttttgacaatcgaacggacggcgcgggcagcattgaaacaaattttgacgttaatttttgaattcaatctttactgtaggatgccattaggatgagttggccgactcgcgcagttttctgcacagtgttcgtgccatggctcgccttcggttgcgcgacgccgcgctgagggcggacggcacgggcgatgtgcgcacatacatcacaaaacgagtggacggacaagcatttgcactctgtcgctatttgtgctgcccagaggaggaaaagaagtggaacggaggggacgagtcgcagcagcagcggatgagcacgacagtttatggcgatgtaattttttgacagtttttccgaacataattttggcacttgggaagtccacagtcaataatgccatacttattggcatgccttcatattaaattgtacgatttccatctttttcccccgttcgcagagtgttgtcgtgctcgtcaacttcggccccgcgccactcactttttctttgtccgatttgccgcccttccatcgccgtggggtctatcggcgtggccgaattgtcgctcgcagtgcgaatgccgcctccaaatttgcgcttggtcttggcattgagttggacggacggcaggtgcacatcggagccgggcagggcatcgttttcaaggcgttcgaa

SEQ ID NO: 52888 - DNA, 616 bp, Heterodera glycines
atgtttctcggccaaaccttctgggccgaccatttggcccttctgctgctcgttcagctcgcgctctgtgccgtcattttcgcttgctgtgacagtgcgcgcgcctgcggtgtgacgccgctgcgctcaatgcgtccgctgcgcgtggacgcggcacgcgcccaacgcgacgcgcacacaatgttcaggtgagagagaattcgctgaaaatttttttctttaaattttcctgtgaaaaattcactaattttttttttgaaaaattaaaattttccgggctggagggggggggggaaagaactgcttccgggatgaattgcttcgaccgggggcatcaccccttctcgacacgtacatgaaatgatcagccgagggaattaaatgctattcaaaagaaaattgcacattttaattaggcatttctggggcgtgtttttcggcgtttcttatccgtttttgttttttcgtgaaaagtcgggtacaccccaaaatgtcgccgggacacaacgtcgctgcaaaaaataccaaaatttcaccattttaaaaattattttaaagcttttttcaacctaaggattaatggaaatagatttgctaaattttcagaaaaatttga

SEQ ID NO: 52889 - DNA, 109 bp, Heterodera glycines
atgaagtgcaaaaacggcaggggaagtgaggaagggatgattgaagaaagagaagaggagtactttgaggttggaaaatgtggtgccgttttctgttcagcggataatg

SEQ ID NO: 52890 - DNA, 601 bp, Heterodera glycines
atgcgtcttgagaagtgttggttttgttcatcaacaatttatccgggccacggaattcaattcgtacgtaacgacgcaacggtgaaaacaatttattgttatagtacataataaattaaaatttttgtttaggttttcaagttttgtaggtcaaaatgcaacaaattatttaaaaagaagaagaacccgcgcaaattgaaatggacgaaggcatcgcggcgaattcggggaaaagttagtgtttgatttttgtttttactcttttacatttattgtaaatttaaatttcttttactctttaggaattggtcaacgatgttactcaagcgatggaaattcgcagaaacgaaccgacaaaatatgatagaaacctttgggaaactgcaggtaaatcgtccatatataccaacaaaccgtaacgacgaaaaaaagtaccggaagggagaatccgcaaaatctttgctctcggacacttaaacatttttcctgttttaaatttttcatggacgaaaaaacatatacagcggttttcgccaaaaaaaaaataaccaatttgggtagacaagtatgtctaataaatcttccatttgaattttgattt

SEQ ID NO: 52891 - DNA, 467 bp, Heterodera glycines
gagcgacgattctctgggggtagcattcattttgaggtgctttgagtcataacggccgcttttcaaaaaactcattggggtcgtccgctttcggctaaatagtgcacctcagcaaaaggggcggcgtttgagcgacgattctctgggggtagcattcattttgaggtgctttgagtcataacggccgcttttcaaaaaactcattggggtcgtccgctttcggctaaatagtgcacctcagcaaaaagggcggcgtttgagcgacgattctctgggggtagcattcattttgaggtgctttgagtcataacggccgcttttcaaaaaactcattggggtcgtccgctttcggctaaatagtgcacctcagcaaaaggggcggcgtttgagcgacgattctctgggggtagcattcattttgaggtgctttgagtcataacggccgcttttcaaaaaactcattgggg

SEQ ID NO: 52892 - DNA, 558 bp, Heterodera glycines
ttaaacagccaacaaagataaattaattattttgttttatttctgtgataatctttataaaaattcattcccttttgaaagttgcaaagaaattctgtgggacttattgtggcacctctctattagactcttgtctaatagctcctgtaatctggttttgcaactttcaaaaaagtaacaaattacgaattagcaattttatattcgaaaattttgcagttgataattgttgctataaccacgatgtgtgctacataaataaatatcagaaacgttacgattgtgatattaaattttgcaattgccttaatgaatatcctaattgctttctaacaaaagtctgttctccaactcatatcttaaatattttattttttagaatatattatgctggtcagttcatatttttggagaatgttttaaagaaggataaaaataattattttattttaccgtcaatagatatgcatatgtattttaaattttttattgttatgtaaacttctaatatatatatatttatatacataatcatatgagttggcggttttaagaaac

SEQ ID NO: 52893 - DNA, 683 bp, Heterodera glycines
atggagaaaaacaccgaaagcctttccaagttggatcctagcgaaagtaattacaactttctgttccctgtaacaaaaaccacttttagctttgggaaccgatgccctcttacaattgatggaactgatcaaactgaggcctaaacagaagcaggtgacccaggaaaagttttatgttctttatatctcttctgcattttaagggggaagtcgagtcggaaaaaagggaaatggaaaaaccaattgcggactttcaccaccgcaaaacggatcagataaacccggacagcagtgaactgaagaaggaactgcgtgaaaaagggaaattggaaagttacggacgaatcactgatgaaaagggggaggagaaaggtaaaaaagacaaatcaattccaaaatttattttgttgcttttcagattcttggggccatgcgcttcagaaggaattggacgaaaaggtgcgaaaattcagagagctcaaccgaaagaaatgaacgagaatttaattgattttaccggcattttcactttttcacaatgttagaaatttatagcattattcattttgtttgattcgttcattcggcacaacaactcaaaaccagaaaatccagggattatgccacacagaaaattgttattaatataacactttaatatccaattttgtttcctatgacga

SEQ ID NO: 52894 - DNA, 437 bp, Heterodera glycines
cgtacgacctgcactttttcgagcgcaattacaagttggggcctgagttaggccgcggagggttcggcgtcgtctattccggttttcgagtcgcggaccgggagccggtggcgatcaaatacgtggccaggcgcaatgttaccgattgggcccagctgcgtggcaaagatgttccgttggaaatcgctctgcttgaaaagtgttccgcctgccctggagtcattctgctgctggattggtttgaacgttacgacggcttcttaatcgtcatggaacgaccttcgccctactgcgacctgttcgactttatcactgtcagaggtgccctcgacgaatcggtcacgcgcttctttttcaaacaaattgtggacacggccatcgcttgtgcgggccgatccgtcgttcatcgagacatcaaagacgaaaatgtgagctga

SEQ ID NO: 52895 - DNA, 504 bp, Heterodera glycines
atgcccaccggcagcacagcttccgcctcctctttcgcttcttctcccgccgctgcttcgcctcctttttcgtcgccttcgcttctgaggggcgctgttgccgaaatttgttcccaaattccgttgaatccctccgcacttttccccgttccgtcccaactttcaacttccgccgcgcgtgacaattcggcgccaattgtgccgcagcagcagcagaggagggccgaaacagaggaggaggacgcggaagaattagcctgttttggtcagtcaatcagtcgcaatggacagaacgcaccagggaaaatcccccggggggagggggggtaaaaaacaaaaaattggaatggaatcccggggcaaaaaccctcaaggccaaagtaccaccacccaagtttaattttgcagtgctttgccgaattatcccctaatccttttatccgttcgttcgtgtccaacagtcgcaaaatctcgggagagggcacactctgaacagaaaataaa

SEQ ID NO: 52896 - DNA, 972 bp, Heterodera glycines
  unsure (1)..(972): unsure at all n locations
attaattttcatttttaaggtgatcgccaatccgaaccctttggccaatgcgccggnaaaattcaaaaatatttaaaacccgaatttgcatcaattacaccgtcagtttccttcgtttgttcagacacgcatttgggcgaaatttgggtgtccagcgggcacaatgccagcgggttcttttcactgttcagtgaagaggcgcatttgcaaacgaatcatttcaacgccaaactgaagacgggtgacaccagcacggcattcgcacgcaccggctatttgggcttcttacggcaaacgcaagcgatcacagcggacggaggtgggcgaagggagagaacgacggggaggggagcaaaaggaatggcaaatgacatgagacatttaaggcgaaacaatatttgaaaattcgcatttttggatcgaaaaatgaaaaataccgtcgattccaagtgtgtttttagcatgctctttcgatttttttctaaatccaatgcttcccctttttcacattgtcagaattacacgacgcaatctttgtggtcggtgctttggaggaagcgctgatgctgcgcggaatgcgcttccatccggtggacattgaactcagtgtttctcgggcacaccgccgaatcgacgaaaggtaagaaatcacgtcgatcaatccccccgttgttaattgcctcattagctgtttccacggcgcttaaaattgccttcgttaagctgcgtgttcacttggacccatctgttggttgtggttgcggaaacgcatgcccccgaggcggaggcgctcgacttggtgccggcgatcacttccgccctgttggaggaccaccatttgatcgtcggcgtggtggtggtgttggacccgggcaccatcccgatcaacagccgaggggagaagcagcgtatgcatttgcgtgaactgttcctcaggaccagctggaccccatttacgtggcgtacaacatg

SEQ ID NO: 52897 - DNA, 273 bp, Heterodera glycines
atggtgattgaggtggcggaagagatggtgaagcacgaggaggaggaagtggaggaggacgaacggcaggacgaagaacggcacggcacaacggagggacgaagcagcggagggggcgcgcaaatggcagaaccgaccccggcggagggacaaacggatcagcgcgaagacatcaccgcaggtggaggggcgacgaacggcggaagggaaaacggtgggagggacaaaaagggaggggaaggggggacaggggcgaagggagccggggactga

SEQ ID NO: 52898 - DNA, 1048 bp, Heterodera glycines
atgaagaacaaaacggaatggaaaagttgcatttatacaaaaagaaggtaaattaatgcatgcgggacgtgagatttgacttggaaattaaaaatagttagattataggttcttaaaaagtggtttattgtttgcgttggggtagtgcgctggtctcaattttttcggtcacaggttctaacccactgcatgcaaaaaccatttaacaatttttatttttgctttttttatgcaaagtcaattatcgaaaatatttttatgaaaccaaatttttattttttattattttaacaccataagatacgcaatgaagaatgttagacaaaatcaatttattttaacttaaaggagatttactgcttctttacctttaatgaattttttgattttaatgaaataaattaaaaataaaggttttattgataaataattttttttgataattgacgttgcataaaaaaagcaaaaataaaaattctgcaaaaataaatgctctatccacccaccaagtttcattcagaaaccccacggatacctggggaccttcctttgttagataaatcctaaaatagagaaatacttattaattttgcaactcagggggctgaaatttttggaagtcggaaatgtgagcccaaaaattctgaagttggaacttagactttatcggagtttacaaaattttattggttcttaaaatttaattttatttaaaaatttattgaaaaattgcctataagcggtatccgttttgagttatttttttaaatatatgagttttggtccactgttaagttgcatagagtgtcattctgaattggcaaaatatatatatatatatatttttttttaatttgaaaaagccgaaaatttaaaaaatttttagaccttttggagaatttggcgttgaagccatcatttctctcgagttcgaacgacaacatttcggagataaaaatcatattgttgaaagcgtacaaacattttaacattacacctgaagaggaaaaccttagtgaatttgaaaaaattacgcaaaattttgcta

SEQ ID NO: 52899 - DNA, 440 bp, Heterodera glycines
actcaaaagtaccgtaaggcgttggaacaaatcaaagctgagatggtaaaggatgcggattactgtaaggattgtgcaattcctaccgttacccaagtcttggcaacaccaattccgcttagtgaacaaaccaaagaattgatgcaaaaaggcgcaaaaaaacttggcacgtttttccaaaatttgcaatttttgccaaaaaacaaacaaaatttaagatgagaaatttaaaacatttactaagcgcgcatgattttcaaaactgtgtcaacaaatgaatgatgggatatgggaacagtgaacggatattgtgtgatgaaatattcattattatttttaatttcaagcatgatgttatattatccaacgaaaaaacatgtttttagatgatattgttaagcttccggtttttatgtcctaaaaataaacatcaatcagtc

SEQ ID NO: 52900 - DNA, 315 bp, Heterodera glycines
tttttgggccccggggtcgtttgggccccaacacaaaaatagaaaaatgtgcttttttgaaaattaagattctaaaaactaagcctgagggatccctcgccacttggcataagttaggtttaattaacattcgctcattttttacaattttacttattccaaatcctattattttttaatagttattgatgtacattctgatttggacatttttcagaaatggctaacccaattgcaaccaaaaaacaaaaagtaaaattgtcttacgaaggccacctttacaccttcgctaaaatgagttctgatgggatgaca

SEQ ID NO: 52901 - DNA, 930 bp, Heterodera glycines
atggacgagtccaacctcggcctgctcttttcttcctacgtttttccagtccaacaacaggtgaaatcaaatcaaaacggatttttagcaatatttggacacacatacttgatgaaaagggtcgactaattattgttcattgtcaatatccaccaaaatcccccgacataattacaaacgaacaatttattgggaacaaaattcctttaaactcactcacataatttcctaacttgtcatgtcaaaagcaccaattttatttgtgatttacgatcttaaaggcctcaaaaatctttcggtgttactttatttgttttggttttgttgggtattttatgcctaaacccaattcgacaaaaattacttttatttagaaatacgaatcaattgaaaaggcaaaagacgaaattgcgcagttttgtcgtttgtttcccgttttactcaaacattgcgacgcgctgtttaaactgcccgctgagctcgtgcagactttcgacgcttctctaatgaaaagggcccttgagcagcagaattgcggggacctcacatccagcagcactccctcctttccctttctctcctctgttggtcggtcattttgtgttgttttgcattgttttatttgtcatttttcaagccaactccaaatcgaaacacaaaaactccgagaagagacgaagacgacgcgggtgagaattggcagaaaatcgcaactgaaagcatagacaaatttcagaagtcgccattgtgcactcgtgctcaaagagagtggcgacgcccaaccaaaacaccaccgatttggaagtggcgaagttggcggcgaacatcgcatcgatggaggaaggctcggccaggtcgcggctgttgaacaaaatgatgactgtgcagcgccagaaaatgggcattaagaagaagaagtccattctccgg

SEQ ID NO: 52902 - DNA, 328 bp, Heterodera glycines
caaaatgtcttttactgtcgtgccaattcttttttgcttctttttgcctgctctttcgatttataaggtgtccatcctctgattggttttgtattttgtgaatttttttagccaaattgggactcaattgactcgcgccctttgcccaattggtacgacgaagccaaatttggtattttttcgcattggggagtttattcggtgccggcatttgggtcggaatgggtaaggccgaaaacagacccatttgattgttgaagttctttgaagttttggtggtattggaagggacaacgtgacgcaaaattcgaaagatttttcaaaaaca

SEQ ID NO: 52903 - DNA, 195 bp, Heterodera glycines
atgcaccaaataattaatttttatttatttattctgttcttcgcacctaattttgctgaaaaacttcggtatgtacagattatttggcgccatggagacagagcgccgctggaaaagccttaccccggcgatttaaatggtcaacctaaaaaagaaaaataaaataaataaattaattaattaattttcagatga

SEQ ID NO: 52904 - DNA, 620 bp, Heterodera glycines
atggtcagcgaattgcccgagcagcgtcacttcgttgccctgcaccactgcgttttgctgctgcccaccgaacaccgcgaggcgctgacgcaattgctccgttttctgggcacagtgacgcgactgtcgcctcgaatgacttcgctgtgcatggccacctgttggatgccgacgctgttcaaaatgccgggggacaacaaaatgggcaagttgatgacgccggacaacaccaaacggagcagaaacagtaaattgacgtaagttacggactgaaaaaattgcggcgaaactgccccccccccaaaaaaattaaaacaaaaacaaactatgcatttttgaaaaattcaagattttaaaacgtttgttgttttttaagccgtcgaaaaaccatttgcacgcccgttttggattctctggacgcagtgaagagacttctgatgacaatgatagaccaatgggagcgtttgttgtacttgccgagtgccttggccaaattggtcgctgaggacaaacggtggaaagtgtgccacgacttggaaatgccaatcaaaaacggacagtttgacttcagcacggaattgcagtacaactttagacagcaattgtcccgattaaaggcg

SEQ ID NO: 52905 - DNA, 1275 bp, Heterodera glycines
aatgtaatggtcgacttggctacactcttgttgaggtaatttttatctcccccttttttcccaatttttttagcggtgaaaaaacgcatttttttcaaaatttccttggatgatggcatatttgttgtatttcctagggtgattttcccccgaattttcaggatgattcttcactgttgggtggcatcacttttcgctcaattgtgtccggtgacaaattgccgttgttgcgcgactcaccgcccgagtcgcatgttgagccggtggcgcaactgttgcgatctccacgtgaccacatggacaacatcttcaacccagcggacaacaacattgtggacaacaccaatggcttcgctttggcgccttacaccgaacagcgacgtaattttgccaaaaaactgatattccttacttgagctagacctggacctggatggattcaagctttttttttcctggacttggattttcctggattttgttctaagccatgtgaaaaataaaaccaaaatgattacttggatttaatttcagaatttattgttcagagtgcagtttttttgttttcaagttatcgaacactgattaatagatctaaacgattttattatggatattcctgagcaattagttgacttttttaaacatttgtttgttttttaaaataaatttaaaaaaaatccaggtccatgccatgacaggcctggatttttgtcaggaaacgcgggtgggcccgggcatttttcaaaatatcgcccttttcaggtgcgcccagcggagtgttggcacagcaaacgatgcaacggttcggcaatgcgtatttcatggtttgttttgttttataggtggcatgcttaaattcaaaagtcgaaaattcaaaaaaaaaaaactttttttctttgagtcactattgaatggccatttgaattggtgttgcaatgcgattgttgaaactaattttgcttatttttgaaagatttgtaaacaaaaaggcgtgaaacccgagaaatttttgaattttcgactttttttttgttcgagttcgggtctctggtttcggaatatgtgccaaaatgaaatagtcataatttattctttcttttcagggtaatagtaataatagcactaacaacaccaccacttcctccgcctattcattggcaacaattggcaccaatacgacgacgtacagtggcggggcctgcaacggcagcggcggcacattggtcacaaacgcaactggcacaacaggcggacgtcgtaaagaggtgtaca

SEQ ID NO: 52906 - DNA, 1514 bp, Heterodera glycines
gcactccgttgggccgatgaaaaatgtcttcaaaatgccatcgaatgttccgctgagaatcgtcgtgctgcacttggcccggcacttttcaaaattcgtttccctctcatcccatcagatgcatttgtgaagcaaatcggtagaaaatcctttttttgttccttaaaggatttcatttatcgagcgagcatttcccttttcgcagttccttctggtgttctgtccaatgatgaatttgtcggcgttttccaattccattgccatccgaatttttgtgctgtgcccgggctttatccgctgaaatttccaactcaaacccgaatttctgattggaacatagccaaaggcaacagaggcactgtgactttggaaattgagaaattttctgaatttgcgcgagaaaaagagggaaatgagaggagcagtgaaatcgaagtgttgataaagggaattccgtggaaaatatcggcagaaacagcaattaatgaagaaagcaatgaaaaatggctgggattttatctttggtgcactaatccaacagcagaatgtggtcaaaatattaatttggatttaaattaatgacattaattaagatggaaaatggaattgcaaatgttcggcaacctttcgaattgtttcactaaaaagcggcacggaaaatcccattggaaaattttatgatcgcgtttttaacaatgaaagaactatttcgggatttgaaaatttcattgtatttgcagtgagtcgataattaaaattctttttcgaatttaatgaccataattaaggaattgatggacccgtgcaaaggcctttatgacaaaggcggggacaaagtgactttggccattgacaactttgtggaggaagaaaatgaggagaaattcgatttgaatccaaataaatccaacgggacaattgtgatggaaattggcaaattgtcagaatttgcgcgagaaatcattgggagtgaacgcagcagcgaaactgtttttgtaaagggaattccatgtaaaatattggcaataatagaaattgacgaaaaaagcaatgaaaaatggctgggattttatctttggtgcaccgcctcacaatcagaagaaggtgtacaataatattacatttaacaaatatttaatttatttaagatagaaattggagttgcaaatgttcggcgacctttcgaattgtctcattaaaaagtggcacggaaaattccattggaaaattttatgatcgcgtttttaacaatgaaaggactattcggggatttgaaaatttcatcgaatttgcggtaagtcggtaattaaaattcttttttctaataaatgaccataattaaggaattgatggacccgtgcaaaggcctttatgacaaaggcggggacaaagtgactttggccattgacatctttgtggaggaagaaaatgaggagaaattcgatttgaatccaaataaatccaacgggacaattgtgatggaaattggcaaattgtcggaatttgcacgagag

SEQ ID NO: 52907 - DNA, 1146 bp, Heterodera glycines
atgccatcaaaaaatcttcgaactcagagcttcgggctcaaaaagctgattttgggattgaataatggtgagaacgagacacgcatcaaagaacacgaaacccgagacaagcaacaacatccctgagatttatgtacatagaaaatgggggggggcaacaggtgccatccaaattttgccataatgttttattctcaaatttcagggctcaattcattctagtcaatttttagtgcacatggtgcggctattgctgataagctttacatatgtttttttgccaatgattatgctttcatttaaaaaaaagcattttaagctgaaaatataaataattaattgccaaaatttgtagaaaaaaaggtgggagtgggatgaagcccgacatacaaacaaaattgatcaatcacattgatcagaagaagagctctagccgaggaggaggaaaggagttgcgcgagatgggaagaagcattatatgcatgcatggatggagatggtctgccaattctcgactttgcgcgagagttgggcgacagagtgaggagcgccccgggggcgggaggggggacgagagagccgagactttcccgcacattggtccttctcctccaacaacaatacattcactaaacacagtgctcagaaagcacaaaatgctgctgatgaggcgagagtcccgagagtccgtcgtcgtcgtcgtaatatgtgtgtacaaacagcagaaaatggcccggcccgttctcaattgtcggcccaccaccacaagaaggtgacgacgacgacacaatgggacagggggagaggggaaattgacggggtaccgggggagaaaatgtggaagaaaatggagcacgaaaaaaagtgattgatcaagaataactgatcaaaattaaaaaaatggtatagtataattattaactgattaaaggggaatttgcaacaaaattcttggtgttggacgggtcgaaacaaaagtataacaaattcttggccggccgccatggtacgaattcatggtaaaatttagcataaattattggctgagttatgggttatcatcgcatttaagtttttaaattaaaaaaataatttaattttgcatttaaaaaaaaaatatcaggtagatcgaaaaatttgaataaa

SEQ ID NO: 52908 - DNA, 531 bp, Heterodera glycines
atgaatggcatggtcactcttttttgggccggtcgagaaacggaggtcaaacaaataaattatttattattgataagaaaaccattcatgagaactccaaaaatgcagtgcaataaactaaaatgccttcttaaaccccgctaaattaagatattttataaaccagtaatttataaaaatatattttttaattaaaaattcttatttcacaaataataaaataaaaagacaagattaattattagaaattatttgtttttaatgaaaaatttgatttgttagtgtactgtcgaaaagtccttcactgtcgaaaagtcctttacagtcgaaaagtccgctgtcgaaaagtccttctgtcgaaaggtccgctgtcgaaaagtcctagcgccacctgtggacctggatttcctggacaaaacccaggaaatccaagtccatgaaaaatccagcctggatcgaaggtcgaactctaattaaaaattggagccgaaaattttaaagaatttgataattataaaaaatagtaataaa

SEQ ID NO: 52909 - DNA, 1226 bp, Heterodera glycines
atgtcttctggttctagtggtcccgaagaaggtgaaattggggccgaactctttgcaaatgaagcctttgaagaagcagaggaaccagctggtcttgtccaattttttcgaccagaaagcaagcgtggccgagagttaatcagaagcggcggttttgaatatgcctttgaagcggacagcggacttcaagaaggtgcaaaacttggaattttttgtccaaaccccaaattagggatcgaattttggcgctgtatcaatcgccccccgtattgtttttgcctatttcggactttttatgcctttttaagtgtctatttagtatgcctaaaaatctaatccctaataataacaattgaatttaaaaaaaattaaatcccatttgagaactggccaaatattttgcaaaaaattggcttggatgccgtcaaatttggcatgaatggaattcgtggtaaaggcatgaaaagaaaagaaatttatgttgaacaagacgaaaatttgctcgcgctttacaacacacgtgaacagcgccatccctaccaatatttaagagctgtggcctatcgaatgccggacccaatttaacttttccataaaaacggaaataatttcgaaacaaaaataattattttgcttactaaatgaaatagcattgtcttttttaaaactaccatttactgtcgaaaagtcctccccttaaacaaaaattttttctgtcgaaaagtcctttctgtcgaaaagtccgctgtcgaaaagtccttctgtcgaaaggtccgctgtcgaaaagtccggcgcccaatattttatcgaaaaattatttttaaaacaaaattagaaaatcattaaaattatttaaaaaaaaagaaatctgaaaattgcacattcgataaaaaaaatggaaattgcacagtaaccaagaaatgaaaaagaacaaaagcgcaaatacggtaatcagggaacagcgaaagaagaggggaatgaaaaggtataagacacaaagtgcgtggatactgtagcgtcaattttggtacaatgtaaccttaatgaaggcattaggtaaaataattaatagtgatagggttataagttgtatgattttgcatattttttctgcgcatatgctatgaagaaaggggggctcaaaaatagcatttctgcgttaaaactttttggtttggagaaggtttttagtgcatataaaagcatactttggtgggtttttgaaa

SEQ ID NO: 52910 - DNA, 752 bp, Heterodera glycines
gttgaacgcgagttggaccaactggacagcattgtggtgagtgcacagcaacaagcggacgacgtcgaggagaacaaccattacgcgtccgcttctgcgattgatcgccgactctctgtggacaacgtctcctccgcctcctaccgcaacaaattgcccgcctcaatggtcgctgctgcgcaacaattggaaaggtgtggcgttttgccgtggcggtacatttaaaaggggggtggggctaagaaaaaaaatgcattttaatgacattttgagaaaattttacatgcttttttgaaaaattttggaaatacttaattgtttatcattattgtttccccggctttaaagcttttcaaattgtcgtttcaatgagaggatttattataaggaaaagcgcattgacaaaataattatatatattttactcatactgtataattgcaaaatatatcgtaatgaaatgtgaattttccaggcagagcaaatcgctggccgcgctcagcttgttggacacttcgatgacgtcactgccgtcgccgccgcgatgcgatggcacttcggtggtggccgagttgcagcacagaaaccggcacttaccacaacaacaaggacagcctactgctgaaggcggcaatgatgtgcggtccgcagaagttcagcaaaatgagcaacgacggcaccaaaagcagccacctccggcggtgccggccaagccggccattcggtgcgaaacgcgggacagtcttttttaa

SEQ ID NO: 52911 - DNA, 1350 bp, Heterodera glycines
atgtctgacaatccaaaggaagcggagaaagaaatggaaaaagcgatgtaaataattaatctaaatttgatttccatggctaatcattctgcttttccgttttcagcttcatctctgctgattgttggctcgaagtgttcggtttgcttccgccatctcagcttggccttggcattgcgatgatcagtcaccgatttgactattacgtcgacgaacacttcaaaacgcgcaaatggacattgggcaaaatggaaattcgaagcaaaatacgacgatggagattgggctacttggaaattcgaggcaaaatcggagagaatggcgcaattgaaatggaaattgtcaattccgatggaaaagaattgccaattccgcaaaatccattgccaaaaaaagtcatcggattcgaaagcatttcgatcgagtaaaaaatgaattgaatttgtacatgattttctttccattacattcctctgattttcagcttcatcgaccaaaatgtgctcacttttatcggccattttcaccgtcttttctccgtttgttcagcaaaattgaccattcacgcaagtgttcgcatttcggagttcgttcagttcaccatttggccgatgttcaaggacagcattcgtctgttgtatttgagttcctttgttttacgtcaaatccgtcaattggccccgtcttttctctgcaattggccgtctctccaatttgtcacactcttttgcgactttttgcccgaattgccgcctgatgacagtgccaacacgtcagagggccaagcagtgaccaaatggctgttctcgcctcatcccgacaatttgccaaagctgttttatgtccaaatttgggaagatatggggcaacaatgggcggcaatagtggaacaaatcaaagcggtgatttgttcaatttactttgtttttaattttttttttttttttaggaattttccatcgcttcttctcccgtttctttcaacattactgttgcctttatgccgtttcattcgcttcctgttgttgtgccatttgaaatgaccaacgcattgactggggagaaattgaaattgaaaacatcaattggaactgaggacaatgaagatatttttgagctcatccgttgttcaattggcgaaggaagtgagcaacaaatggaaaaggcattgaatgaattgattgatggacgagagaacaacaaaattgagatttccatcaaacacggcggagtcgacgatgggtgaacaatttttaaaaatatcaatgctaattttttgtgttgtttttaaggcttctcgacgatttgccgtccgggccgagtggtgatcagaaacagcagaagaaatga

SEQ ID NO: 52912 - DNA, 1562 bp, Heterodera glycines
atgggaaacaaatcatttattaacaaaatttttatggtgtttcgagtggaaattgaggtaattaaaagttcaaatataccaaaaaattaaaattaaataaaatgttgtaattttgattagagacagggaaatttcaaatttgcggatctcgctgcgggattgaaattcaaatttgttgcgggaccggatccggagggattaatcacgcaaataaatctttaaataaaatttattctctttataaattgttttacttttaaagttttaaaaattaaaagtgggaaattcatttcctcatttttatttaataaaaaaaatattttcaacaatttttattcataaaagtctttctcagaacacttcaaccctctttctgctgatggaaaatgtattccaaaatgccaaggatttgacacttttgaactttgatgtgaagggcgtcttttcgcgtcagcccaaattggtcaagattgatcaggaacagcgtttaaacgacgtcgtgctcaaatggtacaattattttggtgccgaaccgccccttgtgccgaaaatagtggagccaatgttcccggaaggcattttgttggacaaaaaaacacatcataatatcgcagaacagctgaaacgtgactttgaggtggtggcattttttgggtgttattcaaacaaggcacggcacctaataaatgaaaaataatttctaattttatggtttagtttacaaaaaatttaatgtcccgctgtgcctataagcgttgcgggaaaaattttcaagattgctccaatttggttaataaatttatgaatattttaggttttggcgaaaaacaacgtaaatgattggagtattatatttggtgtttactttgaacaaaatggagaacatgaaaaaattaccgaaagctcgtaagtttttatattaggattattccccgcccgaccttcagggaaagaaatgtaaggggcgggaaaatttgtgagtgattgcttgaaaaaattaaaaaatatccttgtcaacgccttcttctgctggcgttaatttttttaaattcagtgacgaaattccgtttttcaaagccacctgtaatcagtgcagaaatcatccgaactcagcgacacttttgaatagccaaaaattgcgcctttactttggcattgtggacattttcacgccattcagtgaagaaaggaagaaaagatatattgacggtcttaaaagacacattactgtgcaggaaaaggattctgctaatctgatggcatatgtgaagacgggcagaagatgggtaaagtcgtaaattatttaatcgaaaaataattatattttttattatttaggaaatgtttggaccgattccgccttcaatgtatacagaacgcatgttcgcttttaggtatacattccttataattgatattttcttctgtcaatttctctgactttaaaattgccaacgaaatttataaggttttatttctaaaaaaaacaaagaaaatcttttataaaattgttttcttttcatattgtaattcttgaaaattattcaatcttcgggattaaa

SEQ ID NO: 52913 - DNA, 731 bp, Heterodera glycines
atgttatttcttcatatatttcaaactatattatttgtttatttaataaatggaagcccaattaaaaaagtaaatattaattaattttattatttgtccaaaattttttcagaaaaatgacatttttgaaactgatgaacacaatgaagtgaagcaattgctggagaaaattaaaattgaagcacaaaaaaacttgaaaaaattttctgatgaggtaaaaacgttggaaaattattaaaattaaaatgtttttatagcattttgtgaaattgtcaaaacaaaggccaagcccaaaagacagtgacaaagattcaatattgaatttgaatcacaatttgttggaccaattatttgaaggcgacattttgctgtcagttccacaggccaagaacattttatatcaattggaatacggtaagaaaataaaaattcaaatttaaaatttttttattggattattcaaaaaataaactttagcaaattttggccataaacggacacaaagacaggctaatcctgctcccgactcattttggtcaaatttgacaattccttacacatttcgttcagattacttaaatgattgtatgtttaacacttcatttaattaattaattttttaattattttttagctaagctaattgacacagtgaaaaatggcttaaatcatattgagtatgtttgacaattgtttgttatttaaaaattaaaatttaattttacaataaa

SEQ ID NO: 52914 - DNA, 1056 bp, Heterodera glycines
acccaacatggagtttcactggttcaaccgaaattcgatccatttattcgggggaggcgaaagtctatgatttgaaaaaatttgtgttcaatgccgggacaaccgaattgaattatgccatccatcttaatgaggtttgtgagcagggctgggcgaagctcggcttagcactcgaagccgaagccgaaggcgaagcccaatttttattcgaagccgaagtccgaagctcgaagcccaaaaaacccgaagttttcgaagccgaagccgaagttttttcaaaaaatttttttaattccaaaatttttttcatcacaaaatttcggttaaatatcaaatttatcaattgacagaactgctagagaccaaccaacccctttcgataaataaatataatgaactttttgagcaatatattttgtaatttttataattcttagaatattcacggtttttgagtcaatttaaaaaataaagggaaatttttttaatttgagtgtaatttgttaacagattttcaacaaaaaatgaccaaattttgcgactttgagctacttttttaaataaaatagaggatttttagggtccggcggtgccgataggcgccgccggtaaaaattttgaaatttttagtgcactttgttaacagatttagtccaaaaatgaaaacattttgcgattttaattgttaaattttattgaatttactttgaaaaaaaggaatatttttgaaaaattagaagaaaaacaactaattggatgggaactgacccaaaggaaacataatgaaaagagccgagagcactccactcgaccatgcttctgaacaaacagagaaagcaaaaagtttataaatataattaattttaagtttaccaaaagccaatcactaggggtgcattttcacattgaaaactcaatctttaggggtgtatttttcccgaaacttcgggtaaaatagccgaagccgaagcacgaagttcgaagctcaaaaaacccgaagttttcgaagccgaagccgtttcgcccagccctgtgccggatccagggtcaaatctc

SEQ ID NO: 52915 - DNA, 625 bp, Heterodera glycines
atggactcatacacaactatcaataatgagccgtctgttacgggtcccactgaagaggaatccgtcctctccgcaactgcgacaacagcagttcagatctcgtcgccacctccgctgctcatttcccccaatgcaacttcggtgcgtttgtcgagtggactacgccttccgcaaggcggagacgatgaaggttttcagctcaacaaaacatttgtaatttttatacttttgttcatcagggccaagtcgtggaccaaaattgcgtcggctggcgtcttttggagaccaaataacttcgcagtcccaattttctggtcaagtggcgacaacagatttggctgaatttcgcagtccgtctgttgtaagtgcgtcttcggcggccacaaatgttgcagctgcccttgttcatctacaacaacatgcggtacacgctaagcaatattctcgatgactcaagttaaaattttcggtcatactttggtttgttccccctattttcgaaaaatttttttttttaaagttgtgtaaaacgcctttcctggggattttcttggtcgctatcggacatcagtttttgccaattccgaaccccggaccagaattcgaacaagaagtcgaaaattaa

SEQ ID NO: 52916 - DNA, 680 bp, Heterodera glycines
  unsure (1)..(680): unsure at all n locations
atggtgccattcgaatnggtgacgaaatggcaaatggaaaagctgacattgaccaaagaaaacgaaaatgaatgggacaccatttgcataatgaaacgaagcaaaattattggggagacagcggcggttcattggaacgacggaaattgggacaacaattgtaactgtgtgttcttttggcttgatagtgacactaattgcattgggtgagcaaataaaaaaggcatttaattttgtttaattaattaaaatttcgcttaatttagtccattgtctccgccaccgaaagaagaagacgaagcaggacaaagcagcgaaaaaggggcgtcgtctgctgacaaatgagtgacggagaaaagaacaaaaacagtgatcagccgcagaagtagaaatgaattaattaagaatgatcgatcgaccgatcataattcatccgtgatcaaattattaaaagtaattatttggaacgttttcgccactatttttgccactatttagttaattattttgggatttttgccactaaaaatccaatccctacttctaacatgcatttttttgagactttttttacactttttcggatttttatgacttttttgagtttttgcgacttttgttcgtgatttttttgacttattgaggcaaagtttgagttttacagaagaaaatgccgaaaa

SEQ ID NO: 52917 - DNA, 1162 bp, Heterodera glycines
ccctcatgtttatttaacgggaattctgcatttaatgcttcccccccccgccctcaggccatcatttggcttctcgtcgcggatgccgtcttcatcttcctgctggccattgccgacgtgctcatttgggaattaattaaccctgtcgactttctctaccctgtttttctttgcctttcgatggtacgacacttttcggcattttttttgccgtttttaattttccatttttcagctaattttgcgctctttgctccacgcttgtcggcttcacgggcgcatcacttcgggcccaattttcctttcctggtttctgttcggcatttgcgggctgcccgagctgtacgattgggttctgaccgcaacacatccaaatgtgtggattataattaatgggggcaacagagaaataccgaaattaaattcaataaactttaatttaaaaaaccccacaaaatatcactctctgttgaagttttcgaagaaggacaaaatatcgccgaaacaattaaaaaaatttttttttgtttcatagtctagctctagaatttctttctaagaaaattgggtacttccgggttatgtcgccccccccccctcaaaaaaattccaaaattcgtaatttggggtttccaacttcgctgatcatgaatatgatatttattttaacatcggatgacttttaatcatagatttgacaaaatatctatgattttagaaaaatatttaaaattgacgagattttgcgcaatatcgctgcctttatgccacctgtctgactcttttcatgatttaattgaattttaaatatttttcaaatctatgattaaaagtcatcagatgctaaaataaatatcatattcgtgatcagcgaccttggaaaccccaaattacgaattttggaatttttttgaggggggggcagcataacccggaagtacctaaattgaaatgataaatgtataaaagcaatgctttccataaattcactcaatttaagcagtacgctgtgaccgaccagcgcaaggaggaccagaaaactgttgactcgcaggttatggaagtgatccgcaaacatcccgagaagaaattcttgttcggctaccttggctcacgctttcatctcgccaagggaatgcatccccataaaatggtcttctga

SEQ ID NO: 52918 - DNA, 710 bp, Heterodera glycines
atggctcctcgtaagcagaatgagcagtttttggacgaaatccagagtaaattttaaaataaaacacaaaatataagcattttatagaagcgaaccacgtggaagaagcacaaaacaatcaaagaaaacataaaatgggtaaaatttttcacaaattttacaaaaattttggattttttctcatttttcagatattgatgatgacgtcatattggttgactcgcagtcatctcacgcagaggaacgtcctgcgctcaagaagaggggccgaaagtctcgctgggaaaaactgctggaggacgtgaacaacgcaaagaagtccaaccccgcagaggttgaagtcacagatgtcgacgaacgcaaagcagccaacgtcttcgactacccaacaattttctggaagctcgcacgcccaaaggtaatgtttgctctggtggcagccctacaatgttcttcttccgttgcagtatggggtgttcacctttatgtgcaacgaatgccgtaacgaaaacttcaagcgaggcgacaagcgcttcatcctcaacactggcagtggccaagagaagctggagtttacccaaacattctgccaagactgtgccattgactgcaccgacctgatttcttctaaagccgagacggctctaaaattattcgaaagcggagtcggcacgccaaattcgtcaaaagccgggttggctaaatattaa

SEQ ID NO: 52919 - DNA, 486 bp, Heterodera glycines
atgacgcaacccgccgcggttcagccaaatctgcagcaattaatcgacgtaattgctcagcaacagacgcaaatcaaccagctgataaatgttcaaagaaacaatcagccaaatccagcaatcatccaaacaataccgtcaatgccggacgttgcaattttcgaacaatgcgacgaaaagcatcgcatcaccgaatggctggagcgtttcacttttgccattgactcgtgcgcaccgaacgcggccgatgacataaaagtcaaggcactgatgaacaaactgtcggaaaccgcgttcagcgagtacagcaaatttgttctcccggccaaggtgacggatttcgactttgatgaaacaatttcgaaattggagaagctgtttgccaaaccacaatcaatatttgtggaccgatttgcatgtctgatggccaccaaagacgatggcgaagattttcacaatttgttaacaggcacaaacgacttttga

SEQ ID NO: 52920 - DNA, 874 bp, Heterodera glycines
atgtggagtgattcgacccatgacggacaccggctgccactgtacaaggacgacgaacggccggacaagccggacaatgcgcaggagggggacttcggaaattaccgattcaaccgggtgagtgagaacaaatgggggcaattggaaaattaaacaatttttgtgggaaaaatggggggcaatggaaaaataataataattttttttttttttgtatatcacatgcattcaaaatttggcaatcgtccagaaggggtcggaaccaaatcgtttccaaattttcaataaccctagtttttcaagaaaaaaaattgaaaaattttaaacctttttttcttaaaataaaagtttcaagaaaattgtcaacgcatttcagaaatgcagggtcgccattgagtacaacgacattttcgtgcagcaatttctcgacaaattcccgcacatctctggcattttccgcgcgcacgagccccaacccaacgggtaccgaataaacgaaggccagactcatctgaccttacactcgtccatcagatacgcaaagccatctgactgtgcttcaatcgctcatgtaaattttttatttatttttttttgcattttttatttgtattctatttttaattttttttttccttaaaattttaactccccctcttttttctcaaagatttcggccgactgtcagaaaattgtgatcatcacgctgaagccaaagggcggcggtggaggacaacgacaacagcagcgaacgacgaccaaggaggagcaggacgagcagcagcaaggaggaagtaatggggggacggacggcggtggtggtggtggtaatgatgttgaagtggactttaccgaactcagcaaaaacacgtga

SEQ ID NO: 52921 - DNA, 1040 bp, Heterodera glycines
atgaaaatgatgggaaagaatgagccatttgtaatcaaaacagaagcaaataaaattgtgtttgctgaggacaacatcactaaaaaacaaaaagaaaaagtcatttaaattaaatttttaaagaatttttaaaattttaattttcaggctcaaaatgaaatcaaagattttttgatgtcccaaaaattacagatggaagccgttttatattggtaaaccgaattattgaaagaatgaagtgaaggaagaacacgaagaaatgcattcttgaagcaaaattttctagaaatttcatagaaaaaaacgggcttccattaacaaaaaaaattttgactttttttaaaagattacccacaaatttttcaagcaaattatggtttttttttcttgtccaatcagtgatacatttttaatgctttttattcatattaaaatttcaattcttttcactgataaaaattatttcttaatatgtctaaactagtatatttttaaaaatataattttgaaaaaaatttttttctcatcattcgataaccacgaatgttttatgtaaattcataacaatttcaattttttaaattcaacattttctagcaaattctttaatactgtagaaaaaattataaaaattatacaccttaattaaaatcaatttcaaattgacttatttaaacaatatttaaacattaattccaaaatttattttttgctgctggctattggtctgctgctgatggcctctttctattaatgcacaaaactttccattgtggcacgagtgggcagccagtgctaactcattttcactttcccgcacatttttattggcaaaatgccctctcccattggccaagtgccgtccgtcgtcattgtgctatgtccactaaagccccccccccgccctcactcaacgcgttgctgctggcaatggccaagcaaatgcattggccattttttttcaactcaaagctggggccatgatgagaaaaagcacaacggcaccaccaccacattggccaacacggcacaaaaataaa

SEQ ID NO: 52922 - DNA, 313 bp, Heterodera glycines
atgacgacaccaaaaattcctgctgaaattgcgcgtataactgtggaaaaagtgctaccgacgcattttgccaaaagccggggaccgggccgacccgtcttcgaactcgtgccggcaaaaggcggggaaatattggccgattatgtgctttttgaagaaacgatgaaaaagacgaaggtgtgcaaataggaattaattagcatgatcaatcccttttctctttgttttttaggtgtcatggctttgttttgacaaaatgaccagtcagtttttaagctttttctttttgcatttaatcagtcatcccatttga

SEQ ID NO: 52923 - DNA, 1039 bp, Heterodera glycines
tcgcttggaaaggggcgaactcagcgacgatgacaaacgcggattggaagcgctgaagacacaggcggagcaaatgcacatcaacctgtccgatttgtggcgtgaggaggtgttttaattctataaacaatttttaatggccgaaggtgtaggataagttaaaaaagtgccagaacccgggacaatcagaatgcttattcagttttaggctttggtttaaaatgggtgttataatgagaggggagaattatttgtgtgtggtacgacgaaagggacagagaacaacactttctcgtcgccatctctggcccattccgtccactatttcgtcatttgtccatctctctttcttgcctttcgttgtttttaatcaattctccactttgagctatttctttgaccgtttctgcttttttaaactcatttaccatgcctttctaacacaatgtccccaactaaaaaactggtcccaaagcgattaccccccgaacttttgtatgaaatttcactttttatcaattcccgaaatgatttgtcttgtatctattcctcctcccgtatattacataaatttgtgtctctgcgggtggctaaattttatcactcagtatgtctttggaggggatttgtcttcagaatcataatttgaccaacacattccatccattttaggctgttgaaaagctcaaaacttcatatgcaaatgcgcgccgaagcactttctgggaagctgtgaagaccgcggcttctagtgctcgtggagctcgtgacccttgtcttgatcagtttttggctgcacttgaggatgctttggtaaacaatgaattacgcaataatgaacaaatattgaatcgattttcagggcaccggacgtcctgccacttacatagttgaggaacgcagcgtaagtaacaaaataatttgtaatgtagttaactattaactctaatttaaggaacgcgtcggcaccggtctcactcacacacagggcggcagcgaaaccagccgcactcacactgtctcgaagacatctgccggc

SEQ ID NO: 52924 - DNA, 1343 bp, Heterodera glycines
atgttttccattctaatagagaaaaagctgggctatcgagtggtaccaagaatgtaaaatttggttgcttttaagcaaagttatgccatgttctgtcaaaaaatagctaaaatggcggatttaagaaacgacccagcacgtttcaattcaaatttattaacttttttaatttgccagatttcttccatcgatagtgccctgcccgcattgaatctggaagtttgcggtgccgactctgctccatgcgatgccgtgtgtggtggacctggtccaacctgttcacgttgtggcggttcatcgtgtccaggcacattaaatttgaaaaatattaaatattaacgcaacaattaaaaattaattttaatttcccattatttaaattgtattttacattattatattaggctccgtatataaagctgaacaagccaaacattttgcacacgaagctctcgaaaaggtggagacaaagcaaaaagaagctgaagaggtgaattatttttatttatttaaatttttgtttttcattaaatatttaaaatgcgtttattaattaatctaataataattgtttatataaagcttctgaaaaaagtgcgagatgttctgcccaaaacgcaggaggcacgcaaatcaacagaaaaagcattggaaaactccaaaagagaggcaaaattataacaaaaaaaaagacgggaaaatgacaaattttaaaatttagtccgaacgtatcaacaaaacgcatgatgcattggtggcacaaattgagcaaatcaaaaatttccttgaatccgaaaggcataggtcaaatttacaataaacaatttaaaaataatttatttaagcgaattgtttaattttagacctgaagacatcagggccaaggttgaacacattctgaacatcacaattccattcaatgaggaacaaattcgacaactttctgaaaacgtaaaaaatgattgcacctttatttttctaggaaaacccaaaaaaatttatgaaaaattcgccccaattttttttttatttttaaaaatcattttttaattagaacccccccccccccccctctccctcccctgaaataaaggaagcccttttcaagaggtgttgaaaaatagaccatagatgggctctaatccagtaatacggcatttcccccaattttcgtttttccagattcgccaaaaagtttacgaggcaaaagagcccgagaaaattttgactgaaacgcatgccaacaaaacagctgcttcggagttgcaggcaaaggccgagaaagccagccaaagggcagcgtcaatccacagtaaaatgatgaacattgataaaaattgaaa

SEQ ID NO: 52925 - DNA, 146 bp, Heterodera glycines
atgccgaagaatgcgttttccacccgggcaatgccgtttttcacgaagggctcaaatactggtcgtgttgtgggcgcaaaaccaccgattttaccacatttttggaccaattgggttgcactcggggcaaacactgctggaaaaag

SEQ ID NO: 52926 - DNA, 640 bp, Heterodera glycines
atgttcgggattgatcgggatcgggattcagtcgggatcccgactcgggatccctccgaccccagttgtccggtctctagtgttcatgcggtggaagttgcgaaaaagggcgagagaatgagtgcacgtggtataccgaaaagaagccagagcatttggcaatagtgtgctgcaaaaacaaatgaaactttctcgctgatctgtcccccattactccctctttttgttggcatccaaatccaacaatcatcgcttacttttttcttttatttgtttcaaacggtacggaacagacgataaaaaaatgtttgtaaaaataatttacaaatttttttgaattaattttattttaactaacgatatacaaggaaatctgccattacttcacttgattctaattagttgaactgatccaacaatttaattttagtccctttattattgtgccgatttttgggccaatgtgccaaagaaaacccatttttcggtcgtttttttggtaatgtttccaattgctgaaaaagggaggaggcctagctttttttattttgttgttattcaccaaaatgccattttcttttccacgcattgagaacagaaacggcgccgcgattttcttatcgcactttgaacaaagaaa

SEQ ID NO: 52927 - DNA, 1006 bp, Heterodera glycines
atggaccggaggaggccaccaaatcccagtcgttttggtccccgtctcggctgtcacggtcccggcatttcagtcaagacacgggaccgcgacgagccaccaaattacagtcattttggttctcgcgtcatctcggcactcccggtgtcccgacatttcagtcccacgggaccggaaaaaggaaatgcccggctttttcaggcctgcccggcgcttctaacccaatcccaacccatgccaatcactccactctttttttccatgcccttttttcaaatatccttaatatctcttcaaaattttgcgattctttgggaacactttggccccatgaaaacataacaattcaattgtttttgatggaataaataaataaatgaatgaatgaatggctgtgatttgttattattattataatattggttacatttgaaaagtgttttttgttcacatgtcattaaagcttttgaaccaagcaacaaaataataattattatattataatattttctttcacattttcagggcgatgcggtggtaaaaaaacaaaaacggaggagaaaaaacattcgcaatttgtggcaaaaacatcagccaggacactttgatcaatttatggcatccgatcattttggccatcctcagtttcttgagccataattttttttttttcttaattggtcaatgcctacttattcttggtaacaaaaggaagcttaaattttctggaatttataaatgcaagaaaaatgacattatgataataagaaaaaaaaattgaaacgaaaatactcgaaaaatgcaacatttttcgagttttttatctattgtatgagttttatagtccataatttagttatacaaaaaatttctttttaaaccaagaatgaataggcattgacgaagtaagaaaaaagttaatggcctaagaaaaactgaggatgatgatcattgattttgaatcaaaattatccgttccgaaagcgaatatttcttgaaaaataaa

SEQ ID NO: 52928 - DNA, 257 bp, Heterodera glycines
ccaaagagtgaaaaattcattaattaattgcattatagtcaaactcattaaatttatattttatttgttaaatttcatttttattttattttattcattcaaacattgattctatgctaattttattgttcctcctattaatcgcaatttaatattttcaaattttgttgctaatttccatttgctaattgaccacttttatttgtttaactacacaaaaggacactcgccaagcataataaaaactgtccattcgt

SEQ ID NO: 52929 - DNA, 1642 bp, Heterodera glycines
gatctgattttgactgtgctgttgaccgttggctggatgatcggcacgctgagtttttcgctttcggcacgtgccatttcagaggcgacgacggaagagaatgtgaacaaaacaatggtggcgcatggcatttgcgatggggtgaagagcggggacgaatgcaggtgggaatcgcatgcgacgcacgcgccactctctgctgttacggtgagcaaagaaaaaggaaataaatgtatgggaaagaaagtgcggacgaatgaaaggagagagagaagagagaacgagaaaagaaaacccaatgccaggggcagagagagagaaaaaaggaagagaaaaagaaaagaaagaagaggagcaaacacaaagagagagagagagagagagagagggaagtacagaaaagagagtgaataagaaaaaggaaaatttaatttaattaactttttccctcacttttttgtagttggccggtgttggtctgttcattttgtttgcctcaaatatttggttcatctataaggtatggtatactgtgtatttgtcctaactacggtaaccaaaaaaaaattctgcgcaggagacgccgtttttccgggaacgtcaggctcggcgcaacacacacaacaatttgccgaccaatgagccgtacactttggaatgagtacggtacggctacagtaccgtccacacttttctcttgactaccatcgtttttatccgtatgatatcatgagtttctcatcaaatttttttattttgacattatttttttctcatctttgcacccttctttctctgccatcctacataattattgatcgtaatttttgagttaccgtctctctcctgtcggattatggtaatccctctccaatcaccggccttatctactctatatttgcagctttgagaatacctttctacttcatttctttccagttttatatgcttttttcaaatttattccaagtaaaaataatgatgtgaaatgtttaaaaaaataaatgcgtcaccaaaaaaatatataattaaaaaatgtgctacaaaccaaaaataataattgttaatgaattgactaaaacatgaaaataatgggaaatgacatttagaaattgaatcagtgttgtgtttacacaataagctgctttcactgtttgttatttttggtaaattttgcgggaaaaaaatatttgaattttggaaatacaaacattgtaggaaattctaaaaaaatgaatgaatggctggtcacaaatgaatgaattattatgtacaacttttgcacatgttcttttactaagaaattgtttggatgaaattttggcaaaaaaattcttattaagtgattgcataatcgaaataattgacaacgtaaataaagacgtaaccatgggaggggggaggggaccgaccattctgctaattaaccaacaaaaaatgagcaattattgcttaattaccctgtcattaatcaatccatcgtttaccgtgatttttttaaaatggcaagaaatgccatattttcagataaatgacccctcggtgcatttggctacgtctttatgtttaaagaagggtcattgtttgattattatacacatttgatcataatcagcacaaatacttatacatcaaaaataaa

SEQ ID NO: 52930 - DNA, 78 bp, Heterodera glycines
atgaccttaaatggaacctatcttttcaacctgagcttgtactgctccaactccatgcgtgaagttcgagctgtacag

SEQ ID NO: 52931 - DNA, 889 bp, Heterodera glycines
ttccaaaaaatataaaaagtgccatcctcgagacggattttgttgtcaccgaatttaacaatgactctatttcggaactgatgaattgtctagaaaaaagaggagcttcaaaattgctcgataatgatgacttgaaacaccgaattgaaagaggtgaatgcataatttaatattaattaaattaatgcccaatttataatcaatgcgaagttaagctcgataaaaccaccgactccgcttaaaaatttgttaagaaaaaaggattaaaacaaaaaaatatgaaaaatttcgtaagaataaaaaataaatttagctttttcttgacgattactgaatttaaaataatttataattttaataattttttttaaaagtgatttcatgaaaaattgttgttcggttggcaaaaatgaaataaaatatatagtaaaaaaaatttttataaaaaaattacggaccggatcccgcaaaatctcacgcggattccattgcgaagagaccaaactttagataggtcgatcacaaaacattttaaaataaaattattatttgaatttaactgtttttataattttaagattttccaaaaagtctgctgaagttgccgccggattggctgcttttatcacttggccaaattcgctcacaacggcaattaaaagcttttgattattctgcgagaaatttctttgcaacatttgataaaaaagtcataaaattgggaaaatcaacgaaaaagaaatgcgttacttggaggaagaagaggatttatgcagcttatgccaaatgttaatggagaccaagtataatattccaaggaacaggaattaaatgctttcatcccccaaaattaaaattttttaaatttaattttaattaaaaaaatata

SEQ ID NO: 52932 - DNA, 581 bp, Heterodera glycines
atggtcgaatggtacaaaaaaggagaatttactgaggaaaagcttataaattatgattatggactaaaatacagcagagaaaaacaaaattctttggatgaagtgagtgagtgcttaatcatttatcaaaaaaaaaaaattaatcaaattaaaaaaaatttgccactgatctaaaaatccgacaatttcaaaattcttctctctaattttaatataattgataaaacagttttttcgaagttaaacatttttacaaaggctaacaaacagttgatttcggacttgggacatgttcgaaacttaaggtggatcaaaaaaatgcacaattggatggttgaagaaaattcaaatggccaaaaatccttctttttcgctgttggaattcgcaattatctattaatacattttaatttcttaatcaaattcctttttcaatgcatattatttctgtggaagacaacttgcaacaacttctcacagaaatgggttatacggtcgaagaagttccacaaaatacggtagtgatcagcaatggaattaaatttaataaggacaaattgccaaaacagtatcataattga

SEQ ID NO: 52933 - DNA, 1354 bp, Heterodera glycines
atgagaatgaaatgcaacgaaattcaacatcaaaatggtaattattattttaaatttaaaatccaattttaatttaaatttttagatataattgaaacgggaaataacgatctggttaacaatcttccaaatgacctttttgctgctgataatcaatcttttgatcagcaaaaatttatcaatgaatttttatgccgtagggaaaatgaaatcggaaaaactatttcaaaattggcaaaaaatattttatatgaaaaagcagaaaaaatgcgaaaagatttttgtgaggaattgagaaaaggaaaaagcattgaaaaagcaacacaaaaagtgggaaaagcggcaataaaattggcaaaagaattggaaaatgatgaaaatattaaagaaaatattcaaaaagcattgaaaaataaaaacgaaaaaataaaattggataatgcaaatttaaatgagttgaaagaagaattagccaaaaattattcagaagaaaatatgaataagctcaagagccttttttactcgaaacttcatgaattttttgcatcaattaaaggtaattaataattaattatccattgattaatggaaatagattttttgaatttactgtactttattcaatttaatactgtatgagtctttaagttttatccttttttcaggttcaaaaattgaattctttgaaccccataaaatcaatccgtcgcattttaatggccgaagacaaaagcgtgccaatgtccgtgaattattccaaggcgcattccaacgaatccgtcggcatggcactctaatcgcatgcgttttttatgtttttgtcgcatcgatttcactttttatagtgatttttctgattgcccgtttggttttagtaaatccggcagattatttggcatggcttctgatgctctggcttttttatgtctttttgcactacagcaatgaattcatcaaagaatgcgccgactgccttcgcaacaataataaccaaattcactcaatcgaattggcggagaatggtcccgctgctggtggtgctaatggacaataatgaattgatgtttaattaaggacatgaaactgacgaatgtgtgtgtgatactgtattccttaaatcgtagttgtatgaaactataaatatattgtatcatgtaggtaaacattgtcacatgtatttttagatgatgtatgtgtgtgtgtgtgtgtgtaaaaaatgtaatttttgaaattttaacttatgacacttgaacatcgagatcacgcacttaaacaaatttactcgagaaaaaaagtcatgaaaatacatttcatctataaatattgggtattcaaaaaatgataacataattga

SEQ ID NO: 52934 - DNA, 64 bp, Heterodera glycines
tagttatatatatgttatataggttttgagtttcgtttcaaaaaacaaaatctcccggccgaag

SEQ ID NO: 52935 - DNA, 202 bp, Heterodera glycines
atgtcactttcaaatgttcacacaaatttggtacaaaatggaaaaggtagaaaattaaagaaaattttttcactttttttatatttcagaaactaatgacccattcgctttttcggctgctgaccacccacaaaatgttggcaacaacgaatcatcgtcatccattgagcagaaaagggtcagcaaaattgtggaaaaataa

SEQ ID NO: 52936 - DNA, 166 bp, Heterodera glycines
atgaaccgacggtaagcacaaattcttcatttatttaactaaactgttttcccataatttcagttggatttgcaacgacgtttggatggacattttcccatcctttgaccgtgctcaactcggcctcaaattggcattgctttcaccacgttttgatgaattgtga

SEQ ID NO: 52937 - DNA, 1571 bp, Heterodera glycines
atgatgaattccgaattggtaaggatgggcctgcaaatttaaagtcaaacactgagcaattcaatgatcggcaacaaatcaaagttggaaaaaacaaaaatcatataaatgcactctcggggtgtactatagtcaacccccggaaaaaatagcatacctaaatgctataccaatcgattcgtctggagctatgcacgaattcgcaactggagacctactttttcgtgcatagctcctcgagacgaaatgattggtgtatcatttatgccattttttctggggggcttgactaaagtatatcccattctcgagatttcatattaatttgttgttttacagcaagtttgtgaaaagtttataaaaatggaaatggaattgaaggaggcaaagcacttacaaacgattgccaaattggaatttgaaaatgtgagttgataaacagaggaataacaattataaaattaattacaagtttataaattgcgaaaatttgtcataggattttgggttcgattataacgaatctgacatttccaattgaccaatccctaatccaaagtcgacaaaagtcgaaaattcaaatttttagccaccctttgacttttataaaatttaaaaaactccttttttcagtaacgccaattatttaatttaacatttattcaattttgtcaccggtttgaattagaattaaaagcatgctttaatattaagaaaattattaatttgaaactcattaaagcgtaaaagtttaattttcgatttcactgaaattttgattttagaaggcacttcaagaaaagctaaagcagcaggaaatgatgacagatataaatgcactgcaggcgaaagtggccaaattggaaaaagaacaacaaaaggaaaaagaaggaaaatacggtaaaactgaaaatatactgtaaaaatgtctttagcccttatactgtatttttgaacaatttttattaattattttttgtttagttactgtcgagcaattcaacaaaattttggagagaatcagtgaattggagaagcagcagaaaaatgaggagaaacagcggctgacatcaaaaatggcagcagaaaatgcaaatggtaatgagaaaaagagcaaaaatgaaaatgggagaaaatgaaagcacaaagtatcggataaatttaatggagagcataaataatacttaaaaactaagaaattcaaaaaattctatgtttagcaattgtggaaaaaaccgatgcactttttgaaagggtcgctgaaattgagaagcagcagcagcaaaatggcatcacaggagaggaacagcagaagaaattggacaattttattggcattttgaaggatcgatttggaaatggtaaaaataaaatttatttaaaattaaaattgttcaaattttagaacttttaaatgccgttcatcccaaacttcgtcagaatattgctgaggtgtggaaaataaaacacatacataattaatagggatgtcaaaaatttgtcaaaaattggtcaaaatatgtacataaatatgtaaaaaaaaatcccaaaatatgtacgaaaataagtaa

SEQ ID NO: 52938 - DNA, 380 bp, Heterodera glycines
atgcagcaatttttgctgttgtttctgttgtatctgaatggcattggcaatttgctgggcttggtcaaaaattgtgccggatttgtgagtgatggaagaagctgaggatgaggacgaagaaggcaataataattcattgacacggaacgattggtgcacatggaaagaatcgcgggaaaacggcatacccgtcaggcaaaaaagacgggaagcgggaacgggattcccgttttttcccgcgggattcccgttccagccggactcgtggttggtcgatcgccgaaaagtgcaaaatttgctaaatttttgactatatcaactcataacttttccagacgcaatcaaattacacaatcttggtttcatacgatagcccttga

SEQ ID NO: 52939 - DNA, 1108 bp, Heterodera glycines
atgggtgaatgggactctcctcttcttctgtgtgtgtgtgtgtgctgtggtggtggtgtgatgtcccgtattttcgcgattttgtgttgtccacaatggcggcggacagtggcagcagtggaaaaatccctcccccccctcttcgccattctttttttccacacatatacaatgccataaaagaagagcaacgaaaaaatgttattttcatttacacattcatgtatatgttgtgttgtttatttttggctttacgaaaacatttttacttttataatattttataaattttgctttttttggttttttttttggattttttgagcatttcttaatattcaaaatacggttcaaaaccgcaccaaattgtcacctttaaatgtcctctcttccctcttctttcgacatttttgagcaatcattttttgtttacaaaaaatattcctaccaaaaactgtattgtgtttttacttcagaaacaccttaaaattttaaacataggtattttttgtactcaccttactgatggtgatctcgggtgaaaactgaaaaagtacatttaaaaaatttacattaaatctgaatttcagtcagctaaataaattgccaaattccttctaatgatcactaacaaataagggtgcaaaaagatcctcggaaaatgggatcacccgggcactccgtcccagtttccgtcccgcttttttagtttttccgtttcccgttcttgctaatttttttttgccgaactcacaatttaaaaaccaaataaatgaaaaatttaaaaaaaatcaatagcagaatgccaaaaattttaaatttccatgaaaacgattttttttttttactttaaattaaatgggccatttcttttctttttaaacagaagcgatttaccaaacggaaaaacaaaatcactatgattaaactaatcaatttttagctcaacaaatacttaattacaaaatatttctaatccaacgcgtcaaattcctcctcaccgtcatcagacaaataagggttggcacgcgttgatcttggccgcacctcataagccggagccacgtcgagaatgcttaaattataatccaatacatttatgagtcaa

SEQ ID NO: 52940 - DNA, 1050 bp, Heterodera glycines
atgccgacagcctctggccaagtttatgccaatggtcagctgggcaactttttaccacagccgacggaggcaaatgggggaccatcgcccgtttattcactgccactcccacaacaacaacagcaacaacaacgtgaaggacaggcagtactagcagaacaaccgcaacaagtgccaatggtaaagaaatgaagttccctttttcaaaatgcatctaaattttcaacctcattagcaaacagcaaagcaagcagtggtttggcagcaaccagtttatgtacagcttccgcaacaagtccaacaacaacaacaaacgcaacaggtgaagaaggaaattattaatagcaacttgcttataaattggtacagtttccacaacaacagcagcaacaggtacagccacaacagccacaaacggtgtatgttcagcaacagcccgcccaacaacaactgcaagcagtacccgcaccactaccaccaccacagcagcaaccacaaattgttgtgcaacgtccggcccaacaatctcaacagcaacaacaatttttgttgcccaacccacaacaacaaccacagcagaatttggtgattttgattctgcgcgaccgcccaatgcgatctttttatttctttaggttgtcgtcgatgccgcggcacccgccgggggaatgcctcgcgcgccgttggtgcagcagcccgcgcgggtgtcgtcgtcgtcatcatcccgtggctcgtacgtaatgttgcgcaaaaatgcaattggcggcggcaacaacattgtggggcccaaatgccgtgattattacccatagtgagtgccaaagtttgttgcttattagtgctgaccaaatggaaaattctcggtaggcttctaatgttgtaaagtttgctaaaatgagaagggcattttaagtgaaattaattggcatttagttgtgaacaaattgtgccccgaggcttttgcatctccgaagtttatccgttgaggatgaagcgagaatattgcccacaaagctgtggtttatgctaactcatgtgttaataattaaa

SEQ ID NO: 52941 - DNA, 467 bp, Heterodera glycines
atgagaactgtgcaaaccgcacgcaaaagcaccgggggaatgccgccaagaaagcaaactgcgcgcaagtcagcaggagggtcagggcagcgactgcaaactgcacgcttgccagcagcaggaggaggggaaccgattctgggcactgcgcgcaggtcagcaggaggggctgcaccgcgattgcaaactgcgcgcaggtcagccggagggtcaggacagcgactgcaaactgcgcgcaggtcagcaggaggtgcagcaccgcgaccgcaaacggcgcgcaggtcagccggagggtcaggacagcgactgcaaactgcacgcaaagcagcagcgggaccctccctacggaatggtagctgaatttttcggggtcgatcaaatcaacgagttctgtgtttatgagccctccaaacttaaaaagtcttttaaaaaaaaattaaagttcactatagaaagtaattaataaa

SEQ ID NO: 52942 - DNA, 1499 bp, Heterodera glycines
atgacgacactaaatatatttgtgaaacactcactcatatttcttcgccctatctgtattgtgcgattctggctatcattccatcttcaacatgtggtacgacactattgtacattgttatccaattgactgctaaatattagacatctagctctagttcggccattggatgcctatatatcctgtaaacatttattatgtatttgatgaattatcttaacatggaagactattgtttaaatgctccatattatttatatctttcatttctctgtaaaattacattttcatcactgataacttatttgtttgtctacattatactcaaatagcaattcacttcatgtaaaatttcaaacaggagaaagccaaccatatttctcatctggcgacaaaaagatgttatctccagtttatttctcatagatctttgacacccacaactactacgcattcggaatgattttcacgagatataaccatgtctatatgaattcttattatatatataatcatgtcccgataattcatctctttctacccaactgttaccgcatgtcataccagaaaattcaggaaatgagacttttcatgagaaaatctgcgaaattatttgaaaaattttgtttaattttttatattaaagtgatcaataaccaaaattaatttaattaatttgataatttttatgattgcaaaaaatattgttaatttgcttattttttaaattcagatgtcatgattgagatgttattttccatttatttttgattaaataaataatttttaaaaaatcttttggcattttaagcaatggcattgatcaacttttggacattgaactgatcaatgaaatggaaaatcacacagaaatcctgctcaaaaacggtgaaaaaaatgcaattttacatatttcattctatgcatttatttattctttagtgttttcatccaatttgaatgaatttcaaaatgcgtccaattttggtgcctttttggccgattacgattggatggcacagctattttttgctggaaaaatttttgatgcctgctcacaaaatggcacgatgttgtgccaaactaaggcatggaattttaaatgaaatttaaaataatgaaaatgatttaagtgcatttttgacccaacggcatggaccgaggaacagtttggcacagaatttatgaaaattgcctttcctgtggccaaagtttccaaattcgtgctccacatttgggcaacaccctatgaaattgcttgccacaaatacgcaaaaccaatggaaatgtttgaaaaggatcctcctcccagctatgagcatcggcatttcgatggctgtatgaaagtgccgacgacaaaatgccatgagtaatatgcataaaatagcaaatttttgaattcccaaaaaatgagaaattttgaaccgattttgcatcaaaaatggtcaatttttatctttgaagcaaaaaaaaattttgtttaacagaaatacaataaa

SEQ ID NO: 52943 - DNA, 822 bp, Heterodera glycines
atgtttgctcgttgtgtcttccgaccatttttgaagaattcgttggcaccctcaaaaacatgccgtagttttgcttcatttggtgttgcacaaccgtcattgaacaacaacagcagcagcaacacgttcatcgacagagaattgcgttttggggcccacaattataagccattgccggtggtgttgaccaagggaaagggtcggttatttgggatcgttttctgggtcatttccgtaaaaagtgccatcatgggcttttggtaaaagtgccattgtacagatttttcaagaaaaattcgtcatagtttttcttaaacaaaatcaaatgaaatggtctttgtatcctacgatagcaattggcttgctctattagaaagaaaaatttcagataaattttattgagttttcagaaagttatggcaattttttgaacatttgtggtcacagttgtgataactcaatgaaattttctgaaacttttctttctaatagagcaatccaagagctatcgaatgacccaaagattatttaattttcttgtgtttaggaaaagttatgccgattttttcacgaaaaatccctaaaatttggacactttttactagagaccggacaagagggtcggtcggtcggtttcggttaaaaaccgaaaaaaaaccgaaacagaaaaaaaccgaaaaactcaaaaatttgtcggtcggtcggtttcggttaaaaaaccgaaaaaaaccgaaccgaaaaaaaccgaagaaaaattttcggtataccgtttcggtttcggtttttttgaatttttttatcttttcccaaaaaaacaataaa

SEQ ID NO: 52944 - DNA, 254 bp, Heterodera glycines
ctgtttgactgtttggactgggctttgtctgccgacgacgaatgaaacaaattgagggatcaaaggccaagccgaaactttggacggatctttcacccacccgtgtcctcccaaaaaaagccattttttaccccgtaatcgaatttttgtattatttttttgaccgaatgatatcacgcgacacattcatttatttttgcccaatttatcatcctcccaaatccatttttatcgtctcttctctctcactcaat

SEQ ID NO: 52945 - DNA, 405 bp, Heterodera glycines
atgaaatatgtcctgttccaaaattctcgacccgaaatttgtggtattttgaccagcgatagttttcttttactcaaatatctttttctctgagattttttacgttttgattataaaatgttcaaaatttaagtttttttttagtttttcgccaatgattttttactgtattcatcgacaaatttccaatttttttttcgcaggacgccgtcaccattttgaaggacagcgaacggccctaccagtgccgcggctttggcaccaaatttctgggcggcggctcttactctgtgtccgccactgaactgatgcagcagcaacagcagcagcaagacgaacagcaggtggccatggaaaaacaatgggggaaattgttgaaaatttggtcgccttttttccaataaa

SEQ ID NO: 52946 - DNA, 915 bp, Heterodera glycines
ctcgtctgctgaattggcattgaatgacgagaagagttgggccaattacagacgaagattggcaacctttgatgtgaaatatttggaattactgtttgagaatgttgtaaacattgaccaaatcaaaaggtggccagtcgaattgcgaaaccgaaggaaatttcgcctgttgtgtgcgcacgtcatggatggaaaaatgtgggggaggagtttttgcaatgcgacgactgtggcaaagtgttatacatcaaattgcctggcgacgaagtgtccaatcgcgtgctgaaccattgcattcggtcagtggcgactggattttatggaaactgaaatcttggcagaattgggagttggtttaaattgaaaattcaattcgggatcatcatcaaaaaccacgaacaaatcaaaggagggcacacatactgttgtcgtacaaaattgactcattttcctttctgtttagacacattcaacgcaaattggtcgaagcgcacaccgtcatttgcccatggcgcattagcccggggctgaacacttccgcaacctatgacatcactgcgcgttatcaccaactggtggacagcggccagcccgaacttccgttggcggacaatgtactcgacgaagcgttggccgacaaatttggcgtgcagagccgatttttcttggctttggccatttttggatggcttccaatatcaaagtaagttgaaagagtttgaactgcttgacaaaacccaaaaatggaattaaacgacaggaaatgattattttggggtttagacaagcgacaaatgacgtggagatgaacaaaccgcagccgaactttcactgtcccctctgtggacgacatctttgcgcatcggtgttttccagtgacaatccgctggacccacgcgaacaacaccagcatta

SEQ ID NO: 52947 - DNA, 1868 bp, Heterodera glycines
tccattcattgcctttctcttcagcactcactccgacgacgctttgccttttcttcgcattagcacttttgacaatgttccgcccaccattctcttctacacaaagggtgcaaaaggtgttgtcctccactttaaagctttccccaacgaaatgcgttcagttaaaaagcctccgccgcactttgcctctcgactcacttggtgcaacaattcccttttggccctcgtcgtccgtcacaggttgaacaactgaccaaacaattagtttcataattgctcttttgttagtttggctgctagccatttcaaattggtggacgaatcgaagaaatggattggctattgggggaagcatttgaagtcaccgcaatatcggacactgaaaccgttccaaaaggtcggtctattatgagaggtgttcttttagttggtttgtttctcacgtcacgcttttccaggtcaatcattttcccggcgcctttcatttgggccgtaaagatcgcctttggctgcacatttacgagtttatgcagcgtttcgaaggggacctcttctgcattatgcccatcacttatgtcctccctcgcgacgctcgaaagctccgactttatttggccggctatacggatcgccatgtcattctgaaacccgtaattattaaatttaaattatgacaaatctttaccattttaaaactcttagcccgcttctgctcgtggcactggcattagcattgtttcgcgttttgatttggttccaccaaaggctgcgcttgtcgcccaacagtaaaatttacgagaaattcatcttttaatttttgtttttaagttatatcgaacggcctttcatcataaatggtgcaaaatttgacttacgaatttacgtttatgtaagtatctttttccaatattttgtcactttctgtgattttaaggtcacttcgtatgatccacttcgtgtgtacgtctacgatgagggattggtcaggtgaacaaattctcagcgaatttctctatttttttttgttttttcaatttaatttcagttttttaatacttttcggagggggttgggggctacgagtgggaagtaatttgcttccttttttcgtaagtattaaaaattgaaaaataaaaaacttgagttttgcaaaattccatttgtccatgtcactcctccatttcccctctccaaaggttcgcaagtgttgcgtacagctcagcgttgtcctcctactccaaccaattcattcacctcaccaattactccatcaacaaacatgcgtccgatgagcccgtccccaaatggcgtctcagcgaattttggtcttttttggaggccaatggccacaattccacgcgacttcgcaacgacattaatttggtggcactcaaagcaattgtcagctgcgagacgcacattcgctcgcacggcgaccattacagtgactttccatttgtcaggtgccaaaagtttatttattttttgtatggaccttaagaattaaagaatcgtgaaaagtggttttgtggcttttttgggtcactaatctcggattttacaaagacttgtcgaattaattctgaaccccggaaccgaattgagacaaaaagtcgtaaatcatttaaaaattcgcatttatgaccaaaaccgggttacacatgagaaccgagccaaaaaatataaagcaagcgaatactgtttttatacattaaaaaatcatataatttaaaattgcaattattctcaaataccattttaagccatgagttgtacggcatggacattctggtggatgccaacctccgtccctggttaattgagatggtctgtcccatcattttacattcattccttttcacaagtga

SEQ ID NO: 52948 - DNA, 1135 bp, Heterodera glycines
atggtcgccgtgcgagcgaatgtgcgtctcgcagctgacaattgctttgagtgccaccaaattaatgtcgttgcgaagtcgcgtggaattgtggccattggcctccaaaaaagaccaaaattcgctgagacgccatttggggacgggctcatcggacgcatgtttgttgatggagtaattggtgaggtgaatgaattggttggagtaggaggacaacgctgagctgtacgcaacacttgcgaacctttggagaggggaaatggaggagtgacatggacaaatggaattttgcaaaactcaagttttttatttttcaatttttaatacttacgaaaaaaggaagcaaattacttcccactcgtagcccccaaccccctccgaaaagtattaaaaaactgaaattaaattgaaaaaacaaaaaaaaatagagaaattcgctgagaatttgttcacctgaccaatccctcatcgtagacgtacacacgaagtggatcatacgaagtgaccttaaaatcacagaaagtgacaaaatattggaaaaagatacttacataaacgtaaattcgtaagtcaaattttgcaccatttatgatgaaaggccgttcgatataacttaaaaacaaaaattaaaagatgaatttctcgtaaattttactgttgggcgacaagcgcagcctttggtggaaccaaatcaaaacgcgaaacaatgctaatgccagtgccacgagcagaagcgggctaagagttttaaaatggtaaagatttgtcataatttaaatttaataattacgggtttcagaatgacatggcgatccgtatagccggccaaataaagtcggagctttcgagcgtcgcgagggaggacataagtgatgggcataatgcagaagaggtccccttcgaaacgctgcataaactcgtaaatgtgcagccaaaggcgatctttacggcccaaatgaaaggcgccgggaaaatgattgacctggaaaagcgtgacgtgagaaacaaaccaactaaaagaacacctctcataatagaccgaccttttggaacggtttcagtgtccgatattgcggtgacttcaaatgcttcccccaatagccaatccatttcttcgattcgtccaccaatttga

SEQ ID NO: 52949 - DNA, 1023 bp, Heterodera glycines
atggacctatcaattgaatgcggcaaaagaagagacctgtgcctgagaaatagaaaaaaacttagctatcgaatggcaccaagaaggtaaaatttggttgtttttaagtaaagttatgccatgcttttcaaaaaactggccgccgtagtcgagtgtgcggcggttttttagcgcaataagcaaattcaatcttttatatttgacgttcttttaccaatttctgactatggtttaaaaatagttttaacgattttgaggaccaattacatgcgtcggttttacatattttgaattttgtcgagaattaatttcctttttttttgttagagtccgggtttcgaatttggtcaaatggatgtcataaccgttttcagcgacctcgaaaacccccaaaaatatgttttcattgtaatttatgaatttcgaatttttgttcgaattcaggttcgagattcggaattttgaaaaataaatgtcatattcgtgatcagcgccccaaattaccctagaaatgactttttatttgaaaatttcagggggggggggttcacaaaaccgaaaagaccctttaaaattgcgggacgaggcgtaaacagccatttggccatccgacgcattggcactgttatcaggcggaaattcggggaaattttttgggtcgaatttccattttgtccaatgtccaattgcgcgtttggaagtgttcgtcaacggaatagtcaaattgttggctgatcagcgcaatgtaaaggccaagctgagagtgtggaagctgcgtcaggatcagccgggacaactcagcctaggacttctcagctgatggacaactcagctttacgagaatttacaaaatgcaactcgtacaatggcttaggcaaggcctaatcggtctacccgatcctgagaacccctaattaaatttatatctgaaaaaaattcttgaaaattttttttttttttgaaaaagggggcccaccatcttaactattaccgccagctttattcagttcaggcgtcaataaa

SEQ ID NO: 52950 - DNA, 242 bp, Heterodera glycines
ttgtcaattaatgaatcgattgccaacaggttgatgggtttttcaattcttttacctgttatatttaattttaatttgagattttgtttccgatttgcctatggaagttctgcctgccttttaccctccgccaactttttggatgcctcaaattgaaatcccaccattgagaaaatacgaagtttctaaaaaggaaaggtctaaaatgacatatctttcagtacacattcgaacatgaaaag

SEQ ID NO: 52951 - DNA, 721 bp, Heterodera glycines
atggctaacgttggtatgggtgcacaagtagctgagacgctggtcgaaaatgtggacatccccgagagcgccgttgggctcggcaagagtttaatatttacagaacctaggcataagaaagatcggatagttaggtttgaatactttgttttagtgattggacgaggtggtgagcaaattcagctcatacaacagcagagcagctgtcgtgtacaaatgtccagcgaaagcaatgtcagtggatttcgtcagtgcactttacaaggcgcacgacataacatcgagtgagaatcctgacataaattttccatgtaccaatttgtttccttttagtaaggcgaaacaacttattcaagaagtactcgaacgcagcaatagaagtgcccctgggccacaaaatggagccaatgcaataacaattgaactgagcattccaggaccaaaatgtggacttatcattgggaagaatggcgaaactatcaagggtttacaggtttcgaaaaaaacattaatttaaaacatcaataaattgtccaggaacaaattggtgtcaaaatgatgttagtgcaagaaagtcatcaaccgaccatgggaacggtaaaaaaaccaaaagtctttaattctggaaattttaatcctcagaagcccttacgagtttctggacctcctgacaaagtcgaaaatgccaaacgcatcattgagcaactgctcgctggagagg

SEQ ID NO: 52952 - DNA, 371 bp, Heterodera glycines
atggcggatcctttgactttgcttcaggaatatacaacaggaaagcgtggattgcgtgagctgaaacacgtaagtatagtttttatacattaatttgactaacttttgactaataccattttaatagtttaaaacaaatttcagaatgggactttgtattacgtgttcgatgatgctgcgtatccccatgattcgaagaccaatttaagtgtctacaacaagccagatgagttttattccatcgagtcgatcttgaatttttggaggatgcgtgaaatgcaacacactgcgtatgttcgggatgtctccggaaagggaatcgcatcgatcacgcgagttcaacggtaattttgctatattgacgaggaata

SEQ ID NO: 52953 - DNA, 1674 bp, Heterodera glycines
atgtcaacggacggaggagaccaacccgaagtgagaggacttagtaacgaattgccagccgagaaagtagcacaattacgaacactcgtcaagaaaaacttgaagaacaaaccactcgacgacgaaaggtgagtcggttcaattccgacggtcaatgtggaattaaaagcttcgtaccgatctccgatttggctatgccggatgcgagtaacgacgccgtagggaaatttataacggagaaggaacggctgagaaaggatcgcacgacttgccttgaatcacagtccagggacttttcatgcgttttgaccgctttgaaggatattcaagtggttttatccttaattggttaccagtaattttcgaattaggtgcgagaaaatcaagccaaaagccatccccagcatgacttctcactttcttctcaatcgcagtcttcgcgggttcaaaagccgctaatgccgggcgggtacagtcgctacgaccaggagattttccagaaagagacggtggccgactttgaaattgaaaccgatctgagctttcacggtaaaatttctttttctttcttcggattcactacacctgcccataggaaatgctgcgctgaaccaacgcattggcgctgctcaccctcaaaatcgtccaactgcgctaacatcgaacggcgtccaaaaggcggacccacgacgacccatcaccgctggagttgctccgtccgccatgcgacaacaacacggcccgggccaaaaacgtgtgtcacgcgttccaataataattatccctgccggtgcaagttcactcatcacaatttacaatgcgcaggaaattttgcaggtttattcatttaaaaatattataaattaatttatgttaaggatttgcgttacgtaagcacagaagaaaaaaagcaatttagcagtaaacgagagaatgagctgttactgcaaatcccaaagaatggcgtcactgttccgtaccgagtcgtagacaatccaacacgattgaaggacgaggaatgggaccgagtggtcgcagtgtttgtgcaggtgggcgtatggtcatttcaggggatttgcaaaactgctttagggtccggcctggcaatttaaaaattggaaatggaatggcaatccggttgagatatttgccaacattgctgcgtttcacttgcaattcgacgaacttccaaccgatccaaatgtgaaaaagtggaggtttgttcagctgtttattttttggggaagaatcggagcagataaatgccttgaaaacttaatttttgaaagttaaaacaattctttaagtgtgcatgtgttgaaattgtcccgtacgaaaaggcatttggaccgggcggagctgcacaaattttgggaaatgctcgacaggcacatttcgaagagcaacaaaagggaatggctcagatattagcgaagtcggcacattacatttgaaaatttacaaacgattttttgtttgagttttttttttgtataataatttaccaacttccagcatttactcccttaccaaatttggtagtgaaaatttgattggtaaaaagtattagcaaagaccaacatttaaaaaaacatggaatcggcatttataaatatattttttaaatctatttaattttttggcaacttgagataaaaaactggtcacttcaaa

SEQ ID NO: 52954 - DNA, 1650 bp, Heterodera glycines
caatagacaatctgtgcttttgttgaacaatgccaaggtgcgattgcgcccccgaaggaccaaaagagtgcctattcggtttttgccgctttttcaattcattcgatggcaaaaagggaatattttgaactcatttcaatcaattgccgtttttgtattaactaaccttttggaaaaaaatcattttcgcgattttccgttccctgctgctcggtgagctccaacgaacgatggacggtgcccccccccgtcccctttggtgccctacattcacaaacccaccgactctttcttatcaatcatccttcccattcacctattctaaaaataacggatcggatggatgaaggcattcataaaccacaaaagcatttatttatccgattttatagtttctgtggcgaaaagtgagataaaagggaattgggcgggggtcattaaggggctgtggggcgggtgaagctttccttccccagccatgctatttgtgatcgtttggttctatctttcccatgccgacgaccttcaatgctaatccgatcacttcccttttaagggcatttcccttcgaaaatcacagcaattttggcgatacggcacttatgccctcctccccacccccgcccattgtcagcggcggatggtcaaaacttgtctttctttggtatttacgagtgctgccgatttgcgcataatgcgctctccgtgcgcataatgcgggcggtcctccgacttggatttgttcgttctgtgcttcaattagtccgtcctccatttgccatttgtctctcctccatcaatccctcccataatcaatcaaaatcaaattgaatttgtgccatttgtttttgttaagcatcgaaatgcctttgtcggtcctcgcgttggccttcgccctttcctttccgcttctgttgccttttgccaattcagctgctcaatgcaacagcatggaaatgttgggcagttatttgaaatgtttgaagggcgaattggacagagattatgccggttttgagcaggaacttaaagagcacacgcggtcagtggcaccgcccaattaatccattggcaattaattaattgcttgttgtcagacgggcgaccggtgcctgctttgcgcagaatattggcgacgccaatcagaacgagcgctgtgtgttggcattggccgatttggatgccaaggcgtgggaccgcaacggccccctgagggaatgttccatttgccgaacggtggattggacttgcgcatttctgaacattaagcaactccgttcagtttgccaccggtgccatcaaagccatcctttcaacaccagccgatgagcagaagtgcattagggagcaaatctcaaaagccattgggtcagaagcggagacatgtctaaagaagaaggtggccgacttcaggtgagccgcttttctgtatcaatagacaaaattggcagttcagtgggccattggtaatccccgacttggaggagggcgcctttgccatcaaagagcaagtgatcgactccatttccgactacatttggatccattcgcgactcgcattttgtgccgagcggaagcccgagagagccggttctacttcgaagtgtctgaagtcgcctttccttggctattatcagaagcattgccaag

SEQ ID NO: 52955 - DNA, 1714 bp, Heterodera glycines
aaaatctattgccatcacactggcgttgagtacatgcatttgacaaactacgagcagcaggattggatccgaaaacattttgaggcgcccaaagtcacagaattaccaccggagcagaaaaaagtgtgtgaaaaaatggaataatttaaaaattggtcccccattttaggtgcttttcaaacggctgatccgctccacaaagtttgaggactttttggccaagaaatggccaagcgaaaagcgtttcggtctcgagggttgcgaagtgttggtgccggccatcaaacaggtcatcgaccggtcgtctgcgctcggcgttgactccattgtgtgagtctttcgggagggattttgaatgaacttttttaaatttgtaatttcaatacccttccagccttggcatgccgcatcgtggtcgtctgaatgtgctgtccaatgtgtgccgtcaaccattgagcaccattttggcccagttcagcactttggaaccaaaggacgagggctcgggcgatgtcaaataccatttgggcgtgtgcattgaacggctgaatcgccaatcgcagcgcatgatcaaaattgcggtggttgcaaatccgtcacatttggagggttaggcattgaaaatttggattttcgacgaaaatttataaattgtttagctgttgacccggttgttcagggcaaagtccgtgctgaggcattttacagcaacgatttgcactgtgaccgtcacatggtgagtttgatcagcggcaattgtcatttaatgtgtgaaatttccccaaaaatgaatttttgttacccatttcccctccccaaaaaggcattggtgctgcacggggatgcctccttctccggccagggcgtggtgatggagacgttcaacctcaacgacctgccccactactccatctatggcgccatccactttgtggtcaacaaccaaatcggcttcaccacggacccgcgcgcctcgcgctcttcgccttactgcacggatgtcggccgggccatgggcattccgatcttccatgtcaattcggacgacccggaggcggtgatgcatgtaagaaacattttctttaaattaaaaaaattttttgttgttattcatggtttcaccaatttttctcaaacaagaaaaaaaaattttcattgacaatgcgtttcttcgcaatttgtttttttaaaaacataatctttcgaatgcgatttggaacctcaaaaaattcaacaggtgtgcgatgttgcggcccagtggcgcaaggagttcaagaaggacgtgatcattgacttggtgtgctaccgtcgttacgggcacaacgaattggacgagccgatgttcacgcagccgttgatgtaccagcgcattcgacagacaaagccgttgttggaccagtatcagaagaagattttggcggaaggcatcgctgaccaggtttgcgttttgattggaattttaattccattggaaaaatttatcgacactgaattttttttttcggagtaggttgctcaaaccctaacccgaaattctgggacagaattctctgagtggagtgttgccttttccatatttttttttctaaaaattcttattgacccaggaatatgtggacgaagaattgaagaagtacggcgccattctggagaatgcgcacgagagtgccaagcaggtgaccgagctgcgcaaccggaactggctggactcgcc

SEQ ID NO: 52956 - DNA, 918 bp, Heterodera glycines
atgttcgaggtgggggacaagcagcgtcgcattgccacagcgtttgaagcggtgcgcaaccggacaggcggcgccgacgcatcctttgcctccatgccattcccgtcgctgatcgcccacctgcagaaccgacgtgccaagcgccagaccgaggcttgcgagtcgtgctgcattccgggccatcccggccgcgctggcacgccagggccgccgggacagcccggaacgccgggcgcgcccggcagacccggcgcgccaggtaatttaaaaagaaaaattttaaggaattttaggcttacaatgaatttattggtctctgagctccgagttttcaattttaaaatttattttttgataaattcaataaaaaatagataatttaaaaaatagaaaaaaaaatttggacactacggaaaaaataaatagaaattcttagtccaaaaattggccataacaagaattttttttattgtaaattttcatcaattattcaaataattttcgaaaattttttgtgtgtgcctattttttcaaaaattatttttgcgtcttgaatagaataaaaaaaacaaaatctgctatatgaaattaaaattacgtaaaattaaaaaattgtaacaaaaaatgatttttaaaaagatggcgcaaaaaatttccaggacgaccgccaatgatctgtgaggagattgaaattccgccatgcaacccgtgcccgcctggcccacccggcaggcaaggcccaaccggacagcccggcacacctggcagatccggacctcctggccgacctggcaccaacggtgagtggagttaaaaaagtagtttttgttttttaattttacaattttaggcttgcccggacccccgggccctcctggaccgcccggcacgcctggacctactggacccgatggagag

SEQ ID NO: 52957 - DNA, 207 bp, Heterodera glycines
cgggatggcccggaatgcagcacgactcgcaagcctcggtctggcgcttggcacgtcggttctgcaggtgggcgatcagcgacgggaatggcatggaggcaaaggatgcgtcggcgccgcctgtccggttgcgcaccgcttcaaacgctgtggcaatgcgacgctgcttgtcccccacctcgaacatgatgtccctagccgaactct

SEQ ID NO: 52958 - DNA, 819 bp, Heterodera glycines
atgccgtccactctcagggacaccaacttcttggagccgggtctgttcctctaccgcatttcgggctcccatccgttggacccgcgccagggccaaaagggcgccggcggaagtctaacgggggaagaggaaagcgactacgaatatcagcaggagcagcaggattacgagccgggggaccaaatctgtgagttgatttgacccgttggttcccaatgttcgcgagtgattcagcggaatgtccgcccgaccctttccgcgactcgtgcccacccaactgcaacgtggtgttggacgacaatcattgctccctttgcatttgttcaagtacgtcttcgagacgtcgcgcacccattgccattttcaggtgttatttcggagaatttggccgggtcggcctacgaaaagcactcaaatggtttgcacttaggcaatgttttgccaatgcttcaaaagttttttcagacatttctcccgaccgttcgcttcgtccgttgcccatggccactctctccgcctctcagcgcacttccgacttgagctgtacgcctcggcagggtcggctccaatgccatcccaggtgaccatcactttcggcacttttccaatcctcgcaaattcaattctcttttgttcgcagtgccaattgcatccagcagaacaacggctactgttgccaatgtgacaatggcttcatcggcaacggcgtcgagtgtttggcgaaggacggaccgttgcgaatcaatggaatgtttgaagcggcactgaacggaaagcaaatgcaacggacggaccttttcggtcggagatacccactga

SEQ ID NO: 52959 - DNA, 1171 bp, Heterodera glycines
atgagttggatacccatcagccccaagtggaagttgtgcgctccaaaggcatggagttggccgagtccagcgaaaaagccgtgcggagattgtgcggagtatcaagcgttggatcaaagctggacaaattttcttcagttcatcataaatgcgacgtggcggagagttggatcggtgacaaggaacagaacaccttcccttgaaatccccccggggctttatttttcaactcacctcaaaaggagggctttatttcagagggggctgtattatagtaaatatgatatttaatttgatcattccaaacagccgatggttattcacatttaccaagtaaaattaatgaatttgaataccctccaatcagaaaatattcctcatcgaaaaagttaattttttttgattattttaattcttgatcatcatcgtctttaattctcatcttttttttggtggatggtgtcgccgggggccgaaccacggcaagcgctttcctcaattttgtgggtcacctgccgatggatgaaattataattaattaattgattgattgcgtctatgcgtcagtcgagcgcataattaaagccaattgagagagctactgtaaaaaaattcagagaatatacctttatgaattgaacgccaaaattcattttttttcttgataaaaaattttaggtttaaaaatttccttattgaaagacattataaaattgaattatcaataaatcagcaaaatttagttttttggttagtttttacgtgttttgctccctaaaaatcattaataaaaaaatttaaatgccttttttcatgcctttttcgggatttttgtgccttttttcagtgctattttgcgctttttggtgccgtaattgcgagctcaagccataactttagggccggcggtgctgataagagccgccgggaaatttttttgtaattttaatgctatttgttagtagattttgtctaaaaataccaaaatttgagattttggctaattttttaagaaaagatagctttttggggggtcggcggtgccgataggcgccgccggaggaaaattttaaagaatttttaatgaattttgttacgaaaatggccaactgatttgtcaaaaaagtcggtcgattaattctgaggaaaattattttaaataccaaataaa

SEQ ID NO: 52960 - DNA, 64 bp, Heterodera glycines
aggtgacccacaaaattgaggaaagcgcttgccgtggttcggcccccggcgacaccatccacca

SEQ ID NO: 52961 - DNA, 87 bp, Heterodera glycines
atggttgaaatacatcctttctgtaacattggtgtactgcgaaagaccgatgataaatcattaatgaatggacagttggcgttaaag

SEQ ID NO: 52962 - DNA, 206 bp, Heterodera glycines
gtgttcatgtgattcaagaggagcaggcgaccgcaaatttaatgtgttggagtctcatcctcgagggggcaaggttggcattgttcattaatttaggacaattaattgcaaatttttacattcatttcaggaatactttgtacgacagtgaaatttttcagttgcaattcagatttgacgaccaatacccattctcatcgccagaa

SEQ ID NO: 52963 - DNA, 386 bp, Heterodera glycines
atgacaaacatccgagagaagtaagtcgagaccgagatttgggaaaaactgaatattaccaaaaaagagtttgaactattttttatggttacctaatttaaattagaaaaatgtttagttgttccttcataacccctaaaattctccttaacctgattagtctattaacaattctaattgctgtttttttaccccacgagctgcgccgaactcgcccaacacgccgttccccatcagattgatgttcaaataatttgccatcattggtgtgacttggaaggtcgccaccctcgacgagaattgcaaaaaatggaaggaaagtggcaaaaatgatgaaaataattgagagaataaggacaaaccgattgtggtccattttagcgaaa

SEQ ID NO: 52964 - DNA, 729 bp, Heterodera glycines
atgtttgttggccacgtattaagcgtttttcgaattccattctcattcattttcatatgcattttgacccctgtttttgagcacaggttcactgtgttcatggtgatcagtatgttcgttccacaagttccgctcaatttggtgatcagtaagtgcaaaaatcaatcatttaaaaatttatctaatccaattgcatacgccaccaaaaacaacatattttcaattataaaatctattatttttttaaatgattatagataagttttcaaaaaattattttctgttttataaaataattattttatttttttgccttatttttttgctgatattttaatttttattagtaactttgagatgattaatgcaaaataattcgttaatttaattttcaatattttaattaattattcccccttttaattgcatttgttttgaagagcacaatgaccaatttttgccaattgcgccagaaaatttggcgtgccgcgaggcgaccaatggcagcggtttcaattgcgagctgagcgtcaaccaaatggtggtggacgacgactgtagggacgtgtccatttgggcacggatggacaacgacacgagcacactccaactgttgggcgaacaggtgaagaagaagaagaagttgaagcagttcagggaaaattggataagggtaacactggagaattgaatgatcaaaaattcttggaaaattggcacggattttca

SEQ ID NO: 52965 - DNA, 138 bp, Heterodera glycines; identical to SEQ ID NO: 50950

SEQ ID NO: 52966 - DNA, 1862 bp, Heterodera glycines
atgaatgacaatgttttgagtttattggcattcgcattggtcgtatttttgttccgtcaaaagtcaaattccgtacttgcgtttgatttggaagaacatggtaaatcgaaattatctttttttgttctcttttatcaaataattttaaaaaagttaattattttatattttttaataaattttttattattttggcaataaaatgaatccaaattaatattttatacttaaatgcaaaattgtgaaaacgattagtcatttaggccctgcttctgctccgtccgcaatttccccaccgatcccttcgcctcccactgaaatttcccaattttttgccccattcggtcggtcttttttattcttttatcgaaatgattttaatgcttttccatttgagaaaatcgtcgaattgtcacgcggttccaagctcgcaaattcatcagtttgctgcttcggcatatttctccaacattttccttttataatttaataccgcccgattcggttaagtcaattaattggcaatttaaagtaatttaatccaaaaacccattttaaaggcattgattcaattggccaaggacagcggaggaataattgtggggcctttcttaagagaaatgcattcaataaaaggccaaattggagaagcgctaattgcttttctgacaaaaatgtcagcaagaagcacaaaactattcgcggaaaatgaagggacaaaggtaagaaaaaagagagaaacaattaaaattaattgaatattcaaagtttaggaggaaaggaattcggcacgcaatttaatcaaagttggcattattttttcgatggcaaaaataattggtgagaagctgcatgactatgaaatcaattgggcaaaagaaatattagaaactcagcaaaaaaggggaaaaatgaggggagaaaattatcagaataaagaggaggatcaaaaagaggaggaggaagaggaaaaagagagggaaaaggaagacagggaaaaagaaaaagaggaggagaaagaggaagaggaaaaagagagggaaaaggaagacagggaaaaagaaaaagaggaggagaaagaggaagaggaaaaagagagggaaaaggaagacattgaaaaagaaaaagaggaggagaaagaggaagaggaaaaagagagggaaaaggaagacagggaaaaagaaaaagaggaggagaaagaggaagaggaaaaagagagggaaaaggaagacagggaaaaagaaaaagaggaggagaaagaggaagaggaaaaagagagggaaaaggaagacagggaaaaagaaaaagaggaggagaaagaggaagaggaaaaagagagggaaaaggaagacattgaaaaagaaaaagaggaggagaaagaggaagaggaaaaagagagggaaaaggaagacagggaaaaagaaaaagaggaggagaaagaggaagaggaaaaagagagggaaaaggaagacagggaaaaagaaaaagaggaggagaaagaggaagaggaaaaagagagggaaaaggaagacacgcaaaacgagcacgaggaacagagagagcaacaccagcagcagcagcaagttgggcatggtcatggacaggccgcagaatcagttgagacacggcatggccaattcgaaatgagtgccgaggaaagggaatgtctcagctttttcggtatgacttttgactttttgactctttaacgaataacggttcatcttttttttttgatcaaattgtcttcaatgcttctgctgatgaggaaggggaaagtgatgatgatcattatcattatcagctgcgcaatgcgccttcgacttctcatagcgtaactttttcattttattcaaattaaa

SEQ ID NO: 52967 - DNA, 964 bp, Heterodera glycines
atgggccaacacaccgatggagtgaggtgcatggagttttgtgccactatgcgtgttgcagtttcgggtggatgggacaatctaatgaaggtcctttacaccccttcaccccaatatctctaatttattttaacagttgtgggacattcgcgctttgatgccagtcggtgccatggaatgtggagacaaagtgtatgcactggacgttgtagacaacagagctgttgttggaacaaaagatcggcgagtgattgtttgggatgttcggaatatgaaagccccattgcagacaagagaatcgccactgaaagtttgaaaagcaaaattacagttttctgattcaggcatttagttccaaacccgttctatcaaatgtttcccctctggcgaagcgtttgttttgtcttcaattgaaggccgcgtggctgttgaatacttcgaccaggacccggaagtacagaaaggaaaggtaaattctttttgttttgttttgtgatgacaacttctcacaacagtatgcattcaaatgccatcgcgtgaaggaggaattcggagagcttatttacccggtcaacgctgttgccttccacccggtccaccgaactttcgccacgggagggagcgattacatcgttaacatgtgggacccgttcaaccggaagcgcttatgccaatttaggaagtattagcgcttttttttgcttcactaaattacctcttttcaaggttcccaagctctgttgtaagcctctcattctctcctgatggtggaatgctcgcaattgcttctacttatatgtacgaggaggaacgcgatccgaatcccatccccgagagttcattaacgattcgccgtatgacagagctagaagtccgtccaaagtaaaatttgtttttttctcatcttgttatctcattccgaacaaagctcaggttcaatattatttttatatttgcaaataaa

SEQ ID NO: 52968 - DNA, 1655 bp, Heterodera glycines
atggagaaaattgcggccagccgcaacccgcagttggccgcttcgctctccacacagccgtcaaattcagttagtgtgtgtgtgtgccgtatgtgccaccatcttttgaaaaatttgtttcggaaatattggactgcaactcttttttgtacaaaaattgttttaacttatcaatgagctgggcaatgtcttggtgtgcgaggcatttctctagtaggcaaatgcaagttttacccgtctattggagacattacttttgcatcaaaacggaaaatgccatatttttgtgtgttttagaaggactcgttgtcccacctgagctcgatgaccagcgccagtcttcgccttgactttggcgacacgcccaagtcgatcagcagcattagtcaacacgggaccatcaccaaggcatcaaaaaatactaaacgaatcaattatacattttaattgcacagccaaagcttgggttgtctggcacgacgcgcaagcgacgaagtgacgcgtcaaccgcggctggcggcacgacgcctcggtccacggcgccgtcggccaaaaagccacggacagcgaccaggcgaaagcggtcaaaacgcgggaggagggcagccagtgatgaggacgatgatgatgaggaggaaatagaagtagaggaggaggaagaggcggaaaaagaggacgacgttcagcaacagggggagcagggtgaccaaagtttgcgcatggaagtggacggtgaagggtcgacgagcggacgtggccgaaagcgcggcacaacgcccaaggcgccggcagatgcgggcgttccaaagacgccggaacgcggcagtttgaggcgtactgctgggtagggaatggggcatcgacaccattttcataggggttgacaaactggacataatataaatattcgcagccaatttacccgtttttgctagctgtatcgtacattgaggaatttaatttcattttaagacatacaaacccaaatttagtattcatttatttgctagagttatggataacaaatttccaggcttgactcgtcccggaaatcggagcagaaacagaaggaggagttgttgtaccaagtgccggaactgtcacctgccgaacagttgggcgtggactgtcctcgggacgcgcatttgttcatgggcgtcggtgcgcgcgtgcttgccctttggggcaacgattattactcggcgaacatttgcgggtttgaaacttttttttattacctattaatggtattttaatggccattcgaatgataaaagcggtgtcatggaaatgttttttccgccaaccgacctttacaaaatttacttccatatttcagtcgtgaagcattgggccgttactatgtgcacttcgtggaggacaatctgaaccgtatgctgccacccactggcgttattcctatctctgcgttgaagccgggaacaaaggtacatcgactaatttcaaattaaacaattttattttattcgttttagatttcatttattgacattgtgaatgacgaagagattggcaaagtttgtgaggttgttgagcagccaccaacagacgacgctggtggatgggcacggggagagttcaaactgtgcgagttggacgaggaagggaaccgaaccgacgttatcaaaacgtaa

SEQ ID NO: 52969 - DNA, 181 bp, Heterodera glycines
aagcaattaaaaaattttttaaatgagaattcatgcgagattttctggaaataagcttaatagggcctagttaagctgtaaaaaaaaatttggggcgatttgaaagagaatagaaagaaccaggttcgatgaagttttggtaagccaaaaaaaatccaaacatttaaaaatctataaaaaa

SEQ ID NO: 52970 - DNA, 441 bp, Heterodera glycines
atgcgtcaggacatttgtgctctccaaacgaaagtgggtacggttgagcacaatttgaagcgagctctcgcaaagctgcaaactgaagtttcagcgattaaggtttttgtttctttaaacttatgttttagttttttttagacgcaagtgggtacgattgaagtggactttaaagccaaaatggacgcaatgaacgtaattatacactttaatattttgcatgtaaattaaatgtattctttccaggaaaaaattgcagttctcgacaatactatgaagctggcgtccgtcaagattcaggatgttgtgaagaaatgagggttcgaacaaagattttattgcttgttttctttattcacttgctctgtttcgctataattttgacagttacagagtaagtggtcaccgcccttctgaaacttatttttcttgcttaataaa

SEQ ID NO: 52971 - DNA, 1192 bp, Heterodera glycines
tacatttaaacccgtcggtgctgcagctaatcccgcgtcagccatgctcaattgagaaagaggtgagcggcggtcatccttaagaatttggaaataagtattttaaaaatttttagattttcccaaaaatgtgttctgtgagtaatttgtacgcctttatattggtcggtttttggatggacgttggacagccgaaggattttcttaggggtacttaatttcaatcattttttgcaataatttttcgtacattttttggtgttcgtctttatcttgcccatcaacagcagcaaaaagttgtgaaaagtgctcttgaaaatggcgttaattcgtcgtcaacgacaatcggcgaaggctgcacaattaatcaacccgtaactgcataaatgaagctcaaatgccatagaaattgcaatcaaatttgctttcattcaaaatcccaactattaattttaggtcctaaaaaagccaaaaataggcattaaaaatgtaaaataggaactaaaaagcctcaaatctaggggtaactcgaaaaatagctttacagccaccaaaaaaaaacttgctttcttgaattttggccgctgggagctcaggaaaaaatggggaaaaatccaaaaatatatccctttatctttggcatttgaataatttataaaaccaaatccgtttatcttccctcatgcctctccctccaaaaggtgatgattgacccgtcggcatcgatcggtgccaactgcatcatcgggcccaacgtgtgcatcggtgccgcggttcggctcctcgacggggtgtgcattcgcgactctaccattctgtccggcacagtcattcgacgcagcacactcatccattccagcattgtggggcgcaaatgcgtaattggtacgtgaaattccattaattttggtggaggagggatatccgaatggttttctttgatccgttaaacggatttttttgtgattttgccatgagttttggaatttattctttgaaatctttttcaatgatttttttcactggttcactttttggcacttttctcgacctgttcaggcagtcacgtgcacatggtgaacaccagcgtgttgggcgaagacgtggtcatcaaggacgagctgtacctgagtggtgcccgtgtgttgccccacgaaatccattggcgaaagtgtgcccgaaccggccatca

SEQ ID NO: 52972 - DNA, 728 bp, Heterodera glycines
atggctgtcctcaaaaaagtggtcaacgaccctttttacgacaaagcccgcgcattttggcgcagttggaaccgacgacatcaacagcaacaacacccgcaacatcaacagcaacaacacccgcaacatcaacagcaacaacacccgcaacatcaacagcaacaacacccgcaacatcaacagcaacaacacccgcaacatcaacagcaacaacacccgcaacatcaacagcaacaacacccgcaacatcaacagcaacaacacccgcaacatcaacagcaacaacacccgcaacatcaacagcaacaacacccgcaacatcaacagcaacaacacccgcaacatcaacagcaacaacacccgcaacatcaacagcaacaacacccgcaacatcaacagcaacgtcaagaacagtgacaacgccgacaacaactacgacaaagccaaggaacaaaaaggcagagttgcctaaggcaaatggtgctatgcaatggcctcaacttttattgtgcggagcccttctgccatttttggcatttgtttggcggcaccaaaggggtttgtttaagtttataggaaatttggtcaaaaaatttttgaatcctcctcaatcaaaaaagggaaattttgtgaatttcaatcaaaacatttttcgtttatttcaagatttgagtttttgagaacttatagaaagtatttcatgcttcctagggattttttcaaaaaaa

SEQ ID NO: 52973 - DNA, 2081 bp, Heterodera glycines
atggcacaacagcggaagccaactcttgaaccaatggcacccactgggacggcacatcactcgccgattggcacaactttgttggaccaaccggcaacatgggcgctgatgtcgggaacaatccgtccacaatgccacccactggggcgccacttcactcgagcagcagccgattggagattggtgaaagggccgaccgaaagaagaaccaaaagcgccgtgtctttttgtgagtttggccgacaaatttcaaccgaaggactaattaggaaaattcgttttgaaattgccgacgcattgggaagaagtattattaattaatctaatcaatcattgtttgggaatttaactggcaatttgaaaaaggaaccgaatggacgcgctaaaaaaagtggtcaaggaccctttttatgatgatgtgcgcgccttttgactcaattggaggccgtcaacaacataagcaacaacatacaacaacgacaacaagaacaacgacaaagacaacagcaaacaagcaaacttgccgaaggcacatgcagctttgccattgcctcaactttgttgtccgccacccttctgccatttttggcatttgtttggaagcaccagaggggtttgtttaagtttatagataatttggacaaaaagttttttgaatcctcttcaatcaaaaaatggtcttgcgtttgttatttgttgtaatgatccctttctctttgctctccgttcaattgttcgtcattatcgttgcttctgtgctcacactcgtcacccaatgctgtgcttgttgtaagaaaaaggtgaataaatgattcattcattatttatcaaatgaattaatttaatttgttttttattgacagaaaaagccaccgacaacaaacttcgttgatcgtaagtctgtttactcaagtgttttgtgtctccgaacagctccaaaacccttacattttcagcagccgattcgcgctattcgacgcttgccaccgatataaacaaggaaattttcgttcaaaaaaggccatcgcagcaacagcggtcacaaactgtaccctatggaccttttgtatgttggagtgttttgtttgctttttttaaatggcactaattgcgttttttggtttcagcaagtgcgacgcccgtaaagccggcacttttggacgagtacaaattcttgccgacattgcgcgtagacccgcccgcttttccagcgcaggccgcaccgccaacttctgtattggcctcaccgaccatctcggcaaaaccgaccactccagcagcatcggcaccgacaacttcggctaaaatgatcacttcaacaaaaccgaccacttcagcaccatcggactcaccgagcacctcaggaaaatcatccacttcagcagcaccgaaggacatggcttcgtcgatgagtgcgccaatcattgcagaggcgacgggtaaagattttttttggaaaatgttgccaggttccagttctaaaactcatggtttcatcaaatttttgattaggttttccaaaggggaatctgccgagaatttagcgcttgtttcattttcattcaaagtctaatgattcaatttgcggtgttttgtgtcatacacaattgcttttccaacatgacattcattaaagtttttcaacagccgactcgggatactcacaaatggatcaatttggtcaggacatgtccattcgagtgctaacgccggaggaggcgaagaaccgaagtgagagagtgcggaaaagcattgcattgattctgatcactcatttcagcgccagagacgggccaatccatcttgatttttgtgctggtcagcagcagcagtaagaagggggacaagcgccgctgagatcgtcgacggtcagtcaaacaaacgaataaatatgtttttcattggataattatcatttttcagcactcgatcggattatttgtgtgatgctgttggccaattggaccgttaatttaccctttgaaagcgttcgctgtgttcagatgaaatgtgacctttcgataacctttgtttatcatgtgattgctgtcttattattcccactgtttctgcccccttaa

SEQ ID NO: 52974 - DNA, 2833 bp, Heterodera glycines
atgccggtgccatcaaaggcggctgctgacgaatgccgcccacctagcccagagaacatcccactcccgacccaattccgcagttttgtggtaaaaaaaaactgatttacccgattctttttactattgacattctaatccaatccgtactaatatttccattaaattaaagtaatttactgattgaaaaaagctttgtaattctgttccaaattttaattaatttttttttgcccactcatttccaagttattccttttcaatcataccgaccttcctcaaaccggacagaaaactggagagataagggcccggtcgggatttttgggatcctgtcccaagtgcttgatcccgaaaaattgaagtcgggatcccgctcctcgacattttctcgagatatcattttcttaagactttaattataattggcaaaatttatttttaattagctgaaattttaattttaggctatttaaagagaataaatattggattactctctgttggttagccattttttgacatttggatttttcaattctacagtaagaaatccctggccggggtcttattttagtttcaaagccacacatccctaaaccagcaaatcatttcatttctaaatctgaacctgcccttacatatcccttatcccaattttaaaggcgaatgacggaattagtgcgcacaacaatggtttagtctgatgatgttcatcttttacctgctgatgttattaatattgttactaattaccattcgctgtgtgaaattttcattttcaaacaaattttatacacatttttatgcacgtaaagtatttatctttaattttaccagtatccaattgaattgaatgtttttcattgtacactttcttttattgtaatgccttttctcccccattgaattcacacgaattggcccttttctcatttcattattttgtcattcaaaaaaaggatttgtcaacagcagcagaggaagaacaccgaacaccccctttatctgctgctgatctctctcactttttgttattgttttgctctttctttcccactttttttttggtccgtcctttgtgcccaatgttttcgtttcgtttcgctttttctgtcatcccccccccgcgccctcccaaatccaacatttttccattttcaaaaggttttgagcattttgataaacactcgaaaaacattttaaacaaaacgatttaagcttctcatttgcgtcatcgccatccctttctaatgttccttttttatcataaaggttaataattagtcagaaattgcattgttgatggacaattccttaacaaggattgataggcggagatagggaagaatcttacaaattaataaagttaaataagattcacgatttaaaaaattttgatcctacaatagaataaacatggaaaaatacgaatactgacgatttgataaaaaaaaacccggacgaatatttttcacttataaatattataatacctgttttttttactttaatgggcttaggcttaacttccttcctcttttccttgagcactttcacaaatacacattttgttgaccaacaacttgttttcttaaccccccccccatttcaaacggagaaaacgtcgacatttatttatttgagaggaaagggacacataagtaaacattttcattttccaccggaggaatgaataattaaaatgccaatttagattcattttgcttttttgtttcttcctacatatattccatgtaatgtgtttctctactaaaaaaacaatgacaagttttctcgcaaaaacgaaggcaatgtttgccaattcttccgattgtttttctgcgtccgaaattggcgcgtttgaggcggagcattgctgtgcatgcggcacaacgcatctttgggccgacaaattttggaaggtcaatcatttttttctttttgactcaaatcaaatttaattgatgcctaattaaaggttgcatgttctgtggactctgaaaagttggcatttcgcggacaggcgacgacagccatcggcgccgcctattggcatccgatgttctttaaggaaactcgtgggtttttgaattttaaagaaatttttattactcaatcgcatctaaatgcatttcttgggatatggtaggggcggagtttgtcactcacaaatcagagcagcagttcagcaggagggttagggtcagcgtcgggttagccatcggtcggtgggtccgagtttagctctttttagtttaattttttgcctttgccctacagtttaaaccccgcctacatccaggaaagaaagtcataaaaaaagaaagcttagcagtataaaagttgccgccgggttggaacgcttttccttaaaattggctgagcctaattgccccctccctaccttttcaaatcagttgcaattaaccctaggattggtttttcgttaatttagtagggcttttgaggccttgggtgagaagagttcaaacaaatgtcattcccaccacatgtacaacgttttgtgtttgtttcaggtcgttcacgcagtgcggtccaagcacatttaaaatgtgcctcttgcgggaaggaagtaaacaaagtttacgaagggacggacgacgccggcggggggtcgcgcagcgcttttggccattacaccgacacggaaaagcggacggagctcagcggtttgggtggcgtcgcttatgcggacattgagcgggcatttgccgtcggcggcatgcggtcggggcacaggcggaatgccgaagatttggtccgttgtctccgtgattatgccaaagagaaggaagaggcggcactttga

SEQ ID NO: 52975 - DNA, 1967 bp, Heterodera glycines
atgttcagtgatttcgatggcacggcggtatacggtaagcgtaacggcgggttcgggaatctgaggaaggtcagattcaaaacaaagattcacagtgaacaacaaaacattttagcagaggaggtgcggttctattgcactttatgagtccaatcgacttttatgagtccaatcaattgacaatacctggtttttatacaataactttgaacaaaccctatctttttggtatcattagaaagcagtctaaagaagctaaaatatataaaatttcagcgtttaggcaattgccataaaagatttgattaacttagtaattgttgattaggtattttcgtttataactttgtttaaatgttagaattctgttgttttctcgtattattacattcttcagacttgcgctttcgaatgaaaaaatatagggtttgttagaacattgaacaaagttattgtgtaaaaccaggtattgtcaattgattggactcaaagtgcaagagccgtgagcgcgggtcaatgccaactcttagacaggcaagtcgtacaatagaagcttaggccttgacctaaagcttaggcctaagtctgtgcacgagttgcctttttatgaaaaaattaaaaaacggcattcaaatgcaaaagtacggccatgaaaatttgtttaggaaaattctgcgactcacgagttgaatttggaagaattggcacaatgccaattcgtttctgtagcggtcgattaccgatctgaaaccaatcgatgtcagttccattttgcagttctggtaataatccatgaatttaaggacgtccagcattacttccactgtccttaaaaatctctctattgcattgttcgattggccatgcattttaaacgtcttacaattagaggtttaattaatgaaatttgaggataaaaaatactaaacaaataactcagtttttgattactattttcgatcattcaaatcccgttaaaatataattattacaataacaaaatcacatggaatcaatcgaaatgatggaaaaaacaacgaaacaatgtgtcacgaagggaaacattcagtcagccatggtcataattatggttgttttacgcataaatttgccacgcacaatgcaacactcatgacgaagcggaaactgccaactttcgcaggtgttccatgaacacttgcatggaaacgtcgtccgtgaacacgggggcaccgccctcctgaaattgtaatttcttcaaatgggctgaatattattcattcattcacctgagaatacgggttgttgtgtgtcaacgacggggttcactttggaaagcaaaaagcgagcctaaaaggaagattggatgaagatggatgcagctgtatccgcttctgaaaacctgtgagccttcatattccgtcacaatgtatcgaggcactggaaaacggtcttggatgatggccgtggcatcctgcacgggggcgtcgagcagctgcttgaacgaagcatattgggggtcattttggtaattggcttttcgccaagcagcaattgtcttaaaaaaggtattttactcattggaatcacttgcaaaagaagaaaggacctgtccatggtaaattaacacatggaagaaatcgtccattagcaaaatgcggtcaggcaaaatactcgacgagtccaaaaggacgggttcaggaggtccattgaaagaataggagaacagctgaggctgtatcatcgtcgtactttcaaaaacattttcacccatcaaaatatggctgaaaaagatatataaaatacattaataaaaataaaacacaaaccggtagtatacagtttcatcaggagaattgttaaacacttgcagaaattgggaacggcgcaaatgaaacataaattgggggaacagagaaaatttgtcggtaagtttcagtgaagcagggtcttctttgtggtaatctccaaatctttgtaccttaaca

SEQ ID NO: 52976 - DNA, 989 bp, Heterodera glycines
  unsure (1)..(989): unsure at all n locations
atgttcgtttcgaacagtgtttttctgcctgtctcccgcttttnccattgtcgcgcgttgtccgctgtgaatntggtggttcatccgtttgttgctaggaagtgcgcctttttgtctacaccatctttgtcttttccatttcggcgtcaatactcatcattggcatctgctacaacgacgggagcgagcaacgacaagctgaatgtggacaaactgttcgaaaaaataaactttgaagtgcgcggtcacgacttcacagtcctcaagtcgtattcgctttttgttatggtgagtgaggacaacgtttatggaaaaggctctaatgcactttatgagtccaatcaattgacaatcctgggtttttatacaataactttgttcatgttcgaacaaaccctatctttttggtatcattcgaaagcacaaaataacgaagctaaaatatataaaatcgcagcgttcaggcaattaccaaaaaagatttgattaattaagtaattgctgattttcgtttgtaactttcttggaatgttagaattctcggtaatagtttagatggtatcacaccttttttgaaaaatttttcaaaattttcaaaagtcttaaaaacatgtttctaggggtttataggtacgctgagcacgaatctgacatccatttcgaccaattccgaaccccggacccgaattcgaacaaaaagtcgaaaattcatttttcatcaaaattcacattcatgcaactaaagcaatacaaatgcacgaaaagacgcataaagaaaataagacagactattcgcatgggtaaaactcagaaatatgcaaccaaagattgtaaaacatattttcgcaatcgccgaaacgttggcgccaaatgaattcagggatgcgatttttaggtaagaaaaatcccagaataggtacttaaataggtaaaaaaaatctcaaaataggtattaaataggtacaaaaattccaaaataggtaaataaa

SEQ ID NO: 52977 - DNA, 288 bp, Heterodera glycines
  unsure (1)..(288): unsure at all n locations
atgttcgtttcgaacagtgtttttctgcctgtctcccgcttttnccattgtcgcgcgttgtccgctgtgaatntggtggttcatccgtttgttgctaggaagtgcgcctttttgtctacaccatctttgtcttttccatttcggcgtcaatactcatcattggcatctgctacaacgacgggagcgagcaacgacaagctgaatgtggacaaactgttcgaaaaaataaactttgaagtgcgcggtcacgacttcacagtcctcaagtcgtattcgctttttgttatg

SEQ ID NO: 52978 - DNA, 49 bp, Heterodera glycines; identical to SEQ ID NO: 51181

SEQ ID NO: 52979 - DNA, 204 bp, Heterodera glycines
tgtttgagtaccccaaacggacacttgaaaaaatcgatttttttgttttcggggcagtccccccgaaccgatgcgcccagatttatggggagaccgaatccttcgggaatagcttccctatagcctgtactttaattctgcgttggatttttgctccccataatgtttgagtaccccaacggacacttgaaaaatcgatttttt

SEQ ID NO: 52980 - DNA, 119 bp, Heterodera glycines
atgcgcctgccggcaacggataagcagggtcacacaatcatttgcgccggggctggctacccatcgcctaccgcggcatgtccgtccggctatcggtgcacaatgttggcgcacatggg

SEQ ID NO: 52981 - DNA, 651 bp, Heterodera glycines
atggcacctgtgctggacctcgacccaatcactgccgcactcgcagagcaagaacgccaacgcacattggtgttcatcggcctcccagaaagcaatgccatccgcccatcggagcgtgttcaggatgacagggaagccaccacaaaaatcttggatcatctcgaagttgaggctggaccaaccgccatctttcgtgttggccggttcgactctcagcgaactacaccacgcccactcaaagtggtcatgccaacatccgcgcaccaacacattgcactcggaggatggaagcgcgagcgtgttcgactccgttctcagaaaaaccttgcccgcctgttcgtccgccctgcgctcaccaaagaacaactcaaggaggaatacgaagcgcgggtccgaaaacgtcaacaagacccagtcccagtggcaccaccgatgcaacccgcacagacaaaagacccgactcccgtcaacgaaaatgggccagaaccgaaggaagccagtcatggacgtgggccagaaccgaaggaggccagtgaagacacttcaaaaccatcgcaggttgacaaagcaatccaaaacgaaattgacagagctctcctccaaattcaatcacttcaaaatgaactcacccatcttgtcaaaagaaaatag

SEQ ID NO: 52982 - DNA, 597 bp, Heterodera glycines
atggcatcaattaataccagctcaaatgacccggtaaaaacaaaggatttaactattttaagttatttttggaaaaattaaaccaagatttatttaaataaataaaaatgttttcatttatttctagctttatttggcctaccgtttcgccggtccgtccgccgatttgattgtgccggccgttgcgctgtatttggttgttttggttggcattgtgttgaacggcacagttttggcagtcactgtcaaatccaggcaaatgccgtggcatttttaaatttaattttaaattttcccatttaaatttttcagttccctccgcggctccgccaattttctgatggcattgatttgtctttgtgaattggtccaccaaattgggcacactttttttgtggttgttgtcattttgggcacaaattttgtcagtttgctcactgctgacttaattatgacggtaaattctgaatttcaaattatttttattttgatttaatttttcaatttttagccaatgatttttgctttgaattgtggcttaatggcaatgttttgtgctgcttttgaccgactttttgctgttgtgtcgccatttaa

SEQ ID NO: 52983 - DNA, 371 bp, Heterodera glycines
atgggcggctgttgcgcatgcctaagggaaattctgttggaggacgaagcggccgacatcagaattaacggtttgtaaaagaaacagaaaagggagacattggctaaattaaattcaaagcatccgaaaacttttgaggcaccgaattgggggaataaaaaacgagaaaaggaaggaatgatggcacttttgcagtggttgaacccacaacagtcgccaaggaaagagacggcacttcgaacgtggcacatggcggacaaatgtacggcacacaattggacgtgccaaaaaccgattaaacgattcagaacaatttatttcgctttagataaaaattacagaatagagatgccaaatgcaaatgtaataaa

SEQ ID NO: 52984 - DNA, 324 bp, Heterodera glycines
atgtggagacgcgccaggaacaacacggtcggcgccctcggaacggggaaagctgagggaggtggcaaagaagcgcaacatgaagatgaaggtggcacaactgccaatcgtcaaacattttactgggctctagaacattttattcacatttttccccttttaaaatcatatgtcatagattcatattttccgatcagctttactattttcttttaatcatttataatgaaaatggtttaccctttataatggaattctgatttatttgaatagttggcatttttttgcttttttccttaacctttcttagtacattttaataaa

SEQ ID NO: 52985 - DNA, 2137 bp, Heterodera glycines
atgcccggacaaaatgccagcaacagttgccaaacccagcagaatttggctgccgaagtgtcctcttctgtgctggtgatgagcagagtgaagcgcgtgcaaaattttgcctccataaaaggggccgcccaattggtggaaaggtgaggcaattcacacaaaaaagggacggaaaatgcaaattaattaataaggaaagcgggaattttatgacaaattaaactgtacaaattgtttattggttgtgagacagagaaggactttccctcgaggattataatggaggagagaattgcccctaaacgatcccattattgattcagttttgccaaatggttggtcgaaatgctgcaccgatgcccggttgagttgcgcgacatgtgagtgttcgcggtttcaatgaatggcaaaataatttgtcgttaattttattcattttccaggcttttggtttgcaccgcttgtaacagagtgagaaatgcgcgcgtaacaaatgacttttaaattaattaattggtctagggaatgatcagagaaagggacaagcaaattatgacgcgtgccattgttggcgaattggtggcagcgctaaaattcaaatgcgaattggtcgagcccaaccacttggccatcgtacggctcgttctccaagactttggggaaccattggacagcgattggactgcaagtcaatgcggacaaacggtcgagacgacagaaggcaatgggctaaaagaggaaggacggagcacaaccgacggagcggaactgatcggcggaaccggcggcggcaacggaagcggcggtgatcagttcaacacgggcgcagcagaagcaattcgaccgcatgtgccggaactgctcgaattcatcgccgacttgcacgttttggccaagatgaaggtgaaatggatggcaagacaaaggaagaaacaaaatcgatttacagaagcaaacgctgagcagcagcgatcggatgggcggtgatctgaaggcgggacttgccgaactgatcgcactggaaatgagtcgcccgtcagtgcgcgactctcggacggtaagagaatttaagccgttctgcagatcaatcattttatttgtattttcattgttaaacttattccatcgttttatcagtatcactttatgttaattaccttaatgagctcctccatctgttcctttaggtgatgcgcttcattccatggctttactcgccgccttcgctttcccaggcgttgcccggcgcattcgccgaatcggtggccaatgtccgcgtgctgtcctggattttgttgggcacgttgcatgcccgtggcaatggcactgtcaacgcaatttgcagctccgtttcgggcccaaaccaatgtttgcccgtgccgatcgcttgttcgggtcagatggccgattacatccattttgtgttggccgggttcgcagatcagtcgaaagtccgccggaacttttgttcgctattggtcaatgttttgcttttctcagcaatccgtcgttcatatgtccgcccttttccatgcgtttcatttatgccaactttggacaatttactgtgaacagaccgccgccacttgtcgctcggaagagacccttcaaaggacgatgcaacaaattttggacttttgggcacgcgtcaccccggccattcttcagctgctgtcccactccaaagtggtcagttttctgcttctaattaccttcctgatcaatctttttaattccgctcattcgtttggttaatgcttttctccttttcatcctatttttggtcttattaatgcctgccttggtttcccataataatgccattttcactgcgttggtgccatggtgccattctctttttccatgcatttctctttttctatgccattctctttttccatgcattttcgcttaatatttctttctctatcgcttttttctcttttatgccaattcctcactctttcagctcgccgacatggtcaacctgcactttgtcaacactctccaggcccttcagcaggtcaattcggccgtcctctgccaactttaccccatgtgggagcccgtgctgaccgcgcaccacgcgcacatcccacgccaacttcggatgaagttggacgcagttgaagcgcag

SEQ ID NO: 52986 - DNA, 507 bp, Heterodera glycines
atggacaattacaccggaaggccgtggttcaatggtggtttgacagtgccacggttcgcaccggaagaatggagtgtgcatcaacggacgttggatggaggagacagaaccaacaattacgcagaagcattccatagaaaacttcaacaggcatttgattgtacccatccaagtgtcttccacttcatcaacacaattcgatgtgagcaaaagtcaattgatgctgacatctcacgatgcgtcgctggtgaactccctcctctaaagaagcccaaatatcgtgccgccgatgcgagaattcttcgacttttgcagggatacaataccatcaacaataacccggctaaccaaaatgaccacaattaccatgccaatgtcaatgttaatcccgataacatcaaccatttgctcgttggtgtttctcgaaattatgaaatgcgcccgtaatttttcaatgctttgttatttttttttgttgttaacacattggataaatatgttttgata

SEQ ID NO: 52987 - DNA, 1314 bp, Heterodera glycines
accacttcagaaactgttcaaaccaccacttctgcccctactcccgaccccaccacaattgtgcccgctccccgtcgctttttgtccccgattcgccagcatccgtcggttactcccgagccgaacattccgtccagctttgtgccccgtccggcagattattcagtcgaaattgagggaccattcgccggactatgcgacgacggcacttgcggaacgcacggcgaatgcgaagaagtgaatgggacgcacgtgatgtgcgagtgtcgagactattatgtgggacagcggtgcgaagaatgtgcgttttaattgcctttggcattttgccatcgtttaaattactccgagttattttttcagttcggcccattgaatacgccgcaaaattcgacgggagtgcttttgtggtaaagatcaatcaattgttgctttgccttcaattagtgccgtacaatggctccgcttgccttttcttcgtcaatttgcctttccctttttggcattttcctccccttaaggtgttctcctcggatgagtttccccatctgagcagtgagcaggaggaagtggtcgagttcaaagtgcggacgactgccacatacggactgatcatttggcaagggcaaccagccgaattcagcggagggcacagaagaggacgacgaatggacgggcgaggattacttgtccattggcctgttggacgggcatttgagcttctccttcgaattgggcggtggcgcggcgcaaattctcagcgaaagtccggtggacgacggcaaaacgcattcggtggagtgaaatggaaatttcatattgaattctaaaccatttatattgcttagataagggcaattcgtcggggtcgggacggatggctttttgttgacgatgtcgcgccaacgtcgggacgtaagccgagacgataatttaaatgccaaaatcagtttaaatagtttttaatacattttacaaattaaggaagcagcggcattttggcgatgcttaacgtcgaagggcatgtctttgtcggtcagtttttggcatttgcgcagaaaaattaccattggccatttaggcggagtgccggaccttcacgaaatgacctttggccttcatacgcaaaactttgttggctgtttggccgaattgaaactgaacggccaaaagatggacatgatggcaaatgccatcgatgggaggtttttcagattttcttttcaacaagaagaaaatgaaataaaaaggaatgttcgcccatgccggtcgtggcaacccaaccgaatgcgaaggcggagaaagtggatgaga

SEQ ID NO: 52988 - DNA, 614 bp, Heterodera glycines
atggcacgcggaaaattcgcacttccgccatttcagcggcacaacggcgatggcagtgccatcggagagagcaatgcgtctggacgcgttgaatctggagcttcaagtgagttttgctagtgcaagcagcacttttggcagctgaacgcttcctctccttaccattaatcaatccactaattaccctattagcccaatcattcgctgaatttgtcatacatcacacagctgatccctatccctttcccatgccctctttaatctactgttttcccctttccctcagattcgtcctcagtctcccaatggcattattctttttgcttccgctgctgatcaaagacgggcgggagacgaacgaccgtttatgcacagcgtggagcttcaaaatggaattgtcatttataaattttcattgggcggagatcgatttggttggatgtcttgttattaaaacgttaaacaataattaagtaattgtagaaacaattaaaagccgagacaaagtgccattgaacgaaccgacaaccattcgcgtgcaaaatgatggacagggcaaaggtgggcaaattaagagacgagcgatgggagtggccatttgtttttggcactga

SEQ ID NO: 52989 - DNA, 2998 bp, Heterodera glycines
tggttgaacgcgtcgagtggaagagggccggcggggacgcgttgccttcggatgccagcgacgaggaacaccgcggggtgctccgattcgacccgttcaaagtaaaactgtcgcgggaatgaataattgaagggtgatgttggttggttaattaggataattaattaattgggccaaccatttactatttctcaaaagtgatcgggtgcttttgttcagcctgctgatcacgcgggtgagtacgagtgcaacgcgtaccgtaacgaggaagtgatcgccaccagcaaagtggaagtgcaccccgagggcgacacgcggcccgaccttttgcacgtggacatttcaccgccgcaagtgcgcatggtgaacgcgggcgactcaattgtgttggactgtgtggtgcacggtcagtttgtagtgggaggaaaacagcgagcaatgattgggaaattacgaggcaattaaggggataattagcagtaataattttgcttattaaagtgattttggttttttaatgaaatgcatttttgttcaagtgcttacggacatttaataatggtttttcttttattggtgatggaaaatgaccggaagtcccaaatgtccgttttcctaaaaatgacaacgactttttgtccctccctttccctcccttcaaaaatgcttttcctcatttgctttatcccaccttggttttttgactttggcttttcctcccagtgcccctcggcactttcccttcccatcgtcgtcctttgatctccttcacttggctttggggtgatcttccgctccgtctttcgcccctccgctggtgccttattccgttgcttcatctccaaaatgttcgaccttcccaatccggcatttacaccgtccaggcgaaggtggagaacggcacagtgatgctcagccgtgccatttatcttatcgttttgcgacggggttaccttattttgatgcctttggcttttttctgttgcttcttttgttcgtttattttttgcttttgctctaacaaatggatggacagaattatgccaatgcttatccacaatccttttgtatccttttttgcgttttcccattttccttgtgcttttgaggggatttccatagtaatgggccctcacaaaatgccatttgcacgcgaatgccttaggccgttctgcggatgagttcacttattcctggtcactcgcgcgtggcggagcactgatccgtgagttgggcaggcaaagtcagctgctggtcaagtcggcggatccgagcaacgattacggcatttaccggtgcgaagtggagagcgaggacggcgagacggtcggacaggcacaggcggcagtttctgtcggatttgactcggaaaacagtcagtttaaagattgggagaaaaacggagagtcggaagaggcaaaagggcgagtaatataatgggagagagagagaaactagagagaggaagaaaaggagagagaaaagagagagagtgagatagacagaaatgagaaaagaaacaaaaaaatgcttcaagcaaatgtcctttgtctgtttttcgtgatttgctaacattttgtttcttcattattttaactatttgaaccatatcgtaacctaccgtacgtttagatgcagttgaagcaaagttcgacggtgattcgcaggcggtgctgaactgtcccgtctttgttgtgcccggctccaccgtcgattggcagcgcgagaatggcgagtcgttgccggagaattcgaaccaatcgggcgacaaactgctgtaaaaattcaaatttcgaatatctgttcaaattaatgattactttgccattgaagaatcgagaaattcgacgactcaaccgcgggcatttatcgctgcacagttcaccacggacagagcagtgtgtccggctttgtgaatgccaaaatatttggtcggtgccattagaatttgaataatttttaaatgctaattgggttcagtgcccgacacaattatcaaagtgttgctgaatgtttcctccgagtcggtccaagttggtgaccaggcgtggttggactgtgtggtcatcggagacccgagtgcacgtgtaaacttctccaaggacggggacgcgttgccagcgaatgcccaagtgggcgtttggccacaaatggcacggcactccactaattaattaccctacaggtcaccgccaatcgcctcctcttcacttccatttctgttgaacacacgggccgatatcggtgccaagcgcagacgaaagacggagtgttggagacgtcggcacttttgaacgtggaaggcggcgaagagacggaggcggaaaagcggcggcgcagcttccatcaacagaagcagcagcaaaagacggaacaggaggaggaggatggaacaccggcggaagaagaagcggaagaggaagagaaggggccgcagtacactttggcggaagggcaaagcgcggcggagagcgacgcggacactgtccaagcggtagagatcggacgacccgagccggaccatcctcaacggatgcgccgactgaggcggctgagacagcagagacgcagggcgacgagtcaccggaagagaacacagcacaaagaggaagaggaggagggcaaaaagaagcagcggaagcggaagaggacggaacacgcacagcacaagcggaagaagagcatcgcggaagtgcgcaaggaaaacttgcggaggagggcggaacggtcagtggacggacgaacgaggggactgtagtgtatactgtacgagactactgtatgcgcagttcaagcgaatggtcattaaaatcttacaattagcaaaaagcgagagtcccgaacagactaacgaacgaacctgtgatggacaaacaaacactggtttaggtaccgaaatggccgcactcagttccaaaagtattaccaccattacgaaatccgcaacgacgcaccgcctgcggcgctgcaccgtgccagactgttcgggtcttggttc

SEQ ID NO: 52990 - DNA, 2384 bp, Heterodera glycines
  unsure (1)..(2384): unsure at all n locations
atgccggcgattatatttgcacagcctatgacccgcacgacgacccgcgcgaagaacggacggtcgactcgacgccagtccgggtcagtaccgaacaattatctcagtgatttgtttttatatgatgttgctcctcagctcgatgtccgtcgtccttcaccaccaccacccgctcgtgctcgaaatccgccccaagttgagcctccctaccaacgcgttgacctcggtcagccggcgcgcttccgctgttgggtgccgggcgagccaaacgcccatttgagttgggcgccggcccgcggcgggtcgcttccatcgggcgcagtggacagaagcggacatttgttgttcgatgcggtggcacgtgaacatgccgactcatacatttgctcgtcgattgacccggagacgggacaggtccttcagtcgccgcctgttcgacttgacgtcaatgaacgtgggtcattagcataattaattaattaatcagttagataatcattacattgatttcaagcgtcaaagagaccattggttgagccgactgagcaaaccgtgcagcagggacacccatcgcgcattcactgttgggttccggatgagccacgcgcgactctacgctggaccgcccgcgggggaaggccgttgccttcgggtgccgtcgatgatgggagaggcaatctgaacattgcgcagacgctgccgcatcaccagggagattacgaatgtatttacgaaccacgagagccaagccgaggaccacaggtaagaaaagtggaagaaaagcgcaaagggaaggaaagaggggcggatgaagcattcattgccataataaggcatttacccaaaaaccatttgttatgcaaaaggtgtccgagcccgctcgaatatacgttagtccaccaccggtcggtccgctggcgcgaaaacctggcgagccgccccgccccgtggccacgcccccgcagcaaactgttccccgcggagaccctgcgcggtttcattgcgagccgaacagcaaaacacccgcgcaaatccattggggtgagtgagctgctgaagttgggcctaaaaagggcgcgattcattcggtggcttttttcaaaggctttgagtcgcccaacggagcattgcccagcggagtcagcgtggacggggaggacattctgattgcagcagcggacgaggccaccattggcgagtaccactgcacggcgaccaacaagttcggacggggacacgccgacccggtcaaattggacataacggacggtagggacggggacagcgcggagggtgggggtaatgaatgggttaatgatcgtaattaatacttactgatactggaaactgtgcacgaaattggggagagtaggagaacacacggcttccggaaaatcaccgacgcattttctgtcattcaattcactcccccccccctcccattcactaaatattttagtttatttgttaattaaaatattcagaggaagagccaccgacagcacgtgtcgagccgaaagtgtggaacggccaacccggcgaatcgaaacagttcaaatgttacgtgacgggcaacccacacccatcgattaaagtgagcaattaggagagcaaagtgagcgaaaagcggacaattaattcagtggagcggaccaaatggggacgaattaccggaggatgttgtcgacttgggggacggagtgttggagatcaaagacgccaagaaggaactgcacgacggagaatatgtaaaggggggggggatggcacaacatttaaaactggcaaatgggggaaggaaggaatctgatcagtctgttcctttgattaatcctctagccattccatccaattcttgattgccatccaatcaatgtagtcaacaatcctttgtcctcaattgccagacttgcactgccaccaatccgctgggcgaagcatcggacagcggcaaagtcgagatcggtccgtccattggtatcaacattatcaaggaggaaaaacccgcgcctgcccggctgaagatgattgtcggcgaaccgttggagatcaaatgcgaagcggagggtgagccggatccggacgtagaatggcttcagtgagttttttcttcacggtgggggagggaaatttgcaaatttggccgattatcgtcaaattaaagtgacccgggccccgaacgtggcgaccttcccgatgactacgtgccaatcaccatctccgagcagttcctgcgccatccgagcattggcctcggcaattccggctgttacacttgccgggccagcaatgacttcgcctccgtcactaagggaatttgcattgaaggtaccgatcgagttcagctaagttttcaaattactgtgataattgccanaaagtga

SEQ ID NO: 52991 - DNA, 1347 bp, Heterodera glycines
atgtcgataaatggttccgggttgagcgctttccaacggatttggcatgggtttctctcaaagaaaaaaaaagtttctcgcgccgaagtgatgagtttggctgaacagattgcttcggaagtgaacgacaatgagctttttgacgaaattacggcgctgaatgaaatacttgaaagtatttctgacgagaaatttggtgaaatgaacgcagaacagaagtggatgaaggttttcgaggcggaattacccaatcttgtgttgctcgtcagcaaaattctttcaatttcggtttccaatgcatgcgtggagcgcgtcttctctctttgttcagctcagtggactgatgtgcgcaatttattgaaagttgaaaccgtgaaaagtctggcccaaatcaaatcgaattatgatctcacttgcactgaaatatacgatttgctcatttcctcaccaaaattgttaaaaatgatcatgggaggtgaaaaatataatatttaatacatttttgatcgaataaattgtaaaaataacgatttgaagcaattttgcaaaatgtccttattttggacccaaaaatcttattttttggccttgatgttcttattttgaaaaattttcgatccgaaccctgccttaaacatctaaagaaatcaaaatttggcataaactcgcaaaaaatgttttgcattccgaaaattaccaattgaagacgccaatcgccaataagttgttgagggagttgaaatacagagcattttgaagtgagaaggcagtacgcaatcagaaaaacccagttaggttagcctaaaaagaaaaaatgaaacaaactcagatttataatatattcgtttttttaattaaaatttatcagcagggctgtaaattttatgcaaatgcatttttttttcctggattctacgtagtccaaatagtacgaaagacaccttctttttggtatttgcttataaaaatcgggacttttatttgcatatttttgcatatttctggttttttatgcatattttggctttatgcatattttgccattttttatacttattttcagattttttgcatatttgccattttttgtcaaatattttccaatttgaatatctcttaggaaaaatttttgattatgccctaaaattaaatccaaatttgaatggatgcgcgaatggatcaacagcagggcgcggatctgtcctgatttaatataagatttgtggcaatcggcactgccggacccctcccctcgcccgttcaccagaattttttggaaaatgcgccgaaaaaaattgctaaattcaataatggaggcgaaaaatataatatttaatacatttttga

SEQ ID NO: 52992 - DNA, 462 bp, Heterodera glycines
atggtggaagagttgagcaacaaagtgtcccaactgaagagggtgaccatcgcaattggggatgatgttcgtgggcagaatagactgatcgacgaaatggcaagtcttttctggtggcactcagttcaaaaaataatggaaatttttatgatttgattggctacacatttaattaaaaatagaatgatccaggaataaaaatacactaaatcggtcaaatttcgagcgaattcatattgaagatttgaaattcgcttttgtaggacaccaaattcgacagcacacgaggccttttgggttccacaatgaaaaagcttggcattgtgtctaaggccggaggttagtggaaatgtgtaaatttttgctagcctttttaaattttcatttttaaggtaagaatgtgctctgctatttggtcttgttctcctttttcgtcttcctcatcatctactttttgatgcg

SEQ ID NO: 52993 - DNA, 100 bp, Heterodera glycines; identical to SEQ ID NO: 51845

SEQ ID NO: 52994 - DNA, 84 bp, Heterodera glycines
ttaattaagtgctaatgagacggattaattgattggcaatgagctctgctgaaattgggttttcattttgacttccgtcgttcg

SEQ ID NO: 52995 - DNA, 1114 bp, Heterodera glycines
  unsure (1)..(1114): unsure at all n locations
atggcgatcaatcccgatgattttggaaaaacgatcggaacggatcccgagtcagggtccagaccaaatcccgaccaaatcccgatgattttggaaaaacgatcggaacggatcccgagtcgggatcccgaccaaatggcgatcaatcatattattattttgaattttccattgaaaaaaattgttttgaaaaattagagaaaaaacaatttcttaaatatattaaattttttagaaaaagctaataatgtgaaaaatccgagatcgagactcgagaccgaaaaaacccaagacttttctcgagtcgagactcgatcgagactctcgagtagcactaaggggcgggggcataatgcacgcacacccatccaatataatttttgttgaaattctcaccaaaaatatgttccaatgttcgggccgaaagccgcgtgccgcgtactgcacgtgccgttcaccgatggcgagcagagacggcttcaaacactcctccatgtggtagagatttttggcagcataagcgattgtctgctgatgggaaggcggacacccaattaaaaggttaattggataaaatactaattaataattaatttatcatttaatagcaagtgaattttaatgtagggaaaagccaaaaaaatatacaaacaaatgttttaattaatttttaaattcatttatttatgagaaaaattgaaaagttttaaatttttattttcgaaatattctattttttcagctgatattccaaatggtttccttcttttttctttagcctaaacaaattttagttttaattaattaattaaattaattaattattgcctggacaaatttgagggcctgggagcgaaagtcggccgattggcgccactcgtcgccatgccgatgaattttggggaataattgctttgcttgaggattgtgctcaaaaatatactgaaaaattataatttatataaaaaatttaatatatttattaaataattttttanattaatttaatttcatattanattaaaaaagacgaanaatttaagtcaaatttttaaatttgataacattaaaaacaataatttgtttattttttaccaatttcaaaatttttaaa

SEQ ID NO: 52996 - DNA, 891 bp, Heterodera glycines
gctttttctttatataggaaaatccattaagtgttataagttgttgagggggttaaaaatgtgaaagagaaagtgaggaaatattgcccttttccccttttctatgttttctctgctgcaccactgtttcgcttctctttgatttctttgaattagaatttgcgggctccctgcgcgatggaacttcaaatttttcattaccggtaatcccaaaaaatcccgcaatttccaagagagggatagctgattagggtcaagcaaaatcccacgcgggattcccgcgccgtgctctattcaaaaggcaccgaaatccggcattgatcagcgtaattagtcagctggactaaatcagactaaaatattttattttaaagatgttttaagttttcggagaaggcgtcgtccattttattcggccatttcatcatcgattgttccggcttcaccttcgtcgactgtatgggcgtaaatgcactcaaagaaatacttattttgttcaattacaattacactaatggaccctaattattctaatgagtgtaattattagaaaagtcattaatagccgaaaaaataacaacagattttcaccgaaatgcgcgagcaaagagttcttgtgtattttgcagcggcaaaaggtgggcgttatttaaaacaaattgtcgaaacaaaatgccaaaataatttagcgcccgtgcgcgatctgttcgaaaagtgcggctttttccgctacgtgcaaaagcacaacttttacccgacaattcgcgacgcggtggcaatcgcgcggaagcggcgaaatgcgtaagcggaaaaataaataaataattaaaatgtgaaataatggtaaaggagggagagggaagcttaaaaataatgaaacattccactaat

SEQ ID NO: 52997 - DNA, 69 bp, Heterodera glycines
atgacaagcgcactaccgatacaccaatggacaattcgaaaagaagcaaataattatttaatggccaaa

SEQ ID NO: 52998 - DNA, 114 bp, Heterodera glycines
atgttggacgaaacgatgaaagtggctgaactgatgtgcatcaaaacggcactgaacgaattcattgcttaccaacgattggctcaaatggtggccaacggcacacttaatggg

SEQ ID NO: 52999 - DNA, 1859 bp, Heterodera glycines
atgccagtgatcaaacatgatccagagcttaaatctgtggaccaaactgtggccaaattcaacacaaccgcaatacaaacagtgaacaattcaaaaatgtaaaaatttttcaaatttattaattatttttaatattaaaaattaaatcatttcattttttgactatgatcaattattaattaattaactttttaattgggcagagaacatggctcaaagcaatttgcgggagcgccaaaatttgataaaaattcccaggattatggaaggtaatatatattgtttaaattaaaaatatatattattctttttattagacctttaatcggcacaaaatcacaggcccgcggcgttagagtaatttatttttattaaaataaacaataaattttatattataataatttttcttttttttaaatgaacattatttgccagcaacttctattttaaaattgtttaaattagattaaaaaaatattttaattaaataaataaattaattaattttgtttaaaaaaaaacaaaaaatcatgaatttgaagggcggcgagcatgtgatgcgtgaagtgatgtttctatgcgaaatgattgaacaaaatggtgaaggcacaccgcccgattgctacatgaagtatggcattttgggaggaaattaaaatataaagtttaaatttaatttttaagatttggcccattgttttacatgtacagtcgcatttcagaaacagtaagatccaaaatataagtttgaagtttattcagttatatttatagttagttggcatgctgatcagagcaagaaaatacggattggcaagtactttaaatcattttttaattaaaaatatatataaatgcatagtgatcttttaataaaaaaattgatcaaatattcatcgtttaattttatataaaactaccattttcgaaataatattatttataattatttttaatataagaatttaatgaaactatttttttaattggaaaatataaaaatattttgatgtaaagattaatttatatattcatttttgccttttatatttcatgtagaactatcatttttgaaataataaattttataatattttaattaaaaccctaattaaaatttatatatttttttaaaatacaaaatatcttaattaaaaaataaaattttagattgattttgaaggagaaatgctgtatcaacgtcaggatgaccataaaaaaattcgtttactgatgtcatccgaagaaattaatcagtcaattgaatacacaggtgggcacagtaattaatgtaattaactgtcaaattaaaattatttcgaccctcaggcgacccagtgaatatcatcaaattcaacaacggcaaaatggtaccaccgccggcgccacgagctcaattaatgccaaatgcaccgcctcctcccgttttctcattaagccttgcaaaaacaaagggtggaaaattgccggaggggaaaactgacgatcaaataaatgagcaaacaatgcctatggcaaaaatggcagcatcaattagcaaacaagcaacagtgccacctgccgtgccaagaaagccagtggcgccaactgaggacaaaacagcgccgaaaacaatgccaaactcaacgccgaagacaatgccaaacagccaaaaaatgccaaaaagtgaaacaacgccaaaggaaatgccaaaaagtgaaacagcgccaaaggaaatgccaaaaagtgaaacagcgccaaaggaaatgccaaaaaatgaaacagcgccaaaggaaatgaacgaagcaataaaatcgaaaacaaataaaacaacgcctccggggacaaaaaaggggaataaatcggtggcacctcca

SEQ ID NO: 53000 - DNA, 687 bp, Heterodera glycines
attgtcgaatatttgcaatcgcatggcgaaatcactgcgatgaccggcgacggagtgaacgatgcgccggcactgaaaaaggccgaaattggcattgctatgggcagtggcacggcggtggcaaaaagtgccgcggaaatggtgttggcggatgacaatttctcaacaattgtggcagcggtggaggaaggccgtgccatttacaacaacatgaaacaattgtatggatgggaggggaagaatttgaaattgggttcattataattacattaatgatgtttaaatgagttcttcgcttttcagcattcgctatctcatctcgtcaaacattggtgaagtcgtctccattttccttgtcgctgcgcttggtttgtcactttcattcgttgttttgtcgtgtcctgactgattgtgaacacgcttcaggcattcccgaagctctgatccccgtccaattgctttgggtcaatttggtcaccgatggtcttcccgccactgcgctcggcttcaatccgcccgacttggacattatggaccgactgccgcgttccgcctccgaatcgctcatttccaaatggcttttcttcagatacatggcaatcggaagtgaacaccacatttttgtccatgctgcattttccccctttttcagcttccgtcggcgtcgactacggctaccacttgtga

SEQ ID NO: 53001 - DNA, 880 bp, Heterodera glycines
atgtcagcgccgttgcccataattatatttcatacaatttctgtggacattcgatccgcccctggaccaataattacacgcttaccatcgaaggctcttactgcccaaaacattagcacatttttacgaattttggccccaattgtgcataaaaagacacatgccgaccacatttatgacgaaaaagtgcgcaatactgtactaagatggcataatgatgaattgaaaaagtgtataaaaagaactgtcgaagaataaagcacgcaaagttatgccaaaaaaaacaaattaaaaattatgccattatgatatgccagcaaagtctcgacccaaaaagcctagttcaaacaaataaaaccaccactcaaactatccgaactctcaaggaggctagggctataactctttggggtgagaaaagtcaggcgggatcagttaaagtcgggtggatcaaatcaatctgggtcggattagggatttatgatttacctctcgatcccgactcaagctgcgttcaggggtcggggtgcatagcgcagggtcgatgaataacccgaaaaataatcttaattttcggggtcgggggcccgaacctactctcaagttagtgtttgatttcttacgtcaaacaatgatttttaaattttttattgggcccggtccataatgattgatgtttaattgaaattgtgtctggttcgatcgatatttggccagataatatgcagtataattcaaaaaaatcgggccttattaattataccaatttaggaaataatgagcaaatagaaattaatgatcacatcaatgcgttaattgcacaacgcgatatgcttcttagagatcagagaaagtttatcagagatgctcaaataataaa

SEQ ID NO: 53002 - DNA, 1224 bp, Heterodera glycines
aggactgtacacgcgtctctttgacttccttggtaccgtaccctaccatagttgcttgtttgacaacactgtgtgtttttagtggcctctgtaaattgtgcactgaacgtggatgccaaccgcaattcgtttgacatttcgttggccgtgttggacatttacggcttcgaagtgttcgaacggaacggatttgaacagttttggtgcgaaagtgccgcttttctgtgcccattgcattcccttttcagcatcaatttcgttaatgaaaaactccagcaaattttcatcgaattgacgctgaaggcggaacaggaggagtaccaatcggagggactgaagtggactccgatcgaatttttcaacaataaaattgtctgcgaactgatcgaggcgaaacggccgcgtccgggtgagcagcgtcaatggcggtggtggggatgagttagtccaagggcggctaacgatgctcaagaccctcgtgaaattgttcagtcttgagcatggatgggagggactaatccccaacaaaacgcatcgattctaaggcataatgttcctcttggacgacacctctctccagctgcacgggcaaaacgaaggagcggacaaaaagtttctgagtgatctgaaaaaacaacacgaagaccacgagcatttccgttctggtgccgacagtttcgtcgtacgacactacgcgggcgaggcactctttttttgcattttcataggttgactggccattttttaggtggtctaccaaattgagggcttttgcgaccggaacatggacatattgcacgtcgacttggtccaactaatgcaaaacagtgagaagtgtgtggaaacaccaagaaaaaaaaaatagcaaatggtttcatcgcatattttcagtgagttcatgcgtcagttgttcgctgccgactgcgtgtcgaatgaaaacggcaacaacaaaaagccaactagtgcctccaccaaaatcagagtccgtcgtccgactcaatgattttttttcgaattcgaaccctaaattagaaatttacaaatccaaatttcatttcctcttccattcattcgtttgctgaattggcaaaacacattccgcacttcccattcacagagtcaggccaaccatctgatggactcgctgatgcgctgtgtgccgcattacgtccgctgcataaaacccaacgaacggaagagagcgttggaattcaacgagcaaag

SEQ ID NO: 53003 - DNA, 1321 bp, Heterodera glycines
atgtgcgatgagtgtcgtggcgaaaatttccggcagggaaagagcagtttcaaactcatcaatcagaatggcgagcaacagcagcgacttgtgttcgcccaatcgttttgccaagactgtgcaaagctgaactttgactgcaccgatctgatcatgaagcacaaaaagaaggatgagtcggcaacgacaacgatggcaaagagtttccgatggaccaaggatgaagaaaatgaaccgagttggcacaccacatataaggacttttttgaaaattttatacttgttgatcaaatgacaaactttttctttgtaattctgccgagcaatacgccaggctttgttggaaataaaacaaacaaattcaaggtacacttgactaagaagttggtgttcgatagggccgggtagatggttggactgtcaggcataatttgcccaaacaggctggggaaaaacatggctttggggtcctttttgtgttaagttggctacatggaacccacaatatgtaatagttcacctatacagcagcaggaaataccgtttccgtgtaccaaaaggtaagctttctgtcgccacaattgcatgagaggggcaaacagacacaagaagagtgaaggcaaaatgaagagcagcaagaaaactaagagaaaaatgaacgtaaacagctcgaggaatatgagaagtggcgcatggcagaataggacattgaaggcagaagaaaaaacggcaagggaaaagaaggcatgggatgagaagttggcaaggcaaaagacggcaggggatgaggctagggaaaagaaggcaggggatgagaaattggctagggaaaagaaggcaggggatgagaaattggctagtgaaaagaaggaagtgagaaagaagccttgggaaaaaagcctgaggttgcgagaatggcaaaggttgaagagtagagagtggcaaaggcagatgaaaaacacatttaaagtgacacattttatttttttctcaataattttcatttatttgtttttccccaaacttagcgtccaattagtgatgaaaaacggctcgaaaagggtttggacagtttctcaaatgtgggcgaaaaaactcagcgtaggttagaatgaaggcaaaatcagcgagcagtccgtcatttttctgtctaaggatggttgtgtccaaggccgctgagaaggcacaactgttcgttggtgctgacaaaatggtgtcggtacttctcgcgcagggccccaagcttcgcgatggggtcaagaaagtgaatggcctggaaaatttgaggaaaatataattaaatagcaagggtacgaataaa

SEQ ID NO: 53004 - DNA, 555 bp, Heterodera glycines
atggtactccctctgactgccgccctatccaaattgctaagctgtaaacccgaaaatttagcagaatatttgaacaaccccgaggcggtgaacaaagcgaacgcctacctgtgtggcaaaaaactcaaaacaacctatcagggtcgtgattgcaagaccaaagatgtcaaatttggcacattttcgctgaaacctgccgctgaaacctacgcctttgagggatttcttggcaagtttccgaaaattctgtttcggtccaacaccatgcgttcagatgtcaaagtccaacagtatttctacataaaacaccggattcgcctactgtaccctcagctcaagtgcattgttgagtaccacaacaagggccattgcaaatactacccattgggtacaaatttttgtccgaaaaaaataaaataaataaataaacccccttaagagttgttggccattgaggagggctgtgagagtgcacccatcgaaaaacctgccgctgaaacggactatctggactacttgaactttcgcagtgggtggcaatcagcactctactga

SEQ ID NO: 53005 - DNA, 405 bp, Heterodera glycines
atgtacggcctgtggctaagcgacaacgccaccggtaaggacgagtacaagatcaagctgcgagggaacacccaggacttggggtgatcaggaataactgacaaagaaatttgtatgatgaataccccaggcgcatgtatttgtctgtacaaccctgacctcgatatgaacctgctctcagaagaagagcacgaccccgaaattattccataatttaatttttatttttcaattcatttcattaattttgtaatattttaacataattcctacttttgtcacctaatttttcccaaaatacaataatttcattaatatttttttgaaatctctctcgttctttgtacttcttttcatttttggtatcgtatttgcatccccttgtacgtagtttaattctggcaa

SEQ ID NO: 53006 - DNA, 417 bp, Heterodera glycines
atgttttgttatagaaagtcaagaaaaattgttatggagtttttttgggtaaggaacataaatcaaatattcattgagaacaatatagaatgccggaactcgcattcagaacaacatttcaaaaacaaaacttcataaatttattatttttgttagcaaaatggatcaaaattcgtgttaacctcaaccagaaatataacaaaatcatatttgcaggatatggcatttatgtactccattttgcaaattgatgcataacatttgcgatttatacgcaaatgccatatattttaatcctaattattccttaatgctttttgtccttttccttatccattgctcttttcttttgtcactgtttttttctttaattttctgcccaccgtttatcaaacaaatgcaattagcatatgataa

SEQ ID NO: 53007 - DNA, 1496 bp, Heterodera glycines
cactcaaattttccgtaaaacggccaaaattgggtccttttttagtgaaaaggtggtacccagcagcgggaaaaagttgttttttaagcagcagccgccgacgaccaaacaatagaaaagtctacaagtggaaaattgtagttatttgcagatcgtaaacaacttttatcaattttattcagaaaaaaaaattatggataaatttgaaaaaaaagaagaaaaaaaaaggtcaggtcttcggaccggacccctccctttccccccccccccccgaaaattttacctggctacgggcttgggtgtcacacacaaaaatttaaaaaaatctacaaaagttcacataatccatattccaagctgatccataagacgatatttaatcaaaaatttgttgcgtttatgtcttcaaaagtaatgttgtacattttttgaatttgcacacattttggttcatttttttaatttttctcttatttttttttacattatttcttagaaaatttctaggttaacttttttcatttttggccttttcagatccgcgcccttctcactggtggaatgaccgatgggcgcccctttcggctgctggtcgactcaatgcacggcgtcaccgggccctatgtgtccaccatttttgtggaccgactcggcgcgccggcacaaagttgtctacggatagtgccgaaaccagactttggaggtttggccaaattgccatggccagagagggggccattaaggacactcccaggactttggcttggcttgggataaaggatgccatgggcgaaatttgtatggtatttgcaccaaacattgccaattttgttggtttttggaaaaatgagcgaatttggtgggaaatttgggcgaagaaacttggaggggcaccaataagaaaatgtcgaaaatttcagccaaaatactagccaggcgattctaaccccctgaaattaaacattacggtgccaataaaatggatgaattcttaggggtttatccaacaaaaacaacatccaatcttttcttaggtggtcatcctgatccgaatttgacctatgccaagggccttgttgaccaaatggcactcggtgaacatgacattggcgccgcgttcgatggtgatggggtacggcattttacaggggcgtattttttatgacccagcatttgcctccaaattattgttgccaaataggttatcgatgtcatcaaagatgatataattttctaattttgttgcaaatttctttcatttcatattttaaatccaatttctatagctttttaaaatgtaaaaaaaaaatcaacaaaaatatgtaataaaattttggcacctttaccaataactccaaaaattatataaaattgcgacaattggtatcatttatacggacggagagaaggtcgttccccccctccaccgaaattttttaaaatatttttttgttcgttttaggatcgtaatatgatcattggacgcaatgccttct

SEQ ID NO: 53008 - DNA, 653 bp, Heterodera glycines
atgcaggtgtttggcggacggttcaactacaacccaatgcaacaggtactatcactactccacctctgctgctgattgggattttgggtttatccccctcccccactctcgaatcctatgacaatttaagaaccagaaacaataagttattgaaaagattaaagggccatgatcggccattcatccgcgaaagtcccaattctcgataaaaaaaagaaaatatgagaaaacaacgaaagcaattcgatctagcttcgggagtctcggatttacggttcgcttcaaaatcccggcaattactcccatttttagaagccccgtgccaacttcgacacgttcatccaatcgctgctgacggtgttccaagtgttgacgggcgaagactggaacactgtaatgtacaacggtatcgaaagttacggtggcatcggctcgctgggaatgcttgtctccgtttatttgtaaaattttggcacattttcttttggaatttcctttccgccctccgcccatttctctctttgtttagcattgtgctgttcatctgcggcaactacattctgctcaacgtgttcttggccatttgcgtggacaatttggccgaggctgatcaggcaagtgatcagtcaggcaacggtctgctgaatggctga

SEQ ID NO: 53009 - DNA, 457 bp, Heterodera glycines
atgaacgcaaagccggaagaggaagaggacgaaatggaggtggaaggcgagtacgaggacgacgacaagtacgaccatggcgaggaggaagatgaagcggacgagggcgacgccgatgacgatgacgagattgagggcgagccggaggaagtggtggtcggcgcgaggccgcgacgggtgagcaatcgatcagatcagcgggggcattcgatcggccgatcgatttaacacattattaataggaccaattttcctgatcagaggcatgatcgctacatttatagatgaggataaccgattggattaatgcgtcatcgatagataaggaccaccaatcgggttaattttcgatcataggaatatgatcgatgcatcattgataggtaaggaccaccaatcgggtcaatttgctgatcagagtgaccatttttcgttttttttatcacactaattacaa

SEQ ID NO: 53010 - DNA, 621 bp, Heterodera glycines
atggactttttcgaagcacacaaagcctttcagaagctgagcaatcagttaggaagtgcggcatttgaagtggcaatggtaaaaatgaaatttgaaatttgactttttagccggcctctccgccgccgactcagtcccattccttccgacaatggcacaaccggcgggcggcatgaacaacaacccatttgtgcagcaattggccacactttcgccctttctgatggcactgcaacaccaatcccagcaattcatgcaggttgggagacaatggcaatggcaaatgggggaataataatattcttgcccacttattaaggcccatcaaaatcaattcgatgcggcgacttttctgtccattccgtccaataataattgtaattaaattcattttttcatcgtaatttttattttaattaaaatatgaatttaaaaagtttcagcctccgaaaatttgttccaacaaatcgcttcttcgccgatgggttacgtgaaggacgaggaggaagaggaggaggaggaagaagacgaggagaggagcaattccggacaaaaccaagcgatgggggaacccgaggatttgagcttaaagtgagccaaacggatggaggggaaaataaa

SEQ ID NO: 53011 - DNA, 733 bp, Heterodera glycines
atgtcaatttcttatcgtcagcttctgttcattgctgcttttctcttcatcggttgtcatgcgcatgctggcgttgatcacacgcatctggcgagcttcacttgtgccacggcgaaggacggtgaaatcaatggcttcagagcggttgacgatggtctgctgtgagttgtgcaaaacccttccatttgaaacaaccaatcatcccaaaatcccatttcagaattggttccgacgccactaatgccactggtgctatgatcctctttggtttccagacgaacaaaaaggaggatttgtacttcaaagtctttgtgccaacatcatcatcatgcctctcatcagtgaacaacttcgtcgtcagcggtcgattttgtgaactcggagcgttggagacagaggtgagtgaaaaacactcaatttgtcacataaacaatcagttttttgtggtttcagactgaatcggctaactgtccggatggaggcggcgctggcaacggctgcaactcccgcagtgtcacctgccaaatcaaaaccgtcaaggaagtagcggaattgcctgacggtcgagtgttcaaagtcaacttgggaaatctcacacaagtgacggcactgtgcacgaagtggaaggcgtacttcgtgagtttgacgtttttacaggtgaatcatctatttatgctttgttgtttcagaccaatgttcgtcaagtgatggaatcaggcggaggcggagaacc

SEQ ID NO: 53012 - DNA, 1055 bp, Heterodera glycines
atggcaaacaacccgagtgtggagttactgcacgaacttgccttcatggacaattcgaaacttcaatttttgctgtcgcttggcactggcgttgcaccaacagtcgaactggcgacaactgaatcgacattcccaactgcgacaattgaaggacttgggaacacctacagaattttgatgtcacaggtgcaaacttaaagaattggtttcttatatttaaaccgggagttcgttcggctctattgcggtttacaaggctaaaaaaagaccattgaataattagaaaattttagtgctcatgaatcctaaaagaaacagatcttgccttcttggtatcatccgatagctctgcgagcctattagtctgcaaaatttcaaagaatttctttctcaaaaaaagatggccagaaaatctcataaaactagttttctcaaaatttttggcgataacttttgaaatttaacgaaaaatatattctgattagtttttcttgttgtaaacaattttattagagccgagcaatagtgaaatttgagttttaactttttgttctaactcgcgttcggggttcggaattaatagaaatggatgtcagattcattatcagcgacctcgaaaacacacaaaaagtcgttttacacgactttttaaatttttgttattttttcgaaaaatggagggcgggggggggggagggggacaaaacacacaattaccgattgcttgtcaaaaaattttacgtaactcatgtaacatgaataagagataaaaacgaacatcatattcatgttcatctcaaaacatttccctcgaaaaacaaaaattatttttagggggtcacaaaaaggaaaagtaacctccggcgcacatgtatgaactggtccttaatttatatgtatttgtctaaaaaaattttttttgatggtggggatgaaaaaaaaacaaaattttttaaatttattaacagaataggaagcaaaaaacataaaataatttttgatgatttttttccaattacagggtaaaaattatgagtaattaaattttagtttga

SEQ ID NO: 53013 - DNA, 874 bp, Heterodera glycines
gcccctttttatttaaattaaatttggcacaaatttgggcaggttgagccaacccgtcgccgattgatgcccacaacattgggcattgcgcttgtgcatggctaccaacgcgtggaccccgacttgattttgccaacaatgcgtgctaatgttgagcgccaattggacctaattgccaagggaaaagcggactatcagacggtggacaaatcattaattaactaactaattgcgctataactaatttaattaccaatttcaagacggataaaaatcactaattgactaatgaattatctgactaatgttgtattattaatgagttaaggcattttctttcagaataataaataaaataattagtcaattaaatttttaaaatttaaaaaatctcaaaatatttaactattgaaattgcgtaaaatatatttgtacttattttttctaaatttaatttcagatcaagaaccaaacacttgagatttttcggcagaaatttctcaattttgtgcagaacataaatttggttgacgcactttttggaggtgaatgtcgcccattaaccaattaattaggcccattaaacaatttttaaattcaccattttaccccattagattcatttacatcgctggccgactcgggcaaaccgttcagcaaatgtggcaaatgccggcgctacatgaagctggtcgagacgcggccccaacgattgtattgcccgatttgcgatgtgaatttttggcacaaaatttttaaaaaatttggcgattcggtcgcataaaatggaaaatgcgatcagtgaaagactatgttatttttaggtgaaaaagcacattaataatgtgataacttatgggttcaaataattttg

SEQ ID NO: 53014 - DNA, 418 bp, Heterodera glycines
atgaaaaagctatcaatctgtcaatccttacggtgtccgggccgggtgagtttccccgtgttgagtcaaattaagccgcaggctccactcctggtggtgcccttccgtcaattcctttaagtttcagctttgcaaccatacttcccccggaaccggaagactttcgtttccgggaagctccccaccagggcgaataaatccgccggcggatcgctagttggcatcgtttacggtcagaactagggcggtatctgatcgccttcgaacctctgactttcgttcttgattaatgaagacattcttgccaaatgctttcgctgtagtccgtcttgctacggtccaagaatttcacctctcacgtagcaatacgaatggccccgtttgtctctgttaaccattatctcggtcagcaaaacca

SEQ ID NO: 53015 - DNA, 1354 bp, Heterodera glycines
agggttcgactccggagaaggggcctgagaaatggccactacgtctaaggatggcagcaggcgcgcaaattacccactctcaacgcgaggaggtagtgacgagaaataacgagaccgatctcttatgaggccggtcatcggaatgggtacaatttaaaccctttaacgagtatctatgagagggcaagtctggtgccagcagccgcggtaattccagctctcaaaatgcatagaattattgctgcggttaaaaagctcgtagttggatctgtgctagccgtccggtgcacactttgtgtgttactggtttggttggcttttctgccggtctttccccggcgttggcctttaccggtcggcgtcggtgggctggcgagtttactttgaacaaatcagagtgcttcaaacaggcgtttcgcttgaatgttcgtgcatggaataatagaagaggatttcggtccgattttattggttttgctgaccgagataatggttaacagagacaaacggggccattcgtattgctacgtgagaggtgaaattcttggaccgtagcaagacggactacagcgaaagcatttggcaagaatgtcttcattaatcaagaacgaaagtcagaggttcgaaggcgatcagataccgccctagttctgaccgtaaacgatgccaactagcgatccgccggcggatttattcgccctggtggggagcttcccggaaacgaaagtcttccggttccgggggaagtatggttgcaaagctgaaacttaaaggaattgacggaagggcaccaccaggagtggagcctgcggcttaatttgactcaacacggggaaactcacccggcccggacaccgtaaggattgacagattgatagctttttcatgattcggtggatggtggtgcatggccgttcttagttcgtggagcgatttgtctggtttattccgataacgagcgagactctagcctactaaatagttggctcattgcttctgtgggcacaacttcttagagggattttcggtgttcagccgcacgaaattgagcaataacaggtctgtgatgcccttagatgtccggggctgcacgcgcgctacactggcaaaatcagcgtgcttgtccttccccgaaaggggttggtaaaccggtgaaaatttgccgtgattgggatcggacattgcaattattgtccgtgaacgaggaattccttgtaggggcgagtcatcaactcgctctgaatacgtccctgccctttgtacacaccgcccgtcgctgcccgggactgagccatttcgagaaattcggggacggttagtgttccggcttcggtcggtatgcagactggaaccg

SEQ ID NO: 53016 - DNA, 2208 bp, Heterodera glycines
  unsure (1)..(2208): unsure at all n locations
tgtcagtgacgtcgtgtccagttggtcgtcgggcaccggcggtgccggcattttcggcgcgttggcatttgccgtgctcaccgaccgtcggctgttggcgctgcagccgcagaacgcactgctcgccatgctcgtggtcccgctgctactcatgtggaccttttggcgcctgctccactttccgtccagcgcgtacagcgggtaaaattcagttttatgggggaggaggaaacgaaaaatgtacaatttttgtaacattcctttaaatatttcaaaaaattttccggcttggactttattaattgttgcaattctcaagattatcccaaactcaaaaactctctaataattttacacttttaaaagggaagcaaattaaaatgaaattaaggcgcatattattgcaagaaatgcacgcccaaattatttcggaggaataaatgccacatttcgagataacaatagattttttcaaatgcgcctattcattaatttatgcaatggaaacgaatggtttttttacaattttatgcgccctctgttcatttttcaaaattcaaatcctggtccccaaacagaaaagtacccaaagtttgtcagcaggaaagaaaattggactattcgaaggtttgatttacgggtacaccccaaaatctcgccgcccgccgtagaaattttttaaaaaaattcaagtttagaaattttcaagaaaaaaaatcttattagaaaattttttataagaaaatttcaagaaaaaaatttttgaagtttttttttgaaaaaaactacctaaattatcataaaattagaaagaaaatcgctgaaaattttcaaaaatttttttcttgaaaaagttctgccattgttttccagttcagtgtctccgccgtattccaacacgggcacagtcgtcgtccctactaatgccaacagcaggagggacccaatcgtcgccaatcgcagtgccgccaacactgtccaccattccttgccctcctctctgttgccgttttccaccgctgtcgccaccgacgcattcgacgattatggcacagcaaatgccgacgccatcactgaaccgttgctgaacaccaccaccaccaccaacaatagcagcagtggcaacgcattgacaacaaccactgtcattctgccggcctcccaaattttttgttggaacggcggccgacggacggcgtacaaaattcgagtgggttgttattattatccggtaaagggaaactgacaatgagctatttaaaaaaaatacccaatttttcttaacaaaatgccttaaaaattaaaatttctctcggcggcgcctgtcgacaccgccggacccccattttaccttattttttttaattttaactcaaaaaattgcaaaaattatgccttttttggccaaaggcggctgcatattgctattttttgctctccggcgtcgaccagttttgaataactttttggcccgaagagcaaaaaaaacataaacttttcggctgcccctcccgaaaaatttttttctggttacgggcctggggcgacctctcctgcctcgaaaatacacatctcagggttttcagcgactccgattttcccccctttggaaatgcgtttatttaatgcaatttttgcgttagccgctgctcaagtacatggtgccgttgtgcgtcgtctacttctccgagtacttcatcaaccagggcctgctcgaactgttggtgttcgactgtgcccattcgtttgcactgtcgcccaccagtcagtaccggtggttccaagtgctttaccaggcgagtcggaccgggaatataagggttgaatatgccaatggcggtagaataaccgtcggaaaatttaaaagttttttgacgtgattcaatagaattagccccaaaacattgcaacctaaatttatataacaattgaaaatttaataaaattgctaaccgaaagtgccgaatatgaggcgaagtggcaaatttacattttaaagagctactagtctactatgttgaacaaaaggccattaaaaaaaatttccgggaagggagccccgacttttgcgcctatgtcaaaaatcggcttctaagttaagttttttcaagatctgttagcctaaacagcattaaaattaagaattatagtcttctagtttactaaagaggactaanttatgtagtttgaataattaatgattttttc

SEQ ID NO: 53017 - DNA, 712 bp, Heterodera glycines
atggcagctttggcaataaaacgtggtaatgagaaaatacttgaactgagagatactgaaaaaagtgatgaaaagaatccaacagaaccgattaataatatggactgtccttctagttctggaataggtttaagatgtactgatactcttgcctgggcaagggttaaaccagaaagcgatgaatatcaaaaaagacaaaaaagggataaaaatagtgatgatcagctaaggatgattattttccagagaatgggtgagtgtgcaatggctgttcggctgggtaaggaggacaaatggccatattttgcattggtttacccaaatgtaaaactgaatgagtattcacgcttaggcagtacaatttcagtaccaaaagtggaaaagcttgaatattttagttcttcgaattctgagttatactcaccaaacccaaacgaggaaagtgggactatttataatattataaaaagtgtaagaaatgagataaaagcaattgatgtcgattttaatgtatatgatgatgagagtgatgataacatataccagcgattctttccgcatcaaattggaccggatgtagaaaatcttgaccttgtagatgaagcatgcgcgcagatacaataactggagctaggaaaaacacagactattggatttttgcacttataactttaagtggagtgaagaatatagaacacgtttttagaataaa

SEQ ID NO: 53018 - DNA, 525 bp, Heterodera glycines
atggtcgctaagcagaccggcacgtgcaaaaatctcatcatggtcgcaaagcagaccgataagattttgaaacaaataaatgtgagtctcaaatggggataaggacagaaatctttacaattgacttcaataatatttataaaataattttaagtatacatttaagtttcagtcaagcgtaaagacttcttaaattctatttaggagcttatgcgtgccaaagtgtacgaaacttattcctaaccaacctcagatttgggttagtataactattcacttagtatacactttgccataatttttcatatattacatctaaaaatttttccttgttctattcagttcatcagagatagataaattttaaagatttaaccggccaaacggcaattgcctgtgagaattttttaatttcacaaaaaattaactggatggaatggttttagcccatcaatgttgagattttcaaaaaatcacaataattgattttcataaaaattaaattgctagtttttttaaaataaa

SEQ ID NO: 53019 - DNA, 97 bp, Heterodera glycines
taagcctaaactttttggcctgtttaaaaaggaattaaaaatttttaaaaattttattcatctccctttttgatagaaaaagcatcagagtgcctaa

SEQ ID NO: 53020 - DNA, 917 bp, Heterodera glycines
atgcaccgccattcgccgatcgtttggccttccgccgtcgtcgtcgccgccgccggtgcgtccgtttggctctcacttttcactcatttgccgccaccgcctccaccgccacacattcacatttaattttcgctcccatcagttttcattcatttggcacaagcatctcaatctcagattttgaaaccccttttgttttaaatatttttttttcatttttttagtcagtcgatttatgcttagttcagccaaccatatgggggttcggtgaaaaattttttcatttaaaaatttgtttgaaattttgaaaaattgtcttatttttaaaggaaaaccataggaaaagcatcgacaaaaatttaaatattttaactatgtctaggccaaaatttcattttgaaaaaatttaaaaatttaacgaaaatgaaatgaataaaatttttgttgaaaattttggcagaggagagatgttttttagttttatattttaatggacattttgtcatttgatgaacaatttattttaattgctttttttggatatttgattctaaaaaaaacaattttatttttaaatacaattaaatgatattcattttaccaaaattccgaattaaccaattcaaaactttaacaaaatttcacaaaatttttgccatgactaaaacaatttttttgcgtattttaagattttgttgatcgacaaaaagcggcttttgcgccatcagaagcagaaatgtcacaggacgaggatccgtacgcggtcagctccgactccgaggacgagaaaggtccgccgccgaaaatcgccatcgaacgcgagacggacatcagccaaattgtgaggcaacagtccaataattacctaattaattaattacctaatgagttcgtaatttgcgtgatacactattaaa

SEQ ID NO: 53021 - DNA, 2732 bp, Heterodera glycines; identical to SEQ ID NO: 4059

SEQ ID NO: 53022 - DNA, 913 bp, Heterodera glycines
atgaccggcacatttccttctgagcccacttttgctgctgcctcctcaaatgccgttgttgacgatggtggcgagtcgcatcaaacggaacgaccgaccgaaactgaagacacttcggccgccttccttccccataacagttcgttacgttctgttatcgaacggtttggggaggaaaatgtgttgaaagaatggacggaggaagactgtgccggacttcttgtccaattgctcaagtcattggatgcctttctttgttcattatttgccctttcaaatttaagaaatttttgcgactacgaaggagcaaaacgaattgtgcgctgtttccgagaaacatcggttgacgaggtgggcaagcagtacggggagcagttgttacctgttatgttcctgggcttaaggttttaggtaattttattacagtttttggagagggaattagacacacaaatttatgacgggagggattgaatcgggaaaataggacaatttcatcattgcaacatttgatatttaagctgctgatacagcattaccttcctgttgtaccaaatagatacgaaatattcgttttcagattaacgactgtttcaacctttgcaaagaattgaataaacgtgccgcgaatgagcgagttcgaatgggaaattgcgtgagttgtgcgccgctgccccaagagagtctgccgacttttccgaattggtcatcggtgttggcacaggcgaaaaaatcacggggaatccctgacgactcttccgctgtcgttgccaaaatgctctcggaaatttccgccaaatataatgatgacaatttcgcgcccgattcccccaactataagttcatttatgagcatctcgcctcactcgtgcggggatacgccatgagagatgcacgaaggtggggacagtga

SEQ ID NO: 53023 - DNA, 1061 bp, Heterodera glycines
atggcgccattaccgggagttattcagctacaaggggacatcaccgaggtttgacgattccgtttatttccctttaattttatatggaatctaattttgtgtagtacaattaatcaaatgttgtttgcttaggttggcacagctcaacaaatcatttcttattttgatggttccctggcccaacttgtagtttgtgatggagctccggatggtaaggaaaggttgacggacttcccagattttatttacatattttagtcaccggtcttcacgcctttgatgaatacatgcaaagtcaactcgtttattcggttcaccaattcgttatcttctttttgaccttgacaaaacacccattttaaggccttcagcattacttctcatattctccaaaatggcggcacttttgtttcaaaggcatgcagaacataagtttttgtcccccttgtatttaattttttaagatttttcgggctaaaaatgtgaatttgctctacgcccaaatgaaatgctttttcaaggaggtgtcgtgttgcaagcccaagagcagtcgactgagcagttgtgaggcgttcatcgtctgcaaaaactattcgcctcctgagggttacaaaccgaccctcgtcaacccaatcttggcatcagactacagtcagtttagctggcttttgttttcgatttagatgccattttcagatgaatgcttggctcagttggagggtccaatgaatgctgctcttgtccctttcatggcttgcggtgacctctccggattcgactcagaccgaacttacccacttaacttggaggagctgtccaacgaattcaagcaattcgactacaaatacagtcacaaagatgtgttgcaaccacccacagagccagcatataaaaaggcatgcgaaatgaagaggaactcggagttggagacaaacttggaccagcaacggcaaagaacgcaatcaaaaaaaccagcgaagaatagagaagcaaaggaagagttgcaaaatgatgtgattgccgaattagaagagggatgttttgaaagactgttgttgtga

SEQ ID NO: 53024 - DNA, 1634 bp, Heterodera glycines
atggatgccagttcattgtcctctttggtcggataccaagactcgcctctcaacaagacagtttcgagtgttcactcgcgttcacaactcaatcatcttctggagaatgaaacgtaaatttacattggttttaatggattttgttatttaaactaataaaacaaaatgtatattcagttgcgactcaatcattgatccaacggattgctctgcttacttcagttttaatttgcctggtccaagtcatttttaccagcctggcacccctcaatatctgctgacggaagaggacacagcctttaatggtaattcaaaagtttaaattttttcaaaagagcgatgctcaataatttgtcgataaaatttagccatttattcagggattcgatcgttcattgatgagcacaaattgtcaaaatattcacgaaggccggacaaacgattgttccaacattctcgtgctgatgattcaccaaaagtgcaccttttatcagagcttaaggaggtttttaagcgcccaattttagacaggtgacaatgagacattttaggttttggaaacgtacggattgcgtgaacaagatatggaaatgtatgaagtgaaattgcgcatttggctttgcaacaccatccttcgaccactcgttgccaaaattgatgaagttaacgcggaattgtgcgaaaagtgcccgtcttcgcatctgaaagttggcacttcctccatggaaatgctgttgacgcacaaacagcacttttccgacacatttctgccttttgtgttgccctatttgcgtgttcatagcaaccagcaatacgttgtgagccgactgcgcacgctttgccaaaacattgcacttgaagaattcaaatgggacggtggaggcgaacagacagtgcgcgatgagagcgactgtaagtgtatgaacaaatgcattgtttctccgtcgaaccgaggaaatgctaacaataagatatgagtcgagccaaaaacgattgctttgagggtaaattggaaaaaggggggatggccctgcagaaaagtgaaagttgctaagaaattgcgtttaaaatgatgactcgagcattcatttcccttttacttggggaagcggtgtgttatttttgctttgctttagcatttgaccgcttcatcggttggggtccgcaattaccgaccgacactgagctcatttggcatttgttttgcacttatttggactttcacatttcgccttcctccgatggcgtctctgaactcagcaaaccattttccaatgtgtttttcgttaattcgtctgatggaaagttcccattggctctgatgcatgccaccattcaaccgacaaaacagcaaattgtgccggatgaattggctgatgagaaatatttcattcgtttggtaaatgatttttttcccataatattcttggtttccgttttaggcttccgctcgtccgccaactttcgaaattgtcgttgatggcggagaaaccgttattttaccttgtaaaaatcagccgcaaaatttttggtatgtgctcattttgttccttgcccatgttacaaaaatgtctcattctcgcattggtcacattcatctcacttcgctttcgttgaacatttttgatgcgtaa

SEQ ID NO: 53025 - DNA, 523 bp, Heterodera glycines
atgaaatttgcccatacggtaccaaggggttttgcgaaatttagccatacggtaagaaaaattattatgatttgagtaatagaaaacgcaaatagcgaaaaagtctaattttgaacttaaaattgttgaaataaatttcagaaagtgaatattgcaaaaaataatgaatagcagcttaatcaaaagataattggaaaataaaaataatacatcttttaatttataattgtcccataaatttttgtaaaatttttaaaataaaaatatgaaatttgccctaagatgtcagttttcgagaattctgaaattccagcactacatgccgaaaacattgctccaattgacatttgtcggccttttaagcccaaatggggacttattttgtaattcttctgtaccgttttcagttctcactaagatgtcagttttcgagaattctgaaattccagcactacatgccgaaaacattgctccaattgacatttgtcggcattttaaacccaaatggggacttattttgtaa

SEQ ID NO: 53026 - DNA, 1597 bp, Heterodera glycines
  unsure (1)..(1597): unsure at all n locations
tgggcaaaaccgggaccgggaccttttcgggttgaaaacccgggaatttttggctgggaaaaccgggaaaaaatcgggactagtcccggtcaaaaccgggacctcggtactcagttgtactcagttgtctgtgttttggtcccggtcccgctctactctaacaaatagtgacataattttcagccaaaaattgagcaaaaataatttttattcactgattgcagttgcaaatgaataggactgggatttttaagaccaaaaaacccaaaatagttacctaaaaaaattttttaaattaaaaatttttgccaagaaagtaaatttttgagaaaattttttttcatttcataggagtatattttgaaaaattttagctcgattcttaggggtgtatttgtttgaaatttttttaagtcgattcttaggggtgtattttttggttttattgcatttttgttaaggaattttccaaaaaaaatcgaaatagtgaaaaatagtgacgatacgccaaaatagtgatttttaactattttagtgacggagtcgtaaaataatgatttctagtgactgataatgacgtccctacttatgaaccataaaatgtctaaattttcatttaaaaaagcgaaatttaaatcatgtccaccattgtggagcatattcattatgtgcctgattttgtgactgaagaggaggagcgtcagctgttggagcgtgtgtatggcgtgccgaaaccgaaatggcgcgaattggcacggcgtcgactccaaaattggggcggcactttggttggcggtggcggcactgttgggacggaggaggaagacggcaacaagcaccagtacctgttgcaagacgaacagttgccggaggtgcgaactcggcacaatggccaaaatctggggcacccaaaatctctctgccgaaatttaaaaaaaaaataaattcaaacttggatatttttcaaaaaacctgaaaatttttttgaaaattttctaaattaaatttttttttttaattttgggaggcgaattgtcacgttcccaaaatctgttaaaaaatcaccaaaatttcaaattttctgatttgctgcataaatatggaaatctgaattttttaattttcgacattggttcaagtcagggttcggggttcgacagagccttaatcatcaaatatgtaaaatttaaaaataatttatttaaaaataattttctttcagtggttggagcattgcattgataaaatcatggcgttcaattcgggctccccaatgacaacatttgctacagaacacaggcccaaccatgtgctggtcaacgaatatttacctggacaaggcattatggcgagttttattcttgccaaaaatataaatttattaatataatttttcaattatttttaaaattaaattagtaaaaaaaattttccattatttttaatattaattaattaataaattttattattattattttcagcctcacacggatggaccagcattttacccactgatctccacaatttcacttggctctcacacagttttggactgttacgaccanagtaagtcatgtctagggctccanatttt

SEQ ID NO: 53027 - DNA, 190 bp, Heterodera glycines
gcggcactctgttgcgctacgtcgcctcctggctccagtcgctggtgacctttgagctgcccggcgcgtactccgccgacgatcggctcgacctgagcagatacgagccctacgagttgttggcccgctgccgacactttgtgcagcagaaagacttgctgaacgctgtccgagtggccaatctgatcag

SEQ ID NO: 53028 - DNA, 615 bp, Heterodera glycines
  unsure (1)..(615): unsure at all n locations
actgtattttagcaccatataatnagagaaattaacatttataatgaacaaattttaaaaagatttcaaggaagagaatatgtttttaaaagtgttgacgatgccgaaagtaaaggaccacctattcttcctgaggtgctaaataaacttcaaacaaatagccttcctgatcatgaacttaaacttaaaattaattgtgttacaaaattaatcaggaatttaaatgtgaatatgggcttatgcaacggaacgcgtttacagattcttgatatagaaaaaaatgtattaagggtaatgattttgacgggtgataggacaggagaaattgattttattccacgaataacattaatagaagataaaaaacttccttatgtacttaagcgtcaccaatatcctttaaaattagctttttgtatgacgattaatggtgcacaaggacaaaccttcgaaaaaattggaattgatttaacaagagatgtgttctcacacggtcagttgtatgttgctttatcaagaactcggagctgggataaaattaaaataaaatattcaaaagaaaattcagaaaagaaaacccaaaatatcgtttggttggaagcattttaatgtttt

SEQ ID NO: 53029 - DNA, 123 bp, Heterodera glycines
atgagcaacaacaatgatgaaggcatggcaaatggtggaaaaggcaattatcaacaatatgtaaaacttgaaaaaacagtgaatcagtgccgtgttaagacatttgcggtccggacatttgcg

SEQ ID NO: 53030 - DNA, 91 bp, Heterodera glycines
ggattatttttcaaaacacctcgtagactgggggataattggagactgcgggattaatagagactgggctataattagagcatatacggta

SEQ ID NO: 53031 - DNA, 465 bp, Heterodera glycines
atggccaatacgctgaagagaaagcgaagaaaggccgaagaacactctccaaaggagaacatccgctcttccgtccctttgaaacattccgtctcttttgccgtcgattcctctggcggaagtcagctgttcattgaggacaccgacttcggattggtcactttggaagacgcgcaaaaggcgccgtttcagtcgaaggcattcgaatggaacggcgaaggaatggacaaacgacagcaaagaaaagtggcacgaggggagggagggcaaatgacgaagattaaagccgattaagagtattgttaaatgagtgctttttcagtgttcagtcctttccaatggctttgtctcttttccttcggctcaccagcaacacttcccatccgaattgaatgctcataactctgatcacttccacagccaccagttggacaacgaggcctttcaatatggtaattttaatta

SEQ ID NO: 53032 - DNA, 553 bp, Heterodera glycines
ccgagtgccgttgttttgcagtgcggcgccgattctcttaacggagaccgacttggcccattcaatttgacgctgaagggtcttttctgtttccatctttaattttgtttatttcaaaacaggacatggaaaatgcgtgaaatttttccgtgattgcaatttgccgttgatgttattaggcggcggcgggtaatactgcgatttttgtttgacagtttgctttttgaaaaaggtacactcctcggaatgttgctcgatgttggacgtatgagacgtcgttggccgtggacattgacatatccgacggttgttctttgacattcgttcacattaatcataaaacataacgacctttaaaataatcacagtcgcatgaattataattttttctaattaccttagcaattttgaagataattagaaccctttcaatctttcagaacttccttacaacgattattttgaatattttgctccaaattatcgcctccatatcgacgcctctaatgaaaccaatcacaacacagaagagtatttaaggacggttcagtat

SEQ ID NO: 53033 - DNA, 981 bp, Heterodera glycines
atgcaaatcgatgagtcagtggagcacgacagagcaaacccggacaggagacttccaggtgggacttgtcctgaaatatttccatttaaaatctgattaagccgaagtcagtgaccacatgacagcacatcctggagaattctacgaaggtgaaaatgaaggtgaagaccgcaggaacaggcaagaatacaagcggagaggagggaatacgacgggcgaaccgagcgattcgagggaggacaaacaggacaattcgaagcggatcaaaattgaaaaacaaccgaaggcagagcagcaagaagacggcgaactgcttgaggaagatgctaacaccaactgacgatcagcaggaggaggaaaagcccttttaagcatcaattcgacttattttctcgtctgcgctttgaatttgtcgtccaccgtttcttattgtttcgacaatattattactcataccttttcacagcttatcaatagcgtacctccttcaaattccgaatcctcttccccgtttaaattgcttgggataaaaaaatccgattcattggatagtttattaattgacaattagtaatcatccaacggtcagcttttatttctaattcaagttttggcttttttctaatacaagagaaagtgctttgctgattttttttcagttgaattttccattataaatccactaatggtcaatttgtcttctgattcttccgtcgattattcggaggatccatgtcccggcgaacatttgcaccatggcattttctacgatggaaatgcgtaagtttcagcgaatggaacgcgtaattaatgttcgcctttttcaggaaattttgtttagtttcggggactgaccttttgtcgtttgattcggagaatgggcaacgcttaggaatcagaaggcactccgaccgtgtcgtcggcgtacactttcaccagggaatggtcagtccatcgatagttctaatccgttgttgcaaa

SEQ ID NO: 53034 - DNA, 2108 bp, Heterodera glycines
atggaaaattgcgtcgtcgtccctcgtcggatttcgtttgttcggtcgaccctcgaccaattttgggactgctcggcattgactgttcccatgacaaatggacaagagtttttggtcatttactcaaatggtgaaatggaagtgtacatccaaagtgaaaatagagggtaatttggtttggatttctgtcgattgttccattgtttttccattagttccctttggcattgcgatttaaaaaggcattaccaaaattggcatcaatttgtggtgaagcattgctcaacaattgccagcacaagtggacgttttgccactgtcaattcccttgcggacaattcccgtgttttcctatggcatttggccactctttcgattgtcaaaatgatcgacactttggtcaatccttcacaggtccctccccccccccctccctttgattccattcgaatgttccgtcaggttgaatgggctacaacaccctccgttttgctcatcgcctgtcaatttggcgtcgtttcgttcgactccgatgccaacactttcccttgggccatccatcacccaaacctttcaatcgcttctaatcatttggccactttcgcatacgatggacactttggttggtctcccaaaacagtaaaacctttactaattggtccatttgttcctcttaagttttcgttatcaatgctttcaatgggacattgaaaactgaacctttgcgtttttcggaacgacaaaaggaagtcgttgccgtgggcgaaggagggaatgttttgttcgttggcatctccgaacgggtgggcgtgtccttctgaatttgccgtcctcatgacttctttcagggcgctctttccgtgcttacgccaaactcaccccaaacaattggtcactctgccgaactccccaaacagaagggcaccgccttttcacatttaatggcagctaatgggcggacaacaaaaaggagcggagaacaatcggaagaaaggggaggacggacgaaccacgcggttgttctgctggaaatgccgtccataaaacaattcattgatggccccgcgcattcgcttccgccaatcgcacaattaacgcgacagtttttggacgcttgtttggccaggagaagcgacgccaactgacaaagaagggtcgggtcgatttgttggtgcctttttcattttcattctcttgtccgtatgtttcatttgctttttcattcataaatttgtgtttccaactttaatttggctattagccccggtcagacttttcttttgtcttctaatacgtttttggagtgcgtccgcaagttttggcccactcatcggccattttcttttggaaatgcaattcaatttccgcccgtccgctgtctcttcgcccctcccccatttttcgctgtgccaactttcatttccaacttctcccaatcaattgccatgcttttcctcccccttttccgactgtttgtccccctctcttttttgctttttccctcccatttttcctccgtccctccgattcctttcggccaatgcgtccgccctttgcgtgtcgaagaatcgcattcgctttttgtttgtgttttggacaaataaatgcatacaaaaatgattggttcattaggaaacaaagcacggccattacttttcaaatgggtcaaaggcacgcttttcagtgcatttgccatcgtcgggctttgtcgcctccgatgggtgagatgggagctgaacatggcacaattagcttttgaacaacaacacaattgcagaaaataggggcagggggaggaggaacatagggaggactaatgaacacggcacaatttgtgccgaagcgacatttaagccgcgaagtgaaactaatgaataataataatattaagatttcggtaattttagctatccgaatgggtacgagaatcagaagtgttctttggagttggtcgccactccctccaggcacaaaggcccttttggctttcggttaattttttttcagcggtttggtggtccatctttcgttcgtcgatttggatttggaagccgcttactcccgatcagagcagtgccttcgggattacattgtggtcacaattatcg

SEQ ID NO: 53035 - DNA, 863 bp, Heterodera glycines
taaggcatataattcccctcccttttaattagtcttattattcatccgtttgtgatttatttcttggttatgtcggtccatagtgaattggctcggtccaaaattttgacctgcagaaatcgtttggcggtgcgtcggttggctctgctcgaacaatacttcgagctgaacaaatccgttcaatgtcttcttgacgattatcggctcaacataatgaaagcaaagttcgctgcattttgtaaagtttaaaattcgtcggaatgcttttcagaagcacttcccccggcttcgtcgttgggtcagtgaccgcccttttgtcctctcagagggaactgagcccgacaatttggttggccaaaaggcactcgcaaagggtgttgctaatctctttttctcatattggggcgatgaattatttttgttcctcaaaaatgtcctgtttttgtctccttttttacgcaacatccccggcactttttctcatcgcattttgccattttaagggttgaaactgcgaaaagcgattgcggttctttcctcgcattgaattggccttcaaaatgtgcgggggaaaaaggaaatgatttgcgaaggaggggaggagaaacattcgatggaaaaggggcggaagaagcggaagggaacggagggcactcaacggatttccacccctttggcgttttggagagtcaaagcgtaaaagcggcgaggaaaaacattcaaaaagtgagacgatttcgaaattctgtcccaaatgttcccgatcagctgcttctgattctttgcgacttggcgaacattcaaagacaaatcctttcgctggggaaagaggcggacgaaacgaaattggccgagttttagcg

SEQ ID NO: 53036 - DNA, 2099 bp, Heterodera glycines
atgggaggagaaaagggaggaaaatgcgggagaaaagaggcggaagggacggaaaggaaaagagacggaaagagtcggcggaacaacgaagtcgcagcgaaaccgcacggaggacgaaatgcctttcgcaattttaccgactcaaaaaatactccgagaaatgggtgagttcttactagagttgagcgggaccggggcgggaaatcccgggtttttcaggtcccggtcccggtttttggaaaaacagaaatcccggtcccggttttgccagtcccggtcccggcgggactaaataagcactggtaagaatgggggtctgggtgagaaaagagaagggaattggtgagggaccagaaatttttgataaaaataaaataaattatttattttcatttatagcatgtgttgacatgtataagtggtcaagtgtctaagcctttttactttcattattcgtctcttcggttcaattctctgatggaacagaaaatttttttatattttctttaccattattttaattgaatttaattaataaaaactattttaatttaaaattattatttttttcatttttaatagtctaaaaacccataaattaaccgaatatttggtcatttttgacaaattctgttaataaatctcgctcaaaatttttccgggggggcgcttttcggcacgggcgggacccaaccccctcccactgttccaaaaaagttttttgaaaaaacattgccacaaaaacagcgatttaaagcaaaaatttaaaagattgtaaatttatttaaaaaaataccgaattttgggactcagaaaattccaagaacccccctgaaaacaaaatttttaaaaattttcctcgaactcgtcccccaaaacgtaaatacaaaattttattggtacatttttgaatattggcaattttcgtaacaaagtgtactttcaatttttttcaaaaaaattttcacttgggaaaagtcccggttggtcccggtcccgggttttttcgctgtcccagtcccggtcgaaaaacttggtcccggtcccgacttttctggtcccggtttttgtcaaatttcccggtcccgctcaactctagttcttacaaacgaacgaatgacttttcaatttctttttatttagtcaccccaattttgcgaccaatgaaaagggccattggccgtccattggtccgaacgaatcgcaaggaattttcagagacagcgaagtgtggacaaaaagaacattcggtggcaaaatttgtcagtgcaacggcacggcttgtgaataaaagctctaaagttcattattgaactttacccaatttgtcaatttcgaaagcgcaccgctaaaactcggccaatttcgtttcgtccgcctctttccccagcgaaaggatttgtctttgaatgttcgccaagtcgcaaagaatcagaagcagctgatcgggaacatttgggacagaatttcgaaatcgtctcactttttgaatgtttttcctcgccgcttttacgctttgactctccaaaacgccaaaggggtggaaatccgttgagtgccctccgttcccttccgcttcttccgccccttttccatcgaatgtttctcctcccctccttcgcaaatcatttcctttttcccccgcacattttgaaggccaattcaatgcgaggaaagaaccgcaatcgcttttcgcagtttcaacccttaaaatggcaaaatgcgatgagaaaaagtgccggggatgttgcgtaaaaaaggagacaaaaacaggacatttttgaggaacaaaaataattcatcgccccaatatgagaaaaagagattagcaacaccctttgcgagtgccttttggccaaccaaattgtcgggctcagttccctctgagaggacaaaagggcggtcactgacccaacgacgaagccgggggaagtgcttctgaaaagcattccgacgaattttaaactttacaaaatgcagcgaactttgctttcattatgttgagccgataatcgtcaagaagacattgaacggatttgttcagctcgaagtattgttcgagcagagccaaccgacgcaccgccaaacgatttctgcag

SEQ ID NO: 53037 - DNA, 763 bp, Heterodera glycines
  unsure (1)..(763): unsure at all n locations
atgtttgttctgcagagtctgattaccggtaccatctcgaaggcatcggctaaacaaagagctgaaagagcggggcgcacgcaggacggagtgtgctatcggttgtacagcgaacttgcatttgccaatcaaatgcttgagcacacaccgcccgaggtaaaaggaaaaggccaatacggtggtgaattgttggaagaagttctgctcaattgtctagaattgaagatcgagtaaagaaagatccgggcttttggacttcgcgagtcttgattctcatatttcataatttttctctaaatgttttgggcaaatgagatcaaaaattaaaattacattatcaaattggccagagctttactttcatgaacatttaaaaaatgcggtcgataatacagttcagtttagtgaggcatacatttgagaaatttccgtatatttatatatatatatatatatatatatatataaatttatgtctgaatcgggttaacgactaattttcacccaaaaattttattttggaattcactttacaaagtagttaaaattgaatccagaataactgggttgtatgccgacttatatttaataagctgaaatgctttttagattctttggtccgatctgacttcaatggtccttaaaatgaagtccattcccagtatttctgagcaccttggcgacctccgcttccgcgatcagccaccgaaagcggctattgtaagcgcattanaaaatctttattttctgggagcaatcgatg

SEQ ID NO: 53038 - DNA, 970 bp, Heterodera glycines
atggtgtccgaattggcccagtgcagtgatcagttgcgctcaaacggcgcttccactgcaatgtcagtggaggagtcggtgatggctgtcggcaacgaacttctcgtggccgcaaattccgtggaggccgtttcttacaaattggcacaaatgcgtccaagggaaattcatgcaagtttttggcttggaatttatttcaattttaattgataaattgctactggactgataattaacgacgcttttgcggcggaggagggcccggctctgatatgtcttgtattcttgggtcggtgcttccacgaggaacccatcgtgcagggcatatcagagtcggcacccttcgcatgttccgttgcccccgtcaaatgccgtgccattcctgcgcttctattccttcgacacttcaacattttaaatgaaattttttttgcaataatattgaaataaatacaataattttgctttttcaattttatcatttttcttttcagaaacctgatgagaacctaacgtacgatgagcaaattctttcgtccgctaagtcaatcactcaggccgtccaaacactcgtcaaagtaatctttggtttgtctaaatttgtttttcattcccatcggaaaaggccgcttcgtctgcgcagcaggaattggtggcccaggggcgagtggccgacccgggcccagcaaatggcagcgaagagcagcaatggactgcaggtggagaagccaaaactccgcagcataagctaacaaataagctaatcactcttttgccttaggtttggtctccgccgctaaactcgtcgccgctgcgactaaccaactttgtgaagctgccaacggattggttcagggccattcgacggaggaaaagctaatcgcagcggcgaaacaggtgaagaagacaaaggaggaaaatcaggggatttatcacggcaattattggacaaattatcgccataaatccg

SEQ ID NO: 53039 - DNA, 659 bp, Heterodera glycines
atgcgcacccgtccgatctggcaagttaagcaacgattgctgactagccaaaaggttcggtgccgtgatgaaacgaaccagcactgcttaccccgcggcacccggcacggtcccccgaaggaatggatttaattaaattctctccttcggggatttttttccattaggtcgtccgttagcgttcgattgctctagtcaatttttcaaaatttttgttgaaatatttgtcgtgctctgaagggcgtgggagggggggggggcgaaggcccaccacgaggccgcgaagaggccgagtgagtaccttcggtgcaggaaaattattaaattttaaaattttttaattgctttttaaatatgccaaaaaatgtaggcttaactttttttatgaaaaattcgatcactcatattttttgctaattgagcagaagcgtaccaaactatgcagggatactccccggtaaaggactaacttacactgaaatgagcgccgagctagctggctcaaaaaaaattttcgaaaatctgagtctttcgtttttatttattttttgcaaaattaattcataaatattttttcagaaagggttctgaaacgcaccaaattttatttacaagttaataaggctctctgatgctttttctatcaataatggaggtga

SEQ ID NO: 53040 - DNA, 1470 bp, Heterodera glycines
atggggaaattaagcgctaaaagtgtaaacattattattcatacttttgtatatattcggttttttttggggggggggcttggacattaataagaccttaaggcaattaagtttaagaattgaatatcgttctgattatttctaaatctgttcctagcactaggaattggattttgaagcaaatgcttaaatttttgcgaactttgaacaagctaagaatcatgaaaaactcatttcaagcttagctcttagaaaaaaaaaaattaatattttgagcatatacttttgagcacaaaaatttatgagttcaaaattttcagaatggaagaataatttaattgtcacgttttatgattaaaagccggtcgatacctgtcacaataaaaatactttatacccgtaactttagaattttccgattttttttctatattttgcctttaaaagcactaaattataaattattttcaatttttccacaactttcgtttttacgaattgccatttttcagtctcaaaaatacctaaaatgaaatttttcttgcatttccttcactgaagtgaaaataatgcacttaattcgcaaaaatctccatcaattatttaattaagcgtctattcattaattatttttctgattttcccccaataaaatcatccaatccttgttcattttcattaccctcgcgctgctctttgcacacaaattgcagtcccgagtaggccgccttcaactcggacacctgtttgctgcgcgactcgcagcggaccatgcactcgtccaccccgcgataagcactgattttaaacaaaaagcccaatttttataaagtttatctcatccaaagcacttgaaaacaattttagcaagcaaaattcaaaaaaaattactgccaaaagtactcaaaaactcatctttatggcttttatgcacctcatgaagaaacttttgcagctgcacgaatcatttgatttgtgcagcaattctacagtagagctttgaattgataccggcaaagcttaaactaatttaaatggggtaaatctattagcggtaaatattttccaattaaaataaaattctaagaagatatttatcgtgatcacttttaaaatttctgttttatcattccaaataatgtatttttttttaaatattcagttgtgtaaatgataaaattcatgaaactgactcgcacactcgtgaaaagaatttgtgcatgaagttttggcctgcactgtacacaaatgggttcacacttagccccgttgaggagggcgttgcctcaattagcttaattgaaatgacgtattttactgagagcggccaaaataataaataaatttaattaatttgagaatatactgtaattatctttttatagccctttaaaaaaatttgcttgacggaaaacgagaaaattaaaaattgagcgttccttttttccgctcccgtaattcggcaataaa

SEQ ID NO: 53041 - DNA, 2036 bp, Heterodera glycines
atgattcgtaataaacttgaaagtctacaaaaaagtcggaaaaagcgttatttgtccgacattttgaacacaactgaggaggccgtgaatttgggagtggaactcgtcgaaccgaatgatgtgagaacttctgacagcgttgaacaaccgaatttgaaagaggctgaggtctcaacagtgcttttgagcgcggaaaaaccaattttgggggagattgcctatggttgaacggtatgtttgaagtgccgcaaaaaattaatttttaaactattcagggtttcgattcacacaccactcaggaaatcgctggagatgcacaaatcgcagttgctcagcttatgtaaacatcacaaacaatggcgaaaccggaactagtggaaccttgggtcaaaaagaatacaaccacctcccagcgcctcagaaacaacaagtttgtttaaattcaacgttacgcgaaaaggtcggtgaggacatcgtcttgtatgacagtcgcaatgtcaggcaaggcgaaaaggacgtggtccttattttcggcagcgttaaggtacattttttggctataaaaattctgtttttcaatggttttattttttaagactctggacattttgcgccagtgcggcacatggcaccttgacggcacttttaaatgtgctccagcaatgtgggagcagtgcttcgtcattggtgcatcagtgcatcagaggatgtgcatctgtttgtggtgccttctgcctggaaaacaacgacgctactacgaagaagcactgaattttctccgtggacgtatctctactgaagtcccaagcaaaagttaacccattgtaattataaaaaatgaaaatttcgaattttagtcatgtgtgattttgaaaaggccgaaattgcggcggtgcgtacggcattccccacagcgcagatcaaatgctgcatgttccattacgggcaaagcctgttcagaaatttcaagcggcttggtcttgtgcatttgtacggtgagaagacagaacgtggggaggcagttcgcaacacgttccggttaaaaaaatttttggtgaaattcgaattatttttcagaagtgttctttctttgccacttttgcctcccagcgttgtcagaatggctttctcaattattgtggcgtctgctcctgcaggaatgcatgagtttttcctttacttctctcgaacatacatcggcttgacacagcgccagttgttggatggtgctaatgcatttggggccactcaaatcagttttttgtccagcaccgaccattgtttgttttcgtatttttgcatcgattttcaaagtttaattatttttaagctgaactagtgacaacaatttcgaccatcaactcagaacacagctacgcggctactccaatacagttcggcatcggctcaccggcgccatcaactcttacatggccaaccactgtgactccacaagaacagcttgttcaattagttgactcgctatcgacttcaacagcctcttcaggcatatattttttcacaaaactcgttgttttcacgaatctttcgtttatatttaataaaaaatttagttcgcgtgtgggaggaagaaatctttcgggcgccccatttcccaattccgctttggaacatgcactcacaggcggcttctgcactcgctcgtacaaacaatggactggaggctactcatctacattttatggtctttttaatttagtaaaaaaaaattgaaaaagagtatttagaagggtctctgtcatcacccggcactctcggacttcatctgtggagtcaatgaaagcatcgacagacaggtggacgctgcccgatctgctcgccatttcattcacaagcgacaaaagcgatacatcctgcaggacgcgctcattatgcgaattttagcggacgcgtcgtacaacaacaacggtgaaattcatgaccttatgacggccctcggtctacaaattgaaggatacgcaggaaaattaaaagatttcgaaaattttgatgattcgattgttcatgttccatga

SEQ ID NO: 53042 - DNA, 332 bp, Heterodera glycines
atggcgacttttacgttacgtcaaggcattgacattgcgaaaaaattggagcctactggggaaaaccaggttttttcttgggggttggggattttccaacaatttttgtaacaaatttcccccaatttttttttcagtttcttctgcttggacgacaaagtgccatcaaagcggcgcagaatggcaccgactgggccaagtcggtggatgccaaattgggcacaatggttgacgagcacattctgaaacgggcgctggaaaaggtggaaaagtccgccggctctgtgccgctgtacatggatttggccaaggtttttaaattcattttttaa

SEQ ID NO: 53043 - DNA, 2072 bp, Heterodera glycines; identical to SEQ ID NO: 4068

SEQ ID NO: 53044 - DNA, 1898 bp, Heterodera glycines
atgggcctttattttttgaacgtgctgaagttgagcagcggtcagacaacggtgctgatcaatgtgaagaaaatcattggcgcctttttcgctttgctcggctcggcggtggcggatggttacattggcaaattcaggcttgttctcaaaattttttattcatacatatgtttctaatcatctgaattagacaaatcaaatttacaatttaatggagaacaaattttttcctcgctaatttcaaaataaattcggggaacattaggcgacgcggcactgccgttaggccgcagggagaaaatttttacaatttttaattaattgtttaaattaatgccttcattagagagaaggatcaaaaaagtgaagagtaaatatcgtatactttgtgcaatttttaaattattttccattttcaggacaattctttatggcaccattatttacggagttggcaaaatcattctcagcggtacgattaaaaaacatttcaatttgcttaatcatttttgcttaattagctgtcgcatttgagcctggcggtgaatcggcctttttccatccgtgggtatgccgcaaaatattgtttatatttacaattaggcatcagttgggaattgtcgggctcagggttatttaagcacggctcagaattcttaagtttatcctttttttctggtttttggataggttgaaaaagatttttaaaagagaggattaaattcttgaaaactttttacattttttgttaggcaaaaaatttcaaaaattataattttggacaaaaaaaatttctgagcggatgagaaaaatgtgctcttcggattctttctattcgctaattactgaattccaagccctgtttttaaattttaatttgttataatttgttttttcctttgcactttcccagttggattatattggcattctgatcattttggtcggcaacggtttcatcgtgccgtgcgtcgcttcgtttggcggcgatcagttcgagccgcaccaggagcggatgatctccgtgtttttctccattttttacgctgccattaatgcggggtgagaaaaaaaaagaaaaaaatatatctttaaaaataaaatagtatttttaaaacaatatttctctgtgctctgtgtgacctcgccatttctttaaaaatctatttataaaaaagtttaaactaaattatatttggcagcgctacccgcaattccttcgcctaattaatcaagtcgtaataattgaaaaatgcccaaaatgtgcgactaattgaataatttttttttaaatatattattttcgattgatagtatttttctttttgttttttattgaacaaataataaatgaattaaaaaatgcaaaataaaaataaattttgcataaatattttcattagaagcaatcaaatacattaattcttgtcaatggtaagcatttaaaaactacaaaaatgctcataaaacaaataatcattaaaaaaaattgtttgtttttcagtgcactcatttccacttttttgttgccgattttacgctcaaagccttgccttggccaagattcatgtgagcaagacttatttaataaattaattttattgttaattttgattttgatttctccaggttatcctctgtcatttgccgtttccgctgttttcatgttagtcgcaacgggtaacaaaaattctaaaaattcaatttatttacattttttcagtaattttcttcgctgggagtggacggtaaatggcattaatttttaataaattttaaaatatttatcttttttaggtacaataaaaatccaccaaaaggcaatgtgtttgctgatgtttatgacactgttgtggtagcattctttgacaattaaattaaatattaattaaaataaa

SEQ ID NO: 53045 - DNA, 1035 bp, Heterodera glycines
atgaccatcagccccgcggtgaccaggcttcgtcagcatgcgaccactgccgaaaatgccctggacgaagatgaaatggaccaggaagcgttggacacgctcagacaggagcaccaacacatcactcggattctcactcgcttggaatacgatctcaacgaatggaacgaggtcatacatcgactccaggggcctgcgcgagatgcagaagaagccatcttcacagccttcatcagagatgaccggcatttcacggaatggatggaagatgcccgagaagtgctggcgcatattgaagacgagctcaatggtccgcccgtcgccgcacaagcacatttggccgggggaggacaactgccaggagccagttgcaatgcacatattccgttgcctgcggccaaccagcaatttcagccagtcatagccgctaatgcacaaggagtcgtaaatgtcccaccacctccagccctgaatcagtttggcgcttggcgcgctgccagcctttgcagctaggcttcctcaactaagtcttccgaactttgatggagaccctcttgagtggcccgcattttggcagagtttcgagagtgctgttgaccgcctaccactcgaaccggttgacaagttcaattacttgcatgtatgcctacgaggaaaagcagctcgtgccgtaacctcctatcgtggcggagagaattatgcccatgccgttgctgctctcaaacgacttttcggtgatccatggaaaattgccgaagcgctccaatcagagttgatgaatctacggccagtggatgacgatgtccgatcactccaggattttctggagacatttgaacgagtgtgccggcaactctcaaatttggaaatgcctgacgatagcccattaatgtaccaagtcgtccgtagtaaattgcccgcaactgtgctctcagaattggtcaagatggagcgaagtgccggtgtcaaattgcacaccccacaactcagaactgggcttgccaaagtcataagcatacgtgaagaggttgagcg

SEQ ID NO: 53046 - DNA, 208 bp, Heterodera glycines
ccgtcctgaggctgcgatgaattgctaaattacatcaatttctagcgacgcggtgaagccgcgtccctgagcgcgaagcgctttccccacagcaacagaactcaattgataatgttttgtatgttttaaaataacaaatgagggccatatattaccaagccacgcatgcacaccatagccaactgtccaccctagtttatatatacat

SEQ ID NO: 53047 - DNA, 835 bp, Heterodera glycines
cagaaaaacacgatcctgaggatattgtggaatcggaagaagttcaccatgaagttgaagcagtaccggctccaattccaacagaaagacatgaactggatgacactgtggaaacggaagaagttgtacaagaagttgaagcagtatcggcaccaattccatctgaaagacgggaatctgatgatattgtggaatcagaagaagtccggcatgaaattgaaggagtaccggcatcaattccaacagaaatacatgaatctgatgatattgtggaatcggaagaagttcgccatgaagttgaagcagtaccggcgtcaattccaacagaaagacacgagcctgaggatattgtggaatcggaagaagttcgccatgaagttgaagcagtaccggctccaattccaacagaaagacatgaactggatgacactgtggaaacggaagaagttgtacaagaagttgaagcagtatcggcaccagaaacaatggcatcagaagaatgggctcgaccagcagcagcggaagaagttattgaatttggtgatttgtcaccaaaaagtgatcattttggtgatcagaaggatgaggaggaggcattggtcgagtcggaagacgtaaagccagacgaacaccgagataaagccgttgatgatcattttaaaactgctcaagaaactgatcagcaacgacctgattctttaatggtgcgctgggccggggatgagcagcgcgacgcggaagaaactcgcgcactttacaccgtcacggaacaacaagcaaatcagctggtcgaagaagcgctggagcgagtgctcagcgatgagtcatcgttgcg

SEQ ID NO: 53048 - DNA, 1142 bp, Heterodera glycines
ttaattaatttgagaatttggcatttttttatagctactcccttaacgagtgattaaatgggatgcactacgttccctccctcctcgccttcccgctcccctccgattttttaaatttcaaacttggaaaattttcaaaaaaaattttttttagaaaatttcaagaaataaaaatagcgattttttgataaactttttgaaaacacttttaaggagatacaaaatttaaaaaggcaaaataattagccaattcaaataaataaaatttagaaaaattaatataaattattaaaatttaattacttaccgcaacgatgactcatcgctgagcactcgctccagcgcttcttcgaccagctgatttgcttgttgttccgtgacggtgtaaagtgcgcgagtttcttccgcgtcgcgctgctcatccccggcccagcgcaccattaaagaatcaggtcgttgctgatcagtttcttgagcagttttaaaatgatcatcaacggctttatctcggtgttcgtctggctttacgtcttccgactcgaccaatgcctcctcctcatccttctgatcaccaaaatgatcactttttggtgacaaatcaccaaattcaataacttcttccgctgctgctggtcgagcccattcttctgatgccattgtttctggtgccgatactgcttcaacttcttgtacaacttcttccgtttccacagtgtcatccagttcatgtctttctgttggaattggagccggtactgcttcaacttcatggcgaacttcttccgattccacaatatcctcaggctcgtgtctttctgttggaattgacgccggtactgcttcaacttcatggcgaacttcttccgattccacaatatcatcagattcatgtatttctgttggaattgatgccggtactccttcaatttcatgccggacttcttctgattccacaatatcatcagattcccgtctttcagatggaattggtgccgatactgcttcaacttcttgtacaacttcttccgtttccacagtgtcatccagttcatgtctttctgttggaattggagccggtactgcttcaacttcatggtgaacttcttccgattccacaatatcctcaggatcgtgtttttctg

SEQ ID NO: 53049 - DNA, 948 bp, Heterodera glycines
atgagcgaaatgataactcacaatcagcatcagttgatcaaatgggtgaagaaatggggacagacccaaatgatcaacaaaaaagagaaatcattcgaaaatttgaagtaattaaagaaaaattggatgaattttaggcatatatcgcgaaaaaatatacaaatggaaaaatgaattaaatttaaataaaattaaattcaaaataatgaaacatagttttttatgaagagaaaaagaaagaattcattgaacgatttgatgaatttaaaaggttgtataaaggcaaacaaaaagaatttgcgaaggaattgggcatttctaaagaaacattacgaagatggaaaaaagaattgatgccaaaatatcataaaagtgagagaatttgttttttaattagtttatctttatttttaagtacaagttaaacattcaaatgaggacaaattaaaaaagatgaaaaaatattttaaaatcaaagaaagaaacctaaaaattagcgatgcaaaaattgcaaacataataaaaaaaggagcgaaaatgagagaaaagagaggggaaagaaagcaaaatgttggggtggcacaatctttgactcaaggatgggaggaatgaaaatatcaatgaaaattaatttataaggccaaatagctatgcttacagaagggattgcattttagttacaatatttaacatttttgctgctttgtttcgctgagaaatgcgcgaaaaactcatttttagcctagacattctcattttaatagtattgttcgtaattaggaatcattaattatttttagagatcgacattttgaaaaaagcctggacctggattccatgttggacctggacctggattttctggacaaaaatctaggaaaatccaggtccaggaaaaatccaggctcctcgagacctggatccaggcctggacctggatttttttaa

SEQ ID NO: 53050 - DNA, 1146 bp, Heterodera glycines
atgcacccgagtgagcccggcccttcttcgtccaattccgaaattcacccaacttcccttccgcctccctcaaccaccgcccttaactaccaatgcaattacaataacatcgatgatgctcagcatcgtcagttgcaccgaatttgggagacctcaccggagggcgaactgctgatccttcagaacaccacctcaatcggaagcggagaaacaaaaaatgccgtcccttccgaccactccacggtcattcgtcccatgttcctcgacatttacctgcccaacggtgtgctgctgccaattcaatgcccggcacagagggcactcgcactgctcaagcaggacgtgttcatccaggccaggaagtgagtggaggcggtgattgttggcattgttttaatgggtttcaaattggccattaggtaccctctcgcctatcaacttaacgacatttccaattacattttttccaccattggacttgacggaacgcatgtcgaagttggttggaaaagcgctttctctgagtgctgcgtttattaatttgccattcacttttttaagctttatgacgaacgcaaacccatcgcgagtttgcaatttctgttcctccctttgcttattctgatagagccaagcggaaacaaaacggagaaggaattaaaccaaagcatcggattggtcatgggcatttcgctgaacgaattggaactgtcgatgagcgaagagttgcatcagtacaggcgagaaaaagacccaattagaaaatttaacacccaatttgttaacattcatcaaccattttcagacttcaattgttcgaaacatgtcgtgaggcagaacgacagcggggcacttgctcatttggccattatgcattcccagaaaacccacttttgatggttcaccccgtctcaatgaatggcgcgacggtcgtcagccacggccaattcggtgagcggtgacacaacatgacgaaaccgacatttatgaggtcaattaagtttaggacctatagaaattaacgagacggatttggactatgcccaattcccggaacagcccggagaggttgagcaacgcgcgatggaaaaacttagacggaaagtgcaattctctgatgcatatttggaggcatggcaccattag

SEQ ID NO: 53051 - DNA, 871 bp, Heterodera glycines
atgccgtgttcaaagtgccgaacaaatcacccgcacaaccaactcactcgacatcgaatgagagaatgtcgagcagcagcacattcgggcccaacggcttcagcgttagtgagcgaggctttggaaggacgaaatgcgaaaagtgtgcaggtgaaaacagccctcggcaaagcattgcttttgaggccgaatttggacatgttgggcctcgtggttgaacacattgactaaagggagagagggcgaatagacggacggaaagcattcatttgatcactgatcagaggctaatgaatgctaatgagttttgagtcaaaagttttaaatatttgttagttagcaagtagcaagtaagaaaactgttgtattttgaaattaaaggctgttcaaaactcgtacagaatagccgagacgtctcctcaaagattggtggattgaatcgggcctgttcaaaaagtcaaataaatttagaaaattcataattaattatttataatttaagcaaataaagcttagaattggactcggatcctatcagaattttcacaggattctacttcttactcagcttttttttgaaaagtgcaccaagattaggtagggtccagaaaaaaattcgagaaaggcaaccgaagagctttttttgcatctccagtgttattgtttttaatttttcagcccaggggcgaaaaagcaggattttgtaggggtcaaattttcaaaaaattattgtttcaataggttttggcgggtgccgacaggcgccgtcgggaaaaatttttttgaattttaattgaatatgagaagaaaattagcaaaattttcaaaaattttgctcataggagtccagaaaaatcctgaacattttata

SEQ ID NO: 53052 - DNA, 1218 bp, Heterodera glycines
atgagtgaactcttgcgaatcacaatcgcgccgattgtgaagcgtctcaagttgtacattgagacggctcaggaaaatctgacaaaagatttgactgaggaaatcaaaacagatttgctcgcagagagacaaaatctctgtagagcagtgtcattgttggagaaaaacaatgacaagtgggaggcagtcttccacagagttaaaggtcctgctcttcaggaggaagagcagaactacaaggactacaaacctgaaggaaaagccttcatggaatgggccgaccaagcccgagggcttgtcgataccattgatagggctttaggcctctcagagcaaggggacgatgtcgttcaccatgctcaggttcaacaacctgctcaaaacattcagccacaagttgttgtggctccgcagcgtcatgaagtgatgctgccgcccatttcccttccaaagttctcgggtgagccccgagaatggcctttgttttggaagttgtttgagacttcagttgaaagtcttcaaattgaagacttcaaaaaacacatttatctcttgggatgtcttcccgagaagtcagttgctcgtagagcaattgatttgtacccgccttcagatgaaaactacccgcgagtggtagaaatcctcaagaaaagatttggggatgagaagtcaattgtggagacactccaatcagagttgctccatcttccaaaaccttcagattcggttcaatctctgaggcagttctcagagtccattgaaaggatttgtcagcagctgtcagattttggagaaaatgaacaaaataagttcatggcctccacgataaagtccaaattgccataccatctcctcactcaagtggtggagaaggaaatgcgttcaggtggaacatttgattgttccgacctacacaaggcaaacacttccattgttgaagtgaaggaagaagtacaaagatgtacacaagtcttccgtggggaagaaaaaccccgaaattttcctcctcaaatgcagaggaacaatttccaagggagaggaacaaatttctctcccaaccaatttcgtcagggtcattggcgacccaacaacagaaatgagtctgtggggatgatgtctccccaaatacacagatcatttaacactgtcaatccgagggtgttgtgtccgacaacagtttatatataattttatttggagcaaacaattatcattaaa

SEQ ID NO: 53053 - DNA, 966 bp, Heterodera glycines
atgcattccatgaacatttatatttgcatgacagaaattataaaacacgagcgtcatcgtaacgaaattgaacagcaacgaaacgccagtgaaaatcatcgtaacgaaattgaacaacaacgaaacgccagtgaaaatcatcgtaacgaaattgaacagcaacgaaacgccagtgaaaatcatcgtaacgaaattgaacagcaacgaaacgccagtgaaaatcttcgtaatcaaattgaacaacaacgaaacgccagtgaaaatcatcgtaacgaaattgaacagcaacgaaacgccagtgaaaatcatcgtaacgaaattgaacagcaacgaaacgccagtgaaaatcttcgtaatcaaattgaacgcaaccacaaagatgaaatgaccaaactcatcaatgagctcatcaaccgcattgctgagcttgaagagcaaaatggccagctcaaacaacaagtggcggagcacgagcgccagcaacggggtatctacattaatattgggatggcccattccctgttcattctaggcaaaaactaccagcaaattaatttttaaagcaaaaaagtgtcagacatttcaccaaaataccctttttcagccgctggtcgtggtgcccatcggcacgccccgtacccaataagaggcgataagtcaacaaatgttgaccaaggccaacgcggtacagcatcagccgctcctagtgctgttcattaatttaaaattaccttatttgtacaaatgcaatttccagatattaatttcgaagcacaaccaccgaatgccaccgattccgcacaaccggagttgacggcgccagcaatggcaacaaatgacggcactaattatgattttgccgaactttcaccgacttccgctccgacacagtctttggcacgtaatgacggcacgggtggccaactcatgagccactcttcttctggtctttttaataccttttag

SEQ ID NO: 53054 - DNA, 854 bp, Heterodera glycines
agcaagaatattgctatcttgcctaggcgggattctgacttagaggcgttcagtcataatccctcagatggtagcttcgcaccattggtctatcgaccaagcacatgaaccaaatgtctgaacctgcggttcctctcgtactaagcaggattactatcatagcaacaggtctttagtagggtaaaactaacctgtctcacgacggtctaaacccagctcacgttccctattggtgggtgaacaatccaacgcttggcgaattctgcttcgcaatgataggaagagccgacatcgaaggatcaaaaagcgacgtcgctatggacgcttggccgccacaagccagttatccctgtggtaacttttctgacacctcttgctggaaactttacacattcaaaaggatcgataagccacgctttcgcggtccgtattcgtactgaaaatcaggatcaagtaagcatttgcctttttgctctacgagaggtttccgtcctctctgagcttgccttaggacacctgcgttacgctttgacagatgtaccgccccagtcaaactccccgcctgacactgtcatcggcgcgggtcgccgggccaccgggtggcccgacttaacaccaaaatggacaccctttcgggcgcactcccgttttaccgattaagtaaggaatcgatgaaagtagtggtatttcactggcgccttgcggctcccacttatgctacacctctcatgattcttcacaaagtcagactagagtcaagctcaacagggtcttctttccccgctaaatttgccaagcccgttcccttggctgtggtttcgctagatagtagatagggacagtgggaatctcgt

SEQ ID NO: 53055 - DNA, 226 bp, Heterodera glycines
atggcatgcggcgtattggacaaattgcctgagataattgggcatcgaagcgtgctcagcacttggtaccgggttggcatggctcaactgttcgccaaacgcttgttggttcaaatgccacgctgtggaccacgagacacgccatggctgttctgtttgctgtgccggtcgagcgcggaacggacggcactccgcgctcacttggccatgaatggcattgagacga

SEQ ID NO: 53056 - DNA, 1299 bp, Heterodera glycines
atgacctcaaaatgtataaactgtaagctccttgtgtacccatggtttgccaaactttgcagatgtgaaccaacgcaagagtctcgtgcaagtacaaatccaccatcgccagcatggacaatcggaaaaaggatttatttgttttggtaggacttggatttaattatttaattaatatttaagaattatttgattttttttttattaaaccttatttgagtttaagctagcgcaagtgtaatcaccaaatgtaccgagcaatttttcttcaccaactgatgatagtgtggtaatgccaacacattccgagatgtcttctatctaatttattatttttaatgtttaaaatttgaaaaaaattttgcatgggtctaagattataattgaaagtgtgctaaaccgaacccgaatttctggatccaggaagactgaaaatgggagttctcgtctttattttactaaaatcccggactcggatcaggaataattcttgtatctaaaaactctaatattcacgaattccctacgggctaaatttatgtttgaaaatattactaatatccatccatgctttttgcatccggccgcaattaattcaatgtcaccagctgggcatccatatgaatgtgtgacaatcactgctctgtacaaatagccaaaataattatttaataattatttattattaattatttattgttttaattatcactgaaaataatcggtcgtaattaatgataattctgattcagctttataaattttatatttgtttaaaattaaatgttttatgaaaaagtttattttgataacaaaaaatgcataattaaaggggcataaattaaaatggaaaattcattttccaatttgtaccctccaaaatcattgaaaatctacaaaattcttttgcaatttttctctcaatttttgaattgtttttcacttgatattttcctttttcttctttttttaattgcttcaaatgttctaattattctcttttttgttcagtatttggtcccatttttgtgttttgatcacttttggtaatattttgatcattttgcatttgatcaattaattcggttccattttctgtattttctttgccgaatattttattaaaatttggtcggattttgcaggattcaatttcaaaagcaaagaaaatattgtataaaaaatattatatgtcataaattcattttggaatatcgaatttattgcattaaatgaatttgtttaattttttgtccgctttttaatactaatattaattttatttgtattttctcttca

SEQ ID NO: 53057 - DNA, 76 bp, Heterodera glycines; identical to SEQ ID NO: 51705

SEQ ID NO: 53058 - DNA, 702 bp, Heterodera glycines
ttatcagacagaggcaaccgaccgatggtttaagggatggcaggagcagtgctggacaagcagaagtccaaatacaacgagttagaagggcaatatctgctcgagtggataaacgaaaaggtgaaagactcgcagatttccactgccggacagcgcacgaatttttgggagcaattgaaagatgggactttgctgtgcaggtgaatggaatggcagtgaccagcggacattgaaaatttggcaggtttttgaatgcagtggagcccggaattgtgaagaaagttatgaagccgatttcaaatttcaagtgattttgctggtcatttccctccctttgctcaattccctcccgttcagttgtatggagaacatcaaccaatttgtcagctttctctttatttatatttctttaacccataattcaattaatgggtcggcataagttttgtcctattttgagagaggcttttttcttaggtaagcgaggcccgtaaaatgggagtcatcgaccaagagactttccaatccgtggatttgcttgaaggtcgggaccttttctctgtttgtgtgaccctccaatcgctggccagaaaggtatgaaaaaaaaaaattgaatttctgctgaaatgaacgtttcagatggaaaaatcacatggaattgcgcttccgaagcaagtgccaaaggataaaatatgaagggaa

SEQ ID NO: 53059 - DNA, 988 bp, Heterodera glycines
  unsure (1)..(988): unsure at all n locations
ggggggggaaagcatcgaataaatgccaaagccattggtcgaatgaatggcatccaaatgacccggcacttacggtcagaaacattgttcagattgccgcatgtgcaggatgcaatcagatggacgcgtggggcacaattgtgacgggggtcggcgccgggcttatttacatggcactttcaggacttatgctaaggcaagtaaatgcaaaaacatcaaaataatgactttttatatctctttgctccgtctctctctctctctctcttttctccctctctctttccctttctctcattatctctcttttttctcttgagtttctctctctcatttttacactttgtctcttttttctttcatttgtccgctcagattgcgcatcgatgatccattggacgcgttcgcgtnccattcgggaggcggtctctggggattggtttccgtctgtttggtcagcacttccnctggccgtggcgtcgtgccgtctttggccaccggcgatggattggccatcgttcgttctctggcggtaatcgaatgcttttcccccgcctaattaccctccgccgatgaagcaactcggctggaacattctctcctccttggccattatcgtttggtcctccgccgtcgttctccccgtctttggactcctcaaaataattggcaaatttcgagttgcgcccgaaattgagcagaagggaatcgacatttggaagcacggggaagaagcgtatccgctcgtggcttatgggcacggatgggacgaagcagaaaaagtaaaacaaaaaaagagaaacgaattgcgtgcggaggaattttaaggatctggaagaagaaattgcatggcatcccatcgcgacaatttaccacgacccaaacaaatatagggagacggacggaagccgaaaggtgagcgaaaggagggaaatggggacaaaatgaacggaaagcgattaattggtcttacagaggaccaatggaa

SEQ ID NO: 53060 - DNA, 203 bp, Heterodera glycines
tcgacctttaccaagtgctgatgcccctcatcggtggaggcgttggccgtgactgtattgtgcacgtggacatcgacgtggactcggagatgcgctacccgaagggggcggcacgcatttgcttcagtcgctacgacgcattcgtgacggcaattaggaagcaattcgtcaacattccggacggagacggaggcgtgaaacgc

SEQ ID NO: 53061 - DNA, 394 bp, Heterodera glycines
atgcccaatctttgtattgttaaatctaaccgcaggggtcgttttgtgctgatttcgaattctgatgaaagcgacaaggagaactgcccctctacctccactgccatcccacaaaataatgaagttgtcaaatggctggtgttggcggacaaaaagtcgacgattcgttgcagcgaatattcgcgaaaaacagcttggggaccgtgtgacggagccgacggaccggtggaaggctgcaaagaaaattggaagaaatggggccgggtccaatttctgcgagcggtgagaccaattgtattaggaatgtgacaatgaaacatgaaatgaaagaaattgatttcaggttcgttccaaatgcagtgattactttggggagaagacgaactctgtttga

SEQ ID NO: 53062 - DNA, 142 bp, Heterodera glycines
atggtaaaaacaacaaaactttcacatttgaaaaagtcgcgcaaacgactaaaacccttaactggtcaagcaacttcatcattagcatcttcatcatcgactatttctacaacttcagctcacaaacagccgtttgactgtg

SEQ ID NO: 53063 - DNA, 1997 bp, Heterodera glycines
atgaacaaaaaggcggttttttacaattattcgttctactcgagggttatcggggccgctgatcacgaatatgacatcaggttatcgtatgacataatctaatctatgattttttgtcaagtctatgatttacctttttaaaattttgaggtgtaggcccaaaacctacaaataccggaaagtgttatattaaaaaaccccggactgtcgtccaattgtcccccttttcgtaaatgccacagtttttgaaaattagtaaagtttcgaatgccgtttttcgcggtggaattcgttggttttatgctaccccatgaaaaacacttacaattagtaatttcataagggaatagtaaaatataaaatggtaatccgcactcattaaagcccttgaaattttcattttctttggaaaatccgaaataaaaaaaaaatttttttttctcacaaaggtccgccaacatttcaagcagaattcgcggattttcttcgccaaaaacaatttgatggccgtggcgttgggcaaatcggcacaggacgaacaggttggagagggaaaccaacctaaaaactgtgacttttacaagccatggcaaaacgctcaatttcaacccaaccccggacacactgacaaaaaaaaaattccaaaattttttggtttgaacaactcataatttgggagtcaattttatgcagccataaaaggcttttattggcagattttttttttttttggtttatctgacgctgacccacaaaatgtccagcccacgaaatgtccaagtctcgaatttgagttttttattattcagatgggcctaaggttaggcaaggggtaatataaagggtatattcgtattcagcgaccccgaaaaccctaaaaatcctaaattagactcattttgtttttataaattttgaaaaattttgacacatgccagaaaaaattaattagcattttgtttaaaattcgtgcctctcccgccctccctctaaactaatggtcgtgcatctgtttaatgccaaaatttttcaaaataaattacgcaaaaaattcccactttctcttaaggacattttcatattgagcaataaattgaaagttgtaacaaaaagagtgatttttgaatgataaaaaaaaataatagcaattttcagaaatttcctcccccccccccccttcggaagtaatttaaatttaaaaaaaaataacgcactccccaatttaggcaaacgaattgcacaaagtgagcgcacttttgcggggccaaagtggactgatgttcaccaatgcgaaggcaaacgaagtgcaaaggtcggcgggggacaattccaattttttcgtaaatttatttttggtcgttcgggagcacattttgagtggaaattcgaggatggcacgaattcgaagccctttcatttttcgtttttttttcgtaaatttatttctttccttttttggcgggtgctcatttggtggaaaatttttttaaaggttctacgaattcgaagcacctcccttttttccattttgtttgcatttgccgtcccaatttttaaaacagaaaattttttcacttttttttttactttgcgacgctttttttaattcattttttttaatttcaaaggcacttacacagaagagacagtaaatttatagtcagtcgtatgtcctcataattctatgattattcatcttgtagcaaaatttaaaaaatttctgagtaaaaaattttcaaattttttagttttccattttcgttccggcgaatggaatgcttttgggcccaaaaagcggcaaaaattaaaaaaatcttataaattaaattttctaaggtttttcgccgagcacaccgaggctgagtttgcccaggcgggcgccgtcgcctcggcggacatttcgctgccggccgggccaatgccggcggaattgcacttgcacggcgccatggaaccgcagctgcgcaagttgggcatgcccacacggctggaaaatg

SEQ ID NO: 53064 - DNA, 88 bp, Heterodera glycines
atgaaaggaccatttgattggtacattgtatcaaaaatgcaaaaaccgataatcgtaaatataattgctctcgctaatctcggtaccg

SEQ ID NO: 53065 - DNA, 705 bp, Heterodera glycines
atgtccgtcattgcttgccatgaattgatgcacgcgcttggctttcatcatgagcaaagccgaagtgatgcccggaattacatcattttatgggaaaaggacggagtaattaacaaatattttcaataatttttcatctggttctttatatgtaaagcaatcggaaattgacccatacacccaaaactttggcttcccttacgatttcggttcggtaatgcattatccatctgggggcgatcatgaagagtaagaaaaaatttaattttaatgaagtaaaattggaattaaagaggcttatacgacctgatcactttgccacggttttaccaacaaacgattggccaaaatgaacgaatctctttcaaagacgcggccataattaaccaaatttattgcaaaggcacataaatttaaataaatttcagaaaattatcatttgttcagactcatgcaaaggccatgaggacaagtgccaaaacgggggctatttgaatccgaatgattgcacaaaatgccattgtccggacggatacggtggcaaatactgtaaagaactcgaagagagtgagcaattaatcaattcaattaaaaataaattataaataaataaatttgaagatttgaattgcgaggatttgagtggaattccgagagaattggtggccaatcattcagcagtgttattgaagacgaaggccaaat

SEQ ID NO: 53066 - DNA, 645 bp, Heterodera glycines
atggggcaaaggaaggaagtagggaagggaagggaagggaaaggaagggaagggaaaggaaaggaagggaaaggaagggaagggaaaggaagggaaaggaagggaagggaatggaagggaagggaaaggaaaggaagggaagggaatggaagggaagggaaaggaaaggaaaggaagggaatggaagggaaaggaagggaaagaaaaggaagggaagggaagggaatggaagggaagggaaaggaaaggaagggaaagaaaaggaagggaatggaaaggaagggaaaggaaaggaagggaaaggaagggaagggaagggaagggaagggaatggaaaggaagggaaaggaaaggaagggaaagggaagggaaaggaagggaagggaaaaaaaagaaaaggaagggaagggaatggaaaggaagggaaaggaaaggaagggaagggaagggaaaggaaaggaaaggaagggaaaggaagggaaaggaaaggaagggaagggaagggaaaggaaaggaagggaaaggaagggaacggaaaggaagggaaaggaaaggaagggaagggaagggaagggaagggaaaggaaaggaagggaatggaagggaagggaaggagcgagtttcaaaacaacccgcctgtagaga

SEQ ID NO: 53067 - DNA, 980 bp, Heterodera glycines
atgaaaatggaaatggaggtggcggtgtgccgcaaccgccaagcgcaggaggaggtggcacttgcacggacaaaggcaccggatgtgagccaggcttttgtagcagcacagactttgctcgggcgcactgtgccggcacatgcaaacacgttttgcaagagtgcagtcatttggcttcggtgcccgacccaggtgggtgatgaaattttaagcatagaaatctggtttctgttatatttttttgtccccgaaaagcaaattcaaaaacaaaaaagaataaatatatatatatatatatgtcgagaattgcgattgagggacagaaaagtctcgaacttggtggtattttacaaaaatattaattaattaattaatttttgacatagtaatgttcttgcctattcagccaaatcatgcaccgaaacggccgagaactgtggcactataccggacatttgcaccgtatgttttttgtcgtttttttaatttattggtttagtcagctagactatgttccctggtctctcttgaaaattaaaaaaacgacaaaatctcgcccggtgggactcgaacccacggcctttcctcaccttggaatgctctaacagactgagctacgggcgctcccttttttaggatgacactttggccgtttgtggttgtgctcacacgtgcaatcgttgccatcaccaggcttcatatatggcacaaggaaggtgcaagaatgtgcagtaatgggatcaattggcacacagattacagtaatggtctgaaagcattggccctatcgtttcccatcatgtaattctaccggacatacaacaaaaataattcatttttaaatctatttttctccaagcttgtcattagggtgtttatttataaagacatattttataaaatatgaaaagatttctaagtaacagaatcatataaaattcaagcccagaagcttattaaaaggcgattagacattaaca

SEQ ID NO: 53068 - DNA, 925 bp, Heterodera glycines
atgaatattggccccgtatttatttcaactgaagtttctttccctctaagagacaccacaggaaccgtcatgtcaggggttagtgtgcacccactgctctattaataaaaaattaaacatattgaacattaaaggcataatgaataccccttaattctccgctgactgtaaaaaatggctgcatattggagcaatgttcttgaaaaatattttgtatttaaaaaaaatttaaatatacccaatgccgttgcatctgcattcgtagtatttaattgtagggaaatatacccaatgccgttgaatctgcattcgtagtatttaattgtagggaaatatacccaatgccgttgcatctgcattcgtagtatttaattgtagggaaatatacccaatgccgttgcatctgcattcgtagtattgtagggaattattgttcggcagaagtcgacacattgagaaggaacaaatttcaataaatttatttaattaattttattaaaattctactcaaaaccattggttgaaaaaattaaaaacgcaacaattcgtctcttctcaaacatgtttttatggtaattaatataaaatttttggtctttcaggtgtacgtccttcaattttttatttttgcgaatttagccttggggcatatttttataacctttgatggaaacgcggaatcgtttttttgtattaaactttagtctggtatttattatgtgacacaacaaacatattattttttgtttttatacgcgtcaaacgtccttgagacattgcatgttccttaaaaattgttcatcaaattatttactaagttatcctaatgcaaaggtatgataattaatactataacaaatatgataattattttgattaaaataattatggaatttatattaaaacacaattgaaacgtaataaa

SEQ ID NO: 53069 - DNA, 1556 bp, Heterodera glycines
atgagtcatatttattctacattgggtttgaacaaacattcaacatccgctgaaattaactccgcatataaacgtcttgcacttcaaaatcacccggataaggggggcaatcccgaacaatttaaatcaataaaagatgctttcgaattactcactgacaaaaaagcccgtgattttttggacaccttcggtgaagcatcggctagggcatatttatggtcccaaacaaatattattgaattctcatcggactccgacacggagagtaatataccgggaaattctgactacaacaccaattttgcgggccgaacaccaccatctcggtccgaaaactggagcaattcttcatcagcgaattgtgaagctgcgaatcaaccggaatttgactttccgagtcccgacaacaacgattttctcgaccaactaataagtgggattgtgcattcagacacggaagattatcaacaaccgcatcagcaacaacaaggtcatcttcataatcatcatcattcccatcgtattttgttatagatggagaatcaaatttcactgggaatgatggacaacacagccaacagcaagaccaagaggaaccaaccatccgaaatctacgaccgcgtaagccgcaacaacaaaaagaatataaaaaaaccggggttcgagcaagacgccagcgaaaacatcatcgtcgtggaacggataaaagcgttagggtaataaatacaaaaataaatcctttgaacttttaaagattgacgcaaacccacgtccaaaaaatgtacaagcggacaaaaaccagaaatattgtgtaaaaaatatcttggcattatttacaacgcttgataaacacggtcacacaaggcacgcattttacatcgattggaaaggtattaaaatgattatttttaaaaaattaatatttagaaattaaggtcatgcagatcgtgaaagctggaccttgtctgaggatttggacgcgctagacactgcaatggattttgcagcaaatgcgcatcaaaatgccacagtggaggccttaaatggcctaagcgtgccccaatttgtgctgtcaaggctcaccgcaaatcccgaatttatcaaatgtttgttaataaaattaaaaattaaaatccaaattttagtgtgccgacgccttaataccaaaattgcgccacctgctcctaagaatattctattctcatcgaattcttcagttcgccaaaaaaataaggtaaggaaatatgaccttagggattgttttaaaaatgcttaaaatagataaggtatacttttctctaaaagttcgggtttatttaaaatttatttacaaacaataaataaagattttataagataatttcatgatcaattcatattcttcttttcatctaatgcttatttaattcttaaggccatcaatcagcttgattcttttattgttgagtgcatgactaatgctttatggcaaggagaattagatgattcagatgatgaataatatatgttttaatcgatatcaacaatttagtgttttctggtaattcttcaataaa

SEQ ID NO: 53070 - DNA, 531 bp, Heterodera glycines
atgccggccgtaaaaatgaatttaaattaacacggacaaattatacttttgcgaataattgtattttttattaattttattaaattttattataatatttttagtttttaataattaattaattaatttatttatctaatatgtattaaaagagatatgatatggatgtatttgtagttagggactgagctaaatttataactcagttaatccttcgtacaaacacgacgctctaaaggtctgagctatttaataataactcagattttcttaagagaaataaaagacaaataaattattttttattaattagtattaatttaaaaaataaaaatatacttttcttaattaacattaaattagtatttaataaattcattttatttaatcaaataatattttttagctgatcagagttcgtttcagcgttaaacgatttatcatgttttttcgacccgattcattgcttaaataatgaatccaagccttgccatttgggtggtcttgtttatttagcctttctagaactca

SEQ ID NO: 53071 - DNA, 2293 bp, Heterodera glycines
atgctcgcctccgtctctaacaatgcgtggccggccacctgcggtgctaccaaaacagaaacatgtaaaaattaattatgtttttaattaaatttattttatttactaatgtttattaatttatattcatcattgtttagctttttatgtgcgaaggcaaacgtcgctcctttgttgcatttttttaaaatttggccctgtgtacgcataaccgaaaagtacccaaaaaaactccatcatcatgaattgtgcagaataagatcataatggaaaataatcttatgttagcgcccaaacagtaattaaattcgtaatttaattggtgttttatgaatttcttcattattatcttgaaaatcattcttatggaaaataatcttatggtttttgcattttttttattttaatgattaaaaataaaaaaatgaattgtttgaaattgcaaaattagttgttaagatttgcatcatccaacttaatggcaaacaaataaaatgtcatatttaagttgagaattttgtaataattttaactcaaaaatatttttctaaaaatcagcgcctaaaaaatcggtagaagcaattgaaaagaaaattattaaaccaaaaataaatttggaaaatgaattgggtggacaaaacgccacagtttcaaacatttttcaaatgccctctcaacgaatatttgcccgctgttgtggcttatcacggcttttatcacaaagtgcaatcgaaaacaatcgcaaaaattgcactgaatttgattttgccgttttgacctcacaaaattggtccataaaaaagcagcagaattctaatgagccaatttttgatggcattttgacatttgatcatttttcggtgattcgccaaaatgaatttgaatttgacgacgaacaattggcgggaaatttgaaaattgaatttaacgaaatggtggaaaaggtcaaagacccaagggaaaggacactcccatcagaatagagacaaaaaaagcagatgaattggctgaaagatgtgctgtttatgagcccagaacaaatcataacccatttaattatccaaatcaaataaatattcataaattaaataaaattcaggataacagaagcacaacattggggaaagacttggtgtgattcgtcggtttgctgctctaccgaatgttgttcaacaacaaacatcccatggacaattgggagccaaagcgccgtttggacatggaatttatggcaagatgggcttctccaagttgaaccagttcaatggcatgtacaaaacggacgattttgtgccgggagactttggcatcgttccattgaagccgaaaactcggtggatttggatgccggagagtgggcgagacgaaactggggaaatggcactggtggaggaacggattggcatggaacaggtggctgccaattaaaatgtctaaatggtgtaattaattaatgattattatttaggattatatcgtcaaattgagaagcattgtcagtgaatttctgcagaataaccaaaaaatgcaattcaattactcaagatttgctgctgatgaagagaataatgcacctcagaaaaaattgtttgatctgaccaaagtaattagaattaattattcaattatttatttaaattaatttcaccttaaaatactaaaactaactaaaaaattattcgtttgaaagaagaaaaaaaaataatgcaaaaatgaaagcagaaaagcataaaaaaatgaactaaaagacattaaaaaatcatttttactttttactcagtgttgaaaaatgagcaaaattgcactccaaatcggtgttggtgtctttaatgagatttaaatttttttaatttcagaattctgttagcttttacttttatgaaaaacaattcatttattgatgaatttaactgcaatttttaaaatttaccatttatgattcccgaaaatttgtaaaaaacatttccatttatttttctaatttttaaaatagtattcaaattaatttacttgataaattaaaaaagaacttttacacgaaaatccctgaattttcacgaatatttaagctgtaccactatgttgtcgatcaaacattcccaaattttccaatgcgtaaacatgccgactcttgaggatttctgtcagcagcagatgacaaatctataaaaaacaaaatctgaaacaaataggaaattttttcaaacagcaaccgtcaagaataataattttcattccctccggctgggcgagttataaataagaaattaattacaacgacgaggaaaataaa

SEQ ID NO: 53072 - DNA, 780 bp, Heterodera glycines
agcagtgctggttcgtttcatcacggcaccgaaccttttggctagtcagcaatcgttgcttacttgccagatcggacgggtgcgcatgattccactgttccaagcaccccaccaaaagcaaaacgatataaccaaaatataaggaaaaattttttaaaaaattttttctccatcttcctttttgatactaaagcatcagagtgctaaaattaagttgtaaataaaatttggtgcgctttagagcactttctgaaaaaaatatttatgaaacaaaaaaatcgattttttcaagtgtccgtttggggtactcaaacatttatggggagcaaaaatccaacgcagaattaaagtacaggctatagggaagctattcccgaaggattcggtctccccataaatctgggcgcatcggttcggggggactgccccgaaaacaaaaaaatcgattttttcaagtgtccgtttggggtactcaaacaattatggggagcaaaaatccaacgcagaattaaagtacaggctatagggaagctattcccgaaggattcggtctccccataaatctgggcgcatcggttcggggggactgccccgaaaacaaaaaaatcgattttttcaagtgtccgtttggggtactcaaacaattatggggagcaaaaatccaacgcagaattaaagtacaggctatagggaagctattccggaaggattcggtctccccataaatctgggcgcatcggttcggggggactgccccgaaaacaaaaaaatcgatttttt

SEQ ID NO: 53073 - DNA, 916 bp, Heterodera glycines
atggggatggcactgttgatcatgctcatcaaccttgccggaacgatcagcggccaaccacccattcgagcatcgggaatggacccgaaccttccatttcgagagggcccaagagtcccatgcaccaaggagtgtgcagaacgagttcaacacaacgaggcgcaatgccaatcggaaaacgggttcgaaaacccgttgctacaactcatggacacacgcttcggagcttcaactgtcaaggggcgccgcgggcaatgtcgccaattttttcattggcgacgagaaggcgggtcaatccccgcctattgcacaaatgaacgggacgggactcaatcgaagcaaaaagaatgagggatgttcttggagaagatcggggcgagtcccgattcatcaattcattcaaaattgatcattcctaatttttgccccttttccatccaatttctcatatgcatttctccatttcgtaccattcacattttgcccgttcctttgtcccatttttgccccatcgcatcccttcacaattcaaatcttttctcatcggttggctcatcttcggccaactttgtgctcagcaaatttcctttcacaatttctcacttttcacatctgccaattcacattcaatttttgtgcacccatttcctttgttcgcaattcgcttctagaattttctgtccattttttgtccctctcacaatttgtccacgtgcattgccttttgcccgcccccttcgaaaattgtctatttaagcgcccccggccaaggggtcgctctcctctcttctcttctcttgcttccactccccttcgcttcatattcggtctgcctgtgaccaattcctccaattcccccgtcccatcgcccaattcgatcaattcgtcgcttttattcattattcgttttgcttta

SEQ ID NO: 53074 - DNA, 3146 bp, Heterodera glycines
cagtcaatctttacaaaattgatcacttgcactgtgaacaaagccaacaaacaccatggcacaacaaatgatgactttttgtccaaattgcattttgacgttttggcacaaatctgtgaagcggatgatcaaatgaaagaaaatgtgttgaaaaacagtaagccgcaaaaaatttaaaaataaaaatttagtaatttagaaattcatttgaaggattttttaaacgcaaattggtacaaaaaatttttggatttacttgagaaggtaagaattattttttcttcatttgttaatttgttgttacattttggcaaatgctttttccaaaaatacttattttgaatagcaacgaaaatgccaatagaaaagtctaaattttcgcgatttatgttaaaacgttatggccaaaaactatcaaaaaaattataaaaatcctcaaacgtaataaagaataaaaaaatttatcttttttatttaggaggatgaatatttttctgtatccgaaagttttaacgaatctgacggttcagaaaatgaaatatttgatgacccatcagaaacaatcattgaggaaaatgaaaattcaaagaatttaatggaaaaacattcaattaaaaatatgaattttgaatttggtgaaaaaagtgcagaaaaatgtgaaaacaaaaatttcaaaaacaatttaacaacaacaaaaatggatgaaaaaaacagtgacgacgaatttttggcattaaatacagaaaatgaagaacaatggacaaagaaaaaagagcagcagaacaaaaaagcaaaaaatattaatgtaagaaaaaataaaaataataataattcggagaaagaaatgacggaacaaaaaaggaaaggaaaaaatggcaaaaataaattggaagaaaatgatgagaatttaaatttaaataaaaaaaattatggtaaaaagaaaatgatggaaaattttaatgctgaaaatgaacagttaattgagaagaaaaatggaaaaatttgcaagaaaatttttagtgaaattggcgtcaataaattaggaggcaatatttttttcaatttatttttcgtttttttaaattttttattttgtttcaattttaggtataaatttttcaattattaacgctaaattttcttggggtttttgggaaagaaattgtcaaaataaatttttgtttttgcagaaaataaaagtgtcgcttatttttatatttttaacgcttattgcttttttcaatgatttaaaattaaaataatttttattttttaaagaaacatattttaatttatttttttagatttgctggatgaatcaattttcaaaaagatttttcaaaattttttggaaaaacattgggaacctcaaagcatggagaagcaatgcttggaatatttaggcacaattgcattatttgccagagcaattcaagcaaaaatgaattttattgaacaaatgtcgaaacattgggcaaataaatcggtgaatggaattgccaaaaaatgggaacattttatttttaatgaagaaattatattcgaattacaacagcaaaatcaatttgtacaaatcaaattgtattttctgcacaatcagcttgatgaatatgcttttgagtaaatatattactaattcacaaattaattcataaatttgttgcacataaaaaaatggcatttttcgtttccttttagataatagttttgaaattttaatttaataagcacctgtaacacgaaatttgatattttttaacaattaattagcgggaaaatttttaatttgaaagcgtcttttgagggttttcataaagcatcgatgaagaattgttatttattatttgaaactcattatgaaaatatatttaaaaaaattaatttagtctaatatttgtttcaggcaattaataaattttcttgaaaaattttttcatttttcattttgttgggtagggcggggaattcctcccaatttcccccttgacttcgggcctgattataataatttattttagtctattctaaatttttatttatttatttattttattcaggcaatcaataaattttcttgaaaattttattcaaataattgatgaaaatgagacagacaaaatcaaaaattatgggaattattcacctcaatcaccaaataatcaccaaacaacccaatttggcacatataattctgatgaattcaatgcaatttttgccacattggaaatgcatgaatgttcgatgctaattgcaaaaggagtgatcaattttgaaatgatcaaacaaataaaattggcccattatttaaacggtgaaacattttcaaatgcgggaaatccgccgtcaaaaaaatgcttatgtgttgatgctaaaattgagcagcaatatgtcgacaagctaaagaaaatgctaaatcagaaaaaattgggtattttttttaagtttcactaatttaatgttttttgatagttattcaaaatcaaaatttttatattataacttttgtggcaaataattgccaattatgtaattactcgaaactttttattattcatttttaaagtatctatttttagatttatatttacaaacccaaaatttttctgatcccgaatttggtcattacagtatgataagaacaaagatgaaaaatcgcgaaatagaaaaacaaatttctaaggaggttaatttaaattgaaaataataatttttaaatatttgcatttttagattcaaaattttgtgtcacccaaaattaatccgattaaaaaagaagcaataaatatattaaaactaaatatcaaaacatcagtagagaagtggacagctcaatttacagcaattagtaataattattaattaaaattaactaattgatatttcaatttattatttgttttagaacctcgattgcttgttggtggttcacttttaatgaatggctttgtggatggatctgacatggatttgctctgtgttttaccagacgaaattaaatttgaccaattatttaatgaagaggataattgcttatacaaatttcttaaaaaagtaaatttaaaaaaatattataaaaacactacagaaataaattaatttaaatttttaaatatattggctaaaaataatttgaaaattatatttaa

SEQ ID NO: 53075 - DNA, 1138 bp, Heterodera glycines
atggggcagaagggtcgtgtaagtagttaacatcccgtacttgtcgtcagtgcgcgaaatgtttttcgcgcacaaacgccagggtgtcgggcggttttgtgtttgaagttgccgcttttggcatgtgttcgggattggtgggggcgggattctctttgaaggggccgacatcccgagggtattggcgggtttcgggaagtgattgattgattgatttatggtcgggagagggggagggggtgctaattgcgcgaaattttgattgatttatggactcgaaaaagggagggtggtggtagggggaatggggaatgcagcgcgagttatcgcaatgcgcgaaaacaatagggaagaaattaaagagggggaggggggggggattaattaatgaaatttgatggtgactgtacgatggattagaaagaatggaaataagcaattctctcattttttttgctcaaacaatttctttttctggggggggggatagattttgaggtcaatgagtgaccattggacgcctttaactattctccaattgattttcgttgcgtaatgccgtccaatggtcatccattggagtcaaaaatctcaccaaaaactttatttatttttttgcttcttttttgttttttgattctcacataattaattgaaataaaaaatttttttcttttacagacaaattgtcggtggcttcaaaacggacctgcgcttccaaccaaatgcgacaacaattttttctacaacgactggggcgggaaattacaccgccaggcgatttgccagcaccaaaaagaaggaagacaacggcatcgcaacggggctgttccgattacatctgcattggtctcagaccaaattgttcaacgaagatcggcaattgtataataaactttacgacaaccgcaccaccgaatatgacgacatcgaaccaacaaatctgcggcgccgttgtccaacatgtcaccaaacataccgatttgtcctggcccgcttctcttccttccgcttccaaacaccttggttgccgaagatgcagaaacaccagtcccgaaaagccggctggattttgttggatgtgtcttttttggtgggttcgattattattattatttgtttttgaaaatttcatgaa

SEQ ID NO: 53076 - DNA, 1186 bp, Heterodera glycines
atgtttcaagaattcattgcaatttgcttggtgaagaacccagatgatcgggcagatgccgattcccttttaaaggttcgagtaagaaagacttttctagcgagttttacattttagcacctatttatccaaagcgctaaaggcccaaaagttgtgcgggaaatgatagcaaatgctcaggacattgcggcacagtatttgctgcaaaacgcggtgagcatttgtatattgtaaatttgacgagaaaagattttcagcattatgccaaggcagctaaaggcattgattattacgcgcaactgaacgaggcggcggagggccaaattgagcgggacgcggaggagagaacaatttcgacaaagacgggcctaatgacttatgacggagggacactaatccaacacggagaacagtcgctgaaggcaacggcaggtcgaataacgaataaaataaaaccaaaaaggcaattcagaaaattgtggggtttcggtctctcaaaaggcattccatccgtcggcactctctcagccaattgatgacaatgttagtccaatgaaatcgcattcaaacagaagttaaatgttcattcaggcagaaatgactcaaacggaagccgcaaaaatgaacgttttgtcggcggaattgtcaatggttaaattaacggtggaccaaaagataccaaacactttggacagtcgtcacggagacggcacagttgaattttgggaccagtcgccaagcgcaacatgggaaacgagcggttataacagtgccatggacacggcgtttagacgggcgatgaacggccaaagcgactacagttttgtgagtgttcattatttgggcgggaggggttaatggacgagtttactattgtggggtaactttttaaaaggaagcccccctttccctgagaaagaaaaaacgcgtaattagcaacccgaaacctctgggaatactatgtttattagtttcaaaacaaaattgtcgatgatattaccatctttttatgattgtaaaatttaagctgagggacctttcaacagaagaattggtgaaacggaaggagattttggagaaagagatggagacagaactgaacgagttgcaagcacggtaccacgccaaacgcaaggcgattctcgacgcgatagcactcaaaaggaatgggactgttcagttctga

SEQ ID NO: 53077 - DNA, 191 bp, Heterodera glycines
ctttgcaattgattgaaattaattagaatagtccatgctttttgttttcgtcttgctcattcacatcgcgtgtgctaattaataagtgagttggatcgctagatatgcttcatttatttcacaccattgttttatgtattactaataaatgcatttaaataatgaaaaataaatttgtacaataatttaaa

SEQ ID NO: 53078 - DNA, 159 bp, Heterodera glycines
tcttcaaggatctcacttgaatatttgctactaccaccaagatctgcactggtggaagctccggccgggcccacgcccaaagccttcaacgcaaccaccacgaccctcctacacgtcatggccagactacgcgacaagcacgtgtacaagccaatgacg

SEQ ID NO: 53079 - DNA, 5069 bp, Heterodera glycines
atgtcggctaaagcagtgaatgaatattcgggcaaagagcttctttaccgctcactgaaccatgtccaagcactcgtcaagccaaatgctgtccaattggatgagaacacaaatttccaagatgccataattaattgcgattggatcagcaaagagggggtgggcacaacataaaacgattggaattaatttatatattttattattgatgtaattgttaaacaaactaaaagtctttaattagaggcctattttcgaatttttcccattaaattagactttggtttagcaaggtgttctcaagcccgatcaattgatcaagcgcaggggaaagcacggattagtcaaaatcggaacgagcgacgaactcgccaaatggttcgatgaaaaaaaggggcaaaatgttcaggtaagggaaatggacacgtgaaaagaggttttgcccttaaattttcagatcggaaagaccacggggcgtctttcgaaattcattttggagccgctttgcaaacacggggccaaagatgagctttacatcgccatttatagcaaaatgaatgaggatgtgattctgttttacgaggagggcggcgttgaggttggggacgtcgacgccaaggtgttaaatgcgaagccaaacttggtaaaattctgaactatttgaaggcacgtcaattggtggtgcccgttcaacttaaagacgaagaaatggcacttggagagcagtccatcgaccaactaattgggagcaaagtcgaagagacgaagaaaaggcacatattcttggtcaatgcttttaaacttttggtgaatttcagtcttgtcaaacaattcgtctgcgagttgtatgagacttacaagaaaaaccatttcacctatttggagattaaccctttgggtatgctcaatgattttaatggagaaatgatgactttcacttttctcaagttgttcgagacggaaaaatattcattttggatttggctgccaaattggacgaaaccgccgcctttctctgttctgaaaattggaagacgcggtccgggagcgaagtggaattccctgctcgttttggaagagacctcaccacagaggtgggcaccatttgaccaaatttccatatattcttcgcataatcagtggttcattcgctcaggagaaatacatcgccgatttggacgcaaaaacgggcgcatctctcaaacttacgatactgaaccggaaaggccgagtttggacgatggtggccggtggaggcgcatccgttgttttcacgtgagataaataaataaaagaaattaattggattttcagaaatattgccaccccctctaaatgaaaattaaatgctcttctctttcatttttaaatctttgttttggtgcccaaactctgtagccttttcgttggcatttccaattttcttccttttaattgcatttatcaattcgtttaaccttttcagggacactgtttgtgacctcggcggtgcttctgagttggccaattacggagaatattcgggagacccaaacgagacgcaaacttttgagtacgccaaaacaattctcacaattatgacggaaggagaggcccacccaaagggcaaagtgctcataattggcggctcaattgccaacttcactaatgtttccgccacttttaaggttggtattcatttgctgacgcatttggttcttcaccatttaattttagggaataattcgtgcgcttgaaatgtttgccgaaaaacttcgactgcataaagtaacaatttacgtccgtcgcggtggcccaaattaccaaggcggtcttcgtaaattcaaagaagccggttatattggtgcttaatttttatttgagtttgccttattgatagccaccaaattggacttgccaattcacgtgtttggtcctgaaactcacatgaccagcattgtgggcgctgctttgggcgttcgtccccttcctgaagcttctctgactcctcacacgacggggcaatttctgttggccccggagaggggggtgagttcggcatttgcattagccttctgtgagtgtggtttttctggttaagagtgccgctgtttctgctgggaacgaatcggccagtcagcagaaagtcgcaaatggttacccgaaaagcaatgggacgaccccggaaaaaaaggcgaaggccgaaacgatggaagagcagtcaaaggaagctatacgaagcctttttgaaagggacacgaaagccatcatctggggacagcagcagcgggcaattcaggtgacttacgggggaagggatttagaggggcattcttagcctgattcaaaagttactcaaaattcgaaataatattaacaaaatttgatctatttaaacaccattttaccaaaaaaaaaattctttgaaactgaaaacgtttcttataataaaatttattctgaaaaatttgtttgatatatttttaaaaactttccaaataataaaaaaggagtaaagtatcaaattcaatggatgtttgacttatccaattcagggaatgcttgattttgactacgtttgcaagcgaagcgctccttcggtggtcgcctcgacttacccattcaccggagaccacaagcagaaatattactttggacagaaagaaatgcttatcccagcgtataagtcaatggaaaaggccttcaaaagtcaccccgatgcgtccgtaatggtcacttttgcgtcaatgcgttcggtgtttcaaacggtgctcgaggcattggaataccctcagataaaagtgattgccatcatcgccgaaggagttcctgaaaatcagacgcgaaaactgataaaagtttgttcgactgtttgccggctaatgctggttttcaggtggctcgacaaaagggggttactgtcattgggccagcaactgtcggggggataaaacccggatgtttcaaaattggcaacactggcggaatgatggataatattctcgcgtcgaaactctacagatcaggaaggtgggagggaatttgtttccctaacgctttttactagcaaaaatttcagcgtcgcttatgtctcgcgttccggaggaatgtccaatgaggtcgttttgaagtctaattttgaattacgaaatagtttagctgaacaacatcatttcccacaacaccgacggagtgtttgagggtgttgccatcggtggggatcgctaccccggctccacttacactgaccacattcttcgttatcaagatgatccgaggtgttttgtctcgtccttttcctttttcagttttccattagagtcaaaatgatggttcttcttggcgaagtgggaggcgaagaagagtacaaaatcgtccaggcgttaaaagaaaaacgcataaataagcccctaatctcctggtgcattggcacttgtgccgatcacatcacttccgaggtccaatttggccatgccggggcctcggccaacgccgtcaaagaaactgcggcacataaaaacgctgctttgaagtctgctggtgctcacgtgcccgactctttcgatgactttggtgttatgatctcgaaagtttacaagcaattggtcgagaatggttctatcgttccacgtgccgaagaacccccgccaccggtgccgatggattacgcatgggcaaaggtattcacatcgttttttagagcattccgaactcatcgcttaatcagcaaaaagaatgcccttcttcaggaattaggactgatcaggaagcccgcttccttcatgacttccatctgcgacgagagaggggaggagttgctttacgccggcgtgccaatcacgcgagtgcttgaggacaacgtcggtgtcggcggagtgctcggccttctttggttccaagtcgctttcccttcctttctactcactctcgacccttcatttttcagaaacgattgcccgaatatgcaaatcgttttttcgaaatttgtttgatgcttaccgccgaccacgggcccgccgttagcggtgcccacaatacaattgtttgtgcaagggctggcaaggacttgatctcgtcgctggtttccggattattgaccattgtgagtgtggggcagtgggctgaccatttgaaaatccgccatgggataataaaaagagattatgaaattcttttaatcaaccaaatttaacgctttggtatcattcgaatgaaattctgaaatctctatttttgaaattaatattctgatgagaataaaagctattgagaataatgataccaatttgtttaatttggttgactttaagcaattttattttattttattatcccatgtcggaatttaggaatgtcctagcaccgggttgtcgtaaaagtagaggaggctgaaaacagtgacggatttacaattgacattttcagggtgaccgttttggcggtgctttggacggggccgcgaagagtttcagtgaagcaatggacacgggactgagtgccatgcaatttgtgaatgagcagaagcggctgggcaaactcattccggggattgggcacagagtaaaatcggtgagactggggggggggcacagcgacgaaagaaatggcggcgattgttcagataaacaacccggacaaaagagtggaaatactgaaagagatagcgaagaacaagaccttcttcaagcaggagacgcctctttttgactacgcactcaaagtggagcaaatcacaacttcgaaagtgacagcaaacccagacgccctcctcatcagaaaatttgtttagaagcccaacttaattttgaacgtcgatggggcaattgcgacaattttcgtggacattcttcgccattcgggaatgttcacaccgcaagaggcgcgggaaaccattgagattgggtctctgaatggactgttcgtgctcggccgcagtttgggattcatcggttgtttacccagctatgtttatttgttcatcgtccgtttaaggccattatttggaccaacgtcgtctgaagcagccgttgtaccgccacccgtgggatgacatcagttacattatgcctgagcatgaatttgcggaacag

SEQ ID NO: 53080 - DNA, 77 bp, Heterodera glycines
atgagccaaaaccgtgacgaaaactcgcagccacctgtactcgatggaccgtacaggctggcacaagagcgcaatga

SEQ ID NO: 53081 - DNA, 213 bp, Heterodera glycines
atggcccgcgctcacctggcggcgctcaaatggctggcgctcagttggccatacacccctcccacacctatggggggctaccgtaatccggtgaaatggtcgcctctaactactcgcagttatcaaatgtacaagcccgatcaaagccaccgcattattatgggaatccgggaaaatgatatgtctggggacaaaaagtctgatagactgtga

SEQ ID NO: 53082 - DNA, 384 bp, Heterodera glycines
atgcctatatatcgctgttaccatcatcattttgctggttcgacaagccgagctacggtaagtgtgccggcgattactgtagcaaatgaaaattgactcattaatccaaatatcacataatttctttatgtaaaatttttattaaaaatttccgaaaaaatcataaaaatgaaagttttcaaaataatttttataaactttctttaaaatgaaaaaataaatattttataaaaccatttttataaaataaatattttctaaaaaccatttttataaatattctcgtactaaaagaagtcaaggattacaaaaaaacttgctcgacttctgatgcttttatttttgaatttcacaacagatatgagtctgatgaatcatacatga

SEQ ID NO: 53083 - DNA, 628 bp, Heterodera glycines
atgtgccaaatttcagccggtcgcagccagttgaacgccgccgtttgggcgccgtataaatttgaaaagagaaagctgagttgggcggttaaaatgccgacaaatttgctggactgggtacgacccattgaagaaacaaagagttgttagtgagctttggtttttaaccttgtttgaatcaacttttgaacaataattatcgagaattagggcgaaagggctgcaatttaacggtaggggtcaactccgtctggccaactccgtcacagcaatgttcaaaaagctataacttttttctttgttggccaaactttacaatcataatatcattcgaaagccctagatgtttagaagatatttataagctatttttcagtgattaatcagctctcaaaaaagttgtcagtttaaaaccgcaaaaaaggcagaattttcaaagttttttatttctatctttttttatagttcgaaattttctgtaatttttagtaggctaatagagcctgtgaagagctttcgaatgatatcaagattgtttgattcggtcaataacttcaagagttatattgactcaaagttggctcagacggagttggccagacggagttggcccgttccggcaatttaa

SEQ ID NO: 53084 - DNA, 1015 bp, Heterodera glycines
atggcaagcctaatccagaagggcatcacattcacactcaaggcgctggataatgccagaacaaccacggcactttcactacatccagacgccgacctctcaaactgggaaaacgcagtcaaattggaggctcaatgcacacgcgtcagcagagaagtccaaacaattgaagcacaactggacaatctacgcgacctctccaacaattggattgacctactaaaccgcctcgaaggatcagaaaaagacaaaggcgagaaagaatacgtcaaattcgacacgtatgagaaaattgctgaacgccatgacgcagccacaaccaaacttcgggatctgcgggatctcgaagcaacgctcagtgccgatgccaaactttaccgaggcagagcagaaagagaagcaagagcggatcagcaagcaaatccgccaccacaaattgcaacgccaccaatggcagctcctacattcacggcaccgctctatcaattccagccaatccagctggacaaattcttcggtcaaaagcgaaaatggcccgaattctacgagtccttcaaatcggccatcggcagccaatcaatcagcaaagcacagaagctgaacttgctccgcaatcttctgggcggagaagcacgggaactcatcgctgggttccgcctggaggaccaaaactacgagacggtccttcagttgctgaaggacacttacggcgcacctgaagagcacatcagggcgctacactttgagctggccaatctcaagacgtgccgaagtctccgagacacaaaagacttcctgcttcagctcgaacgactgacaagagagctgaacaatgccggagaggacatcgagggaccgcaggtgttcctcatgttggagaaaaagctgactccagcattcctacgcaacatcctcaacaaaaagggagaggatccggcaaattggacaacaacaaaattccgggacgtacttaacgaagcagtccgcaaggaagtccaaattcaagaggtgatgg

SEQ ID NO: 53085 - DNA, 1875 bp, Heterodera glycines
  unsure (1)..(1875): unsure at all n locations
atggcggacgacccgtcgttgcacgaggtgaatgaactgtccgatcacttttcaaatggtggtccaattgcattttaaatcatcagagtgccgtcctttctgtgctttggtggaccaattcggtgtcacttccggtatcaattcagtgcaaatatttgcatttaaagtcattgtccattcctttgggttatcgccactgtcggcctcctttgcaacggactcaaccttttggttttggctacgtcggaggctcggcggatgccgtcctggtcagtcggtgccatgagtttgcttctgatcagctgatcacttctttctttgtccatgccatggcaataatcagttccgccaatcatcgcccctttaggcatctgttggtctctttggctttgttcgactcactttttctgctcttcgccgtcctcgagctcactccgacctcccttttgcccactctttcgccccatttgatcgccgtccacacgcgtgtcgttctgatcattcgaatgttcgcctccactttttacaaggcgtccattttgtccgtccaatttcaaattaaaaaatgaaataaattgcctaataataattcactttcctcgtcagaattgtggtcgcttttaatgtggagcgctatctgtgcgtttgtcgtccgctttgggcccaccgcgcgcgcattttggtgggagggggaaaagcgttggccgtcgtcggcggggcattggccttgggaatgatttgcagtgtgcaatggtaagagagtggagagagtgattttgaattgaaattcaattttaaatgcttttggccattggcatggactgtggtccaatgtgagggcgaagggaatgagcagccgggggaagagcagcagcagcacttttcggtgagactgaaaagcgaaacggacagaacttgttgatgtcggaacaattcaattcaattcccttcttctataaggtggtaaccattcgacagtcgcaaacactccaagtcagtgaagggaggaaggtcgattgaaaaggggcgaatggaagtggaaaattaaaaggctaacgattgttttgaaattgtgccgaaagtgccacggcatcccaaacgagtgcattgtgaatgaccaatactccatctattgactatgctgaaacccttccattttgatggcatttcaattcccttatggcccacaattctccccttgtgaattgtccctccctctaattacttctcccttaattaccccnctctgttttcccccggttaaaggcttattaccgtctgatggattggttgtcccttgtgctgttcaacttggctccccatccttctcctctccgtnnccntcaactttcagctcgttttcaccctccgtcgcatcgttcggcgcgactcttccgcctccgctggcactgcaacaacagtcgcagttgcggaagaacggagcggcggagtcgtcgttacaaatgtactttttcaacccatgaatgatttcgtaaagaaatcccnccttgngcattgagttcgcttccgggcactcccccccatcattgaattttcatgccattttttcttcgtgtgtagccagcggtgccggcagttaatcctccgtcaattttccgagtttcaattcaacgtacaaatggggaggagcattgcccccttgcgtcgtccttccttctttcccattcgcttcgtcactttccccggcttttccttcagattattctcgaggatggccatgcccagcagcagcagcaaagactgaacgcaaatgcgatgctttttgcggttgtgcttctgctgtttgtctgcattggcccacaagtgccggctcgcctcctttacgaatggtgggacggaatgccaaatttttaa

SEQ ID NO: 53086 - DNA, 150 bp, Heterodera glycines
atggaaaaggaattattagctaccatgaaaacaaaagggcgtgaacagctgagaaaggacatcggcgccatgtttgaccaactgcaaaatgttgtgggagaggaaattgccggcctatgggctaaaattgagccatgtctgactgagcag

SEQ ID NO: 53087 - DNA, 1210 bp, Heterodera glycines
ctttatcgagagttccgataaaatgggaccaagtagagttaaagagtaaggaagatgtgccttttttgttaacaattgacgaagatcagagaattgacaagcaaatgttggaaaaggagactgtggtggacccaattttggcccaagttattagtaaagtgaaggataattgggcggaaccagtgaatgaagatttaaatccgtttttcagggaaagagcaaatttatttttggaaggaaatttaatccggaaaaggccgggaatgcaaattgtaattccccacagaatgcaaaaccaaattctaaaattaattcatagggcccattttggtattgtgcgaagcaaggcaagggcaagaggcattgtatggtggccgaatttagcgaatgagatggaaaattatgtaaaaagttgtgaaatttgccaaagaaatgcgccaagcgcaccgagaacagacccggagtacaaatggccagaagccagatatccgttcgagcgggtacatatggaccttgcagggccaatttggggaacgaatttcctaattttggttgactcatattcaaaatatccatttgtatgccaaatgcaatcaactcactcaacatcagtaataaattaccttagggaaatatttggaatgtttggctctcctaaatgtttggtcaccgacaatggtcggcaatttgtgtcagaagagtttgagagttttatgactaatgagggagttaggcatttgacgacagcaacatatcacccagcatcaaatggggaagccgaaagatttgtgagaacatttaaagagagtatggttaaattgctggcagagggaatgaatataaaggtcgcccaattcacgtttttgcaagaatatagagcgaccccgtcggcagtaaatgaaggggaaagtccggcacatcaatttttgggcaaagagttgcgtaccgcgctggataaaataagaatgcctcaaatgcctgaggcgaatagggatggaactcatactggagaaccaatccaaaagggggagcaaatgcaacagcagggaaatttgaaaaattttgaccctggagaccctatatggtacaaggaaccgaatggaaaatgggtacgggctgtacttatacaaccgttgggggagaggatgtgggagatccaaacagaaggaagcaccatgaccagaagggtccatttggaccaaataaaagg

SEQ ID NO: 53088 - DNA, 5790 bp, Heterodera glycines
ccacaagtggttgtggctccgcagcgacatgaagtgatgttgccgcccatttcgcttccaaaattttcgggtgaaccccgagaatggcctttattttggaagctgtttgagacttcagttgaaagtcttcaaattgaaaacttcaaaaaacacatttatctcttgggatgtcttcccgagaagtcagttgctcgaagagcaattgatttgtacccgccttcaaatgaaaactacccgcgagtggtagaaatcctcaagaaaagatttggggatgagaagtcaattgtggagacactccaatcagagttgctccatctttcaaaaccgtcagattcggttcaatctctgaggcagttctcagagtccattgaaaggatttgtcagcagttgtcagattttggagaaaatgaacaaaataagttcatggcctccacgataaaatccaaattgccataccatctcctcactcaagtggtggagaaggaaatgcgttcaggtggaacatttgattgttccgacctacgcaaggcaatcacttccattgttgaagtgaaggaagaagtacaaagatgtacacaagtcttccgtggggaagaaaaaccccgaaattttcctcctcaaatgcagaggaacaatttccaagggagaggaacaaatttccctcccaaccaatttcgtcagggtcattggcgacccaataacagaaatgagtctgtggggatgatgtctccccaaataaacagatcatttaacactgtcaatcagagggaacaaacacacttttctcctcgagaacgaggaacgaacccactttgttctctttgtagtgacatgggacacgcaccaagcaagtgtccaaaatatccaacacctggagcacgcagaaggcggcttgcagatcaacaacgatgttttttgccttatgcaagggcacaattctcaacaatgcacaatgcagctcatcaaagaggtgcccaaaatgtggtgaaaaacaccacttcatgatttgctattctgagggagacgctccgagaggaagcactcctaaacatacgaccaaaggagggactgttcaaaagaaacagtcctccaacatacgagaaccacctcgtccaacacaaaatcatttttcgacaacaaacgaacccttaagaataagggagaaaccgtctgaaatagcaatttctgacggaacaacaaatgttttaacaaacgttgtgacaaagaagtcacatgcgtttttgatgacacgacgattgagggtcaggtcaagtcgtgaccctcggcggatgatcaaagctatgtttctttttgcccagcgagccagacatcatatatgtctgaccgcctaatcgaaaaactgaagccacataaagtaacttcagaagagatggaagtctacggtttcggtggtgaaaggaatggaccaatacggttccattcacctgtctactccgttcaaattcaacggagtgacaataagtgggaggaaatcctcctcaatcgaaccgagcaaatttccactccattcaaaatggtggagtggaactcaaatgattataacggaagagcaggatgttttccaagctctgaccctctccgaagacgagcctgagattctgataagtgctcgacacttttggaaatttttccaaagcaaaaaggaagttttgcctgggttgtttgtcattcaaacaactctgggccctctagtcaatggagaatcagacttcggaccaaaagttcaaaatccaggattgtcaatgatgaccattgacgagtccaatcaaaagcagatgccagctactaaagaaattgaatatttctttaatttggaatcattagggataaaggaagaccctaacgaagatgatgatcaaacagcaatacagctgtttgacaaatcaatccgtcgtgaaaacggcggacgatattcagttaaatggccgtggaaggaagagacaccaaatcttccttccaattacagaatggccttctcaaggttaatgtcgactttgaataagctcagacattctcctgaacttctacaacaatataacaacacaatccacgaccaactatcaaaaggcatcattgaagaggccagggaagcgcctggcactcttgagcactacattccgcatcaaggagtgttggctaagggcaaaaaactacgcgtcgtttacgatgcgagtgctcacacaagggagacaaacagtttgaatgactgtttgtacagaggtccggtacttttacctgatctcatcggaatgctcttgcgattccgatgccctgcatttcctcttctcgcggatatccaagctgctttcttgcagatttccttggaaccagaggatagagaagtcactaagtttttgtggctcaaagacatggaaaagccactttcgtcggataatctgatcatatacagattctgccgagtcgcatttggtgtgatcagttcacctttcatcctagcagctactctacaatatcatctaaaaaattgtcgttcgattttggctaaggaattagccgaatcgctatacgtggataatgcgctcatggagtgtgaaactccagaggaagcattaacaaaatataaggaagcgaaggctatccttaaagaaggctgtttcaaccttcgggaatttattacaaattccaaggaggtgatggaagccatccctccggaggatcgactcgagaaagctaaagtgaaagtgctgggacttatttgggacattgatcaagacgaaatcgtctttgaattcccatctgtcgattcattaaagatagtgaatcgacgtctcgtcctaagttttttggcctctttattcgatcctttgggattgatgagcccatgcatccagcctttaaaacttttcttccaaagcttatgggaggaaaagaaaggctgggatgatgccctctcagaagaggactcgactcgctggagtgctttccaagattcttggaaagacaagcgaatccgagttccacgaaggacaatggtaaagggcgaatgctcccttcaattgcatgcatttgtggatgcttcgatccacacatttgcaactgcaatttatctccgagtggagagttcaaacaaaattcaaaattggctgattttctcaaaaaatcgccttaagccaaagagcgcttcgaaagcactcactattccaagaatggagctgatggccattcttattggaatccgaggcttaaaatttatacaaactcaattgcgtcgagcaattgaacattcctatttgtggagtgattcacaaattgccttaaattgggtggcttcaaaagaagtccaaccaaaattcattgaacggcgaatcaaagaaattcgcagcataacgaagtgttcgtttcacttcgttcgaacagctgaaaacccagctgatctggcaacacgaggagcaacaccagaagagctctcaaccaattcttcgtggtggaatgggcccaattggctcacaaaggaccaaaattgttggcctcatgaactcttctttgatataaaagaggaagagttatatgatccaccgaaggaagatgaaaaagtatttttggctcatacatgtgcagagccaaaacagcaattatttaatgcaaagagacaccattcctggaccaagttggtccggacagttatctttgtaataccttctccatttgaaattattaaatggaagagacccttcagagctcacaaaaaggcaccggaaggaaatcgtcaagatttctaaaaacagagcattcacagcagaagatgttctgctagctgaataccttataattcgtttggatcaattgaatgatccagatgaattcacaaaatttccctcactaatcgatagtgaagggattctgagactgaaaacgagattggcaaggagtgatcaaccttatgggttttcacatcccatacttcttggaaagaactcggaaatccgggatcttatcattttgcaatgtcaccagaaacgacatcacctaggggtggacagcaccattacggaatttctcaacatttattggactcctcagtctcgaacggcagtaaaaagagttataaaaaactgccgtcgatgccgaaggatgaaggcatatcaatttgccttaccaaaaatgcgtccactgccggaggaacgagtctgccgacaaatgccctttaagtcaatgggcattgactttttggggccaacagagacacgattggcaggagagaaggtcaaagcatggattattatagtaacttgcctcacaacgagagcagtttacttagaagccatgcttgacagaacggccgaatctttcttaaatgtcctccgacgattcattagtcggagggggaaaccagatttcatttggagtgacaatgccacttcatttaaattatctcaaaaaacgattgagcaattgacaactccaaagggagttgagcaaaacaaaaatgaatttcttgcacttaataagattaagtggaaatttattgctcaaattagtccatgggcaggtggcgtttacgaacgcctcgtgcaattatgcaaaaattgctttaaacggacattggggagaaaaatcctcaattacgatgagcttaacacttttgtggccgaagttgaggctactctcaaccatcggccaatcactgtggtatcagagggagcgtatggcattcagccactccgccccatcgacttacttcaacccgatttacagataaattgggagacaacgacggaagaaaccgatcccaacgataagcaaatttcatcctcggagaaattggctgctttatttaaagcaaccagagaagcccatgaaagcttctggaataaatggcataatgagtaccttctccttcttagagaaaggtctaagtgggatcataaaggtactcatctccaagacaaaggagagccaaaagaaggaatgatagtcctgattcatgaggaattcactcctcggaatcagtggactttgggaaaaataattgagctcaatggtaaaccaggtgccattagaagcgttcaattggaaatgccaattcatggcattaaatcaaagaggtatggaaccatgcctcggaaagtcgttattacacgaccagtcaacaaaatttttccattagaggtaggatttgaaaatcctaccgaagatggcaaagaaaatttgaaggttatcaaagacgaaactgcaaacagttcaacagaaaaaacaattcttcatttggaaaataaattgccaaatgaggaggagaaaaatgaggacaaaaattctcatttggttgaaccaaaagccaaccaaaacaaacatggaatgattactcgcagcaaagcaaaagtgatgacagttcttaactgtctcactattttctgcatttttggattggcaggagcctatccaacaaatcaatgcaatgagtgtaaactcatttgctcaaacaaaggtgttttggcaaagattccgaaagaaattcggaaagtggaactttgctgctcggagaattgttacattcatgagaatgtacacaaactcacatatgaattgccaaaggaaatcctcctgaatgactatcaatgtcaaggtcatttttggatggattcaaagcacatgtttaaaaaggacattttatgtccagcagtcgatgagtgtgtactcatcgaatgctatttatgcatggaacaattggcaaacccaacgtgttatccgttggtatcctctatgttagctggaggacttttcctttccttaatgagcataagctttatg

SEQ ID NO: 53089 - DNA, 777 bp, Heterodera glycines
atgagtgaactcttgcgaatcacaatcgcgccgattgtgaagcgtctcaagttgtacattgagacggctcaggaaaatctgacaaaagatttgactgaggaaatcaaaacagatttgctcgcagagagacaaaatctctgtagagcagtgtcattgttggagaaaaacaatgacaagtgggaggcagtcttccaccgagttaaaggtcatgctcttcaggaggaagagcagaactacaaggactacaaacctgaaggaaaagccttcatggaatgggccgaccaagcccgagggcttgtcgataccattgatggggctttaggcctctcagagcaaggggacgatgtcgttcaccctgctcaggttcaacaacctgctcaaaacattcagccacaagttgttgtggctccgcagcgccatgaagtgatgctgccgcccatttcccttccaaagttctcgggtgagccctgagaatggcctttgttttggaagttgtttgagacttcagttgaaagtcttcaaattgaagacttcaaaaaacacatttatctcttgggatgtcttcccgagaagtcagttgctcgtagagcaattgatttgtacccgccttcagatgaaaactacccgcgagtggtagaaatcctcaagaaaagatttggggatgagaagtcaattgtggagacactccaatcagagttgctccatcttccaaaaccgtcagattcggttcaatctctgaggcagttctcagagtccattgaaaggattgtcagcagt

SEQ ID NO: 53090 - DNA, 785 bp, Heterodera glycines
atgccggagattgagtcccagagattgaattgctggtgggttgagtcccagcgattggaaagcctgagaattgagtctcagagattgaaatgctggtgggttgagtcccagagattggagaaaaagccaagaaaatgatgcgaggccgcgaagcggccgagccagtcgattttatcattcttaattctataacacaatcgtactgccttgcgggggatgcgccgaaggcgctgaccacgctagtatttcactaaaacttcatttcatgtaaggtcaaaaaaaaagaatgcaacgccaaaaaatcacatttctattaactttttaaatttttattataaaaattatttaatagacctataaattaattcaaaacttctatagttggaatttaaaattaatttatttttaaatgatgaattatgtaatctaattcaaatattaataaattaaaattccagcaaatgaaattaaattttgtagaataacaagtaatatttaaaattaaaaaccattattttaattgaaaaattaaactaacctacctatttgatgattaaaatccaagtttaaattaattaatttcttaaaaaattaaattaaatgcaaatgcaaattgtagtgattatttttgaaacttaaaaatcgaatatttattttgaaaatttgaatttataaaaagtaatttaaaagaatttccttatattaattctattttgaaaaatatcagacaattaagtaattacttatacttgattagttgtttttaccaaatgcattaaaataaa

SEQ ID NO: 53091 - DNA, 643 bp, Heterodera glycines
atgggactcaaatctccggcattccaaacactgggactcaaaacaccaactttcaatgacattccaatctctgggactcaacccaccagcatttcaatctctgagctcaattctcaggctttccaatcgctgggactcaacccaccagcaattcaatctctgggactcaatctccggcattccaaacaatgggactcaaatctccggcattccaaacactgggactcaaaacaccaactttcaatgacattccaatctctgggactcaacccaccagcatttcaatccctgggactcaaatctccggccttccaaacaatgggactcaaatctccggcattctaaacactgggactcaacacaccaactttcaatgacattccaatctctgggactcaacccaccagcatttcaatccctgggactcaaatctccggcattctaaacactgggactcaaatctccggcattctaaacactgggactcaacccaccaactttcaatgacattccaaacgctgagactcaacccaccagcatttcaatctctgggactcgaatctccgacatttaaatttcgagtttagtcatcaaataggtaggtttgtttaatttatttaattatttttgcttgaatatttaa

SEQ ID NO: 53092 - DNA, 962 bp, Heterodera glycines
atgggagacgcagcaatccaacgattgacggatattttgcagcagttgttggctgctcaacagcaaaacacgccaccggcacagaacgcctcacaattgccaacactcccggacgtggaatgttttgatgctagtcagcatagtggctgtgaaattgaggactggctcaagcgatttatgttcgttcttgactgtgcaacgccgaaccttcaggacgagttgaaggtgaagctgttattcaactgtatggttttgctaatttctttgaaatcgccgaagaatgctactctacggtcacgaattttggccaagttggcagcggatggtgacactgtcaagtatgacggtgtggtagacgacctgaagatctacatgtcgaccatcgccgaagccaaggcattggagcagccacacatttcgaagcttttgttgacagcaaaattgaagggccaaaagaagaggaagaactcggaccattcgtcgaatgcgagcatcatttcgacagggacacggcgcagaaatcgatcgcaacgcgaatgttggcgatgcggttggaaccattcgtcgaggaaatgccgacaccaagaaacggtttgccgaaagtgcaagaagaatggccacttggaaaggatgtgtgccaagcaccaggcatggttaaagaagaatggaggaaagaaggaaaaagcggtgaacaacgtccgcgttggaaaaattttcctggttaagggcgaaaaccagaggaagaatggaatgatcgatgttccgattgatgtgaatggcaccaaagtggaattcattgctgatttcggcaccgaaggaactgttcttcatgaggacacggtgcgcaaaatcggagctttgaaattgagccgttgtgaagaacgtgctctgtaccacgatgggacaacacgtccatttgttggcaaaggaaaagctgcattttcgtttggagaacattcagc

SEQ ID NO: 53093 - DNA, 442 bp, Heterodera glycines
caagtgtccgtttggggtactcaaacaactatggggagcaaaaatccaacgcagaattaaagtacaggctatagggaaggtattcccgaaggattcggtctccccataaatctgggcgcatcggttcagggtactgccccgaaatccaaaaaaaaattttttttggataaaaattatttaaatgaactgactagataatatttaaaataggttatttctcttcctttcagtatccctgctaagtttggtgcgcttctgatcagtttctgaaaagaaagttaagcctaaactttttggcctgtttaaaaaggaattaaaaattttttaaaatttattcatctccctttttgatagaaaaagcatcagagtgcctaaactaacatgtaaataaaatttggtgcgtttcagagcattttctgaaaaaaaatatttatgaattaat

SEQ ID NO: 53094 - DNA, 153 bp, Heterodera glycines
tgttcctccaggcaaaaaattctaagaaaatttataagcatttgaagggttctcagcagtttccctgcaaaatttggtgagcttctgatcagtctagaacgttgggtgataaaatgaaaaaaataattaaaaaaaaataatgctggtgtggta

SEQ ID NO: 53095 - DNA, 475 bp, Heterodera glycines
atgggtgccggattcgctgcaaacaaagtgctggacacattaaggctgctaaatttcccgacacgaggaccaagactgagaatcccgagcagaattactggacatttgcaatgttaaattcatttcaaaaaattattttcgaatatacttttaattaaccacaacttttaaaaaaccaggtatatttaggctgcggtaggctgcgaagtaaaagaatttttactttttttctaaattagttattgattttaaaaaatttgagtccaaaaatatttgagacggaaccggccctttgagtactaagacggaactggcgagacggaactggcccaagacggaaccggccccagacggaactggcgagacggaactggccagatggaactgacccctactgtccctggattagggcgtcgacgattgaaaaattgaaaatttccaagatgtccttggaaaacaaaatttgaaaaataaa

SEQ ID NO: 53096 - DNA, 480 bp, Heterodera glycines
atggcaatgaaaaaagttaaaaacttgggcttgcggtcaggcagtgccgataggcgatgcaaggtatgagggcaatttttaagatttttaccaagatttttgctattttaacccaatttttcaagaaaaattaaggatttttataggcgatgcaagggaaaaagtttggcattttttaaaaatccggcggtgcctataggtgctgcccggaaaatttgttttgtagacttcaccttcatttttaaaattttcacaaaaaaattgctaaattcagtgaccttttggaaaaaatttttcatgaaaaaacttcgaattttttaaaattcaaaaacgctagcagttcaattttttccccttgatttaaaaaaaaattataactctttcaatttttttcactttaaaatttcgattcccttggccacatgccgctacccggtacaccccaaaacacagccgagacataacacagccgggaataaa

SEQ ID NO: 53097 - DNA, 120 bp, Heterodera glycines
gccgttcaacatcaccaagcagcacccgcagcccaaccggctgctgcagcgatgcccgggggcgctggtgccgcgccggccgccgctatcattccgttggcaccgccgccgtccccataa

SEQ ID NO: 53098 - DNA, 534 bp, Heterodera glycines
atgcgcataaatagcagtacgcacaactgctttgctcttgtcagtaaggcgttcgtccagctgcgacatcagctttttcatctgctttcgtgcatcggcagcgtttggtccataaagttctccatcgccgttgtttttttgaaacaaattcgtttagcagcatttaaatgtccagtaacgtccatccatgcgaatgttgcggtgctttggcagtgcagggagccacggcgtctcgactccagtgttcgggaaccgcgctaggacgaactcaaatttctccgaacacacggcgcatttgtggacgaggtgacgggctcgctcaagatggctgaagtagttctcgcggctgtcgtcgaacagaagtcgatacatggcgttgtttgctgctccaacagtgtctgcgatgcgtgcccgtgctcccccgggcaattgtcgtacacttgcggtgctgcctgattccaaaaaaaaatccaaaaattaatacaatcattaccattttcattttaattaaaaaatccaaaaaattcagcataa

SEQ ID NO: 53099 - DNA, 756 bp, Heterodera glycines
atgaatgacccaatgccttttgtgtactgtttggagacgttactttatgaaaatgtgaaatttgatgacgcaacgaaactttgcttcaatttgatcaatcctggaaaatttgtgcttgatcggatcacgtattatgaaattcggtatattatatttatttcttcttatctttttaaaggcaatgttttgacggatcggaaggcatccttttgcaaaatttagctgcagataaaacgaaaacaatttggccaaataaggtcagtgacagatttaaaattttcttttttgttataagcctgaaaattcaaataaatcgtttcaaaaaagttatgccaaaaattcaaaaaattttcatttcacaaacttagaaaattatcatctatttttttaaaggcaaaagccaatttattttttggcttctggctaattgagtttgtcctgcacttccgaaaaatttcaacaattccaaactttggcaaatatttcagcatcaatttgtgccgtggattttggtgaataatgtcatcattgaaacaatgcaatttttgcgctattcattgccctcattgatctgcgagcaacgggctgagggtgaatatatggccgaatgtgaaagttggtaaatcggaaaaaaacaatgacaaatttcaactgttgaatgatgttgtttagcacattaaacatcacgcaaatttaatgaattgatcaagaaaaaaagaatggaaagttttattaaatccgccaagggataaaata

SEQ ID NO: 53100 - DNA, 460 bp, Heterodera glycines
atggcccgaccgcggagtgccccacagcgaccttgctccactgcgcctgctgtaccatgtgatcggcgtcccccgagcggttgtgcactgttcagctggtgagttaacggaaacaaaaacattgaaaaattaatcatttttcccattgcaggcatcggacgcactggaacgctcgtggcggtgtacttggccaaccaaacgctgcacctcggccagcctctcaacatcttcgctctcatccgtgacctccggcgccaacgatcgcaaagcatacagacgctcgaccagtacctctacatttacttcgtgattcttcggtgggttttcaaatttgcatcaacaaaaatgaaattttaattttttcagttatgcacaaaacaaggcgtcaaagctgaacatcaacgtgaacgcgctcaacgccctcgtgcaggcactgaactccaccatgcgacggggctga

SEQ ID NO: 53101 - DNA, 1355 bp, Heterodera glycines
acatttgaatagtagtgtgtcgtttgcttcaatgaatccgttgagatatagatatccaaataaccgaggtccgtattgcttccgcatttacggtcagatttaccatagaatgaatttagctttgaatccagaagatggcgatgatcctgcttatgggcagattttcatcgtagatactgagcatgcaatgagagcaatgaggcatgccaatgtcgatattgaccctcaattgctgagaactgcttatgaagtgattagaaatgtgaatccgtttgctgaagcatatatgatgatgaaagaagaagaagatgaagaagttgaaagagcaagaaatgagaacagagagccagccgagatcaagcttttgtttgagaccggaaggcaattggacagacgcttggggtacaatgtacctcgagcgaatgaagttgctgcagtttatgtacctggggctgacggtgaagtacctaatgccaagattgtggtgagagaacgtggaaaggaatttaagattttgaagagtacagattcaatggtgactccaatgacttacccactgttttatccgcgtggtacgcttggttggcaccctgaaatgaagcatagaaatagtaatagaagagtaacgagattacaatatgtttcctatacagtcgcaattagagaaagagagtttaacccaattttgtacggtggaaagctctttcaacagtattgtgttgatgaatatgttaagattgaaggagacagaatgaattggataaagtgtaatcagaaaaagattttggctgatgcatataagaatgttgataatatgttaatgagatgagcacaagaacaaggtttgccactgggaaggaaggtcattcttcctccaagtgtaacaaacagtccaaggtatgttgagaagcattttcaggatgctatggccgttgtccgacggtttggtaagcctgatatgtttttgactatgacgtgtaacccgcattgggatgagatttctgagaatttgtttcatgaacagacttcatgtgatagacctgatttggttgttagagtttttaacttgaaagttaaagttatgatgaatgaaattgttaaggcaagttttttggagaagttattgcatggatgtacccggtggagaaccaaggaaggggactgccgcacatccatttgcttttgactttgacagagcaagataaaatgattaatggtgaagatgttgagaaaaaagggattagtgcgagaataccagacaaagaattagaaactgatttgtatgctttggttaaaaggtttatgatccatggaccatgtggcgatttgaacccaaattgcccatgcatggaata

SEQ ID NO: 53102 - DNA, 370 bp, Heterodera glycines
atggttaggagagccggtgatctgacggatgcgtttgttgtggaggtcggaccgggcccaggtggcatcacccgaggtttgtttttatttctccaatttttttttgtatttaaatcttgcctcagaaatttaaaaaaatttctaaatttgaaattaaaaaaaaattttctgtggcgatactttgtctcggcgagatttggtcccgtcccccttttttccgtcacccaaaagtgccatgccataatatcctattttgtgccatgctcttccccttcaaatttgccgctttcccgtttcagcaattcttgagcagccgtgcaaacgattggacgtggtcgaaattgacaaacaatttttgatgcctttgcag

SEQ ID NO: 53103 - DNA, 580 bp, Heterodera glycines
atgcttttcctctcttttccttccttcgtcctccgccaaattcgcccctctttctgtcgctgcttttcctttctgctgatgttagccatgctttttgatctgatcagcatcggtcgatcacttccactaggctcaaccaacgacagaatttacttctccaacgcattacggtaggaattttagtttttacagtatactgtaatagaatccctacaaaaatttacaactttttattttagtgaccccaaagatattgtgcttcaattggtcactgttccaccgccaatgtttaaatttgccgacttttccaataaatttgttcggttggaaaagcgtcggcgacaatttggtcctgttcaggccaaaaaatatgaaagaaattgtaagttactttttttcatttaaagaattaattaattttcaaattcctaggctttttctctcctgttcagtgcatgttggttttcagagacggctccaagctttacggacagtaaaatgattgaacgatattaatatttcgataaacacttaacattaacatccgaatgttaaaagatacgctgctataaagaataaa

SEQ ID NO: 53104 - DNA, 2187 bp, Heterodera glycines
atggcatcaaattttggcacattcttaatcaccttcgctagtcttctattcgtcatttacgtgatttcacctaccgtatatgctctaattatagcccagtctctattaatcccgcagtcttcaattatcccccagtctacgaggtgttttgaaaaataatccctctatcataatcccccagtctctaattatcccccctttctgaggaggttgaaaaataatcccccatgggctataattagagcatatacggtaatttgttgtataatattaattcagactgaaaatctaccgcacttactacacaatttctcactgcactgtttcatatttggtgaacgaattgtgtgccgtaccgtcttgtatttaactgttttttatgtatctacggaaagggccgaaatacacatttaatagagaattttcatcatttaggtttattttttagcaaagtccgtactgacgaggcccgctttgctaaaaaaataaataagtcattcatccactaatgcatttagttcttaatgttgatcaatttgcaggaaccgatcactgattggacggcggcaccgatggatgacggcagagatttacagtgcgttggagatgaacattgcgatttgtaccgcaacaaccgcgagcagttcaacagaaatgcccgtgaatggacgcagaagcatgccttttctttttccatgtcttttatttttcgtttcccattttttgatattttttttttgctctcatcatttttcctaggatttgtaattgtttttctttttgccaattatggaatggccagcgacaaccaacagttattttttggaaagtaatcaacgaaccggtctattgcctttattaaagtcgccaaaaaatcgtgaaaagtcagaaaaacgctaaagatacgaaaaaaatacaaaaattcctgcaaaaactgaagtgatagagttttatttcctaaatataaaatggcagggaaatggggagaagccactaatcagtcactaaacaaaaaaatttcaacaaaaaaaggttcctggcgtcgcatataggcgcgcggtggaacaatgtgaaaattttgctcgatttgacaggaaaattatcccaaaaaagccaattccgacagaaatatcacaaataaatggaataaagaatgggacagcgccatcaattagatatttaaatcatttttccaatcaaattttatcaactttttaatcaaaaaataaatgaaattaaaacaaaatgaaaaaaagaaaaccgcccggacggtgtaaaatatgagtaaaatacaaccgcatccgggtgcggagggaggccaaatgaaaaatggaataaagaatgggacagcgccactgctcgcgtaccctcgacctaggccgatcggcaccgaatagcattgctgttcccacgcataaaaagcaattatgcataattctttctctttccagtccttgtccttcattcgttttcctctggctgggatcgcctcaaagtcgactcggttccattcgggcagcaccaggtactgcatgcgcgcgtcacaggcggcctttgtcttctcagcgattccgctgactttcacaattgctccatacagtgccacttgacctgtgattgcacagtttggtcggatttttgctcctcttgccagtgagacgaaggccaccccccccccccccccgccaagccccggatggcccagatttgttggcactttccttcaaaaaaacatttaaattcttaaatattatattacttaaataaataaaaattcaggttaagaggcatgaaaccagggaggtcccaggattttattttttggcagggggaagaaaagaatacagccctgaccgattagcaaataaaaagagagaaaaagatatcgaatggctttcatgatttctttgaatacgggcctgtgagttttatggtccaaaaattcgtccgacgacgtttcggccgaagacgttttgtcctactccgggagaaagacagtggaagacaagcgcgtaaccagggtcgggagggggtgggggtggtattcaaatgaaaaattaaatttaaatgaaattgatgcttttttctggcgacgggattcttgccgattaatccggtgccagcttttcttttgacaatatcctgagacaacaggagtcccgccctgttcgattctcaggttccgaa

SEQ ID NO: 53105 - DNA, 91 bp, Heterodera glycines
ggattatttttcaaaacacctcgtagactgggggataattgaagactgcgggattaatagagactgggctataattagagcatatacggta

SEQ ID NO: 53106 - DNA, 298 bp, Heterodera glycines
atgtcagacaaccgaaaagaagcggatgaaaagatggcaaaagcaatgtaaaattaaaaatgccaaatttcaatttcaattatgcttttcttttttcttcagtttcatctccggcgacggttggctgtcggtgttcgatttgcttgcgccttctcaacttggcctcggaattgctctaatcagccaccgttttgactgttacgtggacgaacaaacgcagtgccaacacattcaccaactcatcaatttttttcgtcgacaaaccgctgaggaaaaagcgcatggaaatgtaaattga

SEQ ID NO: 53107 - DNA, 139 bp, Heterodera glycines
gtgtacgagtcgttggagtgtgtgcatgtgttttgcgctcgcgcacattttgtatcggcccatcattgtgtgttggtggacaccattctgcgcaatgcgaaggccgaagaattggcaacgattccgttcggcggcattt

SEQ ID NO: 53108 - DNA, 343 bp, Heterodera glycines
atggacttactcaccgcgttggcggacaaaatgaaaaatgaggagcaagatgaagtgggggaggaagaggaggaggacgaattcccacacattgcaaatggcacggcagcacacctgccgacaatcattgaggacgaggcggaggacgaactgaacgccatgctggctaaagctcgtcggctgaagcagacggagacggacaaaatgcatttcgtcaagtcagagcagtacaacaatgatggcaccagcagcgacgacgaggagacaacgcccgctaccctagcgggcggacacagcacttccgttgtgttcgactccacctctgagaagtacaagtccatcg

SEQ ID NO: 53109 - DNA, 1085 bp, Heterodera glycines
aacaaatttggcggaagtgttaagcccgtgctaaatgttgtgcacacagcagaaccgccgcccacatacaacagaacgaacaaattcacctccgtgttccagggcattgttgattcgtacggcattgccagctatttggaattaaatccaggcaacaaatatttatttatttgtttaatgaaaatctcattatttgatttatttaaaaggattgaatcattctcacctagaaaaacctgataaaattgttaaaatgagcttaaatttctcaaaaaattctccattattttaaaaatttgtcaagaaaaatgaattaaaatataaacaaatttttgtcgaaccaaaatttttataattttcttaaagtgaccaaaaaaactcaattttttttttgtacctttttgaaaaatttattataaaactttcataaaatttttttaaaaaattaggaaaaaatccatcttttatggatttgtaaatagggatgggattcttaggtttttatttattttttctgcggctttaactcgacgaaaaatgcacgaaaaacacatattcttcgttttaacgcccctatccgaccctaggaatccctattttgagtgttcgccctaaaataagttcttactcctattttggcgtttcgcccttattttcgcccttatttcgcgattttttaaatttttttatagaaattcacaaattctttaacaaaaatgcaatgaaaaaaaattaatttttttttgacgcgatcacattcgcgaattttttgcccctatttaggtccctattttggacttttagcccctaaaaatcccatccctatttacaaacaggcgagtattttcaaaatcattgcagaaaaaaaagatatatttgtaaaatttttaaaatttaaaaataatttttctttatttcttttaatttttgttttagccccctacacaatcatcactttcccatttctattctccattatgttcggtgatttgggtcatggaattttgatgttcttttgcggactgtttttggtgcttcgtgagaaaaatttggaggctcgccaaattaaggatgaggtgaaatat

SEQ ID NO: 53110 - DNA, 367 bp, Heterodera glycines
atgaaccgacggtaatgaattttaaaagtcacaaattcgtcgtttatttgactaaactgttttcccatttcagttggatttgcaacgacgtttggatggacattttcccctcttttgaccgtcctcaactcggcctcaaattggcacttctttcgccacgtttcaatgcgttggtggacaaacattttgatggcaaaagcgaattgacaatttggagaacgatcgaaattcgtcgcaaggacaaaggaccaggaccgaagctgtctgtacaaatggatgacaaatctttgccggaccgtccgttgcccagcaaaatccgttttaaatggcttcggattgagtaattcggaatcagagatttatggca

SEQ ID NO: 53111 - DNA, 183 bp, Heterodera glycines
  unsure (1)..(183): unsure at all n locations
atgtccaacgaattttgtccgtcaaattggccaattcttccgacgactgttcagcccgactcggagcagttcaaacagaatgaagccgaaatggcagaatcggtgcggaaattaaatctgtnaaccgggaaattaattcattatattcagataagcgaatcaaaaatgtggtcgatgcggtga

SEQ ID NO: 53112 - DNA, 1597 bp, Heterodera glycines
gtatttgcgaggcgaagatattcgggaggcgcagaaaggcatcaattgtttggattggaattttaatgattcgtcacgactctgtgcagcctatgaaaggtaaatgcaaactgtgaattcagagttgggagaaatggggcgatgtacagttggtgatgggggggatgtggccaagtagggtaacgcgactgacgaaatcactattttccattttataatttgtgatctcatcatcaggaaacacgtccttttcccaagttaaaatattcgtttaattccatgtttaggaatcgtggtactgatcatgccgtcgttgtgtacgatttgaatcggacgacgcgcaatgtgcgagaagtgccaatgtcaattttcgaggctaattttgctgaaaaagtgctcagtgtctgttggttcaggttcctccccatgcttctgtttccaattctctcctcttccattggcttgccctttttagagacgacccaaatttgctgctgatcaacgcaagtcgcggaattcgaattgcggacattcgcgagcacggcaatttccacagcactttgagtgtccaaaatccgatgatgggcctttgcagtgagcccaactttggctttcggttccgaaaaatgaattcattcactcagtcatccattttcaatttagttttgcttgtttcgctcacaatttggtttttgtttacgatcggcgttctttgggctctgcgccattgcacgaaattgaagcttgtgtaagtaaatgggtgttgttttgtttttaaatgcattttaaataatatttttattgaataatgggagtcggctaatataaacaaaagatggggaagcgacagccatgaagtaatggtttttggattatttagagttattctgttctttcactgcatttttcgcccttttagtcaaattccaaaatgttaaacaaattggcgtggcacaaccgccgtctcttccatctgacagctttggccaaagattgtggcaatctcttcaatttttccatttcatcctccgccttttctgaccgtcaaaaaaatttgactggcgctgccgacccatcgtcgaacatttacagtcaattggacccatcacaacggaagggactcgacattgatggtcactcatacggagttcatttttactcggtttggattgttttttgatttaacttattgttgtaaatcattctttgaattcagctgcccggaatgtcgtctttgacctccttcgactggcacccgaccatcagtgatcggttggcacttttacctgcccaagaaaagccaatagcttttgcccattcggtcgcctctacaaaacgaattgccataattaaagtatgtcttgcttcttatttttttcactagttttctgttgtgtttagcttcgtgatgacgtcaattccgtcatcggtccttccggtgacttttgcatttcggcggggccgcagctgaactttgaaaacggcgagaaattgttggccaaacccaactgcacttctgacattgacactgaaacactgttcaaacgacgggtgctcgtcggctacggctacggaaattcactgaacgcattggcaa

SEQ ID NO: 53113 - DNA, 54 bp, Heterodera glycines
atgcgcacccgtccgatctggcaagttaagcaacgattgctgactagccaaaag

SEQ ID NO: 53114 - DNA, 878 bp, Heterodera glycines
agtcgcttatttcactgccactgtcccttatgccatcattgtcgttctgttccttcgtggtttgaccttttcctcagtttttccatttgtcttgtccatttcccccctttccacaggaatttccttggacggtgctcagttgggcttggacttttatcttttccggcccaattttagcgtcattttcgaccccgcggtcagtcccacgggcaatcacaaacttttccgattaattcgccattcctttggaggatcattcattttggcctatgttttgacagtgatttgctgccaaactctccccccccccacccgaaaacactttaaagcgacgccccttcccaaaaaaagacttggcgtgccgctgccacccacgtgtgcttttcgctgtccgtcggcttcggtggcattttgtctttgtcctctttcaattcgcattcccacaactgtttcactgatgcgctgattatcactgctgctgatggtaccaaaatgaaggacagacaaaaacgaatattctttttctttttttccatttgttttccgacttttttctttccacggattaattaattaattaggtaattaattaatcttttaatcattgccatttaaatctttcccaggttttatgtcggtttttggtgggacagcagtgttcagtgtgcttggcttcatggccaaacagttggaccagcccattgaccaagtggtccaaagtggcaccggtttggccttcgtcgcttaccccgaggcatttctgtccgaattgcaattccaaagtatcggtggcttttcaggcgatgagtcgcatgcctttgtcgtcactttggtctttccttttcttctctatgcttttcattctcggcatcagctcc

SEQ ID NO: 53115 - DNA, 337 bp, Heterodera glycines
atgcctgcaaaatgtcagtgttaaaatttcaaattgccaactcaaatctcagagaaaattattaataattttaaaataagtaaattttacagtaacttattaccagggaacggatttatttttaatgcgctcaaattttgccatacaaatcgactgataggattaaaaaacacaaattatttaaataggagttttattttcaattaggcaaaaatgaaaagaggaatttttcaagaaaaaaattaaaattaaaaaaaattaaattattttttctagttaaaatttttatattattaaacaattcaaaggcaagagcaatattaaatggtttaataaa

SEQ ID NO: 53116 - DNA, 725 bp, Heterodera glycines
gtgactcggtgccgaacgccggagggtattggtcaacgcctgcagcaaaagaagtgcggaaactcgtgccataattatgccggattttcaattttcctcccccactaattttggcacaaaaattactaaacgccgctccgagtgagtgctgcgcattgtggtgctggtcgatgctggacgggtgccgaaagtccgccaaatgtgccaaggacggagtcatgggcctgagttggtgcagcggtgagccgtccgacggacgcggcgacgaggagacactgttccgcgcgaagggagggcgcgagcggcgccggaagtcgtccagcgttttctgagaacggaccgatcgaatgaaaatgagggcaatcattttgagctgatcaaaagaagcgattgtcctacgtaaactgttcatgatcagaatacggaagcattctcgaatatatcaattggtctttgaattattatcaaaatgttgaacattatcagttgctcaactgatatctgagtttgaaacattgggccacaggccgtagccagaaaaatttcggaggaggaatttttctctcttttttttgctcttcggtcaaaagttttttttctcctatgttatttttaaattttcagcgccgagaaaaaaaagcaagaatatgtagtttttcgataaaaaaggaccaattttgccatttgttaggctccgtcgggttaagaaaagcgcttagatcttc

SEQ ID NO: 53117 - DNA, 1014 bp, Heterodera glycines
atgaagctgatcagaggtggtctgatcgaatcactgatggcattggaatcggaattcattttcgtgccattgcttttacagttttgggtggacagacagtgcacgctgaacaggacgaacagccgcacagaagcgccgaacagcgtaacagcagcacaaacggtcagatcagctagtcattatcagtagaaataccactttaaattaaacacagcaacagtctgatcaagtttactgatgcattaagtcagaaaaataggagcgacatcgccttttctgaccaatttgataagctgatcaagttgatcacggcacagcagatccgtagccagggatggaagacggaggaattcccgcccccttccgaaatgaaaaatgaaacattttgaagaaaaacgggcaattttttttttggaagatctaagcgcttttcttaacccgacggagcctaacaaatggcaaaattggtccttttttatcgaaaaactacatattcttgcttttttttctcggcgctgaaaatttaaaaataacataggagaaaaaaaacttttgaccgaagagcaaaaaaaagagagaaaaattcctcctccgaaatttttctggctacggcctgtggcccaatgtttcaaactcagatatcagttgagcaactgataatgttcaacattttgataataattcaaagaccaattgatatattcgagaatgcttccgtattctgatcatgaacagtttacgtaggacaatcgcttcttttgatcagctcaaaatgattgccctcattttcattcgatcggtccgttctcagaaaacgctggacgacttccggcgccgctcgcgccctcccttcgcgcggaacagtgtctcctcgtcgccgcgtccgtcggacggctcaccgctgcaccaactcaggcccatgactccgtccttggcacatttggcggactttcggcacccgtccagcatcgaccagcaccacaatgcgcagcactcactcggagcggcgtttag

SEQ ID NO: 53118 - DNA, 501 bp, Heterodera glycines
atgctgcagtatttgtgctgtttgaaggtggtgggaatcaatttccacttttttaaataattacaaattccctttccccaggaaaaggacggacagaattcggagtgccgggaccgcgcctttggctacttcaaatgccgcatggacaacggactgatggaccgggacgaatggccaaagttgggcttcaaagacctcgcagaacaacaacagcagcggaaagcggaggagaaggcggtggtggcgacggaattacagcgatagaaactgctcaattattatttcatccatttttctgttttgaagacgaatcatagaaaaaaattgttttaacatctattcaaattatgatataaattaagtgcccgaaacaatttttgtaatttaaaaattaggaataattgaaattaattttaaaatataaacaaaaaaaattttgaagccggccttttttttcgattcgatgactgatcgatcgcttttgatagtcaagcaaataaa

SEQ ID NO: 53119 - DNA, 625 bp, Heterodera glycines
ctggttatccgttgccttttaagcgcccctcgggatgggaggagccctatcggagagataaaatgggggggggggaagggtaaaggccatttccggtcccggccttacacctccggccctccaaaagaccgtccctggtcgttaaaatttaaataatttccaaatttgaatgaagtcctcagacttttctttcttttgatttgttttacgatgagaaatttgttttgattttaagccaaaactgaaaataaaataattcaaatatttatttaattactcaaaataaaaatggaaaatgccgagcctctaatgggaatgaacccattcctccaaccaatccacagaagctctgtcattgagctactaaaagaaatccgccctttttaaattaattttcttgaaattctgattcaattggatttgaattaaattggcattgcttttcaaattatgagacaagagaaaatctgatgaaatttaaaacttttaaaattatataaatttaataattgttttatttaatttccaatcgactaaaatttggatttttgatataatttggtgtgactgtatgactatacctccccttcatatctgaggatcgtccctgatccaagaacttaaa

SEQ ID NO: 53120 - DNA, 213 bp, Heterodera glycines
gccatgccactgaatacgctaaatttaaacattcagagatttcgtcagggaattcatccgccaaaagagtatgactttggccagagttcagcacgtctttctgacaatgaacaacatgcaaaagacgacgacgaagaagaagacgaaaaagaattgaaattagttgataacgacgcccaattaaatacaaaatcacaaactgcgagcaaatga

SEQ ID NO: 53121 - DNA, 1026 bp, Heterodera glycines
atgaaaacagtatgtctaagtgtgtctttatgtcaatttgcattcatttttatattttgtaattaataattttttattaagaattgaaaattatattaatttattttaaaaaagctttcataaattcaaaaaaatgttcaattttctttttaaaatataaaaaaattaaaaacatattaatatttcctgcattattttattttaatattgttttttttcttcatatgagaattctttgtatttttttgcctgaaaacacatacaatgccttttttgtttttttaaccttacaatgcgcgcattgtttatgcgtggcggattttcgagaaaacccattcgtcatctcgagtcccagtacaccctcgctcaaacactattcgcgaatagatataaatatcttcttcaatgataacaaagctttacgaagtgaatataatgtgaattattcaaaaaagttggttccttatttaatacctaatttaatgttgagtcattttctttcttggaaggaatagttctaaatttttatttatgtctttaatcgaaacgataaaaattttaattctttgtgagataaaatagagaagaggtacgcctttttgccagtaaaataaataatttattattaatttctattttttatgtgtttgttttatccaattgctattttaactgatttaggtacatcttgtactccttgtttcatttgttccatggagtatgaagaatattaaataaatcgattttgaatgatgaattaatactttctcactaatatttgttttatagattttataaattttattttaagccaattatgcgacatacgaagtgaagcaaactataggagatgatagtgtatattaatttatcgcagcacatcgaaatttattgcattgccgacattcatattttttcaatgaaaataattaaattggtattttgaattttttaatatttctttttttaaaatatgctattttggaattgtaaatttatttctttcatttaatatataataattaa

SEQ ID NO: 53122 - DNA, 405 bp, Heterodera glycines
atcattcaaaatcgatttatttaatattcttcatactccatggaacaaatgaaacaaggagtacaagatgtacctaaatcagttaaaatagcaattggataaaacaaacacataaaaaatagaaattaataataaattatttattttactggcaaaaaggcgtacctcttctctattttatctcacaaagaattaaaatttttatcgtttcgattaaagacataaataaaaatttagaactattccttccaagaaagaaaatgactcaacattaaattaggtattaaataaggaaccaacttttttgaataattcacattatattcacttcgtaaagctttgttatcattgaagaagatatttatatctattcgcgaatagtgtttgagcgagggtgtactggga

SEQ ID NO: 53123 - DNA, 249 bp, Heterodera glycines
atggagaaggcctgcaaaatttggagagattatatcgattttagtgcgctaggttagatgaaactttttaaaatataagcctaaactttttggcctgtttaaaaaggaattaaaaatttttaaaaattttattcatctcccttttgatagaaaaagcatcagagagccttatttaacttttaattaacatttggtgcgtttcagagcagtttctgaaaaaaatttatgaattaattttgcaaaaataaa

SEQ ID NO: 53124 - DNA, 310 bp, Heterodera glycines
tttcaagtgtcgtttggggtactcaacaatttatgggagcaaaatccaacgcagaataaagtacaggctatagggaagctctcccgaaggattcggtctccccataaatctggggcgcatcgggtcggggggactgccccgaaaacaaaaaaatcgattttttcaagtgtccgtttggggtactcaaacaattatggggagcataaatccaacgcagaattaaagtacaggctatagggaagctattcccgaaggattcggtctccccataaatctgggcgcatcggttcagggggactgccccgaaaac

SEQ ID NO: 53125 - DNA, 1555 bp, Heterodera glycines
aaaaaatattaatttttttgcgaaaaaaggcgaaaaattatgttaaatacaccccctaattcgggatttcaaaaaagcaaaaatacacccctaaaaatcgactgaaaaaaatacaccctaaaaatcgaatttttgatttcagcccccccccaaagccaagggtctggctacgcccttgactggggggggggggggagggcggcaataaaaaggacttattatgttttttttatttccggtaaatgaaatgtcaagtagtataataaatggtattgtttacccaccatattttttaagttatttgttttccaaaaatcatgaacatttgtttccctgaatgatgctttaactgaaaatttgagaatggaatccttaaaccgttttgtgctttgctaggcgttttttcaatgcgctgctccgctcgagtcacgccatcagccattgcctcctttctcagtttattctctctgaacatggctctcttttctgtgaattagtcactttgttgcgcttttatgttcgttttgaaattgacgacgtaaatgggcagcaactgaccgcggctgaagtttgtttggaaatgcctttatcatttattcttatctgtttgaaggtcactaaacgtcactacgattcgatttccgatctccaaaaagcgacttttaaatttttgaaggacaaattgggcgagttttgtcttctgccaattgcatccgttgacaccagcaaatttttgcgtgagcatctcggcacattacggtaaaaaaggattgaaatagcaaacttaagtattttagtttggaggaacttcaacacattgccaaatatttacgactaatccctgacaaaaatcacgacgaaattaacggagatgaaagtgctcgtcaattggtttctcatttggaccaaaattacggtcgttttgacgatccgacatttttacgagaagcgatcattttccaatgcgaacgtcacccttctcaactgcaaaaactaaacgcagaacctttgtatcccaccgaagcaatcctttgggatgaaaaggtcgggcgaaatggaaaacatcccgtaaatgcaaaatgagttttgtgagtttagtccgttccttacgaacattacgacggcaaaaatgtgctgccactcaacaaactcaatctgcaatttttgactttgcatgattacttattgaggaatttcaatttgttccgcatggagtccatttgtcggtgaatttctcaggcgatcgctcatttgggtgttttaagatgaaattcgccaggacattgaggatgttctgttcagaatgaagccgtggcgtcatgagtttaatgagcaggaagttgtttggggcggttgggcgcggatggcactgccggtgggcgaatgccgagttgtgcacgtgggcaaaccgatggtgggcgaggtgagcagtgcaacatcggaagatgatgcggagtttaactactattatagaatttgactaaaaattaccaaattgttggttgtatatggtcccatgctgctgttaggcgccctcagcgaaaatttaggaaat

SEQ ID NO: 53126 - DNA, 1188 bp, Heterodera glycines
atggcgacgaacaaaacgatgagtgctcaatatgtctcggtgagattaagccggggacaatggtcagaccgttgccgtgtaaggtaataaatacaaatcttgaattttttaatttacttatatgttacttattttagcacatttttgacgacgcatgcattgaaaaatggtacaataaatctgctttttagagatttctggctaagaaatacacaaaaaaaaaatttaggttcatgggcggaaatatcacatgtcctttatgccgtgaaaagttgcaaatatcgcaaacggcacaaacaatgacaatggctaaccatttaggtaattaggcattaaattttgaaagggatgaactgcaagataaaagggaatttctgtttttgatcccttaaaaagtgatctttttttcggaatctggcaacacttgccttccagttcaccatttttcgttagcggaaagtaatatgattaaattaatagaaattaaggtgttatggcaccaccgggtggcattgtagcaccgagagttcaggtaagtggtggcactaatgagggacaagttcggcatggaacggttaccgcagaccagcatgaagttgtcatcgatattggcacgaatgccaatcagaatgatggaaatactggtggaggaacggagagtcaagttccagaaacaccacggcatgaagcaactgaaaataccggaggaacaatgaatcacgggaccgcaacaccacggcatgaagcaactgaaactcggctgaataatggctccgaaaatgagacaaaatgatgcatgagcaatttaaagtggattaacgaaaagctgtaatgtttaaattgaaaatttttaatgataaacaattttctaaaatttctaacttcggttttaggcacctgatgaaacagctgacaaaaaaccaatcgacggaccgattatttctaccacccaaccctacaattatttaccattttttgttttttttcttcatcccatccatttgaagaaaatcactgctgttgtacgaatttctgtttttcctcttataaattacaattctatcaaaacagggttcagctgggtttctgctgctactttttatattcaagaggcttagaatttagaaatgtgattattgggacagagttgtaggcaaaaactgaaactagcaaaatagcaaaaatgaa

SEQ ID NO: 53127 - DNA, 1638 bp, Heterodera glycines
atgaaagacggggaggtcagaggacgcgggggtatttatggggaacatggacgaagagagagagaggagagaaacaaggggagagaaataaagatatgaaaataaagtgggcggacaaaagagtaccgatcccaacaaattttagcattattcttttcttttttttagcttatttgttagcgtttgcttttcttcttttcttttccatcatacttaccattgtagcaatgtccgtgcaagaagatgaggctggataatttggcttaatttctaaaaaaaacattaacttttcaggaagaacttcaatggcgtcgagaacacgaggaaatgcacagaaaacacagggtaatttaattttccttaaaaaactgtcgttcatttataacaaagttaatttttgtagggccacgatgcgatgcatgcggaaatgttcatcattttcattgtctcaatggttgtggcacaaataatcttgatgttgtggaagagaagacattttcgctcataccaggtaaaaaacgggtggtggtttcgctgaaagggctttatctaacaataagatgattttggttcagttcgccactttggtcggtctttggctaatcccttttatggtgtcacttaaaaatggctggtggcgattcattctttcctggactgtgttcacttcttcaatattttacgtttggcggagggtcaatcagccggcaatttccggatcaactcccaggttttcagtgggttttacgcaaaaaagggaaattcgtccatttcccttttaggctcgtctacaaatactttttgttcatgcataaactcagttacatttttggtattgtcggttacttttcactcgtctttactgtcattggaataaattcggtgttcggtaaaattaaattttctaaaaattcaaaaaaggctttttaaggaattagcagtaatctgagcttggattttggcgtgcatttgttgttttatggcctttattacggtgtgcttggacgtgatttggcacattctctgaccgacagattggcctgcaaaatcggggttttaaaaatgaaatggagagattaacacattattattatttttctagtattttactcatgacggattgccaaaacggtaccaacaaaacggaattgttcactgttttttttccaccattttagggttctcgagtcggatatgtgcgccgtctgcgggaataatttgcataaaccgtcgtccaaccaaaacaatttcaattcgttggacgaagcgaatggaggagtgatgaccgaagctgttgaactgccagaagaaaaagtttgtcacggttttgttcgtttttttgacactttctttttagacgtatgctttggcatgtaaccacgtattccacgagttttgcatccgcggatggtgtgtggtgggcaaattgcagacatgcccttactgtgagtgttggaacaaatcaaattctccacgtttttttccaatgttaacgataggcttttaacttaataataagacagatttttatggcaaattaagtacttccttgcaaatttacatatatgaacttaattttatatccttgccattttcaggcaaagaaaaggtggacctcaagaggatgttcaagaaccc

SEQ ID NO: 53128 - DNA, 2151 bp, Heterodera glycines
atgaatgtcctcatgcgaaatgtgtgcgatttggtgcctgaacagctcactccggacgtggtcagcagccgactggtgatcacacgatgcgaagaatgctcaaaagtgcgttcatttgtggcataatgccaaacaatccgctcgaatggcattttcagtgccctcaaaagttgcccagcattcagcggatgctcagccagatcagtcttgatgccagcattcagtcccttctcggtatgccctaattgttggccaattatcggccatttggcctttgttcagtgattttggtcaaagacttcgaaagtgcgcgtggcattgctcgtcttgcgcagcaggacccaaccgtcaaatttgtattcctcgaagacgacgacttggactcgccgaccgtttgcgaattgaccgactccaacgacggcagctcgctgaaggacgcggactcgctgaaaagcttctcaaaaacatcggtcagctgatgttgggcataaagccaaaccaatccattgaaaccttacaaaaccaatcattccgacagtgaaccatcggcggaattctttaagtcaaaatggggatcatattgaagagacatttttgtaaaaatttcccgaagttagtggatcaaagagaatggcaccgctctaatcggtcaacccggcattggtcaaaagatcccaacccgagatcactaccagggatgtgcgaaaatcacaaaaaaaaatttttgtatacgaaaacgaaacaaaagaggcattcgacacgaaaacgaaacacgaaacgaaaaaattttggtagacgaaaacgaaactcaaaaagtgccgaaaatgtaggacgaaacgaaaacgaaacgaaatttcgtccctcgctgatcactactctcatttatcaatcgtgattttgtttcaaataaatctatgatcagctaattttgccctaaacatttgccaaagttcaggtgctttttgtcagcatttcgttcatcattttgatggtcatttcgctcgcttggctcgtcttttattacgtccaacgatttcgctacgcacacgcaaaagaccgactgcagcggaggtaaaagagacaaaatttgaaaaaacgacattcccgagattcttttttcgagactctgatcgatcggataatagtcgagactgatcattttttatcccggcttttttgtgctctctcaaattctcgtgaccatttctaaaaggacaaaaagaaaatccgccttttttcagactgtttaacgctgccaagaaagcgttggcccgaatcccaactcggccagtgaaggcgggcgacaaggagctgaactcggactgccccgtgtgcatcgacccgtaccggcagggcgacatttgccgacaattgccgtgtcggtcagtgccaaaatgaaacaacgaagaaaaaatgactaattacacgaaacaaaacagcacaaatgattcccaaattctttagacacatcttccacaaaagctgtgttgatccgtggctgttggagcaccgaacgtaattaaaataaatgaattaaataatcaattagtgcggagcacgggaaccgaggcttttttggccaagacggaccacccaaaagacattggctaatttgaaagtgtcgaaaagttggcattcctaaggccttttaaagcaagagaaagcaaagaaactgaatcccgtctcgagactaaaaccaacattttatcaaaacgaacgaaaatgccgaattctctggcactaattgccgttttattcataattaaccgcttcttctgtcaattaaaaggtgcccaatgtgcaagtcggacattctgaaggcattcggttaccacgtgtgcaatggccgacggcgagcccaattctcggcagggatggaggaggacggcgcgtcgggggaccacgacatgccccggggggatcggctgagtttggacgccaattcgacgggcagcgagtcggccaacccattccccgtggtcaccgaagtgcacgaccctttcggcttttctccgtccgcttcacctcaactcattcaggtgtctggacactgccgttgagggagttggagttcgagagcgagaattcgagattgatctctcgagagtttctgacgtctttttaagagtcacaaattatgtaaacagatag

SEQ ID NO: 53129 - DNA, 313 bp, Heterodera glycines
tttaaatccattccttcgggggaccgtgccgggtgccgcggggtaagcagtgctggttcgtttcatcacggcaccgaaccttttggctagtcagcaatcgttgcttaacttgccagatcggacgggtgcgcatgattccactgttccaagcaccccaccaaaagcaaaacgatataaccaaaatataaggaaaaattttaaaaaaattttttctccatcttcctttttgatactaaagcatcagagtgctaaaattgacttgtaaataaaatttggtgcgctttagagcattttctgaaaaaatatttatgaa

SEQ ID NO: 53130 - DNA, 660 bp, Heterodera glycines
ggcggggggggggggctccgtctgctccaatttgccaccggcagttcgaggtaacagacactctttagcttctgatcagtaatttatgcgcaaattaattgcgtatgcctaatttttggcatcgtgtttttcctcgtgccaatttctgatcagtttttgagaccaaaacgtttttcatggacactcactctctgctgcagcttttcctttctctcttttgcagtgtgccgtacgaaggcttcagggcgttgaggggttccgatgggccaaaacgcttttgcattgagcggtggggcgagggcgaaagcttgccgagggcgcacacgtgcttcaaccggttggacttgccgccgtaccgggacaaaagcacgttgaagtcaaaactgatggtgagttgttgacattggcacaatgctaaagatcgggttttttttgcacaatttttgatccgcccacgtcaaaccaataaactctgaaagtatgtttcagtgcaatttacgattccctcctcccaaaacagattcccaaatcaattccagtcaaagcttaaagcctcaggactcaagaaaagcccaatctcgagcatcatttgcaaaaagaaaattaagaatatcccccatttagttggccatctacgaaagttcaagctatgccattgaa

SEQ ID NO: 53131 - DNA, 972 bp, Heterodera glycines
atggctgccagaccgattaagaaggcaaacgattggcatttgcatgcaaattgtgccccttttattgcagtttcacttcggcatggacattattcaacagagtgagcatgacgctgactggagacgtccggttatgattctgaagatgcccgcccattgtgtgtttttggtcgcagtgcgtactctgtcgcccaccgcgtgaaaatttactcaataagtatattcctatgcttatgaatttcagaagtgctccgagttggctcgcattagcagtcggctatggcttggtgaatgcgctgaactcattgcatgagaagggattcatccatcgttttgtgacgccgtggaatttcatggttccgatgccattcaccatggacaacattaccaaaaagatgattatcatggacttgagtttggccaaacgatgggaccccaactcgtaagggaaattaaatgtcgtaattaaatagcatcttttctacagcattagtgatgtctcagttcgcttttctggcaccgttaagtacagttcactgagggcactcaattttcgaaccgttgggccggccgatgacttaatttcagtcattttcatcgttgctgagttgatcagcgggaagtgcgttctttgtttggaaattgatttttaacttgcctttgtagaattccctggcgttcggtctcaaaaattgaaaaatgcatcgcgctgcgacagaagttcgcggagtccatcgaatttaggcgccttccaagagaacttcggaaactttatacgtatgttcaatttcagaatgaaattatataaaaattaaatttatcctatttagagatctctgcaacacttctcccgctgattgtcctgcgatcgataatgtgaaagaggcgttcgaatccgcactgaagcgacgagatggcgatgactggagtatcaagccaatgcctgactggttggagatgcctactgaatag

SEQ ID NO: 53132 - DNA, 1681 bp, Heterodera glycines
gtctgatacatgccaatcacgggagctccgcgattgattatctgtctgaccaactcagccgtgcttcgacgagtgccgttcgtcacggcgcatgtctgggacttggattggccgcactgggcacacgtaatgaacgtgtttacgaacacttgagggatgtgctgtaccagaacgaagcggtgtcaggagaagcagctggaactgccatgggcttagtcatggctggatcgatgaaccaaatggttttaattgtcttttatttggtttttgaaatcgatttcttacaccttaaacgtcaggccttcgacgaaatgtaccagtacattcttgacactcaccacgacaaaatccaacggggacttcgcacgggaatttctatgttagcttatggagttgcagaaagagctgaagagtgagagcaatttgtttccttccttttttcttaatttgttgtttagttggattcggttgctttataacagtccttacgcaattattcggcagacgggtgtttgcatggtcggtttatcccttttttacttccaatatttcaaaattcgttttcagattgctttggcttacgcgggtacgggaagtgcgtcggtgatcaaaagacttctcgagagagtcgcatcggatccaaatgatgaagtgaaacgatttgcaaccattgcaattggatttgtcctgtcaaagttaacatttttttgttttccaaatcatgtttaccctatttagtaatccgcaacaatgccttgattacgtcgaacttttgacagaacattttaacggtcacattcgatatggcgcagcgattgctttggcaatttcatgcgctggcactgggtacaaagtgagtactgaagtggccacttggcatctgggacattacctcctcccctttaaggaggccatcgcattgcttgaaccgttgctgcaagcgaaggaaaattacgttcgacagggggcgttggtttccctcgcttttgtcctcattcaacaaacgacatcgacctgcccaaaagtcgcagactttcgaaaaactttgattaaaatggttggagagaagggagaagacacaataacaaaggcatgccgaattctattatattttcatgacaaattgtttagttcggtgccgttgttgcacagggcatattggacgcgggcggtcgtaacgtcactctttcgctgcacaaccagaacaaccaaaacgacatgccgtctgtattggggatttttgtgtttttgcaacattggcattggcactcgatgactcatttcatttcattggcacttcgtcctacttgtgtgattggcctcaacaaggatttaaaagtatgactaaacttcattttatctacatacattaaaacatgcgcagatgccaaaaatggacttccgctgcaatgccaagcagtcgatgttcgcatatccgcaaccaattgaagaaaaacgcaaagaagggatggaaaaggtggaaacggcagttctctcgaccacaaaaaagaagccgaatttggagaagaaagcagaggatgccggttagcagaaaaccaatctttctttcggtcacaatttaatttttgacaattcagacggaaaagccgaagagaaaatggaggtggaccagaaaagcgaagaaaagtccaataataatataattcaattaaaaatatga

SEQ ID NO: 53133 - DNA, 716 bp, Heterodera glycines
atggcacttttccatcggattggcgtcaaaacaaaacttggcactgtagcggtgccgttgtatcaaacggttgtccgtccctttggcatcccaacgctgagcagttacgtgacaagtgagtgaaagtgccaaaggggggaaggcatttaattcattaatttaatcatttgattaattataatttagaaaatagagtgtcgaaaactaaatttcaattttaattcattggattttaaaaaatcataagagaaactcactgaattttttcgttaaaatttaaggttaattttttaaaacatttttttattacacatatatcattaactaattttgacatttgtttaaaacaattaaagctaaaagctgaattaaaaataatttacaaaaaaggtttattcacgccattgaatggaggtcacaaaatgaattttgtggaacgatttgtgaattttataaatgatttgtacgattggttgtatttgaacaatgtgatggcttcgtatgaggtaagcaagcaaaaaaatatataaaatgctaattttatttaaaaataaaaaattaaatttatcttttaggagcctgttattgctgaagcatttggccaaaatttccccccgctgaaacaaattatgcgcaatgtttccctgctgtttacaaattcgaacgaagtcggacaaaacataatgccaaaaatgattggaaaaatccatttttag

SEQ ID NO: 53134 - DNA, 669 bp, Heterodera glycines
atgtgcaaaatggatgtggaaaacagcaacaacagtccgaacattgtcggtgttaaggagtggtcaatgtgcaaagagtcgatcaaagacctgttgggccccaactttaccacctatttcattctcaatttctatgtaagcaattgtaaaaaaaattataggcctaagactctaatagagccaaggcacatccaggcctaggttttcgattttttggtacttcggtgggcaatctttcttaattactgtccacaacaaaaatttttttttcacgaaaccaactcagttcgatgcctgaccgtcattcacagaacgacccagcccctccatattcgggactgaatcattttttaggcctaaaaaaagagacttgcgaattacaaagaatcatttttcaggacctcaattccgaatagtaaacgcttcgaagatttgccctgccaatttggcgagcttgtcgatcagtcaagaaccaaggggaatgaatgcaaaaaataattattaagaattaagactgatgtggtaagtgtgaagaactgtgttcctccaggcaaaaaattctaagaaaatttataagcatttgaagggttctcagcagtttccctgcaaaatttggtgagcttctgatcagtctagaacgttgggtgataaatgaaaaaaataattaaa

SEQ ID NO: 53135 - DNA, 603 bp, Heterodera glycines
atgacttcccctttcattggcctttattccttccttttcatccgtgctgagtcgatccacaaaaaaaagagaaagggagaggagcaaaaggcgaagaggaagagaaggggaagaggaggaagagaaaggggaagaggaacagaagaggaagaggagcaaaaggcgaagaggaagagaaggggaagaggaggaagagaaaggggaagaggaacagaagaggaagaggagcaaaaggcgaagaggaagagaaggggaagaggaggaagagaaaggggaagaggaacagaagaggaagaggagcagaaggcgaatgggaacaaaaggctaaggggaagagaatggagaaatgggaatagaacggaaagagttgaaggggaagagaaaagggaagacagagacgatcagaaagaggaacggatgaaggatcagaatgacgatattcccggtgataaatccttcaacttgacctcttataaatatgagccgagcatttgtctaactaaactcgcaaccatcaatctcattgtcgtccttcgaatggacacgaagactctgggataggtaaatgaagaaattctcaatttgaccttggaatacaataaa

SEQ ID NO: 53136 - DNA, 208 bp, Heterodera glycines
aacagttaccgcccgccctccttcactccgcgtctgtccactctattggaaaagttatttctgaccagcgaccgttcagaatggcatttcgttgtccttttgaattctttgccttttcacctttcatttttccctttgctttagtccctccattatcattctgtgcatagaaaatgagcgtaaagtgtcaataaatgtgcacaaaagc

SEQ ID NO: 53137 - DNA, 616 bp, Heterodera glycines
tttccaggattatattcccacttaaatacgggaattacacgaataaataaaaccgaaaacgggaaagaaattggagcaaattgccaatgctcagcagatcaattgccacttttcaccatcgatcggttggccctccacgacggaagtgacccatcgaagccgatttatttggccattttgggccgagtgttcgacgttgaaaagggcagaagacactatgggattggcggcacctataacttttttgccggtttgcgctttattcaatcatttctttcccattgtctatttgcctttttagggagggatgccaccgtttcgtttgtctccggcgacttttccccctccggcgattgttcggacgcaaatgaattgtcggagagtgaattgctcagtgtgttcgattgggtggccttttacgagagggaatatcgcctcgtcggacttttggacggcgaatatttcgacgcgaagggacggccaaccgaaaaaatgcaaagggtcgaaaaaacagaaaatggcaaattgagagaatggaaacccttttaaggtgaacgaacgcatggaaaaagcgaagcggaagaaagcggacgaactcagagaacagtcgctgctg

SEQ ID NO: 53138 - DNA, 708 bp, Heterodera glycines
atgctgaaccattctttaaacgaacttcaagaagcgctttcttctgccgcatttttggacgattttatgccattggttttggcattcgaatttggcgcaacattttgcaccgaaaacggcggaaccaccaaattgttcaaagagaaagtccaatttcatatatataattctcaatttaattaattatttttttagtgcctttcccaatcattggtcgccacaaaaacaaaggcaccgtttgttggcccaaccaaattccatcgcacaacaaccacttttggcattgtgccaacaactgaacaaacctttggctttgtgccgcttgtgcgtcatgtggaccattttggcacgaattgtacgaacattttcttcccgacggaagtggacaaatttttgttgaacatcaccataactccatatgatattggatgtaaaaagtatcaacggcctttgaaaatgaatgatccggaaggtccgcccagcgaaaagcaccgctatttcgatgcttgtaacaaagttccaacggaagaaaaatgcggaaagtaaacgaaattagtggtatttttggtaaaacattcgtcattaattagtgaaacagccattgattaatgaacttggcacagatttattacgttccttaaaattgggtcgcgtcactttggagcggcacattttggcgctaccaatggaaatggcgctaaaatctca

SEQ ID NO: 53139 - DNA, 694 bp, Heterodera glycines
atggcccggaaacagtccaatcgtcgaaatatgccaaaaacattaggaaggaatttcgggtggggccgatgccaatgcaaatgttgccggattcattataaaaatttgtgttcaccgtaacgaaaacgatctcgtcattgagtcaaccttcaacatttccttctccaatgaaacgtataaaattattatttttgatatttataaattaattaagcaatacaaatattagtcgattcagtgccgaaccaatttttggcaattttaacaaaatttttgaaatcttatggtaggtagagagaatcattagtgcaattgaatgatactcagaatattcaaaattatttgcttctcaacagagtatgagccgttaaattattgaatcgtcgatacaaaattaaaataataaaaataaaaatatttaatattcaattgtaattaaaaacattaagttgcaagcggacgcgaacatttccaatttcgttggagaaaataacagacataacaaattggatgccaacattcttaatcgaatttggcaccgaccagaggaacagcgcaattcgtgaaaaaagcgacaaaaaagaatttgcgaagaattgaaaacggtaaaaaattcgaaataattaaaaattcattaattttttacagagcgatggcattggcaccgtgcttaatgacaatgaaccgcaaatga

SEQ ID NO: 53140 - DNA, 1486 bp, Heterodera glycines
atggcaaaacgaaaatcgaagcgaaaagcgccgaccaaagcgaagtcaattgtggcattggagacgcagttcaattgtccgttttgcaaccacgagaatgtgtgcgaggtgaaaatgtaagtaaaaccaatcccctctctgtttaaaccagcaaatccggtgttttcgttatttttgttttaataaatgggaaatttgttcatttctgccgtcttttagtgccgttgttggctaagcgccgtgcctttttttgtgccgatttaaaaaagaattgacttttagtgttttatgctaaattacttgtttattttgaattcacaccttccaggaaatacgtcattttacatgtttattttaacactcaacttatgcaatttagggaccgtgaaaggaatgtcgggttcattcaatgccgcgtttgcatggaaggtaattatttgactcggtgattactaattgtatggtgacacacaaactatgccaaataagcgtaccgaaattgaaattaaactccagtttaaaggttttcttttttttctccaatagatgttttataggtactttacgattttacattttttggtaattttttagtggttatttctttataaaactgtaattatagtcccaaatcttcctttttacattaatttactacttcaaatatcggaaaatgaaactctcaacaacaaaaaaatcccgtaatattttttgtaagtaagttgcaaacatttttcagacttccagtccaacatcaccgctttgtccgagccaattgacgtgtactccgattggattgacgcgtgcgaggcggccaatcagtgaaaaacaaaagtggacaaatcaccaacagagaacggacattgtgtgcacagaccagggatcaccttattattcactgatcatattggcattattttccaacgcatttttttttttgatttcctttttccattaaaagtcgtctcgtaattcgattttccccatttatgtgtatataaattttgaatgatttttggccatcctttgggaggccattctcggtcttaaattattctctctcccggcttggcccaaaatggccaacaatttttggcattttgatttttgtcaatttcgtctttattacctttcccaactgagctgctgaattattaaattaaaatgagtcattccgtttcatcgtccgttacataattttgtattttgtgaatgcgttgttatcaatttgaattatcaaatttcctaaaatgattgattatttcggtccgatagtttctcgctcaaaaaatatcaattaaattttttcatcccgaatgcttaaaattttcgcagagtttggcatttaaatttcaaaattaatttctgaaaaagatggcggatgattcaccgcctccgtcgactctttgccattatcagcagcagccgaatgcttcacttaaatcgcacattttcgatgaaagcgactgctctttctcagtaaaaa

SEQ ID NO: 53141 - DNA, 1216 bp, Heterodera glycines
atgtatggaatttttcaaggtccccacatttacgaagcggacgcgcccccgggttggctcgaggcgggcggagccgccgccgcgacgtgtcgcaccgaaagcggctcaaaggcggccgccacgcgtgacgagcagtccgcgtgcggtacagcacaacgcatgctgttgctcgcctgctcagctgcggcggtgtgcgcggcagcgcacgcggcactgcgcaacgcggtacggtgctggaaaatgcccgaaaattcaacaaaaacccactgtcttctgtgcttcagagtgccgattatctgccactgctcccactgttggcacttgtctcctcaattggcatcgtatgctccgtcatcgtatggctgtgccgactccgtgtggactacggtagcaccgccactgattgtgggcaatattattacagtcaacaacaaattgggcggcatcccctcgagggcaaatggctgccaattggagcggtaattaacggctaattatgcgcaattaaaagaggtatttttaattgttaaggttattgccatgttcacttttgttcagctgtttcctctattccctcccattgaatgggccttttcttttggatgggttttcatcggtttgaaaaaatgataatgaaaataatttttgtttaacaaagtttaggcctttttcttcatgcttgcttcttggcgcgtttgggcaacaacaattaaatgattattaaaaaattcatttgtatttaattttgttttaattaaaaatttaaaaaatggattcgagagaagcagaatcataattaaaattattccaatgaatttttgaaggatccctgaaaatcttttttcggataaattcttaaatcaaacaaatcccatgatgaagtagaaaaagtcttttaaaagaaaattaataattattattttattgttttcagaaaaattttctcattcactaattagcgaaaatgccgtgattttgtttaaaaatgccccgccaaacactaatgagaaatgaactattaaaagaaccgatttaaaaaaacaattaaaaattgattaaaattgatcagttaattccgtcgggctgaaattgcccttctcagtcagaattttggtgatcagttcggccggtgtcacgtcaaatgccgggttccacacagaacaatcggacggacaaatgggcaccccttaaattcttgactttaaataataataaa

SEQ ID NO: 53142 - DNA, 1146 bp, Heterodera glycines
ttagtggccattctcgtcctccatcgtttgtttctcgatgacccctcttccctccgcctaattaggcgtcattctcgttctccatcgtctcaaccgtctcgaattagcgatcactctcgagactcgtccgtacaatcagggctctcggctgaccgcctttgagcttcagcagagcggcgtgccatttcgactgatcgcggacagtgcagcggcgagcgcaatgcgccattttggggttgacgtggtgttggtcggtgggtgatggggatgaagcttggcacaatataagaagcataaagaattttaaataacaattacacccaaaaagaccctccaattgttaagcctgattttggcggatgggccggcactttgaagaaaaggcccggaatgcttaaggtatacaccagggatggcacggaattccgatttccgacatttttggggcctcggaatgccatccctggtatacacaaatctcaatttttattgtttaaaaatgtgtgccaatttaaaaattgaattttcaaacattaataaattccgggccatctgtgccggagagttttcagagtgggtccggcccgaaggaatgtggcccaggccggtgggtcgccccatgcaaagaccaagcggcactcagatcaaacaaagtgtgccaacaaagtccgcgttaaggcgctgatcaggtggcacggaacggggacacggcaaacaaaatcggcacttatgcgctcgccgtgctcgcccactaccatcgcgtgccgttctttgttgtgacgccgatggcgtcggtgaacggacgaattgctagcggctgcgaaattccgattgaggaacggcccgcgcaggagctgacccaatggcacggtcagtgcaggatgaaaaaacatagagtttttttgccaggtttatgggtttcaacaatggcaccttctgggcttttataacatggcacttttcaccgcccagtttcttttaatttattattatttaaagtcaagaatttaaggggtgcccatttgtccgtccgattgttctgtgtggaacccggcatttgacgtgacaccggccgaactgatcaccaaaattctgactgagaagggcaatttcagcccgacggaattaactgatcaattttaatca

SEQ ID NO: 53143 - DNA, 480 bp, Heterodera glycines
atggtggtcacttctccgctgggcgtcggcgccgtttctcttccgtccgaaaatgttggccaaacagcgcttttgcccccatcggacgatgatgtcccgcagcaaaacggcccaccgctgatccgtccctcgtccgccgttgatcgccaccgcccacttcgccttgatcatccgcccatttcggtgccctccgctccgtccctcccttttccttccgcgcgtgccatcgaagcctttttccgacggggcagtgccattggcaccgccgggtcgcttccgtcacctccgacacgaaatgtgccgcctcccttcaacctcggaggactgttcatgctgaatgggggctcatcgacgggcggaagcgacggagggacgggtgaagaggagaagaaaatggcagaaacggaggaggaagaagcggaaggagaagaagaggaacaacggaaggacgaggaggaaaagcggcgggaagacgacgaa

SEQ ID NO: 53144 - DNA, 1286 bp, Heterodera glycines
gtgaataacaatagaaattgtcaaatttagattaggaaatcggaattgatcaaaataattgaaagattcgtgatcggggaccccaaaaaccccagagaataaatttatgactatcacaaaaaagttttgcagaacaaaagggtcccaccttttgaaaaaattttcaaaaatcggtaactttgcaagtagcgccccgtttttcgctgaaaactcaccaaaccattatgaagttaaatttccaaaaatacgaaaaatggcgttccggcggtgccgttaggcgcctccgtgggaaattctggggatttaaatggaattgttaataaaattgagtcaaattttcaaaattttcccattttcttgaaaattttttagggattcctcgccccctccctccccctggctacgggcctgctgacatggattttatgagaaaaaactcttccgaaaaagtgaaaataaatttttctctctcaaggcggttgctgctgcggcgggttgcaagacggagcatattttggacatggacatgttcctctacgacacacaaccagctgtacgcaattaagcgaagaaaaagcatcggtttgaccaccccaattattttttaaatttagactttgtccggactgaacgaagaattcatttccggcgctcggctggacaatttggtctccacgtacaccgccatcaaaggacttgtcgaaagtttggaggacaccgacgcttttgatacggacccaaatgtgcgaatggtcgcctgttttgacaacgaagaggtgggtgtatacaagaatcttaatttggcatcatcgacaccgaaaagtttcgtaatttgtctctcgtaaatgctgcatccggacagagtttgcggaaaaacgacgggggtgagacgacctgctccaccgctggttctcccgccgtcccccccccactcccgggtcgtttcctcccgaaaaactttttaaagaaaaaaaattttattttcgtggtgaaacaatgtaggggaaatgaagtgcacccgtatccggggaatgggtttggacttggaaaggggcggggggattggtgggtagagcaacccgtggaagcgaatttcctccgttttaggttggcagtcgcagtgcccagggggcccagtcgcactgtttcgagtggttgctgcgccgcgttttgtcctccgtggaccacccaaccgcctttgagtgttccctcggccgttccttcatggtcagcgctgaccaggcccactcggtgcatccgaactatgcacacaaacacgaggtcaa

SEQ ID NO: 53145 - DNA, 471 bp, Heterodera glycines
atgacaacttcttcttcccccgctgcctttcgttcttctgcgctcgcttttcttcagttcctcaacaaatcggtcacccctttccatggtcaattaatttcctataaaatgcatagtttttcatttaatttatctaatttatgagttattttgtgccgtaatttgtccttttattcgtccatttttagctgtcgaatcggtcgaggccattctgaagagtgccaattttgttcaaaagtccgagtatgacaagcttcaaattcaaccaaaggatcgtttctatgtcaaaaagtaggactaattatcgaagatattccttggcacggacatttagggttttcggcaattcaatttcaattttaacatttgaaaaattttcagaagcgagacttccatttttgcttttgctgctggcggtgcctttaaaccgtccgaagcgggggtttccattgtcgtcgcgcacactgacag

SEQ ID NO: 53146 - DNA, 732 bp, Heterodera glycines
atgacgacgaaggaagacctcaaaaatattttggaagcgcagcaaaaacagtttttggatttgatttcaaaaattttgcctcaaaatacggcaccaagtgccagttcttcggaccttttcagtcaaatcaacagtcaacttccgcaattccactacgaccccgaggcagatgaaacattctcactttggtgggatcgttttggacaatttgtcgagaaggacggtaaggatttgaccggcgacatgaaagtgcgtttgattttgggtaagctctcggcaacggattatttgaggtatgaacagcaagttcttcctaagaagccagccgaaatcgaatttcagcttacaatttccactcttaagtcactttttggcgacactaaatcaatttttgtcaggcgcttcgaatgctttcagctgtcgtgtggcccctcacaaaatgtcatggagtttggcgccatggtcaacgctcgctgtgaacgcgccgacatgactctgtcaaaggaggaagtcaaatgcttgattttcatcacaggtctgagcgacgcgcacaaagaactccgacaagagtgtctccgccaaatggaaaaagcgcgaaagtcaacgccaccgaggtccatgactttggaagcacttctggaagagtgccgctccatccaatcgcttcaaaattcggccgccgctttgtctggtcccgggcaaattcattcggtgcaggtccgaccacaaaga

SEQ ID NO: 53147 - DNA, 1675 bp, Heterodera glycines
cattgtgcgattcaatgctctaaaatatgcgtatgttgtgtcgaacaaagccctggcgtattgtgacggataaaaaataacaattaaatgttttgtaatttttatttttatacggtaaattgcaaccgattgttctcctgcgtcgcccatgcaacttccgttgcataaaaagggataagtgccgaatttggtagtcaaatttcggttgaattcatcgatctgatcactcgattggttttccagatcaatctgaacaacgaagactactataaaggcacttaaacaggactatcattggaaaaactcgttttccaaggacgggtatactgatttccaaggacataacgggaaatttcgtgaaatccaagggccagtaaaattttttgtcatatgcaaagtgctcattttcaatgacatcttgaattcaagagtattgtgtagttttcaagtgagagggctcaatttcaaggacgtacttgccattcaaggacgaatgcgagccctgcacttagatttgctcttggtctctttgccatgattgaccgaccatgatcacgtgttttgtcgcggcgagcgcgtccgagtcgcgcccatcgctcgggctgtttttgtccacccaaatgttcgcatatttgacactgccgtcctcactggatgaaactgaaaacaatttataattaattaccccttccataatttggccaaattgcctaattagcctgctggagcaatatttggccattttgcctaattaccctgctggagcatgccctggttgcgcagggatcccatgatgaacacaaattcgttgtccgcagcaagaccagtgtcgaaaatggacaacagaaagttgcgacggtcaacctcgacatcgaaacaggaaagcacaactaattgatggtaattagcgatgctatcaaattaattatcccatcacttcgcgatcggttgcgcagatttctcagcgtcgccttcatactgtccacattggactccatctgatgctggaaaacaatggtcacattggtcacgttgagcacatttgtgagactctgtttcaccgagttacagaccctaattaaattatattaatagctaattaattaattaattattcaaaataattcttacattcgctcattgtccggagtgtacacgaaggacacttctgtccaattgaattgcaccaacacactttgtaaggccaacgccaacctgcaataattgttgaaattaataagaaatcattggtcatttgattttgtgacggctcgtaaagcaaatccattttagtttattttattggtagaaataataattttaggggatggaaggcgaagaatattttctccactgacatgtccgagttaacgttcacgttgttcagtgtagggtatacggtagtgttgtaaaattccgaggccacagtagcaccccacaaatacagtggaatgttgtagaaggaggccacgtatcccgcggcgatggcacctttttcatttacgcaatttttggcaaagtgtcaaacaaaaaggcattactggtcacacaaggcggaccgatcaaagcgtccacattttccgtcagaaccagttgagtggcgtagccgacagcccaaggctgaaagcagccgcacattcgccacgtgtaactgaaattggcatttacggccaat

SEQ ID NO: 53148 - DNA, 1675 bp, Heterodera glycines; identical to SEQ ID NO: 22475

SEQ ID NO: 53149 - DNA, 1173 bp, Heterodera glycines
atggacagcaacaggtcatcgtcgttgcgtgccaacaaatcagaacaacaaatggagtgccgtaattgggcccgaaaatcgccgttggaaatcaacaacaacggcatcaatgagtgagtttcgtcattttgaagatccctggaggaaaaaccggcaaataagttctgtcggggaatttcctcctcttgatccccgcttaaaagtgataatgctatgatattgccatttcttgtatagctttgacatccgctggataaaccgcaccgactcgttgaacatgttgggcgccggtgccatgggctgcttcttctacggcgctgaggaggaaacggaggacaggtgagctctgatgctctgatgctctgtgtgttgtgtgtgttgtatagtacaccattcgtggtcagaattacggtaattggtcaccatcccttagattctgattgactgtatttgttaggttactgtatttttgaatcgtatcgaacccattaagcatccctctccccctctaacattatttgattgattggacgaaaggcgatctaatttgatcaatcccacagttttgttgaccaatgtgcaaaactattaagccaactagatcatcaggttttggtttgatcacttcctcgcgaataaaactgatttcgaatttaatcaatttgtcaagccgattaactctgtttgatcattgatcaaattcgtttgatgggattttgatcatgtaaattgctcccctggtcgatcacttttgctctcattaaaattgctcctctggtcgatcatttttgctccctttcttttccagcggtggcactctccgcattccatgcgctgacggggaggagaacaattcgcaggagaactcgcgttccgcctcctcgcttaacctgtccgcatccgcggtcagcacggcaccgctggccgcggcgacaacaccgacggcgacggcggcgccgggggccggcgcttgcattgtcgaggcgctggtcgaatgtcatgccgaggcgggcgctgaagaactgagcgccaacgccgacgacaatgacggcccatcgacgcagcaacagatcacactgacggcgctaggcgcgccgacggcgacgaagccggacaatggcgacgacacttccaccgaagaggaggagacggcggcgccggatgatggaaaag

SEQ ID NO: 53150 - DNA, 789 bp, Heterodera glycines
actcaattatctgactttccaatcgctgggactcaacccaccagcatttcactggactcaatccaccaacattccaatcactgggactcaatccaccaacattccaatcaacgggactcaacccaccaacattccaatcactgggactcaatccaccaacattccattcaacgggactcaacccaccaacattccattcaacgggactcaacccaccaacatttcaatctctgggactcaaatctccggcattccaaacaatggactcaaatctccggcattctaaacactgggactcaacccaccaacttcaacgggactcaatccaccagcatttcaatcactgggactcaatccaccaacattccaatcaacgggactcaatccaccagtatttcaatcactgggactcaatccaccaacattccaatcattgggactcaacccaccagcattccaatcactggcactcaattctcctacatttcaatcactgggactcaatccaccaacattccaatcactggcactcaattctcctacatttcaatcactgggactcaatccaccaacattccattcaacgggactcaacccaccagcattccaatcactggcactcaacccaccaacattccaatcactgggactcaatccaccaacattccattcaacgggactcaacccaccaacattccattcaacgggactcaacccaccaacatttcaatctctgggactcaacccaccaacttcaacgggactcaatccaccagcatttcaatcact

SEQ ID NO: 53151 - DNA, 207 bp, Heterodera glycines
agattagaagaggtacaacagtgattagaagaggtacaacagtgattagaagagatacaacagtgattagaagaggtacaaaagtgactaaaagaggtacaacagtgattaaaagaggtacaaaagtgattagaagaggtacaagtacaaaagcgattagaaaaggtacaacagtgattaaaagaggtacaaaagtgattagaagag

SEQ ID NO: 53152 - DNA, 285 bp, Heterodera glycines
atgacaagctgtgccatattgaaaatcaaggacattggcaatgcttccaagccaaatgaggagccattggcacaaattgtccattggtattgggacaaaaatggcgcacaacagatcaatgatgtaagaaaaaaaaaagattaaactttaaaatgattaactaataaattattttagacccatacacttaacaagggcagtgaaattaattgtgcctgtgccaatgcttcatcaattgttatccgaattctcaaaaagcgggagaagaagcccgatgaaaagtaa

SEQ ID NO: 53153 - DNA, 516 bp, Heterodera glycines
atgctgctcaaattggccgactatttccaggtgggtgccattacgatatttctctaaaattaccataaattcaattgattttcaaaaaatgatacttaaatttgaatatcctttatcaaagagagtttacccataattttcaataaaaaattactttttactcatttttaaattcattaggctaattattaggggcactaattgctccgttttgaggttgccgcgttgaagtcgcgctgcgaaacgcatctgatcaattgtgttgaaattccgctgatcgaccgttttcttttgattgagcgttttgcactcgactatttgaaagtgatttaattttttaatatttttaaataatttttaaatgatttaattgcttttcccacattttagaattattttttgcattttgatgtcaacaaattccgtgccttttttaatgcgaaccatgaacagtttttgcctgttatcagcaaagaatttttgtacgctttgtctgtccgactgtccgaacaatga

SEQ ID NO: 53154 - DNA, 730 bp, Heterodera glycines
atgaccttagttgcaaatcgacacaaaacgagaccatccatcgcaaaattgtgtgtttgaagacgtggagtatattaaaagaattccaacaaaaaatcgcttgctggaataaaaatttaatatcatttattaggaattagtcattaataaattaaatcatgtatcacgggtgcatttaaaatatattaaaaatgaagttaaaaattataccttttgaatattttaggtgcattttatattgtatattaaaagaagattaaataactccaagattaactaagtttcataattaaattctacaattattcagaataaaaaaaaccaacaattcgacatttaattttattataaaagataaattaatcaaataaataaaaattaattttcatgttattaaaagtataatctatttaataaaaattaaaattcaaggtaattattgaaaataaaagaaattaaagtaacttaatattatatttcagaaaatatttggcaatttcattatttggaacagggatgggcctaattgaaaaataaaaagcgaaatgcgaaaagcgaaatttgcgaaactgaaaaatgcgaaatgaaaaaaaagcgaaatgcgaaaagccaaaatatgcgaaaatgcgaaatgcgaaaagcgaaattttttctacaactttttaatagttaaaatcataaagcaaaaatcattttttaaaattttattccaaatttaaaaatcaataaa

SEQ ID NO: 53155 - DNA, 1083 bp, Heterodera glycines
atgaccattctcaaaggtcaaggccaaacaatcagcacggtcggaattgacctcgaaagggatgtgttttcccatggtcaattgtacactgccttttcaagggcaacagacgggaacaacgtccgagtgtacgctcccagaagggagaccgatggccaaggcggagtcaaagtgctgaatattgttgcaacgaaaatgctcaagttgcaataataaatccagcgcgtgcgcactttatgatgtcaccccgttctcatttgcacttaaaacggacacatattcaaaaaagtgctgacagctggactgagggaggcaggtgggccatgacgtgcgagttagggcacttccggtttccattgcattgaattgcaatgtgtcaaggtgaaaccaagtgcatgtcggctgacgcaaagaccctaacacaaggcctaatggggatggaacccatccctctgaacactctcatggagaaggataccatcctcctaaacgatcttacggggacgttatttttttctttgaaaggattaaattttttttctttttagttttttttagaaagagattttttttcaataatttttcaaattccctggaacttttcaccattataatacatgttaaaagagtaatatgaactccctccatatctccccaaaccaatcgaaaattctcctgatttttatctatttttaaggctttatttctgtaaaattgatcaacccttcgatttgttatgaattttcaaatattaggccaaaaacccgaggtccaaaaaattgtcaaatattttcaaatttttaaaaaattccaaaaattctgaaacttaaaatagacatcatattcgtactcagcaaaagtgtttaaaagaggtacaaaaatgattaaaagaggtacaacagtgattaaaagaggtacaaaaatgattagaagaggtacaacagtgattagaagaggtacaacagtgataaaagaggtacaaaagtgattaaaagaggtacaaaagtgattaaaagaggtacaaaagtgattaaaagaggtacaaaaattgaatgcaatttattataaattttaaaaaataaa

SEQ ID NO: 53156 - DNA, 2226 bp, Heterodera glycines
ataatttaaaacttttagcattttaaggcattaaaatattataacaacaataattaataaaataattcataacctctaaaagtggtattttttaaattattatacttaaaagaaataaaaaattttaaaaagataaaaagcaataaaattataatccaaataaaagagtaaaaatattaaaaaaaaattcaaactaataaagacacttatgagaatggaaatttatgcttgtaaatatattattttattaataaatgaccacttaaaattgtaataataatattatgctccatcgccattcaaactaaagaaatctgctaaaacagaataagcatttggcttggaattggactagtagtataaatactaaactagcgggtgcgtgaaccgtcggctatttagctgggaaaaagcgcttcgcgctttgggagcttcgctacctagataagcattgagtttttttagagatttggaatttattttaaaatcttaaggggttttaaggccgcttcgcggcctcagacgggcgcttcgcgcccgttttttaaattgttgagctcatacgggcgcttcgcgcccgtttttaaattttgatgtgcattttcggccgcttcgcggcctcagacgggcgcttcgcgcccgtttttaaaattttgttggaccttttcggccgcttggcgcccttttccaaagtttgttaagcttggacgggcgctacgcgcccgtttttaaatatggtttggaatggacgggtgcttcgggcccgtttttgaaattttgttggactcatacgggcgcttcgcgcccgtttttaaacttggttgggcttgaaccggcgcttcgctcccgtttttaaattttggttatcagaagaggtacaaaaatgattagaagaggtataaaagtgattatgagaggtacaacagcgattagaagagtgattagaagaggttcaacagtgattagaagaggttcaacagtgattagaagtggtacaacagtgattagaagaggtacaacagcgattagaagaggtacaaccactgtcgaaaaggtacaataattgttggagaggtacaaaaattgttggaatggtacaataatggttaaaaagggtacaatcatggttttaaaattaaataattaaggaaatcgtttattaaaaagtaagattaaaaattgaatgtaattaataaatttttaaaaataaaataaatttccttttattaattaaaaagagagtttaaaatgtacagggattgaatatttatttaaattgaaattaagaaattaatattacaaattctaatttaaaaaatacaggagttctttaataaaagtaaataaattattattttaatttaaaacatttttcacaaaaaaaataatttaatttaaattaaaaatttttattttttatggattaaacaaaactatttatatttattaaaatgaaaattaataatataatatttatttaatttgaaatgaaattaaatatgtaaaagtaatcaaaaaatgcacagaaattcttggaaatgacaaggagctgctcaatcgtctgatcctcgcaccacacattgacacatgcgatgagatcaacgaaatcatgatggcgaatgtgcctggtcaagtgcgcgaatatttgtcctcggacaaaccgcttgacgagcggccactggatattgatgaaatcgagtccgaagtggcagcgttgaatcgacgcacagactctgggatgcctccccaccgtctgcgactcaaggtcggaagcgtcgttgttctccttatcaacaaaagtgataaggaaggactgatcaacggcacgcgcatcgttcttgaagaacttggcgacgatcgtctggtcggtcgcgtcattaacagcaacgctgttggtggccaagttaagttcttcatcgaacgaacacgcaatgtctacgaggacaaaacgcctggcggcataaaatatgagcgtttgcagtttcccatcaaacctgcctttgccatgaccattctcaaaggtcaaggccaaacaatcagcacagtcggaattgaccttgaaagggatgtattttcccacggtcaattgtacactgccttttcaagggcaacggacgggaacaacgtccgagtgtacgctcccagaagggagaccgatgcacaagacagagtcaaagtgctgaatattgttgcaacgaaaatgctcaatttgcaataaagcaaacg

SEQ ID NO: 53157 - DNA, 864 bp, Heterodera glycines
  unsure (1)..(864): unsure at all n locations
atgcagcagaaccgccgaccttcgaattcattttggccgagacgaagcacagggtgagtacggtatacttacctgtaaaaatgatattttctgtcctttttttgcagtgccaacaattgtccacaatgttccattgaaggtacaaaagggacaaaaaagtgtgccaatcactgcagatcatctccaagctacggtaacggtcactgtgtcccacttcctacggtaattgtgcttgaaactgttcagcacccttcaaaaatgccgagtgaactccattttatggtatggcaacaacagggcggcgcacttcaaaagggactgaacacgaccatggacactttcacgcaaaaggaattggaccacggctttgtccgctttgaaattgacgaggcgaagggcgtgccggtttgctttttgccagggccaaaatcaacatcgacttttataggacacgaaaatgggcttccattttctgttaaacgacggtcgccatcaattgggccccgaatttttcttgttgcaatttgacgaaatattgccaagcaaaaaagaggacggcacaatgccaactcagtcgacattgagcagtacaccgacaattcatttgcctgtgccaagtgtcgcaattgggccaaaaattgaacgaaacgccaaactcggcactgcgccgggtgtccctgcggtgatcggtcctaatttgctgaaggcgaccggcggagggaaaataccggtcgaaaaagtcattttccacctgacaaagcagccaatgcacggccgactggtgaatggctttccgagaactgctcgggactgttgtccgcttctgttcagctgctcaacggctccctgnggcggttggagcgg

SEQ ID NO: 53158 - DNA, 1305 bp, Heterodera glycines
  unsure (1)..(1305): unsure at all n locations
atgccttctaagcaagaaaaattgcggaaaaaagagcaagagcgttatcagcggcggacggagaaatctgtcagtcgggataactcacccgtcccagacgggagtgcagatgggaatggagaggcatcggcatctctccagggcaccagcaccccaagcttaagtgctttgcaaataagcacgccggcttcttccattggaagtaaaaaaaggggaagacccttgagagccggagcgaagccaattttggcaacgcaagaaactgtgtctgcaattgacacacctcgagctgctttcactcaaagtgaccaaggttcgccgtgcaaaaaaataggaaaggtcgccgagtgcgaccaaccaacgtttgccaatgaagctattgcttcaacgcctgtttcgactcaaagtcgtagagggcgaccagttaagcaactgggagggcatgccggtaaaggaagaggcaaaaccaacgagtctatgagcaaatgctctgaaatggaccaaagtgtggaaaacgctctaagtccggcaccctcgcatattgtgtttgaaaaaattgatttcagcactgtgcaaattaatttcgccacatcgcgaaattttgcctgtaaaatttggagatgggcagcaattggcctttatgagcgtgatggcgaaacagcacttggcccacgctctggcccaagattcattgagacctgctggaacaggccaaatgaatggctaaatgacagctttattgttgcctatttagcttacattgcaagcatttcacaacgaaagacagtagttgtggattctttggcatcgagaactgatgtttctcgattttccaacgtgaagaattacactttcggctatgatccgaatgctgttcctgaagttgtgcttatgccgcttcacttcccaaatcactggactctcattgtctacgatgttgcacatggtgcatacttcgttgactcgctgcatatgagcagcttgagtgatgagagaatggcactcatccagtcaataattgctgagatagtgcccgggagtccgtcattagctgttgaatacgtacagcaattgacaaagcaaaatgatggtaacagctgcgggtacttcgtgtgcctgtatgctgaatcgtggcttatgaacaattgcacttttgttctgccggacttgaacatcaattatgagaagaagcgcattttatggcacataaatgagctttacggctctgatattgtgccgtttcatccaaggggaagggtgtttcacatctttcgctngtgtgtctcatcacaatgggggatgtag

SEQ ID NO: 53159 - DNA, 1371 bp, Heterodera glycines
atgatattcggacagacccaaaccaattggcggagttgcgagtcgctgtcggagtgagccgtaagctcaaaaataattcggtttttgctttgttccgtcagtgttgtccatgtttacaattagctgttgcttattattcgactttgcatttaaattcgccaatttcagccgaagcgacggaggacgcttttccatgagagggactcacaatcagtcgaccaaaggacaaccgaaggcgagcgcagcgaaagccgtcgttcagcagcaaagccctgaaatggtggcatggctcagacggaaagagtacgacccgcggaaggcggcggcagaccaaagccaaagggaagcgcaacagagacagcagcagtgcgttggtggggtgggaggcaaaaaaagtgaaagcggcattttccgaaagggcgcgccttgcgccattggcactccccgaggaaaccctcaatggtgtggggaacgagtgggtttttagtgaaaaatgtatttgttggtggttggaaagtcagtcccctgaatgtctatgcttttctaccattttcttctttcaattgagtttcgtctcgtttttttcatcctcattgtgttttccattccctttgtgaccttctctattgcttaggaactctttcatggcttgtcggtttttctccacctcggcgaatgccaaaacgcccttcgcccgatggcgtcaaaatcgcaagagtcagcagacgatggccgaccaacgaagcaaccgttcccacgacgatttgagccgtctaggggaaagtatggacgacgagtcgcttcatggcgtggctgtcgatccctgctcggttttgttttacccgcgacgctaatttataaccaataaaaaattgcagaattcgctccaacggacggtggacgaattgacgcaaaagtgccacaagtcgattgaacttttgaagtcagttgtttcaaatgaaccaaacttctggttttaccattgtcccctcccccacagattgtgcaaccaatccggcctttcttcgtccgtggagcaactgctcgagaaggtcgtcgaaggaagcgcgggcgaagcccaagtgcattttggaagtgcggattctggtgcaaaggcaaacaatgagaacatttccgatcgcttggagcgcctttcttccgtaagacgcaaatcatttttaatttaattttctcattgccaaaggcatttgacgccatccaaaaatacttggaggagcagacgacaatgagcagttctcgtgtctcattagctgctttaactgggttcgatactttttaccaattaaatttaatttgtttttagtgggaaaatggcgacgacaaatgatgtgaaaaagcaaacgcagggaa

SEQ ID NO: 53160 - DNA, 540 bp, Heterodera glycines
aataattataataattaccgcctctcccttcacaatttttcagctctttaaaagcaattattttcgttttgccatgcgcactaattattctttattgtgtgacggttattgctctcgcccagcgacgcctttccccccaaattttgtcctttcgaccgctcttttcgtcctcgtttttgtccttgtgattacaaatataatcactctctttttgcttctgacaaaacgtcatcttcgaattggcttcaatgggcacttttcatttgcccccaccgacgacgaaaacggcgaaggattcgaaactatcggcggaggggccaacgacggacagaacccttttttgaaggaaaaccgatgacagacgaacaatcaatggggaggaaacaaacgaccgttaaaatggtgtccttatataaaattgttaaactaaaaaacagaaaatctcacgagtcgtttaaaatattcctactgattagcaaattatgcggagagatggtttaaaaatattatttatttcaatgaataaaataatggaaaatt

SEQ ID NO: 53161 - DNA, 899 bp, Heterodera glycines
atgtttaaaagtcaatttcatcaccttgctcttgcgtttttttgtgcgacggtaaacggttttgagctgctatgtcaaaaaggttcttctacttactacccacagaaatttttattcaaaaacaaaaaaaatcttctggaccatttttgtaaattttatgtccaatgctttggggtgcgttttctattttgtttaaataaagaaaactttcaaaaaatgctaaaataaaaatcaaattcttaattcatcaaaataaagtaatgtaaatttgtcctagacgtaactcaagttttaaataatttttttttgtgcttcgggcattaaaagccagcacaaattccactcccaattaataaagattttgaaatttcttcagatttggtctcaacgcaaaaggtgttgctggactctgcgctttcagttaatttttcaattgaagataaattttttgaaaattggctccatgaatatgccactgaagttttttgttgtgaaaaattcggagagaattttgatgattttgattttgatattaaccatttgttggaagatgctcaaaaacttcgcaattcattttgtttggaattgaacaaaagcaaacatttggaagtggcagctaaaaatgttgcgcatttgacccaaaaattgacaaatgaattaaaaaaggatcaaaaaatcagacaaaaaattcagaatacagtgaaaaataatgggaaggaaggagacaaaaaattggaattatcggaaataagaaaaatgaaaaaagaatttgaagacaatttttcaagtgaaaatatgaaaaaactaacgaacggattttatttttctctcaatgaattgtttaattcaatggaaagttagtttcttattttcattaatcaaagcttactcgaaataaa

SEQ ID NO: 53162 - DNA, 111 bp, Heterodera glycines
gctggttatccgttgccttttaagcgcccctcgagatgggaggagccctatcggagagataaaatggggggggggggaagggtaaaggccatttccggtcccggccttaca

SEQ ID NO: 53163 - DNA, 3062 bp, Heterodera glycines
atggacggaaaaccgctcataaaatgtgtggcgattaaatccgtcattcttgaatttgacaacgcaacgccggaaataattcagggatttgaaaaggaagagcattttctgatgatgtttagaaacaatgcaaaaatcaaacacatcgttcaccttcattacatgttggttaaattgaaaatatttaattttaaatgtttttaaattgaaaatattttaattttaaatgtttttaaattgaaaatatttaatttaaatgatttaattttttttattctaacaaatctgggtagatttgatttcggttccttattctttaaagtccaagtctttcgtgggttggaatttcagattttaaaattttggaattccttataaatttacaggccgaaaaacttttatttgactttaatgccttcgaattacatagagaaatgacattttgaaaaaaaactgtgcctggacgcgttaacctgggccaacctggctctaattttttggacaaaacccagagaaaatgaagatccagggaaaatccgagttgccaaaaaactacctgggcctgaacaggaaaaacacaggcctaggtccaagttcggtagtgttttacttggagttttttttgtgaaaactcaatgtgttgttaataaaataaaattaatacgttacgccaaattcaggaaaaaagattatgcaaaaaatcgtctcatcatcattttggagttgggcaggcatgaccttacgaaacgtatcaaattgatgcgagaccaatggaaaatgtattggggttcaaccgcagtgagcattgaccgccaaattataaaagtgctgcggcaggtgctcgcggctgtcaatgaaatgcacggaagtgagaattaaatcaaaatctttgtaaaacaaaaaaatgtttttttgaaggcacctcaattatttaagacccaaaatacgtttggttttagttagctaagcagaaaaagtgattaatattggcttaatagtaaaattttcgcccaagcgtcaaaaattatttaaaaaagtccttccggtttttttatgattggcatgatctctattaaaatttatttttatttcgagaaaattgggtaaattataaatttggatactggttgcaatctcataacaagaaaatccactcaactgacacttttgcctaaatacatttgattaaaagaggcttaatagaaaaattttctccttcgcgacaacaattatttaaaaaaaggcattccggtttttttttgtgattggcatgtcctgattaaaatatgccgtcgggggatgtttaaaaaatataaatagaaaataattttttttctttaattcctccgccgttcagaaaccattcatttggatttcaaagcagacaatttgctgtttgttgaagaatttaatgcttctgggcgtaaaattggcgaagttttgaaggtcatcgattttggcggaagtgaaatcattgacccattggccgaaaaatcgaacgaggcctccgcagtggccaatgtgtgtcgcgtgcgcacgtcaatgtggagcgatgaccggtacagtagcccggagcagaacgtcacttgtgccgagcaaagcacagacacgatagagtatacggtagactatttaaatttatttacatataatttacaaagatgtagagagaccctttgcttcgggagggggctaactcaaaaatatggtttttagtgggtgttttttccagaatcccgattagggggtatgttttttgattaattagagtaattttcatattattgtcattcattcaaaaacttaaagcccagacgctttccattataattattacctcttgtctttggtttttaacaacaaaccagaatattcaaatgctaaaaaaattatttacccccctagctatgcccttaataatttatatgaaaaattgaacaaacattaacgaattttgcttctgctctttttgtcggtttaatcacgctcagtttcgcgagacttttttttcaaagctttacacgctacccagtaaataatttttttttttattgctttaggtttccacaaaatccgacatttggtccattggcgtaatgttggtcgagtttttgttgatgacgccgcattttcctgaaattgatccaatcgcagaacgaggatccgatgatgctaacaacatttacaatattgtgattggcatcaatcattttcattattcaccggcagacaaaacaaacgcagtcaacaaacaggccactgattatatgcacaaaattcaaaagcttttcccgatgttgtcgtcgataataaaggtaaataatatatttatgcatgaacaaattgccaaaaaaatgttcggagatttttgcctaaaaatatttacgaatcgcttaatttctcattagtgggctgaatcgttagcaatttaactatttttgctggttttttttgcaaaattaaaaaattgtctatttaaaatcaaaaacttaatgaactgaaagaataaagaaatttaacattaaattagttctttaaaaaacacaattttttaaccaaaatcggtcagcctaaaattaaaatagctgtataaattccaaaattagttccttttttatgtttgcaatgcaaaaaaaaaaagattattggcacactccgtatttttaaatagctgaaaaatttagaaatattttttatataaaattaggcttgtctggtgattaacccaaaacaacggccaaccgcgaaagggattctccaatttttggacggcaaatgccaatttggagagtttgaaaatgaaaaagctgaccactaccaatttgatggaaagcaatacgggcaagagttggagagaaggaaaaaacgatcagtttcttcaatgttagatgggcaaaagttttcattgttttcacatgaaattttggaatcgccgccggaaatcaaattctgtgacattggaaatttgaatggaacgaacaattaatttgttttaattttttaaaatttttatttatttgtagagaccggattttttggtgctaaaaatattcaaataggta

SEQ ID NO: 53164 - DNA, 881 bp, Heterodera glycines
atgcattcctttcttgtactgaccattctttttgccaatttggcaacaaatgcttttgggcaacaatggccaaaggcaactagtgaagaaactgttaaggcaacaatcaaagtttcgggaggcgtcaaagactttggcttcaaacggttgaccgcctcttcggcattgggtagcggtgatcagtcggagggccaaaaagcattgatccgtgccgaaaagaacgcagtgatcaaaaatttgatcattggccaaaacggggcggacggtattcattgctatgacgggtgcactctgcaaaatgtgtggtgggagaaggttggagaagacgcggccactttccggagcagcagcgggtgcaaggagtacagtttcacggtcacaggcggcggtgtgaaaaatgccaaagacaaagtgttccaaatgaacggcggtggcactttgacgatcaaaaattttgtggtaaaatttatcagttttctcggacttattataacttatattatgaaatcaatttcgcatttcccgccaatcatagaactaagctaaagtaattatggtgtgcattttggcattaatttcaggcggaaggcattggcaaattggcgcgcgcatgcggcaactgcaaaacgcaatgccaaaaacgaaagtttgtgctggagaacattaaagtgactgggctgaaaacgctgttgtgtggcctcaacgagaattatggtgatgtggcaaccatcaaaaatgtgcaaatcaccgggtcgaagaaagtgtgtgccgaattccaaggcaacaaccagcaaaaggagccgccaatgttgcgcagtttcgacgtcggatcgaaaggcgatggcaaaaattgcatcatttcgggcaccaccagcggctga

SEQ ID NO: 53165 - DNA, 214 bp, Heterodera glycines
ctgcttctgctctgctcatcatcgtcgctgcttctcttgtcctcccgcaatgtgccgcggtcggcggaatggccgagctgaaggcattgaccggcgacgcgccctatttgggcaccggtaatcaagagcaggcgccagaattttttggcgaagcgttgtcccgccaatactaccagaacccggcctaccggtacaacgactggtacggcacacg

SEQ ID NO: 53166 - DNA, 2079 bp, Heterodera glycines
atggagattccactaccacttgaaccgagacgccgtcgccttttcgagtagggatttccttcagaaaggaatttgtaaagggaggatggaatattgagtaaaaaaatattaaaacatatttctggggtcgttgaggagtaaatggcttaacactttcagaacaaaatgtttttttaggatttacttacggattcatacaaaatttgaaaattattgctgattcttgatatttttcgattttattatttataattttgtcttggcacctgaaacattcatttggcgactgaaaaggacccggacagttgtgccctgttttctgctgggcgggaaaataaaaaaaactaaacaaagttaaaaattcatatttaaaaatggatattttattaacgatagacctaattgtaagagaaagaagtccaaaaatccaggtttattctataaaaattataatttgaattaatttttttaacgcttttgccaaaaacccctgggaataattattaaaattaattgttatgctcattggcattcatcatcttttacaggcactttacaagcggaaagattgcattgaacgatgatcaactcaacaagctgtcccaagactcctttggcttctctgcgacgcgtaagttgggcccataattagaatttatactgaaaatatataaaatttggcaaaacatctaatttttgtatgcgagtggaaaaagattacctgaattcttaattaacaaattaccattgccccttcccaaaaccgtaaaaaatgtttttcataattttttttcaaaaacaaaacgacaagtcaggcggtgcggaaaatttttggaattgtaatgcacttgttgaaaaaagcgtatttttttccttttaaagaaattctcgcaacggtgaaccgtgctggcgcacaggccattttggacagagtgccgcttacgttcagctattttgacaaggcactcggtgggtgataaaattcgtgaacttgttcaacttgattatccctaatgccttattaagttgagatcacgagggatgtggaaaaatcatgggacatcccaggtaaacgagcagcaaccatcgtagtccatatccagaaaaatatacgagaggaaaaaattgggggggaggtgaggggggcaccaactgaggaacaaaggctttttttgctccaacaaaaatgtttttcaccaatttcctgaatttaaatgcctcgggagaaaatgactttttcggttttcgacaactgcacataatgattttttttttaatttaacgaaatgaaggacacggcgaacgggcaccaggaaggacagcacaaagcgaatagcggcgaaaaatttcctatttatgtaattgcgatgcagggcgaaacaatttttcattgctcatttttacaaaatgatcatcatttctcatttttcaacatgatcattgatcacacctcaaaattattttatcatttgccttccatttattatataaatgattcaaactgaagtttgctaatgaaatggcacatgcagttttatattcgggcagtttaaatgtttttataagtcgctttaaatcataaattgttcaaaaagttttttgggctctcgccataactaacccgtagaaaaaaataagtaagaatataaaaatcccagtttacgcataagatttttaaaaaaacagtatttggttataaatacaagaaactaattactagctttatagaaaaaatcaaaattagaaaacccgaatttagtttttttttttttaatatcttcaataaaatttaacatttttagtcaaaatctgttaaaaaacagtccaaagttttaaaatcttttttcgattgtccttttggcaccgccgaattccaaaattcaattgaactgggtacgaaaaattcaatcaattcaagtattccattggaaaacgatttcatctaaaaccttacaaagatgttgttttttatcaaaatgtatttataaatcacctcaattaaaaaaagatactttgtgcctatcggcatcccatgaaccaaaaaatgccaaaatgctctaagcgaatataggtaataaa

SEQ ID NO: 53167 - DNA, 921 bp, Heterodera glycines
atggccaaaagcgacaagagcaggaaaatgacagaagtaagcgatttcactttatagcataggaaaggaacgaatatcctaaaaagcggaaaatgttgacaaatcgcatgtcagtttaatgtacagtggccatagatctaaacaacggacctaaaacggtctgagctaacggcataagcctagcttatgctttagccaaagtccagaggcctttacttggccttcagtcgacttagctaggacggtctaagcaaagactaaggctagctaaaactaacataagctcaggttatgtgtaagccgaagtctaggccaaagattagtcttatttttgactttcatattttagcttgaatagtttttttaatggaaatatgcaaaatttttatctaaatatttctctgctcgattattgcgttttccgatgcttttccttcataccgaaacattttcttggatgaaaaatccgtcgctttccctttcatagggcattggagtgacgttcattttcataattggcaaacagcttaacaatggcacaaggaacacaatcagtgccaatatcatcaaaaatgattgactttcccaaatctaatggatgaaattaaaatattaattaatattttaataattaaaaaaaacccttttctgtttgagtggaaatgcaattgcagtgaaacgattcatcagaatgagaaaggtggcaatgttcgaggcttggtaagcgactgttgttgcaaaataaaaacacagaacgatggcccagccgggcatcatacggtaaaagggcagcaattgttggccaaacagtgctgggatacggttaccgtaactggaagagagaaaccacagaatgtccttaacatggcatatttgaaaaattattcaataatttttagtatcgaatttaaaacgggataa

SEQ ID NO: 53168 - DNA, 755 bp, Heterodera glycines
atggccaatgtgatttgtcactgttttggtgctgcattggcacaggcgcaaaaattgtcgacagattctgccttcttggacaaagaagacaaagtgctgaaaaaaccaattgtggtcaaaggtgttcagttagtggatgggaaaatggattttgcaattgtgcaattgaacacagcaaatttggcaaaccgaaaaggcgtgaaaaacatggtttggataaaaccaggtgaagaaacacaaaagaagcctggagaacatatttacaagtaacttaaattttaggtttaccattctacaagaccaaaccaatgcatgaaaatctgaaagccattgaaggacttaattccgaaactgtgcgaaagttttgtgcatttttgctttatagatgagtgctgtttatgctgaataaatcgttttatttcatttcgtttcttttatatattgaacgtttatttcgttatgacatacaaagtttcaactttttacacatttttaaatttggttaattgagaaaggcattaattccattgcttcaaatgtggtacgagagattgcccatgattatcgcggccgttagtatccccgcattttgtaccagcgactattacccactgcattggtatgggacgaatggctgcaaacatcatcgagttctgaaaggacatgagcagtcggctctccttatccgcgacagagagttgaccggctacgaatacaatttgatgggcatcgactcaattccggaggaggattaa

SEQ ID NO: 53169 - DNA, 222 bp, Heterodera glycines
atgtcaatttatcacaacaatcatcatctgacggaagacagccaaaaatatcggtttttaatcgacaaaaatggcgaaatatggacggtgctgcttttatttatgcgaattgacccttcgttggcgggcgtgttcagtttcatcgcctcaaatgagttgggctacgacgagaattccatcttcatgcgcattgatgaagctgcaaatcagaacatcgcccaa

SEQ ID NO: 53170 - DNA, 607 bp, Heterodera glycines
atggactcgttggaatttacgaaggcttcgatggacatgaactgctcacacaatcggagtcctttgggtatgccctactaaatgtctatttaacagttctaattttgtcaccctaattccatggaactttcacaggtacgcaataccttaatgtggacattgacattgaggcgggccaggaaacgtcaagcacggatgggatcatcggtctggaaagcattgagtacgcggagagtgagtcgtcagttgcgcttattgaggaggactacatggacgttgacgtggaaattgtggacttcgaaaaggaggaggacaccggcgcaattctctcaactgtggttccacccaaatatcaggtgaaacgacgacagaccgacttctgagttttcaaaaccaaacatcgcaaattgtgtttttagtcacggacattcccgggatttcgtttttggaaaaaagcaaaaaataatttataaatctttgtcagaacatcgtcgaaagagtccgtatacagccaaagatggatgcgatctcacgccttcttgaagacgaagtgattgcagaggcagaagaaggtggggacatgggcaacaaacacccaattaattag

SEQ ID NO: 53171 - DNA, 853 bp, Heterodera glycines
atggcgtcggatggacaagcgatggccaaatggctgttcactcccctcccggacgatgtgccaaaggtgttcaactgcgggttgaaagagtatgacgagagttggccgttgaaaattgaggcgttcaaagcggtaattaccactaactaattaattaattgacaatatgacgtttcgccaccaaagctaaaaccctcagtttttgtctttttacaacaaattaaaaaaatggtcttcaaccgtaaaaactcgaacgccagcttcgaggttttaattcagtgaaaatagttatcaaaattgggtttcctgaccctgaaaatccttaaaaacgactacctgaaaaaattggaattttggctcacaatcaatacttttaacaaaatttaagctttaaaattatattagaaatatacatacattttttgtttgctgggaattttaaaatttcatttttgtttatatatttaaagttagagacccagcagttggtacgccacaaaaaaattgttttaaagtcgtataaaaaatgtttcaaggtgtttcgagtgcgctgattatgaatccgacctccatttcgaccaattcagagttccggattcaaactcgaacatttggtcgaaaagacaaaaattatcagttttttaccaatatgattaacaatatagagcaattaattttcgcatggacaaaattttttggtactaatgcagtttgggtcccatatttttgtcaaattttttcaaattttttttttgtcagaattgcttttagattaatggaaacgctaaatcgacgtggcagaagttcaaacatgggtaatactgaagtttatcccccccatttttcgaaaaaa

SEQ ID NO: 53172 - DNA, 2086 bp, Heterodera glycines
tggtcccgttggtccggtgctttgccggtgccctaccgactgaccggctcactgctcgtccgcctggacgtatggacacgcactgagtatcgaccaattcgaaattttgtggcagtgatgcgcggaagagaagagccggaccgatgggtgatggtgggcaatcacgcggacgcgtggactaaagtgacaattaatggcaattaaaatcccgaaagaacccaattagtgttttattaactaactttagtaattgcaatttaaagggaagcattgacccggggacgggcacctcaacaatgatggagatggcacgagtgttgagcaaatattcagctatgacgggctggaaaccgaggagaaccatcgcattttgccaatgggatgcggagggtacaaatttggatttttaaatattagccataaactaattaaagaatttggcctaatcggctcaactgaatgggttgagcaaaacttgcatttaattcaaaaacgagcgattgcttatgtaaatgtggacaatttgaacggcaacaattcactcgttgttaaggtaaaagcgaaacaatgggaaaaatacagtcatggtcttatgtttatatacacccccatatttccccaattttcagtgtattttgggtgtcctgatcactatgaaggagtgatctggccaagttggtgtaaaagtcttttttgattagcatcaaaagttagcttaacaagaattatttcacattttttaggcctacgaaatactgattttttggggtgttgataaacatttgaccacccataatttttgcataattcatttgataaaatatactgtttaggtagaaaattctttcgagtaataaaatatatcattggaaagcccgtaaaaaatgctacaaaatacaaccaaaatttataattaaaatgactacaaaaacaaaataaaatggggatgtagataaacatatatatgaccatgacttatgtagtatttaaaatggaattaattataaaatataatttaatttcaaaaacccattttgggataataatttgctttttcagtcagtccctttgctgtaccgactgatcgcagaagcagcctcaaaagttgaacagccggtgaaatcggaattgaaaagtgggcgaaacactcttttggattcgtggcaatttcacaaccctcggccgactttgccaggggatcggtgaataaaatattcaaattaatccaattaaaattgtctttcacagctccgtgccccacatcctgccgcctcattcgggctccgactttcagccgttcattgccttcgctggagtgcccgtggcggatttgcgcatggaaagtgccccccaatactcgtacatgctctaccacacggcgtacgaaggtaaaaaaaaaaaatggaaaaagcatagcattttaaatttaagcgatttaaatttttttttttagttccttggcttaacgataattttgtggaccccgaaggggacgcatccgtcgcaatgggccaactttggctggaaattgcgcgaaatttggcggacaatatggtaaaagccgatcagtgttttttgttaatttacttaattgttttgcaacaagatcattccgttcaatgttgaagactatggaattgcgttgaaggaattttgcacaaaagcgaacactcaaatgaagtaattttggtacttttcggttttgtatatacacctcaaaattttaaaaaatatatacaaagttttttcgatggcacaaaaacaaataatttaaatggtaaaaaccctccgaattttgtctttgggcaaattattccttttagacatcaaaaaaatcggtacatcctttgttggcatatttttgaaaattttcggattgtacataaaaccaaaaagtaccgtaattctaaatgatgggcaaacaaaaaattaagtgcaataatataatataaatttcaggatgattggcattgacagtgccatggatgtgcaaatttacaatgaacggataggctttttgaatgattcgatacggcgttttcaagaaaaagccgtcaaatttcagcggcttatccatgtattatga

SEQ ID NO: 53173 - DNA, 378 bp, Heterodera glycines
atggaatttttcttttttgacccggtcaaattcgtccgtttctacaactgttcttcctacgatgtgtcaatggttcagctggaccggcgacagaagccattggtcggagcattgacagttgctcttggcaccattctgacggtttttgtgccggatttggcagtgccaactttcccttttaagtgcctttatttgccctgtctgttcgccctttctcgaccaaaactgatcagacagtcgtgctatcagctgatgttctttctcggccttgtcaatgtgacggagctttgcaccactgcaatttgtaccggagcattcgccatttttggcactgttttctgttctcagccgactttcatgttttggcacgatggttag

SEQ ID NO: 53174 - DNA, 1495 bp, Heterodera glycines
atgtccgaaattgcaagtaaattttctgctgccgaaattgtgcctcaaattttaccagaagcacctcaacaaaaattaaatgtatatgtttataaattgaatttaaataaataatttaaaaaagacaataatgctttttaggtcgttttcgatggaattcccgttgaacccggcaaggaattttcggtgcgcaatttgaaggtaaaattttaaaatttaatatattttttaaatttacattttttcagcccagaatcctttttccaaagtctatacatggtcattttggatcaaactatatgcaaaaatttcttcaaaatttatctagcggcccaaccggcaccgccaaacatttatttattattgttagggtatttaaaactaataaaaaatccataaaaatgtttaatgttttgttttttctttctaagctggaattgcttactgaaattaccggaggccttaaaaatactttaaagcttgattttgttgaaaaattttatttaaaaaaatgaaatttccctttttcgtttcctttttaaattttcgatcgcatttctctgtttaatttattgttttatattttctttcgcagaatgcccctcgtgtcacactgaacgttgacccggaaagcaccttttccctcgtgatgattggttaataatttactaattgtcaaacatttatgtaattcaaaattgtttttgcattgtcaagatccggacaatttgtcgaggaaaaacccatcagtggccgaatggctccattggctggtggtcaacatcccgcttcaaacattttggtagaaatttgggaaaattttttaaattgaagtaaaaaggcaactaattcaaaaaaaattagtaaaattttattttaaatgcaattaatcattaatataaagacaaaattaattttaaaaaatggcagataatcctttttgccttttcattgaattaatcatcattcctttttgccatttgttttaaatttgtgcccatcaccctaatggtcttgaatagggatggtgtcttcttcttccgttgatttgccactgatttcggccactttaggagggcatcaacgggggtcagcaccagcagccgtacggttcgccggcgccgcagccgcggacgggcgaacatcgctaccgtaattgtactgtttgagcaccagggcaagcggctggccgtgccgaagtttaacacgcgggcgaaattctcgctgaagcaattcatcgaaaagcacaaattgggtgggcagaagagagcgaacaattaacataaaaataatttggcatttataattatttaattttttacggctttataaaaaataagcccctacaaaatgaacctttactaaatattgcctttattagtaatggaatttttggaaaaaaatattaaaaatgttttaattttcacaaatatcctctaaatttcttttaggcgcgccactcgccggcaattatttcatcgcaaagaatgaccaa

SEQ ID NO: 53175 - DNA, 656 bp, Heterodera glycines
atgcgcacccgtccgatctggcaagttaagcaacgattgctgactagccaaaaggttcggtgccgtgatgaaacgaaccagcactgcttaccccgcggcacccggcacggtcccccgaaggaatggatttaattaaattctctccttcggggatttttttccattaggtcgtccgttagcgttcgattgctctagtcaatttttcaaaatttttgttgaaatatttgtcgtgctctgaagggcgtgggagggggggggggcgaaggcccaccacgaggccgcgaagaggccgagtgagtaccttcggtgcaggaaaattattaaattttaaaattttttaattgctttttaaatatgccaaaaaatgtaggcttaacttttttagtgaaaattcgatcactcatattttttgctaattgagcagaagcgtaccaaactttgcagggatactccccggtaaaggactaacttacactgaaatgagcgccgagctagctggctcaaaaaaatttttcgaaaatctgagtctttcgtttttatttatttgcaaaattaattcataaatattttttcagaaagggttctgaaacgcaccaaattttatttacatgttagtttaggcactctgatgctttttctatcaataatggaggtga

SEQ ID NO: 53176 - DNA, 732 bp, Heterodera glycines
atggccaccatcgacttgttttccggcttcccgtttttcactcccgaactttgccatagactgaaggaggaggtgccgaaaaaagtggcaacagttgcagtggacattttcagcccaacgccaactccgacattggcactgaacagtgccattcaacaacaacaaaacagtgcgtttatgccgtcctcaaaaagtgtttaagcattgactgatcgttctgaccactgactaataagtccaaatttaaaatgagtaattcagcaagcgctttggcgccatcgcctgtccgcttcgtgttcacttctgcgccatcctccgtcccctcctcctcagtgccatttccgatggttcgtcctccgctgactttgccgaattgcttatggccttttatgaattgccaagcatttggatggacagccgaagcagaaggacagaagcaaaaaagtgaagagaaaaagcattggggagaagaggaggaaaagggtaaaagagggagcgaaagaaatgcaaaacgaataaaatttaggacaaaaagtgaggggggagagaaaaactgatcagagtgccgggaggactgatcggcgggaagaagcatctgagacggagcccggcacaccagacaacccgggggaggagattgaggtggacgtggagagtgttgagaagacaagtgacgaaactcagagagagggagccaaggaggagcaagacagtggggtcagttggaaatga

SEQ ID NO: 53177 - DNA, 966 bp, Heterodera glycines
atgccaatttattgcacttttgataataaaaacagaaaatggaaatggcctcgaaaaggaccacataaagtaattgggagaatatacacaataaacccaaaaaacaaagaattatattaccttcgttatttattactgaataaacacgcaaaaagttttaatgatttaaaagttgttaatggctttaaatataacacgtatgcagaagcatgtttagccttaggcttaacacgagatgatttagaatgggacaaatgcttaaatgaagcaagtcaattcaaatttcctaaaggccttcgttcacttttcgcaaatattcttataaattgtgagccgaaaaacccaaaattactttgggaaaagtataaagacgaattaagttatgatcttaaaaaattgtatacgcaaaatgatgcttatcaaatggctttattattaattgaacagaatctttctaaccatgaaaaaagtttaaaagattttgaaggcatgccaaaaataaatgaaactataaaaaacatttcagagtatcaaattattaacccaaaagatgaattaaaccttgccttaaacaaattttcattaatgaataaggaacaaaaagaaatatttgaaaatataaaaacaatttttgaacaccccacggaaaatcaaaccaaatgtttttacattgatggtccaggagggacaggaaaatcttttgtccaaaccgcaatttttcatttggcaagaggttttaataaaaaagttacaaatatggcatttagtggaattgcagctacagtgttaaaaaatggtagaactgttcataatcgtttcaaattaccgttagatttaaatggtaattcttcatcattaattgaaaataattctaaagaagcaaacgaaattagagaaacagatgtttttattctcgatgaagcaccaatggcaccaaaatatgtaatttgaataatcgataaaaaa

SEQ ID NO: 53178 - DNA, 424 bp, Heterodera glycines
atgatgtaccgaaatgcaaaagactgtgctttttacacctgctacaaatctcgtaatgacagggacagtaatgacaacacttaattttatgtgggcagttcatttttcaatttaattttatttttgtttgctatttatagaggggtatataaagggagtgaaaggaccatttgattggtacattgtatcaaaaatgcaaaaaccgataatcgtaaatataattgctctcgctaatctcggtaccggaattaaactaaactctctgacgatcaccgaatgcgaatttaagtataaccctagaaaattcaatgccgcagttatcaaatgtacacgcccgatcaaagccaccgcactattatggggatccggaaaaatgatatgtctggggacgaaaagtctgatagactgtgaaaatgctatataa

SEQ ID NO: 53179 - DNA, 586 bp, Heterodera glycines
atggcacaaccgtacggcatgggaatgccgtcgacaatggcatgccaaaattgggcgccaattgcttatcaccagccggaccattatcaccagcagcagtattatggtgaattttggcaccaccaacaaaaccctggaatttgtgccacaaacagcaatttgtcacaattaatttggccaacaacagcaatggcaccaacagtgccatcagcgtcaacaacaacattttctggccaaatgccaatggtgaagcagtgcaaacggcgtgccaccctcgcctcagttagcaccagtgccgtgccgtgaagggaacggccgaattttcggcacaaaatgccgtcagcaatgtgtgctattacaattatcccccaacaattagtgctaatgatgccttttgtgctgcacaatattattatccaccgccgccgcctaattatccaaatcagcaacagcagccaaacgcacaatcatcatcatcattagcatgtccaaattatcagcagaattaccattgcattgttcaaataataacaaaacatcatctaaatcatcattatgacatttgttggtcaaaattaagagaaaa

SEQ ID NO: 53180 - DNA, 596 bp, Heterodera glycines
atgcatcagcgtcgaccgccacgaaagctgaacaaatgcatgttggccaacaacaatttggacgagttcagaacggaagtgatgcgacgaagtgccattgtggaggaggagagggatgaatttgagcaaacattggaccaaatcatggacacgtacagcccagcagttcgcttcatcgagccatttactgttcgttttttggcaattatagaaatatatccagggatgtgtcacatgccgactgccaatttccaacattttcgggctcagagctccgatcgagtgccaaaatttttagggaattctgatcgcctaaaatttttccgactgccgacacaaccctcaattactacacacatataattttcaagggctgccccatttcgtcgcccccaaaatacccgtaaaaaatacaatttgtccccagcaggcattgcaatttgcactccaatgtccgcttgaatcgctggtgctgttggatcggctgctctttttgcgcgagaatggcatcggtggcgctgagttggtccgtctgtttgacccggccatttcaccgcggtgcgttgccattgtggcacgggtgaatgaacaataaa

SEQ ID NO: 53181 - DNA, 1899 bp, Heterodera glycines
ttactccgctgattcatcattcacaaattactaattagacgtccatctcggccaagtggggcttcgacgcggtcagtggcgcttccaaccaatacactctgtccaacaatgccgacatagcaccgggcgccacaaattcaaatggtggcctcaacattcagggcaccaaccctaacggaccaccagcaacgccaacactccaactgattgaggccaaatattacagcaacggtaattggaggagggcaccaatcaattttaattagccatttttaagtattaaaattagttttaaaaatttattaaatttaatatattttttaaaatgaaatagcagcagtacatgaatttttcttttaagaaaaaattataaaaaaaattttttaccgctctaatatggttggcaaatgtgtgccaattttcactccattcttagggggtggttttattagaggaatgaaggttgggctctaatagagagaatgggaggggaggtggagttatttatttttattttgcatttttttcaaccagatgtatgctttttataaaagaacagcagagggttggtttctaatagaggggggtgggaataataatgaaagccaatgtccataaaaatttaattattaattaattagtattattagtttattttcatatatttattttgtattttgtccatttccaaagaattttgatttgtgtatttgatattcatttcatttattatctccatacaaattttatttttaggtgtttgcggaggatcatcatcatcgtccggcggtggtagttcttcatcatcatcgtcatgtaataataaagacaaaatatgggaccaaagagtcattaaatctgtactggtttcatttgaacatttatttatatgggtaatttgtaattaggcatattatgaaatgccaaaagcagaaaaatttttcaaattgtgccagaattgggcattagaactatggatgaataatgaatatctatcgctatgccttttaaggcatgggctgtttggccagctccggcacatccggtcccattgactcgtacattggcaagtcgatcagcaacagtgtgttcactttctacggtggcggcggacgcggggcgtgcggcctcgattctggcgtggtcagtcaagtagaaaagattcttggttacggtcaggaatcttggttagtcaagagtcttagttacggttaagaacggttactgtcacggagtcttagttacagtcaaaagagtcttggttacaattaaatgagtcttagttacggccaaaaagagtcttggttacaattaaatgagtcttagttacggccaaaaagagtcttgcttatttatggtcaatacagtctcggttacggtcgcgtctttttgttacaatgacacgagcattcattggttacggtattctcatcatccgtatcgtctatttagccaaaaatgtcagcagctggttccggcaaactgttcaagtcggacgggcagtggaaggacgcgtgccgtgccgacaaacaatacatgctggacgacccaatttgcaaagacatttgcattaagattgactacaatgggaaaaggtggggtgaaaagcaattagctcatatcactttcaaattaattaattgattaattaataaattatagtatataataaagtatattcgatttccttttttcgtattttaaagttttaattttatttacatttttatcgtctttttttgagtttttttttctattttttgcagcttgactgtgccaattaacaacaaatgcccggaatgcgatgtgaaccatgttgatctgaccattgatgctttcaactatttggagccacgcggtggcgaagttggcaaagcgaccggtcagagaatttaatgc

SEQ ID NO: 53182 - DNA, 3895 bp, Heterodera glycines
atgtcaaaaatagtttttgcttgcacattacaaattgctctgttttttgtatggacccaaaaaaatggtgccccaaatccgagccgtttgagcagcagtgaagatggattattagtcgatggcatgcacaaattatttaaaaatggtaactatttatatattatataaaataaaatatatttttaaaataaattttgtaacaaaaaatgaattacaatttggactaatttatatttaagaatttactaaaaatacaattttttttcaattaatccattttttcgctgccattaaagtttttcaaaccatttctgaccgccccttttttgcaagccccaaataagggttgttgcgaatcgaaaaataaaatgcgaaatatgaaaactacgaaagtaaaaaaaaatatacgaaacacggacacgaaatgccctaaaaacaacaaattacgaaacgatacatccctgctccaaactatgacggttttcatgtttggaaagaattcaaaaaatttggcagcccttgaatataaaaaaaacgtaattaaatttttttaattttacgcagattcttctaatgctaagcagcaaaatcgtgataagcatgtcaatgcaaatgatgatgatgatgataatgataatgatgatgatcaacatcgtccaccaatcgaatgcattgtttgcgcggatagcttcacaaatgatcaattgtgtttctgtgatgttgctgctgatcatgctgacgctagcagcagcagcagcagcagcagcagctcaactgctgcttgccgccaagcacaaggtatcaattacaagtaattaattttgaaattgtcattaatgtacagacagctacagaggtatcaattacaataaaataaatcaaatatttatgaatgtacacacatctacagtaatcattagtgtaattgtgatactgtaaattcactacagttttctgggttacggtgatgttttgttttagtccaaaacagcgacaggacagacaacgcaattcattatctttagcaataatcctacaataatcctaaaacgaattggtttgcgcttgtcgagaagccaaattttccgaggctcaagaacagagaccgggaaaattgtcactgaaattcgaaacccaaaaaacccgagaatatgaatttatatatcttaaaatatttttttaaataattttcatttaattttaagaaaaacatgccttctgcattgagtgccttcatgaatacacaaaagcggcacatgaaatggtgccatttgcgcccagtgggcttggactgaagtgtatggcgttggaatgcgaaaatccaatcacatggagtatggacaattaattaattaattaatgcagtttggacaattaatttgtataattaatttttttaaattataattttaagaaaaaataaaagaattgttaccgaacgataaccatcggtcaattgaaacattggaaaaccattgcgacttcatgcgtatgacaatcgctggaaattgctgcaagaaatagtaagttaaaaaataataatcagaaatctatttaatattttatggagtgaaaacccgcaatatattaatttgtttttcattttaaattttttgaaaattaagcattttaaaaattcaggggcccttaaaaaatccaatcagaaaaatgtttttgtgtattaatttttaaattttataaaataaaaaacaagaaatatcaattaccatcgatcaatgttgttttttttgattgtaacaaatagccaaattaaatttatcaaattcaatttacaaattatgttaaatgaaaatttcatattgatatatttatatatattttttttatcaaaaatcatttttattcacaaatatttttcagctgtccatgttgcaattgtgccattgaaatggacaattctgttgataaaagtcgcccatttcagtgtccaaaatgtggcaaggatttgtgccgaaaatgcaatgtgccatggaataataagcataaaaaagcgacattttgtgaaattcaaaataagtttgttcaattttttatgttttttttaaatttattataattaatgctcgggttttttcaaaatttttactcatttttccaacaaaattttaaattaagttttattaatatttaaaaattatatttttccttttaaagctatatcgtaccaattttggcttaaattttttttatttaaatcccaattaatttaaacattttcgtcagaaatttttggtttcaatccgacaaaaattaatggaatttgtgatattattttaaacatttaagggatcttcatgtttgtgataaatgccacttaatttttattaaagaagaaggctgtaattatgtatgatttttgttttttttgtaaaaataaattataaaattaacaataatatttttttaatttaaaatctttaggtaaattgcccctgcggaagtacccattgttactgttgcggaaagtccgaaatttttggaacaaatcatttttgcgggtaaaaataatttttatatttttaaaacttaaattaatgaatttatttttttattaattagttgtggtgaagaaaagcgaataatttgtgaggacaatgcaacaaaatgtcaattgtgtggcaaatgtacactgtatggaaatgttaaagatccgtcaagcagtacaaatatggacattccatcgaccagtacaaaaggacgcaaaggaaaagaggtacaaataattccaatttatttaaatggacaattaattaactaataatagctctgctcttaattaatcttttaattaacgaatactcttggttagctaattattaatatgctctcaattaactaattaattacctactcttagttaacgaattaattaactttaattaagttaattcattagctaattaaaaataattatctctactccaagggcgtaggcagcgaaacccaaaaaagtaaaaaaatttcagttaattttttgaaatttttaagcaattttcttaacaaatttgcattaaaatactcaaaaattttcccggcggcgcctatcggcaccgccggacccccatttaccatatttttgaaaaatgaaggccaaaatggcaaaaaatagtaatttttggcgaaaaaaggcgaaaaattatgtaaaatacacccctaattcgggatttcaaaaaagcaaaaatacacccctaaaaatcgaatttttgatttcagccccccccccaaagccaagggtctggctacgcccttgctctactcccttctttcactatttcagaaggcagcagaagtgatcagcgatgatttagcacaaaagctaaaagaaatgcgtctaaaaatgtgagttttgctaattaccccctcgtaaaaaaaagagaaaatttaaaaatttatttaaattcaaaatatgcattttagggaagaatcgttatcagaagtgacattgcatcaatgtgcatgtcgaaatgaatattttattaaagaggaaggcccaacttatgtaaatcttcgttataaaatttttttgaaattttttaaatgaaattaatttaaggtaaattgtccagcttgtgagaagttatattgtttctgctgccgaaaatctaaagtgacttcattcaaggaccatttttgcgggtgcaaaaaaatacttaattagatttcaattaaatttaattaggtgtcaacgagaggtcaaaccttcactggacaatccatgcaaatgtctcaagtgtaaaaaatgtattgaaaatagtgattataacaaatttgtacaaatcaaattggacaaaattcaaaaagattataaacaaaaagaggaaaaggtaatttaatttattaatgattaaaaattaaatataatttgtttaataaa

SEQ ID NO: 53183 - DNA, 1492 bp, Heterodera glycines
attcgggatttgtgtttaacggactttcgccaattggacgacgatggacgtgagaaaagggcggggaatgacacaggacagtcgcattaatcaccgcagggcaggcattcgtaccagcgaatgttcggggaccaacaagacggggagttcctgaacggagcgcgcatcgactgggttctgtctcaagagcaggtggaccgcgtgatggcattcactttgccgttgcatgtcagtgtttgtcattcgaattgaaaagggcaaaaaataaacatcgaattcaatgggccgttcatagtttttactgccctttcctcttctgatcggctccatttccttctgtcctttagacgtgcattaattatccgctggatgagcgtttcctcgaatattcgcatgattacgttcgtttccttttaacttttcccaaattgagactgttcaggtccattattttataagcggggacatgcaagaacggttcagctccagcaacgacccaatcttcttcatgcatcacggttctgagtgtcttaacacattgcgaaataataactaattaattaatgataattaattaattaccatttccttacactgagtaattgtcaaatcgattaattcccttcatattccaggcttcattgattggatatgggaggagtggagacaaacaaagcaggttggtcggtcagactggccactaaacgattcaaatgtgccaaattcggcctccatttgtttgttgtgccatccccaaaatcacactcatttgtcagaatcgtctccaacgtgaacgcgattatccccgtgacgatgccgactgcatgcccgaatggcacttctcatatgcgtacatgcctttgttacaacctttgcggaacatggacgctctgtccaacaactacacggaccacatgtacgaatacgcaccaaggccgagctgtgccaaaagtggaaaatcatccgaatgcggcaacaccgagttggtggaagagagggggaaatagagaaggagagtggagacaacgagagagagagagagagaggaggagagagaacgtgaaagagtgaaaaggggcgtagagacaaaaaagaaacaagagagctagagagagagaggagaaaggaaacggagtgtccgaaagggaaaaacagaggcgaaaatgccgtaattaaacaaattgcctgcctttcagttttgtttggtgcgacaagcgaactcacccgggccacgccgtttgcagctccaaagtgaagccggggggaaattgcaaagggttcgaatggagtgaggagatttgctacaaggggaagtgtgtcgggggacgctgctcaaagcaaaggacgggggacggcaaaaggacggggaaaagcggaggaaaagcggacgaatgggcgacggacagttttatgaaatgaacggacggacgagcgactgaccgatggaacaaaactttaagcatttaacccacgaatccttccattcgctagc

SEQ ID NO: 53184 - DNA, 93 bp, Heterodera glycines
atggggagcaaaaatccaacgcagaattacagtacagactatagggaagctattcccgaaggattcggtctccccataaatctgggcgcatcg

SEQ ID NO: 53185 - DNA, 125 bp, Heterodera glycines
atgtataattcgccaccaccgcccattcgttggcagatgttgatctacgcgtgtgtgctcaaccagctggacattgctctcacagtggccgccagtctctccgtccagtcgccgttcaccaatcg

SEQ ID NO: 53186 - DNA, 1427 bp, Heterodera glycines
aaactgaagcagtcccaactcgaactgcccatttaccaaagtcggacggaaatcctcgaaaaattggaagaagtgggcggaaattcggggggaaatcaaaaataaataaatatgaatttccagaaccaaatcataatcattgcgggggacacgggctgcggcaaaagcacacaggtgaaaggcatggacacaaatttggggtaaaagtgccaaatttttaaaaaagaaaggattccgccccctttaccttacgtttttctgtttttgctttattttcgtgtttagctgccccaatatttgttgaacgcgggttatgccaaaatcgcatgcactcagccgcgacggattgcatgcacaggtcgaaaatggggggggggggcgagaaaaaaagcattttctcagattttaaattgagactttgacaaaaacaaattctggttttatcaaaaaaaatgacttagaaagtctcgacaaatccgaaaaatcacgacactttttgttaggaatatagtcttacttttttctcattgtcaattttatagtttttggcttttcctccccttttggcatttcccacttttttggcattttctccatttcccttttcttttttttcagcgctcgcccaacgcgtcgcctgcgaacttttgaagcagttcgactcgcacatcgcctaccaaacgcgctttgacaagaccaagacgagtgccacgcggatgcttttcctcaccgagggtgtgctgctccggcaaatggtcgacgacccgggcttacagcggtacgacgtggtcattttagacgaggttggccaatggcaaattaacggacaccgaaagggtgtgaggggaggaggacggcgtttttcattttttggtccaaatttttccattatttccctccttttgttcgtccctctttcgttttactattttctcctctatttaaggttcacgaacggaacatttccggcgaccttttggttgcgcttttgcgcagtgcgtgccaacgccgtggcgacctaaaggcattttttggcatttttcagtaccaattccctctttttaataattgttttcccagttagttttgatgtcagccaccatcaacatcgacctgttccaaggctatttcccggaggcgccggtcatttcggtgcccggccgattgtatcccatcgaactcaggtggcggggggggggtcgaactttttttgactcatttttagtctagcgtcgctctcatttttaaataattttccttttggacacttccattgttttttcatattttctctcccctttctcttttaggtatatgccccctctgatccgtgaagtggacacctccaaaagggcggttcgaattgaccccggacccttcgtgaacattttgcagctcatcgacaagaaatacccttccacggaacg

SEQ ID NO: 53187 - DNA, 1859 bp, Heterodera glycines
atggagtcctatcggttcgtggcctttgatctggagacaatgcagcatctccctgttgaccctcgtgtacctgagaggcgcaaccacgagccaaacttcattgcagcgaaagtgatttgtccaatgtgcattgaaaatgggagctggaagcaaggaactgccgggtgttgggtgtgcggcccacaccgaaccgttgccttctgccaacgaccatttaacggcacttctgttgacaaacaagtggtcaccgacaatccaatgcaagcgtttgtgggatggctgatcaatgacctaccgaagaaagccaacacgtacgcatactcccattttggcggacgctttgatatggtcatcacattccgtgaactatttcgtcgcggatttaacccggaaatgattagacgagtgagaggctctctttacttttatttttacttagtgaatgtttagggcaacaaaatgtacgagatgaagctaaaggcacagaagaacaaaaatccgaacatcattttccgcgactccttcaatctgatgccctgtgcgctcggacaactggtgccagcatacggcttggacgtcgaggagaagccctttttcccgcacatggccaatcggccggacaactatgggcgcgaaatttttccaacacccgaagactacctggcccaaggaatgatgccggagaaacgacgtcagttcgaccagtggtatgaacaacatcgacgagagccgtttttattggatgaggcgttggccagctactgcaccaacgacgtggagatcttgatggcagcgttggtggcatttcgacgtgaattcctggaaatcactaagcggcaagaatatgtggatggtgtcgacaaccgcgaaaatcacgatggaattgacgttctgaagcagtgcatgaccatcgccagcgcctgcatgaagcacttccggatcaatcatctcccggctaaccatctggccatcgtaccggaaagaggctacgacaacgcccaaaaccaatcattgctggccctccgcttcttcaaatggtatgcggagaaacacggagtccaactgcagacggcccacaccgctggaggtgagaagcgcgtcgccaactactcactggacggttggatcgaatccgagaagagaggcattgaagtgaacggtaattttagaaaataaaacatgtgctagaaaaatttgtgtaggctgcgtttggcacgggtgccgcaaatgtttcccggaggacaacatgctactgcctaatggaaagtcggccggtgaagtgcgggagcgggacgcaaagcgccttgaatttttgcggaaccaagtgggccgtgtggacgtctactgggagtgtgaaatcgagcgcatgctgacgacagaccctgagatgcggcaggccttcgcaggctatgttgatgatggaccattggaaatccgcgccgcgttcatgggcgggcgcactggtcctctgaagctctaccacaaggcgcgagaaggggagaagatttcgtacttcgacttcacttccctctaccccttcattaagtgagttttagcattaaaaatgacacttaaaaatttatgtatttagttttacgacacgctatcctgttggccacccaaaagtgcacgttttgaacgaggacgtggaatggaagtgcgcagcggacaacccctacgatttgtcgctgctcaaagtgtgggtcgtgccacctcgtcgatgcgatgtgccggtgttgccggtcaaggtggatgagcggctgtgcttcccgctgtgcttcaaatgcgccaaagactacccgaccggcggagttgacaacgaatacaactgtcgtcacaccgatgaacaacgcggctgg

SEQ ID NO: 53188 - DNA, 1805 bp, Heterodera glycines
atgaagaaacaattaaaacaattcagaaatgaaaaagattcaaaaattatttcccgggggcaaaattcagttaacaaatttatccgaaataagttatcaaaattttttgagattcctactctaattgataatgctggaaatatgttttccagcaatgtacaaaaatgtaaaatattagcagaaatatttcaaaagtcttttttaagaaaatcaattgttaatggtccacaaactcagtcaacacagaataagaccaagctttttgacattgaattgaacgctggcataatttggaacatattaagaagacttccccggagtaattccacttcacctgataatatcccttatattttattaaaaaattgtgcagaaccaattacaaaaatattagcagatatatttaggctaattttggattccggtcaaattccggaaatatggcgaacatcattggtggtaccaattttcaaaaaaggcgaaaaaactgatccattaaattacaggccggtgtcattaaccagcactgtctgtagagtttttgaacgaattttgagtagcaaaattttagaatttctgaacagtacaagattctttgataaagaacaatttgggtttttaaaaaatagatcgactacaacccaaatattaaaaacaatggacgatatatataattctctacaaaaggatcaacaaattgacataatctatattgattttgtcaaggcgtttgattctgttccaattgatttattacttcaaaaaatcaaaaagattggaattgaaggaaaaattcaaaattttttaactaactttttaaaaaatcggcgttttaaagttaaaattggcgaagaattgtcagaaagtttcagaatattttcaggagtgccccagggaagtgtcttagggccattactctttttaatttttataaatgatctgccgtcctttattacaaatgaagcggcatcagttggcataaaaatgtatgccgatgatgttaaattatattatgcccatgaaaatgatgaccattcgaatcagttggataaagaaattgaggctttggaaaaatggtcaaaaataaatgggttagaaatttcaactgaaaaatgttttgttttatatttagggaaaaataatatgaaaaaagaatattttattaactcaaaaaagatttcagaatcggataatgttcgtgacttgggaattataattgaatcgaaacttaatttttcagaacacataagcaaaattatacgaaacgcatatcttagaagctttcagattttgagagtgttgaaaagcagggaaataaagactctaacagcagcttataaaacttttgtacgacctcaattagaatacgctaccgaagtttggaaccctaatttaaaaaaagatatagacaaaattgaacgggtacaaaaatttttcacaagaaaagcatttcgaaaatgtggatttgtgtacaaaaaatatatggaaagacttaaaatcacgagtttacacaaattggaagaaagaagaaaaatcaatgatttaacaacagcttttaaaataattaaagggttcaccagcctcgatactgggaaaagtttcgttttctcagaaaggtccaggaggcctttacttttacgagtaaagcgccacacggccaaaactcaaaataattttttccataggatagtaagaaactggaataaccttccagttttagcggtgcaaattaataaggcaaaggaattcaggggtttactaaaagcaatgagttctgagtaggaaatttctgtgccacaattaca

SEQ ID NO: 53189 - DNA, 625 bp, Heterodera glycines
atgatttgcactttgctccgactgtaccgcaacgtgctcgagttcggcccactgtacgtgaaccatgccattccccggatgctttccgtctggttagacttggcgcccaaatgtgccatcgccgaggcgatcgcctcgggcaccggcacaactgttggcggtactgctcgcacttcggctagcaaaaggggaggcaaagctgcagcagcagcggcggctgccgccgctgttgcaacacaaccacacgacccgaacagagaaatgcgtgacgcgttcaaacggctggacagggcgtatttcttctcctcctactcgcaaatgatttcgcgcatcactcactcggacgccgccacatatgccctgttgaaggtccagcggggaaaataaaaatagcagtcgtttccatgtactgtctacccaatccactattagagggtcagcagaagtgtcgttcggctggccatgtaaaacgatgggttttttgtggcgcttttttcaaaaaaataatttttttgggaacataaaggggtctgccgatgctgatagcaccgcgccggggaaaactttttgaattttttaatgcaatttgctgcaaaaaaaatttttttttttgaaaatgttcaaa

SEQ ID NO: 53190 - DNA, 997 bp, Heterodera glycines
atgcgcaagaagggtccactgatgactcccaccgaattgcaacggtgagtcatctattgctgcacaatttggcactttttgacaaaatgccatgcgattagccattttagtcagtaataattttttatgcccacattacagtcttctcggagatcaaacatccagaggtgatcggttgaaggcttttcgtgaagtctgtgctcggcatcccctcgcaatggcacaatggattcggtacggtcgcactttcacaaaaatcaaatccaaaaaaaaattgttgtgtcaggaccacctttttggacgcctgttcctggtacaatgctcggcttgcattcactcgcacggccgccacgatgagcatggtcggctttttgttgggcctgggcgaccggcatggggagaacatgttgttggatgtgaggacgggaggtatacggaaataaatccatcattattttccactttttggtttttaaaaaataaacctaacaacgtactttgggtgtaccccaaaatctcgtcaccaaaattcaccgagacaaaatcacgcccacgaaattgtttttataagaaaattggcggcgagattttgggtgcccccaaaaattctttgtccggtttttcgatttatttattcacaaaccgaaaattatctgaaatcaatcatgcaattagaaacccttccaagatttgatccacgtggacttcaacattctctttgacaagggcgaatatctgaaggtgcccgaggtacagtcattccgttacaatttgtttccaaatatttttttttttaaattttgcgataaaattctaatacaaaatcacactccttctggtttgtcaatttcagattgtgccgttccgtctcacccgcaacatggtggacggatttggcgccaccggtgtggagggtacattccgaaagtcgtgtgaaaaggcgttgaaggtgggaacatggatggatggattcatccgtcaatcattgtctaattga

SEQ ID NO: 53191 - DNA, 598 bp, Heterodera glycines
ggtaaaccgcccgcgcaaccaaacgcacctgtctgtactgctggtttctggcctcggttgtggtccattccagcagcgggtcatgcgcaaaagcgtgcagaacggtgcggagcatgcgactctcggcccgcattacctgtcgagagtgtgaagcgagtgcatcaattagacaatgattgacggatgaatccatccatccatgttcccaccttcaacgccttttcacacgactttcggaatgtaccctccacaccggtggcgccaaatccgtccaccatgttgcgggtgagacggaacggcacaatctgaaattgacaaaccagaaggagtgtgattttgtattagaattttatcgcaaaatttaaaaaaaaaaatatttggaaacaaattgtaacggaatgactgtacctcgggcaccttcagatattcgcccttgtcaaagagaatgttgaagtccacgtggatcaaatcttggaagggtttctaattgcatgattgatttcagataattttcggtttgtgaataaataaatcgaaaaaccggacaaagaatttttgggggcacccaaaatctcgccgccaattttcttataaaaac

SEQ ID NO: 53192 - DNA, 1242 bp, Heterodera glycines
atgtaccaaatatgtataaaaacatttcacggaaattctgttctaaaggtgtgagtccacccatggagtaatggaaatggccgaagcgcccgtgtggttatgagctctgtgttggtgagggcgggcctcaacactttggtgctctagccgcaagcacgtaaaacatatgacgacttccttcaacgcgcaagcggcgcctatcggcaccgcctgaccctaaaatctataattatcttgaaaaatttgatcaaaatcgctaaatttggtcatttttgggacaaaatttgttaaaaaattgcaatagaactttgggcctcggaattccgatttcctaaaattttttgacactcggaattccgatttcctaacattttttaatcctcggagttgcgatttccgaatttttttggggcctcggaatgccatccctgctccccacccccaccccccccctcgctgggaccgttcccgagggtagactttggcaacaattttttaagcaaaatttttctatattttaacaggcaacaacgacatgccgatgaaatgagatccgagttgcaaatggagcaaaatgagcctgaggcagacaatggacgtgcggcagacacattgtctgcgttcggtgacgacgaacaacacctggagattttgaacattgttgggacagttgaggccttttctgtggaagtaagaatattaaacttaacttatcagagctttcgactgatatcacttttttgaaaaatttatataatttggtgcaattacatggggccataattgtgctgttaagtaaatttattttatttttttaaatatttgaatcactttttccttttttaacattattcatttcattattttggattcaactaaaatgatggaattatattccgtgaatttaaaacgtctcaggacataatttaatcaaaataagttactagagtattttcctggcattggttaacccacacataatttatttttcagcatcttaatgcgatccacgcacacatcatggaaggacatccgtctgctggcgaaattcgcactgttgacgtcaacattattgatagggatggaaacgtcatttaccggccaccaccacattcgcacgttttacaactgatgtctgatttctgcgccaacttgaacgaagcgatgaaaagcgtgaaaaagagacgcatggaagcattggcagttgctggtgggcccaccaccaattggtaatataaatga

SEQ ID NO: 53193 - DNA, 357 bp, Heterodera glycines
atgccaacattcatctttttcaaaaatggacagaagcttgttcgtttattcagcaaaattaatttatctaaaaatttcagcaaaccatcgaaggaaataattacgaaagtcttcggaaaacagtggaaaataataaatgaaggacgaagtgcaaaagaaaggaagggaagggtgaagtgaacgatgggcaaattattgcgatcttttgagacgaccaatcactcattttaattgggggggggtaattagtgagaattggtcagtaaaaaaacgcactcttttcaataggactgtcttctgaaatgtttggcgcactgcactgttaaatacacaaaccacaaatgaagaaatattgaa

SEQ ID NO: 53194 - DNA, 861 bp, Heterodera glycines
atggccgaaactgcaaaccttcgagaaacgacgatcttctcgagaatggtttcgatgagaatgagacggagaaagccgagagaatggacgaatcagtcgaagggacgcccaatgagcgaacggaggccgaacaacggaagcgtttcccgtcgcggttggtccgactccgttcgtggcgaaagttgtcttccatggccatcgcaatgagtcggtgtctctttgcctattcaatggcagactgttttcaggtcattctttggatggaaaaccttcaaaaaatggtgctgaatgtccattggctgcggacgaatgcgctgccgaagagaacggagcggcgactgaggaaattcgtataagacggaaggacctgaacttcgaagagccgttgcttttggcggtgaaggagggaggtcggtggacatccgacaaatcaattgagcctccgacctcaattacactaatggcactaattagcagatgacttcacccgttccctgggcacttcgccttcttcgaggcgtccttctttgtgtgccgacgacgcgaaactcgccactgccgaaactgcgcaaggggagcctaatgagttggaaacaacggaaatgtgagaagcagagtgaataatgaggaaacagtgaaaatattcaaaattgattggatttagcaacagttcactcggaatggcacttcaaatgaaactgaaagtttcggacaaacccttgcggtgcatttcgcttggccatttccaaggccaggaagtgatcatcaccggcgcgggagaatatggggacgatgaagcccttctgagatggcgccgcgacccgaaaaatgtgacaagttttagggaaatttgttaataaa

SEQ ID NO: 53195 - DNA, 1626 bp, Heterodera glycines
ctttgggactgttttctatacgaaggaccgaaggtgcttttccgatttgccattgctctgttgggtttccatgaggaggaactgctcgcccattccgacacaatttcggtcatcaaaatgctcaaagcggccgtccgactgaccttcgacgtggatgggctggtccgtccgtttcatcatcattccttcttggcatttccgttcagataaagttcgccttcgagcagctcagtccgttccccagcaaagcttacctccgtcaacgccaatcgctttatctccgcgtgctccaagagcagcttttcaagaggcagcaactccgccaactgctcaacataacggtgaattgtgttgccaccattaattgggtcaattaattgggtttcgcttcagaattcgtcggaccaatcagaccaactctgtgatcttcccattgaggcaacattttccctttgcttgtccattttttctgtttgtcccccaggtggtcgtgttcagtcaattcgttccgggcagaggctacgtttgtgccgggaaccaaaaacgcggaaaattatcgatgatccaactgcaccaggagactgccagtctggacactctcgaattggaggtccactcgagagacatcctttgccttggcattggcatcgctttccctttcagttcgattgtcgactcatttccatggttctgttcaattcggaaatggcttttgtctcgcttctttctggctacgttatcgctctgcaccttaatgagtcgggcgaggctgaaattctgtgggagttgaagctgaatgacgtggcattgaaattggtcgctttgatgcgacgtgtctttctcaaacgtccgtttaggtcaactgtccccagcgtctctattcctgtctcgccaatggcactttggctgttctcgagaatgccttcgagcgaatgccttctgctctcgacctttaccacattccgattgcagctgctcccataacggatgcactgcttgacgatgacaaactttacttggcagttgcatgcaaaattgttgtgctcaaccgcagcaccctttcaaccgtggcgagtgtttatgttgcctcggcatcagtcggcagccaagtgccaatgtttgaaaagtcgttgtttcacccgattttccccatatttatgtttgattttggaaaggattcgtaatttggcaccttcgcccttcggaatttggctgctcaccgcccattcgtcccttattcaactttggcgcgacggacagtgcgaaatgcttttcgacattcgctacgaccacagccatcggtcactgatcggctggcactgtctgctgacccaacagattttcccatttaggaagccatccttcgacgaagacgacgacaaattggagcaggttgagctgtgctccatccttttccacttggatgagctttgggtgggcaccgtcgatggtcggtcattctttccgaattcgtcggtcgtcttcccacctcctgtccacccttttttaggctatttaatgctttatcgcgtccttgtcgagtcgccaaacaattgcaaaccgaccaaaacgcgttctgccgagtgtcgattccaccaggaaagcgtctctcagcagtacatggcc

SEQ ID NO: 53196 - DNA, 49 bp, Heterodera glycines; identical to SEQ ID NO: 51181

SEQ ID NO: 53197 - DNA, 1118 bp, Heterodera glycines
gtctgaatccactgcacaccgacgcactagactcatcaaatgttgacgactcttccgtgactgatgataaatcatccgatgttgacgactcttccgtgactgatgataaaccttcagatgttgacaattcttccgtgactgatgataaatcatcaaatgttgacgactgttcagtgactgatgataaatcatcaaatgttgacgactgttccgtgactgatgataaatcatcaaatgttgacgactcttccgtgactgatgataaatcatcaaatgttgacgactgttccgtgactgatgataaatcatcaaatgttgacgactgttccgtgactgatgataaatcatcaaatgttgacgactcttccgtgactgatgataaatcatcaaatgttgacgactcttccgtgactgatgataaatcttcagatgttgacgactcttccgtgactgatgataaatcatcaaatgttgacgactgttcagtgactgatgataaatcatcaaatgttgacgactgttccgtgactgatgataaaccttcagatgttgacgactcttccgtgactgatgataaaccttcagatgttgacaattcttccgtgactgatgataaatcatcaaatgttgacgactgttccgtgactgatgataaatcttcaaatgttgacgattcttccgtgactgatgataaatcatcaaatgttgacgactgttccgtgactgatgataaaccttcagatgttgacgactcttccgtgactgatgataaaccttcagatgttgacaattcttccgtgactgatgataaatcatcaaatgttgacgactgttcagtgactgatgataaatcatcaaatgttgacgactgttccgtgactgatgataaatcatcaaatgttgacgactcttccgtgactgatgataaatcatcaaatgttgacgactgttccgtgactgatgataaatcatcaaatgttgacgattcttccgtgactgatgataaatcttcaaatgttgacgaatcttctgtgactgatgataaatcctcaaatgttgacgactgttcagtgactgatgataaaccattcaatgttgaccgactgctccgagagtga

SEQ ID NO: 53198 - DNA, 1550 bp, Heterodera glycines
atggcttgcggcgacggtgatcaacccgaagaatggagaatggaaaagccgaacaataaaagtgaaggacttcaacagcctttacccatcccggtaagaaatggcacaagaaatgactttaaaaatttaaaatttttaagcaacatgttcaccaagtacccggttggccacccaaccgtggtgcaattcgacaagaaagtggattggcgctgcccggcacatattgtaggcgaggacggcgtccggcttcaggggatcatcaaatgttatgcggtgccaccacggcattgcttgtttgacatccccgtgctgccgcatcggaacagcaagcgcactctcttcccgctgtgccgaacatgcgcgaagatatacccgaacggcttgattgaccccaactacaattgtccacacttttcggacgcagaaaggggtaaaatgggcaaataaagtaatttttacagagaagaattcacaggtttttccacatctgtcacgcacattgagttggaggcggcactccgatcaggctacaaagtgacgcacgtctaccgtgcatacatttggccgctggtgtgcgattggagcgatagcgtgttccattcgtacatgaacaaatttctgaagatcaaattcgagtgtacgcatttttttaaagtaatacaaaatttaaaaacaaaaatgcttcagcaagtggatacccagcaccgtgcagagaagtcggcattgacgaagaggagcgtgagcgtcggcagcaggactacatcaataagccgtgggagggcaacaaagtgtgcctcgatgcgaacaacattacgccaaatcccgggctgcgttacctgtcgaagctgtgcctcaactcgttgtggggccgttttgcactcagaaaccggctcacaaagacggagatcgtggaatgccatgccgagttggccaagctgctgaacaacaccaaaatagaaatcagcagcatcgaccagctgacggagaaattctggatggtctgctacaaggcctgcgatgaggatgtagtggagcacggcaccagcaatgtaaacttggaaacttttgtttttaaatgcaaatatctcaggttgccattgccctctggacaacggcggcagcgcgggttcacctgctcgaatcgctgcatttggtgtataagcaagaaaatggggtgcagcgatatgacacgcaccttctctatatggtaaaatcaaaacaaataataataataataataattgctaaatttaaggacacggacagcatcttctacgacttcaagtcagaactcagcgaccctcttcctggcggccagcagcttggggaactcaccgacgagtaccccaaccacaccattatggaatttgtgtgcggtaagaatttgcgcaaaataactttaaaatgatttgaaattttcagctggacccaaggcctatgggctgcgcaacaacgccacgggggaggacgagtacaaggtcaagctgcgcggcatcaccctggactcggacgcctgcgagaggatgacgttcgagaagatgaaagacatg

SEQ ID NO: 53199 - DNA, 378 bp, Heterodera glycines
atgccttattatgtgttaatgttgtgcctaatgtttcacaccgtatttatggaattcattttaccaaaattttccattttctacaaaacagaaatgaaccaaattgtgcccattttaaaaaatgaaatcaacaaaatgttccgaaacaaggattgggattatgcgacttttgactgtatgcacacaatcgaatggaatctgctcagaattgaccttgccaagatggggcaaacccagaaagaaatggaaaaattgctgaaggaatggcgaattttgtacaacaattgggtgctgaacaaaagtgagatgaatcggccgaatttcgcaaaaataatgcaaaaaattgtgcaaaatttggaaatgatgagcataaaataa

SEQ ID NO: 53200 - DNA, 829 bp, Heterodera glycines
atgccgacgaaagtgaattcgcaattgttcaaattgcttttctctttggcaattcgtttatcggcacaaatggaaagtgagcgtttggcagaaaaatatgttaaccttttcatttctgtcaataaatgcatttcaatttcggcagatgacataacggattactggtgattttgtagataaaacattatttaatatttatacaaatttaaatgtttaattaatttaaataataataaatttatatttgtaatatttaattcaattaaatttttagtttacttcaaacgcaaatcaaaattaaccaaaaaattattgaaattgaacttccgaattggaaggacaatttgctatttgcaagaagcttgggaatgttgcaaagagaacaaataaaaagtgggaagctaattttaatttttaaatcatttttaaataaagaaaatttcgactttttgtgtttgttgtccgattattctcccaccatttacgaaattattcaaatgcttaaaattgttggtgaagcaaacaatgcacacttttgggttgagccttctgcgccccaaatttttctacgaattttaaatttttcgatgtcaacagaaataagtgacgacaaagtgaaagtgccaatccgaaaaagtgagttttgcgttttggtgaatttttcaaatgatttgttggaacgaattatgaaaaacagaaaaaatcaaaatattctgtttaatggcgtcgagccaattgaagtgacaattagcaaatttgaattgataaagcaggaattgtgcagtgatacagaacactcgtaaattatttttaaatttaaattattaaa

SEQ ID NO: 53201 - DNA, 824 bp, Heterodera glycines
atgtcttggcctgatcttgtcaacaacaatttgatcggtaaaattaataattttacatataatccgtgaaaaaaatttttatgaattttttttaaaggcactggtcatgtttctaaggctgcaatttgtggcttggacggttccatttggggaaaatcggacaattttaatgtcaggaatttattttaatttaattttaattattaaattaaaaagatatgatgaattattaattaaatatttttttagaaaattttcccaaaaaatcgcagaatacttttgaaagtttctatttcttgaaattttcttattaaaaaatttcttaacatttttttgaaaatttgttaagtttgaaagtttaaaaaattttcggggtagggatgaagcaaacgcatttttttattgaattaaattttacttctttgagcttcaaatgtttaaaaattaaaaaaaaaaattttaatttaagttggatgccacggaagtaacggcagcgatgaacggactgaagcaggtcatcgttttcaaaaaaactaaaactaattttatattaaaattttagccggatgctgtgctcgcctctggacttcgtttcgaaggagaaaagttagaaaaagcgcaaaatttggcgtcggacaatgggcgccaacttagactttttttataagataattaaatcgataacaaattttcaaagaaaaattttgttttaattaggcgcgcttcagttcgaatgagaaaagttcgacaaaaaggctccaaacatttggcgccggacaaatgggcgcaaagcgccagcttagcctttgtgctttttttcaaaa

SEQ ID NO: 53202 - DNA, 372 bp, Heterodera glycines
atgcaccagtctctgccattgtttctgccgcttttcatcttcttcgtctacacgaccgattgtctcaacggtatgaaattttgatttaaaaatttgtgaaaaaccttggacaagaaaaaaaatcggaatatcgctttttgtcgttgtatagggacagttaccgtaattgctaaaatgtttttagcaattattaattaattaaattgaaaggtctgaactgccaacaaggagcagaaatcaagccaaatggtcaaaaatttaacaacacggatccaaagtgcccacaaaagggcgcgaagtattgtgtgacaagcatctgcacaaccggtcagccggcacggcccatcaaatggggcggggaataataataaa

SEQ ID NO: 53203 - DNA, 1309 bp, Heterodera glycines
atggctaacccaattgcaaccaaaaaacaaaaagtaaaattgtcttacgaaggccacctttacactttgctaaaatgagttctgatgggatgacaaaattttggagatgcgagttcaaaaacagcaccgacaaatgcaacggccgaatctggacggacctccacgaccaattcattcgcctcgcaactccgcacacatgtccagcagatgcgtcacgtgttgatgctcaaatggtcacgaccgcaatcaaaaggcgcgcaattgccaccttcgaaccgccttctgtcatcagagcagaagcgcttcaaaatgtcccgtctccgtcggcaattttggtgtcaaaacaagcagcaaaagatgtgaaaacaaaatatttttcatataataaaaacaattccaatttagttaatcaaaagagctcgccgagaagtgaatgcccccccccgtcgttcctgcaaatcttgagcagcttataatcagcccggcgtatcagacgtacacaccgacggacggcatcgatgaacagttcctgttaggagacagcggcgtatattatgaacgaggaaatgagaacccacagaggtaaaatgacaattattttcttatttttcttttgttatagaattttgttgttcggacgcgagtcatttggccggtgggcagatcgaatggaagcttgcttcggtgacgggaccttttcattggcgccgccacttttttatcaaatttatacaagagcatcatcgtttacagggcgccttcaattgccgacacccgtcgatttttcacttcattgacgtgctacgtcgtgagcagaagacaacagacgtcaaatacgcgtcattcattgccggagaggagccaccaccaaaaaagcgaaagtttttggcgacagatgaacgaattcttaatttggtgcgcctttacgtcccgatgaatgcaggcaacatcaaccatgatcacaattaccacaatcgcaatcaatttcacattattttggagtttctccggggaatttctcgcaactatcgaatgaacccgtgaatttctgttaatttttacattttttattgttaaaattattgttgaatttatttttaaactgtttattttacatttttatgctgaaatttaaaaagttgtttttactgtgatttcatttttctgtacttggggcccaaacgaccctggggcccaaaaacgagggcccaaacgcgggggcccaaacgcgggggcccaaaaactggggcccaaacgcccccgactcacatatgtaatatgtagaaaaatccgaaaatatgtaaataaa

SEQ ID NO: 53204 - DNA, 377 bp, Heterodera glycines
ttttcacatcttttgctgcttgttttgacaccaaaattgccgacggagacgggacattttgaagcgcttctgctctgatgacagaaggcggttcgaaggtggcaattgcgcgccttttgattgcggtcgtgaccatttgagcatcaacacgtgacgcatctgctggacatgtgtgcggagttgcgaggcgaatgaattggtcgtggaggtccgtccagattcggccgttgcatttgtcggtgctgtttttgaactcgcatctccaaaattttgtcatcccatcagaactcattttagcaaagtgtaaaggtggccttcgtaagacaattttactttttgttttttggttgcaattgggttagccatttctgaaaaat

SEQ ID NO: 53205 - DNA, 686 bp, Heterodera glycines
atgacttctcactttctcgtcggcgctgcagccttcggggcgggaatcgtaagtttttttttgttgtttttcggtccaaattttacatctcaaacaaaattttttcaaattttcagtgcttcgcgaagacgtacatggagaaaccgaagagcgaagacgacaaagaagcgcccaagaaggaagaagccacgaccggcggcgacgcagaggagaaggcaaagaagaaggacaagaaaggcgacggcgcagctgcggcggacaagaaggaggagaagcgcaaggacaaacacaaatcaaaggaggggaagagcgacgacagcaaccgccgttccaagaaggacaagcacgggaagaaggacaaaaaggacaagaagaaggacgccgccgagccagccgctaacgccggagaacagagcacagcggagacgacccaagcggacgaatagccagcgatgagaacgacgacggtgcacgacctcacccttcacgatcagtcccccctactgcttgctgttgtttgtgtgaagtccgttccccatattttgtacatattccatgtgatcagcgaccttcctaatgtgatcaaaatatgtatgtatgtgtaatatccattaatgtgctgcttcatattcgttatttgtgtgtttgtacagtgtttgtattcattgttcaatgtgtgtaataaa

SEQ ID NO: 53206 - DNA, 1565 bp, Heterodera glycines
atgggcgacttacagtcagagaaaggaggaaaaactggcaaaagacaaaaggtaagaaaatgctaaatgaaaagaaaacctatcagcagatcacccttccatgtgcttatgaattacttttcgataagttcgccgtgtggcgaatttgtttatttcgttataaaattacaatttaatcaaattcgttaatatttaattatttgcattttctatttctctgtcgtagtgattgatttcccatttgatcagtgatgactaataatgagaatttgtcggtgatagtgatatcaatggttggtgatcagttgctcaatcagtgatcactggagattacaaaaaaaaaccccaaaaatcacacgcaaatcaaattgcaaatgtttcgatggaatcggtttccgtttctctctttctttcttttcgtcactttttcctccccccccccggcattttcggcggatttcctccgccggtggtcattttgccctcaaggcaatttcccagaggtgtcaattgtccgccagcgattggaaggattagtgactgatttcattgtgatgctttcatcaatttttcctcatgcaagtttttttctgacattttgtttattttcaattttattctcattttttagaaaatcattcaaattgtttaagacataaaaaagatattttatgagaagggcgatgttttcggacctaaaatctgccaaagtaagtaggatttaaatggaaatttgattttttaaaatataatttttgataattttaaatgaattttttaatttttgaaaacatccattttaggggagtgttttttacttttgaaaagttttttatatcctgtatttagctttctatcgcttatctttttctatttattttattcactttgtctaattaaaaagacggaaaaattaggcgaagacggaggattatggtaacgaattggcggtgtgaaactgaggagggttatggtaacgaaggcgggacgaagacgcagggttatggtaattaacggagagtgggcgtaggattaagtgtaataatccgtcattggggaggggcggggggtgggcatggatcagcaaatcctttaatttggtcccaaaagcattagcaatggcgacgaatgggtggcacaacgaaaacaaccaattattaggaggaagtgaacagaatcgggcaactgaatgccatgccatttgttagcctcaaacggcgcttttccattttcttggcaaataatcgcaaaatttccttctctctctctgttttttcggctttcttttctttttcttcgccaattgacttgttttttcgcaacttcggttatttctcttctcatagtgaaaatggacgaaaccctcaactcataaaatgtgaaaaaccgaaattatctgaaatccatcccagtacgagttgggtttttactgatgaaaatgagtaaaagtggagagaaaatgcatacaaatttgctattttaaatcacttataaaagcagtgatttatgtattccatccgaaaatggacgaatgcgcatgaattggcatgagatggacaaataaa

SEQ ID NO: 53207 - DNA, 654 bp, Heterodera glycines
atgcgcgaggcattggcgacgcggattcagctgcctgaaagtcgcattcaggtgggaatgggactgaatcagcagatagtctcaatgttcaggtctggttcaagaacagacgtgccaaatttcggtgtgccattcccaagaaatcgaatagcaatcgaattgtttagtgccaataaaaaaagcgaggaaattgcgcacaaaattcatcagttggcatcggcgaagttcccctcgggcaatgccaatgattcgccgcccccggccgaaccgacggtggccaaaaatgagtcgctgaagagggcacagatggaaacagcaataacattgagcaccgcctcgggggaacagccggcatcggaagcggaggaagcgaaaatggcggagccaacagcggacgatttcggcacaatgttcgccccttccgcactcaaattggagcctcaaactacccatgccatcgcctcagcctccctccccgtttcggtggacagaacaacgatggcatctactctttgggatggcaatggactggcagcggtggagtcgacgaatcatttaacgacgggcggagcaaacggaacggcgatggattggttggcagcggcacaatggcacaaacaacagcagcagcagaatactcaataccagctctcg

SEQ ID NO: 53208 - DNA, 726 bp, Heterodera glycines
atgccgtttgatccggatcgctacggatgttggagaaatgtgacgaagccttgctcgtgtccctgttcgaaactgcgtgccatcaaattctgccgagtaaattcaaaattttaattgtcaaagatgcttaattggcattcattttccttttggcatctgtccgtccgttttatcttcgcttttgtttttcagattgagtgcgatttcatggaccgtgaagccaaggagtggggcaatgccggtcgcgtggctgcgggcgttggctcgctcggcctggcgtttattcctattgtcggcccatttcttgcagtcggcgcaattgctgctcaagcaaaaaattggggcgaaggtggatgctgttgcttttatcaataaatttattattaattaggacaattaaaatgttttagagtaatcaatgcaaaaagaagcgaaacttagcatcccaacttattttcagacatgactcacaccgcgctggaagtacacttcaaatgcgagcagtgtggccaaattgcgtacaaaacttatgaaattttgcgcgaaaatatcacgagcaaccgatggggacgctacacgaacacttatgggggcgagcaaatctgtggaattgacaccacggcatttgatgaaattgagcaagtgttccgtggcatgcccaaggcgtacaacttcgcctacaacaattgcaaggattggacgagcgaaatgaccagacgtctttag

SEQ ID NO: 53209 - DNA, 1188 bp, Heterodera glycines
atgggccggacggaccctcttcgtttgcaaaaatttgggtttattaagatcagtttgcaacgattttttcttaaaaaaattatataaaaacgaaagtagtgaggaaaatgccaaaagagtgaccaaaagtccgaaatagtgacaaatggtgacataattttcagcctttaggggtgtaaataagaaaagcttaaaatctatagaagtttttctattattctgaactaaaggcaatagactaaaagttttttcatgaaaataatcgaaaaatttgtcatttttcgtcttaatgtcagtttttgtgttattcttgtatttttatgttcccgagactttttaaaaaatgacaaaaacttgttttaggggtgtatttttcaattttcttgtatttttcatacaaatttttctcaaaaatgccaaaatatatgcgaaatatgtgccaaaccccgaaatatgtgcgatatgtttttatttgccaaaatgccaaaataagtgtttctatgtttttaagtcgctctaaatcgaaaattgggacagggtctggattatttgttgacgaaaataaaaaggttagcaaattttaggcacttttaaaaaaccatgggccggcccccctgtggtttgcaaaaatttgtgtcatattaagtcgtgaataattcgttgtttttcagatttctgatcacgaaagttgacatcaatttgaaccaatccctgaccgaactcgaacaagccgaaaatttaattttgaggacttgaaattagtcgaaatagaagtccgaatttttgtattcaccgaccataaacccatgcgaacgaattttttacgacttattgctgcgacaaaaagttttttggaaatagggccgtaccatttatgatgtatttttttaaaccaatttctttagctgaaaatatcagcatttgctcgaaatttcttttaatttttctaaagaattatcggggcaaaacgcataacttattttaatgaaaaattgaaatgggagatcaacagcaaaagggtaagggaaaagagcaatgcttactgtaccaaccgtaacatggttactgtcaaattagttttttcttttcttcaaattgtttattgtggtttaaatgaacaaaaacaacagaacagaataggcataaaattaaagagttagacggtcaaatatgaattttaataataaa

SEQ ID NO: 53210 - DNA, 1665 bp, Heterodera glycines
  unsure (1)..(1665): unsure at all n locations
caaataagaaatatcantcccgtaaagaaataaaatactatnccgtgataagaccagattattntcgtatcttagaaaatactttaaaccattagaagatccgccagttatacaatacaatacttcttttatttctgattcaatttctaaagcggaaatttttgcaaaatttttttctgaaaattatattgttaataattattctcttgattttgataattcttgttcttcttcaacaataaacgacgtagaatttaacattgtttctgttggtaaagtacttagaaccttacctaacagaaataacacatcaccggacggtattacctttagactcttaaaaaattgttttctttcgtttactccttttgttactgaaattttcagactctcccttgatacaggaaaacttcccactatatggaaacaatcgattattatccccctgcataaacaaggggacaaaagtaaccctatgaattataggccaattgccttaacttgttcattatgtaaaattatggaaaaatttatttgttggactatttctgattttctgttaaagaacaatttattcttggaacaccaatttggatttataaggggtagatcaaccacaacacaactaatttcaacccttgaaaattggtatgatggtatttataataataagaatatcgattgtgtctatatagattttaggaaagcatttgacgtaatcccccataatttacttttatataaggttcataaaattggtattaggggtaaaatcctaaattggatatctgactttctttcaagccgtacctttagggttcgggttgatagtactctctcttctgaatataaaatgagctctggcgttccccagggttctgttcttgggccacttttgtttttgatatatattaatgatttacctgaattaattcctaaacaaatttctataaaattatatgcagacgatgtcaaattatattctgtacataaaacaaaaaatgatagaattgttatgcaccacgctttaaatattctctctgattggtataagaaatggtatattaaaatttctattaatataacttttatcatttacttcggaaaaaataaccccagagaacaatataaaaataatgataatgcaatttgtgaagttgaaactattcgtgatttaggaattcttattgacaataaatttactttctctgaatacataagcaaaattacccgtaacgcctactaccgtatgcgtttacttttccgtgttattaaatcaaagaaaattgcaatttggaaaaatatttatgatagttatatacgttcacttcttgaatatacccctgaatcttggaatccgcaactaaaatcgcatattatcaaaattgaaaaatgtcaaaaatatttcactcgaatcgctttcagaaaatgttgtcttccaaatattccctatgaccaacggcttcggttttttaaattagctactcttgaaaaacgaagaaaaatttttgacctcctaactacttataaaattttacatggttttacacatttggaccataacctaaatactcgaaataagtcatttttccgtttaaatgttaaattacaatctaaaaaatctaatgaatcttttgtaaacagatcagtcaaggcctggaatgc

SEQ ID NO: 53211 - DNA, 207 bp, Heterodera glycines
aatttgggtgaacgtggcgatcgcctcaactcaactgttgatgccactgaacagctgcggaacaatgcgcaggcaattcagtcccgatcggccaagtaaaaataatttaaaaattaatttatttttcctattttatttaaatttatttattattattattacagattattggaaaagtatgaaaggcggaaatggtatcagctgtga

SEQ ID NO: 53212 - DNA, 1396 bp, Heterodera glycines
  unsure (1)..(1396): unsure at all n locations
atgatgcaacaaattcgggacaagccgaaactcagacacgtaagtttgaaaataaactattttttcaaatattttgctgtgaaaaaaaattatattgaaaaatgggtaatactggcgatggtactcctcaaccaatttttttttagatagtgcctccgtgggcttctcctccaccggctactccgtcgatgcctttcccaccaatgccagcgttgccgccatcaaccagcagcagcagcagtcggacaacgaattttgacaatccgctgttggtgcagctgcggaacagaattccactgggaccggtgagttttgtgaaaattgcaatcctaatcattttaaatacctacattaattacacaatgcctgattgtgagcatcatcaacaatcgaattttcagattctcgaaaatgacgcgggaagaggcgaagttggagggaccgcagacgaagtggcgaaaggggtgaataaacgtcgcgtgcaaatgaattacaatgaaggtattttagaaaaaaaaaatttttttttttgatcctacattagatgacacatcctcgaactccaggaacacgacattcgaattggaattggaagatgaatgattttttaaacctgattaaatttttgttgtacccccggttctgtgaattttgcattttttacaacctgttttaatttagtgtaccccgtccccccccctctgtgaatttatagattaaatttttagttcactttaattttgcancggggtgggtaatgattgccatggacataacgggaaaaactcgtaaaatttgcaaggacacatacaatgttttaatatataatgagatttgtaatggaaaatgccggacttgcatagcgaaagaggaagatatatcatatcatgatcactgatctaaatttttacctgaatgattgggaatcatacagtacccgcaaagttttgtatgttgaatgccactcatagtttttgaatttgcgcaaatcaacaaaacgccaaacggaatgatggctgcgctgtaaaaataactctggggctcaaatggcatacgcgagcatttaaatggcacacacgcgggcgctcaggtggcatgcgtcccttcccttccctataaggcatgacagctgacgtcctccctctgcctccctttccttctctaataggatttggcgttgggttttatccttcagatgttttttcaattatttacctcttctgggattggatatatttattataggtgttttttaaaggtttaaatttggtactgaaacgtccctttccattgggactgaaatggcggggctgaaaattaagggccaaaatcttggggggtaactactggaatggcaaggaaaagcgcttatattaaacaaatcattgttaataaa

SEQ ID NO: 53213 - DNA, 917 bp, Heterodera glycines
atgccgtgcctgaaggacgggcgactgttcgaattccatcgcagatggacgcccttcgagggttgcgaaagcgatgcgatcggaaagaggcgacaaaatgtgcgaatcggtgcaacgggcgacctcaatttgtaagagctgtctgtctaattgggtgtttcagctgatacggtcaatttgatcactttccttttgtctgatcactttaagttttgatcactctcatttggtctgatcactttgattttgtctgatctgtctcatccctcccacctgctcattctctttgcttattggcacttccttcgtcctttgatacactttttcacattcggtcgaataaaattgcatcggtgtccaagttcgacccctatttgccgatttgaaaatggccaatgaatcggccaaacggccgcaaaaatgcagcgatacataagtgatcttaatgacatcattaattacacaacgaaacttaggaaaattaatcacttcaaattttttgcccaatgacaaagtcaacgaaacattgtggggaaatgcggtggtcggttcgctgacccaacaagtcaaattgttggcattgttcagatcagtgagcagtgccgccggatgggccaattgggccaccgatgggtcgcacaattcgcacttttcccggagaaggccttcagcggagtttgccaacacacagaaactgaaacgaaagtcggggaaggcatgaaagaggaggagaaggaggaggaggagggcagattagacgatgatcagactgatcggaccaaatggaaaaaaccaaacgaagtgccaaattatgggagtccaatggccaacgttatggattatgcaaatacggcgaatggagccaattttgatgagaaattggagaacaatttgagggcccgtaccaaaagaacgag

SEQ ID NO: 53214 - DNA, 292 bp, Heterodera glycines
atgggaaattttttttctacgggaattgctgaacgtaattttacaaaatttttaatttttctaatatttttctacctaaagctgacgttgaacagccgtttggaccagaccagcggccgagtgcgccggtcgtgtgtgtgtgtcgtcgtgtgatgacttgggcatggaatgaacgagtaaccatgctgctgctgttcattctgctcgtactgatgtgccagttcgttttttggaacatcaccatttgagatttttttgaatttttaaatgattcgatgctttcaatttgata

SEQ ID NO: 53215 - DNA, 1031 bp, Heterodera glycines
atgtcggcttcatcgtcactttttttggttgttgttttggcatgtttggcgatgtctgcaaacagtgagtaattagcagcagcagagagttgattggattgaggaataatccgtcttgtgttttttgttgttataaatacatattttaaaaagaaattaaatcgttttttaggaaaaaagttcaaattgtaagtgtctttagtacaaaaacaatctttggaaaattatggcaaaataaacggtacaaaaaataatttgttttttttgctataacttaagttttttttattttaaatgcttattcttagtagctttaataaagattcttttttggaaaaaatggcattttgaaatctcttatgcagtaattaccctaatttagcactgaagtgttggtttggcaatgatgtgtttggcaaagtagaacaccagtgcaagcctggcactgtcttctgctcaaaggctaactgcctgaggaaatgtaccatttaattatttttttttttcaaaaattaagtgccggtggagaaaaaatagcatttgtaacaaattttgaccaagaattaaacaaaattttataaattatatagaagtttatcataaaactttaataaaaagtttttttttaaatgtttatcttttaaaaagattttactggatttatttgtgtgctgctcaaaagtctcggtctcgacaaaaaaacaaggattatttttggtctcggtgttaattataaatttcagtctcgagctttgggaaattctttggtctcgagcagcaaaaaaaaatttttttttaaaccatcttttatttatggaagcgagatttaatttacatttccaatttaggtatttgcgcatataaaaaggaaaattttcagatgacaatatccgagtcattggaatgggttgtgaacccaacagctcagtttgtgaccttgcctactttgacaataaattcatcaaatgcgaaaatattcaatgctgccgcgacgacttttgcaacggagtgcccgatcgtgtggaccccgg

SEQ ID NO: 53216 - DNA, 1351 bp, Heterodera glycines
atgtctgacaatccaaaggaagcggagaaacaaatggaaaaagcgatgtaataattcaaatttggattgtccatgctaattaatcattttgcttctttttcagctttatctctgccgactgttggctcaaagtgttcgatttgcttccacgctctcaacttggctgtggcattgcgatggttagccgccgttttgactgtttcgtcgacgaacacttcaaaacgcgcaaatggaaattgggcgacatgattattgaaggcaaaattggactgaatggcgcaaaaggaatgaaaattgtgcaaattgccaatctcggtggaaaagaattgccaatcccacaagttccgttgccgaacaaagtcatcggattcggacgcatttcgatcaagtaaaaaatgaatttaaaattttttaaatgttttgtgaccgtcaacacttgctaattacatttcagcttcatcgaccaaaatgtgctcactttccttcgccgttttgaccgctttttcgcttcatgtacaacaatctttgacatttacgttgaaaatgttcgcatttcggagttcgttctgcgcaacatttggccgatgctcaaggacaccgttctttatgtgcaaacggaggccatcgtttttcgtcaaatgcgtcaattgggcctgtcaacgctcaacgattatccatcacttcgaattttgtcgttgaccgagattttccccaaatttccgcccgacgacagtgccaatgcgtcggatggccaagtggtgaccaaatggctgttctcgcctcgtcccgacaatttgccgaaggtgttcacatgcattgtggattcgccggagatggcatcagtgggccaatggttggcaacaatggaacaaatcaaaacggtgattactcaatttaattcgtctttttcctttttatggtcaaattgaaattacctctttttatcattcgattactctcggtctgtaaagcacgaaaatgaaaacgaatttttggcggaaagcattttgtactttgttatgggcccggaatttactttttttttactcttttcaggcattttccatcgcttcttctcctgtcaatttcggcttctctgttttccttccgccgtccgatccgcctttgaccgttcagccctttgatctgactaacgaattgactggggagaaattgacattgttagaagaagacgacgatgctcttgtggtcctccgttgtccaacagcaagcgatgtgctcaaatggagaaagacggctcatcatggaatgaatgatcgacagaaccaatcggtctcgatgatcacaggagacgttttcgactaaaggagaacaacaattaatatgataa

SEQ ID NO: 53217 - DNA, 1051 bp, Heterodera glycines
atggccaaggatttggctgaacaatttgatgcattccgatcgctgtgcaaaatgatcagggcgactggagagatcggtggtattttttgtgaaaacgcctctaaaaaattagaaaaaattaacatttattgcttttaattccatcaagtaaaatattagaaacaaatttggaagtaattaaataataaaacttattaataaaaatgactttcataataattttaggtcaattgaagcaattatttattttaatgtcgcaatagaatatttttgttaatcgcataccaatatattttttgaattatttgcaatattttttcaatatttttcgtatttttgaatagtctttaaatagctgaaaaatatgcaaaattttcttaaattcttttaaaatttctcatttttctccataaatgcgtctaagttcttttttacttaaatcactaaatatcaatttaaattatttataactttgctcaaaagcaaccaaatttttaattcttggtatcattcgatagccctaagtgttctctatcagtctacaaaatttcaaaaaaaattcatcaagtttcaaaagagttagggccaaagatgctcgaaaaatgctcgacaaacaaggtttttgagttcctctagccataacttttttgaaacttagcgaaattttttttaattttttagatttatagagaacactaagggctacgaataatatcaaaaattaaaaatttgcttgcttttgagctaagttataaataatttttaatcaaatcatattgatgatttcttaaataatgactccgccgcccaaaagttttttttttgaaaaaagcgcgcagaatgataagaaaagcaaaaaaaaaagtcataggcttacatggccggaactccttagcaaagaaaaattagaaaattttttgcttttaaatggcggtccgcgaccgcgggatttttctgcagacgctccacccttggcattgtccatcggagtttttttccttatatttatatttttcacaatttggtgtcatgataaatactcatcaataaa

SEQ ID NO: 53218 - DNA, 591 bp, Heterodera glycines
atgtcatcatcgagcggatccccagattcttttttccgttcagaaattaatcaaggtaataaatatatagaaaaaaattcaaaaaagaattacgaaaaatagaaatgattaaattttattgaaaaataaaatactaatttaaattttatcaccaccagcagaagcagaagaagtgggcaaatatgaagtgttaagttggcacggactttggggtgatcaattgtcagctgaattgttcgtcactgatcagcagctgctgaaggtgagccatctcaaaacgtacaaagagaggtcgcccggttccatgccggacttacggaatgtgccaaaaaccgaaaacaattttgcaaaatttagttcaacatttcaaattcgtttaaagttttttaaattaagcaataacataaaattaataggagaaagtgccggccgtttcatagcgcaatttttgatggcattttgccaaaaacctttcaataaacggacataaaatttaaaaacttccaaattcttaattaacatttagctgaccgtttaacaaatgcaattaaatttcagtttttgttggtcaattggagacatttttggtag

SEQ ID NO: 53219 - DNA, 916 bp, Heterodera glycines
atgtcctatgtattacgattaatagatttgactcgttatatacgcgtttattgccatcttgggcccatgtcatccggcagtcagcgtctatggtgtaagtctcatagccagcacatgtccaattctccgtttcatcaattgtaagaactgtttaaataataacaatgccaggtttccatataaacattttttcattttcaagcacatagaaatttttgagcacaagggttgttaaatttattaaattttaatgatttatataacattttatatatttatgttgttttatttttttgaaatccctccctctggtgcccaaacttcccggtgcccaaacttcatgtcgccgtttctttggccactcgacagatctttttgacgaaaaatggccgacgaattggtgggccaaacaaaattaaaaaaagcaaataatttaaatttccatttgtcagatgacactcttttttcactacaactcccgtcaattctctgtttccatgcgtttctttgtggactggcgacaaaattgaggccaattttgggccaagtttcaaatttaatttggctactctttgaagaaagtcgaagaaacaacggaaaagggcgattaatcattcattaattaattctttttttcattgttttatttttaatttcactttattttcaattttttatcttattttgtcatgcgtatttgttaacgaatattaatttactgttttattttgctaatttatttattatttgttttcctttttcgtgtaaagatttacttaaaagggaccacagaagcaaatattgaagctgaagaaatagcaatttcaagaaattccccaaaaggtttttaacaaaatacaaagtcgtaggaatatgaaattaaatttaagacaaaataatttcattttcttacaaa

SEQ ID NO: 53220 - DNA, 2248 bp, Heterodera glycines
atgaattattctattttaaaaaagattgccctgatcatcggatcaacacgggatcaggtcttgttggaagcgagaaacgaagtgcagcggctgctggaaccgttgaagaataagatggagacggtaaattttttcattttcattatatatttttaacccaatttatcaacaaaaaaaaaatgaaaaatagagtcatggtcatatatttaaaaatctttaatttttgaaatttcaatcggttaaaaggtagaatttttgaagcattttttgtgggctttttaatgatatcactcattgacgaaaacattcgtgattggaagtggtaccggcaagaaccaattataccccattttcgggtggtcatatgattataaccaaaggttttatttgctttaactcaatagggttgggaaattttttttgcaaaaatcattatgtccatctgaaaatctacaatatgaaaaagaccgaaagtcgttgcaacttatacctgctgaggtataggcatttcaatttcgatgtccacaaaaagtactgtattgccgaaatgatcaacacccttatcaaagtgctcatacctcaacgggtataagtcgtaacgactagaaatcagttgcatattattgagaattttgtgctcactccaatgggcctactcaaaattttaaaaaattcccatccctataggaatttttttcaaaaatttcccagattttcagtgttttttagggtgtccctatcaccatgaagaactggtctgatcaagttaatatgaaaaacacttttgataaacatcaatgttacgttcacatgaatttttttcagatttttctgtgctctaaaaagcgagattcaaaaactggtttaacatataccacccgaaaatggggtgtggtacacaagtaaaatgtaatttgggattaaccggtatatggcttaatgatggtttcattggacaaccctataaaaatgttacaaaaaaatgcaacggtatatgcttatcaaagagctataaaattccaaactaatttggttattttttcagctgattaaaaagttgttcatcaaaagaacgatggacagaactgatgtttttgggtaagtttatttcaaatatataatttaaaaaaacacaacaaaaaaattgtgagtaaaaaatacaggaattttaatgcaccataacttattttagaagcatccaatagaaaaaatgtgtagaaaacgaattttttgaaattttctgaaacactacaaattttgccataatttttttttacttgccaatccaaacattcttgctatttcttcgaaagctttatgtttagggaatttagaaatacaagaaaagagcaaataaaatacagcgaaaaccgaaatccataatttttcgcgtatattcaagaaattttttgtctgttacctttatcccagatttttgctagacaaaacttctgtagacttcaagctttcgaaaataccaagaatgcataaattgaccacgagaaaaaagttacggtttaagaaacatgttgatcactgactgtacgcgttaacagaaatagagcctaaaaagaccttattatttcatgttaagtgttatgaacacgttgccaatgtccgaaaaaagcggagacaaggaaggcgatgatgtgctgcgttatgatgcggatgcggaagaggatgaaaatgatgaggaacctgatcagcaggaagatggacagcagggacaacagcacgagggacaacaacagggacaacagatggaagaagatgaggtagaagatgaggagtatgaggatgatgatgaaacggacgaggaagaaactgaggaagggggagatgaggatgatgatgaaacggacgaggaagaaactaaggaaggggaagcagaagaaatggaagatgatgaagttgagtaagaggaagtgatggaatatgctgatgaattaattgtttaaagccggctttattttttttgaaaatatatttatacattttaatttttaaatagattttctaattttcgatgcaaaactcatccgaacaaatccataataattagaagcaggattttgaggcatatgcctttctttttgctagcttgctacggcctaatatggacgaaaaacgagtttttaactaggtttaaagctttagctagaactttttggtgccttttcttgcgattttggtgccttatgccgggcacgtaattttggtactttttttgccgtttgtttaaaataaa

SEQ ID NO: 53221 - DNA, 1471 bp, Heterodera glycines
atgccgaacttcaactgcctggagcggcccctctcccaactgttctaccggtacgggtgcttcatcacgcgcactccgttcccgctggtggtcaccccgctgctgatcaccattttctccgtatggggcttcatgtcactgaattccatcacaggcaatagcaaaattcgttttttaaataaaaaaataaaatcccatcgcttttcattaatcagtaatttgagaggcatccggtttttttttaattttttcttatttggttttcttaattttttaccgctatggttttgatttgttttgccagaaaaccttggtgaagcttaaaacctttaagcatagacaatggcgggcaatggcaattgaaaatttagttttatgatccctaaaaaatccaatttctccccaatttttatgcattttaaattctattgaaaaaaactttcgttcgactcaattttcttaatttttttccatctcaatatttacttcctcttttaagacgccatttatttgttcacgccgcagaacgcgccctccaaaatggagcgccaggtcatccacgacctgtggccgttggtcaacggcagttacatcccgggccgggccgtcacacagtcgcgggaagtccaggttgttgtcggatgagggcagatggcttatcatgatgcttttgattaggggtggcgtgggatgctatgggttacctaccactcggggggcggggggaatgattttggtagttcgatttaccattagatattggacacacaaaaatggtggcggactttttaagacgcggaccgcgaaaaagtgacgcgcaaacgcgtcccgcccctggccaattgtgcgtgtgtccaaaattggtccaaattcacaaattgggttaaatcccgaatttaactcatttcctggctcactttttcataaatttccgtttcatagatcactgtaagtgcgcgtgagcgaggcgcaaacatccttgaaaagccctactccgaggcggtgcatgtgttggacgaaatcatacaggttttttgttgcaattttgggcggtggagtggtcctagtcaactcctttcataattgtaagaaagaaaataacgaaacaaatttcgcgtaatttccaaatttttcccattttcccggcagcgcctgtgtctgggcgcagccaattcaatttggcgccagcccagttcaagcgttcactattgtttataaaatttcgagagattttaaacaaaaaaagttattgccaaatattctataaaattagatttttgaagcaaatttattaaaattttgcaggattatagacaacattcggataaaactattgaatgatatcaaattgattcaaattagtacaactctgaaggagttctacacaaaaaaagaaagccgggttggtgccacacgtaaccggaaacggaatttgactccatgtgcttatacaattttacacagaaattga

SEQ ID NO: 53222 - DNA, 810 bp, Heterodera glycines
atgaaagatgaagaggaatatcaaaacaatcgtgttcggcttttcgaaattgatcagacaaggggcattgccgatcgaccacgtcttaaaaaatacatcgaaaatgactcagctattaggcaattggtaattgcttatgacgcgaaagaagaaaaaaatgacgatgatttgatccgacatattcatgcattgcaataccgtgtggggatgaagggattcgaaggatgggattagaatattgttgaaaatattaattttgttgcgttgttaaaaattagtatatgtttgtttcgcttatgtcaaaatagggggggggggcggcgcaagtgtctgcggcgcaagtgtcgcggcgcaagtgtcggcggcgcaagtgtcactttggctgggcggcgcaagtgtctgcggcgcaactgtcgcggcgcaagtgtcactttggctgggcggcgcaagtgtctgcggcgcaagtgtcggcggcgcaagtgtcactttggctgggcggcgcaagtgtctgcggcgcaaatgtcacatcacccaattccacaccattgcccttaagccaaactgtattataattagggcgttgaattcgttgtgtgaatgcgccctcgacatttgaattcgccgtgctgatgttcacagcgccaaaattttacgtcaccatcggcgttcaacaaatggaagacatacaggcagccttcatgttcgagtttttttattttttcgttgagatttaatttcagcattttccattttcgcaaggctaaaaaattaatggtactttaaactgttaggtaagtatatactaataaa

SEQ ID NO: 53223 - DNA, 393 bp, Heterodera glycines
atgccgccaagacgagatcgatcaagggaaagaaaggggaaggcgaggcagggacgacatcgatcacggtcaaactcgcagacgcgtttgagtaagccaaatctggctggaagcccaggcccgtttaatcagatgggctgggctaatttggagattttttttgttcctccaattttttgtttacaatacgatttgcaaaagttatgcgtcgggggggggggggggaatatgcctttttaggtaatttaaaactaatgaaaagtgagcaattcagaaaattttggtcatatttttgaaaaaaaattccaaaatggcggttatccgaaagcgaattatcttataaaaaataatttttttaggtaaattattgtgaaaatgaaataatttaataaa

SEQ ID NO: 53224 - DNA, 853 bp, Heterodera glycines
atgaaaaacccacctaaagaaatcggaaagaatgatgatacggaaattaaacagtttgtgcgagatctgttggatcattacaacatggtaggcaaagtactgtttgtggatcagagccaggcaatcgattacagtgtgattgaagcgatactgtacaaaagtgaccagacaaaggtgatcagagaagatttttgggctaaaattgaccactttttttacaatatgtatagttcaaattagggttgctacccaacttttggggatacaaaagtccgggatcaaaatttcgcgatggctggaagaaaattgaaaaaatgcaaaccaataatcatcattctagataaataatttgtcaaaatccaattcaaatatcgaagaaattgtcaatgggattggaaagatcacgttgacaaagtttgataaaaaaggaaaaaatggtaaaaagttaaattttttgtatatctaataataaaaaaatcagattcttcggtgaagccaactctaatggataaatttgaaattttgaaatggattgaccaactcgacaaacctatggctgatttaataagaaaattgcacaaatcagtcaacgaattaagtgcttcaattaatgaaggtgtatttaaaaaaataatttatttatttatttatttagattctttggaccaaaatgcaaaaattcaaaatttaataagtttgattaaagaaattgcaattggtacggcaaatcgtttgcaaatctcaacaaatgaaattatgccaccggcagatggacaacaaattgatcagaaaagcatgctcgaagagttgaccaaattttggcacaaatttagggaaaatggggagcaaaatt

SEQ ID NO: 53225 - DNA, 460 bp, Heterodera glycines
  unsure (1)..(460): unsure at all n locations
atgcaaccaaatttcaattttctaattgttctgattttattcggtgtttccatttgtacggcttcatcttacacttggaaatcagagcctaatttggccaacaatgtacaaacgtttgccaaatttatggatgatctttatgtggaatacaagaagactgtaaaaatgggtcagttcaatgcaaaatgtaaaataaaaaatatattttagtgaaatttaccagcaaaaaaaattattatttttttggatttgtttttttggatataaatacactttcagacacaattctacgaaatccgtcaacgatattattgactaattactcagacaagcagaaaaggacagtgttcaatttgacatttgtnaaatgtgtnggcggaattgcctatttccaagtgcttagccaaaacgacgattcaaaagatgcttatctgattttaaagtgggcattctccatgaa

SEQ ID NO: 53226 - DNA, 327 bp, Heterodera glycines
atgtgcggaagttttccgataattgttggcgaaatgcgcgggcaaagaaccagcaaaatgtatcgaccatttctgatcgctaccgtatgttttttctggcaataatttctggtcattaaaccgtatgttttggcaatatattttttaaaataaaataaaatatttaatttcgtgaattttaggtcataacagcgattgtcggaataattgctacaataacatttttcacagaaaccggtaatgtttgaaattgaccattaattgttataatgaagtctttaatgtttttccaagaaaacattttgatgggaatgtttctaaaataaa

SEQ ID NO: 53227 - DNA, 1439 bp, Heterodera glycines; identical to SEQ ID NO: 22560

SEQ ID NO: 53228 - DNA, 2335 bp, Heterodera glycines
atgtttaatagggattggcatgacaaccctgcgccgacaattgacttcactggagaggtgagtgactgcaaaaaataaagggttttccgcttgggttgggttgtctacgagacttttatattacctattttaaaaagtttattcctatgggcaaaattttgttttttattttattttttgtcttttttttcaaatatgatggcttttggtaaaaagattatcaaaaatattgggtttttcgtcttcagcaggacgaaaaaatttaatacaattttttaactaatagttaaactttttttatatacaaaatttgtataaaataaaattgattacattgtttaaaataaaaaaatgaaattgttctgcaaacttttaatttattcattgggatgtctttaaataaaaaatgaaatttggtctgcaaaattttaatgttataaagaattgagattattttaaaacaaattcggtgagaaatgcttttttaattaaaaataaaaattattattttattaaatctattttcacataaatattgtttttaaatctgctaattaaaaaattattaaattaatattttaaataattgatataatttcaaaaaataaaaataattcgccattatttattttcatttattaaaacaactacagtttgatcagtcgggtgcggatgagccggttattcctgctgaacaacatccgcctgtcccaccagtcgttgctgacgacaaggctgaacgacggtgagccaaaaaacagctgccagcagaaaattttgcaccgaattttgggatggtgccaaaaaatcgttgccaaatttttgcatttcactaattttctttttatgtgactaaaatttcaatttactaaattttgcaccgaattttggaatggtgccaaaaaatcagtgctaaatttgtgtttcacaaattttctttttaatttgattggaattatttcgaatagtggtgcaacacactcccccgtccgccggccatcgattcgcaccaccattgacttttcggcggcatcacctgaaccagaagaggtgggtcatgtcgtataaaaatatacatattgtcttgactcaaattaatccgaaaaaattgaccaaatatttaaaaaatgagctttttttgattttttaattaattctttttttggatttttgaaactttgatcacttttttctgatcagttttttggtgagggccaaaaaaaggtcgagaatttatgatagaataccatctatctccacaaaataaaagtggtttaaacgtgatttgaatatttactgtaagaaatgttcccttgttagaaaaaattaattaaatgtttgctcaaaaaagttttgaaaatatgttcaaaaaataaaattttaattttatctattttaaaatgattcaatttttaaatatttaatgtataaaaaatcatgaacaggagcggaccgcgtccagtagcggaaggcggcgacgcgttggcagcacagcggcggatcggtcggcacaggcggcagcagcggcttgcgctgcgggcgaagaggcaacagacgaggtggacaacaacgaggaggagcgacagaacatggcggtggtgacaaaaaggatggcaaatttggtaaaaaaaaatttaaattattggatatgcttcaatattttttattattgattaccttatttataaataaaaaagaaatgaaatttgatctgcaaaatttgtcaatgggaaagaattgtggtcccaaatttaattttttgggctcaaaatcagtttccgaagggtgttgatatgtttctaaacacggatttacccaattccggtaaaacttcgaatttaagttttgcgccaaagattcgtgatcaataccctcgaaaacccacagaaactgattgttgagcccaagaaaactcaattttgggaccacaattctttacttttgcccaaaaatttaatattttctatttttgagtttaatttttgtttttttaagacggcccaaagtgaggacgagcggcgagtgcgaactgcgtccggtggtggaaggcgacggtgtgacgacagcggcgcggcggcggatcggtcggcggcacaggcggcagcagcggcttgcgcattgaaggtgcaaaacattgggaatatttttgaaaatacgagagaggcatatttgtaaaacaactaggaatggattttttgaattttttttttgaaatcaatttttaacggagtatttttgtttttactgtattttcttttttacaaaatatttttataaaaaattgatttaaaaatggttaaaaacatttttgtaaatattttatttatgaaataaa

SEQ ID NO: 53229 - DNA, 460 bp, Heterodera glycines
atgtgtaaaattcgccggacatctcttacagaagaatttggccttgaattaaattggtaagttttcaagaaaaagtcaagaaaaaatgttataaaaattttctagaggatatgtttttttcaaaaaatagaaaaatctctaaaaatgaataaaaattagtcacaaatcattaatacaccaaaaatagtcattctgtacggattctaacataaaagtaaattttaaaaattgctttttgttcgaattcgggtccggcttttggaatcggtcaaaattaatgttagattcatattcagcgcataaaattaccctagaaaaaataatttaaaaaaaaatttcaggggggtgacaaaaaggataagaaccaaaaattcattcaacaaaattttatatgcttatcaaaaaccgttaacagcaacttgaccagatcactccttcatactgatcgggataccctaaa

SEQ ID NO: 53230 - DNA, 128 bp, Heterodera glycines
gtcattaaaaatctgttgaaaaataatccccccgtctccattaaaggccctgtctccaattatgtccccctttctaaagaggttgaaaaataattcccccggggccttaattagagaaaatacggtat

SEQ ID NO: 53231 - DNA, 621 bp, Heterodera glycines
atggaaaaattaaaaaaaagtcccgtgcattctaggagaatcgaactttcatcctattcaatgagaagagactactctaccgactactctattgtgattgttggatgttttaactctcactttcctaatccttgtccataaatttttacagaattaatttcattttatgacaatatgtatacctttttatttgcttagtgatttggattttgaactacaaacgaacaaatcccatggcccggttaagcagcacaaaaaaagaagtaaaatcccgggacggcccagtcgccgggatagacacccggcttagtccggcgctgatattgaagccgatgacatgacaacttgtacaaaggcaactcgtacaaaaggcaatcaactcttacataggcttaaactaggcctaagctttaagcctgcttggtactaggcttaggctttttttgtaaaattattacagtacctttggatctattgcactttatgagcccaagcgacttttatgagtcagaagtattttatgagtccaatcaaataataatacctggtttttatacagcaactttgttcatgtttgaacaaaccctaatttttggtatcattcgaaagaacaaagtctga

SEQ ID NO: 53232 - DNA, 1156 bp, Heterodera glycines
atgcttgcaagtcgtccgtgccaactgctgctgctgattttggcatctgcacattttttgcaagcggaatcaaaaattggtaaaattcatatttcaaaaattttgcattttctgtttttaattataaaatttatttgtaaaattattaatttcagatgttcaagtcaataatgatcctcaaaaaacggcttcatcatctggtgttgatgaagatcatcgtaatgttgttgtgaatgttaagcatcaccataataatgtcgaacgagatgaagccacgaccgcaaaaagtaattagaaatattaattatgattttcggaattaaaaaattaatttttttaggtgaaaaagtgtacaacgaaaaatcaaccgcctcttcctcatcatcagcatcttcggaagaaaaaaatggacacaaacgacacaaatttgtcttggtccaacatggtaaattcattttagttaaaacatttaaattgcatttaaaatttaaattttaaaaaaatataaattattaaaaaaaatataaatttgaataaatatgattgacaacttgtgagtgtgtaacctatttcagaagtgaacggcagaaagaagcacgtattgcttaaagtgagaggtcaccgattgatggaattgtaccgtggtaaaaacattaaattttgcaatttaatttaatttaattgaattaattttaattttagaaagagacggaaaacatggactcaaaaagcatttgctgcttaaagttaaaacaccacaccaccaccgcaaatatgttcaagatgaatatggtaaattcagtaaattatgaattaatttaaaaactaaaaattaaatttatttaaaaagtattttaaataaataaaaatttaaagtgaaaaaagatgagaaaaatgacgataaattcagtaaatttcaaattaatttaaaaaataaaaattaaatttatctaaaaagtattttaaataaataaaaattttaagtgaaaaaagatgagaaaaatgacgacgaccctaaaaagaaagtttcagtgcgagttcacacttcacgtgaaggtggcataattgacgataattaagaattgttccggagatgataatgcaaaattgttcgaattgaattttgaaagatttatctaaattgtttttcaataaa

SEQ ID NO: 53233 - DNA, 1219 bp, Heterodera glycines
  unsure (1)..(1219): unsure at all n locations
attctgcaaaataaaatatttttaaattttggaagaatttaaatgcatcggagtgccatccgccgattgtttgacgttgccatcgtcggtggcggaattgtcggctgtgccgtcggtttgcaattcgtttcctttggcttcgcttttctctgttttccccaaaaagtccgtagacaatttcagcccgtcagctcaaaattgtcaagcccaatctgagcgtcgttcttctggagaaagagagtcgcctcggtccgtccgtcccccctcccccattttttgctttaccaatgccaatttcagcttcccatcagagtggccataacagcggagtgcttcatgccggtagtaacacaaagcgtcaaacttttgaacttaaaacttaggaatttattatgcnccgggcagtttgaaggccaaactttgcgtcagcggttcgttccgactttttcagtgcgattttttacttttttgagggatcgatttggcctacaaatacttggaggacaatgaaatcgcccacaaaaaatgtgggaaactcattgtggcccttgacgaggcggaaattcgccgtttggaagtgggaaaaagggaggagaagaagaattttaagcaaattaattgccaaaggcattgttcgaccgtgccaaacaaaaccaatgcaaaagcatcgaaatgattggcgaggacggcatccgtcaaattgagccgcactgtcgcgttagtaatgccaatttggccaaatttggaacaatttggcatctaagggtcgaaaggcaatttggtcgccgtacacgggaattgttgattggacgatggtcaccagaaaattcgccgagtttgcttcgatcacttcgccatttactgattggtgtctttaagagacttccagagaatgggtgggactgtcttttgcgattggtccctcgagggcattggcccttcggatgactccgcccatcccttgcgactgatcggtgcccccaacggcgcccaagtgaattcctcgtttttcgagctccctttaatttcatcgtcagatcatcgactccaaatttctgatcacttgcgccggtctcttctccgatagagtcgcgcgtctctccggctgcccaaaattaccaaaaattgtgccttttcgtggcgaatacctcaaattaaagcctgaaagacgctttttgatcaaaaacgctaacatttaccccgtaagtgaataataatg

SEQ ID NO: 53234 - DNA, 772 bp, Heterodera glycines
gcttgaaaatcttttcgctttttgtaaaggctaatagagcatgtgaagagcttcgaatgataccaacaatgtttgatttggctgacaaagaaaaaagttatagtggaaaagcatgctggggccaaatcgtgacggccgaactgaacgcgtagatttattattgtcattagtcgtaatttcaaatgattaaattttctctttttgttgattacttttaacatttttttaaatttaatttttcaaattttagtttctaaattttaaaatttaaaaggaatttatgaaaatatttttcgttcattattcatcgttttctttcagctgtcatcgttttcccttttccatcctttcaattcaattcgatgtcaatcgatgaaattgagcggacaattcctttgccttcgtcccatctcttctctcattcgcaattcgtccgggctgagattcactcttttgaagaagcttttgtccacaacaaacgcttcaaagagttcgaaggattactcagaacgaatcacaaagttagaaaaagaaaaggaaaaaagaaaggaaaaagttacagacttacgaaagtgtcgaagcgaaattcgacctgcaaaaaatcgaaaaaatgagcactttgacgaatcgactgaacaaattggcggatcatttgggggaaattggccatttgcattttgaaaaggtatgccaatggggaaaatgggaggatgaaaatggcggggcagaacgatgccaaaaaatgcctaaatttagtttaaaaaatattaaa

SEQ ID NO: 53235 - DNA, 1627 bp, Heterodera glycines
atgtcggtggacgatgacgacgacgatgaggaggaaatcgatggatggagtggggacgaggaggacgaattggagcccatcgaaccgaatgtatgtgctaaaaatggtggcatttctcaaaaaaatgccattttgacacatttaaacttttttttcagggggggggatgactgaaatttcgctacatcccccaccaatttttgaaagttaatcccaaattttaatacggatttccgaaagagccgtttattttaatctataacattgaagggcatttccaaatatcccatttcaactttcatatgaaattggccatgaaaaatttcaaaaaaaattttttttttttttttgatttacgcatttgaaacccttttttgattcgctttgaaatttcaaactcctccaaattaattaaactcactcatttttttcagtgtgttgaccgttgtttggcggttggccaagcgccggatgaaacggcattttccgacaagtggaagagagagttctccaagcggccaacatggttcaacgcggacatggcactccaccagattttgcgggtactttcctgtggcaaaattaatttttggtgttacaaattacggatttcagggccatagcctgcagatttcactatattctgccataaattctcaaatttctatggaataagtaccatcggtttaaattagcattttatttttttcaaatttacaaaattgttccatcgatttccatcaacctttttccccaaataaccagggccgtgccatcgtctcatattttttaaataggcatttttcctcaatttacagaattgtgccaccgatttccatcgacttaatccatttttttccaaatttctagggccgtgccatcggcttccgttggcccctgtactcgcgcattctcatccaacgctctctgttcggcatcggctgcttcgtccaacggcacgcctggctgatcattgtcctcgttctttcgctgttcacctttttttgttgcgggctgcgctatgtgtacattgagacggacattgtcaagctgtgggtttcaggttggtgtaaaaattttgaaaaaaaatatttgaccgggtcggacactgtccgtcagtttttactataataaatttaaagggaaaattggaaaaaatgtttctttccattgaagaatcaacaattttttcaattaaaatcattgagttttttgaaattcattgatgactaactctatccacacaccgaacccaatttatggtttttgacataaaaatgggcctaccccttccccgaaggcgtattttcctcctttttttggttcaaacgaatgaattttttgggtaatttttgaatcttgcatggttttcttattaaaaatcctatgaaaatttctttttttccacacggcattgccgaaaaatgccatcggagaacccaaattttgcaatttcggtccaaaagtgcccataaaacgttggatttttttctaattttttagagggtggtcgtctgaacgaggagctgaattttctgtccactctgcagcaggagagccgccaacgtcgtcaaaatgcgacaaaacggcacagcgacgaggacgaaccgacaaccgcggcatatga

SEQ ID NO: 53236 - DNA, 771 bp, Heterodera glycines
caatttaaaataaacttaaaaatattttatgatggaacgccgaaacagcaccaaaaatggcggtctgtcccccacccctcaagagacgaccattaatttgcccgtttcctccaatcgaagggcttcgtccgcttcgattctttttgcccaggtccccaaatgccattggctgttttgtttcttcgtctgtttgaccttcacttccccccaggcgagtttcgacacgggcctcgacgtgagccgcgcctcgcaattgtcgtcccagcggaatgtgctgagtacgcacgtgatggacttgggcagcggcagaccgtgcagtggcatccaatgcaaagcgttcaaatgggacaaaagccattcggaatggattcaaatcggagacacgtaatttggcgcaccgtccgcccgaactgacgaacaaatatttgagggtgaccaatgcgcaggggcgcattccgctggtgcaccccggcacttcgctgtccaaaggcctttacaaattgcgttttgccacgaaggaatattacgcacgtcaccagctgaagtcactgtttccgcaagttgacgtagggaaaagaatgaatgattttgaaatggatttgccattgttttaaggtggtcattgaggtggacgacgccagcgaacattgccatgtgccggtgttactcaaccatttcggctactccgtttataagggacactgatggaatattccctctctcattaattctcattttggtgtatattaaaaacaaataaaataaagaatt

SEQ ID NO: 53237 - DNA, 822 bp, Heterodera glycines
  unsure (1)..(822): unsure at all n locations
atggctatatatcaggactcgcattcgtactttgatgccaagtacgtacttgggatntgggctntcatgcttggaaaatgtaactgtactttttccaagaataatcttggatttccaagattagacttggaaattggcattttaacacatgattatcaaaaatacccgttgttatgaaaaaagtttacatttttgtcattcttctgtctaataataagcattaatttttttacaccatagagagtgcggaagaaaacattttggcatttatgccttttgctgtccgcacgtcaacggaattcacacagtttggatggcccgatttcgatggttttaccgacatgatgcaaattctgtggattttcctctgccggaccatccgctgtctaagcaaaaaaaaatctactccaaatcgcaaaactttgtaattttttttacccagtttgtctaggtttttggccataacttttctgaaatttaacaaaatttttcgattttggcatgctaatagagaatacataaggctatcgaatgctttaaattcattcacttcggacaactatgaaaagagttatgctccaaaaaccaggctggagcccagttggttgcagcccagtcaaccctcacccttaaaaattactagggttgtaaattatcgtggtgcgacttttggggatttgcaacttggggacccgacatttggggaactagacatttggggacctgacttttggaaatcccgacatttggggacccgacttttgggaatcgaacgacttttggggatccgacatttggggaactagacatttggggatttta

SEQ ID NO: 53238 - DNA, 521 bp, Heterodera glycines
atggcctcggcattttgttgctgtacgcaattagacagtaaagtcgcctttaactttttgaatgcccttgatgaatttctgttcccgttggcccttgggaaaggcgttttaaataaaaattggaaagggtgtacggtaaatactaaaatgtattgttatttctctattgggttgtggttagtatgggctcaaaattctgctacctcaccgctgtgagtccggaatagctctaactttttttttcgtacatctaaaaaatagatgtccagaatgtttgttttggactaaacctttaacaacagctgttttacctactttttcgaaaatcaagtaatttttgtaaatgctcattgtttttaggaaaagaactcggtataaaaaaaatataaattctcccacgttccaaatactaaaaaaatatacaactaagtttagaatttaaaaaagcaaaattttttagctattatctgtaaaagaccgttaagaccaccgttatataaaaaattaggttctacaaaaaa

SEQ ID NO: 53239 - DNA, 1469 bp, Heterodera glycines
atgggccttcaaacgcaagcaaaaatggaaaataagccgctggtactcagttggccaccggaccggaaaacccgtatttttcccggatgccccgtcccgagatgcctatgtgtgcaaaatttcagccccctaactattcccgttcccgagattttggttttaaggatgaaaccccttatcattctaacatatatataacttttagaaatatttatttcttgggataaattatcaaagggttttggaaggaattaaaaaaaatttgacaaatccgtaagtctttcgtgtaaataaagaatatgtatacaaaaaatatcaggaatttttttctaaacaaaaataatgattcactactcatttttttatttttctataatttggaaactaaaagtgagtgaattttaatcaaatttacgactattttttttgctctcagaattcaggtaccagagtttactatggtttttattatattttagattatcctaatgcttttgagcataagaaaaaaaccaaaacaaagaatttaaaaacggaaatgttaaaatcttagaacttaacccaggccccattcctccaaaagaataattaggtctatagggtagaaaattttttatacaaaaaaatagacccgaagaaaaatgcgtcaaattccttacttgcctttcgaatgaatgtgtattaattctggtaaaagctgaaatataatcacagataagaaaaagaaagagaagaaaaagcaaaacggataccaaatgaatttttgtactatatcgtttttatttttaatgaataattttggcatttattcttaaatttttcaaaaataattaaagatcgaatagatgtctatagataaaattactaaatttaagcaaaacttgattaaataattccttcatattattctaaaaaataataaaaagacggtatttaaaatgtataattaaaattatgataaataaacataattcattaacaaaataaatggtagaagtacgaatttgttattctttttatcaatgatagtcattcttatggtgatttaataaaaataaataaataaataacaacaaaattaaattaaattaagacttaaaatgggtaaaaactttactgattgatgaacttttttttgggcattcaaattaacggcgcaccacatagtctaattatttaggaaaatccgggcctttgctggctcagctgtcaaacaaatggttgatgattatatttgtgcatgcaaaaattcggacacctgcctatttcgcaataagtatgtgacatacggtcagtcagtgaaatgcaccgcgcggaaaggaccgatcaatatcggtccgcttaatttacatattggaggaggaggtcagtttatgtcacttgtcagtcggtcggctggcacgtgatacttcattaatcgctataaaaaactcaaatgagcaacattccatcacttgaatcgagaaaaa

SEQ ID NO: 53240 - DNA, 492 bp, Heterodera glycines
atggtcttgcttggattcttcaaaaagatgattagctccgcctccatctatacacatcagcaaattgcaggtaggtctgacacgttgacagtacgttttcgataagtacccatccccaaataatgtatgattaagtggatggttaccatccacatgtaacggttatgtggatggtaacatctgcatagaattgattatgtggatggttaccatcaacatagtaatgattaagtggatggttaccttccacatagtaatgattatgttgatggtaccatctgcatagaattgagtatgtggatggtttccatccacatagtaatggttaagtggatggctactttaatatttaaactaaaaagtttaaaaatccttttacattttttaaaaataggttttggggctgggcgacgaaaaccaacaacaacaacgttttatacggtccacaaaaacgacacccacaacaatggcatgttcaatgacaacggatga

SEQ ID NO: 53241 - DNA, 1521 bp, Heterodera glycines
atgcccaccacaccaatgagcggaaacatgaccgaaaacgcaactgttgcgaccggtaaggctctgttctttttttttgcgagatgagtgagagtccggcgggggaaaggtggggtcagtctgaccattttcatgaaatccctgctggttagcatgggataaagcaaggatggcatggaattccgaggatttgatttctcgaaaatttttgggcatcgaaattccgaaatttagagaaaaaaaagacggtaattttgtacgaaaccgtatttagggagaaaagtttgaaaattcttttttttttttacattgtatttttattttactttttatttcatttaatgttttctaataaagcctatttaagcacattttgggtccggtggtgccggcccttgccccggggaaattttgatttttgataaatttcttaaaaaacgctacttttcaaaaattttacttgattttcataaaaaattaattttcatttatagtttaagggggggagggggctataacgccctttctctatgctcttgctataaattaaatttttcagatgcaagtggacatcaccatctgacggctttggcttttatcttgccatttgtcattggtagtaacattgctaaatttaaaataatttattcataataaacctccggggatcccccagcggaaaactttggattaaagggattttttaattttaaatttcattgagtaaactctaaaaatttcccaacatttgactcaaaaacaaaaaaaaaaatcatgttttcatttttattcttttaaattattatattttaagttaaaatgtgagactctaatcaataaattatttttaaaatatgcaatttatattaatttaaggaattttgccaaatttggccatgccattcgctaccaacctctagacgacctaattcaagagaaacaattgatggccagaagcagatcatagaaaatcccaaaaaaaatttatccatttaaaaaacaatagaaaatcccaaaaaaaaatttatccatttaaaaaacaatagaaaatcccaaaaaaaatttatccatttaaaaaaatttctaatatttttatttatatgtatgtaattttaactagagtagagattttgaaaaatcctgcacctggattaaatccaggttcagcaaaaacccaggcttgtcaatgcatcgactcaggccttggatctggattttttgaaaaccaaatatttgaaaaaattaattaattgtttggctaaaatatgtataatccaggaaatccagcttttcatgccgaacatggaattagatttatgaaaaatctgacctggacctggatccacgaaaaatcccggcctcgatccaggtcatgatcaaactctagttttactaattactatatccaatttttttacaatttacctatatgtatgtcttttctatatttcgggacatttctattctactcctttttcgactatgtttatttctttaatcaagcatttctttttgtggtga

SEQ ID NO: 53242 - DNA, 733 bp, Heterodera glycines
atggaaattgaaaaagtgtccgaatttgcgttggaggaggtgggaagtgagcgattaagcgatgccatggaaattgggggattttcatgaaaaatatgggcagttttccttgtttcccgcgcatatttttttactctttttctctgtttctctcttctctcttatggtgaatgcgcatctttctgccagcgtacccgcgcggattttttacacctatactactcctgccgtcatgttctggaaaaaaaccaatatttagtcattagcaaaacttcaaaaaatagggtcagtcattaaacaactccattagggtattaagaagaaaattggagttgcaaatgttcggcaaccttgctttttttgtttaaaaataagtaccgcaatttttctggattctctgaacacgtttttaacaatgaacatgcagccggcgatttatatgtcccttaccatttgcggtgtgttccaatttaaataaatccaaattaactaattatggttattaagctactaatggacccgctcaaaggcttttacaacaaaaatgaggaccaattgacgctttgcatcgaaatcagagaaatttcagacagtgagttggtatggcaaggccaattctaaccgctctactcatactgttttcgacaaaaaatcgtctaagtttgaaaaaaagttacggacaaaatttttttaaagaattttttaataatttatttaaaaagaatacaataaa

SEQ ID NO: 53243 - DNA, 1489 bp, Heterodera glycines
agggtttgaaagtggcacagaacgcagcggcacaagccaaactagccgaacagcagcgacaaacggccaacagcacacaaaaaacaactccgacaacacaaacaactccaacggtaacagcagcgaaagttgggaaggaaaaagtgagggaacaacgggacagcagcaaacagcggacaacgcaacagactgacaaggaaatggtacggtgaatgggaaaaatgttgtaataattaattaaattaattaatgcacgatttgttacggaaaagcattaaagcacggaaaagggacacaaattttgatttattagcaacaaaagaaagtatttgaattgttggagaattattttaaatagtcttatattaccaaatatgatttgttgcctttacaggattccgttgactccgcttctgtcaattccgcaccacgtacaaatccgtcacagcagcagggtaacaaaacaacatttaaaggtctaaaacttcaaaaaaaattgcttacaattaagcacctccgaaaaaagcggtggcacctcccccaccaccgcctcctcctcctcctccgccgccaccattgtttgtacagcctaaaaaagttgtgcaaaatggccctaaagcagcgggaggaatgccaccaccgccgcctccgcttggcttattcgtctcaaccgctgaagcggtgccgaagaagaaaattgcgaaaattggcagcaaaatgccaatgatcaattggacggcgctgaacccgaaccaagtgaagggcaccgtgtttaacaacatgaatgacgagtgggtgatcaaaccgtacatataacatgtattttttccttttttcagaaaattggctgaagagcttgacctgagcaaattggtcaataattttcaatttttatttttaccattttctatgcaaaatatgaattcaggaagcaatgtttagtctggacgagaagaagccgtcgtctgaatcgcaacagcaaaatgtggacgcaaacgcagcggtcaaaccccgtggacagccgtcaccaaatgcgaccgtaaattgcggaaaaaacactgttctctcaactaaacggcttcaaaacatcggttgggactttttctcacactgggagggcggaatttgcaatcattaagccatagaaatttaaaaatgatttttttgcccacttaatattattttatttttttacagccataattcgtcggaagatcgggaaaagtgcaatggatgtgagtatcaattgaaaaggggcgggttcatgttcgggttccatacctttttgtgtcctttaaaagcaacaaaatttggatcattgcaattattttagaaattcctcgtgttcatttaacttaaaaaattttaaaattaaacaatcattccaatagttgtgtaaaatttcgcttttttcagattatgactgccgtccataggttcgatttctcagtgctcacttccgaccaagttgatgttctgcttcacaatt

SEQ ID NO: 53244 - DNA, 665 bp, Heterodera glycines
atggataagctccgaattgggacggaagtccaaattttgagatcggatggccgcgttcatgcggcactcgtcacagcaatcaatgaacgaggtgtcagtgttgaatggatggaagaagtatttaatgccaacaattaatacccaacaaaaaattataatttcagggcgaaaccaagggcaaacagttggacattgaagtgattgtcaggaacaacccatctctctttccttcccgtgttcacaaaccggagaaatcatgcgccgacccgaaaactgcgtcaaatggagttgtctcgaacaaaaatcggcactctatcgccgcttcatcaagcatgcaaacggttgttggccgacaaattgattgtggcccttccgtgggttatatcagcaagtcgccgccaccaccaccaccactgcagcctatagcacccgtcaagggtatttgttgtagcagaatctatatataaactgttaaaaattattgtctttaagacatcaagagaatttgtgccggaatgagcgtcaaaattgagcgaagcaacggacgcgttcaaaccgccctcgtaacgacaatttttcccgagaaaaatggtgctgctgtggaatggcaagaacaggtccgagtttgcctatcccaaaattcatttgttttgttaaccccataa

SEQ ID NO: 53245 - DNA, 599 bp, Heterodera glycines
atggacgagggccgtgccgcacattattttgccgacctttcgcgccaatgtatgctcgaagtggacgtgggggaggcggtgacggagaaggtcaaccgcctgaagagagcgatgttggacgattctctgatgattttggctgctttatgcaaagaaatgaatgtaaacggaaatttaagcgaaggacagaaaaatgtggcaaaaatcgtaagaaaaaattataaaatgatttcactttaattttatttgtttagtcatttccctttttcagatcgcaagcaatgagaccgttttgttcatttaccattcaattcttcggatggatacaatttccatgttcaaattgcaaaagacagttttattagtgagtaatttcatttgccatatcaaatggttttttgcccttggatgttgaagaaataatttttaaaaatttagaaaaagactaatttttggaaacgttttcattttcttagactttaaaccgaatcacaaagtctggcgctttgcccgctgtccttgacaatggtccgcttctctccgaagcattgctcaattttctattttcttcttttgactcgtccaatgtcgccaaattg

SEQ ID NO: 53246 - DNA, 910 bp, Heterodera glycines
atgaaatgtgaaatgaaaaatgatcacttgaatacgatctttgaaaattggatagcaaaagcaaattttggggaaagaaattggactttggaaaagggtagtggaagaaggtgagcatcgttccttcgtctttcttttatacggccatccgtcggacaagctgatccatgggcgggccgttgagttgggcgttcggcaaattgttgatgaccaaggaccggcttacgctacgtactgaccacgaagatatttaaaaatgggaaaaacgcagggattaggtgggaagatgatccccatatttaaaaaagtccgactagggcaaaattcccaatccaaatcttttaaggaaaagcgaaatttatacgatcaagattacatatggattcaacaaaatttctgtccatgacactaacatttaaaataatttttgctcaagatacaagacaaaaattcaattatgattttgagcctcatgaaatgtacaaaataattaattgcgcttttagggcgagcggcggaatctgcacaaatattatttatgccatatgtggtaattcttttacatattccttttgaattaaaagttttaaaaaataatcttatgtcataaattatgcaataatttttacatacatatattatttttgtttttataaattaaaaatattcttttcatttcatataaatttgattaaattgtttcttttaaaaggttaaaataatataaaacttacttcccttggggttttatttgatcattttttagctaataaatttaatttttaagccatccaaactgattaaaatgtaaaatgagaaccagcgtgtttaaaaaattaatagtcaaatcaaaacttaaagaaacagaattgaaaaaaaagaaaattaatttgtaagagggaaaaataaa

SEQ ID NO: 53247 - DNA, 1690 bp, Heterodera glycines
  unsure (1)..(1690): unsure at all n locations
atgactgtccgacactttgtcattataatgccatttcagcaccgctataacatagatgcgcgtggtcagcggaaattccgcaggaatatattctttatctttctaaaccattcagtcattgaacgaatagcatggtcgtcatacatatggtcatttaatgccgtttaggcaccagtgtaccaagtatgcgggtggtcttgggaaattcttcaataattaattttcgattttcttaaatccgtaaatcacatagggaaaaatatcaagatcatgatcattaacatgctcatttggttttggtgctagagtgacatttattcgcatagtcatgggaaattactcaacacctagtggacttttcttaaatatacaatcattccaagaaaagcacgtctctcagacttatgctctgtatattcttatttcatcacaatattaatgatcagcacccttctccaatcgatgtatattcattggaatttcagtgaaggcgacggcggaaaacaaattattttttgaaaaaaaaaaatcgaaaaaggttagaattcggggttaggggttcgaaattttattaatctgagttcagattcgtgcttagcgaccccgaaaacccctggaagcatgtttataatgctttaacaaaaaaatttttatgtggtctaaaccacataaggtccttatttttttctaattttaataatcattttaatttttaaaatattttcatctgctgcaatattttaaatttattttgaaattcatttaaatcttttagaaattttgaattttatgtttatttatttttgtaaacttttaatacttaataattaagtcacttttaattttttcaattatattttcaataaaaattttgaaaattacttaatgaaataaaaataaactttttaaaaaaattatttcaaatgaaataaaaattgggttttttaattatttattttagcgttttaaagtcgggcaatgcctttgccatttttgaaccgggccctgcaaatgttctcgagcgtcgatttgcccgatttcgcatcagattggcactgttcgacgccgtgtcactttcacagaacgaggctgttcaatttgttggcacgaaatttgttgatgacgacaattatggcacttttgggcgcctaaaaattgggcattttgccacaaattatgccaaagacagtgccgtcgttgatgatgacacaaccaattcgaaaacaatcaccgattttggaccaattgcttatgccattcaaacgtcgggctctaccggtgcaaaatttttgttttttgtgccaaccgatttttgtgtgaaagtgccaaaatttcgtttttttcggattttcaggcattccgaaggtcgtcttggttccgttctctgccattttgccaaatgttgaggattttatgtaattactatgtgaaggaagtttcaaaaaacttcgaaaatttctatctttttantaaaactgtaatttaatgacaaaaatgaaaaaaaaaattcgttttcaaaaataatggaaatattttttgaattttgttagtttttcgccccaaaaacatttatgagaaaatttaatattttagttagggaaaattttttatagattttttgaatttatttacatttcccaaaaaatcgcgaaacttttcaacttttgcgaaattttataatgaaaataaa

SEQ ID NO: 53248 - DNA, 2333 bp, Heterodera glycines
  unsure (1)..(2333): unsure at all n locations
agagcgatgggcaatcctgagctcgcgttaacctcgagcttgtgagaacgccaggcatgactctggaccacttcgtgtcacttgccgcgcgtgctgaatctacgcaaaaggcaacacaacgattttcgaggccggacaacagagaaaggacttggagaacgaacacaccgcaacatttttcccagacgaataatgggccctcaagaagcaattttgaggaacggggccagcaaatgcaaaaatttggaacccaatcaaaccgaagttggagttgcttcaactgtaacagcccaggacatttggccagagattgtccccaaggaaaaatttttcgcgcaattgagcgaactaactcttctacgacaatgaatcaacaaggcaaacaacaaatgggttataatcggcagcaaatgcctgagcccaacgaaaacccaccaaatcggctttaccagcaaaagaattatttgaagcaaaattgcttagttctgcaagaggaacaagttcatcaaaacaatttcattgttggtgaattgaagcagggacctggaagatttttttgacgaaataaggaaatgtgcgacggaagacaaaaattcgaatttttcaaaagtcggaaaagtaatggcagttttggttgaagtttttggaacgaagacgaaggcaatgctcgacggaggcgcacaaatttctgtaattgaggcaaagttcctctacaatttgataagggacaaaaaattggacgttcggaatttgagtgttttgaaagcggaaaatcgcatttccgatgcgaatggcaatcctttggaatgtttaggagttatttgtctgccgataaaacggcatgagaattcgagcgaggtcaaagtcgcgatgcatatcgccaaatcgtcgattggatttgaccttctttttggcacgaatgcgcttaatgaatctgggctttaagctgtacgatgccatcagcgacactgtaattgattttgaaaaagtgaaccaaaataaaatcgattcgctcaccgtgatctacaaaacggtgttggaaccacgggccacgaaagtcatcgaatgtggcttgcctgaccaatatgaagggagagaagttttattgacatccgatcaagaaaacgatcagattcgtttggaaccaacaatcgcgattggacgcaacaacaaaatcgtggtgccaatcataaatttttcaaatgcatcagtaacgctggaaggaggaaaaaaatttggcacggccgaattaattgaagaagtttgcgatgcggaagactttttagcagcgccaaaagcattgattggaaaacttgaagtgcggagagcagaaaaaactgcggagattgaaaaaatttggcacgaatgggtagacaaaaaggcattggaaaagaaggagacagatgatattttaaaattgctgatgcaatatgaaagtatttttgcgattagtgatgcagaattgacacaaaccaatctgatcaaacaccaaatcgacacaggcgaggcggaaccaattcgctgtaagatgcgttttgtgccatatgcctacagggagaaagtcgcggcaatgttacaagactatttgcaacgagatgtgatccgtccctcccattcgccgtggtcaagcccaatcgttctcgtgccaaaacgcgacggaacgttgagattttgtgttgacttcagggccataaacgcggtcaccagaaaagacagttttcccctgccaaacatcgacaacacccttttaatgcttggaggccggaaattttttacgaccctcgatttcatgacgggttattggcaaattcgtatggacgaaaattccatcgaaaaaacagcattttctaccgaatttggcctacatgagtttacggtaatgccattcggtttgtgcaacgccgtagcaactttccaaagatttatgacgcacctttttgacggatacataaacaactttgtttttgtatatatcgacgacgtccttatcgcttccgactcatacgagcatcatttaaaacatttggcgcttgtttttgaacgaattcaggaggcgggactcaaactgaagctgtccaaaagccatttttgtgctaaagaattgccatttctcgggcatattctaactcgcgaaggaataaaaatggacgtcgacaaagtgcagccaattacaaaccttccaatgcctcaaacgcgaaaggaattgcattctattttgggctttttcacatactataggaagttcatctaaaactttggtnccatcgcagctcctctttttcntctcctgcaaaagaacgtcaaattttccattggtgaagtggaaaaagagg

SEQ ID NO: 53249 - DNA, 2299 bp, Heterodera glycines
aaagcacgagagcatgctcaacctgaacatatttacaaaaacgcagccaaacacggcaattttagtgctaaaaatccagtgttgttgtcagagattgtgtcagtgatcgatttgttccgaacaatgccgcacttcccaatgttagagccaagtgatcaagtaattaattaattaattatgaattaaaaagccaattaaaaacgaaaaatgattttaacaaaacaaataatgaaagcaatcgaagaaacatataattaattcatggaaatatcaaaagcatttaattatgatcaatagggatgtcaattttatgtatattttttcctggattctccatgctctaattagtaggaaaaacactttcttttttgtgtttgcatataaaaatcgggatttttatttatatattcggggttttatacataatttacatatttagcgattttatatatatttggtatatattttggacttttttctgacctattttcatttttatatatattgatgatttttacggaaattttttggaaaacctcaaaaaatataaaatctctcgtaaatttttcgtagatattttcaatataaaaaattaatttttaaaatattaaaatgtgtttctaagcctatttaggtcattttatgcaatttgtgcctatttcaccctctacaaataatttttttgccaaaaataattatttaaaatttttttttagatattttgatacatattttaggtttttgtacatattttttacatatttatgtacatgttttgaccactttttgcacatgtttttgacatccctaatgtcaatgaatctgatgaatgagaagctgatcaaaaactcaatttatcaataaattattcattttgctaaatatatataataaaaattttaattaattaattttaggcaattcttttgagttttgttgccgttccattaattgatgtgaatgcccgcttttattcatcaaaaatcaactcacagatcgtcacagtgcttccaaacaactcatttagcccattgtacctttattacaataatccgttttatgccggcgataaaacgtaataaaaatttaatatttcggaaaatttttgctaaactttaataattaaattgctaattaattttccatgaatttctcaaactttttttgacattttaaaaataattcattaaacactaataaattttataaatgtttagctaaaaattaataattaaatgtttatttaattttccattaattttctcgatctttttttggcattttaaaaaaaaataatttaagcatccaaacactgtctgattcattgtacgtcaaatcaatgcgaccatttaataaattgcgactttctgacgaagaattccttttggtccgcgcattgatctcatcacattcaggcaataaatcaaattggaacaattttaattttctggaataaaatacggaaaatagcgaggtacttttcggttttaggcttaggcctcaaaatttaaaaaaatcattttaaaccaaaaaggccctatatttttatttcctttcaaaaaatttcaagaaattttgaatttttttataccccccccccccaaaatagcagcgcgcgctaaaatgccttcagctcgccctttgttgaccttttttttataaactttaaggtgtaagtccaaaagcaaaaaaaaaaaccaatagctaaataaacattaaaatattccctcaaaaatcaaaaagaacgaaaaataaattggcataaaatatcaaatttatgctaatttcaattataaagcatttaattgcaaaacttttttaaccaatttttcatccaaattacacaaaaaatgctaaaatttaaattaagaaatctaattataatatatatatatatatatatatatatatatatatatatatataatatatatatatatatatatatatatatatacaatatatattaattatatgttagttcaattttttcagcatttaattgcaaagcttttttaattaatttttcatccaaattacaaatgctaaaatttaaattttgaaaatctaattacaatataataaataaattaaaaatcaattttgtttcaattttttcagcagttaccggtctgtccgctgctggtcgtctcaccctgcagcatttatccgaacattatgccgatctgttgatgcaccttttgcgcatcaaccacggcaacatggcgggcgtacttcgctatgccgaattgatccatctgatcgagtcggtgttctccaccgcgaaacggcaccgtga

SEQ ID NO: 53250 - DNA, 267 bp, Heterodera glycines
atgagaaaaatgtcctcgctgggcacgctaattaatggatgtgctaatttgtataattcgcttaacataatatgccaggaaacagaaaatgtgttccttatttgtccaattccttagcagctcacgcgaatattaattagcaagaataagataaaataataatgatttattataataattatgcaatttttaagtaatttttagataaatttgtttgtcatgagattaaaatgaatttaatggggcataatttgtttacctaataaa

SEQ ID NO: 53251 - DNA, 391 bp, Heterodera glycines
atgttcagctgcggcgccaaatatgtgggcacattgcaaagactgaaaagaatcattgaggtaaaaaggaggcagaaatgacagaaatttgaaaacaaaatgccaaataaatttaaaatatttaaaatataatttaaaatgttattgaatataaaggaagtgcatgccgactattcggaatgccaaaaatcgatgaagcaaatggacgaggacgagcaaatggcattcggaaaagggcacggcacagagcgatttgcgatgattgacgaactgatcaattgagcccaggggggcaatttgtggcaaaatcacaaaattcgaagcataaccatttgaaaaacattgaaatgatttttcattgtttgtgataaagcgaaacagcaatttgtta

SEQ ID NO: 53252 - DNA, 204 bp, Heterodera glycines
gtccgattgcttttccacgccaaccttcaaaaagtgtttgagcattttctcaaagccaaaccgaagcaggcgaagtgcgcagatgcattttctgatgagggcaaaatgatggagaaaaaaggcgaaacgacgaacaaaacaaaaacgaattatggggacgaattgtgaaaaaaattaattaatttttgttggacagcgaataaa

SEQ ID NO: 53253 - DNA, 2225 bp, Heterodera glycines
  unsure (1)..(2225): unsure at all n locations
atgccaagtcaagtgccaaaaataaacaaatggacagtgtcgagagtctcggttaaatgccggaaaatgcagcaaaagtcgcagcagaaggagaaggcaattagcaagcgggcagaagagtgggggcaaaaacaatagaatggagggaaggggtgggcccaaacccccccccccccncncccccccattgtccccactttcgaaactgaatttggcactgggccaacacggcacaaatcgccgttttctcaaaaaggcggacgaccattcatttcattgggtgccacgcgcccattcattacctcatcatcattagcctaaaataaaaagtgctcctccccttttaaatgatagtccttccaccactaatctgcactcgagagtcttgactttgctacaaaaacattggcactttagagctttttatgttccgttttaatgtctgtttcattttggcatttgccatttgtcattcattggctttccgtctgaatacatcatttaacagcacatccgtttccacaattcactcatcatttgcttagaattatgaagtcatcatttgtcataattcagctgctggcgaattaatagaggaaacaaaaaagcaaaataaaaaataaaaagtgaaaaatattcaaaatttaattgtaaacgtcatttatgtagttcgctcatttttgccaattttatccttttttttctttaaaccccaaaaaatgccaataaatttgcttcgttatggtgtcattttacatgaaaacgtgctcaaagaaattcggaccaaatttaatgacaaataaattgcattttttcgtttaatggcgatgaattcgccggaacaaatattggttagaggaatttttgacatcatctgataaattatttaaacaaattcaaatccaaaaacaaagagaaagaaaaagcataaagccaaacaaagaaaaatgaaatggagcgaaagatttccaaaaattttttataaagcaatggaaaacaaaaaacagacttaacaaaagtaaaaaagtaaacataatttaaacaaatgaaagaaccaatttccttcggtaattagtcatttcctttggcgaattgtgactgtcaaatttaaatggagacaaatctcattaaccaactactaattctataaatgaccaattaattatcttagggaccggaatttgtaaaaaaaaaattcggagcaggaaaagatttaaaaattaaatgcaattacttaaaatgatttttacttagcaatttagtcatttcgttgctcccaattaagaaacagagcaacacattggtttattttattcaattaatccatttgctgctgatcgccatttaaaagtgccattttcttccgctttttctctttttcctaatttcctttttccatttcattttcattggcactcccttttttgatttgttaaatttagtgcccaaatttaatttgctttccgatggcatattaatcaaatcattcgcctgtcaatttgtcatttttgacgcactccttcgcccacttccgtcccatttttcccccgtttgatcaaatttcacctgccctttttttgcccaattggcgaataaattaagtgccaacgcgagaattgccaccaccacccatttatctatttaattaattgcttttcagaacgccgccagcgattgttttgcttttgtcactctcattttcattcagtcatttgtccctttccgcgccattcatttgccattcgccgccaaattttacgagcatttgccgcgttcacaaatttgggcattcattctgctgaaatgcgccaatattccgctcacattaatgcattcttttttgggttagtcattttttaaatttaatttctatttctattctaaatttaattaatttcccccgcttttccccctcagttcgcttttcctcctcattttgccgtccgtcgtgcgcactttggcggatgaaaacgaacgattttccagcagcaaaataatgagacgagggccaacaattgcaatggttttacagcgacaaaaacaacaaaaaagtgaggcggaagaaatggcaccggccgacgttgacgatgacgaaaatggggcaggaggaagaggaggaggagagggaagaggacggcacgtgccaatagaggaggaagacgacggggcagcagaaagtggacaacaaatacagtgccaatttcacgccaacgaagaattgcatg

SEQ ID NO: 53254 - DNA, 1336 bp, Heterodera glycines
atgccatccgccgcggtcgccgatgcgtcgtcggcatttgcccagccgaccctcgccggcacaggccactcgcgactgttcgaaagtgtcattgccctgaagtacagcgtcagcttcacctttgtacgaagcgaatggcactggacgaaaaatcggcgcaatcgaagtaggaggaaaagcggcaagtcaaaattttaacgcatcgcttcaaaaatacaaccaccaaaataatgactttaaaaaaccaacccccataagttgtaatttcaaaaaaattttgaaataatttttttattttcgaatgtaattcatcataacagaacagaaaaattggttaattttaagtgcaatttgttctaaattgaaaaaattgcatacttttcgattttaattagttatttgaatattttacgcttatttcctgtctattttagggtggttttcttatgtttttttgcctatttcgccatttttgtgccacagccctcatgatcagtcattgttataatttgccatatttggcggttcttttctttaataacaaagaaaacaaaaattttcacacgttttgccattctaaaatagcataacttaattaagttaaatgtcacaactttattttattcatgcgttctcccccccggcaattcttttttttttgtttactccggccgctcgacttcaattgacaaaaatggaaattgcctctctggcacttcccacgccattcattccatcattctgaatttcggcaaatttgcgcatatgacaatttaaatgttttccggcacaaaaataacacacaaaaaatgccaaaagtgaaccccccccccatcaattagagaagcgaaaaatgctggaaaaggggcacaaaaagcggaggaaacaattaacattagcagggaccaaatttaatggttttataattgtatggttttcttaatttaataattttttacgtggttccaaattgccaaatagtcttagattatgccatgacatttattcttcgccataatggtaattttgcattaatataaatttaactttaataagttagtctaaaaaatgcccaaattcgtgataatattgcatacaataatcatttatataataaaagtaaagaagtcgaaatattttatttaaaaagaatttaactttttttaaattttaaataaattcgctttattttgcattaatataattttttagaccgaactttaataagtttggctaacaaaatgctcaaattgctattaatctttcactgatgaaatcattaggattctaaatatttaattttgtttatggatttggattatctttgccaaataaa

SEQ ID NO: 53255 - DNA, 840 bp, Heterodera glycines
atgggcaccaaattggagttcaatgtgaatacaaacgaaaccgaggatggacagcgaatttgggatgttttggcccgtcaaatttggccaatttttgctaccaacattcgccatttgtgcttttacgatagcggcaatcatttggacaaattgcgtcgccgtacttcgccgacacttctcaccgattcaaatcaattgatttcaatcgagtcttgtggccttttacccgatgcaattggcgatgatggaccgaatgcaactgctggccaagcgctgtccaaatggctgcacactccgacgaaagacggccaaccgaaggaattttgttcgtatttagctttaatggaaataaacaattggttcgacaatcacaaacaggtggtcgacaaaaaaatttttacgattttgaattgcatttggttaaaatttttacgaaaatgcactttttagtgaaaattttcggctaaaaaccgcaaaatttgatcgttttttgcacaaaatctgttagcaaattgcattcccaattttgtttagacatttctccatgccaccacttctgtcagttacaatgtgcgaattattttttataagacaacaacgccaattgagccatttgaattggtgaacgaacgaaccaaggaaaagctgacatttatgaagaaagatggcggtggtaaattgcttaatgcttggctgttgaaacggtgcccaattattgttggggagacggcggcggcggttcaaaaagacgaaaatttggaccatttgaacggagttcacttccgtctttatgatgattattgcattgggtgagcagcaaagaaggcgccttacttttga

SEQ ID NO: 53256 - DNA, 970 bp, Heterodera glycines
atgattattgttctctattcgataattaatccaatcaattcccggtaaattcagatcaccacagataagaatattattataattaaattccataatataatctaataattttttaaaatttggtgtagaacattgaggcggcttatacaaagcaaaaatgtgaatcacttttgctaaacaaagtttaatgtgaataatttcacattgaaattttgtcccagaaaaaatttcaagcataggaatatcagtacttattagtatagcacaccctcagaaagtggaagagaaagtggaagaggaacagaaagtggaagaggaacagaaagtggaagaggaagagaaagtggaagaggaacagaagtggaagaggaatagaaagtggaagaggaacagaaagtggaagaggaacagaaagtggaagaggaacagaaagtggaagaggaacagaaagaggaagagaaagtggaagaggaacagaagtggaagaggaatagaaagtggaagaggaacagaaagtggaagaggaacagaaagtggaagaggaacagaaagtggaagaggaacagaaagtgcaagagaaagtggaagaggaagagaaagtggaagaggaacagaaagaggaagagaaagtggaagaggaacagaaagtggaagtggaacagaaagtggaagaggaacagaaagaggaagagaaagtggaagaggaacagaagtggaagaggaatagaaagtggaagaggaacagaaagtggaagaggaacagaaagtggaagaggaacagaaagtggaagaggaacagaaagtgcaagagaaagtggaagaggaagagaaagtggaagaggaacagaaagaggaagagaaagtggaagaggaacagaaagtggaagtggaaaagaaagtggaagaggaacagaaagtggaagaggaacagaaagtggaagaggaacagaaagtggaagaggaacagaaa

SEQ ID NO: 53257 - DNA, 1452 bp, Heterodera glycines
  unsure (1)..(1452): unsure at all n locations
ggctgaagatgaggaggaagaacacaagcgatcgctgcaactttatgtgtttgtggccaaatgcattgcctaccatttcaacgccaaacagcccacagacatggccagaaggcaattgaaggtcaatcaacaaacttaaggggcggggctgatcagtaggggcgttcgaaattcattcaaaatttaccgagactcgaaaacatagatcgaccaagattgactcatacactcgagaccgagaattgaccccccagactcgggactggaaaagatcctaagaattaaaactaatgcccaaaaactcaccaaatcttcgactcgaaaacagggaccaataattttgacctatcgagaccgagaattgaccctgatatctcgagacttaaaatttagccatacaaatgggacaatgcaaaaaaaaactaagaatttccgacacgaaaatcgagaattgagaccctcaagcagcttccttgctgaatagatcggtaaatattaatgtttgatattttaaggtcagcaaacatgaactttcaaggacaaaggaacgcttcaacgcatttctcaagggcgacatacaaattccggtgggtggggatggcatttcaatgtgaaagtttgctggaaaattgggaaattttaaaatgataaaataaaaatagagcattttattatttatatttgccatttttttgtgcaacaggcggacgaagcattcacaaaggcaattgagagctattttgagggctttctgaagtcagaaagggtggccaaagtggtaaataatgaatttgttaaaaaataaaaacatttttttaaattctcctatatttttttaagatacaagccggcggcttttccagcaacgattttcgtgaggtaaaaaaattggagaaaataaataattatgaaatttcaaccaaattgtattttcctaattagtcccgaaaatgctaaaaaaatggtttcaaatttttcaaattaaaaatgaatgttaaatttggcaaaattttgctttaatttctttctgacaaaggaatcttccgtcgaagctttgataaaaatataattatttttttctcaggtctttcgctgcaacgttgagagaaggtaaaaaaatttttattaaattaaatttaattttaatttaaaatttaattttaattaatttaattttaatttaaaatttaattttaattaatttaattttaatttttagaattcgatcattgcctgaaattgatggattaagcaaggacacggtgttggcctcatggatggccaaatttgacatgatcatgaagacggaagatgacgcgacccacccgcgacatgccaggcaaaaaacaatggcatttttaaaaaaaaagtatttggcattttgtatttttttaaattgnccaaaattgtaagggtttggcaatttaaaaaaaaaagtagggtgtcacggga

SEQ ID NO: 53258 - DNA, 312 bp, Heterodera glycines
atgacaaatgttggcattgtgttggaaaaactgggaaaattgatggcattggcaatgataaagttgaaatcaatttttttgaattgttgccattgtgatggaaaacttggaaatgaattggcatttgatggcaaaattggaaatgaattggcatttgatggcaaaattggaaatgaattggcatttgatggcaaaattggaaatgaattggcatttgatggcaaaattggaaatgaattggcatttgatggcaaaattggaaatgaattggcatttgatggcaaaattggaaatgaattgttgccattgtga

SEQ ID NO: 53259 - DNA, 1062 bp, Heterodera glycines
atgttggcaattatgcgttgttacaatgagcagtacggtcaccgtaaccagaaaaaatcaaaggcgaagagtttgcgtgaccgtttaaaagatgagctgcacggcgatgtggaaaggctggcgttggatttgttggagggaaatcgcaacgaacgaacggattttgtgccaaactgtgagcgggcggaagaagtgagtgtggacaaacaggacaaggctcttctgccgggatatttttcaccttcgatcctgagcctgaatttttcaaaattccgggcttaagacaaataacagcaaacggaccctcatgtttcttccttctgtcaaagaacttgcacaagcagcgagttttttaaattttagatttcaatttgctacccaaaacccaaaaaatatcaaaaaggggtagtattcggcatgcccatcggcgatcctagagaaaaatagaaaatttcttaaaatatatttttaattaaaattgataaattttgaaaaatccgtcaacattcgacaaaaaggcaaatttagaaataatgacactttcagccttgaggtaaaactttgcacattttttccacattacatattcggctttttttcaatgggaaaactttctatattcgatcttttctctccttaaggctaaattagcccgaatgtttggtttaattagtgtagtaacaaattttcgattttttgtgacccatttttcgacattttattcagcaagccgctgaactgcacaaccccggcgagggaccgctaggcaaaataagaaaggccactgctcgtgtattgcttggtcaagaaagcacttcacttagtgtcaaatatttcatcgaatttttggcaaatgaacattttcgacaattgcgtttgatgttcgaaatggtaaaaattgtttaaaaaaatctccaatatttttcattgaaaaaatacggtttacctcaattgggcccgctcgtttggggcccagcatgctttccactataacttttttctttgccatacaaatacatcaatcttgatattttagaaagcttaacatattttcttaataaa

SEQ ID NO: 53260 - DNA, 293 bp, Heterodera glycines
aatttcgcttgacgaaagcggcgacttttcattgtatttggacggcacaaaacgtgtggcattggtgcacattgctgacggcaatgtgccgcatgagtacccaacggagcacgaatggacggcacggacaacgatcgagcgatcaaatgccattttgtcgccaaacattcgcttccacctgagcagcaccaagaaaattcagcaggtccagccaaattaatttttcaaaaaatactctaatttcatcccattcaaacaaaaaatttaaaattgtcaaattaacaaatcattta

SEQ ID NO: 53261 - DNA, 1656 bp, Heterodera glycines
atggttgaatccgagcttgaccggttggagcatttgaatttggtgtcaagagttgtcacagagttggagaatcattttggcattagtgagcgcgatgttgcagaatttataattgagctggctcgaacatcgtcaacatttgacaaattcaagaaaagtttggaggagcatggcctggctgatggggtgagtacagtctttagtactaaattggttttttaataaaaaaatgtaattgtcctattggcgttttaaaaaataaactgccttcattgtcagtttgacgactcattggctcaacatattctccgcttggtattgaacatggaaaagaaaaagagacaacggaattccccttccattgtcgccacaataaaagatgagaaaagtgcgttgaaggaaatggtgccggcgcttgccatgccgaacacagcgaacactttgctcgacgaattggagggactgaagcagaaatgggaggaggaacaacagacaaaaaaggtgtctattcaagttcagtgccaattgttttacacgaccaatccgagttcaggatgaagaggtgcgtcgctcaaagagtcgcagtcgtagcagaagtcccagtgacgggcgaaaacggcgaaggcgtgactacagtgaacggacgtgtgaaacccagtcgaggagacgccacgacagacgcagtcgatcgccacacagcagacgaagggggggagggggagggacgagtcggtcgcggtcgccccggaaaagcagcaaaccgctacgagaggaagttgaaatgaacgcaatttatgatggcaaagtgaacaacatcacgaactttggagcctttatagaggtatttgttggtactgaattttctaattaaccaaaaattccaaacccataatttttccatttactttttcagttggaaggttttcgccgccgcaccgagggacttgtgcacatttcacaaatcaaaaatgagcgtgtcaatgccgtggccgatgtgcttcgccgagggcaaagagtgaaggtcaaggtgagttgtcatttttgatatattcttttgtacattttaaatggtaattccacccctttgcaggtcattaagacagtcgactcgaaagtatctctgtcgatgaaggaggtggaccagcagaccggcaaagacttgaacgccgctatgccgatcagtgctgctgccgtggcgggatccgacaacagttttctgaccaacccggacgccccttggcttaatccgtcctctgaaaaaatgtcgacaaagctcacacaaaattcgaagccctcgcgcattcgtctgtccacgcctgagcgatgggaactccgtcaaatgcaaggcggcggtgcaatcacaatgatggatctacctgactttgaccaggaattgggagtcttgaaaaactacgaaggtaggatactagagagatctaaaaaagaaacattggaagttataaataaattgccatctcttttacagaggaaagcgatggcgaagacattgaaattgaactcgttgaagacgacccagactttctgaagggttatggcaaacatgttgctgatctcgagccggtcaaggtggtcaaaaatccggacggaagtctggctcaagcagcgctcatgcaggttcagtggattgaattttaa

SEQ ID NO: 53262 - DNA, 514 bp, Heterodera glycines
atggctgatgtcgagtcggaggagctgttggcgagtcagaagctgcaaaatgcattggattacgtcgaagactcagtgaacagaggaatcaacattgttgttcattggtcagttgggcataccaatattatatatacatattattatattttttcattagggttttattcgaatttaatgttagtaggttcaaaatgtagtagcctatctatattcagtcaatgtggcataagccgatcggcaacagttgtgatggcttatctgatgaggaaatacaaatggaatgttaacgattcgttttcttttgtgaaagcgcgacgttcatgcgttcagttaaacgaacatattttgtaatgcatataaatttttatatttttgaggccaaatccgtctttcttacgacaattggaagttttccagaagttggactatcgttgtgacttgctaactctgcgcaactcgaagctgttcaaggaattcgaatgcatttccgaaaatccatccgaagtcagtc

SEQ ID NO: 53263 - DNA, 60 bp, Heterodera glycines
gttctcgttacggtgcttcaattccatttgaaaaagcaatgcgaccggaagtaattattg

SEQ ID NO: 53264 - DNA, 575 bp, Heterodera glycines
atgattctttttgttaagacaaaggaatttgattaccgtgtttggtccgctcagatgctcagtgaacttgaagagaataatgcgcttactgtgggttattttagttgttttgcatttattttttcattttttagattgaccattagcaaaaaagcaaatgcttcttcctctgatttcgttttttcgtattacaagggattcttttttatgaaaaacgcaaaagtatagctaaagtatgtatgaaatatgtacaaaatgtaaataaaattttaaaaatggttattttttagaaaaaaaattcctcgtaaagggtgaaataggaacaaaatagcacaaaattgttacctaaatggcgcagaatcacattttactattttaaaagttaatttttgattgattttttaggagtacatttaaaaaattttatttttcacaagaaattactataattctcaaaaatcttcaaaatagctaaaaattgcaaaatatgtgcaaaaaatgtgaaagagttgtataaaaatatttacatatataatatatagaaaccccgtaaatatgtaaaatatataaataaa

SEQ ID NO: 53265 - DNA, 847 bp, Heterodera glycines
atgggaggacgaaatcgttcgggcaccacattttccaattccgccggcactttttttcaaattgagggatatgcattaaaattgaaggattcgaaaaatgtgatgattcaatgtccgtgttccgtaatgaattttattgaatgtttaataaaattatttttttcaatgtgtgaagctgagggtgggtctatagagagaattcggatcacataggagccctaaaacttgttcgaattttgatcagcactctttttaggagcttcgaattttttttgctattttatgtttatattgtgtctggggttaggaaatgggttatataaatgtcgtattcgtattcagcgaccccgaaaaccttaatttagacccattttccggctttttaatagctttttcgagttttggacacttcgtgggtttttactcttttggacatttcgtggcttggacatttcgtggcttggacaattcgtggcttggacatttcgtggcttggacattttgtgggtcagcggttaattcaacattaaaaaaattaccggtatatattattcatcttcatatgatatggaacaatcaatattatatacaaacaacagtataccctataataataataatattgttgattatcacatatttacagcatttatatcacaataattgttggcataatagcattcatccattctttctctttcatctctctctttcatctctgttctcacaagcccttgttgtaatagaccaattcaggcactggcacatttttggccacaaatttctgacgaatttgttcctgcaattcgagctccaactgcgccacgcaacaaaaagaccaattaaa

SEQ ID NO: 53266 - DNA, 559 bp, Heterodera glycines
atgacctttgagcgcggaaaaaccaattttgggtgagattgtctatggttgaaaggtatgtttgaagcgccgcaaaaaatttatttccaaactattcaggatttagattcacacaccactcaggaaattgctgaagatgcacaaatcgagtttttctcaattatcttggccgtcttctcctggaatgccaatgttcttcctttacttctctcgaacatatatcggcttgacacagcgccagaagttggatggtgttgacgcattttgagataatccactcaattttcacccaccggcaaccattgtttgttagatttaggcatttatttccaaaaactaaaatttttagctacactcgggacaataatttcgactatcaactcggaacaagctatgcggctacccctagagttcggcaccggcaccatcaactcttacatggccaaccactgtgagtccacgggagcagcttgttcaatactcgttgagcccgctatcgacttcggcagcgccttcaggcagaattatttaatcaattcatccgtttaaatttaataaa

SEQ ID NO: 53267 - DNA, 691 bp, Heterodera glycines
atggtcaccaaggagggaatcaccttatggtgcacacgcatagaaaaagcgcagtttgtcccttttgacattgtctacgagctccccggtcattgttttttccgcgtgaaaaataaggcaagggtgttcagcgttccgtacagcgaactgccgtcctcagacaggtgcgcccagcctctacccccaccaccaccaccaccaccaccaatgacaacagcaaaacatcaacggacaccggacgacgaggaggagaagaatttgaggcgtaaggcaaaggtggcgcttgacttagtggaagctggtctagcggcagacgcaatgatgcaggatgggacgcgttggaagaaagccaaaaccgcgatcaatgtgctggccaatttgcttttggcggaatcattaacagatgtctcgccaacttttgatcaacaacaacaacaacaacagctatcgtcaaaagaggaggagaagagggaggaatgcacaaacaacagcagtgctgcagcaacaactgaatctgctcccgatggtgatgtaatggacgatttcgtcaatagcattcaagcggcgacaagcaatatgcaatagcaaagcgtaaaactgataaactcgctctgccctatatataaaagttgttgattgctgcacgatttgtcataatttttgaaaatgttaaattctcaatcgttcagta

SEQ ID NO: 53268 - DNA, 658 bp, Heterodera glycines
atggagcggtataaacggcaacaacaacgacaacaacaacaacaacaacaagctaaagttactcaactaataaaagataatgccaactggctttgcgcactgtcgaaggcaaaatgtgtgaaacgatgcgggagactgatcagaaaggcgaacactgatcagctgctgtcactggtggaagtgtgcttgaacattgttgcttcctgattcagactgacaactcggcagaagaaacgactaatgccctacgtggacacggtgcgccgcgtgagtgagcgagaagtgagagggacgctaagcgagcgcttgtcatccagaaaggagaggggtttggcggactatttgcagcccttttaacccccgtattaattgaattggccaaatcggttgtgacccgaaaagaaaggaatatgcggacagaccaacaaaagttgagctgaccagggaaataagtgtaatgatgaatagaggtggcgaaggcttagataaatcatgcaaagtttaaataatcacaaaatacaagtaatatacatagccgaatttaaaaaaaatataaattacaaatatttttgatacagcaaaaaattaaaattaaatccagattagcgagtgataaaaaacttacaattgttaaactgcccatttgatttttgaccaa

SEQ ID NO: 53269 - DNA, 1261 bp, Heterodera glycines
gacgcggaatccttggaaaaatttttccatcaaaaaataaagaggcacatgcagaattggacgaggttgacgaaattattgaggagccgtttttattaggaagtgccctggcatctgctgcggatggtggtggtggtgatgatggtgatgatgatcaccttattgtagttggggaggatgtaagttaattaattaattattaacatttcaattactcaattttgtttaaaggcaaatggtcctcctaaaaagaagaccaaacgaggagggaagaaataccgttaattgcgtgataaagcgaaagagctgcgagcgtcaactgtggaatcagcgagtgtggtgtcaacatgatcaatcaacatatcaaaatttaaaaaaattcctatggaatatgctcaaagagttgcgcaacttcgcgagcatcgcaaaacaaaattatgtggaatcggcaaggagttggtcaatgtgagaagggggaggggagtgcaggattaaaaatttatgaattctttgcatttacgaagagttttaaaagcaaataaaataattaattatttttcgtttcgatatcgaatttaaaaattttttgacaaattgcagattattttcagttctttaattttaaacatatggaattcttcactgcgcgacagcagcgtgtccaattgcccgaggggttggcaacggtcgaacaaattgaaaaatttagtgagggaatgacatttcaaggaatacataatggcgcaatttgtactgttgatttccaggtatttttaaacagaatataaatcacattttaaaattctccacatatttttagaacaattaattttaagcggtggtgttgacaaatatgtgacattaaacaaatttaatgaggaggacacccaaagaaggacttttatcgggcattcggctaaaatttcaaaagtttgtttacatccaagcattgaaacatttgtctagggctcatttgattcgcaggtctgtttaaagggttttatatcttttttttgaatattttgttttcaattacccaatcaattttttcattaagatccgaatttggagtgtagatcagtgtacatcaatccacacaattgcaattcatggcaaagctgtgaacgacgtgtcgttccacccgactggcgactttgtgctctgctcctctgaggactcgcattggtcgctaatcgatctcaatgctggacgccctttggtcaaagtcggagaacagtcggagaacaacatattttattaa

SEQ ID NO: 53270 - DNA, 352 bp, Heterodera glycines
ggcattttggctgatcaccgctttttccttacattattatgcgctgcttcttcccccgtgtcgtccgaagtgttttcccctcgcccctttccttcgtccgttcctctctctccactttttatcccatcgatgaccaattgttcggtttggacgaggaacaacgacaggtgttcggacttttttctgatagtttctccattccttccgttagcttcgtcaattggtctttcgactcgctcaaaaggaattggccccttttgctgatgaattgaccgtcaaaatgaattcacaaaacttcgcgatttttggcgattgcttggtcaacaggccttttgtgggtcacagtgccagc

SEQ ID NO: 53271 - DNA, 572 bp, Heterodera glycines
ccccccccccctcccgcagactgatgcaagccgcttgtgacgtcgccttcgaatatgcccattcgcgcattgccttcagcagtcccatcggcacatttcaggcaaagcccaagtgcctttggcaatcgcatggacacgcccattttcagctaatgcaaggcaaattagcggatatgtacgtgcgtttgtccgcttccagggcgtatttatacgcagtggcaaaaaatgcggcggactcagacgaaggattaaacgcaaaagtttgtcaacttctgacaactttgtgatcaaacacttattataaaggattctgctggaacgatcctttttttggccgaaaatgcaacacaaatggcattggacgccattcaggtcaaataaacaggggggggggggtgaccaaaggatgtaccgacgcagcaaccgatcaggtgctgggagggaacggctacatcaacgattaccccacgggacggctgcttagagatgcgaaattgtacgaaattggggcagggacgtcagaagtacgtcggttggtgatcggaagagcattgaacagagaatatatgaaa

SEQ ID NO: 53272 - DNA, 315 bp, Heterodera glycines
atgttctaccagccctggtcgtttatgaagcggacgccgtccgtcgccaaagccaatgatttccaaaaacgccccgaagggcgacaatttctgctccgatgggtcagtcggcgtgccatcccaatcatccccccccattttaagccttccgccgatcattttggaaaacggtcaactgtcgtcccattgatgcgattcggccgtcgaccagcggaaagggcggcccctctgattcggttcgggaaacgagcttatattcggacagatgccgcaccactgatcagattcggaaggagttcagaagagagaaaatga

SEQ ID NO: 53273 - DNA, 1137 bp, Heterodera glycines
atgccacttgtcaccgacatcacagtttggcaggggccgaacacggaagagaaaatgatgcgcgaaattatgacaaatgggccagtccaagttgcatacaacatttacgaagatttccatcgctgttgcgcaaacggcgaaatatatcaagtaaccataggggagattttggcgatatgtaaaaggagtaggactccgatttccgaaattttttggcttcaaaatgcctattttgctttcattttgggcgcctcggaatgccagccatcccttttatatataatataaatacatatttattgaaatttttaaaaatgcacgtttatactgtagcaattgctttaattagaaaaaaattttgattaatattttctgctaaactactatattatcggcccggtacagtatgacacaaaaatatattggcatatccaatttgtgaaaaattttatctgctattgatcagactgttttttagaagggatttttctaacaatatgtgggtggaatgtagtttttttattttaatttgtaatctttttaaaatgtatattaaatattcttaaaattttaattccgatgtaatttttgttgctgaaccaaaaatatattggaaaattttagaaaaaaaaataattcagataagtaatacatagaatttttttaaaaattcggtatgcctaggtaattttgtgtcacactgtaacacttctctctaccgtacttaaacctaattttatgtagcacggtgtcaacagtacaaaaactgaattcgcacattcggtgacggcaattggttggggtgaagcgaacggtaccaaatatgggctgcttgccaacacgtggggcacagagttaaaccgagcaactaattattagggcttcctttttacaggcaaatatgcctaaattttctgcgcattcatacgctcaaaataagcacgaaaaacgcgttttccttggtttgggatttctacggtaacttttataatgcctatttttgcctgttccggcatttttgtgtctaatgtgccaattttggaaaaaatccttaacaaaattgctataaaaatgaaaaacacactcctaagaaatgactaacaaaagtttcagaaaatactcccctaaaaattgaaa

SEQ ID NO: 53274 - DNA, 289 bp, Heterodera glycines
atggtacgaaatattggaggatgacgacgacaacgtaaaaaaattttttgttgtaaattgtatttcataaattattttattccagattttacattggttcaccccaaagaaggcgcgtgacgtgtgccaggaggttttggaatttgcacaagaacgaggaatgccttgcgagaagttgaccaaatggatgaaaattctcaacaaaatttgcgccccacgacttgaagaatcgaagtgacctgatctctttcaatgtgaagaaattcctctgtatttctctcaatgctaa

SEQ ID NO: 53275 - DNA, 573 bp, Heterodera glycines
atgtccgacaaaagatcccttgtcaatcaaattctcgcccaatcggacatcactgtgacaacaagcggcataactgtgagcggtcctcgtctctccactccacggttcatacctttcgatgagtgtggtcgctgccgtgcatgtaaagcaaccgaagttgaggtggacctaatggtgaccaaagaggggatcaccttgtggtgcagtcggatcagcaaagcccaattcgtcccatttgatgtcgtttacgacctaccaggccactgcttcttccgtgtgaaaaacaaggccagagtgttcaatgtaccctatggagatttaccttctgacacgtgtacccccaccccgaccaccactccaacccaaggcacacaagccggagagcaacagcaggacttgaagcgaaaggcgaaggtagctcttgacttggtggaagctgggctaatggccgatgccatgcaggacggcacgcgttggaagaaggccaaaaccgcaatcaatgtgcttggaaatctccttttagcggaatctctggacaaaaaagtgacaaatagccctgtggaggaagaaaag

SEQ ID NO: 53276 - DNA, 1709 bp, Heterodera glycines
atgtcttctacagagcgagtgatgagtgaggaggaatttaatgagtggtttggggcaggggccagagttcgtggcacttgtgaaaaaccaacaatgtttgataacgtgcgcggcttgataattgacttgcgccacctgtttggcatgctttcgctttttaaagtgcttggtgtagagtcaccctcaagtgggcaggggcaaattactgcatcggaaagcatcactacagaaggctcgagtgcagttgttcgtaaatatagacgttatgcacttctttgtcacccggataagcggatgaagtgatttttgcatgaaattataattttcaagtgttattaaatttttttctataatcagcagcaaccattttatttagtcaatttcctgaggaaaagaagaaggataccgaacgttttcaaataatacaaaatttatttgattgttggaaagctgctgcggattactttgtgacaggctgttggtcccatgcggatacacatgcggagaacaagtacaatttttggacggactatattaacggtaagtgatatagaattatatttttttatctaaaaaagaatttaagtattggacaccatcgaaggatgggaggttgtgttcaaacagcagcaagaagaacattttgaatcgttggcagcggccatcaaacggttgtgttttttaaatgttttaattatttttttaacagtttgaaagatgcttgtccgttacttacgcatacgcattcatcatatgtgcaccagtgatgtgccgagccagacaaaatccgattccgattaaatcgccgattccgattatggccaaaaatccgatacggttttaaaaccgattacgattatggcccaaaatccgattaattgcgattccgattacgattccgattttttaaaaataattttttcccaaaaattttattcataatcaaaatcataaattttaagattgtgatgcaaaaataaaagtttgtccacattctgaggcaataaacgttttctcagatctgtcacaatcaacccagcggtggagaaaagccgttcgctttcagtcgatgtagctggggctgagaaatatttttttgattgcttagattcggaaacgaaatgtcttctgcatacagaagcccaacaactgttttgttttgcaaaaaacgatcaagcatttggaaggtggatgaccaacgcacctgataggaaaattgcaacttagtaataattcattcatggttcttttctgctttaatgtcccaacaaattttttcttcaaaatttcgacttttggttcgaattcgggtccgggattcaaaaatacttgaattggctgccatgttcttaaactgacaccattaacaacccttcaaagactttgacatttttgctaaataacaaaaaacttgattatatcggggagaattaacccggcactgctttgtgagaaaaatttaatttcagtcattatgttaaaataagattaaaacattcgtttcagaaaacatttttttcaaaattcattggtattctcgctaaaaaaaattccttcaaaggtcaattcttatgggtgtaataatcggatttcaagccaaaatccgattacgattatccgattccgattatggcccaaaatccgattaattgcgattccgattacgattacgattccgattcggcacatccctgctatgtaccaataaa

SEQ ID NO: 53277 - DNA, 138 bp, Heterodera glycines
tcgtaatcggaatcgcaattaatcggattttgggccataatcgtaatcggttttaaaaccgtatcggatttttggccataatcggaatcggcgatttaatcggaatcggattttgtctggctcggcacatcactggtg

SEQ ID NO: 53278 - DNA, 524 bp, Heterodera glycines
atgggcatgacaattgcgtgtggccgcccctgcccaatggccgttgcacgccacagcaaaaacaacgaattagttgctgcacatcatacttttgcaacaattcaatctcatccgctggtctcgcatttcgcggtaagcgccctagacttatagtacttgaactacgtccctgcctcaatgttggtttctttgcagtcgcgtgcacagatgatgaatgcgtatgcgtaagtaacggacaagcatctttcaaactgttaaaaaaataattaaaacatttaaaaaacacaaccgtttgatggccgctgccaacgattcaaaatgttcttcttgctgctgtttcaacacaacctcccatccttcgatggtgtccaatacttaaattcttttttagataaaaaaatataattctatatcacttaccgttaatatagtccgtccaaaaattgtacttgtctccgcatgtgtatccgcatgggaccaacagcctgtcacaaagtaatccgcagcagctttccaacaatcaa

SEQ ID NO: 53279 - DNA, 559 bp, Heterodera glycines
atgcgtgaagacctcggtaagagcgaacggaaaaatatgatctttaaaattggcattcaaaaaaaaatttcctaaaatcaaaaaaaaatttataaagattttgtttgtttgtttttttgaaaatcttccagaatttttgggttccgggaacatacataagttaattaaagtgctgaatccaatcctccaaacttttgtgcctatttaaaaattgttttccccattatccagggatggtgatgtgcctgctctcctacggtgccggcctcgacgagcaggcggacagtggcaaaatgacggcactgcattttgcggtgtccaatcgcagcctgcagatcacgcgcttgctgctctgtctgggcgccgacccgaacgtgaacaatgcgcacggggagactccacggcatttggccgccatattgaacgagtaatttaattgattttttgaggttaattcattttggggcccactgtcagttattcttcacccatttttgagaccgcgacgttttgagcaccttgccctttcgcccctggaaaaattaaacagtttaataaa

SEQ ID NO: 53280 - DNA, 1012 bp, Heterodera glycines
acactgggactcaacccaccaactttcaatggcattccaatctctgggactcacccacccagcagcatttcaatctctgagaatcaacccaccagcatttcaatctctgggactcaacacaccagcatttcaatctctgttactcaaatctccggcattccagacactgggactcaacccaccagcatttcaatgtcattccaatctctgggactcaacccaccagcatttcaagctctgagactcaattctcaggctttccaatcgctgggactcaacccaccaacatttcaatctctgggactcaaatctccggcattccaaacactgggactcaacccaccaactttcaatggcattccaatctctgggactcaacccaccagcatttcaatctcggtgactcaaatctccggcattccagacactgggactcaacccaccagcatttcaatctctgagactcaattctcaggctttccaatcgctgggactcaacccaccagcatttcaatgtctgggactaaaatctccggcattccagacactgggactcaacccaccaactttcaatggcattccaatctctggggctcaacccaccagcatttcaatctctgagactcaacccaccagcatttcaatctctgggactcaacacaccagcatttcaatctctgggactcaaatctccggcattccagacactgggactcaacccaccagcattttaatttcattccaatctctgggactcaacccaccagcatttcaaactctgagactcaattctcaggctttccaatcgctggaactcaacccaccaacatttcaatctctgggactcaaatctccggcattccaaacactgggactcaacccaccaactttcaatggccttccaatctctgggactcaacccaccaactttcaatggccttccaatctctgggactcaacccaccagcatttcaatctctgggactcaacccaccagcatttcaatctctga

SEQ ID NO: 53281 - DNA, 946 bp, Heterodera glycines
atggcagacgaaattcaacaaaaaattgttcagcgaattgatcaggactttttttcggtgacctctgatgggtggtctcaaattacaaaatcacccgcgctcttaaggttttatactcctttttttcatggtttatatcaacagattttagtgttactctacaccatgtaaatgaatactttgaacgcgccgattttgtacttgatgtgattccaatgacaaatcacacgggaatttacatagcagaagaaatcgcaaattcacttcggacaaatggaaacccagaaaaaataatttgtttggtttgcgataacgcaaaaaacatgataagggcctccaatatttcgaacttgaataggttttaccaaattttagtttttttataattattttttaagctttcaatgtgtgtgccattttcttcatcttgttatgggagacgtattgggactgcctgagttggcaggacttatttccaaaattcggtcttgggttaccttttttcgtacaagtaagggcatgtccttgctccgcgggtaccaagaaaagacaaattcgaagccaaaaaaactcataatggttttataaattaatgttttcaaaatcttcatttaaattaaggcctgcccgacccgttggaattcgacttttgaaatgatgatggcatttcgtgaacaaaaaaacgttcttttaaccattgaaggagaaagacgtggattcggtgttggcccatcaaaaaagtcgcgcctcgacattgtcgcagaaaatttgccaaatttggaaattaccgactttgattttttgcgcgaactgtgccctttattgggagtttttcatcgagagactttaaaggcaagtgaaatatgtaaaaactaaaaataattgtgaataatttcagttttctaatgaaaaatcgtcagcatcaaccgttatttcgactattaaa

SEQ ID NO: 53282 - DNA, 148 bp, Heterodera glycines
atggcaaagaatatgaaaaatatttgcaaaaatctgaccagtctacggtaatataaacttcgtttttacctcaaattaaaaaaaattcagaaaaaccaagggattaccaaattctttggcaaagaagacccaaaaaaaaggtggatga

SEQ ID NO: 53283 - DNA, 1299 bp, Heterodera glycines
atggtactgacaattttggcaattttttgcttggcatttgttcatattggcatttctggcaaatacgataagtcggacgagcacgatggcaaatatggtgctggtccccctggtggctggctacccacatgacaacaacaacaacaacttaaaatcaaaatttgaatttcaaaattaattcagaacactcaccgaagcggcggtggacacggattgtccatcatggaaaagtaaattattaaatgtattttaatgcattagttaattgtttttaaaaattaaattaagaccggatgaacaattgttgttacgtgcagactgagtaaaggattgataaaaatatgaatttttataaaattatcccaaaataattagcgaaaaatttaatcattttttgggtaagtttcaattaaattaaccaaaaataaattttcatcaattttggtataaacctttaaatataatctttcaattacagatgctacaacaagcaaataggacaaaagagttgcgacaaccaattttgtgaatgtatggaggtaaattaattttttaaattaaattaaaattttaaaataacaactaaattttagagggcaactgctggcaaaaaacgttgctcaatttgggaggggccaggcttctgtcgtcactaccgcttatacggcggatcagcctaccgcgaagcggctccgtaagtgttcattcattaattagaggcaattaatttacgaaattgtgcgacaatcgtgctaggcgctaaatagctaagcactggtcaaacaaggctatgacggagtcagtcagagccagtcaggaaggggagctatagccttacatttttatggcatttttgctgggactaaacgaattttttgtaaaaataaataaataaaaagttccaaatatggttattaatgtttcacccatttctagcccattttggagcagttgtggcaccgttttgaacagcgaaaaatatttgggttgtccctgcggcacgtacaaaacatgggaacgctgtgatttcacatgcaaatccatcggtgagtttaaatttgagctaattaatgaaacattttatttacatcatctattttatatatatggatacgatttttaggctctaaaaactgccaaaataggtaggcactaggttctaaaaaaactccaaaatgggcactaaaaagctttaatttagggggtgtaaaatgacaaaatgcatcaaaaaggtaacaaaattaagccaaatcacttttgagatacacaatttttaaaaaaattcttgtcaaaaataaa

SEQ ID NO: 53284 - DNA, 1262 bp, Heterodera glycines
atggacgcgatggaatgcgatgaagtgagtgaagataagtaccaaaaaaatgccaaaaacttttcggttgaggtcgaagtgccgccaaaaaagaaagaaaggtccgtcttctcggctgagcaattggacagattggagcgcgaatttgtggccaacaaatatttgagtgcttttcaacgggaaaaattggccaaggaaaatggccttacggaaacgcaagtgaaagtgggaaaatattttactatataatatcggtcaaaaatattgcttcaaattttttttttaacaaaaaattgtttttttcaataataaaattttattcctttgttatgccaaaagaatatggcctaacaaaaaagcaaatatacacgaacagatttgctgaacctataaaaggcaatccgatagagaattttgtcctcttttttagaggcctattcaatttcccaaaaaaattttcccaaccccttaggaatattttcgaaaattttagcaattttcagtttgtataaactatagtgaacgccccgtgaaaaatgggttaaatgatataccaatcgattcgtctcaaggagctaagcatggaaaaatatgtctcgagttgcggaaatgccaaaaaaccggtttttgaatcggttcaaaactcgaaaaattgagtgaaaagggggacctctgaacctttaagacggtcaaattcggacaaatttggtatcattcgaaagctcttgatcagctaagtctaaaaaaacaaggtataaattcgaaccgatgccatctaggcactggacaactgagtcccagtgaaaatggacacttcagtaccaaaaaaaattttaaaaaatttcatcttatataatgcacgaaaatcgtttaaccttgaatatcgagtattgcgctaaaaaaccgccgcacactcgactacggcggccagtaggtggggcgagactacggaagaagtccgcgcgtgatccgcaggcggttgactgattggcaaagccaattggccagcttcgacgaattaacaccgaaccgatcttcacatgaccgcagatttatcctaattatatgattcgcacttaaacaagataatataaagacctcagctcaacatacttccaagctgatgtttgcacagtactacaaccaaatgcaccttataatgtgagactgcagaccaagaagcttacactcacgagggcttgacggccacctgacattcttctcggagtgctacgtattgaaaccagttgattgttagacaa

SEQ ID NO: 53285 - DNA, 448 bp, Heterodera glycines
atgcaaattcgattcgcggatttggaaatggattgtgactcggttgtgctgtcttcttcatcttcgtcgttgtccaaaacaatggagagtgaaactaatgaggacgaaattgaccaagaagagcagggaaacgaacacactcaagcggaagaggacgtaagcgattgtttgtgttattacgcctttattaagtgccttttagacttcccaccatcagcagaaatgttatgttgcgaaatgcttagactccattgcaaaactgcaaaggacgttccaattaagcaatggtctttccttcttcattcatattgacattttataattatttccctcttcagcctcggcggatgttttggaccgtgccgccgattatatgcaactttatttggaccgttatgcgaatgggaagttcggcgcagatgtgcgtttgttttctgttagcatttaa

SEQ ID NO: 53286 - DNA, 617 bp, Heterodera glycines
atggtcagacagcagcacataagagaacagctggaggaagctgatcagctgcacgaccaaattgtagaagcggaacagcaaaacgacgaaaacgaggatcctgccctgcaacagcagcaacagcagcgtcaaatcatgttgcaggagcaatacgagaggaaagtacgtctgcagctgcgcgaaagccggcgattcagcagcggtgcggcgtcgtcacttgtggtgcccccagccaatttgtactgggagcgcgaatgtctgatctgtacggacgcgcccgccaactttttcaaccgttcatgcggccacgtgtgcctttgttcagactgcgctgtgaattgtgttcttcacaaaatacccacgtgcattctatgccgcgcggtagtgagtggcatttatgcattcgttcgttgaattatgatgtgagtgagaaatggcacttttcatattaatcaattcgctaccttcactcactcatatcaaaatggccaatgattcacaatatttgtaacccaataattcatcacttattttctctctggttttacgtgacttaccatcctttgaattaatttgcattccgttttttttcaactgcattttcaattaatcggcaa

SEQ ID NO: 53287 - DNA, 65 bp, Heterodera glycines
atggacattttgacagtgaactcatttggactgaagcagacaattggacagcggacattgcgaca

SEQ ID NO: 53288 - DNA, 347 bp, Heterodera glycines
atgcttggagagcgcttgaagagctgcaccggatgcgagtgccgccgttgctgtacgcttagcagttgctgtgcaatgacggaaaattgcttgaaaaatatacagcagaaaaaaggaaataagatcaggaatacactctcccatatcacctgtagacaaaccgaagggtatatggacgaacggcaagtggactacggtacccaattaatatttttgggatgcgaattgttaaatgcgtaactgttatgaaaaaagggtcgaaaaactgtgataactccactcaaagaagaactaaaaaaatctgaatatgcttggactaccgtaccaactattatttttataataaa

SEQ ID NO: 53289 - DNA, 1187 bp, Heterodera glycines
aaaaaatgaaagaaaaagcatttgatggatagaaaaaccaatataaatgctacatctcatgttttgcctgtgttcgagtggaatatttatatgcaattgggatattgacgtgccacttgcgggatcaaatttaggtggaaagttttaaacaggtcagttttaatttgaatttatggggtgggggcaataattatacaccatagtgttttgatttattatgggttatatttcaatttctggattccttttaaatagttctgtattccgttgctgaggttgagttccggtgattgaaatgtcggaggactgagtcccggtaattgtgttgctgaaggattgatgagattgagtccagtgatttgaattcgggagaattgagtcccagtgacttgaatgtggtggattgagtcccgttgattgaaatgttggtggattgagtcccagtgattgaaatgctggtgggttgagtcacgttgattggaatgttggtggattgagtcccagtgattgaaatgctggagggttaagtgttggcgattgaaatgttggtgggttgagtcccagtgattggaatgttggtggattgagtcacgttgattggaatgttggtggattgagtcccagtgattgaaatactggagggttaagtgttggcgattgaaatgttggtgggttgagtcccagtgattggaatgttggtggattgagtcccgttgattggaatgttggtggattgagtcccagtgatagaaatgctggagggttaagtgttggtgattgaaatgttggtgggttgagtcccagtgattgaaatgctggtgagttgagtcccggtgattgaaatgcaggagatttgaatcccagtgattaaaatgctggtgggttgagtcccccagtgattgaaatgctggtgggttgagtgccagtgattgaaatgcaggagaattttgagtcccagtgatggaaatgctggtgggttgagtcccagtgatttaaatgctggtgggttgagtcccagtgattgaaatgctgttgggttgagtcccagtgattggaatgctggtgggttgagtcccagtgattgaaatgctggtgagttgagtcccggtgattgaaatgccgcagatttgaatcccagtgattgaaatgctggtgggttgagtcccccagtgattgaaatgttggtg

SEQ ID NO: 53290 - DNA, 639 bp, Heterodera glycines
atgcctaccgtaacgattaaattcgggcgaattgtgcataagatagaaggacagactcagttgtttgtcgcccatttctgccctccccattttgcctctgattacaacggtgtccccggcgttcagtgcattttcaaattttttggaccaactttggcgttttgatttgacagcttcaggcttaaagtaaaaacaaattgaagtcgaagaagtaaaatcaattatgtttgatttttaagaaccttagaaaattcgaaatgaattaaaatatatttaaaaaattccaaaaagtccctaatttgtcaattcatttttaatttttttttcagcaaattccaaccctttgaagtcgaagaagaaaaaatcatttaagagttttgaaattttagaaattaaaaaattcgaaatgaattaaaatatattttaaaaaattccaaaaagtgcctaatttgtaaattcatttttaaattttttcagcaaattccaaccctttccttcacttggggctcttcaatactgcttgggtagacatcgcccgcaatctgagcaagtttaaattatttacatttattaaaattcgaatatttaataattattagggcttccttttttacgtaagaaaaatcgctaaatatgtaa

SEQ ID NO: 53291 - DNA, 2871 bp, Heterodera glycines
atgagtcctgaaattcaattccaagtgccgaaccaccaggaagtaagtaatcactaatcaaatgccgggtacgaatatcgataatgtgaaaaattaattaaaattttaataaaataattatttactttcctttctccaactataattgaaaaattttgtttcattatcatttttaaatttaatgatggttttctgtggtctttgtttggtggcggaaattcccagggatcataaaatccgttttatggccgagtaaattggcacgaaaattgggagaaaaagagggtggatttattataaacccacaaatggaaaagcagtaaattatgaaatcatttatcaactcatttgcaaatatttagagcaaagtggctgaagagtgtttggaatatcagaaaaaattcgacaaaaagataaaccaaatcgcaagtcattggcacggcgtccgcgtgagcgcgccgaaagcatttggcggcataatgatcgaattgtcaattgcaaaagaaaagtggaaattaaaaatggagttggaatgggacggagtcgctatttaaaaaccatcaatatgaaaatttttcatgaaaaaatatttataattttgctaaaaaccaaccagatttttaattcttgatgttatttaatagccctaagtgttctctattagtctgcaaaattacaaaaaagttcgtaaagtttcaaaaaagttatgattagaggaactcaaaaaacttggtttttgaacattttttggccataacttttttgaaagttaataaattttttttgaattttgcaagctaatagagaacacttagggctatctaatgataccaagaattaaaaatttggttgctttagagaaaagttataagcaaaattattattttgatggttttttaaataacgcacattatgatgttttaaataacgacatagtaccattgaaattggaaaaatatttttaattttaattattttacaggtacaatctgagcgacacccaaaattttaacattgaatttggaaatccgaaagatttgatgacaaaaataacggacgaaacgggtgaaggaatttaacgaaatgagtgaaaattttgaaatgtgtaattaaggaagagaaataagattctcaaaagatgaagccattcggaaggcgtatttatccaacaaaatcaaaagagacgcgaaattgcgtaattacacgggcctttggatgctcgggttggacgtgttgccgatgaacaaccaggacaaaatgcaattgcacgtttacagggactgcaggtgcgaaatgcacgcatgggtagggcaattaggcaattagggacagtaattagccaataatttaccatatttacgatatttgaacccccgggggttctatttttcaactcccctcaaaaagggggttttaatacagaggggggttcaaattcaggggggggggggtttaaataccgtaaataaggtaaatgccaaaaaatcgaaaattatgtgccaaagtttgtccatccgtcggacgaagtgccgccactgctttcggatcaccccgtggtcagcgtggactgcccaaccactgtccaggaagtggactcacatcagtttgcactgcccgagcccgtgggggtgggccgtgcgattcgcatgcgacaacgactgaacaaaaacccggagggcatcgagctgcgctttggcaatgaaaatcaaaaggatttgctgatgctccgtgtggacaaaccgccgtatggaatcattaatatttcaacggtaaattggcgattagaagggtaatactaaataatgaattcatttaataactatttatttggatgtaaagcaatgcttaaattgttaattggataaagaaggcgcaattttcgccaaaatttttacttgttttaaagtatatttttgtgttcgagttcgggtcaaattagggacccttattctaggattgattgccgaatagggggcaattcaccatttgttaaatttcgctaattattaattaaatattaattattgttgacaactgattaaggccggcggttaccagcgcattaaaggtggtaaggatggagaagaaagtgaagcgggcattatcagaaagcaaatgctggacaaaaaagcttcggcgggccaccatttcaaatcgtttgagtcggtggaaaatgacaacgaatgggaggacaaatatttggatgttgaattggtggtgcacaattatttctacgaagtgaaaatcggcgaccgaaagtcggtcaaatattttccaaaaccatcggagtggtggacggaggaggacaaattggacaatttcacgcaaattgaggcacttatttataaatccaattataattatttagggctttcttttttaattacatttttcctggattctccatagcccctaatgaattttttcgtacatattttgcaatttttgaggatttttcaaggaatttttattgtgtcccaaaaaagttcataacttagttattattttttttttgaaaattacttttaaaacatcgattttaccaaaaaaaaatacaaaaattaatttttaaatactaaaaggtgattctaagcctacttagctcattttttagcattttgtgcctatttcacccgttacaaagaattaaaaaaaaatttaaattttatttatatattggtggttttatactatatttcatctttttagacataatttatttacatatttagcgatttttcttacgtaaaaaaggaagccctaataattattaaatattcgaattttaataaatgtaaataatttaaacttgctcagattgcgggcgatgtctacccaagcagtattgaagagccccaagtgaaggaaagg

SEQ ID NO: 53292 - DNA, 234 bp, Heterodera glycines
attcccgcggcaattccgttggccatcggcggtttcgctgtcccatttttggtcacattgtcttcaattctaaccttacttttgccattttgacttggtttctgatcggctattcctttttaaatattaatgtttaatgagattaatttcactaattgctcaaagaagaaattaggacaaaaataaataggaattatttaacccataaaagttatttataaatgctaatattaa

SEQ ID NO: 53293 - DNA, 1500 bp, Heterodera glycines
atgtccttcttcatcctgactgtccgtggaggcgctgtgcgcggagggcgcggggcgttcattttcattggtgctcttgcagtggcagccgtcctgcagggggcaaatgctgaccaggctgccgacagcatacaaattaatgtaggtatattcaaaaatctaattctgtttttattgtattttttgcttttttcaaccactttttacttttatttttttgcctttcatactaggggtgggacggcggcgttttttccgcggttcgcgaccgcggcaatttgaatccgcgactgtgggattttttttttgcgcggcgtgccgcggattttctgtgacaaatttttgttgaagcgattgtcttttttaaatattcaaaataaaataaatttttttttgaaaatttggattatttttcacaaaaaattcgtttcaaaattccaatttttcccctccagagctgacaaaacctttaatttttctttaaattttttgattttttggcacaaaatttttattttttttcacttttgtaaaatttttccatctttacttaccagtttaaaagtgcctttttctttaggttataaagcatattaaagagggagcccggaaatgcatagagcatcaccgaacgacaacaaccaccacaacgccgccgcaagccgagggcgagttttggcactttttagcaactataaatatcatcccaaattattacttttgcaatttttatggcattgattacttttgacatttttttattgtcatcatttttttcaatgaaaaaacctttttctggaaattaaattaaatcaaaagaataatttaattcaatgaattaattaatattttttcaattaatatgcattgatttgcggatataagatgtttcttgttgttattagtgcatttttttctttcacattgttcgtgctatttattatcttggagacataagtgccacaatttcaattagggttgagctcgggctccaggctctccgccctattgtgcctctccccgatcaccgaatctggcctctcaaacgtcctgagatttcttccccgaggggtcggggcttaaccctaattttaagcaaattcatcaaatgggccgttttttgcggtcctttggcacataaattggaatcaagagtaaattactcaattacgaaccttgtttaaagattaactcatttttccttgatttattttgttacattgcttacacatgcaaatgattgattattctatggcatttttccactttccttaggtaccacgacccggaaaatgagccgtgcgggacgaaagcgattggatttgatgcggaagcaatcgaacgattggaggcggaacagctgaaggaggcgctaatggccgaagcggaacaatttgggaacaaagacaacaaacaaaacgccaatcagatggaaatttgaatggaaatttaaatttcatatttaagacaaatgggtaaacgggaacaaatcagaataaa

SEQ ID NO: 53294 - DNA, 526 bp, Heterodera glycines
atggtggttacggtgacggatactgttacagttgcggtggtggaggatgctacggatgctgtggttgagaatgactcgaaggcacatcaattatataatgttcttttgtgcttttattttatttcacaattacatataaaaagagctcccgcgggtttgcgggtcgctttgatcaaattcttcattttatttacatcctttttttctgatgattttaattttaagaaaatttaaataattttttagaaataatttttatttattttaattgcattttttggcaatggttccatttgtgagccagaaatcgctgaaaatgttaaaatgtgttgtaaaattacaagaacagccaatttttcgacaaaaaactgaagactataacttgtactatatctttttactctaatcaaaaaagtcaattgcaccacctgatcagatcactccttcaaaaagtgatcgggagtgaccagaatttcagcacgccaggcgactttgatctgctctactaattgtcaaacgtaataaa

SEQ ID NO: 53295 - DNA, 1428 bp, Heterodera glycines
atggtgaaaatgaatttggttattattattactttcttcttatatttaatcatcgtactaattgatggaattgaagaagatttatttgatgatttatggaaaaattcactgctatcgacatcaaaaaattatgaacagcaaaaagcaaagaaaacaattattaaatctgagaattgttttgaaatagaaattgaagacataaagccaaaagttcaacaaaaaattaaaactgaacaattggatgatcaaacgaattttttaatgccaaaatccatcaaagtgccaaaaactgaattcgtccaattcagcgaagaaggatcatttgtaaatcagattgatgagcaaactgatcagaatgatttacatactattattcatagcaatgctgtgggtgatcagggttccagtgatacggtaatgtaagatagaatactgtacaatttcatgaaaaaaatatatatatttttaatttagagtgttttcttaatatttatcctaattagggaccggatttatatggatttcaatattttgttttcacaattttatttctgcctaaaatcatgtgcatggtatttttagccttggtttgatgcttctaggggatgccttttttatttccatattgtacatccatatttcggcattttcacaaaaaaaaattcgaaaaacacacccctaaagatggaaattttttggaattttggaaaatataaaattgaaaaattgcaaaaaaaaattcattacaaattcgcgtaaaaatgaattttttgcaaaaaacttattcagaattttttgtcatctccacatttcagcatctttcgtccatattttacgattttttcgtccataaatataatccatattttggatttttttttgtccatataaatccgctctctatttttaatatttaggaggcagaaaaaaggaaagaaatggaaattttgaacaaatttagtgcgatgaaaaaggaattacggcacaaaaaagtttataagaaattgccatttcctaaatttgaatatgaaattgcaaaaaaattgggcacatctcgcgacaacatttatcaattcaagaagcaattaggacaaacacagaagaagcgcagcaacaccatggttaaggacattgataaggacacaatgattggactgatcagaaaatttgatcaaatgagaaaagaaaaaattcacggtttcaaatatgatgaaaaaaaaagaaattaaattgaatatgaaattgcggaaaattttggaaccacccgtacaaaaatttatgaatggaagaagcaatttggtaagaaaaaatggcatattttcaaatcgaaataccttaaaattcggcgccgaaattttcaaaaatttaaatttaaaaaattgttttaaagtatttttttgaaaattctagttgttactgaaaaataaa

SEQ ID NO: 53296 - DNA, 690 bp, Heterodera glycines
atggcgcgggctaccttaaactttgtgtttaatccacttacggaggacgaacgtgaagaactatgtcaaacatggttttacaattacagtaaaaaaaattaaatttcaaataattagaaaaattgagaaaatctaaaaaaataactaaaaattaaggcgcatccactatagaatgtttaaatattagaaaacacatcgagatatcagtttcaccagcagcaggagctcacgaaactgagaaatggatgaacaatttagacttagcatcaaccagcaaattgtttcaattaaatataatagtttgcgaacgtatacaggaaagaattttccgttggcaagtgtatacaccagatttagaaacatcggttagactcttttgattatacaaattcatattaaaaatttagcttacgaatctgagtcaaaaagaaacacagcatcagtatttttgtattataattagagtgccactggaccgggaatttttgccaaaaccgggaccgggacctgagaagccgggaccgggacctcgattttttttcgggaccgggaccgcaagaaaaaccgggaaccgggaccaaccgggaaattttaaaaattcaaaaaaattttaaaaatttaaaaaaaaaatcaaattttaatttatatcaagtgaaaataatacaaaattatttggttttttataataaa

SEQ ID NO: 53297 - DNA, 692 bp, Heterodera glycines
atggcttttggcgctgggcattattctggagcggccgttgtttccattatttggcttggaattttgactgctctaatggtcgccggtgaagaaaagtttatatatttctttataatgaaggggtaaaatttttgaaatctaaaattatttttttcaagccctattgttaattttccttcaagtttttaattaaccgattattttgaaaattttctaaacaggaattaaattgtccattgggccaaaactgttttcaaagttgccataaagtttcagggaaaatttaggaagcgcagggccaaacattttcaaaatattcaaaaatatttctcttcctattactcaaaaagaatgaaaaaatagtgtattttatgctcaatacatgacaaaattgatgaaatagtgccgacaatcagttttgactattgttttttttgacccaaaagcttttttacagtttctgtttctatttgaaaatgtcagattggagtcctcattatttgaacctaaggataattaaatatttttaagcgttcataagaatgaagaaccatcgctaccgcgaggaccgtcgatcgaatcccaatgccgacgttttaattgatcgggaaatcaatggccaaatgcttttttgaaaattacaatttaaacgcataaaaacgaatattttcaaaaaatggtaatttaaaaaa

SEQ ID NO: 53298 - DNA, 1078 bp, Heterodera glycines
atgggtgaaatgcaaaattattcatccgtaaaacggctgaaatgcaacaaaagtggccgaggtaatagataataagttgcttataggttgctaatccctcaaaaacagctgaaaatgcaaaaaacctgctttattataattttgggcctgaataattgttgtcggtgccaaaaaaagactggaataagggggagaggtaggggggagtgcttatataaagcgtgcctattccaatagcgcaaccaacaaatgcctccatatcatcggttggccaaaagcctgtctccttcttttaaaagtgtgccgtttttacggcaacgttgttcatcctttgaccggattggagctgtattgcctgtaaaaacggcacggctttacagtcggctttatgatgcccttaacggaaacgtcgggaatcgtcgaaaggcttcaactccccatcctaatatatttgatgatgcaccctttaaccccttaggttaccttcccgatttccaaaccttctaaataaatagtatttcagattttattaccaaacaaaataattcttccgtaatggaaaaagggtttttcgcgccaaaattggaggttttttttgccattttccataaataattaacattgaattaataggagcaaaaacgcaaaaaacaaagtgctttccttaaaaaagcattacgtctaaagattggagcattatggaagcagtatagatcggagcgggcaaaaatggttgaggaatacaccgcggctataggtcaattaaatttagtttttttttaaattttgattttaatcatttatttttcagcgatcttggctccacaagaaaatgtttggtcttcgcctgatcctgacccaaacgtgccatccacaagtgcagcttgggagcacaactacgtgccaatctcggcggattatgcagctactttaatgtagcgatgcactacaaatgtgatggtctttaattggtgatattattttagtttaatgcaattattttttaattttgcttgcgttttatcaatagatatgaaatacgaattaatacgcaaatatttgtttagggataaataaa

SEQ ID NO: 53299 - DNA, 1820 bp, Heterodera glycines
gagcgcaacagcattatttgccaacgcatttgaagacgacgacggaggaggcagaagaagtggcggcgagcgacaagcacatctccgagcagtacccgcaacacaaccccgacgactgtagcaaagtgccggccgtggcggcgtcctccgtcgcttcgtttgccctttctcggaacagtgaaaacaaagaaaaccgccgcccgtcgcccagcgccgttatatcggaaaaaacaaaggaacaaacgcaggcggaagcagcgcgagagagtccgaagcggcgaatcggtcgtcaaattaggcacggacagcagcaaaaacaaccgaagcgacagacggacgcatcgccgcaggcgctgcccattggccacgcgcagcgccagtcgccggaggcgtcaatgcctcccgcgccgggctcgccgaagcagcagcagccggacagcagcgtggacttggagcaggtgctcaagtcggaagcggcgcgagcgccgttccatgtgagtaaattggggaggagggcaaaatgccaaaaaaggaaaaacggaatatttgaattttaagcaattcctccaacaacaattttgtgcagagaacatcaacttttatttggcggtggaggagtacaaaaaaattcccgagaatgaatttggccgacgaacggactttgggaggcaaatttatgaccgccattttgcggccaattgtattgaaccggtgaatattgacaactcaacatccaatcaagtgagaatgaatgcttttaattataccaattaattagttaattaactaattaattaattaccattcgttcgttcgttttcccttttcattttaattttctcagattcgcgaggcgtacaaaaacaatcggtttaccagcgacgtttacgacgtggttcagtaccaaattttccacttgctcaaatacgattgttggccgcgttatttgcgcgccgggggacaattggcggaggaattgggcggagatgccaaatcgcacggtgaaaaaaggaaaataacgaaaaaaagaaaaattaaaataggaaaaatgaaataaaatccgaaaaataattaaaaagagaaaatgataataaatgtaaaattcaaagctttttccctttcagattctggtgccagcacttctcaggtgatttcgttttgattttgtttcgttttgttttgtgccgtttctctctgtgcctatttatttgtaattatttttaaattaattaattacctttttcgttttttttaaaattttaattcacttttattggcattctgtttaaaatgacgttttggctttttcacattaaaatggccctaatttttgttggcgttttgttcgtttccaaactgtcgtttcagcaatgtttggtggttggtgccggcaaaggcaaacattcgcagccgcgccgcaagtcgctcttccgctttctgatgaaagcggcaaaaacaggcggcttggacaacgcgtcgtacagcgggggaaacgaaaacaacgcggaggacgcgtgctgtacatgttccgttgcggaataccaaccacaacacccctcggacgcgctcaacggcgacactgtgcatgtattgctgcgacgacgtgcgcactcgcgttcaccaaacaggcgcgtcggcttgcggcgccgtgcgcggcgtatctgcgcggaaaggacgaccgtcgctgcgacgagtgccactgcagaacacgcggccgtactgatgctgagcgcgtccatcatcaacttccccggtggagcaaagagacgacgcggacgaatgtgcagaggcgtaacaagaacttcaacgtttacatcttc

SEQ ID NO: 53300 - DNA, 464 bp, Heterodera glycines
gacgggtgcgcatgattccactgttccaagcaccccaccaaaagcaaaacgatataaccaaaatataaggaaaaatttttaaaaaattttttctccattttcctttttgatactaaagcatcagagtgctaaaattaacctgtaaataaaatttggtgcgctttagagcactttctgaaaaaatatttatgaaattaaaaaatcgatttattcaagtgtccgtttggggtactcaaacaattatggggagcaaaaatccaacgcagaattaaaatacaggctatagggaagctattcccgaaggatttggtctccccataaatctgggcgcatcggttcggggggactgccccgaaaacaaaaaaatcgattttttcaagtgtccgtttggggtactcaaacaattatggggagcaaaaatccaaggtaaaaataaagtagtggtatatcgaagctattcccga

SEQ ID NO: 53301 - DNA, 1105 bp, Heterodera glycines
atgccaattttggacaaaagcgggtgcgccactccgaccacagtcacaggacgcggaacaccaaacaccaattgtggttggaaatattggcattttttaaaaactaattaagtaaacaaaaaaaacttgtaggcattgttcacccaaatggtgacgacaaaacgccaatagcgaacccaacggaagacatggcgaataaagcaaaagacggaggaggaggggaaggaggacacattgcggagcaggacgttcaaacggttcaaacttactgaacaatggggtcatgaattgtaaaaaagaagctgtgcatatttgtatagattaggggtcgacaaaatcaaagggacttctccgttttggtgacgtgaaaaaagcgaaactttttgtccgtccaatttccaaatgcataaattagcgcagcagcaataaatccctcgctttatgttttatgcattagaggcgtgccttttttgctaaaattttatgggtaggcaaagcaccgacaaaagggtctcttccctttggttttttgaatacaagtgccagggactgccaacaattattcaaaagattgctgttccaaaccgtgtttagactaaataaaccctgttagggtatttggaatttattttaaactaatttagaaaaaagcgcaaattttagcattagtacagccataacaaattaatatttttgtcgcttttacaattttgccaatttttaggaacagccgaatccaatagcggaaaaagaaaccgcttcaacggtggccgcgtcgaaaagcgtaaaggaagacaaagaagaagcgattgccatcgcccctggcgagccgaccgattccgtcgccccaatggcaccgccgtcggcggcgacttcgccagcgccaccaaaaacgcctgcttcggcagacgatgtttcttcatccgcaccgaattcgactggtgctgctgctgcgattatactttcttcgtccgctccttcaactaattcaacaacaacgccaccaacaaacccatcccaaagtgacaccaccgacgaaaacggcaccaaacagcgggtggcggtgccattggcttcaagcggcgtaactgtaagagatttttga

SEQ ID NO: 53302 - DNA, 350 bp, Heterodera glycines
atgagcaatcaatccgcggctcaaatcgctgacgaatatgagaggtgggttttttggtgaaggtcctaatttggtgctctgttttacattttttttctgttttaatcaattttactgcatttaggggtgacggtgaagtcatcaagagcaaccagggcaagcgcaccaagtccgaacaggtcggatcgtttgttgtataataaggctgattgtgcgtcattggcttttctaaaaaaggaccattttgatcagggacggtctcagtgggacgtatcccccccccaaccattcgaaatttcaaatagttttttctataattttggaaatcacatttagtaaagaaaattaaa

SEQ ID NO: 53303 - DNA, 2576 bp, Heterodera glycines
ccaacctgcgtattccgtgttcaaccaaacacattactttcggtaattggacacatattgtgtttaataatatttaattttttcatttaaaaattgatttattaagctgtggtacaccatcggttgcactttgctcaactcctggttactgtacctggcctttgtacggtatcgactgtacaccgacatgcaatggtgagcagtgagtagtgatcagagaaattatttttggactgggttaattttaaatttaaatcaaactttacctaaaataaagaaatattaagacaaatatataaataatatatctaaggaatttaaatggaaataaaaaaaataataaatttaatttaattttctaaaagatgaaaatgccattaatttattgcttacttcaaaaattattagcttagaacccacaaatttgtggattaaaatatatttcttgcacatttgaggcctgccggcgcatttcctcgcgtttggctcaccgcttacatatcattgctcggcacttgcattccaattttggcactatttttggtgtttggccttatgaaaacggtgttttgaatttttcaaaaactttatttaatttgaaaaatcaccacacagggcaatttggccggtgacaatgatcggttgggtgcacgtccaaaacggaccattgagctgatcaaaggcggcatgggcaacaccgctgtacggcaccggaattcgaatggtaaagcaaaaatgccaatgccaaggaaatgagtttaatacagagacactcgagagccgagaaaaagccgactcgaaaactaagacagagaaatcgaattgtaattgaggattttaagttcgctatgtccgttataaaaatgcgaaattacggaatatttcagccattcttttttcccaaaatgccaaatttgattttctttgaaatgccaaagtttgaataattttgtttaagcatatcgcctgtgccattgtttgcgttcggcatggcttcatgcgccgccggcaccccagtgtttgcatgtgctgcttgcactgctccaactgttcgtccagcaaacaatgcttgcgcaactctaccgatggggcttcatcaactcgggtgattgaatgtttaatatcttttttaaaaaataaatttaattatttctaaatttttatggatttaaaatagatttataattaaataaataaatttatttatctaatgattaatttaaggtaaaataattttattatgtaattattaaattttatcatatctaatgactaatttaaggtaaaataactttattatatatcattaaattttatatgtttaaaattaaaattaattaatttttaatcttttaattgatttagggttaatttttaatctttatggattttttaattgaaattacagaaataacaaattatttttttaattagtgatttaaattttttaaaaatttcaacaattattaaatttaagttaatgctttattttttaaatattactttatttatcaaattaaattaaatttatttttgagttatataaatgtaaaaaaattactttttttttgagtctaaattttatttatttattttaaaaatttgaatttaattatttatgatttcaattttaaggcgatttcttgaacacggagctcgactggctgcttcagcgtgctcgtcagttggccaccaatttgcccatgggcgaaacgcggcttcagtccttccggatcagtaccgaggagctttccgcctcgcccgttgcgccaaacattttgccaagtcagcgcgagaatatggcaaaattaatataatttaaatgtaaatttaaataatttttgaaataaaatttcagttttaatgcacactcggttgttcggcattccgttggaatttgtcaattttctgatcgctttggtatgtatttccaaataaaaattttatttcgagaaaaggactaactcttccataattttcgatgattttgacgttgagaaaaattttttaaattccattttttaattaatttttccatttttaaaaaatctattaaaaatgatcagaaaataccaaattttacatggttaatttggaaacaaaagaaagttgtaataggccaaagagacacaaagacaattttaattttggcatttttttttacaaaatttcggcaccaataattctcgtaaaaaagacatagtaattagtagagatcggacgggtccggtgctccgccgggattttgccgcgaataccgatctcgatcccggtttttttcgaccaacacgaaaaacggaagtcccggttccgggaccctatcccgctcaattttccacatcacggttccgaaatcctctctcgacctatttcccatgtcccggtctcggccattcaaaatcccggtctctattaattagtgctaatgaattcattagtattgccaaaaatttctcaatttttccctacaggtggccttctccaccgcttacccctccgttttttggcgcgtttcaaagtcttttgcgcttctgttcaccgcttttctgggcgtccattcgctgtgcttggttgga

SEQ ID NO: 53304 - DNA, 351 bp, Heterodera glycines
atgtgcaagaaatatattttaatccacaaatttgtgggttctaagctaataatttttgaagtaagcaataaattaatggcattttcatcttttagaaaattaaattaaatttattattttttttatttccatttaaattccttagatatattatttatatatttgtcttaatatttctttattttaggtaaagtttgatttaaatttaaaattaacccagtccaaaaataatttctctgatcactactcactgctcaccattgcatgtcggtgtacagtcgataccgtacaaaggccaggtacagtaaccaggagttgagcaaagtgcaaccgatggtgtaccacagctta

SEQ ID NO: 53305 - DNA, 393 bp, Heterodera glycines
attttgctgatcgttttgcaactcgttgtctgtactgtttgcgccggcgaagttaccagcgcgtcgtcagattggtattggaaaattctcgcatctattggggcgttgttgtctattgctgcttatatttgggcgatggttcatctgttagtgacctcaaaaattgatgttgtgttggtaaaaatagacggcatgaagacagagatgggtttgagaattgatcttctgaaggcggagctcaacgagaaaatgacggagaaagttaagtccatcaaaacggagctcaacgagaaaatgacggagatgaacaggaatgtggagtccatcaaacatgaagtcacttctattcgcgaagacatcaaaccaaaaccaaaacaggggctgttttggtga

SEQ ID NO: 53306 - DNA, 682 bp, Heterodera glycines
atggggccggaaaatgacggaaaaaatgggccaatcattcgcaaagagaacggcggcccacaaattgagaaccacgaaatttgcaagaaggaacacgaggaaggtaaatcattttaatacgttttgtgatttgaataatcgccacctatttgctgtaaatggcttctaaacacaaaaagttgtcaatacctcataattgaagtggatttgttttattttctcaattaaattatgactaagccaatgaaaaactccaccgaaatttgaaaatccatcggaaacataattgtctttaatgcaatcaattcgaacggcgtatttcatttgttctagatgccacgaagtggcaaaacaatgacgtaaagacaaaaaccaaaaaagtgacatcactaattgttgtaattaaataatttgaactcatttcattccaattttaggtgccgaacagcggccgtttttgtttttgaattgtcagtgtctttctgccaatcgcatttacttcaactttaccactaaatcggaaaaatacgaagattggcttgagaaaggccgaggggaattatttgagcaaattaatagtaattattgtttaaaatcaactgaagatgcaatttttgtttcgaccttaagccattaccagtggagttcagcgtgttttcaccgaccccaattcatttcttga

SEQ ID NO: 53307 - DNA, 855 bp, Heterodera glycines
  unsure (1)..(855): unsure at all n locations
atggaattaacacgtatattattctgttcaattttatttttgatcatcctaactgatcagatcggatcagaaaagaaaaaaatggaacaaaaaacatttgatgaaatattntggagaaaaatgggaagaaaaaagaaacgaagaacagaaaaaaagagaaataattggaaaatattataaaataaaagagaaaattaagcaaaaaggaagaaaatacccaagaaaagaatggaataaaattgaaggaaaaattgcaaaaaaattgggcacaaatcgccaatatatttatgaatggatcaaagaattgggattaaatcaaaaaacaaacaaatgctacaaatcaaaaactgatgaagaaaaacttgacactgtacagaaattcattgaaatgtcaaatgaatttaagcaaaaaagaaaatattcaagcaaagaatgggacaaaaattatgaagaaatttgtaagaaaattggagttagccttaaaacaattacaaaatggaagaatcaatttggcattagccgaaaatttataacggaaaaagaaaaaacggagaaaatgaaaatttattggcaaataaaaagagaaatgccgaaaatgagtgacaaggaaattggaaaaacattgaaaattaatagaaggaccataagcaattggaagaaacaatttggagaagaaataatggaagattgaaaacggatgaatgattctaagaatgttagtgatatgattttaagagtggctataagcggagatcaaaaattgaaattaggtaattagcatttgaaatttttcaaaaaagagaaaaaaattcaatgaatttttattctaaaaaattatttataaaaaatttggca

SEQ ID NO: 53308 - DNA, 734 bp, Heterodera glycines
atgaataaatatttttacaaatttatttatctaactaaaacaatgggtcacgcgtgcccttttggtccgtcatgaaattttttttattgctttaattaatgtgctctgtcatcaaaaactgaattttcctcactcctttaaccaaaatatataaatcaaattcactttctcgagaaaaaaaaaacgaaaaaatttaccgtataaaaaagttgatgtaatgtaacagataatttaattttaattttcatttttattccaccaaaaatttgcccgattaatgattaatcagaattaaaaaaagcaataaattcattagatagttagtttaaacaaatttccgaaaccttaaatttttagaataaatgaaaatttaataaaagtttttataaagaaaaaaatctaatttataaaattcagacaattaattaattggaatcattcaaaaaatggttgctctaaatggctgcactttctcaaggagtcgaagcagtgccccacaaatgatgacaacaccagcaccaacccatgtcagcagtccgatgaacggtcgttcggcgccgcaactgagacgaagactctcaacaaacacacgtaatccaagcacacaagagggaattgatcagattagctctttaaaaaaatttatggattcaaaaaaacattttaaatttttaaaaaaatattaagattagcttgagatatttcccctgcaccgatcatcaaatttgaataaa

SEQ ID NO: 53309 - DNA, 1153 bp, Heterodera glycines
atgctcaaaacttcttctttcacaaaatcacgggttggttcagcccaagtgataaaaaaattatcattaaattgttttgaatttattttcttaattgcctttttttgctaaattattatttattagtggccggggaaacccctcgggggacaaaaggaatttccccttacatttttggctgacggtgaagggaccgaaaatgtgctcaattcacttatttcaatgaaaaatttttttgttggaaattgcaccgaatgacagaaagaaggaatttttgcgagattatgtgcaattattttattgcatttatgaactaattaattcatatcatgtagaattcaaattgtttgggcaaaaaagtttatttaatttttaaattcaaatttcgccccctccaaataataaaaataatgaatttcatttaattttaataaaatattcattaatcattaagctgtggtattagtgactttttggccccttatttgattgtttgtatttgtttggcgcaatgttaatttgaattcgacccaaatattttggttttcttaaagtgcaattggttgatttagtttaaaaatattcattaatcattaagcatctaatcttcatcataattactaaggctatttttaaggtttatatataaattttactaccatccgttgttgcgattcgaaaaaagcgaaatacgaaaaaacgaaactaaaataaatacgaaatgcgaaacatgagatttttactgaaaaattgaaaatttttttgaatcattctcaaaatttgatcaattaaaaaattcgaaatcaatttatttgaatgaaataatattttttatttaattaagataaaaaaattgaaattttctacagaaatttttaaaatttaacccaaaaatattcatttttcagctttttcctaattttaacaatttggaacgaacagatgatgcgaaatgggtgaaaaagataatttgttagaaatcaaaatgtgatttaaaaattacgcgaaacacgccaaaaaaaaaagaagaaattcgtcgcgttaagcggtcgcgcgctaacggaccatatgtcattctgatgacaaatttcgtcgttcccttcatcttacaaattagcatcacttccctactcaatttaatccgaaaattaaa

SEQ ID NO: 53310 - DNA, 1237 bp, Heterodera glycines
atgctaaaactattaatttctctattgattctaaatgtacaaagtgattttgtatccttataaccaaaattgttagcatttacgaatttgatgttttttcatgtgttagagacatgaaaatagtactccaaaaggagagaaaaagaaatgcaaaaattttaatcactccatactttttagttaaccctttttttgctcttaaaaacccttacattttgttcctaatttttttctctatcgctatgcaaaatttgatgtggatttaacaaacagaaaaaaagttaaacaggatgaagtaaatgttgttttttacataattaaaatgaagagatagtacgccaaagagagagaaattacaaagaaaaagagaaacgacgagatagtacaaggcttttctctgcacagtggagttgacccataggggtccactgcgtttcggcgctcgcgtttcggcgctcccgtttcggcgccagcatgtttttggctataacttttttctttgtaaaccaaatccaacattgttggtgtcgttcgaaagcttaatctatttagaagctttttttaagctattgctttgcgattagacaattatcaaaacagttatgcatgaaaattgcgaaaagtcgaaatttttgaagttttttcttaataaaatttttacaggcttgaaaaacttttcgtttttgatacggctaatagagcatgttaagagcattcgaatgataccaagattgttggatttggataacaaagaaaaaagcttaagtggaaaaacgagctggcgccgaaacgggagcgccgaaacgtgagcgccgaaacacgagcgccgaaacgggagcgccgaaacgggagcgccgaaacgcgtggatcctttttttaacttagctcatcaagagctttcgaatgataccaaatttgtgatattttaccatttaaattcggttttttgttcaagtcagggttcgagtttcgaatttggccaaaatgcatgtcataatcgttttcagcgacctctaaaacccctagaaatatgttttccttgtaatttatgaatttagaatttttgttcgaattcgggttcgggattcggaattttgaaaaataaatgtcatattcgtgatcagcgccccaaattaccctagaaatgactttttatttgaaaatttcagggggggtcacaaaaccgaaaagaaccgtgatcttataggtgctttactggcgggtgttgcgagcattg

SEQ ID NO: 53311 - DNA, 1085 bp, Heterodera glycines
ctcgacgagtcatcgggcccggacgatgtgtttgctgaagctcatccgatgcaaccggtcgctgctgacggtaagagcaaaagctcaatgcgaaaaaaaaacaatcgatcactggccaatcgatcagtggaaagtccattggcaaaaattaaaatttttaaaaaacaacaaggattttccaattttacatattgaatttaaaaaggttttataatttttaaaaataattaatttatcattatacaaaatatattattttaagtttttttatcaaattagataattataattttttcatataatttaaataaaatttgttttcaaaatgaatttttattgacggattgtccactgatcaattgatcagtgacggattgccactgataattttgatatttttgggtttttattgaatataaagaaatttttgggcagcgctgggcacatcgggagggaaattttgataaaataaaacgaaatttgttaaaaattttattgttatttctctaatctttcattcttttaaggtaccccaacattacccggaggcattccccgcaattcccaagcccaaattgacgttgtccggaaatcgacgtcggcacgtggcaaaaaaaattcggtgagtaaatcagggttttaaacaggggtctcaactgaaaattttcaagatcagcattttgattttggcttaaaaatcagcatttcaaaattttattacaaatggttaaaaatcaacaaaaatgtttttttgcggcgcgcttctaaaaaaaatatttttttttgtggaatttggagggggaggtgccgatagagactatacatatatggcaatttttgaggattttcaaaaaatcagcgaattttgaaaaatttttgcttggattttggtagaaattttacataaaaatgaccatttttgaggttttttaaaatctttacaggtgaacgcggagggcgaggcggacaaagcgattgtggccaaaaacaaggccggtcctggacagccaagtgacccgtcagacatgatcatgctgccttcaacatcggatgcaccaaggaggtctcgtcggatcgtggccaat

SEQ ID NO: 53312 - DNA, 974 bp, Heterodera glycines
atggcaatgaaaatcaatttgctaattttattttttctaaattttgttcaaattttcgtttcgttttcgccgtatcaatgggacccaacaaattcggtcaccaatgttcacacatttgccaaattcattgacaaccttttcatgacttacacaatgaataacaaaatgggtaagtccggataaaggctaattaaagtcggaattccgtaacatctctggcagttatattcagtgccaaaaacaagtgttttctttccaagatacactattgtactttctttcaccttccttttgttttgttttaatgtgccctatttttcgggtttccgtttccctattttcttttttcagttcataacaattttattaaatgttcatacccattttcaggcttcctaattcgaactcggccctaaatttagacaccatcttcccaaatgttctgccgtccgcccgtctctctgatcagcaaaaaagggccgtgtttattttcacttttgtcaaatgcgccgctgaatttgcccatttccgagtgaataacaaaagcacggccgacgaaacttaccacaatttaaatgtgtttcgcggtggaatcaatgcgaattttgtgggttttcttttttatgaccaatcgcttggccatcgaattgcgaaaaaagtcgaggaattttgtgcacaaaacaaagaaaatggtattttgatgaagcaatttatgcagctgtttttctcatttgccctgcggattcttctcagtgtggtgtcagtgataaaatttaaattgtggagcgaaattttggggatttttcatttcaaaaaaccgataatctttaccaaaaactgttaaaaaaccttcaccaagagccaaatgcatcaagtatttatgatcatcacaagtatactaaaatgttttactaggagttcatattttaaataataagattctattaaaaaacgttttagaaaagtaaaataaa

SEQ ID NO: 53313 - DNA, 1229 bp, Heterodera glycines
atggcgtccatccccgcgcttattaatcatttggcaagaaatgttgattactctgacgtaagtcaataattgataaaatagcactaacattgcctcatttctccaggaagtgctctgttattcgtcaattgcgcgagcactcagcgattttttcactccttttgtggttgaaaataactttgacgaagaggatacaaaagtgatggaagagcaccgacgaattcagatagtgcttcgttcaattattttcccaactctgaaaagtcgtttccttcccccgtcttcactttggccatcaattgaacgagtgactgacattgaaaaagccttcaaacaatttggtcgatgttgagactccattctcagggttgtctattttcataatccatccatttgtccaggcctgtgccgggccaactccatcttcaaattttgttttatcgtctctatttaatttttacttgtatgattattagcattataatttcttggaatttgaatttgcgtttgttaccaagaagcgaataatataactatagccaaaatttttgcttttcgttcatgaatttggtggtgtagcaatagtaatttttttttttttctggagatttcatacttacctattttaaaagggattgaaaaaatcatttttaatattacaacaaaaaatgttgattgtctgaattttttgcagagcgtttgcacagtgaacatgccgttgaactatccttcctactgccgtgccatcatttgtgagaacattttttaatgacttttgaagtaaaaatttgtttccgaaaatagagtgggcgggggcaaaattgtgtttctacagtaccaaattttataaaatgctcaggatttagaatcacacaatgaaacaagacaattttgttgaattaaattgaaatatccccttttcagccttgggacgttgccgtgttgaagttgtacgcagaaaccatgggaaatatttgggaccccctttttacgtacctggacgaagtcatcacttcagtgagtctatcatttacagcaaatagttggcattattttataattgacataaataagcaaagtgtacaatcctttattttccaaaataatcaatcagtcttattttatttaacatttagctggaggatcgcacgaattctccctctcctccgacgctcaacggcaccaatttggcatttcgtcaaacacaagcgcaacatttgctatggtga

SEQ ID NO: 53314 - DNA, 2512 bp, Heterodera glycines
atgctgaagtcgttgctccaaccctttgacgacgacgtggaggaggacagcgaagaggattcgcatttggcagcaatcattgacacggcccaagtgattgcttttgattgtgagggctcacgggcgaggagtgtcctttttgtgtggcaatgttactaaagaatattttcaagaaacttgccgaccgtcaactgtctactgagggggaagacccttccgtcgggactgttgaccgcgcggcgaagccggcctggaaacggctcaagtcgcaactcggccgctccattgcgcgccgttttgaacgccgttgcaaatacatttacgccagttcggtggagtcgtgccacaaacggctgcaacaatcgcaggtgttagtcccgccgagcatgaagtttcgctgctaatttttgtttgtctgtttcaaaaagagtctaagctgggacgataattacgagataatacggtacatgtggagatgcttaaatgagaaaaaaagtgaagaggcatttgataatataatggagcaaattggtgaactttggccatgggaataaatggactttaccaaattattaggaaaaatatcaattgtgatgaacgttgttaaaataatgttgaaaactgttaatgatttgtcagtgtttaaatcagtaattttcctgctctacaaacaaaaaaatcaaccaacgtaattggtaccgaattggcactataaggtatgaatcggttcaaaaaacggtttaaacttgtcggatcaacttccccccacccctagatcgatctgtctcaacgagagctatcgattggtaccatattcttcgagattggtccacgagaaaaaaacaccgtataagtcaagatattctttttctcaatcttccagatattttctccaaattcttctgttgtttttgttcgatggcctttccctacacaattattcatgcgcaagctgatgtatgtttaaattacatatttttgcattgtttatggtcaattagtcaatttaaagtatttatttatatctttcaagttttacctgtacctattatttttgacaataatttattttcagaaaatccaattggcccttttccttttcccccactaatccttttttgcccactgctaatgaaaataaccaacattaaaaacaaacttcccctcgaactcaacgatgaactgcttcattttgtccccgagtttttttgccgaagggttttggttcgctccaacttttcatttttttgtttggtccaacggagtaaaagagcaaaacattggaaacacaaagtacaaaaaaatgggaaaaatggcacatgaaatgccgataaactgctgctaaatgtaattaaatgtgcgattcattttaggacatcaatgcacaggaggagcagaccacgtacggattcggggacaccatttaccgcccgttagtcccgcggcttgagactcatcgcgtgttgacttcctttgtcggcaatctttgtgcgcccaaccattttttccgaccagaccacaacagcggccgtttctgtgtggtgtctatcaacacgcatgaagctaacgtaattataaaattaaaatgtgattaaccgataaactgaattttaattatatatttcattcagccccttggtagttacaaaaatggaaaatgagttgacacagccaacaaaataaaatgtcttttctctacagaatttcgaaatgtttttcgtagtcaatttcatgttagcgttccccgaattctccattccctctgctgaaatggtttaaattggcaaaatgggcaccatcataatcaataattaagaataatattttcttattcgatattcagagagagatggtccgcactttctttcacgacaacgaggctgggttcaccaaaaaatattatttctgcgaactgcaattttttcctatcaatgaattggtaaatggaatttcggcgtttttcgcaaaacttcatttgtccattttgaccaattccggacaccggatccgaactcgaacaaaaagccgaaattcaaatttttcgagtttcagaaattgaaaaatttgaatttcggctttttgttagagttcggacccggtcttcgtaattttatacaaaattttcaggatttagaatcacacaatgaaacaagacaattttgttgaattaaattgaaatatccccttttcagccttgggacgttgccgtgttgaagttgtacgcagaaaccatgggaaatatttgggaccccctttttacgtacctggacgaagtcatcacttcagtgagtctatcatttacagcaaatagttggcattattttataattgacataaataagcaaagtgtacaatcctttattttccaaaataatcaatcagtcttattttatttaacatttagctggagaatggtgacatgccgccgtacatttccgaatcatcgccaaataattcggccaattcactcgagaatctcccgtcggttgaggcaccgcaatcggatgattag

SEQ ID NO: 53315 - DNA, 758 bp, Heterodera glycines
atggcctctaaaaatgggctcattatgaaacatttaaagattctgttccctcatatcatatccaattcccgcctcccaaaacccgccaaaattgcttccccaactcagtccgagtccgtgttcttctaccggtcgtccagctcctcactgctgtcgctggactcggccacttccaccaccaccagcagcagcaattcgtccggcattggcaccagcgacgcggaaacgccgccgttggcatttgagggagagcagcggcaacaacaaaagcccaacagcagcagcagaagtggcacgagcaaaagccaaaatttgtgcggaggcacggcactcaaaatggcggcagacggaaaaaaacagcaaaaagttgggcacaaaacagcaccaactgcagctgctcactgctgcccgatggaggaggaggagcaacagcaatccatggacaaggagcagcaacaattcgaggtgctgccaatgtgcgacggcatttttgggtttcccaaaaaacgaaatgcttttcgctaataagaaagccaacattttggtcaaaattcgttaaattttcccaggcgtcctccaccgcgcactgttcgccgccgtcttcgtccagcggcggtcaatccggcgccgccgccgcctccgtgctgctcgtcgacctgtccaatccgatgctgcagcaattctatgtgcagcaacggttgttcttccgacaaatttatgcccagcagttcgccgctctgtccgcccgacttggcatg

SEQ ID NO: 53316 - DNA, 697 bp, Heterodera glycines
atgccaaaatatgcacatataatatgcacgaaatgccaaaatatgcaaatatgcatatggaaagtcatcctagaagcttcaaaacaagctaaaaacatgtttttcgtgcgtttcaggcctcccagagtccaggaaaaaaatatgcatgtgcatataattgattggactccctagtcatctgttaataaatcttagtaaaatttttaaaatttctcccccaaatttcacaattttttctctttacacaaaaataaataaaacattttctttgttagattggcagggcgaggaatgaaaaaattgatttcacaattgctgagcatcagagaatttcgcgttatgcttgtcgaattgtggcggagcgcaatgcgccggccaatgtgtacatttatgcagctggatttgatcaggaaaacaatgtataatagaatatatgaaaaaaaattatataaaaaaagaaaaatttaaacaaaaaaaaatagaaaaactctacaaaaatttaagtaaaaaaaattcgagtgttaggtagagaccggaaatttcaaatttgcggatcctgttgcaggattggaattcaaaattttttacaggacaggatccggcaggattaatcctgcaaatcctgcatttaaaatctgcaggatcctgcgcaggattgcggattttaggaaatttcaaaaaattctgtattaataaa

SEQ ID NO: 53317 - DNA, 337 bp, Heterodera glycines
attatgagccacccaatttggcaaatcggtctttttaaacgcattaaagaagattcagtcgattgcttggagtgtaagcaaaaaaacgttattaatttttcatcttcatcattttttggtttaaaaatatatttgaatacttttttatactttgaaagattttttattaatacagaattttttgaaatttcctaaaatccgcaatcctgcgcaggatcctgcagattttaaatgcaggatttgcaggattaatcctgccggatcctgtcctgtaaaaaattttgaattccaatcctgcaacaggatccgcaaatttgaaatttccggtctctaccta

SEQ ID NO: 53318 - DNA, 717 bp, Heterodera glycines
caggcccagctcattgcactacgtgaactcgtgtcagctgtatcagtacgaatgcgccatcagtgccgtgttggaaatatgcgaacattataaccgctccaaactgttcgaggcgtacggattcggcgccaaaattccgccggcattcgccgtcagtcacatgttcccattggtgggccatttgttgacaaatttaaaaaacggtaatgtcaaagcggttgaacaacaatgagagggttgtgcacggagttgcgggcgttctggaggcgtatcggtacgccgttctgaacacccatttgttcgggcccaccaatttcgcaccgacaatccgcgaattcattcacaaaacgagcaaattcccgcgtgacggcagccgatatcaggcgagcaatgaccattgttatttacatattggtgagttcgtcgtcaggtgctgctcattctcaccgatggcgtcatcacggacatgcaaaacaccgtcagagcgatcgtcgacgcgtcccatcagcccatgtccatcattagtgagaaggccctttgattgaccttcttccataattacgccctccccaacttgcagtaattggcattggctcggacgaattcgccaaaatggacgcattggacgccgacgaccgaactttgtccgtcgatggacacaccgccgtcagagacattgtccaagtgggagaggagacgacaatcagcaaattgatt

SEQ ID NO: 53319 - DNA, 426 bp, Heterodera glycines
atgactctggcccaattcggcaccgccggcacttttcccctatccctgaaattttttctaacaaagccgactgccaatattgtgggcaaagtaacaaaaaaaaactagtttcatggaattaccccatcaaacatttattttttgaaaaaatgaatttttttcaggacccggttagaaatcgatatccggactcggttgaagaatttgggcccggaaccggttttgcacaaatatccggacccatgaaccgtactcaaaatggtagtaccggtgcgtcatttttccaaatccaacagcgtaaccgatttaccggaataatgaaaataagttgaaagagatttatccactaaaaagaagtttaaaatgaaagataggaattctaaactaaccgaaaaacaaagaaagcaaagtaaaaaaggacagaaa

SEQ ID NO: 53320 - DNA, 592 bp, Heterodera glycines
atgaagaatgtaaagtcatcaaagccttccgctattccaccaattagctgtatactgtacaacttgggctttcaactaaattctttattgtcggagccgacacagaaattcggtgaattctttgcaaagcacaaaagagggtgtggaggagagttgcacaagtggatttctgaagtagttgacgacacagtattggatgatgtatatggtttgggatacaggtaaattcatgcaaagcttaatttaaatatagccaatcatttgatcgggctaggtttgaacaaatctatttaaaaaaatataataattttatgcttactccgtcgtcattcggtcatcaaaattccaaaaggagccgtagttaaaatatttaaaattttacgtacttttatttagcattgaacaaatcgatttggaattgttaaaagagccaattaaacggtacgcaaaagcaattggatttaaagagacggaaaaaaccgaaaagccaaccgaaaagccgacaaagggaaaaggcaaacagaaaactgatgcaaaaaaagtcgatcaaaaattgaaaggaaaaaaggccaaccaaaaaaagggccaatga

SEQ ID NO: 53321 - DNA, 74 bp, Heterodera glycines
gttatacggaattgacaatgcttaaggagtccaatttgctcagagaagagatttcacggtgttcggacgaatga

SEQ ID NO: 53322 - DNA, 558 bp, Heterodera glycines
cgaagctttgatgaagttcaaactcggcactctcccactttttctgctatttagtgaatgtttggcggtgatacctttgagcttatcgaccgaacgatttttggtaagttaatttttaaaaaattctctaaacagcgtcgattgagaaggacaactttgaaaagatggggaaacgaagcgaagtcgaatacggtaattggcaattgcagaacacagtaacagggggggggggtctattcagaccaattcatcaagggaaccggcattccgatgatcggctttggcaagagggacaccgagttcgacccggcgaccattccgatgatggtagctggagaaagaatgctttggaattcaattttgttaagggcttcgggaaaagagggacgggcaggccattccgaaacaatgccatggagacgaagttgcaactttggagaatggggctgctgggataaaatgaaaacactcatcagcccatccaaatgatcgaatgctttgaacataaataaattacaataaagttaaacaaaaaaatgctaataaaaaggaggtcaa

SEQ ID NO: 53323 - DNA, 687 bp, Heterodera glycines
gaaggcaagccaacactttggtcatgtcggaagaaaacatcgccgtatgttttttgcatttgaaagtgattgaagaattgaaagttcaatgtgatcgatcagaagcaaagtcaaaaactatccatctttgaaagtttaatgtgatcagaagaaaagttaaaaattatccatcatcttttccatttgctaatggaaaatttttgatgttaaacgaacaaggaatgaatgcccttatgattttgatttttcttgaagtaaatcttacgggttggctgtttaaactaaaatatagataagcatagattgtcataattaatatcagcgatgagttggagcaagaagtttaacaaaatccgagacctggattgactgccaactggaaaaattgggcatggaagattatttcaatcggaaatacactgatagatcaaggaaatcaaattcatttgcaacatcgtgattagtaaaatttttaaagtgaatcaaaattcgaaaaaaaatttttttgtaaggaaatacgtcaaaaaattgctttttaaaaagcataaaaaatttaaatgatttttatgtcattattaagtttttgaaaaatctcgggtttattgtgtcttgtctcgtgaatctcgaaaaattttcggtctcgaacatcactaatgcaacctgcttttagaggtttccgagaataaa

SEQ ID NO: 53324 - DNA, 417 bp, Heterodera glycines
atgagcataaaaaaaggtttgatttgataatttaaccatcagtaaattttggtaaaaatatttaaacgatgaaattaatgcgaataaaaacaaaaaaatttcaataaaattttagtggtttatggttatctcgggttgaaaaataaatgcaaaccctatggagctatgcgcgaatgttttgggaacaaatacacgaggcacaaacgcatacacaccatatataaatcgtttatttcactttacagaagtttatatgtgcataaaaattccataagctataattattttcagagaacactaaaattaaacaaatcccgcgaaaatgtgaaaaataaagttatatgagttcaaaaaaaagccaatttcaagtgctcaaaacgaaaattattagcaacgtactaaaggttttaaaaagta

SEQ ID NO: 53325 - DNA, 786 bp, Heterodera glycines
atgccgtctgattcgactgacaattccaccaaccgcggagcaaaacggagcgcggacgcggtcaagcgctcgatggacctggaaaaattgaaggacgacaaacggaagcgtcgtcagcatagacatgaagaaggcatcagaaggcaaaaagcactgctcctgctccaatccgagtttcggacggcgcgtgaggctgtccagagcgggcatttcaaattagtgtgcacacccaattcaatcaatttgaccgtcccgacgcttgtgagttgccttttttagtttttgagggggttgtggccaaatccttccgatacatccattcataaaatgacatttttccttgtttgccagagacgttcgcctttttttatggccataaagcaagaagcggtgcaatccataacgccaactgacccccgttctgctgctcccgcccctttaagtcacactgtgccggtttctactagttgtcagtgcttttgttttgaaatggcatgtcgtgaccgtccttgttgattttcagctattgctcccgttccgttggcctcagttgtagtctccacatgccctcccccgccggtgccaccgaaacttcaatctgttgctcattctggaccgttgactcgaactgctgctggttcgtcaaaaatgcactcgaaaaacaaggcgcaaaaaaaaccctattcatccgatgatagcacgtggagcgatggatccgagggaccatcggaaccaaagagaaggatgataatttgctcggatgatgatgaaaaaatggaggggtaa

SEQ ID NO: 53326 - DNA, 2018 bp, Heterodera glycines
atgctggttcatttcatgaatgttttttacgcgggtatagtcctcagctgtgtgccgtcacgattgcaatcggagctgataaatgtagattttacggttgacaatcaaaactattttgacagcggcaaatatcgtaccttttcaaaagatgctacagcagcagaacactttggttatagtcggaatacagcgtgccgaatagagaaatgtgagcgtgacagcgaatgggccgtttcgcttcaaaatgtgtacactttgcacagctatcagagtgtgtttttcgaaatgaaatcattggtgaaaatgtcaccattggcctgttttgaatacaatgggcatagttttaccttttttgaagacagcgaatctggtgagactactatcttccgtggtcaccagcataagattgtgcaacgactgtccaaacatggacgggttgtgtttgatcacctatcgggtcgattgtttctgatcgataagtatcagaggcggatcagcgaaatagagcttgaatacctggagcattggtggcttcgaaaaaaccaatcttccgcacatacgatcttgaagagcaattttgtcgcttttcttccaccagataaaagcgactttactttggcggacaaccatgtgtttgtgatcagagaccagcgcatctataaatttcacattggcgactatgcaaaagggaatcgtgcgctaacttttgtaaccaattcaaatgatgtccgctttaattatctaatctataaacccaaagaccaaaatgttagccgtggtgtttttgcccatctacgcatgtcggacgcatggatgccgatatcgtacctgttcaatctgctcctaattgtactgtgcacatacatacttaaacagctacggcgagtaaaccgacagagtccgcttaacgtgtccgatagcgccgattattacagcagcccgttcattgacgacgcttattcgccccaacatcaacaattgctgaacataccgtatgaaactgaaacatcgagtgatcaaagtggtggagcccgtagtcggagtatttaaagaacgattttttgttgtttggattcagttggccatttgtttcctacattttaagaaaagctattgtcattttacataattgtcacaatatatttacctgcttattgcatgcaaagggcaatccgttatctgatcgacagttacgggctgagcagtgtagacgatctgtacacctgcttgaaagaagaaattaaaagtgggcctgaaggtgggaattgtctctatcccaacccgctttgtgctgttgactgtgtacacgttgcaaacgctgatcatccgaaccaacctgtgcatattgacgggtcgcttgaattgattgctgacgttgaattgtactcaacatgctatccgaagaggaagttcgaaggaatagtgtggtaagcctactaaacaaaaaatattttttgtcaatatccatttttaaggagcgaacctctgtatgtggagctgaaagatctgaagatttgtccgggcgactcgccgctgtgtctatcgcgccatttcgaactaccgaacagcaacaacaacaacatggacctgatagtcgacgagctggatctatccaactattggagcgacgacgagcgcgaaaacgagactacaacttggtgagagtgctgtgccgattcaataactgtggtccctaccgactcgctaaacagctacagaaacggaggaccgaaaatctcacctatcttaatcggttagacattgaaactgctcatcttaggaaaaatatcaaagttataccggatgctttatgcccaaatggggctaatcaggtgtttgcttatcgcggattcctcggaatcaccgttcaacaacatttgtattctcgccaccgtgtcatgctaaagtacccgggtttaccatgcattgttcaatttggcggtggttaccaccgtgacctatttcccattgaattgttacgagtcgctaatgccgaaatgcatagcgaaatagcttaa

SEQ ID NO: 53327 - DNA, 536 bp, Heterodera glycines
atgacaaaggtggcaacagcggaaagaacgacgacaatggtagcaagaaaaatacagggaaggaggtgcgcaatcgaaaaagaagctacccgctcccgttactttcttgtcgagcaaggcagacttggttcgggtttcacatggatagctaattctttttttgttgcagggctgaagcactcgacaacattgaaaaaaaatattcaaaaatggaagcggatataggcggtgaggaaagcgacgaagacaccgtcgattttttcgtggatagcgttgaagaaattatggaaaagtatgtttcaaaagaaaatctgcttcgtgccaatagtcggttcattcttataagaattcgtcgatcggaagagaaggccaaaaaatggatggacacgcgcggtcgtgatgaagccaagaccgtcagcgttgagtttttgtctgctcaggcccaggctgttaagaaagaagatatggactccagcaatagtgagaaggatttggatgaaccaacctcaacggtctatctggaccgcaaaaattga

SEQ ID NO: 53328 - DNA, 2268 bp, Heterodera glycines
atgaggaacaacgaggaaacgaaggctgttaactgtcactctctgttcagtgtctgcatgaccatcttcaaaggacaatttttgaaggaaaatcagctagccatcgtacccgaatgtggttatgagagaaacgatcgtgccagtgtttttgccataaaataccttgactggcgctcaaaaaaagacggaacacgaatacagcacgctggaaacgggcttgaaaagcgttggcagcaatttaggttggatggttggattgaggagcaaaataaatgcatcgaagtgctggggtgctactggcacggatgtgaacgctgtttcaaacccgaagacaagttggtcgacggaaaaacgtgcagagagctcaacgagctgacccatctacgtttattgaagctacgtggacctccaggcgatttgcacagcaggctagagattgaggcagtttgggaatgccagatcagagaacagctcaaaagagacgacgaaatgcgagatttttttgccgatctgggaacggatcggggaccgattgacccacgacaggcctattatggcggtagaaccgggccacttcagctgatcgccgagcctaaagaggacgaaaaaatatcagttttcgatattatatcgctatatccatgggtaaattattccgccgactatccggttggcgttccgtcggtaatccacccgaccgctgaggagatgcttgtcgattggactcgggctgagcaattacaatatcgtggaatctatcgggtccgcgtaatccctccgcgggggcttcgaatacccgttttaccactcaaaattgacgaccgcctcctgttctgctgctgccaccattgtgcaacagcattccgaaagacaaatacgcgccgaacacataaatgtatacacacagatgagcaacgtgcgtttactggcaactacacacacattgaactggaacgtgcgttggaatcaggctacagagtggacagattctggagagcctggcactacgacgaatggtatgggtgcgtaccggcgggaagattaattgtacattttttttcaatttaggagcgacgaaatattcaaagactacgtcagacttctcataaagcttaaggtaagtgaccacatttacgtaacggaacatcgtttttggcagattgaggccagcggttttcctgacggtgtggtctgtgctgaacaacggcaccaatacgcggaagaatatagacggacatacggtgtcaatttggacctggggcatgtgtgtaaaaatcctggactgagattcattgcaaagttaatgctcaatagcctatggttggttaaagactttattctttctgtagcagccttattttcactttaggggcaagttcagcatgagaaatgagctgggtgtgaataaagtgattaccagaccacaagagtttttcgacattattttagatcatgcgattgtgagcagtaacaagatatagttttttctaatatatttctttaggaagtaacagctattatccctttatcggacagggctgtaagagttctttacaagcacaaaagaaatttcatcacggaacactcatccagcaacatcgtcctaagtttatggactacaagccgcgcccgccttaaattgctcgactttatgactcaaattgagcgcaccgaaggagcaaaactactatatacggtcatttttttctttaatggctcttgaaaaaaaacatcaaattcataggacaccgacagtgttgttgtattgcacaagcgtgacgttgcgccaatacagactggagaatatttaggtcaaatgagcgaggagtacctcaactacaatatcaaaacctttgtctgcggaggttatagaatttgcctattatttatttatgaaaaaacaaacatgttcaaggtgccaaacaatacggttttcgtatgaaagacaagagcactggagcagttgaatacgtcctaaagattcgtggcataacatttgatgtgaacaatagtaaagctctgcagtttgagaattttcagcaaaaggtggccacctatggcaggaatgttaacatcggcaacaacgatcaccataacgatgacagcgacaataatggaaatgcaccctcagtatttcgctacaacaaaataatgccgacacgtgatagtcgcattatcacgagagagatgcgcaaaaaatatgtgcctgtgtgccaaaaaggaataataaatgagcagtatgaagtctttccgtttggatatgaataa

SEQ ID NO: 53329 - DNA, 1691 bp, Heterodera glycines
atgaaaagggtagaagcagacactgtgaaggcttcagcattgaccgatcatcgtggcggagacgaagaatgcatggtcaaacgaccgagacggcaaagttgggatttcaagacaatgtcccactttgatatggatgcagcgactggagagaacaggccgaaatcaccgccgttgtttgaacagagacactattatgtgcatcgagtggaacgattcgctatgcaacgtcacgtgaccgaatttttgctcaacgggcagcacgatgagccggaagaggagctccagcgcacttttaaacacatcattgagcgtgcgatccgaaatgcggaggaccccaaacagcaaaccggaagtggagcaaggggagatttgagcgacagtcgtcgcaagcgtcaagtcaccagacttggcatattgttgaatgggagaggtgggattgaccgggaggagggaacacttgtttcctttatgttggcggctgatttttctctgcccaacaggtctgagtgatccgattgtgctgccaatccgcccgccggagcaaaacacagcagaagttttgatggctgaactagacaagcttggccagtcggacggtgatgaggacgtgcacggtggagggataagcaaacgctcactgttgctcagcgaaccgattgaaattattgtcacgtgcatcgcgcctccggttggcgctgcgccacgtttccaccaataccaacattggggctatgatgaccggcagatgattcgcattatgcatatggatgacaattattgtctattccatgcgttgattgccactcgtgcatacacagaccaagagtttttgaagttgtcttcgcgacgggcggctgaggcggaagaggatggtggcccgcagggtgccgtgccagctgaaatcgttcgacgagtgatgacgaggccggacttttgtgctggttacgaggcgttgaaccgacttgtgtcaaaccgagaacggatgaaaactgccgtggcggagctgatgcatactgcagggattccgacagacgaagatgcatatgggatggagcacctcgtgcaaattcaacaattttgggtgaatgctattagcaaaatcagcttattctttaatacgaaaaacaggaccaaacctacgctggtttgtaccggattgttctgttcgaagaccattccgaggaactgcctcgcccgatttggaagggccctatgggacgccgcatctatgtgtcgctttttgtgtccgaaggacactattttggcatcaaaaagatacactgcttcttcaaattaggccgaaaatattgtctggactgcgaatgtgcctacaaccgtgacactaaacacacaatatcgtgcaaaagtcgctgtccacaatgtgctaaaggtagtttccaaataatttttatagctttattatttcttatttttgcttaagttggaccccaatatccatgcaatagagagcaaggggtatgtcttcactgtcagcaatgtaatcgctttttcttctcccaaacgtgctttgatggccaccgacgcagtcagacctgcaatttgcttaagcgttgtcccagatgtagccgtaccttccaacaggatcctaaacgccctcataaatgctacacttctttttgtacacgatgcagggtatttttcgtcaatatctggctaacgtaaataataaa

SEQ ID NO: 53330 - DNA, 885 bp, Heterodera glycines
atgaattgcctgaaacgtttcgaaattgccgcttcaccgaagaagcgcgtttctgaggaatttcctaccgttcttaaacatttgcgagatctaaaaaacttcaatgcccctggagttttttacgcaaatgccaaagtcacggacttgcaattctctttgtataaggtattaaatgctttaagtatctgccgttgtatgtttctcttaaaaatcaacgttttaggcgtgcccccttaaaaatagaggcatgctgtgtaaaaagaagctcgacgacgacagcttctgcggaatatgcatgcatcgcgccaacagaccgctccgcggtctgtatatgcgtctggaattgcacgattgcggagacatggaaattagccaacatgcgaccatgttcgcttcggttgctgagagttacctggatatgaaggtagaccaatttgccgacatggttgagcagcgacctgagaaggtggaggcgatgcttgagtcgaaaattggccaaatagtctgcgtcaagctgactcttaaggtcggcaccatttttccatcgtttgatactaactgtattcgacttctcgcctcgttttaggcaaaaggagagcatggattgctagactgggtcatttcggccctaattgaaggtgaaaaaatgcagatggaggagccaacggtgactaataacgggcaatttggagatggagacggagctgaagacggggaaataattgcgcttgatagtagtgacaatgcatttgctccatcaggaggcggtccaccgaagaagcgggccaaaaagaattgagcggtctgccgccttgcgaagagggctggactatgtcaaaggcggaaaaatgataggtcgcttgcaaaaagattgttatgaataaa

SEQ ID NO: 53331 - DNA, 5606 bp, Heterodera glycines
atgataacacgctcgccacctcttactcgccaaagagcgcttaacctgcgtatgttcggaaatgtcgaaaatcggccggccgctgctgcaacgcaacaaaatcaagaagaaaacagagacaatacgaattttactaataacccgatctccccaaacataactcataatttggaggaacataaccaaaatcaaagtcattttagtgaagacgaaattatgggcgacgacgaaattcgaaacgcattactgcgtgtgtcaatcgagccaagtcatgcacgccaacaaaatgtgctcggtgccgaacagcagcaacaaggcaatgtcacaggtattgcggaatttcgaaatattgggatagtcatcgacagaaataacgagagagggcgtgaccccgacaattttgggacccaaaatgtcgcaatgaaccgacaagttgcgcaatttgattcgatggtggttttagcacaaaatattcctcagaataaccaccgcacatcgacaccattacctgataatggtcttacccacaatattcagcgttcttcagtcggtgtttttgaccaatacaatatgggtaaccgacagttacaccaaaatcaccacttaagtcaccaccctttggctccatttgtaccaattgaacagaataacgcacgcattagaaacgtagaagaaagagtgcaaaatcggcacgcgattccaattcaacagttacgtcaacagattccagtaaacgcagacgcttttcctgcctttcaattccaacatgggcaggggtttgaaaaaggtgtacaatggcaactgcccgaacaaaatccaatgtttttcgaaagaaataaccaagtgcgcgtggaaacacttccaaaccttcctcaaaatcggggaggtgcaattgtcaatcaaacgcagcggcctaacccgatttttggccattcgaaaactgatacgactgttccaagcaatctcgaattaaatttggtactggaaagaattcccgatcttactggaaaagagggaatggataaagttcgaaaatttttcaaaaagtttgatgtatacaccgaaggatggcccgaaaaaacccgtatttcggcacttcaaagcaaagtatatgaaaaagctgagagagccttagaagctgctttgtcaacacaaccatttcgttatgaatgcattaggagagaaatgcttcaacaaatggaagaaacagattcgagaaatctgaatgcgttcgacgaattgatgatgggcgtatgcagaaagcccaacgaagggatcgatgacttagccaacagaatttcaacattagtcagaagtgcatacccgggattgaccagtaatttgtctgatgaatactcaattaaatttctcattcgtgcaatggataaccccgagctagccttgaatttggagctggttagaatgccaggcatgactttagaccatttcgtctcattagctgctagggcagagtcaactcagcgcgccgcaatgcgttatgcgtcatcgtcctatagtcgaagggaaaagactaagcaagaatattctaactatggaaggcaaagatttttcgcaaatcgcttccctgcgaattctgacaaccagccaaattttacacccagatcagaacagcatttttccagccaaaattggcaatgctataactgtggcgattttggacacatttctagaaattgccaaaagcctaaacagtttcaaaaaaactggccaattccatcggacaggaataacccaaattttgggaccaacagtaaccatgcggcaggaacgccagcaaatcgtaatgcaaatagcactaagcctaattcatcgaattatctaaaacagcattgcatcacccaacaagaagaaatccaaccaaatgtttgtctgagtaaaattgagtttgccccagaaatggatatttttttgacaatattcttgagaatatggaaaattgtcaggatgagacagttcctgcaattggtaaagtgatggcggtaaaagtgcaattatttggacaggaaaccgaagcaatgttagacggtggcgctcaaatttcccttattagcgcatatttcctttacaaattactaaaggaggaaaaagtcgatttgggcacgcttaagccttcgaaatcacttgcacgtgttttagacgtaaatggcaagcacctttcttgccttttctcagtgaagttgccgttatgccgtcgcgggcttaaatttccaaccaacattattgcgcacgtaacaaaagccccgattggattcgatttactgataggtacgaacggtttggcaaaacttggctttaaattatatgacaatctgaacgacgaaatggttgaattcgaaaagttcgaagcgaaagcgaaagcacaaaattttctcactgtaatataccgtaccgtaattgagccacgttcaacaaaaattgtcgaattcgaaattgatcaaaatcacaatgattctgaaattttgatcagttccgttcaaaccgataagttgcacatcgagcctactataggaaaagttaaaggaggaaaagttatcgccccaattacaaatttgtccatgaccacaattactttggaaggaaaacaaaaaattggtcaattcgagtcaattacggaaatcggtgaaagtgacgacattttggcaaatcccctaatagtatcgtcattatgcaaacagttggattccattgagctaaatcccaatctgaaaatatgggatttatggaaagaaaaaactggcatgctttctgaaaatgaactagccaggttaaggacactcagcaaagatttcactgagatttttgcggtagttgacaatgaattgacgcagacgaatttggttgaacaccgaattgaaacaggagatgcggcaccaattaaactcaaaatgagaccggtgccatatgcttaccgtgaaaagattgcagaaatgatccaagattatttgggaagaggtgttattcaaccgtcaatttcaccatgggccagtcccatcgtgatagttccaaagcgagacgggtcccttcgattttgtgtggactaccgttcggtcaattcagtaacacgaaaggacagttttcccttaccaaacattgacaataccctgttaatgttaggtggtaaaaagtttttcagtaccatggatttcatgaccgggtactggcaaataaaaatggataaagaatccgttgaaaagactgcctttacaaccgaacatggcctttttgagttcattgttatgccgtttggcttaactaacgccgtcgccactttccaacgatttatgacacgcctttttgaaggagtgatcaatgattttgtgttcatctacattgatgacattttggtcgcttctgaaacatttgaagagcatttgcagcatcttggtatcgtctttagcagaataaaagacgcaggactgaaactgaaattgtccaagtgccggttttgcgcagatgagcttccattcttgggacacattctcacccgagaaggcataaaaatggacatcgaaaaggttaagccagtaactgatttacctattccgagcaacaaaaaggagctccattccttacttggattccttacttattaccgaaaattcatacattcatttggtacaattgcagcaccgctgttcaaaatgttgagcgaaaaagtcaaattcgaaattggagagaaggaaaaggaaatcatagagattttgaaaaccaaaattcttgaggacgtagtattgtattttcctgatttcgaggccgcacaaaacgacccaaatcggcagttcattattatgactgatgcgagtaaggcagggatttccgctattttaagccagccggattttgataataatgttagaccaatttattttgcctcaaggcaatgcaacgagcacgaagcacgctattcagccacagaacttgaggcactcgcagttcgtttcggtgtcaaaaaatttgcacagtttgtaacaatgattccaacacgagtcatcacagaccacaaagcattaatttggatgtttaaaagaaaaaacgaaacaggaaatgcgcgcgtggaccggtggcttcttgaattaaattcgagatttcacttgaaagtcgaataccaacccggtaaaaagaatataatagccgatgtcttatcgcgctcgtttgcttcaccaaaaacccctgaaatctgtcaaaatgacgaagagatcgcaattatcggacaaatccgagaaattgagccaaattgggacgaattggcgcacaattatcagggttgggtcgaagaaaccaaattaagcgaaatgggtgcactttatgatttcctagaacgtaggattataccgaaggaccccagggaacagcaaagcatttttgataagtgtcataaatattcggtcatcagtgggcttttgtatctgtttgaaagtggaagcaatatgagattgttcgtgcccaaaaagtttcgtgaggaattagtcaaagctcatcacgaaggaaactgtgctggccatatgagtggaaaaaagttgtgtaaacaactttccgaacaatatttctggcccaatatgcttgccgactgcgtcaaagcacacgaaaaatgtcgaatttgtgcgcacactcgaaatccgcgtgctaatgagccgccattaaatgtcgttaaatcaaccgaaccattggagttgatctgtatggacatcttagatgtggggccaagtcattcaaataaaaaatatatttgtgtaattgtggatcatttcacaaaatatttggtcgcagaaccaattccggataaatctgcaggttcagtggccaaaatttttgtcgaaaagttcatcttggtttatggtacgccaaaaaaggtccattcggacagagggaaagaatttttgaattcaaccatggaagaaatatcaaaaatgttgagcataaaaaggtcatttacggcagggtatgacccgcaggcaaatggtcttgctgaacgtgtcaaccgaattttaattggaattttaaaaaggtcaactgcaagcaattggacgtgggacgaacgattagcttatgctactttttcatataacatcacaccttcaaataccacaggattttcaccttttgctctcatgtttggaaggattgcgcgctttccccttgatcaaaacgtacctttttccgtaaatcccgcttatacggtggattcggacaaatacattcagctgtttagagaaaaccttctaaatatgcttgaacaagcaaacaaaaatgctttagaagcgcgcaaacaaaataaattatggtttgactctcaaccacgcgtaacagccaacaaatttaaagtcggagatcgcgtaatggtcatttttcccgggctccaccgccggaatccacataaaaaactcatttggtcaaatttcggtccattcttaatacttgaaattggcgaatcttcagctaaagttgtaccaattgataagcaaaaagatgaaccaataaaagtgcccattgaacgattggtcaaagtcccaaaagggataccggacatctcaactttgcctaagggaaaaaaaaacgcctacaaagagactaaattaatggcgtaa

SEQ ID NO: 53332 - DNA, 255 bp, Heterodera glycines
atgttttatttggatgtcaaagaaaaaagctatcatggaaaaagagctggcgccgaaacgcgtgggtcccgtttgtacatttagtctttctaaaatattttatgaattttaaaaaaatactatttttttcagaaaatttttgtgttttaaaagtatttaaaataacaaataaatattataaaattgtccataaaaagcgacgaagaaattgatgcagaagtttcctaatattttttttgttaatgttttattaaa

SEQ ID NO: 53333 - DNA, 61 bp, Heterodera glycines
tatggcacggaaagacttccgatttccgacatttttggggtaggaattccaacttccgaaa

SEQ ID NO: 53334 - DNA, 677 bp, Heterodera glycines
atgaagcgcgagctcaccgaccgacggatcgtcgagttcgttgcgggtggccccaagaactacggcatccggcacaccgctcgggacgggacggacgagcgcgccaacctcaagatccgcagcttccgactgtcctacactgcgcaacagctgctcacctttgaggcgatgaaagacctgacgctggccacttacaacattgacggcccaatgtgagtttttaacatattattcttttacataatattaaaaattgaattttagcgatgatgccttggacaatgacgacctttacgtgtacggaggcggcgaacatcgtgccatacgcgtcaacttcccgcaaattgatcgcaatgtgtacgccgatctctacacgcatgaggcccacaaagactacagacccttctatgccaaggggcgcgttcggcctgggatgcagacgcgcccctttggctatgtggaggatgatggtcagccgaacgaaggacaacggacgcatcgacgaaagagaaattttgtggagcaagatcccacacagcccggacactctgggtggttctgatgttatgatttattgtgatttgataatattttttaaatttttttttgtaatatttcctttaatttgatatttattgtttatgtttaaatttgtaaaaaataatgtgaggaataaa

SEQ ID NO: 53335 - DNA, 2275 bp, Heterodera glycines
atgcttttcaaggctggccgccaaattggcgagtgctttgtcattgagcgctcaacagccatgcggaacgtgccacgcaacacacgtggagagatttgtgaactgcgcttcctggcgctggaggaagcgcagcagtccgatcttttgatggaggccacatccagcaactcctcgaccgtgtgctggctggtcacccgcgcccatggatggtcggactacagctccacccgccgggatttgatcgtccatatgtcatcgggcttcgtccgccggagcaaaacaacgcagcggcattggcggcagctatcgagcggttcaatgagcagtcggcagccggcattgatctccttgccggaacaacagtcatcaaagtcttggcggtctggccccttgactccattcgtgctgatccccaaaggggaggtgaatgccattcttatttcattaacacattttggttaaaaaaataggagcctgtgaccgtgacgtggagcaccatgtttccagcaacgtgcagtcacttgtccggattcacaaccccaacgaccggctctgccttgcgcttgccgttctcttggggagcatgaccgtgagacacgaatggctggcggtggcggcaaagcggcattcaacctgttcgccagtcgtcaagaccaacacggtccggcagcagcgcagatgctgactcgtgccggcattgctgcgaacagggacatgtacacgctggacgatgtacaacgtctccagcagtggctcaacaatcaacatggtgtaggccaaattcgcctggcggtgtttgaaaaggagcaggaataccgcattgtattcaaaggagatgggtgagtttttttgtttcttttcttgttttgggtaaattagttaattgaagattggcggcgaaattcaacctttgccttgtgttggagcgtggacacttcaactatattggccgtgttgagcagctgtttgatgtgcccaactactgcatcgactgcgagcggagggccgacgcgcgctaccacgcgttcggatgcaaagttgtatgccgcctttgtttgcggtatggacctggttatccatgccaaactgaacaggtagattaaggttaaaaaaaactacaaaaacaatagcaaaaaacccaattaagctaccgaatggtggaagtagtgctcgaaaatgcgctgattgtctgttcatcttcccaaatggtgggtgctacgactaccatctcagcaaccacgctccagctccgatggacggtcgtggtcagcgacaacgtcggcccatctgtcaatggcgccgggtgtgtcgtgcgtgtggacgtatcgcctacgtggccacacatcagtgcccacatgaccagccagccgacgatggaatctgtcgacgctgcaatgggccccacaccgtcgatgagccttgctacatccagcccattgacgacggctcagtccgacaacgtgcatcgattgctgttgacaacgacgattttgacgacgacgaggacgatgaagaattgccgcttcgtctgtgcttctttgacgctgagacgtcacaggatatgccattacagctgaacaaccgcactgtccagaagcacgtgccgctgctcatcgtcgccgaagtcatctgcgaacgttgtctgcaggctggcatcagcgtgaacgatggccttggaagacgggctcctggctgcgtctgcatgacaggaatggtgagaggtcaactgtttcgccagtggtcttcgccaccctttgccaatgcaccgggagacaacagcgcttcgccagttggagcaccagcgttcaaccagcgccgcttcttcttccattcgtttgacaacgacggcaacgacccagtggaccaatttttggattttttgctgcagcatggcccaaagaaggcacacacggtgtgcatcgcccacaacggtggaaagtacgatttccatctcgtacttgaagcactacaccgccgaaaccgtccacccaagcatctgtgcaccaccggattgaagatctactcgatgcgtctgtccgggcgtaaccaaagacgaatcacctttaaggattccatcaactactttttttgtgccttggacgcgttggtgaagagcttccaagtgccggaccatctggcgacgttgaagcccttttttccgtatctctacatacgacgacaacatctgtcgcagcgcctcaacggtctaccggctcaagagttctacgcaccggacacgatgaaggcagagaaacgggcgcaatttctccgttga

SEQ ID NO: 53336 - DNA, 102 bp, Heterodera glycines
ttgctctcctccgccgtcctccgacttatttatttgttattttaatttgtcttcaataaattatttatttgttcgtccattcgacatttcggggactgaaca

SEQ ID NO: 53337 - DNA, 678 bp, Heterodera glycines
atgcgcattcactgcttggaaaacgtggacaaggggctgcagtttctgcgcgaccagcacgtccatttggagaatttgggctcgcaggacatcgtcgacggggcgccgcggctaacactcggattaatttggacggtcattttgcgatttcaggtccacacccaccctcacaattggatcttatttgatcctatgctttcccttgccttttgggccaaatcccttccaaaaagtgccattgccatgcccccgctgtccgtttcagatccaagacatcactttcgaggacgtggacaaccaggagacgcggtcggccaaggaggcgttgctgctgtggtgccaaatgaagacggccggctaccgcaacgtgaacgtgcgcaacttcacttcgtcatggcgcgacgggctcgcgtttaacgcactcattcacaagcacagagccgacctaattgagtacgaagggctgcaaaagtcgaacgcactgcacaatttgaacaacgcattcgacgtggcggagaagcaattgcaattggccaaactattggaccccgagggtaaaaaggggaataaatggaaaatgaatgatggcatggcacttttgaagatgtaaatgttgaacagccggacgaaaagtccatcataacgtacgtggtcacttactaccactacttcaacaag

SEQ ID NO: 53338 - DNA, 1017 bp, Heterodera glycines
atggcgctcaacatgcaagacaagaagggactcctccaccaaattcttggcgaagcagacatcacggtgactacgagcggcatcacgatcagcggtccacgtctctcctccccccgttttattccctttgatgaggccggccgctgccgctcatgtcgtggcaccgaggtggaactggacacgatggtcaccaaggagggcatcaccatttggtgtacacgtatcgaccgggtgcaatttgtccctttcgacatcatttacgacttgcccggtcactgcttcttccgggtgaagaacaaggcgcgggtgttcaacattccctacggggacctgcctgccatcacattcccaaaccatcaagaacaacagcagcagctgcaacagcaacaacaacagaacgatttgcgccaaaaagctaacacggcgatggatttggtggagagtggactgctagctgattcgttacgtgaagaaggcgtgcagagggctgagctaaagcggaaggcaaaagttgcactcgatctgattgatgccggtttgaccggtgatgcactgcatgaggagggacagcgttggaagaaggccaaaactgcactcagcgttctcggaaacatgttgttggccgattcacttccggaaaagaagactgcggagctcccgcttccaccagccgaaaaaattgaaacactgccacttccaccactcgaaaaaatgaaaacgcccccacttccacctgccgacaaaatgccttcgccgctcccaccatcatcaaaagtggaaagtgatgagcaacaattctacgacagcatttctgcggctaccactatgatggacagcgcctcaatgcagcagcaggcaccgctgaagagaaaacagctgactccaaaaggcaaaagcaacaacggtatgaagaaggcagctgagccgcagcatcatcacaacgtgggggacatggacaagactcttgacgaattttttgagagcgttagcgcagcgacgaccaatttgtctatataa

SEQ ID NO: 53339 - DNA, 795 bp, Heterodera glycines
atgccggaatggttcaatgccctggggacggacgagcagcaaatgaagcagcgcattgatacgctaattgagatggaaaggcaaatgcacgaagatgaccgtaagcaaagcgagaagcttaatttggggatttgaatttaattctaatggtaaaattgatatttattatgcaaaagtgccacttttcagaaagcattgaggagaacaacattgacaccattgagctgagtttgggcgaactccgttcggactttcccaacggattcgccgtcgattggcaaaaactgttcaatgccattgtgcacgatcgcaacttcaccgcctcctccaccgttctgttggtagcgcaaaaaatgaacggacgcactgagaggcaaacgccactcgacgtaatggcggaatatatgcgcaattttgggcccaaaaacgacaccctcaacaagtgggagcagtatgtagagtggctgctgatactgcaacatgccgcactgtcggacaacaaaatgtacacatgggggaagaccgattggaattatttttgtggttatttactttcagatttcatcgtattttccgccggcacccgcggtcagccaatgccatgatgagtgctttgctcgtcaacaaatactttttcgagaggcacgacgacgagcagtatatccgggacggcacatcggaggaacgtcgcgtggcacaaatccggcacaattgcctggaacagctgaagcatttcttcccagaatatgttgaccgaatgtttgcacttggtatgtaaaaatttagaatttaaaa

SEQ ID NO: 53340 - DNA, 683 bp, Heterodera glycines
ctgcaacaggcgacaacttcctttttggcattggggcgtcaaagacgacggcgccaatgacagcgacgacgacggcactgacgacgagcgcgggcagtcctttcgcctttggctcgtccgcctcgaccaccgcttcccccgtcgccaccacaaccaccgcctcggccactctcccgcttctctttggcactcagcagaaaacgacggcacccgccgctgtgccttcctccgtccccaccttctctttcggcaccgccaaattcccttcttttggctcctccgccgccggtggcactctcttcggttcgaccaccgccaacaccctcacgacaagtaataaattcatttagtggatgtataaatatttgaattcaattttcatttggtttagtttcttctgctgatgtttctaaggctggcaaagtgacagacaaaggcggcgattcagacgacgaagcggccgaagaatttgttccgacgggcacttttaagccgattgttccgttgccctcaaaagtcgatgtgaaaagcggcgaagaaaatgaggaggtgcttttgctttttgcttgttccatcttttttatttatttgttttttaggttcttttcagtgctcgttgtaaattgtttcgctacgacccaatggacaaaaagaacaaagaacggggaattggggagcttaaa

SEQ ID NO: 53341 - DNA, 333 bp, Heterodera glycines
cttgtcgtgagggtgttggcggtggtcgaaccgaagagagtgccaccggcggcggaggagccaaaagaagggaatttggcggtgccgaaagagaaggtggggacggaggaaggcacagcggcgggtgccgtcgttttctgctgagtgccaaagagaagcgggagagtggccgaggcggtggttgtggtggcgacgggggaagcggtggtcgaggcggacgagccaaaggcgaaaggactgcccgcgctcgtcgtcagtgccgtcgtcgtcgctgtcattggcgccgtcgtctttgacgccccaatgccaaaaaggaagttgtcgcctgttgca

SEQ ID NO: 53342 - DNA, 1208 bp, Heterodera glycines
  unsure (1)..(1208): unsure at all n locations
atgtacgaaatgcggattcgaaggcagaagaagcgcaacccaaacattgttttccgggattcattcaaccttatgccaatgtctcttgcctcgctggttccatcatttggcttggatgtggaggacaaaccattctttccgcacatggccaaccacccagacaactatggaaagcagatccatccaacaccagacgactatttggtcaatggtatgatgccagataaacgacagaaattcgacgactggtatgaacaacaccgtcaggaaccattcttcctcgacgaggcgttggcaagctactgcaccaacgacgtggagatactgatggcggcgctggtggcttttcgtcatgagtttttggatgtgacgaaacgaaatgaaggaatcgttgcggagcgtgcggccttctatgagcaccacgacggcattgatgtgttgcgggagtgcatgacgatcgccggcgcatgtatgaagcattttcgcaccaaccatctgccgaagaagcacttggctatcgtcccggaacgcggctacgacaacgcccaaaaccagtcgttgctggcacttcgcttctttcattggtatgcggaggagcatggtgttgtggtgcagacggcacattcggctggcggagagaagaaactcgggcagtattccgtggatggctgggtggaagcggaaagaagggtaattgaagtgaatgggtgcgtgtggcacggctgcaatgaatgcttccccaatgacaacatgatgatgccgaatggaaaaacggctggagaggtgcgagagcgggatgagaagcggctggaattcatcgaaagtcaagtgtcacgagtggacgtatactgggaatgccaaattaaaagaatgctgaaccgtgacccggacatgcgcgaaagttttggtgattatgtggatgatggcccgttggacattcgcgaggcgttcatgggtggaagaacaggaccactgaagctgtaccacaaggcgggagagggcgagaaaatctcgtactatgactttacgtccctctacccgtacgtaaagtgagttttgtttcgatcattattcacaatttataattttttatttccagtttctccaccacttacccaattgaacacccaaaagtgctcatcttgaatgaaaatgtggagtggacaactgcacgcgacaacccctacaaagtgtcgttgctcaanggt

SEQ ID NO: 53343 - DNA, 574 bp, Heterodera glycines
atgaccgtcacatccaacaccgaattccgactcatcgaatgtgtgcgaatccttgaggaagttgctcgtgaatttggctgtattacgccactaccaaaccttgggtatgtttctttcgttttacaacactaactccagcatacagtagccatcgtgactatcggtaagcggatgtatgatgattcgcacgctgacatcgttgaatcgacactacattttcgatgctgaagactgtattgaggttaatggaaaatatgtttcatattttattgctattttaggtgaagggtttcttaaggcaagaggacggcacgagccaaaaagtggtcaacgaatattatgaaaaatatgatggactaaatggatttgctgaatttattcggaattgggcctttacctttttctgtttacatgcctttgatgatgatgacgacacatctgatgaagactaattccgttaataattattgtatgctcttggttacaaaccgataaacaaatccatcagggttatttgaacgattcaaaatttgcataatattttcaaaacccaatccgacggacataaaataaa

SEQ ID NO: 53344 - DNA, 420 bp, Heterodera glycines
atgaatattttctgtttctgtcttttacaatgctgtttagccaaacgaagtatgaatttcaacaatttgactacgccgattgatgaacaaacaatgattgaaaccctgtctttggatgaaccatcaaacgagctacgatctgttgaggttaacttttattaatattatcaaatagaaataatattttagaaaatggacgaagaactgaacaaaaaggaggagccgtttactctcgccgaatgttgcacagcctttgacctggtcgcgttcatgttcgactgcaaaatcccggtgccgtacgagaggagcacaagcgttacgtattcgagcaccaggacaagccgcgtctcatctacatcaccgaagatggagaccagattgagttcaagggaattatcaaacagtttggatacgtcctaa

SEQ ID NO: 53345 - DNA, 69 bp, Heterodera glycines
atgactgctaggaaaggcgacatgaagtttgggcaccagaaattttggcaccgggaagtttgggcaccg

SEQ ID NO: 53346 - DNA, 840 bp, Heterodera glycines
atgccaaaaattgtccgaattgtgagttacaaacatcaaaagggacaagtaccaaaatttgtgtgatttttatttttcttaaaaaggctttgagcacaatttattaatgcgtccattaattaattaattatttacatatttttgttcaattaaattcactgccaacaaaaaatgaaaaagcttctctgggtcatttattcatttttgtgaaaatcacaagcaattttttcttgtccaaaaataaaattctgtacaaaatgaagacggaatgattttgtggttggagcgccatcaattttatttgcgcagatgccactgccatatttttttggccatttctcatcaattggccaacgatgtacccatcaaatgagctgcttgtccaccaaaatgcttaaataccgagacaaaaattggtcattttgtcattaaaacagttcgcccccaaaatgtctttgttttgtccattaaaatttgtccttttccttttaattgcaattgatcaattagtggccttttcttttgtgcagaggaaatgggtaattgttttttttgtgccaatataaaatggcattaaataattttaattttttaaaaaaggattttttattgccacgcgatttgatggagaaaatatttgcgctcgaatccgattcggaattggacaaaatggaggtggaaaggctcactgatcagctgctgaaggaggtgccccgatcggttctcgaccgattggaattgccgagattctactcccgactgccattcagcagtgaaacaattaattgaaattttataaaatatgatttataattcaattttaaatatttctatattaaa

SEQ ID NO: 53347 - DNA, 633 bp, Heterodera glycines
atggacgtgccaagggacctggcggatgtttgtgccgggacgtgcggacgtgttttcggtaaaataccgttaaaatcattgcattgcataaaggttggaaaagaatttaaaaattactcactaattatatacaaaaaaaatgaaaaataaaagagagagtcctttgccatgatcccctgctgctggtcgtaatctgttgtcaaatcagtgataatcaccaaaattagtattgaaataatgactgaaataatcagagaaaaattaattgttttatgtattcaaatatttaacaaattgggttggtcagaaatcattaccctaattagttagtgcagagcaaccaatagtcaggcccggaatttaatggacgtctctaatttcatgatttttcgtgtcttatttatacagctccagtggcaccaccaatgcaacgccccgcagacagaagacccgactcccgtcaacgaaaatgggccagaaccgaaggatgccacagtgaagacgtttcaaaatcaacgcaggttgacaagacaaacctccaaaacgaaatcccaaattcactccccaaaattgacaattttatatcctccaactgcaatcttttcaaaaacaattcacccattgattcaataa

SEQ ID NO: 53348 - DNA, 488 bp, Heterodera glycines
atgattgatcaaatgtggcaaaaagtgtacgaattaggcgatgattgttcaatgtgccaaaaaatgcgcaaaaaatgggaacctcatcaaaatgaaacttttttcgttgtgaatgtatgatggctttctgctgctgatgctacaaataataatattgtttatttcaattaaaatttttgtttatttattttcaacttatttattttatgtaaaatattgcacacaataatcatttataaaaaaaaaagtaaagaagtctaaatattttatttagtttttttggtatcttttcaaaagaatttaatttttttatgctaattttaaataaattcgctttattttgcattaatataattttttagacgggaactttaataagtttggctaagaaaatgctcaaattggttattttttatttatttattttcaaaaataaaataaccaagctgcctcttacacttttgatggaaatcaggtcaaatgggtaa

SEQ ID NO: 53349 - DNA, 273 bp, Heterodera glycines
atgttggcactttgccgcttccttttcccattggatttgggttttttatttttgatcatttttccaattgttaacgctgagcagcagcagcagaatctgtggagtggcttttaccaaaattttgcgctcgaattgccccaagaggagcgatcggacgacactttggcactgtttgccgagatggacgaggtcgacacggtgttgaccgatggaattggcgcagcaattatggcaccgccgagcccagcacacccggcattccaggcaatttga

SEQ ID NO: 53350 - DNA, 353 bp, Heterodera glycines
atggaagagggcaactatgagcaaaaagtaaaataaaacccaaacatttttatcgactttttttcaaataaaaaaataattttattttaaatttagagtttaaaaatttaaactttaatttgtaatagaaattgtcgcctgcccaattctcgcatcatgcccccaaaaaaagtaaaataaaatcctgagattttcaaaaaaaataatttttttttgtttgttttttcagacattggctcaacttttgaagcctctgacaattgtcacgcgcagtgcacaacgaggtgcagcggaggaggacgcggtgccgacaaagagacaaatgggcatacgaagagggccacttgcaaatc

SEQ ID NO: 53351 - DNA, 494 bp, Heterodera glycines
atgattaaaaggttcccgaaactaacgagcaaactcacttttaccaatttagtaaaattggacgaaaaagaagtttactcacccgttaaaaaaatttcggcgccacaaaaaacaaagggaaattgccaatgcggacgcactgaaaaggcgacgatggcgaaattaacgctgacaaatttggaggataaaaagcctattgagcttaggtttaaagaagacgacgtgcttggtgaagggacttattcaaaagtgagaaaaattaaaattgaaatttttaatttttaattgcttttgtccgcttttgcgcttcaaaggtattccatgtcgaattgaagagcattggcaccacaatgtttaacaaatgcgtggcgttgaaaatgactcggaaagacttggaaagcagcgattggcaaaagcacaccaaagagtggaaaattcagaaggcatttgaccaactgaaggagcaaaaacacgtcatcaaactattcgcttag

SEQ ID NO: 53352 - DNA, 1253 bp, Heterodera glycines
atgaacagacggtaagcaatttaaaaaaaattaaaattttaaattcccaattctttttttcatgtttcagttggatttgtaacgatgtttggatggacattctcccatcttttgaccgtccccaactcggcatcaaaatggcattgctttccgaccaggggtggagcgcgcacagaaaaatctcgcgtccgcgcaccgcggatcgcgcatcaaattgccgcggatcgcgcaccgcggatcgcgcatttataaaaacataattcaaaaatttcaataatcaaaatggtaaaggaagatcattaagaataaatcctgcgctgctgaaaaggcgttccgactcaacacttcccggtggcacacttgagaattgtcagatttctcaattttttccttctttttacgtaaagcttcatccctttgcttgtaatgttcaggatgcttagattttaaatggcgttccaaatcagatgttcgttttctcggccctctgtcaactttataattgcatgccttgcatttggcataagaagaattgtcaattttgtcaaaataaaaccaatagagtctttttcatgagtcatttggttttaaattacagaagaaaattgtctagaaaagttaatgaataatatttcttatttttggaggaattagtgagaatccaatttctaaatctcttgctttttatgtacataaacaaaaatttacttttaaataaatttagttataaaacaatcgctttaaaaaaatttatttgtaaaaattttagtcaaaaattaccgcggagtcccaaattccgcgcatcgcgcaaaaaaaaaaaaaccgcgaccgcggatcgcacatcgcggcgcgcccccatccctgtttccgaccgcttcgatgcatttcagattaagtcattttaaacttttttgtatattaaagcatttgtatgcttcttcagctacattgactattccgtcattgaatttgttcgttccaacaagcaaatttgggacagaatgggcaccaatttggagttgtccattgataatgaccaactgatttgggatgttttttgccgtgaaatttggccgaattttgcgacaaacatccgccatttgagctttactaatgacaatcatttggacaatttgcgcaatggcatttcactgacaattctcaccgatctcaatcatctgaattcaatcaattccaattttctgttgcctgatgcaattgctgatgatgggccaaatgcttctgccggccaa

SEQ ID NO: 53353 - DNA, 566 bp, Heterodera glycines
atgaaacgaatcctattattctctgttattgtattgttaatcgttcaaattgaaattggagcagaaaagaaaaaaacggaacaaaaaacatttgacgaaatatttggagaaaaatgggaagaaaaagaaaatgaacagaaaatgaaagaaattattgaaaaatattatcaaattaaagagaaaatcaagcaaagggggagaaaatattcagcaaaagaatggagcaaaattgaatggaaaattggaaaaaaattggggacaaatcgccaatacatttataaatggatcaaagaattaaatctccaaaaaaacaaatgttataaatcaaaaacggatgaccaaaaaattgaaattgtgcaaaaatttattgcaatgaaaaacgagtacaaacaaaaaggaagaaaatattcggcaaaagaatggaagaaaaattatgccgaaatttgtaagaaaattggagtatgcaaaagagtaattgaaaaatggaagaaacaattcggattgagtagacaatgattaacggagaaagaaaaaatggaaaaaatgaaaatttatttgcaaataaa

SEQ ID NO: 53354 - DNA, 845 bp, Heterodera glycines
atggggtataaaagagcatatacggtatctcgaattcgcaaaacctagctaatttaaattcgaatttacaatgattttagaaaagagtaatttagattttcgactttttttcgagttcgggtctgtgattcgaaattggacaaaatcaatgtcagattcatcttcaccgaacccgaaaacccttggaaacatattttcagtgactttttaaaaaagtttgttgttattagggtttttaggtaatttatgcaatttcttcattctcatatattttattacaaagatggtttgcatcccatgaaatgcgatttgttttgtttaaataattttaacagtttttaatttaattattcttttcttattatgctttcaactttttttttatttaaatttttaaaatttatttaatttatgagtttattaaaatgttatttaatgaaagttcataattttctgaatataaatattgtaattttcttccagagtaatgtaacggtcgtagaaactgtaatcgcaaatgcggctctttcatttcatttttattattttttgtataaatatttaaattcattacggcggtcagcacatttagccggattaataggggaccgctatttaataattggtatagttattatgtttaagaatctgcccgatgaatcgataatttaattaattaaattagattattgtgtttttaattaaatatttattttgtttaaatttatactcttattgttaaattctttgtgtacataggcacaaaaacctgcagcgatacttattgatttatttatatcaatttttgtgtcagctttatatattacatttttgaaagccatgta

SEQ ID NO: 53355 - DNA, 904 bp, Heterodera glycines
gctttatcttctgaaggtcgtatcagcaagctttatgtggaatgtttcaacgaacgcgagaagtgtttaacggtcatcggagggggcaaaatggctactgctttagtgcatggattagtttccgctggtagggatttcgtttaaacaagacttaacagacccttaaacacccgaaatatttttttgatgaataaaagtaaataagctgcttatattgtacttttaggttttatcgacaagtccgaagtgaatatctgctcaagatccaaagaaacggcctttcgttggacggtttttaaagactgcgactgactgggaacggtttttaatttcagacacaaggttaccaaaatgcatatacaaatgatgaattttacagcaaagtgaaaaagccacgtggtaacaactttttgcttatttttgaagacttggtcaatttttaggaattgtgattgtcgcagtaaaaccacagatctttcccgggtttctcgacgaactgcgtaaaaatggttggcttaactttgttgggcctgaagtgctttgtgtgtccataatggctgggattgcacttgacacctttaaacagcaggcacccacagttgttggcttacgtataaaccttttttagttgaaattggttggtttcaatggccatgccgcccgttttatgccaaatgtgaattgtctcgtttctgctggtatcgttttggtctgtgccgatgactgtgttccgacggagatggtttagcagaaattgctctagttatcaaattcatgcaatttgtaggtgactctactgctggaaatgggttcaaaattagggtattcagttcgaatcgacgagtcgctttttgacgccgcgtccgcccttgcgagctgtgcacctgcatatgtacggatgtaa

SEQ ID NO: 53356 - DNA, 921 bp, Heterodera glycines
atgccaaaacaaaacgaaatcgttttaaaatattcctttctggacttgacttggtttcttgatatcgaagctgttttctacgctatttctaaaacggttataccaaaccccagatttttgaatccggttttcagaaaaaatgccttgtggtgaaaacaatatttcacatttcactccataactttgtgagttcggcacggatcgagaccgggataagaccattggaaagagcagctcgagctctacaagaaggtatggaaagaaaaaatagttatttctgggactttttcagaaatcagaattaattctccaatgtggcccaaattttaggcccccagccacagccccttgcttctcccagttttaagtcttggatttgtcaaataaattcaagacttcaaattaataatcaaaaattctcttaaaatttttttgaacccaattcaaaaaaggaaaaaaatttgcagtcaaaaaattattcgaatttctccaattttgtttccataatttccgaaagttattcggtatcataatgccaaaacaaaacgaaatcgttttaaaatattcctttctggacttgacttggtttcttgatatcgaagctgttttctacgctatttctaaaacggttataccaaaccccagatttttgaatccggttttcagaaaaaatgccttgtggtgaaaacaatatttcacatttcactccataactttgtgagttcggcacggatcgagaccgggataagaccattggaaagagcagctcgagctctacaagaaggtatggaaagaaaaaatagttatttctgggactttttcagaaatcaaaattaattcttcaatgtggcccaaattttaggcccccagccacagccccttgcttcccccaggttttaagttttggatttgtcaaataaa

SEQ ID NO: 53357 - DNA, 976 bp, Heterodera glycines
atgatggaagtcagccaaatccagctgaaaatgctgcgaccccttttgattgccatttacgtatgtattttcatccgtttcccattgtttaggcatttgtccgtgccaccgccacttcttccgcctgcttcaaaaggccatttttggcaaccatgtctgttttaacaaatatgaatataaataagctttttagtctatattttgggctttttaagtccatatttggcgttttttagtccatataatttataaccctatttataagttataaaaattaatgtcaaaataagttggtggacgagcacaaccatcggatcatccctcgtcgtcatcacccaaacattcgtcttcttctcattcttcttctgaggatgaagcaaagatggcttcatcatcacttcctcctcatcatcatccccattcatcctccgactcggaaaaggaaggaaaaaacccaaaaaatgatgatgaatttgaagtggtcgtggaatatgtgccgaataaacattgaaacaaatacacaattccggtgaaacggacggacactttggcaacattgaaggacaaaatccgggagaagtacaccgaggattacaatcagtacggatttggcacaattgaactggtcaaagagttcaaaacggatgaacgtgagccatttgtaatgagagatgatgttgagctttggcacgaggatttggacgagtacaaaaccatggagcaatgtggcattagaaaagggtcaacggtttccgtgttttatgctcgtcgactggacaaagaagaatatgatcaaggattttacatccgtccttggccgacaccgaaaaagatttgcttttaatgcttttcctattgcatagtttttcttcaatagcactgaaaattccgaaaaatgcattctttaggttttcaaaaaaggcaatgacgaaaaaaactcgaaaaactaaataatttcttggtataaattgtgaaa

SEQ ID NO: 53358 - DNA, 65 bp, Heterodera glycines
atgaaactcgtaggcctcgactcatactgtttgttccgaaaaacgagcaaagaaagtttgaaatt

SEQ ID NO: 53359 - DNA, 1638 bp, Heterodera glycines
atgtcatcctcggctgctgccaatgcacaaatgagccatgccgccgccgccaacaataaccaccatcaattcgccccacacgctcccccgccggtgccggtgccaccacccactaatttgttggcaaatcctggcgcaccaccaccgccggcaccaccaatacaacaacagcagcagcagaacacgacaacaacggcacaagtgggagttttttttgaagaagaagaataaatgtttaattggattttgggcttacattttttaaatgcaaaaaaaacgatggggatgagtaattaagttttggggtcccaataacttttttttctacaaatcgcatcccaaaaaggcggtgaagctttggcgactaaacaaataccaaaatgaagcataaaaaagtgccgaaaatataggacaaaacggcatttcatccctcaatctgatccatccctcggcgcatgtctgtttccttaattctctttttaatcgcaggttcttccaccgtccgagttcaattcgttgtccaccgctcatcaacattcgcttgtcgccccacctgttgggcctccaaatttggcacttccaccacccgtcgagatggcacaccaccaacaaatggcaccgccactgaccgcggcactcggcttttccgccgtcacatcatcgtccatcatcggcggcgtcagtaacgggcaccaaacaactttcaaagaaaattttaaaaaaaatttgagaaaattggaaataaaatttaattagaattacatttttttttcaaaaaaaaaatcagaatgatgaagttccctcaactgaaaaattttaattgaaattataattttttttttgtaccaaatgccattgtacgaactgccattgaccctgtggttggacacaaaaaattaaaatttcgcaaggacataaactaaatttccaatgagtttctaggacaaacaagtggatgacagcagcgatggcaaagctggacaacaacaacatccacaatcggagggcgaggacgacgagcaacacaatttcaggcattgtgccgaaacctactcggatgaggagacagcgtcagcaaataatggtgagaaggcgtcagcgtttaatttaatgaaatttttttttgttttaatggaaaaattttttttttcttttaagaagatttttttattcattttattgcaatccctctccagaaataaataatttcggtcggcaaaaattaaaaaatttttccaaattcagtaaatttttttcttttaaaagttgccgagtattttagggttttttgttacgtaattttttgggatatgataactttgttatcactttttaaactatgtctgaaaaatgtaaactggtacaatttattcaattttttttttgtaaaaaatttttgttgctcaatcgcctttattcgaaaattttcttcttttttagtattccattattttattgattgctttcacaatttcagtttggtgggcaacgacgtttggatggacattttccccgtttttaaccatgctcaactggcctcaaatcggcgcccttttcaatgcgctggtgggcaaacattttgatggcaaaagcgaataggcgcccaaaaacattctcggtttcaaaaaccgctgcgaa

SEQ ID NO: 53360 - DNA, 2073 bp, Heterodera glycines
atggcacttctttcgccatgtttcgaactttggtggacaaacatttcgatggtaaaaagtgattgttttttatggtttttgttgttttttaatgattttgtgcaaaaaaggggcctccaatttcaaacactttagcctaaaagcaaaattcggtttttttgtaaatgtgaactattttagtgtttttgctttttttttgtaattttatattcttaagattttcagcaaccgccaaaatgtttggatggacattttcccactgttgaccgtcctcaactcggtttaaaattggcactgctttcgcccgtttcgatgttttagtggacaaatattttgatggcaaaaaaagtgattttttagggtttttaattaaggattttgtgcgaaaaggggcctccaatttcaaacgaattttgcttaaaagcaaaattcggttttttttgttgtaaaagtgaacctttttttttagggtttttgcttatttgctgattttttatgttagaaaatcacatacatttttaccaactccagctagacagatttatttacctttttcatgtaaaaatagtaactttttttagggttttcgttaatcatatttttgtattttataaaatatttcgttactttttcagcacataagcaacaacgtttggatggaaattttccttttttttgaccatgctcaactcggcctcaaattggcactgctttcgcccgtttcgattagctggtggacaaatattttgatgaaaaagcaaaatgactgtgggccacaaatcgaaaggactaacttaaatgtggtaagtatttagttttctcggttctatggcccgaaaaataaaaaaaattcaaaattcgtaattttttttgatttttttttgtgtcagtttttttagtgtcttattgttacgtatttttggatttaatgatttttaagctgggccttacatttatatttttccattatagtcataaatttctttgtttggcaattacatggcataaaaaatttttttggaaattttgtatgtttttgcatttttaatagaaaaatttttgtttcgtgtaaaattgctcagagtttcggtcaacaaatttttgtccaaccctattgcttccctttccgctaaattattaactttcataatttcagttggtgttcagcgatgtttggatgggcagtttcccactttttgaccgtcctcaactcggcctcaaattggcactgatttcgcaccgtttcgatgttttagtggacaaacatttcgatggacaaacgcgaattttttcaaatttcggtaagtcttttgtttttgctttttttgtaagtgattggttttttttgtttacttaattgaagtcgtaagtttcatttttttcaaaaaattgaaccttatgaatttaaaattggtctctaaaatcgcagaatttttaagtttctgtggcaaaatcataaattatttaagaaaaaaatcaattacaattagcagaaaccttgcttgattttaaattatcacgtaattatagaaactttaatttttagaaagtttttcattttaaaagataatttagcaattttttagtggaaaacccccataaagccagaaagacaaatatatttttactttttttcatttaaaagtaccaatttttttatgtttttgttaatcattttttaaaatttttttggattttaggagtttttcccttttttggcattgctcaacttggcttaaattagcaatgctttcgctcggtttcgatgcgttggtgaacaaacatttcaatggcaaaagcggattgctgcgcaagttttttttcacgaattaaccggttaaatatttttatgctctaattttttggatgcattcggcaattaaaaaattgaaattttcaaaattgtattttcaaacatgaaaatcaattattgtgaatttttgaaaatctcaacattgttgcggtgatgctgtttcaatcccgcaaactttttgtgagattaaaacaattctctcaggatattgctgtatttggccggttaaaatcaaattcatcgatttgaccatgatttga

SEQ ID NO: 53361 - DNA, 367 bp, Heterodera glycines
atggaggaagacgacgacgaagacttgcaggaagaagctggcacagacgttcagtccggtaaaacaatgactaaaggatgatctgcatccccttaacaataactcctttaagggcccacgcaaaaggctaagaagaaaactttggcccaagtgttggcgccgcctaagaatgcaggcaaagacgtgcagtctggtaagtagttttaattttcttatgtgtccatccccctgcactatggtatgggtacggtgtcaaaccatccacataccaccagctatgtgaatggataccatccacataacagatgaaatgagcatgattgtcttccaactacatgaattggagaaaggcaatatgaaagattaa

SEQ ID NO: 53362 - DNA, 993 bp, Heterodera glycines
atgcccaccggcagcagagtgccgttaattgtggaaagacgaagtgatgagacggaggaggacacgtggacagtttatccgacggcgggcatttgcatcaaattcaaagaggtgacggtggggaagggggggggcaacagcacgccctgcttttgcgggtcgtctcacaaaaccccgggcccgaaaacataatgaatttgacaatacaaaaacgtgctggtttcgggcatccgatattagcgcaactccgagtcttacactatcactgaaaagtcgcatttaggcccatttctccgccgcttcgtccgtctccggcccctccacctccaaattcttcatcaatttggcccattgcactgagctgccgccgccccatcggcacgccgaattggacgaggacaaagtggcacaaatggtggaagaggacccggatgcttttcgcattccaatttgtgtgggcgaattggaccgatcggcggaggaccgcagcggcgaagcggtggcaaaagttggttggacaaacaaacacatgttggacaattggccttgaagccgcacacctaacgcattggtcgaattggcaatggaaaatcgaagcgatggggccgaaattattagtcaatagaacttctgtccatccgcgccattcgtattagccaagggaataattatcacccattacactgattggcattgccaatgcgttcggcgtgtggaaaccgtttgtcacaagttgtggccggtcattcgctttctcacaatcgacggtcgggaaaaataattttttttataaaaataaataaaaatttcttattgttgtcaggtcgatgtgctggtcaattcggagttcttccacaaacgcatcagtcaatccgagtttttccgtcagctgacacttcgaatcgtttgccaggcaattgaggtgaaatggttaaaaatggccaacatttatttttttattcagtgaattagccccgttgatttcagattaaa

SEQ ID NO: 53363 - DNA, 1731 bp, Heterodera glycines
gtgtttggaatgccggagaattgagtcccagagattgaattgctggtgggtttagtttcagtgattggaatgtcattgaatgccggagatttgagtcccagtgtttggaatgccggagaattgagtcccagagattgaattgctggtgggttgagtcccagagattggagaaaagccaagaaaatgatgcgagggcgcgaagcggccgagccagtcgattttatcattcataattctataacacaatcgtactgcctagcgggggatgcgccgaaggcgctgaccccgctagttatcaaaataagaaatcaaaaagaaattgattagattttaaaataacgcgaaaattaaatatggggttatgttcaattgtttcttttaaactttgagtccttattccgcgaggaaaagctttattaacgttgtggcaaaaaaggaaaaaactttgcccttttaattttctgccaatgaccgacccttacgcctatttttatgacaacaaagtcagcaacagaaagggcaccgcttctccctttcaaagcccacagcagccgcaagacatttggtacagcggaggaaacgccgcgacgaccggcgaaacggcgggggccacggaatttgggggaacgcaacagcaaagtgcgaagaggggaaaaggcacaatggaaaaacagagcggaagaatatgccaaaactcgaaactaatggaaattgtaaattaaggctttttcaatgggcaaattgacccgcaaaatgcgccctccccgccaaaccaacaaccgttttacccgaattacttcgctgctcaacagcagcagccgaacttgttcatcccgtcgatgccctcccaagaaggtgtgcttttcacttttatttataaaattaaatttctgtaaaatattttttaatgttcaattaaatttaagcgctcaaaattgtgattcagcgctttttttgttaatatgtacataatgttggctcgtatttctactttaatattgttactctaaatttaagccgtgatcatattcataaaaacaggcattttttgcccttagattgccccccccccctccagtaaatttccctttgttttagccaaaggattcgacagcgaattcgacgacattgccaatgagccgcctctgttggaggaattgggcgtcaatttccagcacatttggctcaaaacgatggctgtgctcaatccgttgggcatcgcatcggccgaagttggaaattttgtgccattttttgcctttgtctctttccctccaaattcattgtttttaatgccctctatttgttgaggtgatcgccgaccaagacttggccggtcccctcgtcttctgtttgctcttcggcgcctctcttttgctgcatggaaaagtgaggggggcgaacgttttggcatccgaacttttgggccctttcaatttggatttaagtttttgtttcttcgtaatcccctccctccccctgttttacaccatttcccccattttgggtccatttcggccacatttacggcatcggtctgtgcggctgtgtcggcatgtacgccctgctcaatctgatggcctcccaacacaactccatctctttcacttgcaccgcttctgtgctcggctactgtctgctgcccatgtctctgctctctctgttgggcgccgttctctcattaaatgtcccgtccgtctcttttttccccctttccccaaaaaatcattt

SEQ ID NO: 53364 - DNA, 862 bp, Heterodera glycines
atggaacgacaacgagttggagatgtacaacaggtggaaggcggagagtgtgcatctgatcacactgctcgaggaggtcaaacgactgcacgcttctcaatgatttgtgggaagtcgggaggatgtacaaaaaattcatgaaatggctatgatcttctattcttaccatgtttttttgatgtaatattgcattgaaattaggtacatattgtacactgtattcaagttaaaattttgtttaattaattttcacacaaatacattgattgtcctgctggcgcgcaagtttcgctaaacaaaatgtcatagaaaacccaaaaaatgaataaattgaaaaattgtcttcacacaaattaagccccttccctgagcttccaaaagaacccaaattcacttccctccctccgttctataaaaaataatttatgggagcgggtgtccaaacttttccgggaacgggaatcccgtaaaactcccgctggtcctacttaaaaccgctaaattgctcaaattagagggcgaattggttttttttctttcttaaacaatattcagtgacacaaaccaaataacaatggccaatttgggaatttctttatcgagcatcgtacaccatcattttgcggctgcgcttcttgtacagaatacggtaaccacactcccggcaacggatcgggtctttgggccggatttcgttttccttgtggcaatctgtgcaatgcgcgggaagcaaatgaataccatcaaacaaatcgggcaaaacccaccgccgcaaatgtacgtgacggtgccaagtgaaacagtgccaatgccgccgcccgtcgatgccctcgtcggcgccgtgccgccaccaaacgactga

SEQ ID NO: 53365 - DNA, 374 bp, Heterodera glycines
ggcttttctttgccattttatggacagtgcagcgacaacccctcaccatcagtcgtttggtggcggcacggcgccgacgagggcatcgacgggcggcggcattggcactgtttcacttggcaccgtcacgtacatttgcggcggtgggttttgcccgatttgtttgatggtattcatttgcttcccgcgcattgcacagattgccacaaggaaaacgaaatccggcccaaagacccgatccgttgccgggagtgtggttaccgtattctgtacaagaagcgcagccgcaaaatgatggtgtacgatgctcgataaagaaattcccaaattggccattgttatttggtttgtgtcactgaatattgtttaagaaa

SEQ ID NO: 53366 - DNA, 1681 bp, Heterodera glycines
aatttcaaaaattcctggcattctaattcaagctgttgtgactgtgttccatcgcggcttccatggcgatttgaatgaaacttttctggtcggtgatgcggtcagtgaggagaacttgaagctgatctcggttggttttccaccattggaccaaatcaaaccgaaaattttattacgcttttttaattaaatttggtttttgggactagaatttgtgttttaaaaattggtaaacaaaatgagtaaatctccaattactagaaccaacaaaattttacaataaatttttttaatcttgaaaaaaaattttcttaactctacgtaatttttttttcctcactaattttcgggggtgggaaaaagcacgctgacgtttattttaaaaaattccgagaaaaaatggcacattttttgaaaatttaaacaattttctcacaaattgcattaaaatttctagaaacatttttccctggtgaaacctaatgacatcgacggatcttcattcacccattttgccatttttttttgaaaatttggccccaaaatgacaaaaaaaaaaaaaaaaaattatttttggcggaaaaggccactaattcgcaattttctccccgtcgtcgaaaatgttaaaataacactgaaaaaaacgcatcttccactcattgtcaggtcacctacgaatgtctgcgacaggccattgacattgtgcggcccggtgtcaaattccgtgacattggcaacgtgattcaaaagcatgcaaacgcaaacgggttctccgtggtcaagcgctattgtggttgtcaaaaaaaaattttttttttttgaaatttaacgattggatgaagagaatgggtccgacattgctgaaaaattttatgaattctactcaaaacgtcgtcggaaaacaaaatacaaattctttaaaaaattttcttaaagaaatttccagaaaaggctaaaaaatttttaatttttttaaaaatactgttcaaaatttcaaaaatttgtccattatctgggatttttcatgttccaactagtgaaacaaagttttttcgttttttagggccatggcatccaccggctgttccacacggcaccgaatgtgccgcactatgccaaaaacaaaaacgtaggcgtgatgcaggccggtaacgcgttcaccattgagccgatgatcaacgccgggtcttacggtcggttaaatttcatggctcggaattcgggacgagtcaaatatctggactcggacgcccccccacactttttcccttttttctagaaatttttaacaaaaaataaattgcattcaatttccttaaagacgatgaccaatggccggacggatggactgcggtgacaaaggatggacgtaagaaaatgaatttttattatatatattttttgcggggttacaatttttccccaaaaattcaaaatgctttcgcgttacttaatttcggataaaaatgtaaaaatttttcgataaatccaaaaaaaaaaaattttccccaggcgcttcggctcaatttgagcacacactgctggtcaccgagacgggctgtgatgtgttgacagaacggtcagtggctggcgctcctcggccatggttccgagaccagcttgaacaattgggttacaacagaaaaaagcggcagcagtagtgccactacgaatgcggatg

SEQ ID NO: 53367 - DNA, 1251 bp, Heterodera glycines
atgagaaggaaaagaaaaagggaattggacaagcagcaaagcacgggcgagggggactcggtgtcgacaagtacagactcagagaagaaggaggacagtgaccaaacgattacgaaatcaccacaaagcgaaacatcagaaaagtcagagatggtggccgaggatggtaacatttatttgtaacagatttagggcagaaaatcagttttaaattcaacgaacaaaagttgaaacacatttacacaccgtccgaaaaaacgagatgtgtaccaataaatagagtgccagagaaaaacattatctttttttctctaattttttgtctccttttggcgtactatctaatatttttattactaggtcgttgcataaaaaagggcgctttttgaaggaaaaaaatttatgaacaaaaaatgaaaaataacaatcataacaaagccgatcaaaaagctacttaacaaagtaattgccctgactgtctacaaccttttgccgccgagatgggagtttaacaatgccctttttgtaaaattctgtgccattctttgaacctaggtaattttcactggatccacgaccttgccatattctttaaagagcctaccctataaggaatttttgagagaaataatttagccataaattaagtctatagggtccagggaataagacgggtgacgtagcatgtcctataagttgttctcctgtcagccatgggccaatgaaatttggtgccaaaattagggacttggccataaccagaaaattgagtgtaactttattaaaagtgtaacaaattctaataaatttaatatcatctgatgcagaataacgagatgaattgaatggcgtcaattttaatgcactcaaacaatttttaaaaaagttatggccaaaaaatcccaaattttcccacttgaaaaatggccaaaaaaggctttagggaagttgtttaaaattttaaaaaaggatttaaaacaaggatttcctacggataaactatgctggaataattttgcatgtgttcaaaaaatataagaaaaatcctttgtccaaagacaagtgttttctccttggccttcgttttcagaaattcgaataatcgcccataacacaattttggaaacttgtgcgattctgtaattttttatattatttaagggcataaaaagcctcaaaaccccgatggaattattttggattttgtttttgactttcggtttggccaatagatttggaaacttggccaaa

SEQ ID NO: 53368 - DNA, 1080 bp, Heterodera glycines
atgacaacatttttgaaacaaattaaatgtataagtaagtatttataaaattaatgaatgggtaattaattgctttaaaaattgaacaatttttgtgaaagtcttatcgattaaactaaaaacgctagttagaaaattttaaatgcaataataaggaaaaatatacccctaagaatcgcagtgggacatttgcggacggacatttgcggacggacatttgcggacggacatttgcggacggacatttgcggacggacatttgcggacggacatttgcggacggacatttgcggacggacatttgcggacggacatttgcggacggacatttgcggacggacatttgcggacggacatttgcggacggacatttgcggacggacatatgcggacggacattggcggacggacatttgcggacggacatttgcgtacggacatttgcggacggacatttgcggacggacatttgcggacggacatttgcggacggacatttgcggacggacatttgtggacggacatttgcggacggacatttgcggatggacatttgcggactgagtatacttactaatgagagtagtagcatgccaaagttcttaagtagggttggtcgggcccgggaccaaaacacggacaactgagtaccgaagtcccggttttgacagttttgaccgggaaattcccgggttttgccggtttttccagccaaaaagtcccggtttacctcaaattcccggttccgaccaaccctatttttaaggagtaaataataggaacaaataattgaggagtggtattactcttatctccgtgatcgcctcggtcggggttccagatcaccaacaattttgcgacaaacgaccccgatcagaccaatgaagattaagaaaaatagcgaccaaaagttgtgggaaaaataaataattcaaaaataaaagaaattaaaaaatcattttcagaaattaaagattcaattaggatttccatggtcgctggttactaaaataacatttattttgacacctaatttgatctgatcataaatttgacatattctatagtggaaagaataaa

SEQ ID NO: 53369 - DNA, 1109 bp, Heterodera glycines
atgccttcagaagtgggaatttcgaagcatctcgatttgttacgcaaagagcacgttcgattgcaggttcgccatgccgagttacaacggtcctacgacgctttggtagtgcattttcaatcaaacatttttataaaatgcacgaaaaatgtttttcagttatcagcgaactctttggggtgcgccgatggaattcgaagtgctcaaaatgtttccacttcaaattttatccacgcccttctgcacattgtcacccaactttacgacaaggatttgtacaggtcgttcattcttaagtcgcttatggactttgtttttttgtggatttagtgacattaccattcattttgatggtcatcaattgcgtgggcatcgaattgttatcgccgcaaggaccgacttttggggcgacctttcgacagttgaacgtttagagttgacgggtaaatttcaattgggcagcagagattgtctccactgatcttagccttttgaaatttcagaaatccccggcaaagtggcaaaagtgatgatgaaatggatgtacacaaacattttggacgaaagcatcggcgactccgtccttctgccgttgttggaagcggcactcaaataccattttgaggaccttaaaacgcggtaaatggtcgaaattatgaccaattatttattcatttaaattttttttatttcaaatttgatccaactattttaaaactcttttaatttctcttgaagctgtgaagagattctcattgtgcgcatcgatgtggaaaattgtgccaaggtttaccaatttgccgaattgcattcgctggacagaatccgcgacttttgtgccgaagtcgtttccgaccggtggagcgaatttacgcctgaacattttttggatatgccggcccaactgttgtaccgactgttgaagaggtgagtcctaccaacaacaaaaaatgtttgttttttttcctcaaaaatgcggcaataatttttttttttgtctttatttgaaaaaaattttaaggaaaagcggtgccaatttgctcggctctctgatccgactgcagcgcgaagatgtgctttttctgtttctgattgagaacgacgcacgg

SEQ ID NO: 53370 - DNA, 65 bp, Heterodera glycines
atgcttccgtctaatcctgacgacaaaatagatgaggtcgacaagattctttcaaaacttgatgg

SEQ ID NO: 53371 - DNA, 1339 bp, Heterodera glycines
atggactttgttttttcttttggatttagtgacattaccattcattttgatggtcatcctttgcgtgggcatcgaattgttatcgccgcaaggaccgacttttggggcgacctttcgacagttgaacgtttagagttgacgggtaaatttcaattgcgcagcagagattgtctccactgatcttagccttttgaaatttcagaaatccccggcaaagtggtaaaagtgatgatgaaatggatgtacacaaacattttggacgaaagcatcggcgactccgtccttctgccgttgttggaagcggcactcaaataccattttgaggaccttaaaacgcggtaaatggtcgaaattctgaccaattatttattcatttaaattttttttatttcaaatttgatcccactattttaaaactcttttaatttctcttgaagctgtgaagagattctcattgcgcgcatcgatgtggaaaattgtgccaaggtttaccaatttgccgaattgcattcgctggacagaatccgcgacttttgtgccgaagtcgtttccgaccggtggagcgactttacgcctgaacattttttggatatgccggcccaactgttgtaccgactgttgaagaggtgggtcctaccaacaacaaaaaatgtttttttttcctcaaaaatgcggcaataatttttttttgtctttattttgaaaaaaattttaaggaaaagcggtgccaatttgctcggctctctgatccgactgcagcgcgaagatgtgctttttctgtttctgattgagaacgacgcacgggtaaaatgtgggaaaattcaagacaaaatttaaaagcgaaaagccataattttccaagggaaaaggaaattcctcttaaaacaaattaattaatattaattggttttgttgttcagctgaagacaattctgaacgatttcgattgcgacggccaattgcctttgggcatcgcttttgagttgaagcaattgaaaatggccaaatgtttgcttacgcatggggccgatgtgaacaaattggacgaaaggggcaattcccttctttggaaagcgatcgaaaagggtaattacactaattaattaattattgccaactttatcttccaaatttaattttacgaatgccagcatttccagggaacgccgatgtgtgcgattttctgattgaaaatggtgccaatttgaattatgtgcacgaagagagcggagaaacacttttgcacgtgttggccaagagcaaagcgaagtcacaatggacaccaggagaacttaccaattttgatgtgaacgcattgaacagaaacggaaggtggtga

SEQ ID NO: 53372 - DNA, 1235 bp, Heterodera glycines
atgcacgacaacgcgtcacggagtgcacttcaaattgctctcttggaacggcacaatttggaaattgccgaaaaattgcttgccatcgatgggttggatttgctctgtgccgacaaaaagagtcagttgttgttgagttattgcatggattgtttgtgtttgattcaattcgaattgctcttctcatttcagctggtcaaactctgattcacaaaacggttgccttttccgatcaaattgctgcccaatttttggctgccaacggagtgccggttgacgtgccggatgccaaagtaaattttgaggaattactgttagacaatctatggcatcatattgttagtcctcactttcctttaatttttcccaattcaattccacccccaagggttcaactccgttgcatcatttgctgaaagcgttgcccgcctttgatgagacaacggcacatcaccaccatcaacaacagtcgacaattgacccatctcttttgtccatccttcaaattctgctccagtccggtgccaatccgtcctccgtcgacggcgtttccggctgcaccgcgttgcattacgccgtctcaaagcctcgggctgtgctcgacgcgctgttgccccactgtgacagcgccaccatcggcaccaccgaccgggacggccgttctcccctctggtgcgcgttgttggcctccaaattcgacactgccgcccttctgattggggcgggcgcggatatcaacgaaaagtcggcggatggtgtgccgttgttgatcaaagcgatcgcgctaaaacgtgacgatatttcgcgctttctgctggccaacaaagcgattgctgcagttacttctccggtgagtgtgctaatgagtcatcccaattagcatatcggagcgagggagagacaaatctatgcaaattttgtcttaactatcttaaactattttcgctcgtatttttcaggatggctttacccccctcaatctcgccgtccagaatggacttacttcgacggtggaccaactgtgcaaattaggcgcaaatttgaaccatcctaacccattgaatggactcattccgttatggacggcactcgaaaacggagactttggcacggccgaagttttgatagcacatggcgctgtaattgtccattccaatgcacgaaagttcgctgtttgtgctttttctgtaggatacagaaggattgtgcgccaacgacgaacaaacgatggatga

SEQ ID NO: 53373 - DNA, 1598 bp, Heterodera glycines
atgagctgccgcatcgacgcgcaggacgcggacggacgaaccgcggcacacattgcggtgctggagcaggatcagcacactttggaactgctcttggcccaccccgacccatcgccgctgggcgtccgcgaccgttacgggcacacgccgctggcgttggcaatgcgtgccaaacagaacaaaatggcggaagcaatttgcaaacggttgccccatgccgcgctgcaaatgaacggaagcggcgaaaatctgctccattgcgctgtcaaaggcgctgaccttgaatcagttctttttctgctcggcatccatgtgaatttcaattctttttcatggactgtactgtttaacttttctgatcccaaattggtttggtacaatatttccaccccccccccccaagaaatattttataaaaaaataatcacttaaaaatttttcaagaaaaaaaaattagaaaatttttgttacaagaaaatccaacaataaaaaggattttttgatcgttataattcattataaaatttttcgattttttttttacaattagacaaaaattctctgggagggtaaagagctgctcccattggttttgtcgctttcaccacattcatttcacagattgacgtcaacattgcaacccaagaccaggaacggatcacggcactgcacatttgtagtcgcgtgggcgaggaactcattctgcgcaatttggtaagtgttttttacactttaaaatgctcttcattttgacaattttgccatagattttggccggtgccgaaatcaatgcgaggaatgcgagtggccaaactgcgctggccattgccgcgatgcatggccatgacgaaatatgccgcgcactgttagaaaacggcgctgacccaaacattgtcagttccttttgttttcatttttacattttcatttttaggcaaatgatgacggaaacaatggtccgtttttcatccatcccaatttttgccatttaaaatccgtaacattttttgttagctttgcatgccgcagtttcccgtggttcggtgaaagtcattcgtctgcttctctccgagtcgcaagtggacgttttggcggtcaataaacggtgggtcatttgcagaatctgaattgtttttccatgctaatttggttgctacatctgtggagagcaatgcaattttccgtcttcaattgatcactttttcaggcaacaaaacattttgcacctttgtgccattaacattggccatgtttcggcggaagcgtttgtggagattctgagggtacacccaaactatccgctggaggtggccgatttgtacggcaacacaagtaaaactatggcatggcaacagcagcagccagtttctggtcttgccatttcagtgtttcttctcgcttttatcaacggcaattcggaattatgcaaattggcactgaaaaacggtgcgtgtatgggaacaatgaacagccagggacagaccgtgttcaacttctccaccccaacccaacagttgctcatcggactgctcggtacggatggtttgccatttaatggcttattttgtcattgtaaaaataagaattggtagtcataa

SEQ ID NO: 53374 - DNA, 723 bp, Heterodera glycines
atggcattgcatcgtcggacggaacttcggctcttacgtcacgtgagtttttttagatgggggggggattttgaatttaatggctttacggcgtgaaaacccaaaggctttactcgccaaacgatttttacgcgtttaatcagtgaccatccttattttcttaggctacaaacatctgaaagattaaagtttagggaatcttaaatacaagaaaaacacaatgagaatatcaaaagtcagcttttcgagtatattcggcgataattttttgtttattatctttgacacaaattggttacaaaaactttgtagactttaaactttagaaaaataccaagaatgtaggtcttttttatcaagaaaaagattagtgtgtggtcaatggttggacatgtaaactgcaatagaggcaaaccaaaattaaatgacacttttggactttacacgaattttggacaaatggtcggaaagtgtgaatcttttttaagtaggggagaggaaaaaccgaataattccaacaaaaaaagagaaaagacctattcaaaattttataacttttcagacacgagaccaaacacttcatttacttctacttgggccaagtggccattcttttgtttaagagcggctgatccgactttttgagacgaacggaagccgacgatgcaaaaaacttattatggccgtgctgtaagacagttttgtcatttcatcaccaataaa

SEQ ID NO: 53375 - DNA, 461 bp, Heterodera glycines
atgaccggcgacaaaatgaaggccaattatgaagtggcgaagaaagcaaagcgagagcatcagaggcaattcactgccgaagaagagaggcgcgcagcgaaacaaaatttggtcaaagccaagccgaccaaatgccaaagtggtgggttggccagagtcttgaagcccgggttttagtgtgcccgagactgtttcatccggaataaaaaccgagaatttttgaattttaattgctttcatcatttagcgtccaaccaaaaggcgattcagtgctatttggacgaaatgactgagaaagccaacaacagctgggccagggttggaaagcggacggaaatgccgagtgggttgataaaataaaatttgcgaaatatttttattgttttttccaggacatcgtctaatgttggcatgactgatggaggggaaagcgaaggtgagaaaaagggggcattggtaaa

SEQ ID NO: 53376 - DNA, 1436 bp, Heterodera glycines
  unsure (1)..(1436): unsure at all n locations
atgaatcgacggtaaggaaatttttgaaaaattaaaatttttgtctacccaatttttttccttgtttcagttggatttgtggcgacgtttggatggacattctgccatcttttaactatgcccaactcggcctcaaaatggcattgctttccgaccgtttcgatgttttggttgacacgcattttgatggaaaaagcgaattgacaatttggaaagcaatcgcaattcgcaaggacaaaggaccaaaagcgaaactgtctgaatggatcgatggcaaaagggtggaatttccattgccggaccgtccgctgcccaccaaaattcgctttaagagcctttggattaagtaagtaattttagacttttgtatatattaaagcaatttttatatttcttcagttacattgaccattctgtgctcgcatttctccgttccaacaagccaatttgggacagaagaggcaccaaattggaattgtctatatggtcaaacaaaactgaggatgatcagcgaatttgggatgtttttacccgcgaaatttggccactttttgcaacaaacattcggcatttgagctttcctaatggcgatgatttggacaatttgcttcgtttggtttcaccgacaattctcactgatcttgatcaattgaattcaatcgattccggttatctgtcttccagtgcgatcgctgatgatggtggaccaaatgcaatttctgcttggcaggcgttggccaaatggttacacacgccgagcaaagacggacaaccgaagcgattgcgttgcgatgatttttcaaagtccatcaactatttcaaggaggtgaccgaccataatttcattaaactactaattaattgattgccttttgttttgtttagacatttctccatgccaccacttcagtcagctacaaaatttgttttgaagttttactgtggccaattgaaccatttgaattggtgaacgaacggaccaatgagaagctgacactgaaacaggagatcgatgaattcgattggctgttgcaacggtacccaattggggagacggcgccagttaagtggaaaatccgcgaaaatttgggtgccaatttatctatatcaaatttgctctacggcatgccaattattcgggtgccaatttgaacaatatccgatttgaggtgtggggtggaaatagttgcattgggtgagcagcaaaagcaatttttgattgtcgaaaaaacataaataattttaggccattgtcgctgccagcggaagaagaagaagcggatgaaagcattgaaaaataattataatttgagaaatgatcgatctcgccaataggaagctgatttgatgctctcgttttctcanatgcttttgttgatttcttcattcgattanaacatacatttaatatcaattgaaaactactaattaataaa

SEQ ID NO: 53377 - DNA, 793 bp, Heterodera glycines
atcgtaaagttttcaaaattgctgagaaaattgacaatatgaagcaatattataagatgaaaaaacaaaattctgagctcaccgaccacgaaattgccacagaattgggaattccaagaagctcattatacaaatacaattccaaattaatgggcgatgaaaagaaattttgaaaattataaaccagggcaagatttttactgaaaaaaatagtaaagtcactttattcataaaggaattcaattgaaaaaaacataaattttttaatgcttttaaatataatacatacgaatttttataaaatttttcagtaagttttgtccattttttgtagtgatttgtatctatttatgaaaccaaagaaaatcatttaagaaatttaaacaggatttactataggaaaagtgtatttttctttaaaattattgatttaaattttaaaatcattaaaagattaacatgtttttggtaattaattaaaatcatttaatttattttgtaaatcgaatcgacctttctaattaaagcaaaaattgtaatgtccaaatccgataaagcgttaatatgaattttttttttatcaattctgggccaagaattttatttgtcaattgccggcccagaattcttgtttggccataaccgtttctgaattcccaactaaaatattttacatcatttccgagttgaaattcatctccccaattcaccgcgtgctcatttggatttgaaatgtctgataaatacaaatatcacttcttcctcgaaattattaaattatcttataaataaa

SEQ ID NO: 53378 - DNA, 1921 bp, Heterodera glycines
atgcttgaacaagcaaacaaaaatgctttagaagcgcgcaaacaaaataaattatggtttgactctcaaccacgcgtaacagccaacaaatttaaagtcggagatcgcgtaatggtcatttttcccgggctccaccgccggaatccacataaaaaactcatttggtcaaatttcggtccattcttaatacttgaaattggcgaatcttcagctaaagttgtgccaattgataagcaaaaagatgaaccaataaaagtgcccattgaacgattggtcaaagtcccaaaagggataccggacatctcaactttgcctaagggaaaaaacccgttcaaaaatgaactcaaattaatggctctatatgctggcataaattggaaattcaaaaacgcctacaaagagactaaatgttgtaaaaatgaggccccactgcaattggggacaattgcttttgattgtttgggggtggaattgggaaaaccaaaattgatttcagctcgagtgaacgtcgaaaaaggcatcatgattggctttggttggtcatccacttgtgccggagacatcccaggccatgatctgtgcgaaccaatcacccttggcagcctcgatcccgttctcggcctcacgaagcttggatcgatggtggccaagactcctctgcaagcgctcctcggcatcttcctccttcgctcgggcgttgcttcttcgctgacggcagcacagacgttggttgaagtgattgtaaaggctcagccaaaattggagctttgcatgtattttggaaagaggggtgatcagatcagttcgggcaaatacccaacggaggaagaccagcgaaaagccctggagaagtgggctgggtcatgttatgtggccagacaggctttggcagccaccggattcaacccgctggaaatggaggagccagaaggagtcaattcccttcctgaatccgaaaagctgaagtggaaagaagtgtttggccaaagcgcttgggccctcgaatgtgtgcgggcgacggttgtgcacaaagcgggccgctttttggcacaccagcgcgttttgctcggagattcatcagctgccgccctttcacaatatatccccaattcattttgcattggacaggaggggtcaatggcagacatcattcgacaatttcagccgaccattttgtcaagtcgagtaaaagcgatgcttataatcacaggccgtgactcgcttgtcgccggagaaactgccgaatccattgccgaacaattcgaaatggtggtggagctgtgccgtcgcttcagtcatgtcaaaatttattggtgcccgcccccgtatgtccacaacaaatccgctgaatatgatcaattgatcgacaaaatgagggccttaataaataatggacccattatttcaatttgcatcacagaaaaaggccgctctgttttggaaattttccgttttggaggagccagaaggagtcaattcccttcctgaatccgaaaagctgaagtggaaagaagtgtttggccaaagcgcttgggccctcgaatgtgtgcgggcgacggttgtgcacaaagcgggccgctttttggcacaccagcgcgttttgctcggagattcatcagctgccgccctttcacaatatatccccaattcattttgcattggacaggaggggtcaatggcagacatcattcgacaatttcagccgaccattttgtcaagtcgagtaaaagcgatgcttataatcacaggccgtgactcgcttgtcgccggagaaactgccgaatccattgccgaacaattcgaaatggtggtggagctgtgccgtcgcttcagtcatgtcaaaatttattggtgcccgcccccgtatgtccacaacaaatccgctgaatatgatcaattgatcgacaaaatgagggcctta

SEQ ID NO: 53379 - DNA, 1193 bp, Heterodera glycines
atgcgggaggaagcgaacatttcgccggccgatcatttggcactccaatcacttcgatcgtcggcattggcaaggaaaactaacacaaccacaaaactgacacgtgattgccggaaattgttcgccgatttgatgacgggagaagaagacggagaagagaagcagaaaaagtcgaatgagaaaaaggaaaagccgaaaatgaaagaagcggacgaaaagaaaaaggagcaggcgaattgtgagaagaaagagcaaaagagagaggaaaaaggaggggagaatgagcgggagagagggagtggcgcggaactgatggctcgtggtccgatcagagtgccaccggtggtgggccggtaagcgtttattaccatcccccccccccaaccgatcgtccatttcattccgtcactgttctccttcagcggtgctccgtccgccgttttccacccttacgcctcttctgctgctcatcccaatgcgcagtcttctcccaccaacgactttatgtccgcatccgtctccttcaacgccactgcgcttcagtcaacagtttttgatcaaagcagttacaattccatggctgctgctggctatggctacgagtgcgggctgccgagcaattggagttgcgggggagggagtttcgggtgctattcgggcctttcttcgccgagcactacgcctgacacagtgtcggcgatgtctccgggcgatcgtagcgaaaaggtcggtcgagaagtggagaagggtcggcgtaactgatgatcattggttgcagagcgagttgcctgacgacctttctgacttcattttggaatactcgcgccgttattcgcccgaactgtcgcggaagtgttcgcttggctcgcaaggaattgccgggggcagtcccctgtcggactcgtcgaccgacgacgaccgactcagtctgtccagcggcaattcgccgctctgtgccccccaaacgtattccacccacaacctctctttctccaaatttgaccgaatgctttttgagttcgcccgcagcgcctcggggcggaattgcaaataatgaaaattctccgcagttcaacacaaaaggcacagcgaaagcgaaggaaaagccgcgaccggcgaaagaacggctgagagcaatgattcgaagcgaagacatggacaacgcatgggcatggacatgcaaatgcattcag

SEQ ID NO: 53380 - DNA, 840 bp, Heterodera glycines
atgtctggatgtgagacagtgtataatgagatcgtaagcgagtcagtaataacagttgccagagaaggagggcaaatttttaaaattttataactaatattatcgggagaagtgccatttttattcggaagttttttcaggagattttgggtctcgatgatgttaaaatttatagttgatatataagcatacatcaaattctataagattggacgccgtcctggaggtgtgttttttccacttttcatttatttctaaatgaatttcccttaggccggggcttcgccaaactctcaaagtttccgcctccaacgcgacatgccattgcatttcgctgctgcgcatggaatggtcggagtttggcgggggcggacactcaccgaccttctgacatttccagactcaaatcgtcaacattttgtgcgctcactcttcgatttcattgaatgctcagaatggaaatgtaagtatgggggggagggacaatccgtccgaaattacttattttgttttatacttaatttccattgccttgcaaagccttctcatttatcttttccatccccagggccttacgcctttactaaacgcgttcaaaaatcacgcggagcgtagtgaagagtcgcagagccaaataaacaactttggcacaatcgaagctttgctccgtttcggcgccgatgtgtcattagccgactcggccagcggaaagactgtggtgcattacgcggtggaaaagatggatttacaactcattgaggtggtgcattttatccattttataactatacatagaacttgcacaaagaaagtcaaataagaaggcgtaggggagctaaa

SEQ ID NO: 53381 - DNA, 267 bp, Heterodera glycines
atggagaagggtcacaatgtttggataaatgaaatgtaagtaatggttcaagggatattctgaaaaacgagtgggatttccgattttaggggattgtcattgcttagtgccagtgtttgctccgcaagtgatcagtgccaaacacatttgttccctttgggatttttccacgcggtcagtcattccgctcaaattgttcattggtgtctcaccacaaaaatttttctgatcaaccaattgggccattcgatgctcactgacatttga

SEQ ID NO: 53382 - DNA, 707 bp, Heterodera glycines
atgaattctttaattttgaatatagggttgttcaaaaaaagtaaaaatggcaaaattggaatttgcttagtgtgcaaggagcaaaatagacaaaagtctgaattctcaatcaacgacagctccacgaagagcctaattgtccacctcaattcgtcgcttcataaaggatcggaatatgacaaaaaattccaacaacttgagacagaatggaaaagcgccaaacaaaagcaacagaaggaacagccaaaaattaccaacgtgatgaacatgacttcctccggtagaattatccattaattttattcagtatcagtaattagtaattaggaacgattaccattgccgacaaaaaaataatgcattacattatctgtaacaacattacatttaaatcaattgaccatcctacttttcatgctcttatgcaacaggaggttaaaaagaaagccattataggtttgtttacgaatacattgaaatataaaaattaatgaatctccagaacagaggtcgtcgaccccaactaattaggagaatgatttgcataataattaaaggaggcaatataaagattcaattcaaaatttagcgctgctattttataactaaattaaaaattttccaaattattcgcttaattttttcagacttttaccaagaaatctcgtttccaagagctaaataattttgtcctaaatataaataaa

SEQ ID NO: 53383 - DNA, 403 bp, Heterodera glycines
agcaagaatattgctatcttgcctaggcgggattctgacttagaggcgttcagtcataatccctcagatggtagcttcgcaccattggtctatcgaccaagcacatgaaccaaatgtctgaacctgcggttcctctcgtactaagcaggattactatcatagcaacaggtctttagtagggtaaaactaacctgtctcacgacggtctaaacccagctcacgttccctattggtgggtgaacaatccaacgcttggcgaattctgcttcgcaatgataggaagagccgacatcgaaggatcaaaaagcgacgtcgctatggacgcttggccgccacaagccagttatccctgtggtaacttttctgacacctcttgctggaaactttacacattcaaaaggat

SEQ ID NO: 53384 - DNA, 185 bp, Heterodera glycines
acaaaccctcgtcctcctcctcccgtcggtcgtcgccgttgcccgtccaagtgggccaagactatgtgagcaccattgaactcagcaaacggggaggcggcgccgctgctggcggcggggaccagcgtggatggccactgaagtcgccgacgacgatgaccgcctccacctcgtccgcctgttag

SEQ ID NO: 53385 - DNA, 217 bp, Heterodera glycines
atgtcggcacatccaactgcgtactgtccgttggcgagcagcggcaacacattgccaaccggtggcgacggtgacggagccgcggcgactggcggaggttgctgcggcagcgatggagtcgtgccattcggcggtggtggtggtgacggcgatggtgtcgttttggatggcaataatcccatagcaaataaagacatgaaaatttaaacggaataaa

SEQ ID NO: 53386 - DNA, 158 bp, Heterodera glycines
atgggattattgccatccaaaacgacaccatcgccgtcaccaccaccaccgccgaatggcacgactccatcgctgccgcagcaacctccgccagtcgccgcggctccgtcaccgtcgccaccggttggcaatgtgttgccgctgctcgccaacggaca

SEQ ID NO: 53387 - DNA, 110 bp, Heterodera glycines
ttcatgcgttggcgaccggactccgagtacatggttggggtggcaaattaccagggcgtgagcatgttcaagatgaacctcttcctcgattgggtcgtcggcgacaaaaa

SEQ ID NO: 53388 - DNA, 56 bp, Heterodera glycines; identical to SEQ ID NO: 52733

SEQ ID NO: 53389 - DNA, 1053 bp, Heterodera glycines
atggccaccgcgcagatggccgcgcatatggccgcggcatccgccgctggcggatttggttggtgtactattattgcaatgatcggctctgatcagtttcttacctttcttgtgataagcgattatcattgctttctgctgattggtagtaattgccaatgattatggtctgtccaattaagctttcattaattccatatgatcaatattttggtagtaattaccatggctaagatttgcccaatcaatcatcaattgatctcatatgatcaacatttttcactttaagattgggagtaatattatcactgatatacatatatctgctatttattatcaaattgatttacttaatggattttggatttattgccaggttttctggatatgctcggccaagccggcgcctttccaaaagcgtcgcccaccgccgaagaacaaagtcacgctttccaagcagtgccagcactgtgtgcagcagactcatcgcctgccgaccatgggacgaatggcgtcaacgatttgctgaccaatggcaccggtgccaacggacgccgcgccaccgctgctgcaacaatgcgcgcttccgcgccgccaaacgacgaagcggtcgtggacggaagcggtggcggcaccaacatcggtccgcctcgggcaaagcgtgcgcgtgccggaagcacaccgttaattgctggcggcgcggcactgcagcaaacgacgacgatggcactaatgggcaataatgagggcgccacgacgaacggaagcggacggacaagccgcgaatccggcggtgggatttaaatgtgccatttaaaatggggggggggggaacgagagcacttcattaattaatggtatcaaaattagattcgctttttctcgaactctcggcttaattgacacttctacaacgaaattccattcgcatattttgcgatatgcatattttacgtgcatattttggcatttttttaaacatactcaaaaatttgaaaaaatgggaattatgccaaacataatgtccaaaaatctcaattttcttcaaaatta

SEQ ID NO: 53390 - DNA, 1025 bp, Heterodera glycines
agaatgcagagagctgatagaaagccggaccaaattttggtccattttggcaggcgttggttcctatttctgtgccggcaatgatttgtccaattttacgcgcggcgtcaaaacgagcgacgatttgcgtgctatggccgaccgtggggagcgcgtgttggagcgttacgtgcgcgcgttcattgagcatgaaaagccgctgatcggactgatcaatgggccagcgattgggtggaggaaaaatattatttttcgagcaaaattaaattcgactttatacgacattacatgccccgaatctttcagaatttctgtcactgttttgcctctgttcgatttggtcatcgcttcggataaggtaacaaaaaatgccggcgatcgaatcaaaatatggcatttttctcctttttcactcgctttaggccactttccacgcgcccttctcttcgcttggccaatcccccgagggctgctcctcctacacttttcctctgattatgggcacgtcgaaagtgagttttgttgaattgaattgcaataattttgctgcactttttaatgccattccgtttaatttccattaattccttaatttgttaggcatctgaactccttttgttcgacaaaaaaatgtccgccgaagaagcattggagcgcaatttggtctcccgcgtcattcccaacaacagttttggcaccgaaactgaacggatggtacagcacttgatgatgagagccatttttcttttaactttttggaatatttctgaaaaattcattaatctcgaaaccataactcgagtttcactaatctctaactgccccacccccatctaattaaggtaaattcgctggcgtcccttccgcccgagtcgctgcgactgaacaaatcgctgttgcgggacgtgcaccgcgacgcattgctggcggtcaacacgcgcgagtgcgcgctgctcaagtcgcgatggttgtccgaggagtgccaaaacgcactgcgaaagttcatgacacggaagagcggtggc

SEQ ID NO: 53391 - DNA, 424 bp, Heterodera glycines
caaaattcatatttatgcgacaaaagtaattcaaattcacgaactgtcaacaaaactttaagtcattatttcggaaaaacatgtgcaaaaaccaacaacaatttattacaactccaaaacgcttaaatgtctcatcaacaatactttgcaacaccaattaagcacacattaaatactaaattttcatcaaacaaatcgctccgctattttctcatcgacggtggcacgtacttggacttctgaggctgctgctgcgactgtgctgcctgttgctgttgttcgtcctccttcgccttcttgggctgttgctgtgtctgtggcgtttgctgctgctcgacttccctcggcttttgtggctgttgcgtctgtctttgctccttcgccttttgcgtctgcgcctgtgctgcctgttgctgttcggcct

SEQ ID NO: 53392 - DNA, 76 bp, Heterodera glycines
gttccatccccaagtccgcgtttcgtttcggcactttcgaatttctaaagggtcatgcggtggatgagcgcggcaa

SEQ ID NO: 53393 - DNA, 270 bp, Heterodera glycines
atggccaatctctttggcctcaacaaagacacgatttacctgagtgtttgtctttacgctacaaacaatttacaaggcgaaccgcagcgaaatgatggagaggaattgataatgttgggatgggtaagcaattggcaatttggagactcctctctatttttataatgtttacttccccgctattagttaaatttcattttttgttcatttattcagacgagtgtttatgtgccgggactcgtcgaggactgttcggtttgtcacctgtaa

SEQ ID NO: 53394 - DNA, 295 bp, Heterodera glycines
atgccaacaaattttggggaattgagagagcgtatttgtgaggagatcggctatggaaatgacacaatgaaactcatacacaaaggtaaatgataccaatggcagtgagaaaaggtggtggatgggttttgttgaagtttggtatttaccaatgaaatttattgttttattgatattgccctgaattttgagacgggggacggtgcaaatattctataaaactttaacattaaatcaatttttaggcgtcaaaaatttttttgataaaaaatggaaaaaggcaattgatttctaa

SEQ ID NO: 53395 - DNA, 1149 bp, Heterodera glycines
  unsure (1)..(1149): unsure at all n locations
atagaattcaaaagagcgctctttgcaagtagcgccattaattgcttcattttccgcttttttacaaaaaaaggcttttatggccgaccatggactgctgaacagcggaagcatttgttcacactgttgcgaaagttcggcatgaacacgtatttgtatgcgccaaaggacgacttgaagcaccgggcggagtggcggttgctgtacacgccggaggaagcgggtgggttgggcaagggcagaagcaccgcaaatgaatgaaccaatcgttttttgttgtttagcattgttggagtcactgatcagagcggccaaagacaacggaattacttttgtatacgcactttcaccgggcattgacattgtctattcgagtgccaaggagctgaaggcaattcgcgagaagctgacccaggtttacacccaaaaaacaaaacaattttcataagatgcatttttaggtaggttatttattggtttgaaatatgcttttctcccttttttctatccgtccctcgcattttcggtcttttccctcggctgcaccgctttttcgcttctcttcgacgacattgaggcgtcgatgaacgaaatggaccgcaagcagttctcctcgttcgccctggctcagctgaccgtgtccaactccgtcttcgagtcgctcggatgtccgctgtttttcttctgtcccaccgaatattgcgagtcgtccgcctcgccttctttgagcgagtccgattacctcaatttgctgggaaccaaacttcacccggacattcacattttgtggacaggtccgtcgataatttattgttaacccttttttcaaatattattaaggtcctcgcgttgtttcgcgttttctcaccgccgaccatcttcaaagggtttcgactgttcttcggagaaagcctttgatttgggacaatttgcacgcgaatgattacgacccgaaaagagtgtttatgggtccttttttgggacggtcggtgaccattaaaaatgtgacttcgggacttttgctgaacccaaattgcaaatacgaggcaaattatgtgccagtgagttttttgttattttttgcgatgaattaattagtttgtatttttcaagttttttacgctggctgattgggttcaaagtgngtaa

SEQ ID NO: 53396 - DNA, 837 bp, Heterodera glycines
atgtcaatgcccggtgaaagtgcgtatacaaaagtaattccgttgtctttggccgctctgatcagtgactccaacaatgctaaacaacaaaaaacgattggttcattcatttgcggtgcttctgcccttgcccaacccacccgcttcctccggcgtgtacagcaaccgccactccgcccggtgcttcaagtcgtcctttggcgcatacaaatacgtgttcatgccgaactttcgcaacagtgtgaacaaatgcttccgctgttcagcagtccatggtcggccataaaagcctttttttgtaaaaaagcggaaaatgaagcaattaatggcgctacttgcaaagagcgctcttttgaattctatcaaaaacaaaaggggggacccttttgttttgcaaaaaatttttgagatacaaatccatgaaaatttgttatccgggggttttagaggtcgctgatcacgaatctgacatctaattcgaggtcttggaccccaagaaccccagggaataaattttcatgactaaatattaaaaaattttgcaaacaaaagggtccccccttttgtttttgctttttgataatttcaaaaaggccctctttgcaagtatcgccgaaattgattttcatttgcctttctttgaattttcccttttcaggcgaagtcaaattttggaaaggcatccggaagtgaaggaattctttggcattggtcggtggtcattcaaaccttcagaagacaaatgccacctttttctgactgtttcagaccaaagcttcaaatatgtcgttgtttcgatggtccttttccaattgctcatggccttctttctcaggg

SEQ ID NO: 53397 - DNA, 488 bp, Heterodera glycines
atggacgaactcattgagcaggcgggaggaatttcagttaatcgatgcgttcaaagggccgcttttcgtcacgcatttccccgcagcggaaaagcccttttatatgcgccggtgcgattcgagagggcaaaactttgatgtaaatgggggaaatgatttgggaaaacattttcacatatccctttttctttttgatgtttttggttaagaattgcccctttaaccaaaaacaaaaattcatttttctaaggccaccgagtcgttcgatttgctcgtcccccaagtcggtgaattggctggcggtggtgtgcgcgagtgggaagcggacaaactttcggagcgccttccgcccaactcaaatttggattggtacgtggaactgcggcgccggggccacccgcgaagtgccggtttcggacttggcattgaccggctgatgcaggcactgtttggcattacgaacatccgtgacacaatcgcattccctc

SEQ ID NO: 53398 - DNA, 66 bp, Heterodera glycines
atgttgtgcgaaattttggaacgcgacgaattgcaaatccgtgaagaaatttcaatgtggaatgca

SEQ ID NO: 53399 - DNA, 93 bp, Heterodera glycines
acattgacgaaaatgccgacactttgatcaaatcggatggatttttgcaaattgaccaaaaaatgttgtgcgaaattttggaacgcgacgaat

SEQ ID NO: 53400 - DNA, 1757 bp, Heterodera glycines
atttctgccgactagcagatatttttcatattgtgacttttgaaaagtttgttaaccccgtcctaaaacataagccctctctgatcagtgggctgtaaagatgttaaatcagtccaaatcccggcatttcaattcccccccccccctttcccaggagatttataaattgctcgagaatgaccaattcccgcgctttcgccgttcgccgctttacctgggctttctcgaggcgctgctgccccgctcgtatgccgaacggtggacgacgtcatttgacgcattgttgggcaaccaagtgggagaggggataaagggatcaaaggggataaagaaagggcaaaatccaagcaaaatgatcagttcaatttattagtgccataattcaacaggttggtcgccaccactttcgtcaatttttgttcaatgttcacgcggaagaaaatctgcgcttttgggtgagtgaaagttgaacttatggagaaaaaatgccaaaaatttgaatttttcctcgagcgataataaaaagcaataattactaaggcattacaactaatgactagggaccggatttatatggacaaaaaaatccaaaatatggattataatattgaaaaattcgcaaaatatggacgaaatatggacaaaaacgctgaaatatggacaaaaatacgaaaatatggacaaaaaatctctgaaaaattggtttgaatttttgaaaaaattcataaacccataaattttccggtcaagaaagaaaaaaatcattttaatacatgaagtatagaatttgataattgtggcctcctatttattctttactaaaaaaattgaatttacttagaaaaaaaacaaaacttagtaaattacaaaaaataatttttacacgaattttgctgatgaaaaattttttgcacaatttttggaaattttcccaaaatttttcgattttagggcgtattttccaaaaaattttccatcttaaggggtgtattttcgaattttttgtgaaaatgccgaaatatggatgtcaaatatggacaaaaatctgaaatatggaagtaaaaaggcatcctagaagcatcaaacaaagctaaaaacactatttacgtagtttttaagccgaaatgagtgtgcaaaaaaaaaatatggaaatccatgcaaatccggtccctactaatgacccttaattggattttgcttataactaattaaggagtccgtcatcgaattccgccaattgaaaaacaaaagcaccgcaatgcaggcaaatgctggaaaaagaaattcaatattatgatttacatttgcagaacatgggcaaaaccatacaacaacaatttttgcgggaaggcgcccacaacgaggtactgtaggccaactacagtaggaatgaatgttcatggaaattgtgttaaatcccgttctgccgcaggtgtttttgccgtttggtcttcggcaacgggtggagaagagaattcgggaaaaggacgtggacgaaacacttttcgacgaagcggtcaaacacgtggaacagatattgaagtaaactacctaattaggtggaccaatgttaaaaaatagtcaaaatattccagcaaattaattttaaaattctcgacggattaggttattgtccccagtgactcacttttataaaacgattggatttatttcatgataattttgatcacagaaatgatccgtacgtgcgatttctgcagtccaaagaatacaacgatctgttggccaaactgcac

SEQ ID NO: 53401 - DNA, 172 bp, Heterodera glycines
  unsure (1)..(172): unsure at all n locations
cccccccccctctcaaattatgcgtcggttatccttttcattgtttgttacgcttaagaaaaggtatcattagcgcagcagttgcncaggttacttgnaaaattggtgccattaaacacaatgccaatattgtattttccttcgacacgcgaaaaaaaggcacaaaaaatgg

SEQ ID NO: 53402 - DNA, 464 bp, Heterodera glycines
atgactgccgctttgctggtgggcggtggtgccgctggcggcgtggcacagcggcgaccctccgcaactttggttcttgaaatgccaaatcatcaaccccaacagcaccaacaacaacagcaacagctgcggcaccatcagccgcaacagagtattgtgccttcatcgtcggcattggccaaagatcatggcaatgcgtcgggtagggttttttttgaattggcacttttttcttttgcttggcgttttgccaaaaaagcgattcccgtggatcaaacgcaatcactgattagactaattaatgcatttcagatgaagggcagcagcagcaaggaaaagcagtcgttgagctgccaaactcgacccaacagcccaaaaaacagctgaaccaaatgaataagctgaccggggacgattttccgttgaaagtttggcaacggattggcttaatggtgggccattaa

SEQ ID NO: 53403 - DNA, 376 bp, Heterodera glycines
atgttccgatcgcccgcacttttcgcgatgtttcttctgatgctgattgtttttcagctgtttggggttggaattgtgcaggggtcgaagcgaagcaaaggccgcgcacggacaaaagaaagcgaaggcatttcgaatcgggggaaagaatcggcaaaagaaagtgagagaatttggaaaaaggaagggaaaggaagggagaaagaaaagaagaagcaatttagaagtggacgaattggagggcaaaaaaacgcagaaaaaggaagaggaggagcaaaaggaggagaaggaaaaggcaaaaaaggaccaattgacgggagagggaattggaatggcaccgacggggggacgaagagcacgtcgagaaggaggagaa

SEQ ID NO: 53404 - DNA, 1916 bp, Heterodera glycines
  unsure (1)..(1916): unsure at all n locations
atgatgtttcatttcatgaatgctttttacgccgatctggtcctcctcagctgtgtgccgttaatgttgcactcggagctgataaatgtggatttgacggttgacaatcaaaactatttcgacagcggaaaatatcgtaccttttcaaaggatgcgacagcactacactttggttatagttggaatacagcatgccgaatagcgaagtgtgagcgtgacagcgaatgggccgtttcacttcaaattgtgtacactttgcacagctatcagagtgtgtttttcaaaatgaaatcactggtgaaaatgtcaccattggcctgttttgaatacaatgggtatagttttaacctttttgaagacagagaatctggtgagacggctatcttccgtggtcaccagcagaagattgtgcaacgactgtccaaacatggacgggttgtgtttgatcccctctcgggtcgcttgtttctgatcgataagcatcagaggcggatcagcgaaatagagcttgaatacctggagcatttgtggcttcgaaaaaaccaatcttccgcacatacgattttgaagagcaactttgtcgcctttcttccaccagataaaagcgactttactttggtggacaaccatgtgtttgtgatcagagaccagcgcatctataaatttcacattggcgactatgcaaaagggaatcgtgcgctaacttttgtaaccaattcaagtgacgtccgctttaattatctaatttataaacccaacgaccaaaacattatcggtggtgtttttagtcatttacgcatgtcggacgcttggataccgatctcgtatctgttcaatttgtttctaatagtactgtgcacatacatacttaaacagctacggcgagtgaaccgaaagaatccacttaatgggtctggtagcaccggttattacagcaacccgttcattgacgacgcctattcgtcccaacatcaacaattgctgaatatacagtatgaaactgcgacagcgagtgatcaaaggggtggagccagtagccggagtatttaaagaatgcttttttgttgtttgcattcagttggtccgcttttttcctaaattttaataaaggctattttcatttgccaaaactgacacaccatatttacctacttattgcatgcaaagggcaatccgttatttgatcgacagttacgggctaagcagtgtagacgatctgtacacctgtttgaaagacgaaattaaaagtgggcctgaaggtgggaattgtctctatcccaacccactttgtgctgtcgactgtgtacacatcgcaaacgctgaccatccgaaccaacctgtgcatattgaaggttctcttgagctgatcgctgacgttgaactgtactcaacatgctatccgaagaagaagttcgaggggatagtgtggtaagttttctaaatattaatattttcatttgcattttttaaggagcgaacctctgtatgtggagctgaaggacttgaagatttgcccgggagactcgccgctgtgtctgtcacgccattgcgaactatcgaacagcagcagcaacaacctgatagtggacgagctggatctgatcaactattggagcgacggcgaacgcgaaaacgagactacaacctggtgagagtgctgtgccgattcaacaactgtggcccataccgactgacgaagcaactacagaaacgacggactgagaaccttgcctatctgagccaattggacattgagactgtccatcttagaaaaaatattaagattattcccgatgctttgtgccccatcggtgcaaatcaggtgtttgcataccggggattcctaggaatcacggttcagcaacacctttacactcgtcatcgtgtcatgttaaagtacccaacccttccatgtn

SEQ ID NO: 53405 - DNA, 390 bp, Heterodera glycines
atgtataatagtttttctttagagaaaataagcaaaagaataaaaaaatgtaaaggatggaaattaatagaaagtgaaaaaagctcgacgctgctctatccaatgataccaaatttatacccactttttgataacaattcgcgtggttcacttgttatgtggcgaacggtatccattggctacagtacattgacaggccatgcaatgcaacgggtttatctgtaattttttgtattgattttgccacaaaagccaagccattttgaccatagggaggttgtaacagcttcggtcatcggacagagtgatcagtgatcagaaagagcgtaaaaacagcaaaaacataggaaaaattcaagcaagcattttttgttgaattttacgaataaa

SEQ ID NO: 53406 - DNA, 182 bp, Heterodera glycines
ctgtcctgcgtcgattcggagggccgtgcccgtggcatgggactgatctccgcgcccggcctcgtcctgtcggtgtcgcttggctacgcgcgccgtctgctctcggcggactgcaaaattttggccgagctaagcaagcagctcaagttcgagacaaccattggcatgaacggcacaatttg

SEQ ID NO: 53407 - DNA, 240 bp, Heterodera glycines
atttattcgtaaaattcaacaaaaaatgcttgcttgaatttttcctatgtttttgctgtttttacgctctttctgatcactgatcactctgtccgatgaccgaagctgttacaacctccctatggtcaaaatggcttggcttttgtggcaaaatcaatacaaaaaattacagataaacccgttgcattgcatggcctgtcaatgtactgtagccaatggataccgttcgccacataacaa

SEQ ID NO: 53408 - DNA, 1183 bp, Heterodera glycines
atggacgtaattttaataaataaattaattgtggtcattcgaaaattcaaaatttatcttatgaggtaggcattttattttccgcaagatttatgcttttttaattttaataatttacaaaatgataaataaatttttttgcaaaatgatgagttgggttttcattggcggatgtgctgactgacgaacatcgatttacgaaggaatttgttggaaaaaagaattaataaaaatattttttcattattaataattttctttcttaattttatatttttcttatccacttattaatgtatataatatatatatatttttttttattatgtgtaatttagcaagtgaacgaaaatttaaagtcactgaaaagctaaaattaattttattattccgtcaattttaatgtttcgcaaaaaactgatcaaaattttattgtttaattttcttttattgccaatattatgcaaaaaaccacaacttcacttcggtactcaaattttaatataaatgattttatgtaaaatgttaaattcttgatacttttgagaaagaaagtctcccgagacttgagccttatttccaaatgttaaatttattaaatttaaatcttttgtatttgtcagtggatttctttttaaaattaccacccttttttcatgtcattagcacttaaaaattctcgccctaattgccaaatttaatttttggtcataatttggcgccacgtccttctgttttaggcatcgatccgctgcatttggacttggaatattgccgtttgtttttcgacccgactttggaccattgcgcccgaagcgaactgagcgcgaaactcagtgccgtgtccatttgcgcaaccatcgagacggatttgaagtacatcgaattgaaaatggaaattttgcagaagtcacgaagtgacagcttcggtttgaacataattcgcggggcatggaaaaattacgaggaaattatggcaaaaattgaggagaaaagtgggggcgaaaggatgggaatggtcgtagtgtgccaattgtggaatttcatggacggcttaaagaaattggtcgaatttatgagcagagacgcggaaaccacgaagaaagagatggacagaacgatggaacagctgagaaagatgaccaataacagaaggtgccgtttaaaacaaatgcaaaattaa

SEQ ID NO: 53409 - DNA, 469 bp, Heterodera glycines
gtttcaaatatcgtaagattgtttgatagggccagacaagagaaggcaactgttggtaccaagtttgcggtaaaaaaatgagaaaaaagagatagccattttttggtcaagaattttttttgtttgcgtttcaaatatcgtaagattgtttgatagggccagacaagagaaggcaactgttggtaccaagtttgcggtaaaaaaatgagaaaaaagagataaccattttttggtcaagaattttttttgtttgcgtttcaaatatcgtaagattgtttgatagggccagacaagagaaggcaactgttggtaccaagtttgcggtaaaaaaatgagaaaaaagagataaccattttttggtcaagaattttttttgtttgcgtttcaaatatcgtaagattgtttgatagggccagacaagagaaggcaactgttggtaccaattttgcggtaaaaaaatgagaaaaaa

SEQ ID NO: 53410 - DNA, 857 bp, Heterodera glycines
attgtgccgcctggaaagtacaggttgattctgtgggacaaactttctgcggatggccaatcccttcaaaacaatcgttggccaaatgttggcgaccgatcgctgtgccatcgcgacgaaattttctgttattattgtgcagagccggataatttgttgttctacactgacgtcattaagtttcgtctgaatgaattggaaaaatgttttgtgaatttttacacggtcgaaacggacgaaagaggccattttttggtgtacaaaaggaacaaaaaagcatttgatcaattcaatttttacattttgccattgaaaaattcggtaaaaattttttttaagtatttaaaaaagtgcaggaaatgagaaaaagaaaaacatttttttatgattatgaaaaaatctaaacagaatttttgttttacaatttttacgtatttttaaaaaaatgttttcgattattcgtctgcgttagtataacataatatgacttatattgtaatttaataataatgatatatttatatttggctgatatgttttccaatatatttaaattatttgcttatttctattaattttttgaggttccaatcagtggagatgattttgttccatacgctgaacataaaataattgtaaaagaaaatctaagaaaaaattttttcgaccctctcaatttggttgactattttgaatcgtcaaatgattggaaaatgaatgtgctcgatttgctgaaccattggttaagtgacgaaggattttcctatgaattatcggaaaaggcaaactcaaataactaattaattaaaatgttttttgaaatttttaaaattaattttatcttttttaatttttaa

SEQ ID NO: 53411 - DNA, 1367 bp, Heterodera glycines
atggagacgacaaaagcgcaattgctcggcattttctgggactttttctccgaggcagcaaaagcgaatttattatggaagagattgcgatttgcggaccagcgaattgtcgagttggtagaccaattttgcagaattgacaagcaatatttgttgtcacattcccaaataacactggcattacgagtaagcggcgaattgaaatgataagaacaaaattttatccgaatttttgtaatgcctgagaaaagattcccgagaaataaggcggaaaataaattttctccagaaataccattttagaatcgcaaaaagcaggaaaagaaatttttagaaacttaaagaaaaacaaacccttcgctgcatttgttacacaaaattttaaaatttatttagttagtattgcggcgaatatgtgagggaaaacgacctaatttttcacaaaagttccgaaataaatttttatcataattaccacttttatgaccaattttaattaattggttcaatttgctcccaattttgcttatctcatagaatgtggataatgcaatggcattttgccaaaattggcttgttgcgtgtgctaaagcagcaaatgccatgcaaacgaccattgtgatggacgcattttcgcattggatttacagcggaagaccaccattaaatggggctattgaaattgttcatttttggattgaactgttcagcaaaagaacggcaacaaatgacatcagacgaatgtgccgatggcccgaaatcgataagaatcttttccggcgaatcggtgattttggcactttttgaaagtttttacaaaaatcgaaaaacttaggcattctctttgtcgaagccaatgaaaaatatgcactcaaattgaaaatattagaaaaaatcaaaggagtcagacaattgttggacgaaatttgtgccaatgtaaatcatttgtcattgacatgttgtgcacataattctttgcaaattgcgatggaccaatggaaaacgacggtttgcccaaatggccaatttcgagtgggttttctgctgatttgggtagaaaatctctttgttctttcttatgcatttaataattatttgtggaggggggggcacaggaaggggagggataggaactaaatctccaaaattatagtaaattaaattatttaaattattataaaaaattaaggcttttttgagctcattgttgctgattgtaacttattttctttcttttctctttttctggtgaaattggtagcaacaattgttttgcttcatgaacagctttcgaatgatagaatatttgtcaaattgtcaaatcaaatgaatgccctccctccgctacttctcgaacatcgagtcga

SEQ ID NO: 53412 - DNA, 152 bp, Heterodera glycines
gttattgaggctgttgtgactgactgttttttgttaacaaaagtgcaatttactacacactttagccacatttatttcttgttatgatggccatggaagctcagcaacaattagcaattaatggtgccattttgggaatgccgaaaaatgaa

SEQ ID NO: 53413 - DNA, 3755 bp, Heterodera glycines
  unsure (1)..(3755): unsure at all n locations
tgcgagttcagccatgagccgttgcaattgcccgagcccattggcgaagtgaccgttcgccaggagaaagtgttcgtgcccgtcaagcagtacccggaggtgggggagagataattacaaaaaaattgaggacaaagaatttttctaaaattttaatttatttttcaaaaactaaaaattattttaaagaaaatttcaaaaatacaatttccaaaattctgcaaaacttttaatttttcttaataaaatgtcgtcaaagcaaataatttggtttttaatactaaaaatttttaaaagaactttttaatgattggccgagaaaattaatttcaagattttgagaaaattttgtaaaatttgaaaaatctaccaaataaattttcaatattccccttttaaaaaactctcttctttacaggccttttttcataaattttcttaaaaatctaaaattacctaattacacttttttcactacatatttttcccaattatttttcgcttgtttccatgcacaatgccttcttatttacaatgcaatttatttttcacaaattcaattttctttaattaaataaatatttatttgtttgtttgtttgtttatttaattaattaatttgatttgtcagtataatttcgtcggtcgcattttgggcccgcggggaatgaccgccaaacaattggagacggagacgggctgcagaataatggtgcgcgggaagggctcaatgcgggacaaaaagaaggaggaaatgaaccggggaaagcccaattgggagcatctgagcgaggaattgcacgtgatcatccaggtggaggataaagaaaatgctaatcaaatgtattaatttaaataaaaatagaaaaaaaatgtgggggggggagtcaatcttttttcttttttgctttacaaaccgcttttttacatagaatttgggtgtttttgtttaggacaggagatgccaatatgcgccgccggcaaaattttaatgttcatacttaaatgggtcttggctgacccattaccagaaataaaagaaaattgagtaaaattttaaaaaataccaatttttcttggaaatttttttaaatttttcgtttcggggagtaggggcggcacgtgccccacttcctcccatacggacgggcatgggtcttggtgtcagaccatagttggacaaggagggaggcgtcagaatagttagggtcctacgaagtacgaaattgttagccaacaaaatttattaattcaattttttaatgtttttattgtgtttaaagtgtgaggacgcgccaaaccgtgccgaagtgaaaatggcacgtgccgtggaggaagtcaataaattgttggtgccagctgtacgttttcatcaatttttaaacacaatataaaacgcttattgttttttgttggtccgtttaagcccgagggcgaagacgacttgaagaagaagcagctgatggagttggccatcataaacggcacttttcgcagcacaaatggcaccgcgggcggtggcgcgtcgaaccgcgcgagtccgtcgtcatatggcaaaggcggcgccgtcgcgtgcaatgcttccgccgccgcagcggccgcttcattgctgcgtgagtttggcggtggcattggcattttgaattgcgaaattgtgccgatcgacgacgtttattttgttgaggattttagattaaaaaattttttggaattatttgacatcgcaaacttaaaaaaaaaagtaaaaatttgcttttttcctaaaatcgatcactaattaatttaaaattaaaatgccctgcggcatttttcattttgaaaattttttgaatttcctaattatatttgaaaattttcaaattttcttaatttgcgcgatacgtcttttggccgattgatctatgcgtgatttgtccacacaaacaattcttttggcattcagaattagatccccgtctgctcggctgtccaactacggcattttccaacacttccgctgggctcgccggcactccgctgattatgccttcggctgccgctgtaagccttggcggccttaaggccagtaattagggcattaacgcgcgactgtttttgggcaatgccaattggctgactcatagagcaattataggcccttccttttattgatctcgagacccaataatcgatattaagattgatgagacgggcgcaaatgtcccccccccccaccctcccaccgccgttttctcttaccgtcccccctagtattttttctttaaaaaatttttttgtttttttttctgaagaattactaacaatggttttgaaattaaaaaaaaaatttcggcggtgggaaacttcgggggagaggaacgagacaagacccctattttttccgaccagagaccgagacacttggcatcactataattaattattctgctacttgatgatttactcttctgactggaactgacagacttaaaaaatgggtgtgttatgtttccctccgagtcccttcccnncnctatcagttccccggaaattttttttaattttcaaacttaaatttttagaaaaaattcttgaaagttttttaagcaatttttttgaaaaattttgaaaatttattcaaaaaaaatttatgctcgaaattttttttaattttcggggaggaaacgacggggggatgaactgctctcaaaaaaatacagttaccgtatcccccggaaatcctattaaagaaatatttctgctgtaactgcttgtaaaattttaatataattgattttattttcaaataaatcaaatgattttaagaccagccccgtgctgtcgtttcagtccgctgctgcgcaaccgtcgctcgttgccgtcaacaattcattggcggcacaggcattggcacttcaggcaaatgccattaaaaagcgaaaacttgcgaaacaatttttaaataaatgtggcgttgtgtttacgtgttacagtatttgcagttggcgtcccctcacacctcggcagcccaactgttcgccgcatcgccctacagcgccgggttggcatccgttgcgcaagcggcgacggcaccgaatgccattgactaccagcaacagttgctggcactggggtaaacggaaattgctttgtcggcaaagcctagtaaaattcaaaaagaaaaaaggcttcttacaccaaaaaagaattaaatttttatggcatcttaaagcgttgtgatgaaaatacgaaaaaatctttaagagaaaatctggcaaattaataaatcgatattaaaaataaccgaaaatttgaaattctttcgatcgattttttcgctaaaataccgaaaaatatatatcgacgataagtcaatcgttcttgtctaattaataccttttttttcttaaaaacggacaatttttgggccaaaattggctgagaacttggcaaaaacacatattttttgttgtttcggcgaggtttgatttataaaattctatttctccattacagctgttttgcaaaatcctctaccatctcttggtcattaaaatacagtatgccaagcattttcagccaacttcaacagcaacatcagccccagcagtcacaacttgacgttgccgctcagtcccaacaactgtccgcactgttccagcagcagcaactcgcactgtccgcgcttcaacagttcgactacggtagcggtgccgtcgtcggttacggtggcggtggtggaaaaacggactcctccccgtcttcttcagccgctg

SEQ ID NO: 53414 - DNA, 106 bp, Heterodera glycines
taaaaatgacaaaacacccgatcttggcactttgatgcgagcgattgaaatggaaattggccctgtgacttcgccagatttgttccactcctatgtaattgcccac

SEQ ID NO: 53415 - DNA, 932 bp, Heterodera glycines
  unsure (1)..(932): unsure at all n locations
atgcttcttaaggctatgattggaggaatgtgcgcaaacttcacattttcgggcgatgaacacttgattaagagggaaattgaaaaaatttctgaatttgtgaaagatatcacgggcaatgcaactcaatggataagagcggaactcgtaagtagcaattaaaattattatgcgattatagctgggattaaaaaatgacaaaatggtttaatttttttacgatttcatatattgaattctcattttttaattttttacgagatttatatttctcaatttaaatcataatcggactctctataaacttttcaattaaaaaaaagaatattgcaaatactcatccttgtctaaaatgtgatgcgtcaattacaggaaaactcctggccactggaaataattcggcatgtcaagatcgggataaagaatccaatcatcgacccatattcgtacaattataccgcaaatctgatcgatgacattgtttcgccacgtgggcctttcgggtaagtgaaacaatgaccaataatcattgatttctatgaataatcgctctgaatcacttttatataaacttgatcaaaccaatccttaggtgatcggaccgccaccaaaatggcttaaaaccgaaaaaacaaattttcggaacagttttttaatattcagttacgtctcccaaattttggtcacgaatgacttcgacagaatcgaaaatttctggcagaggtgccctgcgagttattgcgcggtcgtaaaaggttacaaagggatcaatttttcattgtttcggcacaaagtggggcatttgacaagggcccacaaggcagagcgatggtttgaaagaaaacgtgacaaaatgtacgacatcatcctgtgangtatgagatgaaacattgcgctgtattgaaatttagaatttgaattgangtaataaa

SEQ ID NO: 53416 - DNA, 333 bp, Heterodera glycines
atgattgcaattccaattattcttatattctttgttcaaccggcgatttgtttaaaaattgtatgcttcacacacagcaaaatggtaatcattgagcaattataattaaaaaaatttaaaagtatttttaataaataataattttaaaaatgcaaaagcatttttgtttagtttgaagcaaattcttttcttcaacaacaaccaaactgttcacatttggtcattaaagatttcgcaaaaattggattaaaggaattcaaagcggatttgaatgcacgttataaggcacaatatctgaagtgaaaattatacaataagaattaattgaataaa

SEQ ID NO: 53417 - DNA, 204 bp, Heterodera glycines
ttgattttttttctttttgattattttaattatattccatcctgaaattttttaataaacattttcaaactttcaccttattaatttaaggcgaattttgccttttttaataaattctcttgtgaaaaggcaaaaaaataggctcttttaaatatgcctatttaaattactttcattgctttcctttcgcttacgaccatacca

SEQ ID NO: 53418 - DNA, 355 bp, Heterodera glycines
ggaatcgaaggtgttgtaagcttttttccttttttcacttgtaaatttatttaaattttcaatttttttagcttttttcgaaaatttttttgtctttttttcggcaggcactgcctctgacaatgttttttatttatttagaaaaataaattgattttttttctttttgatttattttaattgtatttcatccttaaattttttaataaacattttcaaactttcaccttattaatttaaggcgaattttgccttttttaataaattctcttgtgaaaaggcaaaaaaataggctcttttaaatatgcctatttaaattactttcattgctttcctttcgcttacgaccatacca

SEQ ID NO: 53419 - DNA, 350 bp, Heterodera glycines
ggaatcgaaggtgttgtaagcttttttccttttttacttgtaaatttatttaaattttcaatttttttagctttttttcgaaaatttttttgtctttttttcggcaggcactgcctctgacaatgttttttatttatttagaaaaataaatttttttttcttgttgatttattttaattatatttcatccttaaattttttaataaacattttcaaactttcaccttattaatttaaggcaaatttgcttttttaataaattctcttgtgaaaaggcaaaaaaataggctcttttaaatatgcctatttaaattactttcattgctttcctttcgcttacgaccatacca

SEQ ID NO: 53420 - DNA, 351 bp, Heterodera glycines
ggaatcgaaggtgttgtaagcttttttcctttttttacttgtaaatttatttaaattttcaatttttttagctttttttcgaaaatttttttgtctttttttcggcaggcactgcctctgacaatgttttttatttatttagaaaaataaatttttttttcttgttgatttattttaattatatttcatccttaaattttttaataaacattttcaaactttcaccttattaatttaaggcaaatttgcttttttaataaattctcttgtgaaaaggcaaaaaaataggctcttttaaatatgcctatttaaattactttcattgctttcctttcgcttacgaccatacca

SEQ ID NO: 53421 - DNA, 63 bp, Heterodera glycines
aaacgggcgcgaagcgcccgtcttgagcctcgatgtggactaaaagcctctaataatttttta

SEQ ID NO: 53422 - DNA, 631 bp, Heterodera glycines
atgccaccgaagggggagaattgggacaaaatgccaaaacagcaacagaaggaattctccgcaggtttctcaattgtgaccaatgaccgtaaccgttcctttaccgtatccgccgtccaaatgttgtgcaacacagccggaaatgccccaaagattgtggaagaggccaatgtcgaagattatctgtttggatggagcgaagtgagcaaacgaatgagcgaacgtttcttttgtacttacggcattgtcgagagtgagaagcggcggaagggacgaattgggggaaaagtcgcaatggagcacctgacaaaagagcaacaaccgatcaatcaatgaaccaactgatcaattttaatcaatcaacccatcaatccacaattattgattgtccccattttatttcatttttccatttcgtaaaaccccccaaattcgcttaatggcccaaccggatgccatggccactctctgatgagcgtctttggccaaatcttttctctgagagtcaaatttcgtcaaaaccaaaggcaaactctttgggaaaaagcacttaaatgcaaatggaaatggaaatattagtggcattttgtgaattgagcgatggaaaaatttaaatggaaaagcaaataaa

SEQ ID NO: 53423 - DNA, 823 bp, Heterodera glycines
atggaccgagggaccggtcccgatgaggatggagctgtaaggaagaagctggctgggcggttaaaacgcggaaagcgggggttgataagatccataaaaagaaagggcggatgtgcctcggtagcttaatggtagagctgcccacggaaagggtgcatgagtgggttcgattcccacccaaggtttaacattttgcccatttcttattatattaagttaaaatattaaatgattgagattgataaaagaattcttaatggttatttttcttatttttagcaccttaccagtaccggtaccggtttttcaaaaagaattacagattcaggtttctccagtactgtactaactgataaaactttgtactggtaagaatgtttagccaatttgtaaactaatctaaaaactcgtaagcttggcttttttgaaggaaatcaattagaattttgttatgcctttagttaacatttttgatagatctttaacgagcagttaaaaataatttattttaatcgtttaattttcatttattacttattttattcattttattaggtaaaataactttgatttattatgttattttaaatctatgcttttaatgcaaatttatttatttttattattcacaaaaacgtttatatattttgtaataatttttatttaaaattatttgttctaacctgctaacaagttgattttttattttcatctatttatttttttctcgtctgatgatctctgttttatttgccgttctgagcatgttcgtttatcttcatttatttaatatattccgtttgaacaaatattgataaataaa

SEQ ID NO: 53424 - DNA, 833 bp, Heterodera glycines
ctgccccgaaaacaaaaaaaatcgattttttcaagtgtccgtttaggggtactcaaacaattatcggggagcaaaaatccaacgcagaattaaagtacaggctatagggaagctattcccgaaggattcggtctccccataaatctgggcgcatcggttcggggggactgccccgaaaacaaaaaaaatcgattttttcaagtgtccgtttggggtactcaaacaattatggggagcaaaaatccaacgcagaattaaagtacaggctatagggaagctattccggaaggattcggtctccccataaatctgggcgcatcggttcggggggactgccccgaaaacaaaaaaatcgattttttcaagtgtccgtttggggtactcaaacaattatggggagcaaaaatccaacgcagaattaaagtacaggctatagggaagctattccggaaggattcggtctccccataaatctgggcgcatcggttcagggggactgccccgaaaacccaaaaaaaaattttttggataaaaattatttaaatgaactgactagataatatttaaaataggttatttctcttcctttcagtattcctgcaaagtttggtgcgcttctgatcagtttctgaaaaaaaagttaagcctaaactttttggcctgtttaaaaaggaattaaaaatttttaaaaattttattcatctccctttttgatagaaaaagcatcagagtgcctaaactaacatgtaaataaaatttggtgcgtttcagaaccctttctgaaaaaatatttaagaattaattttgcaaaaaataaataaaaacgaaagact

SEQ ID NO: 53425 - DNA, 323 bp, Heterodera glycines
atgaatcagaatttaagggaaattatgaaagaaatcagtttttattggtatgtttccaggtcccgggtaaggcaactgaaaaaatatgcactgataaaaagaagggttttatttgttagcgaaaaattagtgtcgtaaattggatgagaaatttttgaggggaaataaaataattaattattcaaaattaaagacaaatacagtctttggatatgtggcttagtggctaagcccttctgtcttcgtccctttctttctttctttttttgtttttgattccaattaaaatggaaatttttcaaatatttacaaattgaaataaa

SEQ ID NO: 53426 - DNA, 1118 bp, Heterodera glycines
atgaaaatgaaaaatgatcaaaaatagtgagatagaaagttttgggatttgaatggattaaagtgagaaaaaggtcatttcaaattttactagtatttaaagctgaaaaatgaatcatccattcgtaatcctatttattttttgttatttaataaattagatcgatgcggacaaaagcggcaccatttcgatgaaggaagccattgcatatttggtggacacaaagaatggcacttcggctgaccatttggcaaagaacagtgaatggtttggccacatggaccgcaatgggaacagtcaaattgagccagtggaatttgatcggatgctgatctgatcagaggaaaatgatcggattcatttgaaagcaaattcagtgacgaaagaatgaatgatgggacagagaatttgttacaaaaattactatttaaaactttcgtcaatgaatagttgataaatttttggtgagattaaattaaatgattttgtaagacataaaaacatttctgcaagaaaagattcatttgtggccgaacactcaataaatctcgcaaatgcttttggaatcaataaaatcatttttcgcatatctttatttgcctttcaacaaaaaataaaaaactccaattggaatcagcaaactttccaaatgagtgtgttattctttcatacccaacacctgttcaaactttacggacaatgcatgcagagatgctggccacattagagaatggcaaatcaacctttttattagtttttgcggggtatcaatttaaatgttgatatttaattaaatcaactaacattatgccatcaacgcaaatatcaacgtaatttttaaaatttgcgaaaattttttaaaatttatatgagcggtttataattttagtgcgagagataacgcaaaaatgagagagtgctggatctcagtcccagtcatacaaaacatttttgatgaaggaggtagagaaaacaatttcaatagagagcgcaatgggaagggagtcatgtctcttcttcgctgattcttttggtaagagacgcagattcctcgctatgttctctattctcttctctctgtcttaaatctcttcccataacactctctttttaataaa

SEQ ID NO: 53427 - DNA, 339 bp, Heterodera glycines
atgtccatatttccatattgtgcatgttttggcattaaaatgtcaatcccaaatgtggagccctcatatctatggtcctcaactgttggaaaactcaaatttcaagcgctaggacctcaaaatgtcaaatcttcaaatgccgcaccacatctctctatccatactgtacctgctgcttgcgagacgggcatttggcttcttgttctccggacatccgccctcgccgtccttgcggcaattttggcacccttgcggacagtctttggcatattgtttctcgcaacagtagtaacagctgcacgacacatacaatgtacagtattccttggagcgatcttc

SEQ ID NO: 53428 - DNA, 793 bp, Heterodera glycines
atgaacggcgctcatccaaagtcgcccacgcgagagacagaatatgcaccgggcaaaatggaggtgggaaaatggaatccaattcgtacaattaagctaattgctttattatacttaaaaacactgattaattgtttttcaggtcagcgaaccgccctctctgagccgcgtggaccgccccattgaactgagcgttaccgtgacgaaccctgacgcggttgtgcaggcccaggcatacggtaggacgcatttgaaaaaagcgaaaattccaattgaaatgccctcattcacgctaaaactaaatcatggcacagtccaattgggcaccaccttcacgcatttatttgctgttttcccattgtttctgacgtgttgcaccaaacccaataaaatcgcaccctttgaaaagcaaaaattctttcagaaatttgaggccttggtgtttttgcttaagttttttttttaaacttgaggcgccccaatttattctcattgatagaagtgaacagcagagagacagtgccggtccaaattcaccaggacgggccaaccacgcgacgcattgtgttcactccgcgcagagttggtcagtgcgtttaatatttgaaaggagactaataaatcatttagtttcaatttaaaaaatctgattttttatttgggcatttaaatttgcaggtgatcatgaagttcggttgcagctgaacgacacggaagtggacgagtcgccactcatttgccgagtctatgacccagcaagtgagggaaatcaaaatctattaatttaaataaa

SEQ ID NO: 53429 - DNA, 1616 bp, Heterodera glycines
caccgattaagcagcttttctgacgcttttaccttctttttgccaggttttgcccgctactttgggcatcaatttcccaccggcatttgccatgctccgtcacattgtcccactcgaaaagggcgactttttggtccaaaatgcgtcaaattgcggggtcggccgagcagtgatccaattggccaattgttttgatttgctttccaattcatttgcttaaacgacggacggaccattcagactttggctaccacaccattaatttggtgcgaaacagaaaggaaatcgacgcactaaaggacgaattgaaagcattgggagccgactttgtgtttagcgaagaggaatttgaaaagtgaaatttaaagcgaagcatcccatagattttcagaccaaaaaaaagggtttagggcagatgctaaaagcctccctaagccgcggttggcgttggattgcgtcggcggtcgaagtgcccttctcctctcctccgctctgtctaaaggcgatacgattatttcatatggtgggaaagcgacgagcacttcaaaattgggggattaaaacaagcttatttaggacaattgtcgaataaaagtgccgaaattgctgagggtatcaattcgcatttcttttccattggaaaatgggtcggaaattcggcgaacggagaaaaagtgcgaaaaatgtttggagaactacagaaattggcattgagtggacgaattaaagcacagccgcacaaaataaattccttggaaaattacggaaaagcgatgaaaaatgcgattggtaaatgaacggaggggggggggcaataaaaatgaaataaaattgccattttaaattaaaaaatgcctttgccttaatttttgtgtttttaggctgtggcgtcaaacaaattctgatgatttcgccagagaatgaatgagttaataacggaagcaaattgaagtgaaatgtgaccatttataacataatataacataacattgtttccatggaaacccttcccaaactttcgaataaattcgcaattttacctaattttgtgtgttgaaatgggcaaaaaggacgttgccgcttcggactcaatttggcacgaccgggacgtcctgttcgacttggacacccggtactgttgcggtgttcgcttttggcttgccatgtgtttgggcaaagacttccaaattaaagacccccccccccctctcgcccatcggattaattgatgaccctttcagattattacgactaatcgccggcgaatttatcgtaagttggtttatctgctggtgttaaaggtcgggctggcgagttcaaggccgtagggttttgcttaggtggaacgaattgacaatgtggaggacacgaagggcaacaacggggaccggggactgttgcgcatttcgaacctacgcctcatttgggttgtttgtggccaagtgttggttcatccgctcactttgctcttcgtcagcacgccgtctcggcaccgcgcattaatctcagcatcggatacaacacaatcaatggcattaccaccagaattgccaaatcggtgccatttatccaattgagtcgagaatttcactcttgaaataatttgacagaaaatc

SEQ ID NO: 53430 - DNA, 123 bp, Heterodera glycines
atgaacgaggcgaaagagaagggtattcagcaaaatcgaagccatcagctgatagccgacgtttggaagttcgacatgaacaccgcccaatgggtccgaatgcgcaacaacttggcgaaggcg

SEQ ID NO: 53431 - DNA, 1762 bp, Heterodera glycines
tccgtgtctccccattcgctgccaatggccaaacgcgccaaatcgtcgtcccccgccctctctctgtcccattgtcagttgtactgctcgctgcttctgttcctcctctccatcctcctctccgtcctcatcacctttcttctcacccggaatgccattcgatctcaaatagaaagggtcaaccaaaatgaagcggtgacggcaaaactcgtcgccccccacggggccattgcttcgctgaacgcgggtcatgacatgtgagtttttggaaggagttcaacccgtaatttgatcgatcagaacacggctacgcatgccgggaaagtcactgttggccaacgcacggccgcgcggaaacgaaacggcggacgaagcgaaggaagagcggccggaaaagcggaaggagccgggcgcggaggagctgagattgtccggagaggcgcgttcggccgatgcttcttcgttcccttattttgccatttcagcttttccccatttggtacaatttgtctctgaaagttttcgtccccggctttggtgccgaaatttcgccccaactcaatttgacctttaacggagatttgcttctgaattttgccgttaatcggacaacccgaacaattgaattgaacgcgttaaaactgcgttttgatccgaataatttgatggcgtacgaattgaaaaggacggacaatttggcaactggggacgaggtggacagaacgccgaaagtgatcggaattcgggtggatgaagcgcgagaaaaggcgagcaaaagggcgggcaaactgtcgatcggagtgccaacatctgttaaaaacggtccttttgaaggtgttcttcgacttggacggcgatttaaccctgggaaatcattacgccctgcgggtgatcggagccaacgaatgccccgctaatgctcacctttctctccttctcgtcagattccttattcgggcccaatcgcctccaaattgtccggcctttacctgaccacgtacacaacgctttccggagagcacaaatgtgcggcagtcactcaaatggagccgacggatgcgcgcagaatggtaaaaaaagggggagggtggaagaggtgggcctaattggacaatttggaagtgattagaggcgaatccatttgtggttatggttggtgagcctaattagtttgctaatgaaggtgccctccttcgatgagcccgaattcaaagcgatctttcggctgagtgtcactcatccgaaagggtcgcgggcggtgagcaacgcgaaggaattgcgggagcagcagcaaacgtgggggaggggtggacgaatttgcaaatggatgaagcgttttccagggaagagacggaatggattcggacggacttcgaggagactttgccgatgtcctcttatcttttggcgttggtcgtttccgacttcgaattcgtcgagggaaacacttcccgtggcacccgcgtttgtttttcctttccattggcactttgttctcattttgtttttcatttagtttcgcatttggtctcgtaaagatgcacttaatttggtcagtcccaccatttttctttggcatttcgttttgctttgctcagacttcgtatgcccttcgggcgggcataaaagtgttggagttttacgagcagtactacggcattcccttccctctccccaaacaggacatggtctgtctgtcccatctcaactcttttctattcgctttgtccttccctttcagatggctttttcccgattttgc

SEQ ID NO: 53432 - DNA, 469 bp, Heterodera glycines
atttacctcacccgcttcaaataccgaaacgcggaacactccgacctttgggacgcactgaccgaagcggtgccggagggaatgaaggattggaagggcaacaaattcagcgtcaagcaattcgcacgccaatggacagaacggacgggctttccgattgtgcaggtcccttcggccaaaagccaccaaattccgtccccctctttttgtccaggttaaacaaatcgacgggcagcgagtccaactgagtcagcagcgattccgaatgaatgcggacgcggcagaaacgggcgcagggggaaacagcagcggcacttgggaagtgccggtgtggtggagcaaagacggacagaacggccccatggaatggctgaaggacggtgggtcccccgcctccgtttgcattgatcacccaattcattgtcagagtcgtccatcaacgcgtccgactccgccgttttggtgctga

SEQ ID NO: 53433 - DNA, 820 bp, Heterodera glycines
taattaaatccattccttcggggaccgtgccgagtgccgcggggtaagcagtgctggttcgtttcatcacggcaccgaaccttttggctagtcagcaatcgttgcttaacttgccagatcggacgggtgcgcatgattccactgttccaagcaccccaccaaaagcaaaacgatataaccaaaatataaggaaaaattttttaaatctccatcttcctttttgatactaaagcatcagagtgctaaaattaagttgtaaataaaattttggtgcgctttagagcactttctgaaaaaaatatttatgaaacaaaaaaatcgattttttcaagtgtccgtttggggtactcaaacatttatggggagcaaaaatccaacgcagaattaaagtacaggctatagggaagctattcccgaaggattcggtctccccataaatctgggcgcatcggttcggggggactgccccgaaaacaaaaaaatcgattttttcaagtgtccgtttggggtactcaaacaattatggggagcaaaaatccaacgcagaattaaagtacaggctatagggaagctattcccgaaggattcggtctccccataaatctgggcgcatcggttcggggggactgccccgaaaacaaaaaaatcgattttttcaagtgtccgtttggggtactcaaacaattatggggagcaaaaatccaacgcagaattaaagtacaggctatagggaagctattccggaaggattcggtctccccataaatctgggcgcatcggctcggggggactgccccgaaaacaaaaaaatcgatttttt

SEQ ID NO: 53434 - DNA, 1584 bp, Heterodera glycines
atgctggcggatcaacagaaaatggtgcaggaccaatcacagcaaattgctcaactgattgcgatcggacaaaacgcaccaaatgcggcggcacagcccaatcaaggagcaaattcagtgccaatattgccggacatttcaccattcgagccaacggacgacaagagccgaatttcggaatggattgagcgattcaaattcgcgttggattgcacagcaccaacggcggacgacgaagtcaaggttaaatgcctgatgaataagctgagcgaatcggcattcagtgaatacagcagatcagttctgccatcgtcggtcacagatttaagttttaaagtgacgaccgaaaagcttgagaagctatttgccaaggctcagtccatattcatcgaccgctacgagtgtttaaaagcggtgagaggagaaggcgaacaattcaggcagttcataaatcggcacaaaaaattgctgaccgattttaaattcgatgagctgacaaaagagcaatttaattgcctcatgttattgatggcactcaaagcgcccaacgaagctgcattgcgacagcgaattctgacaaaattgtcagcagattgcgccaacatcagctatgatggagtggtggaagacttaatcagcttccaatccacaatttcagaagcaaaggcaatcgaagcgacaagttcttcgaggccagtgaattcgattcgacaaaattcaaagccgaacaattcaacgaacaaatacgtcaaggaaagtccaaagccaaataatttgccgaacaaattcaaagaaaggaccaacactgaggcaactacaatatgttggcgatgtggctttggcgtgcatcgacctgacgaatgccgttacaaaacgagcaaatgccgcaagtgtgagtttgttggccatttggacaaacaatgcgagcgtgtccaagagtggcgcagacgccaaaatgccaaaaagaaaggcaacaaccgcgttggccaccttcgtattggaatgaccacgcatgccgtcaattccatttcgctgctaaaaacagcggttctgttcaacaagaagccagtcgaattccatctcgacacggggtcggacattgtcgtcattgatcaattgacgcaccaatatgttggacgaccaccgatcgaaaaatgcaacgaaattggcaaggctttcgacggcacaaaaatttcctttattggaaaaggattcggtacattcaaatttggtaaaattgaagtggagcaaacattttttgttgccaaagcaggctcactaaatttgttgagctgcaaaatgatggacttatttgggcttttagacgaattaaagctgaagatcagcaaccctgcagtaaatgcatgccacgcgaatggcaaaaaggctgagaattttatcccgaatgaagcaacgcagattgctgggacaggaaccgaaattcaagccctggaaaaagaatttcacgaaattttcagtgaggaattgggccattgcctaaaggagaaggctcatcttgccctaaaagatgacgcaaggccagtctatcgcaaagcccgaccagtaccctacaattcgttagag

SEQ ID NO: 53435 - DNA, 812 bp, Heterodera glycines
atggccgaacttgagcaggaagtggccgatgatcagaaaaatgcgcagcaaaaggacccatcccgcgcttctgctcccaaacgtatggaattggccaagaaattggagtcaaagggtaattacctctaattaggcattaagcacacagtaattaaactaataaatttccagggatactgtacgttcgtcaccatcaacaattgaagaatgctttgtgtggccaaaaaaagagtggcaaaattggacccacggagaattttgtccttttcagcaacaaaccgaattcctcgcccgacactttgaagcagttttttgtaaaatcacatttcaaaatgctcctaattatttttaaattcgtttgtttttcttttagttggctcttcactatttgttcaaattggccgaagcgggcaagaattgtctgttcgtggatttggagctgttttcggacgggcacaaaaagacgcaaatgccgaaagtgatcagcaattcgttggacattttcccactgatcggcgcccgactgatcaaaatgagcggtgatcaattggtgacagacgattgggttgccaaaaagacgcaaacgttgggcgtgtgcactgcgcgggtgggtgaaaaaacatttgggcatttttgtaaattccgattttaaatattaccatttcagtcctctgactctgaaaagatcccttctcctgctgaccaacttttatggccctgtcatttgccgtgtccttgtgccgaaaaattcggtggtaaatgccgagacgacgaccatttttggggatgtgaacaatgcggacagactttaa

SEQ ID NO: 53436 - DNA, 541 bp, Heterodera glycines
atgaagaaattttccatcatcccaatgccgcttttgctggtggtggttgtcctgctaataatcccgtttgtcccttttacgctttcacaactgtgcttgtacgacagtgtgacggagagctgtctgaaagtcaattgtctaaatgaatgttatgttgatagtccgggcacgtgcggatgcaatgcgagagtaagcaaaccaaaggcgcctaattaggcacagaaagtttaggtcattatcgacttgagtgtcgagaaatttttcgagtttttttgtctttgttttcttgaaattcagtccaatgatgccaaaattcggtccgaaaaaatgctggatagcgggattctggtagccatggaacatacatgattcagtcccgtaacccgaaggcttctagattgttataaattttgtagagatatatcgaatgatactaaaagattgttcaatttgatagattttttgaaatttttatttttcattttattattatgagccacccttactggaattaattaatatcaattcttctaaagttcaa

SEQ ID NO: 53437 - DNA, 1913 bp, Heterodera glycines
atgaccgccgccgccaatggctttgctttttccacggattggtcaaacggcggggcgccgccgcgatttgggtgcgaatttttgcgggggttcgaaatttaattaaaaattgtaatttatttggaacgatttgattatttaccataaatttgcaggaaacaacgccgggagcggaccaccttctcacgcgcccaattggacgtgttggagggcgttttcaagaacacgcgctacccggacattttcgtgcgcgaagaaatggcaacgaagatcaatctgcccgagtcgcgagttcaggtgggaggacacgggcgagcagggcaatgatcggcggataaaaccccgggggggggactgatgagtaattacctaattaaggggaggaaaatcccacaccccccccccctctaatttggcaatggacaatgattgacaataattgttaaggtttggttcaaaaaccgaagggcaaaggcgcgcagccaaaagaaagcccagcagatcaccccccccccaccaggtacagttggggtgttcacacttcccattcgtcctgtttttcttagtccgcttcttcctcctccggttcctctgtcgccggctccaatccgtcctcagccgtcgaccaccacggcaacggctcctccaccgcctcgtccggctccaactcgtcgctggagagcaatggacactctgacgacacacacttggtaattaggacaaaattcgcttttaatttcttaattttgctcattttagcttcaaatcaaattggagaagatcgaagacggcactttgaactcatcggcacaaaacggcggcatcggctcgggtggtatttcgcccggctctcaactcgaagtgggcggaccaccacagagcggtgggctgtcgtcatcgtcggcggatcatttgtcgaaaatgggtggttgttatttacccggcacggctggcatttcgccaagtaattttgaaagcgcgtcaatccgagactccctcgactgatcaatgaatttttcagtgatcggacaatacacctcatattacagtccgttccgcaacggtgccgcccatccgtacatggcggcgtacgccccgtccgcctgctccatggacatgtacacagctgcagtgagttttgctcttcccatttcgtacaattccattttatgagtttaatgaacaattaattcccaattaaggcgtaccccgcggtgacaatagcggcggcggccaacatgaacattaattattcggcagcatcgaacatgaacggattcatgaatggttgacaatgggaaggacagaatgtgaagggacgacgcagtgaaatgatcaaaattttacaattttttcaccgatcaaacgaaaattcttacaattagcagcacaaagaacacttttgatcggagaaacattgcaaatcggaaaaatctatcttttcttttcttttcccactacattttccacccgtcgattgatgcaatattccggaaagtccaaatgttctttaaaaaataattatcgagatttatcccttcatttgaaaggctgagattttaaacgagagaaagagagagagaaaaaacagtttaatggcaattcaaataaattttatggcatttcagactttggcataaaatctcagaccgtcaaaaatatatcagaaaatgtataaaaatgtagaagacacataattaatttaaaaccatatcattgtcattcgtccatttcgtcgtcacatttgcacttctcagcccatcccaatcattcactcgtcaaaatcgaagaaaataacaatgaaaaagggcaaaacgaaatgggagacggaaaaaggggaagaaagtgaaaaggggcgcattttgttaatttttaaaactgcaacttatgtaattaagaagcatttgtttaaa

SEQ ID NO: 53438 - DNA, 421 bp, Heterodera glycines
gcttcctccggtgccgatgccgtccgctcttccgctttctcttccgttttgcttggccctgcttttcctcctcctcctctctccgtccccatgcttttcctcgtctcctcctgacgattcgccaattgtcagcaccaaatttggcaaaatccgtggccaacttttgcacgtcgtcgaccccgtcgatggccaacccgtggcactcaccgcctttttgggtgtgcccttcgcgcgaccgccgctgggcaaattgcgatttgaggcaattgaaattgtggcaattaatcaaatagctgaaattttacagaagcctttgaaaccggaaaaatggagcggagttttcaatgcttctgaaatggcacccgcgtgttggcccattgcgcgtgccgaaatttatgcagaggttcacaatgaatgttga

SEQ ID NO: 53439 - DNA, 1233 bp, Heterodera glycines
atggtttcttattagcaataaaattaaaactaataataaatttaaatgtttctatttatattacataattgatttaaaattaaagttataatcggaaacattgctgattttcatgttaaaaaaaattaattacaatatttgtcaaatttttgtatctcaaaataaatcactaaaaattaaggaattgttggatccgggcaaaggattttacgacaaagacgagaacaaagtaaaattggccattgatgtcattgtggatgagccaaaaactgagaaaattatttccgatccaaacaaatccaacggcacactttcgatggaaattgaaaaactatcggaatttgagcgagaaatcgaaggaagtcatcgtaaaagtgaaactgctgtgtacataaagggaatgccatggaaaatatttgcatatatcaaaatgaaaaatgaaagcactgagaaatggttgggctttgcacttttgtgcgacgcttctgaaaaaggtttgcttatcaaattatataatagaaataataattattttttctataaaattggtgtaattaattattgaaaagacttatgtaaacagtaattttttaacataaaattagaagtgattttttaaaggaaatgcgttaaaatataaatttgattattatttaatttgctttaagatggaaattggagccgcaaatgttcgggaacacttcgaattgtctcgcaaaagaacggtgtggaggattttaagaaagaactcgatgaaacagtttttaacaatgaatcgaagtcttgggggaacaatttcatttcatttgtggtgagtggaaattaattagttaatttacattttaataatgtaatggcaaattaaggaattaatggacccaagcaaagggttgtacaacaaagacgaggacaacgtcaccttggcaattgattttacatgtgaatagcgtaaacatttcgagatggattgaaaagtgaaaagaaggaaatcagcaggatgagaagagagtcttggagggcacaaaattttcttggtgcttaaattttatattttttttatgttttgtaaagtattttggtttcataaagcaacatattccaatgatagggatggatttttatgtgctaaaatcgagaaatatatatacctaaagagttgataaaaaggcagaaaaatttgctaaaatgcagaaaaatgccaaaatagttgccaaaaaattggaaaaaatgtca

SEQ ID NO: 53440 - DNA, 938 bp, Heterodera glycines
  unsure (1)..(938): unsure at all n locations
atgtcattctgcggnagttttcaacgacttggtagatcttcaaaagatgctcctgaaatggttattgattgggcgaaaaacggtatattatttataaccatttagttattgaacatattttgaaaattcagaaatatgtgcccatttttccattcccatcgaaattttcgacaacgtagaattcacagaaaaaataaaaactgtgtatccaatgttcaaggatgtcaatactgacaaactatcgacccatcgccaatgtaatttttgtagttttttatcttttcactttgaatttttagttgtgtctgacatttgcgatgaaatagaaagacgcaaacgaatgggttgaagacgcgaaaaaaagatcagccgaacgagttcggtgtgaagtgaacggactgaaggtgctgttctggagcgagggcatcgaagatatttacttttatttagctgttgtcactttgaattttgtaatttatatcgttaactttgctgacataaaaattaacacaccgtttaaaaaattagttagtgcaaagaaaaatctcatttagcgagtcacccccaactcatccaaacccaactcatccatacccaactcatccaaacccaactcatccatacccaactcatccatacccaactcatccatacccaactcatccatacccaactcatccatacccaactcatccatacccaactcatccatacccaactcatccatacccaactcatccatacccaactcatccatacccaactcatccatacccaactcatccataacgctgcgagtcatcgtcgtggcatggcattttctgcttatgtggtcttgaccgtggacatttttgattatgccggtcttgaccctggcattttttggttgtacggtcttagtcgtagtattttttggttgtacggtcttagtcgtggca

SEQ ID NO: 53441 - DNA, 760 bp, Heterodera glycines
atgcaacgcaccctggccgactacaacatccagaaggaatcgacacttaaactgaaaaaaacgcggctgtccagccgaggcgtggacgcgatcatcacgaaggtcaaccgttcgccccctcatcgcttcacggatgaggtagaaaaatttttgagtttttcaaaaattaattttcccccttttttttccccaacagatcagtgacgatgaaatccgccagctctcgcaaagcggcaacggacgtcttccgaatgcagccgacgctcgtcagaatccacccgccggccgtcatcgtgggcgacatccatggacaattcgcggacctgaagaagatcttctcaacgcatggcctcccgccggagcagcagtacgtcttcctgggcgactacgtcgacagaggaccccagtcgttggagacgatcatcctcctcttctgctacaaggtgtggtttttgggcggagggggccccaaaaaatgaaactcatttcctcccatttttcaggtgaagtacccctccaacttcatgctgctgcgcgggaaccacgagtgcgccaacatcaacagagtgtaagtgaaaaagttttttgtgtgtttttttgtgattaatcattcccccccccccattttcagttatggcttctacgaggagatcgaccgccgttacccgcgaccgggcgctcgtcgactcttcgacctcttcaatcaagtcttcgcctggatgccattcgtcggactggtcggcgagaagatcctctgtaa

SEQ ID NO: 53442 - DNA, 3488 bp, Heterodera glycines
atgagggggcgaacggttgaccttcgtgatgatcgcgtccacgcctcggctggacagccgcgtttttttcagtttaagtgtcgattccttctggatgttgtagtcggccagggtgcgttgcatatgtttaccaaacgcacaaataaatggtgcacatgtcttttatttctatgcttgtttaggaacagaaacatttaattgttttatttagtgtctgtattttattggaatatctcttccagaaagttaaaaaatttgaaatgtgaccggaaatgccaaaaatttcaatctttttaataattaagagaaaaaaattttcatttaaaagatttttttatttttcccatgatagtctgctaatatgaagactgatttacataaatgtgatttatcggcacaaagtataaattaattaggagaaaaaactgttgcgaaaagaaatctaaacccaaattacattctgttgtcccaattgttgactgtgacaaaagggtgggagattaatgaaaattgcatatatttaccaaacgcacaaataaatggcgcacatgtcttttatttctatgcttgtttaggaacagaaacatttaattgttttatttagtgtctgtattttattggaatatctcttccagaaagttaaaaaatttgaaatgtgaccggaaatgccaaaaatttcaatctttttaataattaagagaaaaaaattttcatttaaaagatttttttatttttcccatgatagtctgctaatatgaagactgatttacataaatgtgatttatcggcacaaagtataaattaattaggagaaaaaactgttgcgaaaagaaatctaaacccaaattacattctgttgtcccaattgttgactgtgacaaaagggtgggagattaatgaaaattgcatatatttaccaaacgcacaaataaatggcgcacatgtcttttatttctatgcttgtttaggaacagaaacatttaattgttttatttagtgtctgtattttattggaatatctcttccagaaagttaaaaaatttgaaatgtgaccggaaatgccaaaaatttcaatctttttaataattaagagaaaaaaattttcatttaaaagataaaaaattaattttaaataaaaaattatatttctttttaactaattttttttcatcaaaagctaattcgaccgttgctgtacgcttttgtcgccatctcagcagtcacccaattaactttgggcacagatgaaggtgtgaatttcactctatttatttataacgtttgcccatagtcaatagcgtgcttaattaagtggctgtcatttgcagaaatattgtcaatcatccgagatgagaattgagcaatacattcggaaaagatttatttggatatttaattttgccaaatatccatataaaaatgagcgtagtaaagtgaataaattgcaaaagcccttataattaggatgttgcgaccaattaaattaatcctcttccactaattagcaggaaaaggatttccaggatttttatcttttttttcgcggattgcattttacgacgtgagattcacaaaaatattttctccaatttcgagaataaaattcaaaaaccccaagtcggcgcttatcacaccgccgaacccaactgacaatactgattgacatcatattaaattatgaatccaccaaaatgtctcctttaattgattcaatttgttaaatataaatttatttataattgtctctattccatacaaaaatataaaatatatttaattaatttttttttacgtataggaattatttggttgtgcccaactgctgagagcgcgtcacctgttgcaagcagttcacctgcagcagaacaacccaaactgggaatcatggtggtaagtgtaggaaaatttttaaaaaattaattttaaataaaaaattatatttctttttaactaaattttttttcatcaaaagctaattcgaccgttgctgtacgcttttgtcgccatctcagcagtcacccaattaactttgggcacagatgaaggtgtgaatgtgggggactgatttaatccagaaaaaaattgttgtggtactgtcatactgtaccattacagtaccgcagcatttaaatttatttgcaaattatcttcagatatcgacacatttcgaaaattgatgaacgagtacaacactttgagcgggccagcatttgatgttttgggcaacctgctcagtgttagtgaaaacagcaaattgttgatgaagctaactggcccagccggaagtttgcttgcggcatgtattgagatcgcctttaaggtcaacaaaatattcttctatgccgggatggtcccaggattttgatttgggcgagtggtgatttagccaccctctgggcgaagaactttttttaaatttgagtgcaatttgtctaagaaattttgtccaaaaaataattgtgaattttttgaaaatttcgccaaatttttttatttgttgagaacaaaaaagccgggacatgcgggaaccgtaacataaaaaagtggaataccgtctcggaaccggggtcattttctaccctaattaattaatttggttaatccattcttttcaagcccgaaagtcccactctgaaagcacttgcaacatttcacgactgggcggaccgaaaattcacggaacagaacaatatggttgagattgccatgaacagcatcagagtcgcgcatgacttaaatgattttgacaatgttagcaaactcgagttgttaataacaaataaatgtttttatttaattagaatgttgatgtcccattggcatggttgtccgacatttttgaaacagtgaccaacccaaagaccgtgagaagcgccaaacaagaattcatctcagcgtgtacccaaatgttctcgtcgccgaaaaaaattttaaatgtgcaatttaaataaaaataataaatatatttttcatttttagtatattaatgaaaaggtgaacgacaattgcaacacaatgccacggagaattatgccaattctaagcgagctgagggctctttttgctggtgttttttggcgttacgatgaacagaaactgacgattgagtacaatgaattaaagaaaacgtatctcagtaagtcaaaaaatttagattaattaaaattgttcctttcatctagagctggtcgggaccgggactggtactgaaaacaacgggtacaactgagtacccagtcccggttttgaccagttttgaccgggaccgggactagtcccgggtttttcccggttttccagccaaaaagtcccggtttttcaacccgaaaattcccggtcccggtttttgtcaaaaatcccggtcccgaccagctctactttcatcgaataaataaatttatttattttttaatattcaggagtgctcgaaaaatttgcaattgcttctgaagaagatgcacgagaaatcttcatccaaattcgtgatt

SEQ ID NO: 53443 - DNA, 1799 bp, Heterodera glycines
atgagatggggagcattggacgcgcgagaaacgctaaaagatggtttgacaattggcggttgaatatcagcgaaattataaggtgttttattattaaaaataaaataattatggttaataccgtatatgctctaattatagcccagtctctattaatcccgcagtctccaattatccccctccccttctgaggagtttaaaaataatccccctagtctccatttatcccccatgtgggataaatagaatttttaatttttcaaaatttttttaaaattttaataaaaattaattaatttaaaatcaaaatcatttaaatgtttaatgaacatgaaaaaataatacagccgaaaaatcacttactttaccgggatccgaacctgacccacctccccctcataataatgcctcagaatccacatttatgcagggattctgatgccttaacgaagtcttaaccaaaatctaatttcaaattctctatcagcgcctaaaataatcctaaagatatatttttggagattttgggacaaaaaatttttccactcaaaaatcatatgcaaccccactttggtcccgaatcccaaaatgagtttattgttaaaacttccttcaaaaaagaaaaatattaactaaaatacctaccccttataatacaaaaaattgcggatttttctagttttttaatttataaaaacatcttttttcagaattgagtgctgaattttttctcaaaaatgaaaaattttcaaaatttaaaaacaaaatcccattttctgaaaggttcatatgtgtatctgaatatttttgagggttttgtcaatgttttgtaaatatctttggaatttttcaatttttcacgcaaaattcagaaattttttaacaaaaatgcaacaaaaaataatttttttgacgcgattacatttttggcgacatgttcaaaacaaaatgttttttattcataaatcagtcgaaaaataatccctcagtctccctttatcccgcagtctctaattatccccccttttctgaggaggttgaaaaataatcccccatgggctataatcagagcatatacggtattttattccaatctcagtaccaacgacaaagcccctgaattgggcacattgacgaaagcgattgttgagaaagtgggcccaatcacttccgatccattctaccacagttttgtttttcttcacgtcagcgctttttcttcatcaaactgcaaaataccgaccggaatttcaagcggttcctatatgggacaagaaggatttagttttttggaggtcaatgaccatcactgggcaccgcgtaatgaagaatgttttaagttattcttttttctatgaaggattaaatttttgcttaaattagatgttattttaatgattctgaattttagaccgatttatcagaaatttcgacaattttgaatgcatttttccattttattttaaataaatgttaaaaaactgaaaggtgtatttatcgaggtcagattttcataaaatattatctgtataggatttacaaggaatatttgtctatcaacatgaaaatcagggatatgactgggcgtcaataacaaaagtctttaaagaacctgtgatcattaataatagattcaaaaacatagtgatcaagtgttattaaaaagaatgtttttgaattttttttataatcaaaaacccaaattgtgattatgtggacatggcgcccccacaaaatgaccaggccacgaaatgtccaaaagagtaaaaacccacgaaatgtgcaaaaaattaaagtta

SEQ ID NO: 53444 - DNA, 58 bp, Heterodera glycines
atgagcgcgctgtctgatacattatttggctctctaaaaattattaattttaagaaag

SEQ ID NO: 53445 - DNA, 335 bp, Heterodera glycines
agccctcgtggaatgtttggccaaatataaaaagcccgcgtgcaaaaaaatatgtccaacaacgaaaagcctcgtcagaaaagtcggaaccgttaggaggaaagtcagcgcattgctttggcttaaaattggtgaagaacaatctgaacaattggacttatgcgaagaaaacaatgagacggatttcggaattgccaatttgtttaatgacaattaattgcatttaattgttttatgcattacataacacaataagcgtattaaatttgttgattgggacaaaaggtcgaagccgtggattaagaagttttatgagtcggtctcttttaaataaa

SEQ ID NO: 53446 - DNA, 338 bp, Heterodera glycines
atgcggtaaattaaatattataaattacaattatttattttctaaaattaaggcactccgttggtccgacgaacagtgccgtcaaaaaggcatcgaatgttccgctgaaaatcgacgaaaaatgcttgacccagttttgtccaacattcgttttccactcataccaaaagaggattttacaaaaagcgttggtaataaataatattttgatgattagagagtttgctatcttgaaaatgcttgaacctggcttggattccttgttggacctggacctgtaatggttccaagtctggattaagggcttttcataattataccgtatttcctcgaataaa

SEQ ID NO: 53447 - DNA, 988 bp, Heterodera glycines
atggaggagaaagaaatggaatggacggagagagagaccgaatggacaatgcgattggagaacggggagagagagttggcaatgatgagagagctgggaagagaacagcggggacaacagagacgggtgggtcagtggaaatgagaagagaaagagaggagagagagagagagggagagaaaaaaggagaaagagagagagagagggaaatgtgagaaatttaagaacttcaaatgaccggaaagtacataaaatagagaatcgtggtgagccgaagtaacaaaagtctgaatgtttgtaattaaatttaattattattttaattaaatttgctaaataattaatcataacttagcctaaactttgtcaaattaatgaaatttagtatttagcgacagctcaaagtatcctctactatttatgtatttttttaaaaattttgcaaaaatttacaaaaagttgtaaccaaaaaagtacgaaaaattttgacttaacaattttgaccctaactttattgaagttcaataaaatttttcgaaatttaatataataatagagaaatctttgggctatctaattatataaacaaaattaaaattcattcattcagaaaaaagttatgaaggaattaatagtgtcatatttttatggctatccaaaaaatgtatggtcgtttaaatgcatgaaattgtttaaagatcaattaattcacactgcactttatatgaaaagatagcccaaagatttctctattattttgctaaatttcaaaaaattttattgtttcaaaaaagttacggtaaaattgttgagcccaaacttttcgagcttttttgtttacaactttttgtaaatttctattaaatttttaaaaattacatacctccatttagaccatttcaatcccggacccgaattcgaaaattttcttaaaattcataaaaaatttgttgtagtgttgcttatgcattgatgctaagaaaataaa

SEQ ID NO: 53448 - DNA, 981 bp, Heterodera glycines
atgattatttcctttttgacccgactcgtccttcttctcccacaaatttcctacacggactctgtacgtctcgaacaaatcgctgaaggaggcagggaacgacagaacggtaaaaaaaggcataagaaaaagaaagcaaaagaaataccaaaaatggaaaaccaatcggcagaatttgccaaaggcgcgccgcccctcgcggcgtttgtcggcggagcgaatttcactgctgcaacgacggaattgcgaaaagcgtatttggagcgaaagaaagcgcgcgaggaaaaggcgaagaggacaaaggcaaaagtgagggaaaagccgacgagggaatgcattccgatcgatgacaaccgaaggaaggcactgatccaagtgggtggtaggctgatcagaggcaacgcccgcggggaggagacagggatggcacttgccgaactgagtcgcacaaagcccaatggcatgccgccattaggcccttcccatccgctaattgaccaaaatgccgacactcgctccccccgtcccatttagggtctgttcgccgagaatcactacgacaagaacaatttgccgtcctccaaccacacttcggtgatcgtcgagctaacagtgcagagcataacggagatcagcgaattctccagcagtttcaaagcggacgtttggttcaggtgaagcaaccgaccgatgaatgaatgaatgaattggtgcgtttgtgccgaaatgattttgccgtttagccaaatttggagggacccgcgcttggacttctcttcgctgaattattgtctctccaacatttcgctgccttctcacaaattggtcggtccgtttcgtttcctctaaaaggggcgaatttaatgccatcccctcgacctgtccattaccgtaccattttctcaccgtaaccgtgccattaccattactttctgatccttttttgttaagagttctctttggactccgaatgtgtgcttt

SEQ ID NO: 53449 - DNA, 343 bp, Heterodera glycines
atgccacaaaagcgtcggaaagaaacccgagcgatcaatcgaattcgaaaacgccgtgcggagttggaattgttggtgagcggcaacaaggatggtggacaaaatatggacagcaaaacggacacaaaacgggccaaagagacgaaaacggaggacgaaggttagcggcaaattgtggggttgatttaacaaaaagtgccacggataaggcaatgattgggtcaatgaattatgatttcaaattcatgggatttgctcgatagtgtcattttcagagcatcttttcgcggaactgcgccagcagcatttgatttctcgcgactttttgagtttgatttgctga

SEQ ID NO: 53450 - DNA, 136 bp, Heterodera glycines
tatgtttctgatcagcactgtgctgttcagtgtgccttcctatttgttcgccatacgcaatgatcgccgactgcgcgccgtgacgccgtacggcggtgtgttggccatgctcgcttggttcagtttcgtcctttga

SEQ ID NO: 53451 - DNA, 580 bp, Heterodera glycines
atggatgagctggtgaagccttacaacaaaatcattgactacatcacattcaaaagtgggattaccgagaaaatgctcagcaaagtcaacgtaagagaaaatgaagaggaattttacttttaaatgctaaaatcattaaattgtttattactcattaaaaatcatttttgagccatccaatttctgctcaaagtcgtgccatttttatttttagactcgtctgaaggacattcaaaagcgtttctgtgccttgctcaccgacgatgccattctgtgcgggcacagtttggagaatgatctgctcgccctgcaattgtcccacccgtcagtcccccccccttcatttcgatttattcccccttttcctattattagtatttaattgtatgattaatttcagtttttgcattgacacttcgctgttgttcaacttttctggccgtgcctttgtgcgcagtggcctcaaggcattggcggacatttttctgaacgaaaaaatccaaaactcgcgccagggccattgctctctgcaagacgcaatggccacgctaaagttgctaaagctgaagctggaaaatgg

SEQ ID NO: 53452 - DNA, 84 bp, Heterodera glycines
atggccaactgcggcggcggcggcgaccgatgtgctaaaggatgcgatgataatgaccctaattatggtgataatatagggatg

SEQ ID NO: 53453 - DNA, 1991 bp, Heterodera glycines
atgccatttcatcaacaaacgcaacacacagcaaaatgcaaatggaaatgccacaactgcctgcgtgttgggtctgcctttcgaggaaactgcgtccaaggcaatgacaacttttttgagacctgcttggggtgcaataaagtaaagttatttgagtttcgtttcaaagaattttttttgtttagacatttaaaagtcgtgaatgctatgaacaccatgccaaatgtacaaactacagggtcaagcgtgacaacgaacatgaaattgtgggaaaatcaatttgtaaaagctcgaagaaatgcgtcgactgtggcgtgatttaccaaattcgggttattataaaataaaatttttttattttattaattttctctttagcatcaccaacaaaaagagcatgtttgcggtcaaaaattctgcaaaatttgtctcggcttccatgccccgcgagactgctacataccataccggcctaaagtcaagaaggagaagcgcttcgtcttctttgactttgagtgcactacggatttcaagcccgacccgcaactcatgcggttcaagcaccaggtaattatttttttttgaattcaaacaatttaaaaaaaacaaaggtcaacttctgcttcgcccatgtgacatgcacccgctgcattgagaagggcatttgggaccaggagctggagcgggcctgcgctctctgcggccgattccgaacttatgcctggtctccgtttgagttctggcacacggacgtggaatgccgcaaggtcgtcgaggacccactggctaccttcaccaagtggttgctgaactttgaaacggaagtcctcggcatggagcccggagcgaagaagcgcagaaagaggaaaaacattgacaacaccgacggcgatgccatggagggtgaagaggacgaggacgccgtggatgaggacgccgagaacaactggatgttgggctatgaggaagcgggggaaaagcccgagtcggtgacgtcgtacgcatacgcacacgccggtaaattgaagattgaaattattttttaaaataaaataaaacttaaaggttcccgctacgaccatgtgctgatttatggtgaaatgctgcgcatgggtgtacgccctgaactcatccgccaaggcaaccatctcctggaaatgaaggcacgcaaaacgggagtgtacacaaccaccatctttcgcgacaggtaaaagtttgaatataattattttttaaatttttgatcgctttagctacaagctgatcccgatcaagcttgccaattttgtcaagacgttcggccttgaaattgagggagtggacaacaaaaagtacttcccccacaaattcaataaggtaagggtaatttatgaaattaattaaaaaaaaaaaaatcattaaaatttaggcggaaaattacggcactgttttggacactctcctgccaatggaggactactacccgggtggtctcttccctgccgaacgcgcaaaattcgagcaatggtacgacgagaaccgggaaacagggtttgagctgaacgaagtgatcgccgactactgcaaaacaggtaaaagttctggaaaaaaacatgcaaaaatattcaaaaaaaaattttgaagatgttcaaattctggcacatggtctggtaaaaatgcgacagctgttcttatctgagactcggcatgacatcaccgattcggtcaccatcccatccggctgcatgaagtattgggttcaattggcacaccacgacaaagagcgcgtcgccattattccacatcttggctatgagaagcgcggaaaacagagcactattgccagaaaatacttgaaggtgtgccaaaaaaaaaattaaatttattttaccttttcatttctctctcagtggcgtgccgaagaagagttgcgggagaatggccgagtcctccgccatgtcgaaagccctggaggggaagtcaaattcggcactacagctttggacggatga

SEQ ID NO: 53454 - DNA, 1541 bp, Heterodera glycines
atgtacccgcgcggcttgatcgaccccgagtacaattgcgatcattttgaggactctgaaaggggtgagtttgaagcttgtaattaagcaaatattttttcttaataggcttttcgacaacagtcacacacattgagctggaagccgctctccgctcgtggtacaaggtgacgcatgtgtaccgtgcctatatctggcctctggcgtgcgattggagcaatgggctgttccactcgtacctgctgaagtttctcaaaatgaaatttgaaggtaaaatttgaaaaacttaataaaaaaattaaacaaacaaaattttaagcaagcggatatccagcgtcttgtacggaggcgggcatcagcgaggaggagtcggcacggagaaagcaggaacacatcgacaaggccaaagaaaaggcccaagtccctcttgaggcggaccgaatcaaacacaaccccggactccgctacctgtccaagctgtgtttgaattcgctgtggggccggttcgcacttcggtaaaattttggttaagaattatgaaaaaatacaaattatacagaaaccggcttaccaaaaccgaaatcgtcgagtgccatgccgagctggccaaactgctcaacgactcgaagattgaggtcagcagcattgatcagctgacggaaaagttctggatggtctgctacaaggccaaagatgagcatgtggtggagcacagcacaagcaatgtaagaaaagttttaaaatatttaaaaaagacaattgaaattttctcaggtggccattgccctatggaccacctctgctgcgcgaatccacttgctggaatcgctgaaaaaggtgtatggccctgcaccaggtgtagagcgctacgacacccgcattctctacatggtaaaattcagaaaataaaatgaaaatgtgaagtaattttttaaaatcaggacacggacagcatcttttacgactacctgacgcggctgggggacccacttccgggtggtgagcagctcggggagctcgccgacgagtaccgaaccacacgattatggaattcatttgtggtaagactcattaaaaatagatcaaaataaatggaaattttttgtttagctgggcccaaggcgtacggattgtggctgcgcaacaacgcaacgggggaggacgagtacaagctgaagctgcgcgggatcaccctggactcggatgcctgcgagcgcatcaccttcgagaagatgaaggagatggtgcagaacaagctgggacagccggacaacaacgtccgcttcaactacccaacgaagaacttccggatcaccaagaagggagagattttcaccgtccccttggtcaagcagttcaacccgaccgtgaataagggggtggtcagggatcacgggttgaaggtggtgccctttgggtacagcgacgaagagtggtgtaagtggaactgccctggcgcttgtacctgtctgttcaacccagacctcaatgtgaacatgttcacagaagaggagctgaatgaccccgacattatgccataa

SEQ ID NO: 53455 - DNA, 1093 bp, Heterodera glycines
atgacaacaatcgaccaagaaatacagttcatcaaaaatgaaattgttaaaagatggaaaagggaaagaaaaattgttcaagacgcaaaccatttagtgacatattgtaataaaatttctttctatgcaaaaacatatatgatcatcgcatttagtgctccaggaatacatgaaatttatgaaaaatttttagaattagcacaaaagattagacaactatatctacaaatttcaaatgaatataaaaatatttcgaaaattcttggtgaatttgagaattgtttaaaatataaaaacattcaaagatgtcatgaaaatgagaactcttcaaaacatagcatggcaacctgttataaataccggaagcagctgagaaaatttcgtatagaaatagatgatttgttccaaaatattgtatcattagctataaattatttaaatccaccagaagaacctatcaaagagcaaaatgaaaatcatcaaaatgaaatattttatacgccatatcgtaggaaccgaattatacatggacaattatcagaaattttttatagtccctataggaggaattgaatcataaaaatatatttagatttttctaaatgttttttttaccctgataggaaatacgcgttcgactaataatctatctggtcatttgttacatgcttttactatttttattttgttcatttgaatatgagttgtgtgctcgagggggggtttacaaaatgtaactgattgtgagccgacaatgcgtgtgctaatttgctactctttaccacctcacgatgcacgtgggcactctaattcaatttaggtggataagtattttattggtgagattcatttcagaaaacttttcgattttattttgggaggggggtcgaaaaaagtcgacaagaactaaattataacgggaggcaaaatgaataattttctcaaaactcaaacaattttgaatattcttttttttcacattctcataaaaaatatttaaacaattatttataattaaattttttattttctttttcttcaaatttcaaaaattttcgggttatttttctcttttcctttgtcatctaataaa

SEQ ID NO: 53456 - DNA, 470 bp, Heterodera glycines
atgattcaaagaacagaaaaaggaacagcaattttgttggaagcgctcaaaaaagaggctgaaagggcaaggaaagaagtttcagtattggcagatgaagcggatgagtatgcgaaatccgcccgtggagcccttaatcgggcaattaaatcccgagaaaaggccccctatgcccccggggttcgtgagtggttcgttaaaatgtcagattgtatctgggaaattttcaccattttggaccaaatgaatgcagagtttgaaacggtagagtctatttggcgtgaggccgaacgttctaaagattacgaccaggtaaagaagctggaggagagagtacttaagggtttaagcgaagcaaagattctacacttagaatctcggcggattcacaccaaaattttggagttggaaaacagaattcaatctgtagtgtgggattttattgggcttcacgaataaaagagaataaa

SEQ ID NO: 53457 - DNA, 1440 bp, Heterodera glycines
aaaaacagagaacttacacgattcacaagcccatcaggaaaagattccctagactaaagacaataccgagtggcttccacaccgattggcagtgtgatttatgcatatttgatcaattgaaaaaacataacgacggttacaagtatttattggtctgcatcgacgtgctgagtcgaatgatctttagtgcaccagccaagtcaaagaagagtgaggacatgatcgaggcttttgatcgggttttcgaaaagtcgaaaattatcccgatgaagatatatagtgacagtgggcttgaattccaagcaggaaaaatgaaaaaatattttgaggaaaaattcatcatcaaaaatgtaatgtatagtcctgatctgcacgccggagtcgttgaaagggcaaatcggacaataaaagagcgtttgtacagatattttacaaagaaagacactctacgatgggtcgatgtaatagacaaaataataacaaacattaacaacagtgtaaataggacactgggggtcaagccgtcttcaattacttttgaaaatgccggaaatatttgggataagttatttggaaatttggaaacagaaaaaaagaataaatttaaaaatggtgatttagtccgaattacaaaagaaaaaggaaaattcgccaagggatatcttccgaattttacggaagaaatttttaaaatttataaaataattaaatcagacccaatcgcttatcgaattgaagatttaaatggagataacattaaaggaatattttatgatgccgagttggtaaaagtttcgaaaaatcaaataaataaaatataaaagaactttgactaaaaaataaataaaaatgaataaaataattttcttcgtagtttttggtttggtatttgaccaaacaaatggcaattgttgctgtctttcgaatgaagaaaaacagcaattgaatgctgcgagaaaaaccattgaaaaagcatttcgggataccaccagattaaataacgaagcacgggattttgctgctgcttctcatagggcaattacggaggcagaaaaaattaaagttcgtcatcctgaggcaccgggtatgaaaacgtggttcggtaggttattagaaggggtgagaaaagtacaaggaatttccgaaaaaattaacgaagaaaggcagaaaataggccacattagaaaagaaatggataagtgtttggaccgaaaagatgttttaatgtgtcgtgaattggcagacgaagcgaagggagcatttgaaattgttaagcagtatagacaggacgtcggtactgcgtaccgtaacgcctatactcaatctgacctcgggattggggaattggccgataaagttaaggaaacaatgaaggaatatttataccgccccggaccttccccaagaccaacatttaaagaccaatttatatctgattaa

SEQ ID NO: 53458 - DNA, 188 bp, Heterodera glycines
atgcgtgtgaatcatcggaaagagaaaatatactcagaaaatgatcagagtgagaatgagtgatcaaatgatcagaagatgatcagagtgcgaatgaatgatcaaaataacaagcggcccctatatcttaatgatttgtaggtgatgtgatggggcttgtgagtgagcatgtgtttgtgtatgagtaa

SEQ ID NO: 53459 - DNA, 326 bp, Heterodera glycines
atggataaacaaaagaagtcaaggggaagaccacctaaaaacacggagaaaagagaaattcctcaaaaagaaaacttggagaaaaaagaaattcctcataaagaaaaaattaaaattctaaggcccaagataaaacttaaaggaagaaaaatagaattggacactgaaaacagtacaaattcagttccaactaaaataaaacttcctccaatttatgtaagactataaaaatattatattttaaaccataataattaaaaaaactttttttcaaataatgatagatattctttagtgaaaaatatgtaataagcggtgattactga

SEQ ID NO: 53460 - DNA, 492 bp, Heterodera glycines
atgtcaaaagaatatgcggattcaaaaatattagaagtagtttgtgcgggtaagaattaataaattaataaaattaattgagaattttagggcctaaacaatatgctttgaaattacaaaatcaaaaaggtgaaatttggtataagacaaaaattagaggaatgacccaaaataaaaataataaaatcgattacgaagagttcaaggacatggttttgaattatgaggaagaaaagaaaattcggtttacacacccaaacaaattcgggtaagttttcaaactttaacaaaaataataatttctttaggccgacaagagaaagttacgtgatcagccgtaatattactaaggattatcgaccaattcaaaagaaggggtttgtttgacaggtttttattaccaaaataatatttcaatttaggattattttggatgatgagaatttaactgttttgccttttggttattggtgattttttattttgaataaa

SEQ ID NO: 53461 - DNA, 789 bp, Heterodera glycines
atgatttattattatttacaaattgtacttcgtgtgccaaaaaatcaaaatgtgattttgtttttgccaaaaattccaaaaaatgtagacatagtgccgaacagcgggcactaaccgtggaattttgttctttagaattaagaaaaggtgaaataaataattaaaatgaatcatgctcgtttttttcagcattagaattgggggcagtcatcgatcggttttatcgcggttaccattacgaaaattttgatggaaatttgtttaagaattatgtgagaaaatttttaaaattgaaggttgaggctaccgggtggcctcaggatgttaaaactgaagaagaaaaaatagaatttgtgaaaacatatagagaaacatatgaaattgaattggacccaaacaatatgaattttaatcctggattaagacatattgccaaattagcattaaactcattatggtaagaaaaaataaaaataataataaaaaattattttagggggaagtttagtatgcggaataagttatgttcaacaaaaatgattagcaaaccatcagaattttttgaattaattaatgattacactattgaaatgggtaaaccgatcagatttaacgacaacactttacgggtcatattttgcaaaaaggacgagtatgttaaggagcataaatgctcaaacattatgatttcgatatggtaattatgtgaagttttatcacaactaaataataatttaggactaccgcacaagcgaggcttaaactttactcatacatggaaaaaataaa

SEQ ID NO: 53462 - DNA, 424 bp, Heterodera glycines
atgaacgtgcaattcgctgctgtgctgatgcgggcaattgttttgctggtttgtgtgttgttgccaaaaatttgtgaagcgagtcccaagaaagaaaagcactacaatgttcccaaagaccagttcgctagcagtgtccagttcttaaccggaactgatacaaccaggagcaacacaaattttcaagacagatcaactcttttaaagccgacattagattgggctaatagttcatcctttaaatcatggctcatgccagttgaacaagcaggtggctcagcatcatcagcaacatcaccatcagactacttccagccccatgaaatagcaaactcatccattggcaatcaaattaatggcatggaaaaacgcttgttcatgccacccaaatggcttgaggatgctaacaataagaaaaagagtg

SEQ ID NO: 53463 - DNA, 440 bp, Heterodera glycines
atgtcggaggagatttgtgcgaccatttctgaggtgttcagggccgattttcaactgcaaatttctgcccatgggacgaattcaattgctcttttggttaacaaaaaggctgcttccgtgccggcggcacttctcgcaacttttttggcactgaatataacggtgagcgggaaaaacattttcaagttacacgtttttattatttctgttttaaggaaaatgaagcgaatataactgagaagaaaaatcagaggcaaataggaggaaaatggaaatcgaaacgatcgaaaaaggcaattttatggacaaaaaaagagtaaacaacaaatgattttcagtacgacaagcaaatcggaaagattgatgcggaactgaaagaagcgattgagaccgaagcgaagtcgacgaaaacgcaattggtaaaaagacgagacgattga

SEQ ID NO: 53464 - DNA, 818 bp, Heterodera glycines
taattaaatccattccttcgggggaccgtgccgggtgccgcggggtaagcagtgctggttcgtttcatcacggcaccgaaccttttggctagtcagcaatcgttgcttaacttgccagatcggacgggtgcgcatgattccactgttccaagcaccccaccaaaagcaaaacgatataaccaaaatataaggaaaaattttttaaaaatttttttctccatcttcctttttgatactaaagcatcagagtgctaaaattaagttgtaaataaaatttggtgcgctttagagcactttctgaaaaaaatatttatgaaacaaaaaaatcgattttttcaagtgtccgtttggggtactcaaacatttatggggagcaaaaatccaacgcagaattaaagtacaggctatagggaagctattcccgaaggattcggtctccccataaatctgggcgcatcggttcggggggactgccccgaaaacaaaaaaatcgattttttcaagtgtccgtttggggtactcaaacaattatggggagcaaaaatccaacgcagaattaaagtacaggctatagggaagctattcccgaaggattcggtctccccataaatctgggcgcatcggttcggggggactgccccgaaaacaaaaaaatcgattttttcaagtgtccgtttggggtactcaaacaattatggggagcaaaaatccaacgcagaattaaagtacaggctatagggaagctattccggaaggattcggtctccccataaatctgggcgcatcggttcggggggactgccccgaaaacaaaaaaa

SEQ ID NO: 53465 - DNA, 859 bp, Heterodera glycines
cattcaatcactgggactcaacccaccaacattccaatcgccgggactcaacccaccagtatttcaatcactgggactcaacccaccagtatttcaatcactgggactcaacccaccagcattccaatcactgggactcaattatcagactttccaatcgctgggactcaatccaccaacatttcaatcactgggactcaatccaccagcattccaatcactgggactcaatccaccagcattcaagtcactgggactcaacccaccaacattccaatcgcctggactcaacccaccagtatttcaatcactgggactcaacccaccagcattccaatcactgggactcaacccaccaacatttcaatcactgggactcaatccaccaacattccaatcaacgggactcaatccaccagcattcaatcactgggactcaacccaccaacattccaatcgccgggactcaacccaccagtatttcaatcactgggactcaacccaccagcattccaatcactgggactcaacccaccagcatttcaatcactgggactcaatccaccaacatttcaatcaccgggactcaacccaccagcattccaatcactgggactcaacccaccacattccaatcactgggactcaacccaccagcattccaatcacttggactcaacccaccaacatttcaatcgcctgggactcaacccaccagcattccaatcactgggactcaacccaccagcatttcaatcactgggactcaatccaccaacatttcaatcactgggactcaatccaccaacatttcaatcactgggactcaacccaacagcattccaatcactgggactaa

SEQ ID NO: 53466 - DNA, 1969 bp, Heterodera glycines
atggtcacctgccggatgggaagaatgttcgctatgccattgatgacaacgaattccccaacttttcatggcgaggctttgtcgtgttctccacaattcaggagggtcagtcatcattcagtttttgggatggatgaggatttaatgccaatgccaaacttggcattttgtaaaagatttcttcaaataaaaaacagggacaatgtctgtcaaggtaatgcaaatggcactaaatgatgccctaagcaatctgatcgcaattctttcattgattaattcgatttgtggtaattaaattgtccaatagattatgaatgatcaatgaaaattctgatgatttcgcaaaaaattttaaaaaaaaaagtccaaaaatttattcgtattgtcggcgcgtggtagggggagggcgctaatttagtattattttttcaaaacaaaaaaataattatttaaatttttattttttgaaaatcattttttgcagagattgtgctggacctgaacatccacaaatcgtcggtgtacaaactgttggcacactatcgcaacccgaccgaagtcaacgtggaattggaggtcaagctggtcccggtgcagacccaaacgccaggtcagttaataatgttgaatattatttaaaaattttttataattttcaaaaattttattggttcagatcttatataggaaaattctatattttaaatttaaatgttttcaaaaaaatatgactcgaaaaatatttgccaggagagaaaaatttgtcaatttgtcaatttttgtattcttttcatttaaatattaatatcaatattgaaaaaaaaaactcagaacagttcatcgccaagggaaaagtatttcaattttcaaaatttcaactcacagatttaaaaaaaaatttcttttttttatgactcggaacaattcgccaagggaatatcaataacaataaaatttaaaattgaatttaattaattaaaattagcaaacactttgccaatggaataatgaaaaaacaactttcaaattttcagactccgaacagtttgccaaggccgtgttcgcgcccagcggtgggcacccgcaaaatgcgtttgtcgagaccaatcccgagcacacatttgtgctgagcccgggccgttggaatttgcatgtgcgctcaccgaagcggctgtacttggattatttggtgctgatcccggctgactattaccagggcgaggcgctgaccgaacgtatcattgaggtggggggtggcgtcaaatttatggaaaatttgaaaaaaaaaattttttttttttttgaaatttacactaaaattttgttaatacaatttttaaggtctgcattttttaacaatatttactgaaacataagccccggggggctcatattttcaatacacctgaaagggatcgcttatattaacagggcatgaggggtggggggggggttctaattaaatgggttttttcaataattacgataattatgttgtatgattatttttttcttctgattaccatgttatgaatttttttcaaaatttttttttactaaattccaatgctcaaatatgtaaaaaatacaaaattttattattaaaatgagtccttgactagtcaaattaattattattattattttttattctaattatttttgtttttgctttcattttaaattgtctattttcaaatttgtaagaaaaaaatactgaaatttgaaattctttaatgaatttttggtcaattaattcattttaatttccttgtaatcttttttaattgtcttttagccctgtcgtgccaatgaaacagaaaattgtgttgaactgttgtatccaccaatcccaattgcatccaaagtggatgcgatcacggatttggccaaatttgaggaggtggagccgggcacggagaatgtccagaacatcctgagccatgtatgaattaattaaactcaaata

SEQ ID NO: 53467 - DNA, 609 bp, Heterodera glycines
tgcttaaggcgttcccggaccgatcggaagacgagggaaaaatgggcgaccgggggcggatggaaagccggggccgaaggggcctcccggcgattatggcccagccggccccgcggggccaatcggaccgccaggccccccgggcacagatttgcacagctgggccaggggagttgaactaaacataagatggattgataacccatttttacatttagtattggtactaaaggcgtaaaaggaccgtctggtcctccggggtcgcccggagatgccggacagccgggaacgaacggcgaaccgggccaagacggagagtccggtccacccggacaagttgggttggtgaaaatcaaactgcaaaaacggcgaattaaatgtgattttcaattttgaagactccgaggcgacgatgggacgccaggcaaaccggggaatgtaagtgaaaagaaaataaataatttgaaatgtgacagttaattttgtcatagagctggattcatgcgtaactgacctgtctttctttagagcggctctcctggaaagccgtcgcccgatggcaattattgcccgtgcccgccccgttctgacgcggcaaaaagcggcgcc

SEQ ID NO: 53468 - DNA, 2405 bp, Heterodera glycines
ccgctcagaaagaacgcactttccaccgccgccgcttcatccccaactcggccgtccgcttccgttcccttctcaccgccgtctccttcagtcgcgcctaaaaatgtttgtgcccgaaggaatccgtgccgaaacggcggcgtttgtgtgtacgacgaattaaccgagaagtcaatttgcaaatgcgcagcaccatttaccaacgacttttgcacagagagaattggtcagaaataatcggaaaaatgccaaaattagaagagaaaaatgcaaatggaatataaaattaatgaataaatgtgccaattatcaaaataaatcaaaaaatttaattttaaatgccttttcctttcatatttcgacccgtgctccccaaatccgtgccaaaatggcgccacttgctcagccattgcgggcactcagcgcaccgaattcgattgcttttgcgctcgcggattcgcggggcggcactgcgaattcagtcagcgattttttacagaaaattttttgcaatattcctctggaaataaacaattgttgaatgaagggccatgtgaggacaatccgtgcaaaaatggtggcacttgccgcaccacgcgggcgcaatcgttgtttttctgcgcgtgtccgcccggatgggctggcaaaacttgcatggtcggaggaggtggtgaatttgcaaaaataaatatttcaataatgattgcttaatttgataaggcgttcctttgagtggagaaattttggagagcaatggcaaattattgcttttgcaaaatgccaatttgacacggcaactttcgagtgggaaagcagaatggattgaagagctgaagcgggtcactccaaaaatgccaaattcggaggaattcgtcggagaaggacgaccaaacgccggtgaaagtattcaaacgaaatgccaacataaaacaaaaaccatcttccacctctaatgcttcatttgcttttaagatgggcctggcaaaaatgccatttccaatgccccccgcggactcttctctcccgccgcaaggaacggcactcggactgcgctcggtgacttttcgcgcctctcttccccacattctccgggttccgttatcggacatcgtccggtcaccgcctccgttcttctcccccacgatcaaatcataggccacgaattgcccacccggaccctcaaagggacaacgccaaatgcggcgacgaatggcgttgaaatggccaaaaaatggacgggtggaaggggacgggacagctcagtcccgtggcaaattttggcaatttactgttcattaatattttattttatttcttatttataaactcaacaatctttgatcattcccatagtcaatatgtgtatttcgttatttttctttaataattcattcttttgcttttttaaatattatgtttcaattgtgcaaaatctgaattaaattgtgattaaagaacattaaatgagaaaaatgataaatatgctaatttcatctgaaattgatgaaattaaaagatgagtttcccattaaaagttagtcagctaattgtaaaggaaagaagccgctttctgggaaccggtaaggaaggcgatcaccgatcggtggaggagagcatatcgccaaaaccacacaatgagcagcaatccatttataagcatcgcgcaataggttcatcgaccggttttgcgccttggccaatgctaatttcccgtccattaagaggcggcggaccgcaaaaaggaataattactcccaaattccattaatccccttccactgccctgtttatctttttccgatcagtccgtcgttcatttttcacactgtccttatttttcttctctcttttcaaatgtccgcttccgtggccccaaaattcggcctttcggacgaggaagtcaaaattcatcaacttatcgcaacaatacgacgcaaaaatgttccaattatttttgttggtttcttctgttctgtcactctctttgttgcattgaccgtttcgctatttttatactccgaaatttgtcaaatggacgaagaattgaaattgggggcggaagaattcaaagtaaaagagaatggtacaaaaacaaaaggaataattgctaaataaaggatttgactgatcgctcttggcattttttgttcttcagcgacgcgcaaagcgaaggcggcgaaagagtcgccaaaagaagcgcctatttcccttcgctttcatttcccgcgcaaaaatgtcgtaaggaataattgttaaagggataaatagttcttacgagatttgttaaactttgacagaatgtgccccgagtgttcagaattgtccgtccggacccccgggggttccgggcgaagagggcgagcccggaggtggccaagaaaatgcttgcccagaaatattgcaat

SEQ ID NO: 53469 - DNA, 400 bp, Heterodera glycines
atgaaacaattccttctcctttcccttcttttgtgctgtctgttttttgctgttttctctctttcttttagtaatttatttatttaattgattaattaattagttaattattaattataattaatttttagattttttactaatttttattttttcagatgatcaagtcgaacttccgaccttttgcagtgggccaaacaaagaaaacgcgcgggtgctcagctgttgcgaggcggtgaaggcattcgaaggttcggaaatgtccgagtcgggcggagcggcgccgcccgaattgaaagagtgcgttcagtgcggcacggaattgtgtccgcgcgagtgaaaagagcacgaaaattgggcaaaagcggaaaaagcggacggataagaaagcaatttgtta

SEQ ID NO: 53470 - DNA, 426 bp, Heterodera glycines
atgccacttggactgcccgactcacgcgcacgcgaaagtggcgaaacacaattcgactcacgccttttcaaccaaaccggggtgggtggactcgagaaatgatttggtgcaccgtttgcctttaaaattgcttttcacagggtctcgacagcggcggcatcgatgacgaaacgtacgccgcctacgataagccatggcgtccccaggatggcattcagcagcacatctaccgaccccgtaaatccatttttgttcacgatgggaatcatccgttctctctcgaattcaggaaaggacattgacagcagcatttatggcgccgatttggatcgaattatcagcaccaatcggtttgtgcctgacaaaggcttttccggagcggatggagccggcaaggagggtggacaacgaagcggaccggttcag

SEQ ID NO: 53471 - DNA, 1280 bp, Heterodera glycines
atggccctgaagatccacgcaaccgggttcccgtcgtggtgcgagagcgaagagcagaagagtgaatacattgaggagtgctggatgaaatttgcaattaaactcgacaaagaaaagatgaaagctgaaccggggaagcggtacatcgccaagctctgcctcaactcactttggggccgcttctccatgaggaatctactttcgaaggcggtaatcaacaatgacccttgtgttctccgccaatacaccgacgacaagaaaattgatattatggacattgagctgatggatgaggacaacgacgtattcatgctcacctacaagccgaaagaggagtttgtcgacgaaaataaatactccaatgtcgtcatctcactctacacaacatcaatggcgcgtctatacctttacgaagtgttaaaaaaagtggccgacactcccggatgtgaaattctctactttgacacggacagcatcatctacgttcaccccgaggaaaacgacccactcccgacaggaaagggacatctcggtgagctgactgacgaaaagccggaccacaacattttggagttcatcagcgctggctgcaaaaactacgggctgaagttggaacgtaaggacaatggggaaattgagtacgacttgaaaataagagggataacactggatgaacaaactgtgcaaactatccattatgacagtgtgaaagatcaaattatgcgttatggttccgatgaccccgcggaccctattattgtaacatatccccattttattcgtcccaaccttatccaaggcaaagtgtacactcaatctctaactaagcattatcaacctgtcttcacaaaaggtattattaatgattcattccaagtcctcgaatttggttatcgcaaatgataagtatgcattctcaattaaattttctaaatattagttttcttatggttcccttcttttctttctctctgtttatatcactcatgtgggacggaatgacccctggttgatcctctccaacactccaggccatccatctgagatgaaggtggacgagctgttcattattgtaatgcacagcctggtgcgtgagtgtttggattggggaccgaagggtgaagccgttccctgggtgtgtttgctcacttttttcaaagggaactctaagaattctgatatgtcttcaaatctatcaaaagagttgcatactttctttttataatttcctttattctctattttacacttgtatttttcatttgaatgtttattcagaa

SEQ ID NO: 53472 - DNA, 677 bp, Heterodera glycines
atgccaccaccagcgaacacctcggctttaccaacaaattattcgcaaaagagaaatgagttcgatgcattccaaaaggtgccaacatcggagacgtgtcggaagtaaaaaattttaattaaaacgttaaaaatattttgacttttaaattattttgcggttttattagtttttgcttggggatacaatttagggttttacctattttctgagctcttctcagctgcctagtgcctgttttatgagtttatattttcaaaaatacacccctaaaatgaaaaaattttccgataaattgtctcaaatttatttattttcgtcattgaagaatttttgattttaatattggtttggcctaatgttgttacaattttttaaaaaatttgtcattttaggccccaagcctaccaatttcatttattaaaaaaattccaattttggttgaacatattttaaattttcataaaaattttttcccattaatgttaatgtgttttaattgcatttttttcacatcagttcgtatgaattggttgcctgtttcaaaagcaaacggcccccattggtactcaacaaagcgatttcacaaatctgcaaaagacacctcggcaatgagccaaattcggctggatttcgaattcgccattgcgtgcgtcgggatgccagagcccaactga

SEQ ID NO: 53473 - DNA, 1394 bp, Heterodera glycines
atgagggtttttgtacatatttccatggtgcgacttttgggatttgcaacttggggacccgacatttggggatccgacacttatggaatccgacatttggagacttcatttacgacatgtgtgtggagttttaatttcttcggatttatgttatttaatatttaaatgtagactgaattatatatacatcattatcatcttctgtatataaagtttttttaatagataaatttagttaaattttaaaaatttaacacattttttaattatttatctaattattccatttatcatggaaaattgctatatattaaatatttaaacacaaaatgacctcaaatattttaacgcacttgctttgttagttatcggaaaaataataccaaatgaaaattattttcatgtacacactttttttagttgtttttattaaacatttaattcaagtattttatattattgtcatatgcgtaaattacaagtattttacatttaagcgattttttcctcacttgggttttcatatttttactaaattcaaattaatttaaattttacattatatatttagaattttgttatgcatagctcaaatttttacatatcatattaattatgattgtttgttgatgttcataggatgcgaaaacaaatgatattctcatttttttaaatagtaaatttttatatttttctcaaaatgacagaatgttgttcttatatttcattcattaaaatttattttttagatgaattttttcatttatttgttaataattttttttaattttgcttaaattttttaattctttgccttatatattatttatatacaatgtgaatgtttcaattaaattgactcgacgcctttcaattcttctatttttagtgagaaaatattttaaaaagctcatttaatttagggcatttgtaattttcttgtaaaattttcttttggctaattttctaaattttcaagaaaactattaaacttgcattttggctattgagtgcattaatttggtcttggagaggtcatagaaaagattttttcgtttaaattgtcttttttattgtataaatattacagattattgttttatttacatattcttataaaaaagttagttgcttttaaacttttacattgcaaatattttgtattgaatatatttaaattgttataatgtcttctttaataataataatccagaaaatagcagactatatgtgatttcatttaattatgtcatgtttttattacgacattgagactttgtccctttaatttgacatttcattaataattctttttagcatattttttcaaactttaatcgtttaaatactttatttatctttttggctatgtaatagctatattcaaaaaatca

SEQ ID NO: 53474 - DNA, 1029 bp, Heterodera glycines
atgcccacaaatgagcaggaaattcttgatgcttttgaagcagttttggtaaatcccatgaaattattttaattttcctaaattttattgttgcaggcgaaaaaggatttgccgcctgacaaaatgcgaattttgagggactgtgatctgaagaaaaaatgggatttggtgtgtgatgagcaccaatttacacacaatcagtgcatcacagaaccccacgtttacctcaaccaattgatggccataatggacaagaaaaagtcgacgaaaaaggtgcgttttaataggaaaacaatactttcattaatttatcactattaggagcacttgtatacttttattggcgtgactttttcttaaaatgaattttttttttaaattttctatgttacacttattttatgctaacatccatttacatgaaattttgccattagcgattaacggaagaagggactcaaaataaaatgataaaacatgccattgtttatagaccagtgatagattataaagtccatttgaaactgcgcagtcacagattacacggcaatctttttgattttcacctaaaattcattaactcacgttaaaggatgctagcttaaaataaaagtcagattccttttcagcgcttaaaatatcacaaaaaaaaattcttgaggtgtgcacaaaaggacaattaccgacttttttaatggatcatttggtttaaaaaattttcattaattttttcacaaattttttttttccatctgaccccatgtacaaatatatataatttatttatatattctaactgtttttatttagaaaaagaagattttggccggtgattcgcccacccaaattctaaaacatttggaaatttcgttgaggaccaattccattgaatgggttcgatcatttttgtcgccacaaaacaatggtcagtctcacaatcagtcattgttgttgtgccaacaaatttttccttttaggactccaagttgtggtggaatatctcagccttctgcagcaatcattgagtaa

SEQ ID NO: 53475 - DNA, 358 bp, Heterodera glycines
atgaagaagtcatatagatcttacaatttgaaaagcccgaatcaggatcaaaaatttggaaatcggtaagtcaaatttcccagcactaattattcattcgataaatgcttatgaacattatatcttttccgaaaaaatattagaattttcataaaaaaaattctgacagcattcttatggttatctatgttttaaaagagagagaatacagaaaaataatagatatttatttgttttcagaaagcttttaactctccaaaaatccgccacaaatcaatgggtaaccgaaaaaatgaaaattactttaaaagctttaaaaatttttattttgacattcttaccatttctaattttgtaa

SEQ ID NO: 53476 - DNA, 156 bp, Heterodera glycines
atggccacccttctcgaatatccggcttctgttgtggagcaaatttcggtgaagctgtcagcgccaaacttgaacaccatcgcaatggcatacccaaaagttgaagtgccaaaatattcgcgtgccactctttcggccggcattgtccattttggc

SEQ ID NO: 53477 - DNA, 657 bp, Heterodera glycines
atgcgcacccgtccgatctggcaagttaagcaacgattgctgactagccaaaaggttcggtgccgtgatgaaacgaaccagcactgcttaccccgcggcacccggcacggtcccccgaaggaatggatttaattaaattctctccttcggggatttttttccattaggtcgtccgttagcgttcgattgctctagtcaatttttcaaaatttttgttgaaatatttgtcgtgctctgaagggcgtgggaggggggggggggcgaaggcccaccacgaggccgcgaagaggccgagtgagtaccttcggtgcaggaaaattattaaattttaaaattttttaattgctttttaaatatgccaaaaaatgtaggcttaacttttttagtgaaaattcgatcactcatattttttgctaattgagcagaagcgtaccaaactttgcagggatactccccggtaaaggactaacttacactgaaatgagcgccgagctagctggctcaaaaaaatttttcgaaaatctgagtctttcgtttttatttatttgcaaaattaattcataaatattttttcagaaagggttctgaaacgcaccaaattttatttacatgttagtttaggcactctgatgctttttctatcaataatggaggtga

SEQ ID NO: 53478 - DNA, 1220 bp, Heterodera glycines
atgacccaacctcaaaaagcattgactgagcccagcgccaatgaatcaaatattccggagaaagttccaaaggccgaggtttggtaaaaattttagaaaaccgccaaaacgcattttaatccgttttttcaattttcagcctcacagtgagaagaatgagttgtcctcctcgaaattcgaagcgttgtgtgagccgccgactccagaccaggtgtttatttattttgtcacaaaatttagtgttttatttttaagattttgtacggaaaaatgaaggcgcgggcgcgtggctttcagctgacaacgaaacccaacaatttgggcgagtgggaacgaacgtgggaacggtggcgcaacgacaacacacattggagtaagaaacagtttcattttttggaaagcgcaacagaattctaactcgggagtggaatcgtttttatgacatccatttcgacaaacttcgaacccggatctgaattcgaacaaaaagtcggactcaaaaaatgtaaaatttgaaggtttgaattaacgtttcgaattcggtatacgaggttcgaaatggatgtttaatcaataatcccgaaacatccgaaatatttttattcatgtaagtaccttttttggcattttaaaatgtataaaattgggcctgttgtaaaactagaaaagtaccaaaaaaacattttgtccatgtttaaatggtattcaatgttgaactgtaggatgaaataaatggcttatatttaacctaaaaattaaattgcaggaaaaaaaattgaaaagcggcccaaaattttttgccctacgccgttgcagcgtaaggcgcttgtctggacgggagtttacgaagcggtagaacaagtcccggcacatgtgtcgtatgtttttttagtttaaaatatctctttaattgtcgtctttttaatttaaaattttatcatacctatttcaaaaaattgcaaaaaaataaagtttttgttttgtggtgccaatggtattgtaatttcagaatgcacactgtgaagaggtccgttatgcgaaaagtgcgtttttcggttggcactgtcctcgcctgtacgttaatcacttggtcactgttcgcccattgggcgccgccttaattcattttttgttgactaagaaagagatctttcattagattttttgtgtattgttttttggttttttgtcgtcattaaataggtatttgttacaataaa

SEQ ID NO: 53479 - DNA, 299 bp, Heterodera glycines
atgggtccagcagtaagtacggtaaatgtcgcgcagcagagacagtgacgcggtgcgacggcggcgaccgctgcggcgatggcggcggtagtggcgccgtttgctgccaccgtcgtcacttcggcacatttgtcgccgttctgtctctattttttcgctaaaattaattattttaaaaattaaaaatgtataggccgccaaggttgaaaaggctccggataatccgtctgtagacaatccgtcagtgatgaacaatccgtcaacccttcagcaaattttgtatttaaaataattgaaaa

SEQ ID NO: 53480 - DNA, 66 bp, Heterodera glycines
atgggtgaatttcgtgtgaaatttcgtcaattggaggcggacattgaggaactgaaaggcaaaaat

SEQ ID NO: 53481 - DNA, 204 bp, Heterodera glycines
atgagaggaaatgaagcggtggtacgtctgctcctttttccccaatcgttcgccattcttcgtcagaatgatctctttgctggtcaaattcagtccacatccgatgacgtcaccggcatcgaatttggccaagttttgcttggtgctgcctacaattctgtggccacgtacattgccatcgttgaagtaggcaaaagtgccggg

SEQ ID NO: 53482 - DNA, 685 bp, Heterodera glycines
tgaaattgtttactacgaagtgaaaatcttttcagcggagcaaaaggattttgatgggttttatttctttttaattgcaattccttttgagaattttccaattttattacttcaaaacaaaatttaagaacccaaaatgactcaattggcattggctttgcacccaagtcgatgccattaggcaccaaggttggcacgcaccccggcacttttgcctacttcaacgatggcaatgtacgtggccacagaattgtaggcagcaccaagcaaaacttggccaaattcgatgccggtgacgtcatcggatgtggactgaatttgaccagcaaagagatcattctgacgaagaatggcgaacgattggggaaaaaggagcagacgtaccaccgcttcatttcctctcattacggcagcgaattgtttggtgggaaaataaataaattaattaaaaatcgaaaaataaaatactaattatcccccccctcatcccttctcacaatcagataccaatttcttcttcgcatcaaaagacgccgacgatttatatccggcaatttccttgaacaaccccggagacgaagtggaggccaattttggaccgaacttcaaatacacacttaattaaatgacatatccctttttccgatttatttatttgtacttgaaaaattatttgttaaacagt

SEQ ID NO: 53483 - DNA, 1855 bp, Heterodera glycines
atgggcagcagcagcagcagtagtagcagtagtagttcaaactataccagcagtagcagcagcagcagccgcaccaccatcaaaatcaactttatggacttttcatcgaatgacaacggcagcagttctggctttatcgaggagggttactgttcatgtccttggtcgcatcttcgttccatcagcattactctggtaagtagcagtttacttaatacggtttttcgaggttctgaccatcacttcctttcctaattgcctgtatttcatatgttaatctgtttttataataagtcgtgatattccatgtttcagttagagtatcattttgctggcagtgacaacagcagaagcccaattgaaacagcaattggcattggctcttctttgcttagttccattgttccccttatcgatgatgaggacaaagaattgaaaacaattggaaaacttttgggaattccttcagtaatttgtggtaaagtttcgaaaggtaaaaagcccgtgtaaaaactgtatgaaaaaataaatttctctttttgaacagtgtctgaaggttcgacttgttgggccgtggtggtggagtacaaatgcgacgggtgtggccgagttgtgcacgtcacttatggcatcacccctcaaggaaagtttaagcgttttggacggatgaccaacacagaaaattcgaccgtctggatggtgagcagcgcttatccggacatagagcgtgtttatgacgacatgcattcgaactacaatttcggcaccaccagggcttgggcggaggaaatgattcgccgtgttcttaatcagtgacgggggaataattgtcgaatttcgaagcatcccagctcattatgatcatgttaaagtggtcattgtcattctgatatattatcgaatttatgcttttgttcttttttataaagaatgttcgttttctgagaatgcattcaaattataaaatatttttgctgaaacattaaactaacattaaaatttatggtatttttcttttaaatcattgctgatagttgttcattatgttgaattaaatctttctataatgcaaaattattaaacttttaaatgaaaattgggcaattttatatgacagctatttaaattaatccattaatcacagtacttaagtataaactaattagaattgaatcaaattatttataaatatattttgaaatatcattaatatattttttacgaaataagaagataataccaataatttaattaatttataaataataagtttatttattatagtaatgactaaaaaacgaataaatttttacaacaaaaaacatttaaaatgggaaactgatttatttcaataaactcattaacggatttttagaaataaacattatctaatagtgtcagtttgttataattagggaacggattttaatcatgaatttgacaattttatacaaaattttaagcaaaaactgaacagctgcaaaaaatttcaaaaattttctcgaaaacatttgcaattaataaaattatattattttaaatttatttcatttatttgaagaaacccatgccttttgcattgattgccttgggaaatatacaaatgcggcacatgaaacgatgccattcgcacacagtgcgcttggtctgaaatgtatggcgaagaaatgtgaaaatccaattccatggcgtaaggatataatttaattaaatttaatttattgatttaatttcataaattaaagaagaaataaaaaattggctcccgaaagaactcaagtcaataggagctttggaaaattattgtgcagaattaagtgtggaaatggctggtcttagctatttggaacggtaa

SEQ ID NO: 53484 - DNA, 912 bp, Heterodera glycines
atgcttttataccaagtttttcaatgcaaaataatcgataaattaaccagaaagtacatagtttttcatgaaaggacctggttttttgtaaaaacctaggctcaggtttaaaatatataaaaaattcagtggccttcaagaacaacaattactacaaaatgttgacaaaactgaggaagttgtaccaaaagcagccgtggaaattgatcaaaattcgcagcaaaatgtggtaatattttatatgagaatttttatgaatttctctcgttacatgactggactgcaaatatttgaacacgatacaaatccttttttgggtggttttttggaataaatccatttctgtaaatttgaggttttagtctatatttggaatttttgcaaaattttataaaatagaaaaaagcgaaaagatttttagtgtaaaaaagattacaaatttatttaaaattatggtaataaaataaattttcattaaataaagccacaacggcccaactattcgcgtgatcaactgaagaaattggaatgtgtgtttgaagggaaaaattacatttcatcaaacgaaagtgaacaattggccaaggaaattggccttacgaaagagcaaatcgaagtaattgggggcaattaaatgtttataatatttaaaattttctattttattttaatataaatttaattatttagaaatggtttaaaaatcgtcgagcaaaacaaagagcacaaaaacgtgtggaagaagtaatatccgaaacaattaaatcttaaaatatttcctaaataattttgaatttcaaaaagtttgctgctgttgctggtgccaaagtttgtgctcaaattggccttacgcaaatacaagtcaaagtgagaatttgccaattaatatcgataatttcaagaggataaata

SEQ ID NO: 53485 - DNA, 1071 bp, Heterodera glycines
atgagcaaaatttactttcactatttcaaattaacaattcgtaaattagtccgttcggtttggtgctgtaacatttcgacagtggctgatttcgacagagaataaaattattgtttttttattattaggcattcacacgaacaagccggaacccacagttttgccgaagcaaactgcctcagggtcaaactgacccgaaaagtcatttttatttaaaaaattcactatgtttaatgaaaattgatatatgtgtgtagtaaaaataaagcttttttttaacctttgttatctaatttgatgtcttcaaatgttccaaatggcaaagttaactaaaccagatacaataatattctaatgcccaattaaaattcaaatttaatttcattagtacagtaaacagtaatttttttaaaaataacatttcctttttatgcgaataataataataaaacaataattttattctctgtcgaaatcggtcactgtcgaaatcagccactgtcgaaaattcctggcacgttcggttttacacattttaaacttgaagtgccaattttgaccaattgtaacatgggggtcaaaaaatgagcttttccccactttggcacctatatttaacacaatgtctttgttaaaaaaagacaaatattttttctgaaacaaaatgcattcgatagaagaaagaaagggctaaaaattgatataaataaaatacccaataattgtcgtattttagagaaataatcccggagtactcatttttatcaatttggaggtccatattcaaaaatcaatagctgcacgaaatcccgatttccaacgtcagattcccgtaatttttgtgccatggaatttcggttttcctttccaaaaatttttggggtctcgaaatgctatccaattgaacacgagagcaagagttatatatggttcttcccctactatctgggaaaaaagtcggggaactggtatcaaattccccgaggattatctataaggctaaaaaaaaattttaaatgttgggggggtcaaaaacttggtcgtcaaatagaaaaaaatatttttctaaaa

SEQ ID NO: 53486 - DNA, 272 bp, Heterodera glycines
attttctaagaaaaaatagcagttttgggggcgcggcggtgccgataggcgccgccggggaaaaaaattggaaattttgatcatttataaacagtttttcactgaaaattagccaatttataggtaaaattttgaaaaattttatgggaatttaatccaattcttaagggtgtaaaagtcgcttttcgcgccaaaaagcgaaatgcgaaacgccaaaaaatgcgaataatgcgaaaggcaaatgcgaaaagcgaaacctaggcacatccctg

SEQ ID NO: 53487 - DNA, 330 bp, Heterodera glycines
atggccaaagaatttgccaattatggggagaataggcacggggaaagcgaaggtcaaatggaaaagccaaaaagtgaaattgaaatggcaaaaacaaattcagacaatgaggcggagccaattgtgacgataatgaaagacggacgaatcgaagtggaagagacggaacggagggaaaagccaaagacgaagagaaacgcggggggaggggcgaagaagcggacgatgtcaccggacgcaatggacgcggccgattcgatgctcaaattggcatttacggaacagcaaaaagtgaaaaaacggaggggaaaggaaaagcaaaaaggataa

SEQ ID NO: 53488 - DNA, 128 bp, Heterodera glycines
ccccctcccccccaaaatgcccccctctgttcctcctcccttttcccctcttcgccccgtcgttcgaccccaaaaattcgtcgctgtcgttcgaccgttcccttcgctttttcgccctcgaacaaaaa

SEQ ID NO: 53489 - DNA, 742 bp, Heterodera glycines
atggcgaagggaacaccgcggaggaatggtaaaaaacaaaaaataaaattacgatttttgatttaaaaagaaaaagagaaatgcttaacatttggtaaaatggaaaaagagagaagggaattggcaaatgttaagcattcaccgaatcattctttgcttctttttttaaaaatattatcagttaaatattttttgattctttttttgttttcacaattcgattttaaatgatttaataatttttattttggggggagcgcgaggcgaacgaccaaaatttggaggaaaacgaaaaggaaaaagaaagggcggcggacgacggaggcgaaaaaggggcaaaaccgtacaaaaaagattgtgacaaatattgcgtaccatgcaacagggaattgagcagcagacattactacgaattgcatatgctaaaggtggcgaggaaaagggaaaaaaatggaaaaaaagaaaatccgaaatttaatttaagggggataaagcatttgggaaaacggatttgggatccttttcttttgctcagattcacaacatttttgtgggcgattcgaaggcgctttacgaacttttggagtcatttgggccgaaacgcgagaagaaaatcatttaccggtgaatttgtcgaaaaaaacaaaaaaaaaaaaaacattttgccatttttctttttcagttgcgacgaatgttttggaggcgaattggactacgaattgttggaggtaaagaaaataaa

SEQ ID NO: 53490 - DNA, 804 bp, Heterodera glycines
atggacatgttccggttcaacgttcataacgctgtcaaagacaccgacgacgccgccgccgactctgctgcacacgatcaatgtcaacaacgccaacagcgcgaggttgcgtctcctcgcacaatgccgttgtcgttgttggttgaagagcaagctcatgtgtcagcagcagctgaggctgctgccgaggcagcgagtgctgttgaccaaaagatgtcggcagcgccaaatgacactcccgccatcactgacacgaaaattgattttatgactgatgaacaaacagtggcggcagcgccgccgcctctatttagtgagattgaaccgacgcagcagcagcagcagcagaaaaaacaacaggtttgctctaaattggtgtcggttatttaattttttatcaagaagattcaggggcgtacagcggaaatcatcgcaccgaaagtggagctgtccgtcgaggacaatggtgatgatgatgatgatgatgaggctggacaacaggtcaaacaggaggcggacaggaacggcatggatgcacatcattcaaattgtgcaaaagggccccttttgttcattgatgaacaggagaatgaggaggaggagagtgaggaagatgaggacatttcaacaacgcatcgaaggcaaggcatggactcatcatttgactacgaagacgacgacgatgatgatgacaatgacgatgatgatgatgatgatgaaatggaatcagtcagcggatgtgcggaatcggacaaatgtggtcactgtcaccacccgcatcagctaccacgaaatgctttggag

SEQ ID NO: 53491 - DNA, 1198 bp, Heterodera glycines
atgcttaaattatcctttccatttttgcctataattatgatggattttgcgatcggacgcatagcattaaacgacaagtgccaaaaaggtgtggacacatttttaaaaattttcatcatctatcaaaaggtttttaagacttttttgcaacggctgatcaattgcaagaaatggcatcggaaatttttgcagcggcggacaaacaaacggaaaatggaaaattttttgaaaagggatttgacattttctgttgtattgcatttgaaattgaaaaagatgctttaaacaaagatgagttggcaatgattgaagattttgaagcaaagcaacgcaatttttgccaccaaatgaaaaagggccaaaatatttgggaagcgatggaaagtccggcagggaatgccattgtaacagcggcgaagaatttgaaagtgaaccctcaaacatacgaagaaggactccgtaaattgaagaaaatgcaaatttgagccctgaaaatcaaaaagaaattgaaacatttgccaaacattgctttgccgcgttgaaattgtttcaacaattcatcaccggtatttgtttatataaaataattaaatttcagttaggagcaaaatattcatcaaaattgcaaaaaacgcttattctgggctctattgcactttatgaatataaagttacaaaagaaattactcaacaattacttaattaatctaatcttttttggcaattgcctaacgctgatattttatatatttttgcttcttaagacttttactttcgaatgatactaaaaagataggggtttgttcgaataggacattacggtggataatcgatcatatgatgttagaccgcggcaaaagtatgcattcaaaactgctaaaaagtagaatcagaatcccgcggcgttaaaaccgttttcccaaaacctagggattgaccgggatcggtaatccggttgagattgagtgttttatacaacaacaaattaagatgagcgattggctcagactttgctcgctggtggaggacagactgtgtctgatcaaagttcagccttatcagctcaaccggcgcccactcgatctgatcagctgccgaaggggaaatctcacggcgaaggaaaaggtcgagtaaatggccaaaatgccttggtgcttttgcattggccggcttttccggctatgtgtgcagtatattt

SEQ ID NO: 53492 - DNA, 1209 bp, Heterodera glycines
gaaaatgcgcgccgtttgtgcctaactttgtgatcagcttcacctttttggcactgttctgcatctgttgctcattcacttttttgcccgccactgatggcacatcgtcacggcacgcatttgccatcgattggattcgctcaaagccatacgtcgcatgtgccggtgtgtttcacagtgtttgtacagaaataaatatgccatatccgttaattttttttagtggaaaaatggccaaaaaattttgtgccggttttttgccgtgtttttgaaaatttttaccgattttttcccagctgtttttgaactcatgcaccgagtttttgaccatcgcatccctgatcgatgctttaccgctttaaataaaccaactaatcaataaatgatcgctcgctgatcactcaaaaaataaattgatcaattattatttaggtttgttcaacaccattttggcactgatctcttcttttggcttcttgttgttgctcggcattccgtacaatgtgatcaacacaatcatccctttcttggtacatagaccaatcatttcatgagaatggactcggcaataaaaccgaaataaaaagcctttttttggccaaaaaatttcgagaaaacatgcaattaggccagatcaaaccaacataataataataataattatgaaaaacattttaatcttgccaacttaaaatggaatttttaagccatttttcataaaaaaaactaaaatttaaaaaaataaataattttcgtaaattttaatttaaaatattttttacataaacttaaaaaataataataaatttattctttttttaattcttttaattataatttcttattttttcacaaaatttttttagaaaaaattttctagattaaaaataaataaatgttctaaaatttatatctgctatgatgtaatcggacaaaatctccttttcctgctgatcagatcatcgctgtcggcattgacgacatgttcgtgatgaactcgtgctgggaccagtccgatccggcactttcgcctgatcagcgcatggcacaaatgatgcaaaacggcggtgtggcggtgtcgatcaccaacatcaccgacattttggcatttctgatcggctgcgtcaccgaattgccgggcatcgaactgttttgtctgtacgcatttgcggccgtgttgttctgttatgtgtatcaggcaagtttttt

SEQ ID NO: 53493 - DNA, 2731 bp, Heterodera glycines
atggacgacccgggtaagtctatgtaattgccctttatgttctgctgataattttggctgctgattagcgtgattgatcaggctgaccaaaaaattataaattttcgtctgatgtaaccgtttagcttgtacatcaaaacccaaatttaataaataccccgatactgatcaatcccgatgaatttaaaaaagtttcgggatggatcccgagtgtcgggattccgagaaattcccgcgggatcccgaacatgtccggtctctagttcgaagcaacgatttttatgctcaccaagtcagtgatcagatcaggcaattgttgatcaaatctgattgcatcagatttgatcatttacagaatttgaaataaaatcacacctaatttaaaattagtggcaaggtgcagccaatagattcataattttttattctaacatttttttttaattacttaattaataatttgtcccaattaactctttgatccgcaatataattttcttaccattttttcagcctatgttttcactcctcgggatgccaggtgattttcatatcattttgaattttggcattcaaatttaaaaccttggcactttgttcagatggaaaaaggaattgggcactttctcaaagctttggccgctggaggagaacaaattcatccccggaaagtcatttgagatgaagcgttttgtgaatgttttgtgcaaagccaaggacggtgagtcattgttttaagaagaaggcaatttccaaggacacttaacgataaggacagaatttcatggttttgggggctctattcccaaggacgccatacgaattaatttttatagaaaatccaaggacggttcaaccaaatttcaagtgacacataataaggactttttcaaaatgccaaactttcatccgtaatgatcagatctgttcttaattttttaaggattcaaatttgattaaatttattgatcaagctaagcatttcaaaaatttgatcggaatgatcaaattaaagatatttaaaagtttttgtttaaaagttcaaccaggaattaattaaaaactgaccaaaattttagaatttttcgtataaaatttaaatttttaaattttcaaattaaaaattcgaaaaaaattcgttagaaatttttcagtttttcctttaaaaaactaataaaatttaaaaaatcctaaaatttttaaaagttttatcgaacttagctctttctataattaataaaatcgcaccaaattttatttgcttttccattttttttttgcaaaaattaattcctaaatatttttttgcagaaaattgtctgaaacacaccaaattttattgtcatgttatttgcaaattaaaaaatcgaaaataaattccttaaaattttccaagcttttcctttaaaaaaattccaaaaaaaattttttttttgataaaaaacaacacatcaaacgaagaaattaattattttttttttaaatttaatttttgaaattctaaaaaatttccgaaatgatcaggccatttctttccattagactgatcaaaatcactcactctttgcttttgcgaaattcaaaaaaatgccattggctccttccttctcccattttgaggcggcaacattttgaggccccaaattttggacgaaatttcgctgctcaacaaattcattgcggagaatgtgacggtgccaaccgtggaccggcgcttcaatttgagctaccaagatttgtgcctgagctatgattgggtgtgtggcaacaatgaacacattgaaatgttccgacaaatgacccaagtgggacgagtgatcgacttgcgctaccccaagggcggaaacaaggtggacaaatgaacacaacgactcaaggaccgatcagggggttttcaaggacaaacattgggaaaggacgcgtaattttctgaacacaatccgtaattactagtatatagatgaaggtggacaaaaggacacagggacaatgcatcaataatacagtatttctaaaataaagtactgtagcattgaatatgttttataaaaggtcaaaattgtaaaaaaaacttccttttgaattttttcaattaagtttttttcaggacttacccaaacctctaaacataaatagattgtaaatggattaaaaaattttcgaaattttaccggcgctatccaaagggcgaaaacaaggcggtcaaatgaacacaacaaggaccgatcggggttttcaaggacaaataaatattggggaaggacaatatatgaaaaaagggggatgtgttcggcgccatgtaaatcggcgacttttttttttgtttttcaaagctttttcaaaaaaaaaaaaaattttgggggaacagggagggggtccagcggtgccgaaggcgccatgggaaaattttttaaaattttaatgtgatttgttagcagattatgtccaaagagccaaattttgaagaaaaatgccactcttgccattattaattttaaaaaaataaaataaatattaaatgatgtttaaaggacacgccggcatatttgggcactgcccttggcgacatcgcattgaacggcacggacggcacggtgatggaagcaaaagtcacacagctgttctacttcctgaaacaggacccacccgtcgtacgacagtactccacgggtgattcattcctctttttttttttttttgtaaattccaatatttttaatttttaattaaa

SEQ ID NO: 53494 - DNA, 57 bp, Heterodera glycines
acttggacatttcgtgggctggacattttgtgggtcagcgaaaaacagtgatcaaag

SEQ ID NO: 53495 - DNA, 60 bp, Heterodera glycines
cctttctgtacagacggtcccagtcaattggccggaagaattcggtggcttgaatctcgc

SEQ ID NO: 53496 - DNA, 890 bp, Heterodera glycines
  unsure (1)..(890): unsure at all n locations
tatatgtattagttttgctattgttttctaaatttcnacaccgaagctcgagagtcttggtttcaagaaatctcggcgtaccacccaatttgacactttcatgtccacccatttaatacaaaatttctgctcattgtcagattatggccgttccgttgattggtggggcgttggtgttgtgatgtacgagatgatgtgcggtcggctgcccttctattcaaagtgattaaatgggcaattaatgctactacatatgaaaaataaatttgatagcaaaagcattgacgagctattcctattcggtcccaatgtttggccatggaaaggcgtgccgtgccgccccctggcgacgacttttattttttgtttttatttttttgcttaaaagtggccgatatttgcccgctcaattttctaaccaaattttcgagaaaaaaaactgattaaatttaaaaaatacactattctggccaagtcatgtaatgggataccatcaaagatcgcaatcagattaatgaatgttattcaaatccacccttttccccatggagttgaagttttcacggattttccgagggaacttcgagattcggtgaaacggtgcatttcatttcccctttaacggcgccgaaatttcgaaatttatactttttaaaatttaatttgtgtgcccatttgttcagagagcacgagaagctgttcgagctgatcctccaatgtgcgctccgttttccctcacgactgtcgcccgaggcgaagattctcttgtccggcctccttgtcaaggatccaaacaagcggctgggcggcggtccggacgactatcgcgagattcaagccaccgaattcttccggccaattgactgggaccgtctgtacagaaaggtacg

SEQ ID NO: 53497 - DNA, 605 bp, Heterodera glycines
atgaagcaccaatatcagaatgagctgaatacacagtccagcagagctgtgacatcaccactcgcagatgatgacgaaacgctggacgagtcgcgcgagcgtgcctacaaattggtggcgtacacggcggtcggcttctcgctggtcgccatcctggcggtggccatctgcttgccggtggtgttcaactttgtggaccacatccaacgccagaccaaacgggagctcgacttttgcaaggtgggataacaacggtgatcggacaatgacaaatcagttcaaaggcagctaaggattaattaaaaaataattataataattagagaatcccgctgtgaggtcagggaaaatggctttgagaatcctgaaagcgatgcatttgctctaggattcctgatcaaacattacaaatcagtatataagtgatgaaaaatgacaattctaaaaaatagagaatcccactttgggtcaggaaaatggcaagtgatttgagaatcaagaaatcggtgcatttatcctaggaatcctgatcaaaattcggtggcaaatttcggccgtttggctctgctctctttagcacttggattttaactgatcagaaacta

SEQ ID NO: 53498 - DNA, 345 bp, Heterodera glycines
atgaatttaatgactacttttttgacaacaaaaagaaaatcttgggttcttatttcatttcatttccagtgagtcacaattaaaatttcccttaattgacccaattatggctaattaaggaactgtggacccgagcaaaggcttttacgacaaaagcgaggacaaagtgacattggccatcgatgtgacagtgaaagaagcaaaaaaagagcataaataccaacataattttgtaaagtaaatgtttcggtttgaaatttacttgacgacatattttaattccgaaagtcattagagtaaatgttctcacattttgatggcttattttatttgagattcaataaa

SEQ ID NO: 53499 - DNA, 502 bp, Heterodera glycines
atgaagccgtcaaccggcagagaactcatgacaatgacagaaagtaagtgtgggttgatgcactaactctacaccacactacacatcaataaacagcagactaaattatactttatttaataaaatttggtaaaatggttaaaaaattcaaaattttgtgtaaattttttgcttttttctcacacgaaaatgccattgttttattttaaaaacccaatctttaggggtgtacttttttttcgctttttagctcaaccgaaagatgttgacataataatcctttgtgggattatattagcggacgttagtgctgctgtcgagagtctcaacgagataagactcgggataatgtcagggtctcgtgaaattctccatttatcgaatggcataaccagccaaggctaaactgtgcgacttaataagctcatttttgtggtgattaggaattttttgtgattctcactattaccatttttaaatattctgaattatatacaataaa

SEQ ID NO: 53500 - DNA, 742 bp, Heterodera glycines
atgcccctctcccctacaagggcacaagtgctgctgctgctgccaccagcggaggtcgtggcacgcgtggtcgtggcgctggcggccgtggtgctggtcaccggggcggtgtggcgccgggctttggccgtggtcgtgggcgtggacgcggcggaatcctcgaattccctgccgacatcaacaacatgaacttggaagacattttctatgatctcctctaattgtttagccggaaattcgcgcaaacaatttttaattatttttattatcctcgaatttaaataaaaatgttttttgaagaatcttaaaataggaaggaacatctaaaggcagcgcacaaaataggttagttttcactgggtgagttacggtttcaggattggagtcagggaggtcgaactttggtttttcactttttactttacaagttaaatgcaccataacgttttctaaaagcatccaaattaaacattcttggtattctttcaaaaaactgattttctaaatatttttgacaataactgttttgaaacacaatgaaattttttgaaattttgtagattaatagagtactctcttagagctatagaaaggtaccaagaagatttaatttggatgctttttgaaaaagttatggtgcattaaacttgccataatattttatggtcctgtgaactgcagtagagccgattcagaagaccccattggaaaatattaattcaaaatgaaaaaaatcaataaa

SEQ ID NO: 53501 - DNA, 426 bp, Heterodera glycines
atgccaccgccgccaatcactttgtaagtgttcacttgattgatgtcctcataaccaaacccggcagcatggtagcataaccttttgtaactgaaacatcgttttgtaaaagtgtgtgccaaccagggaaatattgcccaaaatgatggcctaattagactaatttggtgtcatttggtcgtcctaagtgctctctgttagcctgcattttgaagtttcattaatttcaaaaaattgtggccaaaagattccttatttttggccgtaacttttttgagagttaaattatttgaaatattccaggctgctaatagagacatttatggctatcgagtgttggcaacaagttcgttcaattaggacaaggtccaaaatttctaatattctaattcctcactacttcatttaatgaatataaaaattaaa

SEQ ID NO: 53502 - DNA, 1366 bp, Heterodera glycines; identical to SEQ ID NO: 22800

SEQ ID NO: 53503 - DNA, 478 bp, Heterodera glycines
  unsure (1)..(478): unsure at all n locations
atggataccggattcatggtctgtacccccgaaaacgcaaggaacttgttgaggggatggaaaatgacaaatgctggcatccccccccccttccaacccgttaattttccaattttcctaatcatcaataaatcaggcgttgacggaggatatcgacttctacgttgattcgtcgtgtgaagaggatgatgatggtgacatcgtcctcgaaccgccggttgctgctgaaactgaacctgaggaatcgcagaaggaggaggaacagagggaggagggaaaagccgaagaggaggcggccaatagcaaagcaatttgagtgacaattaatgatacgataatattttgataacgtttctaggcagtttattttatgttgtgtatcttttgctgattgtgaacagatttctttctcctttttgctttaccggtgatcatttatttattttattttcccctnaaaatatggcgatttattaaa

SEQ ID NO: 53504 - DNA, 348 bp, Heterodera glycines
  unsure (1)..(348): unsure at all n locations
atttttaataaatcgccatattttnaggggaaaataaaataaataaatgatcaccggtaaagcaaaaaggagaaagaaatctgttcacaatcagcaaaagatacacaacataaaataaactgcctagaaacgttatcaaaatattatcgtatcattaattgtcactcaaattgctttgctattggccgcctcctcttcggcttttccctcctccctctgttcctcctccttctgcgattcctcaggttcagtttcagcagcaaccggcggttcgaggacgatgtcaccatcatcatcctcttcacacgacgaatcaacgtagaagtcgatatcctccgtcaacgcctg

SEQ ID NO: 53505 - DNA, 533 bp, Heterodera glycines
atgctctacacgatagaagtggttaaaaagtgatttgggcacatacagtcggcatgttcccttgttagcttaatcacaagacccgacaccgatcctacatcgtcaaaccagtcgccgttgtttatgtgcagccacaggtaggatacatgagcggcctcatggagggctgtccgcgccgtatcctccccttgtgccgcctcgtccacctctttcttaaactctttaactttttctcgatgctgcgccgcaaatttttgttttaacgtcatctaaattaacataaaagcggtggccattgaattgttcaagcgcaaacgcatttcgcgttggcacttgattcggtaaattaaaaaaacacaattttttatcaaaattttttctagaaaatttggccgggcaagaagcgaggccattcttgaagtagaggatgaggaagaagagcaggaagaggacatggaatgggacgaagaagaagcgtgaccggaaaatcggtcagtggaaaatgcgtcagtgataaaaatactttaaataaa

SEQ ID NO: 53506 - DNA, 203 bp, Heterodera glycines
atgaatgcctaccaacagcagcaacaacagcaacttctccaggcttactacagccaattccaaccccaaggggtggcaggtgctgacggacaagtgccggccaagtataagagcacactgtgcaacatttggttgatggagggcatttgcacgcgcggaaaacaatgccattacgcacatgggatcaaagagctgaactacag

SEQ ID NO: 53507 - DNA, 88 bp, Heterodera glycines
gctgattattttcgtttgtaactttcttgaaatgttagaattatcttgttttctcgtattattacattattcagactttgtgctttcg

SEQ ID NO: 53508 - DNA, 203 bp, Heterodera glycines
acagatcaagcggaagaaggccagggagtgtcacgaagaattggacctgcctcagcattgcattcatttgatgtattcactggccgagtgcaaacgaaacaacattgatcctcgagcccgttttcgtggacggaagggcgatttgtgattgaaatactgcatacttttcatcgctgttttagaataataaaaagtttttctcg

SEQ ID NO: 53509 - DNA, 747 bp, Heterodera glycines
atggtttccacaaaatttcgagcagctgccattgacgaaatggtgcccgagcgaaggacaaagattgaaaggaggccttgcattggagttttgacggtaagcgacccgatcgcattgcttccaaggactgggtccaactctgccaaaagcaatttttagcaaaattcatggctttccgatccagggcaataggttgaggtccagccgagttctgtaaaatgaatttctccaattttttaattaatttcggatcgtttcgaatcaggtacttgtttgtctctacttttgtatcgtaaatgaagccatgtctaattattatggaagaattggacatttggttggcttcaatccgccgtcaaaccgtaatgaagctgaagaaatgataattgaagaagatgcaaggcttttgcttgaacaaagtttggatgaaaatgggctgcttgttgatcaatactttgaagaaatgggtttgaatgaagtgcaagatgaaaactcgcatgatgttaattcagaggatggagaagtggatatcatgaattaattcatatgaatttttatatttttatttaacttttatatttgaagatgcttaaattttacattgttgttaaaatacatgaaaattgggtcagaatcatttagactgcaattcattagcgctgagtcttgttttattaagcggtagcgtgtaatacataaaaattttcattgaaaatggtttttaaacaaaaaaaacgaatcgggata

SEQ ID NO: 53510 - DNA, 1520 bp, Heterodera glycines
atgccagctgttgactgtttgaatgggtatcgcagttacactgatcgctgtggggagttttttatgggggacccattggacccaaatatggagacagacttcgattttgctggaaacttggcgctttttgacaaggctgttagtaattaatatgatacttgtgcagttttaaattaatttttttttaaataatatctatttagtacaaaaaatacgctggtctcattttgattcctttccacctgctaaattaaaatcttcgtttcgggataatgttattcaaaaatatctacttgtaacaatgtagtttttaatatcaaagattgtatatatccttccttttatttttgaaccgtaaacacacacattaatagctttatttttgaaaaataggaattcaaccgagaaactgaaaacgtcttccatgggcttgactcggccggcgattgttctcggaactatcgcaatgatgagaatgttcttcaggtatgtaaattattgtttacttctgctctattcatttcgcttaaggattcttcccgtgttatctcgtggaccaaaaataccactgctgatgatgatgacaatcaaaacaattctacctcctctccgatcgactgacctcattaaacgatttgaacatcgcccaatttaggttgtttgttgcctcgtgtaattgttgtcgtttttcctaaacattatacctatgtggatagaatccgatctaccaaaatcttatggtgcctttgttgattttcgtttccatataatgtcttacaatgagttgaattcattgttttttggaattaagacaaaacgacaataataattatgaaacaacccaatgttttgattaaaatgggaaaatttttattaaataaaatcttccaaatttaatatggaacattgtttttaatatgttttccaacgtgtctttggatgtttgttgcgggtaaacgaattctctaactcatcgaaattcaatattttgctcttctttggtcaaatgacttgtttttttcaagttgaaaattcaaatgcatttttaatttaaagaattgagtatgacatttggtaattcaccgactcaagagagaaaattaggcgaacaggagacgcaatttgatgagactattacgcggactgggattgcgtgtgatcggatacgactacaattgaagaagtgcattaaagaatctgattgcatacaggtggataatttagttttgcgactagatcacgttcccttcatataaaacaaactataaaattttgacttaaaaatgcttaaaagcttcgggtgaaccgataggtgtcattacaactcgtacaaggctgtctaattgtaagcctgaaaagggaacattcggaactgtcactgctcagatcgctttaaaaccgcctttatcgtgtagagcatagtcgatttcctattgtcaatttccggcttttttggctccggtgtcaaaaatgatcaaatgaaaaacccagcagaattgtgttattcttcagttattaaa

SEQ ID NO: 53511 - DNA, 285 bp, Heterodera glycines
atgtttgttgcgggtaaacgaattctctatctcatcgaaattcaatattttgctcttcatttggtcaaatgacttgtttttttcaagttgaaaattcaaatgcatttttaatttaaagaattgagtatgacatttggtaattcaccgactcaagagagaaaattaggcgaacaggagacgcaatttgatgagactattacgcggactgggattgcgtgtgatcggatacgacaacaattgaagaagtgcattaaagaatctgattgcatacaggtggatatttag

SEQ ID NO: 53512 - DNA, 455 bp, Heterodera glycines
atgggcttgactcggccggcgattgttctcggaactatcgcaatgatgagaatgttcttcaggtatgtaaattattgtttacttctgctctattcatttcgcttaaggattcttcccgtgttatctcgtggaccaaaaataccactgctgatgatgatgacaatcaaaacaattctacctcctctccgatcgactgacctcattaaacgatttgaacatcgcccaatttaggttgttgcctcgtgtaattgttgtcgtttttcctaaacattatacctatgtggatagaatccgatctaccaaaatcttatggtgcctttgttgattttcgtttccatataatgtcttacaatgagttgaattcattgttttttggaattaagacaaaacgacaataataatagtgaaacaacccattatgttttgcttaaatgggaaaatttttattaaataaa

SEQ ID NO: 53513 - DNA, 550 bp, Heterodera glycines
cagcaaagtcgtccaaattccccagcaaatggcgtatccaaattgatacttccgagaagccgagtcgcttcaatacgtcgtgagtcggattgcaattcagagaaaggatttggtgaggcggaagcggcacacgaaaaaatggtaaaatcggcacagcaagtcgcgatgggttttgaggatttttgtctcgtgagtgcaaatatattttttaaaatctatctttgtttttaaggacgacaaggctttcgaggagcgcaaaagggccaagtcgttgtctgagcctatttgcattttcaccaatgcgttccttccccaatgttcgtcaccgtcgccgagtaggggttcaatggatggacagaaagtaaggacaactgactctgattttgaccgccactccgttgtcattcgctcagcaatgctattctccgtctgcccagcaagtcgtccgcagcaatttggcgtattctccgagtccgagtccaactccgtctggcactcagtcaatgcaccgaatgaggtcttgcgagagtcaaacgcaccttcccgatga

SEQ ID NO: 53514 - DNA, 1660 bp, Heterodera glycines
attaattcacaaacctattaggtactttagattattgtcattggcggtggactcgctgggatgtcggccactttggaggcactaagtaatggtgccaaagtgattttgatcgataaggagccgactttgggcggcaacagtgccaaagcgagcagcggttttggattgtcgttgcttttctttcaatggcatgaaggcaattaagggatcaatggttgtgggacgaaagtgcaggaaaagttgggcattgacgacacagcggaacggtttcactcggacacaatggcagcgggcgacagagagaacgaccccggcctcgtcgaccttttggtcgtcctacccgctatttgttatgtcacatttcttctaggttcaccagtcagcgtcggctatcgattttctgacagaaaatggagtcgatttggccgacataaacctttgcggaggacattctgtgcccaggactcattggtcatttcgcgtttcaatggtttttgaagagacaatttgccctttctctaaaggctgctctcgccaaaagaaggaaaaccgttgccggtcggagttgcaataattcgaactttaaacgcgaaattggaagaatggaaagcaagggatcccgaaagactgaaaattattctcggcactgccgttttgggtttggtcacatggaatgattacgtaacgggcgtacggatcagagacggagacaacaaaatcagtgcattaaatgcatttgtcttaaatcgtttcttacacttttagtggagattaatggaaaggcggtgattctgaccaccggcggattttcttccggtagaatttgtcattgtgatccacttctaacttttcttgttactacaatataaagatcgggacaacgagacttccttgttggtcgaatttgcgccctccgttctccccttgccaacgaccaatggcccattcgccactggagacggcgtgaaaatggcccgagcgatgggcgctggtttagttggaatgggaaaggttcaaattcatccgactgcattcgtcggtaggcaaaacagtttttgaattaatcgcttaaactctataccaattcttccaacagatcctaaaaatccaacagcccacacaaaatttttggcagcggaggcattgcgcggaaagggcgcgattttggtaattagggaacttaattggtggcatttccagctaaaacacaaaagttttaggtcaatgaaaaggggcaacggtttggcaacgaactcggacgaagagactatctgactgagaaaatgaacaaagtgaaccactgttgttgttgactgagaaatgagcaaatggctttcctccttctgcagaattgtgctcgacaaaagtctgtggctgatttgcccattgcgtggatgctaatgaacgaccaaatggctgattcctttgggcgtcccgcgtttaatttctatgcaaaaatcaaaggatttttcactgtctttcgatgttctcgttaacaaaggaaaatgccagtttttcagcattttgcgaatgtcgacgaacttgcgactgagattggctgttctggcgaaatgttgcgcaaaacactcgccgaatgcaacgaatacgcggagatgagcacgaaaagtgacaaattcgtcgatcccttcggaaggagtaa

SEQ ID NO: 53515 - DNA, 744 bp, Heterodera glycines
atggcaaccgatattaaaactattttacttcgactgtcttcaattgaaacgttattatcaaacaacaacaacaacactttggcaacgcaaatggcagaacaattcaacgccattgctgaacgcctcaacgaaattgagcgcaaaatcaacagcaacaataacgacaattccagtgcggaggaaaaagaacgcaaacgaagcctcgttttgattggcctgccggaggctgtggctgaaaagccgtcagaacgcgccaaagaggacgcggaaacagttgcggaagtgttggacgctttggatgtggaggtttgcccgcagatggtgtatagaatggggcggcggattgatgagaagcgaaaggggccgcgtttggtcaaagttgtcttgccagcgacgacgttccaacgttttgcattggcacaatgggggcgcaaccggacggaactgaagcagcatgttggttggcagcgacttctcgtcaggccctctctgacgaaagaagaattggcggctgagcgggagattcgtgaacagaggcggatgaattatgaagaaagcaaaaagaatgaaatggtgacgacgcggcgtggaggcaacatgggaaaaaacttttgaggtcacaaaattttctcaattgtctttattttaactcaagaagtttagtgaacaaaatgaatgagtttaagcttttacttttagaaaataggtataaaattatcgcgataaccgaaagttggttgaata

SEQ ID NO: 53516 - DNA, 889 bp, Heterodera glycines
atgagcaaaagcggtgccaaaggcctgtctcgcttcgaaatttcgtcatccaccggcgccgcggggaaacggcgtgggtcatccgccgaagagctgcccgcaaatctgaaggggctcgccgaagtcgttgatttcggctcggtaggcgtgttttatgtacgcgccaaactcgtcaacctccaatacagcctttacaatgtcagttttcatcaatattttattaaatttgttgttgttgctgatggttccatccggtcacaggcatgcccgttaaaattttctggcggactgttctgcagacgtaagctggattctgagcttcgatgtccgtcgtgtgatcaccgtgccaaaaaaccgctagtttgcatgtactgccgagtggagctcaaagacatcgagaatccggaagttacgcagtgtgccaccatgttcagctacgttgctgagaagtacatcggtatcaaagcggcatcgatgctcgacatgcgtgaccaaaacccggacaaattggagaaactgcttgaagcaaaacttgaaaaggagctagtcgtaaaaatgactattaaggtacaaaaaatgtgtgattattattattattattattatacaacgatgtacgcaatatgtttttttttgtatgaaggaagccactgccgaagacttcgaaggccaattcgattggctgatttcaaaggtgtttgcctctgatgacgaagctgaaggcagctcacagaccgctaaaaaagccagaattgttgaggctgaacgagaagaagacgaagacgaaattgttgttgtcgatcacaagaccgccgtcactgctccatccacctctgctgtggacgagcaggagggaaaggagaaaccaaatagtgaaaaaacaaaataa

SEQ ID NO: 53517 - DNA, 1961 bp, Heterodera glycines
  unsure (1)..(1961): unsure at all n locations
atgggacgcgaaaatgtagtgccgatatttttggagaatggccattgggatggtctgaagaattatgtctgctttttcaaccgtgggaganaattctgtattgattgcgagtgcttttacgacaaagatatttaccatactttcgactgccgggcaaggtgttattattgtaacaaagtaggaggagtaccatgccaaaaggagagtggagtgaagattgagtgcccgaagtgttgtcgttacttttacaatttggagtgttataattaccatcaggaacatcagacttgtaaattatggaggcgttgcgttatctgtgacaagacttatcgatttaacccgaagaagggacatgaatgtgaagagacttattgccaactttgtagtgtgagccatgaccccaagcggggttgttatattataccgatcgaggagaaagaggaaaaggccgtctaccgaattgtcgtttgggtaagatttaataaagaaaaagacaaaataaaacctaactttcaggatacggaaacatcacaggattcgatttataagggggaccagaaagagcatgtgatcaattatattttggtgagagttacatgtacggagtgctgtgatgataaaaataggacgaattgcaaaatatgcggggaggagaggaccaaggattggagcgaggctgaggggcatgagccgacgaaggcatttgtggagtggattttaacggcattttcaaattacgatacgtacatatttgcgcacaatgctgggcgttttgatggtaatgaaaaaaaaattaatctaaatttttaaatcctaaaatttttaggtcattttgtgtttaactacctctgccgtaccgggaagaacccgataccgcttatcaatggactcaaaatttatgaattcaaagtgcgaaactcgaagaaacattcaatgctgatatggagagactcatgcttattgatgccggtgaaactcgagtcgctgaaggcgaccttcaacttgggctgtgaggacaagccctttttcccctattactacaataagaaagaaaattatggagttcgattacaacatctaccaccgatggaggactattcgccgggatctatgaacaagaataaatacgaaaaattcgaaaaatggtaagaaaagaaggacaaaattaacaataaataatttttttcaggtacaacgaaaacaaggacacgcctttttatttgaatgacgaattgagaaattattgcagaaacgacacagagatattgctgttatcgattattgagtttaggaggatattgattaacgatattacgaagggatttgaccccttaccgaggagttgtacgaatgcgggggttgcgatgaatatttttaaggcaatgtttttattgactgagcagttatcgattgtgccggagaaaggctatgagcggtgtgatagagcgagtgttatggccattaagtatttggagtggcggagcaagcgtgatgagattgagataaggcacgcggggaacggacgagaagttaaaattgggaattacaaattggatggatttattgcgaataacggagctagggacaagtgcattgaagttatgggatgctatatacatggatgtatgaactgttatgacccggcagcggaactgattggaggaaggacggcccaggaattgaatgatgagacgcaggagagattggcggagctgcggaagacgttggacgtcgaagaagtttgggtaagtttatttgacatttacatttttattgtgaatttttagggctgtcaaattgaggagttgaaaaaggatgaggaaatgagggacttcttcgacgatagagggaatgagaaggggccgattgatccgcggatggcttatgcgggagggaggacgggaccgatgaaattgtttgcgaaatcggatgagaagaaaaaaattagtgtttatgatatt

SEQ ID NO: 53518 - DNA, 486 bp, Heterodera glycines
atggttgggcaacggcgttttggtcagcgacggggaccattggcttcgccaagtgagtcccataaatccataaatcagccgaggattactaagatttaggattttcggggcttcggtgggggggcacgcttgaaaaactgtctttcggccaattttcgggctttttgtcttttgcacccggatttcatgaattttcacatatactttttcgaattatcagtcatctctttttaaacaagtttttttcaatatttagataaaaaattgtttattaaatgaaatttaccgtatcgtatcccttctaattaccgtatcaaaatacattcatttaatttagcgccgaatgttgttgcccatctttcacttctccatgttggaacagtacacgcccaccttcaacaaatatggacgaatgttgacaaaaaatttggccgaattgcagggacggcgcgaacttgtggacctgtcaccattgtgtaaaataaa

SEQ ID NO: 53519 - DNA, 417 bp, Heterodera glycines
atggtccaactttatgttggagcatgcaaatggtaagaaataaaatttaaattttataatgttttaaaaaattggttgattatttattaattcagaggccatccgtaatggacaccatttgatgagatggttaaacaattcaaaaaaataataaataattaaattaaaataaatccattattttacatttttcaatttcatttttaggtgggtcgctaataaatttattattatcatgttggatggagagaccgcaaaagtgattaacaatttaatgtttaaatacagtatttgcttttcctaaaatagctttggtactaattaattttgtatcccattttggtcattttttatcattttaaaatattcttttaactggattaagaattataatgctcgatttttgtttttaataaa

SEQ ID NO: 53520 - DNA, 714 bp, Heterodera glycines
atggccattaatatttcggacaccaaatcgcttttcaatcaaatcctcgcccagtccgatatcaccataaccacaagcggcataactgtcagtggtccacgcctatcgaccccccgttttttgccgtttgacgattgtggacgctgccgcgtttgcaaagcaaccgaggccgaggtggacataatggtgaccaaagagggggtcacattgtggtgcactcgtatcaacaaaccccaatttgtgccgttcgatgtcgtctacgacctgccagggcactgctttttccgcgtgaagaacaaagcgagggtgttcaatgtcccctacggagacctgccctccgggacgtgtgccaaaagcaaaccgacagaccaccaacaacaacaacaacaacaacaacaacaggatctgaagcgcaaggcaaaggtagcacttgacctggtggaggctgaactaatggccgatgctatgcaggacggcacacggtggaagaaggccaaaaccgctatcaacgtgcttggcaatctccaattggctgaatcactggactccaccaaccgcaattccactgatgtcccgacgcaggcaaatgaagccgctgacatcaaggaagaagaggaaaatgtgcagggagaagaagaaaacaaagaagacattggagacattgacaaaactcttgacgacttctttaacagccttaatgcttcaacctcaaat

SEQ ID NO: 53521 - DNA, 1271 bp, Heterodera glycines
atgaaaacccttcgcaaccaagtgggtcgccaaacgatgccaatggtggtgaattttgatcaggtgagtaaaaactttttaattttactattttaaattttcaaattatttcagactggggacgcgcaaaggactggacaagtcgggggccgccgatcgatgccaccctctgttgtgccggcgaatttgggcggcgggccgccgtaccaggtacaaacacaacaaagcccttcgcttcccttttttataccattttttaaaaaaggagccacaaacgcagcagcgcgaggtgatttatgatgtgccagcggatggtgtgccggaagacgacgatgacgacgacagtttttgaacgatgagccgatacaacaatgagctttaattcctcataaatttttataaaatttgggaattttcatttcacattaaacaatatttggcaaataaatgtaacaaaatgacaaattggcaatttataggagaccactaaataggagaaatttcaaatgttttactgttgggtattcagatcgttaggcgagattaatgaattttgaattttaaacatgcgatataatctttttgaatgattaatgtgtgatatagtggagtaaatctgtcggtacatcaaatgagcaatttgtttaaaaatgggtcacatccattatcgggaattcgggatgcgttggtgtataataaagctgcctcccatttggagaataataataaagccgttgtgcaaggtcaacagcgcaccatttaaatgcatccctcccgtctcgctctcattatttcttcacatcacttgctcaatattttcacatttatttatccgctttacattttgctatatcccaaatcatatcatttaagcacacaaaatttacttcaaatttttgttttaaaaatgtccgacagtccaacgcccgaaaccgaaataagcattgcatgggacatcctcgaaaatgataaagatgtagtgaatttttttctttaatttgaattcaaatcttatttatcatttctgcagtggtacaactggttcactccaacgaccgccaaacaagcatgcgtcgaggcattggcattcgcgcgagaaggtggactaaagcacgagaacattctgaaaataatgaagacgcttgaggagagagaaaagcgtgacaagaaatgaaatgtcgatcgatgaccgatttgttgatagtgatgtggatatatgatctttttttttgggacatttaaaaaattggtgatgaattttgtcaaataaa

SEQ ID NO: 53522 - DNA, 586 bp, Heterodera glycines
  unsure (1)..(586): unsure at all n locations
atgatttttctcttaagcnccgtaattgacattgaactttggtccgagtcgtccaacacgtcttacacttattcctcaaccgacaaaatccttgccacaacaaccacggctcatccggctttccaacctttggtcaaggcgacacagttggaatggcgcaaacctgaacacgatggaggcaatttataccaaaaatggacagccattaagtgagtcatcaagagcaaaatcggaatttgaaaattgtacccgaaagggttttgttttatgatagagaaccgacacttaaaattcccgaaaaaataataaaaaaaattattgctgagagtggataataaatttaaaatgctaataaaaaagggttattaattctcttttaaacatattttagtgacaaatggcttgttgtacatcagtgaatctgatttatttccacgggttacgctttataattctggcgatgtgatcctagcaaattttggccataattttatgcacaatttcaacgtcgcttcacgaagccaacgtttggtaatgttattaagaaggagcttctgatttatgcagcccccccaaaaaaaaaata

SEQ ID NO: 53523 - DNA, 3804 bp, Heterodera glycines
cccccaactaccaaggcttcatccactaaaaagcccccaactaccaaggcttcatcatcggccaatgacgagccgtgcgatgaagatgccactaatgagcacccaactaccaaggcttcatccactaaaaagcccccaactaccaaggcttcatcatcggccactgaagcaacctcccaagcttcgtcctcggtcactgaagagccgtgcaatgaagagacatcgacttctccatcttgtgcatttgtctgcagtggttttggatggaccatttacaatggcaattgctacaaagtgatcgaaggattgatgaatcagaggtgtgaacacgaaatgaattcattggaggcgaagcccttaaacaaatttaaagaatttattattgaaattgccgtttaagccaagcagtggccgcttgtaatgccgaggactcaaaagcgcaacttgtaagcattgcggatgaagccgagaatcggcttcttggccgaatcattgcccagccgcttgctcgttcacttctgacttaccaattgtcatcaacaattttcaacacattttggttggatatttgtttaaattttgttgctaataatatattattaatccatgataattgattgcctaattacaatgatatcttttccaggatcggtcttcgccgtgtccgtgtcggcaatctctatcaaagcacatgggcaaacggatcgccagcaacgtttggcaatgtggtaagtcaacagaattgcctaattaataataattattatataattgtttaattaataataatcaaaaaaccaaaattataattatagcccgaaattacaactgctgcaacgacaaccggcaccaaaaaccaatacccatgggcagaaggacaaccatcaggcaccaacaaatacactgacccaagttgttacagttatattaagaaatttaaaaaatcgcatttttattgaatactttaatatatttttatttttttttatcattttaattattcttaattacaattccaaatgcttttagctggcgcaaatgaggaatgtgtgcatatgataaatgcaaatggccaatggaacgacgcgcgctgcgcaattcaaatgacaggcgcaatttgcaaaaaagcagctcaagcagttggaattgggtcacaggccgccgtaacacccgttggaacgggccaaatccgtgtgcaaagtgccggaagttccgcggcaccaccccaagcctcgtcatcgtccttcgatttgtgtaatccgagtgtatcggtgtgcggaggctttgggtggaccattttcaatggcaaatgctacaaagtgatcgaaggattgatgaatcagaggtgtgaacacgaaatgaattcattggaggcgaagcccttaaacaaatttaaagaatttattattgaaattgccgtttaagccaagcagtggccgcttgtaatgccgaggactcaaaagcgcaacttgtaagcattgcggatgaagccgagaatcggcttcttggccgaatcattgcccagccgcttgctcgttcacttctgacttaccaattgtcatcaacaattttcaacacattttggttggatatttgtttaaattttgttgctaataatatattattaatccatgataattgattgcctaattacaatgatatcttttccaggatcggtcttcgccgtgtccgtgtcggcaatctctatcaaagcacatgggcaaacggatcgccagcaacgtttggcaatgtggtaagtcaacagaattgcctaattaataataattattatataattgtttaattaataataatcaaaaaccaaaattataattatagcccgaaattacaactgctgcaacgacaaccggcaccaaaaaccaatacccatgggcagaaggacaaccatcaggcaccaacaaatacactgacccaagttgttacagttatattaagaaatttaaaaaattgcgtttttttatttttatatcattttaattattcttaattactagggctgggatttttatgttttaacatattttttttgcggcttagttatggcgagagaagcccaaaaatagcattttctccgaacaatttttgatttagagcgacttataaaaacataaaaacacatattttggcgttttcgcacataaaaacatatcgcacatatttcggggtttggcacatattttgcacatattttggcatttttgaaaaaaatatctatgaaaaacacaaaaaattcaaaaatgcacccctaaaaatcaactttcttgccatttttataggctctttcaaaattttctttatttatttcgtgtaccgaaaatcgaattcttcattaattctttactggatatcgaagtttattgctggcacttactcaactgatggaaaaattatctttaaaaacaatttatcaaaaaaggactaattttacccccaaacacctccaaatgttttttatttgcaattgtgcgggcaaaaatgataaagaatgagttttttggaatttttatgcaaaaataccattggtttttccaatttttagcacatatttttgcattttttaacacatatttaggcctttttttggtttttagcacatattttattacatatttcaggatttttagcacataaaaatcccagccctaataattacatttccaaatgcttttagctggcgcaaatgaggaatgtgtgcatatgataaatgcaaatggccaatggaacgacgcgcgctgcgcaattcaaatgacaggcgcaatttgtcaaaaaacagctcaattttaaaagcctacgattgatggatggattttgaagagcctaagaaagcaatgagtgaccaattaatgctatttttgtaaatattgaattgctaattttcaatatggaaaagcgaaaaaataaattcttcggtttttgcttttatctccgatttactatttatacagttgaattcttacagcaattaactcaaatataaaattaaaattaatgagttcaagtgattttaggcttattttcaaaaaaaaaaaactaattttaatgcttcattttatctcgcatttatctaaaaatatttatttgaaattttaaagaattttttgatctaacaataaagaaaaaagaaataaaaaaattcaatttaattttgatcaatacgcagacgtaaataaatgcttattcatccaaagtgaatttgtccataaattcctcttttttcattacttttgtcttgtgagtggttaaaaagggctattaattctcttttaaacatattttagtgacaaatggcttgttgtacatcagtgaatctgatttatttccacgggttacgctttataattctggcgatgtgatcctagcaaattttggccataattttatgcacaatttcaacgtcgcttcacgaagccaaagttcgtaaacaattggcctttataattttaaacaaaaaataatttaaaaagtaaattattagaattggctgaaattgatcaaacaattacaaaaatgaaggacaaaaaccggaataagcgaagctgccgatgtagtggtattacaatgttataattaaaattattaaattaacttttttaatagattgatacagttcattttttgctaaggaatttgttaaattaaatactacaaattagcggcagtctatctgtttatgataccgggaaaaggtaggaaaattctgaatgatatagttatatatatatatatatatatatatatatatatataccagcattagcgaaataatttattattttaaataaa

SEQ ID NO: 53524 - DNA, 671 bp, Heterodera glycines
atgacagctatgcgcgggataaagataaaggcaaaaataacgttggagtgctcaccaatagaagatgaagggaaggggtcctcatcatccaaggaatcggcttcatccgaagaatcatcagcagaacattgttcatctgatgaagattcatcaccagtcaccaaagagcccccaactaccaaggcttcatcatcggccactgacgagccgtgcgatgaagatgccactaatgagcacccaactaccaaggcttcatccactaaaaagcccccaactaccaaggcttcatccactaaaaagcccccaactaccaaggcttcatcatcggccaatgacgagccgtgcgatgaagatgccactaatgagcacccaactaccaaggctttatcatcggccactgacgagccgtgcgatgaagatgccactaaaaaacccccaactaccaaggcttcatccactaaaaagcccccaactaccaaggcttcatcatcggccactgacgagccgtgcgatgaagatgccactaatgagcacccaactaccaaggcttcatccactaaaaagcccccaactaccaaggcttcatcatcggccactgacgagccgtgcgatgaagatgccactaaaaagcccccaactaccaaggcttcatcatcggccactgacgagcc

SEQ ID NO: 53525 - DNA, 1453 bp, Heterodera glycines
aaatgcgcgagatgaaccgttgcccaagagtaagctaccaacaggtcaccacaatgaccggtaagacaaaaatcacttgggcgaccttcacgaagttcaaaatttttaaataactatattttagccttaaatgacccgtccactgacaataagccaatgattgtgattaatgggcagcgagcgatcacgccgactattaacactttaatgagggaagacgacgccgacacctccaaacagcagcagcaaaaagaacagcagaggaacagttcaagtacttcaaacgaggcataaaccattatttatatgaattaataggctaattaattattaaatatattattaaaggtttttttagtccaatttaattaccaaaattaaatgaattaccgaataacttttccccacttttcagacacaattattggtgtctgccattcgccatcgtcagtcctcctcctatagcgccaaatcaaacaggtgatcggtcggtccttcatttatgactaaattttgcatttatccattaatattttcctcaaattttgtcactaattactcccaatttacaccactaattaattattcttcagaaatcgcgctatccgtgtcagttttttgctggttgtcggctatttcgcctgctggttgccctacaattttcttgcactgattcaattcgtcgacactgacctgttcagtcggcacgcaaatcaagtcgggaaataaatttgtattgaaaattctgcaaaacgataatatattccaaattggaaatttaatttttgattttctaccataaaaaatcttatcatgcaaatttataagctgataaaagcattcttaacaggagaattatttttaaataatctttttaactttgtgttaggtgtactttctgcacgggatgatcgtgttcaactccgtgatcaatccctacctctacggtctgtgcggcggactgtgccgacaaaggcgaagggattcttgaaattaatttcattattattattattatcatcttcttaattggtctcaaacaacgaatctttttcctctatttattgtatcttcataaatgttttaattaaggcatttataaatgaaaggaaattttaaaaaattatattaaatgagcgtcgaatggaaccagcaattttcacatcgaccaagcgagagtaacccggaaatgaaaaattaaaggaagatgggtgtaaggcggtgccaacatacaacgccgggaaattattttgacaatttgattagattattaaaagattttgtccaaaatgccatttttgtggattttacgcaaaaaaaaaattgaaaaatttcagaaatcttctataattctttaatggatacgttaattagagtgctcgcaactcgcaatggcaattcgtggcaattcgaattgatggaaagttctcgtgatgaactaaaagtttactga

SEQ ID NO: 53526 - DNA, 3018 bp, Heterodera glycines
  unsure (1)..(3018): unsure at all n locations
atgcgcgganngaagcgattccttcgtcaaatgtcttcncacaaccgtgtnggaggtggagggtctattggacgtgtgccgtgagcattttggcatttggtggctgccggcggcacatttgtcttggacacggattggatttttaaatgcgaagtgaaaactgatggacaataaatgataaaaaggattgataatcattagggacgtgaattttagtgaagaaaaatcccgaaatagttaactaaaatagtgagtaaaaatgccgaaatagtgacgaatagtgacataattttcagccaaaaattgagcaaaactaatttttattcactatttgcagttgcaaatgagttggactgggatttttaagaccaaaaaacccaaaatagttacctaaaaaaattttttaaattaaaaatttttgccaagaaagtaaatttttgagaaaatttttttttgatttcataggagtatattttgaaaaattttagctcgattcttaggggtgtatttttttaaaaattttagctcgattcttaggggtgtattttttggttttattgcatttttgttaaggaattttgcccaaaaatgtcaaaatagtgaaaaaatagtgacaaaacgccaaaatagtgatttttaactattttagtgacgaagtcgccaaaatagtgatttctagtgaccgataatgacatcagaatcgaaaaatttttatgcggaaatgcgtttttgagctcctttcttcaaatcaattgagcaaaaaaaatagttgtccaaaaaatgaccaaattttgtgattttgagccatttttagcagattttcattaaaaatttgtgcattttttgaaaaatttagcgacatttcttggaaaatttgggtgtggctaggtctgggggggggggggggggtgctgcttgcctgagctaagccaagatgtacagcaacagtttcgcttgtgtaaatcactttgccttcacagtcaagaacgatcacaaaaccgtccattgcctttttttaaatgagtgattgatattagaatcatctgctgatctacccattttctattatttaattgtgaatctaattaattatatatttaattatggaatagggtccaaaatgcagaaaattaatttattctgtattaaattttttagcatacagtaacagggttgttccgggtcacccgaatccagaaacccgaatcccgacatttttctcgtcccgaaacccgaatcccgacccgatgattttgatcgggattcgggacaaaataagcactggtaagaaaggggtctgggtgaaaattgagtagataaagaaattggttgagaaaggagaatttttgaaaaaaaaattaataatttatttcttttaaagcattttattcttatgtttttgtggtctattggctataaattttcttattgatttttgaacatatatttaaaaaaattttaattgacccgaatcccgaaacccgacatttttctcgtcccgaaacccgaatcccgacccgatgatttttcggccgacccgacccgaatcccgacccgatatttttctcgtcccggaacaaccctggtcggtacctttgcgttatttttaaatttaattcgaaattttttgaaattttgaaggctactagagaatggtagcactatcgtactgtgtcaagaatgtttcatttaaataagcaaaatttttaattttaatgatttttgattaatttcattgacctttcaagatttcttcaaatgtgattgtgtgtattgcgcttgatcgccttctctccgtgttaagcgcttctcatcgaaaccctgaccaggtactcccctaactgagaaatgtcagcgaattttcgtttgaaatttataattaatttctgtttaattttgttgtgtcccatttttaggctgcccgtcgcatgcgactgatgcttttggtcgcgtggctaaccgcggcactcatttctttgccccaatttgccatttggcgttctttccaagcctttgacaatccgccatggaatcaatggtatacaacaaaatgataaccatttaaaaatattacctaattgcattttacagtatgcaaatttgggaaattcaacgcgcaatggcacaacaaagtgacccaacgaccaaagcttctccaaaaatggtcagtcagcttgtggcattcacaattttaattgttcactttttctattgtaattaaactcaattagccaaaagcatttaattctattttaaattttcatccgttcattttttagctaaaaaacgaagaatcactgtacgtgattgcgcacatgatgctgatcttttgggtgcccgcttttatcattttggtaattttttttttgagaaaaacaaatatttttaattgtttatattatattcaatttttaattcatttctctattttactaaagtagtttatttaagctctgttacgtgctgctctcctgctgggtatacattaatagtaagccgtcactgttcgaattgacaacggccggcaaaggcattgaaagtgccgggggcgcgggcgccggtgaggggcccaacaaagcgggcgcgggtctacttctaatagaattttgactttgggttaccgcagaggaaatttttttgcttggctgggattttgcatttttcaaaagaaatatttagctatgggcgaggggggggggggaacttgggaatcgtataaaatttaatttttttttatatttagaaatgcgcgagatgaaccgttgcccaagagtcagctaccaacaggtcaccacaatgaccggtaagacaagaattcacttgggggaccttctcgaagttcaaaatttttaaataactatattttagcattaaatgacccgtccactgacaataagccaatgattgtgattaatgggcagcgagcgatcacgccgactattaacactttaatgagggaagacgacgccgacacctccaaacagcagcagcaaaaagaacagcagaggaacagttcaa

SEQ ID NO: 53527 - DNA, 765 bp, Heterodera glycines
agtgttgctgcttcgtacgaattcaccactttgacatgtaatttcattttgggcttaaatcagtgcgaaatgtttcatttttcctgtttacttttaaggcattcctggtgtgatagaggtaggcgttcattttgctgcaatttgtccacaaacgctttcgccagtacgaaggggcgaacatccaactgctcgatttgccgggtatcattgagggggcagcgcagggcaaaggtcagcagttgagaacctttttaaaaaacaatttcggcatttttttcaggccgaggaagacaagtgatcgccgtggcgaagactgccgacctcattctgatgatgttggacgctaccaagggggagatccaagtaaacagttgacttttttaaacctgtttgcatatgtcaataaattgtaactcatgcacttataaataaatacccaagggttgtcttttcctaaaaatgcacttttccgggagttttatttgtcaaagatctgatcatttatgcaactttctttaaattttccgctagcgtctaataaaacctcaaaggaattttcataatttttgccatttccccccgcccttcaaattccttgtcatttcattggcatttttcagaaaacgctgttggagaaggaactcgaagcggtcggaattcggctcaacaaacgccgcaaacatttatttcaaaagaaaaaatgggggcggactgaaatcactcacacagtgccgttgacactttgcacgagaactgatccaaatg

SEQ ID NO: 53528 - DNA, 217 bp, Heterodera glycines
atggatatgggattcgggatcattcaacgcctaatcccaggaaaggtaaattacaaaatttagtgggtgcaaatgactgcgaaaaggaattcttattgtattcttagaaaagtgagacccatcctgccgcttgttcgcttacgagagattgcaaattgagaaagttgctagcattcagaaagtcaccaactcttcaacttcgacctaaaaaaggaag

SEQ ID NO: 53529 - DNA, 1666 bp, Heterodera glycines
atgctcattgtcattaaatgtttgctcggatttgatggaattattgccttatttgttatattcgtgttccttaatttgggtattcgtacattgccaatatcatttacttttgggttgaactcttctgaagtgttagtcaattttgctttttgatgtgaggctgctaattcgactatgactccaccttctgactagtggctggactaggcgctcgagaaagcactttgatgaaaaagatataaataaaattcgtcagcttaacaccgaggtcggcaaaatacgcacaaaaataaaacacatgcagcacaatttgaccatctttgaaaatgctgcgcttcagcgcgaccaccaaaaatctttgtcggaatatgaggagctcatccaccagcagaatagtgcatttgttgaggaattttttcaaaaacatcccaaaaattattggcaaattattcacaacaattataggggtcttacagaacattttcagaagatagaagaactgcaagcaaaggcagtagggttaaaggataatgcctctttcgaaaagcaaatagagcgagcaaaacagatgattgagtacagacgaaagagattcgctgcgctggaatttgagggccaaaaagcgtgatgagcaacaacagtttgttgcagcagcagcaaatacaattactgcaccgactgcgtcggcattgatcggaagagaggcgttaaaaaaacgtacaggcatctctgccagtacggatggtgaagtaggtgataaagcagatgtcggtccacaaacagctaccacaacaacacatggggaggtattaaaagagaaaatactggagcagcaaaaacacacggacaacgatgataaagcagatgtcggtccacaaacagctaccacaacaacacatggggaggtattaaaagagaaaatactggagcagcaaaaacacacggacaacgatgataaagcagatgtcggtccacaaacagctaccacaacaacacatggggaggtattaaaagagaaaatactggagcagcaaaaacacacggacaacgatgataaagcagatgccggtccacaagcagctaccacaacaacgcatggggaggcagtacgtgagaaaatattggatcaacaaaagcgcacggacgatgatgataaagcagctgtcggtcagcaaacaatcccaacagcaacaaaaacacatggtgagacgttaaaagaaaaaatatcgcaagagcagaagcacctagttgacgataagtcaaattctgccaatgcaaaacaagatgatggtagcggtactgatgagaaaatcgcgcatggtcaaacgctaattgcccgacttaaacagagcgaggagcagaaaaaagaatggggggacccatcccaagataatgatgatgatgggcgagcgccgaagcatggagaaatgctgtggaaactgttgcgatcaacggtgccgactaaccaacagcaaatgggcgatgtcatccaccaccaatttgctgatgctgaacaaacccgtggacgaggtactgatggagctgttgaaaaacattttagaagaaaaaactgacactgcggatgcacgagcgaaattatcaccatctacggaaatcggcctatctttcttcaacactgcgaagaggtgaagcgtgaaggaactga

SEQ ID NO: 53530 - DNA, 1217 bp, Heterodera glycines
atggtgttatgcgaattttctgaacttccgaactttgcaatacgccggcgatgttcgcaaccaattggccaatgcgatgatccaaagactcaacatccaagtgaatgaaatgttttatatttttattttcaaatgccgttttgttagcttgaaagtttgaagccgacttcgccgctttacccccacaacattttgaaggctttgctcgccgcttcgttcatgaaagtgagtgaaagctttttgaaattggaaatccatcttagacagggttctcaagttaatgaaattttatgggcaaattttgaataaattagtttttaaaaatgaaaaaatgccaaaaatattttcatttttttgtttacatcaacgaaacaaaaaccaattcgtttggagatggcattcgtaaaaaatgcattttgttacttttaagttggcatatttctattcttctggcaccggccacacgtctcaggcgcgcaaaggttattatgtgacggtggaaagccaactgaatagaaatgggaagcaaaatgctgtcactgacgaatacatgctgcacggctcttctgtgttgtataaggtggcaccacaaacaaaaacaaaaaaggatgactcatcaaattcgaacattcggagccattagaaaaataatgcaattaaattatggacgctaatgatttttttttaaatacgaaataatccggctaatgattgcctgtttgctttcttcaattagcttatttaacgggatttttaattgggttatttaatacaaattgtcccttaagcgccctttgttgacattttttttaattttgaggtgtaagcccaaaacggaaaataccacattttctttcccgaaatttaaataaaaaatattttttttatttaaaaaagcaaaaattttgccaaagattgtttttgttatttaaaggtaaaaaaaaataaataaaagagaaatttgaatgggattgcgtatccaattaaacaaatagcatttttatatttttgattgaacgcactaattaatctaattaagccccccccccccaatattcaagggcaacaaacagtacagcaatcagaagccggcctgggtgctgttcaacgaggcggtccaacgcgaccactccgaccgccgctttctgcatacggtgagcattgtacgcccaggatggctggacgagttggcgccgcactatcgcatcatagaaggg

SEQ ID NO: 53531 - DNA, 238 bp, Heterodera glycines
atgacgaagcgaaaaaagtatgcgtgtggggcgatcggagggggtgggtcatttcagtacggaagagttgttctaatgatcaattaattatttaaatttttaatctattaattagatttgttaccataattataattctattattctctatttcagtttacacgaccacaaaaaaagacacgaccatgttatattttgataaatttcaggcaacataactttttatagaagcacacaa

SEQ ID NO: 53532 - DNA, 2250 bp, Heterodera glycines
atggaaggtgggaccatttaaataatgcaaaaaagcaataaatttgaaaaatgaacaaatttcaaacattgtaatgcataaattgaaaaactgacccgaagattttgtttttgtactttgccatcgccgccaaggccggaggcattgagcacgaattgattgggctttatgttgatctgatcaccggggattgcctttccgaaacgatttgtggccaccaatttgacatagcccggcctaaaattggaccaaataagccatttccccggggaatgccaaggaataaagccacctttggccccgattttcaaactccaaccaaaaatggttggggtcgtccggccgcagcacaattgcctgactcgaagccgcctttttggcaatgccatcctcgtaatttgaggcggacagtccaacgcaggcgctgcccccgtggccgatgagttggaactgaaaaaggtggcacaaacaatgcaaaaacgcgacatttttgaaaaattctctcccaaattttgttttccaaaattttttgtattggtcccccaaaaaacgcacactcttcttgaagtgttcacaatttgtccgctccagcaccaaatgcgcaaaattggtctccactttggtcggttggtattgcacagcgatttcacactgtccgccgggctccattattggcgcagtgacttccacaatctaacaaatggtaaacttggagcagtttttttaaattttaaataaattttttgaaaaaaatccatggtaaacgaaaccggcgttcggtgggagactttctcaaaacagtctatacttattaagcagctacttttataaaatttgcatattagagaaagtgccgccgataaaacggaggaaattaacaaagaatttatgacgaatacgtctccctcctgtatcgtttcctgttcggaaaattagaaaaataacgatattttccaaaaatgtttccaaaaaatcgctgaaaattttctttaaaatttttttttctcgacatttcttagttggcgtgggaggggggacgaccatttcccggcgggtgacagaccttaaagtttgactgtcgcgttgcccccgtttcgtccgttatttcgcatttcagtcgcatttgcattgtgtccacattccaaactttcagtcgcagcgtcaaacagtcgccgaacggcacacaataaaagttcagtttgtccttgccccgctcaaatgccaatttgctgcgtgaggaggaactgaattaaatgggtgtgccgattgtattcaaagcgagtgaataatcgggctaagtttggctttttttttattcatgattggtgccacggcaccaaaaaacagaaattggaccgactcaatgccttattaatgaatgagaaaatgcgttacgccaggtccatttccgacgcgcttgagacgggtcgcgaattgcgcggttcgtcgaatttcggcattttcctataggcggcgatcaattcggcggttgtggctgtgtcccggcaactcgacaacggcaaatcgtcacgcacaaaacgcttgttcaaaatgtccaaagtctgctgatctctgagcgcggcggcgtccaaagcggcgggtgcttttgccttcatccgcttttgcagctcattctcgagaaaattgcagacgcggtccttctcggaaatgttcaaggcctgctgaaagcaaaatggggagggaagaagtcaaattcaaaaagcagggcatttaaaatgttggtgggcgacagccatacattaaaaaggggggtgggtcggtaaaaatttttgcgaaggggggtcggccgccgatgacctttattttgcttttcaaaaaccgtttctttcggcgcgctttttccaaaaaacttttcgggaacaggggggccggcggtgccactaggcgccgccgggaaatttttgatctttgggtgtgatttgttaacagattttcaccaaaaaatggccaatttttgcgattttgaaccaattttttaagaaaaataggaattttggggttcggcggtgccgccaggcgccgccggggaaattttttggatttttaatgaatttgttaagaaaattttcaaaatttccggtttctatttccttcatttttttactgtaatttacaggaaaagatgacgacgacaaaattacggtggaagagttggcacgtaagaaattctcccagcaaggaatggctttaaatgtgagatggcttattgttaacaaaagcatgctctag

SEQ ID NO: 53533 - DNA, 767 bp, Heterodera glycines
atgaacccatccattgaagaagtcgacgggtcagaaattgagatgatgaatgacactgaacttttccggtgagtattttaaagctttcctttgttaattgatcacttttgggtttttattgggttccaatttttgccattttgttacgcttgtccaaaaatcaaatgatttgggcgattctccgatcgatttgcttttcttttcattaatgcgcttttcagcaaatgctttgggcagttatcgcccgcggcaattcctttgtttaattcgcttaattctatcagtcagataaaagtgaaaagaaaaggaaaaacggagaaaaaaaagaaacaaaacaatggttactttttcccattttgctgtggaaatgcggcatttgccacgtttctcttctgttttaatctttcttttatgtgccaaagctcaacttacattatttcattgctaaatgttaaaagagtctaaaagtggtaatacaatttgtttttcgattttttattcattaattttaaaatggcaaaaaatgatttattaaaaattgccgtgttttggtgatagaaatccaaacaaaactaaaggacaaaaagagaaagagccaaaaaatgaaaattattaaaaaattattatgaacaacaattgtatttgtattagcatgaaaagaatcggtggagcaaaggtacggcaaaaccaaacgaaaatttgaacaaattgttggccctcccctttcccccctccgaaatttaaggaaaacaattgtggaaaataaa

SEQ ID NO: 53534 - DNA, 672 bp, Heterodera glycines
atgcgtgggcgccatctccgcaatggtcaaggcctatctgccggcactgatgtatgtcagccgccggtgtttcggtcctctcccaccccgaaaaatttttctaaaaaaattcataaaaaaaaatcgctggaaattttttttccaaattttacttcaaattttctaagtcccgacactcgttaattgcagtcgcttcgtggagcttgacgggcccgcccggctgatgcgctgttttgaggacggtgtccaaatgggcgcggcgcccgagggcagcggcgtccgcacaaagttggcccaccggtgcgctgtggcggcggtcgcgttgaagcgcagtttttccgtcgaaggtgggcggaaaagacctgctccggcctcaaacagtgaccagcggacccaaattttatagtgccaattttatagcccgtttcccaacaaagctttttctcgcgcatgcgttcgattcccacccaattcctgcatatttttttcaaacttgcaagaattttgcaaaattatttgcaattctcgaatgaacaatcagaatttgatttcagtgctgaatgccaacccgagctttcgccgtgtggcccaatgtccggccgaaatgcgtgccgtgttgtcaaatgtgaatgaagacggcaaatggaacgacacacttgaatttttggcaga

SEQ ID NO: 53535 - DNA, 542 bp, Heterodera glycines
atgccgccaagaggaaaagctgaggaaaaccgcacaaattgcacggcaattcagcgaacagcaaaaccaaatgagccaaataaacgaatggtaaggcaaaaaaaaaaatgaaaagtggacaaaaggaaaaaacgaaacaatgtcaggcgaaattaactggggaagaggaatgccaattggaagcattggagggacaaatggtcgaactgttgggccgaattgacacggagagacgggaagcagagaagagtgaaaggcaaagtgccaccagcagacaggtaaaagattaaagcgatgaaaataggtgccaattgggaggaaattaaaaaaaaaattttttcgaatcatcaacaatttcttaattttttttgaaaatttcttaaattttctggggtaaaaccctgcttcctaattaagtaattatcatatggaccatatccataactagaaaacaatagaaaatttaaaaagatttgatgacataaaacaataaggttttttggggccggcggtggataaacgccgcagggcagggccaaaaa

SEQ ID NO: 53536 - DNA, 2606 bp, Heterodera glycines
atgacctcaaacggtgcgttggtggcggcaaagacaccgccggaggtgcagcgcgagttcgcctcgctcgcccaagtgccggtggtcgccgggacggtcaaccgcggctcggaactgatcggtgccggctgttgcgtcaacgattggatcgcattcacaggcgagtggtggtggtgccgtgccgtgacataccaattcggctttttcattccaaattaaatacttccccagcatttttcaaactggttgggtatttttaaataatttcttcgatgaaacaaaaatctcggagttggggactttatttttcaacgctctcatacggaactttattaatcggattgaagcaaactatattcagaaaagacataaatcccaaaaactgaaactcatcaagcgaattcggccgaattgtttagttttccaggaattggcgacggatgtgggcggggctgtcactttaatcaacaatttttatataattgtaaattccgttttcccatttgcaggcctcgacacgacctccgccgaactgtccgtgttggagtccatcttcaaattgggagacgcggcaccgagcgcaatttccaccgatttgcgcgacactttgatagaatcgatgctttgaatgacaaatttcaaaacgaaggcggtggaggacagacacaaaaacgctgacattttttccgaaatttggtaatagtaccgatggtagtcccccttttttgaaaaaaaagttaatttatttgttttgtttttttctcaaacaaaaaatttaaggagtcagagaacgtagatgatcttagagcgtcatgcgagcgaatgtcggctgagttggaacaggaaaagaaggagaaggaggaagaaaagaagcaaaaggaggaggcaaaagcccgtgttgccgagttggagaatgaaaacgaacaattgaaaaatgaaatcgaacaattgaaaaatgcgctcaatgcagagcggagcaaatcaaaggtataacagaactgattcccttttcattggtgaaacgcactttgtcaggcggaaggccagcgcacaacacacacggacgaaccaatgtctcgcatggagcgagacttcctggccgctcaaaatgtggtcgatacgctcgaggaggacgtcgattttttggtaatcaaaagttttaattgaaaaaatttaatctttgaagaaggaaaaggaaggaaaaacggacgaaaaggaggagaaagagaagcaaaaggaagaggaggaaaagaaaggcggagaagtggaggaagaggaggaaaatgagaaggaacaagacgatgaacaaaacggaggaaacaaacctaagcgagctcgtttcatgtaaatggttatgtaagatcttgttggcatggaaataaatttaaggctgcaaaggtattaatttgttaattgtgatttatgtaaattgaaaagtccaataactctaaaaattgatgtttaaagccgcattttgggaacctaaaaatgattccggcattgggagacgttcattcagaggcgcacaaaaacgagtaatggcgagaagagttggagttggaaattgacgagaacgaggtacgtaggtggacgggaacggacatttgggcccaattttatccgtttcatgcaatttaaaacggtagctacaacgaaaaaaggcatataaaggcgttaaggtggccgacttacaattagtatcatttttcgacgggggagagcggtaatttcgaacaaatgacgcgggttttaagattaaaatatgatttttcattcgtagtcctttaaatctccaactttaattttattataatataacactctattcgagtcgaaaaatataataaaaatagtcaaaaaaaaccaaaatttcaacgccatttcagggacttcgatcggaccacatttgaacacagcgagcaattttcttctactgacaataccacggtgtttcttggtgcatttttgtgacattcatgtgacgagacgattcatttcccctttttacaaattgaggcaatccttacacagcaaggcatttttatatatttttcatggaggagagattttcccaattttagtgacactttcaagaaatacttggttttctacgtatttaatgactttttgaagccatttttggatctcatttataataactaactaactgatttttttataatataaaataactttcttccaaattcgaatcgaaaaattattttaaaaaataggcaaaaatttaaatttcaacgcaattatttcacccctcgccgttcagggacttcgatcggaccacatttgaacacagcgagcacatccaatcgttgcgcgacaaccccaatttgtccgcccaactcggcgttccgttgggctgtgcccgttcctccggcctcccttcactcagtgccaaattcgccgctgccgtacgccatgacgccggcggcatgtcaccctcatcatcggccatgccaaccgcgcaacagctgcgtgccgaacagtcggccaaattggcgatggcacacgtgcgacggggtgccgaactgacgcgggacaacaaatgcttcgaggctatccaggttgtccatggcacgggcatcggataa

SEQ ID NO: 53537 - DNA, 1273 bp, Heterodera glycines
  unsure (1)..(1273): unsure at all n locations
atgcaaaacctgcaacaaattcaaagtcaacgtgccgaacagaaatatactcttaatgggtatatgtacgtcaaagacaaagtcagtgcaagtggaatggtgcaattctggagatgtgaaattcgtggctgtcgtggtcgtatatggacgaatttggaagatggctttttagtttcagagcacggaaaacatatttgttcagaagccggcgatgctgtaaacgttgaattggcaaaaattcatacagcatttcatggacggcacattttcggcttctcctccgctttttcaacagatttatgtcattctttctcgacgtggtgacttcgtttttccggtgttctcttttgtcttcttcgaaacaaagatgcagctacatatgcgaaacttttccaaatgatcaaagatatttggccacaattcaacccagattccattagtgtggattttgagcacagcattcatttggcaatctgcgaatttgctgagaaattagatgctgttttttcacctcatacaaaacctacgcaaacatttgtcttcagcacatcttttaggtcgttacaatacggatgcaaattttgcacttcattctcgaatgattactgcgattgcattcattccggaagaggatataattcggtccttacaggaactcgaagatcatactcttgatcattatccggaacttgcgcctatttttgaatggtttactaacacttatgttggaagaggaacaagggcacccccaaatttttcctatgatatgtgaactgtttttcagcgtactttggaaggcagcgaccgtaccaacaactatgccgaagcttgcaatcgaaaattgaaaatcggatttggctatgctcacccacatatttgcgttttattgacgatttaagaaaaattcagaaaggtttagatcagattatgaagaatatgttagaggtcaggaaggtccatcaaaaaggccaaggtacaaggaaccgatgagcgaatactgagaaaagtgcaaaattatgaagtcggcaatgttttggagaaaggttgcaaccccgaccccgcccctgaaccccgacatttttggccatttttcggggaaaaccccgaaccccgaaaccccgacgcttcataccccgacaaccccgaaaccccgaccttaaccccgatncgggtcagggttaaatatacacccctaagaatggcatttcgtgggagaaatgcaaaaaagttagacgaaatttgattttttttttacatttgccaaattttataa

SEQ ID NO: 53538 - DNA, 56 bp, Heterodera glycines; identical to SEQ ID NO: 52733

SEQ ID NO: 53539 - DNA, 313 bp, Heterodera glycines
atgtatccgcttcaactcaagctaaatttcttggttatttttattcgagaaaaaacttttagaagaatttgtttttaattttttataggaaaaatcagttttttgatttttacacttttttaggaatcgaccaaccacggttaaagcgttcatcagatttaaattttatttcatttaggccattgtctgtgcaaaaggcgggcaaaatgaacgcaaatattctttgaaaatgagtcccgggccagcggaagaaaaagtgaatggattattgggaaatgacaaatgaacgataattgttagggcatgtaataaa

SEQ ID NO: 53540 - DNA, 654 bp, Heterodera glycines
atgcaactgctcggaaagtggtgtccaaatggttgcacactccgacaaaagatggacagccgaagcgattgcgttgtacagacactgatatatcaagaaacataaaatggatcaacgatttcaaagaagtacggtccggcgggccacacacttcgccaaaaaacaattacctacctaattgcattttggtttttgtttagaaatttatcggtgccaacacttcagtgaatttcattgttcattttctgctgtacccgtcaacgccaattgtgccatttgcactggtgaacaaccgaatcaatcaaaagctgacactgagcaaagaaacagattattattgggtgatgaagcgatgccaaattgggcaaattgttcagtgggaggagcaaaatttggcggacaatttgaacaatgtcaactttatgctttatgcagattacattgggtgagtgagaacagcttttgccattgctaaagtggtgctatgtcaattcttaaaagtgcaaaaatcaaaagtcagatttttcctatgattttttaatcaattttttaattataaatatgttaaaatttaattaaattaatgcttaaatatacgttcttttaaaatttttttagatctcgaataaaataattaaatttgccttaaataaa

SEQ ID NO: 53541 - DNA, 366 bp, Heterodera glycines
catttgctgaacaatacttcttcgtcttcgtcttcttctgccgatgatgggccatcgtcgtcgtcgtctccgtcttctgtttctgctgccgacaacaccaacaaaacgccaacatcatcatcttcgccatcgccaattcgtttctgcatccgattgaccgtcaacgattggggtgagccggtgcagcggttgccgttccgttggctcggcagttcgctcagcggacagtgtgtggtgttggtggagcgtcggccggtggacaacctgaacgtggagctgtgcattgtgcgatgtccgtacatggaggcggtgcagcgcgggctcatggacaacgcggtgacaatgaacgacttggaggcaagttga

SEQ ID NO: 53542 - DNA, 367 bp, Heterodera glycines
  unsure (1)..(367): unsure at all n locations
aaaattcgtggcagtgcccaaaaatactccncaaaaaatgccagttttaatgacncatcctccatttgtttcncaattaaatagctcgatgccatttgccactgccaacattgtcctgtcgcctgtgtatggcatgtggctggagctgctctcccgggacatgccaccaatgcttttcggtaaatttgtgccctatcaaaaaagaaattttaattaactgtaaaaatgccaattctcccccattcaatttttcagtgcgcggcaaccgcacatccgtgatcacacacacttcatgaaactcttaattattgtgtgtattattgtttttttttgtctcccagtaattatgtataaacgaaaaagagaa

SEQ ID NO: 53543 - DNA, 851 bp, Heterodera glycines
atggctttctcaggaatcgcttcaactttattaaaaagtggaagaacaatacacaatcgatttaaatttccgctaaatttaaatgctcagactgtttccggtgttgtccaaggcacaaaggctgccgaagaaataataaacagtgatttttttgtgattgatgaagctcctatgacaccacgatttgcacttgacgttattgataaaaaattacgtgaattaactaaatgtaacctattatttggtggaaaaactattattcttgctggtgattttagacagaccttaccaataaaaaaatttgcagtaaaaagtgaaattgttgatctaacaatcaaaaaatctgttttatggaacaattttgagcaattgaaattaactataaatatccgagccaaggacatatttgcaaaacaaattcttgatataggcgatggagttagtccaaacagcttcattcaattacctccggagtgtattttatcaaatgaatctgatttaatcgatgaaatttacggtgacatttttttaaagcataattttaatgaattaaaaaatcatataattctaaccccatacaacaatttgaccgataattataatgaaatagctttggataaattcccaggaaaatgcgttacttatcttagtattgatgaagttgaaacaagcaataattttccaattacaccagaaataatgaactctttcaattctcccggttttccattgcatgaattaaaattaaaacaaaattgtaaagtaatgcttatgcgaaacataagtattgaaaatggtctttgtaatggtacaatgttgcaagttatagaattaaaagataatatgttaag

SEQ ID NO: 53544 - DNA, 1020 bp, Heterodera glycines
atgacgcccaaggtttatccatgctccgcggagcttactaaacatcatgttgtggcgatggagcatgttgttggagcagctctccagattgagatggagcgagaggttgacatgatgattgaagcacgctttgaaggaagggctcggaagttcgatggtgctgattgtctgattgtctttggttcgagatcgaagaaagaagtgaatgagttggccaaggtctgggagccggagtcccaagtgaaggtcttcaaagaattgggtgagaagcattttgctttgggagtggtcaaggatgttgaggtgctccacgcagagtacgaaaagttggaactccacatcgtcatcttcttgaacaacatccaagaaaggaagaatgtcgacatcgcaagaaaagtggatgagttcatccagggtggcagtgttgtcatacacccggtccctgccactgcggttgaggacagactgttctgtttccgctgcaacgtcccatcaataattgctgatgaagactccccgaggggaaggataatggcagttctgctcggccgtccagccatggaaggcattcgaatggagaagcaaagcgttgacgactcaacggattcgtggatggaagaagaagggccgctccaccctgcaattcttgctctcaactcgcggcagagagtgactgcacgcctaatgttgggaggaggtctggtgcaacaacaggcgccgccaggcaccggcaaaaccaaagtcgctgcggcgatcattaaggcaatgatggactcaaatcccgggttccggattgtggtgatggcttgtgccaacattccagttgcaaagctggtacaagaggcggaaggcacatgtgctgaaaaggatttggatggagcacgagcgattgccttattttccggttttgccagatgcaaatacacggatcaaataagagatgtccaacgacacacgctgcccaataaagtaaactctgaggagttcgtcaagcagttatcgcccaatgtacagaagcag

SEQ ID NO: 53545 - DNA, 62 bp, Heterodera glycines
atggaaggaagaaagaaggaaagaatggcacgtctgctgaacattgtgccgaccgtcgtgtt

SEQ ID NO: 53546 - DNA, 2213 bp, Heterodera glycines
atggtaattttgtgccattttcgcccaacctcagataactgaattcatacaattttttaaattttgacagaaaaatgattattcggatgaaaaagaattcaaatttttcaaaaaccgctcggaagagatttatgagaattatccggcactaagccaattgttggagggattatttgctgctgtagtttcagcaaatgaggcgatgaaaaagggtaaaacaaaaattagtcaaatttttattggccgaaattttgtaaatttttcagaaaataacaacaccttatcttcgcgaaagaatgaactcaaacagagtttggcatatgccgtgtttttcatggcaaaacgtggccaaattccactggaaagccccctaggggagaaggaaaaggagccaaaagaaatttcgattgagctaattgacatttatgatgagttgcaaatggacgatgggattacggtagaaagttgccaaaaaagcgacgaaaaagaaagaagagaaaatgggcaaaaaggaagaggaaaatatggccaaaaagaacggcgtattgttcaatttgacgcgcgatcattggaaattgaatggaacgcaaatgcatttattgctgatggacaaaataaggacggcgacgacaatgatggtaattagaaaatatctgttttaaatgatcgggataccccctaaatacactgaaaatcggggaaattttcaaaaaaatccagtgtcgcattttcccgctctcaacgtggtgtacctatacattaatttaagacacaaatcgtcgtcggagacgcggcaaacggcgcaatgcgccggcgccgggatacgccgaatggtgctaggtcacttcgcgaatcggcaaataagatgacgtcattaaaaggggcacttcgcgaatcggcaaataagagggattcctgaattggtaaaaaaggatgacgtcattaaaaggggcacttcgcgaatcggcaaataagagggattttcgaatttgacaaaatagaataagttttatgcgaagttagacgaacaaattgccgaagccgttgatgaatacgaagtataaataatgaataagcaaaattagttatgtttttaaggggatcctcgaaacaaaatttcatgaagacgaagatttccaacaagtgtcagatcattatttaagtcgaatttcgtttttactccttcaaatgaactctaaagggacggcaacaagaaaagaagagaaaattagagaagttaggggcggtaatttaagggtgaaaccccaaatattttagagaaagcgccaatttaagagttcggaatatgattcaattgagtattcttcatctgaaccagcattggttgaaagtggatcatctgaaaattatattagagctgaaaccccggatatattgttttctgaagctcccactaaagaattactcgaatccatgtgagaggaattagcgggtctcagggtggggcggagtagtgatgctcgagagtctcggtctcgactcgagaaaagtctcgggtttttttggtctcggtttcgagtctcggtctcgggttttcagtctcggtctccgagaccgagactgacttttttatacaccgcgaaaaaaactaacgaattttttgtttggtgcgtttttggattgataaatatgaaccaaattgaatcaaaatcaaaaaaagcaaaaattagttaagaaaagagtcaaaaaatttttttaacaataacgagaggaggaaggttcgtcgaattgagtcccggagtttttgagtaaattggaagggatcgtgggtttatacaatacaaaaataatctcaaaattttgaactattgagcctaaattaaattgcttttcatacacttcacggttgtctgctgatgatatttttacattcaatcgggcttaaaatcagcataattttttagtagctgagtttgctcagttttccaaagtgtccctatttttatgaacaccccaattgaaaaaaaaactataaaaaaatttcccctccttgttccgctttctcacttgctgtgcttaagattttcagaattgctatgtatgttacaaaatttcagctccatcggtccatggcaagtggtcaaactcccggaaaaacgggcgcccctattttaaattaacacacaatataattcagatggtaaaaaatgaaaataacttaatatatttgttattaaaccaaaacaaataaa

SEQ ID NO: 53547 - DNA, 191 bp, Heterodera glycines
atgccgaacgtttattttttatttttcgtttgcctcgcggccatggcaccggcggcaacagcaggcgacagcagccttgggaaccttgtctatggaccgccaaactgcggaccgtcgccggcaccacaaccaccacatgcggaaaagttggcaatggaggacgacggcacaggcaccaactttggatggtg

SEQ ID NO: 53548 - DNA, 574 bp, Heterodera glycines
cgctttcatatgatcagcaaaaggcgacaccaaatgaatcattttggccgaattttcattgaatttttctgctttgatgtcattgagaatggtgccaatgccattaacctaaatttaattaaattattggcaaatgccattggtttatttaatattaattcattaaaaaataattagcaaatgcaattggcttaattttatattaataaaaaagcgatgttttcacattttcattcaattctccgttgatcactttcccattggctttttctcggattgcgctttgctggagatcgatgccaaattcgagaaagaaaatgggaatggtttcttttatctccataatttgttcaacggaaattgggaaattgcgcgtcattttgatgcttaattaacccaattaagtaaaattaattaatgacatcattaaatctctcattatttggccatacaattcgtctgtggtagaaaggttcaagaatgtttcaaagacaagcttctgttccttttcatcccgatggatgcaaatttgtacagaaaatccggcaacattcgtttcattaagatggtcttg

SEQ ID NO: 53549 - DNA, 1930 bp, Heterodera glycines
atgaagaagacccaattttcaatgctttatcctatcaaagcatttatcaacgtcaaattgtccgatgcaaaaaagtggtggaaaatttgtcggattatttgtgatgatttggccaataatttgtaaaaataaatgaataaattacttttgtcatttatcggtgcccacaatctctgctacaaaatgtgtggtcgttcgtccgctttttcttctgttggtgccttttccccacttttttacttttttacacatcgacacagaaaattcagtgattggtccaacgacggaattcactgcttccatcccgacactttcattcattcattcatttgatttgatcatttgtgaaataaatttttttttcataaaataaatcgaataatttttttttattttcattaattaaatagtattaatattcattaattaattaatcaattagcaaatgaattgcttttctctattgaccgtctttctttgcttggtcattaattgttcatctcctccaatacggtagtttcttaaatgaaagtaaattatttttttgtaaatttttcaaaattttcaatttttcagccctttgtcatccgacgttggcatttggaaattatgcaatggcaaaaatggaacaattttggtggaaaatggatgtacaaagtaaaatatttccaaaattttattttaaattaattattttaaatcatttttaggctcctcctctgttaccaaagcgaaatggccacaaacagaaaaattggaaaacgttttggagtgggcaaaggaaacattggcaaactgaaatttgtggaatgtgccgaagagattgccgaagaccaatggcacggtctgatcattacgaagcaccaagacggagtgataagctacgaatcgaggcaaattgagagaaaaaatattctaaaatatcaatttaatgaattaagccatggattcgacgacattttcggcaccgaacaaacgaaacaaacggaaaaatatttggaaattaatttgaccaaaagtaaagccaaattaataataatattttaatagcaattattattttacagatgctgaaccactgggaaacgaacttcaaaaagcgctttcttctgcagcattttttgacgattttatgccatttgttttggcatttgaatttggcgcaacattttgcgcagaaaacggcggaggcacaaaattgtgcaaagaaaaagtccaatttcatatttaaaattctcaatttaaaataattttgatttttagtgcctttcccaaacattggtcgccccaaaaacaaaggcaccgtttgttggcacaaccaaattccatggaaaaacaaaaacaacaacaacaacttcaatcccgaccaccaccgaacggcaaacatttgcgtttgaaccgttttccgaatttgtgtctcattttggcactaattgttcgaaaatcgttttccccgtggaagtggccaaattcattttgaacatcaccgctgtgccctaccgaattgcatgcaatgagtatgaacaagattacgagatcggacaatcggtggagctttatttggcaaattcaaacaaaagttttttcaatgcttgcatggaagtgccgacaaccaaatgcgcaaagtgattgaaattccggcacaaaatttggtgccaaattctcacaaattgtttttaggcatgtggaactgagcgcatgctataaaagcatgaaaacagtggggccaaacgacaatgtcgtcgccaaattatgccaagaccatcttaatgaaacgaatgttgccggattttctgtacaaatttgcatccatcgggatgaaaaggaacagaagcttgtctttgaaacattcttgaacctttctaccacagacgaattgtatggccaaataatgagagatttaatgatgtcattaattaattttacttaa

SEQ ID NO: 53550 - DNA, 73 bp, Heterodera glycines
tgacgcggcgaagccgcgtccctgagcgcgaagcgctttccccacagcaacagaactcaattgataatgtttt

SEQ ID NO: 53551 - DNA, 1052 bp, Heterodera glycines
atgggagagaaaaaacaaaaccaaactttgcagaaactgactcaaacgccgccaatttacgttcacaacgcatcgcaacagccgcgccaagtccgtctttttgtggtgcaaagatttgttgatacaaatggaagaacaattggtaacaaattacatcgtaatttttgtatcttgcccccttttttgcattttatttctattagtgatggttttaccataaatttaagctcaacatttcagaggaattggtgtccgccccttcgcccatcgccgtgtttagctctttgaagacaccgaacgaatcgcccaaaaagcggaatttgcaaagccaacaaccccagcaagggatgagcagcaacaaagcgacgggtgagcgaaaaatcgggaaaacaaatcttaatttaattccaggaagtgccgtcgtcggcagaaagtccgccaatccctacccattgcccaaggagaccaaaatgagtttgggcaagaaggttcgacgcatggcgagttggctgcgcaagaccgtgtcggagaaggactgcgcactgattgttttggtgggtttgcccatctgatatttcattttattgctggacaatgcgaaattaaggccattttcgtcattcttgcctttgggatcgcaattttgcttaacaacttttatctgaactgaacgccatgcatatttggtgaaatgagtcatcgcagaaccaacgaacgaacgaacaccttttaagactaaataatttatcactaaacatacataacatattccatttaaccctttttatattccgatcacattatttgcatatcattcgttcattttcctgccgctttttccttttcctaatttaattgatttttctgtactataaccacacacacacacacacactgaacagtttgtaaatgaatttggttgtctattgtcattttcacaatttctatttttcttattttaagaatatattacagatttcatacataattaattaaatgatagtttattttgtttggttttgtgcggtggtgctccccccccccttctgcta

SEQ ID NO: 53552 - DNA, 1287 bp, Heterodera glycines
atgtccgcaattttccgtccgctaatgtctgtaagccgtataatgcagagtacgaaaaagtgcaatgacattaatcggcacaattcggcccaaaatgatggcttaaaccttttttattaaattgaaaattcattcaatttaattatttaagaattattaaataattatagaagcaaataattatttgtaattgttaattaattactcaatgatttttaaacaaaacctaattggttatgtttttctaacaaatttaaaaatttgagtttttggttgtttagttttctcattaagataaaatccataggcaaattttatttttaactttttttattatgttaacatttttttttgttgcttaaatcacttaatattaaagtaaagattttcctttttatcactttttactaataaacaaatatatttttaaatggcaatcaaatgagaagaagaacacacttttgtgttattttaaattataaaattttacgaattttttaaaatatttaatacctctgcaaatttctcattctttaaaaaaggcttttcctctttaaaagtccttgtaaaagaatgttaatgctgcacaagagagacagaacagactcccacacttcttaagtgaatgcctaacactgccatcccatgcaaattattattaccaaaaatgtttttttaaagaaatatttaaatttacagagacaacttggcaaaatgatgcgaatcaaagaggcaattcaacgcagaaagctcatccaacagttgaatgaggactatttggtgtcccaaattgagtcggaatcgcacccatttttgcgcagtcgaagtttcaatttgttgatttatcgttaaattaaaaacactaaatcccggtctaacaaatcaacaattccaagccagaaaacattgaatttgttttgctttttacttttttttttggtgtttcaaaaccactaattttgtgggtcggtgctgggacgttagtcaaaaaacaatcaaaatgaaaaattttgacagaaaattattcaaaacttcgcctaaaatgcacaaattttaaaaaacttgttatcattcgctaactttaagttttttctattatcatgcataatttcaagaaaattcgtttattttcaaaaaagttatgacctgaaaaactcaataaccttttttgtgaatatttttggttataactttcttgaaactttttgaattttgcaagataatagaaaacactttatagcaagaattaaaaatttggttgcttttgagcaaagttatatcaataaa

SEQ ID NO: 53553 - DNA, 1124 bp, Heterodera glycines
atgggacgatttaaaattactaaattttttatttctccattttttattattggctcaatttctctgctggtaaatgggcgaaatgacaatttgggcccaaattccgattttaaaattggaatttcgtcagctaaaaaagggcaaattggtgaacagaatgttaagggaaaatcacaacaaataattgaagatggcacagaaaaaagaaatgatttgttctcaattttcaagaaaaaagaaatatttgacgaattaattgaaaagaaacgaattgaaaagggaaaatttgacgaatttgtggaggaaatgagagaaaatgaccaactgatcaaaatggcattcgaacctcaacaaagtgatgattaccaagaagaaaaggtaaaagtggtcaattagcaaatatgttatgaagatcactgaaagaaagcgactcatttgtgaaaaatttgcgcggtttctgacggtatttggtttttaaatagaagtgatcggagaattttgaaaaaattaagtaaaaaattaaagcgcttctccaggggactcggtggtttcagcaccatcgttttggtgccagcccgagtttttttgggttgtaactttttttcattgttgaccaaatccaataatcttggtatcattcgaaagctttacatgtttagaagctgtttctaagctattgtttggcaattcgacaattaccaaaaaagttgtaacatgaaaattgcgaaaaaatcgaagttaaattttctagcatatagaaaagttattatgaaaaacttcaaaatttcgactttttcgcaattttcatgttataccttttttgataattatctaattgccaagcaatagcttagaaaaagcttccatttttttaaaaatgtgcagcattaatatttaaataaatttagaataaaaaatttaagctagaaaaacaaacgattcgggcaatttcaaaaggtcttaacaatgtaaaaatcgacaacgaaaaaataacagaaactcaacaggaaaaacaattcaaagagaaataccgcgagtttagaggccataaaagaaaaagacccggcgttgtgtcgattaatggaacaattaaattcgtaccgtactcaaatggagtcgggtga

SEQ ID NO: 53554 - DNA, 1314 bp, Heterodera glycines
atgggccacctcatcgtggtgtgcaagtctagtagccaacaacaaaaatacattgttggtgaagctaacggcccattaggtaaaataatttgtttttcatatgtgtttataaaataaatttctgcaaagagcatggttgataatcattccaaaatattatagaaaaaataaattaaaaacttgcttacagatttattcaatatttaaacgatgcaaaataacaaacttatattgacttcaactccaaaacgttctgaatccaatgtacaatttatttcaccaaatttgtcgccaataaaaaatagtgagcactcctttgatgcatctcaaatgttttttcgttgccaattatttacaattacaagtttttattctcaataaatcatttaaaaacgctttatttaatatttatttgtcaatcatttcatttacctatttcaattttattaatgattttttttttcagcgaattttgaattattaattatggatcaagaggccattcattcagatgtgtcaaaagatgttcaagaaactgttgcctttcttgttgacaatgttgttgacaacattttcaaggaatataaaaggcaggaaaaagaattgctttttgaagaacggcgaaagcggaatattacgctgccagaactaatggcttatagcaacatgtttaaggtcaatcaaaaaagtattaaaaatctataatgttgtttttatagcatcaaaccgcaactaaaaagccaaaattgcatgatgacgaagatgattcaattgtttttattaaagaggtgcccgcttttgacaaacatgttggacttgacgtaaaattattaaaaatatttcaactatagttattattaaaacaaaaggattcatttaatcgtggagacgacacaaatctaatagctgccctcaaaatggatgaagaagctcaaaaagtgaaagaagcccataatctattgtcttccaattctgaaaataattccactgagcttatcaatttgtcttccgattctgaaaattaaatggttgttttatgtgtaaaactgtaaatcaaaacaattacaaaatttcgttttgttgcaaagctgaagtgtaatttccaccacttcaacaatttgacagacaatcacagatatatagtggcaaaaacaaccatttaaattttattatttgcttgtatctacacttggtcggagtccttactccccagtgtttcatttatgcattcaatttctgttttatttattttatttgttttggacacaacacttggtcggagtccttactccccagtgttgtgtattaaataaa

SEQ ID NO: 53555 - DNA, 967 bp, Heterodera glycines
ttttattcatttttcgattttaaatttttaagtgaaaagcaactgaaaatgcttctgctcgatttgttttttgcgggctctgagacgacagttaccaccacaaaatggggcattttgctgctgctccatcaccccgaagtgcagcagcgatgccacgccgaactgatagaacaactcggggaggagggcgaagtgcgacgagtggggggggggaagaggatggcattggcattggcacgccttaattgccctattttacttaaactctcataattattccgtttttcggtggaattgcgccatcgttcccgcttcgtttatctgaacgcgacaattgccgaaattcagcgattggccaacattttgcccattaatttgcttcgcacttgcactgaaaatgtttccctcgacgccttctttttcccctcgggcacaatggtcctcccgcaaatttcaagtcaccatttgccaattcgttcactctttgcaaaatgcttattcagtcactttgaatgaccccgcccatttccctgagcccgaccgattcagtcccgaaagatttatcgacccgctaaacggcacactgagacgcatcgacgcatttttgccattttcgatcgggaaaaggtgaggtggaggaaaggccaaagctgtgcgaattgtgccgttcccgggtcggcttggctttgtgccgtgcccaatgaatgattaaaatcctttaggcaatgcctcggcgagagtttggcgcgtgccgaactgttcctcatcttctcatcgctcattaggcacttcgaattccgcacggatcggccgccgtcgcggcaacgaatttacggactaacggcaaaattttgaaaaaataaataattaaatgtttgtcttttatttttttttttaggtttcgccgttgccatttaaatgtcaaataattcgccgaaaaatttcctgaaacagcgaaagaaaagaa

SEQ ID NO: 53556 - DNA, 1589 bp, Heterodera glycines
atcccatcgcttcttgtccaggcaactctttggctggtgctttccccgttgacttttgctgttttggcatccgtttttgctgtacgtatgctatcattttaaattccctctatttggcgttctgttcagtcctctcactctcttttcgctctgccatctctcattgccctcctcccctcatacaatgtctcgtctttgtttctgtttcttctcttcggctcgtacgttttccacgagttgtattggaagcgtcgtttgctgcccccggggccaattccgtggctaattgccggaaatatgccgcagggtaaacgtacaattaaacagctaatgaaacgaccgattgaccttcgttctttcaaagtgcttcttcacggtgcccacaacatcgatgccctcctgcaaaggtggcacgtcgactacgatggcattttcaccttttggatgggtccaattccggtcagttgctaaccgaacgaaggcaaaccttttgacgtgagaaggcgggtgacgaagaaagatacgaacaaaatgccaacaaacacaaaaacattgccaaataaaagggccgttcgttggatgcccccaccccctccacgctctctcagatttgcatggtctctcgcgtggatttgctccgtcgctttttcgtctcccatggcgaggcgttcagcggtcgttggcagaatttcatcacgcacacattcatgggcaagattaaattggatgataattatggaaacaattacaacttttgattcgctaattggcaaaaacccaaaggcattgattggtcaattgcccactaattgtctattaattgattcactttaatttttccttttttgacagatggccacaacggagtggtgcaaattcaaggcgaaaagtggcgcgaacagcgacggtttgcgctgcaccttttgcgcgattttggactcggccgcgcattgatggaaaagaaaattcaggacgaagtttggaaaatgattggccaatcgatcaatccccagtgatttgatttgtcaacatttcaggtgaaatcattgatcgcccatttggacgcattgattccggaaggtaattagcgtaattatcgtgatcaatgaaaatatggacaaaaaagtgaccgaaatctgcacaactcgtcatcactttgaggatggctctttttttggcacttttccaaattcgtttaggctcccgctgcagtggtccgttggacatcgtgtaagccggtggcggtacggcatcgccaacataatcgataacattttgttcggttgcacttacgcccatggtcagtgggaccaaatgggcaaagtgccaaggccgtcgaaccattccttccaggatgatccggcatttatccgtgtccaacaaatggtggaccgccaatcctcgctggtggtccgtccggtgagtgcttcctcatcgccgctttgctcagtcggcctccgctacgtcaggggatgggcctttacctttgcgcacctttcaccactcgtctcccattggatttgctccgcttggcgccaatggctcgccatccgcgacgatttctgggcttttctcgacacacacattga

SEQ ID NO: 53557 - DNA, 171 bp, Heterodera glycines
atggtcggtgccgtcaactcgctgttttaccctcacaattcaattcgcttctttaaggtggcttacccccgtggctgtggttcgttggtgttcgattcgcttaatgctgcccaactttgtttggctgccggtgaaaaacattcggtcaacggacattcaatcgaagtcaaa

SEQ ID NO: 53558 - DNA, 835 bp, Heterodera glycines
atgggcagtaacgaactgtcgggtggatgggtcgggagatttatgtgccaaacattggacaagtacatcaactcgatgaccttgctcatgagtccattctcttctctcagtaagttatttttgtgtgtgatccgtcttaattcatttatacatgaaaaaagagtgggatcgacccccttccctctccaatcactcgcaaaaaaattaaattatttcattgtcttcccccattttcacgtattttcatttgctgttttttgcataattttcataggcattgtgcccgttttgcctgcctctctcccggcctcttctgtctgcaaatgggtcgacttcaccaacaaacatgggttcggcgtcacttttcgtgatggcactcggtcgttgctattcaacgatcagtcgtccctttcaacgaggtatcgtgaaaagcagcctttattttaacaattccacacaaaaccgactggaaaagaattttcatttactgtaggtcaaaaagttttttgcagttattgtcaacgatactttacctatcgagcacaaaaatttgttggcaattttgtcgaatggaattgtgacgacggttgtccatcggacgaacttctcaaaaaagttcacctttcttttatttgtttctgatttgtaaattccttttaggccaccattatgcgctcttatcgtggttacatggacagggaattgcgttcgtcggtgcccattcaggagaattcgttcagctcactcggcacagcttttccgaactcctctcaaagtcacaatcagttcaacttgctccacatcgtcgactttcatcgatttcccgatgcactga

SEQ ID NO: 53559 - DNA, 1484 bp, Heterodera glycines
atggagcggtataaacggcaacaacaacaacaacaacaagctaaagttagtcaactaataaaagaaaatgccaactggctttgcgcactgtcaaaggcaaaatgtgtgaaacgatgcgggagactgatcagaaaggcgaacactgatcagctgctgtcactggtggaagtgtgcttgaacattattgcttcccgattccgactgacaactcggcagaagaaacgactaatgccctacgtggacacggtgcgccgcgtgagcagagcgaggagcgagaggggtgcgaagcgagcgcttgtcatccagaaaggagaggggtttggcggactatttgcagcccttttaacccccgtcttaattgaattggccaaatcggttgtgacccgaaacacataaataccctcgtaaaattgtctcacacacgcattcattcattaataaaaatggcaaacaaattcattctcgtaccacaagaaatttatcggggtctcacctccgtctcgcagacgggagacctcaatttggacgcggttcgccacgacctggaccgggccaggggtggacagacaaatccttcggcgaaaaatgtgcattataaccagcagctccgacgttatttacagatgagaaaggaacatgcggacagaccaaccaaagttgagctgaccaagggaataagtgtactgatgaatagaggtggcgaagaaggcgaggtggttgataccccacgccgtcctcccgctcctccaccaccacctccgccgcctggaagacctcctcgtcgtccaccgcccagtcctccgggtggtcccgggggtccttcgccaccaacaagtcctccgcctcgtccacaacgccccccgagaccgagcaggacttctcggagaggtggtcgtatggagcaatggcggaaaaggcgatacgatatacaacaacagcaacggcagccgccgccgctagtggtgcgggacctccttgcggaagcagctgcggcgccactgcccgaaagtgatgatgatgatgatgatgatgatgagtatatgctagagaatggattcgcgctaccagcaccatcacaatactatggcgatttgcctgtgctgcccgacaatgcggaagaaattgaggaaatggacactgctcagcgcaggattgccatcagaagaaaattgaaaaaggacgaggctgatgctgatgatgatttgcaacgcaaaaaatatatgatgatttatcaacctccaccactgcctcgcgcaaaagtaaaagttgagcagccgaggcctcctacaccccggccgcgtcctaacgtcaagagagaacaacaacaaaagccaaagtcagaattcaaaccgccgtcgacatcaaaaaaaaaccggtcaccccactccggcaaaaagagtgccagagtttggtgatctcgatccacgaccatccacatcaaggcaggccgggtatagcccgcctcccccgacgcccaaaataaa

SEQ ID NO: 53560 - DNA, 687 bp, Heterodera glycines
atgggcggcataaccttgagcggaccccgcctgtctgttccccgtttcattccgtttgaggaaaacgggcgttgccgcgcatgtaaaggaactgaggctgaggtggacacaatggtcaccaaggagggaatcaccttatggtgcacacgcatagaaaaggctcagtttgtcccttttgatgttgtctacgagcttcccggtcactgtttctttcgcgtgaagaataaggcaagggtgttcagcgttccgtacagcgaactgccgtcctcagacaggtgcgcccagcctctaccaccaccaccaccaccaccaatgacaacagcaaaacatcaacggacaccggacgacgaggaggagaagaatttgaggcgtaaggcaaaggtggcgcttgacttagtggaagctggtctagcggcagacgcaatgatgcaggatgggacgcgttggaagaaagccaaaaccgcgatcaatgtgctggccaatttgcttttggcggaatcattaacagatgtctcgccaacttttgagcaacaacaacaacaacagctatcgtcaaaagaggaggagaagagggaggaatgcacaaacaacagcagtgctgcagcaacaactgaatctgctcccgatggtgatgtaatggacgatttcgtcaatagcattcaagcggcgacaagcaatatgcaatag

SEQ ID NO: 53561 - DNA, 625 bp, Heterodera glycines
atgcctcctcctggcatgatgcgtccaccgcatggctctttcatgcttcctcctccgccccccggcgcctctgttggcgatgagccgccaaacaaacgcccgcgcgaagaaacgctggaaccggaagaacgttggcttcaaaaggtgagcgccggtctccaccgatatttgctaaaacgaggaaaaaaaatctttaattgcttacaggtccacggtcaaatcgctgtgcaaatcgctacgccgcaaaatgatgaatggaacctgaaggggaacacagtacaaattcagttggacatcagttcatcggtcagtcataagttaggatgatcaagcaatgcgttattcgcagggctttttgcaagtattattttactggttttaatttttcaaattttttaaatattttatacgtgcttttaaaaattttttccacttttttaaaaattaaagctagttttttaacaaattaatgactattttggggcttgcacataaatcgatttgtattcaggtcactgcgttaaaatcgttaatccaagagcagatcggagttcctgcaaccaaacaaaaattagtctacgaggtgaacacaaatttaattcccattttaagtcatttgcattaa

SEQ ID NO: 53562 - DNA, 1106 bp, Heterodera glycines
cctccacaagactcgataattgcggaccttctcagtttggacatttctgggcctcccgttgcgggtaaggttattctctttctttgttatcactttttggcctttgtttcagccctgccttctcaaaccgcgaatatcatggacatatttggcattccttcggccccttctgctgatacaaccgcttcttctgccgcccccgctgtccctccaccaaatattttcgatgcgcctccgtcttcgtccgtttttgacaacgcaccgcccccacttcaaccacaacatccattgactactctttcgtccgccaatgccaccaacccattggatcagattttttgcgcttctatttcacaatcatcggctataaccacttcgcaatcccctgaccaattcgccaacttgttcggtggttcgagtgccggcactggcgttgctccttcactgcaaacactcggaccctttgttccgccctatgaggtggcattatttctcgaaatttgcataatcttattttatatcataaggcatggctcgatgcttccaagggtaaaggattacaaattgagggccgttgggtccgtcgaagcgggcgaataattgcggaaatgaatttaacaaacaaagcgctgcaaccgatgaactcttttgccattcaattcaacggaaacaggcacttttcaattagcactcaatcttttaattccaccccactttgttgcccaattaactcattttcagttttgggctcattccctccgaaccgctaagtgtggccaccattttccccaaccaaagtgcgtccgcttcgcttccctgcaacaccaacggacccatccaacgaatggaaccactcaccaatttgcaagtctgttgttgttgttgttgttgttgttgttctttctcgcatcaatctgttgttaattttaaggtggccgtcaaaaacaatgtcgacgtgttttattttgctattgttgtcccgcttaatgtgttcttcgaagaaagtggtcaaatggacaaacgcgactttctgcaactttggaaggaaatcccggaacaaaatgaggtccaattcaccgtgcagaacaacagaaatttaactgccg

SEQ ID NO: 53563 - DNA, 88 bp, Heterodera glycines
atggaatggtattctggtgacgttactactgctctgaacatttaccaagagaagaaaggcattcttatcgtctatgttttttctgatg

SEQ ID NO: 53564 - DNA, 94 bp, Heterodera glycines
tatgtaacttgagaccgtcctgtattgtgttccgttttattcatcatcatgaaatgtatttcaatgatcacggaacgataaactcatcaaactc

SEQ ID NO: 53565 - DNA, 1460 bp, Heterodera glycines
  unsure (1)..(1460): unsure at all n locations
gcgaaacgctttgtcggctggagggcggcggcagggaccaggcgagcaaatggcataatttcgaatttaaaaatcnttttttgtgccattcattagcgntaaggcgtgagaatgtttggcgcatcggagtgaagcgttgcgcattgacttacgtccgctggcatggtgagcagtgcatctgcccgagtacgcgctgttcgctgtgctgcactccaactcggagatgtacaaagcagcgagtgcatattacaatcaggtgggagaagggaggggggggggaagtgattggacggagagacaaaaagtgatcaaagtggactcaatgtgaagcagggagggaaactgattgatcagagggaggggagacatgttgagaagcaatgatagagaactaaagatcagagagagagaggagagatgatcagacaaattgatcacttaaggagccattgctgaggaaaatgatcagaaaacaatggcaaaacaaattaaatttaagaaaattgtatgatcaatgggttatgggtaagaaaactttgatcaaacacataagttcattgatcggaaaaacaatgatcggcactttgttcctaagagggttgtcgagtgccgaatcgctgcccaagtgattgccaaacaaagcgggtgtttgccggcggacactgattggcgttctgttcgaaccctgcggcagggtataaagttgggtggttagacatgattcggatttctcgggacccgaaaaacttttcttggccaagtttcagttgctgcactgctcggcaaagatggccatccggagcaaatgttgacgctggtggacgagcacttggcaaaacggtgccaacgccaacagcagcagaaattggcggatggcattcacacgagggaggaaatttgtgccattttggactgttcagacgcacaattggcccaatggtcgttgaatgcgaacacacagaacagtgagaagaatgatctcgaattagaacaaatcccagggtttcttggctttcgcaattaaattcgacttctacccaatgatttaaatgccaatttgagacttttctcggcttagaaattggatgcttaatcagaatggcgacattgctttttctctcacttcatttaattcatcccaatttccccaaaaagtgactgagttttggctggccaaacgggcacggcacgtttatgcggaggcggcacgagtgttggaattcgaatgggtgtgccgtgaagggagagaggacaatggcacagtggcaaaattgggcggtaaattgagacaaaattcaacatttaatgaccaacggtttcccgaacagaactgatgaacgcttcgcatttgtcgtgtgcgcaactgttcgagtgcagttgccccgaattggacgaaacggtggccaattgtttgagtgcgggatgcattggtgccagactgacgggtgattttcacggag

SEQ ID NO: 53566 - DNA, 852 bp, Heterodera glycines
atggagccttatcggattgttgcatttgatctcgaaacaatgcagcaccagcctgttagtcctcgtgagccagagaaaagggagcatcagccaaactttatcgcagcaaaagtgttctgccctgagtgcattgacaacagcagatggcggaacggaactgcgggttgcaaagtgtgcggtcctcaccgaacagttgccttttgtcagcgccgctttgtcaacactaccgtcgacaaacaagttgtcgctgacaaccctttggaggcctttgtcggctggctcatcaacgctctgcccaaaaaattcgacacatacgcattctctcactttgggggtcggttcgacatggtcctcgtgttccgcgaactattcaaaattgggttcaatcctgaaatgatccgacaggtaacttaattgttatatttttttattgtgttattatttttagggcaataaaatgttcgagatgaaagtcaagaagcagaagaaccgcaaccccaacatcgtgttccacgactcgttcaacctaatgccctgcgcattggcgcagctggtaccttcctatgggctggaggtcgaggacaagcccttcttcccgcatttggccaaccgcccggaaaactacggtcgacacatttacccaacagtggatgactacctcgcaaatggaatgatgccggagaagcgacgacaatttgacctgtggtacgagcgcatcagcatgagccatttcaactggatgaggcattggcttcctattgcaccaatgacgtggaaatcttatcggctgctctcatcgccttccgccgcgaattctttgaagtctcgaagcggaatgactacgttgatgga

SEQ ID NO: 53567 - DNA, 2758 bp, Heterodera glycines
atggaaatctttgacggatttattattgttgacgaaaaagtgatcagtataaatctcctaaactgtgacagatgcatcggtacattttgtgaaattacccaatttgctgcactgtaatttcattttttaaaaatttattattacaaaattatttttttcattaaaaagcaaccaaattgatagcatataattaagcaaacatgattttttttttctatattaatcacttacatattttagtgaatttacgataagcgattatcccatattgcaaatcacggacgttggcaatgcttcttcttccaatccgtcgaatgaggagccattggcacaaattgtccgttgggattggggccaaaatggggcacaacggatcaaagaagtaagaaatttaacaaaataaattttaaatttaatttttaattaattaaattaaatttaacgaaaatgatcaaataaaaaatgttaatcaattaaattatttggaaattgccgaatttggtatccactcaaaatggcacaaaaacgcatttttatagggtttcttaagcgctgagaacgatggaacagcttaaaatttgggcgcggaaaagcatttaaaccggtttttgaaccggtttaaaattcgaataaatgaatgaaaagtggggttcatgaccttttggtctgaggcaactgagtcccagtgaaaatggacatttcagtaccagagtaaaaaaatttagttttacttctaaacacctataaaagtgtttttgtgcgattttgagtcgataccatattcggcaattttaccaattatttagacccttacactcaacaagggcagtgaaattaattgcggctccaatgcttcatcatcatttgttatccgaattctcaaaaagcggagcctattcccggcgccttccaacagctcaactgatcacgaccaattgacagtgaaaattggagacaaacaggtgaaacagcagaaagagagcacagggcattcatccactaagatttgatcaggtcacccataacattggtctgatcactagtaaatcccggtcagatgactgacaaatgattttgatcagatcactggttcttgtactgaaaattttgtcagattagtgatatttcttgctcaggtcactgataattaatcatgctcagatcactgattaacttggtcatattactcataattcttggtctaatcgctgacaaatttgttcggatcactgataattaatcttggtgatcagatcgctgtgtccgccaattggctgtcgtccgtttccccggtgatcagtcgcatgctcagcgtggagatgaaggagaagcagcagcgaatgatcactttggacgaattgggcgtggacatggaccaattcaagcagtttttggaggccatcaattatctgacaatgagcggaccttttctgccaaaccgtaattcatgatactgtatttattcaattcaaccccctgaggggttgaaaatataattttaattttctttgtaaatttggacttctcaatttcccaatttttagccaaaaatgtgctgatgcttctcaaattggccgactatttccaggcgagttcctctgatcatttatcacatcttctttctttgtctgatcattttaatttaaatattaaattaaaccaccataatatttgtcacttttttacttgactttccaaaaactaattaaccaaagttaattttaatttgcttgtaatgtttatatttgctcacttaaattaatggccattaaatgatcccaaatttgctaatgaatttgctgtttctaataaacgaactgttctgttttgaggtgaccgcgttgaagtcgcgctgtgaaacgcatctgatcaattgtgttgaaattccgctgatcgaccgtttccttctgattgaacgcttcggactcgacaatttgaaagtgattattatttaaatatttttgaactttaaatcctattttaaattttgattgatttgccactttttagaattactttttgcatttgaatgttgataaattccgtgcctttttcactgcgaacagtgaacagtttgtgccttttatcagtaaagaatttttgtacgctttgtccgtcagactttgtggatgaatttgttaaattatcggctttgatcatattgatttttttggcattttcattaattgtttatttttcaaacaaattgtttttcctctttttggttaaaattatttattttcaaatgggataatttggcgaatattttggcattttttataacaaacaaagtggtgaaaaaatgtcattttacgtaatttttttaagcccaagttacaactgatcaaaattggcactttataagaattgggctgctggggaagttttgcattatccgccaccgtacaatcattttaatttaaatattaaatatttatgaaaaaataaatctagtattttgaatgagacaacgaaccgttctgtgatttttcgtaaaccaactttgtgtttttataaccttttctacctaactaaaattttttaatttggtaggctaattgggactattaattgccatcaaatgactcaaaacttgctaatgaatttgctatttctaataaacgaacttctccgttttcaggtggccgcgttgaagtcgcgctgcgaaacgcatctgatcaattgcgttgaaattccactgatcgaccgtttccttctgattgaacgcttcggactcgacaatttgaaagtgatttaa

SEQ ID NO: 53568 - DNA, 845 bp, Heterodera glycines
atggcattttcgagtgtaatgccggcaagggcttttggacagggacctgctgaacaagtgatagtcacttgtggtgccatatccgtacaatattacggcggatatggcaaaacttccccagcccaaccctcaattattttattatagtacatagcatatgctgtgatttattttttaattgaaaataccaaagtattgttcgaaatgttaaaattcgccagtcactaaaatgcgaaaatgaacaccaaaagtgggcaaaaaatgctcagaattaacctttttttattaaaccaaacattttcttttaacccaaataaaaaaattatctaatcgagaaataaagaaaatgttaaaaacatgaaaatgccaaaaaatcaatttgatcaaagccggactcaatcagcagaatttaacaaattcatccacaaagtcggacggacaaagccaacaaaaattctttgctgataacaggaaaaaaccgttgattgttcgcaacgaaaaaggcacggaatttattgacatcgaaatgcaaaaaataattctaaaaattaatttaaaattgaaaataatttaaaatatttgaaaattaaatcactttcaaattgtcgagtccgaagcgttcaatcagaaggaaacggtcgatcagtggaatttcaacacaattgatcagatgcaattcgcaacgcgacttcaacgcggccacctcaaaacagagcaattagtgtccctaataattagcctaatgaatttaaaaatgagtaaaaagtaattttttattgaaaaataagggtgaactctctttgataaaggatattcaaatttaagtatcattttttgaaaacgga

SEQ ID NO: 53569 - DNA, 1156 bp, Heterodera glycines
ggactcaatccaccaacattccgatcaacgggactcaatccaccaacattccgatcaacgggactcaatccaccagcatttcaatcactgggactcaattcttctgcatttcaatcactgggactcaattctcctgcgtttcaatcactgggactcgaccctcaagcatttcaatcgcagggactcaatccaccaacattccgatcaacgggactcaatccaccaacattccgatcaacgggactcaatccaccagcatttcaatcactgggactcaattcttctgcatttcaatcactgggactcaattctcctgcgtttcaatcactgggactcgaccctcaagcatttcaatcgcagggactcaatccaccaacattccgatcaacgggactcaatccaccaacattccgatcaacgggactcaatccaccagcatttcaatcactgggactcaattcttctgcatttcaatcactgggactcaattctcctgcgtttcaatcactgggactcaacctcagcaacggaatacagaactatttaaaaggaatccagaaattgaaatataacccataaatcaaaacactatggtgtataattattgcccccaccccataaattcaaattaaaactgacctgtttaaaactttccacctaaatttgatccgcaagtgtcacgtcaatatcccaattgcatataaatattccactcgaacacaggcaaaacataagatgtagcatttatattgctttttctatccatcaaaggctttttctttcattttttattactatcataacatgctttttattcaaaacaaatatcaaaaaccaaatcagattcttttcatattataagcaaggaaaagtacaaaaaacttttttaagtaacaaacctttttcattcaaacaaattctaatgcatttttttaaccaaacaattctccattatcgtttacataagcaaaacaaaagctttaagatcaaaatcaaatcaattaacaaaaacaaaatttagaaaaaaaataatgataaacagcaaaacaacaaattttttcttacacacaaaaacagaaccttcatataccggattttccactcaaacaaacacaaaaatgtgctcattcttttggtaaatattttataaaataaa

SEQ ID NO: 53570 - DNA, 584 bp, Heterodera glycines
atgcttctcaaattggccgactacttccaggtgggtgccttgacacttatcaacaaatcctcatttgatgtctaaattttctcgctttagcctgtaaaattttgtgaacaaaaatgtcgaaaaaagtgctctgttttgaggttgccgcgttgaagtcgcgttgcgaattgcatctgatcaattgcgtggaaatcccactgatcgaccgtttccttctgattgaacgctttggactcgacaatttgaaagtgatttaatttttcaaatattttaattgttttcccaatttttagaaatattttttgcatttggatgttgataaattgcgtgcctttttcaatgccaaccatgaacagtttttgcctgttatcagcaaagaatttttgtgcgctttatctgtccgagcattggccgggctttgatgaaactgattttggcattttcataaaatgtttttttacaaatttcctcattctcgatttagagagaaaatcaatttaattgcatttttgttaaagaatttgtaaattttacatggacaaatccaaaaatgctaataggaattttcaaaatattgaaataaa

SEQ ID NO: 53571 - DNA, 656 bp, Heterodera glycines
atggaagtctttgacgaatttattgttgttgacgaaaaagcgatcaatgaaatctctgccccaaagtgtggcggctgcaactgttcatttcgtgatgtgacccaatttgctgcactgtaattctattttttgaaattaaattataaaaagaatatttaaaatgtaattagctaacatgcttttttctatgtaaatcacatatgtacttatttttagtgaatttgtgacaagctattttcccatattgaaaatcaaggacattggcaatgcttccaagccgaattctgagccattggcacaaattgtccgttgggattgggacaaaaatggggcacaacaaatcaatgaagtattaaagaaatgatcaaacttaaaaaaacatgattaacaaatattattttagacccttacactcaacaagggcagtgaacataattgcggcatctataccaatgcttcatcatttgttgtccgaattcacaaaaagcgggagaaaaagtccaatgaaacgtaaagtgttaaaattttatctaaatagttaaaaaatttcggttcgtattctatcgtttatctctgtcgtctgaattgtcttgtccgatcacaattaacaaaaccccttaggttttattcgatcgaaatgataaatcacaaataaa

SEQ ID NO: 53572 - DNA, 884 bp, Heterodera glycines
  unsure (1)..(884): unsure at all n locations
atgcctaccaatgtctccgtgtcncaatggaaatggacaagccccgtctgctcaaatccgtactccttcaacgtgttctcttcgtccaattttttcttttggtatttgttatcaaatgcaacagcatccggagtgagtgtgaatggaccgtattggaaggaaaggtgccgagcaacaaactcacgaacactcgcaaacttttcattctcatggaaaatgccctataaaactggttttttatcaaaaaaaattaatatactcaacggaatatgattttaataaacagatttgcaaaataatttatatataataaaatttgatatttaccgctttccggaaatgagccgttttttatttggaccggtaaaaagtagagaccggacaagagggtcggtcggtcggtttcggttaaaaaccgaaaaaaaaccgaaaccgaaaaaaaccgacgaaaaattttcggtatatcgtttcggtttcggtttttttgaatttttatatttttccaaaaaaagcaataaaacatttttattaacagaaaaagctaaagatcacctctgagtaaaattgtaaagctattgaagctctatcgaatggtgtactaattttggaaaattgaaaaaaggaagccaaaaaacatttttttaaatagtgagaaaaagtgccaaaatagttaaaaaagtccaaaatagtgacaaatagtgactaatacaaaacttttagtatcactatgatgaaattaccttacaaatagagatgattgaattttctattcataactctttcaattaataacctaatatgttataaaaatggatataaattatattcttttgcatattttttctgcgcatgtgcaatgaagaaaggggttcaaatttttttta

SEQ ID NO: 53573 - DNA, 1536 bp, Heterodera glycines
atgtgccgccaaatctctcccggagaaaccggagagcacttctggattcctccgcagttcctcgttaagagcaaggaagagctgatagattatgtctatcctaacttccaacaactccttggcaatgacaaagagctgctcaatcgtttgattctcgctccgcacattgacacgtgtgatgaagtcaacgagatcatgatggcgaatgtgccaggtcaagtgcgggaatacttgtccacggataagccccttgacgaccgcccactggacatcgatgagatcgagtccgaagtggctgcgttgaaccggcgcacagactcgggcatgcccccgcacagtctccggcttaaagtcggatgcgtcgtcgtccttcttatcaataaaagtgataaggaaggactgatcaatggcacacgcatagttctggaagaacttggcgatgatcgcctcattggtcgtgttatcaatagcaatgctattggcggccaagtgagattctttcttggaagaacacgaaatgtctatgaagacaaatcgcctggcggcataaaatacgagctttggcagttcccaatgaaagcctgcattcgctatgaccattcaaaaagggtcagggccaaacaatccgcactgtcggcattgatctggaaagggaagtattttcccacggtcaattgtatacggccttctctcgggcgacagacggaaacaatgtccgtgttcatgctcccaaccgggaaattgatgcccaaggccgagccaaagtgctgaatattgtagctactaatatgctcaagttacaataaatggcttagtccagagcagttgggcacatggtttttggagagatgccaatcccattcccatctgcactatgttgggtgcgaaaatggtgagaagcttggatccgggacatggaccggtcagccctctttagggcctacaggtgaattgccatttagcgctcaacccaataacgtgccaacgcctggactaagggagggaggagggccatgacgtgcaacgttagggcacttccggtttccattgcattatgcgatgtgtcaactccaattattggaggaaaccaagtgcatgtcggctgacgcaaagaccctaacagactaaaacgcgcctaggtagcgaagctcaagaagcgcgcagcgctttcccaagcgccaccctcgcatgcacacacccgctagtttatacatatatagagaaaagttgcaactcgtcttaaaaactaatttgagtcgaacggctgtcgggaggggtctgaaagtggtggaagggtcttaatgattcaaaaaatgcgcagttggctgatccgtcatcgtgatcaaaccgcagtttcatacaaccgatttggacggccaggcactccgacaaaataaaattgtttttttaattgaatttttaggggaagaagaggaggacaagcccccgccgacctcaattttagtggcaccattcaatgagaatgctccagagtttatcctgttcaatacgtgccatgttcagaaggcggcggtg

SEQ ID NO: 53574 - DNA, 600 bp, Heterodera glycines
atgaagatcgtccatttcctaaaaatttgcgtttgcggtgcattcatcgccacaattatcactggcacaattttcatggttcgttcatcggcggatgatcggaatggaaaagttagcgtaaaataagtaaaaaaaaaattctaaaattcaccaattttccaattttgctaacttttatgcatttttttcatgcttactgaacaattttcctacattcttttgcctaattcgaacctcggattagatttttttaaattgtgaaacggaaaattttgtgataaaaaagcaaattttcatcattttctcgccgttcagcagatgaaagcgccccacgaggatggcatgcagaaatccgaggacaacgaatgggacgacaaagcgcactttccggagcagcaaaaggcatcaaaaaaaggagtgaatagtgaagaggagaaacagcagcaggagaacgatggtgatggagttggacaagcaccggcaccaccacaaaaacacccaaaggacatcaaaaaacaggtttttctgtctgaagttttattaggagacattttgggttgggaaattgacaatttttacagattaatgccccaattttga

SEQ ID NO: 53575 - DNA, 304 bp, Heterodera glycines; identical to SEQ ID NO: 51570

SEQ ID NO: 53576 - DNA, 101 bp, Heterodera glycines
atttctcaaaaaaagagatagccatttttctgggatagagtataaatttaaaaattccctcaaaaataaaaggtctattgcgcaccgccctccctatcatg

SEQ ID NO: 53577 - DNA, 1859 bp, Heterodera glycines
ccaacgtcctgaacttctcgacgagaatggccatcgttacgtcggcctcttcaaccaagcgatgacttgctatctcaattcgctgattcaaacattgtacatgacccctgagtttagaaataaagtttacaggttgtgcttaattcctggtaaaatacggacttgagaatttcagttggaaattcgtcgacacgccgacggatgaggacaataaaaacattccttaccaattgcaaagactgttcttgttgctgcagaccagtgagaaagcgtcgctggagaccaaggagttgaccaccagttttggatgggtgtcaaacgaagcgtttgaacagcacgacgtacaggaactgtgccggattatgttcgatgcattggagcaacgatggcgcaaaacggagaacgacgaatcggctttccataagctttacaagtgggtgggttcggcagaatgccgaaaattgctgtgaattttcagaggcactgtggaagactatgttaaatgtttgcgttgcaaaagagaaaatgtgcgaaaggacgactttttggatttgtctttggccgtcagaccgttcggcgccagcgaatcgtttaaatccatcgtaaaaaatttgatttgcaattgggagaaaaataatgaaacttcgaaaggaggaggctttgagtgcgtttattaaacccgaaatactcaacggaaacaaccaataccaatgcgaagtgtgcgcatcaccgcaagacgctgagaaggtgaattatcaatgaaaaaatagaaaaactgccaaaaaaacttaataaaaaagccacataattttggattggttctcgacataaaattgcatcttttgcatttcttttgtactccttcattttcagggcttgcgcatcgtcgaatttccgtatttgttgaccattcaattgaaacggttcgactttgactatgcggctttgcaccgcatcaaattgaatgacagagtgacatttcccgattatttggacgtcaacgactttgtttattcgccttcggcgtcggcccaaccgaagccgagttacgcagaaatggccaaaaagtttttcggtctacgaatttttagaaattgacatggttttgttcagactaccagagcaggacacagcagttcagccatcgacgaatggacagtgcacttccgccacagaggacgaagtcgcggcggactgtccgaatggggaagggccaagcggtgaacattttgttgtgggacattaggcctaatttctgcggcaatttcttaccaccgatggcattttccatttaggtcaaaggcttgtggaagagaaaactcgtgctgaacacattgctcaattattgaagcgtggcaaatacatttacgagttgttttccatcatggtacaccagggaagtgcgtcggcagggcattattttgcttatataaggtaaagaaagacccatttgtcaaactgattgtctaaatgctttgccttagaaatttggaccagaataagtggttttgtttcaacgattcgtccgtccatgtcgcttcgcttgacgacatttttcgaacatttggtggccatgccaacggatggatgaacaatatgaacggttctaaatgctatttgtttcgtgatttgttctcatcggtcccttaaaagcgtatatgttgatgtaccgacaaattgatcacagccaaaacgaacatttcgtcaggagcaccgaacttcctgagcatttgattctgctcaaggacaaattggaggcggaggaggaagaacgaagtcgacaacgacagattgacgagcagaattccgcgcaggtgagaagaattttaagcattttcatgaaaggagttaagcaggag

SEQ ID NO: 53578 - DNA, 1883 bp, Heterodera glycines
atgtatgaagactgcaacaccatttttgcgcgctgtcacgacgcaaaaaaggcgcggctctttatcacattcacgaacaaccgtgagtggccagaattcaaggagaacatttacaaaaatggtcaaatgttcactgaccgttttgacatgtggatgcgagtgtggtgcggcaaaattgctgtcttccaccaagagctctacgagaagggtttctttgggactatccttggctcaggagagtccatggagttccaggggcgtggtggcccacacgcacacattgtagcccagactgacctggacgcaattccagaagtcatccaggaatacatatgggctcatattccacctttgccagataaagatgatgactccccaattgcgaaaatgcatcgcgaagtccgcgaactaatgcatatgcaactgcacagatgcagtgatagttggtgcggtccacgtgaccccaactttgggaggtgcaaaaagggctttcctgcccctttttcgaaatgtacgatactacacccggacaggcccgcgttatattaccggcctagcccaagcgatggtggtgcaaaaattgaggtaaacggcttaatatacgacaactcacaagtcgtgccgtacaacccatacattttgctgcgttatcgagtgcatcataatgtgttgtttgcttacggtaacaaagcaaacattaaatatgcactcaaatacccattcaaagggcccggacattgttatgtcgagtgcaaagaggagtccggcagcaaaatcggtatcgatgagccggctcaatatgccaaaatgaatttccgtggtgctacggaagcttttgcagttgtgcattcaataccatttgcaaaactctcgcaccaggttgttcatttgtccattcatttgccaaaccagcagcccgttgtctacagggcattccaactggtgagcaaagctgaggaaattcagcgaggcgagctgccagagacgccatgctctgcctattggaagcaatggcaaactgaatggcagcatgttccttcgctcaaggacatgctttttgaaaaagtcccagagcaatttcgctgggcaaaagaccgatggcttccgtataaaaggaagcctgccaagaggcccccaatcggtcgtgttgtacctgtgcctccaacggaccgggaaagatttgcactttatgcgttgatgcgtcactttcccggtgatcctgaccacttgaaactggtcaatggccagcagtacaacacctttacagaggccgctctacagcatgggcttcttgaagatgaccaaatttggcacaaaacgctcggtgaggcagccttgcatcgctggccggaccagatgagatggctctttgtgagcatcctcgtctttgggcagccgagcaatgccatagaactgtggaacaagtataaagaccaaatgtacaacccacagggcatcaccagtgcagctatacgccaagcacgcgagctgcaagccttagccgacatagattggcgattgcactactttaacttaagctgtgtgcactgtggcctgccagatccaccaaattcaaaagccaaaaataccaatttggcagttgaagaatttttctttggtgatgatggtctgaatatgccgcatggccagccaaatcaaaggccacaacaaaacaccccacctcccctcaatagcgaccagcaaaaggtctttgatgctgttgtgagggcaatacagtcggacccgaaggaccagactgtgccgcgccgtttcttcattttcggcgatggaggtacaggaaaaacattcctgtttggtcaaattatcaaacgcttgcgaaagcccccatacacctttaaagtgctggctacggcatccactgg

SEQ ID NO: 53579 - DNA, 1868 bp, Heterodera glycines
atgacatttgggtatgaccccaacgttccggcagaagtcatacttttgccagtacatttccctggacattggactctcattgtccatgatgtccagttcggtactcattttgccgattctttgcctaccccatatggcaggttggatccgcaactgacggataaaattagaaagattatttctgacattttgtcgtcaacagtgttgaccgggatttttaatgtcgaaaatctgacggaacaacacgatggaaatagctgcgggtacttcgtgtgcctgtatgctgagtcatggcttatgaacaatcgcacatttgttctgcctgatttatccattaattatgaaaagaaacgcattttatggcacatcaatgagctttacggctctgataatgtgccgtaccatccgagggaaggagtaccaacaccttgccccattgtctatcgacatacggatgaagcgcagtcgacatccaaggccgctgagtcaatggaagttgatgataaaaatgacataatgatcatcgaaccacagacaagtggacaggctgctaatgccattctcacccaagcccaagtggatggtgaaaaccaagtcgacacgcttggtttggtttcggagtcttgtgttccgcaagagccaattgcgcaggcagacgatgcaatatttgtcagaccgaagacgccaccgaggcgatcatcgcgcataggcagacggcaatcagcttcgattagccgttcgccttcacccgcaccgagacgcagcttatcagcaaaggctgttgagaaagtcactgcatttacgcagcgttgctaccttgcccacaagggttggtgctgtgctgccgcagcagcaaagcattatccaggatattcaaattctggtaagcttggtgaaaagaagtgctctcattgtggagcactactcttcccgcatgaggacagcagagtttgctgtcgtcaaggaagagttgttttgccaaagcttaacccgcacccaaaagagcttgaagagctcatcgtgtgcgataaacaaccccgcgaagggaaggagtttgttcggaatatgtcgcggtacaataatttgctccaatttgcgagtgtttcggctggcaataagccatgccctgctggcggaccgatggcagtaattctcaacggagaattccatcgccgcataagcagcatgcaggctggcacaacccagattcctggctttggtcagttgtacattctggacccagtcgaagccatggagcagcgacgaaaaaatcccacgtttactggggaaaaaatcacaaacgaggaagagtttgtgcagggtcatcagcttaatgatgagacccttgaaatcttggaaaaaatgatccaagaaaatcacccagctgcatctgcttacaagcaggctcgtgaacagctacaagagttgttaagacaacaaaggacggaagagctccggtttttcagaatgactttgttgaatgagcgctctgctccgggtggtatgaaagacccgaagctgcatccccaccagataatcaccccctcaacgggtgaagggatgtttgcaattcatgcagatcccactggtgccccggcacctaaagggatatgggtcgaaaacaagcagggccagttgaacgaaattgccccattcagtccttggactgatagcttgacctatccattgattaagcctaaaggagacgatggatatacaattggcattccatatgccaaacccgcacaaagaaggcggaaaagcaacatgtctgctgatatgcttgacactgaagcaatgtccgatgatgacatgtgcgagactgagtcaattgcagagtcagatgccggatctgaagcatcgatgca

SEQ ID NO: 53580 - DNA, 1199 bp, Heterodera glycines
atgctgaagaagagaaagaaagaagagcacctgcggcgcacggagaaatctgttagtccaggtcgctcacctatcccaaattgccctcctaagggcaattcaaactgtccgattttggacaaaccattggttgcagatgagaatggggtggtatcacacccgggcactaccacgcccaatattggtgctttgcaattaagcaccccggcctcttcgattggaagtaaaaggcggcaatttacatcggccactcaaaatgttgagtcgtcgcctagcagtaaaaaatggaaggtcaacgaagttgacagacccatgtctgctaatgaagcaattgcttcaacgccagtttccacgcaacgaaaccgtggacgacccgccaaaaaaaatcgaggaccaggcaggggcaaaacaaatgattcaatgagcgaaagctcttcaattgatcagggctctgaagctaccacatcagtggccgttttgccaactgtgcctgaaaagataaacttcagcacagtgcaaattaatttcgccacatcgcgaaatatggcctgcaaaattcgcagatgggccgatgttggcctttacgagcgtgatggcgaaacagaacaaggcccacgctctggcccaaaattcattgagacctgttggaatgatctgacacagtttctaaatgatgcctttgttgccgagtatttggcatacttggcaagtatatcagtgcgaaaagtggtcgttgttgatccaattgtgtggcaaattggcatagaccgtgtcatgccttacaaaaacatgacatttggttatgaccctaatgtcccggccgaagtcatacttttgccaatacatttcccgggacactggactctcattgttcatgatgtacaatttggcactcattttgccgattctttgcctaccccatatggcaggctggatccgcatctgacggataaaatcaaaaatataatttctgatattttgccgtcaacagtgttgaccgggatttttaatgcggtaaaccttacggtacaacacgatggaaatagctgcgggtacttcgtgtgcctgtatgctgagtcatggcttatgaacaaccgcacgtttgttttgccagatttatccatcaattatgagaagaagcgcattttatggcacatcaatgagctttacggctctgataatgtggcatatcatccaag

SEQ ID NO: 53581 - DNA, 2388 bp, Heterodera glycines
atgcttggatggacattcttccctcttttgaccatgctcaactcggcctcaaattggcattactttcgccacgtttcgaacttttggtggacaaatatttcgatgacaaaagcaaaatgacggtggaccagaaatcgcaaaggcaattttgaatgcggtaagtttttaaagttttctcggttccaaaaatggcccgaaaattaaaaaaaatcaaaatttatatattttttttgatttttttgtttgtgtcagtttttttttattaaatttactgcaaacattgcaacatcaaagaatggtcatgctgtaatgatacgaacataaaaaccagttttgaaaattttgaattttcgattttttgttagaatccaagtcgggggttcggaattggccaaaacatgtatcattgtcgggatcagcgaccccgaaaaccccgtaatacatgtttttactgggccttacatttatatttttccattatagtcataaatttcttagtttggcaattacatggcataaaaatttttttttagaaattttagaaaagtttgcttttgtgtaaaattcgctcagagcttcggtcaaaaaatcttgtccacccttattgcttccctttccgctaaattattatttttcataattttagttggtctgcagcgatgtttggatggacattttcccactttttgaccgtcctcaacccggcctcaaattgacactgatttcgccccgttttgatgttttagtgtacaaacattttgatgtcaaaggcgaagtttttccaaattttggtaagtcttttgttagtttcttttttttgtaaagttattggtttttttgttacttaaaataatagtgtttttatggaatttaggggcaccaaagctttctccatttcaaaaaatggctgaaaattatttttttttcaaaattaactaattcattttgattttttgtgttagagtgccggcttttttaagggatttttggttatgttattgatttatcaactccagctaagcagatttttttttttgtgtaaaaatacaaaatttcttagtttttcgttaatttttttttggattttataaaatctttcgcgactttttttcagcttgatgggcaacgacgtttggatggatattctcccttttttgccttgctcaactcggactcaaattgccactgctttcgctccgtttcgatgttttagtggacaaacatctcgatggaaaagcaaaatgactgtggaccagaaattgcaaggacaaatttgaatgcggtaagtttttaaaaagttttctcggttcgaaaaatggcccgaaaattaaaaatttttaaaattcgttatttttttgtttctgtcaggttttttagcatttaattgttatgttttttggatttaatgatttttaagctgggccttacatttatatcttccattatagtcataaatttcttatttttatttgggaatttcatggcaaaaatttttttgaaattttgtatgttttagctttttaatataaaaattttggttttgtgtaaaattcactaagaagtttgttcaacccttattgcttccctttccgctaaattattaatttcaataatttcatttgatgtgcagagcgatgtttggatgggcattttcccttttttgaccgtcctaaactcggtctcaaattggcacttctttcgccacgtttcgaacttttggcggacaacattccgatggcaaaaaggtgaattttttttagtgttttgttgttttttaaaggattttgtgccaaaagggggccttctatttctagaatttttgcctaaagaccaatttcggtttttttgttgtaaaagcgccattttttagtgtttttgcatttttttttatgattttaaattctgcattttcagcaaccgctcaacaattcagcaactgcgtaacagtttggatggacatttttccattttattgaccgtcctcaactcggactcaaattggcactgctttcgctccgtttccatgttttagtggacaaacatttcaatgacaaaagcggattgctgcgcaagtttcaattttactcaaattaaccggtcaaacgctttatagtctcgaaaattattgattgaattcgacaattcaaaaattgaaaaatgtaaacatttttcctatagttgaagaaaattttagtttattaaatttaaaattccaaacaaaaatcaattatagatttttttgataatcgacaatcgcttaacattgatgggtgataccatttccatccttcaattttcttataaaattaaaaaattctctcaggcaattgctgtgtttggccggtttaaatctttaaaattcatcgattcgaccatgaaatgaataaa

SEQ ID NO: 53582 - DNA, 673 bp, Heterodera glycines
atgcttggatggacattcttccctcttttgaccatgctcaactcggcctcaaattggcacttttttcgacacattttaatgcgttggtcgacaaacatttcgatggaaaaagcgaatttcttcaaatttcggcaagtttttttttttgattttttataaagctgtttggtttttggttactttttgctaagagtgtttttaaggaatttaatttcccaaagttttaaggattttgtgccaaacaaacgggcctccaattcaatgaatttttgcgtaaaaaacgctaaaaattaaaattttttcaaattcgtttttttttttgatttaaaagcccccgtttttagtgtttaattgttatgtttttttgatttaaagactcagctcgctgagctgagtaaaacagtagagaatacgcgcagaactgttcactttaagacaaatagcagaagtgtcaattttttttaaagaaatcagtgttcaccaatttttttcaaattctgtttttttgtttgtaaaagtgcgctttttaggaattttgctttttttacaattttaattcttaacattttcagcattttccctttttgatcgcactcaactcggcctcaaattggcacttctttcgctacgtttcgatcctttggtgaacaaacatttcgatggaaaaaaatga

SEQ ID NO: 53583 - DNA, 932 bp, Heterodera glycines
atgagaagaggtacaacagtgatgagaagaggtacaacagtgatgagaagaggtacagcagtgattagaagaggtacaacagtgattcaaagaggtacaaccatggtttaaatgaataaataagagaattgttttattaaatataagagtaaaaattggatgcattaaaaaattttaaaaataaaataataatccttttcattattaaaataaacttttaaatgtataatatgaaaaatttattgaaattgaaaggaatttatttgttgaaaagtctaattaaataaaacttttattcatcaaaaaaattaaacataaatcaaacaaagaatatttaattaattataacaaataaataattaattttaatacaaatcatttatcaaaaattttttatttaaattttaaattaaaatttttattaatttataaatcaaactattttaaattaattaaaaacatgtaaaaataagctaataatatatagaaaaataatatacaccgccctgcttcgaactttcccccctcccaaaaaaatgatgacccagaatccccaatcacacagggattctgaggtcttaagtatgtcagaagtaaaatctgatcacgtattcgtgatcagcgtcctaaattggcccaaaagacatatttttggaatattttcggtgaaaaaatttttccactcaaaaatcctggtcacccccctttggtcccgaaccccaaaatcacttttatttctataacttttttcaaaaaagtgataaaaagctaaaataaaatttataaaatagagcaaaaaattgcggatttttatattattttacttttccaaaatatcttttcagaaccgagttcagaattttttactgaaaattcgaatttttccagaacttctggaataactttttttagtttcatgatagaaaatctaa

SEQ ID NO: 53584 - DNA, 990 bp, Heterodera glycines
atgcatttgtgtggtttggcacaggctccaggaaatccggtcattgcgtgtcagataaatttggacaaaaacttcgcgttcattgaattccgttctattgacgagacaactgctgggatggcatttgacggtataaattttatgggtcagcaattgaaaatacgacgacctcgcgactatgtggctccaaccactaattacgaactgcttggcagaatgccaggtttgcttttggccaaaacgaaagcatttgtcaaccgtttttagtctctaacattgttgtggacagtcctttcaaattatacattgggggactccctaaccatttgaactcggaacaagtcaaagagctgctgagtgcgtttggacagctgaaggccttcaatttggtgatggacacgaccaccggaatgtcaaagggttacgccttttgcgaatatttggatcagtcgctcactgaccaagtcggcccaattttcacttcttttttgcaaaaatcttttaaggcagttgttggtctgaatggaatgcaactcggcgacagtcgtctattggttcagttagccgctgctggagcacgtcaatcggtcacccatccgagcactgcggttcaaatcgcggggattgacttgtccagaggagccggacccccaacggaagtgctttgtctgatgaatatggtaactgaggaggaattgcaacaggacgaagtttacgaaggtaattttgctcattggatgaaaaacacactgcttgctattttttagacataacggaagacattcgcgttgaatgcaacaaattcggaaatgttgtgagcatggaaatcccgaggcctgggtacgacgagcgtggtgttggaaaagtaggataattggtttatttgtcatatttgtttgtcttaaggtattcgttgaattccaatctaaagaagaatgccagaaagctcaggccgcattgactggacgcaaatttgatagccgagtagtg

SEQ ID NO: 53585 - DNA, 1057 bp, Heterodera glycines
atggacgacgaaaacactcatcaagcgaatatggaacgagtgagagaggacgaagatgaaaaaattggtctgatggacattaaacgggaaataaaagccgaactcaatgaagcgattggtcgccaaacggaagatggcgaaacggagccaaaggcggagagagagcgcgagaggaaaagcgacagagagagggagcgcaagaagaagagcaagcggacttcgcgagaccgaagccggtcgaagtcgcgggaacgcaaacgatcgttagtcacttttcaaggggctggcattgtccaattcatgtgatttgcttcctgaatctcattaagacgcgaacgccgacgaagtcgctcgcggtcgaaggaacgccaccgcgagagagagcgaagccgagaaaaggaaaggggcgaaaagaggtcgaaagtgaagagcaacaaatattgggatgtgccacccgctggctacgaacacatgagcccgaaggagtacaaagaactccaaggtgggcccaccttccctttggctcctcactggaatttcctgaatttcagtagtggtcgtccattagaattgcgcaagggtgctgaatcgatggattttttagcatttaggtcttctgtacggtgctttccgaagcattttggcggaattttaacttttagcactcaatttggtcgtctcgtcgtttttcagatttaagatactccgccaaatgttaatcgatatgaaagtcttttaggttttaggggaaaacggtgtcctgctgcatttttggattcatcccaacccaatagcttatagggtgaccgagcacaatcacctcgcaacaaacgcagaatagcattcccactttcttgaattcaccacttttattttagctaccggcgccatccctcgggccaccctccaatcgtctgttccggtggtgggcccttcggtcacttgtcaggcgcgacggctttacgtcgggaacattccattcggttcaaatgaagacgcaatgctggacttttttaaccaacaggtcaaccatggactttttaacggatgggattcg

SEQ ID NO: 53586 - DNA, 655 bp, Heterodera glycines
ctggtggggagcttcccggaaacgaaagtcttccggttccgggggaagtatggttgcaaagctgaaacttaaaggaattgacggaagggcaccaccaggagtggagcctgcggcttaatttgactcaacacggggaaactcacccggcccggacaccgtaaggattgacagattgatagctttttcatgattcggtggatggtggtgcatggccgttcttagttcgtggagcgatttgtctggtttattccgataacgagcgagactctagcctactaaatagttggctcattgcttctgtgggcacaacttcttagagggattttcggtgttcagccgcacgaaattgagcaataacaggtctgtgatgcccttagatgtccggggctgcacgcgcgctacactggcaaaatcagcgtgcttgtccttccccgaaaggggttggtaaaccggtgaaaatttgccgtgattgggatcggacattgcaattattgtccgtgaacgaggaattccttgtaggggcgagtcatcaactcgctctgaatacgtccctgccctttgtacacaccgcccgtcgctgcccgggactgagccatttcgagaaattcggggacggttagtgttccggcttcggtcggtatgcagactggaaccg

SEQ ID NO: 53587 - DNA, 840 bp, Heterodera glycines
  unsure (1)..(840): unsure at all n locations
atggcgttattttccatgctactaatgctgctgctactcctgctccatctgtccggcggagaatggatcaacgtagagctgagcgttgacccacccaatttctttgaccgcacctttcgctccctttccaagacatcacccatccaacattggttcggctacaaccggaacaccgcgtgtcacgttgagcgggaaacaaacataaatcgactgtacaacagtgctgatatgtggaacattgccctcactgatgtggacaacttcatgagcatggggcggcaaactatcgagttgttgtccagcgcattgccgtgggcgtgttttggacatgaccgccacagttttgtgatttttgaccttcgaaatgacgcaaatgaagtggcagttgtgcgcggtcatcagcacaagatagcacgaaatttgagtgcgtatggacgcattttgttcgaccatatttccggccggttgtacatggtggacaagcacgagcgccggatccatgagctgctcatcaccgattttgtgcgatggtggactctgaataacactgacggaggtggtggtggtggtggtcataacggcggcggtgagaacagcacggcaacacactcgttgaggagcaactttgtcgggtttttaccagaacaaaaaacggattttttcattgcggccgaccatgtgtacctgatttggcgtagacgtgtatacaagttccgtgttgggcactacttcaatgatccttcctcgcagctacagtttttgaccaactccagtgacattcgcttcaacttcctcatattcgagagagatgatgacgccanaattggaagacagcactga

SEQ ID NO: 53588 - DNA, 411 bp, Heterodera glycines
atgatcaaaacattccaatctctactcaatccaccaacatttcaatcactgggactcaacccaacagcatttcaatcactggcactcaacccaccaacatttcaatcactggcactcaacccaccagcatttcaatcactggcactcaacccaccaacatttcaatcactggcactcaacccaacagcatttcaatcactggcactcaacccaccaacatttcaatcactggcactcaacccacagcatttcaatcactggcactcaacccaccaacatttcaatcactggcactcaacccaccaacatttcaatcactggcactcaacccaacagcatttcaatcactggcactcaacccaacagcatttcagtcactggcactcaacccaccaacatttcaatcactga

SEQ ID NO: 53589 - DNA, 417 bp, Heterodera glycines
atgatactcataaaaaatacaaataattcaacccacctattctatgaccacattcgaaaaaaatcccagaaatacgaggaaagatatgcttggtcacaataaaataaaaaatggctagtatgtaaaaattggcggtcacaaataaaataaaaattggctaatatgtaaaattggcgtccagaaatttttagactaatccgaagcaaagcacgaatgaatattaaagaggcgaaagaattcacagtatcgtttctaatagggaaatattgacaggatattcggctaaaaacgggtttgatcatttttagcgcatttttaggtatacatttgagacaattgggcaggacaagaaaagaatgaagttgatgcctcatgaaactcggaattggttatgtttagtcgaaaatatccttacac

SEQ ID NO: 53590 - DNA, 155 bp, Heterodera glycines; identical to SEQ ID NO: 51421

SEQ ID NO: 53591 - DNA, 98 bp, Heterodera glycines
atgcgcagaccaaggctggggggcgggcctccaacgctttttgtcctttctctcttccgcctcactggtgcccaaatggacgccgattttgggcacaa

SEQ ID NO: 53592 - DNA, 2409 bp, Heterodera glycines
atgtggccgtctgatcagccgaccaaggagccccgggcattcaatctccgcgacatggatcatccggacgcggttgctggtaagtgtattttcagtggcaaattttgccaattttcccaaaaatgcccattaaatttcagccattttgccgattgccattaccaaatttttgattaagttttataccttttttcgctcggatcggaatctgattagtgctcattttattcctgatcagttttttcaatcatttattttctctctgacatttccctgtttgaatctgatcaccacctgaaactcattcttcttgattaccttttatttccgattaaatttcattatttttctggatcattttccttgatcatttctttctttctttctctcgctctctcaccctcattctctcccccccccgtctctgatcactctcttgcttccccatttgtctctctcttctctcctccattgcttcttcttttccttttccgccccaatcaccgccaaattggccccgcaggggacaattaacataaacgggcgccgcgcgtttcactttcgcttttccgcgcctcttcaagaagcgtttatttgtgttgtgtatatatttattcatgggtcaacaaaaacatgtttttttttgtacccgtggaacgtcactgaaccataaaatttgttgacaaattttcaaaaaatctaaaaaaaagaggcttatccggaagagggaccgtataaaaaaagataaatccccgctgaaaaagtgtcccattttcctttttttacgacggttctactcgagagtcttgagaacggaatcgaaatgccacaagaaatggatggatttgctgtccataaaaacctctacttcagccactttttggtgatcacatgaaaaactgattttttgaatgtgtttattgttaatccacccgaattttcaacaaaattttcccattctcgagccaattaagtctcgaaacactcactatttagctaattacccccactcgcgcaaaaaaagaaagaataattccctaaacacaaaaaaagtccgaggtcacaactaggcacacatacaatgggaaaatttacctcaaataacctttcctcgcccaaaaattgcagcgcacctaattcctcaagatgccatcgcttttagtagtctataatggacatgactcatcccaccctttttcatcctctgctaatgaatgggactggggtcatttgtccccctttcccccctcgcccatcccggcatttccccggagggggggggggggggacggactttgctaattgtaaggacataccagcagatccgcgtcctccaaaaggacacccaccacaaacatttatctctctccctctcccgaccgacttaccgcgcgggagatgggatttgttgaacagcgccgccaaaaatgggcaattaattaagtgggcgctccgcgcggctcacgctcgcgcgggcgacgggacggaggaggacagtggcaagtgcatgttgttccttgtttgttgttgttacttttgtaccacggggacggggtgcgttcgttcgttcgttcgtttagtgtgcccccgaggggacactttgtcccctcaccgccctccggggccccccgtcccgtcctctccgctccggtcaaggtctgtcccccgaagcgaaaacgcacttctctttctgtgccgactcgcggcgcggaaagacatttcggcgactttttaacaactctcttcttctcttttgaggtgtttatgtgctggaagtgaggaaaatgggaagagagatttggagaaagatgaatgaattgatggattggaacgaattttgaaaatggaaaaaaaacaaaatttaaggcgcgaaaaatttggcattccgtcgacaggggaatttggaagatgaattggaaaatttaaaatatttcacatttgaaaaaacgttctaatagctaatgcgcccatttaaaatggcaaaaacaaaaaaaattcggttccttcggtggcattggaaagcgattcgaaataaaaatgggcgcggcattttaaactcgaaccatgagttcagagttctgttttgcttgtaaaacatggcatttgccgggttttgaggaccctctgggcttgggttttttgtccggtatttgcagggatttttgacaaattttgccagtttttttcattgttttgccagggttgagaatattggcattttaccaaaaacgcaaataaatatgtataacggcttttgaccaattttgttgccttttagcattggaactcggtctgcttcatcattacccgccgctgttaaatgcgagtgccaaccatgacgacgactccaagcagtacttccgcctgttggagctggacggcaaccatttgctgatcggcgcagcgtga

SEQ ID NO: 53593 - DNA, 543 bp, Heterodera glycines
atggcggaaaattatggacagacaaatggtctaattgtggtgccaaaaaggttggttgcttccttggcattttgtctcctcgactaatttaaaattaaataaatgtatcttttttttattaataattattgaatatacgcttcattgtcattttcaaatagagaaataatgcatttaaaaaaataaaatattttttcgccggagttcttaaaaaggaggaaaaaatacgcaagagtaaatatccccaaatttaatcgttaaaatgattaaatttctcaaagtgattattgttgtgccaattattaaaaatttaataaaaaaaattccagtatatttttaaatttttaaatatttttataaaccaaggggcaaccgcttttgcacttttatttgttgttgctcggtgctaattacttataccatcactcatatttatttatgtgtaatttagtctcatatgtcaaaagttgttgtgtgatgaagaaagaaattggtacgtaaaaaacgctcaaattgcctcgggggagaaaaaaattattatta

SEQ ID NO: 53594 - DNA, 970 bp, Heterodera glycines
atgctttccctcaatggcactttccctcctcagtctcttaaacccttggctttggcatttgttctcgatggcgggattggttcccaattggaggagcttggctatcccatcaatgtgatttttgggcctttctgacggggtttgacttttgaccgcaaacagaactcggtgatttggagtggggaagcaataatcgatgcgcccgaccttttggccaaatgtcataaaaagtaagagaaagtgacggattagtgaaaacgaaattaataatgtgtcaaagtctcaactggtgattacctccgtgtccaaaagatgaagccttcctttcccacatctctcatgccatttttcttttttttaggtttatcgatgccggggcggatataatcgagacgaacagttaccacgtcagcattcagaaactcatggaaagccggggcttttcgctgggacaggccgagtccatcctccacgtactgctccaactttgccacttgccacccttctcaccctcccccttttctcctatttcatatgcctttctcagaaatccgtgctgattgcccgtgaggcaattgctgcttcgggtcgtccggtggccctcgtcggtgccgtcggtccttacgccacctatttgagggatgcctcggaatacaccggtgcttatgtgaaaaagcccgacttccaagagcaggtggtcactttgctcgcaattcgctctcggcaaattattgtttcaaaattcgtttggcactcccttcagaccatcatcgactattatctcctccaatgccgtcctctgattgccgcaggagtgaccacgctgaacttcgagaccattccgtcggtgaaagaagtcgaatgtgtggccaaagtgatggaccaattggacgacactgtgcaggcgtgggtttgctgttcatgtcaggtgaaagtggacaagcagattaaaaggagcaaaagcatttga

SEQ ID NO: 53595 - DNA, 693 bp, Heterodera glycines
cattccaatcactgggactcaattctcatgcatttcaatcactgggactcaattctcttgcatttcaatcactgggactcaattctcttgcatttcaatcactgggactcaattctcttgcattccaatcactgggacctaacctcacctggtccttcggcatcgcaatcatcgagactcaattctgcgacattccaataactgggactcaactaaccagcattccaatcactgggactcaattctcctgcatttcaatcactgggactcaattctcttgcattccaatcactgggactcaattctccatcattccaattcccgggactcaatcccaccagcattccaatcactaggactaaatccttcacttttcacggattcttcggcatcgtaataaccgaggactcaattctcctgcattccaatcactgggactcaattctccgccattccaatcaccgaggactcaatccttcactattccaaacaatgaactcaattttacggattcatcggcatgtcaatcacgggacttaattcagacctgttcagcataattttggaattttaaaaatgtatttcaattatgaaatacaatttgcgtagaaaatccttttcattataaatacttgttctcttacattttaataatttcttttacataaatatctacatacaaaaaaagaacaa

SEQ ID NO: 53596 - DNA, 805 bp, Heterodera glycines
atgtcacgattatttattttgctcttaccagcggaattaatttttgagatcgtatgcaatattcctaccttatccttatttggtataattataatcgaaagtaaaataaatacttattttagggagaaatggacctccgtgtatcacagggatagtcaacagacaatttgaaacttttagggacttgaaaaaagaaaattttaaaaaattggtaaattatttgcaaaaacttgtaactttttactaatcttctttaattttagaatgatttaattgatatcattagcataaaatgtaagatacaaattacttattggggacacataaaccgaagattttacgtccatgaacatgctgttaaacgagatttggtagacttagtttataatgaacttcattattatgtacgttatggtaggagtgaaaaaaatttattagaaggtgttacatggttttcccccgttaatgaggtaatttatgaaagagaatatagataatattctaatttagaccaacagttttcttgctcttttattcaaaaggacattatatggttttatacaatcggctaatcctttcaccatgagaaaatatatagttttaggcccaattatgtttaatgaattaccgttaatttttgatgaatcggttgacaaaatgataaaatttggtatttatcccggggtaagagacaattacacaggcattttttatgtacgtaataatcactggactgctgaaaacagagtcttaaaaattttttcttattttcatccaaatcctggaactttgtttatatgtttta

SEQ ID NO: 53597 - DNA, 428 bp, Heterodera glycines
atggcaacagtgattaaaaaaattcgaatttttgttcaagttcggggccgggatcccgaattgtgtcgaaataaatgccatattcgtgaacagcgacctcgaaaaccaacgggtattcatcattatgtgtaacaaaaaaaatagacaaaatatgaggttattcagtccttcactggtggttatcgtacgaaatccgaagactcaccacggatggccatccacgagtgtccgcttcggtctcatcggatgaggaagaggaacagcaaggaaaagcagaagaggaggaggaggaaatcatcggaggagaacgaatgccaaatcgtagagcacagcaaaccaacaacctttgataaaatagggagattttattaaagatggcatagaaaagtgaagaaaaatcaaaatcagagagaagggcaaaaaattga

SEQ ID NO: 53598 - DNA, 1032 bp, Heterodera glycines
atggttaatgggttgctttgtacctcattcactgaggctgcaataatgcatggtcttcttgaagacgacaaaatttgggacaaaactctggcggaggcagctctatcgcgctggcctgatcaaatgaggtggctcttcatgagcatcctcgtttatggccggcccagtaatgccgtcgaattatggaacaagtacaaagaccaaatgtactttcctcaaggcattaccacaccggcacaacgccaagcagcagagcttgaagccctagctgacattgattggcggctgcacagctgctttaacttaagctgtgtgcattttagcctgccagacccgccaaactcaattgccaaaaatacaaatgcggcaattgatgaatttttctttggcgatgatgatttgaatttgccgcctggccaaccaaatcctcggcctcagcaaatcactcctccgccactcaacagcgaccaacaaacggtctttgatgctgttgttaaggctattcagtcggacccaagggattcgactgtcccccgccgtttcttcatatacggcgatggaggcacaggaaagacattcctgtttggccaaattattaggcgcttgcgaaaggccccatacacctacaaagtgcttgctacggcatccactgggtgtgcagccattttgctgccatatgggaaaacagcccattccacgtttcgtctgggtagagaagtgtcattagacaaactcccaagcattccgctggagagcttctttgcccgtcggattcgtgaggcccaactcatcatcattgatgagatcaccatgcttcacaacacggtgattgaggtcatcgaccgagtgtgcaaagagatggcaattcgccagcacaaggatctcctcttcggaggaaaaacggtcattttcagcggtgacttcaaacagtcgctgccggtcgtgcctcatgaaggcttaaccgctcaggtgacagcctgttttcaatccaacaactccttagcaatgacaaggagttgctcaaccgcttga

SEQ ID NO: 53599 - DNA, 957 bp, Heterodera glycines
aatgcatttctgccggagtctatgccgcgcaaaatgaaatcttgaccaccggacgaaccaccaagcagatggacgaattaacatcaaaaactcccatttcacttccagtgccgcagtgtcccatcattcttgtccatcagattgatcgaatgcaggaggacccgacctcattttcggcaacaaatccaatgcaaacccggactgtcatgaagtgcttgactttcctacggccatgtttcaacggcttgattcgcgttgtctgcttttacgctggtcaagcgaaggaaattggaaccgaagtgtctgcgctcaacatgccgaacgtaatggtaacaacagttgatggttgccaggggcacgaggccgaattcgtcttcgttgtcacaacaaaagccggcctgagctccaatgacaacagcggcgccttttggaacgatgaacggcgtgttaacgtggcactcagccgcagcaaattcggcatgatggttgttggcgacttgaagctgttgtggacagctgacggcatttggcggcgattcctgcgcagagctctggataaggctattgctgtaactccggagtatatccatgcgatgatggacccgaaaccgcaatttgtggatggcgtaattgccacctcaaacggatcagtgaaagcattcgacttttacgatgattggcaaggttctgatggtccctctctgcctaggtcaattagacctccgcgcatgttattcgctggcactttcgaggcagcagcagtcagcacgtcaacctggttcagcacatccgaacatgcccgctggtctgtgccactactgtctgcgccctggtcacttccttcgcgactgtcctgaccgccctagcccatcaccaaacatgccccgtccaacatcaagccgcccgggccaatggaccaatcgcacaaatgatggaagaggcagacgaaacgactga

SEQ ID NO: 53600 - DNA, 1377 bp, Heterodera glycines
atgactttggtttacccccaagaccaacagcaacaagtgctgatcgagcaacctaatttttctcaaaatcatcaaaaattcactcgccaggtctttcagattccggaaacgaatcaagagcctagacatttccctacctatccccaaccgaatgttgcgccaagcaacctcgaattcaacttgattttggaaagaattccggatctaaatggaaatgagggtacagattctgtgcgccgctttttcaaaaaatttgatgcatacaccgacggatggccaaacgcgaaacgaatttcggtgttagaaagcaaagttttcaacaaagcagaaagagcttttgaggcagcaaagtcaacgcagccctaccgatacgagcacatccgcaaagatatgattcagcagttggaagaaaccgactcaaagcaactaaatgcttttgatgatcttatgttgggcgttcggagaagacaaaatgagagcattgatgagttggctggaagaatttctcgcctagtaaagagtgcttatccgggtttgaccaacaatctgtgcgacgaatattcgatcaaatttctgatcagatcgatgggaaatcccgatcttgcgttaaatttggaattaatccgcacaccgggaatgactcttgatcattttgtgtcactagcagcaagggctgaatcaacccaacgcgcttcaaaacggttcagtacacacccaaatgatggctttcaacagcgcgagcaacaacccaaatggcgacaaaattttggtggtaactcaagccaaaacatggcgaaggttcaaaattttgctggaaacataaatcagcatccccagcccaaagaagacactagaaatcaatggaaatgttacaattgtgatgaatatggccacctttcacgcaattgttcacgtccaagaacttttatgcaaaaccagccaataaatcagcaaaaaaactttgttgctattggtgcgaaccgaactcaaatccaacccccaaatcagaaccgaaattttcaaacaccaaaaccaaattcagctaatttcctaaagcaaaattgtttggtggtccagcatgaagaagtcttagccgaggcgagggtaaacaaaattgagttggcaccggaagtaagtgaattttatgaaaaattggaacggatcaccgaaagcaaaaatgaaatttttttgccaacaattggaaaggttatgtcgttgaaacttgaagtgtttggcacagaaaccgacgcaatgcttgacggaggcgcacaaatctcattgattagtggtgattttctgcataagttgctgattgagaaagcgattacgctggaaacattgaaaagttcaaaacgaaaacccaaatttttgacgtaa

SEQ ID NO: 53601 - DNA, 1292 bp, Heterodera glycines
atgtgtgattttgaaggcgagttcgcgggtgtcaatgtgcgactcgaacatgcttatggcctgcgcatcgaaggccgattcgcgcggatgacaagggtaaaagtatccgctcactttagcaatagatttttttatgaaaaattcaagaagttcagcgattttttttaaatttttgaaaggactaccctgtcgcgtgtacgtacctcccccaccaaaaaacacccttaaaccgacgaaattttgaggggaaaaggatttttgtcagaaaaatgcacaattaatcgtggataacgagataacgaattcagtgatatttagaaaatttataaaaaagcaaaaaattatttcaaatttctgtttttcatgaatttttcaagcaataattttcgatgaacaatcttatactcattaaaagtttagacattttccatgccctcggctgactgtctctcctccgctttcttttctcggctctccatccttactgaccatcctccgctttcgtttctcggctgactgtccgcctacatcggcatggttgcgttgttgacaggcagagcagtgcgcgccgattggtgtgtcaccggcgaactggatagcgatgaagagtaaatgaagtcgctgggatcccgcaaaaagtggcggcgtcaaattttaaacttaagacatacataagaattgaacgggaaacccaagatggatatgttgtgcatgcgagaatttaaaaacaaaaatagatgaaatcataaagctaatgtattgttattttagaataaacttgctttcaatttctgaaattttttgttttaaaagtattgcgagaataattttttaaggaaaatctaggaatggtatttaaacataaaattattagaaatcaataatatttaaatatttaattgaatataaatttactttattgtaaaagattatttttagaaaaaaattataacaaaatgataatgaacaaattcatttttgttttttcaaaataatatttgtaaatcattttaaatatgataatatttgtccgcttaaagaacggcaactaatcaatataaatttagaaaataaataaaataaatttaattaaattaagtataaccgaaaacttttgcttttcggcgtttcaacgagatcaagtcaattaattacatgcctgaaaaacagaattgcatatgaaaaatgacggaataagagaaaaataagacacctacaataatatggagaatttaaaaaatgaaagagagtttcatagcatataaattacaaattcaattaaaggaaataaa

SEQ ID NO: 53602 - DNA, 1008 bp, Heterodera glycines
atgaaatttgcaaagaaaatgttaatgattcccgaggcggaatatttggctctacggagtgcgatgaatagtggtgattatctccaaaatgaaaaagcaagtttagacgcaaaaatttctcagaatttacaagaccccggcataagcgaggacctcaaggcgaagagacatgattggctctataaagaaagacgtacggtaaaggggatacttaaaaatagaccacagaaggtagtgattgagaatcatgtaccaggtccaaatgttgcaccatatctgggcctcaagaaccaatccaaaccacaggagaccgaagaaccacggaaaataattattcctaggaaaagacttaaagagcaaactcctgatcctgaatcatataatgatacacttgaggagttaactccggagcgccaaacaacatccacattaaaaacacccattccgatcaaaactattatacacccgacccttttaaacggtctttttaggtacgtgaaggaaaacaaagatttatttaaaattacggcggccggaaaggtacagtcgaacatgaatttgccgattgaaaacagtaattatagagatgttttgttgtatctcgcagggaagaaagatgaaacgccgcgcggtgcaaaatttctcaaagatcggttactgatttttaatgcatcttatttatttgacctatttatattttcatagggaacatgtttcgcgcatttggggcatagccagaaattatcaaaaaatgatgtaccgaaatgcaaaagactgtgttttttacatctgttacacaactcgtaatgacaggggcagtaatgacaacacttaattttatgtggacagttcattttttcaatttaattttattttttttggttgctatttatagaaggggtatataaagggagtgaaaggacaatttgattggtacattgtatcaaaatgcaaaacccgataatcgtaaatataattgctctcgctaatctcggtaccggaattaaa

SEQ ID NO: 53603 - DNA, 356 bp, Heterodera glycines
atgcctccaaatgaaaattctgaccgtccctttcaacaacccgacaatgttcaaccagatcaacaaccgcatcaacaacaaccagatgaagacaccgagttgcgtgcacaaattgaagacgcggaggaggatttgctcttgaattggtggcgtgaagacccaacaattgtaagcttttttttcaatttagcatagttttttttaatttcatcacatttttcagattcgttttcttttttggacacagacgcgcccctgccatcgaagctgcgcttcgtcaacgcgctgaacgtgaggccgagatcttgcgccaatatgccgagaatcagcaatgagaagtgaccgatcaaaataaa

SEQ ID NO: 53604 - DNA, 965 bp, Heterodera glycines
atgcatgttgattttgatcctctacaagtggattggtccacattctcgtccgagtatgtgcaatttggtggatacaacatttatcgagggttgccctatcagcgtggagcgggagttggcgcagtgttccgaagccttatgagatacttgctgccgattggaaagcaaattggctccgcaattggacgtcaaggaatagaaagcggaaatcgagtactcaccaatgtgctggagggaaaagacctcaaagagtcgctcgttagtgagagtaagtcgggactaaagaatcttcttgaaaaagcggccaacaacataaacactcagaagggtcaaggttttgattttaagcgatacaaaaaagactcggctcccaaaattggaaaaattgggcgaaaaaatataaataaacttcaatcgtcaatcgggccaccaatggttgttaaaaccaaaaataagcgtctacgtgttgactcactaggaacttactaaaaatgacttgcccacaaaaaatcagcgacagcagtcccctagcaattaacagtggcctgaacattttctcagttccaccgaccaacgtgtccgttgttcgctcattctttcgtcaagtgcttccactagcaacaatcacgcaagaatcgccttacctatttcgactgtacagtgacaatttgtggacagatttatcacggatctacctttatctcgaactgtcaattgaaaaaccgggagcaaacgataaatgggttgcgatagaggacacggatactggtgtctctgccattcaaggaatagggcaaacatttgtccagcaactaaaagttacggttggcaacacggaagtgtacgatagcggaaatctgtacccattcaaagcgtatatcaccaatgagttgagctttccaataaatgccaagaaacgattttctttgttcaacggggtattattacaccgtaaaccgagatga

SEQ ID NO: 53605 - DNA, 1894 bp, Heterodera glycines
gggtgtcggaggaagggcaagttttgagagctggtgggcgtccatttataaccagcagtgttgatgacattgttagtcacctgttgaacaaggacaagcgtggccaaaataaagagccaacggcattcaaagaatttgttgaaagggcaaggcagaatccgctcttgagtaggcatttatttcccgaaggtcaatccggcaaaggaatttataaaaacaccccacttaagtttaagccatcattatggatttgaaaaagcttcgtttgctcgagtttttgtacaaggacctaagttcgcctgtcgcattcacgagcgttgaaccgctgctgagagaggcgcggaaaagtcaaccaaaaatcaatcgaaacgatgtccaaaattatttgaccagccaacgtacatacacactgcatcgccaggccaagcggcgctaccgccgattgccaacattggcacccggcttgcatactgaatggcaggccgatttggctatttttgaccgacttgataaacaaaatcatggcttcaagtacttgttagtctgtattgatacccttagtcgacaggtgtttgtcgagcccgtaaagaccaagacgagcgctaacatgatcattgcctttgatcgtatattcaaaagatcaaaatatatcccgtggaaggtgttaacagatcagggaaaggaattcactgcccgcgcagtacagcagttcttccgcacaaaagacgttgaacacttttgtatgctcacttctccccaatttcatgccggaatggcagaacgtgcgaatcgtagcatcaaagagcgcctttatcgctactttacggagcgtaacacgtacaaatggattgatgttgtgcaagacattgttcgtgcaattaaccactcgccaaattcgagcattggaatgcgcccagcagacgtgaactttaaaaacgcagaagcgttgagacaaaaattacatgatgcagctgaaaatgttgtacgacgccagccaaaataccgtgtgggagatcgcgtgcgcattgaaaagtacaagcacgtgttccaaaagggctatctcccacgcttcaccaatgagctcttcactgtggcagaggtacactctgagcgttcgccagttgtttatcgattgcgtgatgaccataatgaaattattagtggttggttttacgcaaatgatttgtgcaaatcactagaagacaaacagcaaaaaatgtatgaaattgaaaagattttggtgaaaaagaggcagaacggtgtggattatgcacttgtgaaatggaaagggtatagcgctcgctttaatagttggattcccgtaaattcaattagcgagaaagatatataaaaaagcactatttaataaatttaacaaaaatgccttcaaattctttttatgttgttgttccgtcgaacaccaatattgaaggaaataggacaaattctttccgagtgcgtttaccgcgcaaactacaattcaattcggaatgggaggtgggtctggcggtgattgtgtatccccactcttggccttccataggcaccgtggagcaacagtttgttcaggttgagtggcaaacgggaaatacggtgcggattgagcttccatcatcaaatgtcaccaacccccatgagcttggcaaaaatttgtacagactcctgggtgagggcagcgatccgttggcaaaaaaggtacgctcaactcagaattctttcatgcttacgataaacaaggctcgtcggtggaccagagaagagtacattaagcgaaagaccaaagaaaaacggggcgtccgtgacgaagagctgctcctacaggccctgttgacagatactgagacagtggttgacctcaacatcatgacccacggccttctggcacgggaaaagc

SEQ ID NO: 53606 - DNA, 1215 bp, Heterodera glycines
atgatttgcatccattggaagggcccactggtgttgcaacaagtattaatttttgcatattttccttaataaattgatcgaaactgattggctccccgccggacccaaatccctaattttctgaaaaatatgctaaaaatggcaaaatttactcatttatcaacaaaatatgtttaccaatcgctttccaaaattgttccaccggcggcactccccatgttccacaaaatttttgaaaaaagtgtttcaatctcccatcgtattggcctgcgagacatcccttgaatatgtttggattttttttgtctaagaaataccagttttgaaggtctaagggaattgaagggacccctcttggggaacaccaaaaattaccgttacaattttccattttttttttgctggtggataatgtgcatgtctagaagcgtaagaatttctttgttgggctaacaaaactgaactaacaaaattttatgtttaaattgccaaaaaatccccccccccctctctctttttagttctatttgatcgtcgtttccgctttgatggcattgcttttcatcaaatatttgccggattggaccgtttggacagtgttggcaattctgtcaatttgggtattttttttcactggcattttttggctgcatgacaataactcagtttttgtttggcaccatttaaaagttcaaattctgcatcgaaaaaccgagtgctgaatttaattaaaaaaaaaaaattcgtttaattgcaggatttggtggccgtcctcagcccaaaaggtccgctgcgaattcttgtggagaccacgcaggagcgaaatgagccaattttgcccgctctcatttattcatgtaaaattttttttcttgttataaaaaaattactaggatttctgacaaattttgtttgaaaattaacaaaaaaattcaaagggcggggggagcagtaatttatccaaggtaataaataaatatttaaatatataacatttttaataaaattcagcaaccgtcactgtcctctactcatatgtgctccatggcgttgtttcttccgcttttattgtcgccgccggggtgggcacaaatggcgatgatgaagacgaacagcaacaacggcaaccacaaccgaatgatggtaggcagcagggatgggccaaatcggaaaataaaacgcgaaatttgtgaaagcaaaaaatgcgaaatgaaa

SEQ ID NO: 53607 - DNA, 150 bp, Heterodera glycines
atgagacgacaacaaataatgctaatggtaattgacaataataataatgatgatgatgcagatgagcccagccagcagcagcggaagcaatgcgcgactcaatcaatgatcagtgatcaaatttctgaccgatcagatcaatgcgccgcg

SEQ ID NO: 53608 - DNA, 233 bp, Heterodera glycines
ggcgcccccacaaagtgtccaagccacgaaatgtccaaaagagtaaaaacccacgaaatgtccaaaatttttcaaaatttataaaaacaaaatgagtctaatttcgaatttttagggttttcggggtcgctgaatacgaatatatacgaatataccctttatattaccccttgcctaaccttaggcccatctgaataataaaaactcaaattcgagacttggacattttgtgg

SEQ ID NO: 53609 - DNA, 778 bp, Heterodera glycines
atggataggcttaaagttcagtcgatccacatagaacccgattatggtacaggtattttaaaatcaataaaagagaatttatttcataaaactacaatttaaaaaaaatatgaatagagtttcaaaccaaattcagatttaaaacttaattttttaaaatttcaggtttaaactacatattgccgcagaactactctgtggacaaaattgtgttttttcttttgttgaggatgttgataattaaggtaaatgtgggaaacaaaataatggcactgtaattagtgtatgtttctaaaaataggtcgagaattgcctattatatttattagtaaaatttagcgaaaaatcaaaattttctcacttgtattgcaaattttataactttgttgcaattgcgatcaatttgttgtggaaaagaaaaataaatcgattttatggcatttacagttgacaagattcccggttctaatctatttttaaacgcgttctaatacgaaaagctgcaattaataaaaataaaacctatttaacatcagttttgccggtaaaaatccaataaagacagaaggaaatttgtaataaaatagagcatatatgaaaatttcagaattttctatacgagtatgtaatggtcaatttaacgagctgatcttcactttgtttagttaaattcttgacctttttaaagggtggttgtatacatctagaaaatggaacaatcgaatgttgattactgcagaaaagatagaccgtattacgaaaaaaaatgaaaaataaa

SEQ ID NO: 53610 - DNA, 2943 bp, Heterodera glycines
atgcaacttttgaggcaacaaaacatagagcggcgtaatgtaagcccactccggtcgccattcgaacaaaattttcgggaaaatgtgattgtaaacccgatccgtaatgaaaatcgaggacccaatcagcattttgcggatggatttggaggacaaccaaatcctaatgcccgtctccaagtttttcgacagcaacacgccgaaatcgatcgacattattcgagtgcttttcatgcaccggtgccgatgcgacaaacctgtcacggacaaattcaacaagctgcgtatatggagcaacacggtgcgcatcagcctatgctgctccagcaacaaaatatgcgaggagtgatgcatcatcagcagccaatggcggggagaaatgaatattttcctgaatattacggcggaagacatttgtatcccgacggcagagaacaaccaaactcggggaataatgaattaaaaatcggtaatatggaatatgtgctgaccatggaccgacttcccgagctaaatggcaatgagggaactgacaaaatgaaaagttttttcaaaaaattttcaaatgtcacggaagaatggccggaaaaaaaacggattaaagcgttggaatccgaagtcaatggacgggcagagcgtgcctttaatgctgcgcttaacacccagccctatcgtttcgattcaattcgacgggcaatgcaacaacagctcgaggacacggattgtcgcgaaatgagcgcattcgacgagttaatgagcggagtaaagcgaaagccaaacgaaagtctggacgcattagccgatcgaattcaaagtcttgtttcccgtgcgtacccgggcttgacgcaaaatttgtgcgatgattatgcaattcggcacctaatcagagcactgtcaaatcccgatctctcattaacgctcgaaatgtcgcgaaggccaggaatgtcgtacgatgaattcgttgcattggccgcacgcgctgagtcaattcagcgtgcaacaaaagtgcaggcgaccgaaaacagaagcaccgacaatcggaaccgaaacttttacacttcgaataacccgattagacagcaaagtggaggatacgaaagtaatccccagcaaacacgaaagggagttgtatgctataattgcaacgaaccaggccatatctcgcgtgaatgtcaaagcgtaaggggtcagcgaaacgtaaacaccggcgcagataggagtaggcaacaatttgcgacgggagcaaataacatttcactgcgaaacaatgcagacaatcagcggaatgccataagaacatatccggctgtaaaatcccaaaatttcctcaaacaaaattgcatagtgatgcaagaggacaaaccccccgatgcattttgccgaggagtgaaattgacatccgaaatttcgagtttcatcgaaaatgaacttggtgaagcaacgcagactgaaatgtctaaaggaaaggaccgggtcggaaaaattttggtgattaacgtagagacatacggcacccaaacggtagcaatgttagatgggggagcccaaatttcactgattggagcaggatttctgtatgaattgatcaaagaacgaggcttagacctcaagaaatcggacttctctcgaacgtcagcacgaattgccgatgtaaatgggcaacaattgaaatgttttggagtggtaacaattccgatcacacgaaaaggttgcagccaaataccgatctgctttcacataacaaccgcacaatttggctacgacttgcttcttggcaccaattcactttcaaaattaggatttcttctgtacgacacagcgaacaaagaaatgattgaatttgaggaaatatcccaaaatgatagcaattctgctcgggttattttttctacaaaaattcaaccccgctcaacccgcctcatcgaaattggtgttggtgatcagtggaatggaaaagatgtggtcatttctccccaaactgtgaaaggaaatgttaaagtggaagaatcagtgggaaaagttgaaaacggcaaagtggtcgcccaaatcacaaatttgtcggcatttttggcacaaatcgatgaaaaaacggaaattgcgaccgtagagtcagcagaaatcgttttcgacagtgaaaattcgattattcaggcggaaatttattcgccaattgcaaaaccgaattcggggaaccgaaatgttggcaatgactttaatgtcggcaaactttcggaaagccaaatgttggaattatcggagctcataagtggccacgccgaaatctttgctttttctgaagaagaactaagccaaaccgacttagtccagcacacgattgaaacgggcgatgcggccccgattaaatcgcaaatgcgacccgtcccttacgcttacagagaaaaaatttctgtgatgatccaggattatctaagtcgcggaataattcagccatcaaattccccttgggcttcaccgatcgtaattgtgcccaaaaaggatgggacacttcgtttctgtgtggattacaggaaactaaattctgtaacggttaaagatgcatttccgttaccgaatattgacaacacactcttggcattgggaggaaggagagtattttcaacattggattttatgtcgggctactggcagatcaaaatggatcataattccattgaaaaaacagctttttccacggaattcggactacacgaatttttggtactccctttcggcctttgtaatgccgttgcgacattccagcgatttatgacgcgccttttctccgattgccttaacaaattcgttttcatctatattgatgacattttgatcgcgtccgaatcatgggaacagcacaacaaacatctgaaagaggtgttcgaacggatccaaaacgctggtttaaaattaaaaaatcagcaaatgtcattttgcgtcaaatga

SEQ ID NO: 53611 - DNA, 1824 bp, Heterodera glycines
atgaaaattgttgcaacatccgaaccatttgaattggtttgcctcgacattttgtctatcggacccgcgcattcgtcatgcaaatacatattagtcgcggttgaccacttttcaaaatacctggtagcaacaccaatcccaaacaaaaacgcagacacaattgcgcgcgaatttgtaaaaaatgttgtcttaatttttgggacaccaaagaagattcacagtgatcgcggaaaagagtttgtgaatgaaactcttaacgaaattaccaaaattctacaaatggaaaagaccctcacttcgggatatgatccacaagcgaatggcgtaactgaaagagtgaatcagacaattttgggaatgctaaaacggtcaactgcgtcaaattgggagtgggatgaccgtcttccatttgttgtgttttcatacaatacaactccgtcagaaacgaccaacatttccccataccatcttttgtttggaaaaccggcaaattttccttcaaacatttccttaccagttaatccgttgtacacaattgatgtgaatggatacattcaattgttcagggaaaatatcgcgcatttggtcgaaaaggcgagggaacactccgaaaatgagcgccaaaaaatgaaaagttattatgataaacaggcaaaagtaactgccaacaaattcgtcgttggccaaagagtgatggtcatttttcccgggtccaacaaacgttctccgcaccataaactaatgtggaaccatttcggaccgtttaaaattacggaaattacggattcgacagcgtttgtaatccccgtcgacaagccgaacgatgtgccactgaaagtgccgattgagagaatgattagggtgcctgacggtgtccccgacactagtactcttccaaagggaaaaaacccttacaaaaatcagttgaatacaataatttgcttcgtcagcctaatttgtgaagaaaaagttgacaatggaaaagttggcggggtaggaaaaaaggaaaagttccaagaagttgaacaagaacaacttctggaaaaagaagtggaaaaaaatgccgaagttttcgatcaattcccgaaactaaagtcaaaagttggaggggaactcaattttggagcgaatgtgtgtcaattgaggacaattttttcctcagaaggtgtggaggacatggagatggacaccaccgaatttgccattacgtgggatttgcagtgtggaggacttggcccagaacatcgaaactgtgtgcagctaatcgcggctgatttggaccccgtgttggagagggccggttttggcttgaaggtgcccggagaattcaggacacggaaaaaagggaatcttgggcttaaggtcgttggaactccgttgaaagcacttctcgccacctttctgctgaagtccgatgccatttcttcctctgccgttggaaggaaattggcccaatcagtgatcggttcgcctgtcggatttgagctgattacgttcattggaagccgagaagatcaaatcaaaagcggcagaattccaaccgaagaagacttggagacaatccttcggaaatgggccgactgttgcgccgtgactcgtgccaaattgacaaaaagcggatttgggcgaattcacgtgccaatgccacaatcgatcgaagacttgccggacggtgaacgaaagccctgggctgaactgctcgagaagaccggcttcctgttggagaaagtgaaggcaacgtccgtcatgcgcaagcagcactttgtcacttcgccacgcatcattatgggcgactcaaatgctaagcaattggtagagcgttga

SEQ ID NO: 53612 - DNA, 1212 bp, Heterodera glycines
atggacaaattggggcgactggtgcagatgtgtgccacgttcccccatgtgaccttcttttggcttccgccgccattcgtccgtgatcgacaattcgaacacgaaacactgatcggaaaattgcgcgacttttttggccaaaagacgaagaacatccaattcgtggcaacaacgacgaatggccgttcgcttcttgagatttggcgctacggcaatggttacaacacggaccatgtctcgcctgagggagtgatgaaagagaagggactcaacatgttgaaggcgtggcttttgacgcaagtcaaggaatttccgggtgatcaggagttgggcattgagaagaagaagccggagagtggagagaagggaaaaggagcggggacggcagcagatcgacaacacggccgcaccgagccgcctccattccgacgcgacgggcccgtctttcgccgctcgaacagccgaccgttcgttcagcacccgtactcgcgcaccgccgttgatcgccaccctttccgcccctttcgcacgccgaatttgccgaatcccaatcgccgtcactttgatcgctgaggacatcgctcgttgcaagccgaggatgtgataattaaataatgacctcatttgacttttaaagttttaattaatttggcattttgtttatttttttgtgtctttcattttcattttatgttttttggctctcttcgcccggacttaaaaatttgtgatgcggattgtgtgtggtaattttaatggtacttttaattgttgtgttgtttaaatttaattgattgggattgctgtggctttaagtgattttaaaagtcttccttctcattcttctccttcgccccgttttggaattcggcaaaagagcagaggaggaccccggcaaaaaggcggctaattttacgacgttattttggatttttaaattctgttgaaaaggattaagaaagtcggtatcctttgctaaaaattattccaattccaaaaagcctaattataagtaaaacattaagcataaacaaaaccataatatttttttcacacaaacaatacaaaatcaaaacaacagaacaaaatttgagaaataagaatcatgaaaagtaaatctaaaaatatacagatacaaaagaaaatgctttttgctttacataatcatttacacaaacgaaaactaaattttctttatacaaataacaaaaa

SEQ ID NO: 53613 - DNA, 1234 bp, Heterodera glycines
atgccgtacatccatcaagtgcaagggttatggaacgtcaaatatcccggtgagtacaaaattttcatatttaacgattaccagatacgaccaatcaccaaatctgatgtcaccgactaccaattccccattcttctctaccacaacaacaaccactttgacggcatcaaaaccctgccaaaattttggaacaaacgctactattgcctctcctgtgaatcggcattcagcaataaaccacaacattcaatgaactgcacatcgctctgtcacggttgccgggaggtgggcgtcgactacccctgcgaagcccaacaaggctacttcaaaaaatgtttgcactgcaacaactatttctataacaacgactgctatgaacgccacctccacaaggatttgtgcaccaaatttcagcgttgcgaagattgtggggtaatttataatgttaaggttcacggaaatgtaggccaccaatgcggagaaaggttttgtcgtctatgtaagcagtttcatttaaaagaggaagatggcgagaacccctgcaaaagctgcttcatccaacccctaaaaccccataaacttaaaccatacaggatcatcgcatacgattttgaggcgacacaggataaaaaagtaggtaataaattcgaacacgaggtaaactttgcagcggctaccatcatctgcaccgattgcattatcaatgggcgactggaacaaatcacttcagggaaaaaagtgccaaatttgcggtcctcaccgctcaatcaccttttcaccctttgactacacggagacaacagtcgaccaaaaaatcatcactcaacacccgctacgcgactttgtccaatggctactcttcgaccacaacaaaaaatttcccacggttgcctttgcacactttggggggcgctacgacatgacgatgatcatcaaggaggttttggcgcaaggaattcacaatccggacatcatcaaacaagggaaccgactctacgaactcaaaattaatcaaaatgaacatggaccgcttacaattcttcacgacagctacaaccttatgcccattaaattatctggcctcatcaaatcatttgggcttcatataaaagataaacaacattttccacacatgttcaacaaatcatcaaactatgacaacattctctcccatcttcctccacgtgaacaatactgtcctgatcaaatgaaaatccccgatcaacagaaataa

SEQ ID NO: 53614 - DNA, 507 bp, Heterodera glycines
atggcatttttaggcgaaagcaaaacattcaactggctcctctgctggtggtggactatcagtgccggcgccaaacaatcggaagaaaacgccaaatcaacaacagcaaaaaggaaacaacgaattgggaggagaaggaagagaaaatggggggaaaagagaggaaaagggaggagaaaaggagcagcagcggaagcagaggaaaaggaaaagaaagttgcagttgaacatcatcaaaaacaacaacaacaaaagcaagaagttcaagcagtacagcagcaacaacaaaagcaaattttggtgggaatggagatgaagatggataacagcaaaaatggagaaacaagggaagaggtggaaaaggaaggaaatagcattggggaaggaggagagacggaagagaaagagaggaaaaggaaaaggaaaaattcggcggaaggaagagaagaaagaggagagaatgaagcagaaaagagagaggaacagcagcaaattgacactttttaa

SEQ ID NO: 53615 - DNA, 271 bp, Heterodera glycines
atgccctcatcttcccgtgccataggtgcactgttttacgacccggcaaccgaccaaattgtggccgacggcacgacgacggcacaatttgaggcgcctgcggcggcagcgaacccacggcaaaaccctttggcggcacaccctgtgctaaatgccatcgagcatttgtccgccaaccaacggcagacaacggcacggacagatggacgagaagaggaaggcgaggacgaagtgcccggggcagaattttcggcacaatatttggcaactg

SEQ ID NO: 53616 - DNA, 496 bp, Heterodera glycines
atgttggcgggtttgacaaatttgtacaccgactattggatctcagcagcaatgagaaataacaaacagaaaagagggagaaaagggcgttggctttggaaaatagctgataaaaaggagaggcgagcagacgatgagtgagataaaaatagtggtaaaaatggacaactgctgcattgcagagtcagagaggggccacaaagagttcgcacagcatcgaatatttccttcattttaggcgtcattcttccccactgcacggctttcttcggtttaattacccaagtttgaggtacttggcgtatcctgcccataatatctgtggcatggaataaattttggaactgcgctgcctaacggcggtgcttaaaatccataacgtatgatgaggtgatttttttgatttttttattttgtttaaattccaaagtgaattcgaggcccaaaaatttattcataattcatgtggtaaaaaaatggattgaaattaaataaa

SEQ ID NO: 53617 - DNA, 71 bp, Heterodera glycines
gtatcctgcccataatatctgtggcatggaataaattttggaactgcgctgcctaacggcggtgcttaaaa

SEQ ID NO: 53618 - DNA, 488 bp, Heterodera glycines
atgttggcgggtttgacaaatttgtacaccgactattggatctcagcagcaatgagaaataacaaacagaaaagagggagaaaagggcgttggctttggaaaatagctgataaaaaggagaggcgagcagacgatgagtgagataaaaatagtggcaaaaatggacaactgctgcattgggagagtcataaaggggacacaaagtgttcgcacagcatcgaatatttccttcattttaggcgtcattcttccccactgcacggctttcttcggtttaattacccaagtttgaggtacttggcgtatcctgcccataatatctgtggcatggaataaattttggaactgcgctgcctaacggcggtgcttaaagtgcgctaaaaatgatcaaatgattatcaatttttatttttcttaattccaaaatgaattcgaaacgcaaaaatttaatcataattcatgtggtaaaaaatgcatttaaaaataaa

SEQ ID NO: 53619 - DNA, 488 bp, Heterodera glycines
atgttggcgggtttgacaaatttgtacaccgactattggatctcagcagcaatgagaaataacaaacagaaaagagggagaaaagggcgttggctttggaaaatagctgataaaaaggagaggcgagcagacgatgagtgagataaaaatagtggtaaaaatggacaactgctgcattggcagagtcagagaggggccacaaagagttcgcacagcatcgaatatttccttcattttaggcgtcattcttccccactgcacggctttcttcggtttaattacccaagtttgaggtacttggcgtatcctgcccataatatctgtggcatggaataaattttggaactgcgctgcctaacggcggtgcttaaagtgcgctaaaaatgatcaaatgattatcaatttttatttttcttaattccaaaatgaattcgaaacgcaaaaatttaatcataattcatgtggtaaaaaatgcatttaaaaataaa

SEQ ID NO: 53620 - DNA, 488 bp, Heterodera glycines; identical to SEQ ID NO: 53619

SEQ ID NO: 53621 - DNA, 877 bp, Heterodera glycines
atgttcaacgacgcaacgacaagaaacgccgattcctccgaaaacgaagaagaaaatgatgacgaggatgaagacgatttcgacgaggacgacgatgatgaaccatccgacgagaagacgctgcgcgacattccgctcgacaaaattgacatttggtgcttcatgcgattgttcaaggacaaggacgaagatggacagggcgaccgcatgatttgtatcagcctggcccaggtggagttcaagcagtaccaggaggacaaccctaaccccatttgacactttgccgctttttttagcgcttcactgatgaatcgcattacattatgggagcgtcggacgctggtcaactgcccatggatgtgccgctgatctccatcaaccattgtctcgcggatttcatcaaaccggaagacattgaaggctcacgctgtgcacagtgcagcaacgcaacgccaccgccgtctgcgccaccaacgcttgtcaagcagctgatgttcactcaattgcccgacattttggtgatcattgatcacttattgattgatcatcgattagttatcccccttttttgcctcttccacagatcatttgcttcaagcgcttcatctatgaaccatttgatcaccgatacatcaaacagtgtgtgcccgtttcgttcccgttggacaacgaagatggacagggcgaccgcctgatttgtatcagcttggcccaggtggagtccaagcagtgccaggaggacaacatgacggtcgcacgcggtggtgggccgaagacaagcgttggatgcaaaaattttgtgagcgaaaaaagaatgaataacgaaattgaatttacggaaatttgttgtgaatattcgttgcaagtacatattaaa

SEQ ID NO: 53622 - DNA, 172 bp, Heterodera glycines
agctctcaccactagtccacgcaccatccccgaaagaacagcacgcagccacgggcaaaagccgcctgtttcacgcaacagcccggctgacccgacctttagagacaattcttttcccgaagtgacgaatctaatttgccgacttcccttacgctacattattctatcgact

SEQ ID NO: 53623 - DNA, 1535 bp, Heterodera glycines
atgccaattattttgaattttcattttctattattcaattggatacatttgtttagcagaggaaaagcagcagaaggaaagtgttggtcaacagaacaaaaacaccgaacagaaattggatggaaaatatgccgtggtggacaaaaacaatgttttgggtgggcacaattggcaaattatttaaaattaaaaattggcgttataaaaaaaatgcattttttgagagaggacaaaaccctcgtattatatcgggattttatacatatttggtacatatttcggacttttttcttacatattttcatttttttacatatttgaggattttttacggaaatttttggaaattctcaaaaaaaatccaaaaatttcggcaaatttttcattttttttacatagctattctgagaatttttgaaaatttttagaaatttcttgtgaaaaaattaaaaaatctttttttaaatgtacccctccaaaaataatttttaaatgttaaaaggtgattttaaacattttggtcattttatggcattttgtgcctatttaacactttatgaaaaaaaattttccaaaaaataacaatttaaaaaaattttatttacatattttcgtacatattttgggcttttatacatatttcttacatatttcgggatttttttttacatatttatgtacatatatgaccactttttgtacatattttttacagccctaattataaatatttaggtgttaaaaaattaatttttctttttaaaatgtatttattgctaatttagttgctttagtgacgtcatcgggcgaccattcgccgccggcggttgtctcagcgaaagttgcaaaggtgggaaggaaaccttaattatttcacaaatgccatttaatttcaggaagtgcctaattcgcagcaacaaaatgattgggatgccaaagtttgccacaaagacatcgaaatcattggggaaaagcaattgacgatcaattgcaagggcaacagatttggtatttaatataaaaattaaaaaatgtaattaattaattactttcttaattaggatggcactctgtttttgcgaaatttccaattacgaacttttgtcgtcccggaattttctacttcgaaatgaaagtgttcaaattgaaaaggtgttcattttgatgatttcttagcgttttatttataattttgaatttattttaacagttttgctgcgattggattcgccacgaaggaagtgccattggacgggtcaattggtcaaattttgaacagttacgggtaccgaagcgatggctcatttggctgtaatggcatcactcggccgtgcaaaatgccaatgtcattatttggttcgtcattttcccccgtggcaatgcaatcggcggacgtggaaatggcatacaaatcatcggagttttccactggtgacgtggtcggatgtggcattttcttggatactcgactgatcttcttgacgaagaatggccaacgaatgggtgggccaaattaaaatgaaaaaacaaattaa

SEQ ID NO: 53624 - DNA, 843 bp, Heterodera glycines
atgcaaaaaaatgctttaggacgcagcgatggaactgagcccaaatacgttgttgtctcaccggaaaaaagttccaattctgctgcaggtggagaaaaggaagcggaaggtgaacaagcacaagtaccagctgagcaacagccattaccaggtatttttgcaaaagcgccatatgaagtttcattaatgtgattaaatcagttgcgccagccgcggcggaagctgcttcagccgaaaacgcaccgaccgaaaatgcagcagctgtaccatcctcaggatattctggtggtgaaccggcacaggctcaagctgtagcagtacaaacagtagaacagcagcaagccgcttcagaatccgaacccactggttaaaattgatgttttctcgcttaaaaacattccgagactttaagccattggcacatccaacggcaacaacgagattaacgatgcaaacagcagcagcactgatcagcaaagcgatactgctgatcagccaaagcaacaacaaatggtggaacaaatacaatcgaagcagcggcaacgggtgcacgcgtcaaaggcactgacgccggcgcccggcacatggggatcaatgtgcaacagtgccgagttgcgacaaatgatggacagtcaaatggtgccgggcaatgccaacgcgtcaaagcgacgcatctatgaactgctcaaccgcaagcagttcacggaaggcgtcggcggtgcgcaacggttgctggacgtgatctgcgcgaacagcatgttcagctaccgaattgcaaccgatctgttttgtgagcacacaaaagcaaacgtcacttgttttgtgtaccaacaacagccgtag

SEQ ID NO: 53625 - DNA, 1587 bp, Heterodera glycines
tgtagatgctacaatttcgagttttttaacgggagaatcatgacaatacaattcatttgagttaaactctttaaagtacaattaacattctcgactatttttttggcaaaaaacaaatttatattaaatacgcaataataaataaaataaaactccattattttttttcatcgctcattgctctttccctacggctgttgttggtacacaaaacaagtgacgtttgcttttgtgtgctcacaaaacagatcggttgcaattcggtagctgaacatgctgttcgcgcagatcacgtccagcaaccgttgcgcaccgccgacgccttccgtgaactgcttgcggttgagcagttcatagatgcgtcgctttgacgcgttggcattgcccggcaccatttgactgtccatcatttgtcgcaactcggcactgttgcacattgatccccatgtgccgggcgccggcgtcagtgcctttgacgcgtgcacccgttgccgctgcttcgattgtatttgttccaccatttgttgttgctttggctgatcagcagtatcgctttgctgatcagtgctgctgctgtttgcatcgttaatctcgttgttgccgttggatgtgccaatggcttaaagtctcggaatgtttttaagcgagaaaacatcaattttaaccagtgggttcggattctgaagcggcttgctgctgttctactgtttgtactgctacagcttgagcctgtgccggttcaccaccagaatatcctgaggatggtacagctgctgcattttcggtcggtgcgttttcggctgaagcagcttccgccgcggctggcgcaactgatttaatcacattaatgaaacttcatatggcgcttttgcaaaaatacctggtaatggctgttgctcagctggtacttgtgcttgttcaccttccgcttccttttctccacctgcagcagaattggaacttttttccggtgagacaacaacgtatttgggctcagttccatcgctgcgtcctaaagcatttttttgcatttattaagcagctttatttaaaaagcaaccttcaatgtttgagacgtctcccccaccaccgcaaccaccactacagccgcttccaacatcacagccaccactacaacctcctccacaaccgctcccacatccccctccacaaccgtctccacatccccctccgcagccgcctccactaccgcaccctccgccgcaaccgcatccgcaaccaccacacccaccgccacatccacctccgctgccacaacctccgcaaccgcctccatcaccgcaccctccactgcatcctcctccaccaccacacccgcctccgcaaccgcatccgcctccacagccacctacacatccgcctccaccactacaccctccgaaaccgcctccaccaccacaaccgcctccaccgccgcaccctccgccgcaaccaccaccaccgccgccacaccctcctccgcaaccgcctccacctccgccgccaaacaatccaagtccactgaatccaccgcaccctccaccacaaccgcctccaccaccgcaccctccgccgcaaccaccacca

SEQ ID NO: 53626 - DNA, 1557 bp, Heterodera glycines
atgcaagttgccaaagtgccagagaaacggcaggcgaacaagaattgctgccgttgtggagctgccgatcattggggcagcgaatgccgattcattggagcgaaatgccgaaagtgcaaattcacagggcacattgagaagcaatgtgaaaatgtgcagcaatggcgtttgaagaacaaaggaaaaaggtttggaaacaaacgaattggacatttgcaaatcggtatggtaaatccgaagaacgaggcaaattcgctgaggaccaaaattcggttcaaccaaaagccaatcgcatttgcactcgacactggatcggatgtgaatgtcattgatgaagactcacatgtggaggctgggagcccaccgatcgaaaagtgcagagaaattggaagagccttcgatggaacgccaattcggttcatcggaaaaggcttcggcacatttgaatttggaggaattttgatcgaaaatgaaccattttacgtggccaagcgtggttcgcttaatttgttgagccgccaaacaatggacaaatttggatttttggatggcattaagcagcggatcagcgagcatgtgataaattcctgcagagccaccgatcaaattggaaagcacattttggaattaaggaaagaatttccgggtgttttcgaagatgcactaggccattgcatcaaagaaaaggcacaactcaaactgaaggaaggagtcgcgccaatttaccgaaaggccagaccggtgccgcatcattcaaaagaagtcatcgaacgtgaattggaccggctggaaggcctcggaatcattcgaaaagtcgaacatttggattgggccgcacccattttggtggtgaaaaaggcggatgggaatgcccgcctttgcatcgattattcaacagggttgaatgatgcattaatcgactaccaacacccgctcccaattcctgaagatatttttgcgacgttaaatggaggacaattcttttcgcagattgacctcaaagacgcgtacttccaggtggaattggatgaggactcgaagaaattgtgcggactttcaacacacaaaggcaatttcgccatggaacgtttaccgttcggcgtaaaatcggcgccaagcatttttcagtctattatggacaaaatgctcgcaggcttgaattttgccacggcttatttggacgatattatcgtcgcaagccgatcattcactgatcacattcagcatttaaaagatgtgttcaaccggctgcagtcatacggattccgtgtcaaaatgacgaagtgctcatttttccatgaggaaattaagtaccttggattcgtcatcgacaaaaacggacgcaggccggacgcatcaaagattaaggcaattactgaaatgcctgcgccaacgaatctttctacattgcggtcctttctgggaatggtaaaccattaccagcaatttgtgcaaaacatgcggttcgtcagaaaaccgctcgacgacatgctgaagaaggacgcggaatcgaattgggtagaaaattgccgcaaagcatttgaaaaattgaagtaa

SEQ ID NO: 53627 - DNA, 1850 bp, Heterodera glycines
cggcggttggggacccgaaacggcaatttgttatgctaaccgatgcaagcaaaattggtttgtcggctattctttgccaatcagacgaattgggtcagctaagaccaatttactttgcgtcaagacagtgcaatcagcatgaatctcgttattgccccaccgagctcgaagcattagcaatccgattcggtaccaaaaaatatgctcagtttatcacaatgataccaacaagagtgataactgatcaccgtgcacttgtccctatgtttaagagcaaaaaagagacgggtaatagccgagttgataagtggctgctagcaatgaattcccgttttattctacaagtcgaataccaaccaggcaaaatgaatataatccggatcttttgtcccggtcaaaaacgctgttaaaatcggagaatgctgaaaactgaagagtctgacaaaatcgcatttataggccaaattagagaaatacagttagcggaacacgccaaagaaattgaaaatgagcatagaaaagactgggcccaaaaatcaaagaaaagtgaattagggtttgtttatgattttttggataaacgtgtcttgccgaatgatattcgtgaccgccaaaaattgatgtcttatctacacaattataccttaatcgagggattgcttttccgaagtggcaaggaggggaaactacaattgttcgtaccacgagaattccgtgaaaagatgataagagagagacactccggtacttgtgctggacacctcagcggaattaaaatttttcgacaactatccgagctttacttttggccaaatatgttcggagattgcataagagcagcacttcgatgtcgagtttgcgcacacgctcgcaaaccacggtcaaatgctccgtcctttaaatgcaattgagacttcagaaccgttagagttggtatgtatcaacattttgtcaattgggccagcaaattcgtcgaaccattatattttggttacgattgaccatttttcaaaatatttggttgtgaatcccattccgaacaaaaacgctgaaaccgtggcacaaaattttgtaaaaaatttcattttagtgctaggggcgccaaaaaagattcatagcgacaaaggcaaggaatttgtaaacgaaacactgactgaaatttcaaaagttcttaaaattgaaaaatcgaccacttcgggttacgaccctcaggctaatggtgttacagaacgtgcaaatcaaacgattttgggaatgcttaggcgttcgacttattctgcctgggagtgggatgaaagacttccattcattgtttttgcttacaattcaaccccatcagaaattacgaaaaaacgactgagagaagtgtttttcaattgagggcaattgattttttaggcggtacggacgaagcaatggaaaccgaacagcagaaaggaaaggcaaacattgaggaggacacaatttatgtgctgggagaagatgaagccgaaacgccaaaagtgatttcctggagcacgtgttgcactggtgatcagcacaaagactgcgcggaccttttaatggctgatctggatgctgttttggaccgttctggaatggggcttctcaaaatcgacaatccgctgaaggccctgctcgccaatttcctgctcaagtcagaagcggtgaaatcaggatcggccggaaagaagctgattttgcaaattttggaggcagaagtcagttgggagttagccacttactgcagttcgagagaagacgacgtaaaaagtggcgcatttccgtcggaatcggacgtggaaaagacattggaagtgtgggcacgagcactgccaaatcgtgaatga

SEQ ID NO: 53628 - DNA, 502 bp, Heterodera glycines
atgtcttctggttctagtggtcccgaagaaggtgaaattggggccgaactctttgcaaatgaagcctttgaagaagcagaggaaccagctggtcttgtccaattttttcgagcagaaagcaagcgtggccgagagttaatcagaagcggcggttttgaatatgcctttgaagcggacagcggacttcaagaaggtgcaaaccttggaattttttgtccaaaccccaaattagggatcgaattttggcactgtatcaatcgccccccgtattgccctgggagagtgcatgtcagttcagcttggcaccacgataatcaggggcgtgcttacaaattggggcgaattgttggaagagatcacaatcatccagttaagcacgaatctgtcagagatgcccaaaaaattctaaaggaaaacgcagaggccgataatccaattcccgcaagggatgctgtgactcaggcacgagcacaaatgcctgcagatgtccgagccggacaag

SEQ ID NO: 53629 - DNA, 393 bp, Heterodera glycines
atgccgcaaactgtggtggtggaaaatttgtcggaagaaagctttttgcccgaggaagactacagtgtttatgtgaaaggggaaacggtaattaattaattattcaactaattaatcaattatgctttaatcacggcgaaatttaaccgcccaattaaataattttcacccattaattattgttgaaaatttcataaaaaattgttcagatcacttcgaaaatgatctttgaggacagtgcccgagtacaggtaaaaaaaatggcattttggcattgtgtcatgccaaatataaattcaaccattaaaaaattggtgaaatttcagtgcagccaaaagagcgtgtcaatttttgtgcagacggacaaagccatctacaagccgggcacaaccg

SEQ ID NO: 53630 - DNA, 776 bp, Heterodera glycines
atggacatgttcctctacgacacacaaccagctgtacgcaattaagcgaagaaaaagcatcggtttgaccaccccaattattttttaaatttagactttgtccggactgaacgaagaattcatttccggcgctcggctggacaatttggtctccacgtacaccgccatcaaaggacttgtcgaaagtttggaggacaccgaagcttttgatacggacccaaatgtgcgaatggtcgcctgttttgacaacgaagaggtgggtgtagacaagaatcttaatttcgcatcatcgacaccgaaaagttccgtaatttgatttgtctctgataaatgctgcatccggacagagtttgcgggaaaacgacggggtgggacgacctgctccgccgccggttctcccgccgtccccccccccccactcccgggtcgtttcctccccgaaaaactttttaaagaaattttttttaaattttcgtggtgaaacaatgtaggggaaatgaattgcacccgtatccggggaatgggtttggacttggaaaggggcggggtgattggtgggtagagcaacccgtggaagcgaataaattttcctccgtttttaggttggcagtcgcagtgcccagggggcccagtcgcactgtttcgagtggttgctgcgccgcgttttgtcctccgtcgaccacccaaccgcctttgagtgttccatcggccgttccttcatggtcagcgctgaccaagcccactcggtgcatccgaactatgcacacaaacacgag

SEQ ID NO: 53631 - DNA, 831 bp, Heterodera glycines
aatttaaactgaatgtgatctccccctgattggcaattagcccacgtggtcccggcactgatccacaagtgctttttggccaagcgcgacggcggccctttggtggttgccggctcgggcaaaccgttgcggcaattcatttactcgttggacctcggccgtctctttgtgtgggcaatccgcgaatacgaggtggagtgttgtattattttctttgtaaggcttcattaaattccaatttccctgtcggaacctgtcgcaccgccggacccccctaaaaattacctcaaatttttaaatttatccaaaaacaggacgtggaacccatcattctgtccgttgacccttccgacgaagtgacaatcactgatgtggtcaccgccattgtcaaagcaatgcaatttaaggtgaaataatgtgtaatcaattaattgctgctcgagaatctcggttcttaaatcgagaaatttctcgagtcctttgggtctggcctgactttcgactatttactgacttttcttacaaaccctaaaggtagctttttcctaaaattttaattttcttaaaaaagctgcttaaaatcgcaatcgtccgtcgtatggcccttgctatggagatactccttttatttgtgtgtgttttatgttttcctcctccacttttcagggcgaagtcattttcgacacgaccaaggcggacggacagtacaaaaagacctcgtcaaatgccaaactgcgcgcccggctgcccgacttcaaattcacacccttcgaacgtgccattgcggagtctgtgcaatggttcgaggccaattacgagaaggcgcgcaaa

SEQ ID NO: 53632 - DNA, 1223 bp, Heterodera glycines
gcggcaattcgtgtgctcgtgacgggtggcaccggactggtcgggtcggcaattcaacaggtgctcgtggcgacgggttgtagggatgccgaaatggcacgccaggcctctcaatgatggcaaaatgacaagcctggttgaggagggcacttccattcccccgccctccgtattaattttgtcgttgaattttgaatttgccaaaggtggtgacggaggaagagcagcaacagaagccccagcggctgcaggagcagtggtttttcgtgggcagcagcgagtgcgacctgaccgacttggagcagacgcgggcgcttttccgccgcgttcggccgacgcacgtggtcaatttggcggcaatggtcggcggactgttccacaacttgcgccacaacctccaattctttgtcaagaatttggtgagacagtgccaaaaagaaagaaagaaatcccacataccgtatccatttgggtttactgtattttttgaaagggatgtctcaatcataggtgggatgtttgttctatttcagaaaaccgtatcttaattaccatatgtcttcccgaaggcgatctgtcaaaatgttctccaatgctgccatgagactgacgtggaacggtgcgtttcgtgcctttccacgtgcattttccccgacaaaacgccgtacccaattgacgagacaatggcacgtgaaaaacagtgcagaaataaataatcatgtgtttattaaagagcaattaaatccctgataattagggctgtgcattgtatcgactaaaaggaatttgacaaagtaaaattcctcataaaaatatatctcataaccatgactggaaaagttggattttccaaaaatcatacgtgggtgaaaaatttaaacattttatatgctttatgttccaaagttaaaaaaacttgactggcaatttttgcaatttttagtccatacaatgtgccaactacatgatcattataatgaattatgattaattagtgatcattatggaataattatacacacagaaatactttatttttaaatgtttagcttattgttatacattttcaggtgtacaatggaccgccgcatgacagcaattttggctattcgtacgccccacgaatgatcggtgggttggccatgatcagctaaataagtcgaatttccaataaactaacagatgtgctcaaccgcggatatgctcaggagcacaatcgaaag

SEQ ID NO: 53633 - DNA, 2852 bp, Heterodera glycines
gcaattcgtgtgctcgtgacgggtggcaccggactggtcgggtcggcaattcgacaggtgctcgtggcgacgggttgtagggatgccgaaatggcacgccaggcctctcaatgatggcaaaatgacaagcctggctgaagatggcacttccatcccccgcccccccatatttattttgtcgttgaattttgaatttgccaaaggtggtgacggaggaggagcagcaacagaagccccagcggttgcaggagcagtggtttttcgtgggcagcagcgagtgcgacctgaccgacttggagcagacgcgggcgcttttccgccgcgttcggccgacgcacgtggtcaatttggcggcaatggtcggcggactgttccacaacttgcgccacaacctccaattctttgtcaagaatttggtgagacagtgccaaaaagaaaaagaaatcccacataccgtatccatttgggtttactgtattttttgaaagggatgtctcaatcatgggtgggatgttctattaaagaaaactgtatcttaattaccatatgtcttcccgaaggcgatctgtcaaaatgttctccaatgctgccatgagactgacgtggaacggtgcgtttcgtgcctttccacgtgcattttccccgacaaaacgccgtacccaattgacgagacaatggcacgtgaaaaacagtgcagaaataaataatcatgtgttttttaaagagcaattaaatccctgataattagggctgtgcattgtatggactaaaaggaatttgacaaagtaaaattcctcataaaaatatatctcataaccatgactggaaaagttggatttccaaaaatcatacgtgggtgaaaaatttaaacattttatatgctttatgttccaaagttaaaaaaacttgactggcaatttttgcaatttttagtccatacaatgtgccaactacatgatcattataatgaattatgatgattaattagtgatcattatggaataattatacacacagaaatactttatttttaaatgtttagcttattgttatacattttcaggtgtacaatggaccgccgcatgacagcaattttggctattcgtacgccaaacgaatgatcggtgagttgcaatgatcagctaaatgaaatccttcaaattcgcattaaacaaacagatgtgctcaaccgcggatatgctcaggagcacaatcgaaagtgcatcgaataaaaaattactgtcttttatttttaattgaataattaaactttctctctcttccccccccctctctctctctcccttcatttgctctctctttattccgttctctctcttccctctctctctctcccttcatttgctccctctttatcccgttctctctcttccctctctctctctctctctctcccttcatttgctctctctttattccgttctctctcttccctctctctctcccttcatttgctctctctctcttccctctctctccgctctctctctctctcctctctctctctctctctctcccttcatttgcactctctttatcccgttctctctcttccctctctctctctcccttcatttgctctctctttattccgttctctctcttccctctctctccgctctctctctctctctctcctctctctctctctctctctcggtcatttttggctcatctattctttctttatcggactcgcactctctctctttttctctctatcctctctccctccccactccctctctaataattaccataattggtttgattctcgacatttttccaatgctcaaaccaaatgggcatgggcacatgcttttccaaaggtacacttcggcagtgccgtgcaatatatttggaccgcgtgacaattacaatttggagaacggtaaaaaacagacaaaaaatgtacacagaattattattttttaattctgaacatttcttacattccggcagaattttcagtgttttaaatttgtcattaatattttaaatttaaactgaatgtgatctccccctgattggcaattagcccacgtggtcccggcactgatccacaagtgctttttggccaagcgcgacggcggccctttggtggttgccggctcgggcaaaccgttgcggcaattcatttactcgttggacctcggccgtctctttgtgtgggcaatccgcgaatacgaggtggagtgttatgtttttgtatatgatgattaatcattgggaatatattaaatcgtcaatgtcgagactggactttaatgagcacatttcgtatggatatgagggaccaaagagcaattgtattcccacttctgaaattattttttcggctacggccttggcaaaattattacctaaaaattgtcacacatctcttaattaggataatagatcaactaatgatctattaattttacttgtggtaacttttcaaaaccaaacaggacgtgacaccaatcattttctgcgttgaccctgccgacgaagtgaccatcgccgatttggtcgacgccattgtcaaggcaatgcaatttaaagtgagagccgagaataatcgtacggcacttggaattactcgaacatctctcgagaattctttttttttcatttttcaataaattttggcacatttcatctcttcctcctccacttttcagggcgaagtcattttcgacacgaccaaggcggacggacagtacaaaaagacctcgtcaaatgccaaactgcgcgcccggctgcccgacttcaaattcacatccttcgaacgtgccattgcggagtctgtgcaatggttcgaggccaattacgagaaggcgcgcaaa

SEQ ID NO: 53634 - DNA, 1216 bp, Heterodera glycines
  unsure (1)..(1216): unsure at all n locations
ctcgatggatctcagcgaatatgccaaaagtgtcagctcaatttgggatgtgatcggtgagcattggtcagaaattgtcaaaacattcattaattgtgcccaatttgattgtccatttttacccttttaaactttgtttcgataacttcattacagtagcaaacgatattttgaactgtagcgataccgtattcccttcagatgctcccgcttcgttggtcaaccgacggtaattcttttctttctttcactttttgccaattttcgccttttctttttgcccatttctttttgctcagttcccgcattgaataccaacttcgaattcgtcgtaaaacgttgttctacaccgttgtgctgatcattcccacgggtttgtccgatttaattggtgcaaaatgccaaaaactgaaaatacaaaaaactaaaattgaaaattccttttatttttgacagttctaatggcctttctcagcatggccgtgttctttctgccgaccgactcgggcgagaaaatgacattggtcaaatctatttgattaaatagtcaattggagggtccttagttggccaattgtcctttcccttgtccttagttggccaattgtccttgctggtgtccttagttggccaattgtccttgcaggtgtccttagttggccaattgtccttgcaggtgtccttagttggccaattgtccttgcaggtgtccttagttggccaattgtcctttcccttgtccttagttggccaattgtccttgcccttgtccttagttggccaattgtccttgcccttgtccttagttggcaaattgtccttgctggtgtccttagttggccaattgtccttgcaggtgtccttagttggtcaattgtccttgctggtgtccttagttggccaattgtccttgctggtgtccttagttggctaattgtctttgctggtgtccttagttggccaattgtccttgctggtgtccttagttggccaattgtccttgcaggtgtccttagttggccaattgtccttgcaggtgtccttagttggccaattgtccttgctggtgtccttagttggccaattgtccttgctggtgtccttagttggctaattgtctttgctggtgtccttagttggccaattgtccttgctggtgtccttagttggccaattgtccttgcangtgtccttagttggccaattgtccttgctg

SEQ ID NO: 53635 - DNA, 419 bp, Heterodera glycines
gacacctgcaaggacaattggccaactaaggacaccagcaaggacaatttgccaactaaggacaagggcaaggacaattggccaactaaggacaagggcaaggacaattggccaactaaggacaagggaaaggacaattggccaactaaggacacctgcaaggacaattggccaactaaggacacctgcaaggacaattggccaactaaggacacctgcaaggacaattggccaactaaggacaccagcaaggacaattggccaactaaggacaagggaaaggacaattggccaactaaggaccctccaattgactatttaatcaaatagatttgaccaatgtcattttctcgcccgagtcggtcggcagaaagaacacggccatgctgagaaaggccattagaactgtcaaaaataaa

SEQ ID NO: 53636 - DNA, 80 bp, Heterodera glycines; identical to SEQ ID NO: 51817

SEQ ID NO: 53637 - DNA, 80 bp, Heterodera glycines; identical to SEQ ID NO: 51817

SEQ ID NO: 53638 - DNA, 624 bp, Heterodera glycines
gggcagcgcgaggccgaactgttcggtctccgacacattggcgacggcacaccgttggagcagaagcgagtggagcaagcggcgaatgacaacaacgccggagacgaagcgcaaactctggcgaacagtgcggagacgacgagcgaaaagcgcgaagcgatgcacgactggctgaacaccttcctgccgctgcttcatgccaacaaattggacacgcaatgtgccaaccagccccagtccgagtcgacgcggttgttcatggcgttgaaggcgcaggacgacgcgagggagggcaacgacgacggaactgctgctgctccgcatgaattgttgttggccaagcagcgaacgacggtggaggaggagagcagcgagttccgcttaagaatggggtgcgttgctttgatcttgactgtgcttgtttgtccgagtaaagtcgggaaatatgatatgccgccaatatcaaaagggctcgaaggaagaattatgctcctgtattaggtttttcatgataaaataagcatttatttgtcctatgtccaccatttttagccttgtgctcgatgatttcacttgtaagggttcggccaagacggtctcggagaagcggacgatgaaagacgg

SEQ ID NO: 53639 - DNA, 1268 bp, Heterodera glycines
atgcaagcaacaatggttcgcacagtcggtgccatgacacgtcaacatttttacgattatctgcatggaatcaagacaatgatagggaagctgcagagagaaacaacagaaatgatgaatgctgtaaatgcgccgctcaacctcctcaattatgatgcagaaatttatgttccgcgaatcatcgattggtggaatgacgaaaaatttgcgaggcagtggaaattcaaggcgtttattttcggatcagcagggcattacaagccattgtttaaatatggggcggatgactacgatgtgtcaattctgttgtactttgatgagggacactttaatggcgtgcagaaaaatggcaatttgtttggaaagccgtattgcttgagttgtgaagggacttatgatcgaccaaaacggcactccaaaagttgcaaagcccgctgcataaaatggtataaaaaatgtaataacaaaaaatccctattttattagctcacaaatgggaccaattttcccatgtaagccaatcgatgggtttcgtcaaaaatgcagcgactgcaacaaaatgttcttcaaccaagcctgctaccaacaccatctttcgttaaacttttgtaaaacgagcaaggaatgcaaacattgcggtgtggtgtgggacttgaacaacaatacaaaaaatggaagagaggtaggttttgttttttcatcaaatttttttgctttaaggaattgttttttttaagggtcacaaatgcaacgaaagatggtgtgaaaattgtcaaatttttcatgaatttgagcgaggctgctttataagaccgcttgaaccgaaccacaagaaggaaacaatgggatggcgtctggttacttttgacttggaaacacacaacacacgcctatcgacccggattttccgaaaaaaacggaagcatcaagtcaatttcatgaccgcaaaagtcgcgtgtccggattgtatttcatcagggagatggaaagagagtttgcgtggcaaattctgcaacgtttgtggctatcaccgaacagtcacattcagccagatgccttttcatgagacaacagtcgacaaacaaaatattgaccgtcaccctttggttgcatttgtgaaatggatactttacaagctgccaaaacaatacgacactattgcttactcacattttggagggcgattcgacatggtcttggtctttcgagaattattattggaaggattcaacccttcaatgattaaaaagggaaatcgattgttttag

SEQ ID NO: 53640 - DNA, 269 bp, Heterodera glycines
atgaacccaaatgtgactttccgagactcatggaacttgattccggggccctgggcatcgatggtcccaattggtcgggttttgaatgtgcaggacaagcccttttttcctcacctggcaaaccggcctgaaaaattacggatgcgatctcttccctacaaagctgactacttggcagacggaatgaacatcgcaaagagaaaagaattcgacaaatggtatccagagaacagaaatgcaccctttctgcttgatgaatcattggccag

SEQ ID NO: 53641 - DNA, 886 bp, Heterodera glycines
atgacaaaaagatccgccggggcagatggaaaagctgatcgggctgcatacaccactccacacaacggaattgatccaatacggcactgtattactatcgcttcagcatgtatgcggcattttcggacaaaccacttgaaaccagcacacttggctctcgtaccagaaaagggatatgacagtttcggggataatcaaagcgatttggcactcaattttatggagtggtatgcggaaaagtttgatgttcaaattcaaaatgcatattcagccaatggcgaaaaaaggtagaatttgtcgaaaatacaaaaaatgggcactaattttaagggttggaaatttccgtcttgatggatggattgaatctcagcaaaaggggctcgagatccatgggtgcatttggcacgcatgttccaactgttatccggatgataacgaagtgctgccttgcggcaaaacagcagggcgaattcgcgagaaaaacaaacgacgaatggaaatcattttggaacaagtcccaaacgttgagattttttggcaatgcgagattgagacaatgttggcaaaggacaagcaaatgaggaaaaaattcgacgaatataccggtgacgggggaccaatcgatatccgggcatcattcatgggaggaagaactggggctctgaagctttttcacgaggcagcggaagggcagaaaatcagctattatgacgtcacaagcctctaccctttcataaagtctattaattttcgttttttcctttatcaattttttcagttttacaacggattacccaattggtcatcccactcttcacgtcccgtgtgaagaagttgattggcgacggccagaggacaatccatacccattggccattctcaaagt

SEQ ID NO: 53642 - DNA, 837 bp, Heterodera glycines
atgtgcctgcctgaccacgattcagcaaaaatctattgccaatgccgagatatcaaacttgaaccagcactcgccgatcctgagaagcgcctgccaattcagctcaaaaacttgcttattcgaaacgaaaagcgggatatttttgccgaaatcacctacgcgccaattcagttgtccattcaattcgaggggcttcgaatcgccacggaagaggacctaacaaaatgccatgccatgtccaagggtcttttcggatgctattcgtgccacaatggagcttatctccatttgcaatgccacaccgactttggctccgcacttggctacgttcgttgttcggatggcacagaattcacagccctctgccacaaaacaccagaagttttgaatgccagcctgtcattcaaccgtgccgaggtcgacatcaattgtaccattgaatgcagtggaggacggaacccattcgtgattaatggtcatctccgctatgtgccaaaacacttccaaacacctaatgaaggaagctcatttgcctcgaaggccaaacccagcaactcatgcctaatttggtgcccagattggaacttcgacttttccgatgtcttttggtacttcttcgggctacaaaatgctcttcgaaccattggaatcatcactctggccctcttcatcgtctatgtccttttgcgttgcaaccctgcccttcgatcttggagagccataagccgaatcgtccttttgttccttgctctttggcctacgactgattcttctgcagcgggagggctgagccatctactcagcattcaaaattcagcaccaaagctgcagttttaa

SEQ ID NO: 53643 - DNA, 479 bp, Heterodera glycines
atgcggggttaatcccgcgggaatccgtcccgtaaaaaaatttgagttggacctgcaaatttgaaatttcggtctctaattttaatgcattaattatatcttttgttttaattttataatttattttaaagcttttgccagcgcataaaccgattttgagggtttcatccgatgtgttcgacgcaatgtttcgatttgatgagcaaaaaagttgaaaaaataatttataataattttattttttaatataaatttttaatattgtcagaagaggatgaaaaccctattgaaatcccggacgtggacattgaagcgtttaaaacgatgttgaactttatttatacggacaatttgaacgcagtgaacggaaacaatgccatcgatgtgctttatgacggtaaaaaaaagaaaaaaataaataattatttttagtattttatgatttacgacagggatggagctgattatacaatattaaa

SEQ ID NO: 53644 - DNA, 1385 bp, Heterodera glycines
atgaaccgacggtaatgagttttaaaaattacaaacttcatttaactactgttttcccgcattttcagttggctgtgcagcgacatttggatgaacattctgccgttttttggtcgtcaccaactcggcctcaaattggcactgatttcgccacgtttcgacattttagtggacaaacatttcgatggccaatcacaatggacacttttgcgaccaatcaaaattcgcaaaaacaaaaccatcgcttcgccagaattatgtgtgcttagggctgccaattacgcaaattttccattgccagaatatccgttacccagcaaaattcgctttgattgccttgcgataaagtaattgaaattcaagcattttgtttgacagaagtattcacctcttttcaggtacattgattattctgtgctcgcatttatccgtgccaatcagcaaatttgggacaaaggcaccaagttgcgtttgttgctaccatgtacttcaccaacaacaaatgtcgagccagtttgggataccttcgtcagtcaaatttggcccatttttgcgacaaacattcgccatttgacatttcgaaattctacttatttgaccaaattgcttcatctcatttcgccgatcattctcaccaatctcaccaaattggattcaatcggtgttggttcttttaaaccagaccaaattgatgaagatttcgacgggccaaatgcaactccaactgctggccaagtgttgtccgaatggttgcacgttccgacaaaagatggacgaccgaagcgattgttttgctattttcatccgtcaggaaacactcaatggatcaacagtttcaaagaagtgagttgcccatttccgttggattgattgaaatttgtttttgattgctattcattatccattttttagctatttctccgtgccacttcttctgtctgctacaaaattttcatcagaactaaagcgacatttgagccatttgaattggtgaatgaacggaccaacgaaaagctgacaatgccgaaaccaaaagaagagaaattggccaagcaatggattatgaagagatgtgcaattggggagacggcggcggttcaatgggaggacaatacggacaatttgaacgatgtcacattttgtcttcaaaaagttgaagtttgcattgggtgagcaaaaaagtgcattttttcttttattgaatttgaattttgcgcttaatttaggccagtatctccaccaccgacagaagaagcgggacaaagcgtcgaaaaggagggacaaagcagcgaaaaagagggacaaagcagcgaaaaagggacgtcttctgacaaatgagcgacggacagaacaacaaaaacaacagtgatcagcagaagaagaaa

SEQ ID NO: 53645 - DNA, 532 bp, Heterodera glycines
atgtcaactttatgctttgcgatgccaaacgatgcactgggtgagcaacagggatggcacggaattcgaccccctaaaaagctttggacgtcgaaattccgatttctgaaaaaatttggaagtcgaaattccaattcccaaaaaggtgtcaatctgaagctcttgatgagacaaaccgatctagggcttaaagtagttgatcagaagaaatccacaaagaaaaccctttactttacaatagccaaaaaacagttgatttcgtttaagtaattcaaattgcgccgaatttttaggcctttgtctccaccagcggcaaaacagcgaaaatggtgtctaattatgtgagagtgactactcgacttttgaagaacagacagttgaggacattcacattttatttatataattataagaaatacttcccgaagggccaatggaagtgaatataaaattatttcttatcttggatcatcccaggtttccaaaagcattgagcttgtgtatgttcttttttataatgctataaaataaa

SEQ ID NO: 53646 - DNA, 2222 bp, Heterodera glycines
atggcatcgcccgtcgaaaaaagaaacgaattttccggcgccgttatctcttctagcattagtgaaaatcagcagcaatcgctgggttcatttgtaaaaacatcttttggaacacgacggcattggtaacactgaacataaagcaactaaaaattgccaaggaggggaggcagtaaaaacttgaaaagtggcgattttgtggcaattagtgcgtgttttacatagaaaaactaagttttgagattgagcaattcaaaaacttatgccacagagattacaaattttatttccatatctatgttaccacttttttgcacaaaacaataaccatttttttggtttttgacaaaatttaaaaatttatttgacctcagtaccgagaaaatatattttttaatgtttttactcatcaaaaagtcagaaaatatacttttcccctgtcattttcatctggcaaccctggttttaaaagtaccaaaatacgtgctcagtgattctccaatgtgctgctcataattaggaaatccaattaggtatatggaaatccatatttttttcctggactgtgggaggcctgaaacgcatgaaaaacatgtttttagcttggtttgaagcttctaggatggatttctatatccatattttccatatttcgcgatttatgtccatatttgtccatattttggcattattatccatattctatgtccatattttgacatttttccaaaaaacctctattagaaccgcccctatcaactaaattcgtctttttgagcccctaaagacaagaaaattttcaaaaaataattttttagcaaaattttcttgaaaatcttaacaaattaaattttctcaaaagtggttaatttatgtcaaaaataagcaaaaaagcgaaaaattcgccatacgggttgatttatcattaacatgagtaaatttttgctttatcgtatgttttttcttctttttaatgacctatttaagcatttgtgaaagttttactttacatttaatgaatttgaagaaattttgtaaaatttacccctcaatttggaaaaatttatgtccatattttgcaattttatctccatattttgagattttcgtaattttatatccatatttctcgattttatatccatatttttggcatccctatttattgcagtttgcttaagaaattaaaaaaaaaattgcggaaataaattcaaaatctggaatcgtgccatttctatggcttttgtttgttgttccgtcgcttgcaactagagaccggagcaggaccggatcatgcgcaggattttgccgggttccagtccgcaatcccgcattttttgaaaaagcgggatttgcaggatttacgggattaatcctgccggatccggaatagctaagtaattctctaccattttttttgcgtgtttcagttgggtgtgcaacgatgtttggatggacattttgcccctttttgaccatgcccaactcggcctcaaattggcactgatttcgccacgtttcgatgttttagtggacgcccatttcaatggcaaaagcgaattgacaattttgagacaaatcacaattcaaaagttcaaaggaccaaaagcgaaactgtctgaatggatcgatgacaaatgggtggcatttcctttgccggaccgtccgctgcccacaaaattcgttttaggaaccttcggattgagtaattcaaacataaagggaagaaaatcactcctttttcaccatttttcaggaaccccgaccattctgtgctcgcatttctccgtgccaatcagcaaatttttgaaaaagccaccaatttatgtttgtctgtttcttcatgcttccatgattgcctttcattattcgtcgacaataatgtccagccgatttgggatgtttttgcctgtgaaatttggccgatttttgcgccaaacattcgccgctttaactttcgcgatggtgatcatttggacaatttgcgtcgccgcatttcgccaacaattctcaccgatctcaaccaattgaattcaatcaattctggtgatctgttgcccgatggcatcgctgatgatgggccaaatgcaactgctggccaagcattggccaaatggttgcacactccgcgaaatgatggccaaccgaagcgattgcgttgcggtggtggttatatgtcaaaaactgaatttgtcaacattttcaaagaggtatggccatag

SEQ ID NO: 53647 - DNA, 974 bp, Heterodera glycines
gtgaccatggacaccatcatcgacgcaatttgcgcctccaaattgcccgtgtcgcgcattctgtgcgaccagatccgctcggtgggcaagtcgatgctgctggtcgggccggtcgagtcgtccaaatcgcggacaaagtgagtggttttgtgtggcataatggttcatttggttgtctaatgtgaaaaattaagggtgagggttagcaaaaaaaatcaaaaaatgatgcattttgctggatttttgaaccataaaatttgaatgttttgtaagctagtcgtgccaggccgttaaaaaaaataaaattttgtcggttggttaaaagttttgaattttggcggtgaattgggagtagtccggcggtaccaacaaacgggagcagctcgtttcccccccccccccccccccgccgttaaatcttagtaattcaccataaaaatttctcaaaaaattttttcttagaattttcctatgaaaaaactttctaagatttttttcttgaaaaatttctaagttagcaaatttttttttacaaaatttctcgggggggggggggaaacgtagtgcacccccaacaagctgccttcagatatttgctatcctattatgcataaatcgtgttctaatttttgcgccttttttcattgaaaatagcataagaagcaggtttaaaaaactgacaggaaatggatttttgaaaaaatcacaattcttcaaatagtgctttataatattaattttggtttgggttaagccccgctccccaataatttattatctgcggggtcgtcacttaaacctaatttcaattaaattgcccaattttttaggttcaacaattcattggtgattgccgaagtgttgggcattgaggcggcacggggctcaatcatttccgaaattttggccataatgggaaaacacggcatcgagttggacagacagcacgtgttggccgatttgatgatttatcg

SEQ ID NO: 53648 - DNA, 1066 bp, Heterodera glycines
atgacttctcgactgcttgagcttgttcaagcacgaaaagacaacttgtttcctggttctcgtcatgccgaagctggacgaatccaaaaagaggcttggtcgactgttactgaaactttgaattccgaatttccgatcgacgttcccgcgggtggtctgaaggtacaacaagtgcaaacaagatggaaaaatcttcgtcaggccggaaaagaagaagcgcaaaaaataaaaaagtaaaatcattttgaattattcttatgtgcatcggaacactaggcaccgccttggaacgggtggaggaccgcaatcatcggtttctgacacttcgaaaaaagttattgacatgtttggcacatctgctgcttttgccggagtgccaggcggcggggagactagcactgcccgtggtgatattttgcaaatggaaagtgattacctcggtgccgacccatttgttcccggaaaaattttcgaggaagacgacaaggaaattattgaaatgtcgagaatgccaattacgccgttaatcatcaaaaaggcattaaaaacacttcatttataaaaatttagaagagaaaattgataattaattacatttgtcaatttattttattatataataaaaaggcacccgacaggcacgctatgactctccagcttttggccgtggaacaccgatttctcgtgggtcgtcacgccctccttcttcccgtccatcatcatctgacattgcggagcttcaattgaaagtgcttcaaggcgatctcgaacgaattgagcttcaaaaacagctgtgcgaagatgcaaaacaatttttgaaggaaggaagagacttttttgcaaaaggagcaaaattttatgacgagaaaaagggggaaggggaggggtaatgagcgatcagtatttttgatcagaatttatggtgcattttaaacaccaataataattatttttgataattttttatcatctataataacataaattgagatgtcgtttgcctgttttattccacccgcagggcaagattttgaaagcaggcggttgcgtggtgtcttgctgggta

SEQ ID NO: 53649 - DNA, 475 bp, Heterodera glycines
atggttcactatccaaaggacgtttttaaagaagtctcagacttatgctcgaaaaacagagaagaccgagcggctgtgtatggtgtcttagaagaaaattttggtctaaaaattataagattaattaactaataaaaattcattgtccagaaattggtatcattcgcatctgttggtgcagccaattttgagcctgaccatgtggaacatctgatcaaggaaggacacagatgtgccagcggttgtccaatgcgaaatgcacccatttcttcagcgagaagatctacttgattactgtaaaagcaaaggcatttttttgcaggtaaaaactagggggtaggtagtacacgatcgctatttatcagtagggcgaggattttattggtgaaaagtccaaaatagggacctaaataggggcaaaaaattcgcgaaataggggcgaaaaagtttgaaatgtaggggtgaaattattaaa

SEQ ID NO: 53650 - DNA, 101 bp, Heterodera glycines
atgtgccaatgcagtgactgcggagctgaaaagcaattgggtcatttggagaaggaatgcatcccatacaaaaagtcgttggagcatttgtttgcgccggc

SEQ ID NO: 53651 - DNA, 835 bp, Heterodera glycines
atggttgagcgtacggtatgggaatggcagaaggtgaacacaatgaagcccatttggatgcgaaagccggcggaagtggaggaagatgagtacaaggagttctacaagtcaatcaccaaggactttgacgagccattggtcagtcagtcacagttttcgaaaaaccgggaaaataatttttgtcacaaatttatttgttgcccgttttttaaggcccatgtgcacttcattgccgaaggtgaggtctccttcaagtccctgctgtacgtgccgaaaacactggccactgacgcattccaaaactatggcaaaacggaggacaacatcaaggtgggttgaagggggggacggggaaacccaaatgaaatttcaattttaaatacaaacctattttaaaatgattattttaattaaaattctatcaatagcacacggcaaaaataaaatttttatgcccaaaaatccacattttgtctaaattttacattttttcccatgattctatttcctggcttggttttcatgcatttgtccttgaatccgtataaactgggtccatggtgtccttaactttatcaatttttaacaccccccccccccaaattttcagctgtacgttcgccgtgtgttcatcaccgacgacttccaagacatgttgcccaagtatttggcattcattcgtggtctcgtcgactcggacgatttgccgctgaatgtgtcgcgtgaaatgttgcagcagcacaaactgttgaaagtgatcaagaagaagttggtgcgcaaggtgttggacatgctgaagaagatttcgcccgaaaagttcgacgagttttggaag

SEQ ID NO: 53652 - DNA, 2359 bp, Heterodera glycines
atgcaagaagcctgtgcagaaatgtcaaacctcaagcggctacagcactacttcgcgatgctgcttgcgcacgcccatccgtccaaccctcaggcgctgttcgacgagttcctcgacgagatgaacccgccgacggctgcaaaccacccgggagctgtgccaaagtctgccgaagtccgcgcggctgaggtgatgctcaaccttgagtattacttaaactgcatggcaacgaacaccaagtgagtaaacttggcataataaatttcatatttaaaatattttaaagggacgttgggctcaaaggactaccagtgggctacgactttcaacatcaggcacagctcctggaggaggacaacatcttggacagcttctacggggacgatgctgggcaacgccgcaaaccaccccagcaagttgccgttgaacagattggacgcctcaacacagaccaacgggccgcctttgacgcgatctcaacatcaattcttggcgggtgcgaccagaagttgttcttcctcgaaggcgcgggcggatgcggtaacggcttatttatttttaaaaatataatttattttataatattattttaggcaagacgtacttctacaacacgctgatcaagtggtgcatcgcaggcaaacctccctttgatggaaacgccaacgcacagtgggtacgcaatcaagtactgcagcgggacacagttgtcgccgccgccagcaccgggatcgccgctctgttgctgatcggcggaggaacggcacacaggcacttctacgtgccaaacgacgtgtcgcaggagacgccgccgatgttgaacttcgagtcggcaaaagcggagcaactgcgccacgcacaactgatcatcattgatgtaaacaaaaacataagttgcttttcgttcatgataacaattttaggagatcagtatgttgtccaacaccgtgctcgactacatcgaccggctgttgcgagacgtttgtgcaaatgccacaccgttcggcaacaaagtggtggtgttgagcggcgactggcggcaactgactcccgtagtcgagcatggaactcgtgaggaccaagtgggtacgtcgatcaagatgggagcgctctttcgtctgttcaaaaaaatcaggtaatttgtcaactttgttttttacaaacatatttatgttttagcctaacgatcaacatgcggacggcacagggagaacaatctttgcgcgactggctacaggaaatcggcaatggaatacaccgcgtgggtacggacacccaaggcttcaccaaccaacttcgcattccgccggaactcctcgtggacgacctcgaccacaccatacatttctgcttccctgaagcaatgttcgacgacccgctggccaacgcggacgcaatagcacacaacgccatcctctgtccgactaacaacgacgtgcagcacatcaatgaggtggcgcttggcagaatgagcgggtgcggaagggaattcctatcgatcgacgagcctcttgagccaaacgacgagatgcacaatttccgcaccgacttcaacatggaggcggtgcacaacgaaatgccatccggaatgccgccgcacaaattgaccatcaaagtgaactattttttgttttaatcatttttaacctattaatccaggtgggtacgcccgtgatgctgatccgcaatttggacgtcacccagggactgtgcaacggaacacgacttcaagtgatgcgcacttcggagaacaacctgttctgccggattctcaccggaccacgagcgggtgcgcagaacataatcgccattccacaaattcaattcgaatatggccgcgcacgacaccaccgtgggctacgcttccgccgtctgcagtttcccgtccgcctttgctttgctatgaccataaacaaggtgaaatacagattatttaaggattgaaataaataagcacaaaaaattaaaggcacaaggacagacgctgcagcggatggcgctcgtactcaacggccgtcaatgcttttcgcatggacaagtgtacgtcgccatgtccagggtcacgcagatggacggcatcagggtgtacgcgccgttctgccaaagtgggtacggaacgcacatcgagaacgtggtttaccacgaactgttggacttggagacgcagcagtcgaggacaccgaatcgtggactgatggacgtggacaatgacccggacgcagcaataccggacgtgggcccaagagtaccggacgtggctaatgacccggacgtggaacgagataatggacacgcagcgggtgcgcacgatcaagaaccaaatgatcttgatagttcttttgatgatttttttgattga

SEQ ID NO: 53653 - DNA, 808 bp, Heterodera glycines
atgacaaacccaacattgaatgataatcaaagaaaagagaggacttgtgaagaatttttggatagaattaaacccaatattggatttttgcttcgtttagtcggtctcaattcgaccaaagacttagaccgaataaaggcacaggccgaggagcttgaggctctactcttaactgaaaaaggacaaatctcggataatttggcacacactgttcatgcacttagtggacaacggttcggaaaccgacagactgaacaaaacagagaatccaattatcggggaccaccttttgtttcggaagctaatgcgacaccactcaatgaccgttttgccccgcgtaatttcgacaataacaacagaaataacaacggcaataataataaccgaacacaattcaggcgtaaccagagaccgaacgacagaaggccaaacttttgtcgcaacagacggtctcaatttatcaacaatagacctgacccacaaccaaacagaggcagaaatgggcgcaatgctaattatggcactgtcaattcagttgatgctatcccatcaaatgtttctgtcctcgattccgaccaattaattcgcgccattgctaatttaggcataatgaaccaacagccgcccttgggcaattcagtcaaaagagaagatgctaatgcattgaatgcaattacaactgttaaaagtaaaccaaaaatcgagaccaaaggaattatgaatgactcaaaaaactgcgaaattccagtcattgattcaaaaaatattaaaccaccttcaccccaattgaaagcttcaagctgggagg

SEQ ID NO: 53654 - DNA, 137 bp, Heterodera glycines
  unsure (1)..(137): unsure at all n locations
caattaatgacattttaaatcgagcaactttctcatcctcattccaatttcgtcctacagctccaacataatcagtaaaccactcagcccattcatcaaaagcgatcaccgaatcttcaccaaatnacctctaagtg

SEQ ID NO: 53655 - DNA, 681 bp, Heterodera glycines
atgctaattgcatttatgagaaatggtcagcaaatgcaaatcagtgagtattcaaaacaaaaatatgagatacaccttggctttatatattatatgagaatgaattggaaatgtgacaaaattgtgggtgaatttgaagaatttgaacggacagaatgccaaaaatatcgaaaatatttggacattttgtacgaatatttgttcagagaatatctcggaatccccacagtgaagccaatttttgtatttaaagacaaaattgaaattaatgggccaataatttatgcggtgaattgtttggccagaatttcgcaattttattttataaaatgggagggacgactttatgaatataaattaaacgaattgttcaattatcaatttgaaccaaaattattgaataatgagaagagattgaattatgatgaacaaaaattgtcaattaatgaaatgattttggaattggcaattgacacagcgaatgattggcaaacaaatgaaagtttggacgaaataattaaacaaaattgtggagataaatttgaagtgaatttggaggaaatgctcaaaaaagcggatgaatgggaagaagaaaatgaagaaggatggagtgccaatgaaataaattatggcaagcataggataattgtgggatcgaaattcgatgataaatggaaatgg

SEQ ID NO: 53656 - DNA, 1485 bp, Heterodera glycines
ctactggccaatatttgttcaggcattctgaacatcatcggcggttgcagctggtggcaaatttgggtgtacctgttggtcagcctgcagcagattccgcacgccatgttcaacctcagcgtggtgtacatgatgtaccaggtgggaccaattggggcagcagcacaacaaaaacttggaaaaaacgccaaatttgtgtttcccttttcaatttattttaatttttgaggttttgctctttataaaccggtcgacaaaaggaagactacgcctgttagccgaaccaaaaaattactcctaaaattaatcttcaacaaatttttttccatttttggggtgggaattccatggtcgcttattcctccctcccgaaaaatttaaaaaactgaattattttttattttttaaattacttggtgctttttttcaaataaaaaatgcaattaagatttttacaaacccgatttctttccaaaaaaattctttttttttaatttcaaaatttaaatttttttctggttccatcgaaatttagcgtatctcaaaattttcggatttgaaaatttgttggctacccttccgctccctttctgctgatcaaacgaacactgattgttgctattttataaaacccaaacaaaaacagatcctccaacaaaatcattgttgagttgtgtagccggaccactggtgcaaagtgccgggactgaacgcctccggcgccgccaatgcgtcgggcgcgccgtaccaatgggacgtgacggacacacttgccggctcggtggtgtacccgcggacgcgcaacaaacagcgggacatgctcaacttccactcccagtgccactactatgaccgaggtgggtggcacgacgggggcgagccgttcaaccaaccccctccctccccgttatttcctccctcgaaaattttgtgttttgaaaaacttcagcgatttttttttgatgaactactaagttttttcaaaaaaattattttaaaaatcgctgaaaatgtttcaaagttttaacttgaattttcttattaagaaatttgctaaaaattttttttggaaaatttctgtttgaaatttttaaaaaaaatttttggggaacgacctgttccaggtgccacatccttccccccttccaaagaatttaattttcattttgtattgtttgtccaggtgatcaccgttatgtccagttgagatggatgctcttggaggaggggctaggggcgcagaacggacagcgaggagagtgaggacattcgagaaggcaccgaagggtgatagagagagagggggagacagagactaagagagagagagtaacagagagcgattgagagagagaggcagttgaaagtgaaaattagcacacaaatgagtctcaaatattggtattgacaataaacagagcgtcagaagccccgaaacataggcacagcagaaagggggagacacatatttggagagagagagag

SEQ ID NO: 53657 - DNA, 125 bp, Heterodera glycines
aatattcctactataaacatggtcaatggaagattggaatgatgaagggacacagcaaaatgtggagagaacgccgtgaagaaatcttacgctgggacccaaatgccgacctgtggaaatattag

SEQ ID NO: 53658 - DNA, 85 bp, Heterodera glycines
gttcaccaatgcttccgctgacaccagcaaaaagattcgtctccaaaaagcattgtgtcgattcaattcgatggctctctctcca

SEQ ID NO: 53659 - DNA, 244 bp, Heterodera glycines
atggccacccattgggtggaggccaaagcggcaacgccgctgtccccacttttcctctgctttctgtcctcaacaatgttggtaaaacagaccaacgggggcgaacagcatcatctataaaataacaaaaataaattcaacaaataattaataatattttttcaaaaaataaattatttagggagatggatttgtaattgttatctttccagcggtaattgctctctgtatttttgtttattga

SEQ ID NO: 53660 - DNA, 306 bp, Heterodera glycines
aagcatctttcaaaatttatttattttttaatgaaatagaattatttttcttaaaaaaaattaaaagttggcgtggaaaggagccgaatctcctccaaaatattttccgttcataaccactgacaatgagacaagaacttgacaaaaacggaactgtcaaaattttcttaaatggaataaatattcttaaattaatttccccccccccccccgaacaattgagcacggcgtttacctgctgtccttttgtactgcgatttgctgaccaatcgctgcttttcttctcgtcggcgcgttcttctactg

SEQ ID NO: 53661 - DNA, 408 bp, Heterodera glycines
atgcaaatcctggacctttgcgatgttgaagcgcttcctattacacagtaccgaatgggaaaactgggcacccgcccacgtccgatgaagttggttcttccgacccgtgctcatgttcggaaatgtctcctcatggcgcgcaaaaaggactctgcactgagaacgcaaatgccaaatgtcttccttcgcgaatcgttgacaggagaagaactgaagaagcgaagtgatgcgattaagctgtgctcactgctcaacaaaaacccgaggttctctgttcgtgggacttttgtcgtttacgccacctttcatgtgttgttgaagacccaaatccccatatttcgcaatgacaattcatttgatgggctttctgccctcaacattgatctcaatgaccccgctctttcataa

SEQ ID NO: 53662 - DNA, 2025 bp, Heterodera glycines
atgcccgcaccgatcgacaaaagcaccctccgatcatttttaggcgctttgaattattatggcagatttgtcaaatgcatgcgtgagttgcgtgcaccgctcgaccgactcctccaaaaggacgtagcttggaattggacttctgaacagcaaaatgcttttgaaaaagcaaaagaaatgatgacatccgatttattgctgacccactacgacccggcacgcccaatcgtcgtatcagcagatgcgtccaaagatggaatcggtgccacattaagccacacattccccgacaaaaaggaaaaagcggtggaacacgcagcctgcactctaacagcagcgcagcaaaattacagccaaattgaaaaagaggcattggccattgtgttcgccgttcagaaatttcaccgcatggtgtacggcagaaaatttattttgcaaacggaccacaagcctttattggcaatttttggctccaaaaagggcattccgatctatgccgcgagccgcctccagcgctggtccatggttttggcgaattacgattttgaaattcgctacgtaaacaccacatcatttggccaagccgacgttctgtcacggcttattgccaattattcgcgtccagaggaagacatcctgatagcaaacatctgtgccgatacagattgctacattaattctgttttcgaaaacagaatggatcagctccccgtgacaacagtcgaaattacagcagaaatggccaatgatcaaccacttcaaacggttcttcaatttttgagaaatggatggccagcaaaagtcgctgattctgaaattagtccatattttccaaaacgggacaaaatttttgaagtggacaattgcctattgtatgaggatcgagtgatcatcccaacatcgctccgcagtcggatcctaaaggcattgcacatcgctcacccaggcattgtgcgcatgaaagcacttgctcgatgccacgtgtattggccgggaatggactcagcgatcgaaaaagttgtgagcacttgcgaagagtgtcaattgggccagaaaaaccccaccaaagcacctctttcaccatggccaacgacggacaaagtctttcagcgtgtccacatcgattttgcaggcccctgctcagatggtcaccaatatttaattctgatcgactcattttcaaagtggccagaagtttaccgaatgaacacaatttctgcctatgccaccgtatttgtactccgatcaatcatttttcggctcggaatcccagaagaaattgtttccgacaatgggacccaatttcgatctgccgaattcgccacattttgtaaagaatttggaattaagcatactttcactccgccatttcatcctcaatcgaatggccaagtcgaacgcttcgttgacaccttcaagcgttcgatgaagaaaatgtcaaaaagcgaaaaggattggatcgaaaagatgctattctcctacagaaccactccacacgtcgccttgaatggattttcgcccgatcaattatttttcggcagaaaattacgcacaaaattgtcgctcgtccatccgaaaggagaaaaagccgaaaattttgatcaaaactcattcaaaaagggacagacaaaatacaccgacaaaatggcgcgaaattttgatcggaaacatgggacaaaagtgatcaatttttccccaaacgatcatgtccttctgatcaattatcggaacaacaagacggaatggctccaaggaaaagttgttgagaggcttcacaaatcgcccacatatcgtgtttatgtgcctgttctgcgtcgactcgttcatcggcacgcaaatcagctaaggcgacgacatcttttggaagacgaagccgaagaagaggcacctcaagtcgaacagccgccgccggttgtcgaaccgcctcgtcagccccaacaaattcagccagccaattacccgttgaaagtccgccgatcgagccgtatcaagaaacccacacaattttactctccatcgagatga

SEQ ID NO: 53663 - DNA, 397 bp, Heterodera glycines
cggggaatgtgtggcttaatgtggcaccgattccatctttggacgcatctgctgatacgacgattgggcgtgccgggtcgtagtgggtcagcaataaatcggatgtcatcatttcttttgctttttcaaaagcattttgctgttcagaagtccaattccaagctacgtccttttggaggagtcggtcgagcggtgcacgcaactcacgcatgcatttgacaaatctgccataataattcaaagcgcctaaaaatgatcggagggtgcttttgtcgatcggtgcgggcattttccgaattgcgtctgaacgcgacgggtcaggacgaattccgtttgctgacacaatatgcccaaggaacaaaagttcgggctgcaaaaatttgcatttgtcgagttg

SEQ ID NO: 53664 - DNA, 762 bp, Heterodera glycines
atggcaaaagtcgcaaaccgaaaacgaaatgagcgccgaattcgtgccgtccaagacttggcgcggcacctcaaccaccgaatgaaccgccaccgccgttggcagcgcgacggaaaacgggacccatcggaggaacggcacatccgaatgaccgccgaacgttatgctgatcagctctctcgcctgggagatgaccacattcaccgactgcagcaccaattcccgcaactccccaacccccgccggcgacgatcagaggtggggggcaatctgaaagggggaaagtcccagccaaaattggcatcgatggtggtacgcctgccccagggagagttgctcccttcaaaggatgtcggcggcgcagcaccgggcgcatcggactcccatggccgaaacgagaacgaagaggaaggccgtgagaaggccgagaaggaaagaggcagccgcccgcgggtgctccctccgcctggggacagttttggagaattgctggagaaagaggcgaaagctcgggccgaagtggccgagctcgaagcccgggcaaagaaggcaaaaatggagagggaggaggaggaacagaaactgaaatcggcgaaggaagcgcgccttcgggacttggaaacccaagccgacgacttgcgccaaatgttgggcgatgcgagctggccgtggtcgagaggcaaagacgggaaaaatgggggaggcggtggctccccgcgctgggaaagcggtgggcatgccagcagtgccgatggaggatga

SEQ ID NO: 53665 - DNA, 1222 bp, Heterodera glycines
atgacaacatccgacaatgattcttatgaatcgtgcattactattgcagaagatccaacagaattagcagcacatgacaatgataaaattaaacaaacaaagcactcagcagaaaatgaggagaacaaatgtttagcaaaattagtgagttttattttttgataaaattaaatttgacgtggggcaaatccccgactcttacgttgaaaatccagtttttggggtttacttgacattttgaagaaccaaggcactaaatgctcgatcccaaatcccaacccaatttctagggtccacaaccaccaaagacttggaacctctcgatttttcgggatttcgtgaattttcctaataattttcccgacggcatttatgaccccggcatgaattcggccccaaaagtattcaacagggacgcacttgaattccttccaaatctcgattttggacctcagaatcccccttttctgtggtcttttcagttaatgaaacactaaatcacctattttccgagggtccacgaccatcaataaatgccttgtaaattcttaattttcttggatttcttgaatttttttataatttcccgacatctctgacccccggaatgcgtgcggcctcactggatcacgagggatgcactcaatttttaatattataattccactctatttttaattattttaattccactccatttttaattattttaatttcactccatttttcattattttaattccactccatttttaattattttaatttcacttcatttttcattattttaatttcactccatttttaattattttaattcattttttttccaattttttaggaaaacgttttgagcaatgccacagcaactgatgagtcagtgtccagctcgtccttcacaaattccatctcggcagcatccatcaattcaaggacagcacttggtgtgaaaaacaacaacaatggcatcaacaccaccaattcaacatcgtcggcattatcatcatcatctgctgctggtggtgctgctactgcttctgttcggcaccaccaacaacgtaatcgtgtcctctcatttcatctaaatggcactgtggtacatcgacggaggccaaatagtgcaagcaaaaatcccattcatgtaataaaaatttttatttgaattttttaacttgtttcggtatcattttaatagcgattagtctgttctctctatttacaa

SEQ ID NO: 53666 - DNA, 689 bp, Heterodera glycines
atgatcaccacggatgacgacgacaaaaacaacaacaataatgatttggtggacacaactcgtgagaatgcttttgacatgttgttacgcttttgtgaaacgccggcggacgttgcctttctcaggagccatcctgatcagtaataatttaaaaaaatataatattgtaatggtagtgaacactgatcagtgggtctgaccaaaaaagagctgaaaatctataaagttttggtcctttttacagattttttccttacgaatttgttggctatagttaattgtagagttgagcgggaccgggacctgaacacggacaactgagtacaactgattaccgaagtcccgggtttgaccgggaccgggactagtcccgggtttttcccggttttcccagccaaaaattcccggtttttcaacccgaaaaggtcccggtcccgggtttgcccaaaattcccggtcccgctcaactctagttaattgtcaattcgatacaaagatcagaaaaaaaattgtgtcacacctctgctggtgatgatcgcgactgatcattccgagtatcgacattgtgatttcgaccattttttgagaggggagggggttggaaatttagggttccagtccatttttttcatatcaacaatttgttcactgttcattttaatgttacttttcttatttaattataatca

SEQ ID NO: 53667 - DNA, 1744 bp, Heterodera glycines
atgaatctgttaccgcatttccttatttttggttgcctttcaatttttgcgtcggcatttttgcctcaaaagggcataaatcgcaacgacaaaagcactgcatggcacgcatttcatgcagatgtgcgcgatgaagtcgccatcgccaatgcgtcgcggatttttaagccaattgaaaatgaggaagaggccgaagagattttgggccgcgatcgtgggattagatgtggccaaacggcaacgaacagagtaaaaaaaataataataatctacggatacagttattttttctccgtaattattacaaattttgaaaaaatggaaacaattattttaacacagctggataaaaagactcctaacaaattaactacataaattttttcatttaataaccagtgacaaaaataaattataaattcaaaaaatgtgcaataataaaacttttttaaattttaattactgtactcgcaggtggagtacggtcaacagtcaccaaatgaggaatggccatgggtcgcaagtgtccaattggagtgtgtgacgaagcggacaaaccaaatcgagcttcttcaattgtgtactggcgttttaattggggaaaagcatttggtgaccgctgctcattgcctttatttgcctgccgaaacattcatgaaatgcaaagacaatcaaattcaaggagagtttgacgagggcacaaggtgttttaaatttttaaaaatattacatttttcactaataatcaaaacttatatattttcataaatattttttaattttcagtttccttgtcaccaacaagtatgttaaagtaacattaggcggtggtgattttcggaattcgtcaaagcttggcatcaagcgcttcttcaaactgcaaactttcaggcagcacgaactgaacgacgacatttcgattctcgaggtaattaagaaagatatagatcattaatgagttaattcatttgttcatttcttagcttcaacacccagtgtccgtgagcaccaaaatcaacaaaatttgtatgcccgctacgtacaatccacggactggccaagttgcttacatggccggatacggcgacacttttgggggtcagttataatttaattaagcaattttggaccaattacaaaatcccaattattctgaaaattcaatcttttaattcaaaaaaactcagtcgttaatatgccgttattgcaattttcatattttgatatttagctcgtgaaaacagctcggaccatctgaaagaaacaacggccctgcgcgaagacctcattacaatccgtgtcaacaaaccatgcccgacaaatttgatatgtacaacaaataaagcgcgacaaactacagtggtagaccaacctgagcatcaattaaccttaaataatcaatttaaacacaataattaccttgaaatgataaaaaaatgatttaaaaattcggaaataatttattttttaatttcaaaaggacgattctggtgcaccattgatgcgacaacttgccgatgggcgttgggcacttattggaatcgtaaaagggcatagggaggagtgccaatcgaagtgtaaggaatgatcaaaatacattgaatttaatttaaaaaatgaatttaaacaattagtttttaactccgtacaaaattttggttttgtgaaatcaaaaaatgcaaaacctttaatgttttcattatttctaattgattttttgaaatcattcactttttaaaataaa

SEQ ID NO: 53668 - DNA, 1733 bp, Heterodera glycines
acagacacccggactgggacaatcggactttgctcgaatggttctccgaaaagagatggaccgacgaagataattttccacccttttctgagaagcacttgcaaattattgaccaagccgttgccgaaatgaaactgctcattcgatatgcgcaactttttggcagtgatccgtcgcgcattgtcttccagccgtcgctggcacgcggcttggattactacacgggcatcatttttgaagttgtgatgaaaggtcacattatataactttaacggaaaggacaactgggcgttgaatgcacttcactttccccaagtcgtttctctactgaaaatgatctaatccgtgtttttggctataactcatttcaatgcccaaaatgaacgaatttagtatcatttgaaatctgagctttttcggccatcaaaatttcaattgtaaattatgttaaaaaataaaacctattattcacggaacaggacaaaattgcgccgccggaatttcgccggccgaattttaccgccaacatttttttaattcttgaaaattttcaagaaaaaatcttattgtaaggaaattttttagattttttctagaaaattcgtttaaaacttttttcctaagattttttttttcttgaaaaattgctattttaagtccaatatatctttttaagaattcggtggcgaaatttggggtgcgtccatttttcaatggtagtaaaaaatattgtttaaattggtatgttttagacagtgccggttcgttggcagttggttcagttgcggcagggggacgatatgacaaattggttggcatgttcacggacatgggcagaaataaggacgatggaggggtggcgacagccccaaagaagcggccggaagtgccatgtgttggcatttcgtttgggattgaacgacttttcaccataatggagctgaaggcacgcgcggattcggtaattaaggacgaacagtgcattttatcatgttccgacaattgcgccttggatatttgcgtccatcccaaaaatcggttacaaatgcatgtttttttcaatccgacatagcataataagccgaagtaacaggaaaaaattaatcataatttaaagctttttacaccactttttggattggtgtgttggtgcaaatgcggttaacccatttattccatcccccgaatgtcgttaattgttgcagaatgcggtgaaagtttcgcccactcaagtgtatgtggcatcggtttcggtagcaaaggaagagacagacaaaatgttggaacaacgaatgcgactgtgtgctcagctttggaatgcagagatccgtgcagaaactggttaaaattagctgttatatcggcagggtgatcatttttccatctatcgttagcatttccatggtatttcggcagcgccaactttgaaatgctataacttttctctctgttagtcgtctttagcaaactcatttaaatgtctgtcaattttccttttagttcggactttgcctttgaaatggccaccctgattgtcttacataaatcattttggttatttaggttataaggccaacgtaaaatttttacaacaaattaaattttgtgagactcaacaaatccggtggatgcttatcctcgggccggaagaaattgctaaaaattcggtaaaattgcgttacatcccggccaaagacaaaggagaggaggttcgattgggaattggaaagtaa

SEQ ID NO: 53669 - DNA, 1166 bp, Heterodera glycines
atgggctttattgacaaaacaaacggcaacacgtttgttttttatgtgtcaaatttttgttgtaattactgttttgtgtcataattttattatgtttaaaatatctgaattaataaaacccagattagacctgtaataagccttattcttgacattatcttttgattcttggttttttaaattctgttcctgtttattttaaatctccattcacaaatttaaaaaaaaagtaatatggatttattaaatattaacaaatgaaaaattttaatttgtttttttaattattacacaattctagcactttcccaatgaatcaccgacttccgattaacttttattccatttcaccaccaatttaacataataaattattcaaaatcatttaaaaatttgggtatagataaaaatttacttttactttcaatgtgctagggacataaatttgttacttaatataaaaaatacgactaattttctgtaaagcttgttaatcttaagaaacttcctaatattctttttttttggtcaaatgattacttttatattataaacatcctcgcactttctaccaatttaaaaggtttgaaagttcagtgaaaatttattagaatatcttacattaataaattgttttttttaattcagcacttaaatgtcggaatagtgaatcaattgatgggcaaagttttgctgatgaaagtattgtggaatactgctccaattctactgagagcaagcattttccagacagctgcggagctgttgtgtgaattgaacggaaatctaaaattggagggaatttagggtttactcattatttttggtaattttataattgatttatgataaatatttttgggaaacaagaagtgaattttcgattaatagcatcgaattctattaaatcaccttttagacaaagataagcattattatacgagcgaacagtgtgtcaacaaagtgatttggaaacttttttgcaataccacagaaatgaaaaaaactgttcaaacggcaacaaaactcgttgaaaaaaaggcttgtcgttgttcttcgaaaggcaattggtaaatcggaaaggataattatttgtaaatgtattaaatttctatttttatttaattatgaattaaagatgatattaattaatatgaattaataaa

SEQ ID NO: 53670 - DNA, 1209 bp, Heterodera glycines
  unsure (1)..(1209): unsure at all n locations
atgactgttaagtcatcagacggaaaaggcaaacataaagtttggggtgcgatattcgtatgtgctctcacgaggatgattcatttggaattagtcacggatatgactgcgaaaagatttttgttggccttcacgagatttgtcagacgatggaagattcctcagagaattgtgtctgacaatggcactaacttcgtgttaggcaacaaagccttaaccgaaattgttcaacaaagcattaaagagaaggagcattggctcaaagttttaaaggacgaggaagtgcagaatttttcgaatcaacaaaaaattgaatgggtttttatttcgccttttgccccttggagaggagggcaatatgagcgtatgattgggactgttaagtaccacttaaaaagggaaataagaaataaactcctcagttttgaggaattatggactttgttttcagaggtggagagaatagtcaatgagagaccaatcacttacacttcccaatctgaagttattcagcccctaagacctattgatctaattttacccaacattggtaacaatagattggaaataaacactagatctgttgagaactcagacaatgattatattttggaaaattcaaacactgctaatgtagtgcaaagataccagaaggcaatgaatatggctgaaaaattttggcaaaattggaaagattcctatttattgggtctaagggaacgtcatcaagggaacaaacacacgccaggaaaagcaccaaaacttggggacgtggtgatcatttctgaaccacaaactccaagaaattgttggaaattggggaaaatagaagaaattttatcacaacgaaccgcaagagtcagaatttcggaaaaatcaattattgaacgtgctattaagcacttatatcccttagagttagccgaaaatgccaataattctgactctggcattaaacaacaggaacacagttttgtgaaacaaattcattataattgggcaaagggacttcctcaaaataaggcgcttgttaaggcaaattccccaaatcactacaaatgggcaaaacaaccaccgaaaataataaatgatataactaatgtgacatgtatttcagaaatgaacagagacttcgatgccgtgtctcttgattgtgaagagatnggaagagatctcgaggacgaaacaaggaagaagaatcgaggatga

SEQ ID NO: 53671 - DNA, 291 bp, Heterodera glycines
caggacctaaagaagcacattgcgcccaaaattgaccggctgtttctcgtcagttcgttggacaaaaactgcagtggcgtcatcgttttcgccaagtgagtcgaaatttgactgaatagcaaatgccagttttgaacaaaaacaaatttaatgtcactgagaagtgcccggggggggggcggttgagaattcgaataatttttggtgccacacccaaaaccaggagccaggtcaagcagttggagataaaggcccaactgcaaaatgacgccctgctttaccgttaccgag

SEQ ID NO: 53672 - DNA, 209 bp, Heterodera glycines
atgggtaatgaacaaagtcagtccagagaagaacggcctcgaaaattgcctaaacaaaacaacggcgaaccaaacgaaaatattgtacgaattaatcgaacggaaatgccagaggaatttcaagctgttcttttatctgacaatgttgttcagcaagtaatgaaaagtggccaaaatacgactaatgacctgcggacacgcgaactcga

SEQ ID NO: 53673 - DNA, 1079 bp, Heterodera glycines
atgcgcagaaaaaatatgttaatccatataatttacaaccctaataatgatgaaactccaataaattctgtcgaaatcaatatttcgaaaaattttgccgcaactattgaaaattgcaataaatttgatgaagaattccatttatcggacgatattatgaccaaaaatttaatgatcgattgggttcacaatgttttggtcccagttttacgccctggagaacaatcattattgttggtggatagttggaatggttggaatgattttcgactcccggataatgttaattaaaagtaaagcaaatcccaaaacatgcaactggaatatgccaaccattggatgtttacattttccggtagttttgttgccaaaaataaaataaaaaatagttttagaatttggaagcaatttaccagaaaaataacggaatttgtaatgatttatgatgtgaaaataaatttgcacgacagggataacattattaaattacaatcgttaatccataaccagtttcaagccgaacgttttaatggatggattaattttgcctggagaaaagccggttattacggggacgagcctttgccaaatttttgtcatcctgttaaattttgctttgaagtgccaaaaaatgacatatgtcagaaattaaattgtgaaaattttattttattacggtgtgcttatacttcattggaattttccagtacgggtttgtccgtgaaaatttgaaaaatatttccaaaattgcccattttctctagaaaaaatttcctaacccactatggatttcgaaaatttccccaattttcagtgtattttgggtgtcccggtcactaggaaggagtgatctggtcaaattggtgtaagagacttttttgatcagcatcaaaagttatacatgcatgaattatttcaagtttttaaatgaactataagatagtttttcaggtttgagtcaagaattttttgtggcactgtatttctctcacaaaaatgcaatttgtttgggaaatattaaaataataatcgaaattataattatggtaacaaagctaattaatagattaaaaatttaa

SEQ ID NO: 53674 - DNA, 766 bp, Heterodera glycines
atggctttgtgcaacggcgagcccccgtccaagaggtcatcccgcaccgtgtcgtcccctattgaagacccggcgcctcatctccaattgctgtacccagcaatggcaccgactcctcccattgtcaacacttcagctgctactcctttcgtcaacaatcagtacaacgacagcaatgacaactataataccatcccgatggacgaggacgatgatgatggttggtttgttgttgccatgaacatttgggtgcacttcagttcccccctcgaattttttttcaaaaaaaaattattagaacatttttagaaaaaaatcgctgaaaatttttcaaaaatttttattgttttttgaattgaaattcaatgctaattgcatttcatggcctttgattattcacatttttctttataattccaattaggtataatattgtaatttttaagacattcaagtgctggaagtcctaccacgccgaccgcctccacccataatgccaatgccatccactccgcctttgcctgttacgcaacctggcatgatgaatggaagtttcactttgccgccttaccacaaagcactggaacataattagggagcgctttgctttatgcgccatttaatgcaacatcaaactcaatttcttttcttttgattccggacaacaatctaatttctattgaatctcattctccaatttcgaaaaccctctccatttttgtttttttccgtgaataggaagtgagtggtgtaccgagcaaataaa

SEQ ID NO: 53675 - DNA, 3160 bp, Heterodera glycines
ggtgcccaaatccatcccaatttgcttaatttcaccccatttatcccctcagattggtcttttgcttatgcaacgggttattttactttctggaaaaaatggccccggatgctgtaaaacagcatttgctccctttgatttacaattctctcaccggcgacaatgtcagagtccaggcaggttttcagttaatcaatttgaaaagaaacctaacattggttttttattcccacaaaattctaggagttgacccttatagaagtgccgaacattgtcaaatttgtcgaccgagagcaaatgcgaactcaattgatccccaaactcatccgtcttatgctcgagtcaaaggacctttccgtaaaatcgcaattactttttctaaaattcatttttcgtttttattttactttcaaaacttcgaaaaaatgctttataatattagctttttatttttaatcacttgtaaagagtttgacattataagttgattgttttgcaataatggggggggggagagaaatattattttcttattttagattcgtgtccaaacaatggtttgtctggccaaattgcttccccacatggagccttggatggtcactgatcagctgttgcccgctttaccgaaaataaccagcaaagacccgagtgttttgatggcagtgctgggcatttacaaaattgttcacgaaaacaccaaattcgggatcaacaaagagcaatgttagggagggcaaaattgggaaaatttaaaaaatttatttttcatcaacaaaaatataattactaattgatgaaagctgattttgtgtccaaggtgctcggagtgtgctaccttatcttatttccaccgcagtcgagcccactctgaacctccaacagttcggccagtacatggaactggtccatcaactgatccgacgggtcgaaaccgagcaaaggcattgtttggagcagctgagtgccagtcaggaggaacaaaggtggacggagaggagccactcgcatttgttattgaagcgattgttttcatttaaggaaaatcactgactttgcggactttctgaatgcccaatcgaatgaaatgaacaaaaccaatcagagcgaagtcgatttgggcgacttggcacgagcattgagcggcacatcggcaaatgatggcatctgcaacagaacaacggacaaaagggacagtgggacgacagaaaacagtggcgaaacaatggcaaaggtatgggggggggggactcggattgatgttcaaacgcaacaaaagccttacgatgagaaaaaacgggggattaaacgagttgctccgactatataactcttttttattcttatccgaaattatgtcgcggcgaaatttcggcggcgaaattttgtcccatcccctaattgtgtgccattcatttttaattcgaactttttagggagcactttcactcgatgaaaaacggcgcattgtggcagagaaaaacggccaagtggtcgaaatggaaaaaacattgacggcgtcgaaaaacgctccgttcgaccccttttcgctgtcttctctctcttcccgccagtcggttcaacaacgtccgcagagttcgctcgaagcttcgaatcgcatggaacttttactctccgaattcttgcccacaacttcatctcattccgtatcagttgaccaacaacaaaatcagcaactgccccacatttcacaatcggcctcatttgccgccttcccaacaattcctcagccgaatagcagtgctaatcccgtacagaaaagaggtaaaggggagaagcggcaaaattaaattagcagacaaagagaaacgaactaacggaagagcacaaattcatattttaggaatggttgagacacggccatcgacagcaccgaaagacccatttgatgcccttgaccaattagtgatgaccgtgaagaggacagaaacaaattggacagaaggggcagcgagaaatggtggcatagcacagaacaaagggcaaccaatgaaagacccttttgagcactttctccgctgacaaattgccgttcatttgttttattattccatttaattgtttgtcatcatttatgtttctttctttttgtgtgatattctctttcatatgtgtaaaaaaggctatacaacaggggatggaattcgtacgtgaatggcaaatacgttttaaaaaaaagcacatgcggtgaaacgagtaaaatggtcagtggaagcaaaaaataaacccattatggcaacaaaaaaaaccgattaagtaaactacatttttcatatacctatttttttgcgttcttgaattttagaaatttccattataactgttttttgatctgatcaatggcagtgattgcgaatgtttcaacgaaatggacattttctctcttgcgattgttctttgtgcaaattgcgctgaaacctttgaagaatcctacaaaaaacgtggggtcatgggagttcgtacaatggagtttcgtacaaaagccggttcgtacaacgtttcaattttgcgtttcgtacaataatcaaatttaaaaaaaataagtgacacataatttcatcaaaataacaaaaataaagcaaattataaataagttttgagctaatgattatcaaaaataacaatagtaataactagggccgcgacttttagtgactaaaaatccggaaatagttaactaaaatagtgtcgaaaaagtgccaaaaaaagtgacaaaatagtgaaaaaagtccgaaatagtgacataatttttagccaaaaattgagcaaaaaataatttttattcactggttgcagctgcaaatgagctacatttccgttataaaattctcttagcaaatattgacattttttaaatcaaaaattttgtcaagaaaaaaatttgggggaagaatttttgaaaaattttccaattcttagtggtgtattttaaaaaaaatttttggtcgattcttaggggtgtattttttgattttattgcatttttgttaataaattttccaaaaaatgtcgaaatagtgaaaaatagtgacaaaacgccaaaaaagtgatttctagtgacgaaaaatgacgtccaaaggaaaaaattttatcccttactctatactaagtgagaggaagctccgcccctttttgtgtt

SEQ ID NO: 53676 - DNA, 318 bp, Heterodera glycines
atggacccgcagcaacttcaacaattgcttaatgcactgcaacaaatggtcacaaatgccgcaccgcaaaacgccgcaccagcaaatttgagcaatgccaatttggcaagctctattgatgctcggctttcagcattccattacaatccggaggtcggcaccacatttgaaagttggttcaaacggtttgggaaattgatcgaggacgacggaagcacactgccggaggcctcaaaagtgcgccttctcctcggcaaactcggagaggaggagtacagcaaatatcgggacacgatcagcccaacccagccggaccaa

SEQ ID NO: 53677 - DNA, 150 bp, Heterodera glycines
agattggggaaatgtcataaaaataggtaattggaaaaggaagggaaattttggatgaataggatgatggacggccagaaggcctgggatgggacaaaaaggcgaaaaacaaaaatggttaaaattacgaatggcagattccacacattc

SEQ ID NO: 53678 - DNA, 3269 bp, Heterodera glycines
atgacgacaaatttgcctcaaggcaaagaagctcaaaatagtgggtcagattttgatccgatttacttttcgcctgaggagaaccaaaaatgggcgaatttgctggtcaggatgagagcattcgagcaggctgtgtgccgacaatttcgtcaaattgaaacccaatttgttcaaatttcgagtcaaattcaaatttcaaacactgttgatcgtgtccgagaattagagtcttctctgagggaactcgagaatacaatggaaatggacacatttcagactcaggaaaaaatgattgatgttgaacaagaagttggtaaagtgaatatgagaatggattatcaggaaaggctgactaaagtgcgtttcgggaaaataattgaaaaaatgaaggccgaagtgagcaaagttttagagagtcttgacactctccaggcaagagttcaaattttggaatatgaacaggacgaggaaattggtcgaacaatgtggatggaggatgggcattcagaggaacatgcccaattgccgaccaatcaggaagaaaacggagaaaataatcaagtgcaggaagaatgtgaaataatgatttcagacccatttttgggcgggatatcgccattggaggggtacgacggaaacccaagtgtttcattttcgcgatgggtggcccgttttgaggatatgctaactttgtacccgcagtatacggaaacgcaaaaattaagcagattacggattttgcttaagggccaagcgagggccgaattcgaagcaatggaaccccctcccacgagtttatccgttgctttaggccatttaaagagtaaatttgagaatgagaatacccgctctatagcaagacaggcaatggctagctgtaggcaagcgcccggagagcgcgtttatgagtttgccaatcgcttaagtgaagcggtcagaactgcgttggcgggagaaaaagaggaaataataagaaaacgtctttttgaggaatttttggagaaattaacgccggaattgcaattcgaagtgaaatccggcaggccatcaagctactccaacgcttacgaacttgctcagcattttgagctacttttggccacaaaaagggccaatcacgtctcagttgctgattcagttgccgaattatctcataaagtcgaagcgctgactattcatcagcagccaattcccaacagaaggggtagcgaaagacgcgcctgctattactgtaaacgccccggacacatagtaaaggattgcagagataaaagaagggacgaagagcgcagatatcggggagatcaaagggatggccataaatattttggaggagaaaggcgatggagtcgagagagaaattttagagacaatcgcaattttgcccccaggggaaggggccaaagggatggaaggatccatcgcacacccaccccttatggtgaagaaaatggccagaattttgaaagtgcgagaagacattcgcctgggcggcgagtaagctttggcgggagagttggagccgcaagaattgcgagtccactttttctggcactaattatggtcatatcgctttttggtcgtaattcagcgaccagtcaaatggctagtccaatgatatgccatccggactcaccagcgagtttgtggtctattccggtggacccgatttgtcccacttggtcgccaacagagataccggtcacaatgaaattgtctgtctatcgattgaacacaatacagtataaaactgcggcgacagcttgtaaatgcataaagacaaaaatttctaggagaattggattttttggtgggcgatatgaggaggtggcaacaagcccaattgaaatgcctacggcaacatgccggaaaatgagagaaaatggagaatcgcctgcgggacaattagtacagataaatgggatttttagggcaacccaaaattcgttagaagttgggtggagaaattggccagcggcgatgttttggagatcaacggaagtgagcaattgttatgcatatgaaactgttgtgttcacacgacacggaatggagggacttaacacaccaacaaatgattgtcccacctgtgcttatcagtccggaagttgccgctgtccacaaatcagcttaatttggaaaccggacttaactcaacggtgtgcttatgtaaagattgccgagtggcaaggagaatattcctcacgcatatggacagcggaaagtggggattttgccctaacatttgtaaatatctctgagaaaacggacaccaatggaaatgactttgtgatctctgatcagacattcgctgtacccaaagtggaatttgttgaaatgttaagaaaaagtgaacaggcaaatacaaaactaagaaagaaaaggtcacatgcatttattaatggggttagacgtgaatatgtaataaatgagacggataccactgtaaaatggcttgagccggatcaagaaacaaaggagttggaaaaagttgggctggtgtattcctcgcagctggcagcacagcttacagcgttaagtgtcaaagttacagcaaatacacaaaaattgtttgctgaaacagtgcataaaatatgcactagcctccgatttctcgccgatcagacgttgactttggcggaggcaaatccaacacttttggcccggtttttcctagcaaacccttatttaacggcacgattggtgacaaaagatatgttggaaatcagaccatgttttgcagtaaatgagagggaactgcattttcattggcaaaatggaagatgttttgagagacttccggttacatttcggctttttggaagctatgaaaaaacgaaacatggatttttagacccaaaaacgctaattatacactcaaatgcgagagaaaatagttgcaaagatttccgatacttatatgtgcagacaaaagggacacattctcagtatgaccaaataactggggatgttaaagaaatttcttcggaatcgatacattatctctcacgtcaaggaaaaatcgatttcccagaaatgccaatccaatttttcagaaataaagtgatcgcaaatttgtccgtgttgtactcaccggataattttgcggaaacaattgaggttgctaaaatagcacaagaaattgttcggttgaaccgaccgaatgcatgggaatttatttctgaaaagagtgatcatatggccacaaatattgtctcaaatggacttttctcattcctaaggggaggtttaatttcggccaaccaaat

SEQ ID NO: 53679 - DNA, 145 bp, Heterodera glycines
agattggggaaatgtcataaaaataggtaattggaaaaggaaggaaattttggatgaataggatgatggacggccagaaggcctgggatgggacaaaaaggcgaaaaacaaaaatggtttaaaattacgaatggcagattccaca

SEQ ID NO: 53680 - DNA, 1099 bp, Heterodera glycines; identical to SEQ ID NO: 4228
  unsure (1)..(1099): unsure at all n locations

SEQ ID NO: 53681 - DNA, 921 bp, Heterodera glycines
ccccctctgtgccgttgccatgctgtgcgcatggctttgctcacgatgactgtgatccaattgacgtgtcaaacaccgacccaaattatgggtacaaatacggacttatgctttgtcaacatgtctaaataaatttaaaattaatttttaagttaattttatttagttttattgaattttatttttttatttaaaatcttttaattatttttttattttaaaagttcttttttaattattattttttatttcctcacctttcagtccgtttcgtatcagctgcgtccctttcgcgcgtagtttggctgcaccgcatgaaaactgcgcattgggcccacgagagcaggcaaatttggtgtcaagctttttggacgccagtcaaatttacggtaattggagaaaaaagaataaaattattattttaattacttaattaaaaagccttataaatttttgttccaccataacaattataaattaacttaaaggaaagtgtaaagttctgttctcattttctttattttaggatcttttccggaaactctcggcaaattgctggccacgggcgattcgggaaaattgttgaactcaaaagtggccggagagaacgactatttaccattggcaagttttttcaaattacgaaaacttatatatgtatggcctaaagggtccaaaaatgttttatttgcaaaatcccctgggttcgactccgtcattaattaaattttaaattattttcttaacccccccccccccgcccaattttaggacccgcaaggtgaccactactgccaatcggagaatgggcggcgtaaatgctttcttagcggcagtgccgacgtgaatttgttgcccggcatcgcccttttgcacaccgtttggaaccgacagcacaacacagtgacggagaagctcaca

SEQ ID NO: 53682 - DNA, 831 bp, Heterodera glycines
atggatgtgcatgttcaaaaagctgctgaaaagattgctgctctgacacttgacctggcttatttagaagtagaatgttttttatttaataaaaaatatattaagtatttttattttgaaaaattctagcttaggacttacgtaaaagtagagggcagcggtaccgggaatttttgtaaaaagaaatttattggaaaattgcgcaaaatttttggaagcttactccgaaattgttaatagatatattctaatatactaaattttttgatttggatgttggcctttacctttttcatgtatttttacaaaataaaactctgattttatccaaatttagaaaatataaatattttgagtcagatgtaaatgaatgattttttttatttttactaaaatgtgtcattttagttatttttaaatttcaataaactgaaatatttcgagaaattcatttttatacgtaattcaaaaaccgggcttttcaaaatttccgggatccgaacctagaaacctcgtatttaccgtaccagccacggtcccgctgcactctacttgaaagtcatttaaattattcatagctaagaatagttattttattttagaatgtacaaatgattatcgacagaatcaagccatacttcatctatattcttgatccacacggctgctgtgctgaagctgactggaaaacgtttacaaagtactgtaaatccgaggtgtcaaaaccaatagatggcattaaggtatgtttattaaattgaatatgagccctaagatcattttgatgttaaatcagaaaaaatcaattgttatttttttgaggatctgtaa

SEQ ID NO: 53683 - DNA, 192 bp, Heterodera glycines
atgaataatttaaatgactttcaagtagagtgcagcgggaccgtggctggtacggtaaatacgaggtttctaggttcggatcccggaaattttgaaaagcccggtttttgaattacgtataaaaatgaatttctcgaaatatttcagtttattgaaatttaaaaataactaaaatgacacattttagtaaaa

SEQ ID NO: 53684 - DNA, 262 bp, Heterodera glycines
atggtactaacacgcaaaaaactgaaaaaataataaattgagtaattctggagtagaagcaagaagaaagcggaaggaatggcgccaggatcgggctcaaaaaggcggttcaacaccaaaaagtgatgaaattttgataaaaatttcatttcaattaaaaatcaagtttttacaggtcctcgacaaaccacagaagctccatcaacaaccggagagggaacatcgaccgagacaatgccatcgacttcgaatgctgagcccc

SEQ ID NO: 53685 - DNA, 859 bp, Heterodera glycines
atgacagacaaaaatgatgacaaccgaaaaaagggttcttcttcccatggcgctggtggcgatgatgatgggcaaagaaaggaaaacaaactgaaagaatacaataaagcggctgcaaaatgtaacaaactcacaacacgggaagaatgtgaaaaattaaaaaaaaatgacatcaatttatgctattggaatccgaatgtacagtatccggatagacggattggccaatgcgagccatctcaatataccaagttagaatattcgaacgtgaagatagagaagaaccggaactgaaactgagaaacgacgaagctgcaaaaccatttgctttagacaccggcacaaaaagctgttaaggttgcataaaaattcaaatatttttcccagattcaccgcttcagaaacgccgaccttatttaaaaaagagacaatataatcttacattcaccttggaattttgaagaacccagtataggaatgaataattaaaatttcaaattgttcgatttggggttaataattcgatattgggcaaaacgaatgtcattttttaacgaaattattcaatattgaaacctcgaaacgggacaaaaattcaaaagaaaggaaattacacaaaaaaccatcaaatcaatcatttgattttttctcatgttttttttgcagatgaattttcaatagaaattaattaaaaaattcacaatattaaattaaattcgtgacgagaactgacgttcaaacgaaaaattttaaagcagaaatacgtttttttgagctcctttcttcacaataattgcgcaaaaaaatagttaaatcactagaaatcgtacccctacttaaaaacaagctaaataataaa

SEQ ID NO: 53686 - DNA, 561 bp, Heterodera glycines
atgtttaaattggctcaaaaattaccactattgattatcgagaaaaattattttatggaggtgtttttggttaattctttgttattttcgtaaaaattatttgtctctcgaaattttttttgtcgagttttgactacctttgtaaaaagtggttttaaaaatacttaacattaagataaattttttattttggtatcagaagaaagagcacacttcaatctataagaatcttatttttgtttatttttatctcacaattttccgtgtcaaaaggctcatggtaaatatggcaaccatgggtaggatggtggtagcatttctaaccaccaactcccgtcaaatgaccatgaactacgttcttattgacagggtaaaaaagagggtcatggtcatggttaaataaccaccaacttcgtggttgtttgaccaaagttcgtggtagctcttgttgaccgaggtttaccaccaacttcatggttatttaaccattaccaccttcttattgaccgggccctgatttttcactattttaaacaaatgcccccccggcctttttttaaa

SEQ ID NO: 53687 - DNA, 605 bp, Heterodera glycines
  unsure (1)..(605): unsure at all n locations
atggctgaaagcactgctgatttggtaggctaaattttaatcaaatttatcttttcaaataaaataaattaaaaacaaaaaaatacaataattttcattatattttttatatttaaaattacaaataaataagacatattttgtcattttgttgatagattttggcgttcaaccgatgtctcgacttcttctcgccccgtttttcaaactttttgttcgctggccacagaacattgttgtggaatttggcttgttccctctacgctttctattgngcttttttccttcgtccggctgtttacagtagcgtttattttggttctttttacaacccattcgcgggctaccgtactgacgagaagcacaggtcttcttccatcgacagggacagggagaaaaaaagcttttgattcaagttactgtaccaattacagtatgaccggnggttgcatgtggcgcataacatttgggtggcagtcctaagcccgggcattattttgatcttcgccgctaaactgtttttcgactcgcaaatgaatcacagacagtttggcgtcatcgtctcggaaatgagcgctattcagagaagggtttcgataattaaa

SEQ ID NO: 53688 - DNA, 203 bp, Heterodera glycines
gagcataaagaatcaattgacaacaacaaaatggtgggacaagaacagcaggacgaacagcgattgaccaacggaccaacggagccggagaaggaaataaccgatttgaaagcaaccggttggctcaataattaattttaaaatgaaagcaccaaatttttaaaataagccataagaaaacttaaaaagagggatttttgaaa

SEQ ID NO: 53689 - DNA, 1372 bp, Heterodera glycines
atggcaggcgaatggctcacggcaacatgcaacacgaatatgtacgataatattttttttaatttatgaaaaataaagataaaaaatgtgtgattatcctttttttacagtatttttttattaacttaaaataataatcactaaaattctttgagaagagataaagtcgttttcgttcttaaatacattcaaatgatgccattcaaaattaaggttcacctacgaaattgcacctgtgttcagtctgatggagaaagaagttacgaagagaatggtaattttcatatttttttaaccagtttaaacatttattgattcaaggggatctgattggagaatttctcaaggccaatcaatgataaattcaggtggaactgatcggctggcaggggggcggtgatgccatcttttcgcccggcggtgccatcgccaatatgtacgcgatgaacgcggcacgccacttccattttccgcgtgcgaagccgctcggcatgacagccggattgcccaccctttgctgcttcacctccgaagatgtgggggatttaggcattattttagcaaaaataaacaattatcaattttgtgggatttataacagtatagaaattaataaactagtgtacattaattaattaactttcagagtcattattccatcaaaagtgccgcagctgtgctcggcattggcgcagacaattggtaaaattgtttttccaatgataccaattttgtctaggtttaaccattttaaaagttaggagtgccacatttattcattttccagcattgaacgggttcaaaaaaaggggtttaaaagcgttgctgcattttttgctttttctatcattttagcacctaagaaaacctacaaaagtgattttgtgtgttgttggctcagtgccttttgtcccatatttacctcaaaaaaatataattattgtttttgtggtaaactacaaactcttgaaaaatgaattccttcttaagaataaattctccgcttgttttcaaaataaataatattaatatacttttatcttttttactttttttatctctgtaaacaaaacacacttttttcagttttaatattcccgtggacagtcaggcccggatgaaccctgaggcgttggaagagtgcataattaaatgcaaagatgaagtgcttaatttttttgttaattattcaaaaaaagattttcaagtatttccttattaaaaatgtcaatttgattgacattatgacgggaatttttcaaaaaatagtcatataattctatattttgatttcaaaatgtataaattttctaaataagttttacttttaacaaaaaaaaaaaaattgaagataaaaggatatgaataacca

SEQ ID NO: 53690 - DNA, 2591 bp, Heterodera glycines
atggatcaattggcaagcggaattcctggtgttgttggctatatggacgacttcatcattgcttcaagcacagtgaacgagcatttttcaacaatttttaaattttttaagcgaattcaagaattcgggttccgaattcatatggacaaatgcaaatttttagttaaggaaatcaaatttttgggtcaaattgtttcgtccgatggtatccgtcctgatcaaaacagaacacgagcactgcaggaaatgccagcaccgacggacatcacaacactccgatcattcctcggggcaatcaattactatggaaagtacatcaaaaacatccatcaaatcagagcaccactggatgaattgctcaaacagggagtggaatggcaatggaatgaaaagcaccgcgaagcttttgaacaagcgaaatcaattcttttgtccgatttagccttaacgcattacgacccaaatttgccaattattgtcacagctgacgccagcaacaaaggaatcggcgcaacaatttctcaccgttttccggacggaaaagaaaaagtttttcaacatgctgcccgaacattgtcaaagacggaacagaattattcgcaaattgagaaagaaggacttggactcattttcgcaattcaaaaatttcaccaatacatttttggtcgaaaattcattttacgcactgatcaccgtccactgctggggatttttgggtccaaaaacggaatcccgattttttcagcgtctcgtctacagagatgggcactgattctactgaattacgacttcagcttggaattcgttcgcaccgacaacactggacaggcggatgtactgagtcgtttgatcagcgaacagcgcaattctgcagcaagcgaagacatggtcatcgctcagttgtgtgcagaaactgagtcggaagttgagcatcttttgaatgtgcagttggaacaacttccggtgacagtagacgaaattcaaacagcacaacaggacgacgaattgatcagggaagtgatcaaatttactcaaaacaaatggccaaaccatggcattaatcccgaaatcaaaccgtttttctcgggaaggcagaaattatcaattgtttcaggatgtttggtgtttaatggtcgatcggtcatacccccatcactcaggcaccgcgttttgaaggcacttcacttggcacatccaggaatcgttcgcatgaaaaatctcgcgcgaactcttgtgtactggccttcgatcgattccgacatcgaagaaatcgtgcgaaaatgccgccaatgtcaagaagcagcaaaacaaccgcaaaaacaaccgctacaaccatggccaacaacaacacaagttttccaacgtgttcacattgacttggcaggaccttgtagtgatggaaacacgtatttggtaattgtagactcattttcgcggtggcccgaagtgtttatgcttcgccacacgtcatcacaacatgttattgaacaattacaatggctttttgaccgatttggcattccgaaaacgctagtttcggataatggtcctcaattcagttcatcccattttaaagatttttgtgacagtaacggcatttgtcatctcttttcgccaccataccacgcacagtcaaacggagcagccgaaaagtttgttgatttcttcaaaagacagttgaagaaatgcagtggggataaaaattggttgaaacaatcacttttgtcttatcgctccatcccaattgcagttttaaacaatcgatcaccagcagaactgttcctcggccgaccactcaggaccaaactttcgctcatgaaaccggaacggccgaatccattcttccgaggcccgtatcaacaacgcatggcacaacagtttgataagaagcatggagcaaaaagggtagagtttaacatcggcgacaaggtgcaatttgtgaattaccgtgatggaaaaacattatggttatttggggaagttgtcaccaaaaaagggttaatttttggcattcgttccccacaaatcgcaaacagaattgtcactcgccatgcaaatgccatacgactcacacaagcattgggcactgatcaaacatggccaaattttgatgaagagcccaagaagaacaaatcacccgttcgagcaccacaaattcagcgaaatgtcacaccaacaccaccagccgaaagaaaccatgatcaatttgaacagaacgaagaagaacagaaccaacaacaaacaccagtgttgcggcgatcagaaagggttacaaaacgtgtccgtttcctgagtccaaggatgacgggacaacgacacaatattcgccagtgatcagacttttaagagagggaggtgttgtgtgggcaatcatggacctattatttatatttgtatgcattcctttttcctcttccaaacattgtactctgtacccaatcaataatgccctccacagaccaagtgcataaatacccttcgcttctcctctccctcgtctcttctcccattcattattcaaactcattcctcttccgacttctctcatcacttcttattcccttttcatttattatttgttgtgtgtgaaa

SEQ ID NO: 53691 - DNA, 529 bp, Heterodera glycines
atgaccaacagcaaactaatccatctcaacaacgggaaggtatctgcgataattgaaaatattttaattatttttatttaattattaggtaataaccagcagtcaaacagcagcgccctcaagaaatgaaattttttttcaattattatttgtttcaggtgctcagcagtaacgcaacctgactctttaaagcattaaaacggaaaaaggaaaagccgaaaaagaaatcataacgctataaataatagactaattaaaagcatttaaatttataatttttttattattatgacagtaaccactggccttagttctatttttcataaatatttatcgcataaaaacccgataattaagtaagaaatttgttttaacaaaacaaatatttttttataaagcattagagaaattttctaatccatgtgcaaaaaaaaaagagcttttcgagtgccctcccctaaaaattttttctgggtactgtttcctatgatttttttatcaatacattttgtgcaattttggccattta

SEQ ID NO: 53692 - DNA, 529 bp, Heterodera glycines
atgaccaacagcaaactaatccatctcaacaacgggaaggtatctgcgataattgaaaatattttaattatttttatttaattattaggtaataaccagcagtcaaacagcagcgccctcaagaaatgaaattttttttcaattattatttgtttcaggtgctcagcagtaacgcaacctgactctttaaagcattaaaacggaaaaaggaaaagccgaaaaagaaatcataacgctataaataatagactaattaaaagcatttaaatttataatttttttattattatgacagtaaccactggccttagttctatttttcataaatatttatcgcataaaaacccgataattaagtacgaaatttgttttaacaaaacaaatattttttataaagcattagagaaattttctaatccgatgtgcaaaaaaaaaagagcttttcgagtgccctcccctaaaaattttttctgggtactgtttcctatgatttttttatcaatacattttgtgcaattttggccattta

SEQ ID NO: 53693 - DNA, 1366 bp, Heterodera glycines
atgcaaaagggtgacaaagactggcagccatctttgggctccatcttagaactacagtttttatcgacaaataatggtggtcttggtgttccaattgagggaattacgtcgccctatttttatttacgaaaagccggctcatattttaccgcccacactgagaattctgacctttatagtgtgaatttattgtgcccttcaagcggaactgacaatgttggcataactatatggtacttttagtgggggaggggggtctttttatgacaatgtattttcaggtattcgattccggcggcagattttttgaaatttaaaaatctgctctcaaccttttttgttaaagaattcacaaatgatccggaatatttgcggaataagtcaattttggtgaaccctaatatcatccgtgaaaataggatccgatgtatccgaactgtgagttatcaataaagataagattttaagaaaaatatatttttacatagtgtttagtaatttttggtatctaaaacatttttttttgaatattttttcgaagcttgtgactagcaaaaacattatcatagtgattggaaattattttttttaaagaaattttataaccatatcagtttaatatataaaatattatccctaattttattataataaaaaacgtttatattttattaggttcagcgtgctggtgagggtataataactctcccgggttctgtgcattttgggttttcaacggtgagaaaaaaaactttgagccaaaattttttgatatatattagggattaaattgtgctgttgcgtacaattttggtccaccgtcttggattccatatggaattgattctaaaccatgctctggcgtctatacatatgcatttatagaggcatttgagctagcaaaactttatgtgcttaaatgtgaagatggtgacaccgctcgagcagcagaattatggaacaccaagtataaaaacatattgaactatgggcatgggttcgatcctatctacccaaactgtcgcccgactatcaccgaatctaatgacatcataccgagaaagtatgtactattgtccgggatttggtttagaagtgaaggattaatcgagaaagaaacgggaattcggcgtggcattagatatcgttgtattaattataattgtagggcctcttcaacttatgatctttccactttattgtttacaaatactaatcccgcccatcagccggttgagcataattttgaacctaatcgatccttgattaatttaccatattatgtactattttaaatttttttgtttgatttttcttgcaatttagttgccgatgttctgtttattcttttctattaaataataaa

SEQ ID NO: 53694 - DNA, 588 bp, Heterodera glycines
atgtgtgattacgactctattgtcggcgccaaaacgatcaccccaagctctgatgatttgggctcaaatattgattatttttttgataacatcatatcgctaaatgtctggtcgcgacttatcggtgttattcgttttcgcataccggaatcatttcaacttcctatatgcagaattacaaaccgaaaccgtgttcttgttcggtttgtcttaaaaatatcaaatatttttttatgtttgtttattaccaaataatttcttatatttgttttaatatcaaataatttcttatattttttaagtcaatgccaattaaaaaagcgcgcttctggattttatcatcaaaacgttttatcagaggagtacaaaacgattgctgattacaagcaaaatacacagtggccatgtctggaaaccgatcaatatgaaaagtgtggtctatttgttaacttataattttaagcaggaaattatcaatggacatttttttgtggagtttgaaaaaaaaagttttttaattcattttttttttgtttggttaactgacaaccccagctatataggttagcatttaaacaggataataaa

SEQ ID NO: 53695 - DNA, 2906 bp, Heterodera glycines
atgttccgttataacgtgcaaaattcaaagaattcaattggaaaaggtaataaatttattccaaaatcatcatttctattaaatttaattttaatttaaggtcatgccactaagaaaaacttaattttggtgccagacattgaaattggcgcgttcaaaacgatgctaagatttatttatacgaagagttttgatggattggatgccaataatttgttagaagttttaaaagctggtgaaaatttatgattgggattttaaataaattactatttaattatagctgacaaatataacatcagtggcctggtaaaagaatgtgccaacttttgtgccaaagtttcaattaaaaagttgccaaatgtatttgtggcttttgaacaggctttgttgctgaatatggaggtgaggaaagaattttaattattaaactcattattcatgtatctaaaattattcttcattactgacaaaaaatttacgggtgttcgttttttcaaaaattcaagacaattttcataaattttttgtccagttattttatttttatagagttgtacgcgaccgggacctgatactgaaagaacgtacaactgagtacctacgtcccggttttgaccgggaccgggaaaagtctcgggtttttccctgttttgccagccaaaaattcccggtttttcaacccgaaaagtactggtcccggttttctatggtacgatccccgacgagttaaagtaataattatataattttttataatatttttatttttgggatttttctctccgttgtttgcactacattgatcgaaatatcagtgctttgatcaaatcagaatcctttttgcaaattgatcaaaatttgttgtgtgaaattctcgaaagagatgagctgagaagcagtgaaatcgaaatttggaatgcggtaaattaaatattataaattacaattatttattttctaaaattaaggcactccgttggtccgacgaacagtgccgtcaaaaaggcatcgaatgttccgctgaaaatcgaggcaaaattcttgacccagttttgtccaacattcgttttccactcataccaaaagaggattttacaaaaagcgttggtaatgaataatattttgatgattagagagtttgctatcttgaaaatgcttgaacctggcttggattccttgttggacctggacctgtaatggttccaagtctggattaagggcttttcataattataccgtatttcctcgaataaacccccttcaaaatggggttatactcgagggtggggctttaatgttcaacccttttttacaaaattgcaatgtttttatgcaaatttttccaatagcaaatttttattagtctttgaaataggccaaaatttttgctacaatttaaatcttaacctgaaatttttaaattaaaaagatttttcattttttggcaccttggaaatttaggcgaatgcttgaaaattcataattcacttcgaaatggatcaattaaagtgcaaaaaagcattaaaaatagagaaaaatctggagaatttatactttttttaaggattttctagcttaaaatgaagaagttagctgataataaattttggaaaaattcgtttttcggaaaataattaaatcactgttatgaaaaggtatttttgaaagaaatatacgaaaaaaaatctgcaattttttccactataagattgcctttatttcttatcgaatcggaatcatatttttattttgcactaattataattctaataacctaattccatagacttaaaatttaaaagaccgtatgtcgtttttttaatattacaatgccccaggtcaaggccaaacttaattgatgactcattttatgaatgaattaattgtctaattaattatccatttcaatcaaatttcagttccaactggtgtgttaacaattgaagaagtgatcagcgtgtatcagcattattcccatccaaagtttgatgtccctgggcttatcaaattgaaatttcccacccatcaacgctacaaaaacggagaaaaaattgagatggaaattgaaaaagtgtccgaatttgcggtggaggaggtgggaagtgagcgattcagcgatgccatggatattgggggatttccatggaaaataatggcacaaattgaaacgaaatacaaaagcaatgagaaatggttgggcttttacctttccaacgatggccctaaaaaaggtagaaaaaaagtcattttcgtaaatctgtcagggaaaaacaaaaaaaatattatttcttactcattgttttaagcggaggaatacatttactaaattcttttttccagaggtttttaaatattatttaaatcattcgaactaaataaatgattatgtaaagaattttctacaaaaataaaaattcaaaaattaaaaatgcatgtgaaaaggactagtaaacttaataagtactgctttaaatataatgctaattttattaaatatttatttattgtgcagaaaattggtcttgtaaaagttcggcaacacttcgaattgtttcacaaaagaatggaacggaggatttaattggaacattcattgaccgcatttttaataaggaatgtagcagtcatggattttattatttcattagttttgcggtgagtgggattcaaataaatttaataaacttcctatcttgaaattaaaatttttaaaattttaaaaaagaaagtgacaaaaaaatgaatagaaatttttgaaattttttggttataacttgtaaatttttttctagattttaaaaaattaaataagataggatttgataggatatgtaatgcatcgtttaataccaatttttattaatttaactaaatttaagctaagttatggtttcttattagca

SEQ ID NO: 53696 - DNA, 203 bp, Heterodera glycines
atgaatccgccaacttttgctcctttccgtctcctccgacaacatttcgaccgattggctgtcattttgctcaattcgcccccggcagcggtcgttccctgcggcgattttgcatttccggccgattgggccaaaatttggaacagtgccaacattcgcttgtgcaccgatggggcggcaaatcatttgatgaaactgtgcag

SEQ ID NO: 53697 - DNA, 663 bp, Heterodera glycines
atgtgcatgtgtgctgtcgcagaatgcccgtgccgcccaaccccaacgtggtaactgagggcgcaagtgaaacaaatctgaaaatttttttgaaaattttttttcggatttttcgaacccccctgagccgctgccgaacacggacctgccgccgccgctgcaaaccgagcagccgattgagtccatcacttttcggcctccggtggacgagctcacttgcccggtcggttggagtgcgtacgaggaccaaagggttagccgcataatggaaaaacggaaatttttggaaaaattttttcacaaaattttcagggtgctcaccatttttgccaagatgcactggacatgacatgccctcatggttagaatacaatgttttttgtattattattgtatcactgcttatcaaatccctctgacatagttttttaatgataatcgaacatcatggattcaatggatcagcaatatgaggcataaatatactcttgtatatgcatattaaccaagggatataatgtatctggtatacaaaccataaatatacccgaaatcgattgtaaaggagtaatatacgccaaaacaagtaaatttgtatgtagccataaagatgtgtcataatataccccagataattaatacaatacaagaataatccatgga

SEQ ID NO: 53698 - DNA, 105 bp, Heterodera glycines
tgtccatttggggtactcgaacatttatggggagcaaaaatccaacgcagaattaaagtacaggctatagggaagctactcccgaaggattcggtctccccataa

SEQ ID NO: 53699 - DNA, 825 bp, Heterodera glycines
  unsure (1)..(825): unsure at all n locations
atgaatntactaatcactgttgtacctcttttaatcacttttgtacgttttntaatcacttttgtaccgcttctaatcactgttgtaccacttttaatcacttttgtacctcttctaatcactgttgtacctcttttaatcacttttgtacgttttttaatcacttttgtaccgcttctaatcactgttgtaccacttttaatcacttttgtacctcttctaatcactgttgtacctcttttaatcacttttgtacgttttttaatcacttttgtaccgcttctaatcactgttgtacctcttttaatcacttttgtacgttttttaatcacttttgtaccgcttctaatcactgttgtacctcttttaatcacagttgtacctcttcagatcactcttctaatcactgttgcacctcttgtaatcacttttgtacgttttttaatcacttttgtaccgcttctaatcactgttgtaccacttttaatcacttttgtacctcttctaatcactgttgtacctcatctaattacttttgtacctcttttaatcaccattgtaccgcttctaatcactgttgtaccacttttaatcacttttgtacctcttctaatcactgttgtacctcttttaatcacttttgtacctcttctaataacttttgcacctcttctaatcactgctacacctcttctaatcactgctgtacctcttctaatcactcttctaatcgctgttgtacctcttctaatcactcttctaatcgctgttgtacctcttctaatcactgttacacctcttctatcacttttgtacctcttctaa

SEQ ID NO: 53700 - DNA, 2222 bp, Heterodera glycines; identical to SEQ ID NO: 23000
  unsure (1)..(2222): unsure at all n locations

SEQ ID NO: 53701 - DNA, 1073 bp, Heterodera glycines
atggaaaacccgtgccaaaagccatcaaaagtattggcagaaatccgtgcaaacaccaaggacgaaacctttgtttccatgggcactgacctcgcactggtggcagtaatgagaaggtttttctcttttgatacgtgtattcctctttcactcttatttcaaaatttttaggcagaaaaggaagatttacggcaacatggaccgtgtcaaccctttgagtgttgtcttacccgatgccctgcttattaaggatggcgaaagcacattgttgtatgacagccgagcgcatcgccaaggagaatcggatgtggtcttggtctttgcacacccgaagttaagttcattcatttcatgttcaatttttcgcttttgttttcagctgttggacgttttgaagcgggcgaagaaaatttcagttgatggaacattcaaagtgtcaccagccgcatggacgcagtgtttcgtgatcggcgcttttgtcaaccggcggctcgcattatgtgtgcatgctctgttgcctggaaagcaacgaaaatactacgaagaggcgctcaatgcggtcaaagcggtgatggcacccagcaccccagcacatagtaagtgatcatttctcctaactttatttcatcccaaaatgtaagtcatcagtgactttgaaaccgcaacgattcgggccatgcgagaaacgtttccagcggcccaattgacgggatgtctattccacatgagccaggcagttttcagaaaatggcgcgaaatgggcttggcggaattgtatgccaacgacgaaggagcaattgatcggagatgcattggacgaggcggagtacaacaccgacgaagacgtcatgaacatcctttcactgctgagtctgcagatgcaaggatatgtgggtggcctgcgtgcacgaggggctcaacacgaacatgaggaccgtgaatgattgatcgctttataccattggcaaaaacccttgtcttattccgcacaagtgattggattttaaacctcaatttccgtggttttcaacattttcatttgattcgaactattatttttgatgtttattata

SEQ ID NO: 53702 - DNA, 132 bp, Heterodera glycines
ggaagctattttacatgaattaagacaacaacaaaaaaattatgtctggtaaagtgcattagtacccgcttccttttggtttctaattcgccaacactcggaggaatgccaaagaaaagaccttctcttgcg

SEQ ID NO: 53703 - DNA, 331 bp, Heterodera glycines
atgtctggtaaagtcagggctcggatctgttctaaatttatcagaaatgttctgatttgaagggtgttgtgttacgcctcccctcgattcgtctactcaacgattcgtctattcaacgattcgtctactcgacgattcgtctacccagccaaaaagtgacgattcgtctactcagcaaaaactcaacgattcgtctattcaacgattcgtctactcgacgattcgtctacccagccaaaaagtgacgattcgtctactcagcaaaaaagcaacgattcgtctattcaacgattcgtctactcgacgattcgtctacccagccaaaaagtga

SEQ ID NO: 53704 - DNA, 1273 bp, Heterodera glycines
atgaagacacgtctgttggtcggtaagcttggtgcgcaagaatacgcgcggttcacggagagcattctcccgcaaaaaccaacagacctatcatacaatgtcacagtaagcaagttaaagagtctattttgcggcatcaatcaatgaggaccgagccaagaacacggacatcaagtttgagcggctcgtcgaggaatgctgctccattttgtcgctcaggagtgccgccgctgcactcaaacatcctggtcacgggtggcaggccaattcaatttcagttaagccgcagcgtgagaaggagcgacaaggacgacagcgacagttcagcacatcctcgcaatcagggcatttcaatgaaggacggacgcgcagtcaatcagtaaatggccgccaatcatcaaagccgcgtccgccttttccatgcaaaacctgtggaggaaatcattggaacaacgagtgcagaaacaaacgtggaggaagtcagcgcaacaacgaatgtaacaacaaacgatcgcaaaagtgcttcaactgcaatcgagtcggacattttgcacgcgagtgccgaagcaaaaagcaggcaaacagcaatgactcgatgtccgtcatgaatgtgtccgacgacactgacggatggatcaccgtggattgcctcatcaatggcaggctggtttcattggtggcagacacagccgcccgaaaaaccatcatccaaacgcccatttgggagaaattgggaaaacccaaatttaaaacgggcaaaactttcggaaaatcatattcagggcataatttcgaattaattggttcatttgattgtacagttgagttcgcaggcattaaattggagttggaatgttttgtggcaccaacgggagcactcaatctttttggtcttccgtggattcgcgcatttgaattggcactgcaacgtccaatcgccacaacacttcaaattgtccaaccagaaccagcattcatggccatggcgtcgtccgcagacctggccagcaaactcaagcgaaaatttcccgaagttttcagctcagaacttggccattgtaccaaaatgcgtgcgcatttgtacttaaagccggaagcgaagccgattttctgccgccctcgtccggtaccgcatggcgccatcgatgccatcgacacggaattggatcgtttgttggcgattggggccattaaacaaattgattacagccgttgggcagctccgattgtggcgagtgaaaaagaagtcgggcgacgtccgagtctgcattga

SEQ ID NO: 53705 - DNA, 47 bp, Heterodera glycines
atgccaatgggccccgccaaaggacaattattgttcctccgattggg

SEQ ID NO: 53706 - DNA, 869 bp, Heterodera glycines
  unsure (1)..(869): unsure at all n locations
atgtgccccggcaatttgtcaccactttttgcgcttcttctgttggcattgtcgctaaatgccaatgttttgtctgcccatgaggacactttgctggacgaaatggagccggtgaaggaggacgacgcaggcgaatatctgacgaaattcggatacacaacgccctcccaactgaacgtgaagacggacggaatggcgggcgatctgtccaacgttttcgaaatggcagtcaaagcattccaagagattgcgcatttgcccgtcacgggcgtattggacatcaaaacacgcaagaaaatggcggagccgcgctgtggcatgccggacggagtggaaatgctgacagagggcggcggagcggcatttaaatggaagaagacggacttaacatgtgagtgatttggtgaggcgcgacagcaacagagatgagaccgcccctaattaattaattaattgaccaatttgcagacactttccacaacttttcgcccgatcttcccagaaatacagcgaggtaactattaaattggtgctgatcagatcagcccagaaacggcacctcattctctcatcccaagggaggcgatcagaaaggcctttggcatttggggggcagtgactccgctgaacttcagagaagtgcccacgtcgcaacaggcggacatcaacatcaaatttgctagcggaatgcatgacgacccctggcctttcgacaaaagaggtgccttggcatttttgcagttcgacgtcccctccccgtcccattcctcaggaggagtgctcgcccatgccacgatgccgcccagcggaatgttacactttgacgaggccgaaaattgngtgtacatggacgcggagaagatcagaac

SEQ ID NO: 53707 - DNA, 806 bp, Heterodera glycines
atgattgatcggttgcgtggcatccgtccaaattcagcggagagagaggacaatcagtcaaacgaaactcattcattcaacccgcgcatcgaacgtaagtttaggtcgagaagagaagtgggggaattgtttttaatgtcgtaagaaaaaataaaataattgtaaacaattaataaattttattgaaatgggtgaattagatccaaagtccggcccacacattgctggccctacaaacaaagccaaacttcacaaggcccactcttaatttagacaattaacgcacttaatttattgggctccaggacaaggaccaatcagaataatggaaaaagattaacatattatattattattattattgggccatcatgtgcttattccaaacaaataggtgttcttgaaatttaatttcttttgcacccaaggataagtagaagggaagtttcagtctaaagcctgcatttccatcgaatggacattcttccaatgtaggaacatggcccataggtagggcgggtcagctctccgccagaagaagtccgcgcggttgactgttcggggggggggagggctttgggccccgcagtcaaccgcctgtggcactcgtcggactgcttcctccgccgctccgtcctccgtctcgtagtatttgagttataatgaaatttgaaaatcttaaacttttgtcttatacgtcaaactgcttaccattcgcttagaaaaaaatcctccttttcaaaaacttttttaaaaacaaatttgttcagtttagttagaaatgaagagagttatggctgatcaaa

SEQ ID NO: 53708 - DNA, 135 bp, Heterodera glycines
atgggaacgaatgttcatctgcggaggaaaccgactgctgggaaattggaggccggaaaaggcgttggaaatggccagagaaacggaggacggcgaagagaatcagtcgcagcagaaaacgaacagcggaagaaa

SEQ ID NO: 53709 - DNA, 76 bp, Heterodera glycines
agttactggtgttagcatcatagcggtgcttttccttgtctttttgatgcccttgcaaaatctggtgcgcttctga

SEQ ID NO: 53710 - DNA, 2186 bp, Heterodera glycines
gacatatatgacgaggtgttggacaagttgcccgaagtgtcctcggatgaggacactccgcccgaccacaatttcatcaatgtcctttcgttggatggcggtggcatccgtgggctggtcatcattcaggttggtgtgaacacaatgccgttctgtttcgtcatggggggggggtgggtcaaccaaaatttttgcgaagggtctcggccatgtaaatcgacgaccttttttgcttttcaaaagcacttttttgcggcgcgcttttttcaagaaattttgcgaaaaggggggccggcggtttatagccaaatttaattcccctctttcccttctctacgaccccccccccccacctcttaagccggccccacctcgatgcgaaggggatccctcattttgggggctgctcccgatcagggattgaaaaatgtagggttgaacccgattttgacaaaggcgcaaatgtcgggacacgattgttagaacgattagggtgaaaaaaaagatttttttttgagtttttgggactctgccaccggtccttcttcatataattaaaaatgttctcacaaaaccacggcattcaaatcggtaatgctaattccgtcatattttcagcttctgatctgtgttgagcgcatcatgggcgagccgattttcccctactttgattgggttggcggcacttccaccggtgccatggtcactgccgggctcgcaatgggccaaacactgcaccaaattcagcgggttttattttatttattttttattatttccatttttatcgcattgacaattcaacatgtttttgcaataattcaaaatctaaatttatttatccaagcagagaattttgtctgtccatcttacatgaaaaaaaaaattttttttttttttttttggtgtttttaaacacttcttattattattttttacgctgaaaaatataaatttttggaattaaaaaaactcaaaaaaatttagattttttaatttttattttactgatttttgtgtgtttgcatttgcagctgtacttgcgcttcaaagacatggtgttcgacaaccgtaggccgcacaacacgcaggtgctggagaagttcattcgccaggagatgggggccgagacaatgttcagcgacctcaaatggccaaggttgcttcggtgttcccaaaatgtgtcagggacatagcatcgccgaaaaaaatctcggaaaaaaatccttggaatttttttttttgaaaaatatgtgtcgttgaaagcaaaaattttttgtaaaatttcttgaaaatatcttcttttttttttaaatttcggggacgttgccgaaaaatatttatatgggaagataaaatttgaaaatttaaattatttcctcatttaaaaaaaaaattccagacttatgttcaccaccacgcgggccgagttcttcccggttcagctggagctgatgcgcaactacaaactgccgacaaatgacgaggagaatgaggagctcggctaccggacgcccgacgatttgttgctgtggaaagtgttgaggcgttcatcggcgggtaaaaaaaaaaaaaatttttttaataaattcgcgaaaaattttcagcacctacctattttgccagtgtggacaacaaatacattgatggaggtgggtgaacagtggtgctttgattgttgttgttgtattaatcggtggacaattaaaatgcatttggtgacaagaaaaaagcggtttttcgaaatttaaatgatgaatttctgttttttgaatttttttggttgattttaatgaaattccatcccattataatatgtggtttttctttccataaccctcactcattttttgtcaggcattattgcgaacaacccgtcattggaactgctccaggaaatcaatttttggacagcttcacaagtacaaggtaaaacaccaataacaacagctaaataaatttttttaaaattttttttttcgttttttcagaattttcccaatgccgtgaacgttggatgctttctcagcattggcaccggtgtcattccgcccactccattgaaggtttttttttaaaaacaaagtgtcattaattcgaatgcaatttccagcccacttatatcgaagttgcgcaaaactggatcgcccaaccgctcacctcaataaacgccttttggaccatcg

SEQ ID NO: 53711 - DNA, 680 bp, Heterodera glycines
atgacactttgtttttaaaaaaaaaccttcaatggagtgggcggaatgacaccggtgccaatgctgagaaagcatccaacgttcacggcattgggaaaattctgaaaaaacgaaaaaaaaaattttaaaaaaatttatttagctgttgttattggtgttttaccttgtacttgtgaagctgtccaaaaattgatttcctggagcagttccaatgacgggttgttcgcaataatgcctgacaaaaaatgagtgagggttatggaaagaaaaaccacatattataatgggatggaatttcattaaaatcaaccaaaaaaattcaaaaaacagaaattcatcatttaaatttcgaaaaaccgcttttttcttgtcaccaaatgcattttaattgtccaccgattaatacaacaacaacaatcaaagcaccactgttcacccacctccatcaatgtatttgttgtccacactggcaaaataggtaggtgctgaaaatttttcgcgaatttattaaaaaaattttttttttttttacccgccgatgaacgcctcaacactttccacagcaacaaatcgtcgggcgtccggtagccgagctcctcattctcctcgtcatttgtcggcagtttgtagttgcgcatcagctccagctgaaccgggaagaactcggcccgcgtggtggt

SEQ ID NO: 53712 - DNA, 174 bp, Heterodera glycines
atgcacaccggttcaaataatcggattggcattcggtcggggagtgccggtgagacattcatcccctttaaaaatgataatattttttcactaatttcagcatcttctgcatcagcgggtgctgtaagtgatgagcagttccgttcgtccttcgaggcggtgccaaatgttcgg

SEQ ID NO: 53713 - DNA, 788 bp, Heterodera glycines
atgcagcttttcgtaagaaatctcgtcgggaaaacaattgtcgtcgagactgatcagcagttcggcactgtccgatcgatcaaagaacaaatcgagtaaattgaaggcatcccaacggatgatcagattttggtcagtaatatacaaatcacttcaaaaatttaagcagaaaaactcgaaataattctaattttttaaattattaagtaaaaaacatttacttatttgattttactattaatataattacgatttatttttcgatttttattcttccattttgtgcaattttatttaattttttaaataaaaaatgaaaaataataattttgattttggtttttttaaagtaaaaacacttacttatttgcttttactattaatataattacgatttcgattttttcttcaattttgaggaaatttatttaattttttgaatataaaaatgccaaaaaaagaataatttagatttttgctggacacattctgcacgatgaccagcagttggccagcaattgttcttcttcttctgctggcgatttgtcctctggcagttccattcatttgtctcttcggcttaatggcggcggttcgtacgatcgatgcgacccaaaattggtgcaattggccaaatgttttcgatgggataagctgatttgcaggtacacaaaatgggtattttaatattcaaaatggcttgtggcgcttggccagacaatagagtgccgacggaactttggccaattccgtcccaccaggggagagcatcatttaactatttttaa

SEQ ID NO: 53714 - DNA, 1318 bp, Heterodera glycines
actaaaaacaataccaagggggcttcatacggattggcaatgtcattgagcgtaagcccagctggaagaacattcattgggcgtatgcccagtgggaagggaagtcattgggcgtatgcccagtgggaagggaaatcattgggtgttttagagttcttttgatatggtattttaatcacatgaatatttttcaatattttaaattacatttaaaatcgttgtgctcttcacattaaaaatatctgttgcaaaattcttgttgtattaaaaatcaaagccgttttcgtgctcggatggggaacgattaaaaaaaatgtcgtaaaagggaaaaattattgaatatcacaccgcacaaaggttgcgttttatgttttttaatttctcaagacagcaaatttttatagggaatgaaacatttccaatgtttcttatgcaaaataaaaaatgaaagacatgtttcttatgcaaaataaaaaatgaaggacatttagcagggcgtgtctctatcacatttgattgttttctttttttatggcttgtgtcgtcataagattacacctatgaatctggatataaaatagcgaccactcgctcaaattttattgttttgtaattccaaaaacccaatgaatagtttcatgttaaatgtttcaatagcttccattctgatttttaaaatataatcgtatttagatataatgaattctagccccaattatttatcaatccgtaaaagcaaaggatgtgtcttagaacacgagggactatatgaaagtatagatttttctttttttcaaaaataatttataaaattaaggagccgaaacgtttaaatcacataaaagttcatcttattttgaagttcaaattttaaacagcagagggttagtgagtatttcgatattatgaatttcttattttaagacctatatgtgtggggtatgcaccaaagggccttcgaaaggaccaaactgtgggatgggccgacaacacatatggagttgactcaacaggccaaatttttaacaatggaaaggaatccgaatatgtagcaccattttcaaagggagataaaataggagttttccacaacaaaagagagaattgcctttcatattttttgaacggtgatttgctaggtgcgtgttagataatttttttgtgattgtaatatttattttaaggccaaaataaacaattcatcgcggattcaaacagtgggctgtggcctgccgtaacactacggcacccaggcgatcgtgtggaattccgggtcgattctgaattgggtcaaatgccgggaggactttggaaatga

SEQ ID NO: 53715 - DNA, 2938 bp, Heterodera glycines
atgtctcgtttctgccctctcgttgaaaccaaggaattgggacgcctttccgctccgaaggggaaatttagtgagtttgaaatcactttaaattcagcacaagatttgcaaatctttaacttttgtttaggcctattttactcccttgaattcgcacgaaattaccgattgattggaaaggagataacggaagacaagtttcgttatctcatgaaaacagagaaaaaacaaagagaaatggctgtcaaattgatggaaaaggccgggataagcggggaggaaaaaacttttggtctacaacacctcggtctcatccagaacttttgggacaaggaatacccggaaatgtttcgcatagtggcatttgacatggtaaaaaaattacgcactttgaaaaaacatttaattttccagagatcgggaatcaaacctattttcaagggagaaggaattcgtaaaaatgaagtatgtgtgataaaagatggagaccactgggacggaatgaaatcggttacgcaattcttctgtgttcgaaacttttgtgtcagctgtgaagtgacacgcgaaaggccggagagacatcgattggaatgtaaggaaagatgcaagaagtgctgtagaatggggttcgggtttccatgtgcggatgtgtgtgctgggatttattgcgcggaatgtaatcgcaacttctacaatacggaatgttttgagtctcacaagaagactgcttgtagggagtacaaaaaatgcgaaaagtgtggagagacacacaacacaaggaacaaacacacatgtggggagaaattctgccgaatttgtaaaatttatcatccaaagcggggctgtttcatccagaagttaaaaattcgttcaacgaggaaatacagaattgttgcatatgaccttgagacaacattgtataacggagtccatgcaccgaatctcgtttgcgcggcgttgacatgcagtgagtgcgttggagagaaaaggaaatgtgagatttgtgaggaaccgaggatgctgacttggtcggcagcaaatgtggaggatcctattggcggatttatcgattggattatgggcttcaaacaatttgaaacggttgcttttgctcattatgctggacggttcgactcacatttcgtccttcgtgtgctgacagaaagggggcttaacaccgaactgatgatggcggatctgaagatctatcagataaaggcaaagggtgtgtactttcgggatttctggttgctcagccaaaacaaattggcggatcttccaaagaccttagggctgagcatcccggcaaagttgtactttcctcataagtacaataaaaatgagaattttgggaagagattgtcacacctgccgccttttgatgattacaatccaaatgctatgaaggaggaggaatatgagaagtttgaaggatggtataacgagaattttgagaccgaatttgagctaggttagagaaagtgtgttttaaataaaattttgtatttttttaggagaacagcttaaggtttactgtgaaaacgatgtggaaatactgatggaggcaattctgaagttccggcaattgtttttggatattactgacgggatggatgtgttgaaggacagtgtcacaattgctggggtcgtgatgaggatattcaggacgaaattcttgaaggacaggcacattccgatcatgccggagggaggatatgaaagggctgataatcagagcaaaattgccgtgaagtattttgaatggttggcgcaccgggaaggcataagggtcagacatgcggaaaatggtggggagattaaattcggtgacctcaaagttgattgcgtcattggtggtcagaaaagaataattgagtttcaggttttcaaaaataaaagtcatccgttaatgtgagttctttaaggggtgtgcataccatgggtgcaaaaattgttttttgccctgggctgttggaccgaatggtttatgcatggaagagaattacagaaggacagagatgcggatggaagtattgagagaaatgtgtaaaaacttctcggtggaggaagtttgggtttgccaatttccaacagttattgattattgattgaacaaatttaggaatgtgaggtgaaagcggaattgaagaaaaataaggagatgaagaggttctttgaaagtgtgccggataagggaccgattaatccgagggatgcttacgcaggaggacgaacaatgcctttttgcttgtatgcaaaggctacggaagcagtttagatttcgatgtttgatattatcagtttgtacccctttgtgaattatggtaaaaatccgcttgcatttttaatattgccattcacttaagacactccttatcccgttggtgtcccaaaaattgtggtgagcaggaattttaatgtgaattggacggtgcccgacgatgtgccctatgatggactgctaaaggtgaaggtcatccccccgaaggaactgctgtaccccctcctccctgtgcacattgatgaaatgctcctcttcccaaattgtggtatttgtgcgagaaaggccaagaacgagtttgttacgacgaaggacgtgaaaaaatgtaaccatcgaccagagcagagggcatttttggggacgttcacttcgattgaactgcggaaggccttggagttaggatatagggttgttggcttctatcgggcatatcactttgagcaatttgacagtcaactgttcaaaggatatgtgcggatgtttttgaagataaaggtttaggcatccgggtggccagcagaagtgaaaagtgaggaggaaaagagagaattcatcgaaatgtataatgcaaagtacaacatttccttgaattatgacaagattgtctctaaccctggtcttcgaatgatagcaaaattggtgagaaaaacaaataaa

SEQ ID NO: 53716 - DNA, 2025 bp, Heterodera glycines
tttttggggccaaatttgttttaattaatcattaatagaataataataaattttcagcgttcccttctgacgttgaagagcgtctgatcgccgatctgttccgtggctataatcatctgatccgtccggtgccaaatgtttcgtcgacgccgttggaaattcgcttttcgttggcactcactttgctaattaatgtggacgagaaaaaccaggcacaaattgagaatcaaataattaattaacattaattaaattaattttattattttttaattatttaaaaaatttaaataaaatatttttcagattatgcaaacgaacgtttggccaacaatgcgatggattgactaccaaatgcaatggtccaacattccattttaaaaatataattattttaaatttaatttccaacaggaatccgcttgaatacggaaacattcgcacaattcgcgtccctcccgacaaagtttggctgcccgacatcgttctgtgagtcatgagttaaataatggtttaaaattgagtgttaagcttcaacaatgctgatgggaactatgaagtttgtaagtgtcattttgctacttattgtccatttgatcagtatcagttcattttccctcactaatttctcttttcctctgatcagtcctctccctacctcattttccctaatgattttcttcattcctttgatcagtcccctccctccctctgatcactgatataattatttttccctcactgatcttcttcttatcattccccttcctccctctaattatttttccctcactgatttcctcttttatctgatcagtcccttttctgtctctgatctgatcaccgctctcatgctttccccccccccccccaattagccttttattccaatgtcgtggtggagcacaacggggaaatgttgtgggttccgccggccatatacaaatcctcgtgcatcatcgacgtcgagtttttcccgttcgatgaacaaatttgtgcaatgattttcggatcgtggactttcaacaaagacgaagtgaccaaaaccatcaattatttggcaaatgatcaaatggggacaaaattgaaggaaatttggatttaatcaggacggactacaaaacttaaaaattaataatgcgattaattatgtaaataatctgtttgattaactttctggctcattgcggtttggtcatttaggtgatcatcagctatttgaacaataagcgtcaagcggagctcaacgattactcggagagcggaatttgggacataatggaagtgccggggcaactgatccatcagaaaagcaaaattgcatatcaaatcaaaatcagacggtgggaaatgaatgatcagcgagagcaaaataataaaaatgaatttgaaaattcaaataaaaacacattttcccatttaaggaaaactctcttctataccgtaatcctgatcatccctaccgtactgatggctttcctttcgatgctcgttttttatttgccagccgaagctgacgaaaaaatcactttggtccggcatttgcatcaaacatttataaaatttaaattatgttttaaatcatttaaaaaattaattttaattaatttgctctcatttgctaattaggcaattagcattctgttggcccttgtcgttttcttctgttggtctccaaaattttgcctccgacttccgacacaattcctctgattgccaaataccttttgatgacttttggtaattggcttacaattagcttaattaatacgcctttgactcacatcagtgatgaacatcatcaccattttggtcacggtcatcatcattaacatttatttccgtggccccaccactcacacaatgcccgaatgggtgagtaatgtgtgccattgccatcttttgccgaatcaaactcatttttcattcgaatttttaaatttactgtgccaggttcgtaccgtattcctgcgctatttgcccatttttctgatgatgaatcggccgcggaatgatccgtccgaa

SEQ ID NO: 53717 - DNA, 281 bp, Heterodera glycines
atgagggacgaaggcatgcaatgggtggggcaaatggaaacaattaggtaattattcattaattatccatttttggcatttaactaaaatatttgaatattaaaaaataaaagttaaaacttttaaattacaataattgaataaaataataaaaaaagtgaataacaaattctttctatcaaaatatcattataattttataaaataatattttacataaatattaatattaaaagtataaaatttaatccttttagattatattaattgtataaaataaa

SEQ ID NO: 53718 - DNA, 157 bp, Heterodera glycines
atgcaccaacaacaaccgtcgtcatcctcggcagctcacaatggaccacaggtgccgggagcggaagaacaaagaacggcatcattaactgtgccgacacggccaacggatggtcaacaacaacaccaacagcagaatgctgtcgaaataattaatg

SEQ ID NO: 53719 - DNA, 750 bp, Heterodera glycines
atggcaaaagtcgcaaaccaaaaacgaaatgagcgccgaattcgtgccgtccaagacttggcgcggcacctcaaccaccgaatgaaccgccatcgccgtgggcagcgcgacggaaaacgggacccgtcagaggaacggcacatccgaatgaccaccgaacgttatgcggatcagctctctcgcctgggagatgaccacattcaccgactgcagcaccaattcccgcaactccccaacccccgccggcgtcgatcagaggtggggggcaatctgaaagggggaaagtcccagccaaaattggcatcaatggtggtacgcccgccccagggagagttgctcccttcaaaggatgtcggcggcgcagcaccgggcgcatcgaactcccatggccgaaacgagaacgaagaggaaggccgagaaggaaagaggcagccgcccgagggtgctccctccgccgggggacagttttggagaattgctgaagaaagaggcgaaagctcgggccgaagtggccgagctcgaagcccgggcaaagaaggcgaaaatggagagggaggaggaggaacagaaactgaaatcggcgaaggaagcgcgccttcgggacttggaaacccaagccgacgacttgcgccaaatgttgggcaatgcgagctggccgtggtcgaggggcaaagacgggaaaaatggggaggcggtggctccccgcgctgggaaagcggtagccatgccagcagtgccgatggaggatga

SEQ ID NO: 53720 - DNA, 547 bp, Heterodera glycines
atgatgccactgctgctgctgttgctgcggacggtgctgacactgcttggtgccctggccctcgtgttgcaaccattgtgggctcgtcaaactttggtaaaaaactaaaacaaaaaactatgccaaacatattttttgaaattttgtgacattttcttaacaaatttctactatataaaatttacccaaattttcccatttttttttaatttgactcaaaatcaaaaaaatttcattttttttaaaacctaaaatttgcagttttttttaatttccgagaagaatgtgtatagcatgcctctcccctttggtgatagtttttttcccttttttatattgcattttccccaaggttttcggtccgcccaccgcgacttggaggcccaacttttgctggtgacggacaacgacgcgttgagggagcaaattgctgaggtagcaaaaatcagtacaaaagcacagaaataggtgcacttgggaccaaggagcagtttttcataaattttttcaaatttatttttagaattttgagaaaaaaaataataaa

SEQ ID NO: 53721 - DNA, 156 bp, Heterodera glycines
ggccaatctgttccgattttcattcccccaaactgctcaatgcgttgtgtaataatggcgatctaaagattagcctgccttagtttacacttaattagcttattcattctcatctcattgtgccatttttgtattgcaataaaaattcatgtaatt

SEQ ID NO: 53722 - DNA, 244 bp, Heterodera glycines
atgtacgaacactacgcgttggacttcgtccgtcgcgctgtgcaggcgaaccaaacaggtgatttactacaaacagaagcagcagcagaaggccacatggtctttcaaccaaccatttaaatagatggatttctataaaattgtgaatttgaaaattcaattttaaaaaatttcttttttgtttctgtttgaatattcatattttccagttcacgttactcgagaacaatgtcgaaatgtgtga

SEQ ID NO: 53723 - DNA, 358 bp, Heterodera glycines
atgggcctgttcaacgtgaaccaggaagttgagttgttcagcaaattgttcagcagctgcaccacaaccagcagcgtaagtacaaaaaaaaatggaaaaattctaaattttgggtaaaatttccgaggagcgaaattttaatttttcccaattttttctaaattttcttttttatttccagcaaaatggcgacgacgacctccgccggctggagttcacgctgatctccgcctacttcaacctgttcgacccgtacgccgacctcattctgcacaagtgccgcgacccgttcaaaattgtgttcgcgtcgccacaggtgttttttgattgcaattttcaattggcccaatcaaattga

SEQ ID NO: 53724 - DNA, 7071 bp, Heterodera glycines
  unsure (1)..(7071): unsure at all n locations
atgggccttttgacgttgggcactccgctgagttggcccagaatagttgagcatctccagtacatcaaggtgagcgaacagagaacggccgagttgacagaatgtgttccccatggattgtaatttgttcccgaacctttctgggccatatttccagaattgttaataatttttgtttggtttttggggttgaaatcatgaatgattttggggttattcccacacattcttggcaaaattttcgtgtttattgcatcgttctgacgctttttaggttgtccatttttcggcgttatccccggtaattttggcttttttagttgtttccccgacaatttggggccattttcggggttagactctcaactcttaatgacaccactcttcatggaatattgaattcgctcttaatgaaattttatttttttaaaattttccaggcccacggcatcgaccagttcattgcgttgtatcatcgtgtcaagggacgcgagcgggaccagttgcgatggggtgatgagattgagtacacaatcgtaaaatttgatgacgaacacaaaaaggttggagggaggggggggggggggtacgattttcgaaaaaatggcatcccccaccaattacacaggtctagggatacaaatttttggtggttttttctgtggcttcgtttttatgttcttttacaattagtccttaccctaatccattttcaaaaaacaaaaatgatgtatggaattggaaaaatttttttttttttgcttgcataaataaacgatcaaattgtgtcttccaaatagcaatagtttggcgcatttgttaactttattcaacgcgacatttgcaaaaaaaaaacacaaatntttgccattaaacaaaaaaatctataaaaatttatgaatttttttttggggggggaccttctccccccttcccccctcatttaaaatgattgcttttcattttcctattctaaaatttaacaattgtggttgatgaactgaactccttgccaaggtccgtgtctcgttgcgtgccaaggacttgctggacgcgctgatggccagtgaggacgtgaaccggtcgttgggcgaggagaaccgcagtctgtggcgcccggaatttgccgcttacatggtggagggcacgcccggcacaccgtacggcggtgagtcatcagagtcggtggtggcgggtgtgaggccattacccaaaaatcgggtgtttttccccttccgaggtccctttccccaaagttttcaaaaaaaaaaaactttttaatttttggtgcgaaaacgaactgttcccatccgaaaacatctctctctctccatattgttgtcggtctcaattttatctttattttcaaatttgggacatttgtagattttgtttcaatattttgaaggggatggataccctttccgagggttgctgaattcagattcaggatttcgaggggtttttgagcctccgggtccgagagcagcttgtccccgaattttttaaaattttgaacatcgtttggttgcaaatacttactaattcatcatgaaatattgagataaatcgctagagagatttttctggtttttttttcttgaaattttcataaaaaaatgattatgaaaaattcctatttcgaaaattttcaaaaaatttctggacctaacaagggaaacttgtgtgatgtgtagtaccccgcttattattaggcatttccccatagaaatttggcatatttttttaaattgtcgttccatggcaaattacacgttgtccctccccattttgtcgtcctgtcccatgcccttctttcatcatcattctgtctgtgtcaggtctgatgtcctgcttcaacattgtggagtacaacatgcgcttgcgctacgacgacgtgtccgcactgttgcggcccaacgagtcgctgctgtccatcagtttcccggcacttggcgcgcccgacttcaccgacccgccggcggtgccgcgcccgactcatccggacagtgtgggccattcagtgttctacccggacgaggccatctacagcgggtcattattactgcttggcggggcggtggaggggacttattattagaaatttgaatatttttctgattaattttgcccaataaaatttgaaaaaacggaggcataaaaatttgaataaatttcgattattctgctaatttagttcatcaattgcagaaatttttggcatgacggatacatttttatataaattttacatttcgaatttggatatttttgagtaaattttcaccggttccaaaaagtatcataaacttacattcagttgtaaataatttcttaaaattttcgaaaattatatttgtttttccatgttcggaaaagcttttaattaatgcttattttaaaaaatttcaaataattttggaattttcaggcacccccgttttcgcaaccttgtcaggaacatccggggccgacgtggcgaaaaagtggccataaatgtgccgatttttcgcgaccagaacacgccatcgccatttaccgtatataatattttgaaaatttgaattaaaacatttaattttaaggcaaaaaaataataatcaaaatttatcgaaaaattgcatttttaaggagacctttgaaaacgccgaagcttcacgggctgcacttcccgaccacatttacatggaccacatgggcttcggaatgggtaaatccttttttcaacttaataatggtggagcaggaccaaatatttttcatggaaatttagcagattgtttcagaacacctagttttcaaaaaggctatttgttggcgacgtttcgccgttttactgaaatttcgtaaagcattttctgattttccggggttttattaaattgacacattgaaaaaacgcgttttttaaatttagtaaatttccgaatttttccaggcctttgctgtctgcagatgacctttcaggcggtcaatgtgatggaggcgcgttggctgtacgaccaattgaccccgattacggtagagtactgttttgtagtggatacaagtgtaaacctgcttatttatactggttattgtattacattttaagcccatcatggtggcgctgagcgcgggtaaaatttttttttattattattaaattttgttacaaaaaaagtccatttccatttttaaaaaaagtttgatttgcattttggacgtgcgaaattcccaggattttgtctcggaggagatatcgccccaaggcgaaattcaaattttcgaaaaataaaactcctttcccttttgccaaaaaatgttatttttaatgtctaaattttttccggtttagttgataaatgataatttactaacaattataaatatgcttatttttctgtccgtttgttcagcaacgcccattttccgctcctatttgtccgatgtggactcgcgttggcccatcatttcagcggttcatttcgaaaaaattccaaaaaaaaaaaatttttttgccagagtgtcgacgaccgtacgccgtttgagcgcggtttggtgtccagcgccagcgatgggtacagcaaattccacgccatcccgaagagtcgctatgacagcaccgactgttacatttacccatgctcggcccagtacaacgacatccaactgcagtatgacgagcagttgtaccagcagctgatcgccggtgggtcccagaaaagcgaagtgatcagggagatcactcactggatcagcgagcattattgtgattgggaatttgctctgatcaaacaaactgatcagagtggacaaatgggaatgaccactggggtcctaacaatttttttaattattcaacgaatttaccattgtatttcatatagttttctgcgaaaattttaattttcctcattctattaagacgtttgtttgaaattttaacaaatttactttgtcgagaaaaatttcaaaaaatttggtcggatagcgttaatttctttttttgccatcatcaatttgacccattttatgggattagaaatttatttcatgatctaattaaatgctttttcaggcagtgttgacgaacacctggcacggttggcttcatttttttgatagggcacgggaaactcgagccgctcctaaccggggacaggacaaaacgtcgccgcgaatttttttaattttagaaaaaaatcacgaaaaactgtctaaaattttagtacttacaattagcataataaaaaaatttaaaaanaattcaaaaaaaatatatntaaaaaattcaaggaaataaaaaaattttgcggcgacgtaatgtcccggcaacgttttggggttcactatgctaaccgccacattttttgaatttgatttttcttttttggcgcattgccaccacttttgtctctctcttacattcattttgccccactgttctgttcagtcacattgcgcacatgttcatccgcgacccgttgcaggtgttcgaggaacgcattgagcaggacgaccaaaagtccacggaacacttcgagaccatccagtcctccaactggatgaacatgcgcttcaaaccgccccctccggacgacccaaacattggctggcgcgtcgaattccgacccaccgaagtacgcgttggtgttgttgcaattttcccggcggcgtctatcggcaccgccggaccacccgtcaccccttccccaaaagttttttggaaaacacgccgcaaaaaaaagtgtggctgaatagcaaaaaaaagtcggagaaagaaaagtttggaccttcgtatgaaaaatcggtcccgagacaccccctctggcccaatcgtccgtcgtacagcccttggtctgagacaccccttgtatatgtatgtctgagattatcagtaacagcaattaatctagaaaacatttgttaaatgtgaaatactatggatttgaaaattccgggaacattttttagggacaaaaaaattttcggcttcttcccctctctcccccttcccgtttttttttgtggggcataggcttgggctttttttttggttcttaatataaaaattgcttttaagctgcatttacaattagtaataaaaaaaattgccaaataaatgtgccgtttagaaaaattttccgcaatttttcttccccgaatttccctcccccccccccaatttcacaggttcaactgacgcattttgagaacgcggcctactgctgcttcctcgtgctgctcacccgcgtgatcgtctcatatcgacgtaattattgctcatttttatcattaccactaatgaatcccaaaatcttcgtttatggtcaaaaacccgggtacaaaatggtggactgaaatttaaaaatttccaaattttttttgagggttttcttctgtttcatttaaattttttcaaatatttaaattttagagtcatttataattgtttataattaagctgttcgttcattaaagcgtatgttttatggcattttcaccaaaaaaaaagccaaaattttcgcaaaaacagtgacaaatgccaaaaaaaatcaatgttcctttcccctctccgcttttcagtcacttttctcatcccaatttcgttggtcaccgagaacatgcagcgcgctgtgcgccgtgatgcgatcagcacgcaaaagttgcacttccgcaaaacgctggcccattgttggcacacgccggagggcaaaccgtgccccgaggggcgcccgccggccgagccggagcccgagccgtacgataacaacgtggccgagatgagcattgacgagattgtgaacggtggggtgggcagttgagttcgggaaatcacgccgcataaattttttttgggaatttggcaatttttctttacctcgcccaattcgacaaaaaaaaaatttttttttgaaatttttccagggctttttcgttttttttttgaaatttggcaaattttgttttgaataacacgcctgggtcttcaaaatttccatattttcttttttgcacagggaacaccgattttcccggcctcgtgccgctgatgcttcagtttctgaactcggccgacgtcgacgtggacactcggtgagtgaatcatctgatgcactacagttccacctgcatcgtttttgaaaaattgaaaaattttttgggggtttttctgtaaaaaataaaaaaagaataactgattttttaaaattctctttcaaaagttgtaaaaaatgaaagatttttaaaaaaaatcttttactaggtaaaactaaaaaattagctttgaattttttttcaattgttggctttttgttgttaactaactcatttttagttgcactgtcagccagtacctgtcatttatccaggtatatatatttgtttacaacattgaaatttatttgaaatttttcatttttttcagaagcgcgctcggggagaaatttggacgaccgccaaatggatgcgtgaatgtaaaatacatcaattaacaaacatgcaattagctaatatattcaattacaaatacttgttttcagttgtccaccagcatccgacgtacaaaaaggactcgcacgtgccggacgagtgcatttacgacatgatgaagacggtgagtgaatgagccgattgtgcaggttgcactgggttatttctcgataactttctctgtattttccctttacctctccctccttccctcactcactccatttctcaacctttttttccctcatccctcctctctctctatctctctctctctttacaattttccttctctctctctctctttacaattttccttctctcactctctctctctttactatcttccttctctctttctctctctctctcttacaattttccttctctcactctctctcttattttttctctctattcctctctccctctgacttatcatgtacctactaacaacacattcagatggacaagatttcgcgcggggagcactgcgagaagttgttaggctgtttcaagacgaagacggaacagcgtatcccatccgctgtgaagcgtgccgaggaggagatgaccatgctgatcgcacggcggaaa

SEQ ID NO: 53725 - DNA, 575 bp, Heterodera glycines
atggcagatgcatccccgccgtcctgccccaataaggtgggttttgaagaattgcaggatcgttagatttggtcgacacagaaaaaagttgtagtccaaaacttgggctggcaccgaaccgtcctgttccgtgaacggaccaggccgttttcgcgccagcgcagtttttgaactataacttttttcattgtcaaccaaatccaactttcttgctatcattcgatagccctatatttcctctattagcttgcaaaattgcgaaaaatttggttaagcttcaaaaaagttatgggcagaaaacttcaaaaaactggttttcgaaacatttttggccggaacttttttgaaccttaatgaaaattttcacaattttgcaggcaaatataggatatttagggctatcgaatgataccaagaaagttggatttggttgacaatgaaaaaagttatagttcaaaaactgcgctggatcgaaaacgaccccgacccttccgtgaaaattcactattttggcgttctgtcactattttttttcattattttggcattttttggaatttctctataaaaatgca

SEQ ID NO: 53726 - DNA, 333 bp, Heterodera glycines
atgggtgattttgttcttttagcccaccctatccaaggaccaccggtttgttttgcgatttcgccattgaattgtccgctttatccgattcgaactgccacctcccctattcagggcgcatacggaatccccggagagcctggcgagagcggcactccgggaacgcccggattgcccggcgagcaaggcctgcagggataccctggcgacgacggtttcccaggcattgcaggcaaaccgggatctcccggggagcttgggccgcctggcgaccagggcaagcagggcgggtgcgatcactgctcaccgccacggacagcgccgggctattga

SEQ ID NO: 53727 - DNA, 1263 bp, Heterodera glycines
atgaatcgccaaatgtttttattcttatttttgttgactattgtccaatcgaattttgaatttgttcgtgaaagtgaaggctggagcgcctcggacaacaacataaattcaatttttccacaaaatatcgtaaatttatttgtttaattaattcatttatttaaaaaaaaaacaaatattaattttctttaaaaatgtgaaattacaggcgaatgaatttggcaccacaaaaaatcgtcgagcggctgaaatgaattttggcaaagatgccgaaaaacagcataaacaccacaatcatcatggtaaaagttatccaaaaattttaaattgagattaattaaaaatttcaagaggcttggggctatgatgaccatgacgggcctcataagtggggaaaacaggttggaaattctaattgaaaattttaatttcttttttaaaatttaatttttttttaacacagtgtcaacacggcacgcgccaatcgcccatcgacattcgaacatcaaatgttgtgaaataaattaattattgcttttttttgggacttttgagcaaaaatcctccccccccccctcctccctttccgaatataaaaaaatgatgaaatttaatcaaaattaaaaaaaaatctcatcaatttaattttgacatttaaagaaagctcgaaatttctactatttaaatgattaattcgttcttagcaaatttcctgttagcaattttacttttttaagaaaatttaaaaattctgcagcaaaaacgaattttatgcttttctcatacataaaaataataaataaataataaatctaattatttatacattttaattattttaaaataaattaatgaaaaacacctaaaaataataattgtagttggaatttgccaccatcaatgagctccaatttgtgaattatgacgtgtctggcgctgttgaaatcaaaaacaatgggcacacaggtaaaaaaaaaagtcaaaaatttattaaaatttaaattattgaaatttaatggcacattgggataaaaaagatatttaaaaataaaatttaatttattgcaaatttaagttgttgtaagcggcttcgaaaagtggcaaaaccggcaacggccttacatttacgggggcggtctgaacggcaaatatttgttggcccaattccatttccattgggccgcggaccatgacgacggcagtgagcacaccgtgaacgcattacactatccaattgaagtgagaaatttggaattattttaa

SEQ ID NO: 53728 - DNA, 772 bp, Heterodera glycines
atgaaaatccgaaagtgagtgtttaaaaaattgcaaaatgatgaaaattagtggttcaagcattctccacctccgcttgtagaaatttgtttaaaaaaagtcaatcgaatttttaattttaaaaatcattaagttccacttgcgccggaaaaaattggttgtttggacctgctggacatgggtattctgggaaaatccaagaaaatccagcaggtctaggaaaaaccaaggttagtaaataaaataaaataaattagacctggttccatgaaactaaatcattattgtcaaggtcgaaatctaatttatatttaatagtgatgtataaaattttgatcagtaatttacagtttttccattttcgataattctctttcgatttgtccctaattttttcgctatttttgagttaattttattccattcttttgttgaatattttcttcctttttgcttaattttctcttttattttataatatttaccaattatttctctttttttgagttcatttcgtttttcttcttctttctcttcccatttttctccaaatatttcgtcaaatgatttctgttgtaatttttatttgttgaatcaatttggtcaattttaatgacccaaaatattataattggaattaataataggcagagtttcattttcttcacaatttttcaaaaaaatttataatatatttcttataaaaatgttattttattaattatatttgcatttttaaaatgtgcctttctactgatttcttgtaaataaa

SEQ ID NO: 53729 - DNA, 858 bp, Heterodera glycines
atgaaattgaccatcaaccagagactgggccaaggtcagcaagcgtacttgcaaatgtgccgccaaatcgggctcggagaaaccggagagcacttctggattcctccgcagttcctcgttaagagcaaggaagagctgatagactatgtctatcctaacttccaacaactccttggcaatgacaaggagctgctcaatcgtttgattctcgctccgcacattgacacgtgcgacgaagtcaacgagatcatgatggcgaatgtgccaggtcaagtgcgggaatacttgtccacggataagccccttgacgaccgcccactggacatcgatgagatcgagtccgaagtggctgcgttgaaccggcgcacagactcgggcatgcccccgcacagtctccggcttaaagtcggatgcgtcgtcgtccttcttatcaataaaagtgataaggaaggactgatcaatggcacacgcatagttctggaagaacttggcgatgatcgcctcattggtcgtgttatcaatagcaatgctattggcggccaagtgagattctttcttgaaagaacacgaaatgtctatgaagacaaatcgcctggcggcataaaatatgagcgtttgcagttcccaataaagcctgcattcgctatgaccattcaaaaaggtcagggccaaacaatccgcactgtcggcattgatctggaaagggaagtattttcccacggtcaattgtatacggccttctctcgggcaacagacggaaacaatgtccgtgttcatgctcccaaccgggaaatagatgcccaaggccgagccaaagtgctgaatattgtagctactaatatgctcaagttacaataa

SEQ ID NO: 53730 - DNA, 431 bp, Heterodera glycines
atggcatttgatgaagaaaaacccgtggatttgcttgttcatccaattcttcccacaattttgcgcatgttaaaaggcattggaattttttaatgaaatttgtaaaaattatataaaaaattccactgattcctcttagaaaaacagaatacctgccacaaaattggacgtaacatgaaaatgcctcgtgaaataatcaaaatacggtagtgcataaaatatattttccataaattttatttaaataaaattcacattttagctccaaatctgccgaacacataaccatgttgggtgttcttgaagattaatgataattcctttatcctcatttgaaatctcatattgatatattttttaatccatatattgaatttatttgttttattttgaactttattgaaattgtttttgttttaagaaataataaa

SEQ ID NO: 53731 - DNA, 484 bp, Heterodera glycines
atggcaatcgtgtatactgaattcactcgggaaggtatagatacgtggttgttttatgctaaattttgaaattcaagaaattgacgaagctattgaggaagcagttttgaaagtgaaaggaggaactgagagagatggcatgcgcgccgccttggaaacgattgtgagcagccctcatctgctgttgaacgatgtggcagcgcgtcacaacatcgactacagaaaagtttctaagtacagaaacagatttaatgtaagtgcttccatgaaataacttcgatataatgtttgggatttagaagattttgtcggaaatgcgggaacagcaacagaggggttcaggagatagccggcatggagtaaacaaataattaatctattggaacaagattaattataggatgatgcgcaacccgcgcgcgagactgaacaccattatggtgattatgagagcgagattctcggatacttcaaaaggcgtcag

SEQ ID NO: 53732 - DNA, 1113 bp, Heterodera glycines
  unsure (1)..(1113): unsure at all n locations
ttcataaaaatttaatttggccaatttccaatgttgnccacttaagcaaattctgcgcagtcgtctcatttgggtggtgtggctaaatgcatttgccgacctcttctcgggcgtctttctgctcatgtacattcccagctacctgaactacggtaaaaactgacgggtgttactgtacggacaaaaatagccaatgctaaacagacacaaaatcgaacaaatccttcttggttcgaatattggtttatctaccgtagtcccttcgcacaccgtctctcacttctcagttgctattttccatacttattaccgtatccctaattttggttttagtgttgcactacggtatcgaaaagacgggctttctgggcgcattgccttccctttcgcacattccgctcaaatttctgtttggctactgtagcgaccaattcaagtgcgtaatacgtacagtatggcgatgaataaccattattgattgccaactgtatcccctcccgcgccgccccaatttgtgccgcttttcgcaggtgccttcccgagcgtaccaagctgattctgttcaacaccatcgccgtcggagtgccggccattgcctatttggccattggcttcgttcccgtggaccggccgatgtggacagtgctgattttcaccgccattctgatgctgctgtccaccgccgggggcggcttttataaatgcggcactctttgctcgaggcaaaaaaaatgattgaaaaatgaatgtgaattttattcaaatgccatcgccgtcatgttcaggcagtactcgcactttgtggtggccaacatccaattcgtgaagagtttgacgcttttcgtgggccccgccctgctttggctgttcgttgaggatgaaactgatcgagatcagtggcgaaaggtgttcattctgttggccgtaatgctgatcgtggtgagagtttctttgactgcctgcactcatttgttgagagaaggncttacgagagtcttnccccccttcccnctccccttcctcgtccatttttgtcaatagaactttcaatattttgcaaaattttggcataatcattgttagatgaaatttaaaaaatatttgacagttaat

SEQ ID NO: 53733 - DNA, 1304 bp, Heterodera glycines
gaaaagatttggttgcatgcctttgtcagatatttcattttgcttctgagttggctctgtctgacctcaatttcgtccaacatgttggcactgaatttcacattgatttgcatgggttcggtgccgaccaatggcaccgatctaagcggtgccgaagtgggcgaaataatcaaaaaatgcatttttatttttaaaaataaattaccattttcagcaacactccgtcgcttacactccgcagcagaaaaaccaattgatgtaagcagcagaagaatgatttcacacttatgagcatgccttggcacttttcaggtgggccgttgcggttggctcaatgctcggcactttccccttctcctggctgtacacccgtttcggcgcccgtttcgtgctgttcggtgccggattggcatctgccattgccactgcgctgattccaattgcgacatcgttcagtttcaacctgtttttggcacttcgctttgtgcaggcaaaaaaaaacatagaataaatttggaaaccgaatggaaagccatcccatttgggcggctaaaatttctcgaaattaaatcgaatatgtccgactcacagtattaaggatacgataccgatcaaatttccccctcccccaattattgtctgaatttctccgcaattcttcaatcactcttttcccacttttccagggcatttcctatgcagctgactttgccgccatgggcatgatttgttcccggtgggccagcctgaagcagaacgcgctgttcatttccgtgctgacctgctactcgcccctgtccaccaccatcaccaaccccatctccggcatggttggcacactcttcaaaagcgctttttaatcagcttacctaccggactttggcatttcccctaccggactttggcatttcccctaccgtattttggcatttcccctaccgtactttggcatttaccctaccgtattctggcattttccctaccgtactttggcatttcccctaccgtattttggcatttccactctaatcccctaccgtactttggcatttcccctctaatcccctaccatactttggcatttcccctaccggactttggcatttcccctaccgttctttggcatttcccctatcgtactttggcatttcccctaccgtactttggcatttcctctatcgtactttggcatttcccctaccgtattttggcatttcccctaccgtactttggcatttaccctaccgtattctggcattttccctaccatactttggcatttcccctctaatcccctaccatac

SEQ ID NO: 53734 - DNA, 250 bp, Heterodera glycines
atgacactgaaaacctttcactttgctggcgttgcgtccatgaacatcacccaaggcgtgcccaggataaaagagtaagcaaaaaataaaaatatttttttggcatttttttaaaaatttacaaatttgtgtagaatcatcaacgcggtccgcttcatttcaacgcctatcatcaccgtggcattggccgatgagcgggacgaaaagttggcacgacgggtgaaggcacggattgagaagaccacattgg

SEQ ID NO: 53735 - DNA, 484 bp, Heterodera glycines
atggcggcgggggacggactgattttggtggtacaaccgaattaaaaaggtaaatctcccttggcacgcctttggcgtgcctttctaccgtatttctctaattgtcgccccgtctccattaatccccccgtcctttctgaggaggttgaacaataatcccccccgtctccatttatccccccgggcgataaatggaatttttatttttttgaaaaaatttctttttaaaattttaataaaaattaattcatttaaatcgaaactcatttactcgggccaggccgttttcgcgtgggccgtttcgcgtcttttttgaaccttaacaaaatttttccaaattttgtaggctaatagagaacacttagggctatcgaatgataccaagattattggatttggttgacaaagaaaaaagttaagttcaaaaactcgccccacgcgaaaacgaccccccccatttactagtatgtaaatatttaataaa

SEQ ID NO: 53736 - DNA, 1127 bp, Heterodera glycines
atgtacccaaaattggtcgatcagattgcgggaggaattgccaaagcagtgcaaaaggccactgacagtcacgcctttcacgagttccccgattgcttatcattggcccacacggaccgactctccatcaaactgaacgctgctcacagtcaaatgtaacagtaatcattttttgagaggaaaaattagacgccgaggaaattaaaaaaaaattatattttcgaattaaaaatgtgaaaaatgtaggcaaaaaaaaaatatttacataaaatgctttagggactatccgtcagaaatttatttaaaaaaaagattattataaaatacataatgattaaaataatttgatatttataaaagtaataataactttttttttaaataaacataatttctataaaatagtaaatttaattaaatttttaaagaaatattgcaaaaaaaaaactgcaactttttttaaatcaaacagattttatgtagcaaggaagtttatcattgagtaaaaaataaaatacatttggctgacggattgtcctccatcactgaatcaatttgtaaagatacctttttatcccctccgccttttgcccccccccacctttttttgtcccatccgtttcccttttttacccttttcagacatcggtcgcttcatcgatcggctaatttgacacagctcgatgcgattagttttaaaattagaaatgaagagcaaaagaagaagttggtcatgacggcagaagtccaaaaggggaacgggctgctgttgaagaatgaggctggcaaagcggtgatgctcgtcagactttccactcacacggccgactcactcggcaaactgatgcacccgtcccaagcgacgctcttcaaggtgggcatggtaacattggcaagcagtgcaccagggatgggccaaattgaaaaataaaaagcgaaatgcgaaaagcgcaatttgcgaaactgaaaaatgcgaaatgaaaaaaaaagcgaaatgcgaaaagtcaaaatatgcgaaaatgcgaaaagcgaaatgcgaaaagcgaaattttttctacaaatttttaatagttaaaatcataaagcaaaaatcattttttaaaattttattccaaatttaaaaatca

SEQ ID NO: 53737 - DNA, 564 bp, Heterodera glycines
atgccgaaaacgccaaggcagcagagaatttgccagctgaagggaaccgacggcgtagcggtggtaattaccaatgtgcccgtgtcgtccatcactcatccgaacaatcgatcgaaaccgtacataaacacggacaaaaggccatcggaagagaagcaaatgccatatctgtatgcagaaaatgccaaccaaataagggcgcatcacaattacgcaacagaagagtcgggcaaatggatgatgttttttgagaaaggaagcgaattggacgaccattgggacatggcgaagcgattgtacaagtaaaaagagtggcagcgatggaagtgcgatcaattgatcaatcaataataaaacacacggacattcattgattgatagattgatcggcattttgaacgattatccgaacggtaattgtggtttataaaaccccaaaacattcagcgaagggaaattggacggcatcacgagcatgaaagtgtcaacggcattcgacaacccaagggccagcgacaacagaaaggtagcaaaaaatagcgaatggacggacaaaatggaggg

SEQ ID NO: 53738 - DNA, 517 bp, Heterodera glycines
atggatgagatatacaagagatcagtgggtataaatggcacgataaatgagagaagaaggattgattggcttgggattggacgaacggatggacaaatttatgaggggattgactcgtgagaaatagagaaatttaaattatgcacaaaattggaaactttgaatgctgcgaataacagcagaaaatttaaaatcacagaaaatccaaaatttttgaccaatttttttttaatggtagtaaaataaaattaaaaaaaaattaacctatatttaggaattggctgcccaaaactccaatcataagatgtgtatttttttaacggaaaacagaaaaaaacggacaaatcttaacgaaaaaagaatacggaaaacggaattccgccaatgccttgcgaagaatggcattcattgtacaaagattggagaacatatggaataaaataaaaaattggtgaaaaatgtgtcaatgcggggtgatggagaacagcagcagccgaatgtataaaagaaaatgcaa

SEQ ID NO: 53739 - DNA, 1559 bp, Heterodera glycines
taagtgatgataatcattcgctgtttttcaattgtttcttcaagtggttcgtttgctagttgttttcaatgctcgaccatttccagcaggtttttaatttgtcccatggatttgggggtttctggcttttttcaatggaaaacaacccataaatctacaaaaataacagtcaaaaaattgaggaaagggagttttggagatcggaaaatcagattgtgtcattttatttttattatgcaactttattaatgttaatttctactttcccattttcggcgtttcttctgccaccaaaggcgggcaaaggtttcgactccgtgtccccctccccccgatccttcggcggaatttcgtgttgttccaacttcgtcagttataccgcccatctcgggcacggaaaatccgtcgcttggcagaggcgaggcgcggcggatttcatcggtgatttcatttcaacattttgagtcatttttcttcaatattccgcatgttttgatcttgactttatgtctaaacctgcaaattttgtggtttccattaccctaagtccctctacccaaattgacaatttttcaaaaccatcaattttctcaaaatttttttatttttacgttcccagggtgggaatctcccctccctttgttacgggcccactctaatccctaatacattgggccattgctgcattctccttcccggtcattttttgcccaatttagtccataattccctgttgactcccttccctttcgttgttcagctgatcaccgacaatttccgtgccgacgtcgtcgctcgtcgctaccgtttggaccgccttcggccgtccgattggctgctcgtctacaattaccgggtcggctcatggcttttcacggtcggccgttatgcgtttgcccttctctgcgtgatatttttaattgccgtcgatgatttcgtgcgcgtgggcagcggcaaattcacactccaaaagctcagagtgacacacaacgaactgattagggttggacctttggacactattcctccactcattgtcaaacagtagggaagcgagggaattttaaaagaaatttataaaattttaacaagtaagtaataaaaacttctttaaaaattcgtcccatattcggttcaaattctcttcaaattcttccaaaaattctcataaattttttgatatttattaaattaatgattttaagccttacaattagcgtgccattctttggtttaacaattactaaaatgacaattccatgaacagttgtataaatttctggtataaaaacaataattaattttgcattttttttgggttatgtaactcttggaatcttcttatttttgtaggaaaatcagtggcattttctgggcatttctcccccctcccctttttagcttggcatcgttggcaaattcttttgtgccattgctttgctcatttttttcctgctgctgcgcgtccggtcgctgtttttgctccgaatgtatgtgcacagaaaggagccgaaccgaatttgtgcgaccattgcgaagggagtgttctccaaaaaatt

SEQ ID NO: 53740 - DNA, 1515 bp, Heterodera glycines
atgcgactgatcgccgccgggacggcaccgacggcacagcaacaacaacaaccacaacagcttcagcaacagatcagctttggtgtacgaaaattatcaacaatttttttatcaatgtcatttaaatccgtatatcattttactgtttgatcactgtctgatcagtgccgaatctttgacagtttaaaattagttattgctggtgatcattgatcagcttatttgttagagagaaatatacgttgttcaagagtgatcataaaaaattgggcgagaaatttttaagccttcattaatttaaagaaaatctttttttttctaaattttaaaattttaaactgaaaagttaaatatttaatatttttatgtatttacattagatataaaaaaatagttgggaaaatattttggcataggcataagggctataagcctgcaaaattcataaaattttattgaatcaaaagtttttttttttgaaaatctaccattttgcaaagaaatttaaattattttgaacttactttttctttttttaaaaattgcttttttcatttttgtttaggaatttctcgaatttgtccgcgcggtgtttgcgctgcgcggccgcagcgaccaatgcgagcggaaacgaaaagccgactctcttctggtgggcggcactggcggcggtgcgtcggcaccaccgcaacaacgacgcggctccaccctcgtgcgtaaagcaacgattgtgcgcagtgcggtaaaaaataaattttaaaatttcagcgagatttttccggagagacaatgaaattcccctttatggacctgtactgatcactactgatctgccgaatattgatggatcaatctaaaattaatccccctcccctaattaatccctcctaaggcaatgtttgcgtcggcaatcaccgcgcccaccgctggccctgccattgcgcattttgggcgcgcgcggagttcgtccggcacggacggtgacgcaatggcacggacagcaagcgaacagcgcgcattggttctgtttaaagtgcgtgcggaaaattgaaagcctcgcgcggcttttgagtttgaaatattccgaaactcggccgaaaaacttaggccaaggcatcaaaaaaaacaagaaatttttaaaagcgagaccaacctaaactcctagagtttaggcccgatgtgcccctaaaaacagataaattctagaaactccaggaaattgtttgtagattaggagaaatcctaaaaaacctgggttttcagtcccttaattacctaattaggacaatcattatggtgtttttgtcaaattgcgctattatttggacagcaggaattggacacggatgagaaaggctttctgacgaccaacgattttgaacagtttttcgcctgccaacagaagccaatgatttttgtaagttgactaaatcaactgacaaatcagagcaaattttgacaaaacccttttgaaatgaactcatttaatttgtaaattataatattttaaataaa

SEQ ID NO: 53741 - DNA, 611 bp, Heterodera glycines
atggcaaaacatcaaaaagcgacgccgccaattggcactgagcaaaacggggaaaattcttttgccgccgtcgcttcatcaaattcaacaaattcgattgctgaatgtgccgacgattacgtggacagtcatgacaagccgtggaaattagtggccaaaatcaacgccggcaattgcgaaacactcgaacagcgaaaacatttgcacaaattttgtagcgaagtgagtcggcatttttgattggaaaaatgccgcacaatttgtggtaatggatataatgggcaaaagctggataatttatttatttttaaaattggcggatttttggccaatcaattagtcagcaattagttgcagcgaaacaataggcatttcaccgccagaaatttttggcgttggatcccaaaacgcggcgcgggacaaattgaaataactgtagtctcagaaaaaataaaaaaattttaggaaagaaagttttggttaaaattaaattttgttgtgtgttttgaaaaaccactatgttctgaaaatcaaattttgcttaatttcaagaaaaaacggaaaaattccttgaaaatgttttttttcagggaaacgaaatttttttttaa

SEQ ID NO: 53742 - DNA, 978 bp, Heterodera glycines
atgagggcatctgatcagaccaaaaaagacaaaaacaaattatggacgacggacgaaaatcggagggaaaagaagcaaagtgacggtttgatggtgatcgatcacacattttcgtatgtagaatatacctaccgtatatgctctaattatagcccatgggggattatttttcaacctcctcagaaaagggggggggggataattggagactgcgggattaatagagactgggctataattagagcatatacggtatatcgcttttttattttgtttgttttcgatggctttttaagccttagatataaaaatatgtcaaattaataatccatttctttgaatggtttaattttaatattttccatgtatttttctacatttatttgattatttgcccaaatgttctcatctattgatttttgaatgtttacggtgcactattctgtgatttaaggccatattttaaagagaaaaaaatggaaaaaaacccattaaaatgggccaaaaatggggaaataaaaatggttcaaaaaattttaaaaaagagtaaatcaaagcaacattaaaaatgatggcttctgtaacgatatttcatttcgaattccttgataaaattctaacccaccacacaaataaatcacaaaaaaaattttttccacaattgaggggttcagaatttttttttcaaattttccaaacttttttagcattggcacattttttcatttccaattgaatggcttccaccgagttgaccagaatggagcgggaggcgaagccgcagatcaaaattgcccattatattctgcgcgacacgctcggcgtcggcacgttcggcaaagtgaaaggtcagcagacgtgccgaatttcacgccctaccctgccgctgtgacaacaatcattgttggcacagtgccgaaatatggggaatttgatactttggcaagactgtcgatgtgtatagatggtagtccctaa

SEQ ID NO: 53743 - DNA, 287 bp, Heterodera glycines
attttctaagaaaaaataggagttttgggggcgcggcggtgccgataatcgccgcccggcgaaaaaaatggaaattttgatcatttataaacagtttttcactgaaaattagccaatttataggtaaaattttgaaaaattttatgggaattcaatccaattcttaggggtgtaaaagtcgcatttcgcgccaaaaagcgaaatgcgaaaagcgaaatgcgaaacgccaaaaaatgcgaataatgcgaaaggcgaaatgcgaaaagcgaaacctcggcccatccctg

SEQ ID NO: 53744 - DNA, 892 bp, Heterodera glycines
atggcgcaaccgaacactccaaccgctgaagttggtgggggaaaggggtggggggggctgaatatggaattggggtgcactctgctctcggcttgaaataccctaccttgcaccttttggtttgcaataatgcataagaatgtgtgttgtctaaaatatgtatcaaacgattcctgtcttgtgcctgtaactttgtatcaaattgtcgccggccacccagacttagctttcacaaatggcattttgccaactaaatctaaatcggattattcgccaattattctaaaatgatgtttttgctggatgaaaatgtaaatacatggttcctattcgttcttcgatgacaaaattatatgtccttgaaaagtatcgttcgaaaaaacattattttattaaaaccaatttttaaatacctaaaagttatcctaagcctaagtaggccgtttttacggtattgtgttttctaagaatttttattccaaaaatcatgaaaattatgtaaatttttttaatttacagccctattgaccagaattcggaatcgtccgattttgtataattggctacctgtccgcgtccatgacgcataattcattttaaatcaatttttcccttattccggtccgctgatatcatggatatttttgaaaattatagctttaaaaactctcctttgatttttgaaaatgtatcatctccctcaccaagcaaagagtgacaaaacatatcgccaaaaatgactatattgttttttaatcgctaacattgaacaatatttgtgaatatgcaatttttcctcaaattatttgtttaatattggactaaatgttatttttttacatgtatccactttaaggtctttaaatttcaaacactaactagtgtcaataaa

SEQ ID NO: 53745 - DNA, 379 bp, Heterodera glycines
atgtacatcgatgaaaaggcggtggcaacggcaacaaccaatttaaaaaaaggtcggacgatgccgccgcgagcagcggaaacgggaacatttgtcaccgaccgggtcggcgccgttggtaataacttttctcttaattttgtctttttcgtcattttttgtttgttactcaaaatttattttttgatcaataatgcgtttttttgttattttgaagctaagtgtaataatttattaacttcgtaaacggtctcttccagtttttgcattttttagcacaacattgagtcagacaatgcaaaaacggcgaatttgattgtactacaatatgttgttggtcgacactcagaaatgattttatgcgttcaatgctaataaa

SEQ ID NO: 53746 - DNA, 1317 bp, Heterodera glycines
  unsure (1)..(1317): unsure at all n locations
atgaaggaaagatggccccataacaacagtcatccctccagtggtggatgtggtctagtggctaagacaacggatccacgtaaggggccccgagcggcggttcaaatccggccttccaccccaatttttcgcctaaataatactgctccgttttagtgtttaggattctcgaccaaaagaatttaaatttaggcccggaattttgaaatgaacgagaccgaaaccagngagtttagaaatggaccgggacgggggtttatcgagacaaaaaaaacccatttgttagcggcctagtccaggatggtttgcttgcgcgccgggcccccggacccatccaggctgaggtttgttgtaattcaaactttttagaatgaaaatacctaataatagacagtatgttgaacaagagaagggtccgtatcgttttggcgccgacgttttggcgccagggtcgttttggcgccgacgttttggcgccaagccataataaaaaaaagaaaaacacccaaatttaaaaattttcgaaaaattttgtaaaacaagaaaaaaaacgtatttttcgcgaaggtaatactgccgatggttgttggttgcccccctttttgaagaaaatttttttgttttcaaaagtcacaagtactattcaattaaaggaataataaatattttttcaatttttaagatcatcaaacgcgctcgacacgaagtcaatgcaccacctgctgtccctcaaaacattgaacaactgattgttcctccggcttaccggacatatgaaccaactgatgggaacgaagagcagttcctgttgggtgactctggtgtgtttttcgagcccggaaacgaaaacccacaacggtaattgttaaaaggaatgtttagattcaactttttttcaaggattctgctgtttgggcgcgaatctttcggccggtgggctgatcgaatgaaagaatgtttcggagacggcacattctcattggcacctccaatgttctaccaaatctacacaattttggccaagtgctgttttaatttgatttcacgtgaaaattgttttaaggcgtgggtcgtgggttatcgtcgtgtgccattgcttgctgacgtccaagtcgcaagcgtcctacgagaggatgtttggacttctccgtcaagcttggtcgacattctcgcctgcctcgttcaaaatggacttcgagaccgctgcgcgcaacgccgctgttgccacgtttcctgcatgcgaaatcaaattttgcttcttccatttcgcgcggaatttgcaaaaaaaaatcaaggaacaaaatctctgggaggtca

SEQ ID NO: 53747 - DNA, 744 bp, Heterodera glycines
tgatgtggttgacgccatgccaaaaccagtcaacgttacaaggccaattgttgtttctacgcgtcgccatcttaaagttgggcgtgcgcgaaaagaaaatgttgaacaattagaagatactgatgatgatgatgattatcaaaacccacggtcgtcaagttaaaataaacgacaacccacacaaacggaaatcttaaaattaatttataaaaacgcccaatctctaggggtgtcggaggaagggcaagttttgagagccggtgggcgtccatttataaccagcagtgttgatgacattgttagtcacctgttgaacaaggacaagcgtggccaaaataaagagccaacggcattcaaagaaaaaaaatgcagcatacaaagcgctatttgttagtccccaaagagatttatcagagtttggcagcaccgccaccatctgacggaacaccaattgggctggtccgtacccgaattaaacaaataaaaaatgatgacgccataaatgaggcggaaagggcagtcaaatatgagcaggaacttaagcgtctcaacaagctcacaaaggacgaagatgaacgtcccgtgggtgttaaattagaaaatttgagtgatgtggttgacgccatgccagaatcatccactgtcggatggtccattactaacggattgtccttccctgacggattgtgccctgacggattagccactgtcggatatccactggcggattgtccggacccctaa

SEQ ID NO: 53748 - DNA, 2355 bp, Heterodera glycines
atggcatttcgtcgctcattcgatggcatttctcttcgaattggcacttttttgcttctcttcacaaattcagcacttcttctccaaccaccagcagcagtaaatggtgttgtctatgctcaaatggctttatttgcacattaaattgtttttgtctcccattcgcagcctttccgtggaaatgctatgggtgtcgcggcggtgtcgaactccttcgacttttatatgaggtggttttttcgctgatcagtgatcagtccgttcaattggctcatttacgccttcgaattttgatcggtccgtttgaatgaccattttgtagacaaatgcgacggccgaccgaattttgagtgttgccgattttgtgtgccgtcactttgcggactcggattcgttcgtgtgccatggcatcaccacgcagttccgggaagagttcctctacgtgctgggccgtctcgtgatcagtcccggccaactctgcgctttgttggtcaccgattgcggcacaccgttggacccattcggcacgaattggtcagtcagtcggtcggacagcggacggaacacgttgtcacaaacgtagtgataaccccattactgtaacctaccgtaaccataattgttgagggaaagagcaccataggctgtaattttaaaaactaacggttcatgatttcagaaatggaccgggacaggattaattaagtgtctgtaaatcccaccaactttcaattcggttgagcatattcgttatcaatggtatccgatcaaaaacattgcgaaatatttgctctaagccgaggaggaagagggaccattgaagctgatcaatcaatcacctcaacaccaaaggacagtgccgttaccgccaaaagtcaacggcatcaaaaagttgtctcggccgccggcagaaaatcacaccaccaccctcaatttgcttccgccggcacggcctttgcgcattttgcagttgagtgacctgcactttgaccgcaagtacgcgtccgggacggaggcggactgtgctgagccggtgtgctgtgtgaatgggactgagagggcatcgccaggttggcacccctcggagtgatcggccaacgaaattgacatgttgcatttgctttggtatttagggcagacaaaagttcgaattcccgcgggcaaatggggcacattggccaaatgtgacattccggtaagggaatgaattaagaaaaactgaatttccgaaaagttttttcgtgattttaagctgcgcacagtggagaatatgctggaacacatccaacgctctcacgaggcactcacatttatattttattttagtccaaaaaaggaaaagccgggaatttatttcccgaaactttcctcgagattcctaagcataagaaccctttgtctgcatataccggccggccaattcacaatcattttcagatcgattttgttttcctttccggcgattacatggaccaccgcgactggggtaaatgcgccaaaggactgctcgagattctcgggctccttctcagactttactttctttcggcaattccatccatgaatttctgccttttttgttagagtattcccgtgtgggccatttgtcccagttggatcaattgtccgcgttgctccgtcatcactttgacactgtgcccgtcttttggaccctcggcaaccacgagggtgtgccggtgaatgcattcgcaccccatttcgtgccggagcggttccggccccagtggatgtatcgcgcaatggttgacgcggtgcaacggaccgccgcgcgactgccaaaagaggcggagcgtagtgccctttagtaaaaataaataaagaaaatgaaattggaaatggaaaaataaaataaaaatggatcgcatatataataaaactatttttatacattttaaaagggtgtaaatggccaaattcccccttccctaacctttcagtcgtggctcttatatggtgccacttttgcccggaattcgactgatctcactgaacaacggatactgcgaaaagacgaacatgtgagtggtcgtatgctcattgtcagtgatcggcaatttatgatagattaacgagcgatcccattagcggggaacaaaccatcacttaacggagggggggggggggaatgtcgtcatctctcgtcgctctcaatctgtccgtcctctcattttgccacgctctctcgcgtctctcctattcttttatagtttggtttcgatcactgaccctcgctttctcttctgtcccaggttcatttacatcaatcagacggacccggacgggtcgctgagttggctggtcgaccaattatgggcagcagagaaagcggatgag

SEQ ID NO: 53749 - DNA, 984 bp, Heterodera glycines
atgccaccaaaaccatccggcaaaggggcgaagaaagcggtgaagtccaccaaagcggtgcgaacgggcgacaagaagaggcgtaaggctcgcaaggagtcgtactctgtgagttcggaattcgggggaattttcagtgccgagggtttcttttcaacagcgttttcggaaattatagttaaaaatggagaatataatgtaaaaaaggggaaccgaccacttcggcgcggaccatttcggcgccgattcaaataacttctttcattatcaaccaaattaaatatttttattatcattcgatagctcttgagattctctattagcctgcaaaatttcaaaaaatttcatctgttcacaaaaaagttatggccaaaaaactaactttttcttggctttttcggcgccgcgtgccataacttttttattgttgaatcattaatttctattttggcatgtaaatatagagcacacatagagctttcaaatgatgatggagaatataatgtaaaaaaagtacttacggtattcttgtccccttccaaggtgtacatctaccgcgtgctgaagcaggttcacccggacaccggcatctcctccaaggcgatgtccatcatgaactcgtaagacattttcaaaagttaacgatcactcatgaattttgcttgtcaggttcgtcaacgacgttttcgagcgcattgccgcggaagcctctcgtctggcccactacaacaagcgatcgaccatctcttcgcgcgaaatccaaacggccgtccgtctgattctgcctggcgagttggccaagcacgccgtgtcggaggggaccaaggcggtgacgaagtacacctcgtcaaagtgatgatgcgacggtgctggcgatgaaatgaaacccaaaattatcccaaacggccctctttagggccacaagcacccaaatggacggatatgtttttcgaaaaacttgcttttgcattttcttttgtttga

SEQ ID NO: 53750 - DNA, 1596 bp, Heterodera glycines
atggacacgctggagacggagcaccgtaacattctgttgcaactcggcaatcggaaagtgaacgccattttcctgcgcaatttgccaaatgccgaggaaaatgccaaaatgggcatcagtcggcacacgaacaggtgaaggaaaaagcatggcaaagtgacatttaatagcccaccaatgagaaatctaatgttttccagagaaagccgtgaacagtggatcgtcgccaaatacgtggagaagaaattcgcatcgcagccattgtatcaaatgggtgagtgtgtcaaatgcacatacaatgaaatgaaatgatcatttggatgctacaattatttatttaagtggcttaacaatgagacactcagaaatcagtaatttgtcttaaaatatcccactcaaaaaatccttaaaatttcaaatatatagcctagaaaagtgacaatgacagaacctaaagtggatgatcgtattactgttgtaccccgaactgatcagacattggataagtgttgatatggttttgaagaatcacctttgggacttacactatcgccctttccgcccattgtcatgatttgattggctaattaaaaatcgcatcactcacaatcagtgaacctccccccgataaaactgtcttcatttctccccctttttcagcttattctcgctcggtcactgcactgaataaaaatgaaagggaaggcggcggcagtgatggaggacaaacgggtgcaacagcacaacactcaacagaaacgaacccatcatcagcagcagcaacaacaagcactacggtcaaactgaggcataccgtactgcttgacgacgccgccgttaccgatgcgttgtcggttgacgacaacttttatggtaaaactcagaaatgcaaacagtttattcattctcgtattacaaataaatgaataaattaattttatatttttcaaatctcacttttccaattctttgatcgtgtttcatccttttttggatcgggatcagtcagattgtttttcaaattactaatgatcaattaaatcctacagcggaaaatcgcctctcccgtgcctcctccttcggctcggactccaatttggtgcaaagcgctcgcgcggcgattgcccaacgggcgtccgcctgttttgcccgcggcgttgttgggcagcagcaccgccgccttgtgaacgcgttgcgcaccgggtgcttggaggaggtggttttctttttgaaatgggccaaaaggctttaccccttttaatttaggtgcttagggcgatgatccaggatggtctcaacctcaacgaggaattgcaactgcacgcaaacacacaacaacagcagcagcagaagcaacaacacgaagatggtggagaggagaggggaagcaactccaaaggaagcggaaacgatgctacagcaacaacaaatgccaacattgaacagtgccatcagcaaaatagaccaaagcagcaacatggtggagcagtaattgcagcaataaggacgacgacaatgacaacaacaataacattaccactgcacattgctgttgaaaatgttcgttttgtttacaacgggaacaaatttacgtga

SEQ ID NO: 53751 - DNA, 1105 bp, Heterodera glycines
atgcattggatgaattttttggatcgaaaaatgatcagttttataaaaaggggattgaaatgttgcccgaacgatgggggaagatcattgattaaaatggtgagtacatcattgattgaacatttgttttttgtgaaataaaaaattgtttaatgttgaagtgcttaaagggtcagaactttttcatcaacccaatattttaggaccgacgatttttaataaaacatcaaaaaattgacaaattgtcaccagtgccgaagttgcagttcatttttatgtgtgttcgtttcgttgttcattttgtcgtttttccgatgccgtccattccaaaattaaattttggtgctcggcaactcagcgtacttataaaagatttgggaagaaaattgcaaaaattgatcaatgattcaaattatgttgaagaatatgatccgaaaaagagagcagaactgaaatggaagcttgaagaagatctatttttagacggtaaatcgaatataatttacaatttttaactaaattgtattaatattggccgaatggaaattaaatatgccaaaagttcttagtattttcggtggataattttaaaattaaatttttcaaaaaagaaaacctctttcttcctgaaaatttgccaaaatttttgataaaaatttggtgctaaaacaatttaatttaagatactgatgaggataaactgctaagaattttggacgagcttgataaaatgaaaaatgaggaagaaaagaaaaaacatgaattgaaacacaattcggctgaaacaaaaacaaagcaaaaaacaaaaatggaaaagaacagaaaagaaagtgagaaaatgggagcaaaattgaacattttacagagtaattaataataaataaataattttaaataaatgcattattttaaatatatttcattttaattttttttaggacatgcaattcaactaaaaatattagaatttctattgacaagcgatgaattgttccgaataaatcatcgttttgatgaaagggtgacaaagggaaatactttacaacattcataatagcttatgacattttgaattatgggcaaaaagttaatttaaaaactttta

SEQ ID NO: 53752 - DNA, 831 bp, Heterodera glycines
atgctaacaaaagtgtttctgctattccctggcaatgtttctgtgccatttttgttagaaaattttttcctaatttattcaatttggtaatttgaaaagatcggttaaaatataattaattaaataatattttatgaataatttttttaaataaattattaaaatatttctaatggtttatttaaaacttttgatttatttgccatttttaaatttgaatatatttatatttattaattttctatgaatatgaaatgatattttcaaaaaaatgcaggaattggcctttaccattgcaattgactgacattaaacataaaatggcagaccaatttttgagttggtcaacaacgacaatttctgctgaattgactaaaaaatatattaatttggaccaaaaaaattctgtggaaatgccaatcattgcaccgatatttcctgaacaaaatgttatgaatctgatcaatgcgagtgatgcgagaaaaattaaaaacgaattttgaatggtaaaatatttaagaaatcaattttttattatttaaataatgcaaaatttttagcatttaaaacaattaggtcaatgaaagaaaatgaagattttgttgcatttttggagggaaaataattgttttttttatgaaaatattttatttataatttaattcgatgctctttttatgaaattgtctaaaatgaaaattttctgaatgagattaaatttcaatgctctgataaaatgtgataagacaatttattcattaaatcccaaaagcaaaaatgtaaaaaaaaaattgaatgattaatattttgaatgtcatacacacaaaaaaa

SEQ ID NO: 53753 - DNA, 982 bp, Heterodera glycines
atggttataacaatgactactaaaatttatatgattgagtaaacatttccgtctttagggtggcattggctgtgccgtgctcgcctcgcttggccttgtgccaaccggtttcggcgctccgcttctgaactcgtcgcttttacttccgttggacggcggaggctccgccacaagcgcaacaatcacaccacgaaatgccaattcggacagaagaagcaatgagaatatgagcgacattttgccaacatttcaaatggtcagtgccaacaatggacaatttcctaatgcaaaaacaaatgacaatttgccatcagttggaaatgcatccgactcagcctttgtaccgtttggtttggatgtcaatgaagcgcaagttgcgcaagccggactatctgccaggtattgggggtgatcaatgattagaatgtctgatcaacagaaatgataaaaatgccatgtggtgaccagaatgcctgatcaggagaaattatagaattccatgttgatccatgcctgatcagcagaaatttaaaaaatgccaccatcagcaaataatgccatcagtgatttttagcagcttttgaataaataccatctcattttgacgtgacttatcagttgatcactctcggacccttttaagcattcccgcccccctatttttctcctttaatttttaatttggctaatttcccaattttcagctcgcatcgattggtacgcccgcgtttggatgcccattggttttgcggtgttcaatgtgtgctattggagcgtttgtctgaccatggcttccaaccaaatatccgacaaaagaaattgatgacaacacagaattaattctttttttattttaaatattgccaatttattttattttccaattattatattttatgttttatttttattagtcgtaggatttatcaaagaaatgtatgtaaaaacggtttaatacatatcatatgtacatatttataaa

SEQ ID NO: 53754 - DNA, 877 bp, Heterodera glycines
atgaaattaactgaatatgcattatcggacgcattgaataacaatgaagtgaagaaaatttattttggcgaagaaattctcgaagctttggcaagtttcgatgctgacaaacgccgggcatacattttgatggaaaaattacggccgatgtctgtgaaggtaaagtcgggaaaatgcatcaattgtgagcttaaaaagtctcagtttcaattttcaaattcttaaaataattttataaattcatttatgcaaattcagaatcacattatttgggcagaggacggagaagaaagcagtggagaagactttttagaagacgtgaccccggaattgggaatttttggcactttgctcggcaacattgtcaacggtgaagtattgtacaatgcgcaatttggccatcagctgaagaccaaattggccagcgaaaatgcgcgtggcataacaactggaaattgtgcttttgatacggcatatttggtggactgattttttgaagggaaaaaggagaaaggaaggatgaagaaattaggataaatataaagcattcattgtttgatatataatcaaaatgtttcactttgataaaccaaataagctctttcttctttggactttataaaaagtcagaaaattattaattttaagtttgttatgaaatatttcttgttacttcttttctaaattatcaaaattgtttacaaacaatttttgatttagcgagattttagcacctaaaaacatctaaaacgggggttagcatctgttttggcattttcaaattttagaacctattttggtattttccagatgattttttttgacgcaatgaaatttttagcgacgtgtttaaaataattacaaaaattttagacaa

SEQ ID NO: 53755 - DNA, 1878 bp, Heterodera glycines
atggccactgtcgccttgaaaattcgacatctttccgacgaaatgggcttacagcggtaagggcaactcatcgtccacatcataattaatttgttaaaataaaaaaaagaaaatgcaaaaaattatgcatttaataatcattaaaagagtaattattatacaaaattggtatgccatgcactgtaaatgttcatttcgttttttgattattatattgtatgtttctttccccaactcttagcttaataattatttgtaaatttttgttttattaagatacagcaatcgggtgttaatcgttgaggacatcgaactcgatggtggcaggtggtcatttatcgaaaattgttcggaagcaaactgtgtggtatgtgtaatgattaggtccgggaccgaaaaatggtcaattttgcatttttagggcccttttttaggcccaatttttttaattaggaggtggtttgtgatttgttaacaaattttgcaacaaaaattgccatttttatgcgcgtgatttttgattttttagaaacgaacggaaggatgggggttcttaattttttagttaaaatgttaagttaaaatttttggaaatagaaactctgtccttcaaaaaaaatatatttttaagatttttaaatcagcaattaattaaaacagaaaaatattataggtctcatgacgaagaacagaatctgagagattttgtgtgttggaggagcgcgagcgtgatacgcgattcgcgtcatttttttccgcgattcgcgactgcggcaatttgaatccacgatccgcggaatttgggactccgcggcaatttttgataaaatttcaaaaataaattttttattgaagcgattgttttatatatttaaattatttaaaagtaaatttctgtttatgaaaatcaaagagatttgcaaaatgcaaatatccttcaaaattccaatttccccagtcggcgccgaccaaaatctttaattttcttttaaaaataacaaaaaaaaaattggaaattttgagtttttaatgcgcgaccgcgatgcgcgactgccggatttatttttgtgcgatccgcgaccacggcaaattgtatttttaggttttacctatttttctgagctccccatggccaaaaaaagtgttttttcgtcgaattaaagccgcagaaaaactaagtaaaaaccaaaaacacgatccctaataaatacaaatttaaatgtttgggtaatttaaggtgttacgagccgtccgtggtgtgcatgttgtgatcacgcgatttgattttgaacaagataccaaccgtgcccagcgttcaaacgaatggtttagtcgaaacaagggcgaaatcagcaatgcaattatgtaaggcaagggagggataaaaagtgcaaatcggaccgatggctaaaaatgcaaattttgcgatgaaaaaaagcaaaatttagcaaatttgcactttttccatcgccaaatttgcactttttgttcatttgcgaaactgggttttatcagacctttcgcgcattcgaactcaaaaagttaattttctgccaaattctcagcaattggcacgcaagcaacaaagacctgcccacggttttcagcgaagttaattgggctttgcacaaccaactgagcaatttttccctttatcgaaactttgttttgattcgccgagaaaaatggctttcgagtagttgcttaatcgacacggcaaattccacagtgcccattcgcggaacgcatccgactgaaaacatggccaccgcactcattaacccatttcttttcgacgcgtactgctatgccctgtttttgttcttatgaagaatggattggtgtgaggagcgagacgaagaaggattattgaataaa

SEQ ID NO: 53756 - DNA, 296 bp, Heterodera glycines
gtccatggtcgcgtgtggagggttcgcccacttctccgaatccgaatattccctttgctaaattggacaataaaccgttattcaatgttgacggccgactaaacccttctctgactatcctcggttccgatgttaatgtgcccagggaaacagtgatactgaacacggtaaattaataataattagcccaacaaattttaagattaaatcgttggaaaattaagtcagctaattttaaggttgtgctgccgtataaggaattgtcggctaattacaagaatcaaattattctctga

SEQ ID NO: 53757 - DNA, 308 bp, Heterodera glycines
atgccgggcgaacatgccaccggcacattggtgttcttgaacaacgtactgataagtaagtgcgcttttgaggccatggtttaacataaattcacctttcttctagcaatttttcttttttctcccaatttttagaaaaaggtgccaaattcactcttcgagagtctcgtcagcggacggttggctacggcattgtgtccgaattgtacaagccagttttcatcgacactttcaagaagaaagttttcaactttgagaagataatggaaagagcggaagtgatgacagagggaaatgtaacgccatga

SEQ ID NO: 53758 - DNA, 423 bp, Heterodera glycines
gacattcacgtggttcggcaaaagcacagcgcaggtggacatggaagacaaaactttcaaataaaaaaacggcttaaaaccccaaaaatggcattttgaaaatcttaacaattcacacccaaaacttcaaatttttcccggcgcgcttatcggcaccgccggcttcctgttcccgaaaaatttttcgaaaaagcgcgttgcaaaaaaaagcatgaaaagcaaaaaatattttgtcaggggcgggcccgtgcccttggccctccgcccaaggcaacttaaattatggtcaacatttcctcctttctcatcgattgtcagagttcggccggtgaacacgtcggtctgctgtgtaagaatctatactatgatccaatttcgcgtggtttttggttgacaaagccgggaacagtgacgccaacgaac

SEQ ID NO: 53759 - DNA, 800 bp, Heterodera glycines
atgaacagattaattagaatgttctaccaacttgctccactacaattgtgtctctgcgttcgtcctgctcaaacgtttggtcgacaaatgtggtaagatttttgaatgattggctcagaatgctcgtcttcaacggattgagtgcgtctctgaatgaaataaacgattgatcgtttctgatgtagatggcatatgccggtcaatcaatgttcgttcgtgccctttctttccctcatcgtcttccgtccggttggccaaccatctccgcccccccacccgatgccttcacctaatcactgtggcgactgaatcagtgtgtgcttggacacatttgtagacggtctgaacaagtcgcattgcgtacggagcattgggtggcacctttgaagtcaatccattgggaaccccaaaaacattgtattaccctcgaagtgatcacttttcccacatgtcgtgcaaattgctgcgcgttttcaattccttaacaagcaaaaataaataaagtaaatttaaaattaataaatttcagctcaataattcaaaatattcacccaacaattgaaactgttccaattgcgtgtgcaatttgttgcccaactgcggcaacagtttggctgtcttctccggtgccgagtgagcgtccaactgaaggaacagcgcgtccaactccgagacggactcgtccatcacagcattcagttccttctgacacgcgtggacaccgtctggcgaaaagttttttgtttgaaacaacgcacaaaatggtacaaattcattcaattcgtttactaataaagtaa

SEQ ID NO: 53760 - DNA, 803 bp, Heterodera glycines
atgaacagattaattagaatgttctaccaacttgctccactacaattgtgtctctgcgttcgtcctgctcaaacgtttggtcaacaaatgtggtaagatttttgaatgattggctcagaatgctcgtcttcaacggattgagtgcatctctgaatgaaataaacgattgatcgtttctgatgtagatggcatatgccggtcaatcaatgttcgttcgtgccctttctttccctcatcgtcttccgtccggttggccaaccatcttcgccccccccccactcgatgccttcacctaatcactgtggcgaccgaatcagtgtgtgcttggacacatttgtagacggtctgaacaagtcgcattgcgtacggagcattaggtggcacctttgaagtcaatccattgggaaccccaaaaacattgtattaccctcgaagtgatcacttttcccacatgtcgtgcaaattgctgcgcgttttcaattccttaacaagcaaaaataaataaagtaaatttaaaattaataaatttcagctcaataattcaaaatattcacccaacaattgaaactgttccaattgcgtgtgcaatttgttgcccaactgcggcaacagtttggctgtcttctccggtgccgagtgagcgtccaactgaaggaacaacgcgtccaactccgagacggactcgtccatcacagcattcagttccttctgacacgcgtggacaccgtctggcgaaaagttttttgtttgaaacaacgcacaaaatagtacaaattcattcaattcgtttactaataaagtaa

SEQ ID NO: 53761 - DNA, 83 bp, Heterodera glycines
gcggaacgcaactgaacgaccaaatcctgacgagtgcgcgagtacatctcggaaagactgaacagacaacggtactggagcca

SEQ ID NO: 53762 - DNA, 887 bp, Heterodera glycines
atgcgacttgttcagaccgtctacaaatgtgtccaagcacacactgattcggtcgccacagtgattaggtgaaggcatcgagtggggggggggcgaagatggttggccaaccggacggaagacgatgagggaaagaaagggcacgaacgaacattgattgaccggcatatgccatctacatcagaaacgatcaatcgtttatttcattcagagatgcactcaatccgttgaagacgagcattctgagccaatcattcaaaaatcttaccacatttgttgaccaaacgtttgagcaggacgaacgcagagacacaattgtagtggagcaagttggtagaacattctaattaatctgttcattgttgaaatttctttctcccctggtttctctttggatgcgtaatcccctcaccttttttacagcttaacgccactttccgtgccgagttggccagcgtggcttgggacatggcattgcagcgcgaaatggagggcaacgtctccaaggcgttgcaatacgtcggggtgaagttggaacagcaaatgacttttggcgacgacgccctccgtttcaccggtcgcatttcacgtgctcaaactcacaattaccagctgctgaacattgcacacgaactggcgaagtacgtgcatcaaaccaaattggacactcaaatttatcatttgaattcttctatttttagatattggcccggcctttgtggccctcttttttcactcatccaaacggccgtcaacacaattttggagcgaatgcgcaccaccgtttcgcttgttttagactcaatgcatgacgagaatttggcggtcgctttggcacccagtgccacctcatcggaatatgtgaaggagctgtgcggacatctcaa

SEQ ID NO: 53763 - DNA, 2897 bp, Heterodera glycines
gtcccttccgaccgaatttcggaattggaacggctcgtcttttacctgcaaaaacggcacaaccctaacgaaagttatgccctgtgacaaaacttaataattgcttttttggtagattccgattccctggccagcatggaaattcatgcaaaaatggacgatttggaggtagtcgataggctaggcccatacgtccgctttcgcttccaattttgctgtgttcagagttacatggaattgctttacgaggagggggagcccaagcagcgcggggtggcaatgcttgcggaattggtacgccatgtcgaggcatcgcaattggcacaaattgtggagaatgagcagctgatgggagcactgactcgaatttggcgcgaggtgatggcacaattggctcgttgtcctttttgcctttttgttgtcctttttcctctccccgtcaccgaaattcaccaaaccatttaaaggactcgcgcaaaaacttcgaattggcaattcatttggcccaacttttccgtcggctgtcccaatttgcgccttttcatcccacactttcgcatttaaaagtgaattttctgtttcaattttctactatttctccgtttcgtcagattgggctgctcagtgtacaaacggtcgattttgagttgggccgttgggaattatggcgagagcaaacgcacgaaaaggaggagaaagagcgactcaaatgggaatatgcgatgagaaagcaggaccaactgatcgcgggtaaactgggaaaaattgagcaattccggactaatcgacgcaaaattccatttttgagcgtcgctacaaagaatggaatgtcaatttaaattaatgccgattgtgtttagtggtccttaacatactgttgaatttggccgacgatttgcggacggagcacaaaatgttgcgcaagggccttttgccgacccttttcaaatgcctcgaccaccgttcgtcgccccaactgctgacagtggccgtgaagtttctgtggaagctgagccaattttcagagaatcagcagcaaatcgcagtaaatttaattcatttttcgttgtttttctattgcttagaacaccgccggttccatcgaccgtttggtttcacttttggcaccgtctctgaaaagtgccgtatccgaatgttgtggtggcgtcggcagccctttgccactgtcctcctcctcgccctccgattttctgggcccccttttctcccttttgttcaactgttccttcgagccgtcttctcgccgctgtatggtcgccgcggggctcgtctctctgttggccccgcacatttcgggtgagaagcaaatgcaaatgcgcggattggacaagccaattaaaatcgccattgcttaatttcagaaaatgatgttgccttggccctgatgtatcagctcagcattgtggacgatgccaaagcgatgatcgcttttacggattgcattcccaccgtatgttttttggactgttcgtttcccggatgtttcttcctttggctgttcttcttcagctcctccgtttgctcttctccgacagtcgccccccttccgacggcgacggacgcccaaaaaaagaaacggcggatggacagcggcggaagcgctctctgctggtcaaatcgctgttggtgaacattgtgctggagaagcggaatgcccaactgttgtgcgggtcggagggccaaggattggactcgctgatggcattcgcattggaaaacgaagggggcgacgttttggcgatgaaagtgataaaaacacacaattttagatggaataataattctttttcatatttttttgggtcgcacgaaacatcgcctcccacgagggccccacccgggaaatgttcaccaaatgggtgccccaactgttggagaacgccgtcgagaaggcccaaggagacgacagcaataacaacaacagtcctctcaaaccctcatcttttgcgtcgtccatttttgcgctcgaatgtttggccatttgtgcactgcttccgaacgcaaattgggcccaattggaggacagtcacagtgtagtcgcatttttagcccaaattttgaagcgatcgcagcaaagcgaaagggacgaaacgaaaaagtcaatgcacaacactttggacagaaggaaagggcgagaacaccacgaaagaggagcagaggaggagaagggcaaagagcgaaagaagggaacgatcaccgacgaagtgctgcttcaggtgacagtcgaagcgatcgaactttggacgatagaaacgaaacacacactcattatcattttattcactacaaaaccatccagcaggatgaaacaatttaaggtcgtccaattgtgtggcacggtcgccggacattcccttgaaatggcagaacgggtggagaagcatctgttgccactgatcatttcgacactgaacagtgagtgatttgaacccccaatattcctaggtagcctccgtcccatgtctaaattagaccgccaagacgacgacgaaattgtgttgcaatgcgttttcgtttttctttctcttctcgcgcatggcggcgaaatggccaagcgaatttgtcaacagaaagaggaaattaatctacgcaaaagcaaaagggagaaagcggtggaaacagcggcggttgttccgctgcttttgctcaatttgatgcacgacaaaaacacgcaaattcgcgcgttgtgtgagcaaacgttggagagagtggcggtgtgtagggatacaatcatattttgttgtttaatgagtaaactaaggacccaatgtttgtatgtttcaggaagtgaatgcacattggcgagaacgtatacgcgaggcgcggttccgctggcacaacgcccagtggttagaaatggtcgaaacgaccaccga

SEQ ID NO: 53764 - DNA, 608 bp, Heterodera glycines
atggcagaggatggtgttctaaaatcggtgatcggacttcgcattgaacgggtggcagagctggacggggttgcaaagttttccccagacaaacgcatcgccaaattgccatggtaaaaagcaaagggaaattcgggcaaaaggcccgcccgatgaggaaattcatttaacctcgaaacaggcgtcttgaagtacggaaaagtgcgggcggaggacagcactcgccgcccactttggctgtttatgtttggtgcaattgggccaacaaatcgcagtgttggcgctgcaaggccatcgtcaaatttgtcatcaaatcacgcgaggtatccacatttgtgaagcctttactcagtgccattgagaattcaagccgtgccaatgttttcggattaaatcgaatggcattcgatttctttaatttcgatgaatttggtttttcccatttagttggattttgtccgcaactttgagcacattttctgcgctcgtcagccatttgtgaattggacacgtctgttggagtccaccgcagcgaacagtctgagacgggccgaggacacactcgaaatcgaggcacagatcagtgtcaccgaaatcgtcggatacgg

SEQ ID NO: 53765 - DNA, 299 bp, Heterodera glycines
atgacaaattccaacctgggtgagcacacatttcagataagcttcctatcattatttcttagaaacaactaataatctgttgaacagttatttcaaaataaattcgaatatattagcttattatgcatcttcagtgtgcattctaaaataaaatcattttttgttctaattttatgatttatttgttttctgttgactaaatagtcagttattatagcaaatattaatttatatttgcgtagcttcaaatgagcattctgccttcaatttcgaagggaagtgaatttttttataataaa

SEQ ID NO: 53766 - DNA, 928 bp, Heterodera glycines
atgtccgctcatttccgagcccaactgaaattggcgtacaatgactccgaagaattcctcaccgatcaagagtcctttcctgttccccagcaaaatggtcaacccgacatactgtatgccaaatcaattcgttcccaactccaatccctggatgatcataattccgatgtcaaatctgtcttaacgcaactcgaagataattccgatcggtggatgaccctcaggactaatatgactggggctgaaaggacccaagacaatccattatacgatgcatttgtgttagataccccttttcccaaagcaatttctgaccttaaaaaataccttcgtaccctacgtaccgaacggcgagccctggaagctgcactccccgtagctaatgtccaaaatgcatctgccccttccttagtccatttacccaaaacatccctcccaaccttttctggcgattgtaccaattatacgagtttttggaacacatttaaggcaggtgttcatgacctgaacattcccaattccctcaaatttacctatctaaagcaatgtctctctggtcctccccttactttaattaattctctcccgatttccgacgactcttatgattctgctgtttcccttttgtctcaacattatgaaaatcccgaggaggtagcccgagccctccacaattccttgcgcaaacttccccgaattcgacccggtgattatttttgtgaagacctccgggctctccttgaccagttggagtgtatctgtattcaaatgtcccaacaaaatcattcatatgatactgttgctgtccaaatggaggtcgaggaacgactccctcgttttgttctcgatgaaatatttatgtcaaaagaaaatgacgataattggtcatccgacaaattgaaatcacgactttgggccatactcaaac

SEQ ID NO: 53767 - DNA, 1572 bp, Heterodera glycines
  unsure (1)..(1572): unsure at all n locations
tacaaatcattaatttctcatcccaaaatacggataccgaatcaatggccccaccctcagactttttcactctggaagggataggaattagagacgacctacaacccatttccgttgatgaaattgttcttaaacaattcgatcaatcgatcgaatttgtcaaaaatcgctaccaagttaagttgccctttcgttccgaccccaaaacccttcccctcccttgaaattttggactttgttttggccgattgcgttctgtttttaacacactttcagctaaacccgacctcctccaaaagtacgactctattatacaggaacagaaaaaaatgggtattgttgaaattgtcaaaaatcccttcgaattttcgcctccattacattatttggcacatcacccggttatttcaccccttaaaagcaaagtgcgtattgtctacgacggttccgcacacgtcggaaaagaactatccctaaatgagtgtctttttcccggtcccataatcctgcctgatcttatcggtctcttattacgttttcggattcccccaattgtcattacaactgacattgaaaaagccttcctccaagtcaatgtgcacccggcacatcgtgattgtacccgcttcctgtggctgaaaaatacctctcttcccccatcaaaagcaaatactcaaatcctccgatttacccgtgtttcttttgggctcacatgctccccctttttgcttgcggccacaattctccaccatttatcagcttttccctccaatttgtccacggaaatttcccaaaatatttatgttgacaatatccttatttctgcctcaaattctaccgagggacagaagaaatcaacctccgccatttccttatttcaaaaggccggaatgccattacgtgaattcgccagcaattgtcaggaagccatttcccatcttccaaggcaattaaaactccccggaaccgaacaaaagtttcttggacttaaatggaacactgaaaaggattttttaattgtggaactttcggtccctccgcctgattttgtcccaaccaaacgctctgtcctttcctttattgcatcacattttgaccctcttggcctaatttcccctcttatcctccccttaaaattatttttacagtccctttttgaacttaaactcaattgggatgaacgatttcccacagaaataatcacaaattggcaaaaatcaattgaatcctggaaaaggacggacaaggtaaccatcccacgttcccccatttcgtctcctttatctgctcgtgaataccaattacattgctttacggacgcaagcaccttggcaatgtgcgcagccgttttcctccgagtttcacaccccaaattttcccaggcggaaacctttttaattttctcaaaaacaaaagttaaaccaattcacaaaggcgtcccattaaccatccccaaactcgaactaattgctgtagaaatgggaactcgtgctctgaaatttacccaagcccaatttccctctctaaatttagacccanaatttaaatctttggacagattctgcaatcgtc

SEQ ID NO: 53768 - DNA, 1979 bp, Heterodera glycines
  unsure (1)..(1979): unsure at all n locations
cccccaattgtcattacaactgacattgaaaaagccttccttaagtcaatgtgcacccggcacatcgtgattgtacccgcttcctgtggctgaaaaatacctctcttcccccatcaaaagcaaatactcaaatcctccgatttacccgtgtttcttttgggctcacatgctccccctttttgcttgcggccacaattctccaccatttatcagcttttccctccaatttgtccacggaaatttcccaaaatatttatgttgacaatatccttatttctgcctcaaattctaccgagggacagaagaaatcaacctccgccatttccttatttcaaaaggccggaatgccattacgtgaattcgccagcaattatcaggaagccatttcccatcttccaaggcaattaaaactccccggaaccgaacaaaagtttcttggacttaaatggaacactgaaaaggattttttaattgtggaactttcggtccctccgcctgattttgtcccaaccaaacgctctgtcctttcctttattgcatcacattttgacccttggcctaaccaattcacaaaggctcccattaaccatccccaaactcgaactaattgctgtagaaatgggaactcgtgctctgaaatttacccaagcccaatttccctctctaaatttagacccaaatttaaatctttggacagattctgcaatcgtcctttcatggcttaattgtcacaaattgcccacggaaatttttgtacaaaaccgacttaagncattaaatccgttgatcatttaactgtccgacatttgcctggcccggaaaaccccgcagacattggtactcgaggaatttcttccgcacctaccctttccgctctctctgcctggtggtcaggccctcaatggctttctctcccggccaaccattggccaaataacccacaaataaaagagtattcatacggaaaatcagaacctataaacgccccttttcaagcaaaccctccccctttgttcacgttttttaccgaacagacacccgaattaacacatttaattgatttggcacgtttttctaggctaccaaaagccctcagggtgttaagttatgtgtttcgtttctcaaatggcacccgaaaaaattcccaatgtaaagcaccgaatccgatttcctttaatgagcaaagaaaggctctacaggaattaattttacgagagcaaaccctaaatccaccctctgatcaggtcacgaaaattttgggcctttactcagacccacagaaaattattcgcgcaaaaggtcgtctcggaaaaagccagctcccaccgtcggcaaaaaaacccaattttcctccctcccaaatcgccattaaccaatttaattgtttacgaaatacacttaaataatgtccatttcgagcccattgttgaccctttcgcgattgcgcagaatttattggattccaaagggacgacaaattgtaaaatcgatcatttcgagatactgtctaacctgtcgacgttttaacacccgaccatttgaccttcccccctttcccccccttccggaagacagggtaaaaccttcgccccccttttcgaaagttggcttagactttactggtcccatttatgttgtcacaaacccccacgtaccaaaaaagcgtaaaatgtcgaaaaaacattggatagtcatttgggtttgccttccgacgcgtgccatttctcttgatttagtcgaagaccagtcggcgcccgtctttaccctcgcttttcgccgtttttcctcaaaatacggcatcccttcgacgatttactgtgataatgcacctacttttgtcgctctttcaaaatttttggcggtccaatttccaaccctatggaattttcgtgttccacacgcaccgtggcgtggcgggcattatgagcgtttgatctcactggtcaaacatcatctacgaagggcatttacctcatttc

SEQ ID NO: 53769 - DNA, 726 bp, Heterodera glycines
atggaaaattttgccagaactttcgttgaacaactcgcaaagcacacggacaacgaaacgagccgaaaagtccacgggggtcagctccaactgaacataaagcgtagaggaggaggtcaaacagtccaatttgacctgccagtccaaatcgggcgttttgccagtgcaaatcactcccagaagcatcaaataagtgaagtctctgtcattccaattgccgtcgcaattggacggagccgactgattgccgagtcggtaacaaacgccgggcagtccacgagtgagcgacctaagggcaacggacacaaaaaatgccatggaaataattgtgttggtcgtggagagtgccgatcacacacctggtcaccagctgttccgccacgtatttgctctgtccgtacccatctgtcagctgatgacagtgattttgcggtgggaagtgttcgtcaacgccgcgcaaatcagcggggaacacccgcgtcggtactgaacggaaccaaagagaaaatgggcacaaaagagcaaatgccgcggttttttggtcgatttgtaagcaattaattatttatgagacaaatacttcaaatatacggctgacctgatgtaatgcagcggttttaacttattcttcaggcagaagtcaagcacattgcgcgtgccgagcacattaatgccatgcaaagccttgggaaaagcgagcgaatctcagcaaaagaaatgctgtga

SEQ ID NO: 53770 - DNA, 257 bp, Heterodera glycines
atgaatttgaagccaattgtgtttgacgacacgtctagaaatgagtataacctttcattggaggacgaggaccacattcaattcgcggcattcatcgacaagatttggaaagcaaaaagtaggtacagggacggcacgcaattccgctttctgagatttttggggtcataattccgtccaaaaaaatatatttctttagaatttttttgtgcaaaaatagtttttgatataaattctgctttattttgactaataaa

SEQ ID NO: 53771 - DNA, 54 bp, Heterodera glycines; identical to SEQ ID NO: 53113

SEQ ID NO: 53772 - DNA, 852 bp, Heterodera glycines
gaaaaaaatatttatgaaacaaaaaaatcgattttttcaagaaaatttttcaatgtccgtttggggtactcaaacaattatggggagcaaaaatccaacgcagaattaaagtacaggctatagggaagctattcccgaaggattcggtctccccataaatctgggcgcatcggttcggggggactgccccgaaaacaaaaaaatcgattttttcaagtgtccgtttggggtactcaaacaattatggggagcaaaaatccaacgcagaattaaagtacaggctatagggaagctattccggaaggattcggtctccccataaatctgggcgcatcggttcggggggactgccccgaaaacaaaaaaatcgattttttcaagtgtccgtttggggtactcaaacaattatggggagcaaaaatccaacgcagaattaaagtacaggctatagggaagctattcccgaaggattcggtctccccataaatctgggcgcatcggttcggggggactgccccgaaaacaaaaaaatcgattttttcaagtgtccgtttggggtactcaaacaattatggggagcaaaaatccaacgcagaattaaagtacaggctatagggaagctattcccgaaggattcggtctccccataaatctgggcgcatcggttcggggggactgccccgaaaacaaaaaaatcgattttttcaagtgtccgtttggggtactcaaacaattatggggagcaaaaatccaacgcagaattaaagtacaggctatagggaagctattcccgaaagattcggtctccccataaatctgggcgcatcggttcggggggactgccccgaaaac

SEQ ID NO: 53773 - DNA, 781 bp, Heterodera glycines
atggcacgggtggtggtgccaaaatgcagccaagacaaagtaaatggatcaaaaatgcttttcttaggtctgtaaaatgccatggccatgccaccgaattttggttaatttaatttttggtaaaaggtgtccaaaatttatgaggaaaaataattttggatttttttggggaggggggggggcgggggaaatacggccaaattttcggggattttctaattggaattgtataccctaatattgacaggacggaaagtgcccgagggtgagctgtgtgccgtgtgttccgacagggccaccggttatcattatggtcagttttctgttgcaaaaccccccagggggatttccatggcatatttctgggacaattccctgacaaaactccaccaatttttttttctccgataaaaattagagcacagaacttcgaagccacaattttcaataaacaaattctcgattttaaaaagacaccgaaaaacgccgccgggaaaattgcaaattgtgaaaatttacaaaaaaaaaaaaatttcatataaaatctctcatccattttcctaaaaattttctgtcaaataaacgagattgggagcatgagccaagtttctttcttgaagctaatcatttttttagcattttttttacgaaatttttttttaaaaatatatttaacgcccatttttaggggtggcaagctgcaacggatgcaaaacattcttcaggcgaaccattgtctctgaacacagttttggtatttgttcacattctccatttttaa

SEQ ID NO: 53774 - DNA, 66 bp, Heterodera glycines
cataaacatttatttgatttattttaccatattcacaatttgatcaaaatataggtggtcaaaagt

SEQ ID NO: 53775 - DNA, 981 bp, Heterodera glycines
atggaggaattcacagctgttatgtctgcaaattgccgtgccacacattctgtggcgattttagcggagttgaaaacgaaggcttcggcggaaaagtcgtgtgcaacaactgaacgaatgagactcgacggagcaggtctcccagttcaccgtccggacatcgacactgaactggcagaatggatcgccaaaaaaagaaaaaataaacagcctgagtcaaggaacatcattcgacagagggcggctgcgctgttcatggacactgatatcaaagtgaaaaaagtattaagctacaaaaataaaaaattttgttcaggcatcaattggatggctgcaaaaatttctgagtaggcacaatttcatgctgcgcaaaaagacatcggtttgtcagaaacccccgtccaactatgctgaagcggtacccaagttcatcagttttgttgaacaaaggcgcaaggtgatgaacaactttcccggcggcatcttcgcaatggacgagacggccgtttggttcgattgtccggacaaccgatgcatcgacaataaaggcgcaaaggatgtaagttttttttggataaaatgaacttattctaacgaattaggtgacagttgcgatcacaggatatgacaaaatgcgggtgacgttgtcttacagcatggaataacggacaaaaactcaagccgtacgtgctggtcaacagaaagcgaccggtgccgcaaattgtcaaccaatttgctggaaaattggtgatcaatttcgctgggtcgatatggatgaatgatgacacaacggaggactacctgcacaaaatcattgaggcaaagctgttcgttggcgaacgcctcttggtttgggatgcgtttggcagccacaagagcgaaagaacgacgaaggtggtgaagggattgcgagtggaaacggtttttatccctggcggttgcaccaaattcatccaggtaccaaatcatccttctcaatga

SEQ ID NO: 53776 - DNA, 1787 bp, Heterodera glycines
atgtggctgcgatccgaccgggtgagactgactaggaatattccaaacctatcggtttaccctttggtgtttagctctgagactttggaatgcgacgtttccagtgggcagtgtttgtgccgacagaacgtggaaggccgtcgctgtgaccaatgttccgaaaatcgtttcaatttgcgcggtggttgtcccgcatgtgacgactgttacgcactgatccaatcgcgcaaaaatgagctcaacggaactatgagtgaattgcgcgaaaacctggacgagatcatcaataacccggtgattgtgagtgaaaaaaccttcatttggttgtttagatcaaagtggacgatcgcgaatttgacgcgcatgtgcaaaaagtgcgagtggaggtcgagtcactgcatgaaagagcactgaaaaaaatgggtaagttctacgtccctaatgagagagtaattacacatcgaccagcagaaggggacgactcgcacattcgcgaccaggcaatttccatgagggcgcaacttgcagaagcggacactttggtgctgggacttcgcgacagactccagcaaatcgacacgaatgctgcggtgattgaacagcaattgggacagtttagcacggacaagggtaataaataaacaaccagcgacgtattcacgggggcggggggatacactacctttcccctcccgtattgtttctcttctcgcgtcaattccctaccgtatcatttacagaaaccacccataaagagctgtctgttggagtgaattatgtgcaaacacaaggagaacagcacttggcaaaagcgcaggaggcgttcgaccgttacggggaaaagagtcagcaattgtcggagatcgctggcgaatccaagcagttgtctgatacgcaggagcagcgtcgccgggagatcctttcgttggctgagcaaattcggaaggagtcgcggcaatcgctcagcgacgccaacgaagcaatttttggaggtgagcgactcatcggagctcattgttcaaaatcacttacgaattattgcagcttcaagcaccagtctgcaaatttctgctttgttgaccgaggtccacgagttggaacagcgactgaaagccatccaacaaatggcgacggaacagtccctcgagacaaaccaaacacacgacggggccgccttcattctgagcggagtggacagtatccgtctgccgaacgttttttctgatgagttgatggagaaagtcaaaagggcacaggaagagggtttggaagcgctgtctaaaacacggtcggaggcggaaaagcaagcggaattggtagaaaaagtggataaattagtggaggaagcgtgcgaacagttgcgaaatgcgcaacagaagcaaatggtgggaaaagcataatgctttttattgccttctcttcccaaagagtgtggacaattcctttgacgaagccgagtcttttaatgcgcgcacccaaacggctttcgaattggccacgaagacgtggaacgatgcgaaggattcgcacgacgcgctttccggtttaattgttgcaaaaggcaaacaaataaaaatttatttgcagactttcatagtaaaatcgaacaaagccgcgcagaagctaccgaggaaatgaccaatttggcggatatcgaaaaggaaatcgaagaggcgcaggcgacgacaaaggaagccgaagatgcggtcggagacgcgagtcaaaatgcaaaagaagcggcggaagtggcggaggaggccaaaatgaaagcgcagaatttggccatg

SEQ ID NO: 53777 - DNA, 279 bp, Heterodera glycines
atggccgaaacagaaacacggagaacagccgaaagggttggaggaggacaacaggaagaagctgggcttgcacttatcacagcgctgaccctcaacattctaaaaacgaaaaaaggccatgagaaaacagaaaagaagaacaaatggaacaacctctttgcaaacacacgatccggaggaggaggaacaagtcggggtgttgttgaaggagccatttgcatcacaacgacaatctctgagggcagtggggaaaaactaagaaaaatgtcagtgaaacag

SEQ ID NO: 53778 - DNA, 888 bp, Heterodera glycines
atgctcgttttgagcgattgtgccatgcactcaagggttttcggggtagctgatcacgaatctgacattcatttgcaccaatttcgaaccccgaacccgaattcgaacaagtactgccaatggtcaccccgtttttgggagaaaagttttgttcgaaaaagtcatgaaacatgttttgggggttttatgggtcgctgatcactaatctgacattcattttggaaaatttctatcccggaaccgaactcgaataaaaagtctaaagttgaaatttcaaatttcagttttatgttcgtatctgtacagaatgatcatgttttggttttgcaatggtttctgactaaatttagattgtttctggattagtcagctggggcaactcagctgacagacaaatcagctgatggacaacccagccgtacaataaaaaattatacaataaagcctaggcctaggcccaagcaagcctaagcctaggtctagcctaaagcttagtcctaagcctaagacttaggcctaacctagccattgtacgagttgctcttgtacggttgtctgtgtataagttatcatgactagggctcggatttttaagcgcgaaaaagtccaaaataagtgtttaaataagggcgaaaaaagcgcgaaataagtgcgaaaataagcatgaaaaaattccaaatgtagaggtgaaatttgttaaaattgctgttttctctatgtaaattagttaaaattaagtcaaacaattttatttactaattgcagttagaaatgaagtacatttagaaattttcaggatttaagggtcgattctcaggggcgtatttttccgaaattttttttgtcgattcttaggggtgtatttttcgtttttattacattttttta

SEQ ID NO: 53779 - DNA, 1505 bp, Heterodera glycines
atggacagtgaggaagtgaagaagcataatgaggaaaaggagaaggtgaagaaactgttggcagaatataagcaaaaggtgaacaaacaaatggaaaagaatgtcgaggaaatggagaaggacgaaaagctaaaggaagtgctgagggaaattgaagaagcgcaagcgaaacacccgggggagaagagaaaagcggcgaaatccatcacagagataaatgagaagcattgggacgaattgtaccagggggacattgagttgagcgtggaacaggcacagtatttgctggatactgtaacaaaaaccgaaaacagagcgttgatgagagcgaagcgaggggcagccaggaatgctagaaaatttcccaatcacaaatggcctattcttgtcccattctcttttgacggctcaatttgtaagtttcaattaagagctgaatcaacatttaaatacctccgtgtttcctcgattattggcccctccattagaacccctactcccacttccattaaagccctcagaggggttgaaaagagaaccttcgggactcgaataaaagaaaatggtactatgattatagaaataaataaacgatcaattttttaagccagcgaaatgaaagcgcatatatatgaagctgtaaaattatggaacgataacacatgcttgaatattgttgaggatgacgaagtttctcctagaatccaattcacaaatattaagggcatgggatgcctttcaaacgttggaatgcaatcctcggatacataccaagaaattaaacttgaatacccaagttgttaccgagtaattaggaaatcatttacaacaataatctttaatattttcaaaagcttggagcaattgcgcatgaaattggacacgctttgggattttttcatgagcatgagagatatgatagggattcctttgttacgttttacgctgataatgttgaccccaaaaattattacgctttcgaaaaagaaacgattgagacgacagacaattatcaagttccttatgaccttggctcagtgatgcactataacgcaagtaagcacaaattaaaaaaaacatgttttatgccgagacctattttgcagaaacattctcaatcaatggtgagtatacattggtgcctcgagtgggtgcttcgtatataaacacaattggacaagaatatggtcccagcctcagtgattatattgttataaacaaacattactgtggattagagtttctcccggatggatcaaccataaacacaggcatttacaaatttgtttattgtacattgtttttgtaattaagaagcgtgtcatgttacaatgaactgtgacaatgatgggttccagaacccggacacttgtacaacatgcatttgcccacagggttatatcggagcgaaatgccaagatgttgacattggtggttatgcccctgccagcattgcaaatacttgtgaagggaatattttatttgcaacatcaaattggcaaaat

SEQ ID NO: 53780 - DNA, 1427 bp, Heterodera glycines
atgaaactccgagaattctatggaagcaacatcgaagagctaaaaaagctgcaaccagacgacttggcaaaggacctcgaagacaacaaagtgctcggcattcgatggaaaccaaaacacaatcgactcatattcaaattgccaatcttcgaaggaaaaatcacaaaacggacaattctgtcgcaaattgccaaagtctattacccgctcggactcatgtcacccgtgctactgccagccaagctcattcttcaagaagtgcaaaacttgaacccaaaatgggacgacgaaatgccagcaaacatcaacaagtactggctcaaattgatggcacagtggctcgacagaggcgaagcaatcacgatcgaatttccaggcacatccaagccatcgactcagtggaattccactgcttctgcgacgccagcatatacggcatgggaattgccgtgtaccaaaaggccaaaacaataatcagaaaggatgaatgcaacctaatctacgcaaaaagccttgtcaaaccaatcaaagtggcagtgcacgacggcacaattccaaagttggaacttcaagcactgactctcggagtaaaagcagtcaaattcatccaagctcaaatcaaattcgccgatcatcaagtcatcatgtggacagacagtcaatgctcagtcgaacgacttcgagaaaacaagcgccaagatcgatttgtggcaaatcgattacaaaaaatccgagaagcgaattttcaagtcagacacgtcagaaccgactcaaacccggcggatatggcatccagaggcgcagatccccaatgccttcgaacatcactgctttggcgctttggcccgatttggctttcaaaagcagacaaatggccagaatccaacgtcatctaccgacccggagatgaattcaaagaagtggaaaagccaccaatcgttgatattccagcgcaaccaattcaagaagtgcacagcttcatcgcatcggtcatggacgactcagtttctcttgccggcagcgacgacgaaagtcaacaaccacgcccaaagaaaaagttcaaaattccgaaacgacgctcagcactgttacgacccatcggtcagcagcaaagtccattgcaaggacaacacaaacgccgcaagcaactacaagactcaggcttacgcaagttatttcaagccatctcggaccaacaaggaagcagcaaggccaccacaaaggtcatcgaagaaagccgagaaatgcagaaggcaccacgtcatgaacagatcgagcacgaacaacgaatggtgaggaaaagtcaacaagaagcaaatcgacatcttcaaccgaaaaagcggcagcaaaaagaaattcaagaagtgccacattcaacaacagaagagcaacaacgagaaaccaaacgccaacaaatcgaaagataa

SEQ ID NO: 53781 - DNA, 581 bp, Heterodera glycines
caactttggaattgtgccgtcgtgcactgccactttgattggtttgacaaggctttttgcgtagattaggttgcattcatcctttctgattattgttttggccttttggtacacggcaattcccatgccgtatatgctggcgtcgcagaagcagtggaattccactgagtcgatggcttggatgtgcctggaaattcgatcgtgattgcttcgcctctgtcgagccactgtgccatcaatttgagccagtacttgttgatgtttgctggcatttcgtcgtcccattttgggttcaagttttgcacttcttgaagaatgagcttggctggcagtagcacgggtgacatgagtccgagcgggtaatagactttggcaatttgcgacagaattgtccgttttgtgatttttccttcgaagattggcaatttgaatatgagtcgattgtgttttggtttccatcgaatgccgagcactttgttgtcttcgaggtcctttgccaagtcgtctggttgcagcttttttagctcttcgatgttgcttccatagaattctcggagtttcatgcccgctgcttcgaagat

SEQ ID NO: 53782 - DNA, 420 bp, Heterodera glycines
atggatcagccggatccaacagagaaacaaccggaagaaacggatcagccaacgaaatcaaagcaacaatcaacaaagaacaaagaggacaaagagctggaacgacatcgcatcggcagaaaaaagacaatcgacatgcaagaaaaacggcaacggtcaagagacgaatggccagaggaaaacgaaacgctgctcagctacgttcaacgcatttacggaccggagaattggacgtcagcatggcaaagaggacgtgttctccgagaactccatgaactggaagatcaagggcgatggatgattcatcacaaatccgatcgcctacaactcagcgtctcgcgaatgtatggaggaaaacgaccatttgccgagttccgcttcgtggaaggcagatactactcacacatggtgccagaagat

SEQ ID NO: 53783 - DNA, 661 bp, Heterodera glycines
tcaaagacaaaaccttaaagcactagcagattgaaataaccgttcaaaaaaaagcaaagcaaaacacaagaccttaaagcactagccgattgaaataaatggacaaaaaagcaaagtcaaagacaataaccttaaagcactagccgattgaaataaacggaaaaaaaagcaaagtcaaagacaaactaggaactttatacaaatttaaaaaagtaatattttgtatattgtatatgcatttaatcaaatttctactttctttataaatgttagctaattagtcagcgtctatttattttctgtaaaaatttgcctctttatttaaaattaaattaatataatttcatgaaataagacactaaatgtatagagaatgaattaacgtggtcgattggaataaatggaaaaaaaagcaaagtcaaaacacaaaaccttaaagcactagccgattgaaataaatggaaaaaaaagcaaagtcaaagacaaaaccttaaagcactagccgattgaaataaatggacaaaaaagcaaagtcaaagacaaaaccttaaagcactagccgattgaaataaatggaaaaaaagcaaagtcaaagacaaaaccttaaagcactagccgaagcaaagtcaaagacaaaaccttaaagcactagccgattgaa

SEQ ID NO: 53784 - DNA, 655 bp, Heterodera glycines
atgcgcacccgtccgatctggcaagttaagcaacgattgctgactagccaaaaggttcggtgccgtgatgaaacgaaccagcactgcttaccccgcggcacccggcacggtcccccgaaggaatggatttaattaaattctctccttcggggatttttttccattaggtcgtccgttagcgttcgattgctctagtcaatttttcaaaatttttgttgaaatatttgtcgtgctctgaagggcgtgggaggggggggggcgaaggcccaccacgaggccgcgaagaggccgagtgagtaccttcggtgcaggaaaattattaaattttaaaaattttttaattgctttttaaatatgccaaaaaatgtaggcttaacttttttagtgaaaattcgatcactcatatttttgctaattgagcagaagcgtaccaaactttgcagggatactccccggtaaaggactaacttacactgaaatgagcgccgagctagctggctcaaaaaaatttttcgaaaatctgagtctttcgtttttatttatttgcaaaattaattcataaatattttttcagaaagggttctgaaacgcaccaaattttatttacatgttagtttaggcactctgatgctttttctatcaataatggaggtga

SEQ ID NO: 53785 - DNA, 458 bp, Heterodera glycines
aatcgaacgctaacggacgacctaatggaaaaaaatccccgaaggagagaatttaattaaatccattccttcgggggaccgtgccgggtgccgcggggtaagcagtgctggttcgtttcatcacggcaccgaaccttttggctagtcagcaatcgttgcttaacttgccagatcggacgggtgcgcatgattccactgttccaagcaccccaccaaaagcaaaacgatataaccaaaatataaggaaaaattttttaaaaaattttttctccatcttcctttttgatactaaagcatcagagtgctaaaattaagttgtaaataaaatttggtgcgctttagagcactttctgaaaaaaatatttatgaaacaaaaaaatcgattttttcaagtgtccgtttggggtactcaaacatttatggggagcaaaaatccaacgcagaattaaagtacaggc

SEQ ID NO: 53786 - DNA, 747 bp, Heterodera glycines
ttgatgccacaaatgttgaaaaacccgtgggctcaatcgccgactacgaccctttggctgccgaaaagcagcaacagaaggccccagccgctggcgctgcggcgcctaaagcgaatgggggcggtttcactgtgaaggcattgtacgattacacggccgcggacaaagacgaagtgagtgaaaggagggaaaagaacacatttcggaaagcatttgttccttggcgatacattttccaatttgaataggtcagcttcaaggagggcgacgtcattgtgaactgccaaaaagtggacgacggatggatgacagggacagtgcagaggactttactgtatgaacaatgaatagataaatatttattatttttcaattggttggtcgtcccattcaactttcagctggggaatgctaccggcaaattacgtggaacaagtcaaacagcccgtgggacagtttaaattgaaatgaaggatttttagtcctttttgttagcgtccgtccgattgtttcatttcttttctctttaccgattttcttttgtggcctttgatttttcagtttttctttaaacaaatgtgccagaatgttcttcagcaatatttatttctgtttagcactcttagcaatcattttcattgtaagcatttattttctcaaattcacagttatgtatggttttaatttttgtcacatggctgctaatttccttttaatcgtaaccaagtatttgcttcgttcaataaa

SEQ ID NO: 53787 - DNA, 324 bp, Heterodera glycines
atgataattattgttttaatatgttatgtgattagtaatgacaaagaaaaggataaagaccatacgagcattggtaatagtaaagcgcataaatctgatctatattctgataaatctaatcttcaacctgaggatgctcaaattaatcaacaacatcgtaatgctaatcgagatagtaacaaattcgatcataatcataataatggaactaataccaattgtgatgctaatcaacatgaccaacatcatcatgctaatggagttgatggtgattcggatgataatcagcttgatcagctttatgcaaatcaccaactcgtttaa

SEQ ID NO: 53788 - DNA, 407 bp, Heterodera glycines
atggggggcaatgaaactgatggcagcacaattggacgacgagtgtgcagcgtaataatagagggaaaggaagacaatggaaaggagaaatggcagcaaaaggaaaaacacacgccctattatactaaagcatctcgcgcaaattctgaaatacgtaagtacattttatgatacctatgtttttgtaagtcgctctaaaccaaaaattgtttggagaaaatgctattttgagcttctctcgccataataaaagatcatttaagtcatgtttagaccaaaaatgtgaaattcgagaatttgagttttcgacttttgttcgaattcgggtccgggaatcgaaattggccgaaatggatgccggattcgtgttcagcgaccccaaaaacccctggaaatcttgtttttag

SEQ ID NO: 53789 - DNA, 1224 bp, Heterodera glycines
gctgatgatgttgctcctcccgctccttccgttgccgtcgatgactttgcgcagcgcaccggccaattcttcgacttcatccgccagggaaacatcgaccgattgcgtgcgctgatcgattcgctgagcgtcgatgagctgaacaccttgctgcagatgagatacaacgaacaacaatttgcgctgctggtcgcagttatggaaggacaccccgaaattgctgcacttttggtggacacaattttcaggggcaacaaataaacgacaataaattttgcccatttttcagttggacaaaggcgcggacgtgcatcagaccaccgttggccgagtgaacaatgtgaccatgggtgagcaattcggtttgcggaccgaccgattgtgctgtttgctaattcattttttcgccccattttcagccgttatgcccctgtggattgctgtcaatatgcgccacttggagatgtgccgtgtgctgatcgctcatggtgccgacgtggacttgggaagcgattcctcctttacaccgctactgctcgcatgtgccaaaggcagcacagcaatcggtgaagcaatcatcctgaataatttctcaaatttccctattttcagtcacccttctcgtggagagtggcgccaacgtcaatctcggggacagcgaaggagtaacgccgataatgatcacttctcgtttcggaagggtgaaaaaagcaaaacttggaaaaacttggcattttttgtttgttcaggtcgaacctgtgcacttcttactttctcacggtgcaaacgttgaacagatggattacagcggtggctttttgccaatttctaaataattatcgcgctaattaatgtcttttcaatttcagggatgcgatttgctcttttggacgccgccgctgatggccatttggaggtgtgccgtttactggtggacgattgggcagctgacgtcaaccagcaagcgatcgacggtaccacgcctttgatgggcgcgtgcagcttcgggcactttgaaattagtaagaagcaactggtgcataattcgactcaactttctgccccaattttcagcggtttttctcatcgaacacggcgccgacattgaccacgctgacatggacgggtacaacgcgttgatgtgggcagtgaagtacgagaaggctggtgtggcgcaacatttgctggcgatcggcgcgaacgcagaccaagtgggaattgacg

SEQ ID NO: 53790 - DNA, 649 bp, Heterodera glycines
atgggttcagatccacttgcatgtaaaaatgttttttagggtttttgggaccactaatcaagaacttggcatccattttgcccaattccaaagccttgatccgaactcgaaaccccaaaagtaatttttttaaaatgttgcaggcatgtggatttgaacccatggcccaaaaacccatttttaacaaaacaaaaaatatattgggtataatatttctatatttgcttgaaaattttttagtgattttcatcaaaatcttttccagtgcaatttattaacagaaattttttctaagctattgcttcgctattagacaatttccaaaaaagttatacatgaaaattgcgaaaagtcgaaatttttgaagtttttttgtaataaaataaaattttttccaggcttgaaaatcttttcgcttttggtaaggctaatagagcatgttaagagctttcgagtgataccaacaatgttgtatttggatgtcaaagaaaaaagctatcgtggaaaaagagctggcgccgaaacgcgagtgccgaaacgcgtgggtcccgtttgtacagtctttctaaaatattttatgaattttaaaaaaatactatttttttcagaaaatttttgtgttttaaaagtatttaaaataacaaataaa

SEQ ID NO: 53791 - DNA, 585 bp, Heterodera glycines
atgcttatttttcctgttcatattttaaaaaatgtttgaatttatgtaaaaagttttgaatgtgtgaaaccattttgaattttacagatagaaagccctatattatgctattcctccgaatttaaaatattcagacaacacaaaccgaacagaaagagcaggattttcaaacttcctgagttttatttgtctaaaaaatgtcaccctagtacctatttctgctcatttataattaggacttgaaataaattacttcttgttttatttgaagggaccggccaacaaaggcggaccgtgcggcggacttgggtcggccatcgcttttatgtctctcgctcttcaaaagcctgtaaaaaaatttgtggctgtgactggtcggatttctgattgtggtgctgttggattcgtcaccggcatcccccagaaagtgatcgctgccattttgggaaatatgaaatagttgattttgcctgaaggaaaccgagacgatgttgataatcttacatttgggttggattctttggaaattatttttgttaaggatttgcatgaagcagtttgtaaatgtattaatgtttgaataaa

SEQ ID NO: 53792 - DNA, 434 bp, Heterodera glycines
atgggctcagacaacgcgctcagctgcatgatgagacgtcagaagaagaaaatcctgggaaacgtcgattgcgtcaacccaatggccttcgtgatccccgacaaattgcgcatgaaaaatggcgaggacattgtgctctacgacagtcgcaatgtccgaattggtgaaaaagacgtggtgcttgtttttgggagtgaacgggtaatcgatcaggatgaaattgtgattaaaatgctcattttagactttgggcattttgagccaaaacaatgagtgtgaatgaatcataattaatttgctaaatgccttctgttatgtcccatcatttcaatgatttccccaaccgattgattcattttataaaaataagtgaataatttattctaatttaggctaaagagctgctctttttctgtatagtgaaagcaaaaaca

SEQ ID NO: 53793 - DNA, 1024 bp, Heterodera glycines
atggcaataaagattgaagaatatggaaattataataataaaataggtaataatctcttttttttcaaaaaagaaaggaattggtagatggaaaatcatagtagtttacatgataattcgaggatagggtggggtaaggaaaaggaaaggtacatggaggtaaaatggaaggaaatagagggagaggggggtggagaggggtccacatcgtttcggcgccgttcgtttcgacgccagcctagtttttggactataactttttctttttccaacaaatctaacattgttggtatcattcgagagcccttctgatgctctattattttgcataattccaaaaaatttgatcaattttgaacaaagttatggccaaaagtacacatgtggcctggttttttgaattcttctagtcataattttttgagcattaacgaaattttttgaaacttagcaggctaatagagaacacttagagctttcgaatgataccaataatgttagatttggtggaaaaagaaaaaagttatagtccaaaaactgggctggcgccgaaacgagcggctccgaaacgagggtgtcccccagattcgcactgtacttcattctttggcatctgttcaatgcgatcagtgcccacccaacatttcagtgctaaattaagtactgccttaatcatttcaatattttgttttcaaaaaaccatggttttcttaagaaaaccaaaattaaattcaatttttttgactattaaaatgctaaattccaaaaataaaataactataattttgaatatttttataaacacaataaattttatttattttttaatatttatacaaaagcgcgcatttttccttcattttacgagtctaatcctaagttgccatcaactcactgtttgcagacatcgccaaacatgacaaagaaacggccaaaaaaagggacgatgaagccgacatttgatttcaaaatgattgaaatttggaaaataatataaaataggaaaaattaaaaatgcaataaa

SEQ ID NO: 53794 - DNA, 630 bp, Heterodera glycines
atgaaaaattctattttgacttacttttttgcttttattctctttctgctgtttttgaagcaccaatttttcgtcgatgggacaaaaacggggaaatccgtagaagcgaagaaacggggagaaacattgggccaactgatgaccaaggaaggcaaagataaagcggagaatttacaagcagaggaaaagcaaaaaaagaaaaatttgggagatttaataagcgaggaaaagcatgagacattggccgatttgttggccaaggaacgacggaaagagaaggaaaacccggagaaaactaaaggaaaattgggagaactgttgaagatggaagaaatcaaggacgacgaatttgaccaattattgttggatttgaaggaaactgaacagataagttttgctgtgttcagcaaaccaaaaactgctgaaggggtaatgccaaaattattattataattaaataaatgatggcatttaaaatttattctaaattaggaattcaaaggaatgcttgcgcgagttttttcaaaacgaaagagcgtaaaggagaagaaaaacgatgatcggatgggacttggagaaaaatatgaacgttttatgagcataaaagcgaacgatccggcactgagccaa

SEQ ID NO: 53795 - DNA, 383 bp, Heterodera glycines; identical to SEQ ID NO: 51114

SEQ ID NO: 53796 - DNA, 412 bp, Heterodera glycines
atggagaaggcctgcaaaatttggagagattatatcgattttagtgcgctaggttcgatgaaactttttaaaatataagcctaaactttttggcctgtttaaaaaggaattaaaaatttttaaaatatttattcatctcccttttgatagaaaaagcatcagagagccttatttaacttttaattaacatttggtgcgtttcagagcagtttctgaaaaaatatttatgaattgattttgctaaaaaaataaaatagtgaagctttaaaaattaataaaaaattttaaattcagaattactggagttagcatcatagcagtgcttttccttgtctttttgatgctctcgcaaaatctggttcgcttctgaccagtttataaaaaaaaagttaagcctaaaatttttcgcata

SEQ ID NO: 53797 - DNA, 76 bp, Heterodera glycines
aattactggagttagcatcatagcagtgcttttccttgtctttttgatgctctcgcaaaatctggttcgcttctga

SEQ ID NO: 53798 - DNA, 724 bp, Heterodera glycines
atgaagcgaaccaacgcatcaaacatcactccgcctcgcgcaaaacgttcaatggcacccccactggacctggacccaaacactgtcgcactcgcagagcaagaacgccaacgcacattggtcttcattggcctcccggaaagcaatgccgttcgcccatcggagcgcgttcaggaagacagggaagccactaccaaaatcttggaccatcttgaagttgaggccgaaccaaccgccgtctttcgacttggccggttcgacccccagcgaacaacacctcgtccgctcaaggtggtcatgccaacagctacacatcaacgcgtggcactcgggggatggaagcgcgagcgtgctcgactccgttctcaacagaacatggcccgtctgttcgtccgccctgcgctgaccaaagaacaactcaagaaggaatacgaagagcgcctccgaaaacgtcaacagacaccaactccaatggcaccggcaagctcacagacaaatgccccgacccccgttgtcgaagatggacctaaccagaaggaggccagcgacgacatttccaaaccgccggaggtttttgaccaaacaatcctcgtctgttatgaagcactaaactcatttccacccaccgacaaaattgttcaccaaattcaatcgctcaaaaaacaataccctcatcttttcaacaaatagttctaccagacctccaacaatttcttcaaataaa

SEQ ID NO: 53799 - DNA, 1215 bp, Heterodera glycines; identical to SEQ ID NO: 23097

SEQ ID NO: 53800 - DNA, 3847 bp, Heterodera glycines
atggcagcggttgtaaaggctggcaaaggaccaggcccttatacatcggaaacgtcgtggaccatttgggaagaacgatttgagtttttcatcaaactccgaggcatcactgatgcggagacgaaaaaattgctcttcttctcggagattgggccaatatacaaagagcttcgccaaatggcgttgccagacgacgtccgcgacatgtcaattgatgagatcaaagcgctgatggaggaacgatttggcgagacgaagacgattgcggcaaaaaggtttgagctgttttcagccaaacagacgttaggactgtccattcgggattactcaatccaacttcggaccttaattgccaaagctgaatggcataaggattcagtcgacatgtgcctgagcgctcttttcatcaacggccttaaaaaggattcaattcgggccgagttgataaagaagggagtgaacgaaatgaagttcaaagatgccgttgaaacggcagtgcttctcgagcagtccgacttggacgcagagcaaatcggtgggcataagaaagcggaagtggcgaaagtctttgctccaaagggaggaagaaagagtagcgcaccaacgcagcaaatgcaatgccatcgatgcgggaggaatggccaccgcaacaacgagtgcccgaacaaggactcaaaatgccgaaagtgcggcaatgttggacactgggctgtgatgtgcaagacaaagcagggctccaattggccaaggaggcaagggaagccggttcaccaggtcaacactgaaagccaaaaagcacacgatattggaacactggccaagtctgaagaagtcaaatcgatttcggtgccaccagcgatgataaaacttcagctgagtaaaaaggcgacagatttcgaattggactgtggcgcagatgtcacactcatcactaagaatgattggatgtccatcggaaggccgaaacttggacaaacttcaggattgatggcatatggaaaaaagccgatcaaagtccttggatcgttcaaaacggatgtggtgtacaacggcaaagaagtgaatgccgaaatttatgtcgtggacggcgaaggcaaaaatttgtgtgggagagatttgatcggtgaattgcaaatcgatctcaacaaagcgttcggaatccgatcgatcaatgaagtcaagtgcaaggcagtggatcgagagctgggagcggtgcttctaaagtacggtgaggtcttcaatgacggactcggccgatgcacaaggcaaatttcgttgaaatttaagccggaagtgcaatcgaagaagtgcaagccacgccccgtgccttttgcattgagacccgaagtggagaaggtcatcgacaactgggtcaaagatggagtgttagagcaggtgacaacgtctgagtgggcaacaccgttggtgattgtacccaaagccggaaacaaaattcgcttatgttgcgactacaaagtcacggttaatcaatggctcgacattcatcaatacccgttgccgcgcccagaagaattgttcagcgtgttgaacggaggcgaaaagttttcaaagttggatttgaaggaggcttatcttcaactaatgttggatgataaagccaaggaatgcttgaccatttgcacgcataaaggcttataccaatttacgcgtatgccttatggtgttgcgtcagcgccagcaattttccaacaagtgatggaagacgtccttcgtggaatcgacggagtcgccgtctacttggatgatattgtggtgacagcccccaacgacgcggaacatttgaaacggctggaaatgactctccaacgcatccaaaaatttgggttgcgtgtcaaaaaggaaaaatgttcctttatgcaaaagcaaattgcttatttggggcacatcatcgacaaagaagggattcgaacgtcgccggacaaagttgaggccatacagaaaatgccagcccccaaaaacttaaaggaattgcaatccttcttgggcatggttgggtattatggcaagttcattccgtcaatggcaacaatttcggagccgttgaacgagctacgccgatcagagaccaaatggcattggggacaacaacagcaaaaatcattcgaacagatcaaaattatgctgtcgtcgaacgagctgttggcccattttgatcccaaaaagccactttatttggcaacggacgcatctgactatggagttggagcgatccttttccacaaagatggaaacacaggaaagtttggcgtgatcgcatacgcctcaagaacattgagcccagccgaaagaaattatgcgcagaccgaaaaagaaggacgcgcagtaatcttcggcgtggagaaattcaaccagtacttgtacggtagaaaattcattctacagacggatcacgagcctttaaaaaggatttttggaccaaaaggtgaattgcccgtggttgcggcacgacgacttcatcgttggagtttgaagctcatgaattatgacttcgaaatcgaatattgttcgacaaaaaatttcggttacgccgatggattgtcgcggttgcctagtccagaaattgatcaggtctgtaaggaaagtctcgagctgaacaaaatccagcaggagagccaaaacgctttgccgattactgcgaaggacattgcgaaagaaattggcaatgatccggtcttcgcaaaagtaaaaggttttgtgctcaatggatggccgacaaggatagaagacgagaaaattcgcccattttttctggtaaaagacgaattggagctgaataacggatgcctaatgttgggatgtcggacagtgattccgagcaaattccgtgagaatcttttgaaattgatccacgagacgcatccaggaatcgtccgaatgaaggcattggccaggcaaaaagtttggtggccgggcatcgacaaagacattgaaagcatgaaaaagaagtgcaaaatttgtcaaacgaatgcgccggaaatgaggaaagtccctctccatccatgggaagtgccagaaaagccatggcagcgacttcacattgacttctgtggcccatttttcggaaaaatgtggctgatcacggttgatgccaagacaaaatggccagaagttgcaatgatgaaaagtactacgaccgaggccacgattgaggcacttcgaaaattgatttggacccacggattgccagaacaaattgtgtctgacaacgggccgcaattcgcgtcaaaggagttcgaagaattctgctccaaacgcggaattgaacgaacgctgacggcaccataccacccgcagagcaatggggaagctgagcggtttgtccaaacattcaagaaaggaatgttattggtaaaaaaagacaccaactgggacaacgaattggcaaagaaccaattcttactcaaataccgagtaactcctcattctgcaacaggacggtctcctgcagaaatgatgttcggcagaaagctgcgaacactgctcgacctcgtgcgcccgtccgaatcgaccaaaattgaaggaggagaagagaaggcgaaagaaaatgctgaaaagcatggccaaaaatatttggctcgcgccaaaaagaactttgatcgacggacgtggaaacgatcgtttaaaactggacaaagagtctttgccaggaattacagagacggttcgaagtggatggcaggccaaatcatgagccaaataagcccatcactgtttcttgtccgaacagcccgtggggtctggaagcggcacttagatcagctgaaatcggacgagacgaagcctgatctggagagcaacaccgacgtggactcaacatcgtccatag

SEQ ID NO: 53801 - DNA, 614 bp, Heterodera glycines
tggagagtcatttccagccgtttcaaatgttccgcgtcgttgggggctgtcaccacaatatcatccaagtagacggcgactccgtcgattccacgaaggacgtcttccatcacttgttggaaaattgctggcgctgacgcaacaccataaggcatacgcgtaaattggtataagcctttatgcgtgcaaatggtcaagcattccttggctttatcatccaacattagttgaagataagcctccttcaaatccaactttgaaaacttttcgcctccgttcaacacgctgaacaattcttctgggcgcggcaacgggtattgatgaatgtcgagccattgattaaccgtgactttgtagtcgcaacataagcgaattttgtttccggctttgggtacaatcaccaacggtgttgcccactcagacgttgtcacctgctctaacactccatctttgacccagttgtcgatgaccttctccacttcgggtctcaatgcaaaaggcacggggcgtggcttgcacttcttcgattgcacttccggcttaaatttcaacgaaatttgccttgtgcatcggccgagtccgtcattgaagacctcaccgtactttagaagcac

SEQ ID NO: 53802 - DNA, 76 bp, Heterodera glycines
gcaagcactgccgcttccgttgacaatagcacacaatccaccgccgtggagcatatcgcttttcaaacaccaaatg

SEQ ID NO: 53803 - DNA, 3135 bp, Heterodera glycines
ggaaacaactcgaggacggacgaaccttgcccggctacaacatccagaaggagtctactcttcatctcgtattgcgccttcgtggtggaaccctgtcaagcgcctcccttgacgcgatcatcgcaaaggtcaaccgttcgcctcctcatcgcttcacggatgaggtagaaaaatttttgagtttttcaaatattaatttcccccccccccccttttttccccaacagatcagtgacgatgaaatccgccagctcttcaaagccgcgaaggcagcatttcgagatcaggatacgctcgtcagaatccacccgccggccgtcatcgtgggcgacatccatggacaattcgcggacctgaagaagatcttctcaacgcatggcctcccgccggagcagcagtacgtcttcctgggcgactacgtcgacagagggccccaatcgatggagacgatcatcctcctcttctgctacaaggtgtggtttttgcgggatggggggagggaacccccaaaaaatgaaattcatttccccccatttttcaggtgaagtacccgtccaacttcatgctgctgcgcgggaaccacgagtgtgccaacatcaacagagtgtaagtgaaaaagttttttgtgtgtttttttgtgattaatcattcccccccccatttttaggtatggcttctacgatgagatcgagcgccgttacccgcgaccgggcgctcgtcgactcttcgacctcttcaatcaagtcttcgcctggatgccattcgtcggactggtcggcgagaagatatcacgcgcttcccgccggcctgaggacgacgagacggacggacagaacgcgcacacacactaactgcacacagaaggatggtggaactgcccggagagcgatgcgtgtggagaaatcggatcatctgaccccccattgttgtattgtattgtaaacccccatttcacatgatgaactcccccaaaaactgttgtcatttcaatatttgcgtgtgtgaatgtatgtatgtatatgctatgtgtgtgtgaataaacattgtaagcaaaaaaaaaaataggcaaaattcgttttttcaaaaaatagttaactaaaatagtgagtaaaaatgccaaaatagtgaagaaatagtgacaagaagtccgaaatagtgacataattttcagccaaaaattgagcaaaaataatggctctaatgcagtttacgcgtccaatcaatgaccatcctcagtttcttaagccataacttttttcttacttggtcaatccatacatccttggtatcaattgaaagcttaaagtctcgagaatttataagtacaagaaaagagcaaatatttgcattacgaaaaaaatttcaatgaaaaaaacctgaattcatcatttttcgcgtatattcaacagtaattttttgtctattgcttttatccaggcatttttctatacaaaaacttcagtgaactttaagctctcgattgataccaagaatgtaagttttgaccaagtaaaaaaaaagttatggcttaagaaaccgaggttggtcagtgattgggcgcgtaaattgcattggagccgaaataatttaatttaaaaggatttttataattaaaatgccattagtgtacgttaattaatataaatgctattaattaattatgtaattaattaattaaccaattgataccatttggtgtttgaaaagcgatatgctccacggcggtggattgtgtgctattgtcaacggaagcggcagtgcttgcttaaaaatgcaaaactagaaaactctacactgtccgggcactaattagagcatgttaatgctcgggattggcaaaatgtgccgggatttcttgatagaaaaattgccgctcgggattcaaatatttgcgcatttaaaaagttaccgtatttcttgaaatagggccccctggggctctatttttcaatccatctcaaaaaggggggggggctttatttcaggggatgggaactctatttgatttgttggcacaaagtataaattaattaggagaaaaaactgtttgcgaaggaaatctaaacccaaatatcattctgttgtcccaattctccactgtgataaaaaggagggagattaatgaaaattgcatatattaacatatgcacaaataaatgcacatatcttttatttctatgcttgtttaggaacagaaacttttaattgttttatttagtgtctgtattttattggaatctgttccagaaacttgaaaatttttcagttgaaatccggtggattttttgaccaaattgtgatcagttttgcttttacgcgaccaaattgcttttcagttgaaatccggtggattttttgaccaaattgcttttcaggcaaccattgttttaaacaaatcccttgttttcagggaaacaactcgaggacggacgaaccttgcccggctacaacatccagaaggagtctactcttcatctcgtattgcgccttcgtggtggaaccctgtcaagcgcctcccttgacgcgatcatcgcaaaggtcaaccgttcgcctcctcatcgcttcacggatgaggtagaaaaatttttgagtttttcaaatattaatttccccccccccccttttttccccaacagatcagtgacgatgaaatccgccagctcttcaaagccgcgaaggcagcatttctgctataaggtgtggtttttgggggatggggggagggaacccccaaaaaatgtaattcatttccccccatttttcaggtgaaatacccgtccaacttcatgctgctgcgcgggaaccacgagtgcgccaacatcaacagagtgtaagtgaaaaagttttttgtgtgtctttttttgtgattaatcattccccccccccattttcaggtatggcttctacgatgagatcgaccgccgttacccgcgaccgggcgctcgtcgactcttcgacctcttcaatcaagtcttcgcctggatgccattcgtcggactggtcggcgagaagatcctctgtaagttttgggggagggcaatttttgggggtcaataactgttttccaactgattttcaggcatgcacggtggcatctccgatcagatccgcagcctgaccagctcagccgcctga

SEQ ID NO: 53804 - DNA, 1249 bp, Heterodera glycines
  unsure (1)..(1249): unsure at all n locations
atgacaacaacgacgaggaccaacgccagggacagcccgagacgtgtgctgatgcgccagttcgaaatgctgctgcagaactcgaacgccaacatcggattccgtgcgtgtatcaacgatggcaatgtgagagaagcagcgaccgaccgaactgatctgatccgattttccgttacgaatatttcagtcccatccctttaaacagatcttcaaatggcgcattttcatcgatggtccgccggatacaccatagtgagtagtgggcggcggcggcagaggaaaagtgcaaatcaatcaaattaattgtttccccattaatccctcccctctcctttttttagcgcgggatgcacgtttacggcactgctcaaattcccagcttcgttcccgtcttatccgccaacaatgactttcctcaccgacattcttcatccgaacagtaagaaaagcgcgcaatgattcatcaaatcccagcaaaagcccccacccgtccctttcagttgacacgagtggcaaagtctgcatcagcattcttcatcagcctggcactgatccactgggctacgagcaggcggccgagcgttggaatcgcaaccgaaccgtggagtccattttggtgtccattcaactgctgttggtggagccaaacttcaacagtccggccaatgtggatgctgccgtaagtggaatgattcttcggcatatgaatgaatatatatcattttcatncaaaatttcaggttttgttccgcagcgacccggcacgatacagggaggaagtgcgtcgacgtgtggagatggagatagcgaggacggcaccaatactaccgggagcgcaaccgccgccggaagagcatgggacgcaaccgccggaagaacagaggacgcaaccgccggaagaacaaagggcgcaaccgccggaagaacagagggctcaaccgccggaagaacaggggacgcaaccgccggaagaacagaggacgacgcaaccgccggaagaacaggggacgcaaccgccagcgacaccgccgccggaagggccgcagcaacaaacgggcgaatggtacatttgatgtgatgtgatgccctctgagtgatgatattattatacttatgtatgtattgtatgtgattaacgatgtctctatgttcatttgccctgcttttgttcactgtacatatgtgtatatattgtcattcaccaattactgtatgtatattgtatatatgtgatgtatcgagcaataaa

SEQ ID NO: 53805 - DNA, 1527 bp, Heterodera glycines
atgtcatcagacgacgcggacaaagcggcggcaaaagacggaccggcaccggacactccgagcgatgccaaagtgacggacggcggaccaccaacggcaactgaggacaaaccgaaggaacaaacggaagcgaaagtgcctgatgagccaaccgcgacgaaggaggagccgaaagtgcccgatgagccatcaacgacgaaggaaccaacggcgccagtgacagacggaccgccatcagaggcaaagggagacaaatcggacgagccaaaagtttcggatgagcccgcaaccaaagtgccagatgaaccgcccgcaacggagccaccaaaggattcagcgacgacggaaggatcggatgagccatcaacggacactccaaaggactcggcgacgacggaaggatcggaggacgaagcgcctgcgccggaagaccaaccaaagaaggcggacgagaagaagtcggaggaagcagcgtcagagccaccgaaagcgccggaagaccaaccaaagaaggcggacaagaagaaatcagaggaagccccagcaaaggagccgaagaagaaagcggacaagaaaaagaagtcgaagtcggaagaatcagtggcctccgtcagcgtgcgtcttcagcctcgaaaggtgcccgtcaacagcttcaaggacgtgcgccccaccgtgcagaagagcctcgccgggctcaaatacccgttcatcaagaagctggagaagcaggcggggatggaccgcgagaaggtaaaaacattgtcatcctttcattttttaaacattttctttccattttcagctgttctactctgcactggccgtcctgtccgtctacctgatggtcggccccggcaacactttcctcagcgctttgatcggttggtttggctggggtgggtccaaatgtcacccctttctaatgttcttcattttagtcaaagcctggcccgtctaccaaaccatcctggccgtccacactcagaacagaagtgagtaattgcatttccttttgaaatgaacattctaattttcataattttcagaggatgacacccaatggctcgccttctggtgcgccttcgccgccttctccgtgctcgaccacttcttcgcccccctcgagctgctcttcgggctgtacctgctcttcaagacggctgcgctgctctacctgggtcttccgcaaacgtacggcgcgcacaatctctacgtgaagcacgtgcacccgctggtggaccgtctgggcaagatcaaagtgaaatgaagcgcaggcaacgacaactgatgtgagaagcggccaatcgatcgatcatcccccacccccccccctgtattatatgatatcaatattgtatgtatttgtaaccccggccaatcgttaatgatgcctgatttgttgtcaaatcccgagccctttatgtgacagtgatattgtatgtgctgtgattattgttcgcaatatgattccggaaatgtataagttatattgtattatgcatctgcgagataaacaatttacagtga

SEQ ID NO: 53806 - DNA, 296 bp, Heterodera glycines
atcagcaactccgaaaaccccaaaaaaagtgtttcttatgacttttgaaaacataaaaaaatttggaaaagggggggggggggacaatctgaactattaccaaaaaaacaaccgccattgctatttttagtatcatatttcgccagagtcatatttttaactttaattggctaatcataatgatgtatttgtatgtacaattgtcactggaacataaaatgaattttgttacatgcatacataggatattggttaaaaacaaatggaagaaaatgcaaaaattaactttgtatagt

SEQ ID NO: 53807 - DNA, 1939 bp, Heterodera glycines
gagcgtgttgcgacgagtcggtgtctccgctggagcgattgttggagacgagcaaagaggaaaaggtggacgaaatcagcttcgacaaattgtgttgcggccgattgcggcgccgaatgtggacctttctggagagaccgggctcctcgctgcaagccaagacttaaaaaaaataaaaattttcccatagaattcttttttcgaaaacggtcagcccgggtttagaatttgtcaaaaataaatatatatttaataaaataacaatttaatatagaaatttgagaccattatttttatgaataatttaaaagtcccatccaaccatgcttaacttcctctgctcttccttattagtttcgaattgtgctcaacactgttcgtgatggtctccgtgctcggactcagtttcggcaccattcccgactttcaggtaaaataaataaattaatcaatcaatcctttgggctcaaaacggacaacgaatacggcacacactattcctttgtttactttttctgctttcataatatttttcaggtgacagaatatattccgacgggcaatcgaagtgtgatcacttcgaatggcacttcgattgagcgcgaggaattcgaagcggtgcgcgtggaacaccccgcctttgtgttcacggaacgcatttgcatcgccttcttcaccatcgagtattgcctgaggcttttcgcggctccacggaaactccgtttcgcgctgaaaccgctcaatttggtgaaaatgaaaatgaattaattcaatttgaagtggcattgcatgccttttaattcctttttcccccgtttcaggtcgatattttggccattctccccttttaccttgaactgatgctcactttgctcggcgtcgatgacaaaaagctgcgcgacttgcgatgggcgttcgtttttctcgctttgatttcgtctcaatttttcaaatgataatttaacttttcagttttctcgtcgtccgaattctccgtgttttgcgggtcattcggattattaaagtgcgctatttgctaattgtcttttgtccaatcatttccttttccttcgcagttgggtcgcttctccagcggtctgcaaaccttcggcatgactttgcagcggagtcagaagcaattgcaaatgatggccatcgttttgctgaccggagtggtcagcatttgcaattaatttttttccaataattaaatttaattaaattaattcacatttttaatttgaaaatgattccaccttttgcaggtgttcttctccacaatgatctattttctggaaaaggatgagctcagcacgccgttcgtcagcataccggcggcttactggtcactcactaattgccccattattattttttttgcctaatttatttatctttttctcaggtggtgcattgtgacaatgacaacggtaaaccgaaaattgattttcaaaaaaagaaatttgtcaaattcaggtgggttatggcgacgttgtgcctgcaacaacaagtgggtccatttataacaaacaaattgtccaattgattgttcaaatacgctattaagtgggtaaagtgatcgcatccgcggccataatgtgcggggttctcgtgttgggtacgaacgatggaattttattgaaaattttaatcaattaatattggttaaatccaattaataggcaattagcaaatgaaaatgtgcatcgctttttctctttcagcccttccgatcacaattattgtggacaatttcatcaaagtcgcgcaggaggagcaacagacggaacagatcaaagcagaactgctggcgatggaagaccaggaaaagcaacaggcgcaggagcagcagaagaggcgcgagaaaatcgacaagtgcaacggcggggacaaccgcgggttcgggggcggcggcacgcaaatgcttttggcatcatga

SEQ ID NO: 53808 - DNA, 2792 bp, Heterodera glycines
  unsure (1)..(2792): unsure at all n locations
accaacttttattccgccaattacgtgccaattcccggcgccatccttggcattcattgccccgctttgctctccgccgccaatccttggcaatgttttcacattaatggacttcccaaacccatcaggaatattaaacagatagacaaaaacggaaaaacatttaatcaatttccccgttttgccttacttctaattcatgtacaattacaaatgtcaatttttggatttaaacttattaataataattaagcaatgttaaaaaacaaacaaatgcaatgttataaaggcttaattttagcggcttttatcattttaattgaatatttataatttcccttttaattgcctcaattactatcatttttctctcttcaactgatcagcggataatctcactttatctccctcttttatcccttttaatcgatgattgatggcactttggaattttttgtttctcttgtcaaatgcccccgaggcgttaaaaattattccgccgcccgtgtcaaaaattttcccaccacattctttcctaatgatttatttttcgcatttttttctgtctgaaacatttaaaaatgataattcccccttcccccaaatttttgtgcctttttgagaaaatgcatttttacaattcggctttccttttcccatttagtgcaatttatttttaaaataatttttcattttttaaatttaccctttataaattgataagttatctttttctcagttttaacaattccctaatattccgttcattaaaaataacacttaaaataataatgagctgtgtgagcggcgtcagtgccacttcaatgcttaggccgtaagtcattcaaacgaatattctcagaatgtttggcccatggcaaataatttcaaaataattaagtgactcttttattaactatttttcattattttaatttatttattaaccatgctaattgttgttttctttacttcacaatttcttcacttttttacgttttttgagtctttcaaactgataattgaaaaaagctcagcttttgccgaaagcgtataatttcgccgtaggcaaataagtgaatgaattaaagagagtagcttataattgtgagaaggagaagcattggaaaaatggaaatttttttgggaggagagaaaagagaaaaagcgaaaaataaaaaaaataggtaaaataaaaaataggctttaaaaacaattatatatatacatatatatatcaatcaaattggtgttattgttattaagggtgtccggaaacatgatcgccgctgcccagcaacagcaccgaaagcgccgtcagatggccatccgaaagacggactcaatgaatttggcggaacggcacaacggacgcattttggacctgatttggtgcgagggggacgagcagtcattcagcaaggcaagacaaatggggaaaatgaccgaggaaattgccataaattggcaaaataattaatttaattgagaaatatttaaaataaataagcattatttaattgtttttgctttaaatgatttaacaaacaaaataaaattccttggcgatcaacaaaaacctttgcctttgttcagacaattcgttccaaagcttcggtggtcagctgtcacgccaccttcgcaagcggtcacagaagctcatgcgcaagttctaaaaaggactctgccgaaaatttactgatggtcccatcttcgaccactttaattccgtctctgcttgagcaagttggtgaaagttttgaaaaaatttataacaaaaaattgtgaaaatttccaaaaaatattataaatgattaataaaaatttaaaataatataaaaattagcataaacatcaatgaggtagttagactttagcttcaccagcagaaggctaacaaatataattaattaaggtgcctgaagaggaggacggacttttggccaaaatggagcacgacgatgacgacgacgacgaggaggaggaggaggaggacaacgcgacggacgacgtggacgaggagctgctcaggctaaacatcggcggctcgacctttctcattcttgtcgaggccattctgcgggctgacccaactacttttttggccagatttgtacagcttaaccaccagacgaggctaaaagtgcgaattttgccaatttttgatcaccgaatacaaaaaaggcgatttgcctataaattttatcaatgggatttgtatccaaaattttgaaaaaatttaatcaaattaattaatttgtgcattgttaaggtagccgatgcttatttgcagtccgaatgtgcctattattttcaggtaccaaataaattttttttcaataattataaattaaattgatttcttttaagcggtctccattagcatttgaacccgttttgcaatattatgccaccggcgttgtgcacaaaccgcccgaggaatgtccatcggcgttcaatggtaattgttgtttatgggtataaaataattgcttaattttgtccttcattaaggctgagctggaattctggcgcatttccaccagttatattggtaattaaatgtattttaatggacttgcaaaaaatgacgggattgggcattactattttaatattaaatatttgtaaatnattaatctttttntnctntttttaanntncntnttntnccnantctntttctccnctncancnattnttccattcgaaggaagacccaaanatnnacnaaaacancttcgaccctgtgtgagcggccgattgcggcgccgaatgtaacctttctggag

SEQ ID NO: 53809 - DNA, 737 bp, Heterodera glycines
atgaaaatattattattatattttcttttattttcaattttccaattaaatcaaagtgaatccgaaaataaaaaattgcaacaacaaaagtcatttgacgaaatatttggagaaaaatgggaagaaaaagaagaagaaaaattggaagaaaaaagagaaataattggaaaatattataaaataaaagaaaaaatcaagcaaaagggaagaaaatacacagcaaaagaatggaataaaattaactcaaaaatagcgaaaaaattggggacaaatcgaaataaaactaatcaatggattaaagaattaggacttaatcaacgaatacagaaaagctataaatcaacaactgatgaagaaaaattagaaattgtacaaaaatttattggaataaaaaatgaatataagcaaaaaagaaaatattcagcaaaagaatggcaccaaaattatgcggaaatttgtaagaaaattggagtaagcaaagggacaattatcaaatggaagaaacaatttggaatgagtaaatttataacgcagaaggaaaaattggaaaaaatgaaaatttactggaaaataaaaagagaaaatccgaaaatgagtgacaaagaaattgcaaaaatattgaaaattgatagaacgacaatttcaaaatggaagaaacaatttggagaagaattgttctaagaaagtagaagaattttttttcccgccatttttccttcaattattttacgaataaa

SEQ ID NO: 53810 - DNA, 90 bp, Heterodera glycines
atgccgcaacaggaaaatgcagcaaattgtgttccctgtgcaacagaaaatggacggagaacacggaatttgacaaaaataaccgtcatg

SEQ ID NO: 53811 - DNA, 261 bp, Heterodera glycines
aaccgattcacaagaattggaacaaattaccaattgttccaattcaggcagataaggcaaatcaattcagggcattgctaaaagctatgtatgagttctaagggatttattgacatttgcattgacattcattccattttattttattttactttacatttcatattgttgtattttttgacattatttattttgattttttttttatgcgccacataagagcactaatgtgcctgtggtttgctcaataaatataatttt

SEQ ID NO: 53812 - DNA, 250 bp, Heterodera glycines
aaaattatatttattgagcaaaccacaggcacattagtgctcttatgtggcgcataaaaaaaaaatcaaaataaataatgtcaaaaaatacaacaatatgaaatgtaaagtaaaataaaataaaatggaatgaatgtcaatgcaaatgtcaataaatcccttagaactcatacatagcttttagcaatgccctgaattgatttgccttatctgcctgaattggaacaattggtaatttgttccaattctt

SEQ ID NO: 53813 - DNA, 567 bp, Heterodera glycines
atgagcgcggaccaaattaagcaattccttgaggccatgcgtgtgcaatcggatgccatccaacagctaatgggccaagcaccgcaaaacgccgcgtcagcgagtctgaaccaggcaaatttggcaagttccatcgacggccgaatttcaaaattcaattacgacgccgaaaccggtaacactttcgaacagtggttcaaacggtttggagttttgattgaggaagatggtaaggacctccccgagtcaacaaaagtcagactactcctcggcaaactcggcgacgatgagtacggcaaataccgcgacagcatcagtccgacccagcccgacaaagtcacttgggtggactcgatcaccaagctgaaaggattatatgccgaaacgcgttcactatttgtccggcgctacgaatgtttcaaaattcgtcagcaaccgagccaggacatctcatcgctggtcgctcatatcaatgcgtcctgcgaaaacgccaatttgagtccgaccaaagaacagctaaagtgcatatcctggtcattgcactcaacgacgagcaccacgacctga

SEQ ID NO: 53814 - DNA, 869 bp, Heterodera glycines
atgccatcaaaaaaggcactcgtcgtattgaacacaaaattgtaaacattgagcagcaacaaaacagtcgcacatcaaaccagcacaaaaattcaaacagtaaactgttttgttactataaatatgcaaaaaaaaacaaaaaaaactttcctatgtcatgaaaaggatttttagtgcctgcaatttcagtccccgacttttggcgcttttccggtgacggactctaatgtccggcgcttggatttaaacatgattgaaatccctccatttttagtctaagattttgtaaaaaattcggcatttagggacaataaacgggtttttatgccatatctttaaatattattttccaaatttagaaatgccgactcgcccaaaacccgaagtgaacatcaattctcttcagccataaacggtggtgccacgctggataaatcaaaagcggacggaaatgacgaaaaggctaactaaatttaatcggaatgagggattgtgttttgaatttgttatgatgacaatgattgtggcattttcagtgttcattaactttatttttcatttttatttttaaaccatatttaaatttgaattagcgtatcaaaattgtggcacaaatcaatgagcgtctatttatatacctaatccaccatagcttttccattaatcagaattttttaaatttgtttttactgatgcccataaataatctgtgatacgacgcgctttcacatttaacctatttacaagttcaatattattaggaagattcattttgcaatttttatttatttttttatttaaaaatatcaattttattttaccattaatgtgagttaaaatttagtacatacataattaatcaatttaaa

SEQ ID NO: 53815 - DNA, 76 bp, Heterodera glycines
tagagaaaaaaagataatgtttttctctggcactctctatttattggtacacatctcgttttttcggacggtgtgt

SEQ ID NO: 53816 - DNA, 457 bp, Heterodera glycines
atggacacatttaaaatttctgacagacaatacagttattatgtaagtatggttttcaggtgggtaccagggatgtgccgaatcggaatcggataatcgtaatcggattttgccttgaaatccgattattacacccctaagaattgaccttttgaaggaatttttttagcgagaataccaatgaattttgaaaaaaatgttttctgaaacgaatgttttaatcttattttaacataatgactgaaattaaatttttctcacaaagcagtgccggattaattctccccgatataatcaagttttttgttatttagcaaaaatgtcaaatatctgggaatattctccaccgctgggttgattgtgacagatctgagaaaacgtttattgcctgagaatgtggacaaacttttatttttgcatcacaatcttaaaatttatgattttgattatgaataaa

SEQ ID NO: 53817 - DNA, 1618 bp, Heterodera glycines
cgcttacgatttcgggtcggtgatgcattatccagctgggggcaatcatgaacagtaagaaaaatctcggattttaataacctaaaattggaattaaaggggcttatacgacctgatcactttgccacggttttatcaacaaacgattggtcaacgagaacgaatctcttttaaagacgcggccataattaaccgaatttattgcgaaggcaaaattggtcgaaaatttcgaataaattttaatttgtttagactcatgcaaaggccatgaggacaagtgtcaaaacgggggctatttgaagccaaatgattgcacaaaatgcaattgtccggacggatacggtggtcaaaactgtaaagaactcgaagagagtgagaattaattccatcaattaaaacaaattatataaattaattgaagatttgaattgtgaggatttgagtggaattgcaagagaattggtggccaataagtcagcagtgtttttgaagacgaaggccaaatgtggggggaattggccgtgccgatgccattggcgaattaaggcaataaaataatgtttagaaaattataaaattattttgagtgttattaatgcaaattttaattgctttcagcctgaagcggggaaaaaggcgcgaattcagttcaaaagtttgaacaatttgtttgaatgcacatacaactgctcatcggcgtatgttgaggtcaaataacgagccgacgaaagggcccaaggcaaaaataaataaacaattaactaattagttacaattattaatgattatcaaaatattgctcattaaggtgccaagctttgttgtgccgcatcactcactgatctgaacgcaaatgaatataaaaattggattgcggctgaaaagccagacatggacattgtcatatccgcgcgcctttcaccaaaatggaccgtaccatctaccgtattcgagctgacgtatgaatcaggcaaggaaaattgtgaaataaatttttatatattttcaatttttctataattaatttattttaaattgaaaattgtctttatttcaatggctttcgtaaatcaaaaccattacacaattaaaactgttcaaaaatgttaaggcaaagtcaaactcataaattcgaacaaatgcgtaaataccgataatttgtttgccgagaaaaggaaccccggcaccggcggtttgaaatgttatgacgagatcaagcaccaatcttatgactgctcctgtcacggtgataagaaatgccttgctgaagaaaaatgggctcacgacgcctttctttgtccaataataaaggtaattaattaatttattattattaattaatgccaaaagacaccgccaagacaaattcatataatataggcaatttaatttttaagtagagtgaagcgggaccgggacctggtagcggacaactgagtaccaaggtttcggttttgacatggacctggactagtcccggttttcccagccaaaaattaacggttcttcaactcgaaaaggtcccggtccggttttacccaaattcccggttccgcttaactctatttttttttctatcaaaaaaccggaaataataaaaaaatagggacgataaact

SEQ ID NO: 53818 - DNA, 383 bp, Heterodera glycines; identical to SEQ ID NO: 51114

SEQ ID NO: 53819 - DNA, 1716 bp, Heterodera glycines
atgctcatctcggcactccagagaaggttgttgagaagttggtgaaacacgtgacactgctgaatgcccttcacgatcgaggtgtcgaaaacaatcaagaaaatggaaacaaatacccaaacttttgatcaaatttcatttttccaaacattttcaccatttcacatttccactatctgaatattatgttgaacacatcttttccgctttctataatattattaaataaagagtttagtcaattgaataaagtttattaatgttaattggtcttcaaaaaaggcagtgatcagtatcttttgaattaacgcgcaaaaatttacgccaaatgcgctatttggcgttatgagcaattttgtctgacactggcgcgtacccatagtgaatcggcgtctattaccaaaagaatcagcgaagaagggaagtgaattctcttcccaatgcactctctatatgactgggactgaaattcagcactctctcatttttgcgttatctctctacataaaatgataagccactcaaacaaattttaaaaattatcgcaattttaaaaatttacgttgatatttgcggtcggggtcggtttagtacggccggtttagtacgagggtcggtttagtacggcaagctatttttgtccataactgttacaaatgttttttttgtcaattataaagaaggaaaaacttataatatctatgtttagctacaatacaaatggaacagcccaatcagtagtaatgaaatctcgaattcattaattcgtcattggatttcgaagttctctgctggaactttcaatttatagaaatgatttatcaaaaaaagacaattttaccccaaacacttcgaaatgtatttgatttgcgttgtatgggctaaaaatgataaagaatgagatttttgggaatttttatgcaaaaacacacttattttttcaatttttaacacatattttagcacatattttggcatttttgggggtttttagcacatatttcagcattttttagcacatattttattacatatttcaggatttttagcacataaaaatccgggccctaccaatcaggaaataaagacaaagcgaaacaaggagaagctggaacatgagggttcactttatgttcttcacaaactcagtgacgatggacttcggaagtattggcgatgcgagtttttcggagctaacgacaaatgcaaaggtaaatgcataaaataaaataaaaactatttttcaaattcagggcgccttcacactgacattaatggtaatgtcctcaaaataattggaagccacacatgcgacatgagcgccgcacatgtggagtgtcagcgacgtataacccagctcaagcggcgtgcagttgagacgtgcgaagcgccggctacaatccgtgcgcaagtattgcagaacactgcaacccccgtgttggctgcttttccgaccaaagctgcgacaaaacaggtcaacttttacgaatttttctgccaaagtatgctttgttcatttattttaggttataaaacgtgttcgccatgacgaaaatgtaccacctgctgcaccactcagtttggaagcattggaattgccgccagcgtacagaatgtacaaacgaacagagactgacgaggagaatttcttattggcggacaccggcgtttttcaaattcagggacaggctggaccgcaaaggtaaaaaaaataaa

SEQ ID NO: 53820 - DNA, 258 bp, Heterodera glycines
atgaaatgcggcgtctgcaacgagacgtttttattctatattgtgacatggcaatttagctcagagaattgggggttggtcgttgggtggactatggtggaagcagataacattgtgagataatttaaatttaaaaaatccaaaattaaaatttcagaaccaaaaagagttcatcgctctttttgcaaaagaaagagaagaatttaaacccgaattgaatatctggagagtggagcccatttgcctgtccccaataaa

SEQ ID NO: 53821 - DNA, 594 bp, Heterodera glycines
aaattttttgaatattatacaattgtgcattttgctctctatcaatttattataaaaaaattcacttcccttcgaaattgaaggcagaatgctcatttgaagctacgcaaacataaattaatatttgctataagaactgactatttagtcaacagaaaacaaataaatcataaaattagaacaaaaaatgattttattttagaatgcaaactgaagatgcataataagctaatatattcgaatttattttgaaataactgttcaacagattattagttgtttctaagaaataatgataggaagcttatctgaaatgtgtgctcacccaggttaatttgtcatttcctgcaataaatgttttcatataaaggtttaaaaaatttgatcgggtttaggaacattcaacaaatgcatagataaattttttgaatattatacattgtgctttttgctctctatcaatttattataaaaaaattcacttcccttcgaaattgaaggcagaatgctcatttgaagctacgcaaacataaattaatatttgctataagaactgactatttagtcaacagaaaacaaataaatcataaaatt

SEQ ID NO: 53822 - DNA, 673 bp, Heterodera glycines
atgggaatgcgacgactgaagcgagcattgcccttccgcgatcggtaggtcagccgtccgggcgagaatgtcttcgacggaattcactccccgcccacgggttcacccccttactaattaatttattgttatttcattttttttttaattatcaacccgtcgcttttttatcgtctccgacactcataaatgtcccatttctttcttttcactccgtcaatgcattcattccctgcgggaatgataaagtgtcaacaaaaacaaaaaaataaatgccgtcgtacattttacggaagaaatttatcggacgacggtcattcatattcgttgatccggttaagcaaaaaaaggggggagcgacttaaaataaatagtttgaataaaaacccattctaattttttagcgcgctaacttcaaaaatgggctcaattttcttttttaaaaatgcaacttttgttgaataaattaaaaaactatcacatttattttgattcaaaaattcttaaaaattataatgattcaatttatttttaaattcgatattagttgaagaatgtattatttaatattatttttgatttaaatgaagaaattaaccattgaatcttgcaccaacatctctctttattctctctaatagcaaaatgctttgtgagtctaatctcgaataaa

SEQ ID NO: 53823 - DNA, 316 bp, Heterodera glycines
agaaaaaagagataaccattttttggtcaagaattttttttgtttgcgtttcaaatatcgtaagattgtttgatagggccagacaagagaaggcaactgttggtaccaagtttgcggtaaaaaaatgagaaaaaagagatagctattttttggtcaagttaattttttttgtttgcgttttcaatatcgtaagattgtttgatagggccagacaagagaatgcaactgttggtacaagtttgcggtaaaaaatgagaaaaagagatagctatttttggtcagaaattttttttgtttgcgttcaaatatcgtaaga

SEQ ID NO: 53824 - DNA, 469 bp, Heterodera glycines
gtttcaaatatcgtaagattgtttgatagggccagacaagagaaggcaactgttggtaccaagtttgcggtaaaaaaatgagaaaaaagagatagccattttttggtcaagaattttttttgtttgcgtttcaaatatcgtaagattgtttgatagggccagacaagagaaggcaactgttggtaccaagtttgcggtaaaaaaatgagaaaaaagagatagccattttttggtcaagaattttttttgtttgcgtttcaaatatcgtaagattgtttgatagggccagacaagagaaggcaactgttggtaccaagtttgcggtaaaaaaatgagaaaaaagagatagctattttttggtcaagaattttttttgtttgcgtttcaaatatcgtaagattgtttgatagggccagacaagagaaggcaactgttggtaccaagtttgcggtaaaaaaatgagaaaaaa

SEQ ID NO: 53825 - DNA, 102 bp, Heterodera glycines
atgaggagccgggccaaaagagttgcaacggatgtgagccaagttgtgacaatccgaagccggagatttgcactgcgcgcttttgtgactgttcatgcgact

SEQ ID NO: 53826 - DNA, 49 bp, Heterodera glycines; identical to SEQ ID NO: 51181

SEQ ID NO: 53827 - DNA, 55 bp, Heterodera glycines
atgtgttttgcgatctttggacaacggatggccaatgtgagaggagcaattcaag

SEQ ID NO: 53828 - DNA, 1274 bp, Heterodera glycines
atgtgtgagggatggggagcatctcgttcggctcccggtaaattggacaccagaaaattggacaccgaaaattggacactagaaaattggacaccaatggaaaaatggacaccagaaaattggacactgttgtaaataaaaatgaaaataaacaaaataaattactaaacaaaaattttggtttggcctaaaagatctttatcttaatctgccatatgttgtttataagcgtaaataatatggaaatgaatttgttattatttttgtaacttcaggagaagaaaaacatcatatcattcataaagaaataagttttattactcatttctggtgcattttttggcccattgatcaatcgtcacgttagagggaaaggaatgaaacgcaaacagctttatattgagcaagatgaaaatcttcgggaaatatttgcaacgcgtgccgatcgtcatcccctccaatatttgagggcaattgcctatcgaatgcctgatccactctaagtgccttaatgcattaacccatttattctactcaaatttattggcaatcatcaagaattggtgtcccgacgaaaaaaaatgttaaaattttggcaggtattttttctaggcttaaaaaatgcgccgatcacgaatctgagctcagattttgaaaatcattgatttttatctaagatttttcgtcaactacttgattattttcaattttttaaattatttttaaaaaatttttagcaatgaattttggcttaaaaaatattctgatcacgaatctgagctctgattatgcatgaaccttcattttgtctatgatttttcatcaagtgtcataaaaaaataaaccgcagccaaacggactcgaacccaaggtctccttctcatcctgcgcatgagtttttacgcccgactaaatttcttaaaattttggaaaaaatcaagtagtcgacgaaaaatcttagataaaaatcaatgattttcaaaatctgagctcagattcgtgatctgcgcatttttcaagcctagaaaaaatacctgcaaaatttttaatattttttttcgtcgggacaccaattcttgatgattgcccaaattttccattcccttgcaattcgttgattcaatttgtatttcatttttgaacccccaaaaatttggattttttgtaaattttttaaattttatttccagcaaatttccttccgttccattgctgtgcccgtgtttggcgaagcgcggctggccaaatgggacgcgggttgggagcgggtgaag

SEQ ID NO: 53829 - DNA, 168 bp, Heterodera glycines
gatcttttaggccaaaccaaaatttttgtttagtaatttattttgtttattttcatttttatttacaacagtgtccaattttctggtgtccatttttccattggtgtccaattttctagtgtccaattttcggtgtccaattttctggtgtccaatttaccgggagcc

SEQ ID NO: 53830 - DNA, 1680 bp, Heterodera glycines
gtgatcccgaaaatctccaaacaactatagttttcacgactttttatcttttggggtcttttttacccttttggtttttcgtagccattcatttggtccactaattgatactatttttagccctggttccgattcgtttgcttatgaaaatccatggccaatgctgaacaagggccgtcttgattggtcagttttactcctttttaatctcatccatccatttttggaccggaattgaactggaccattcaaatggcctagcaaaagggctgcgtgccttccccgtcttcctaataagcaattcttccatttttaaacatttccgacaaatgttgactggcacaaacgcaccaaaaaaactaatagaattgggattttttcggtagccattcacttcgcagcaaaaaaattttaaattttttgcctaaatttctaacaaattattaaaattccaaaaaaactctccctggcagcgtttttcggcacagtcggacccctctcaattccccataaattttttgaagaaagtgtaccgcaaaaaaggtgctacgtaaagcaaccaccgaaatactaggctttcccggattatacaccatttttattttgcttttatttgaaggcttttcaacgacggttggcgtcgaccactcgcggctgaccaaggcgctcacatggtcgggtttttgtgctgaaatccgtcgtttcccccctttttaaaaaaattgggtttagcgtcgccaatggatctatttcaaatgcatccctcgcgacgagcacaaagactggaagaagtggcacggcacaatgcccatcttcggcaccggatgttttgtcatgttgacctttgtgtggcaatactgcaattccgactggtgagcacagcgagcaccagcagatgacggggggctcaatgggcagttcgtacaatggaattttgtatttattttttttaattttcggttaaaacttggaatttttttcaaaaaaccaaacctctaaaaaattttttgccaaggtttctactaaatttttcaagtttaattaaattttttgaacatataatatcttaggtttttggtttttcttgagaaaaactgtacgaaactccattgtacgaactgccatcacaccgggggaggggtgggctatgggcggaagatctcgtggttttttgcacaaaatggatatcactgccttcattttccatggtcatattttctgatttaaaacattgttaaaaaacaattagataactcgactatggtggcacaacacaatgccatttttaatcttttggttttttacacccacaaatgtgtgatcaatgaatgcatatattaaaatgtcatcagtttttgatgagtctcaaaatttcaaaaaatgccttaccatttaacttttcaattttaagttatggatttttgcccatactttttggttagagtcttgtatcaaaatgtctcatttttgtaatttaatgctaaattcggtcccttctaaacctttcccccggcgttaaggcccagcgcgaaagagtgggcactgcgcgaggcgcactttgaactcgtccgccgggagcgtgccggactgccgctgatcagcccggatctgatcgaacgcagccgggtggaggcggctctgccggcggaggaagagctgcgcgactttgagattctcatc

SEQ ID NO: 53831 - DNA, 877 bp, Heterodera glycines
atgactatttcgattttgggtcaaatttttgaggaaattccgggtaaaacttaggggtttaatttacatttttcgccgtttcccttcgctacgacccgccccattgcacagctattaggcattcgtcgtaacattttcatagcagaggcagtccttttctcgttttaaggcggttgcaaaccgttcccttttccgccaatgtctttttcgaggcgtttgcctttcgtttaccgcggtaagtgcgaggaaaaatgcgtaggatcacagcacaacggggaagaagaatatagcagtcaaaaaatgaaaagtaaaacactcggggacaatctgtctacaaaatcctttttgtcagcgatcgactggcacactctttcacgaaacgtctgctgggagcaagtgatcaaggaagaactgttctacaacggatcaattcccgtcgatttcattgtgtacaatcatttatttgtctatgatggtggaattctcctacagagaagagtatgttttttaataggggtccaattttgaatttggttgggggtttgggttacaatagattgaatactttcattacgttttcaatttttaggaagacggtgttcaaagaggtgcgcacgtcgttcgactgatcggttacggacgcgtgaactgtacggacggacggcgtgtcaagtactggttgggagtgaattcctggaacacatcttggggagaaaatggcggcttcttccgtatcaaacggggcgaaaatgtgtttggcattgaatcgcgtgacatcagttttgggcgagtcgagttgccatgagacgaagacgaagaggagagagacaaaatacggcacaaatttctagcaaatcccaggctttacgaaaaggga

SEQ ID NO: 53832 - DNA, 2933 bp, Heterodera glycines
gtgtcattcatcgctgaacaggtcagccaccatccgcccgtctccgccttctatgtcgaacatcctgaggccggcgtttcatgcaccacacacatttacaccaaatcgtccttcctcggcctggccattggcgtccaaatggtcggcaaggcgaccgtccgaattcacaaggttgttggtctgctgggttctgtgaataaacttttttgttttcaaaagccgatgccattttgttcgtaaaatttaaatgcgttttcatttatttattttttgttttaaatattatcacttaaattgtagcaccacgaaacatacattgccaccttccccaacggttacggacgcgcaataatggcaacgccgtggtttgaactggcgggaaaggtacaaaaattgttcatttttggatgtctgtaacaaaattattcaattttttcaaaggtcgaactccgttgcgagaagacgggctatcgggccgaaattgacttcctggccaagccgttcttccgcggcaaagcccaccaaatccatggccaaatctttcacaccagtcgaaagactgcgttgatgcagctgaagggagaatggaacggggaaatttacttgaagcgggacggagccaccgactaccaactgttcaccgatgttcggcaaaagccggatgttcgaaaggtaaatgatgcgggataattctttaaaagtcgctcaaacaaatactcgttcacttgcatcgagatccaacaaaagcaaaaaacttattatgcatattgtaaccgctatttgctgattttttcacctataccgaaatttcaaaaaatgtttgccacaagtggaaaaaatctgaaaaaacctctttttaataaaattgctatattaattgaatttttatgagatttttaaataaattgttgatcactatgacaaaatttcgtggacactcaaatatttaagagttagttgattattttttgaagtatgagtaccatatttcttgaaaaaacaaacaaccatgtcttttttttataggaatgtgtgccggtcagggaacaggaggacagagaaagtcgcaaattgtggcgtcacgtcactgcagcactgttcagcaacaacatcgaaatcgcatcccaatgtgggcttaaagcaaatatttatgtatttaaaattacatcatttaaatttaaaaaatttacaatttggtcccttttcagcaaagcgatgcattgagcaacgccaacgggacgaaaaggtggggcgtgagcggctcggtcaccagtggcaaccgcgcttctttgtccgcatcggcgacggttcaccgtccgactcgtggcggtactgtgacgcgttggagcaacggacgacgacggacgggccgtagttatggagcagtacaacaaccaaacagagtgtgtgtggttgatgaaagaacagatcgacaaaaaacaaccaaaaactgcacggattcttctaattattattgtctattcgttcgttgttgtcctctttcatcatcatcagccgatgaaattaatatgttataattataattgtctttttgctcccttcgttttttggcaatgttgcgtttttcggagagcgacggaaagacggattttgtttttttctgaaatttaaatattttccattttcaaaattaaacgattgcctaatgtacggttcactctccgtcgcttttttccaagcatttctctcctcgtcattcagttcaaaaagcggcccaaagcacaacaaatgaacaaacacaatcaatcagtcattcatcaattgtagaattgtttatttagttacctattttaatttaaataaatgttttcttatttgtttgttagttatttttgtttccgatcattttcatgaattgttgcgcttttgctactgttgagtttctcatgctttctaagtctcaaaaatgaataaaatcaatgcgctcttttgtgttttttaccttattttcttggaatttgccaattgttttccaaagttccaatataattttcgcggcattggcattctaattactcttttttttcttttttaaacatttccattcgattgttgattgatttcaaatgggagcagcgctgacgtccagcttcaaattcattgggggaggtggcgttcctcataagatggtgtttgtcatcaatacttcgcttaggatggggcctggcaaaatggcggcgcaggtcgtgaaaaattgttcaaaaaatttttttttgaattttccttgttaaggttggacacgccgcggtggccctgtacaggtcggccctcaagtcggaggagggacgaaacgcgttggactattgggcacagcatggggagatgaaagtacgaagagatacagcaaaaataacctttccttaatcagtcaaatgcagccgagacactcaaaattcatcttttaggtttttttttttttactagagcgagccgagaccggcttttaccgggatcaatcattttggaaaggccggtttttgggagagcgcgccaggaaaccattgcctttgaaaatgtcagcgcggccctggaagattcggaaatctcgctctcaaatttttgcaagcatcattttctgttcagagcgactaaaacagaattttttggggtggcttggctttggtcatgaatatcatcgatgtcacattttgagtcccgctaagatttagtttttatgaatggcagttttttgtttttacacattttttctcactcagattgttctccgtgccgacagtgccagccaactgtcggagttatgcaaacaggcccaccagcatggattgattgcgcagctcatccacgacgccgggcacacacaaatcccggccggctcgtgcacagtgctcggcattttcggaccgcgtgaagaaattgacgaagtcactggccacttgaagctacacaattga

SEQ ID NO: 53833 - DNA, 1223 bp, Heterodera glycines
atgagattggtccaatcactcaacaatagggtgaaaaggaaaaaggaaaacgcaaaatgggaaccatggacggtaaaaaagaaaaaaaagcggcaataaatcttttttatggataattatgggaaaaaattggcgttctgtcacatttactttttatctttatttctctcacttttacgtactatctcttcattcttaataatgtaaagaacaacatttacttcgctctatagaacttttttttcgccttacagaatttcttcatattttgcatatcgatagagaaaaaaattctgaatcgattataaggaaatttaatacaaaaataaggccaactttagagttattttaaccgaaataataaaattatttttttcaggaattaatgagtaaaaaaaaattaaaacaaaagtctgacgtgaagaaacccgtggcgtttacttgccggtgccattgtccgccgcttgagccgatcgatcagcccagcaggacgaatgaaactgatcagtacaccaaaatctgtcccaagaaagcgcaactcaagtggacaacaacgcttgtcggcctgggatgacgtccgactttgccaaagcgttggaattgttcctgatcaacgaagaagattgaaacacgaactcggcctacttggacgcgacttttttgccacgtctcagtcgttcatggatgagtaccgcggacttttcaacggcgaagtgtatgccacccgtcgtattgatgcagaccgtttccctgtacttttaccaaattttttttcaaattttcttaaaattaagagcggccaatcgacagttgttcttttctgcacaaatgttgctggtgttctcacagagcgtgtgaaacggcttcgggccagcaacaaattgcgtgttcttcctggcaatgcgctcaaattgtgtctcgctggtgattttggtggcaatttcatgaaactgggcttcctaattggaaatgtggcaacccctggggcagcttcaaattttactttgcttgggtgctacaggggtaatttctgagcaagccaattgttaacatttacatgtgcattttataggtgcagaaacaagtgcaggcattcgcgttgcctttgcggacgtggcaagacaattggccgacatatgtgaaattgatggcctttcgacccaatttttcctcaccggcgacctgatttttcatacatttttcaattttttatatttaataaa

SEQ ID NO: 53834 - DNA, 87 bp, Heterodera glycines
ttaaaataactctaaagttggccttatttttgtattaaatttccttataatcgattcagaatttttttctctatcgatatgcaaaat

SEQ ID NO: 53835 - DNA, 1094 bp, Heterodera glycines
tagatgttaaaaatggtttggaaaaagacagcagacattttgatcggtggcaaggtgccacttgcgatttatcactccaaccggtataactattaatacatgttaaatgttacaacaaaatgtttattctttgaaggtcaaaaattcgcgtatttgtggccgagacacctgggccaatggtggatgggcacataacttttggtaaaaaataggaataataaaaatataatttctattaaaaatttaatttttctgaaaaatatctgcttgttgtaattctttggatactggataaaagtccatttgactatacgtcccatgttttttttaattgtacggagatatcggtatttatttcttttgtgaccccctcccgaattttttttttttacattttttatcttgcataattttaggcgctggaaacgcacctgttgtttgcactttaccttaaaataaatggcgcatgcgttttcagcgtctaaaattgcccaagaaaaaatgcaaaaaaaaaaattttttttttttctgaggggatcacaaaagggataagtagcgagatataattaaatcaaccataaatataaacaaatcatgggattggtaatcaagaaccttttgaaaacttgttcagtcaccgaaacccacacaaatgatgggctgccccacacgctggaacaccttgtgttcacgggcagtcagcggtacccctacaagggcatgttggacataatcgccaaccgctgtcttgcgagcgggacgaacgcgtacacggaccaagacaataccgcgtacgaactccgcactgccggaagcagcggttttttgaaggttctccccgtcttcttggaccatctcctgcgaccgacgttgacggtacaacaacattggcaaatttgcggttttggcaaaaaatgatttaggcatttcaaaacttaaacatacaaatttgacatcaatatctttttttgaatcatttttaaattttactttcagcagtcacaatatgacacaaaggtgcaccacatcaatggcgagggcaaggtggcctcatataggcgccaccaaaaaataaaaagaaaaattacaataaa

SEQ ID NO: 53836 - DNA, 774 bp, Heterodera glycines
atgaaaaagggtgaagacgacactgctactgctgctgctgctgtcccacgaggcaaacggcccaactcaaactctgtatcagctgcccatttttctactgaatcagaggagatgaaaagttgtaagaaggaagagccgatggcgaccggatgtcgcaaaggtgcgaaacgacaatacccttattcgttgatgtcagctcgagcccaagatgtgtggtaagttttcagacccaaagtaaagcgtatgaaaataactcaggtcgctaaaacttgaccagttggaggagaaatattcaagaatggaagaggagctttcggaagacagcgatgatgcaattgatttctacgaagacggtattgatgatattgtggaaaagtgagttagcctcctttataccagctagaatgttatccattcatcctttttttaaggataaatcgtttcgaagcaaaagtgaaaaaatggtcagtaaatcatggaaatacgccagttgtcaaaaaaccacggttagttgttttcaagcagacagaacgcaccacatattatgacaacatactgaattttacagttataacacaaatgctgatgagaatagcaatgatgctgatgatgatgcgccaacatcgactgtgtacctgaatttgcacaatgacaagatgatcgagaaaagcaattaaaaaaatccctgatatggtttaaaatgatgataatgatgaggatcataaaaaactccgatatataaaccgattattttgtgagtgttttattacccaa

SEQ ID NO: 53837 - DNA, 642 bp, Heterodera glycines
atgccatcggtttgccgagtcacgagaacgtgtgcacagtgagtgagccaaatgaacacaatgccaatgaaagcggcaaatccattcggtttttgagcagtccctttcagacggtcattcgctccgaccatcgcccccaatttggccgcggttggtccctttccttttggttggcctccgtttttggctaatcagctgcattttagaacagaatggcacgctagtggagatacagcaggatgaaaatcgccaattcagtgccacttttgtggagtgttcaaatacgaaaaaagggaattgccatggcattgacaacgcaatgtgagcaaaacaatggcacattgggccattctcagtttcattttaaatggcattcctccaattgcttcagcttttcctccgaatgcgtcactttgtatgagtttcgtccggcgggcgttcgtgtggagggaaattcggcagaatttgctgaaggatttgtccgcgtgccgatcacttgccaatgccaactccgacggaagaaaaagcatggaatttattccaactgagtggccaaattctcagaatgaatagaactcaatcaacattaaccgtttgatgaacccatttttcccctcgacgcattctttccaaccaaataaa

SEQ ID NO: 53838 - DNA, 1193 bp, Heterodera glycines
  unsure (1)..(1193): unsure at all n locations
atggaaattggcattgcacgttctttgcaattgcttcttagttcagtgctgctcatcagtgctttatacctttatttggtatgaaatttttaaatatccaattaattcacctaatttttaatttgaaaaattcatttaaattaattcaaaattttcggccgtgcctgactggtggatttacgcaatcccatgcattgtgggcggtgttttgaacgtttttccgcactccggttgtccattttggcgcttttttgccagtgcattaattgttctcggcacaattgagacgtatgtaatttggacatttttatttaatttaaaaattaataaacaaaaaacattttagccttttcctcgtttggtccatacggtaagaaattttttggtaatctattttaacaaataaaatattttctaaattgtgcaattattttttaattggccgcatataatgaaccaaaaaattcctctaaatttttacttgccagttttaataacaatttaaaaaattagaaattattccaaaactttctaattattttttgaatttaatttttttcgaattaagcctcgttgagcagtcacccttcttcactgcctcctcagaatcttctgcgcgcctagaactgtttgaagggcgcctgattttgttgccggcattggccgtttcacttaccatttccacacgactcggtacggtacacagaaaaaaatgcatttaaatttattaattcacaacaatttttattcgtgtattttaataacttttaatctctcataattttttaaaatagataaataagtgtgttaaatttttgttaagcattttctacactttttaatatccttgtaaattttgctcaattctgcatgctaaatatagacaaaatattccaaacaaaaaggggcctataaaatatgaaaaaattaccaaaagaatttggaatttagtcatttaaattaatgtatttaatttgttttcctgaattcggagtttaatatccatttcctacaattaatccaaaaaactaaattaaaatttttaaatttagaataaccaantaaaggtattttataaaaggatattttttgcttanaaaatgcttttatcatananatggcgttgcatcttccgaatgccaaaatcaaacctccgttcgaaaaatcatcaaatttttcaggcctggcaataa

SEQ ID NO: 53839 - DNA, 184 bp, Heterodera glycines
atgaacaacattgcattcattgcatttgcattttcagcgcttttcgaattcggtaaaaatttcagtaaaatattttttttttttttaatttaggcctcgctcaaccgaagccgacgcctgaaaatggtttaaataatttttaaatatcttgttttaatttaaacatgattatttattttataaa

SEQ ID NO: 53840 - DNA, 1342 bp, Heterodera glycines
atgttgaaaatacccaatcaccaatggatcagacatctgagattcatcgagaattggccaaaggtgtttaagcaattaaggataaatagccacaataaaaattaatttattaataaattattcaaaaatttaataaaaattaaattaaaatttatttaaaattttagagaaaaataaagaaaatgcacaaacatcaaaggaccagccgacatcggcgggtggtcaaaatgaagcaatcccttcaccaaaaaagccaagccccaaggggaagttgaaaagcgattttcggcctaaacttggccaagagcttttccacggccggttccgaaaggttacaacagtcatagggattaatttataaggatattcatcgagatcctcattctcggttctcgagttaagaaatttcttaggtttttcgtttctctgatccttgccttggctaggctgtcctaacaatttaaccatccctggtattaccagggaatgggttttttggatctagaaaactgtcaaaatatgcaggatttaggactcaaaaagcccttaaaaagaatttaaaaaatcccaattttatgggagggtattaaattggtcagaaaatttttttggcctttatatattattttgtttatttggtacatcatttttcattgaaaatggaatattttagcaaactttctgacgtacgccataataggacaaaattaacgcttcttaaatatttttcgaacctaaaaaactcaaaggtaaaattccaaaaatcctggtcctatttattcattcatccatttgatttaacagaattttattttcaaaacacagtatcattgacgcatttccttatccttatcattcatacgatttaggaaaaaaagttgaaaatacactatcatcaaaggactcggcatctgaagctcacaaagaattggccaaaggtgttcaagcaattaagaataactgtcccaaaaaatgttgttgataaaattatcccaaaaatataaattaattatttttaaaaaattttagagaaaaatgaagaaaatgcacagacctcaaaggtcccgacatcgatggaagggcaaaatgaaccaatcccttcaccaaaaaagccaagccccaaggggaagtccaaaagcgatttcgtcctaaacttggccaaagcttttccacgaccggtgccgaaaggttgcacagtcatgggcattaatttatatgcctctgggtccttttcttgattctcaagtgtagtaatttttctcaggttttttttttctgggtccccgttataggacaaaaaaaattctttaaaatatattttttggacctaaaaagctcagga

SEQ ID NO: 53841 - DNA, 1383 bp, Heterodera glycines
atagtcttaaaaggggtgtgaaaaagggtgcgcatttggcacgggacaaggcaaaagatgcaaacagttacatgcacgagaagggacggcatcactcggaaaataatggtaaaacgacaaatgccaatgtgaaatttcgggaattaaaattttgatttaattaaaattcatttttaaattaagaaattccacgccatcattcatcatcatcatcaatgtcaaaaggaaggcattattcatcagcaaaagaagggaatcaaaacaaaaggagcagaaaaggtgagaagttaaattggcaaggaaagttgaccaatttggcatttatgtatttaattatttaattttgcaatttgagagacaaaaaatttgaataataagggggaaaagggggaaaatgtgaggaattttgaagaaaacgaacaaaaaacaacggaagagaatttggaagaggaaaaggaagagaatatggaagaggaaaaggaagagaaagagaaaatggaagagaaaaaggaagaggaaaaagaagagaaaatggaagaggcaaaggaagaggaaaatgaagagaaagagaaaatggaagagaaaaaggaagaggaaaaagaagagaaaatggaagaggcaaaggaagaggaaaatgaagagaaagaggaaggaggtgaaaaatcattagaaagtgaggaactaagaagaagaaggcccggaagaaaatttgggtttaataatataagcaaaagcgaagaggaggaggaagaggaaagtgaggaagaaaacccattggaagagaagaaagaaaagggagaggaaaaggagagagaggaaaacgggggagagatggaaaaacaaaatgccaaaaaggaggaggaagaaagtgccaaaacgggggaagaaatgggaaaggaaaatgccaaaaagggggaagaaaaggaaaaagaaagtgccaacaaaggggacaaaacgggcaacaaaaccaataatgaaaatagtgggggagaaaagcagaaagaaacagcaacaaatgggaagaaaaatgacaaaaaggaaggccaaaagaagaaaaataatgaacaaaatgcaaaagatatggacaaaaatggtaaaaaagaaaaaggacaaatggccaaggaaaatgagacaaaaagtgccaataatgggacagtccaatccgcgacaggtgccaatgccaacggcggagcagcgaaatggggcggacagcgggcgagtgccaacaacagcaaaacggtacaataattaaggggatttatttaattaattaatggattttttactgatttagaagcggcagccaaaacggaggaggatttatgtgttcagtgacaacatttcgaattcggcgaaaagcaaaagaacaaaaaatatggtgaa

SEQ ID NO: 53842 - DNA, 1437 bp, Heterodera glycines
atgggcgacgacgactggacacgtgcaaacatcggcgtgcctggtgccaaaacagtgcgcgacacacgctgcacggtgaaagacctgccagagaaggaacagttcgagttccgtgtccgtgcggtcaacaaggcgggcgagggcgaaccgtccaacctcgtgttcactaccgaccagccgggccgtcccgtattcgacatgtccaacttgaaagacaccacaggtggcggatgcattgcttattgttaaaagttgaaaagcttttatagtggtaattgtgtctaattaggtgttcgtcattgtgcttaatgctaattttctaagatttatgcttgagaatccaagtcttagttgaattttttcaagccctgattgcctaaacagcactacttttaaaatttacttttttatcaaattaatactttcattttatttaaaattatatattttttaaatttatatatttataatataaaatttataaaaatcttttaattttttaaaaacaattattttatataaaagaaaataactttttttttcaaattagataataatacttttcacatcattttatatagaatatgttttattaaaataatggattttgtttcagactcatcagatcaaccattgtcatccaccgcccgtcgcagcgagtcgcgcagaccgaaaagtgccagaaaggaagccgcagcattgacccccttggacgccatgcagtggttggttaaacaaaaaaaaacgaaaaaaagtttaatcatttattttattttttagttgcagcagccatttgacgccgccacatcccaaaaacatggtgagcaaattcgggtttttaatttttttttttttttttgtttttttttcaataattccttggtcatagtaaagtttgttccgcaccctttttcgaaaattttttccattggttttcatgtcgttgatcacgaatccggcctccttttcgaccaaatccgaatcccggacccgaattagaaccaaagtcggaaattgattcttcacaaatgctcctttagtgtccaaaattgattcaaatacatgaaatggccacgattccctattttctatacaattcagtgcatttggatcgatttgggcaataaggatgtattgtggtataaaaaattttgactgtgggtagaaatagaggacggagttcgaaaatgaagtatgtaaatattctatagaatttggccacattcgtggcctaggcagtcagaacagtcaggttcttccagcggcggtcggcacgaaatatcaggaatgtatgtcgagaaaagggatgagggggtaacaattagaggaagtagtggtcgggtagaaacaatactttgcataaatcgacatacatgtgaaattatattaatgcttttcgcgagttaattctaaagaagacaatgagcgacgaataaa

SEQ ID NO: 53843 - DNA, 1226 bp, Heterodera glycines
atgaaaaggccttcttcggttgtcgcttttggtagtcatttatttgtcggctttatcctgttgtcgcttttcattggcactttgggcactgagaaaaaagaggtgaaaattaaaatgtaattaataaaaacttgaaaaaatcgaatacaaaacaaatatgaaaatgcgaagcaaattctgtgaaaaatattccattttctgattatatttcattttttaatttaatctttaaatttacttttaatagtaaattttctttgcacaattcagacgaaacctgccgctgctcattctcccgccgatgtaagaaaagcattaattattttaagttaattacataatttcatttgcattttcaggccaaacatccgccgccagtcgccgcccacgcggccgctggcgccggccacgcctccgatgtaataaaataaagcataaatatcaggggacattatgtattgtttgttcagccgaaacacgcttctccttctcccgctggggctgctgctgctgcttcccacgctcatccgcccaatggcggcgccgcccacgcggccgaagtgagtcgaaatttttagagaaattagtacaaattaatttgaaaaattaaaaggcaatttaagcagctcattagcttgttgatttttgtgctttttcagccaaaacatgctgcggctcccgctatcaaaataactgatgtaagttgggaaaaagcacttcccaattttaattaattttaaattgttttaattaattttaaattgtttaattaatatataaattattttgattaatccttaaattatatttctgattcacaggaggccaacaatgtttactcggtgtgtgtggagagagacgttctgccggcgccggaaaatgcgtcaaaggacaaattgaaggcaatcgctgcgaaatgcgacgaatgcggggcggcaaaatgcaaagcgaaatgcgggggcaaagaagtgaacgacgcatgccgaacatgcattatgcaaaactgtccaccggcaaaataaaaaatagcagaaatgaggagggaaagaaaggcaaaaacggcacggaaggaggacaaaatgatggcacgacgagaaggaatggatgaatgaatgcacataaatgaacaacatttcacccactttttgtgatttgaattggccaacagatcaccacttccaactgatcattctgatcattcatgccaaaaaaacaatagtccataa

SEQ ID NO: 53844 - DNA, 304 bp, Heterodera glycines
aaaattccctcaaaaataaaaggtctattgcgcaccgccctccctatcatgctcgagagcatttgtatgtgtataaaatttatcaaaaaaagagatagccatttttctgggataacctctaaatataaaaatcctctgtgaaataaaatggcgattgtgcacagccctccgtctcatacgcaagcgcttttgtgaggtataaaatttctcaaaaaaagagatagacatttttctgggatagagtataaatttaaaaattccctcaaaaataaaaggtctattgcgcaccgccctccctatcatg

SEQ ID NO: 53845 - DNA, 304 bp, Heterodera glycines; identical to SEQ ID NO: 53844

SEQ ID NO: 53846 - DNA, 159 bp, Heterodera glycines
ggaagctattcccgaaggattcggtctccccataaatctgggcgcatcggttcggggggactgccccgaaaacaaaaaaaatcaattttttcaaggggccgtttgggggactccaaaaattatggggaggaaaaatccaacgccgaattaaaggacagg

SEQ ID NO: 53847 - DNA, 861 bp, Heterodera glycines
atgctttccgcgccgttcggtgcactgctcggcgccgtcgtcgccgtcgccgttttgctgccgtcccattgcaatggtaaggcaaacaaaaactgttaatgtttgagggtggatggttcatggttcagttgaggagggcattcggacatttcagtcccaagccgtaactctttgttcatccatatttctccatttcagaccgaaaaagagtcggtccgggttcaacaccataagtttggtgtgttgcacaaaaaattaaactgcaccaattggtctgatcacacacaccaagggcgtagccagactcttggcttcggagggcgggaggagggggatcttcggcctcatgttttttcgccacgattttccaaaattttcaaattttgaaaattgtatggagattttgggtccggtggggctgataggcgctgccgggggaaattttgagatttttatgagatttcttaaaaattccattttttggatttcgggggggggagtgaaaagtgattgatgggcgacggggaaggaacgacggacgcggcgatgttatcgcattttgagtgttgcgagagactggcggtcgaagactgatgagcatttgctatttgagatggatgttggggaaagattagaaagaattgtgggcagattgccagcagcaaaatacagtggcaccaaaattaatttttaaatttgtgttccttggacaatttcagaaagggcgcggcattggcataatcttaaactttaaagtagatttaacccaatttttggttcaaccaattcaaatctctagagcagtttggttaaagaaacactttcatgattttcaaaattttagaaataactttctacaaa

SEQ ID NO: 53848 - DNA, 70 bp, Heterodera glycines
tgaagaaagttgaatttattttacacgaaatgaaaaagtcaaagtcattttaattcggctgatcggcctg

SEQ ID NO: 53849 - DNA, 1812 bp, Heterodera glycines
atgctgaaccacttggaaacgaacttcaagaagcgctttcttctgccgcatttttggacgattttatgccatttgttttggcatttgaatttgtcgcaaaattttgcggagaaaacggcggcaccaccaaattgtgcaaagagaaagttcaattttcatatttaaaattcataatgtataaataatttcatttttagtgcctttcccaatcattggtcgccccaaaaacaaaggcaccgtttgttggcccaaccaaattccatggcacaacgccacgctctgtgccaaaaaccacttttggcattgtgccaacaactgaacaaacttttgcctttaagccatttgtgcggcatgtggaccattttggcacgaattgtaccaacattttcttcacgtcggaagtggacaaattcttgttgaatatcaccgcgacgccatacgaaattgcatgcaatgactatgaaaaacgtgccaaaattgacgagccaataccgtccgattattggtcaggcggacgctttgtgaatgcttgcatggcggtgccaagtgcaaaatgcgaaaagtgatttttggaatttattttttttaaattttaaatttgaaggcacgtcgaactttacgcatgctatgaaagcattggcaataagccaagtgtcaatgccattggcgaattgtgccaaaaacatctgaacaatgccataaatgccgctggttttgctgttcaaatttgtgcacatcggcaccaaacggaggcgacgaatgagctcattgttgaatcgttcatcaacttttcgttcactaatgagccgtttgttaattaaataataattatttttttattaattttattaatttaggttccaaaagacgcgcattttgccaatttcaatggacaaaatttgggacacaaaaaagaaaacgccatatttcctcatcgaatttggccaagacgagcaaaaaagtgcaatccgagaaaagggcgacggagaaaattttggcggcgccaaatggcttaatgaggcaaaaagcaatgttattaatttttaattgttgtaatttagaatgatggcatcggctccattctcaaagacattgcgccacaaatagtcgacggcactttggcaaaaatgattcattttgtgccgccgtcgaacgatgacaaaatgctcccatttttccaaattgaaaggcccaaatattcaaaattcataaccaacgacacggatttgttaccttacaaaaatgacccgaacaatacaagtcaggaataaaattaaaaatattttcgttttggcatatttttagggagagcaacaccatgtgatatatacggcgcagattgtgtgccgatcagaaatttgttattgaaaattgaggcattggaaaactgtggaaagaacgaaagcgaaaacgatgcggtaaaataaaaataaaaattttaaaaaatatttaaaaatatttttagatttttaaaatgccaccatgggccccaccacttccgccaccggtgaccatgaaaaagccatccgaaacattgttatgtggaggggatatgttttgcgacaaacgaaggcttcaacaacagtacaacagattgagggagagtgagtcattttaacaaatatgaattaattaattaaaatacctaattaaaaattcaaattcacagtttgtgggcttaagcccgaagaaatggagaaccagcgcgaaaaacgacaatacgacccataccaaaaatggaccgaatccccgatcaaaatcgcattcaacaaaacagctcgtaataatcttgccacatcatacagtatttga

SEQ ID NO: 53850 - DNA, 1220 bp, Heterodera glycines
atgggcaaggacaagcaaggtggttatgacccggacatccacggaaattggcaaaatgaggagaagccatgtgcctgccattgttcgtatttgcgtgccaaaaaattctaccgagtaatttaaatttaaaaaacaaatttaataaccgaaaagttgaatttttcaattttgttaaaggttgaatgtgactttatgaaccgaactaccaaaagatgggcaaatgccggccgagttacgcttgggctgctctctgctccgcttctgtttgttcccgtggtaaatgagctagttgctaggccacaactgcagtcagtgggacaaggtaatgtaacgaatgtattgaaattttgaaatgtgtgaggtttgctccctcgactggcattttggcactttttcggggaaagttcccgtccccgaatggtgtctcatatttccgtaattacgtgcagccctctgctggtctcatccccgaactccccattcctccattccatcaattttttctgcacttggattctaagtacatacctacttggattctgctttcatgcttggaaatgttagccctacttaataaccaaaaaataatttataaattttgccgcatttataattttattccaaaattattttgagtcgaaatctcatttaaaaatcgcattaacattttttccttaaaatggatttgttttatccattgttgctgttcattcattgtttcttcagacattactcacaccgctttggaagtgcacttcgaatgcggcctttgtggtcaaattgcctacagaacttacgaaattgtgtgtgaagacgtaacgagtgaccgatggggccgttacatgaaaacttacggggacgagcccatctttggcattggcaccacggaatttgatggcattcagcgcgtgtttgatggcatgtggaagaactacgatttgatctacagaaattgcaaggattggaccagcgaaatgatcgaacgtctcagttaaacgagaaattcccataaaaaattcgatttgattgattttttacgacggaattcgaagtttaaaaatatcttaaatccattggaatttgttaattgatgcaaaattttgttgagataaaagtttaaaatgtgctgccttttcttgcgccaacttaaccaaacaattgttgaccttttcattattcgctatattataattggtttaaatttcttttttttaaataaa

SEQ ID NO: 53851 - DNA, 883 bp, Heterodera glycines
atgcaaagccaaagtgcaaatgccatggagtgaggtcaacaacaaaaaaatttgaatgccatcataaatgcatgcttttttcagcggctcatgcaatttaaagacatgttggatgcaattggtgtgtaaataattgggcatgccagttttaattaatttatatcccgagttgatcctaaaagcgatcaatcattgatcaatagagattgaatttaacataaaatcagcctttatgccaaagaaatttcatgccaaaatttaaactaattctgaaaatgttgaaaagagttacaaaacccagctaaaatatcttcattctcatcataataatacctaatgatctggaaacattttcggcttggaattttgatttctttagacaccgaaattacaaatttcggtgtattcagataataataatttaaatattacaattattgttaaagttataatcgattgttaaaattataattgaacaataattaaatttaaatattataaaataaaattatgattccaaatcaaaattaaatttaaatattatttatcattgacactttttcaagttcgaccgagcacccaaatttaagacagaattttattcaatttaatacattcattatctttaaaaaatgcatttagcctccaatccgtcaaattggcaacatccttcagacaaagtacaagcaggcacggcgtattcagatcaacagccgcggaaatatgcaatttgatgagccaatgcgagtggaggacagcagaggccgaaggcagcagcaacaacaacggaggaaaaacagagcactgactgacttagttttcctggtcagatggaaaacttttttttttggggggggcatcagtttaatttgaatttaataaa

SEQ ID NO: 53852 - DNA, 599 bp, Heterodera glycines
atgaagattaaggttcgtttttaaaattctcagtcaagtaattttatggaatttttaagcaaaaagccatttataggaataaaaaaaatttacaggtaaagcttttcggcgccggcgcaatttgccattttgaggatttctcaacacggtcagcagcaaaagcagaagaagtcaatttgtttaaaaatgtggtcatctacttcttttttaaatttaaacaaaaaatgttcttttttgtaaaagcgagaaaaaaggctccaatattattttatttagtaagttttttctataaaaaattaaatcgcaaattatttcatagaaatttttataaaaattattgaatttccaatttttttgttttgcttatacctctttttgtggaaatcattcaacaagttcattaaaatgagggaaatttgaatgagagagcaggaaagaatattatccgggattttagaggtcgctaatcatgaatctgacatgtattttgactaatttctaatccttaacacgaactcaaataaaaatcgaaattttgaatttttcaaattatattttttgttcaaatttagattaggaaatcggaattggtcaaataa

SEQ ID NO: 53853 - DNA, 648 bp, Heterodera glycines
atgaatgaattaatgagcaaaaaacaaaacaaaaactgcacaaaaatagtgaataaattgacgagaaaaagcatcaaaaaccattcgaagatacaattggagacaaatttggaaaaaggaagcgaaaatatatagtaagggatttacaaattcaggttgcaaacatttttttcgacgttcaatttcgaagatgaaggaatataattgcgataatggaggagaatgtgatattgaacaatgtaatattttaaagttaaatggtatattagataggattaaaattggaataaatgtttaatttttatataaacaagataaaacatgtaaactgtgccggctgaacaaatgcttaacggtcggaatgaatccgcggggcgttagcgcaacaaaattcagtggccaacaaatattggcatttgtacaacaaatgaaacagcaaatggcatcattagcagcaacatcaacatcagcaaatttgacaggatttgaattgtgcgcacaaaccaacaccacaacaaaaaatgggccacaacaattgggatcactaaattcggttgtcaaatcaaagacagaaataagttaaaacgcccggttaccgtaacccgttttcaaactttttatggtaactgatcggtaacggttaataaa

SEQ ID NO: 53854 - DNA, 613 bp, Heterodera glycines
tcaaaattggcaaatcattggggcatcgttccgcttgccactgacaatggcactgctgatcagcaacagttgttcacattgcccaacaatgtgcacctttacccgggcaaatcattcgcttctgccggcatttcagtgaacggtgctgaccgtccggaaattgttattttggatgtgcaatcggttctttgcacggaaaagcatgacgatgctgccacgaattgagcagaatgaaaactgattgggacaaaaaaaactaattttacccccgaacgcctcgaaagttggcttctttttaataatagaatttgtaagcatttgccctctcattttacaatttcattaccactttcgaaaacgaaaaaattcttaccacaaaaatctttgttcaatttaaattagcaaatttaaagtgaatttttaattctttttagataatgaataagttattctttcaactagtaaatctttacaaggataattgtctccaactgatgcagaaaagctgaaaaaccaacaattggacacttgggaacaactgcaaaatgccattttgaaagaaaaggaagcgaggtaaaaatggggaaatgaattacatattataaaaaataaa

SEQ ID NO: 53855 - DNA, 741 bp, Heterodera glycines
atgtcaaaggagggcccgacagacgaagatgctattattgccgtcgccctgggcatttggtgagggactgcaaaacaaagaaaagagatgaaaggcaaaatagccgcgggccacaaagaaataacgaatattatgggaatgagagacattggaacagagggtcaaatggtggagaaaattctcgttttgtgaacggaagggaacaaagaaatgaacgagaattccgccggtcaccaactccgaatacgctccctaggggatacggtaataattcgggatcccccgggagaagagtgagctttggtggaagatttgcagcggcaagaattgccagcccaattttaatggcatttattgcaattctgtctctctttgccccaaatatagctgctaatactgcagttagcccaatgatttgcctatcggatgctccctcaagtctctggtctattccttctgaccccttttgcccaacttggaccccaacagtggaaccgattcccgcaaattttgccatttttaggcaaaatacaatacagtacaaaactgaggctacggcttgtaaatgtgtgaacaagcatttcaagaagaatcggtttctttggagggaaaatcgaagaaataagtacaagcccagtggaagtcccaacagcgatttgccaccaaatgaaagaaatgaagcattcacccaccggaaacttaaatttttatgatcagttttgccggtaaaaatccaataaa

SEQ ID NO: 53856 - DNA, 267 bp, Heterodera glycines
ctacataataacaaaagctgtaacatcgttgaaaagctgaacattaggaacacgaagcagttcaacattgacattcgcgtcgaggagggcaatgggctgttcactgtgacatttgacacgggcggaaaagcgacaaaatgccaatacagaagcccagatatgccaacatgggcagtccaatacataacagtgagaactgaattagcccaactaatttgaaagaaatggaaaaaacatttataaaggaatgaatttcaaaaagtcaga

SEQ ID NO: 53857 - DNA, 387 bp, Heterodera glycines
atgccttcaaaggagcagcgacgtaaagaagcaatgcgtttgcgctcgcgtgccattcgacacacgcctgatgtgggcaatgctttagtgggtccgagcacaattggccaacaacctcttgatctcgaccagggttctggctgcttttcatatgagaatttaaatctatttgtagaaccttcaacgtcgactggaattcgtgcccaaatcagacaacaacgaaatgatagacaagctattgtgggtacgccggcaatgcaactggacaccagtgttgtttcgactccgaccaccgaaggaatacggactttgactattgttggaggtcttgatttaagctaaattaaaactaaagctatatatataaacaactgccaggctcttcaa

SEQ ID NO: 53858 - DNA, 1185 bp, Heterodera glycines
atgtgggaccaatgcctggacaacgcggtccgattggagcagcgactgctgccccacgtgatctatgacgacgcagagcacgaagcgcatcataatgacctgtgagtgtggctttttatgagcggaattaatttacgaatatttggactcggaggagtgatacttttaaatccataaaattcctaactagcccgttttcagttaagggtccaaggctgtacgcaatcggattttgaattcgcttaaaccatattgctaaaccaattaatttaattatgaagttggtaaattttccgttaagactttgctggttttcctattcaaatctatattttccagagtttgctcgtgcgatgcatttttgcattatctaatttttttttcattacaaataggattttgtcattaaatgctaaagcgcaattcccaactcagaattgacgtcatccaacacgttgagcccgtccgaatcaccaacagcggactggagccattgaatggcaaactgaccgaattcatcaacaacccattgaacagctcggacaacgaagtcccggtgctgcctcgtgcaatcaccggcattaatcacgtgtaaactaatgttcaggctttattatttttttaatgaaaatgaaaactaagaattttctggagataaaatttcagcacgccttccttcgaccaaatcaaacaaatgattgaggcgatcagaacccagggcgactgtccagcggtggacattttggcaccggccgacaatttgactgtttacggtttgttttggacatcattaacgggggggggggtgcgctaactttggcattttgccattaatttgcctccctttaagacgcctttgtgtgcaaagtgttggcggatgtgctcgacattctgaagcgtcaacgtttctacaccaatttggaactgattgagcgcgacgcgcgtgcccggggggaggcgaaatggcaaaatgccgccgaagccgcaggggcggttgatgcatctgccaccggaagttcagcgacaactactgatggcaaagggacagcagcagccaagggggaggacgacccgttgatgttggctgggccgtcttcattgtccgtcgaacaacataaccttgtggcccatgtgacatccactcatgaaaaggcgggtgtacttcgtttttggaaaaaaatataa

SEQ ID NO: 53859 - DNA, 104 bp, Heterodera glycines
atgaagatgaaaatttcggacgacaatgtcacgtcgatggtttgtgcaaaaaacttcaccgagaacagtgatcagatcaaccacatcaactacacaccggacgg

SEQ ID NO: 53860 - DNA, 306 bp, Heterodera glycines
atgttaattggaaaaacgaataaggtatgccaaacatcggacgggcacgactgggccccagtagaaaacacttatttgttagggctatcaaattaattcaattaggacaactatgaaaggagttataccccaaaaaccagcctggggcccagttgcccccccccccccaattctgctcaccaattgcgtgcaggcggatgccaacatgaagtacttggggttgaacgccacctgctcgatgttgccggagtgacttgtgggaatttcgcggatttttcgaccagattccttcaaaacaaaaataaa

SEQ ID NO: 53861 - DNA, 895 bp, Heterodera glycines
atgcccaatttaattgtccatttatcaaattcaagagaaataaaggtaataatttttaagtttgcacaatgttttgatgcgacacgacagcaaaacaaagaaggagcacatgacggagcagtacccccatctgataattcatcaaatgacgtcgccggtcggacaacgcgtaagcaaagcgacgaaaccactttcggattaaatgggtgcacttcatttctcacccctaaaaattttcttataaaaagattttctacaattttttaagaaatttctaagtttgaaaatttttaaaaaataatcaaaggggaccgggaactaactgctccataaaaattaaaatgcactgcaattatggggatattgaacatacttttgttggtttttgaaatttattgcattaaaaatccccaccaaacccgcccaaaaaaagttaaaaaaaaatttttttaatcgttttccaattaaagtttttgcattcttttctttcccttttcccattgtgcagatcgccaacattctgaagttccttttcccggtgccgaagcgggacgcgcgtcgggtggtcacttttgccaacaccgacgacttcgtttcgttccgccagcacagttggaaaatcgacagcgaaaagggaggggcggtggaactgaacgaattggggccacgctttgaaatgcgacgtgcgcattttttgctgttttaaatatgacaaatataaacacataattttattccccacatttttacctaatttcccctcaagggttttccaattccctcaaaagtttgcctctctttttttgtctattagaaatgaatgcttctcaatcacagaaaaacatatgtgttatgggggtgcattacattttgaaaaattttttagaaaattaaa

SEQ ID NO: 53862 - DNA, 1866 bp, Heterodera glycines
atgacttctgatctgctgttaactcattataatccggctcttccaataatcgtggccgctgacgcatccaaaaacggtattggcgcaacgattggccacgtatttcctgacaaatccgagaaagtgatcgaacacgcatcatgtgttttgtcaaattcccagcaaaattacagccagattgaaaaagaagcattggctctagtgtttgcagtacagaaattccaccgaatgctattcggcaggaaattcaccttatttactgatcacaagcctttgcttgccattttcggttccaaaaagggaattccgatttattccgctagccgattacaacggtgggcgttgatcatggcaaattatgatttcgacatcaaatacacgaatacagcatcatttggacaagcagatgtcctctcaaggctaatagccaattatccaaagcctgaggaagatgtgttgattgccaacatttgcgtcgaaacggactgttatattaacaccattttacagtcgcaaaccgatcatcttccagtcacggcacaagaaattgcggaatcaacaaccaaagatgagacactccagaaaattgttaattttgttatttctggttggccaacgaagtgcagggaacccgaaattgcaccatttcatccgaaaagaaatgaaattttggaaattgggggctgccttctctacaaaagtcgtgttatcgttccaagccaactgcgtggccgaattttaaaggcattgcattttgcacatccgggaattgtgcgaatgaaggccttggcacgccagtatgtatattggccaggaatcgattcggaaattgagagagttgtacggcaatgtgatgaatgccaaggtgcacagaaatgtccgattaaggcaccattggccccatggacagtcaccgacaaagcatttcaacgcgtacacatcgactttgctggaccctgccaagatggatatgtttattttattctggtggacgccttttccaaatggccggaagtctatcaaatgtcttcaattacggccaagtccacagttttcacacttcgttccataatccatcgccttggcattcctgaggaaatagtgtcagataatggcacacaattcaagtctgctgaatttgccgctttttgtaaagaattcggcatcaagcacaccttttcaccgccgtttcacccgcagtcaaacggccaagtcgaacgattcgtcgacactttcaaaagagcgatgaaaaagtgttcaacggacgataaaaattggactggaaaggtgctgctcgcttacaggacgacgccaaataatgccattgatggttattctcccgatcaattattcttcggacgaaaactccgaactaaattggcattagtcctcccgcaagagcacaaaaacaattcagagaacattgacaaaattcagcttaacaaaagaaggaaggactactcgaacaacatggcaaaacaattcgatggacggcatggtgtcaaagaaaaagtgtttttccccgccgaaccagtcctccttttgaactacaggaaccaaaaaacttattggctccatggtacaattgtagagcgagtcaggaattcgcctacataccgagtccatgtaacagttcttggtcgaattgtccaccgacattcgaaccaacttcgtcgaaattgtgttttcgaagagaattcgaaacacaatcctggtcccgatcagcagccaattccaccagtcaacggacaagctcaaaatttggcgcatcaaattgctgatccggtcgatcaacggactgatcaacaagccgcaaatgacccgccgacaatggctcttcgacgatcgcagcgtaagccgaagccg

SEQ ID NO: 53863 - DNA, 1413 bp, Heterodera glycines
cttgcacttttggaaaatgcaaatttcaacaaagaaattgagaggacttccgagtttctcttcactgactacggagaatcggccaatttcattgacaatcgcttcgaatggcactgccgtcaattgtcctttctcattttgttggagggcccaactttgatggatcgaattgtgaacagagttttggaggataggacagaaagtgtgatgctcaatttcgtcaaagtgagtgtccatttttacatttatttgtcttaaaattgcgataattctgtggagggtgagcccattttcaaaaaaggttacctgacatttgcggaccgacaagtgcggaatgtccaccacctttttcagtttgtgaagtgcactcccgggttattgaactgtgctccgcccgtggaactgctcaaacgattgcgtgaagcgattgaccgtgaagggcaaaatttgttgcttgttcgattgaagtttgggcttacatcgcaatgtgacaacattaagcggattgaggacattggtcagttgattgggatagttttggaatggttttgtattttaattttggtcctttcgaaaattctaattttattggcatatttttgacgaaattagggttaggtgttgtcagtgtgtcaaatcggttttcaaattaggacaccgtccgattttgttttcgtttgttggagaattgctctttttccaggtcagtccagctttggcattgtgcatgattgtgggccgttgttcgacacttctgaaaaaaattctatcgagatagcgccagtgcaaccctcaagagacaaactgtcaacacagcccaacagggacaaattatcaatgcaaccaaaccgggacagattgccaacgcaactcaacaacgacaaattgtcagcacagcccaaccaggacgaattgccaactcagcccaacaaagacaacctgtcaactcacaatttgctcaacagagacaaattgttggcacaggcgctttacgaaataggggaaaggatgcaagacgaaatgcaacaaggcagcgaaaagctgcttaacaaaattggacaacattttaaacaaattgacaccaaattgttttttatggaatcgaaggtcggttttctttcaacaatgctttagtttcggcctaattgcattttccctggccaatagtcaactcattttgataaccaaattcttaatcatctcccacatttgctttagcttgagcatttgagtcggaatcagtggcaaaagcgacaaaacccaagcagcagcaacagcagaggcgaagtcagcagaggcggaggaggactggccaacttttttgaacggaaaacgccattccgaaacaatttttacgatgattacgatcaatttctgatggacgagcatcaatttcgttttgagcttttgtga

SEQ ID NO: 53864 - DNA, 992 bp, Heterodera glycines
atggagtccctaattatcattgatactttttttaaggtttgctccattgagacttttctctatgttgactcataatcagcacaattcaatctttcttaaacactttaaaaattatttcatgaattattatttttttaatttttttttctttggtattaataatttaatttttatgacaaaattaatttttattttttgaaagattttcttgcctttaggctattccgaagtttctgttaacacggaccttggcaaaattttctctgtgatttttgcgcttgttggcattccactgatgttcatcactgctgcggacattggcaaatttttgtccgacccaattttgtggttaaagaaataattggcggcgcatcagacaaaggacaaaggcaggcactaatttctaactaaaaataattaaaaataattttttgaaataaagtaaaaaattagttaaagtaaaatgatttattatttttaatttaaattttttataaatattggttaaaatacttttagcaaaaggaaacttttgaacattttttaaggccaaaaatatttatttcctatcaataaatccattttattaaaataaaaatattgtttaattattattttactgttaaaaaaattttttttaaattaatttatgttttttatattgcagaaggtgatctatgaatttttttgtattcacaaaattggtgggaaatatcgtcggaaatccattcaatcagcaactacttcaatgggcgcggtggcattagacatgctcgagggcatggaccgtaagtctaataatttttttttaatttcaaaaaattttaagaaatcgacgagcctaccaacctttggtttcccattggtatgatcgcataatgtcaaaaaaaaaattttttttgaaaatttttaggtgcctatgttatgtgcatatgcgtttattgctccatcggatcttttatgtaaaaattttttgaaattttttaaataaa

SEQ ID NO: 53865 - DNA, 156 bp, Heterodera glycines
cagttaaaaattatggaaaaaagtgccaacaatttttcgaaaatattgtggacacaaaatgagcatcgtttccaacaaatttgtgctctcccatttattcgtgaacaaaaagatgggacacttgctgaggaacgctatcgccactacataatacaa

SEQ ID NO: 53866 - DNA, 105 bp, Heterodera glycines
atgatgttaagcgcagagtttggagccctgcttatgctgctgcttttgtccttcggtgccccagagatgtccttattagtgggaacagggtttggcgtagcacaa

SEQ ID NO: 53867 - DNA, 57 bp, Heterodera glycines
gggcttcgccttcggcttcggcttcgagtactaagccgagcttcgcccacccctgct

SEQ ID NO: 53868 - DNA, 642 bp, Heterodera glycines
atggatttgccattcggatatggtttggctgcatttaaactttacccaattaattttcttttttttagcttctggcttccctcttcccgcttggcatcatggacaaatcggctcaatttttggcggtggtggaggcagactgatccttttattattacaaatagcttgtttattttaagtgccgccttgctttgatttggaagagtcttgcctcaattttgtcacacattgcaatgttccggttggtttcttaaacaaccaatattataaattgtgtctttttaatattgaaaattcttattttatggaattggtcatgacttttgccaaaaattcttaaatttcattaaactttaataaattaatctgtttacttgttttctttgtagtatgaataatttttaggtttttatttttcattttttcgaataatgaaaaaataattaatttaaaaaagaatttgtattttaaagtcagtagcccaagtatgcagccaatcatgcggattatgccatggcccatttccatatggtcaaggtcaacttccctatggccagccaccaatattaacgggataagcattatcgaaatcaaagtccaatgcgttttcttataatttattactttatgtggataaataaa

SEQ ID NO: 53869 - DNA, 577 bp, Heterodera glycines
atgtgcaatttggaatggcgcgttttcgatttttctcagatggtttctggtcgggtgcgccaactgaacagttacgcgtggaaggtttttgccatggcggtaatttaaatttaaaaaatgccaaatttattatcaatttgaagcatgtattttcggaatatgacaccgttgtttgggtggacacgtcaatttcttttgacaatgacaatttgtcgtcaattttaagacaaattcaaacaggacaaattggcccagtccagttgttaggctgtgagtgtgggaaggagcaaattttcaggtgaaatttaccaaatttattgaatttaagacagcggacatggcaaaaacattgcgactcatcctggcaaatatttcaataaaaaataaaatgaaaacaaataaaacttccagggatgtacaaatatttgccaatggtcgccaattttgggcccaacaaaacatatgaatggacaggaaacgacgacccaccacagttcgaggccaatctcgtcataattcacaaaactgagcaaactcggcaactgatgaaatggcatgattaaatattccaaataaa

SEQ ID NO: 53870 - DNA, 1694 bp, Heterodera glycines
  unsure (1)..(1694): unsure at all n locations
ttcaantcatttttaacgcaaactcaaaacaaaacgccacactaattcaaaacatggacacatccggacaaacaatcaactttattatataagattacacccctaaatttggaactttttcgccactatttttgccactattttggaatttttttctcactatttagttaattattttgggatttttatcactaaaaatccgatccctactaatcaccactatttatttaaaaggacaaaaagtgaataaaaaggataatttgtgactacctaagataagggtgttttcaaagaaacattccttccgtttatttgtttatttttcattcatatgaaaaggcagtcgcttcacagccctaacattaaaattgtctgttgtcccatatgaaagtgcttcggttggttttattcatttttacactcagattgggaattattttgactgtttgctatgaaaaccccaataaacaacaaattcactaattgcactccttcgactaaacggtcttcggtttccaaattatctgtccaacggaatgccgtttttgatcttttgaagcaggtaataaataattacttgtaaatatgtatttgatgttttattttattttaagctggccactgacaatttcacatactttcgccaaaactgcagctcatccgtctatggcaagcgcatgtccgagtgctgtgacgatctttctgcttcggctgatctcatgcgaggttggccaaaggattttcattgcctgtttcaatacaaataataattctgatggtcccatttcagtttcactcttttcatttttttagtttttaatgtaaagtgacgtccatttcctttcagaaattattcgcaaactccaatttgcttctcagaaatgcgattacgacgaaaacactcctggaaatggttttcggtcgtctaattcattttaaaaattaaacttacggcttttttcagttcattggtgtgtatcactgacattgtccttcttcatcttgtttcagttcttcgcatatgttccgaaagtcgcggaattttaatgtttcgtttggcgtattattgcaaagaaattgaggcatattcggcaattcttcgttttctcgttttggcatatcaacaggtggcatatcattatcatttcgggacgctgcatataaataaaggattgcaaaaatcttaactcgaattaattatttttcgtgtcctaaacaatccctcaaatttaaatctttgtgtttcaggtagttttgttgttcaaccggctggatggtggctcgttattccctccgctggaaggggattaccaacaatacaatattcttttcaaaggcatcgagagtcttgacgggtcgtgtttttacgggaggcctctcggctttcaggtatcactttccgaagaatatttttgcatttagcaattttcaaaaaaaattttccgactgcgcctatttgactttttcgttagccttttgccatttatgctattcgtttagtttttcccttctgtcacccgtattttccgtgtcattggccttgtgttggccacttacagtctttcctgggaaaatgggtcggcggctttgtcttctctgatcaattcggacggtatgcttttgaatcctgagcagagagcgaaaactctaaagaaagtaacattttagctttaagagttcttctcccattttag

SEQ ID NO: 53871 - DNA, 837 bp, Heterodera glycines
atgtcggacaatccgaaagaagcggagaaagaaatggaaaaagcaatgtaaataattttatttcaatttaatttaatgacaatcattttgcttttcctctttcagcttcatcgctgccgactgttggttggaggtgttcgatttgcttccgccatctcaacttggccttggcattgcgatgattagccgccgttttgactatttcatcgacgaacatttcaaaacgcgcaaatggaaattgggcaaaatgaaaattcgacgcaaaattggacagaatggcgcaaatgaaatgaaaattgtcaattccaatggaaaagcattgcaaatccctcaaaatccgttgccgaaaaaagtcatggcattcaaaagcattgagatcgagtaaaaaagaatttggaaatgatgtaccaatcaaattttctgattttcagcttcatcgaccaaaatgtgatcacttttcttggccattttcaccgttttttcgccgcatgctcaacaacattgtctatcgatactgaaaatgttcgcgtttcggagttcgttgttcgcaccatttggccaatgttcaaggacactatctatgacaccatgttgatccccatcgcttttcgtcgaatgcgccaattggtcccgtcaatgctcaatgattgtcagtctcttcaatttgtgtctttcgatggcgccatttccctcgaatttccgcccgacgacagtgccaatgcgacggatggccaaacggttgccaaatggctgttcacgcctcgtcacgataattttccgaagaagctcatatgctatatgaattcaaccatggaagtggaacaatcaaagcggtga

SEQ ID NO: 53872 - DNA, 150 bp, Heterodera glycines
cgtttgggcccccgtttttgggcccccgcgtttgggcccccgtttttgggccccggggtcgtttgggccccaacccaaaaatcgaaaaatgtgcttttttaaaaattaagattctaaaaactaagcctgagggatccctcgccacttggc

SEQ ID NO: 53873 - DNA, 3753 bp, Heterodera glycines
gagcaaaccgcaaaaaattataaatgaaataaaaggtttgcttttcaatgctcgctcactctctaacaagatcccagacttaaattttgtaattgaaaataagcaaccaaaaattctaatcatttccgagacctggttaaataccagaaattcgatttcatcagatttatctataggtggcaaatatatacccattttagcaaatcgggtaagtaaaagaggtggagggtgtgcaatactaataagtactgatattcctatgcttgaaattttttctgggacaaaatttcaatgtgaaattattcacattaaactttgtttagcaaaagtgattcacatttttgctttgtataagccgcctcaatgttctacaccaaattttaaaaaattattagattatattatggaatttaattataataatattcttatctgtggtgatctgaatttaccgggaattgattggattaattaccgaatagagaacaataatcattcgaaattatttattgattttatagcacaaaaacaattggttcaacatgtaaaacaaataacacgtggtaacaacattttagatttagtgctctcaaatcctaagcaattagtttatgacacgaatgttacagaaagtttttcaacatcagatcaccacatgattgaatttaaaattaatgggagcttttcgatcaccaaaaaagacaaaatttatattagagagtttaaaccaaaaaattttctaaaacttagaaatatgcttcagcaaaaacgcattgacctacatttactgaaattatttaaagttgacgacaaatacaattttctcgttggcgaactttataattcctttgatcaattatttcctaaaaaaatattaagaaaagttctaaaaaccaattatccacaaaaaataaaaaaattatactccgaaaaattaaaaatacacaggcttattagagaataccctgatcatggacaacataaaataaaatacaaaattttaagtaggaatctgaaaagggaattaaaaaatattaatgataagaaagaaagccaacttgttaataaaggcaatttggctatttttaaatacatcggcaacaaatttaattctgacagagaaataagattgcttttcgatgaccaaggcagaatttacactgaggataggcagaaatgtatgctttttggtaaaatatttcaacaaaattttatgcaaagaaattataatacgaattatccaattaaaaataatataaatagcataacagatatcgaattaaatgctgccttggtctggaaggcattaaggaaattacccaacagaaattcaacatccccagacggtttaccttatatattgattaagcaatgcgcagatctattggcacctatcataagtgaactcttccgaatggttttagattatggggaaatcccaaacttatggcgtacttcttttataattccaatttataaaaaaggagacaaatcgaatccaaataattaccgtcccatctctctgacatgtactttatgtagggtttttgagcgactattagtatggaatattgttaaacatcttgaaaaatataagattttaacagatgaacaatttggttttttgaaatccaggtcgaccaccacacagttgttggtctctctggattatttttataaatcaatagaagatggacaaaatattgatataatttttatagattttgaaaaagcatttgattcggtgccaataaatttgttaattgttaaacttcagaacataggtatttctgggaaaatactgaaatttcttcaaaattttctaacgtacagatcatatagagttaaaattggagagtattattccgaaagttttagaacttattccggtgtcccacagggcagtgtcctcgggcctcttctttttttgatttttataaatgaccttactaattatattccgcctgaagtcggaattaaattgtatgccgatgatgttaaaatttacatttcgcatgataatgacgcgaaaagggatttactctctttagcgttggctaacttagccaaatggtctaaagataatggcatagcaatttcgcatgaaaaatgcgcagtattatatttaggaaaaaataatcctaaacatgagtataaaattggcgagaaagtaattttaagcgtagattgtgtccgtgatctgggagttttggttgatcaaaagctctcatttaacaatcatatttcaaaaattttaaaggcggcttatttcaaggcatatcaaattttaaaaatattaaaaacaaggaatatcagtaccttaatcctagcatataaaagctatataagacctcacctcgaatacgcatccgaaatttggaatatctcctcaaaagaacagagtaaaagaatagaaaaggttcaaaaatatttcacatgaatcgtatacaaaaaatgtggcctcaaggcaataccatatgaaaaaagacttgagatttgcaaattggagaaattaagtactcgaaggtcgctcactgatatgaatatgactttcaaaaaaattaggggcttaactcatttagatccaaaaaaatattttgaattttcttcaaggtcgcaacgaaaaacatttaggattcaaaacaaaagatgcagtaataaatctcgaaataatttttttattcgtacaattaatccctggaattgtctacccaaaacggctatggaaatcggaagtttagctaaatttaaaaattttctgagagaattttatttagaaaataagtcctgagtggtaattcatcccttttttattttattttatgtattttactgtattgaccatatcatattttttttttttttaaattgtattcattactttgttttccgctataagtgcaattacatgttgccttgcggtttgctcaaataaataaataaataaataaaaattaattgttattctaacaattttattataaatttaaattgggtttttataaataaattccgatttccctggattctatattctctaaaacatagtaggaaaagcatttacttttgttttcagtttgctaaaaataaaaaaaagattatatttttgaaaatttcaaaaattgtcataaacttaaagaattatgtaacagtattccctgttatcaatgttgattaaagagattaagtcaatggcaactcgtacaaagaatcgtacaataaaaaatttaagcataagctaaagactaaacctaagcctaaagcttagatgcttatggccactgtagtcaaatgtgcgctcgttttagcgctataagcaataccaaacccttaaattttaagggatttttgcgaactttcttcggattttgaaccggtacaaaaggcaattttaatttttggcaaaggatctttttagtcatgtttgggttcatatgagtttgctgggaacaggatttagctgattttattaacaatactttttcctagaatcaatcgagattttcaaattgcaataattttttttttaaatatttttgtgcaggcttttcttacataaaattattaagaataaataattttaaacattcgacaaaataaaattcctttctttctcatataattcccgatccaatatggcttatgcatgtttgcatccatatttatttctattaatctatccttaagtgatttgttatttagtatcacttcgtccactccccaattcagttccgattttctccaaattttgtc

SEQ ID NO: 53874 - DNA, 730 bp, Heterodera glycines
ttcttccccgtccgtctctgtgctcgccatcgtcgcaattgtctgtttgatgtgccaatgttgcttttcggcaccgcgtattatttttaatttattattttaatttactaatttgttgttttccgacagatccgtgctgtcccggcagtcaaaaagtggtttcacttatgtccaattacgttggcacttttgccaattccatttccaagtcatcgctttgttcggatgcccaaaatgttgcggacgcgttgaaaggccaactgatcggctgctcgaaaggcggcgatcgaactcttttggccgacatcgaagcatcccttgccactcattctgctggtaataaccaattaatggacaattgcctaataattatttatttatttttaaatcattttaaatatctcttcccccttttagatgagtgtgcccttagcctcggcttcgtccgtgccatgttcgccattgccgcctccgcttcttcccatgccagcaacaacagcgaatggcagacattgagtgggcagtttggtcagaaagtcactgagattgactcgaaatgtgcagagtttggcattagcattggcaaagtgcccataaacggtcccaagggtaaagtcaattaagaaagaataatcaaatccatttaatctcttaaggtgtccatgttcaaaatgtgcccaactcggaaagtgtgatttctatgcctggattggccggctcacacacccaa

SEQ ID NO: 53875 - DNA, 1720 bp, Heterodera glycines
atgatttggaaaattcaaaatttagggctcaatcgaataagagccgctttaacggaagagcgggcaaatgaaagaggcgaagggactaatgagggtgaagtcgctaatggagtgaataatgaggatggtgaagccgttaatgaggggactgacaatggcatcattattaattgcaatgtggcaacaacaaaacgacgaaagaccaccaaagagcagcacaatgagagcaacgggcgcaacactccgctggacaaatgctgctccaactcccctcaaaattgtggcatttgatggagaaaatggcacacttaccgtaccctaaatttacccttacattttcacgctttacggtattatgccagtgttaagcttcgatgttgtgcattacatgtgaattttttgatttaaaattaatgcaatttaataaaatatatttttttcatttctccaaatgaaaatagccaattttaaggaatacatacagtagtcaaatagctgttactaccgtagacgatggtgctgttgctgttacggtacttttcccaggggcacttctttcatcagtcattgtgccattccttcattcgtttgctttttctttatttcttttcattttttggccatgtcccttggcccatttccaaaaagaaatctttctcttttcattatttatttcgcccattcacttcttctattggcttttgtaatgttttaatttaatgcgctgacaaaagaaatttggcaaacgcaaaaaaaagaaaaaagaaaaagccacgtaaaataagcgccgcttttcctccattttctcgcttttccattcattcgattcattccattggcactcaccaaaaatggcaatcaatccaaatccattcatttttctcttttattttagcattttctcatttcgatggttcgttcctttcccacttttttctccccgctttctttcgtcctttgctttttgttgctcgtcgatggcacttttgctgaccaaaagaaaaagggcagcggtggcggcggcgacttaagcgaccttttggggggggttggacttggacggaatgctttcgggagtgcaggaaatgctgggcaaagccgggggcggagctgcgggtaatctgaaatccaaattggccagtagaattgctagccgatcccaaattccaatatttttcgagttcgtatccgattcccgaattaatttttagccatggaaagccaattaataccaatttttccctctttaaaagatggaaagaagggattcgacaaaatcaaagaaatggcggccaatttggacccgaaaatgctgcaggatatgctgggcaaaattgacacgggcaaaatcaacgaagtcatcaaaaatatgatgacaccggagaatatgtggaacatgcttccggcaaatgtcaaaggtgccgaaaaggcatttgctaaaatgattagtcaaaaataaatttaagagttgttgccacatagttggtttttgattggcaaaaaattgggcaatgttttggccaaagaatgggacaaaatcgtcgaattgatggactcggtggacaaattgggctcggcggaagagctgtgggcagcagtgaagcagaagacgccgatgctggccgatctgctggagaacgatttgtggaagggaagcaaagagcggtggacaaagttcgagggcaatttgggcgacgaggcgaagcagtacaaggaaaat

SEQ ID NO: 53876 - DNA, 812 bp, Heterodera glycines
atgtacattacgtattgccgaggttggcatgttggtaaaaatgttgctaccgtttaccacccattctcccagctgtactccgaagaacagttcaagacgtacatgcacgaggcgggcgatgcgatccgcgactgtgcgttgggttgcgccgggtggcggttcaattacgacggtgtgtcaccgaacatgacaatgttgagcatcaacaacaacaacccgagtgatgagctgcagtccgcccgacaagtgagtggcgttaatggacttttccttcattgtcagaattatttttggcatttgtttttgtctttatccaaaatttttgccagccttttactcgcatgtgctcggcccgttcctcatttgcatccacaggttggaatcgctatttccagaaccgttcctcgcacggcactctgtcggccgagggcgccggtgcggcggaggcaattcaaagtttgaacgaacttggcaaagacgacgaggagcgggacgaattgggcaacaacaacggcaacagacagatgatggacggtggaggcggcggtggcttatcccaggaggaggacctcaacgaatttaagtcggtcgtttcgcatttaatttacttttaaaaccattcatttaatgtgctctttttcagtctttactattcaatggccgaggatggtgttcgtttggactacttccaattcgcctacgagggcgtgtccgagtcggacgagccggactcggtgacttgttcaaggcgtaattcccaagaaagcgaagaggaaaaaggttggaatggacgagttatggacacagtttaa

SEQ ID NO: 53877 - DNA, 503 bp, Heterodera glycines
atgcttaacgcattgcctttgccgtccaaccgagaacacgttgagaaagccgctgctgctgggcccggtcgttggagcccggtgccgaagagagcgcgcactgttgaggagaacatggcactgatcgaatctcgatggcaatatttggaggtatttaaaactgccgactaaaaaagggggcgggggtcaaccgaggataatgaattatgaggaaatctgaattttgaattcacaggaattgcgattggaaagagaggaaacagccaaaagggagggagaaaagggcgaagaagacggggacaatctcttccgattggacttaagcgaagtcgcggcaacagacgaaaatgggaacagcgaagaacaacaacgacagatggcggaagaacggatggacgacgaggagaacggcgtcagcggggacaatgacaaaaacgcaaataatactgacaacaataacaacaatgaggacggatttccgatggaatgcgtcgatggaatgg

SEQ ID NO: 53878 - DNA, 249 bp, Heterodera glycines
atgatttttaatatttccgtctttaattctcgcaagcggtcccgtattgacgccggccacccatcttctccccaaaaaattgtcgactcaaatttaatcaacaccgtcgctgacaatgttaagaatgttcttaaacagttggactccctctccgcactttcgactattgacaacgacgccctcaatggtgcttctctccgctgtcaaagcgcaactcctggtttgctctacacagctcacacaaattag

SEQ ID NO: 53879 - DNA, 1147 bp, Heterodera glycines
  unsure (1)..(1147): unsure at all n locations
atggccggtggcggtggccgtgcagcactttctgcgtacgcgattcgtcaagaccaacacggcgcggatgctgctgatctactgaccaatgccggcgtcgccctcaacaaacacacgtacacgcttgatgacgtacgacaacttcaacaatggctaaacaatcagcatggagtggggcaaattcggctcgtggtgttcgagaaagagcaggagtaccggatagtgttcaaaggcgatgggtatgttaattatttttagtggattagtcaatgatatattgaagaattgccgcccgcttcaatctctgccttttgttggagcgcgcgcattacaactatattgggcgcattgagcagctgttcaaagtccccggctactgcattgactgtgagcgacgggcggatgcgcgttaccatgcctcggggtgcaaagttgcgtgtcgcctctgtctccgctttggtgccggatacccgtgcaagtcggaacaagtaagtattaatttgttgtcaatcatgtaattattttttcaaaaaaaaagttgccaaacggtgaaagcagtgcccgtcgttgtaacgagtgtggcttcgtcttcccctgcgacgactgcttcaactaccaccttgtcaaccaggcacctgacccattggacggccgtggtttgcgacagcgtcgtacgctttgtcagtggcgacgattttgccgagactgtggccgtgttgcctatcttgggcttcaccagtgtccaccacttggccaagccgatgagggagcgcatgactgtcgtctttgtgccggaccgcacacgaatgatcagccatgcttcatacagccacttggccctggaccatctcgcgctgcgcgagtcaacaacaacagcatcaacatcgacgttgcttctgaagatgatgatgagaatgacaccgatgaagatgacgacgaacaaccactccgtttttgcttctttgatgccgagacatcacaagatcggccacttcagctcaacaacaacaacaaccaggtggcccaaaagcatgttccgttgctcatcgtcgctgaggtgatttgcgatcgttgtatcaaggcgggaatcagcgttcacgacggtcatggacaacgtgcgctcggttgtgtttgtatgtgtgngtct

SEQ ID NO: 53880 - DNA, 1132 bp, Heterodera glycines
atggctggtggtcgtgccggcggcggtggcattgcgccgttccattcaccgccccactaccaatggcaacaacaaccacagcaacaccagcagcagcaatcttcgtacatgatggtcagcagtggtggtggtgggtcacgtagcggtggtggcggcggcaacgcaaattccgtcctcggcccctcgctgatgtccatggcgtcgccgtttatgccgcaacatcaacaacagcagcagcagcaacatcagccgctgggcaaggagtcgtggcgtggcagtcagcgccaactgatggacatggaggtgcagcagccgaagtatggcggaggaggttaccaccagcagcgcgggatggtaatttttaagcattataaataaatagtaaaattgcgaaaccaatactggttgaagaagggggccaactccgttttggccaattcagtctgattaggagcagtcaatttttagcctttttcattgttgactctaaatccaaaaaacttggtaccattcgtttcacagctttcaccaagctgatatagcctactatttgcaaattttggggcgttgattttgaaaatgtgagtgaaatttttttgacgtaatttactcacaatcagtatctttggttttattttttttcatttttactctatcttcagtgcctccataaatgtaaaaaaaacatatttgaattcgttcgttttcaatttttctttgtccaaggaacgtgacattggcggcggtggtggtggctacgatatgcgccgcagtagcggcggcggtggttacgacgattttggtgcttccgccggcacgtcatacggcggtggtggtggtggtggtcatgggatgatgcagcaacagcagccgcctccgctcggctcttcactggcgtccgccggtcactacaacacgtcgctgtacggcggaggcggtggccgcggtggtgccgggccgacaccgccgaagcgccatcgctacgcgtcgccgcaaccgccgcccgtggagcgcttcttttgaggagcaaaatggacggacaacaaatggacagacgtgcaatgtgtgagagagagaagaaaggctgagatttgggagagcagaaaaacaaaaaaatggttggatgaataaa

SEQ ID NO: 53881 - DNA, 1124 bp, Heterodera glycines
atggaagaaaagatgaaagacgacgaaaatgagttcggcgctcttcgcgctgtgcaaattgatgccgcgctgttggacaacactttgttggcattgatacaagcgcggattgaccaaattgtggacattggtggcgcccattgtctccaaatacaagcaacactttcgcgaatgcatcgcaccgctctattttttatcccattttctaacaggtccatagaattttgttaatttttcgaatttcttttttttgtgtttgtcagtttccttcgacccaggaaacccaaatttgccgaatttcaaaacacgaaaattgaaacaatttccgagttttcaatttttgtttaaatcctggttcaggatacgaattgggtcgaaatgaatgtgtgtaattaattctttgaccccggaaaacccaaattttccgatttcaattcaatttttttcttccaaattttaggccaaagtcccggccagcggctgctccaaattcgcaccaattttccaacaacattcaaagcattgatcaattatgtgctctgttttttgttgccatcatttgttgccctttttgtcaaactgagaccattcgatcggagaattcaggtttccgaaaatttatttatttatttgtcaataaagaaaaagtccacaaaagggaaaaatccgctttaaagctttggtacagcagggcgcagacggcccaccgactggtcgacttcatccacttttgcctgtttcttgcgcagggtgggccgataaggtagcgaagattcaggcacatagcaaaaaaaaaatcggcaatttaaaaacggctacagatttatgtagtagtaaggtttatcccaacctccctccccatttttcgaaaaaaaatttttttccaaaagattaaaacattttcaagggttttcagggtcgctgatcacgaatccggcatttatttcgaccaattccggacccctgacccaaaattcgagcaaaaagtcaaaattccaatttcacttattaaaactatcagacatttgaaaaaaagatgaaactcaaataaatacttaaattttacagacccaccgaacgactgtttggtagtcgacccgtttatgtgcagaaaccgacaattg

SEQ ID NO: 53882 - DNA, 680 bp, Heterodera glycines
tggtgatggaaatgcactcaaatgcatgttttattttcctcatggaatggaaatggcaaaaaggcatttatgcctggttttaagcttctaaggcaatatttaaaaaaaccctttaaagcggccaaaataaccgctaaaaagagcaacatatctctcaaattgattatttttggtaaaaataaaaaattcatgaattttttcccgttgttaagcccctttttaatttagggaaaagtcagggccattatgctggtgaacccgcaaaatccggaggccggctacttttccctggacgaaattcggccggtcgtccactgggccctgaggcaatgttttgaacattttggcgttttgttgcctattgtttttcattccattcgttcaattacagtcgcaatttgttcgtgcttttggacgaaatttacgatttgtccatttacgacgaggacaacgaatgtccgtttcgaagtgcggtagaactgttcgaagacgaacgcagccgacagaagctgatttggctgtggggactgagcaaggcaaaagcaaaaaatagaaagggaaaagggaacggaggagaaaaaaaaatgagaaaaaaagggacaaagggccaacaaaacggacaaagggccaacaaaacggacaaagggccaacaaaaaggacaaagggctaacaacagtca

SEQ ID NO: 53883 - DNA, 1269 bp, Heterodera glycines
aaagaaacgttgccaaccattgaacacgtgcgtgacaaagcggcacagctgcagatggcactttccgacgctgaacaagttcccgacctggaggagcaggaacgtgctcggcaacgggaagaggagcgcgcgagacgggccaaactgccggcacaggtattatactttttcttggtttgtatgtatggcaccttttatttatagtattggcacgtgacaatattattgatgcttgagagactcgaaaatgccctcatttctaaggccaaaccccaaaaaatggcattgaatgttttgtagttaggctcataaattttttaagcgtcatatttataaaaaaatatacctaattctgttttggtgtggttttttttttgttcaaaacaatggttttatccattaaactttttacagaatgccaaggatttggacccgtgcactctgtcgcgtccgcaactgatgaagttggccacgctgaacgacagggcacagtttgcgcaggcgatcaccggctgtttcatccgtctgaatgcgggcgctgcaaatcattttgaggtcggcgcattttcgcggccatgccagacattttgtggcattctgttcattattagtggcgaaattaatatttaaaaaaatgtttccttttcagatcgaccaaattgtgaaggtggaacatccaccggcggccaccgaggaagcggcgagcaaaaaggcggcggacaaagccgtgctggagctgaaagtgaccggcaccatttcgctgaccgcgctcacctacattgccagcaacttcaagttcacggaggacgagtttcgcaagagttggttggccgagaccaccgaggtgggcgagggtcgggggatgatgatgggactgaactagccagttagttgtgggtgatgggactgaactggtcggctaattctgggtgatgggactgaactggccagttaattttgtacagtgggattgtacaataaaaaattactaaatttttttgaaggcaaatccactgccaacaatggaaatggtgcagcagaaacagaaggagttggaggaggcattccgcgccgtctcacaagctgcagacgcacagcaaagggtttgacaataatagcacggactttgggaagggattgggaagacagtccctttgttttaaggggtttttgtgatttgtaccaactacttcatcttgaaaaaaatttttttttggaataatgtttccgaaaaaatgcagcagaccctggaaagcatcttaaaataaa

SEQ ID NO: 53884 - DNA, 495 bp, Heterodera glycines
atgaacatttgccaattatggacaacaattacgaagctaataaattttaagtaaaagtgtaagctaaagtatagttacttaatttgaattataagcaattttctttgataaatgaattaaaaaaattttacattagcattttttaaaaggagctaattttatttttttttaaattggcattgccaattacatacaattaaattggttcaaaaatggcacagatgacatcatatgtagcaagaagcattttcaagaatttatggctctattattaagtgaatagaattttttaaaagaattaaatttaagagaaaaattgacaattgacaattaaatataattaaattggttgaaaatggcacatatgacatcacagtctgttcattttaaagatttatggctctattattatgccgagtgagctgtgttaaattttcggttcaatgcttttccttttatcggcatttatcctttcaaattggtctataaaataaa

SEQ ID NO: 53885 - DNA, 956 bp, Heterodera glycines
atggacggcacttacgaatgcgcgacggaagaaagtgcaaatggaaaagtgccattggccatttactcactgagagtggacggcggtaaggcaccaatcagcgaataattagccgaaattaacttccgtctgatccctcccccaattaattagtcaattaacttttccgtctgacccccttaccccccccccccttttctcagctgactgcgcccgtcccaaaagtgtggaacagttccgatcggctcaaagggagtggtgccgtcggatggacacttataggagcaatttgtcaaaatgggaaagcattcgcgatgccaatggacaaggcaaaggcctttgtgacacaaatgccgaaacggaaaggaggacggactcggggaattttgttgcctaactttggcattttcacacccacaaaatcagaggcttaaattggccctaagacaaacccaaggcaaaacattccatcgtaattctctacttccgattgctcactcatttattatctttctacgcctttcttttgtctgtgtttttaattattttgtgcataaatatgcttttcagagagagatggaaagatggaacagattttgaattaaactgaaatgcaaaattttttgaagttcaacaaacagtaaaatttgcactgtttcataattaaggcactgaacgaataatgaatgggtttttattactttatttttcggtcagtttttaatttattcaaaatgatagaaaagaaaattttggattgccgtttctcttaatggataacaaaaaaaaaaaatatataataatgaaaagttgaacattgtatgagcaatgtgcaaaaaaaaaaagaagcaaaaatatggaacaaccggccgtccaaactgtcaacctgcaaactatcgaagaaaattcagtaaaattaatggttataattttaatggttcgcatcgaaaaataaa

SEQ ID NO: 53886 - DNA, 704 bp, Heterodera glycines
atgacttccactgttccacaaattgtgctccgtctgttgctctttgctgtcctcattttgaactgcttcgactgttgccatgggtaagctttcggatttggaagcattttgcctcacttttttgcttatttctcggtcaattattttcccatttttcagcagagttcattctaagtccagcacagttccaacgactacgaagtccagcacagttccaacgactacgacgaagtctcctccagctccaaaaaaaggaagtattctcgacaaactcccaatttgggccaccattgtcatcgccgttttaattgggtgagtttgtctgctgcttttttgccgtgccattttcctccgtcttcaatttgttccccatgttcagcatggtcatcgcaattggcattgtttgctgcgcgtggtggtgctgccttcgtcagcgatatgttcgccgttctgcaactgatgggccctcctcgtcactgagcgacaccgaaaagtcaaagggcggcggatattcgtcgaagccgagcggattgatgtccaagctgcctttatggaagtcgtcgtcctctacgaccaaaaccaaaatgccggacagtctcaaatcggacatacaaccatcaagggcatcatcatcaaaaacgaaagacaagtcttcgtcaacaatcccggacagcaaatataccatgctgacgcagaagcattga

SEQ ID NO: 53887 - DNA, 1585 bp, Heterodera glycines
gaaagacattttcgtgccttgacatcagaaaggcacttcaagcaatagtggaagtaaaggaggaagtgcagagatgtgcacatgtcctccgaggcgatgaacgaccacgttcatccgccttcaattccccacctcaacagaggggtgcctggaatcaaaggggtgaccaccgtcactccaacaaccgacagagccaaccaccaaggccatttaatcgcggaggaacgcctcagccagaatatagggcgttctccgctattaacaaaaatccggaaagggccaaaaccccagcaagaaaatggggtcggtcctgctcgttctgctcgggaactgatcatctcccgagcgagtgcccggcattcccaacaccgggagctcgtcgaaaacggctgaaagaacagcagcgctgcctcaactgccttgtgcaaggtcacaacactgaggagtgcacctcaccataccggtgccgaaactgtggcaacaaacaccacttcctcatatgcttcaagagggaggagtcccattcacggtcaaatgggaatcgttccgcttcctcccccaagtcgggaagagagccaggagggcgaaagttccctcagcggcaggtggaaagccaaacccacctgatcacggctggatttcaacagaacgatcagtcaaaccctccaccaagagagggggagatcgttcaatccatggggatgtccaccgtggacaccagcaaagggagagccaacaaggttcccaagtgcaaaaagccgcacgcgtatctgatgacgcgacggctgctggctaagtcaagtcgcgacagccggaatataatcaaagttgcagtgctctttgacccgggaagccaaacaacgtacggagcggatccgcttatcgataagctccgcccgcacaaactcacctccgaagagatggaggtccacgggtttggaggaaaacgggagccgttactcttccattcacccatttactccgtccttctccaaagggcggacggaaaatgggaggaaattctactcaatcggacggagaaaatctccactcacttcagcatggtcgaatggagcgccgatgaatccgtcacgaatcatcacgaagcttgtgaagcaatgtgcttcacaaaggaggagccaatgatactcctcagcgcaagacacttctggcaattcttccaagggaagagagaagtgtctcccgggctgtttgtgatcaacacagcatttagcccgctggtaaatggcgagtccactattggaccgccaaactcaagtcaaaaggccctttcgatgatggccatccacagcacaaatgtggaacaaatgccaaccatcaatgaggttgagcatttcttcaacctcgaatcactgggaatccaggatgatcctgcccaggatgacgaccaaacagctatggagctgtttaacaaatcaatccgtcaagagacagacggaaggtactctgtcaaatggccgtggaaggagtccaatccggacctctcttccaatttcaaaatggcccacagcaggctgtcatcggtgctaaccaagctccgacattctccacaaattctggagaa

SEQ ID NO: 53888 - DNA, 235 bp, Heterodera glycines
atgttaacaaaaggactgcttgttcagcatatgaattggatgtaatggcatttttattaaaatttaaaaaacaatttaattttaataaatttacaatttttagagtggaaagaaagttgaaaagtgtaaaaaaggaagaagaaactgattggattgaggataacaaagaattataaacattaattaatttttgctttatgcacttttttgtatttttcgattattttttaataaa

SEQ ID NO: 53889 - DNA, 639 bp, Heterodera glycines
atggggacagcgcgcacctcagctggcttgccacatccggggacttttgacggaacagcggactttcacaattatttaaaatcttttaatcttgtggcgacggcacatggatgtacacctgttcgatgtgcgcaaattctaccattatatttgcgcgggtccgctcgggctatttacgatggattgctacaagacgataaatcgaattggaagacattagtcgacgcactcgccaccaatttaaagaaggtttcatccagccttgttgcgcggcagatgctggcaaaacggaagcaacacgtcggcgaaagcttagacgaatttgcccaagagatcaggactctagtatcaaaagcgtacccggatacgtcgcttgaaatgaatttcgatgcgttagtacttggagacatggaggaagacgtgaaaagggaacatgacgagcgactaaaaagattcagatcgggaattgccaaggattttttccgctcgaacatgacggcatcaatcaaagaaaaaattctcttcatggatgaacctcagtcatttgaagaagcgatcacacaggccaaaagggttcaacaaatgcagggagcgttggcagaagatctctggaaacaaacacaaggaaccaaagccgaa

SEQ ID NO: 53890 - DNA, 167 bp, Heterodera glycines
atgtttgatttcgttgacaaagaaaaaagttatagtccaaaaactgggctggcgccgaaacgcgcggcgccgaaacgcgcggcgccgaaacgcgtgtgtccctgctgctgtgcagcagcagtctgctggatgcgctgggagagggagggagtgggaaaaaagagaga

SEQ ID NO: 53891 - DNA, 642 bp, Heterodera glycines
ccgctccacagctgaatcccaatgccgaaatgtcaccgcaggacgaagcagggccgttaacatctgctgcatcggccgaagaagcgatggagtcgccgccaccaactccaggaccagtgcggacgcccgagatggacgacgaaattttggaatttggcttttcgctgccatcgacatctgtcacaccaatcggcgatttggtgccgttttcgacaacaccaactgcgtcaatggacaccggagagacgaccccgccaccgctggccattgacgagttgaatttgatttgaattttaaacattttagaggctgtaagaccaaaaagaaaacgacaattttttggagcattcggatggtgaaaatgaagatgacgctgtcattgatgttattgggtgatcaaattttgttttgttttttaaatttacttaaaaaaatttagaataatatgacttaattattttttctttattcgttgagaaaaatgtgaaatattgcttaattaaatatataactcaggtgggattgaacctgggactcccttttagagagagatgagagagagtgagagaaagcaagagagacagattgaatattagaaattttaataagtttcccgttaataattagtaataatttaataaa

SEQ ID NO: 53892 - DNA, 56 bp, Heterodera glycines
gtcccggttcccggtcccgggttttgaaaagctcaggccccggtcccggtagggca

SEQ ID NO: 53893 - DNA, 1349 bp, Heterodera glycines
aatacgacaatgatggatcatcatcatcttccaaagattcatcatcgaaagattcctcatcatccaagggatcatcttcgcacaaggattcatcatcaggacattcatcagaatccaaagaatcacattcttccaaagattcatcactgaaaccatgttcaccaaacgaagattcgtcctctgtcaatgaaaagccctcaaattccaaatcatcggacactgtctccacatccgaagcctcaccatcgcatattgaagagtcgtcaacatttgatgatttatcatcagtcacggaagagtcgtcaacatctgaaggtttatcatcagtcacggaagaatcgtcaacatttgatgatttatcatcagtcacggaagagtcgtcaacatctgaagatttatcatcagtcacggaagaatcgtcaacatttgatgatttatcatcagtcacggaagagtcgtcaacatctgaagatttatcatcagtcactgaacagtcgtcaacatttgatgatttatcatcagtcacggaagaatcgtcaacatttgatgatttatcatcagtcacggaagagtcgtcaacatttgatgatttatcatcagtcacggaagaatcgtcaacatttgaagatttatcatcagtcactgaagagtcgtcaacaatttccgagtcttgtgcgtcggtgtgcagtggatttggatggacaaattataatggcaattgttacaaagttatcgaaggactgatgaatcagacgtgagtaaatgggaacttatccaagaaaaaaaaatttccatgagaaaatattagtggaatattttaattactatcctaattatgcttttaattagttcccaataaacgattgtttagtcaagcggtgtccgcttgtactgccgaagacccgcaagcgcaactcgtcagtatttgggatgaggccgaaaatcggcttatttcacaaattattacccggccgcttgcccgttcacttcagacctataatttggcatcaccaattttcaacactttttggtgaattaattatttttaatgggctaatcccacaaattataatgtttttatttttcaggatcggtcttcgccgtgtccttgtcggaaatcgctaccaaagcacatggacaaacggttcggcagcaatatttggcaatgttgtaagtgaaaagctaattaattaataattaaaaaacaaaaacaaacaaatagcccgaaattacaactgctgcgtcaagaaacacatcgccatgggcagcaggacaaccctcgggcaccaacaaatacactgacccaagttgtttgacttattgttacattgaaaaagcttttttaatta

SEQ ID NO: 53894 - DNA, 693 bp, Heterodera glycines
atggccaccaaaaatgttcaaatggcaaatgtttgccgcaaaaatgagccaaatttgacgggcaaatgcgtcccaaattggctgaacatttgcaatagacaactccaaattgatgctacttctgtcccaaatgtgcttgttggcacggagaaatgtgatcacggaatggtcaatgtaactgatgaaatatgcaatgctttaataccgcttaaagccagggatgcgatcgaaaatttttcaaaatcaggacatcgggcccaaaaaatcagattttggggtcaaaaatcagaacattttgcaaaattgcttcaaatcttttatttttacaattaatttaatcaaaaatcattaaatattatatttttcgcctccaattatcatctttaaaaattttggtgaggaaattaacaaatcgtaaatttcagtgcactcgggatcaaaaaatcagatttttaagaattttttgcggcgcatttttccaaaaaacttttgggaaatgggcgaggggggagggtccgggggagtttcttttagacacccatcaaatttgatgttggatcggcttagcgggaaaattgtgcatattgattttggcgaatgttttgaaatgggagatgaaaacggggaaatatattccggaaaaaaaatccgttccaactcacgaggatgtttgttcaagggggaaaaaataaa

SEQ ID NO: 53895 - DNA, 1256 bp, Heterodera glycines
atggtgtgccaaacgtcaattgagccatttgaattggtgaataaacggactaatgagaagctgacactgacaaatgaagacacttgtgggaaattaattggtggattatgcggcgatgcccaattgttggggagacggcggcggtccaacaggggccaatcacaattacgaacgacaaaagataaacgccaaatctgtcgtaatatacgtcgtttgtcgttatctccaatcacaattaaaaaatttgtcgtttgtctcccgaaatttggcgtttgtcgttttgcgttcgtaattgtgattgaaaccaacgacaaacgccaaatttcagacgacaaatgccaaatatttgggggggggggggcgctcaacaccgcccctcaaatttgtcgtctgagaagtgtcccaaaaatccaccaaattattttgattcaaaatttttatttaatattaaaaacatgtttctaagggtaaatgagttcgctgatcatgaatccgatctcagattttcatttctataacttttacctatgatttttcatccatttatttgggtctttcgaatttaggtttatgattagaattagagcaaaataaatgttagattcggaatctacgtacccaaaaacaaacgacaaatttacggtagattttcacacgacagagacaaacggaaaaacggcttcttcaaacgacaaacgacataattttttgtcgtaatgacaaattcggagacaaataccaaatttgtcttttgtcgtccgttttgtcgtttgtcgttcgtaattgtgattggccccagaacatactgtacacattcacaaattctttttctgtgtttcttaatattttatagggtactgtcgaaattaattattgtcgaatcacttgctgtcaaaatcacgcacagacagtgagaaaagtcaaaacagtttactgtcgaaatttttagattgtgtagaatttgggccagggttggaaacggccagaataatgccatattcgtgatcatcgtcctgaaagccccccccccgccacccttagacaaactaatatttcaagggctcccggacaatccgacagtggacaatccgacagtggacaatccgacagttggacaatccgacagtgaggacaatccgacagaagtggacaatccgacagtaaatttctattttaaaaaatattttcaagtcattagaacggattatttcctaaaaatatctcaatcaaatcaatttggttccggcattcgataa

SEQ ID NO: 53896 - DNA, 946 bp, Heterodera glycines
atgatgtgcgactatataacatcccagggttgtatgtgaatggcttttttcaaaaaaatgaaaactatttaaaattgaaactgttattaaaattcaaacctggtttcaaagaaagaaaattatattttcaaactttaataacaacaagtaatattgtgtaaagtttaatatttttaaaaaataatgcactatttttcaattttatcttttctataaagtacattcttacaacaaattttaaatcttatatcgattcatattattaattccgatatattcaattgactgttttctaatccacaacactctcagtacgcatgacattcactgaagattttttaaattaataagaaaatgcccacttccgcagaacaacgtggatcttgatcattttagaataaataaatgtttaaaaaatgttaacaaaagtgaagtttaatatgctattataagttaagttattttttacgagattattagaattataacttcaatgatcaataaataattaatttaaaataaataaaattattataaagtacttctaaagatttaaattaggtatttaaaatcattggaaaagaataataaaggtatataaaagcatataagtgaattgaaaaaattttcggatcaacgcgagaaaaataaaagagaacataaaataataactcaagtccagtttatcgtgactggacaatccgacagtggacaattcgacagtggacaatccgacagttggacaatccgacagtgaggacaatccgacagaagtggacaatccgacagtggacaatccgacagtaaatttctatttaaaaaaatattttcaagtcattagaacggattatttcctaaaaatatctcaatcaaatcaatttagcttaaatttgctaccaaattaaaaaaagttagtttcgtatgctggtaacaaaagtacaataaa

SEQ ID NO: 53897 - DNA, 1236 bp, Heterodera glycines
atggcttctgttccaactcaaaaagatgagaaaacgaaacgaaatgaggagttggcaactgcgtaatattttaaaaatgctaaggagttgaaaattgatgacgttttaggattctcaagaaaatgccgaagccgaacagactcattgtggaccaatcgcccaaagacgataacagcagcgttctaatggcacaggtttgaaacttattcgttatttagtctaattatggcctttagactaaaatggatgacctgggattgtttcgcggcgattcgatccttctcaaaggcaaaaacgtcgtgagacaactagcattgtcataggttatccggcctcattttctacgtgaaattaattaatctcttcagccagtgacacttgtcctcccgagaaaatcttgatgaatcgagttgtgcgtcagaatctccgcgtcaaactgggcgatgtcgtcagtgtgtcgtccgcttcaaatacgccaaatggactgcgcattcacgtgcttccgattgatgacaccgttgaggggctgaccgggtaagccttgtaagacatgatattccctatctttttgcttaagaaacttgttcgaggtgtttcttaagccctactttttggaggcctaccgtccggtttacaaaggcgacacgttcactgtcaacgcagcaatgcgaactgttgagtttaagatacgttttttgactttatgttaatctaataaaaccccgggacctggtcaaacataaaaagatcacatccactatggagatttttttaaaacaagaaaaaattagggtatacttaactaactgtgttgacggatcagactttaaaaagttagagaatcattgtttaaacttgagaatatttggttttactcatgctgtttcccttttaaactacaatttttgctcctttaagtgattgaaactgatccggcgcctgcttgcattgtggtcccaacaacgatcattcattgtgagggggaaccgatcaaacgtgaggacgaggagaacaatctgaacgacgtcggctatgatgacattggcgggatgcgcaagcagttggcgcagatcaaagagatggttgaactcccgctccgccacccgatgcttttcaaatccatcggcattaaacctccccgaggaatgcttttgttcggtccgccaggcactggaaaaacacttgtggcccgtgctgtcgcgaatgaaactggcgcattctttttcctgctcaatg

SEQ ID NO: 53898 - DNA, 754 bp, Heterodera glycines
cattcaatcactgggactcaactcaccaacattacaatcaacgggactcaactctccagcatttcaatcactgggactcaacccaccaacattccaatcaaagggactcaacccaccaacattccaatcaacgggactcaaccctccagcatttcaatcactgggactcaactctccagcattcaatcactgggactcaactctccagcattcaatcactgggactcaacccaccaacattccaatcaacgggactcaactctccagcatttcaatcactggactcaacccaccaacattccaatcaaagggactcaacccaccaacattccaatcaacgggactcaaccctccagcatttcaatcactgggactcaactctccagcattcaatcactgggactcaactctccagcattcaatcactgggactcaacccaccaacattccaatcaacgggactcaactctccagcattcaatcactgggactcaactctccagcattcaatcactgggactcaactctccagcattcaatcactgggactcaacccaccaacattccaatcaacgggactcaactctccagcattcaatcactgggactcaacccaccaacattccaatcaacgggactcaattctcctgcatttcaatcactggggctcaaccctccagcattcaatcactgggactcaacctcagcaaatttctttagcatttttaactttttgtgtgccttgggatgttga

SEQ ID NO: 53899 - DNA, 603 bp, Heterodera glycines
atggcacacagtcagcagcagcaaatgatggcaccaaatgtggcagtgatccaaaacggaggcggcatcaaagggggcgaagaagtgcgaaaggagtcgacggaggaggacgagtcggacgacgaggagatggacgacgaggacgtggacgacgacgacgacgatgaggaggaagaagaggaggaggaggaagagagtgggagcggagaggaggcgaaccatcgtcggcacggcacggagagcggcgacacggcgacgaccacgccggcaggggccagcacggaggttccgctggcggcgcacatggcgacggacgtggcacagacgcaggcggcgccaggcaacgcggcagcagcggcaccgccgacggggactgaactgctggccatccgagcgaatctgcagattctgaaccatcaggtggtgatggcacgatgggatgaataccaaggagtggcatggcacaaaaaaagcgtacaaatggggaagtcggggctcattcaactgagtatcataagctacgcatcaaagcaatcaaaatggaattcacttcgggattcttccatgtgttccaatttatgtcatccttggctagcagtctga

SEQ ID NO: 53900 - DNA, 246 bp, Heterodera glycines
ccatctgttcaaaaattccaagaaaattgccaaaatttgaactcgaccgagaatggcacagacgggcaaaagcccccccgggcgagcctcatccgttcggccacacctttttctcctccggcgtgcagtatttagagcgtcggccccgcggtgccgattccgcgccgcttccgctcatgtcggcaccgccggcggagaacagactctgctgttgctgagtgccgggcgtcgcgaaggacgacgcgg

SEQ ID NO: 53901 - DNA, 563 bp, Heterodera glycines
atggcctcctccgagtattgccgtgcctttctctctctgtcgcccgtccgttgtcttctccatcacttccctttgtgcgcttcgttggcaaatgcgcgtcttaatgggtggctaattaactaattaattagtaattgcctttattcttccgtttcagtcattttgaggccaccgctttgaccacagcaattaacgaatcggccgcctccaactcggcccattttggagctcaacaacagtcatttaaaagtgcaaaaacaaccgcagaaaatggccaaattgccagcgaacctttgaaagaacggacaaatccgaaagggacacagggcgaaggggctgcgcggggaatggcggcggggaattcgccaaaaagcggggacagtgccgggggcaaaatgctagtgccaatgaacaaaggcaaaggcgggagagagtacatttggcaacacacgacgacaatggcactgatcggggaggaacacgacgactttctgtgatcaatcagattcatttggatttttgctttttttatttttttgtatttctgttaattaaccaataaa

SEQ ID NO: 53902 - DNA, 993 bp, Heterodera glycines
atgacaaggacaaacaacaacagcagaagcatcgggaaaagcgcgtgtcgtttagcctccgtaagtgcattttttttgtttttgtcattttccttggcaataatttttttggcacactttacatgcatttataatcatagaacacttggctagaaatttgctggacatgttttttttggaggtccttgggttgaaatggaacggcttacaattagctgggcacctggccgaattagaaaaaaaatctaccccaccaattaaaaaattacacgcaaaacatacacaaatcactggcccgtagccagggcggagagtaaatgacaaattttacgattttgagccatttttagcagattttcatcaaaaaaaaatttcgaggaggcaccggagctttttttttgctattggtattttttaaattttcagcgatggggcgaaaaagaacgtctcttttgccaaaaaaatcacttttgtctattttccaaaaaaactaatcgtccaattgggtccgcggtgccgatggccatgaaaatttatgcaatattcttagcaaatgtggtgcctattattttaatggattatattttagcaaaaaggcttttggtcaattgtgtggaagttctgattgttgtatgttcccttcttcctgcgccgattctcggcagcattgtaagtttcgctacctttttttaagggggagacacacctctgcatccataatatgattaaaattttagctttttttggcactttttgcaacaacggcggttgccgaccgctataccgactacgttaacatcggcaacaacgcagcggcaaagggctgtgagcccaattgcggcacagaaacgacggcggaaacaacaacaacgacgacggcaacaccaacagcaacccaaacagggatattgattgggattgtcgtcggcgccgtcgtcgtcgtcattttggcaatttcttttgtggtatggctctgccacagaaggaagcgag

SEQ ID NO: 53903 - DNA, 313 bp, Heterodera glycines
  unsure (1)..(313): unsure at all n locations
agtcctcttcccggaaaagccttcaagcgccaattgcctccttctaaggacgacggnattttcgaggagggtttcatcgaagaacgccgcaagggactggaacagtttctgaacaaagttgccgggtcagtaccattgaaatgctcttaaaagcaataactttctttttagacatccgttggctcaaaatgaaaaatcgcttcatatctttttgcaaatgaacgagcttgacaagtgtgttttactggttttattagtcagcctttttccattcgacagaaattacgtcccgggacgcattcgtacggcctga

SEQ ID NO: 53904 - DNA, 905 bp, Heterodera glycines
  unsure (1)..(905): unsure at all n locations
atgtcatcgcttttctccgccgttttcgtcctcttttcgccgcttgtccaattaatttngttcatcaaagagaacagtgaccgcattttgatgtccattttccgcaacatttggccaatgatcgcgaaaaacatttgtggcatgcatttgtttccgaacattttccgccgtttgcgacaattggccccgtcttttctcaacgactgtccatcgcttcgctttttctctttgtacggcactgatgacttccccgattttccgtgcgatgacagtgccgcggcatcggatggacaagcggtggccaaatggtttttcacgccacttcaaaacaatgtgccaaaggtgtttgagtgctggatgccgaagtataatgtggattggcggctgaaaatgtcagccttccaaacggtgcttccatttatcatttccgtttttgctaatcaaaattttccatgttttagccatttgcatcggcttcatctcccgtcaatttcattgtcgtcatttggtttcactggtctcatgccgttgtgccatttgcgctgaccaacgaattgacgggggaacaattggcattcaaaaagactgacaattggcgtcgttttctgttggttcgttgtccaattgcgcgagacgcggacaaatgggcgaaatgggaaaaggaggcgattgattggcagattcgtgatcagtggaatcaaattggcattaaaattaatgatgaggacgaaatcggtgatgggtaagtgaatgtgaaggcttaatcaacaattcaaaatgattgcgtttctatttttaggcttctcgacgaaactcccggctcaagtgatcagcagcagaagtgaacgaatgaattgttgtgaagtgattggccaatttgaattatgcgattattgacgtgctca

SEQ ID NO: 53905 - DNA, 1897 bp, Heterodera glycines
atgagtaagaaagtggtgaacatagacctctacattaaacatccggaccaattttttctcggacaattggccattctcgggggtaagcgcagttttgaaagtgaaaagcgcacaatgacaaaatactttcctagcacaggcggaagtgtttggctggtgaccgctactcttctccgtctgcccgtctcttccactcatagcattgtcggcgccaccctcggcttcactttggtgttgaacggtatcaaaggcatttcctggtggaaaatccttgaaattgctctttcgtgggtaattatcggtcaatttgtctctcgtaaattgattcttaacaaaaggttctgtcccccgctttgtccggtttcgtctctgccactctttatatgattgtcgactttgccgttctgcgaagagttggttatttcgttaagaaaactcgaataacattcaactttcagagaaacccggtgaagtgtggtcttcgcgctttgcctttcttctatttcttttgcatcgcttttaacacttttgccatcgtcaaaaatgggtcgcaaaaacttgagcgtaatgctctgttattttcaataattattgccactaaatttcagattttgaagtaatcaaagacagaattagtgtttgggtgctgattatgctttccattggatttggagtcgttgctgcactgatttctcatttcatattgcgtccgcggattttgcgctggatttatagtaaccagcaaattagcatatttgtccaattgaaaaataaaaacggtttttaggaggcagagaggaaaaaatcaacgaacaaaacgacgaacagaacgacgacgaaagcaatgaatggagcaatctctcatcaagtgaacggcttcagtcgtttcgactaagtgagagaaatccaaaaaaagacggaacccctcgggtttttcagctcctcgtggattgatctcgtggttttttccgcgcaaggaccgaaaagagaacaaagacactttgcgaatgtttagcacaattcaggctatctttttctgcgtttgcgatgccccgtttgaccaccttttcaggtgttcaccgcttgcttcgccgcatttgcccacgggcgcaatgacgtgagcaactccatttctcgcctggtcgcaatgctttcgtgtgggatcaacggcaccgtgaaagagaaggaggacacttccccgtggctgctccttttcggcgtgttttccatttgtttgggcctttggattcttgggcaccgaggtgggtcaacggcggatgagcaaatgaatggccgagcgttaaatttgcatttcccttttaagtgatcgaaatggttggccaaaagctgtctcaaatcaatccgtgcaggcaaatcatacacctgttcattatgttccttcatccaccacatttttcagtggtttcactatcgaatttggtgccgctttcaccgttgtgctcgcttccgaattggggttgcccgtctccaccacccattgtttggttggcagcgtcgtcgctgtcggcactattaactcgggcgaaggcatcgattggcgtcattttggctccattgccaaatcctgggtaatttaatttggcggagaaagtttacatgttattattaatttaaaataatttcagctggtcactcttcccgtgtctggtgctatttctgccgcactgatgtttattttgaaagtgtctcttttaacaaatgaataatccgattttattttttgcaaaccaaaggggtacaccacttttgtttttcccctgctctggtttttttcgactccaaccctatataagtgccaaaaaataattgtatttttcaaaaactgccaaattaactgttgaaaagtttcaacaattgtgaaacaatcaaaaataaa

SEQ ID NO: 53906 - DNA, 354 bp, Heterodera glycines
gccttttcgtcagtcgaaaactgatgatggaatgtttgcggggtgccggactgattttagaaaggtcggcacaattcgaaatgaaaggggaaaaccccggaacaaaacagagaccaattggacaacgaattgttttatgaattggacggaatgtacattttggtagcgaggaaaatggccgagtgaaaggaatggaaaaggattttaaaatttgttaatacatttatttttgattgtttcacaattgttgaaacttttcaacagttaatttggcagtttttgaaaaatacaattattttttggcacttatatagggttggagtcgaaaaaaaccagagcaggggaaaaacaaaa

SEQ ID NO: 53907 - DNA, 2944 bp, Heterodera glycines
atggtgaagaacccattgcctgagggatgcactgcacggccacttgatcaacggaccatgaccccctggacggttaccatccgaggccgggccggcacaccgtacgaaaacggcaacttccaactgagcatggcatttccgagggactacccgttcaaagcgccgcaagtcacgttcaccacgcgcatcttccacccgaacatcgacacacggggcaaagtgtgtctggacattctgcaaacgcactgggcaccgacgctgaccatcgaaaaaggtggcgtggatttggtggtggatttgatcatgttttaaatggattgatcactttaatgctcgtaacttttttcaggggcattaagatccgctttttttgtgtttgattagcaaattcaaaagatttcattgcgtttcatcagagttagcgaaaaagcgaatttttggaatttatggtcttaatcgggcacgaatttgatggcgttggttttgtgtggtatttgtgcagtttgagtgatcaattttttcacatacaatttttggctgcagaaatcgttaatttgtttctctgtctttacagttgtgatctccatcatcgttctgctgaatgacccgaacccggacaactcgcctatcaatgcgcaagctgccagtttgtaccggactgaccgtgcggagttcaacagacgcgcccgtgagatgacgctcgcctatgcacgatgagatgatcagcacgtctttctgattccactaccaattatgtattactcattcattgtatatattattgtactgtatgttgtaccatatttatttgtgtgccactactgtgtgtctatttttgtgttgtatttgtgtgcattttcaaagccggtaaagaattttgtgctttttctattggcgtatccaaccttcaggaattttttttcgaaaactccttgaaaatgggccctcccgcttgaaattcaccctataaatgagctgatcactgatgaatgtcagtcaactcagattttgtgaaactttcgctaacattaagcattcattacacatgcacaaaattcggtggggattctttcaaaaagatttagcaaattctgcatgagtccaccgctaaaattatgtaattacttaatttcccgtccaattatattcattagtcgcagaaatttgaattgaatgaatgacatgttctcattcattcactgacatataacaatcgattggggtcatctcaaagtgtaaatgtttttgaactatcaaggaggatgtgatgatgatgacgagtgagtgacaattgcaaatgtcacggctcagaaatggccgtgaagcgtggaccaccgacgcctcccccttccccccccttcccccacgcctttcactcaattcaattcaaatcattatccgtccactccctctcattaccgcacaataattggattcaaaaaacattccattttctctcactcaactcatcattccgtgttcgttgagtgaccgttcatttttgtctcatttttgactgggattttccgggaccattttttgtttctgttttgtacttcatattcctgggtttagaattcattttctaacctgttttaacatcatcaccgtataatgaataacaccaccagcagcaggtaaacaccacccgttattttatttaattaaattccttgcatttggtcgggtttcttgaccaacagtaaaatttggttgtatgcaaatatgaatcccgaataggcctaaccaacaacaagtcaaatgccgaaaataaacgttcggtgtcggtctttaaattgattttgaaaattcacaattttctcgttttggcataatgcacgtttaaaaaagcagtttcccaccattctcgaactcattcccatgcataaattgtcccctgctaataccctttggcaaatccataaaaagtgccaaaaaaattattccccaaaatggccccaacgaccaaaaaaatatgtaaacgcctgccaccagagcttttgtatgaaacggttctttacgtatatcccaacccgaatttgtcgaatcttttcaattcttcttggatactcagaaaatttatgagtttccgagtccaaagatgggaggaaatacggaaattattatgttaattcaaatttggaaatgtttaattgtccggcaattttgattaatttttcattaagaaacgagcaattcttgaagcactttatgagtgttgtcgagaacgtaggccatggagaaccttcgaatcgtacacagcagacgaccaaaatgcccaaattttctttgcggcgttgacagaatttttggtgagcacaatttaagaaatgtcatgtttaaatgtttatgtgaatattcagaatccatatgcggaaatcgtgccctgaaactcccccggagcacatttacgacactatttcgtcatctcgtccgccgatgattcccattcgccgcataagaaggtttaaatgggatttttttcaggaaatgcatacttaaatggatatttagttgagcactcccccggggcacatttaccatactgtcatgacgaccacgtccgatggttcgcagctctcttctgtcatttacgacgttcctccgccttcgtcgaccattcctcgcgaatctgttactaccacccctccgccggtgccgcaacacacggttttgttcagggttaatttaggttaaaaatgtgcaatttggctcgcttttctcgaaatttcttcagggggagaactttttggattcaaaattttatttccagcacggaggcgaaaagaatcgaaagaacaacgaaacgccgtcgccggcctcgaaatgctcggacgcgaaaaaaaggtcgtaattttggagatgaactgatttttgaaataaaataaaattgtttttttagcgcaaagagacgccgaagaaggacagcgatggaaagaattga

SEQ ID NO: 53908 - DNA, 1482 bp, Heterodera glycines
atggaattgataaaaatgtctgaactttatttggcattgcagggcgaacaatgttattacacagtgccatccattcataagggattcaacgttaaaaatgtttgttcggtcggggcggggggacaatttcttgcaaaaaagggaattttggacctcgggtcaaaactcggagcaaaaatgaaacttttaaaaaaaactgaaatttttgattttctccaaatagttttggagttcggcattctctgaaatgcatgccattttcctgatccaaaaaactccaatgttttcagattttttgttttaaaaccaacttttatcaccccaaaaatttgccgtttttacgttttaattttaagcttcctttcgagtgtccgtcattttcaattgcacttgaacagcagttgcaacaaattgtggacttctccggctgtgtgaaggcaattgaaacatggaaagcggaacacttgtacaaccgcacggactgcttggactcggtgaagaaggcaatcctggagtcaatcatcgacgcctacaacatttaccagaacgaggctgaccgaatgcgtcgcgaagtttgtgtgaaggccgggaatttgagtaataattgagattttagggattgagttacacacgaaaattcattggcaacctattataagataatgcctcccataaaaaaaatttttttgaaattttttccaaaaatggcggggggggggggggggtaccacttataatataagaaataatcaaccatttttcaattgttttgttgattgttctaggcgttatgccaaattccgggttttcccgggctgatggaaattattgaattggtacgtttccatacctgtcaggttccagaaaactttaaaacttgctcgattaaactaaatcaaatttggtattattgggaagctcaacgagatttgtttaaccatataaaatatcaattttttaaatatgtgctttcgcgctcgaatttcgctcttgaaaactcctcattttttttcgaaaatttatcaatattttaagataaatattttttattcgcatcgcatttttgacactttaaattcaaattgtataccggacactgttcagaatgtgttgcacaagtacagccacagtattgccgatttgtgtgcatttgttcgcacttggcaacaacggctcaaccatttgttgggtttgctgcaaaaatcggacggtctctgtggccttgagatgatgaacgtgttgtttggccagtggacattccagtgctgcatcaacgactggcgttacaggtttcatcaaaatccaaacattttttggtctttgacggtgcggaaagacgccaaaaatttttgattttttttttacgaaattgtcatggaaaagtactacaaattttttcaaaaattggccatcgatcggctttgatattctcccctgaagacaaaaactacaaaatttcaatcttgggggtccgaatttcta

SEQ ID NO: 53909 - DNA, 1474 bp, Heterodera glycines
atgcgaaaactcagatatccaaataacgttggaaaacgaccagagatcgcaggtgaaacaagtaaggcacgcgacggagccgcactcgacggaggtgcatttgttggtgttgaaattgacgcagaaaaaatggtcggcaaattgaacttttatgcggccggaatattatacaaagaaaaagatgaaaacgtgcaaccaattgagaaagtgccagatgaaaaagtgccaattgggaaatggcacaaattcgaagggcaagaaattgaactgatgccaagagaaattgatatgacaggtgaataacgaaaatattaatttattatttaattcagtatataatttaaaataaattaaattaaatataattaaattttgccatttgaaagatgaaaatgacaacatttgcattgaatttttggcattcgctgatgctgatgaaatgaaagacgatgcgcactttaaaatggacgatacagaacgaattcaagcaaaattgggcaaatatatttgcaaaaacatgaaagaaaatgaaaaaaacaagcaaaagaatcccaaaaagctaaattacaaatttaattggacaacggtggacgatgttcaattttatgcggaagaagcaatgggcgcaatgcgggagaaatttggaattaattacaaggaattagcggtaattatccacatatcctaaacacattaatgataaaattcgattgaaactatgaacaattaaaagaccgaaaaaatgtattgttttataaatggtaaaaaatatttttaaataaactttttaggattcttttctatcggatgacttaactgacctgggtatcaaagggaaaagctcaaacaaaatttatcgtacagaagacgaaaagtttttgttaaagcaaattccacaaccctatcaaatggaaacaatggaaagaacgttgaaagattatctgaagcatatgatgcaaatgggcgacaaatcatttatcaacaaaatcttttttgtgtttcgagtagaaattgaggtaataaaatttcaaatttaatcaaatgttgtaattttgattgcttcctttttatattttaacaaattttcgattccttttttattcttgaagttttttgattttataaattaagagtgggaaatcacttccttaaaatcttttaaaaaaatttttatatataaattctttcccagaacactcaaacactctttctgctgatggaaaatgtgttcaaaaatgccaaggatttgccacttttgaactttgatgtgaagggcgtcttctcccgtcagcccaaattggtcgaagttgtccctaaacagcgtttaaacgacgtcgtgctcaaatggtacaattattttggtggcgaaccgccccttgtgccggaagaagtgatgccaatgtttccagagggtattttgttagacaaagaaacgcatcgaaacatcgtagaacggctgaaacgcgactttgag

SEQ ID NO: 53910 - DNA, 351 bp, Heterodera glycines
atgacttgcgcatacgctaaactccttggtccgtgtttcaagacgggtcgaacagatgaccggcttttacaccgagaacgcacaactgagagcccgagctggaccgaactggttgctggtacgtgtcgcacgcgaccgccaccgacccccagctcgagtcaacacggacccgaaaccattgcacaattcacccagagtaaacagcactcccccgatccgggtaccagaccccgaaaggctggcctcaagaccgagctcacgcagctactccgagcatctcagcgcactccgcctgcaaatgccccattcgccactgaacagaaggacagcaaaccccagtctggaggctag

SEQ ID NO: 53911 - DNA, 959 bp, Heterodera glycines
atgcctttgctaaatatggtggaaattgagccggatatttaattttctctcgatttattattttaatatttttaaggattccgaacgtggcaaattggagaatgaactgatgctaaacgaaatccaacaacttgtggttaggcattcagcagacgacaatggcactttggcgttgaacgctgtacagtcgcgtcaaattgcacaacttacccaagattacatgtccaacctgcttaaattgttttccgtttcgtgccaagtccgtggggaagggcacataaaatcccgagaaatttgataatactttaagttgaaccgtgagggacgggccaccgaaattgctcgtcggaccacaaattccaagttgatacaagcgatgtgcaactacgcgtccaaagcacgccgacccgggctcagtgaaaaggtaattaagaaatattaaaaatttgtgtttacattcaaaaaataaatcttttcgttgattgcgatcagattgcttcaattggacgcgaacatttacaagcggttgaggcggaacagcagcgaaaaaagcagcaacagcagagcgcaaatttaaattatggcaattccatgttataccatcggagagtgcaaaatggaggtggaacaataatgctgatcaaattttaaaattttacatttagctaaggatgggactgaaaggaccgtcgctgatacggtggccccaaatgtgaacaaaatgttggtaccgaagcgaaaagtcactgctgacgaattgttggattctttacgggcagaagacgggtgagtgatgaagagcaattaatctcacaattagcccttaaaaatcattcattccgatatttagagccaaaaagcataaacaaaatgccaaaatgtgtccccctccgccgtcggtgccatcatctttgtcctcctcatctgccactctttcttccgcgctttgggaccgatga

SEQ ID NO: 53912 - DNA, 532 bp, Heterodera glycines
atggctttcattggatacggcgctcttacggccgcgctgagtggcatcattttgtacgcaaatttgcccacccgtctgaccattggcgccattgtgccgaccgttgaatttttggccgagacccaactgaaaaagttggaacccggccaagctgtggctggaccacaaattaaggtcattagcgactaattgaatacaaaatttattatcaattactatacaagaaaacaatgttatcaacttgtaaatgcacattgttcaggctagcgatctgttcaatgccggccatcctctgcttgtgatggctgtccgtcgacctggtgcctttttttgaatattccatttcgatttttctaaattgaattctttctatttggaaagaaaattcttaaatgtttacatttttttgcccagagccttgttaagaaatgccagagggattctgatttttttttctgataaaaaatataataaatttcagggttttgatcagtatttggataaaagtcaggaaattaaaaatggatattaa

SEQ ID NO: 53913 - DNA, 58 bp, Heterodera glycines
aaacaaatttaaaaaacggtcgcgaagcgcccgcccaagcccaacaaaatttaaaaaa

SEQ ID NO: 53914 - DNA, 595 bp, Heterodera glycines
atgaccccgagggacgagactgagacgcgaaaaacccgagaaatttctcgagtcgagactctcgcacatccctacaaatttgctcaaatttgcgcgtttccttccccgctttggcacaccttcgaaatgtgttcaaaaatttgctgtccaccaccaccaccaaagtcggcactttgcacacaaagcgtggccaatgccgcggcacagaccaatgccgaagagctgctcagtccggcacttggcggaattcgactggccaccaccgcacgcattcctttggcctacgcacaaaaaaaacaatgaaattttgattattttcgaagctaaaactctttgtaaggcttctgtctctgtgttgacaccctcccgttgggctaaactctccaaaatgccgcgccaacccgccaaaaaatagtggtgccatttgggcacggcgccattggaggaagcgccggaaaacgaatcggaaatgaccaaagtgaagggacttggaaggaaattaattaattgttttagaaatatttaatactatttaagataaaaataattaaattaattaagaagcgaaaatttgattttaaatttcaaaaataaa

SEQ ID NO: 53915 - DNA, 3087 bp, Heterodera glycines
cgtccgtccgttgtccgtctgttccgccaacggtctgtcaactgcgacccgcaatggctgatcagatgcccgggccgagtgaataggatcggcgagcacatagtctacagtgactactccgtgcttcagatggctattgagcacagcacatgggtgggtcggttgatatacgacactcactctgatcagaggatcggcactcactctgatcagagggtctttactttgatcagagggtctttactttgattagaggatcgtcactcactctgatcagagtcccaattgggaaaattcgaattaaatttttgattcaaaaattcttgactcagattttcacttttggaacctttatttttcttgagtagctcgacccaatggtactcatttctctgatcaggtcgctgttggaccatcgccggaacggacggtgcaattggtcaacgaagaagaagaaaaatacccgtaaatgaaaattaatttttaaaacgtttgaaaggagaataaaacataaaaataaaaattaattctttatttttagtataattttcgaaagtgaaaattgaataggcttttaggcttgataaaattaacaaatataatttaaaataattaattctttatttttgaaatttaaaatcaaattttcgcttcttaattaatttaattatttttatcttaaatagtattaaatatttctaaaacaattaattaatttccttccaagtcccttcactttggtcatttccgattcgttttccggcgcttcctccaatggcgccgtgcccaaatggcaccactattttttggcgggttggcgcggcattttggagagtttagcccaacgggagggtgtcaacacagagacagaagccttacaaagagttttagcttcgaaaataatcaaaatttcattgttttttttgtgcgtaggccaaaggaatgcgtgcggtggtggccagtcgaattccgccaagtgccggactgagcagctcttcggcattggtctgtgccgcggcattggccacgctttgtgtgcaaagtgccgactttggtggtggtggtggacagcaaatttttgaacacatttcgaaggtgtgccaaagcggggaaggaaacgcgcaaatttgagcaaatttgtagggatgtgcgagagtctcgactcgagaaatttctcgggtttttcgcgtctcagtctcgtccctcggggtcatttctaagtctcggtctcgattctcggtaaaaaatcatttctcgcacatccctacaaatttgggaacaatgcccgttactctttttaaatttggcgaattgttgcttgcagaaagaattggccgaaattgcgacccacgcggaacgctttgtcggcttggagggcggcggcatggaccaggcgagcaaatggcataatttcgaattaaaaaacaatttttgtgccattcattctccgtaaggcgtgcgaatgtttggcgcgtcggggcgaagcgttgcgcattgacttccgtccgctgggctggcgagcagtgcaactgcccgagaacgcgctgttcgctgtgctgcactccaacacggagatgaacaaaacagcgagtgcctattacaatcaggtgggagaagggaggggggggggggaagtgatcggacggagagacaaaaagtgatcaaagtgaactcaatgtgaagcagggagggaaactgattgatcagtggaagggggagacatgttgagaagcaatgatagagaactaaagatcagagagagagaggagagatgatcagacaaattgatcactaaaggagccattgctgaggaaaatgatcagaaacaaaggcaaaataaatttaaaatttaactaaattatatgaccaatgaatggataagaaaactttgatcaaacacataagttcattgatcggaaaaacaatgatcggcactttgttcctaagagggttgtcgagtgccgaatcgctgcccaagtgattgccaaacaaagcgggtgtttgccggcggacactgattggcgttctgttcgaaccctgcggcagggtataaagttgggtggttagacatgattcggatttctcgggacccgaaaaacttttcttggccaagtttcagttgctgcactgctcggcaaagatggccatccggagcaaatgttgacgctggtggacgagcacttggcaaaacggtgccaacgccaacagcagcagaaattggcggatggcattcacacgagggaggaaatttgtgccattttggactgttcagacgcacaattggcccaatggtcgttgaatgcgaacactcagaacagtgaggagaatgatctcgaatcagaacaaatcccagggtttcttgactctcacaattaaattcgacttctacccaatgatttaaatgccaatttgagacttttctcggcttagaaattggatgcttaatcagaattgcgacattgctttttctctcacttcatttaattcatcacaatttctccaaaaagtgactgagttttggctggccaagcgggcacggcacgtttatgcggaggcggcacgagtgttggaattcgaatgggtgtgccgtgaagggagagaagacaatggcacagtggcaaaattgggcggtaaattgagacaaaattcatcattcaatgaccaatggtttcccgaacagaactgatgaacgcttcgcatttgtcgtgtgcgcaactgttcgagtgcagttgccccgagttggacgaaacggtggccaattgtttgagtgcgggatgcattggtgcccgactgacgggtgattttcacggagttttttgcctggtttagtggaccaaattctataaattttggtgccatcattctaatccattcaaaatgctttaaaagtgatgcttgggccctacttttgtaggaaaattatacaaaatttcattattatttggacgtccaaaatgcgggtcatggtcgttttcgtacgagcccatatttttggctataacttttttattttcaaccaaatccaacactgttgttatcattcgatagccctatgtgtcctctataagcctgcaaaatttcaaaaaa

SEQ ID NO: 53916 - DNA, 592 bp, Heterodera glycines
atgttgggttttgatgacaaagaaaaaagctatagccaaaatcatgctggcgccgaaacgaggtgggccccaaattacaacctatgagttttttaagcatttaagtttgcattttgattttaaaaatgaaaaaacacgtcacgttcactccgagtatcggagacgatgtccattccaccaatgtatcgtcggtagcgaagtctgagttcagcgttaaagagcgtgcctaagtgccagaaatattcaagtccggcaaaatgggaaattgggttaaaattttgattttgtttctttgcaggaaattggccgacgatgcctttcaaatattgcctttgcccgacatcgacccgaccgtcacttcgaccccggcggtcgtcaacaatttgatcgaggtttggctcctcagctcttggcactgactttcccgtaactctttcaggcggtcgagtcgctcgactcgcggatgcctttggcgttccaagagcagcagcaaatcctgaaaatgcaaggcgaaatgctgcaactcggcgtcagttgcaaggaacactacaagaagatacacgagcagtccgtgatgcgttacaatctcgag

SEQ ID NO: 53917 - DNA, 992 bp, Heterodera glycines
atgcatcatccactgatggtgccgccgcacacaattatgaatttggaagcttctcaacctcaatggatgacagattcgtttcttcccacaatggcttctcattcggtgatttgtgctccgtcctcttctgctgctgctcctccacgactgtcacaaatccaacaaatggcagcaagaagtgatgatggcaccacgccacaagcatcgaaggtaagaaattgatgattgcaacaattttggtgcaatggttgttaaactatgggtgggttaatatacgcggggatgacttgtcatgtttaggctactgagaagtcggtagaagttggaagcagcaacaccgccgccgccgcttttcacgattatttggcatgtgcgcagatggtaagaaaaggcatttcatataaacatttgtttatcggttgtgtgtaagtataaagaattatttttattatattttttctttaaaatttctcaaaattgcataacttggtcatactttgacaaaatctgtcaacaaatcacccttaaattacaaaatttttccctccgaaccccccccccccccccacaaaaaaagttttttttaaaagcgccgcaaaaaaccttttaaaataaaaatattgtcgcaaatttgctcaaaatctaaaattttgaaaatcaaatttcgatttacatgacaggacacaccccaaaacgtcgccggacaaaaaaaaattaaaatttttcagcaatcgtcatcatcggaccctattcttaaccacacgccgccgcctcctcctccgccccttcggccttttcatccgcctccacttcctccacaaggcaaccgcaactttcttcggtcaccgccgtgtcttctcccaccctctccgtcggggactgtcgcctttttgcacacgccaccgcctcctcctccgcaccctcgggccgcaattcctcctttgatgatgcagatgtcaacagcgactacaccgactgcaatgcgactctaa

SEQ ID NO: 53918 - DNA, 1463 bp, Heterodera glycines
atgactttgccggacacgatgatgcattttggcccacctcatacttctccaatgcctttacggatggcaccgccggacacaatgatgcattttggtacgtctcgtcttgctccgatacctcttcgtatggcagcgaggccaatgttccgatctgcctctcattcacaacttcaacaaatccaaccaatggtagcgacaactgatggcaccatgcaacaatcattggaggtagcagaagcacattttctggttcaatagtttaaaatacgcagcgggctgatttgtcatgtttaggcaactgagaagttgggagaatatgggtgcaactccgccgccgccgcctctgttgatgatgatttggcatgggcacagatggaaattccgcccgagtttggacagcacaccaaattcttcagcaacaaggaattgttggaagataacaggtgtgaggaaggagagggtggggtcggcttttacaaagtccatggcatgttttattgttaattgttctaaggattggttgctcatcgtcaggcggcagacgcggcggtggtgcgggtcgaaaaggcggcggacgcggcggtggtgcgggtcgaaaaggcggcggacgcggcggtggtgcgggtcgaaaaggcggcggacgcggcggtggtgcgggtcgaaaaggcggcggtgttgcgggtcgaaaaagcggtggtgtggatagtaaatactatcaggtgattcttttattagtaattaacacaccaacaaagagattgttataggaatttacaatttatgcattgttcccatgacctttctttctttatccccttggttgcaaccctattccatttataatgagaaagtccatctcattttctccattcactattttttgaccaaaaatgaaccctaaaaagagtaaaattccacccgagttacttttcgagcttgtttcttttcttccgtttgacattctttgggccatcacaagggtttcctatgtttttgatcgttttctatgggacaggcaattttggtggattcgaaatgttttaattcgctgggaggcagtaaggcgaaaagctgtaaaattttttgtaaattaacaattatttaagcaaatgacattctccggcgtttgcgcacgacttcgtgcatcctcaaaagatgctcccgagactgttcttatttgggcaaaagaaagtatatctttagccacttaattcatgaacttattttgaaaattcagaaatatgtgctcatttttccatttccatcggaacttttaacaacgaagaattcacagaaaaaatgaaatatttgtatggactgtacaaggatgtcagtactgaagagctaaagatccattgcgaatgtaatttttgtagttttttatcatttcattttgaattttagttctgtctggcatttgtgatgaaatgaaaagacacaaacgaatggcttgggaatccgga

SEQ ID NO: 53919 - DNA, 929 bp, Heterodera glycines
atgaaaaaacacgtcacgttcactccgagtatcggagacgatgtccattccaccaatgtatcgtcggtagcggagtctgagttcagcgttaaagggcgtgccgaagtgccagaaatattcaagtccggcaaaatgggaaattgggttaaaattttgattttgtttctttgcaggaaattggccgacgatgcctttcaaatattgcctttgcccgacatcgacccgaccgtcacttcgaccccggcggtcgtcaacaatttgatcgaggtttggctcctcagctcttggcactgactttcccgtaactctttcaggcggtcgagtcgctcgactcgcggatgcctttggcgttccaagagcagcagcaaatcctgaaaatgcaaggcgaaatgctgcaactcggcgtcagttgcaaggaacactacaagaagatacacgagcagtccgtgatgcgttacaatctcgaggtgagcggacaaaggcgaatttcaccatttgttgatgggagggggtggtaatttgtaaaattgaatttggcacattcgttgtacggctttaagaccatttttggaaatgagcaaaacacgggtaattttgtaaggctgtcccacccctccatttttgataaaatataaaaatttggtcataaaacattcttacaaattatggggggttcgtaccgctgataacgaattgaaattcattttgattaatgaaacaaatgatctcccaaaaagccaactatttaaaatgggaatttcgtcatttttcttatcttaaatcgtccccccttttagaagagtgtcaataaaaacatcgacgatctgaaggagggcgcagttgtcgcgcagaaattggtgaaggcgaagagtgcgtacgaggaaatggtagcgaaggcggaggcgttgctggccaaggcaaacaaatga

SEQ ID NO: 53920 - DNA, 813 bp, Heterodera glycines
atgttcgcccgttccatcgcttctccaatgcatcaacggatggcgccgtcggtcacaatgatgcattttggtacgtctcgtccttctccgatgccttttcgtatggcagcgaggcaaatgttcccatctgccgctgctccaccgcaacggatgacggcgcccacttcggttctgcccacaatggcttctccccctccggtgatttgtgctccgttctcttctgctgcgcatcctccaccgcaaccgcgccaattgccggctgtgcaggaggaaaaagacgagcgaacgttgcgcattgagcggatggccgaccaaattttggatcagcgacagctgcgggcggagcgacgggcgcaggggataatgtacgacgaggtcagtcacaaaacaattgaaaaatgcaattatatggggacaacaaattcatcttttaaggagatcatagaaggacgagtagtgcggttcaattatgccggcgagttttgtgaacagcggggcattggcgaaatacatagacaggtgagcggtatctttattaaaaatattttaaattgtcttttcagttgaggcatttcatgatcggctggtgagttattaacgttgttacaacagagaaacactgaaatcaaatggttgcgaaacaattttttaggatcggttaaaattttgcaatcatatttttaaatttggccggaaaataaggaaataaaaaatttattcgcagtaaattttccccattttcagtgcattggtcggtgcagtcacatttgcttttgtgaagattgaccttaagaagaaacggaggaggaaaat

SEQ ID NO: 53921 - DNA, 853 bp, Heterodera glycines
atgttcgcccgttccatcgcttctccaatgcatcaacggatggcgccgtcggtcacaatgatgcattttggtacgtctcgtccttctccgatgcctcttcgtatggcaacttcgtttcttcccacaatggcctttccccctccggtgatttgtgcttcgttctcttctgctgctcatcctccaccgcaaccgcgccaattgccggctgtgcaggaggaaaaagacgagcgaacgttgcgcattgagcggatggccgaccaaattttggatcagcgacagctgcgggcggagcgacgggcgcaggggataatgtacgacgaggtcagtcacaaaacaattgaaaaatgcaattatattgggacaacaaattcatcttttaaggagatcatagaaggacgagtagtgcggttcaattatgccggcgagttttgtgaacagcggggcattggcgaaatacatagacaggtgagcggtattctttattaaaaatattttttatatttaaattgtcttttcagttgaggcatttcatgatcggctggtgagttattaacgttgttacaacagagaaacactgaaatcaaatggttgcgaaacaattttttaggatcggttaaaattttgcaatcatatttttaaatttggccggaaaataaggaaataaaaaatttattcgcagtaaattttccccattttcagtgcattggtcggtgcagtcacatttgcttttgtgaagattgaccttaagaagaaacggaggaggaaaatgtgggaaagacagaatcagttgtacgaagcgcggaaggaagcaatgaaaaagcagaagcagcaacaattgatgatggccacatga

SEQ ID NO: 53922 - DNA, 1405 bp, Heterodera glycines
atgtttcatctcaatgtaatttgctgtaaagagataaataaatgttcacaataaatatttcaatatgtaatattcttttgcagcttccaaaagtccatattcctttttttttctatattttacagctcttttcccttgactttggtgtcccaattaattcaaaacaaggccatttattcatttttgaatgctttccattcatcatatcagccaattcccattgaatttgttttgcttttatgtgagaaaaaagaaagaaatggaaatggcatttcgcaaagggaaaacgaagaagtgacgggagagaaagagagagtcggagagagagtctctcttttcgcttctcttcccttcgctgaaatggcggccattatccatttttagttcttcagtcatttctcattttttcattcattccattcaattcgcaagggcaatgggaggggacattaagggctcaatgagcaaaggaagggaatcattaaccatctaataataataacgtcattttcatttggttttttatctgtgtattttcgcgttttacttaattagataatttttttaattccgagctttttagtttcgagttttaaatgcttttttttgtaatgtctccaacagaaatttttggtttttaaaatctcgacaaacaatagtttaacaaattaattcaaatttttgagtatttacttcgaacacagcgttttcacgtttgtctgccacccccttttcctccttataattataacaaagcaattcatacatagccaactgacatcgataaaaaaatattcatttttagtgttcaatttctttttctgggtttgcttaaaagtcgctgtgcaaacaatgaatgaattacgcaagaaccccacaccaacaaaaaaagaaaaattcaatgattcttcttttttgcttgactcattaaactgtcatgcgttttggccatttctttctttatctctctccattttccctttttgtatattggcggaattgattgaatcatcctttacgatattcttttctgccatttactttttaatcgaagtatttttcagacagttcaaccaaacacctcaaagcttcattctcgagttgtctccctgtttatcgcattcttcgagtccgtaatcgcttccgggatagggcgtttatggacgtgtcatttgacgcgactaccctcaaaaccaatccaaaattacaccggaagagcctttagaacatctattgcccttcacacttccttcggtaagcattgtatgacatcaatttcgactgatttgtgttaatttttcagtttgtcgtccttcgcttggcactgctgaaaagtcactgcaccgaaccgcggccccgaacccgggcctcacaacacttggacgtgaacgcggagcctccttgg

SEQ ID NO: 53923 - DNA, 1060 bp, Heterodera glycines
atgtgtcggctgaccgtgtgtttggcgcctttccctgttggactcggtcggcactgcgccaggcggaaacgtgtggcgtgtacacgctgtgtttcgacagtgagcgcgacttggaccgcatcttggccaaccactcaaacgccaggtagggaagacaatgtttggattactggctaactacatttattgtttttgtggaaaacggatttttttggtttctcgtatgcccttttttaattaattcatcgaagttagttgtcacactcttaattggccccgctattcattttcagattgcttttgcgtatctgcgtggacccctgcgcgactgatgcgaatgcgttgttcggagccccgcttgacgaggcagtcgaactgttgaagctgtgcgttcagttgggcctcaattgcattggaatttccctctcaactggcccttccactgatgataattgcaatttgtcatcatcgtctcttttccatttctcttccgtctatgcgtttgccattgaatgcagtgcgcgtctgtttcgcattgccattgacttgggcctacggatggacgtgctgaacattggcgatgcttttgcttgtccttggtcatcagcatcgactgaaaccgacgagtcactggcgcatttcgcggaggtatgaaccaaaaccgaagggacggaatagtaatcacttctttttcagttttgtaccgaatttaaccggtccttcgatgtccatttcccgtctgatggcattggccgtgggcttcgcattatggcaacccctggccaattctttgcgcgttccccattttcattggtcaccaatgtgatcggaaagcgaagcactgacgcaagtgcagtgaccaacaacggtacagaaacccaaagcattcgcttctttaacccaactcattaaatgcaaatttcagattttgatgctggcaaaaccgcttttcattaccagactaatgagagttattacggcacatttggctgtcgaatgatggtcaacaccgaaccgcgttgtgcaccgctttttgtaagcatataatttattttttcta

SEQ ID NO: 53924 - DNA, 2002 bp, Heterodera glycines
atggtcaaagaccgcctcatggaatttcaggtaaatagaaatgactgccttttccattttgttacgatatttatacatgcttttggtattttcagcagttgtccggtatgaatcggaacattgccgctaaatgcaatccgtcatggaacagaccaatgaaggaccggctggggaccctaaaaacggtcggttttttgttttattttcccaattaatgataattgcgttattaaaaacatttcaagaccgaggatgaccatttggtggcgagccaaagtcagttcatggaagactttttcgagcaggttgaagagattcgggccagcatcgacctgatcgccacgagcgtggaggaagtgaaaaagaagcactcggccattctgtccaacccggtcaacgacccaagtgagttttttgaggaaaagtgaagatgtaagactaaaatagagttaagataaaacagactttgtagaattggcaggcgtgtggttacatagctccacgatgacctaacctacctatatttttctttaaacgaaaatttttggatttaccaagaaaaagcgggttcaatttttcctcattgaattttattcatatttcgggatggggcgggggttttccgtcgtttataaatagtcactttcgaattttttaaaagacaatttaaactttttaaagaaatcaaagagcagctggacgaactgatggtcgagatcaaaaaaactgcgaacaaagtacgcgggaaattgaaatgtcagttcatttgttactttttatttgttttgggttttatttcatttataattattcggattggactttttcattcaaaaatttgcactactttcaactgaaattcgaaaaggaattgttagtgccaagacaaggctccaccagcagaatttaaatacttttttctatttccagccatcgaaaataacctcgaccacgacgaaaacggaggacaagcgaacgtcgacctgcgaattcggaaaaaaccgagtgtcaactttcgaattcggatacaaaaagcgagtgccgaccaacgaattcggcaaactcagcacgcaacactggcccgaaagttcgtcgaagtgatgaccgactacaacaaaacgcagacggactacagagagcggtgcaaaggacgcattcaacgccaattggacattggtcagtgggagggcacacgactaacgacggactcacttttgggggcccattgtatctagtggggaattaggaaaccccgactctgaaagtgggtggggaaagaccggactggtacaacttggtgccaagcctgttttctggagaatggctgctttaatattttgtgtcgtctcgtttatacaaagtgaacatctgtgcccctttaagcgggtcttcagatgccggaagaggaagtggaccgtgcgattgagaatggcaaattgttcaacaatgtcggggtctgttggtccacatgaattgggtcctattcattgttgcgcacacagaagataatgctggccgagcgggacaagaagatgctgttcgaggatgtcaagggcagacatgacgacattgtgcggttggagaagaccattggcgagctgcacgaaatattccaggacttggcgatggttgtggacagtcaggtgaaatgccacaggggatttttccattaactccattaattgttgtacgaaacagggtgaaatggtcgatcacatcgagcggaatgtggagacggcgcaggaacacgcggacggcgccctcaaaacggtgaaagctgcggaggtggcaaagaagcgcaacatgaaggtgatggtggcacaactgccaatcgtcaaacattttactgggctctagaacattttctttcaatttttccccttttgaaattgtatgtcatcgattcctattttccgatcagctttactattttgggttttctaagttcgcttcttttttttgacgacgatggtaatataggacagaaaaaaatatgaataaa

SEQ ID NO: 53925 - DNA, 188 bp, Heterodera glycines
  unsure (1)..(188): unsure at all n locations
atgcactcattgctttgtccacgtgcgtccagctcccaattatcggccctttttaaacgtttttccgtcgggaatggcaccgcttcgaccgattgtgccaccaaaaaagggcctgtcgatgtgctgcgtgcacggcttctctaccagagcagaaagcgtgngatacgcgagaacgacattttgatcgg

SEQ ID NO: 53926 - DNA, 339 bp, Heterodera glycines
atggcccttaagaaatgggccgcaaatgtccgaggcgaaaatgtcgggccgcaaaagacggaccgcaattgtcgtttttggctggtggccgcaaatgtcgtgacacgaaatcaacaacagcaaaaaggaaacagcgaagggggaggagaaggaagagaaaatgggggaaaagagagaaaaagggaggagaaaaaggagcagcaactgaagaagaggaaaaagaaaattgcagctgaacaccagcagaaacaacaacatcagcagaagcaagaacattggaaggaggagagacggaagagaaagagaggaaaatggaggagaaaaaggagcagcaactga

SEQ ID NO: 53927 - DNA, 384 bp, Heterodera glycines
atgaaccgacggtaattaaattaaaagtcacaaattcgtcgtttatttgactaaactgttttcccatttcagttggatttgcaacgacgtttggatggacattttcccatcctttgaccgtcctcaactcggcctgaaattggcacttctttcgccacgtttcaatgcgttggtggacaaacatttcgatggcaaaagcgaattggcaatttggagaccaatcgaaattcacaagggcaaaggaccagaaccgaaactatctgtgtggatggatgacgaatctaacaatgttgtgccatttccattgcccgaccgtccgttgcccagcaaaatccgttttaaatgccttcggatttagtaattaaaaatcagagagctatgaca

SEQ ID NO: 53928 - DNA, 63 bp, Heterodera glycines
tgccctaccgggaccgggaccgggacctgagcttttcaaaacccgggaccgggaaccgggacc

SEQ ID NO: 53929 - DNA, 1583 bp, Heterodera glycines
ttggatttgcaacgacgtgtggatggatattttgccctgttttgaccgtccccaactcggcctcaaattggcacttctttcgccacgtttcaatgcgttggtggacaaacatttcgatggcaaaagcgaattgacaatttggagaccaatcgaaattcacaagggcaaaggaccagaaccgaaactatctgtgcggatggatcacaaatttgtggaatttccattgcccgacgaccgtccgttgccctgcaaaatccgctttaagcgccttcagattgagtaattaaaaatcaaagctttatggcaataaaagcattcttttcctttttcagttacattgatcactccgtcatcgcttttcttcgttcaaatcaccaaatttttgagaaaagaggcatcgatttatatttgtggattccttattcacataccacggatggccagcggatttgggatgtttttgttcgtgaattatggccaattttttcgacaaacattcgctgtttgggctttttccgtggtgatcatttggacaatttgcttcgtctcatttcaccgacaattctcaccgatctcaacaaattgaattcaatcaattcctatgatttgttgcccgaggcgattggtgatgattttgatgtgccaaatgcaacaatttctgctggccaagcattgtccaaatggttgcactctccgagaaaagatggccaacccaagcgattgcgttgcgaagattacaacgcacaagcgaacactgattggatcaacaatttcaaggaggtgtggccataatctcgacaaatcactgatttttgttttcaaattgtttagcattttctttgtgccaatgccatttcttccgtcaattacgaaattcgttttactgttcgtgcgccgtcaatacaaatggtgccattcgaattggtgaacgaatggacaatggaaaagctgacattgaccaaagaaaacgaaaatgaatgggacaccatttggataatgaaacgaagcaaaattattggggagacagcggcggtcaattggaaagacggaaattgggacaacaattgtaactgtgtgttcttttggcttgatagtgacactaattgcattgggtgagcaaataaaaaagtcatttaattttgtttaattaattaaaatttcgcttaatttagtccattgtctccgccaccgaaagaagaagacgaagcaggacaaagcagcgaaaaaggggcgtcgtctgctgacaaatgagtgacggacaaaagaacaaaaacagtgatcagccgcagaagtagaaatgaattaattaagaatgatcgatcgaccgatcataattcatccgtgatcaaattattaaaagtaattatttggaacgttttcgccactatttttgccactagttaattattttgggatttttgccactaaaaatccgatccctacttctaacatgcatttttttgagacttttttttacactttttcggatttttatgacttttttgagtttttgcgacttttgttcgtgatttttttgacttattgaggcaaagtttgaattttacagaagaaaatgccgaaaa

SEQ ID NO: 53930 - DNA, 3155 bp, Heterodera glycines
caccaccaacactgccatcaccaccaccacaactgtctatccacagaagattggtgtgcctcgtttggcatcatctactcgtatggggaaaggcaacgtgagtggcaaaccactaaaaattgtcaccaccaccaccgccaacaccaatatcagcaggaacacgaccaccaccaccaaaaacaacaacaacaacagcagcaaaatcaccactcctataccaaaaactgcaaaattggttgtggatgagcagttgccagtcgcaacactcctcccaacattgattcatcaaatgtgcaaggatcgtcccggggaagaaaacttttatcagcaagccatctgttgggcactttttgcactctatttaatggtgtttgtcagtctggtacttcatcagctttgttctatctgttggttaaagaagaaaaaggagtatggacagcgcgcagatttcgactattttaaggcaaagtcgggaaaccgcacgagttttccggggctgtttcccaagtgaccagctcccagcgccggacacgctacggtacccagcggcgctagtcgtgaacaacgacccacattacaaacaaggatcccattggtgcgcgatttatgccccttcaaagacggaggaagcggtcatttactttgatagtctcgcaaaaacaattcctcctattgtaaagacatcatttatggataaatttccaaaaggttttgttacaaataagcacccgtaccagtccccgctgactaccacatgtgcaattcactgtatcgtgttcatctatcacatgtccttatgtcacccatttgacgcatttctgcgtatgttagacgctagtgaaagccccgacatgtattctttgtgcattttgaataaaatgattaatccgtatttgtgtgtgcgtgccaattttaccaccctttgggaaagggcatagggaatgattgattaatttattataccacggcgcacgttgcgcgctgttggtgctgcgcatatatacagcgagctcacgcggaaaaggctcacttttttcgtaaaaaataaattaaaatattaataaataataataatgtcgttggaagatcacaattattgcggcgagttgggcggcaacgaagcgcccacaaagagaagaaaaagaaatgatgatgtggagggagagccgaaatttcaaaaaaactgcattcgcactctgagcgccgacaaacagtacagccaaaagttcaaagtgcagagtgtaaagtcgacttttatcattgaaaatctgcccgccaaccccgagtcaatgctgcgcgcattgttcgctcactgcatgtcaaccgccctggacgagtcacagcagaacgggatcacaccggatcaattgggcgctacaatctcttcagatctgctaaatccgagcatatggattcccatacgccgcatttccgcgccgactcaattatgaaccgcttccttgaggtggcacagtcaaaatcgcgggagggctctctgtggggctcgccgttcactgtgaccatcacaacgcttgatgttgcgcagctacctcagcggcaacaggtgcgtggcagtgggaaaaggacaacgaattcagtgcaacatatcatcaaagagagtgcacttctgcgaatcaacaacagtgatgattcctattgtcttttttacgctttggaggcaagcagaaaataccacagcaaagagatgagccgacaaaccttcagatattaatcggcagaatgggcgacgactggaagacgtgtttggactgatgagcagcgcaaacattcgcaccgatttgagagagtatgacgcggttgtatatgtgccgattgtcgtggactattggaatcggaaatacgccacatcaaaccagcgatttaaggtgttcatttttggcactacaggcacctatcggccaaaatttcaatatgggccggacaattacaacatcgaaatcccactctaccatcacaacggccattttgacggaattcgatgtggggtgggcaaagcggtgtttggacgtgactactactgcttttcgtgcgaatgcccctatgataatgctaatgatcacacgctacaatgtaaagcaaagtgcataaagtggtcgcataggagtggggcgaccgtgccgagcggatgacaacaacgacaattattacagagaatgcacagcatgcggcaaggatttcataagccaagactgcttcagtcatcatttgtcgagcaatgtgtgccgacaattcaaaaaatgcaaacagtgcggagttgtgtggaatgtcaaacaaaaccgacgaaaaggacgcagcggacacgtttgcggtgagaaattctgctacacctgcaaatgttaccataagccggagcggggctgcttcatacagcagttgaaggcgcgccgccccaaaaagtacagactgatcgcctttgactgcgaaacaacacagaacacacgaattgagggcgaccgcagacttcattccgtcaacttcatctcatgctatgtcgtctgcaccaagtgcataaacgaaattttatggcgaaattccctacaagcgccatgtggcatttgcggtcggcagcgcaccgtcacattctcccaccgcgtctatgaacgcacacaaaccgatgcccaattcatcactccgtgtccaatggcggcctttgctcaatggctgctcagcgaattcgatccgcgctatcccacaatgctcttcgcccatttcgggggtcgctttgacaacattatgctgtttcggcagttcttcctcaacgggttttgtccacagatgatccgccgtggtaacaaattatacgaaatgaaaattgcgaggggcgaaaaaaacccggaaatcatcgtaagagacagctggaaccttatgccggtgccactcggcgctctgcccggagcgtttggactcaatgtgcaggataaggagttcttccctcatttggcgaatgttgagacgaattatgggctcattctgcagtcgctaccgccaaaagctgactacttatacggtggaatgacgcccgaccgacagcgcagattcgaccagtggtacgcggaacaccgccatcaacagttcgacctatgtgaacagctcgcagcctactgcaccaatgacacgcgcatactaattgaggc

SEQ ID NO: 53931 - DNA, 1057 bp, Heterodera glycines
atgccacttgacgagtcggaagcagccagcggtgcaaattcggtgccgatcgctgttcgcgttccgtcggaaactgttcctgacaccaattctttgccaactgctgtaactgttccgactgataatgtggctgcaaccggtgctaattcggtgccgcttggaacccgcgttcaagacgacggaaccccgaatggagaagcaaaggacccagccatccagaacaattctgctccattgccttctgaagacgccaacgatgagtggtgatttgagtagggtttattcggctccggactttcattgttttgttgttcagccttatttattgacgatctctaactcatttttatttatcgtcgggactgggttttcaaatttattctggtttttcactttctttttctgttaccaaaacccattgttttgatatcaattccattaactacttttgaaaacaacttacttttcttttattgttagatttttcgttattttctgagagatttttcgttgagtttcttttatatttttctgaatttgtgtttcgttttgttataacttatatccgaccacattttttgttcgtgtctttgatcgaattttgaagataggacttgagagcaaaaatatttattgtcagtcgtcttgctatgtttttatttggttgctcttcgatctccattatttcttttggttggtcctctctttcacactgagtacattttcatctgctccaccaattcctccttctcattgatgccaaacttctccttctgagactccatcattttgaagatggcttccaattggtcctgccgcgcttttcgttccttcgaaaatcattttaaaatagttttaatttttcaaaaccttttctctgtcctcctcactcatttgctcttccaacagctgggtttttgcacgaagctgtgcagttgctaactgaaggaaatcagaaatggtgatgatgtttaaactaaaaaacgatttgtaccgttttcgactaaaactttcataattttaaattctggaaagccgaaatttatagcctaataaa

SEQ ID NO: 53932 - DNA, 75 bp, Heterodera glycines
tccaagtggggaattgaacccaggcgaaaaattatgaaaggtagaaagtttaaccactacaccacatgcgcatgt

SEQ ID NO: 53933 - DNA, 684 bp, Heterodera glycines
atgcggccaaggggcccggcttttacggatgcccggagagctgtgcgcaaagcaaatttggctgctgtccggacggcaaaacgattgcccgagggccgaacaaagagggtgagtcattgtaattagatgatggtataattatgccattaattagcagagggtgagtgattgagatattcattatccgtgtgctatattcgtatcctgttcttggcacattgaccgaattgtttaacattgatcagtgatcagaagtagaaagaaaatttagatactgagatcagactcattaggaaggttaggagctggaaataacacacagatcaatgagctgctgcgaaataccaaattattgcactgatcagaactgttaagctgatcaaacccgttatgatcaagaccaggcaatatttattactttggaatttcattaatcaaacagtctcagttgattacagttaatgcctcaaccatttgtcaaattttattttgatcaatagatctgtgtccgttcattttattctatgatcataatgatacaaaattgaaaatttaaaaaattattatttttttcattttcccaggctgtccatgtcagtacacgcgttggggctgctgcccggacggcgagacaaccgcgttgggcccgctcaacgaaggctgtgacgattgtcgttatgccaa

SEQ ID NO: 53934 - DNA, 1141 bp, Heterodera glycines
atgtggtgtagaggttagtgcatcacattgacattagagatcggaccggtcggtttttttcggtatttttcggtttcggtttttaaccgaaaagaaccgaccgagaaatttttgagtttttcggtttttttcggtttttatacggaaaccgaccgaccgaaataatcaaaaaaccgaaaaaaccgaccgacttttttcaaaaaccgaaaaaaaccgactggcgatttgaagcgacataacccgttaataacaatttttggcataatatactgtttgaaattcgatggtttttgattaagttttcggacttttgaaaagtttatcactaattttcatttctttttttaatttattgatctaaaacattacagcaatagtcaacatgccctctggaagtgtgatttggcaaatcgggctttataaaaaaagcaacaacaatgatttcgagtacgaatgtgccgagtgttgtaagaatattatatgtaagaaaggcaacacatccaatgcgataaaccaccttaaatcaaaacacaaaaacagcgaatatgaggcgaaatatgaagaattttttgtatttttcagacgccaaatttgttcacacctcgaatcattaagggaggaacaattcagtgaggaggtcctaccgttgccaaattctcctatttctaaaaagccgaagggattgcttgatttttgatcatacgctgtcagcatcgtcagtagtcgagacaaactcacgttaaaaacaatttgttttttcattaaaatttttgaattatagaagagaaaaatgcaacgagcgaaatcaatgcttattgttctgccgtcaccattccgtctaattctgatccattagaattttggaaagagagagccaatgaatttccgggtattttaatttgcccaatttattaccccgttctaaggaattttacatttagttttggcagaagaagcaaaaaaatttctttgcattccggcgacaagcgtggcaagtgagcggttattttcgacagcgcgcgacacatacgactaccgtcgacgccgcttgcgtccaagaaagtccgaaatgctgatttttttgaatcgaaatcttccaaaaattcaatataaatattaaaaacattttactgttaataaa

SEQ ID NO: 53935 - DNA, 908 bp, Heterodera glycines
cacggcaaattggccaaccgtgccaatgccaaaagtgccgatgccgaactgctgaacgaaaagctggccaagctgtacagttcgcctcaggcaatcaaatcgttcgaaaatttgtgcttcattgccgctctgttgcgcaaaaaggacatggacactaaggtggcttattgcttcagtatttatttatcaggatggaagtcggctcctggttcagttttccgattggaaaacttcggattccaattatggattcgcgaaattttaagcaaaaaattagaaataatgattaaaaaattagaaataatgatttaattatcaattgcgaaaagtatttcaacgactttttagcattcataataaaatagaaaatactaaaatcaaaggttatatttgtctttttttggagggatcagatgttcaaatcattcaattgaaacgttgcggcaaatctactgagaaaaaacttgagtttattgaatgaaatgcaattttaggccttttggacgtgttttaaatacaaaatgccctccttattttggaattgaaaaactgtttttatggtattaaatattttgaaaaattatgccctaatttttaaaaaccttgcaatttctgagcaacggatttttatctgatcagagagagccatgattgacatcagagcaattttgtttgggcaaaccccgaatttcttgatcaatcaatcaatgctggttgattatagaatttccattttagcaagaccaagaatggaaatttgttgccatggtgttcgatcggctgtttctgatcattttcacgttcgcttgcttgttcggcacgtgttggattctcttccaggcgcccaccttctacgacacgcgacagccaaaacagccgatgatgagcttatgataatgatcattttt

SEQ ID NO: 53936 - DNA, 1806 bp, Heterodera glycines
atggctcaacaacagcaagacaacaaaatcaaatcggccaaaggaccaggagcatattcaccggaaatgtcatgggattcttgggcggaaagattcgattttttcatcaagctcagggggatcaccgacccggagatgaaaaagctattgcttttcaccgaaattggcccaatttatgatgagttaagaatgatggcacagcctgacgacatccgtgatatggattttgcggaaattacggcattgatgtgcgagcgttacggcgaagcaaagtcaattgtggcaaggaggcacgagctgttcaccgccaggcaacattccggccaatcgattcgcgacttttccattcaattgcgttcacttattgccaaaacggagtggggcaaggacagcatcgacatgtgcttaagcgcattatttgtcaatggaattgtcgacgactcaattcgtgccgaactgatcaaaaaaggggacaaagatctcaaattcaaagatgccgtcgaattggcagttgtgctggagcaatcaaatgtggacgctcaagcgattggatcggactcattgaaaggcaatgtggccaaaatttcaggaagaggaggaggatatgatcgcgccaaaggaaccaacaatagcaaaagtgccgacagtaagccatgctaccgttgtggaagaagcggacattgggctaatatctgtcccggcaaagccgacaaatgcaccaaatgcggaagagtcggacattgggcgattgtatgcaggacaaatggtggcaacaaaaacccggccagagtggaaagtcggctatggaaaagcagcaaacacgtgaagcaaattcagctgcagtgcaatgagaagccaccagtaatttcgagtttggagcgaaagtcggctaaaactgagactgttccgccgagcttcatccaactcaaagtgcataaaggaaatgccgaattcgaattggacagtggtgcagatgtaacaatcatcggtagccaagattggaaccatattggaaagcccgaattgaaggaaagtcaaggactactggcttatgggggcattccgatcaaaggcgtcttcggcatggcaaatgtaaatgtggaatacaatggcatgcaaatcaacacggatatttatgtggtaaaaggaaataagagaaatttgtgcggtcgtgatgtgattcgcagactgcgcattgatttgaacaaagcattcggcattaacgcaatccaaatcggatccacgaataatgatcaaaaagaggtggacaaaattctcgaaaaatttcaagaagtatttcgagacgaattgggccgatgcacccgtcaaatttcattgaaattcaagcctggagtgcaaccaaaaaggtgtaaggctcgtcctgtaccatttgagctcaaagccgaagtggagaagattttggataagtgggtacagcagggagtgctggagccgacgaacaacagtgattgggccacacctttggtcattgtaccaaaaccgaacggaaaaattcggctctgctgtgattacaaagtgaccgtcaaccaatggttggacgtgcaccaatatccactaccaagaccggacgacctattcagtgtgctaaatggcggtcaaaaattttcaaaagtggatttgaacgacgcatatctgcagctgatgttggatgatgaagcaaaaaagtgtttggcagtatgcacgcacaaaggattgttccaatttacgagactcccttttggcgtagcgtcagcaccggcgattttccagcaggtcatggacgaaattttgcaaggaattgaatga

SEQ ID NO: 53937 - DNA, 1465 bp, Heterodera glycines
atgaaaggactctccacccatcggcaacaaacagaacaatctcagacatgggacggcccgactcgcccatctccgcccttccacctcaaacaacttccagcaaggcatcatttatttggcagtgccccccctccttcattctctccccccgccccttcagtcgaccgtctctccgagcagtgctgcgctggttgggactcgggactgagttcggctgctgcgactgatagtcaaagcggcagagggcagcagcagcacaacgcggccacttgtcagtcgacggatgccgcaagaacatcgctggaggaacgatgttgcgtttgcagaaacgagcagcggtcgtgcccaacaacggcttcaacttcccccgaatggtcgacactgacggaaaaggaggacaaggaggactgggtccgcattttggacgcattggaaacagtgggagaggaggagatgctgcgcaagttggaggagtgcattctgtcggggcaagcgtccaattacacgacgaacagaggcgcgaagaaatggtcggaaacattggcacaatgccaaaattccatttttgttcctctcagcagtaacgactttgccaactttactcaaaatggctttctttcgtgtcgttttccttccaattttccaatcaaagggatgaacagcctgaaaacgcctttggcctccacaaattaccgcgccggtgaaagtgtcagaaacattgcaagcgtaactctgccaaggcctcaaacgcccgtttcccgggaaaagcaaaagtattgccaaatactcgttttacctttccatatttacgaagatttagaggcgaacaaatgtgtcacaacggcaacacttttgtggttgagttgcccccgccgatgccttccccccgggccgcctccaatgcgttggcgcttctgacacagctgaactccaacagcaaagtcggcgaagtgtcctcaaccgtcccaccaatcattccttctcacaatgcgtccactttcgctccgtctgcggatgaagaagagcatcagcgagttcgctgctcttcagtagttccgttcatcacttcaccaacagaggatgatggaaattgtgagcaggaggaagagaatgaggcgaacgaagaggaggaggaccaattcgacagcgaagtgttcaccattcaattgtgccgttgcccgtacacgaaaagcttcggtttttcggtttgcgatggcacagccgacgaaacggcaaggggagagagggaacagcagagacagggcggcatttacgtgaaatcagtggtaaaagacggaccggccgataaaagtggacgattgcagccaggggaccgaattctgaacgtagggcaagcggaagcagcctctggccagcaattttggcattttattttcagataaacaggagaagcatccaatttctcacgtgcgatttggcacttccgttgttggccaccgatcgc

SEQ ID NO: 53938 - DNA, 117 bp, Heterodera glycines
aaattagtcaaaatacatgtcagattcgtgattagcgacctttaaaaccccggataaaaaattatcatggttttttatcttaaaaaaattttgcaaaacaaaagggtcccccctttt

SEQ ID NO: 53939 - DNA, 312 bp, Heterodera glycines
atggtgattagaagaggtacaactgtgattagaagaggtacaaaagtgattagaagaggtacaacagtgattaaaaaaggtacaacagtgattaaaagaggtacaaaagtgattagaagaggtacaaaagtgattagaagaggtacaacagtgattagaagaggtacaaaagtgattagaagaggtacaacagtgattaaaaaaggtacaacagtgattaaaagaggtacaaaagtgattagaaggggtacaacagtgattagaagaggtacaacggtgattagaagaggtacaattatggtttaaaatgaa

SEQ ID NO: 53940 - DNA, 1313 bp, Heterodera glycines
atggccaaggtggaggaggacaggacggatttggccgcattttatgaaaaagtgagaaacgactgactgggaaagcaatggaaaggaaagaaatgttcgttccattagcatcatttgcgatttttccgctaccggacgatgggatttttactgagaaagccaatcgtccaatttttcaaaaaggcttatcgtctcagtttttatgagtagaccaatctcaaattgtatgaataggtcaaccctcccattttgtctgagtagactaattgtccaatttttctgagtaagccaatcgtccaatttcataaattatataatattatatcaaatttggcctgagtggcccaattgtcctcctattttgtctgttaggccaattgtccaattttttcagggtgggacaatccagcaattttatgagtaggccagtcgtccaatttcatctatgtatcaaattttgcctgaatggcccaattgtcctattttgtctgtgtaggccaatcgtccaatagtttgagtatgccaaatggtccaattttggggattcttcctggcttgatcatttcgatgaatattatgtattttttctttgactaatccttcaaactttgctttggtcaatccgaaaccatatcccatactgctgatcatttccattttactgcttctgatcagtgtttattttctcgttagcgattacctttttttgttgttcagtgtgaccccttttcctctgatcgttggcgattacagtatttttccaaatccaattcaagagatgtcccgtgaaagtctggttagtttatttgattaaattaaaaaatatataaaaagttccccagaatgttaatctattttgcacttggcaaaaatatttttcttttatttgtgccgctgaaatttgcctaaacccaactcattaaaagccccagagattagataagagcatagaactcctttttttgtagtggccattctttgcgataattttcccatcacaaaaatgtttttagtccccaaaaaattgcccgttgaattggtctttgatctgagccgtttcattaaatttgatcgaaaatggtcgagaaaatgccgagtttgctttttatttgaccaatatttgttggcacaaaaccgatattggctgaagctgatcaaaaaattggtcttttcctcaatacaaatgattttcatgatcaattttcagattactgagtgcattcgttccattgagagcttgcgggaatacattttggtggacatgaaagacgtgccggacctccgaaaaatggcggcacgcgccagttacagaa

SEQ ID NO: 53941 - DNA, 718 bp, Heterodera glycines
atgcgctgctgttgtgctcattctgttgttccgggaacctataatctctttgtatatgccagcgtggcaatcgaggacaataaggaaatcgtaatatttttccatcgcgatgtattccttcgatctaatcccagcaatatatatattagtaatctttaccgggttcgaatgagcataagacaaatagttttgttactgaacaaaagagagtggttaatttctcctgtaactatagtagtcaattcgtttctaaattacgccgacgggtaggtattttttgctattattgcctatttttaaacttaagtgaattgcttaacaaatggaaatatttgccatgtcgtgccccgatattgaaagaaatatgttgcgataaaattgccagaagtaagttttctatgggacaatatcggtcacttcctcttagttttaaacaaattttttcaaaaattgaataaatatttatttctgaattttttgtattgctttttaaaagtttatatttctttctatatatttacataaagcattaaaataatttacttagtactttttggttttgcgtttggccaagaaaatagcaattgttgttgtctttctaatgaagagaaacagcagttctggcgttttattgagcttaatgactaaaatggaagcaatttcttacaattgtcattaagaaagtacatccaaaagtttttagcattgagaggaaata

SEQ ID NO: 53942 - DNA, 128 bp, Heterodera glycines
aattgttttgaagaaaggagctcaaaaaacgcatttctgcattaaaaattttcgattctgatgtcattatcggtcactagaaatcactattttggcgacttcgtcactaaaatagttaaaaatcacta

SEQ ID NO: 53943 - DNA, 1080 bp, Heterodera glycines
atggcgacatttatgcaggagttcgacctgctgcccgccaaactgttgcagacgcccagcgcacgccatgtgggctcgtggtacaaacaaagtgagtgaatcattaccatttggcatggtacagtaatccctaatccagcgggtaaacctgttggtcaatctaatccacaatccgtgccaaatgtccgttggggcctgatcagaaattgtttgggcttagtaaccctaaacagcttttggtcgaaggaatatgatttacatgaacttcatattatcgaaaatgcctggtccgacgataattgtctgggctaataatagataatcagtgctgattaaggaagattgacaataattatgttcggataagctaagcaaaatcgttttaaaatcgacttctgatcacttcatttttaaatatattattgacattgcaccgttcgttttcaaattgatcagcattttttattatccaaaaaactaattctgatcaaatccaccgaggatccatttcaaacagtaccaagaaaagagttgtttggatcatgatcttgtgattgtttggatcctgatctgctgatcagttctcccagccttgatcaaattgattaaattaacttcacccacatttcattcaggcttctctgaactgctccatttcgagggcctcgagcccagcgacatggtgttggacaagttcaacaaccaattgcgcacaattttgcatcgtcacaacaccgtcgtggagacaatggctgaggcattgctcgaactgaaggaaagccacggcgtggacattgcatgcgaacgcaacattcaggtggagtggatgaattgaattccagatatttgttgacacatggtatcgagtcttggcaagaggaaagtgttcgagagtctcgactcggcagaaatctcagccttcttgggtctcggctgaaatctcggcgttttttgggtctcgagtctcgggtcatgaataacatgaacttgtagctgttttttcgtcaaagccgcccctaaatacttttttttcattgaattacggtcccgaccctccgggccaatttttcgtcggcagaa

SEQ ID NO: 53944 - DNA, 248 bp, Heterodera glycines
atggccggccgggtccaccacgactgtcttgcgcgactgattgttagtgccattggtgtcgcaggcggcggcgaaaattgccacttacaaagggaggaaattaaatgtttttttaaaacaattaaaatttaataatttggtaataatattattacagtgttggttttgcaacattcgtatggaaatccgattcaagtagaaacgatccaagaagtactgaacaaatgcacaaatcacaaatgaataaa

SEQ ID NO: 53945 - DNA, 949 bp, Heterodera glycines; identical to SEQ ID NO: 23231

SEQ ID NO: 53946 - DNA, 791 bp, Heterodera glycines
atgccgatggcactggactaccgcagcagagttgctgttgtggaggcggaggcggtgggtgatgttgttgcggtggtagcggaggtggacttggcggattaagtttaggcggcggtggaggcggctgctgctgttgcggaggagggggcggaggcggaagatgaagtgaccaaaaaatagcggaaaaattgggaattaatcgaccaaaaatttacaaatggaaaaaagaaattggaatttattattataaaaagaaaaaacaggaatttattgaccaaattgatgaaattaaaagaatgccaaaaaatggaagacagaagcaatttgcgaaagagttgggcattagcaaagaaacattaagaaaatggaaaaaggaatttggcattgaaatgagcaaaagtaaatttgaaattaatttccaatataattattaatattaaattttattatattcttaggtccaattcgattcaccgaagaacaaaaaatgagcaaaatgaatgattattatgaaatgaaaaaagcaaatccttctttaagtgacaaagaaattgctgacattttgaaaattggaactgccaccctaaagagatggaaaaaggaaaataattcgtaatttttcgtttttcttatttgtattggtttcaaaggtgctaggtcactttaaaaaaaagttcaaaaatcaaaagtctgatttttcttataattttttatcaattttttaaattataaacatgttataatttaattaaatgattcttaaatacgtttaaagttttgttgaatttcga

SEQ ID NO: 53947 - DNA, 640 bp, Heterodera glycines
atgccgaatccatttttatttgtgcttttcacgtgcccactttccgtcatctgggcaacgcgaaaatcagctactcgtaacacactcgaaaaggtaaaggtcgcttccatacgtgatcgccagacgcctatgattcgacttggagacaaaaaatgattaggtagagcatcaacatactcaaaatgcagaaatacaaaattattagtaagaaacagggacggagcgaggacagaaagctcacgcggtcgcgcagcgcggattcaaattgctgcgtcgcgctccacccctggtaagaaatttaaaagagaaattccgagattatgaagaatgaatggctggcgaccacctataaataaacatacaggattataaaattagcaaaaacgaagcacaaatacaaaatattttatgatatgtaaatgaccacccatatatcgattgacaatgagcaaataattttactttgaatttaaatatcgaatgaattttaatttatgaaaaattaaatgttttttcataaaaaatgattattatcactgacgaaatcccttacggacgaaatcacatgttaccgtctatacttagcttttttaaaatttattggcaccctttaagctccaaaatttaaaattttaggtaa

SEQ ID NO: 53948 - DNA, 660 bp, Heterodera glycines
atgtccaatttgaaattgctttttgctggaggagcagcgggaatgtgttcatggctgagcaattatccaactgatgtggtcaaaacccggttccaatcggacgatgcgtatgaaaattgtgagaaaaattggggaggatggaatgcgaaaagaaaaattttcaaaccaaatttcctgggcgcgtaaatttttttgagaaaaacttgaacaaatagtttttcagaccgagaagttgtcaaaaaagcttactcggaacacggctggcgaacattctttgctggacttggctcaactttgattaggtgctaatttgattttattcgttggatcttaagcttcctaattacctttttgtttaagggctgtcccgacaaacgctgccattttcttcgcagtcgagtggacttatcggatattagcaagaaaaggtatgcagaccgaagcattgacaaaagaacggagtcaacagcagtcaaaagtggcgaaactaaggacatcagccgggggttttctttttccaatggaagcgggttgcactctccaagagccgatgatcagctaacatttttcatccatattttgttgtatttattcatataaaggaatttgattatataaaatttttatttttttccaactcaaaccatttgctcaaataaa

SEQ ID NO: 53949 - DNA, 163 bp, Heterodera glycines
ttgtcacacaaaaatgccgacgacgacgagcagcagcagaaggtcacgctgggcgttgaacgctttgcactgcccgaactgctgattcggcctggcgatgttgaagtgcagcaaatgggcatcccagaagcattgtgtgctgtcattgaacggctgccaaagg

SEQ ID NO: 53950 - DNA, 491 bp, Heterodera glycines
tcaatttgttccaaaaatgggggcgctttaaggctgccaatgcggcgatcgccagcacttgggacgcttctcgtgcgaatgccttcgccgaaatgcatttctccacaattcgaagtgccacttttcctacctccggattgctttctttggaaatgttcgacgattatgacaaaatgctaagggcaatgagcgaggcaatcaaatggcttatccttcaccttccaaaaggtcgtttcgtttataatcaaaaatctttatatatatgtataagttttcagatgaatttatgtcgagaaataaaagatttaatctttttgctattgctgaagattctggagaaattctaaccgttttgaaacagttgtcgcaatttgaatataaattccgaaaagtttttcaccctttttcactaaatgtcattttttaaagaaaaaattaaggcaataaccccattgaggaacaatcgtcaagattgtattaacgcacttcat

SEQ ID NO: 53951 - DNA, 1201 bp, Heterodera glycines
gccgtccctcgggccgttttccatgaaatggccaaattaaacgactgtttcccaactgacacttcatccgtttccattgaaaaggcgcgaattcgtgaattttcggacttcaaaagacgaagcattttggctgatctcacctttaaaatatcgaaacttgcgctcggaatttcgaacacctgcattaaacagctcggtgacgtggaaattcagccgcgtgctctgttagccgatggactccgtcgtgaacttgatgtaacattctttcgatttgttatacctttttaattttaatttcaagattcggttaattcaaatttttgcctcggatgtccaaccaaatattctccgaactcttcaaaatcagtcgctgaaattgcaacaattccgaaaatcttttctgttcatctgtgaccatgtcggcattcgcgacggaatccgtatttggacggaacaactcaaaagcattttggaggagtcattaaatgataaaatattcaaaactgccgaggtttgctgctcccacaacagttatttttccccaagttgtttttcgtttagcgaacaacaatgaccacttccgtcgtttctttcataccgcagtcaaaattggtggtggaaaaactgctcgattttgcgctctccgccacagcgccacagttttgtcaatgtatgcctttttttatatgaattccacgttcagatcgaccaaatacaaccgaatggagtccatttggcgttccgctgatgggaaaacaatcaaattttacggcaacgttttcgcttctcttgatgtaattaatgccattaaattattgaaataaccaaaacattgtttcttcattctaagaattggttgctgtacggtttgaactcgatggtcgcaactctgttggccaaggatgtgtttgaattgcaacgaattgtcgcacgacttccctttgagcagcaccgttcgttgtccgcctcgccaacggcacttattgcccagctgacaacgaatgcggcagagtttacacagtccggtccgaatcgcgaactgttgttcgccctcgccaaattgggtcagcaattgctgttgttacgcaatctgcaaatgttcgtcaaagcggagaaacacagccaattgggcacactgcaaacagcggaacggacactccgaaggtcatccacgcatttggagtcaagggatcagggctaa

SEQ ID NO: 53952 - DNA, 1166 bp, Heterodera glycines
  unsure (1)..(1166): unsure at all n locations
atgacacttccaacncgattccatgcaaaccaaatgacgccccgtcatacggatgatgatgaccatggcaacgaagcgttgaacattttcaacgacgcttttggtcttccgttggcaccgccggatggtcccaacgaagcagctctgccagctgatcaacaagcggcacctgcacaacagacggacgaagcaaatgccgaacgaggccatgtccgtgtcgatcgcccgcaacgcaatcgacgtcctcctcaacgctacactccgagctgagatggactgatcactgatcaacggaccgatggatgaggacagactctttttaaggggggagatgttgggaagggtactgatttgtcccgcctaaattatttaattcctttctatctcttcccctcccactctctctctgctgttccctccataaatacccccgtccctttgaccatccgttcattccctcatttatttgttgtatgtgcccatctccctcaatcgatactcctgcccccatttctcttctttatttaattgtgtcttcaccaaaattggaataaataaatatttattctttggtcaagtgcaaaggcacaacagttcgcaaacacaaaaaagaaagtgtttttcctactaattaggctatggagaatccaggaaaaaaatgtatttacataaaattagcagccctagaaataaccaattatcaattatgtagcttttctcatttttttttctcgccaaattattggcattttcattttcaccaccggtactcaaacatacgctaatgttttaatataaaaatataaaactgcccttttttctcctctttctcacaaaaagattatgcacatataattttttggtaatttcaaatttttaatgagaaattgctgttttcaatttaccttctctaaaataagcaaattttttgctctctcattttttctaattgttctctctgttttaagttaacaacaaattttttgccttttgtgacacacaaattaattaattggaaaaagggaaaagcgtgctaattgaaccaccaaaatgaatcgacggtaatgaattttaaaaattataaaattttcattttccatgttatttttttcatgtttcagttggatttgtggcgacgtgtggatggacattctgccatcttttga

SEQ ID NO: 53953 - DNA, 50 bp, Heterodera glycines
atgcaacggccgttcggaaatttggcggttttccaaccgctgattgactg

SEQ ID NO: 53954 - DNA, 248 bp, Heterodera glycines
ggcacccccacaaagtgtccaagccacgaaatgtccaaaagagtaaaaacccacgaaatgtccaaaatttttcaaaatttataaaaacaaaatgagtctaatttaggatttttagggttttcggggtcgctgaatacgaatataccctttatattaccccttgcctaaccttaggcccatctgaataataaaaaactcaaattcgagacttggacatttcgtgggctggacattttgtgggtcagcga

SEQ ID NO: 53955 - DNA, 2541 bp, Heterodera glycines
atgaccaacagagccgaatatttgttccgcttttttgaaagtatgccagaaaaagagcttcgcgaagaattgcgcaaggctccattataccaagggtattgaagcaaaaaacaaaaaaaaaaattttttttaattcagtggcacaaggaagcaaatgctcaaacggctgagggatcatcaccgaaaagagctgatagagcacaggaagaaaaaccaccgcaattttctcactgaaaatctctacgactatctgattgtaggtaaaataggaagatttttcgattcaaaattggcaaaaaaaatttttttttgaaaatttcagaaaaatgcaaaaagtcaccgaaacccaatttttaggtgatcgactttgagtgcacttgcgaggcgggcaaatacgaatatgacaatgagatcatcgaattcccagctgtgcttgtcagtgttaagggcaggaaaattgtaaatttgaaaaaaaaaatttttcaaaaaataaaaaattttagattgacacttttcatgcggtgatccgtccaaagatgaacccaaaattgactgaatattgcaccaaacttacaggttataatgttatttttttatatgatttccgtttcttgactaaagagtcggccaggccaaaaaatcgcaaaaaaaaaaaaaaaaattgaattttcagggtttgtaaatttttttcatttcctcacaggtataacccaacaaatggtggacgaagcgtgcacctttcccgaggtgcttgacatgttccgggattggatggccaaacacgggctggacgggctccacagagtggggggaagttgccgccgcttttgctacatcacggacgggttggtaaacaaaaaccagggtcgggttcagggacgcatcacggggggaggggaaatagtattttgtgctgaaaatttttttattggtaccccctccaagacctcaattcacccaattttctaaaataaaaaaaaatccacaaattaccaatcttttagtgaaaatcttaaaaaaaattttttttttcccgcggtgccaaacccctccttttcttctaaaattaaaaaaggctcgccgtaaaaacaaaaaatgttatttaatagccaaaaaatgtgaaaatgtttcaagtttaaattgtaataggggggggggggtgacaaattatgtaaaaaaaaattttcttgtatttgatagtgtgttttccaggccttgggacattggcaagtttttgcagtcggactgcctgcgctgggccatgccgttgccgcacgacttccgcagctttgtgaacctgcgccgtgcgttcgtcaacttttattgccacgcgcggcccggccagccgaagccggcacgtctgcccagcgcggagttgagcgaaatgctcaagcggttggacatgcaatttgtgggccgtgagcactgtggcatggacgacacggtaatatcataataggatgtacgggacaaccattggcaccaaaaaatcggattgggttgaaaaaatgttcttaaaaattcaaatccggggccctaaatttagcctaaatgtgggaaaactgaaattcaagggaagaaaatggaaaaaaattaaattgataccaaaacaacaattttcagattaacattgcccgaattgtgatccaaatgctgaatgaccatgccgaattgagggtatattaaaaaaagtatttgttacattattttttttaatttttttaggtgaatgagaagttggtgaacggtgctctacttttgccatgggtagaattttaacaaataaattttaaaaaaatttatgaatgcatttgttggcatatcccccccccccttaataaaaatttcgttagtttctctcacggcactcaagttttggtggtaaaatacatttggaaaagattttcggtgccaaggaacaaccaagaaatagtgtgccaaaaaactcatttttctgttttagaaattaacaaaattaaatttttagtcacccttaaaaatgtatggcatttcactttcaccaacaacaacaaaaaaaaaatttgtaccatattttccctcaaattttcagcatcagaaacagttgattttcacggaccaaatgtgggaaaagcggcagaaaaacggcaccaccaccaataataaccaaagcaaagcggcgccttcgcccccactggccgcgttggaagcgtcgcacgcggcgaccatgtcctttctggactcattcggctcgtccacctccgcctcgtcgtcagcggaggacatcatttgcgcgggcatggcacggatgggctttcgggatgtggacgatgacggatatgaggaggaggaagcagcggcggtgaatggtggcggtggcaccagcccgatgaatggtggtggcaacaacaaattggcgacagcgacgacgacggcaaaactcttccaaaatggcatcaccaccaacaccaatggcaaaaagggcggcgacgacgacgacgatgggcaggaggaggaggcgaatgacggcgacaccaccatcaccgcgcatggaaatggtgg

SEQ ID NO: 53956 - DNA, 1221 bp, Heterodera glycines
ccttttcaggtaaatatcggtttatttaatccaacccattaaataacccccacgtaagaattgaaagaaatggcgcccaaacaaaggatgagtgtggccaaccaacacttcagcaaaaatgtggtggcccgcggtcaggtggccaagtcattgaagcccaaggaaaatcagtacccggccgcgccatggctgatcggcattttcgtcagttttttccgggttttcttgccaaaacagactttgtgctttattggagggcaaattttgggaaaaaatgaaccaaaaataagacagtgagagcttaaatgggcacctaaaagctctcaaaaggtgtaaattgtctaatttttttatcatttctaactgtcgatttttttgcaggtgttcgtcgtttgtggctcagcagtgtttgaggttatttgaatcattttggaaaaaattgcgaaaaaaggatcttttgcaattttggaaaattcaaatttcattagcccttttatagaaaacccggcgctatggcactttaggcgcccaatcaatgaccaggcccagtttcttatgccataaaattaatcaatgtctgtattcttggcatcaaacgaaagcttaaaatctatatgataaattctaagctaaaacaaatggtttaaacaaataaaaaaatgcttgaatttaatcgccgaaaaaactgaatttatttttttctccactgtattttttcttatgtaagtttttaaacttccgaggcttaaagctttcatttgataccaagaatatggacattgttcaaataagaaaaaagttatggcctaaaaaattgaggctggtcagcagattggacgcgtaaaagtgcaataaacccacaaaaatccattttgaaaaatcatttccatttccataatccctctaaatctccccaatccatctcagatcatccgatacgtgaagttgggcttctgatcacagtgtgattatatgtgtgtgtttggcattttgactgacggacggacgagtgtttctttttttcttggtgttgtcattggcgcattgtttggcgggaaatttggactggatacacatttaaatgaacaaatgatgatgatgaccgataattggttgacttccctttaacttctactctttcgttctctctgtccattcatttccatccatttgtttcacaatttcctaacaaatcaccaacagaaatttaattatttcttt

SEQ ID NO: 53957 - DNA, 1194 bp, Heterodera glycines
atgaaagttgtcaatttatccttgaaattaaaattttcaataaaaattccaaaaaaattaatgaaaatcctcaacacctcctcttttgtgccgtgccaggaacgctttctgttccccgtctacccgcacatttgtgtgctggccgctctaggctttgacctgctacgacgactgtgccaagccagcttttccaatcgggacgatggcattgctgccgctgctgtgccgtcctcgtcttcgtcctcctctgttcgccgccccgccggtggtgccaccatccgtcgtggtcaacaacaacaacagcagtttggcattggaaccgcactgtgtgcgctggtcgccgcgctcttcgtgctgttcagtgtgtcacgcattgcggcagttcggcgcaactatgccggactgatggacacgtacaggtccggagtggaaatttcataatttcggttgccgaaacttcagccatcgagataccggtttccgaaattttttgagccatcagaatttccatttcgaatgccgtaattttttgaggacgtcaccccatatcccttgcataaatgcccgaaatataaatgtcacacaatgttttccccttttcagggcctttaatgagcagattctgcagcggcaacaattgctagattatgccgaaatgcgggtaagaaaaaaaaaatttttttaaaaattaaaaaaaaattgaggacccaattcgactgtgcgttggcaaagaatggcaccgatttccgtcctccttttttctgcctgaaagtgccgccattatcatcgacgacaacggcacaaataacagtggcacgagtggtggcaaaccacgccagcgcccagcagtcgaaatggaatttgtgcgcagcgaattccgcggcattttgcccgcccattttgcgggtagcgctgacgacggcacgtcgtccacacttcggcacagcacggcacacgcaccgctgggacggatgaatgacgcgaatcgggaagaaatggaccggtaattggaaattttatttttagggatttacacccgggagaattgggtacgcccggcggatttcaatttcaacaatttaccatataattaattatacataattcagatatgtgccggttgaaagttgcgatttcttggtccatctggaggacggacaggagaccgagctggagccgaactacgcaaaaatg

SEQ ID NO: 53958 - DNA, 506 bp, Heterodera glycines
atgcctaatttatacaatgtttggttcaacgagtacagtaatgttgctgacggtggtggcactttgtctgatcaaccgagcacctcccagcagccggactttgatcagtttgaggagtgctccgacgaggaatttcttgatgatccggaggtgccgagcacttcacatcagacgaaccctcatcagcgtcacccgccggcttgaggaaatcagtgccttgacaacattaatccatccatcgatcacaatcgactgatccaagtattcattggtgatcattaacgcagatcgttttgagccaatgaattttttacactgtatttttatgctcaatttaaattgcgagaattccgtcgggggcagtaatctttggggccaacacataaaaaatcaatgtatgaaaaaaaccggaaggaaacaaaatatttttaaaattatatttttattccaacaaatttgaaatttgtttttgacatttctttaaaaggtcaacattacaaattata

SEQ ID NO: 53959 - DNA, 416 bp, Heterodera glycines
atgatgtttcggcagcgacgttttggagtgcatcgacggggacgacgaccccagggggtggcacgtacgacgtacctcccgacaaatcaaacaaaaaacgagaagggcactaacgtgccgtcgcgcgtcccatcgtttcggtgttggaccgttcaaattgctcaaacatggcaatcatttgcgtttcaaattggcactcgctcattgccaatgtgccattacaatcatcatccttttgatcttcttcgtcttgttgttggtgttgttcatcaaaaagagcaagtccaatggagccgacaaattgggacaatgccaagtcgaaaaaagtgaattattttaaaatattttagctttaagctaaacgatttcattgactaatttaaaatatttaaaaaaattaaaatttggggaataaa

SEQ ID NO: 53960 - DNA, 1419 bp, Heterodera glycines
atggaatactgtaactgctcaattcccacagggcgtccattgcccagcgacgcttccggtcactttgtcgatcagtcggacgagcaaattccacttgatcagtttggccaaccgcttggccctgacggacttccgttgatgaccaattcgcgtggcgaatacgtcgtgcacagttcgcccgccattcccacagcttcgattgggccaacaacggtgccaattgcgttgccatttccggcactttccgggcccggactaaaagcggaggcagaaaaggaggaggaggagacggaggagggaatgccacccacggacagcacgggaaggctggtgttgccggtgatcagcgcggacacgggacaactgatgccgcgcaacgaggagggacagttcgtcaatgcgcacggagaggtgagacaaaacataggcaacaatagaactgatcagatccgcagagttgaaccgggagagagggcaaagactgatcagactgaaaaaatattaagactggtagtagttgatcagacctgggataaaaatgctttactcactgggaggggatcagactgattaggcggatgccagaaaagggtcatgaatttgggaactaagctgaaatttgcaagaacggcttaatttcagaaaaagttatttgaaggtcaagactggtaaattatttctttgtaactaaaatggtaatttttcctgatcggacacgagacttaccaaaaacggtgcctgtgttcccagttccgttgctgatccgacaaaggtgacattggttaggagaagttccgcttttctcgactctcgagtcgtgaaattttttgcgtctcgttctgtctaatcacccttctttcccctgtttttttaggtgattccaaccgacgactttggtcgtccgtttgattggcatggcaaagtgctgccgcgcaacgagttgggccaattcgtgttccacgatgctgtccaatggccagacgaccatcaaacggcgccaccggaagtcggcgacgctgcgtccacggcacttttggcgcaacgcgagcagcaacaaatgctgcagcgacggcgcaaccaaaccgcgcattgttttgtcggtggttttgtcgaactgctgaatgtgttcgacacgagtgccaacgtgaaaatcctggattaccgcatgatgaaggaggcggtcaaggtcagcgggggaaatggagaagcggcggatcagcatgtgtagagagagagagagagagagagagagcggacagagtgacagacagtgaaggaaattcatgtctttttggtctctgatacagtaatcgtgataattatgatagtgatcaatcagagataaaggacacggatgctctggacaatgccaatccccgacgcaaacttcagctgattagcagcagaattttacatgga

SEQ ID NO: 53961 - DNA, 1952 bp, Heterodera glycines
tacacaaacaaaattaaatgaaaaatcgggctgctggcggtagatgggaacaaaattgacgtaaaattcatgataatatatttgaataaatggaatgataataatgtgcgaagcattaagacattaattgatcaattaggggatgaaccgttattaaaaaaatcctattaatgatgcgcgttatttaaaaaataaaaacaactttactatcaaaaagctttttagcgatttccaaatatcttctctattagccttggaaatatcaaaaaaaaattttgtcaaacttctaaaaagttatggccaaaaatgtcgcaaaacgaggtttttactttttttaaacttaaaattcttttgcaggctaatagaaaacattggttgcttttgaacaaagttttaaatagtttttgttaggaagttttcattttgatgattttttaattatcgccaattatagtgattattaggcaccgagcaagtatttattgatcatcaaagtgactgatcggtgatgggcggacgaatggaagggaccgatcgccatttgactaaccgtatccattaagcatgcaactgtaatttgcactcgcgcaagtgtcgcttcaacgccgaactttaccgtctcagcggataccaaagcggtggcgtttgtttgaactgtcgccataacaccgcgggcagaaattgtcacgtgggcaattgaacatttggcactttgaccttcctaattgctctttctcccctcctacagtattgtcgctttggttattttcgtgatcagagcaaaccgatcactcatcggaaggcgtgcaaacgtaagaaaaaggaacacaacaaattaaggacaacgtttttttcagcctgtctttgccatccgatcggctcattgtcgcgcaattgcaaccaaacaagcggacaatgcatttgcaagccgggggtcgacggtaattgggcaaaggcaaagctaaggccgaaccaattcgattgtgccgggttcaggcccgacttgcaatcgatgtgccaagggcttccaacagtccctgtcgccggacaccccttgcgtccgtaagtcgccccttttgccttttgcttcgccatttcaacgcgtctgtttcaggccctttccctcctcgcccgcccaattcactcgccaaatcaaccgaaccaaatggtaataaatgccaaattccgttgcatttgaacttgttcagcagatgaatgtgagaagtgccgtgcgtctccaagtcgtcttacccttaaaaaattctgtcggcgcgattacggtaatgtttctattttgttactgtcctttttcatcaattattttaaaattcaaattcagccctgaaattacaactcatcagccgtgaattggtggaggggtgggccaaatttcgggcccaactcctcgacgagccgatcaaagatgagctggggactcttctcggcgcggagatgggccgcggcactgaaatcagcctttggctgcccaatcgaaatttaatttgcaaatgcccacggctgaaagtcggccgcaaataccttctgatgggtcagtcgcttttgaaagtgccaaagcaaacggaaaaggcggaacaaaaagtgccaacttttccattgccttttgcctttcacttttggcactttttcctttccttccaataatttcgcatttctctttctattggctgttctttgctttgctgttttcctaatttgccaatttcagctcgtcacggctcatttaaatctgatggcaaaggcattgtgaaagaattgggcgttgaatttggcggaaaaggtgaaaaatctttggcgaagccttcgtctgcgattgtttttgatcggcacgtggtgatgatggaatgggccgatgaagtggcggaaagggcaacgcgattcgcacagaaacggcactttatggagaaatgccaacggatgagagcaaaggaaga

SEQ ID NO: 53962 - DNA, 876 bp, Heterodera glycines
atgataaatcttcaaaatgttgacgattcttccgtgactgatgataaatcatcaaatgttgacgactgttccgtgactgatgataaaccttcagatgttgacgactcttccgtgactgatgataaaccttcagatgttgacaattcttccgtgactgatgataaatcatcaaatgttgacgactgttccgtgactgatgataaatcatcaaatgttgacgactgttccgtgactgatgataaatcatcaaatgttgacgattcttccgtgactgatgataaatcttcaaatgttgacgattcttccgtgactgatgataaatcatcaaatgttgacgactgttcagtgactgatgataaatcatcaaatgttgacgactgttccgtgactgatgataaaccttcagatgttgacgactcttccgtgactgatgataaaccttcagatgttgacaattcttccgtgactgatgataaatcatcaaatgttgacgactcttccgtgactgatgataaatcttcagatgttgacgactcttccgtgactgatgataaatcatcaaatgttgacgactcttccgtgactgatgataaatcttcagatgttgacgactcttccgtgactgatgataaatcttcagatgttgacgactcttccgtgactgatgataaatcatcaaatgttgacgactgttcagtgactgatgataaatcatcaaatgttgacgactgttccgtgactgatgataaatcatcaaatgttgacgactgttccgtgactgatgataaatcatcaaatgttgacgactgttccgtgactgatgataaatcatcaaatgttgacgattcttccgtgactgatgataaatcatcaaat

SEQ ID NO: 53963 - DNA, 993 bp, Heterodera glycines
atgcctcgggacgaagcagagaatgtgcgtcaagcggctaaaaagcaccgaattaggaaactgtacaatacagtacatcaaattgtcatttggcaatgcaatagaattttttaattgcctatcctaaaaattcgataatttttgcaaatacaaaaaaacacccaaaaatgttgtcaagtattttttggcttttttttggaaattcagcaaatttagttttcagtaacagcattccaaacagatttttcttgaattttagatatttttcaattttttcccaccttaatgtacaggtcaggcactgttgttgctgctgctttacgcctctgaacattctccgcactcatcaactgttcatgctcaacaccagcaacattgaaccttattacaatacattagcaaagcaacatttggtttgttcgtaagttttaaatgttaaaaataggtttcataaataatttaaaaaattgtttttttttgagttcctataggaaagtgaccagcagaaaaaaggggaccatcactttgtgaagttgggaaaaatcagtaaaaaaaaagtaagaaatcaaaagtacagtagcaaattaaaaaaaaaatcaaagaataaaaatcagccaaaatcttaaacttttttggaataatcaatggggaaacattcgaataaatccaaaataacatgataaaacatgtgttgttaaacccatctaacaatcagcactttttctgatcacttttggcgcataggcaaaacaaaaaaaaaaggcatcgaattcaaataacaaattgatatagaaaattcagtcactttttttttaccacgcaatttcgggcccaagccctgtcggattttggtacattgcatgacaagtggcggacaaattcttggccatttccatgtgcagtgatggcatgccatggtgatggccaagtgctaatgtgccagccagaaaacagaccaaatgatcctgggcgagggcacaaaacaatgtaata

SEQ ID NO: 53964 - DNA, 1215 bp, Heterodera glycines
  unsure (1)..(1215): unsure at all n locations
ggttgatcgatgactacaaaaatgcaattgattccatgcacacgcgtctttggcgccattcaatgccaaacgcgttgcattttgttggcgaacttttggccgttgatgtcaaattctccccaaaaatggttagaaaaattcgagtctcactgggcgagttagcttttttgtttaaaataattaatatgtttattattacattgttttgtgccctcgcccaggatcatttggtctgttttctggctggcacattagcacttggccatcaccatggcatgccatcactgcacatggaaatggccaagaatttgtccgccacttgtcatgcaatgtaccaaaatccgacagggcttgggcccgaaattgcgtggtaaaaaaaaagtgactgaattttctatatcaatttgttatttgaattcgatgccttttttttttgttttgcctatgcgccaaaagtgatcagaaaaagtgctgattgttagatgggtttaacaacacatgttttatcatgttattttggatttattcgaatgtttccccattgattattccaaaaaagtttaagattttggctgatttttattctttgattttttttttaatttgctactgtacttttgatttcttactttttttttactgatttttcccaacttcacaaagtgatggtccccttttttctgctggtcactttcctataggaactcaaaaaaaaacaattttttaaattatttatgaaacctatttttaacatttaaaacttacgaacaaaccaaatgttgctttgctaatgtattgtaataaggttcaatgttgctggtgttgagcatgaacagttgatgagtgcggagaatgttcagaggcgtaaagcagcagcaacaacagtgcctgacctgtacattaaggtgggaaaaaattgaaaaatatctaaaattcaagaaaaatctgtttggaatgctgttactgaaaactaaatttgctgaatttccaaaaaaaagccaaaaaatacttgacaacatttttgggtgtttttttgtatttgcaaaaattatcgaatttttaggataggcaattaaaaaattctattgcattgccaaatgacaatttgatgtactgtattgtacagtttcctaattcggtgctttttagccgcttgacgcacattctctgcttcgtcccgaggcatttgaaggtgggtggcactcgatgngagag

SEQ ID NO: 53965 - DNA, 641 bp, Heterodera glycines
  unsure (1)..(641): unsure at all n locations
tcaatggagaaaagagtttctggacggccgatacggatccaaacaaccaacccctccttccaccccgcgtgccccatcgcccagcttcccaatcccggtcattgttggtaattttgaatttgttttttggattttgcaaatatctatcttgacaggaaatcgtccacaggatgaaaattgtttggtttttccacaaatatcttgtctgattttttccattttagggcggcagatgttcccaaatgacgatggatacgaatcggaagatgatgaaattctcttgccacctccgccgatccccccgcaacttggccaccctccgccaaatgtgccggtaatttcggtctcgcttttcgttgctttttctcaaatttccgagtgcttttttcaggcagttcgagttcagccaatgcatgttgggcagcagcggctgccgctgagagtcctgccgcaaattttccaccctccaccanatgtgccgggtaattttgggtctttctttcgattgctntttctcaattcccgagtgcttttttcaggccgttcgtgtccaatcaatgcagcaacccgtaccaatgagagccgtgccacaattcctcaccttccgcaaaatgctcggtatcttgagcctcgtttttcgg

SEQ ID NO: 53966 - DNA, 1491 bp, Heterodera glycines
atgaaattctgtattttattatttttatttttgattgccctaattattccaattgaatcagaaaagaaaaaacttcagcagaaatcatttgatgaaatatttggagaaaaatgggaagaaaaagaagataaaagggaaataattgaaaaatattataaaataaaagagaaaattaagcaaaaagggagaaaatattcaacaaatgaatggagaaaaattgaaggaaaaatagcgaaaaaattggggacaaatcgccaatatatttataaatggattaaagaatttggtcttcaaaaatgcaaatcttacaaatcaaaaactgatgaaggaaaaatagaaattgtactaaaattcattgaaatgacaaaagaatataagcaaaaaagtaaatattcacaaaaggaatggaaccaaaattatgccgaaatttgtaagaaaattggagttagcaaaactacaataataaaatggaagaaacaatttggcattagcaagaaaataataacgaaggaagaaaaaatagaaaaaatgaaaatatattgggaaataaaaaaagaaaatccgaaaatgagtgataatgaaattgctaaaattgtgaacacttcaaatgcgaatatttgtaattggaagaaacaatttggagaagaaaattttgaaagattgaattgatgcttctaaaaattcgataaatttgaccaaaaattttaaattgaacaaactaagacaaataatctttcgcttaattatttaattttattcgtaaatgatttttatttaaattctgtcataaactgttgctttatttcaaagaaaaaaaactgttgaaattttaaaaattgtaatttacaagaaattataaattttttaattttttgaaacaaatcaagtagcaaagataggccagatttaaggccatattgtcatattcggattcttctggtcttgttcagaagaacaatttgagaagtcgcttttgttgtatcagttttcatttttgacgattaaaattttgagaaaattagtggccaattaccaattttggcatggtcgtaaaaaaattgaaaatggttttcgcgggacaaaaaatatgttacaacctaagtatttttagcagaataattctgtgttcatggttttaaacaaaaaaagtaggatttgaaggattggaccaacaaattttcgaacaaaaaaacaacaaaaataataattcaattcaaaaaccaaatttcgcagaattcgtttctcagtcttggagcaattcagtcaactggtcaaataagcgacagtctttgagcaatttcaacagcttttttgtaaacttgctttttattgaagtctcagtctttgagcaaccttcaaaacgtcggcggcttatttgcttcaagcgataacagtgagcatcccaagagccaggagcgccatgtaatataaaatcagctttatattgatgaaccctaacttaatccttaacaactttacactttaattcaa

SEQ ID NO: 53967 - DNA, 303 bp, Heterodera glycines
atggggagggagggggcgaccgccggcgcgcgctgcgaagggcacaatgtgagggtaaaatttaccaccacatttggtgcctgatactactaaccagaattattgtacagtttggagattattttgcttcagttcgaattagactagattttgctatcacatttgctcataagaacatgaaaaatggtgttaggtatttacaaattcaagtcaatctttgcatttacgataccgtcaaaaattacaaaatgaaaaaatgccacattgggaaaatatgaccaaatattgttgtataatcttata

SEQ ID NO: 53968 - DNA, 780 bp, Heterodera glycines
atgaaattatttccgttactattattaattattttatttttaattgtcaaaattggatcagaaaagaaaaaattgcaacaaaagtcatttggcgaaatatttggagaaaaatggcatgaaaaagaagaagaaaaacgaaatgaactcaaaaaaagagaaataattgcaaaattcaacaaaataaaagagaaaataaagcaaaaaggaagaaaatactcaacaaaagaatgggataaaattaactcaaaaatagcgaagaaattggggacaaatcgaaacaaaatttatgaatggattaaagaatttggtcttcaaaaatgcaaatcttacaaatcaaaaactgatgaagaaaaatttaaaattgtgcaggaatttattgaaatgacagaagaatataagcaaaaaagtaaatattcactaaaagaatggcacgaaaattatgccgaaatttgtaagaaaattggagttagccatggaacaatttacaaatggaagaaacattttggcattcgcagtaaaataacggagaaagaaaaaatgggaaaaattaaaaagtattgggaaataaaaaaagaaaacccaaaaatgagtgacaaggaaattgcaaaaatgatgaaaattaatagaacgaacatttcaaaatggaagaaactgtttggataaaagaatcgttgaagattgataggatgattataagaaaaattggataaatttgccgaaaaaattatcagaaaaactatgacaatttctagtttttttttcaaattttttgtatttgta

SEQ ID NO: 53969 - DNA, 656 bp, Heterodera glycines
atggcatcgacaaagccgaacacactgttcaacaagatgaggaatttggtgggcgaacagtccagcaatatgcttggcaacatcgccggaggcggcggcggcgccggcactcaactctcgtcccaacaccgaccgtccacggcacaattccaccatttcaacgcgggggttgggttttcagtcttaaaaaaattttgggatagaaatgttttaaaaatctaactaaccttctcttttatacataaataaactgaggcttcccgaataaacaattctcaaaagtaccccctggggcggaaaaattttaaaaagatagcaaagctcgttttgtatgccaatagaatccggacgggaccggactcccacccgggactttcccggatcccggtcccggctttttggaaagaaggggcaggaccggatcccgaggttatcaatccgggagacatgattcaaatccggtaatcctagcgtttatatgaaaaatttcaccaccaccatcaatttctcagcaggcatcggccggaggcggcaccgccgccggggccaacaacagtgcccagcttggccaacagtacgtaaacttcttgcgcgcctcctctgaacagcttcagcaagtgattgctgatgaagtgtgggtgaaccgactgttggaa

SEQ ID NO: 53970 - DNA, 760 bp, Heterodera glycines
gcatttgcctggttttccgatttgcttgccgatcactccgaaattttttggtccctctattccgtggatttggacgccgcgttggagctgcaaccgcccgactcgtgggactcattcccgttgtttcaactgctcaacgactacctgtgcattgatcgtaagtgatcggagtggccgagaccaggctcgagatcatgggaatttgctttcgaacaaaaaaattgagttggagtttacttgacccaggattatagcttgatattttgaattatggaactgaattcgtcccagaaatcgagaccgagaattcctgtcgagaccaatgggaataaaaattgtccaatcaatccgcgaattctcgagtcaagagactcttgaatatttaattgtctgtacaaaattttatgccatacttttttttaatacgcagaaaacttgcggatgggcattttccacagcaaattgatcagccaattttctccgatggttgtccgctacattggtaaagttttcctactgtttttttaaaatatatgtaatcaatgatatgctagcatgattattttctgatcactcacagatttgatggagcattcgatcagccaatcgattgagaaaaatttttgccgcgagaaatgggaagtgcgcaagtgagttatattaattatctttatgcacattgaaacctaagcgtaatgatcagaggacccctgagaaagatttgcgcgatcacttagcgatcaggggcctgaccaggtta

SEQ ID NO: 53971 - DNA, 812 bp, Heterodera glycines
atgcaaatcttctcgtgcgctgagttttcaatgcaaaatgtggactatcaggcagtcaacaattgctaccgctacattccggtccaaatccgcattgagaagaagacgctcaacgcattcctggatccggagcttcacatcctcacagcgtcatcaccattcgcagattgtggaaatttccgctaccattatctgcagctgagccagaacaattggatcaaaatcgacacacgcaccgctacgatccagaaaatcgactccagcagcatctctgagatccgcgaagcctctggagacaaatcgttgttggaaatcacgccgctagtttttcatcgatgtacgatcgacaacgaaacaggcgaagggctattcgcgcacttggatgaatggctgcgtttggatcaatggaagtcgaaggagaaggagcacaaaacggcgcgtgcgctcacactgggagctctcccgaacggagtgattggcctcaccgaagaatggttcatggacaaacttcggctgctcgtctcctactggacaacggcatgctgcatttacgtcacattcatgtgccccccaattgtgccatttttccctttgcatttcccctcgcattttgtccccattgtcacaatttcccccctttgtatttctcacacatttcttatgtatgggtttaattacccaagtttgagtttgagataaacttgcggagtaattttggtgcaaattcttggggcggcaaattggcaattggcggcagcaaatcggaacaaacggcgcggacccctcccccttaaagacaaaggagtattaaa

SEQ ID NO: 53972 - DNA, 753 bp, Heterodera glycines
atgagtccaaccctttcaaccgcgtcgcattgccccgtggtcagtgtttccgcattctcttttttaagtgttctgtttattttggaccttttcattgccctcgccgaacgcagcggaaaacgcgtgagcgaaaagcgaagggaagtgctgagaaaggctaatctttcctggtgattcaccgattaattagcctcgggtgatcagttgttctgataatttagcacaatttatgccacggatgaaaagccgagcttttcgttgcgaaaaagctgcgcaattcttttgttggaacgcgacaaattgtgcgtttttccttaggcgaattgatcaattaatttattggatttaaatttaattaggcaaaattggagccaatacatttttggagacaacaattgtgagggcaatgatggggaaaatgatggtcaacaattggcggatggaagcgaatcattgcgcgaaacgcaactcttggcctccattttgggccatttgcaaaatgcgcttgaggggcgaatggcaaattgcgtggatgccgaaggggaaaacgtagcgaaatggcaaattggggagaaggaggaagaagaaaaggggcacgaagaggaagcgaaaatggtggcatcgttgtgggaggaacaagtcgaaattgtgcgcggaatggcacggcatttgacgcccattttggacggatggagcaaaagcggggggactgatcagaacacaagtgacggatcagcaacaggccaattctga

SEQ ID NO: 53973 - DNA, 1239 bp, Heterodera glycines
atgcacaacccattcgggctggacacgctgaacattgattacaacgatgacccattggcacatttccaagtgcatcaaataaacatttcgggtaagtaaaattattaaattaataaaaatatttagtaaaatataattgtgccaaaaatagtgtcggtattttggtttggatttttcaatcaaaaataaataaatcgaaaaatttttcaccacataattcggatgaatttgtttattttaacaaagtgcaaattaaaccttttctgaaatagaaggcattttttaaatgatttcaggaagtgcagcaaaagtgcatataattgctcccggagacaaactcccattcgcaaataactccgtcgattttgtgatcaattcgcacgtgttcgaacatttttatgacccaatcagaaccattgaggaatggcttagggttgtgaagccaggtcattcaaatatacaatgtttttttaatatttttaaattgaaaaatgaaatttttaataaatataaacattaatttccagtgataattttttttatgtaaatacatgtttttttcctggattctctatagcctaattagtagaaaacactttcttttttgtgtttgcgaacaaaagttgggacttttatttacatattttcggaattttctacatattacatatgtacatatttttatacatattttggactttttagtacatatttcgcaattttttcgtacatattttgggaatttttgagaatttataaaaaaaattatttgaaaatgtgcccctaaaaaatcggtttttttccaaaaatcagatgtcattaattttttaaatacttaaaagtgattctaagcctattttggtccttttaacggcattttatgattagttcactttttacgaggaatttttttttccaaaaaaagcattaaaaaattttttatttacattttttagtacataatttggaggttttaattagagaccggaaatttcaaatttgcggatgccgctgcgggattggtactgaaaatttttgcgggacgggatcccgcaggtttaaatcccgcatttcccaaaaaatgcgggattgggattgggaaaccgcaaaatcccgcgcgggatcccgtcccgcgccggtctttagttttaatacatattttagcattttttatacataatttatttacatatttcgcgatttttcttacataaaaaatgatccctattaattactata

SEQ ID NO: 53974 - DNA, 864 bp, Heterodera glycines
atgcccggcgcagctcatctggcccgactcatccaaggtcactcgctcaaaagccaaaacgctagcctccgttctgaccatttcgatttgtgcctttctgagtggctctgctccagccaacaccacatgcaagccgaaacgtggaaaatgcccgtcgtcccacgcacagagaggtcaggcgccttcgggcgttcaactcctgctgtcctccagaaaatggtctctgcgcgattgatgatcaagtgcccacaagttccacatggttgctggtgtgccaagccggacaagcgcagaacaactcgtaacatgtgaccgacaaattcttcgactcaacggattttgttgaacactgctcatttgtgatccaatggattgtgccctctgacacgaatacaccgacgaaagcgactatgcatgatctcaattcaggaagctcaagaagcacagagaaatatgccggaggatgacagaactgatactgccgcggggagtgtcggcaaagcggtgccgacgaaagataatttgtattaaaataatttataatttattagtcattcaatgtgatctttgaaaattgtgattttattccctcctttgaaacattttgtccatttagcattagtcactagagaccggcgcgggacgggatcccgagcgggattttgcgggatcccagtccgcaatcccgcattttttggaaaatgcgggatttgcgggattaatcccgcgggatcctgtcccgcaaagaattttgagttccaatcccgcagcgggatccgcaaatttgattttttgtgcgggattatgcgggattttattgattttttgaaaatttttctaagacagaatgccaaatatttttaa

SEQ ID NO: 53975 - DNA, 52 bp, Heterodera glycines
tcccacagtccaggaaaaaaatatggatttccatataattggactccctagt

SEQ ID NO: 53976 - DNA, 1344 bp, Heterodera glycines
atgcccctccgatcgtccgctgaggctcgacgttcggatagagggcaacccggcgccggaagtcaaatggctgaaggtgcgctaattgacactaatgactggtcaatggccgagcaatttgacaggactggcgccctctggtcgagtcgtcgcgagtgcacattgtgcacgagccgggccttgacctccggtcgctgctcatcgaccagccgatttggagcgattccggcatttattcgtaagtgctaattgggccatgaattaatcactaatgggcaaaagagcattcattagttggattaaattgggtttacgaagcacttgaatcttgttttgttttttggcatcaattctgagcgttttcagttgccttgcaatgaatgacgctggccaagcggtcacttcgtgcacaattaccatcgaaggtaatggcaaaatgtcaaatgtaaaattattggccaatttcagccgccgaaacggatttcatgacagacataaagcttcgggcgttgaagaaaagcataaaaatggaacggggcccactacgcgacatttacgacattcaggaggccgaggtggaggagtactcggccagcgaagcgacctctgttcagaacggaagctaaaccaattaattggccattatttggaaccatttaatttggaagaaaattaaatttaatttgggggaaatattttcggtaaatactttaaaattcgattgattaatttgttggttcacaattttatttgccgaatcagcgcaagttttccggcactttttccgtggctcaaatttctgtccaaatagcaaatgttcccccgccgcccaccgcccccacacatttctttgctatttttcatagcattattttggaatccctcctccacttggatagatagcagctgttcccctccccccttccgaatcgaatatccccggaggggatatatccgctttgatgagattgatccatttcgaccatcattttagatcaagctcggtggaaagcttttcgtttagtttcctgaaaatagcattcatttttggcaccgtttcaatgtgtgcctttttcatcaaagaaaatgcaattgacaattattacataattaattatctcattttctctcctctctctctcttccccatctttctttctctggcgattccttgttgtgttttatgtattgttatcgccgtcaattggtattgtttattgattgattttttgatccattttcaattgattttttctccattgtcctgatcggacttgactgcccaccgatcgaaattcaaccactcccatttttcgttgtctccgtcccatggttttgcgccaa

SEQ ID NO: 53977 - DNA, 1535 bp, Heterodera glycines
atggtttgcaaatgttgaaatgggtccaccggatgtggttgtttttttgcatttttttactagtcaaacaatcaaaaatatagattttgggcgtaactgaagcatttaaacgcgatgacaacccgaaaaaggttaaccttggagtaggcgcatacagagatgaccaggtaattttaaaataataatgttcgtgagattttattattattttttaaatattcattttctgtttagggaatgccttttgttctgccgagcgtaaaacaagccgaaaaagaattactcgaagcaaacctcgacaaagtaagtgataggacagtcaaattaatcttgatgcacttataaaatggagcagttcattctaggaatatgctggcattgccggtttgccggacttcaccgccaaggccattgaattggcgctcggaagagattctgaagttttgaaagcgaaacgaaacgcgacggttcagtcggtgtccggcacgggagcattgagaacgggcgccgaatttctcgttggtttttaagattttacccaatttttattgcctaaatagtgtaaaatgcactaacgctgatcataaatttgacaaatgcattttagtccaaatggtttccgcacaacaaagttgtttatcagccgacgcccacttggggcaaccatgtgcccgtgttcaagtgcacatcaaagcaaattaattgccaagtccaaatattcttgtcgtttaggtttgctggctttgaaatccaaaagtaccgctattacgacccgaagacttgtggctttgatgagaatggctgcttggaagacattctgaacatcccggcgaagtccgtcattttgttccacgcgtgcgcccacaatccgacgggcgttgacccgacagtgcgtttttatatgaaatttatttgattttttcatcattcctcatttttaactaacttatcacaatccggaatgacaaagaaacccctaattagccagagcaatggacaaaaatttcggatgcatgcaaaagccgcgatttgtacgtctttttcgacatggcctaccaagggtttgccactggcgacgtcgatggggacgcacacgcattgcgctatttcgttcaacaagggcacaacatttgtctagcgcaatctttcgccaaaaacatgggtctttacggtgcgaattattgtttttatacaattattgtatatcagaaatttggttttacgaattcaatcaattaatcatacctgtttttatacaataattttgtttttgttccaacaaaccctatatatgtttttttatataactctaaagccataaatgtaagtctgaataaggtaattaattgtacgagaaagaagagaatgctaacatttaaccaaagttacaaaacggtaaataatcaacgctttctcaattatcatattttttggcattgcaaaaaataaaaataaattatttttattaattttaggtgagcgtgtcggtgcgtacaccgtcgtctgtaaggaccaggaagaagcaacccgagtga

SEQ ID NO: 53978 - DNA, 986 bp, Heterodera glycines
atgcccggtgatgttgaacgatgccttgccgagactggaattgatgccgtaatgagtgccgaaggggtgctcaacaacccacaccttttcgatggcaaaaatccattttcatttgaggtaaactattcctccgaattaattgtaaagtgcatataatttattttttggttgcacgcgaatatttggagtttgccgaccgttacaaaacggggacaagcgcagttcgtgcccacctttttcacatttgtcattacaggtgttttcgtcgaattatttttacaaattattttgctaattaatataaatttcagttttctgaaatacgacgacttgcgagaacggaatgcgattatttgttcgcttagcgaattttctgagaacattgagaaattgcgcaaaaggttttagtcttttgtttaatttcaatttaaatttgaccgtttcaatttgaggtgtcagctcgaagttctcaccaatgcaaatcattccaacgacatttgttggtccgcttccgtgcagcagtgttgtcccaacttcgaatcactccaacaaatggtttttaattgagtccaattatttctcgttgctttttttagtccatcattttcaggttctgtccactccccacttcttctgcaagccctatgttcgtcaaatgttaaaatgcgctgcggaagcctcggaaaatggagacgatgtgccaaatttgcccgtctctgtcagtgcgtatcgcgagaagcggcgggcggagatcgaaaggttggcaaaagaggcgggcgtatcgaagaggcaaattcggaagagagagaagcggaagagggggcagacaaaggagcagaaccgaaaacagacgtacccaaagtgtgaacggtgagtggaacagattgcacagtccgtgttcaaatggtttgggttttccggttttgaatcacttcggtttcaattcccaacagcctccggttctaccccaattgacaattcccaaa

SEQ ID NO: 53979 - DNA, 73 bp, Heterodera glycines
ctgcaaccaacgaaccacttcaatggccgaagaatattttttaatcgctgcggctgccttcggagcaggaatt

SEQ ID NO: 53980 - DNA, 834 bp, Heterodera glycines
acttccgtcctcacagaagggaccatcattttgtctaaatggtccgacccgacgtatttcatccgcacccaaatgtacaccttcacggtgcgcaaccccgacgaaatcacccacggggccatcccttcggtgaagcggcaggggccctattcgtttgaccaaattcaaaagcggaaaatccaccaaattgtcaatggaactgtgcagttcgagacgctgcagtcctaccacttcaacgaggaggccagctgtgccgagtgctttttgtacaaccgaatttggatccccaatttggtctatcagaaatttgtggaggcggcctccaaaccggcgatgagagtgggttttgcccgttggcggttcatttgccgcttcgtctgcgctttgcttctatcccggcatttccccttcagcccgccctcgccgcagtggccatgcaaacgccctttttggaggtggaagtggccgagttgctctacgacggctacaaggacccctttctggaccaaatctgctctttgcccgtcgtaaactttgtctgtgaacaaattctccatttgccggaccgaatcggacttttctataaagtcagacatataattagcaaattttaattcaacgaataaataatttcagaaaaatgggacggcgaacggagttttcgttgtggaggacggacacaccgaaaacgcggagagtttgggcagaattttgtcgtggaaaggctccaaaagccttcccgactattggtgggaaggggaccaagcactgctaataaacggtgggaatgagaagcaatcgctacaatcactgggccattcgcctccttttgag

SEQ ID NO: 53981 - DNA, 975 bp, Heterodera glycines
  unsure (1)..(975): unsure at all n locations
atgagcgctaaaattatcagagtgccgaaaatcgcatgtgatctaagcctagaaaaaaatggtgtaagtaaaaatcgtaattacgctcaaaaagcttctcaaacaattttagcgcttccaattccttctacaatcgcctttatacatcccattatgagcgctaaaattatcagagtgccgaaaatcgcatgtgatctaagcctagcaaaaaatggtgtaagtaaaaatcgtaattacgctcaaaaagcttctcaaacaattttagcgcttccaattccttctacaatcgcctttatacatcccattatgagcgctaaaattatcagagtgccgaaaatcgcatgtgatctaagcctagcaaaaaatggtgtaagtaaaaatcgtaattacgctcaaaaagcttctcaaacaattttagcgcatccaattccttctacaatcgcctttatacatcccattatgaacgctaaaattatcagagtgccgaaaatcgcatgtgatctaagcctagcaaaaaatggtgtaagtaaaaatcgtaattacgctcaaaaagcttctcaaacaattttagcgcttccaattccttctacaatcgcctttatacatcccattatgagcgctaaaattatcagagtgccgaaaatcgcatgtgatctaagcctagcaaaaaatggtgtaagtaaaaatcgtaattacgctcaaaaagcttctcaaacaattttagcgcttccaattccttctacaatcgcctttatacatcccattatgagcgctaaaattatcagagtgccgaaaatcgcatgtgatctacgcctagaaaaaaatggtgtaagtaaaaatcgcttctcaaacaattttacgcttccaaaagcttctcaaacaattttagcgcatccaattccttctacaatcgcctttatacatcccattatgagcgctanaattatcagagtgccgaaatcgcatgtgatctaa

SEQ ID NO: 53982 - DNA, 828 bp, Heterodera glycines
atgagttcactaatttggcaaataggtttattcaataaattacttgaaggaaaagctgagtgcacggaaacagccgaaatgttaatttttttaaacaaagcacttccggaaattaattacaaatactgaaatatttaccctcacttccatttgttgccaatttgttgctagttgtgttttcgaatatgaaaaaatttttaaaaaatccgtatccgtatacggatccgtatttttcctggatacggatttttacggagtacggattttccagatttttgtccgtaaatccgtatgtgtatctagtccgtaatcctgatcctgatccctattttctcaaaatgccgatctctaattttaatgtcaaataaatgaaagaataatagccgaagtaataaatatagaattggatataataattcaaattattctattcaattttatatggcttattcacattaaaaatgtttgcttaatattttatagagttgtgtttataaatattttaataattttatgttaaattttagtatttttctttgtgttttaatttattctatgaaaaataggttattttaaatttattgataattaatattaattttagttttgaattattatcttttcacatgtcactttgttttgcttttatttaattttgaaattgtttttttttaattttttgatatcattcccagtcacaaatgaccaaaattaatttatatttttattgaaaattaaaattttagaaatattttattcctactgcttaaataacaaatgagcagaaaacggcatcaaagatttagatatgacaatattaaaaataaa

SEQ ID NO: 53983 - DNA, 2521 bp, Heterodera glycines
  unsure (1)..(2521): unsure at all n locations
atgacgaaggtgtcttatttactttcatttaggtcatttaggtcaggaaacagtctgcagtggcccatttgggaacaggacattgctcatttttttttgccaaatgccaacaatgctatctctttacaacttggtaatgccaaaaaaagtgataaagttgctgttataattagggaaaagaaaacattaaaaatgatttgtttattcgttttccctaaatttggagaaaaaaaagctaaccctaatgccaagaagcttcatttataaaactaatcaaattgcaaaaaaaaaactaataaggaccaaactttttatgattagattttaattgaattttttaaatttaaaaggaattggtggaaagtgcggaaaaattatttttatgcttgttaatagattttgcaaaaaaaatgaatgatttttttttgagtttttttagtaaaacaaataaagaggttaggtaatgcggtgccaggaagaaaatttgggttttttttaattcgggtaattttaacttgaatttttgcagactttttgacaaattgtcacggccttatccaacagttgcttgccttccaattcaatgttggcattatggaaacagttgcatgggacctttcgttgagcatttttcgcgcattgcccacaatcaaaaaatttggcatttcacaaagcgcaacaccgacaatagcgcaatggcacattttgggttatgaaaaaattgttggcgcaatgccaggtgaattaatttggcgtttttttaaatttcggcacctaaaacatttttcattaccaaaatttcgaaaatttccatcttttcttcattaaaaaaatctttagctaaattaaatttaaaaattaattgacattttgaaaaaattttttgggtaattaattaagaatatgttttcttactaagaaaagttttaccgaatttttggtcagaaaaatatataagtcgaataatttcattagcacctcaatttgcccaaataaaaaaatcttttgaataaaataggaaaagatttggcacgaattggtgaccacaaatttgcaactgaaaatgccatcaaagtaaacccgaattattttcgtgaacgcaatgtgaattcgtatataaagctanatgaacaggcaataaaaacagtggtaatttatttttatccttggattttatgggctttgcatcttggacttttcaataaaattcatcaaataatgtgtgatttttggataaatatttttaataaagtaattataatttttaaataattttttatggtatcgaaaatttaaaatttattagcattttcttgaaaattatttttttcaaaaatgccgtttttataatatcataaaatgaacacattttaatcaatttttaattgataaaatatattttaagtactcattttaaatatgtatgctttatttttacaaaaataaaaaattaattgaatttttttttaaattttaggaagaaaagtttttggaagcaattcgccaagaaaaactctcacgaaaaatttttgaggatattcttattcaagaaaatttttctgaatgggaatttaaacatcggatggattttttcataacaaatactcaaccttttctcgattttccaattgttgagcaagaaattgcaaaagaacgatcaattaaacagaaaaatcgtattatttttattggcggaatcacaatgccaaagaatggggcattgccaagtttgagtgaggtaatctcggaaaatcttgtcaaatagtttgaacaacaacctaagaattcataaaaaattaaaagataattggaaaatggattttttggtttcttgaaattgagaaaatggttcctaaattaattgctaaatacattcaaaaaatccaaatagggggaaaaggtaaaaataaaatttccgaaattctctctgatcgaatctgtaaaaatttcaaagtacgcaataccataggcgttgtcggcgaaaatttttgacttttctccagtttttttatcaaatttattaaattgcgggaattggtaaaaaaataggtgcaaaaactctgtaaatttttttaaatattttttttttgagcgtttaatgcaaatcattcacagagttttacacaacaatttcaaaatatttacaattaaaaaaatatttggttcgacggtgccgacagggccctagaaatttttgaaattttcgcttaattattgcaggataacaaacaaatatttgaatctgcgcgcaataaaaatggtggcgttgtgttgctcagttttggctccgtggttccgatgcatgatgacgatgcacatgcagtcgcattcaaaaacattgtggtcaacctgttctccaagcagtacccgcagatgaacatgatcatcaaatggggcgaacggccaccaattggcatgggcgaccaatacaaaaaaatgtcggaaaatatttatgccaaggcttggcttgaacaatcggcaattcttggtattgccaaaatggcatcttgaacaaaattta

SEQ ID NO: 53984 - DNA, 524 bp, Heterodera glycines
atgccgaaattgttcattacgcatggcggacaaaacagtataaatgaggcagtgaaatttggcgtgccgcttcttttattcccattttttgccgatcagtttaacaatgccgaagcaatggcggcacgaggggtggcaaaagtgcttggtaaatttataataaaaattatttaaaagatctaaattcgaaatttaagacattcgttccaaaacattggaaaatgagttggctgaagcgctgaatgaaatattcgcaaattattcaatgtacaaacaaaaaattgaagaattgagcaacaagctgagttcaattgatatagctaaagaatttttgggcgcatttcgccaactacgaaaaactctttgacaagaaaatagaagcaaaatttcttgaaaacaattatatttcttagattgaaaaacaaaatttcttgtaatccactatatatctaagattgttcgctagcttatcattattatgttgtaatttgccttacattttctattcatattcataatccaaa

SEQ ID NO: 53985 - DNA, 1484 bp, Heterodera glycines
atgatttttgttcatacatacatcatttacattggccatattctgtttgtcgagcgtacaatggccacatttatggccaataaatatgaaagtgtcaaaaacaattggttcagtgccagttggttcatcattttggtaattgttaattgatgtacttatttattaaagaattattttttattttagactgtttacagcttcattattggtttggagcaagcaaataatacaaattcattatcaacatttacgactatttcaacgtttttatctttggtcatcagttttcttgaaatttttgtaatcattttttatttaattttagttttttatttttgaaattttttaaattaaatttagacattttcaatgctgagtaaattcaatgaaaaaatgtttaacaaaaaattaaaatgttcaaacagcaatgggcataatttgactgaacgttatcaggtcaaaaaaaattaatattaattgattccgagttaatttgtatttgaaatttttagttgactgaaaacatccgaacaggccatcaattatggccaacttttctacttcatttttcaattataggctggacttccatctttaattttttgtattacataataatttattctttatttcttttctttgtgcaattcaattatttatttttatcattttaccatttgttaattgagtacactataataaggtaattaaaatagtaattatttcattttctatttattttaatttagtcgtcatccaatcttgcgccaaaatgccgtgcaaattttgaaaaaaattttcaacaaattttccatgaaaattccatgtaacaatcgcgtcaatgataatgtaaaacacccgacaattggtcgaattgacggaagaaatttgccagaaaaacatttgatgaatgaaactgatcaacatttcaaaatattaaaagaactgtggtaattaggatttgggattgtgttttacagcatatattttgattaatttgctaactttgagccagctcgatttggaatatttttattaaaatttttcaaaatttttcaagaattccgtttcgggattgcctgtccccattacctgtcccaaaattttataaaaacttgtctcaattaatttgtatattttttattgatttgaatgtaaaattatcaaccaaaaacaatggaaaattctattttttttgtattagaaattatataaaaattcaaaacacattgcgttacaaatattttccattgtaatattttacaatttttttcattatttttaagattgtattctgaatgattaattatttttggaaagaccaaaaagttatatttttaaaatataactttttaatttattggattttataaaatccataaaaaatagtttataataattttttataactattttttttatcaaacaatacaaaatgaaaaatattttaatatataaaaaaatttaaacaatataaaaataaa

SEQ ID NO: 53986 - DNA, 608 bp, Heterodera glycines
atgtcaaattcatctgctgatgaccaaggagaagcatctcaattcatcaaaattggcatcccaattgttttgggtttgaatgtttgcgtttttgtcgtccaaattccgctttctctgctcaacattggcattctgtgccgaacatcgcttttgcatcgcaatttgaaatttattcttttcattcaaagtgttttattctgcacattcgcattgacattatgcgttcagtttctgattattgcattttatggaatacaacaatgggcctcttttacaccattactcgtaaattattaattaaaaaatatttttataaatatggattatcacaatccgtcataataatttccacttttttaaattttttatatattatttaaaataagagaatttttaagagaaaatacaaaaattatgagatgtatccattttttaaattaatttccgacttgaaaccctgactgtaatcttttttttcgtttaattctttttaaattaaaattattagttgtagatacttttgcctctgtgggtcttttgtcgtatgtccttttgtccgtggatcctttgtgcatgcaccatttgagccgtaaagccacaaaaataaa

SEQ ID NO: 53987 - DNA, 301 bp, Heterodera glycines
atgactgatcaatgccaaagagaaaagggagatattcgcctgataagagcaagaggaaacggagaagggacggggagaggaagcgatgagaaggaaaaaggcaacggaagagcaaaggaaccaaacgaaggttggcgcgaagagaacatttcgatttctcatagaaaagaagcgaaggacagacaaattctgcagcaaaagtgccacagaccaatcgaccgcaaattcaaacgcttatgggtcaatcggacgccggcgatcgcttctgttcaccgatccgaccgaggatgaccgcgcatct

SEQ ID NO: 53988 - DNA, 1510 bp, Heterodera glycines
tcttatcaggcgaatatctcccttttctctttggcattgatcagtcattttggctgtatcccgcttcaggtccctggccctgatcagctcactttcggtgtgcctctgctccgtccattccctttttcccctccgcgccctgcgcctttccgtcgccctcggcgtgcgcgacaacggcgcctctttcgccgcgacttggccgtaagccgtgacttccgtccgttgagaattcatttgcattttgaccccgtcatcattgaatcgtaagcatcgaaatctcagcactaattattttttaattatttggctttaattttcgcttagattattcgtttttcctcttcaattaagtttgcctccaagtaagcagatgttcatcaacgtgagttgtcgccgaattttcgctgcttttcccctcccaagtgtacgccgtcctttccctccctcccttttcagtccacgctgttgcctcaggcaatttccttctggcaggtaccgtaccgtacccaatggtacgattttacagtatttatttgttgcctcttcagaaatcgcttctcgtccgtccggccaatgttcccatccgtttgagtcggtcagcttcatgtatccattctcttttgcagtttcctttgcttttaagcaaatgcgagtccaatcagtattactctgatcagtctagtgcatttttgcgatgtgtgacgcggtgcaaggcaattacgaattgcggcgaggtgcaagtgccggacgcgcacctttttgtgagaagagagaagcaaataaataggggaggggtcgagagtctcggcctttaggacgacattggctacaacccaaaacggatgattgcttcccattctggttaagcaatgccgtttctgtctgcagtccaaccctttgtcctgcatcccttccggcccctcggatgggccgggagtgtccgacaccgattttctgctttacgtttccgccgtggacacccaaaggtgtcgcaacgaagagaccattgcctatgctgcgcattgccagcaagagtccgagcttgacaggtcaaaaagccaattgagtaactgcttttccaccgaccgtttcccttcattttcccctaattattaggccaattgccggtcacgtgaacatttgccccggggcactgtccacccatgcccatgacaaggaagtgcttttgtccaccgtcaaacatgaaattctccacgcgcttggcttctccgccggactgtacgcttttttccgcgacgcggaaggaaagccgcgatcgaaaaggtgagaaggaaaagaataaccccttttttcaatgattttcaagaaatgtgaacaaccgtccgctttcatttaaccgcgagcgcggctattacgacgcggacccatcgacggtgagaacggtggtgagggaggattggtggacggcagagggacaggtggagaggaagagagcataattacactaattaaccgaattaattgtcagatccctcacccaattcatttg

SEQ ID NO: 53989 - DNA, 235 bp, Heterodera glycines
atgtcacttctccgtaccgtcaaagattgtaagggcaaagtgatcgaaaataattcacaagcaaaaatagttaaatggtttttttcaaaattttttagttttttgtgctaaaataaaaaactagaaaatagttgctaataactagaaaaatagcttaagaaccaccgaaaaaacacgtttttcgtgagtttcaggccacgtggagctcaggaagaaaattggtaaaaaactataa

SEQ ID NO: 53990 - DNA, 1098 bp, Heterodera glycines
atgggaccagaaaatgtaagttttgccactctccaaattttatcggcccaaaagtctggggttttgagggtgcaaaaatttttcgaaactcgaaataaattcatgttttgttgtattgttttccgaattacttaacaaattcccccgttttcgggtcgatgtttgttggtgttttcaattcaaggccgcctcggacctttacgcgccggttgccggcgaagtggtggaacggaacgcggaagtggaggacaaaccggcgctggtcaacaaggactgctacggaaagggtaacataaatctcggtttttccttcattttacgagccgaaacaaatggccatcataaatttcaggcatttgtctaatttaggtattccccttttttcatcattttttatttttggcaattttatagtccaaaccagtttccgcaccaaaacaaatgcctatttgagacaattcaacaatttctgactaatggaaaacatgtctggtccgataatttcgtatgccaaaaaacagtgatttacaacgacaaaaaaaagatgtacatgttttttgaataatttatctataaaatctaattttgaagcatttctattctactgagaaataatctaaaaaagtgatggcaaaaaggggcctaaatagacaaataggccaatttcctagaccgtaaggcaacaattttcttagtgtcaatcgaagtcttgctgtttagagattttataaacacatacaagaaaacagcaaatatacctatgaaacattgaggagaacgaaatgttaaattttgaaaatgccaatttttactatttttaaataatttaaatttttgtcggttgtcctaatgcaagaattttattacaagggcttttattgacaaaaaaaaaaaattcaacagctaccaaaaattgaggaattctcttataaatggggaaaagctgttttaatttcacaactccttctttgtccaggttggctgtacaagatgaaggtgagcaacctgaaggagttggacgagctgatgagcgagcaaagctataagaactttttggctgaggagagtaacaaagatgacgagacgcaacacttttag

SEQ ID NO: 53991 - DNA, 760 bp, Heterodera glycines
tcctggttctggcaatgaacggagcatcgaacttcaatattcggaggccaaagtgattggcaacggttcatttggagttgtctatttggccaagttggtgtacaacaacgaggacgtcgccatcaaaaaagtgttgcaggacaaacgtttcaaggttccgccaaatgttgtgtggattggactggctggggtggtatattagaactgatgacattttttggtttaagtggcataaattttttcacaaacgaagagtgaccctattggtttgcaattttttttttgaaaattttgacgaaaaagcaaaattggcaaattaaataacattcaaaaaaaaggtttaattgtaagattttatttgtcaggctaactaatccagtaaatggactccttataaaaaaagaacacgaaattgtcgcaatccaagaaattatctaaattaaagggaaataaggtgaaaactacaaccatttttttggttttattaaaatttcttatgaacttcttcctaattgtcctcgattcgtcaatttctaccatcgctggctaaaaatttttggaattgatggaatttttataaataattttttgtgtagaatttttttatctcttttccagaacagggaactacaaataatgcgaaagcttgaccatcgtaacgtggtgaagctcaagtacttcttctactcaagcggtgacaaaaaggatgaagtttatctgaatttgatcctggaatttgtgccggacaccgtctacagag

SEQ ID NO: 53992 - DNA, 1551 bp, Heterodera glycines
  unsure (1)..(1551): unsure at all n locations
atggccatccctttgaaggttgaaggtaatttaataatcaaaatatttctaacatagacattttggataaataaaaattacttattttgttagtgctcaagtccgacttccaaaaatacatcatcgagttcaagccgtttttgttgacttcgttggacaaccacgaggacccgcaggtgtgcattgctgcaattggtgtcatttccgatctttgccgggcgttcgagcagcacattgcctacgtgatggacgagattatggagaaattgcttggcatactccaagtatggcattaaatatatataatatttttggtttttttttgatcacattccattgatagcattttgtcgtttgcccctaattttcttgtttgtttttaggacccaaaggttaaaaggactgtcaaatcgcaggtgctcaacgcgtttggcgatgttgctcttgctttgaacgctcagtactcccggtatttggcctccaacatgaaatggttgtcggatgcaattgcggctgctcaaataaccaacccggttttgttaaatttattttattaaaacagttatattattttgaattcaattgttagacgaacatttaacaatagacgacaattttttcaaaaaatgcttgtaaaaacacacacaaaattgctaaccacaattttttttttaacaggacgactatgatcaggtggaatatgtggaaaatttgcgtgaaagttgctgctacgcattctccggcattgtccaagcgatgaacggcactgacgagggcaaacagcaaattcagcacagcattcagccaatgctgcagctcattgtgctgatcgccaattcgcagcccagtgcgcccgagtcattgtgcgcaagcgcttgtgcactcgctggcgatctgttgcacgcgtttggtgtccaatttttgcccgtggtggacgctgccgactttggcatttctgcactgatcaccaagtgcaagaagtccaggcagaacaaggccaagaccattgccaattgggtgagttcaggaagagttcgtctcaattaactcgacccttctttctatggcaatactgctgaatatgttaaataacaaaacgattgcttattacattttcttacgctttttgggagtttcggttgttgaagcctaatttcattttttttaaacaaccaacaaaatgccgcttttgggaatattgnngtcagaaaacttaatggatatttacgcttaaaaatttggccatgattttgtgtttgtcttgattttttttttaattttcaggtgaccagggagttgtcacgggtcaaacggcaggctgcgggtcaatcgtaaaaagatgtcatctcaacagcacataattaattcgaatcgtatactatcattgttttttgtcattgatttatttttttgttttcgtttgtcggccgttgttttttatatctgtcgtatgcgccgccgccgttttttgtttttgacaaaaattttttgattttttaaaagattatttcatcaatcatttgatatagtatacttatttatttgtccgga

SEQ ID NO: 53993 - DNA, 776 bp, Heterodera glycines
aacttgcgcatttgtacaaactgagggaaatgccaaaaatggtcatcgaagttggggagcacctggacaatgtctctttttgcgaattttttgtgggaggagagaagtcttctgtccgagtccaacactttcatctcttcaaaggtgtcgtaaccaacgccgatcacaataatggacaggggaagagcagaagccgaaagatggggggaggacacggtaagtggggaaagggcatacggtatgaatgctgagcagaaaatacggtaacagagatgagtgatacggtgaatatgattgaaaggagaaaccgtgcaggtaaacagcctgtaaataccttcacaatttcttccttggtctcctcaaaatcggtgatcgccccatcggtgacgatcagcaaaacgcagtagcgactgccattttcgggcaatgccgcggcacggcgagcggccaaacgaatggtcggcgtgaaatcggtgggcccactgaaagcaattggcagtgagaagcgaaaacgaaaagcaacagaagcgggtgggttggtccacctgagctccacgtgtgacagcgcaatggcatacgcctccaaaagtccgtcgacgccgcgacagcgcgggtcattgacttccaagttctgaacgaaacgaattggcacgaggcgaggaacggacagacataagatggatttgatgggtgatcagtttttgtttgatcaacaaatgatcaatggtcagtttcttattgataaatggaccaacaatttggattaacaatgtaat

SEQ ID NO: 53994 - DNA, 1458 bp, Heterodera glycines
atgaaggaccaatcgtcgcttcaccgcttcgaccacagcaaccgcccaaaccaatacgaaattgcgatcggagccatcgccgaaatatgccaacattacagcaaaaacaaagtccgatcgctttttggcatttccgctaatcacttttttcagcttttcaatgcttatggcttcggtgcccgaattccttctttggatgacaaagtgcactacaacttcccgctggtaaattatcaaactaatgataacaaaagtgtaataacagacgaacattaacaaataccgaaactgatcgatcaatcacttactttatcagcagtaattacattgttaatccaaattgttggtccatttatcaataagaaactgaccattgatcatttgttgatcaaacaaaaactgatcacccatcaaatccatcttatgtctgtccgttcctcgcctcgtgccaattcgtttcgttcagaacttggaagtcaatgacccgcgctgtcgcggcgtcgacggacttttggaggcgtatgccattgcgctgtcacacgtggagctcaggtggaccaacccacccgcttctgttgcttttcgttttcgcttctcactgccaattgctttcagtgggcccaccgatttcacgccgaccattcgtttggccgctcgccgtgccgcggcattgcccgaaaatggcagtcgctactgcgttttgctgatcgtcaccgatggggcgatcaccgattttgaggagaccaaggaagaaattgtgaaggtatttacaggctgtttacctgcacggtttctcctttcaatcatattcaccgtatcactcatctctgttaccgtattttctgctcagcattcataccgtatgccctttccccacttaccgtgtcctccccccatctttcggcttctgctcttcccctgtccattattgtgatcggcgttggttacgacacctttgaagagatgaaagtgttggactcggacagaagacttctctcctcccacaaaaaattcgcaaaaagagacattgtccaggtgctccccaacttcgatgaccatttttggcatttccctcagtttgtacaaatgcgcaagtttttgccgccccatcgatcgctgactgagcaggaattggccacagcgaaggccaaactggccaaggaagtgctgttcgaggtacccgctcagctgatcggctatatgaaagtgaattggcaaaagggcgacaaaagagacagaaaattggaccatttcagtcaaaaggcatttgtccgcgaccgcccgacgaccctttcactgcggtgaatcaatgcgaaacattggcacaacgatttatgaaatgggaaagtggtgaaagtggcggaacagaggggacggcacaacagcaaaggagaagcagcagtctgaagagcagcaaagagatgctgcgggcaatgcaacagaaaagggcatccgccg

SEQ ID NO: 53995 - DNA, 497 bp, Heterodera glycines
tttgtcgcgtccgtccatttctttgctcttcccatttctatggagtcccgcacctcaaatttgtcagcttccatccatcgccacggcgattatcagctgcgattggcccgctcttcggcctatgtgcgggcgaaagtggcgccaaatttgacgaaaaattttgtaagaaataacaaaaagctgaatatttttagtttagcaaaaatgtccaaaatgtctggtgatggtggacattcgactgcacgccaaatgcccagcggatgcaatttaccaaccgtaccaatgggttttggacccggaaagatggtatgtgtgaagaggaagcggacgaggcaaagccggacggacggaagagggaggtgaaaagaaggggaagaaggagaaggagaagaagcagcagacgatgtttgattactttttgggataatcaataaaaaaacacactgatcactcttggcattatgttttattgccaataataaacattcattcaaatt

SEQ ID NO: 53996 - DNA, 178 bp, Heterodera glycines
atggaggacagcctgtcgaagggattggcacagtatcgtcaaggggtcggtccacaaaattcgaaaatccgccaatcgaagtccgctcaatgttcagaccatcaactacaaccagctgtaccgcaactggataacttccaacgattgggacaagcgaccacaaagactgggggcaatt

SEQ ID NO: 53997 - DNA, 512 bp, Heterodera glycines
atgtgttccgctccaactcgcgctattccgagtcccaattttctcccaccgttgtgcccatcggaatgccgtcgaagccgatcagtgtccatcgaccgtattggacttactccgcctattggccctatcgataccatcgaaatttcaacacttacgagtcggttaatattattgaccattgctttttgttcaattgggcaacaaattcagcaatcaaatcaccgattccttctattggcattaccctttccgcctttggacatcctacaaacacaattggtggccaatttggccaattagtacaattaaatggcaattttaaggtaccaatacgacagcccctattactatcgccgttaccatgacaattacaacattttctacaacactgaactgatgtcatacggtaacagagggaaacggttacaaaaagaggaaaatgcaagtgactttcaggaaatcggtcaaaactgatggagaatttgtaccaaggaacgccgatcacacaatga

SEQ ID NO: 53998 - DNA, 781 bp, Heterodera glycines
atggagcgcgacagaccgtgcgaaccgctcgtcaaatatttgcaggtttggctttcggcacagttttttttttgttcattgtgattgagtaaaatggagagataccgtaataaatatttttaagattttttttttgcgatttttttttcaaaatttaccgttttttttttaatttttcggggcgaaattgtcgccccaattcctttgtatttttaaagttttggcttaataatttggcaataataaatgggtgttggttgtgaacatgggctggccaaggatgacaggataagacgccctaaccaattaaatttattaattatttttaagttttttaatttgccaggaaaaaaacgccgccggtgtgatctctgtgcccggcgcagttgtgtacgtgctgaccgatacgccgatcacgcagaagctggtcaaatttttcacgccacgcctttgtcccctgctgacaccgacgcccaaccacctcgtcctggtgctcaaactgactgcccaaccgaccgtgatgggcggtgccaacagcggcggcggcggcaatgccatgacggcagcgccaacttcgtacggactgctcagcgcgacaatggcaccgccaaacttgacgacggcagagatgaaaaaggagttggtggacaccaccaccatggccatgatgacgacaaacagtgttgtgaaaactgaaacatggaaagtggtggggggcgaggaaattgcgccaccaccgccgccgccacaaccaccatcaggaacagcagactacacatga

SEQ ID NO: 53999 - DNA, 1234 bp, Heterodera glycines
gcgtttggagcattgcggttctgatttttatgcatgtgttgaacaattgagttcaaattttccatcttttccacaaatccgggaggaaattgtcgaaaaggtgaaaaacaaataaaaaaaacattaatattgtgtccttggttttaaggcttttaaaccatttgaaattatcgttttctaagggaggatttatttaatgaaaaacattgaaaaagaaatatgaaaaaaccgggaataagttcgggtcaacaatgaattaaaaccgaaaataagtttggtcaaatgaattagaaactggaggataatttgggtcaactaatatctcagagcattttgaatgggttagtgcaattagttatttggaaatgatttgtcgccaaaggcaaagaacagaaatgacccaccgagacatgacatctcagagcctccgtttaaaaattattttagtatcaaataatatttttaattgtttgcagactctatccattttgtccaaaggtggtggtcaatgccgtaacattgcatttgctaaaattctgttgccaatttttgcttccattggcccaattcaaagggcagaacttatcagcagaattatttcatttgattattttgaccaaaattctgaatccatttccatttgtggtgcgcttggtcaaacaaaattgcatttacatcagctgttcctatttaaggaattggtttccaccacaaaatttggtaatcttctgacaattttttctaaatgcaaagctaaaactaaaatttagatttacggaattgtcaaaattgaaaaagactcatttttaaaaacaaaaattttattctaaaacaaaatcgttaaaattggtcaataaaatctatgtttttttaaaacataaaatatttcctttattttatacagatttagtggaatctagagaggaaatctttcaatttataatgcgaattattcaaattgcaatgaaaaggggacaaatggaaaggtggcgccttttttcaatggctggcaatgctttcggtgtgttttttttttttgtttatattcaagattaatttacgcatagtatttaatacggatattagttgtatcatttaattttttttttttttttggttaaatttttttgattaaggaaggttttgcatattttgaatttttcgagatacacgcatattttgcatttaagaatttttagagtatattctggcatttttgataaaaattaattaa

SEQ ID NO: 54000 - DNA, 109 bp, Heterodera glycines
cccatcggcgccgtttgccgtcgacactcagcgaattaactcagacacaacgatttggactcatttgtcagcagagggccctcaaaaagcgacgatcgtaatttgaaaa

SEQ ID NO: 54001 - DNA, 488 bp, Heterodera glycines
atgaaagaatggagatttgaggttaagaaacttttaaataacatacctaggtaaacattttgcctatttggtgcatttgaataattatttcttttaacattttttcttttctcttattcagaatgcttacaaatggcatcctttaaaattacataattcattttttagtagatcaaactctataaatgtctgacatttggaaatatttcgacaaatcgctgaatgataaagcaatgatgaattttgaaatttttcatataatctatgcattttgatgaaaatttttggaatttttcatttttttcaaaaaaaattcacttgtgaaagttccggttggtcccggtcccggcttttctcgcggtcccggtcccggtcgaagactaattaattttaaattaaaattatcatttttttccaggaaattaattgacgtaatcgtaccaggcagttacatttaaccgaccgaacatttgattaaaaatggataa

SEQ ID NO: 54002 - DNA, 813 bp, Heterodera glycines
atgttggaacatcttggaattttcaataagacagtcatcggattttctgcattgggctatgaaatcatgcgcaaaaatgacggcgttttggatttaaacaaatttacgaaattgaacatttcaatggtaattaaaataattttaggattgctattttatgaaaattaaaatttttataagagaatgcttaaaaaaaatgcaataaaaatttaaaaaatttcaaaattctattaaacttttaaatttcctaaatataaatttttgagttattcaattgtatctcttctataataatttcaaaatgtgaagaggcacaaaaaaagttttttttttaaacagatttgttcaattctttacggtgaaagaaggagcgtactgtatgacagacaatcattgacaacgtcctttttacgtcataacacatttgtcatattcaacatgccataccaaaaatcactcaaagaaagggtacggtaatagtacacttaactttattataaataggttacctttttctcatttcattgaaaatcttagctatgtttttaagcaattaaaatttaaggactttataaaaatatttttaattcggtcgatgtttataaagattttctccaattgtaagtgattaatactagaacccggaatttttaaagtaccgaaaccgggttggtttagccatttgaccgggaccgggccgcccggtccaaaaaaaagcccttttaccgcgagtcgcgggcccggtctaaaattgtggccgggcgcccgccgggcccgggctttttcaaaatttgtgggattttgattaataaa

SEQ ID NO: 54003 - DNA, 1052 bp, Heterodera glycines
atgaggaatgtgccacggaacactcgtggcgaaatttgtgaaatgcgcttcttgccgctggaggacacacagcggcccgacttgttgatggaggtgctcatccagcatctgctagaccgtgtgctggacggtcacccgccgccatccctggttggtctgcagctgcacccaccaggctttgaccggccgtacgtcatccgccttcgcccgcccgagcagaacaacgctgcggcactggcggcagccattgagcggctcaatgagcagtcggcagccggcattgacctgtttgctgggacaacggtcgccaaagttctggcggtgtggccactcgagccaattcgtgcggacccacaaagaggaggtttgttcttcgattttcaagcacattacgttgaaaaaaaaaaacaggtggctgtgatttggaggcggaacaccatgcttcgcacaccgtgcaatcattggtgcgtgtcgttaacccaaacgaccgtctctgcctggcgcgtgccgtccttctgggtcttcgggaccgcgaaacgagaatggctggtggcggtggccgtgcaacatttacggagtacgcgcgtcatcaggagcaacatgggcgtgacgcagaagagctgctgacgcgtgccggcattccccttgacaaagggatgtacacgctggtggacgtggctcgactacagcggatgttaaacaacacaaatggaattggccaaatccgcctggcggtgtttgaaaaggagcgggaataccttattgtctataagggtcaggggtaaatttctgtcttaaataatggatatcaaattttggtctaattaaagcatggcggccaaattcaatttgtgcctgctgctggagcgcggccatttcaactacattggccgcgttgaacaactgttcgatgtgcagcgctactgcatcgactgtgagcggcgagcgcacttgcgctaccacttctctggttgtaaggtggtgtgccgcctttgtttgcgatttgggcccggatatccgtgccaagcacaacaggtatttttcgaaataaa

SEQ ID NO: 54004 - DNA, 516 bp, Heterodera glycines
aaggaattcctgatcacaaaaacgcatctgtccgtttgtgaggtgccgattgtgctcggcttcggcacacgaccaccggcatataaatcattcaatttaaaaaaccatttaacatggattaacgacactcaagaatctcttgtcgggattaaaattggatgcgatattggtcttgcttatcgtaataactatgtaattggaagcgcaatttttcatcctcaacagcagcagagcggtggacagagtattctatatccatatttcgcgatttatgtcaatatttccatatttgtccatattttggcatttttccaaaaaacctttattataacggcccccatcaggtaaattggcatttttgacccctaaagaccgaaaaaatttcagaaaaagacatttttagcaaattttgtcgaaaatattgattaaatttaaattttcttgaaaattgggtaatttatattaaaaataagcaaaaacgtgaaaatttcgtaaatttgatgggaatacaataaa

SEQ ID NO: 54005 - DNA, 335 bp, Heterodera glycines
atggaagaggatataggcggtgaggagagcgacaacgacaccatcgacttttttgcggacagcgttgacgaaattatggaaaagtatgtttcaaaaaaataaattggctttgtgataaaaatattgtttcaacccttaaaagaatccatcgatcggaagagaaggtgaaaaaatggatgactacgcacggccgcggtgaagccaaggcgaccaacgctgagcttttgcctgctgcggccccaactgttgagaaaaacgattgggattccagcaatagtgagaaggatgaggatgagccaacatcaacggtttacctagaccgcaaaaaatcttag

SEQ ID NO: 54006 - DNA, 1080 bp, Heterodera glycines
  unsure (1)..(1080): unsure at all n locations
atggagttgatcaacaccattcttgacaaaatgtacaatgacccatcctccccagcggcgtttgcaggcgttaccgcactgtggaaagaggcgcggaaaaagattaagcatntacgaaaagatcaagtgcagagttacttggatggacaccgcacttacacattgatgcgcccccggcgtgtgcactttccgagagccaaaactgttgcagctgggtttatgaccgatgtgcaagtggatttggctgattttcaagcgctttctcgtcataatggaggccaccggtacctgctcgtagcgattgatgttctctcaaaaagattatttgtcatcccactgaaaaataagagagccgaggagatgttggaggcattcaagaagcttattgaccaaatgcccatggtcccccaccgaatattctccgacaaaggcacagaattcaaaaacagactactcaaagaatttttcgaggagcaagagattggcaagcacgagcccgtccattcgtcagtgaaagcgtcagttgctgagcgcgccatccgaaatgtaaagcaacgattatacagatattttgcgcaaaaacagactctcaactgggtggatactgtgcagcaaattgtggatgggattaacaatgcaccgtctcgtgttcatgggatacgaccaattggcgtgaattttcaaaacgcacagaaggtatggaagcgaatgtatggcccacaatcatttgtcaaaaaatctccccgcttccgtaaagacgattttgtgcaaatgagcagagagaaggggcagttcgagaaggggtacctgccaaattacggtgacgaaatccttgaggttgaccaagtgctgaagacggtacgtcccatccgttacaaactgcgcgatgacaatggcgaaaagttcaggggtaccttttatgagcaggagttggcacgcgtgcgcaaggatgaagagacaagctatagaatagagaaagtgttgaagaagagaagaaaaccggatggatctactgagatgctcgtaaaattcataggctatcccgaaagggaatggattagtgaatcccagcttgtataa

SEQ ID NO: 54007 - DNA, 543 bp, Heterodera glycines
atgggcagaactacagtgagggtacaacattacatgaggtaagtcatattgagctaatgatataaaaattgaaaaaatgtatcatgaaataagttaaatagattcttttaattaattatattgccatattatacgaatagaaaaaatgaaaatttaattaaaggacaaagcaatacaaggaatgatattcattattctaaacacaaaagttaaattaatagatgctcattgatcagatagtttataatagggttcagccccaagctttcggggagcaaaatgtcgggtacggggagtaaattccccgaaataatttgtcggggatggctgtagaaatttaaaaaatgtcggggagcaacaccttcgtcggggaggaaattttcataaaaagtctaaaaaaaatatataaaaaatccagaacaaaaaagtcttaaaactcatttaaagatacttccatcttatttcaagtgcaatttacgactttcgtaatttcatttcccgaaacatgtcggggctgaaccctagtttataatatcaaataaa

SEQ ID NO: 54008 - DNA, 1544 bp, Heterodera glycines
atggcgcttgacgcaaacaaaaatactcttatggtgtttctaatccctacaggcgccccatgccgagttcgtcccaattgctgcaccacaatgccaaacagtacatgctgtgctgccttgccaccaaaacaatgctttattggcaccaccactgttagctgctgctgctggtgctgctcaacaacccattccaccgctgccgccaccgcattcatcggccatgctgttgccagtgccaatagtgccaacaacatcaacaccagtggctgccatgcctccgcttcggccgcaacaaattggtgatggtggagtcagcggtggcgattgcgaaaaatcacccattaataataataacaacaaaattggcggtaacaatggcgattgttggagcacagctgtgacaggtgtgtgtcggaggactctcccaatatttcaggcccgtaggcagaaacaacaacaacaaaaaaattcggaaggcgggaatccgaagacttttttttccccaaaaattcgtgttattttaaaatttacagcgccatgcagaaaaatcaggaattttggtcgtttttttgccaaaaaatgacaatttggccattttcgtttcaatgttcaaaaaatatgattaattgaacagctaaatttttaaaaccacaattttttaactaattataagcaaaaaatattatcaaacttttgaaaacgccgaaaaaatgataaattaagagatttttctttgtttttaacagcattaattaattctctctgtttttcaaaaaaagatttaattattttagcttattgttagatagaaaaaaaattattattagaaaattttttttttttataaatttttgtaaaaatattttaggttgggaacaggcggcgatcatcaaaaacaaaatcggtttgctgatcaacggacgctttcgcattttgcaaagcattgcctccggctcttacggcgaaatttttgcggccgaagacttacagcagcggaggcaccgagtggccgtcaaatttgacggaggtcattataatgctaatggacccaaatttagtcgcaaatttcgcgctatttttttgttgtatttagcctgccgcgacaaccacttgagatacgagtatcaggtggagttttgtgttcttcgcttgaatagggcattaaatttaaaaatgatttaatatcgcaaatcaaaggtgtacaagtctgctttgtatgaggatgggaacggcaaagtggacggctttccacaagtgtattggtacgggcacgagtatggccataacattttagtgagtcaatttgttcggcgaaattgaattgtgcatcaaaggcttgctgattcgcggaatttctcaatttttgaataatctattcccgacgcccgacatttgcggcagcggtccgacattttgcgcctttgtccaaaatcgggttcaaaattatgttttttcaatccctgatcgcataaacagcattaaataagcgattgaaaatgattgtagccgatcatttgatcttcaaaaatttttttgaaaaaata

SEQ ID NO: 54009 - DNA, 980 bp, Heterodera glycines
atgtcgggtcaactcagagcaaaaataccgttacttaaccgagtgttaataaaagaaatacagaaaattaagtcaaaaatagaagaagggaattttgagtatgataaaaataattttgatgattgttctcgaatttttaataaaactaaagaaatcattcaaagaattgaaccaaattttgaaaaattaaaaattttgcaccaaaaatggcaaaatttaatgaggcaaatgaataaaacagaatggaacagtgaatggaaactacaaaaaatattccgggaaaagcataattatttaaaaacaattaaggaaattgacgaaatccttgacacaattaaggatataaatttggaggtaaaaagaaggctgaaagcgctcaaaccaaattcccttcagaatccgaccaagagaatgaatcaattgatgaagagcaattaaacgatgatgaagaagccggagaagaagaagatgaagatgaaaaagaatatgatagtgatcaagaggacgaatcacaagaaatgcattcaagtgatcaaatacatcgtaatcgcataccatttgctcatcaacgatcaagaataaagcttccggcacaaactctaactcatttttcgggaaaattttcccaatggcccagtttttgggacgattttaaatcctcagtacataatgatccgaacatggaaaatatacaaaaacttaagtaccttcgtggactgttacatgatgagccttatcgaattgtatccccatacccccttattaataaaaattacccaataataataaaattgctgaaatcacgttacggtaaccccgaattaatcagagaaaatcttcacagtgaattacgtaacttgaaaaggcctattgaatccacgattgaattaagaaaatttattttactaattgatcgaatgattttgcaattaaaatcccaaggcgaagacataatagaaggcaaattaagcagtctatag

SEQ ID NO: 54010 - DNA, 529 bp, Heterodera glycines
gacttcaatcactgggactctattctcctgcgtttcaatcacccggactcagtttttatgcattccaatcaccgtgactcattctcctgcatttcaatcactgggactcaaccctccagcatttcaatcactgggactcaattctcttgcattccaatcactgggacctaacctcacctggtccttcggcatcgcaatcatcgagactcaattctgcgatattccaatcaccgggactcaattctgcgacattccaataactgggactcaattctccatcattccaattcccgggactcaatcccaccagcattccagtcactgggactctgttctcctgcattccaatcactgggactcaatccttcacttttcacggattcttcggcatcgtaataaccgaggactcagttctccgccattccaatcaccgaggactcaatccttcactattccaaacaatgaactcaattttacggattcatcggcatgtcaatcacgggacttaattcagacctgttcagcataa

SEQ ID NO: 54011 - DNA, 627 bp, Heterodera glycines
atgttgatgcaggacaagcatcttgaaattttctacaacaacaaacaccatgaacacccacttttcagccgcttttcccagcacgcactgcgcaaggacggagtgagtatgtggcatggtggtgttgtacagtttggatgcatgtgtattaaattttttgcacggcgatgagaaaaaagctattaatgattctgtttcgctaaaaattaaatggttcgaccaacaccaccgagtgctgcagtcatttttggcaaattttaactcaaattttttttttaaatattacaaatttaaatttagaaattatattaatttcctaaaaatgccaaatcattctcttttttagctcctacttttttggttcattgaaagccatgcaggactaatcgtggcgcgagagttgatgggcgaactgttcgaaaccttcaaaatggacatggtattatgtattacaattatataacaaatagattttttaaatgtacttttaaattatacaaattcatttaatattatatattttttaacaaataaatttttttctgcagagcactggctcgctgtatgatgaaacgaataatggtatcgtacagcgttctggcaatggtatttaatgcaatgaataaa

SEQ ID NO: 54012 - DNA, 462 bp, Heterodera glycines
atgcattttttttgtcctcttctaatcaccgttgtacctcttttaatcactgctgtacctcttttaatcactgctgtacctcttttaatcactgctgtacctcttttaatcactgctgtacctcttttaatcactgttgaacctcttctaatcactgctgtacctcttttaatcactgctgtacctcttttaatcactgctgtacctcttttaatcactgttgaacctcttctaatcactgctgtacctcttttaatcactgctgtacctcttttaatcactgttgaacctcttctaatcactgctgtacctcttttaatcactgctgtacctcttttaatcactgctgtacctcttttaatcactgttgaacctcttctaatcactgctgtacctcttttaatcactgctgtacctcttttaatcactgttgaacctcttctaatcactcttctaatcgct

SEQ ID NO: 54013 - DNA, 421 bp, Heterodera glycines
atgggacactatgagcgattgcgcaagtcgtattcgcgctgcaggcgcgtgattggcaatttggagctgacgcacgtcgacgagcacgacgtacgacgagacgtacagcgacaaaacaaccaaagcgcgtcggacaaagacggagctgcttctttcgcgcagcgtctcaccgaccgcgcgccatttcatttcttggagcatttggaggaggttgggaattttggaaaattttgccattattactattaaaaaataaagttatatttaatatttatcgtatttttgatcacttacatttcatttaaaattaaaaatttattttaattttcagatcaccggttatttgctcatttacaatgttaaaattcgcgaaatttcgttgccaaaattgcgcttaatttggggcgcgaaaattgcatga

SEQ ID NO: 54014 - DNA, 576 bp, Heterodera glycines
atgagagttcggcattttctgcagttggtcctttaccgacactttgtccattccctaatcatttttctgatcatcactgattggtcatcaaatgcggcacgacgtcgcggcggtggaagcacaacacagcggaagaaacaaggcaaccaaaaactcacaacaaagaagtacggtgctggaggcgcaagtcgtacggtagcgcggaagggcggcacggaagaagtggaacggcaccaattgagaacttgtgagttaatgggtcgggcttaaagagtgccgaacagaatggcattttcatttggcgacgatttactctcccacattcattccatcgtccaattttatagggcgaaatgggtcacatattgcgaataatgcaaaatttcttatttttccaggaaaatttgaatttgaatattttgataattatcttttttagtcagtttttaaagataattaattttataaattttcttaaattatttttctgaaaaattaaatttttattattttcggggcttaaaaacagcagcgagtgggataagcccagcacatttttgttcaattggcaataaa

SEQ ID NO: 54015 - DNA, 1081 bp, Heterodera glycines
  unsure (1)..(1081): unsure at all n locations
tttcacgaggacgtcaaagtgattagtcctcctcccctactagcggattgtcacgctgatgaaaatggnaattattcttacgaatatgctgttgccgatgattcaccgccgggcgttgaattcattggacaaaaatttgatgaaaacgaggcaaagttagatgagaaaaatgaagaggagaaggaaaagcattggatgcgcgagaaaggttgggatgggactagagcggaggaatcggaagaagatgaagcggaggcatttggccaatcgagaatgattgggtgtggacaaacgatgtttcacagggtaagctgttttctaagagtcagtaatagtgagtggtttatttcatttgaaattataagcatgttccttgatttttaaggtaatttcatttccgcttatttgaatgcaggttgagtatggtcagcaatcgccaactgctgattggccatgggcagcgtccgtacggatagcttgcgaaacaaaaggctcgaacaaatctgaagttcaacaggtgtgtaccggcgttttggttgataagcagcacattgtgacagcggcgcattgcttttaccttccgattcatgaggcaaccaaatgcaaagggaatgaaattggcggagcagtgcccgagggcaggtagagttaattttatcataattcaattgccgtggcaaaagctgtggttgcattttgttggccaaaattaaaccatggtaatatatggtttaattttaatcaaggttttaaattataaattagaattgtataattattaatgtgtaaatattttatatttttcttattcagctggcaggtcccgtttgaatatgtgaaggtgaccctcggcggcaaagattggcagcactcatccggactaagcataaagtcattctcaaaaattaaaagctttcactcacatgcgctgaacgacgacataggcgtaattgaggtgcttaaaaattcaattaaattttaataatattttttctttttaaattcatttgaaataatttaatataatttggtttcaaaatgaaaatttttatttttaaaataatatttacttaaaaaagga

SEQ ID NO: 54016 - DNA, 1877 bp, Heterodera glycines
atggacaatgcgacaaaattaagaagggacagtagagatcgtgtacggaccggatccgtatacggatttttacggatccgtagtccgtaatccctgtttttttgggtcgatacagatttttactgactacggattttacagatttttaaatccgtaatccgtatctatgcaagtccgtaatcctgatactgatccgtataaattatgatacggattacggattttttttttctaacatttttaaggtgaaatttaataaattttgtgcagtcaattggaaaattttactaaattggaaaaaagcaaacgttttatgttaaaaactcgaaatctttacaatattgatttagatttcttggaaatttttatgaagttttacataagttcgttttgtaaatttttcaaaattatagatagttttaatgaaatctgataaaaattcatgaaatcggttaaaaagcgcaaatttggccgataaaatctgtcaataaattgcattttaaaatttttcccggcggcgtctagggggaaacggccgccccccccccccccccccgttcctcaaaaatctttttgggaaaagcgcgccgcaaaaaagtgggatgaaaagcaaaaattgagcattttttatttcgtaaaattaagaccgagattcgtatttataaatcattttttattgaaaaagaaaaaaaaattaaaaaaatccttatccgtatacggatccgtatttttcctggatacggattttacggatttttagtccgtaagtccgtaatccgtatgaatggctagtccgtaatcctagtcctgatccgtattttctcaaaatcacgctctctaaggacatcataatgaaagcaaaaaaaaaaaaaacgccaaatatcaaaaaataacacacattaaaaaaatgaatgaaagttttgctaaatttgattagattttctccaaaaaatgtccaaataaaaattaaagaatcatagggtcgattttcaattttagtttgttttaaaaagtaaagaaatgtaaattaattgtttaaatatttaagtctggaaaatttaccaataatttaacataaaaaaactggtgaaggacaacaggacattgttctattgcagaaattaactaaataatttttctcagaaatttctccatacaatagaacataaggggtcccgattctgtgagggaattcccgagttttcccgcgggaattcgtttccgccgggctctatttaaaaccgacttttttttaaaatcaaaatgaagtcgcatttcaaaatatcaatcgcgcaaattgcctcatttttatcatagaaaatgcgtgcagcagataaatgccatttttaatagggtaacaattggtgtaattccactgggcctttggtgcatattttggccagcacgggaggcatcactctgtcaaaattcggatccaacacatttgaaatgtaagtgagaaaatggcggtgttttgtgccagagatgaaagcgaagttgatcagtcccatcagttccacgtaccgtagggcacccgccgcggcaccgtaattgatctgataggaataaatagagaaaaaagatttaacaatgaataataattcaccaattcaaatatactaatcacataccctcaattgatatttttaaatttaattgaaaattccaactttcagatcttatagacatcctggattagttcctttctcacgtaactctcggtcctgcccttttctcaaaaaaaacaaggtcgggagtcacggcaaaatctctcgggattcatgtcagtcagaaattttcaatttttatctcgagatatcagttacccattaaattttttcagatgaatataaaaacaaaatccattaaaaaataaa

SEQ ID NO: 54017 - DNA, 920 bp, Heterodera glycines
atgctcaacagccaatcgtcggctacggttgcgcatgccaacaacggaaatttggtgccattacggtaaattaattgggcgccaccattttttatgggtttttggcgttgttttccttagacatttcgccaacaaattgcccgcctggccaatttcgcccattccgcgcgagtgtcagtcgccggaagcggtaattaaaaaaaatatttttattcattttctcaatttaaaattgaaaataattttaaattcataaatgcaaattttaagaccaacgaatacgcgtcaatggtgcaaggcgaaatcaattgtggagctcaatttgaggccaaatttgatggctttttggtgccaactttggtcaagaaaagtccaatttttggttggtttttttgtttttggcgtacaatttaatgttaatgcatttaatttgggtcggggtcgttttcatacgagcacaagtttttggctataatttttttctttgccaaccaaatccaacaatcttggtatcattcggtagccctaagtgtcacctagtagcctgcaaatttcaaaaatttcgtttagattcaaaaaaggggccagaagaattcaaaaaaaaaaaaacaatgtaactcaatactgatttggcttaattttttttcgtttttcaataaattttgttcattttacacccctaaatttgagactttttagtgcctatttttggggtttttagagtctaaagcctagctatattggccgtccctatttatcactcctgtggcctggtctactggatattcttatgtgatttatttccttcttttctcattcaattcttttcacatatcggtcttttttgaacattttttaagatttttgttgcaaactggcatttttatcattaagtaaaaagacaaaaatttttaaataaa

SEQ ID NO: 54018 - DNA, 1082 bp, Heterodera glycines
atggattttgatgacgaagtttttgatccaaatttaaacatcgatgagcaaaacaacactgaagcggaaggacaaattgttgagagggaaagaaaattggaaattactgaacccccatcatcgcttagacactattttgtctatgtaaaaggacaaaatgatgccaaatgtcgaatctgttcaaaaaaactaggccggaaggatgggacaacgggaggaatgcttcgtcatttgaaaagtgcacataattcattgttcaaaaaatacgaaaaagctaaatcaacaaaaactgagacaaaaaaacaaacaagaacgagttcatcattcgcagggccaccaccaaaacaactccgcatggacgaattgcatgtagtgaatttatttactttttccattttccatttatttttagggaaagaaagcggaaaaaacggaaaaatcgccagaaataattgacgatctgcttttgcgcttcatttgtttgagctgtcagcctttgagttttaccgaacaaaatggattttcggattttttaaaagcagtctgtccaaggtaatcaaatttaaatctcaaaacccaaaataaattttagttatgaattgaaaaaacgggatttttttacgcgtaaaatggaagaaaaatatggccaagtcttttctggtatcaaagagttgatgaaaaatgtcaattatttttctttttccactgatatttggtcaaataagcgaaagcggaacagttttttgaggtattttaaagtaaatattagccaataaaattcttgaatagtttgacagtacattatattgatgaatcgatgactcgccgtttttttgtgcttgccactgaaccatttgacaatgcacacacaggccaaaatattgctgaatgtttcagacaattgttaaatcaattcgaaattcctaatgacaaggtgcatttggtggctacatgtcgtttcaatatatgtcatttcaatactcagtgaaaatgtgtcatttcaatactaaatcgtttcgattcgattcgtcgctcaattataacgtcttttcgtgactgccttatgttaaccgaaaatttta

SEQ ID NO: 54019 - DNA, 1206 bp, Heterodera glycines
atgtctgcatatggtgcgataatgtctttaaaacccctcctagactgggggataattgtagattgggggattaatggagattgggggataattagagcaaatacggtatgtcaaatccaataaaaatatcgaaaatggagcattttaactgagtattgaaacgatttagtattgaaatgacatatattgaaacgacttagtattgaaatgacatatattgaaatgacgtatattgaaacgaagtgcaccggcatttggtgcttagagatgcacagtcttctatgatttctgggatggaatcgcttgaatttgagcattttgattgcatgatccataaaatgcaattggtaagacttcctatctaatttttactgtcctaattaattttaatttatttttttcttaggcaattcgagacggaattgatcatcctaaaaagggcgttaaatcaatttgtgaaatgttacaaaaggcgcgtaatgattgtcgctgcaaaacaataagaatttaaccgaagtgccaatttccgagtctttttgtgaacaacaaaaagcccttggcatggcttcaaacgttttgttgcaggtgtcaactatttttatttaatccattttttataacaaggatgtctgcacgcgttggaattcatcatacattatgcttgaacgtttgtatgaacagcgccgcccgcttatgcttattaacgaagaatacaatgatctttctttacctgattttgagcttgtaaaaaacatttgccaggtcctttataataattagtcttattgatttatctaatttttaggttttaaaacccttccttatatttacaaatcaattatcacaacgtgactaatcgctttcgtcagttatttcggtctacaaatgccttcaaaattatctccgtgttaatggcgaagaaaatgagcccattctgagtttaaaaaatgtcataaaagatggattagaatcccgtatgcgagaacaccaatctaaaatgtaaattttggattcttatttgtcatatttgctaattataatagtttaagctttttgcgcatggccactctcgttgaccctcgtttcaaaaacaatcctaacattttctcgacaaaagaacgagctcaaaatgaagtgttattgcttgaaacagtaaaaatggtaacgaatccatcacgtcgagggtctgattcggaacaaccgaaa

SEQ ID NO: 54020 - DNA, 402 bp, Heterodera glycines
agccttcacaaagctgcgcaacttttgtgcgaacacaaaatccatcggttgcccgttttggagcattcaaccggaaacattttgtacattctgacgcacaaacggttgatcaaattcctctatctttatgtgagtgaggggcgctgcccaattatttcctaaattattatttttttccctaattaccactaattccccccccccccccattccgctgctgcttcttcagatcaacgatttgccacggcctccgtttatggacaaaacgccgaaggaattgggcatcggttcatggggccacatttgcacgattagcaaagatacgccgctgatcgaggcgatgaaaatctttctcgccaagagagtgtccgcgttgcctttgctcgactcggacggacgggt

SEQ ID NO: 54021 - DNA, 808 bp, Heterodera glycines
attataaagcaatggaaaacgaggaggagcctcagcttcatattgacgtgttgcttaacgttgcagaaaagctaattttctcggtaattgtcgagaacacttatcgttagctaagctgacaaatgcttcacttttagcctgacaatgactttcgtcttgatttgagagacccaaacgccgacatcgtcaattttatggtattctttcccgcatttgtaaatgctttgttcaaatgttttagttgaagagggtctcttccttttcagttcgctgggcccgcctgtcgttggtcctttttctcgcagtttcggaagctcacccaagtcagtgtcaactcggccgaactccaactgtacgcgccgaagccgattcagggcattcgcggcactctttccaacaacaaagaggcgagtggaccaatggcaaatggtgtcacctttgtccggccccccccccctccctttgcagttcttccaagggcccttcgtcgtcaccgatcagttcttttacacccttttctgtcgtggcattctccgacccaccgtcgtggacactttcttcatcttcggcaatgacgtcgtcaccttcgacagcgttccgtcttcttcggcctccataatgatgaacgattggagggaacaattggaggacggagaagaaacggaagagggagagattgtcgagccgatgcacggagacagccaatggcatgaagagaagtgcgaaagcaacttcggcccttgcgaaatatctttcactgacggagagtcgccggccgagtcgttggttcgtctgtttctggtcagag

SEQ ID NO: 54022 - DNA, 334 bp, Heterodera glycines
agtcattgctgaccgcacttccaaattggtgttcgcctacacaattgacgttatcaacccggaacgcgactgcgcctttcacttccctaccaatgaattcgtcgcacttttatgttacatcgccgcttgttgtcccaatttggacactttttcgttgtcctttttgttgcaaggcgagttctctgacgaagacttcaagcagctctcttcatggctgtaccgcaccatccaaagtgttctttcgcttcgttgctccattctctgcatcgattgcaatttgaccatcgaattccgtgcttttttccctgaggctacacttatggcacacttttaa

SEQ ID NO: 54023 - DNA, 1340 bp, Heterodera glycines
taggaggacattttagaatatcgaaaataacatcaatttgccaaccccattgttaagggattgaatattcgggagagacaaattgagacactgcgcgcgctgctgattaaacaccacgagttggcccgggaccaagaaaaagaccatttccacgccctgcaacagctgaagcaacggaacttggaggagcagcactagttggagctgaacagccaaaaggacttcaaccgaagggcgttggagcagaagacgaaagagcacgcgatgcagtccaagcagcagccacgggaattgaaagtagaaaatgggtggaataatacattaattgcttgttttgggatgctttttttacttaaaatcgacgacattcgtcttttaaggccaaggaaacgatcatccgaaaacagtttcgacaagcggtcaaaattcaaacgcgccaattcaaagcgtaccaatcccaaatgctccaaatggcgccccgggaggagcacagagaactgctgaaccgactgaaggatgaacagagtcggaagatcgcctcccttgcggaccaatacgaagcgaccattgaaacgatggtcacggaacaaacggtgggaatcttgtacaattatcacgcatttgaaagggggtgggattttgccggtggattacgccgagattagggccatgatggcataccatactttccaaaatttactgataatataaaactgggtcaatctgaaaaaaaattcgcttttcactaaagatttacattttaagatcaaattggacgcccaacaggaggaggacttgcgacagctgaccgaaaaactgaacagggagctgagcatgttgacggagtaccaggagaaacagcgggttgaactgagcgcacaaattgagcgcgagcgagtgcaactgcaggaccgcgtcaaccttcggcttgctgtgctgaaacagaaagtgggaccacaagacaatttagcctataattagttaattaaatgacattggaatccgttccattttttcgaatcatttttttgtaaaaataaatgttttttatcgcagatgaacgaagaaaaggtccattttgagcggaacagagagcgacagttggcgcagttgcacgaccgacaggcgcaagcgttgagtgccttctccgtcgatgagagacggaagaaaagttccatgggaagtgacggggggcggaacgacgcgtcgtccacaaatttgtgaattgggcccagcgggcattcgttgccttttctctccttttgtcgccttcaattttcaattgtttcgacaatttttacttatctttttctttctccaacgaatttttgtatgttttt

SEQ ID NO: 54024 - DNA, 96 bp, Heterodera glycines
  unsure (1)..(96): unsure at all n locations
atgtcccttcgcttcttcggtttccacgattcggtcagcgaagggaaatttctgtgggagattctcacgcaactgagagggctcggagttggancg

SEQ ID NO: 54025 - DNA, 205 bp, Heterodera glycines
gtcgccgctgttggccgcgactcgcgtgttggacgtcgctttctccgacgatctctgtgagggtgcctattacgaggacagtcgcgtcaccgcgttaaaatgtgccgacgacccggaattcgtttggtcagtgggcacttccgtcagggacatgatcgtggacagcaacgcgaactccttcaacaaaagcgaaagcaccgaataa

SEQ ID NO: 54026 - DNA, 476 bp, Heterodera glycines
atgagagccgactttgccatttgcgcattttttgcctattttttgtgtgagacattggccggcattgcttactccaaaagcaataagaataattcatcaacggcatcggaatccgacttgggcacaaccaactctagcaatactgaaaaacagggtaaatgaattcaactttaaattttggcatttttacagtaataatcaacagacaaatatttttgccattattcgggtttcagggctttactttggacaaattttgaagttttaataatgacaaaaaattaataaataaaaaattcaataaaatataaataagccaagaaaatatattcgactcaaaaaaaataaatttccagactaaaagtccgacttattttgccataaaatcaaattttttttccccgtatttagaagatacgaacgaatcaaatgctgctgctgctggtggtagcggcgaagaagcgccaaaaaataaa

SEQ ID NO: 54027 - DNA, 1254 bp, Heterodera glycines
atgcaacatacaaagcgctatttgttggtccccgaagagatttatcagagtttggcaacaccgtcaccgtctgacggttcaccaattgagctggtccgtgccagaattaaacaaataaaaaataatgacgccataaatgaggcggaaagagcagtcaaatatgagcaggaaattaagcgtctcaacaagctcaaaaaggacgaggatgaacgtcccgtcggtgttaaattagaaaatttgagtgatgtggttgacgccatgccaaaaccattcaacattaaaagaccgatttttgtagctacgcgtcgccatctcaaggttgggcgtgcgcgaaaagaaaatgttgaacaattagaagatgatgatgatgatgatgaagatgattatgaaactccacgcgcgtcgagtacaaataaacgtcaacccacacaaatggaaatcttaaatttaatttataaaaacgcccaatctctgggggtgtcggaggaaggacaggtcttgagagcgggtggacggccatttataaccagcagtgtcgatgatattgttagtcacctgctgaataaggacaagcgtggccaaaaagagccaacagcattcaaagaatttattgaaagggcaaagcagaatcgacaattgagtaggtatttatttcccgaaggccaatccggcaaaggaatttataaaaacactttacttaagtttaaaccatccctatggatttgaaaaaatttcgtttgctcgagttcttgtacaaggacttaagttcgcctgtctcattcacgagcgttgaaccgcttctgaaagaggcgcggaaaagtcaaccaaaaattaatcgaattgatgtccaaaattatttagctacccaacgtacatacacactgcatcgccaggcaaagcggcgctaccgccgtttgccaactttggcacccggcttgcatactgaatggcaggccgatttggctatttttgaccgaattgctaaacaaaatcgtggctacaagtacttgctagtctgtattgatacccttagccgacaggtgtttgtcgaacccgtaaagaccaagacgagcgctaacatgatcaatgcctttgaacatatattcaaaaggtctaaatatattccttggaaggtgttaacggatcagggaaaggaattcactgcccgcgcagtgcaacagtttttccgcacaaaagacgttgaacacttttgtatgctcacttctccccaatttcatgccagagtggctgagc

SEQ ID NO: 54028 - DNA, 1359 bp, Heterodera glycines
atggatttaattcttgctaccgattggataaacaacgcttatcccgaaatggaccagcaggaccataataaggaaacgccaaaaaaggaccagcaggaccataacaatgaaacgccgaaaaaagaccaggaggatgaggaggagacgaaggagcctagctggatcagcctcattgacgaagagcagaagcaggacccgttcaccccaatttatgatgagccgccaagagcaagtattcaattttcttttttttttttaaacaaattggttaatttaggtaccccaaagacttgtgcttgtgcagaacgcccgcgcccgatcccgctcgtcgagcacttatgcaagcgcttcaactgtagcgcgcatgagctgcacgtgttgttccgaaacttggagaagcgccgagacattgtcgagcacttgcgctctgctcagctgcggaccgcccacctgcgcccttttgttcgaaatttcccggtgcgctgtaacgacctctccattctcgacgcccactcagtcccggcctaccgcggcttcttgggaattacggtactttttggcaatttggtggacataattaaagattttaggtacgaatgcattactacataaaacatggaatccgtttgcatcatcccaacttgccgtgtgtcgtagaatttggaggcggtgatcacaaaacctttttcccgcttgaaattctcactattatgttttagatgtttttcaatatttaattgttgttgtttttaaaataaatttgttgcgtaaaatttttgtccattttaatttagatgaaaatttctaactgtactgttatttttaaaattaattccttgaacacgcaacagtttttggctattgcacaacgtggaattaatacagaatataatccacgccgtttccacgcaatcatcatgcgaatccgatatggagcaaaaactgtggctgcactcatatttcaatcggcacgtgtcgtcctcactggagttccacaccctgatcaagcccaaaagtttgcagcaagggttctacgacgaattgaatacacgcaatgcagaacgatgacaatctatgagctacgtgtggtcaacattgttggagttttaacgtttgaccaaagaattcgagtggagaaactacaacaatctctgggtggcatctatgatcctacgatcttcccagcccttcggtgcaaattagataatggagccacgtgtctcatttacatttccggaaaagttattcttactggggtgaaaaatgtagaaaatttaaaaaattcatttgattacttgtctaaaattgttcctaattattttcggtaaattttattttctcgtaacaaaaaaaaaacga

SEQ ID NO: 54029 - DNA, 549 bp, Heterodera glycines
aaataacagtacagttagaaattttcatctaaattaaaatggacaaaaattttacgcaacaaatttattttaaaaacaacaacaattaaatattgaaaaacatctaaaacataatagtgagaatttcaagcgggaaaaaggttttgtgatcaccgcctccaaattctacgacacacggcaagttgggatgatgcaaacggattccatgttttatgtagtaatgcattcgtacctaaaatctttaattatgtccaccaaattgccaaaaagtaccgtaattcccaagaagccgcggtaggccgggactgagtgggcgtcgagaatggagaggtcgttacagcgcaccgggaaatttcgaacaaaagggcgcaggtgggcggtccgcagctgagcagagcgcaagtgctcgacaatgtctcggcgcttctccaagtttcggaacaacacgtgcagctcatgcgcgctacagttgaagcgcttgcataagtgctcgacgagcgggatcgggcgcgggcgttctgcacaagcacaagtctttggggtacctaa

SEQ ID NO: 54030 - DNA, 5692 bp, Heterodera glycines
atgcggcacatcagcaaatgccggtatttttctttgtttttaatcggaaaaccattctgttttagtcgccattttgtgacgatggcactcacaccattcaatttttgaatgggagcgtctctattgtgggccgcccgctgccgtctgttattcattacaatgtttcttcaattaaatgattttttttcaggccgctttgtctcaccgtagtagcagtggaccaccgcccgcaccaacaaacgccagctggccctctccctgtgaccaatgttgtgcttcgtaacggcgacggtcaacgtgttgaagcttcgggttggcagcaccaggccagtgttctggcgtctttggacattgggagtgcctactggttcaccaactgcactgcgcgggcccgataccagcatctggactgttggtatcgcattggcgtcgatggcaaaactgccattgtcgtccctcacaccgcagctccacaggtaagtttttcaaacttttcttatcatcgaattttgtgttaagtcgacggctccgcaaagtgctggactccaccatccatttgcctccactttgggaggacaagtgagtttcatttcatttcttcaaaaaaatttaaatatcgaaatatttaaggcgactacggttcagactggtggaggccgtacagtcaatcagacactcgcccctcccgcagctggtccaattgaagaagaggacgaaaataataatgtgagaaaatgatttttttttgttatgtttttaatatttattggaatacattaatagacgattgaccatcgctttggggtaccgatacgcgcgcgtcttcctcagagacgggcagctcaattggttggttttggggtgtgattgttttcaattattttactatgactaaatttataggccacacgaccaattgaggattgtttcgtcattgagcggacgacgccaatgcgcaacaccctccgcaacaccaggggcgaactctgcgaaatccgcttcctgcctctggaggacgccgagcggcccgacctcgtgctcgagacgctcattcagcatctgctcgaccgtgtcctggaaggtcaccccccaccgatgctcgttgggcttcagcttcacccgcccggattcgatcgaccgtacgtcatccgactccgcccaccggagcaaaacaatgcggcaacattggcggcagccattgaacgcctgaacgaacagtcggcagctggaatcgaacttcttgccggaactacagtaaccaaagttcttgctgtatggccccttgaatccgttcgtgctgatgctcagcgtggaggttgtactctgcatttaatattgatttttctaatgaatttaggtgcttgtgactttgacactgagcacagtgtttctaacaccgtgcagtccctagtgcgcgtagtcaatccaaatgaccgcattgtctggcgcgtgccgtcctcctggggctccgtgaccgtgagacgagacagccgaacggtggtggacgcgacgctttcgatgcgtatgccgcacgacaacaccaacatgggccagaagctgtggttctgctgacacgtgctggaattgcggtggacaaggacttgtacacgttggaggacgttggtcatctgcagcgtttgatcatcaatgagcacggtgttggacaaattcggcttgtcgtgttcgagaaggagcaggagtatcggattgttttcaaaggagaggggtgagtattttgtaattttcaattaatgtctaaaatattctttcaagtgtggcagcgaatttcaatttgtgccttctgcttgagcatggacatttcaactatgtggggcgcatcgagcaactattcaaagtgccgaactacgtattgactgtgagcgaagagcagatgcgcgctaccatgcaactggctgtaaagtggtttgccgactctgcctacggtttggcgccgggtttccatgtcaaccggaacaggtaaaattaaaaaaaaaaaaataattgaatatattattatgtttttagttgccaaatggtggaagcagttctcgtcgctgcaatgaatgtggcttcgtatttccgaacgacggttgctacgactatcattttgccaacatggctcctgcgccaattgatggccgaggtcaacgccaacgtcaacccatctgccactggaggcgcttctgtcggatctgtgggcgtgttgcttatgcaaacaaccatcagtgcgcaccactccatcggcccgttggaccaattgactgtcggcgttgtcatgggcggcacacactggatgagccgtgcttcatccagccacttcttgacaggactgctcaccagaacaacaacgatgatgatgacgacgacgatgacgacgctgatatcctcgacgacgatgaagctgatgacgaacttccgctgcgtctttgcttcttcgacgctgaaacgtctcaggagcggcccctgcaattgaacaaccaaattgctcagaagcacgtaccgcttctcatcgttgctgaagtcatctgcgagccatgtcttcgagcgggaatcaacgtcaacgatggattcgggagaagagctcctgattgtgtttgtctctgtcggatggtgcgtggccaacagatgaggcgatggtcttcacctccgtttgtcaatggagcaggcgacaacactcctcacccagagggcgctccggcattcaatcagcgccgcttctactttcattccttcgacgatgaagccaatgacccaattgagcaatttttgctctttttgatgaagcacggctccaagaaggcccacacagtctgcattgcgcacaatggtggaaaatacgatttccatctcgtacttgaggcacttcatcgccgcagcattccaccgaagcgactctgcacgacggggctcaaaatttattcgatgaagttgcgtggattaaatcaacgacgaattacattcaaggactccatcaattacttcttctgtgaattggatgccttggttaagagcttcgatttgcctcaacatctggcaacggtgaaacccttcttcccgtacctctacatacagcgccaacatctgctgcagcgtctcaatggtcttcctgccatagaatattattcgcccgacacgatgaaggtcgaaaaacggaccaaattccttcgttggcacggtgacaacgacgctgactccaacttccagcttcgtgagcagttgatcatgtactgcgtcaatgatgtggcaatcctccgtgaatctgtccttcggtttcgtcagctcatcggtgaacacacccaaggcctggatccgtttctctgcgcctcaactgccgctggcctagcgctcgcaacgctccgccgatgcttcctccccgccaaccgtttggtgcactcaccagaaggcggctacctccgtggacgacgtgcttccgctgaatctcgtcgctacatccgattctttgagttggaaaacgatggagcccaggtgcaatgcgctgactggtcagtgggggaggcgcacatcgaggattctgggtaccgtgtggacggtctttggcgacgggagccaccccttcgtccgttggccatcgaatggatgggatgtttctatcacggtatcttccaatcaataaatatttattaaataaaaaattttttttttgaggatgtcctgagtgcttccctgatcgacaacagaagttggcagcaggacgaacagccgaagacttgtacgagcgaacgatgcgacgcctctttgaattggaacatcaacatgggtgtgagctccatgtcatctgggggtgtcagtggaaggagcgcctccgccgtgaccatgagctgaagcaacgatacgaagccgtcttcacgccatgcccattggacccccgcactgacgcgttgaggggagggcgcacagagcccttcaagctccaccacgtgtgcgccgacgacgaagaggtgctgtgcatcgacattgtcagcctgtacccttacgtcatggtttgcatttttttttatggattcgtttcaacaatatttcatcttagaaggtgaatcccttccccgtggggaacccgatggtgctgacgcgtgaagtgctcctccatccaccgacggcacctcttccgtggacatgcccagaaaacaacaccttccgtggtcttctgctcgttcgggttctggcgccacgaaacatccgtgtgccacttctcggctaccgtaccaaggacgagcgcttcacatttccactgtgtggcttatgtgcggaccgtcggcaacaacgaccgtgtctacatggtgacgacaaacgatcgtgggtgtgtgcgtacactcacgtggagctgaacaaagcacttcaactcggctacgtcgtcacagacctatttgaggtatttcttttgttgatgtaatttttgaaccaatttcaataggtgtgggactacgctgagtgggacgacacgctattcagtagctacgtcaacagcttcgtcggtctcaaagtgcaggcgagtggttggccggagggatgcgacgccgaagagcaacgtcaggccttcgtcgcagagtttctgcgtacggaagggattcatctggacccgacgaagatggccttcaacccgggtctccgtctgatcgccaagactttggcgaactctctatggtattttattttttctacgatatattaaaaaaaaatgatttgaaggggaaagctcgcgcagcgcgtcggtcacactgagatacagtacacgcgcacgcctgccgaattccacaagctgctcgacgacccgacttacgacaaactggactttgtccacgtctccgaccacatggaccgtgtcgtcgtccggaagcgacccgagttcgccaaagcaccattgaccaactgccttccagtggccatctttgtcacttcgtacgcacgcctccatctgtacggatatatggagcaagtgttggcattgaacaacgctgagcttctctactgtggtttgtcttctaccgtttaatgttatcagtgacggtaattcagacacggactcaatctattacgtcaacaagattggagctccgtgcgtaccggagggcgaagcgttgggacaaatgaagcgggaactcgtggacaggcgcatcgtggagttcgtcgcaggaggcccaaagaactacggcatccgacacacagcccgagatggagcggatgaacgtgcgaatctgaagatacggagcttccgtctctcctacgcaacgcagcagcttatcaatttcgatgcaatgaaggagctgacgctgtctacgtacaacattgatggacccatgtaaaaagtttccactttaattttttaataataatacaaattcaatttagtgatgacgtcattgacaacgacgacttgttcgtctacggtggtggagcacatcgcgccatccgcgtctcctttccgcagattgaccgtaacgtccaggccgacctcttcacccgggaggcccacaaggactaccggcccttctacgctaagggacgcgtccgccctgggatgcaaacgcgcccatttgggtacgtcgaagatgctccacagccaatggatgtcgaacagcacgcccaaccaccaccactaccgccaacagaacgccgaaagaggactttgattgaagccgatcccacccagccgggtcactcgcgatggttttaa

SEQ ID NO: 54031 - DNA, 595 bp, Heterodera glycines
cagaaggcacaaattgaaattcgctgccacacttgaaagaatattttagacattaattgaaaattacaaaatactcacccctctcctttgaaaacaatccgatactcctgctccttctcgaacacgacaagccgaatttgtccaacaccgtgctcattgatgatcaaacgctgcagatgaccaacgtcctccaacgtgtacaagtccttgtccaccgcaattccagcacgtgtcagcagaaccacagcttctggcccatgttggtgttgtcgtgcggcatacgcatcgaaagcgtcgcgtccaccaccgttcggctgtctcgtctcacggtcacggagccccaggaggacggcacgcgccagacaatgcggtcatttggattgactacgcgcactagggactgcacggtgttagaaacactgtgctcagtgtcaaagtcacaagcacctaaattcattagaaaaatcaatattaaatgcagagtacaacctccacgctgagcatcagcacgaacggattcaaggggccatacagcaagaactttggttactgtagttccggcaagaagttcgattccagctgccgactgttcgtt

SEQ ID NO: 54032 - DNA, 612 bp, Heterodera glycines
cgtacgcatgtacgatttctggagcattgaatatcgtgagtatgtggatgcgtacgcacgcatctaccgtataacattaatctaccatagtcatgtagacaacgtacgcatcaagaataaatatgtgttgatggacgtacgcatttctggagcgttgaatatcgtgagtatgtggatgcgtacgcacgcatctaccgtaaaacattaatctaccatagtcatgtagacaacgtaggcatcaagaataaatatgtgttgatggacgtacgcatttctggagcattgaatatcgtgagtatgtggatgcgtacgcacgcatctaccgtataacattaatctaccatagtcatgtagacaacgtacgcatcaagaataaatatgtgttgatggacgtacgcatttctggagcgttgaatatcgtgagtatgtggatacgtacgcacgcatctaccgtatacattaatctaccgtagacatgtagtcaacgtacgtatcaagaatacgtatgcgaagatggacgtacgcatttatggagtgttgaatatcgattggatgcttacgcacgcatctaccgtagacaacgtacgcattaagaatacgtatgcgttgatg

SEQ ID NO: 54033 - DNA, 352 bp, Heterodera glycines
cgtacgcatgtacgatttctggaccgttgaatatcgtgagtaagttgatgcgtacgcacgcatctaccgtaaaaccttaatctaccatagtcatgtagacaacgtaggcatcaagaataaatatgtgttgatggacgtacgcatttctggagcattgaatatcgtgagtatgtggatgcgtacgcacgcatctaccgtaaaaccttaatctaccatagtcatgtagacaacgtaggcatcaagaataaatatgtgttgatggacgtacgcatttctggagcattgaatatcgtgagtatgtggatgcgtacgcacgcatctaccgtaaaacattaatctaccgtagtcatgt

SEQ ID NO: 54034 - DNA, 1007 bp, Heterodera glycines
atgtcgacgggctttatggccgtatctacagtctcatgggttctctatctggaatttataaaaaaatggttagcctctctggtcctggttgttaagcaaaaatgtgtggattaagagcaaaccgcctgaggacgctttcgtgatccgcggcatctgcgctccaatcggcacgtccgctttctgtatgcatagggaggaagagcactcttaccacctgaattttaattttggtccctccccaaaggtgaatttttgagttcttttgtttctcctgcatttttggcttcccaattagttgtggttttttgtggcggccgagctcgagggcaaagtgcgcgagctgggtcagcggttgtttggtgctcagtgggcgaagtgtgccaatccacttggacacatttcgtatcttttctcgcctgcccaatttcgagatgccggaattccgttcgaaatgcagttgcagaagccaggggaggctattctcaccgtggggctccattccggaatcaaccttggcccttctgtttgccttgtggctgaatttcaaagtccacgttcagtggcacgtttcaagggtccgattttgtaaaagatagagaaaatgttaactgcctaattcagaggtgggaagatggactcggtgcagttgcaaggatcgcgaggcttatcggttcaccaagcagcaggagaccgagtacttgcagttaactcagtaaatctcatgttttgtgtgccataaatagataggaaaaaaaaattgcaggtccttggtcgcttccgaacgtgccaccatggcctggcgaaagcatgatggttccggaaaacggcaaaaacccgatgccaaccgtctcgcagagctcgcggcacggaagcgggaacaaagagcgagacaaaagaaagaggggcatgtgccacaaaagaaaataaaagaaaaggataccattattaatttggatgacattgattttgattgagtaaagggaagagaggaaaaacaaagtgaaaaa

SEQ ID NO: 54035 - DNA, 3784 bp, Heterodera glycines
  unsure (1)..(3784): unsure at all n locations
acccgtccgctgcttaatggacactggcgccagtttgactgttgcaccacgatcagttgcggatgaactcaattgtcgaacattttcatctgatctggaggcaatgagtgcctcaggccatgtcattcgcctcaaagaatatgctcaggtgaatttgaacattgctgggtacacagtccgttcattaatttattttgtggatgattccgaatttactgtggcccgggattacagtgtaattgtcggttgggatgtctttgaaaaattgcccccagtaaaattcgatcatttaaacgggaaattttttgttggggacaacgaatccaaattgtgctatcgttcgattcttttactgaacgatttgcgcgtgtcagcagagaaaaacacactcattccggccgactcccaaatattggtcgatgcttcaatcgaatcaaccccaaacccaaaaaattcattttgcattgatcgccctgacataagtcttattaaaaagggactgtcagtcattaatagcgtctcgcctgcgggccagaaacaaataaaagtggcggtggtcaacccaaccatggaaccaaaatggatttggaaaggaacacatttggcatttgccaacgaactgttatgtgaccgaaatggacttttgaaggaaaatagcacaaaagaaattcttacgttaaattctgaacgaaagaaaatggaaattgacccacatttgtagtcgacttttctaaggcaatggttgaaggcaaaaatttggaaaagctgaaggcattaattgaagaattttcagacgtttttagtaagtntaggtatgatcttgggcttttcacagctgctgaacatcacattacaaccacaactgaggaaccaatcgcatctgcgccaaggcgaatgccgtacaaatacaaagaggaactgaagaagcacattaatcagcttttagaagccggagtcatggttgagtccgataccccatgggtaactccaattgtcattgtacagaagaaagacggtggaattcgtccttgtttagactttcgcaaacttaacgaagttacggtgcccgacaagtaccctctcccacgccttgacagcatcatggaaagggttggaaattgccaattttacagctctcttgacttggccagtggctattttcaaattaaattgagtgaagaaacgtcaagaaaatgtggaattataactgaagacaaagtgtaccaaatgattacgatgccatttgggctgaaaaatgcaactgcagcattttcaagggccatggctatcgttttgtctggattggaggatacttccttggcctacgttgatgatgtgcttattttcacgaaaagcccaaacttttcagaacacctaacggcggtaaggaaagttttggagcgttttcggctctataatctgaaacttagcccgaaaaaatgcatttttgcctcaaatgagatgaattttcttggatttgttttaacagctgaaggttttaagccaagcttaagtcgaatcgaaattctcaaagaaatgccagtgcctttaaatgttaaagaggtaaaaagagtgctaggacaggcaggcttttacagacggcacattgagaactttgcaatggtcgtagagccattactgaaacttacgaggcaaggcaatagattcgaatggggcagggaacaacaaaagtctttcgacaagataaaagaattacttacgcaagccccgagtttaatttttccagattacgacaaagcatttcacattttcactgatgcatcatcgactggacaaggaggagttttaatgcaaaaggatgacgtgacgggcacattttctgccatttcctattgcagcagaaccctctctgctgctgagaggaagtggccggcagttcaaattgaaatgagtgccattatttatgctttaagggaattcagaccattcattttcatgtcggacattgaacttcacacagatcacaaacccctcgcgtttttgctgaaaaaatccgaaaccaatcagcaattggcacggtggctcattgaattgcaaaactaccaagttaagattgtccacgtggcaggaaaagccaacactttggctgatgcactttctcgtgccgctgaggacaagcccttgtcggaaatatacaatgtggatgaactcgaggacattatcgcatttccggtctgtctcgctttggcagcacattccagggtggtcgcggacccatttttgcatactttgaccatccgacacgaggatggaaacacttacgaaattaatttgttggaagagcaggcaggagatccagaagccgcagcctacattgcgtttgtcagggatggggaatttccagctgatttggatgaaaaagaaaaagaattatttgctgtaggcactgccaattacaaattaatttcgggaattctttattttgaggacaagggttcccccccaagaatttatgtcccaatttcattacgtgggctcattttcgaatcgtttcactcctctctattgggtggtggtcatttaaattacaggaaaacaattgccaaatgcaaaaaatatttttggcctaaaatgtactctgacgttttaacttgggtcaaattatgtgtcacttgccaattcagacacaatccaacacccgcgtaccgtgaagagatgctcatggtgccagccaacacactttttgccaaagttgggctggacttggccggcccctttccaatcactcaaaaagggaataaacacattttaaatatcgtttgttggttcaccaaatacgtgatttctgtcccggtccccgacacaaaagcacaaacaattgcccactcttttcttaccaattgttacttaaaatacggtggttgtgttgaattaatcaccgataatgcctctgcctttacttccgaatttttcagggaattttgctccatgctttacattgacaaaaagtatgcctgtcctcattggagtcaaggcaatgcgtcaactgacgcaacttttcgcacatttcacaacatcttggccaaatacatttctaagactcagcccgacttcgatgaatttttggatgctgctaatttttgctacaacacgtcagtgcatgcttcaacgggtgagactccattctttctaatatttgggcgtgacccaattttttgtgttgatcagatcattgatccgaaagttcgtgatccgatagccatttcggaccgtaatgaatttaaacagaagctggtcgtcgcaataagacatgcgtggcacgctgcagctgatgaatatgcaaaagctcagcgaaaaatgaaggaacaatatgacagaaaggcaaggccacaacaaatcacaattggtgatcgagtgctgatcagaaactacgacggacgggtaggaacatccaaaaaatttcaattaccgtggcgcggaatttttcgggttatcaaaattgagggcatttatgttactgtgatcagttgcacttcgccaaattcgaacccaaaaagacttcatttaaatcaaatcaaaaagtgcttcgaaattttgggccccccgtgcactacgccaatgcaaccaattgaagagcaaaagtgccttgaacatacacaaagcgtggaggatgttagttcggaaaggtctgaaattaggaatgaaatggaccccgagtcccgaaaagatgagaacttagaccaaatccaagcccgagggccggaaaaaagaccagaaattgaagccgaggcggagaaaatcaatgaaaaaacggatatggaac

SEQ ID NO: 54036 - DNA, 1608 bp, Heterodera glycines
atgtttttgagtggaaaggatgatgagtcctcgatttcggctattgataggaaactttggcaaggaaagaccacgataaaaatctctgatttagaaaaagctcaaaatgatatggggaaattagaagatggagtgaacagagcttttcgctacctgaatcgttccttgaaccaaaaagtcaattgggtgaaagatgtcgtggccaatacaaatgccaattttgagactctgaaagtccaattcgagaccctaaccgaaagagttgatatgttggaacaagacagtgatgggacgaattcaggtgggactgttagcattactaatttgaatagagcgtcgcgtgcgccgtttgtgacgccaatgggcaatgcacagcccaaccaagtcgtaccgaaccaagagccaattcatcaattgtcaagcgaagacgaagatgacgggccgactctttttggcctgaacatgctctcgagcggacccacagtggggtcaggtttggaaatgttttgtgaggagtctgtttttgcatttgacgattgggctgaacgtttcaaggattacctgtccgtgtcaggcaaggcttacactgaacaagaaaaagtcacaagacttaaattggctctgagggacactcctcgggcactgtttaaggagttattgcccgcacaaatggacactcttgactcagcattgagtgaacttcgacagaaattggactcccctcagcgtcgggaaattgcaaaacgaactttatcgctgtgcaaacaaagggaggataagacagtggcgcaatttctgagacgcctgacgcctttggtggatgcaacaaattcgtcattgacaggtgaaattcgaaaagagaaaatttgcgaagaatttctggatagattgaagccaaacattagttttcttatccgtctggtgggactgtcacgggcaaaagatttggacttggtaagagcacaggcagaggagctggaagctttactgttgatgaacaaaggtgatgaagcatcacgcctctctcaggcagtccatgcgctgagcaatcagtcaccacagtcgaattggtctacaggagcgaacccgaacaatgaccgtgctggacaatggtcgtcaggcaacaatgtacgtgggtttagacctttttctggatcaaatgcgacgagacaacaacaaagaggaagaggaggacgaggccgctctcgcaattggggaggaggccgccaggagcaatttagccaaagaaactggtcaagcaaccctcgatgccattattgtgaccgtgctggacattttgcgtacaattgccatcaacgccgcgccaattttagaggaaattccaaccaatcgttccgtcaaggaagatggtcaaatcagcaaccacgccaatctcagggacaatggcaaaatcggcagaatcctgttaacgtgatggatgctacaagttcttacaacgcttcaccaggatttttcgagaacttggcccagtcgttgcttgacctcaaaatccaggacaatcgcaattacaaaaacgaagagccgagatcgggagcaatgaatgcgctcacacgcatcaaacccgaaacaacagcaagggattgtcag

SEQ ID NO: 54037 - DNA, 786 bp, Heterodera glycines
atgccaaaggaggtgcttcgacaaatcttggccaaactgcccgaccacgtgtccatgttggaagtggccaaggccaacgagacattccaagcactggtcgactgtgagcagaagcaatggcgaagcctgtgcatgtgccacttcacacaagcacaaattgacaaacacaaggcgggaaatggggaaacattttttttgacaaattttaattaatttgaaattaataaataaaagcgggggggggggggggaaattatagggccctaaaaattcaaattaataacgtccggcatctatcgggcaccaggggtgggatgcacactaaaaatgtcgcggtcggcatttttgcaaaattttcatttacctccaaaaaatgaaaaatagacaaaatttgattaatgaaaattataattattaatacaattaattttcagagtttcgacccattcacatggcgtcaactgtttttttcgctcaaaaaatactacgggctcaaagaagtttatgcggatctcattcacatttgttgccattgcaaggctttattttggaaggtgcctttttagcaaataatattaaattaattttgaattttatattttaaaacattatttaaggaccatggccatccgtgtgtttccaaggaaactgctccatccgtgcgggtaactccacaacaatttgttgacagtaagcaattcatacattatttttaaacaattatttaaattaaaataattatttatttagtgcaattatttctctgatcgaacaacgaaaaaacaa

SEQ ID NO: 54038 - DNA, 1050 bp, Heterodera glycines
atgccgccgcgtgccacctccgccaccgagaaggcaacagcgtctgcctggggcgtgctgttgaccactccattgcctactgtaagtaaaaaatgaaacggcacctgtgtacatgaagatttttaccttcgtaccgtacctgacggagcaggtcgtcccacccccccccccccccccgaaaaattaaaaaaattcctaagattttttttgaaaaaattctagtgtcctccccccttttcgtacatttttatgtttctttttcagtccgtcaaaaagtttcgtttccgatgccgaatttttcgatttcgtatttattccaattttttccggcgatgtgccaattgattccgccggctttccattttcccaaattggaaaaacacggaaatatcaaatttactataatttggtttttcattagtcttccccatcgctggaggaggagcgcgtctgccacgacacacacgagtgctgtgcccactgggcggccagcgatgcgtgccgcaccgcaccgcgcttcatgaacacgtggtgcccggcccagtgccgtttcgacgggtgccgaccccatccagagcagggcaaaccgggcaagtgggaaagaatggcacgacacgtgtccagcaagggctgggcactcaatttcgcatgcccaaataaatgtgtggacagaattacctataacaaaagtttcaggttgtcaaaatctttattcggaatgccaaagatgggcccattaccatgaaaaggctgttggcacgccgaacgaatgtcagcggaacccgcattggatggcacaaaactgtgccattgcatgccaaaagtgtggggcgacgaagccggaacagtgcatgtgggttcaaaaaaagaacagtgattttaataatacagtggaaaatttacaatgggtgggacaaaagttttataaaaatttagctttattatataaattttgaaaaaattagctaattaaaaagcattttaaaatttttaaaataatttcagcaacaatatgccgaaggactacgaagctccgccagtgggatttga

SEQ ID NO: 54039 - DNA, 100 bp, Heterodera glycines
gtatacatttgagacaattgggcaggacaagaaaagaatgaagttgatgcctcatgaaactcggaattggttatgtttagtcgaaaatatgcttacataa

SEQ ID NO: 54040 - DNA, 358 bp, Heterodera glycines
atgctaaatgctacacattttgcatttgcatttcaggtgcttttcctgtgcgtcgtcggcactcaaatcgcaatggcaagtgaccggtaggtaaatgtaccgtattatctctaattattaggaagcaacttttagtgacgaaaaaccccaaaatagttaactaaaatagtgagtagaaatgccaaaatagtgaagaatagtgacaaaacgtccgaaaaagtgacaaatagtcacataattttcagccaaaaattgagcaaaaataatttttattcactgattgcagttgcaaatgagtaggactgggatttgtaagaccaaaaaacccaaaagagttacctaaaaaaaattttttaaa

SEQ ID NO: 54041 - DNA, 101 bp, Heterodera glycines
ggaagctattcccgaaggattcggtctccccataaatctgggcgcatcggttcggggggactgcccccaaaaacaaaaaaaacgttttttttcaggggccc

SEQ ID NO: 54042 - DNA, 628 bp, Heterodera glycines
atggcatcatcgacaacaacaatgaacagcaataacaacagtggtggtggtggtggaagcgccaagacgacaatgttggtcaatgccgtttccatggagtcgcttgactcgtccgcgtccgccaccaacggcggtggcagtggtggaagcgtggcgggcggtggcgatgcgcaagcacaggtgcgccgcgtattaatggcactggaaaaaaagacagacaaattgtcaatgctaaagacacgggcagggacgttttacgaaaaatttaatgggaattagcaaaattgagagttgtcgtgtaattgaaaaaaaaaattgttttttttttcaagaaatgatgagatattcgaaaattttatgcatttttctaggagagttcagagcttctatgttaaaaagcgataaattctaagattaatgcaatttataggaaattgaaaattcagaaataatgaaaattatgaatgaatttcagtgaaaaattttacgatttttcaggttcgcactttgttcgtctccggtctgcctgtggatgtcaaggagcgcgagctgtaaatttttagttttgttgtaaaaattacagattgtaaggatttttataaagcaagcaaatataatcctaaataaa

SEQ ID NO: 54043 - DNA, 2334 bp, Heterodera glycines
atgtcaccgccaatcaatggcaacaacaacagtccggcaaactcaatctcgcgatcattcagctcagatcggtaagaaaagccaaacatgtgacactgttggatttttcaagagatgtttctgtctctgatcagcagaagcgatcagctgatatgaaattgttattaaaagactgatcaactgatttggttgtctcatttgacagtaatgatgaaggagaaaatgtgatcagtgatcaaacttacaaaagtgatcagtaagttattggtgaattctggtcagacaagtgccgagtgatccgaaattataaaaggacaagacaggattagctcaatggttaaggaaactgattagtggcctgatcatgatcagcaattagactgaatgactgacaattgtttgtccagattctaccggcttgtggatgacgaagaccaaagggccccgctgaacgcattgaacagcagcagcaacagcgaggaagaaagcagtgcctccaaccagcaacaacaacaacaacacaccggcggcaatttcagtttggccaacagcagacaaacgtcgatcacgatgcccgttgagggcaacggcacaaccgcggccaaattgacggtgggcgtgcgcgacttcaacacgcgactttgcgcagtgttggagcgcctttatgcactggcattgtccgaggacagacgagtaagcaattgaaaagcctattaaaccataattgtcgcggtttcatcgcgcccatttggacttgctggacgactgcgacacgttcaactgcgactaccgcgagctgtcgctggaggctaactttgtggacattggcgccgcaacggcacaggaaaggctggcgctgttcatcaacctgcacaacatgatgctggtgcacatcacgcacaaatttggcctgccgggcacaatttggcaacgccgaaaggtgcaatgggacgggcacataaatgccccattatccatttggaaatatgccaaaataacacactcacacacaccaatggatttacagtacctgtacagcacatactacaaaattggcggccatctatactcgttgcagtccattttcaatggcattttacgcggaaatcggaaaggcattggcatgctgtggaagccgttcggcgaccatgatcccagaaaagaggtgatggcattttagtacaatttaatattttgaaaaatgtcacaaatgttgtaagttcgtcatcgaaggcggcgagccgctcgttcatttcggcctgaacaattacacccggtcgaccgtgccgatccgagtgtattcaaccgaggtaagtaatactgttacagtaaaccggggactaatctccaacaaatcaactattacaatttccccaacagaatgtgtacgaagaactgaaagcaaacgcgcgggaatgcctctcgtccaaggagtttcttcaaattgaccccaaaacgggcaacattcggctggccaaactgttcaagcagtactcggaagactttggaccgtatacggaagacgtgagtttcttctcaaagcaaacaattcattaaatccctttatccgtggtttctgatttaaaacaaccctcaaaatggggattaaaattcggtatgcttatgttagcttgaacatgatcatggaatttgtgattgattgaatgggtaaatgtttggggcaatgatcaatgtgatcggaatattacatgacaaatgaccaggatgatcattacgcaatgcttttcaggtgctttgttggattgtgcgtctgctgttggacacgtccgaggatcggatgcatttggccaaacttttaaccaattcgtccgcctcgttggccaaccttagccaaacagtgtcctatctgccgatggacatggacctgaacatgagctacggggtggcgcccccgtcctccccatcgttgaggacatcgacagaaaatggagacgaaggaaacggtagggttgtgacggggtttgttgaggaagggtgccattcaaatggcaaacaattcaattgcattcagacaatggccgtggactggacggagtcgtcggcggagacatcgacatcgacggcaccaaagccatggcgaaagaacagcggggggaggaggaaaaggaggagtacaaaaatgtcagcaacaacaatgacaatgaggacggaagaaatgggaggcggcggcgggaagaaattgcggaccgggcaaacaacggcaacaacaacaaagacaatggcacgaatgaaatgccgggaaaattgatgctaatgccaacggatgcaatcgaagcagaaatgccaaatggacaactgacaatgaacacatag

SEQ ID NO: 54044 - DNA, 2219 bp, Heterodera glycines
ctgtaggcagctgtcactgtttggtcaatggtttggattaagcctgaacggttgttatttggacacagtttttggtaaaaaaaaaaacaaattgcaaaaatcgtaaacttttcttttattaggcattctgaacgtgccaacccgtattttgtgcttcaacgtcgaaaaggccatcgtgaagatgagcagcaacggttttcgtatcagcaaaaacagcacagcgacgtgtcctcctcatcgaagggttgaaaatgaattttttaaattttgctaaattataaattaaattccaaatttcagtgctcagcggaggactgtcggctttgtttgtgtccaccatcgactcaatttttgacactcgtccgccaccctatcgcatcatttaccagcgagaattggacgagggccaaattgcgtggggtcagtcatccgaggctaatgactccaaaatttggggatgggccaaactgggaattttgttaatcatattaatgcgatttttaaattttacaaaaattcatccaaatttttcttccgtttttcatctctcccaatattttccagtgattgcaattgccgtcgattggcgcgatgtgttggacaattggcaatgtttagagacttcgctgttgccaattttggaggtattttcaaaataatagaaaaaataataaattgtttaaattttctttttttagtcattgggcaccgatgagaacgaattggagaaatttgtgctgacaaaaattgacgggtttttggcgctgcgcgatgaaatggaacgccgtgaacatttggtggccgacggtggggaggaggacgatggcgccgagtcggctgccggtgaaattttacaaattaaattcaaaattccataatgttattgatcacgcacatattttttttgaaaaaataacttcgccaatgaatttagtaaagtggaatcttaggctttttggtactagtttaaaattttcggattttttaaaaattagcattattaatgtttgttttaaaatacaatgtttgcttatattggtcccatgaattcttttcgtcttttgcttcaattgagacgacacatttatttgtgttgaataattaaatgcataaaatgcgtatcatttatcataaaaaagcataaaagattaaataaacgttaattattaattactaacaaattattctgttttcccagtgcttgaacatgtatcaaatgccgcaattctgcgtaagtttctcaaactgttcgacttgccgccctgtgaaaaactcgtcaattgtaaataaaaatttcccccaattacacatgaattttcaatgtttcagattattcctgcacttattggaggggcaacaagccgttccagggcaaactgtacttgtccgtcaactttctgtgcttctacgcattcattgtcggtagtcaaacgcgcatcaaaattcgatggacggacattttggtaaaattcaaattaaaaaatgctaacaattgcggaaaagccgaggcggtgtgatcatttaattgttgtactgcttcaactttatgaattcaaattccgtttctcgatgacagatgaatcattttcttctcgggagaattcaataaattgaatattgccaattaaaacattttaaaaaatatttaaattaatttggttaaagtttacaaaaaatttcataatgaccaattctcatcacagaaaatggagcacaacagctcgttgtttctgtccaatgggctgactgtttcaacacgggatggccaaacgcacattttctccatgtttatgaacttttccgatgcgtaagtgtgggttaaaatgtatacgaatattttagcttttttagtgaaattttggaaattttttgggctaatagagaaacttttgtttgtagatgatatgaaattcattcaattttggaaactatgaaaggtattatttgcattatacccaaaggagtgggtgggctgtcttcccacgaaaaataaaatttatgtttttttttgaaattatttccgttgttttcagcttcaaacactgcactcagttggccaactttgcgatgaagcagcttatagaggagaagggcttcagcgaggacgcggcgttgcgcaccaaatttctgctggaggacccgcaaaagagggccaagcggagcatgtcatttgtgaagcgcgacttggaggcgcggcaacggaccgaggcgtacaggtg

SEQ ID NO: 54045 - DNA, 1082 bp, Heterodera glycines
atggcccaagtatttttgcaccgaaatcgtccggctccaagccattcgatcaggcacctgagcaccggacttgacttttttttcataataattctgtttctgcaagtgacagatgtcatttcttacaatgaaagaataatctattttaatggatacagaatgcaaaagcagggaagaccaaatgggaatattcaagtaattaaatatttaaaaaacaatttgagtatgaagcatttgtttaaaaaacaatttgagcaggtatgggcgtgtacgacacgaaattgtgacgggagagctgagtctgaaggtcgatcgagaacgcttcatgaaaccgcaccacacaatcacgctccgaaccaagtttatttcattcactattccatatgattattacataaatatagtttcaattcagaaaaaattgaacaaaacgagacatgcaagatgtgcagctatcaagcgatggaacagaaacagagagttcagcgaggcaatggattttgaaaaaaaccaacatacgaatggcacgagccgcgacagcgtgcacgaatcaggccatatcatatgctattggtttttagaatatgcgagtgaatttacatcggtatgttaaatgcagcagatgaattttcaaatgcattattgggctaaatattgaattattttatgtcttaaccctattttaaaaatttcttattgcatcagagattttgaagagcaaatggctaggaaccggttcagtacgaaatgaaaaaaccagcctttttaaactccgtgatttttatttgcctaaaattctttcgaaacaactcttgaaataaattatttttagtgcgtaaatcgtaatatgcattttgcaacaaaaaaaacatgtgcctcaaactaatctcttacaattagacttttgatatttggaagctaattttgtttaaatattaaaattaagattgccgatataacggaaggtaatgaagatgcggtgttagcagaagcggaggatgaagtaagaagacttgtcacgccaaaaaagtgcctgatcaaaaaggtagaaaatgccaaatttaaagtaattattatagcct

SEQ ID NO: 54046 - DNA, 452 bp, Heterodera glycines
atggccgagttggcagcacgaatggaaagtgccgaacgaatggtcggccggtggaaaggggagggagcgatggagggggggggggaataaaaaaaattaaaaatggggacggggaaatggagggaggggacaaagcaaacaaaggccatcaatcaatcggtgggttggccaaccaattagcaaatgttgtcaggtgaatgtcagcattcaagcgggcgttcacagccgagtggtgccgataatgggcgcacgagaagggcacaatttgcaggacgaggagttcgacgtaagcacaaatcggacagaccgaaaatcgaattttgcccctgaacagtatttgaccaatccgacctatccgattgtgagaattgcgttggaattggaagaacaaagtgaggaggaaaagaaggaagaaaaagagaaggaaaaggaggaagagaaagagaaaagaa

SEQ ID NO: 54047 - DNA, 706 bp, Heterodera glycines
atggacgaaaaggaggaaaaggcaacgaaagaagaggaagagaagtcaaaaagggggcagagaattgtggaaagagttgtggcaatttggagggggaagagggacagagaaagaccaaagacagcaatggacggagagagtggaaagaggtaaaaacaaataagaaaacacagtgacacacagagaaaaatgcaaattcagcagaaacgaagaagtaacatcatcttccaaggaaaaaatgaagaagcaaacgcagcagaagagaaaacaaacaatccaacaaatcggagagaatgagcaggaaaatactgaccaggaaacgaagaccaaagaagaaacagaaactgatcagcaggtgaaaagtgagattgatcaggaaatgaacaccaaacaagaaactgatcagcaggtgaaaagggggactgatcagaaaacgaagaccaccaagaaagaaacagaaactgatcagctgatgaaaaagggcactgatcaggaaaggaagaccaatgaagaaacagagactgatcagcagatgaaaaggggaactgatcaggaaatgaagagcatggaagaaacagaaactgatcagcagatgaaaaggggaactgatccgcagattaagaccaagaaagaaataaaaactgatcagcagatgaaaagggagactgatcaggaaatgaagaccaaacaagaaactgatcatcag

SEQ ID NO: 54048 - DNA, 255 bp, Heterodera glycines
atggcaaaactcgtggccatttttctaccgactttggtcgtcgtcagcgcagcaactgtgcccattctgccacaacaattgctcagtgccaatgatcaaaattcaaattcattaccaaatttaacaaatgttcttgctgatgaaatttcgctgagtgccattgattgtgccgcgttgccaccggcactttggtgtaccaaatttgtccgttataaatgcggcaccagtaatttgtgcagaaagcatgacgatgcc

SEQ ID NO: 54049 - DNA, 667 bp, Heterodera glycines
atgttgcacagcgaatggaccctctctatggtagtgaataggcccgaaattttgaaatggccgggactggatccggcacttggaaaatggacggagggaactccgtttttccggcactaccggttccggtggtttgtccaaaaaaaggggaccggggccgggaatcccggcgggcccccggttccgtccgggcgggctctaatagtgaaattatttggcgaattctttttgaatttgaaattaactaaacagagagaggaaaccattttgaatattatttgactttatggcaatttttcattttaaatacatcttactaataaattattaaaattcacacagcacttgacaaccatacgcttgtgaaattggaccaaaaatggcacgacacggccaaagtgtgtgcctttgacaaacagtcgaaattgagatgttttgccgacaaaaagtaattgcataagccaaatgattaatcgctaaattaattttaaactgctaatttaagctgtgccgtcaaagcaagtgaaaaggaagtggaaaaagcagtcgatgagtgctatatggagcacaatgtggtcaatgttcaacacaaacgttgtgaatgcataggaaacaatgtgccatggtgaagatgacactgaaattatttaatataataataattaaa

SEQ ID NO: 54050 - DNA, 841 bp, Heterodera glycines
  unsure (1)..(841): unsure at all n locations
atgatgatgattagggtgagggtttttgtttatttaaataactgctttattttgatgagaaatgcacgaaaaatatcacttttagccgccgaaaatgtttagttttaacgtcaatatccataaatataaaaaaatattttagactttattttgcatttttttaatcaatattttgataaatttttgttttgttgctccaaatttctcatttttggtcaatattttcttaaatattttggcattttttcttaaatatttatttaaatatttcgggattatttttttataaatataaatcctcatcctattgatgatgataattaaaactcttacatttaacaaatattacttttttcatgacattacttaaattcccaatgaaaaattcttttaaatggaaaagtggcatttgttacaaattagtatttccttgtttatttattagcgataatttcatgaaaaattggccataagttcaattaagaaatagaaattanaaattgtttttagttaaatgataatctacattttgttcttcctcgcattntcgttcaggaaggatccggcgattgcatatatcgtcaggtaattaagtaaagaaaatttattttttttttgttgtctaattaattctcaatattttagtgttcttgtgatgaacagaatcaatgttttggagtactaattgacgagacggcaaaatgctttgaagtggcatacgatgaagtgaaggcggatttaataaaagcggtactaattgccaaatattaaagaatatttttgaattaaaacttttgcaggctaacaaatctctccttagttttaaaattgtgtgaataaa

SEQ ID NO: 54051 - DNA, 562 bp, Heterodera glycines
ctacattgaccattctgtgctcacatttatccgttcaaacaagccaatttgggacagaatgggcaccaaatttgagttttttgcgaaaagcattcgccagttgggctttaccagtggcgatgcctttgacaatttgcgtcgtctgatctcgccgacaattctcactggtcttgaccaattgaattcaattgattccaatgaactgttccccgatggaattgctgacgatggaccaaatgcaactgctggccaagctttggtcaaatggcttcacactccgagcaaaaatggccaaccgaagcgattgtatcgcaataattattttggtccacagaatctcgaatgggtcaacaacttcaaagaggtgtgtctagccatattttctataaattgtttttgtttttccaaatttgtttagacatttatcagtgccaccacttctgtcagttacaatattcaactttattttcatgtgaacacaattccaactgaaccatttgaattggtgaacaaacggacgaatgaaaagctgacactgaaacaggagatcgacgaattcgac

SEQ ID NO: 54052 - DNA, 1021 bp, Heterodera glycines
  unsure (1)..(1021): unsure at all n locations
cagtgggggctgcgtcactactgctgcctntggatgtgttgtcgcacgtggacctgatcgaaaaagctgcncagcaagcgtacgtaatacaaactgattaaattactgagagtcataaatccaagaaaatttaattttaaaaaatggtctaaattaattcttcaaaataaaataattttatttcatatatgctacttacaaacgcaaaataattaattttattataaaagaatattaaaaaattttatgttacccaaaagaaatgacttcaaaatccatataattgatatattttatgattaaaaattttcatcgaattaactctataaaataaatagtttagcaataacgattctgaaataaaataatatttttatataaaataagaaaaaattaatttccttaattaatataattctctagaatggcttgataatttaaagcatcatacatttaatgattcttttatctaaaataaatatctatatgagaaaaaaaaccgtaaatgccaatcaaataaataaattaaattaatttaattcactaagatttagctggtcgaaaatgcaagaaaaatagttcataacaaaaaaggtacaattgtacatatataaatcggcgaaaatattataaaacttgtatttttttatttagaattttcttattttatcagcctaggttatacaatttaataattaatgttttgttataataccattttttaatcaataaaataaagatttcgagtgtgctcgcatatacattacaaaaccaaaattaaaaaaagaaattcagataatgttgaaacggaaatagaggttttcctggacttgccgggaacgacggttgcgacacagaatgcttttacgcttctaagggaaattagtgagttttatcagttaatggcttgcagcagcaatcaatcatactaaacattcaataaaactttattaatgaaaaacgtacaattaaaaagtgtgtttcaacaaataacaaatgtttctcttttcttcgaatatta

SEQ ID NO: 54053 - DNA, 572 bp, Heterodera glycines
atgaaggaattaatagtgtcatatttttatggctatccaaaaaatgtatggtcgtttaaatgcatgaaattgtttaaagatcaattaattcacactgcactttatatgaaaagatagcccaaagatttctctattattttgctaaatttcaaaaaattttattgtttcaaaaaagttacggtaaaattgttgagcccaaacttttcgagcttttttgtttacaactttttgtaaatttctattaaatttttaaaaattacatacctccatttagaccatttcaatcccggacccgaattcgaaaattttcttaaaattcataaaaaatttgttgtagtgttgcttatgcattgatgctaagaaaataaatcgatgtcacgcattcacgagtagaacacataaacagcaacaaaatagtgacaaaaaggccgaaacagtgacgaatagtaagggcggggaccggtaaactggacaccagaaaattggacaccaagcggaaaactggtcaccgttggaattttggacaccgaaggaaaattggacaccggaaaactggacaccaagttcctaaa

SEQ ID NO: 54054 - DNA, 1250 bp, Heterodera glycines
atggacctgaacaatcgctttaaacacctaattaatgtgctgcaaagagttgccgtcgagtcatcagcaaaagcaacggcaaaagccccaccgcccgaaacaccaccatcagtggtgtaagtgttgctggggtgtcgttagagcccggacgggattggaattttgtgggattttcccgtggtccccgtcccgatttttttttttgaagaagtgcctggattggaatcatgaaaaattggggtttgaattagggttaagccccgactccgagccccccgacccgacccgagacgttttttggacctattccccgacccgacccccgacatgtcgtcccccgaggtccccgacccccgactttttgccccccgacactaattcgggggattatggactcggagcgttttaaaaaattcatctacgaaggcggaaaaatattgaaaatttttgagattttgaacaaattttcttaataaaattcattaaaaattacaaaaaactttccggcggcgcctatcggcacccggcggcccctcaaaaccatggttccgatcggtaatttttcaaaatatgaacaccaaggccgaaaaataagattttagggtcaaaaataataacattagcaacattttttcaaatcagtaaatttttacaatttatttgatcaaaattcccattataaactaaggacaaaacgaggttaaaacgaagattttggacccaaaaataagattaaaaaaacggctttttacattgtaaaaacagggctgctaactgaaaattttcaaaacctgcatttagccaacaagattcatcatttggggtcaaaatcagcactttggaaattttagtcaaaaaggaaaaacatgcttttttgtgacgcgctttttccgaaaaaaaatttttgtacacaggtgccggcgggagaattttttgaaaatttgagttcattttgctcacagattttcaccaaaaatgaccaatttttgcgcgattttgagaaaatttttaagaacaattttgcggactggcggtgccgataggtgccgccggaaaaaaaaaaattgaaaattgggagtttttgatagcattttttacataaaaaaattttaaaactataaatatatttaagaaatctgaacaattttcgtcgctaccccaaaatcagaacattcttataaataacgtactcttgttggcgctaaatcagatgattaaagtgaaaaaaggaagatttacgagctttaaaa

SEQ ID NO: 54055 - DNA, 192 bp, Heterodera glycines
aatatattatgctggtcagttcatatttttggagaacgttttaaagaaggataaaaataattattttattttaccgtcactagatatgcatatgtattttaaattttttattgttatgtaaactttaatatatatatatatatatatatttatttatatacataatcatatgagttggcggttttaagaaac

SEQ ID NO: 54056 - DNA, 1166 bp, Heterodera glycines
atgacggtacttggaaaaatcggtaccggtacaaaacggtaattactagctggtacggtatcggtacaggcactggtaccgccctaatttcgtgggaaatgtaaattttcgggtttatggaaattcgttcaaaatataccatattgaaaataaaaaattattatgatacaagttgctaattaattgtacgcatttaaatgacaccgaattttttggccttccttcccatgttacaagtcttatcaaaattaaatataaatatatgcacttaaaaaaaagatggattttaaatttgaatgaattttttcagttgataaagtgcgattcacttcaatgagttgtgtacccacaaggtcggcttgtgcccgtggctactatgaagatgcatttgtgacttgcactaatttgtactgctgccgggccgacctttgcaacggcgtgcccgaccgtgtggtccaaccgtgggtcgaaagactagggtcggtcgacctgggcctggtattttctgtacccagctaggtcctggaaaattttgactgcctgttttttcgtggacctccaaattcatagcatattcatggattctattttgctcaaaaatccggcatttgccgggaccaacatcaaaaagttatatcattcggcttcaaaaagttacgtaaaaaaacggtgctaggtcgtttcttaaaaactgccaccatgggcgtttcttaaaaactgccaagttttttgtactttcacgacggtcattatgaactaataagaaaaccacaaaagataaattaattatttttatttttttctgataagcttattataattaaaatttccctttgaaagttgcaaagaaatattgtagcacttattgtggcacttcattttttgactcatgctttatagcaccagtaatatggttttgcaactttaaaaaaggtaggaagtgctgaatgttcattaacaaaagtctgttttatttgtattttaaatagtttattttagagtgcccacgggaccgggacctggtttgcccaaaattcccggtcccgtggcactctagtttattttttagaatttgttatgcttgtcagttcatgtttttggtgaacactttaaagaataagaaattaaaaaagaaatacggatatataaaaacttatatcaataaa

SEQ ID NO: 54057 - DNA, 420 bp, Heterodera glycines
atgaaaattgaatttattttgttgattttattaaaaatttattcaaaaattttggcattccgtcttttaaaattttcaaagaatgtatgcggatcctgccggattccgcacaaaaatcaaatttgggatcctgttgcaggattggaattcaaaattttttgccggaccggatccggccggattaatcctgcaaatcctgcaaatcctgcattttccaaaaaatgcaggattgcggactgggatcctgcaaaatcctgcgcaggatccggtcctgctccgggctctacaaaggaccgaccacctgccactccttagaacttttcttcattttcgacaactttccattagacatggaagaaaggggacaaaaataacgaagaggggagaagggaaacagcaaaagagaattagcgtaataaa

SEQ ID NO: 54058 - DNA, 2450 bp, Heterodera glycines
  unsure (1)..(2450): unsure at all n locations
atgcaaaaacctactccttctaaccgccccaattcctctgtctccaaaacccttgcctgcgggcttgaaaaaattgtgaatttgagtggaaatgagccactctcggtgccggtgctggcggatcggagtgatccgctggggctcaagtcggtccaacccgacccggtgccaatggaaagtgccgaggctggcacaaaagaattggaagtgatggaagtggatgaaatgagcggagaaaaagggaaaaagggagaaatgggtaaagaaaaggtgaaaagtggtggaattgaagaggaggaagaaagtgagtgcagtgagggtgaactgctaggagacggtggatttggcaatttgcaactaaaccccagcctgagggcgggaaataaagcagttgaaaaggaagataaggggaaaccctatctggtcgcccaagtgagaagcgacggtgtgatcgcggcacggatgaaacttttctgggatttcccggaattggtctttgtcccttttagcctcttcgacaacgcccagccgatcgaaatcggcgatttgttccgcttacataagtgtgagtggacgaagagcgaaacaggatgggaagagcgcggagattggctgtatgaagcaaccggacggctgaactaccaagccacggcaacggacgtgagccaattgcgccagcgcatccccactcaggccgtcggcattttggtcgatgtgcaaagagcccgtgaccgacacgtcaaagtggccatggtgtcagcacctgagctgagctgcgtgatgcgcgcctaccgtcgccacttcccggccgatttcacggataccgacatccgctaccgctctgttgttcgtcttcaacttcggcagatcaacagtccgccatgggtgctgtattcacagcagtttgcgtatgttttgccatctgattttggtaaaaaaaaggggcgatgaactgctcgttcatcacgcaaacgtcattgctggcgttgagcctgagccaatgggctatgagttccctttcagtgccgaactgagctgggcgaaggtccagctgggtgagaaggtcatggcggcggctgtcgcagcgcagtcgttcgatgtgaaggctgatctgcggaagcacactctgttcgtcgagccggtcgtcatcaatgagatctcgacaagaagcgtgatcatccagttcgtcatgccggtgccgagcatcgaagagctcaccgaattgtgcaaaatctgggaggtcgatttggcggtgggttgcaaagtcaatccggcagccaaggcaaagccttgtgcgcatgggtatgtgctaagcatcgaaaagcgggcattctgtgtaggatacgagatcgatgtaaaagtgatcctttcctatcaggcagcgaaggagcaggatgcccaggaggaattcgatcagctgcgcaccggcgaactcgacggatgcgttgaactcatcccgcagacgtccgtcagggccctacaggaacggatgttcacgctgcggtccaatgactgctcgaaagtggcgaaggatgaggcaaaggtgggccgaatcatgtcgattttattgggccgaccggtaaaaccggaaagcccaaaggccaataacccattaatgacttttggggctctttcaaaattgaaagagggacagatcgacaccgcgctgtgcatgctcgacgaggtgccgcgcctggtcttccaacaggctgggcccggcaccggcaagacgttcagcgcggcgtcgatcgtggccacggtcctggccacggatcccacggctcgtgtgttggcgctggccccgccgaatgtcgccgtcgtcaagctggtgctggagatgcaggatgccctggccgccggaaaccacgtggagccaatgcttgccttgttctcggggacaggtaagttgagatatgccaaggaagttgagcggatttcccccacctgctcgccaccgcggtggaggcacaggactttcaggaactcctacagaaggaccaagaacgcgtcaaggtggagcggtacctggacgcctgcgagcggaacccacgcctggcccaggaaatggcagtggcgaaaattgtgcaggagcacaaaaatcgccgcttgtgcttcgccaccttgtccttctgtgagcagctgccggcactgttcggggagacgacccatttgatcatcgacgaggccggacaggcgccatacgtccaaatcctcaacttggtaagccaactcccctgcctaaccaaggtgctgatcaccggtgatcgccgccaactgcgtgtccatttgccctccctgccgatcgcaatccgtgaggacttcggcatggacacggtcatccaaaacctggatgtggcgcgaggggacggacgtcacancattgggtcggtctgttttcgctcgcattctgctctcgtcgctgcacggagggccggctttacaaccgcacg

SEQ ID NO: 54059 - DNA, 1322 bp, Heterodera glycines; identical to SEQ ID NO: 23346

SEQ ID NO: 54060 - DNA, 342 bp, Heterodera glycines
atgaatgttttttgcttagtaggcgaaatgaatgttttttgcttagtaggcgaaatgaatgtttttggcttagtaggcgaaatgaatgtttttgggttagtaggcgaaatgtcagtaggcaagatgtcggtaggcgagatgtcgagtaggcgaaatgtccgtacaccaaaaaaaagttccttttctcttttttaatttcaatcaattaaaaacagcacaaattataaatttaccaaattggttttcaatacaaacattcaaagtcaacagatgcaaaaacaagacgaagaacaacttgtacgaagtgtcaaggaagcgagtgagattatcagaaagttttaa

SEQ ID NO: 54061 - DNA, 760 bp, Heterodera glycines
atgaattctgaaaaatcagaaaaagctaattctatattattggaagctgcaaaaaaagagacagaaagagcatggcaggatgtagctgcgctaacggatgaagtaagcgattttgccaaatcttctcgcgaaacacttaatcgtgcaataaaatctagagaaaaggctccttactaatggtattcgagaattatatcttaaaatgtccgattcaatttgggaaatcttcacaatcctggacaaaatcaatttggagtcagaaaaagccgaatctacgtggcgtgatttcgagagatgcaaaacttttgaccaggcaacaaagctcgaggaacaatcgcaaaattcattaatggaagcccgaagattacatttcgagtcccgaagggttcagagccaaatgttaaattatgaaaataggctcaaaacaattgtttgggagcacgttggtatataagaacaaaaaactaaaagggcaacagccaaaatggaagggtgttctgtaattgagtcactatgtcatgagggcttaaaatttggctttaaaaaatataaaaccaaattttattttaaaaatcctttcctaattaatgcggaggaaaattttaaactaatactcgcatcaataatcgaaaaaatttataaaaaggaacagggaaaattcaaaagcattctgaagctttcctttgggtttgaatcattttattgccctcttagatgccctagcgaaaacacagccaaggctttgttccaacatgtcata

SEQ ID NO: 54062 - DNA, 497 bp, Heterodera glycines
agaagaaaaagagcaatttaccagtgcccgaagaactgtagaaggcgtatttagagacataattaggttagataacgaagcaaaagaattttctttttctgcacataataccatggttgaagcccaaaatataaaaaataaaaaccctgataaacctggtgtaaatttttggcatagcaaattattagatggagttttaaaaattcatgccctatttgacaaaataaaaaaagaagaaaaaaatatgaaaaatattaaaaaaggtatggaaaaatgtctagacagaaaagatttaactatgtgtcaagaattagcagaagaggccaaacaatcaatcgaaatagccaaaaattatcggcaagaaattgggcatatttatcggaccgcttactcgcagccagatttaggtattggagatttggcaaataaactaaaagaaacaatgcgcgaaaaccaaatacggtttgaaaggcaaagacctcaggaagaatttaggg

SEQ ID NO: 54063 - DNA, 1796 bp, Heterodera glycines; identical to SEQ ID NO: 23351
  unsure (1)..(1796): unsure at all n locations

SEQ ID NO: 54064 - DNA, 128 bp, Heterodera glycines
cccttctacttcgtcagctgccattgcctctccgtcaatgtctgtggacgttccccccttcaaaatggcaccgtcttccccaaattcggccccctcgtcggatggcactttctcttttcaccaacaga

SEQ ID NO: 54065 - DNA, 214 bp, Heterodera glycines
atgtccgccgctgcttccgtcgctcccaatgccgccccttccttccaacaacaactcggttcccatgcctttaatgtcggtggcttttcctcgtcctccgattccgtcggtgggccgccccgaccgcagccgtctcagatcagcagcctgcgcgagaagcggaagaacaacgagtacgagtcgccattggcacgcattggctcctcctcggggg

SEQ ID NO: 54066 - DNA, 908 bp, Heterodera glycines
ataagctaattgattgtttattcttcccattcccttattaaagggttcaccaaagtgttccacacgaggacccgttttcttctgattgtcctttgccttttgtgtttggccagcgtttgggccaacattttatgtaagaacaaattaattaaaatatattaacaaatgaaataaattaggttttaactttgccatcatttgcattgatcacaacgaaaaaagtgccaatgaaagaaaacaaacggacgaattggcaaatttattgaatgaaaacggcacagatcaaaatgggtaattttgtggaggtattcgaaatatcgttattttttttctaaatttccagaaacggcactttctccgcttttgccaatgccaatgtaaattcaaatggctccgccgtccccgcaaaaacttcgaaaagttttacgccgcgacaaaaactgtacctcacctcggcggtcgctgcggccgccttagtcgccaattttgcggttgtcactttggtgagtttcggcatttgtattttatctaattggctaccataattctaccgtatccgttttcctttgtttttaattacttttgctttgccaggtgaacaattacggcattcgcacagtgttcgttttgctcggctttctctccgccgtggccacttgcttgctgccaacggccattgaactcggctttttctatgttttggcttgccgaatgctccagggtattattcttccttcactaattagtcccattttccttttaattaccctaatttgtccacaggggtcactttttcctgcacttttcccgtcatcggcgcgttcacttccaaatggacatattacaagcagaatggactgttcgtctccgtgttggtcgcttatgtgcaatttgcgccggcggttacg

SEQ ID NO: 54067 - DNA, 743 bp, Heterodera glycines
tcgccggtgtctttgtgcagcgtcgtcgtgcctccaccatcgtcaccaattccttgctgttggcgctggacaagcctctcgacctgagcatcaagagcacggtcattctgcgtgacgaatggcttctgctcggtgcccaggagggactgttcgccactccgatgagtccgcaacagttgcgcgcccccttccgaattgcgggcgtctgctgcgtctatgatgatttaatcaaaaaaaaatttaagttcagaaaaattattttgttgttacaatttttatttttgatgattaaatttagttgttttatgtgtttaattttttacacataatttgttgacatgcgaatgtgatcaaaaaatatgtcagaaagtctaatttgtatagtaaaataattttatccaatttaattaggtatataatatttttattgctggagaatgtcttcgtctgcgatgggaactcaacccggtgagcttttatacttccttcccactcccattggatactttcaaacaaaaaaagtgatggagtctaatttgtgtgcgtcggaattgagtcgatttcatttttattaagctctcttcgaccgttccaacatttccgttgcggtgtcctttttggccgggggtttggccattggctatttgctcggctggcgaaccacggcttcaaaattggcccgatgcaacacgcgagtgcagttgagcaaggacatggaacactacgaacaggaactgcagaag

SEQ ID NO: 54068 - DNA, 1298 bp, Heterodera glycines
atgcgcggtccttcccacctgaaatgtctttccgatggcaattggaatggcactgtgccaatttgtgtccccgccacttgccaaggcatcaaaaacaacacggccatcggactgttcgtccgtcccgactccatctcaattccgtaccgacacaatctgagctttgtctgctcccaagccaaccgtccgtcgaagcacagccccttgggcgaaacgcggcagtgcatttacgacccgcgcactgatggcactgagtattggctcagcggatcagaagtgagctcgagtcccaacttttgctggacaataagcttttcgcgccatctcagtcccagtcatgtttttcccattgtctgatcacaggtgatttgtccgttgatcgattgtgggtcgcccccggcactttcgggagcgtatttcgagagtgagaacaatgggccgggcaccttcaaagttggcagtgcgttcctcttccaatgccgactgccctattccgtcgttgggaagtcgtcgtacgacgaccgaatgatccgttgcaacgtggacggcacttgggatttgggcggtaagcgaacgataccaacccaaaattggattgccattctcagatttgcgatgcgaaggaccggtctgtggtgagtgaatgggctgaagaagctcatttgttgcctaattggatgtaataattggtaatgccaatttcgcagttgacccggggcatcccgacgacggacaaacgcatctcgactcaatcgaagagggcgcagtcgcccgcttcacttgcaatcggcccggctatttgcccttcccgagcgacacgctgagctgtgcccttggcaccgcctgtgtgttgagcgaagatgtcggcatttccactggattcattccggacggggccttctctgacaactcagacaaaaccatttggggctacgaggcaagctctggaactttcactttgacttggttggcactgatcaaacgcaatccatgccatcccaatcccattccgtgccattatataccagggttgccgctggataagaaaaaaatcaggaatcggaccgggacggccaaagtttttcgggtctgggtttgggattataaaaaaatctcggaactcggattcaagctaaaccctcttctaccctcattccccattccgtgccatgcttttccattcgatcccatcgcgtgccattccctcgcctctttagccacacaaagctcgcatgtcctcaacgggttggtgcggttccaaagatgcgttcatcttcctggcggtggacctgcaaagg

SEQ ID NO: 54069 - DNA, 2511 bp, Heterodera glycines
atggcaaatgtttgtctgatcgctttcgttgcgacggcatcgacgactgcggcgacttcagtgatgagcttaattgcccctgtaagaatttgcctactgaatgcgaccatattttgcaacagttcatggtgatgcttcttgtcaacgttatgaaaagggcgagtcgggccgaatcgaaacgcccaattttccgtcgccgtaccccgcgggagccaattgccgttgggtggtggagggacctctcaattcgcgcattcaggcaaagcacacaacattactctatttgacactactcattcagcttaactttgactcatttgaaacggaacagcatcaggacttggtcagcgtcgtggacggaggcccggccgaaaatgccagcatttcggtgagggcggagggagggaatactcgcgggcaatcagtgccatcattttattttgtgcccgttcagttggtcactttgtctggccaaccgcgtcctccccaatcgctaacatttgaatccgcttccaatcggatggtcgtccgtttccgttccgaccacgcaattcaagcgcgtgggttccaagcgtcgtggagagccggtcagtcgactctttcgcgagtttttcgttggccgagccgttgggtactgcttttgcttttctttcagtgtctgcttcatgcggaggtcttctgagtgttcagtcgcagcctcagcagctgatcagtccggattggccccgtccttacccaaatggcatggaatgcgtttggcatatgaacgcacccgagggacaactcatctctttggcagtgcgttgggaaagcggaaaatcaacggcataaagacggaattgccattaaggttgaagaatttgacttggagcaggacaaagattttctgatgatttacgacggggcccatccttcggcgccgttattggccaaactcagcggcaaagtgagccaaaagccatgggaaaagcaataaaagtgcaaactttttcattcagtcggacccccagctgattgtgtccactcagtctcgcctctatttgtacttcttcagcagtcaatttggcaacagaaaaggcttttcaatttcatacaaaaagggtcagtgtttttcttttattttgaccgaaacggaaagtgccaataaaattcggtaataatcagtgccattccctctcgtgataaattgcccaatttcactactccgtcctttctcaggttgtgacaatgtgatccgtcgttcgcatggcattttgacaagccccggcaacgcccattttccttatgcgccggcacaaatttgtcgttggaccatcgaattgccaatggcacaaacggaggaaaaaatgtgggaacggacggcggcggagggtaaggaaaaaggacgcaacaaaccggcacaatttgatttgcaatttataacacaatttgataatgcttttagaagcgatttcgctgactttggccgtcaattcgtgggatgtgtccgattcgggtgattccctgcgcatttttgagtattccgccgatggacaagccgaggaggggcgtccgttgcatcccatcgaaaagggattcggcgcggagtcgccgccccccaaaacggctagcgaaccagcgaaaaaacagacagtgaatgaatgtggatctttttgttcagatattcgctcgtcaaagtcgcgtggaattggtttggcgtgccgacgaacttcgccagggcgtcggatggaacatttccttctccacaagtcagcccccccagccccggcatttgtccattgatcgtcctctttggccaatccccgcaggttgtccccgactgtcacttccctcgcggcgcgtgttgctctccacgcggaacaccgcctacggcacgcgtgtgacggtcagctgcgaacgcggtgccgagtttgtttcgggtcgtggtcggcactttgagactgtgtgcgagttgggcggtcgctggtccgagtcggagcccatcccggactgtcaacgtaaagccatgtcaaaagcgtcgatttagcaattctcccattgcctttttcagccatttactgctcccccatcccgcaaattgctaatggtttcgctgtgatggcctcaaatgtttccttcgccggcatcgcccgctttcgctgctacgacggcttcggctttccttccggcaaagaaatggaggaaatcttttgcaccgacgaaggccgatggacccaaacgccgaaatgcaaaagttggcactttcgaatgccaatttgttgcttattttcttcctttaaatcccaatcagcacccatctgtcccatgttgcctgtgtttaactttggcgagcgatcgcttcaatttggcgacggcatcggatacggtagtgtctacagtttccaatgttctgccgggtacagacgagacggagcacaaaatattgtatgccaatccaacggacaatggtcagcggcccagccgcaatgtaaaagtacagtacaatgtgcagggagcattctattgccataa

SEQ ID NO: 54070 - DNA, 610 bp, Heterodera glycines
atgacaattttctatttaaaagaaatttgtcttttctgtggcttgttcatcgctttatgtttagataaatacttaaaaaggagattagactcatgaacgatttgttaattttttatttattcgagttaacaaatttctttaacttgataagatctaacatttagatatttatgttacattctgcttaaaaatcgtgaaattaaattagtttctaatattgtctaaataataaaaaattaaccaattatcatattttagattaatttttgttgcagatgttttgcatttcataataaattttatttccctattttcaattattaatttacaggcttcagtattcagttaaatatttttgaactatctgtacaattttggttgttttctaatcagttaataatatccattgagttatgatcggttctctgaaaaatggccgttataactgttgaccccatatttgtgaaaatagttaggtatattaaaattacttactcatatttatactcttaaaagcttgagaaaaaattataattaaaatatatatttggttaatgaatatatcataaaattaaagttaacaaagcctaagagaaaaatattaaataaa

SEQ ID NO: 54071 - DNA, 2247 bp, Heterodera glycines
  unsure (1)..(2247): unsure at all n locations
atgncattcagtggaactcggaaacaaaaatatattggtggtcttaaaaattatattaatgtggaaacaaaggatgctaaggattngatggcatatgtgaagacggggagaatttgggtaaatcagtagtaaattaattctaataagaaaaataaatcaaattatttataatttttaggaaacgtttggaccgattccgcctccaatgtatgcagatcgtatgcgcgcttttaggtatatttgccttacaatttgtattttcttctgctcactttttcagacctaaaaattaccaacaaaaaaattaattaaatctgctaaaattattgttaaagtgtataataaccaaatgagttacaggcatcaattataggatgtcatgtcttaactaaatcccattgcctattcattctaatccccattatccgttaaaatattattttcaatttgagcatggcttgcgcctttcgctggaaagcatcgacagaaaatgttttgccgtccgaggccattcgacaagcgcttatttcggcattttgcgattcgtacggaaagtcaaaacaattcaaagaaacagaagaacaattggaggaagcaaaaacgaaaaagtggacggatttggtgcagaacgaatattcaattgcccaatacactgtgaccatttttggggtcgaactgttcaagcatttgatggagcaatcgggcaaatacacctggaactttttggtaattcgtttaaatcgaaatgaggaagataaatacaataaaagaatttttaatttaaaattttcatcaccgttaggtccacgctgattgaattttgctcggatgcgtaaaattggatcgcaatgagcacgacgaacagagtggcaattggcaacatcagagacgaattgccttattcaattaattatttgtgagcaatgattaaaagtggccaaaaatgggtccgtttaaatagcaaaaattttgtgaagaaaatggtgtaatattttgaaatgtgaattggttgtgcaaataacatttttatttgtattatttcggtcataatatttttaacgcaaataaaattatggaaatacaatacgagtccatctttgaaatcccaatcctcttcaagtattttgatcaagaccaacctgattttttctcaagatatttaaaaatttagtttttttagataaggccatcgccttttttcaaatttggttttttaactgtttgccaataattttttttttaaatactatttttatttttgtgtttttaaataataaataagacagaaaaaaagtttaataaaaaaaccgaaaatgcaaaacaataacattgcaaagaaaaattacataaataaatctaatactaagacagtttacccacacacaaatgatgctaatcgaatttagaaaactgtaatttaagggtttttttgagtaatgaaaaaaaattcaggaaatgattttataggatcatccaataaaaattctttggattcatttttccaggagaacaaaatttcgtgtcgccatttttagggccaaaacccaaatgtgtgcccagtcttacgaattatcagcatcatttgcatcccatgaaaaagaaaagtggtaaaacagaaaacacaatgctaatcaaatgatcaacaattttctatctaagctgttctttctgatcagctgatcaccatttggctgatcattggtccactttctttggtcgtcctcatatttgccgatcacttcgaaccactttggtctgatctgagaagacacccttcacatcaaagttctgcaaatccttaatccgttgatcaattcaaagattatgttttctcatgtttttttcatgtacaataaaattcaaaaatttcgttggcggtttgaaaatctctaaataaatattattattaaaaatttttaaaataaaaaaacattcctccatttttaaggaatgaaaattaactgttaaaataaaaatgtgacaaaattaattaaaataataaacggtttgccctctgctcaataatttaaaatagagagtattacatgtagtttcgtttttattttaaatatgctttttgaaagaattgaaaaattatttaaatagaatattttagtgcatttaaaagcattaaaaaagtttcagttcaatcaaatatatcaacttcgttcattattctatgcacttcacttctccatttgtcgcttcttctatccaattgcaatcaatttgagtgtagtcagctga

SEQ ID NO: 54072 - DNA, 163 bp, Heterodera glycines
atgtcccctcttcgttttctcgccgttctgctgctgatctgtgccatgttcagcttcaacaatttggggctggccaatggcgaggaaagcaaagacagccaagtcgctctccgtcccgatgttgctgctgttcagcctgacctcgtcgttgttcgcgctcgcc

SEQ ID NO: 54073 - DNA, 315 bp, Heterodera glycines
atgaagagaatgaaaatgccaatgccaatgcacttgctgaggaaccaaatggagacgaagaactcactcaaacaacaggtgttttttgcgcattattaaacaatgtttttgctgaccccggccatttgccgaaacagaaaatccagctgatcatgatgaagaagagccatcagattctgagcttggccaatcgaaggttaatggagaagacggtgccgactcagcgccagcagcaatcattcaaaatggtgcgacaaatgcaaatttaaaaaacgcctattattcaagaattaaatataataatatagtaataaa

SEQ ID NO: 54074 - DNA, 691 bp, Heterodera glycines
atgaaaggtgtaccagcggaagaagaagaagcagtgacggcaccaccaccagcagcagcagaaaatttgccggaggcagaagaagaagaagcaccatttgttgttgtggaggacgaagaagtgcgaatggcagcagcagcagcagcagaagaagcagttgtggtggagaatgaagaattaggagtggcaccactaccacccccagcagaagaagaagaagaagcagttgtggttgtggaggacgaaggaatggaagtggcatcagcagaagaagcagcagcagtgattgatgaggaagcggtaccaccccctgcagcagcagcagcagcaacggaacacattttggatggagatgagggagcggatgcaatggataccgttttaggtagaaaatatcataaatcaataacaaaataaatacaatattaaatttatttattcatttccagttttggacgatgggtcacctggacaaccgggacaacccggacagccgtcgcataagcggcataagaggggcaaagtgagtgcccaattttttatcattcacctaaatataatttattcttattatagaatgtggcaggatctgagcgacgccgaagacggattgccagggaagccgccgcccaaaatcaatgattttttgagatgaattgttgcatttaattttttaaattgttgacaaaaa

SEQ ID NO: 54075 - DNA, 558 bp, Heterodera glycines
atgacgtctaaactgataaaattggcggaagaaattcgaaaacaacggaaatgggtaattaaataaaaattgttttattgattaaacattttatttaaaagcccctttatgatggctgccatattatttctgcccattgattgccttttatgaataatttagcctaaatttacaatttttatttttaaaataaaaatatttaaattatataatagaaaattttcatttttaaaaattcattttatttaatcttctaactaaggctaaaagcataattaatttgaaaggtgctatgacgttagtcaaaaaccatcataatgggcgttagtcaaaaacccatcaaatcagacatttgacattttaatgtcatttactgatttttttttataaaatcaattaagtaataaatttaaatatttgcctttaccgatttcaaatatatttatataaatatattttatattgcagctatataaattccttttggaatctccatcatattagaataaattaattttaataattatttattgtaaataatatattataaaaattata

SEQ ID NO: 54076 - DNA, 1750 bp, Heterodera glycines
atggaatgtaaggaaagatgcaagaagtgctgtagaatggggttcgggtttccatgtgcggatgtgtgtgctgggatttattgcgcggagtgtaatcgcaacttctacaatacggaatgttttgagtctcacaagaagactgcttgtagggagtacaaaaatgcgaaaagtgtggagagacacacaacacaaggaacaaacacacatgtggggagaaattctgccgaatttgtaaaatttatcatccaaagcggggctgtttcatccagaagttaaaaattcgttcagcgaggaaatacagaattgttgcatatgatcttgagacaacattgtataacggagtccatgcaccgaatctcgtttgcgcggcgttgacatgcagtgagtgcgttggagagaaaaggaaatgtgagatttgtgaggaacagaggatgttgacttggtcggcagcaaatgtggaggaccctattggcggatttatcgattggattatgggcttcaaacaatttgaaacggttgctttttctcattatgctggacggttcgactcacatttcgtccttcgtgtgctgacagaaagggggcttaacaccgaactgatgatggcagatctgaaaatctatcagataaaggctaagggtgtgtactttcgggatttctggttgctcagccaaaaaaaattagcggatcttccaaagaccttggggctgagcaacccggcaaagttgtactttcctcataagtacaaccaaaatgagaactttgggaagagattgtcacacctgccgccttttgatgattacaatccgaatgctatgaaggaggaggactatgagaagtttgaaggatggtataacgagaattttgagaccgaatttgagctaggttagagaaataaaattttatattttaaacacgaattttttaggagaacagctcaaggtttactgtcaaaatgatgtggaaattttgatggaggcaattttgaaattccggcaattgtttttggatattactgacgggatggatgtgttgaaggacagtgtcacaattgcgggggtcgtgatgaggatattcaggacgaaattcttgaaggacaggcacattccgatcatgccggagggaggatatgagagagccgagaatcagagcaaaattgccgtgaagtattttgaatggttggcgcactgggaaggcctaagagtcagacatgcggaaaatggtggggagattaaattcggggacctcaaagttgattgcgtcattggtgggcagaaaagaataattgagtttcaggttttttaaatagtagtcattcgtttaatgtcagttcattaaggggtgtgcgtaccatgggtgcaaaaattgttttttgccctgggctgttggaccgaacgggctgtgcatggaagagaattacagaaggacagagatgcggatggaagcattgagagatatgtgtaaaaatttcagagtggatgaagttttggtttgtcaatttccaaatttattgataactgaacaaatttaggaatgtgaggtgaaagcggaactgaagagaaaccgagagatgaagaggttctttgaaagtgtgccggataaggggccgatcaatccgagggatgcttacgccggaggacgaacaatgcctttttgtttgtacgcaaaggctacggaagaagttgagatatcaatgtttgatatcatcagtttgtaccccttcgtgaattatggtaaaaaatctgcttaa

SEQ ID NO: 54077 - DNA, 998 bp, Heterodera glycines; identical to SEQ ID NO: 23368

SEQ ID NO: 54078 - DNA, 1601 bp, Heterodera glycines
atggcatttgtcgtacttgcgacggtaacagcaatggtggtggtggtcgtggtggaaaaggcaggtatggttggtggtgtaccggcaacggaaatgtcaaaccatcataccacgcaggctaaaaccgggtaagaaatgtacatttattcttaaacgaaaagattacaaaatttgtttgtccattaactgcaaacggtgctctaatttcagtgaggttctaaatatatttttaaagaggaaacattactgacaacttgccctcggattcgacattgagtgcgttgtgaaaaaaaaaataaaatacaaaagctaaaatggattctttttttttaatgtgcaaataaagtgacttatgcaataggcattactgccttttattacgcaaaaatagttggcctttttcaataaaaaaaaatcgctaatcattgtaacataataaacttagccaacagcgatagaaattaaataaaatccaatcatcatcattatcatataaatttaatgcattacagaatttaagaaaatgtttggggtcaaagattgacgaacggaggatggatcggaagggacaaaggggtaggtaactttttttgttgaaaactgtaataactatcaattttaaaagcaataagagaccaatggaaagcataaaataaaataatttactttatttaatgtgtaacgggtttaattcaattattttggtttatttgttaacagtgttgaaaattattatcaacatcgcaattcccaaccgataatccactggcaaattgagaaacagcccatcagaagggcaacatttcgacaatgttgaacagaaagtcgggcccgaaatttgccttgacggagtcgttcatgtccacgagagtacagcacgcatacatgtgaaacaattcggcttgcaaaaattggcttgcttaagaatgaaacaattcgaatttgttttgtcttttgaatccattcatttactcacaaattttgtggccattcaatgtgaaaaaaatgccccggttgtttgcgtccattccgcatccgacaacatcaccgggaccaaactgtgcgaatccgtcaagcacatccggcacgcatggcaatttgctgtggatagacccgtcgctccacaacgcaatgcttccctcaaaatgcccgaccaattcatgcatcctcatgtgcgctggggcaagtccaactccaacgtcccttaatataatcaaacttattttaaaacatttttttttaattcacgatttcatctgaagaacggtaatttcaaagtaaaacaatccaaaggcactgttggccggcataaccgagcgcaccgacacaaaatctttaaaaaaaaataaatatttatttattttattaatattattacagttattttgcgacaaatgctcgaccaacaaaaaatcataaacgtaaattccctcgttgcaatgattaatgtcccagctgtttaattgctgggccgcgagaatggactgaaggcaaattttgatggtttcaacagttcgggccagattattctgaaaaaatgaagagggcgaataattaacaatataagaaaaaatatataatttgttttttattcaattaaa

SEQ ID NO: 54079 - DNA, 49 bp, Heterodera glycines; identical to SEQ ID NO: 51181

SEQ ID NO: 54080 - DNA, 132 bp, Heterodera glycines
atggtttcttcaatacgttttactctttcagctgcttacgtcgtgctttcctgcaaagactttgtcgaatttggcgaaaaggtgggccaatgccgagagatcgacgacgaccaaatgccgggacagatcgat

SEQ ID NO: 54081 - DNA, 756 bp, Heterodera glycines
atgagttttgtattaggaaaagccgaaagctccaagtaaaaattaaataaaaaccattaatttaagaccttgttaatcaagaattgtaatcatttaaattaactaaaataaattgttcaaacagttatatgtacaataaaaaaataaactacacaaaacactggtcgaaatataacagtaaaagataaaactaatcacttttatgtgtttaattacccacggttgagattactcaacatgctattttaataaataacaaaatacaaataaatttataatctctgttaaatcctaaatgtttatatattacaccaacgaaacataaattaattgcaaaaattgacattggctgggcctaattttaaagttgatattaggccagatacattagttagttaaatttcttgccaaaaactacatgattttaacatataatacaacaaataaaattgtttaaaaataaaaatttaaaaaaaggtctaaaaagcataattttatcgccgaagctaaaaaaattgtttcacattacagcaacattgaacttttattggaaatttcaattaatgccaaattgaggggggcatcttaaaaatttcgtgttttatctctaaaatttcaaaattaagtttataatttttcactaaaaaatcaatctatttaagagattatgataattaaattttatcttaaaatacattgcattatgacgagtacgtgatttgtagggtttaaaaatgaaaaataataactttttaa

SEQ ID NO: 54082 - DNA, 625 bp, Heterodera glycines
atgccgtccaaaagcactgacggacagccgattgtggtcactgggcctgacaaagccagcgttgaagcgacggagaaggcgctgagagcactgtgcccagtgacggaactcatcgaaatgaacgcggaacatcgctcgtcacttatgggacgtggcggagcaattttacaagaactcatcaggaagcattcggtaactcgtcggaatgccttttttctcacaatcagcagggaggttacaattagtcagattttcgcgcataaataaacaataaaaccgttttttttgtatttaaactttccaggtccaaatagtcgttccccgaggtgaagcaagttcaagctgtaatgtttcggtttccggtgcccccgaagacgtccgtgcttgtcttatggaaatccgtgaacatattttaccaattacacgcacaattttggttacacctgaaattcgaggtgaacgcatactttattgacttatattctataaataatccattaattaattaacaatttcaggctccttgatcggctctgggggtcacaaggtgaaggagctttgtgacaaatttctcgtgaaaattcatttttcgaacaaaagtgcatactgttgtgaaattacgtaa

SEQ ID NO: 54083 - DNA, 792 bp, Heterodera glycines
  unsure (1)..(792): unsure at all n locations
atggagaagcaattccattgtcaagtgatcggaaagggcggcgagtttttacgaaggctgaaaaggaagcacggagtgaaggaaatcaatgtgccatcagagttttccaactcggaccnaggtgggcatggagaaggtcaagcaaagggacccctccgtttttcagattcatattgaagggccctctctcttcagtcttcgctcatgcaaagacgacctgcttaaactgttggatgattggcgcaacgattgctacgaggaggtgccggtccagcgtcgttttgtgccgatgattcggggaaaaaattcgaacaaaattgtcaatctgctggacggactgcccagggtcgaagtggacttaccgccgcacacaaacaacgacgcgacggaggacagtctgataaaaattaggggacataaatctgaggtgagtcggacaccgacagaaattatttgaaaataatgccctccaatgttttccgttaggtcactgtgtttgttgaacgtctcaaagagttcgtcgacaatttggccaagaatcatcacgaagacttcattcaattgcccatggacgaccctaatcattcttctttggagtttgccaaattcgtttgtgcaaaaaagaagcagatagagcatcggttgcccaagttgaagttggacttccaaagcgatgacgacacagcacaaaatgcgaaccgaacggttcgactgattgggccgctggatcaggtggaagccgccaaagagacagtgttggaactcatcgggagccttagggtctgcatttga

SEQ ID NO: 54084 - DNA, 741 bp, Heterodera glycines
atgggcacctgcccgccagcgaaacgtcgaaatgagcactcagacccccgcccccaccaaccccatgccccatgggcacctgcccgccagcgaaacgtcgaaatgagcactcagacctcatggattccacacattgtcaaaagtggagtccttctgtctttgattgatagggttgtctttgtacctgataaaaatagtcggtcataaatttgaagtccttctgcctttgattgctagggttctctttgtaccgcataaaaatagtcggtcattaatttgaagctccaaatcacccacacgctatgcaatgctcttcatccgtccacgccagtgtggcaaatgcccacaacaacagcggcgggagccaataatgccaaggtggagcaaaagccgccggaattgaatgccgtgccgaaaataatggcatcgacaatggcattgcgcaatggtggtcagctgcagatgaacaacggcgggaactcaacaaaatcgacagcaacaaacggtgccgtcgtcaaccattccaagcagtaccaggaacaactgctggagcaacaacggagagcgagggaggcgcagagcaacgacgactccaacgagtcagcagcaacaacaacgatggcatatgatgaggagctgcagcagcacaaccaccaaagtttgaagcaggacaggggagaggaggagagagaagaggacaacagcaggcgaagacaactgctcagggaacaatgcttcaag

SEQ ID NO: 54085 - DNA, 972 bp, Heterodera glycines
atgcacagcggatcgggccgaccgaaaaaactattaatttctccatctgaaattgctacgacttcgaaagctaatatggaagttattaatcatccacaagctaatgatttgttgaatttattcgcttctgaatctattcaatttccaattagtcaaccaatgattgatattgaccgtgtgacagttgctggtgtcaataaggaagtaatctcaagcatgtggaaagacaataaggaaatgtttactgaggatttgatctttgcttttcaacgatatctcacgagagtgattacaaacaaaaaagtggttgttgtaaatcccctttatacagacttaaacatgcattttggcatgcatatatttgattacaatgctttagacaactgttataattattcgaatgattatgatattttgcttatgacaataattttcccagggcactttgcacttataatatttgatagatctgatcgtgaaaatattcaatgtttgtttatcgattctctgccagattacgatcgccttactgatacacaatatccactttatgatttccgcaaaacagaaataattaaaaagggaatctgcgagttaacgcctgggctttcacaaactgatattaatattcgaaccttaaatcataatgaattcacacgtcagaatgacggcattaattgcggcgtctttgtaattttatattccgaattatatttgctgagcggttcattgtttttaccaaatttgaacattaatgttgaaaggcaccggatcctttggcatttaatgaagttattatatagtaatgatgtggcacatgttggacgtaacaatttgattacccatcaattggttcaaaatccgtcgttacctttgtataatgtggagtcagttgttgatgaaacatgcccaagggatggaaatgcagcttttatttgtgtagagcctgaattcgacactgctccagaggtg

SEQ ID NO: 54086 - DNA, 384 bp, Heterodera glycines
atgaagggaactcaaagtaacaaaatcaattgggttttgattttttgtgaaaaaatgatccatcttttgttttttcgtaagaggcagacgggaaattgtagcccttgaagttcgaggtgtactcaaaccaattttttgaaatggattgatcattattgtctgaaaattttctgacactgttcgttttcttgaatttaagttttgtgatgcactcaaatttaaaaattcagtgaacgcggaagcttcactaagggacgagtgccctaaggaggacagtggtcgatcctcagtttgcgtcttcctcgcatcacgtcttcttcgttcttttgagggcattttttaactaaattcaaaaagataaatatatcaatgaatgcatcaaaa

SEQ ID NO: 54087 - DNA, 431 bp, Heterodera glycines
atgaaaaaagtggacatagaagcctcaaaccaagttagaaatgcgtttttcatgcttattatcacgccccaagttagcaaaaaaacaaaaaaacaacagcatatgctgcaaaatgagcactctagtaatctattttacctaattgaaaaatattcaaaaaattaaatttaatcccgattttagtacggaatatcggcaggcattccaaacggagttccaatttgttttcagaagaatttcaaatcaaaatcaagtaattccactgcagaatacgacacaattatgagaagtttttttttgcaaagaaaaaggaggaaattgaagttctctactgatatttttacaattagccaatttttaagggttcgtgataacgttcggatgtctaattgttgtctataagtaatcaactaatttaatgggtttatcga

SEQ ID NO: 54088 - DNA, 872 bp, Heterodera glycines
atgcggtaaaaaaaatgacgggaataaaattaattagttaatgaatataattattgttgaaataattgcttttaaagcccggaatagggctcgttggtactgagatgggctttttgctcgaactttcttagagaaaaattttggaaaacatctcaaaaaatgcggcaaaatttttccgctcctggccttaaaatttagtttgtaggaaaaagccgtcaggcaacagcatgccaaaaagcccgttttggccaacggagcgccgaacgggccttttccacggctttttaaaacgggcttttcgtaataaatttctttaccaagattgggtattaatcaaatttggcttagcattaatgttagcatgagagatatttttgagaattacaaaattttcaaaaatttgataaaaaatacgcttaatccaattaaaaaaaatcgacaatttgaaaaggcctaagtctattcgataattctttaagataatacattttttcgaaaatttccgagatgtcagatttgcagaaaagttattaggtgtacaatttggcaaaaaaaaaatattaaattttccaattacctaactgaaaattcgttggatcaataagggcaaaaattcaaaaattaaattccaaataattttttaggagattgatcaacagaacagtgaggacgagaaggggagcagcaccagcacaaagcgtgtaaatccattcctaaagccggatggaagcagctacaacaaagacaaggatgaataaacagaatgccaaacattcgaaggaattgatcaaattcaaaaaaaaacgattggatttatagagccctcccccaacaaatattggcacatgttatgaaatgaattagttaataaa

SEQ ID NO: 54089 - DNA, 752 bp, Heterodera glycines
atgttttttctaaaattttacaatttaaataacgtactcgatccagttcctgatccagtgcctgatccagttcctgatccagtgcctgatccagtgcctaatccagttcctgatccagtgcctgatccagtgcttgatccagtgcctgatccagtgcctgatccagttcctgatctttttttaggtaacaaatatttgcaaatcgatttacgtaagtatttcctctaatagagccgcagggggctcaattttcaaataattaaatttatattattataaaacaattataaacggtaaataaatttaaaaatctataaattattaaactagagtgccacgggaccgggaattttgggcaaacccgggaccgggacctttttgggttgaaaatccgggaatttttggctgggaaaaccgggaaaaaaccgggactagtcccggtcccggtcaaaaccgggaccttggtactcagttgtactcagttgtccgctaccaggtcccggtcccgtggcactctatattaaaccatatacgcattctaagaagaaagtttattttattttatttttatttttgtaatttgattatacgctttaacctttttactaaaaaacagaaaacattttttggcataactccaaaatcgtttttaacagctttatcggagagggggttctaatagagagggaggctattaatagaagaaatacgctaaataacttaacacattattatttttttgaaaaaataaa

SEQ ID NO: 54090 - DNA, 505 bp, Heterodera glycines
atgatcaaaaactttgatgagaatataatgaacttttcccagctgataaaactcgatttgaaccttgataaaggtaaaaatggagcattgattttcattttaacctcaattatttcttaaagataaacaacttttcattttgcccgaattgatcagtgaattggaacaaatgcaaaaaaacggcaattggaattatgccaatttaaagcatataaaaatggcggaatggaatctgttggaattggcacttcataaagagggcgaaagcaaaaaatggttggaaataaagaaattatggaacaaatggaagaaggcatttaacggaaaatttaaaaattcaaacaaaatgccaaatttcaaaaaattaatggacgagcttaacaaaaaattgaaagatttgagggaaaagaaacaaaaagaaacggagaaaaaggaagaaataaaaggttaacaaaaagcacagaaaagaagcggaggaggaaaggaagaagccaaatttaataaa

SEQ ID NO: 54091 - DNA, 1054 bp, Heterodera glycines
atgcaattttgcgatgctcttcaaaacgccgttcattctgcgctcaaagcgcgcgaggtgaaaagggaaacaattcaaaagatcaccgaattggatgaattcaaatttttggaagctattctaagcagcttggaatataaaggagaaagcacagaaaaactgaaaaaattttcaatggttttttcgaaaaaatcatttgcggataaatgcaaatcgttgagtgcccttttggccatattggatcagatcaaaacggagtacaacagaagcagtgaaataatcagttccaaatctgccaaaataggcatagaattaaatgaatgggaattggaaaatgtaaaatttggtgaaattttatacgaaactctgaaaagccattcgaacaaagtgaaatatgacgaaaagcatcaattaatggaatttcctctgcaaatgtgcgaacaattcattgagcgactttatgcattcgttgaaaggtccgaatttcatttttgacattaaatcgaaataatcgaaagttttttcaatggggacagaaagaaaatttttctaaaaaaattatttaaactattcaaattttggtggaaaaaatgaaactttgctgtaattcttaaaaaacaaaaaatttattaattttctctatctttttcaaaaacttggaatatctctttccatatagaaaatcaatgaattaaaatgtttttttacgaaagaaatgacaatgaagttttggagaaattactcatcttaatattagcattagttttatttctgatgccattaacaaaaaaataataaaatttattttttaagaaatttggctaaaaatatgccaatctatgaagaaatagactttataaaaacaattgaaagcgttgtgtcggaagaagaaaaagaattggtgatggaaaagcggcaaaagtcaatttggccatcagtcaatttgaaattgttcaaattgctttttacaatggcaattcgtttgtgctgcttacaaatggaacaaaaggaatttgcactgtcaacactttcatttgcactaaaaacggagtaa

SEQ ID NO: 54092 - DNA, 1042 bp, Heterodera glycines
atgatgcatggaccatgttcagaaaaatcattgtgttggaacaaaacaaaaaaaaaatgtaacaaaaaatttcctaaacaatttcgagaagtgactgttataaatgaagacggttatccgctttataaaaggcctgataatggacgttatatatatagaaaagggcaaaaactgtcaaatcaatttgtggtaccatataacccatttttgagtaaaacatttagagcacacataaatgttgaaagagtaacagatatttcagttgttaaatatttatatgaatatatatataaaggatatgacgcagcaaccatagaatgcgtacaaattggagaagacggcacaaaaaaaatattaaattatgacgaagtcgctaaatatttagaggcacggtatttaagtccatgcgaagcatgctggagaatctttaaatttccgatgcaaggaaaatcccattcagttgatcaattggatgtgcacttagaaaatacccaaagagttttttatagaaaaaatgcgactgatcaagaaatcgaagaggcattgttaaaaaattcaaccttaactgcttattttaagttttgcctagaaaatcctgataaagaaattaaatacactgatatgccaaaatattgtacctgggttaaaaaagataaaaaatggaaatatccaagacaaggttaccaaaataaaattggtagaatggtaccaatacacccatctgaaacagagaaatattatttgcgttttcttttgctaaatgtttatggaaaaagttttaaagatttaaagaccgttaatggagttgaatatgattcattcggtaaggcatgtttggctagagggttggtgagagacgatgaggaatggcacaaatgtttagaagaagccacgtatttttctcgaaaacacgcgaaaggcttaagaactttatttgcaaatatattggtacattgtgcaccaaaatatcccgccagattatcgggattcattcaaagagtttatggttgatgacattaaaagaaaaaatccttccttttca

SEQ ID NO: 54093 - DNA, 358 bp, Heterodera glycines
atgaatttattcatattattccttttgaatattattttatttttgatcaccaaaattgatcaaattaaaacagtcaataagaaattagaacagaaaacatttgacgaaatatttggagaaaaatggcaagaaaaagaagaagaaaaattggaagaaaaaagggaaataattggaaaatattataaaataaaagagaaaataaagcaaaaaggaagaaaatacacagcaaaagaatggaataaaattgaagagaaaattgcattaatttttataaaatctctttacattgtgaatttattttatttttattgaaaataagtttattattttcgaatgagctccagtagaaagtaataaa

SEQ ID NO: 54094 - DNA, 1293 bp, Heterodera glycines
atgaacggcactggtgccatgccgtcgtccgcgccgccgatgtccagtggcaccaccaccgtttcgccggcaaacggatgtcatgccggtgcgcaaattatgccgtccgccgatggcggcatcattggcacagtgggacaatcgatcggtgccggtgccaccgtcacaaccaccgctggtgtcagtgttgttgatcaccaacagcaacaatatttgatggctgctgcagcaatgaacggatttggtgggtttttgagaagtgatcaggaaaattttggtttcttgatcaataaatttacaaagcaaaaagtgatcggaccgtaaaaacttatgatcattaaaatagaaaaggtgatcagaaatgttttattagtcggcaaatatttaaaaaagtgatcgaaaatgataggtatattttgcgcataaaaactgatcggaaatgttttttgaccaattcaaaatattgcccaaaaatataagaattaaatttttggtcttttttctggccttattacaaaccaatgtttcttcgtttttcaatttatttcatgaaataaatgcattttcaagtgaatatttaacaaaattttcagccaaatttaaatttaaatcattttaaatcattaattaatttatttatttattaattattattctccaccaatttttagccccaccccatcctcatcttggccaatttatgctgaatggtggcggcgcgccgccgaccgccatgccgccaatgcctgccgacttttatggcttccccgggtcggcggcggcggtgaaccacgggccaatgatggcatcagcatttgccggcggtgccatcgtcggcgccggaggcgctgccggtggcggtggcccaccattttcgccatcatttcaccaccaaaatcagcatcatcataatctcctaaatcagcatcaaatgcaagcagtagttgcagaacaacaacaacaacaacagcagttggagcagtacatgccacaccaccaacaccacctgcaccaccaccaccagcagcaacaacaacagctgcaacagcagtaccagcagaataaccatgcggcggcgaccattcttcaatgaaaatttcgcaaaaaaaaaaatgggaaaaaatgaaaattcctaattttaattagacgtcacaattgaatggcatggcatacatatatgtatttgcttatttcatcataaattacctgatcaaaacatcatgaaattatttgaatgtagcgatttcggaaacataaaaaaaaagttacggtccaaaaaatattaatggttaa

SEQ ID NO: 54095 - DNA, 1602 bp, Heterodera glycines
atgattgctgcggcgcctggcggtgccggaagcaccagcggctatcgccattaccaagcggcacggccggtggacggatgggcagcgcacgcggccgcgctgaacggaggcggtggcgcggacaatgcaccgccacgcgtcatggtcgactcaacatcaacgcggcacacgcatgttggcacgccgttgcatggtggcggcggtggcatggctgcgtcaacgacggcaccgctgatggtgagcaaaaccaaaaaaaatcggggaaaatgttgcataaaaggcgtagttgctacggcatgataggtactgtatattattgattggttggatagatcggtgcagaaattatattttgaattttttcagtaggcaagcaagcctccagaaaaagaatttttcttgttttgtgcccttgttcgtacttggtactgtagaaataccgtaacggcacccactgtatcgtttttgggcctgatgaccaaatctgagcaacacccaagacactgactgatcaggaaatttgtgatctgtaatggtggctgtcttgatcaaatttgtagatggcaaaaatttcaaaaaattttaaatgtttttcaaaattttatttttcggatcaccgaaagaattgtgccaaaccgttgtgccggatggcgtcacttcctttccataaaaattgtgttggccggcacagaagtccgagcagtgaatgaataataaagaaaagtgaaattgtgccaaaaattttccgattttttttctttttattgtaaaagtgccaatttttgttttctgtttttttcgataaaagagctttttcttaaaactttttttttcacatggtcatcttattagtataatatccacttttgcttgtagtaattaagcctaattatggcaattatctgagacaggtatttacattgttctaatgaagaggggctatttattaattagcccctaattggtgtgccatttgatttgcattaccaaattcagatgaacagcagcggcggacgcggcggcacaccggtgaaaggcagcggaatgtttgttgccgcgatgccgtcaccggaacacgatgggggctatcatcagcatcattatgacactccaaatcgtcaatatccgcatcataatccgcaacagcaacaacatcattattccgcgagcgcaacgcgcgacgacgcgtcatcggaacccggcaacaacaaccacctgcagcaacagtctccgcccacgccaattagtccggcgacatcgtccggcgccgtcgctaatgggcaactgaaggtggttgttgttgatgcggatactctgattaatgacgataacagtgataacatgctgattaattgctgggagcaaaacaaaaactctgatcactactgatcagggctaggcttcttaattacggaaattatgcgggcggcgtttttggactcacgtaattagggcattcgccaaaaaaaaaaattaacgaaatattgccgtttttcaaaaaaaaaactgaaaattttttaaacgcaaataacaaaaattcaatggattaatcagagagtgatcagagcaattgcatttaccaaaaaaacattgatcaataaa

SEQ ID NO: 54096 - DNA, 485 bp, Heterodera glycines
atgaaagcaaatggacaaaatgggaagatgaagcgattggatggcaaacttatgatcaatggaacaaaattggcattcacatttataacgaggacgaattcgggaaagggtaagcgaatgctttttcaaaattcatatttattttgcgtttctatttttaggcttctcaacgaaactcctggcccaagtgatcagcttacagaagtgaatgaatgaactgttgagagtgataatcaatttgaaattgcggtgttggataattaatttgacgcttataaaactgttttttttgttgcggtgatcacaaattgtgttatacaatatgccttaggatgaattaagcgatttgctgaaatcaaggtcattctttgaacatgcttccagggtcgctgatcacgaatccggcatccatttcgacctatttcaatcccgaacccgaattcgaacaatttttttgtaaaaattttgaaaaaattgtcaataaa

SEQ ID NO: 54097 - DNA, 595 bp, Heterodera glycines
atgctcattgtgccatggctgctgctgctggtggtggtgttggcattggtcattatcaccatcattttcatgcaattggtgttggccatcagcagaaggcgcagtatcattagtggtggtgaagacggtgttcatgttgattttctgtgtccagtgagtgttcgggttgctggaatagcatcattaaaaaacaatttccaaaattatataaaattttttaaatgccagccaacccattttgtttgaaaatttaagaaaattttcggtggaaaacgaaaggctcccaacccactcacccatatttggcaaaatttgtgaagaagccgccgatgatgcgcatcatttgcttgtcatcccaattcggtcgaaatttggcgtacaaacccttgcccagcaaatagcgcgcgtcatgacaatgggtggcagctgaggggggggggggggggggaaatgctaaatttaacacaaaatttttggatttttaccgaaaatcgattttaagaatttttttttatttaaaaaatgtcgagtgaatcacttgtccggtctctaatactaattcatacccgaaatatgaaaaattcataattcaaaa

SEQ ID NO: 54098 - DNA, 373 bp, Heterodera glycines
atgatgcgcatcatcggcggcttcttcacaaattttgccaaatatgggtgagtgggttgggagcctttcgttttccaccgaaaattttcttaaattttcaaacaaaatgggttggctggcatttaaaaaattttatataattttggaaattgttttttaatgatgctattccagcaacccgaacactcactggacacagaaaatcaacatgaacaccgtcttcaccaccactaatgatactgcgccttctgctgatggccaacaccaattgcatgaaaatgatggtgataatgaccaatgccaacaccaccaccagcagcagcagccatggcacaatgagcattgcggtagtgacagcgaacaaagcatttag

SEQ ID NO: 54099 - DNA, 974 bp, Heterodera glycines
atggcgaaatggtgtgtgaggtgtgcggcaccgacactttcacgttggacggtggcttttattactgcgatgggtgcggtgaacggagcaaggtggaagagacagaatcttttccgtcgatccgggaaaaccgagattcaattttttttttggaatttcgtttcgtttgtttttgaacgcagcttttcagggacaccgcgagactgaaattgagtatcaggacgcaccgttggtcaacataaagcgcagtcagaaaaaggcggatcggtccaaaggcgagggcaaaggcccgcgggaggtgagccgatttctcttttataaaacgcaaaaaaactggcaaatcgcgaccttcaaaatcgggtttccattgataatggactgattcatttttctgaccctagagttcgatattttgcttgtcgaactctaataaaataatcatttttatggctttttgctaaatgccattcagcgtcctcgcaaactgcgcgtggacccgcacttgtgcgagcgtgcacttgcgcaggacggcgacttccccgcctatatggacacggtcggcacacgcatttgtacatcgacaaaagtgagcagaggggtggggcaacgctaactccacgaagtttttcactcaacccctcccctccctcacatcgatacaccccaattttccattaaattttttccaaggtgttggccattttcaccgccggaaaccaaccattactaaatttttttttaattttaaattcccaaaaattcgtcattttgattattgttagtaaaaaaaaaattatgtcgagaaaatatttcgaaaatttaacggtaaaattcaaatttttactgtctttaagattgttgccaaagtggccagtgttctcacggatgagccctttcggttgccgaaacaatgcgtggttagcacattttccatgaaattttatccgttttttttctaaaatttttataataaa

SEQ ID NO: 54100 - DNA, 181 bp, Heterodera glycines
atttcttgcttttggccttatggacaaatgttccatttttgcaagtttcatttgtaatatttgatcatttccaatatctcccagcatttgtctctttcacgcttttgtccatgttttgaacacagacgatgcctttcactcactcagaattaaatttttaataaatcagattctcgactta

SEQ ID NO: 54101 - DNA, 80 bp, Heterodera glycines
atgaacggctacagcattctgtgtgtcatgctgctcgtcgagctggtggtcgtgccaattgtcaatgggtcacccgttgt

SEQ ID NO: 54102 - DNA, 964 bp, Heterodera glycines
atgacatcatcgtcggaaagcaatgtgccaaaaagtgaaaatttgggcagcagtgaaatggagacggcggaggaagcggcacaaacctatttgaacaatttacgggttgatttaaataaaatgtaggaaactttaatattgatttaaacattaaatataaacctaattaggattggcttagttttttcactcacatttaaataaatttaatataaaaaatgtttggttggaaattaaaatttattaactatttttgtcatcaatacaccaaattatgatggttggcttagttatctgacctttatttaaatatttatttttaaaaaattattagaaaattcaaatatataattatcatagttcttatatgtatgttttattatatatttaaaaaaatttattggtaaaaaaaattaaaaattcatagatatttttccatcaatacaccaaattatgattggcctagtttttagcacttatctgttattattaatttttaaaattatttataaaaaaattaaaaatttttataaaacattatttagtatgctaataactttaggataatgaatataatcagaaaactggaaaaaaacttttttttttgaatattcaaattttaaatttcagtccttcgatgaaaattccattccttgaaccaataattgaaaaatatgttgatgaatacaaaaaaagtcgtcaattattcgctgaatgcatgcaaaaaattttgcgaaaatcgaaaaatcctaatcaaacggtgaagatcatcgaatttaaaaagacaattgaaaaagaaatgaatgatttgttgaaacatacggatttgccaccagatcaattgattgatctgttgaacactcgtgaatggctattgtcgatgaaaaagacattggcaagggcaaaaatagcccaacatcgtcctttgatgccaaaagggcgcccttgggaatcgcttttttag

SEQ ID NO: 54103 - DNA, 1260 bp, Heterodera glycines
atgccttttttaaatatttattttctgctcctttttcttctcgtcaatcgcacattttgcgatgaaataggtcattaaaaatgccgaaatttatgaaaatatttttaaataaattaataaactttttttttagctcactggattgaatcgtgtaaaaaaattgcacaaaatatacattcattggccacggaattggaccaaattccggatagtctcgagacagaaaaaataattgaaaaaataaacaaattaaagaatttcgcagtgcaattgagtgaattcagaaatgacgaaccaattttgttggaatcgttggtgattgagcatgggcaaaaaattggccaattttgtcacaatttgctgatctgtgatgcgaaggatggtgaagtgatccgtgaaaggttacggcacggaattgaccaacaaatggcacgtgcagtgcaaatccggcaactgatcgacaccatgctaattgattgggaaatttggccaattcttcacaattttgaactcgccgaagacccgtccaatgcggtagcttatctgattgacgagttgggccagaaaatcgggaaaatgcacaagctgttggccaactgcggctcatattacaacactgacccatttgatgaagcgctgcgacggctgctgatggtggccatggacgaggagcaaagtccgatcaaaaagctggaccaatgccgtgccattgtgccaaaacttatggccaaatccgtgcaggaaatgctggagaatttgctaatggatctgttagagccgacaagtccatttttcggcatgacctttttggcagaaattgcaaatgaattaaatgttgcggaaaatatttgtgccggaattttgcgcagttcgaaactttcgccgatggcacagtttacggtcaatgagaaacttcaaaaattgagagcaatggcaaaagcaatgtttttggaacaatacagaacaacaattgaggaacaaataaaaaacattggaacacaattgaaggacggaatgggccgccttatccatattggtatgtaaatggatatttaccagtttaaatgaattagtctcttatttaatgctaatgataattcttttctgtgctcaatttagtttaatgatgtaccaaaaatttacaacagacaaatacattttaggtgggggggggagtcaatctctcccctcctcgatcacaaatgagcttagcaagtcaaggagggggtcgcaaattttgaaattttcacaacaaattca

SEQ ID NO: 54104 - DNA, 607 bp, Heterodera glycines
atgtttggtcgcgaaattggccatttctttttcatgcctttttcgatgggttcgacattcagacagctcagaattcgttcagttattgccacttggtcgtcttcgtcgttcggtgtgccatttccattcttttcattgtcctgcaattgtgccattatttgccccaattcgtccaacttttgctccattactttttttgtttccaacatttcaatcattgccaactcattatgagtaattacgaacaaattttgaacatttttaagtgtttcaattaattgcactcgtttcattgttcctttttctaaagaatgcgtggtttaatttttaatttgaggaattatactaaatttcaatataacaggaaattttttgctaaaaaaataatagtttagaacccacggtgccgaaaaacacatgccagattctaggtttatttgggttttatgaaacatgccagattctagatttatttgggttttatgaaacatgccagattctagatttatttgggttttatgaaacatgccagattctagatttatttgggttttatcaaaaatctgagtgtcggaatgcccttgcttgtctgtctgtcatacgttaa

SEQ ID NO: 54105 - DNA, 431 bp, Heterodera glycines
atgaaacgagtgcaattaattgaaacacttaaaaatgttcaaaatttgttcgtaattactcataatgagttggcaatgattgaaatgttggaaacaaaaaaagtaatggagcaaaagttggacgaattggggcaaataatggcacaattgcaggacaatgaaaagaatggaaatggcacaccgaacgacgaagacgaccaagtggcaataactgaacgaattctgagctgtctgaatgtcgaacccatcgaaaaaggcattgaaaaagaaatgaccaatttcgcgaccaaacatttgttctaattgcctttgatttatttgccaattctgttgacttattctttcttcatcgtcaaactttcttcattatgtacaagtttagtgtttatagtaaaatactgttgcttataaaaaatatataatggatttta

SEQ ID NO: 54106 - DNA, 2071 bp, Heterodera glycines
atgagtcaacgaaattttttcgcaagatcaccagtgtacgacggatggtcttatggttatgagaaagatgggcacaattgtgttgattttgtgtacgaatttgtctgcaatttgttcgacggaaattgtccacccgagaaattttttccaaaaaattttgtggaaatcgacaagaaattaaacggttcacacgcattcaaaaacaaaacaattcaattatacggtaatattttatagtaaacactttataattttataacagcaggcagggctcccaactctgctgatttatcatcattagggttataatttgtatgattttgcattttttttctgcgcatatgctatgaagaaggggctcaaaaatagcatttctgcgttaaaattttttgatttggtgaaggtttttagtgcatataaaagcatattttgggggtttttgagaataaatgcatatttggccatttttgcatttttagagcatattttggctattttttgcaaattttcataagaaaaatgcgaaaaaagcgaaaaatacacctccctaaggatcgacttttttagaatttttttaaaaaatagacccttaaaaattgaaatttttttaaatttttgtaaaaacttttggaaaaaaatttatataaaaaggtaattttgttttagcatataataaaaatttataaatttggaaattcaatatttttacaatcgctaaaaaatgctccttagcccttgttttgtggtttaaagtcaatttttaatttatatacaatttttggcattttttgagggttaaaagacatttttggcagtttttaaaaacatattttaatacatattcagggattttcgggtttttagggcatatttgggggatttttagtgcatatttggcattttttagtgcatacaacttataaccctaatcatcattttgatgcttttcaaggggtcaatgatgattgtttttttagtttctaatttaatggtttttgatgctttttgagaacgtttgctgattatgctgattttgggaaaaatctcttaaaattggccatttttagcctattggcactgcctgccccctgcccaaaaagtttttgtaaaaaaacgcgccacaaaaaatgaacgttttttattgatttttttcatttggagtaaaattttccaaaatgctgattgtttgtcggccaaatgctgattttgaaaattttcagttgggcgacctgtgtaacagaaaattttgtacaaaaactgttaaaaatcagtccaaaattatcaatgccttcctgccgcgcctatcggcatcaccgtgccacttcctattttataaattttagtatttttttttctttttttgtccaaaaatcaaaggctttgctcaaaaaaaccggatgattttttttaataatttttcttttttgtcaaaataattaaattttaaaagaatccttaccgaatgcaaaaaattaaagaaaaaaaatgaatgttaggctgaaataaggacgattcatagaaggaaggattttaagtttcaaagttccgacccctccaaataaggaagggcatctctgctttaattgtacaaaaatgataatgaattttttgccaatgccgtaattttacatggttcaattcaaaatgcacttataattttgctttgatccgtttacttttctaggacagttcaatgagtgttctctcaaagtgcacgaattacgcattgaatacgcgttggcaaaacatggaaagtacggcacccccgtggtcacttatgagacgggcgtggtcgaagatccattcgaaaagattatgagccttgacgatgtgaggctaatccaagaaatacgaaatgaacaaaaatgccatgttgagagcattgaaagtgacggggctgtgctgtgcaaagccgtgctgcacgtttgctccaataaatatgtgatgtgcatggcgatcaaggattatacggcaagttttacgatcaaaatcacttcaagtgccaaaaccaattaaaaagggtgtccgcccaatttgttgcaattgctcgatttgctgcaaatgaaataaa

SEQ ID NO: 54107 - DNA, 757 bp, Heterodera glycines
atggaaaatattttccattttttatccctttcactatttgccgctttcgcacttcaaaacggcgttttctcatcacaattcgattgctatggtaaattttaattttaatttcttttaatttttgtgaaatttttagtttttttgccccctattggcctaaatccaaaaagcacttccgaatgcccaaaagggttccaatggttcccatctgttcaattttgttgcatttctgccgaccaaaactttcgtccaactcctgccaccgatggccttttctatcagcagcgttacttctcagtgccggaattcgctgcaaatgattccgtgccggagggatgcattcgtaagcatttaaattttaattttaataaaaattaaatcaaaatacaaaaacattacaaatttattgggtttttaattgtcctttttaggcgctgtgcactttcaaaatgaaagtttggcctattgtgggccacgaccattgtcgccatcagtcgaacggcaaattgccaaaatcagtcatcaattcaccgatatgttgactattccagtaaaggatagcttggcacagaacatttattgctgttcgtccgacggcaaattgtcggccaaagaccaaattaaatggcaaagcgtttaccacgggacaatcgctgcaaattacatgctaattgcagaaagcggcacaaaacaaatctcaattcgcgcagcttgcaacaagcaaagtcaccaaaatttattgggggaggagtattaa

SEQ ID NO: 54108 - DNA, 738 bp, Heterodera glycines
atgggcacccttctcagctcaaccattcttaaactgaagaaggcgttcaacattggcattatgaattgctctgaggaaccctttcggtttagttatcgacgagagatgtccactcggatggaggacaattcgttgtttctggaggaattggcgcgtcagactgatgaaatccgccaaaatgggctcgacgcaatgccgaggcacggatcactgacagacaaagtctgaagcaaaaatggaaatttacctgggattaaggaggctattgttatttccccattcagattctcgaacttgaggaagaggtggaacgacttcatgcggagaatcgcgagctgaatgagcagtgcacggatttgcaagcgcagttgctgcacaattcggtggaatgtggcagaaatttgttggcggacgcgggacagccgagtttggccgccgaactgagtgggaccggtgggatggaccaccacagggtgagaaaacagttcaaacggtcaaattacccaattttgaattgagatgttggacatcataaaggagcaagacatcgacaatcaaaagcttagaaattacataaacggttggcacaatgataattgccaatttgtgatcgcatccctttcattcgctttaggaattttggtgagagtgatcgagctgcatcccgagattctcgagatcaaggacgacatgaacagttcacaatcagtggcgtccaacggctccgcccaatcatag

SEQ ID NO: 54109 - DNA, 356 bp, Heterodera glycines
ggaatcgaaggtgttgtaagcttttttccttttttcacttgtaaatttatttaaattttcaatttttttagctttttttcgaaaaattttttgtctttttttcggcaggcactgcctctgacaatgttttttatttatttagaaaaataaattgattttttttctttttgatttattttaattatatttcatccttaaattttttaataaacattttcaaactttcaccttattaatttaaggcgaattttgccttttttaataaattctcttgtgaaaaggcaaaaaaataggctcttttaaatatgcctatttaaattactttaattgctttcctttcgcttacgaccatacca

SEQ ID NO: 54110 - DNA, 348 bp, Heterodera glycines
aggtgttgtaagctttttttccttttttcacttgtaaatttatttaaattttcaattttttagctttttttcgaaaaattttttgtctttttttcggcaggaactgcctctgacaatgttttttatttatttagaaaaataaattgattttttttctttttgatttattttaattatatttcatccttaaattttttaataaacattttcaaactttcaccttattaatttaaggcgaattttgccttttttaataaattctcttgtgaaaaggcaaaaaaataggctcttttaaatatgactatttaaattactttaattgctgtcctttcgcttacgaccatacca

SEQ ID NO: 54111 - DNA, 1424 bp, Heterodera glycines
atggacaatccgtcagtgaaggacaatccttcactaatggacaatccgtcattggacaattcgtcagcaaattttttttccaaaacccgaaattcgaacgcaaaaaaaaagccgctaattttcgcaatttgagttttcgacagccccagaaattttttttttacgcttatcaattcccagttccgccacactttttttatattaaaaatcgccgatccctcacaaatattaaaaaaaattccattattcattcattgaaggaattattgttatgtgcagaacacctattgggtgccatttgaagaacacattccgcatcgattggacgagcgacaaaagtgtgaattgattaattaattacttaattgattatttgggggggggggggggtgttcaaaataaatttaattaccaaattcaaggaccatttgatgattaaatttcagacgacaaattggttattatcaatgggtgtcttttgtacttgctatttctgcgctaatgttccatttgccggtgagttaaggtctcgactcgagaaaagtttatcgggttttctggtttcgggaccaagtctcgtcggtctcgagtccaccgattcgagaaaagtcgtctcggatttttttcggtctcgagcatcactctgtttagcgtgctttttgtgtgtaaatgcgaattaactacaaaacaactgcatactaaaaaacaaatactaaatttggccgcttacagtagtcctcttttctactgatactgtaggctctctgctggcgaatgctgtccaaccaatcgggcctgcaagtgtccgttgtgctgggcgtggcatgccaggaagagaatgtggacccggaggtgcgcgaccgtaccatcgacgtgatggcggtaaagcaacaagggagggacatacctaattcgagagtggggttgatcgggaatctgggccaaggatggatttttggaaattggccggtggcctgaaaaattcggtgtcaggggtaagagtcagggacggttcacacgcaaaatttatatgtgaaaaatggtattttgtgctaaaattttcatttttaatattggtaccttctccaagacctccacacccaaatttttcaaaaaaattccgtgaaatttacataaaattagcaatttttagtgaaaattcaattttcgaatactttttcctgtcctcatttcacgtaaatttaattaaaaaatttttttatagcgtcacattgatgacgcactgcgttaccaacgtgatctgattgcccgatcacggggcgtttttctgttcgcactgatcaatgttggccgaatatacggtaaacgaacaaaacagatgcaaaaattagcataatttgccatttaaggagcatacgtcacgtgagccgaatgctttgcaatttttaaattcccaattttta

SEQ ID NO: 54112 - DNA, 679 bp, Heterodera glycines
gctgatgacattcctcctcctcctgctgttgctgctgatggtggtgatgtcgtcgttgatttggagcaacatgttcgccaactcatcatgtccatcggccagggaagcgaggacgcagtgcacgagctttccattctgatcgagtcattcaaccaggagcagctcgtcgactttctgcagattatgggtaatggcatggcgtccaaattttgatggcatttgttgtgtttaactctgccaacatcttttttccagcaagaatgtacgtcgagagcggattcagcgttgacatgccgggtggccaagaaggaatcaccatgttgatggtcgctgcgtcctctggaagggtaggaaaaaaatgccgttttttgaagaaaaacaaaacatttttccatttattcaggtggactttgcgcgctacttgctcgcccacggtgcaaccgttggacacttggacgccaccggtgagtttaattttgaattttttgatcatttaatttgtttgtttcccctccccccgtttcaggaagcgtcttcccactaatgctagctgccgaatctggtgagttggaggtgtgccgtctgctggtcgaggaatgggcagctgaagtcaaccagcaagcaattgatggcacgacacctttgatgagcgcgagcagtgagggacgactggacgttg

SEQ ID NO: 54113 - DNA, 400 bp, Heterodera glycines
atgttttgtcatgttgagtcaccgtattatgctgaattgccaatggaagaggtattttgatttgaatttgttcttttggcgttgtgtctgtctctgtcgtttccccttcagattgtgaacaatgtttcaatgacaaaagacctgaccaatgaattacagctttggaaaatggtcgcatttgtgcgtgacccaattgagcgatttattgctggttttgttgacaaatgtttccagtaatcttttctaccatttatcttcagtagggtgtcaaattatatgcacataaaatcgtaaaatatgcaccaaaaatggcaaaatatgcacataaaaagtgaaaaatatgcacgtaaatttttccaaattgggggcaaaatttttacaaatcttcatattcattaaa

SEQ ID NO: 54114 - DNA, 838 bp, Heterodera glycines
atgttggtgatgtcttctgcgctcaattttgtgatgagtttggctggcgctgttctcttctccgtttatttggtgttcgacatcgatgacataatggtaaatacaaaaagcgaaatttcccctttttaaatttaaaatattatttttccatccaaattcttcatgctttagtattccgattcgacatttcgtcccttaaatccttcccattttctgttcagaatcattacaatgaggaggactacatcatcgcatgtctctcaatttacttggacatcatcaacttgttcttgcgcattttgcagattctgaacgaaatcaaccgcaattgaaaaaaaaagaaattctttccacgacaggcccatattctattcggaaaatggttggggaaggctcccccggttttggtcggttttcatatattcccccggtttcgaggcctggtacacctgtaaaaaacatttatttgcaaattgcaaaacaaaaaattattgtgagattctttgggatggactcatccttctgtgtatttgtgttactgtatgtctacctattttatgtatgcacagtgattaacttatacaatcgcatcgaatggcaattgtttgtgcttttaattcggggagaaaatgttttcgtaatttgccagttcaattaaagtcgtctttcgagtgaattgactgacttatttatatatttataatttgatggattagcggcttcaatttaaatatttttaaattaaaatattgtcaatacatttaattgtttttctcgtgtaaaaatatgtaacttttatcggtctttttgatctcgtcattccttccaaatgtttaca

SEQ ID NO: 54115 - DNA, 500 bp, Heterodera glycines
tagggttatttgtcgggaatttcttattctttctacaaaatatttccatttcaaatgttgccaccgaaggaaatttgggaaaacgatgcctacgatcggtggaatgattttaatgtgaattttaatctgtcgaaatgcctttgccccccccccccttgtttgtttacttcgcctcacatgtcaaattcccgtaaacattctcggccctcccaaattcattcatcccttttcttggcttttatttataccccccccccccaaaagtatcatcttccaaccaccaaagaattttaatgcttttcccttttgatttgctttatgtaaaagcattaattaattaaaatggcctattggaacttccaggggttggaggtcgaattaaaatatgtaagtgtttaataaacttaaccattgctcaggtggctctgatcattgtgatttgtgtcattggctttgcactgatcgcttgcaccacagctgccatttggtttacagtggcg

SEQ ID NO: 54116 - DNA, 289 bp, Heterodera glycines
cacacattttggccaacaactgctttccgacagtgaagttcgtcaagtgttgggtttcatggtcatttccggtaaaaattactccggaaaatgcaactctaccgccaagcttatgtataaatggcatgacaaagaatacctcggggcggcgcacggcgtcagcggaatttaccaaatgatgttgaggtgggcggcgaatcgagtcggtgggattaaactgacattgctttgtcaattggatgctttagcttctggaacttgcttgatgcctctgcgaagtcggacttaa

SEQ ID NO: 54117 - DNA, 911 bp, Heterodera glycines
cagacgttgaacgttgcatttggatgtaacgaacaaatctattctctccatctgagtaaactgtttcgtagtgggcgcgtctgttaaaaattcattttagactacatcattcctacaccagacgttgaacgttgcatttggatgtaacgaacaaatctattctctccatctgagtaaactgtttcgtagtgggcgcgtctgttaaaaattcattttagactacatcattcctacaccagacgttgaacgttgcatttggatgtaacgaacaaatctattctctccatctgagtaaactgtttcgtagtgggcgcgtctgttaaaaattcattttagactacatcattcctacaccagacgttgaacgttgcatttggatgtaacgaacaaatctattctctccatctgagtaaactgtttcgtagtgggcgcgtctgttaaaaattcattttagactacatcattcctacaccagacgttgaacgttgcatttggatgtaacgaacaaatctattctctccatctgagtaaactgtttcgtagtgggcgcgtctgttaaaaattcattttagactacatcattcctacaccagacgttgaacgttgcatttggatgtaacgaacaaatctattctctccatctgagtaaactgtttcgtagtgggcgcgtctgttaaaaattcattttagactacatcattcctacaccagacgttgaacgttgcatttggatgtaacgaacaaatctattctctccatctgagtaaactgtttcgtagtgggcgcgtctgttaaaaattcattttagactacatcattcctacaccagacgttgaacgttgcatttggatgtaacgaacaaatctattctctccatctgagtaaactgtttcgtagtgggcgcgtctgtt

SEQ ID NO: 54118 - DNA, 913 bp, Heterodera glycines
cagacgttgaacgtggcatttggatgtaacgaacaaatctattctctccatctgagtaaactgtttcgtagtgggcgcgtctgttaaaaattcattttagactacatcattcctacaccagacgttgaatgttgcatttggatgtaacgaacaaatctattctctccatctgagtaaactgtttcgtagtgggcgcgtctgttaaaaattcattttagactacatcattcctacaccagacgttgaacgttgcatttggatgtaacgaacaaatctattctctccatctgagtaaactgtttcgtagtgggcgcgtctgttaaaaattcatttttgactacatctttcctacaccagacgttgaacgttgcatttggatgtaacgaacaaatctattctctccatctgagtaaactgtttcgtagtgggcgcgtctgttaaaaattcattttagactacatcattcctacaccagacgttgaacgttgcatttggatgtaacgaacaaatctattctctccatctgagtaaactgtttcgtagtgggcgcgtctgttaaaaattctttttagactacatccttcctacaccagacgttgaacgtggcatttggatgtaacgaacaaatctattccctccatctgagtaaactgtttcgtagtgggcgcgtctgttaaaaattcattttagactacatcattcctacaccagacgttgaacgttgcatttggatgtaacgaacaaatctattctctccatctgagtaaactgtttcgtagtgggcgcgtctgttaaaaattcattttagactacatcattcctacaccagacgttgaacgttgcatttggatgtaacgaacaaatctattctctccatctgagtaaactgtttcgtagtgggcgcgtctgttaa

SEQ ID NO: 54119 - DNA, 412 bp, Heterodera glycines
atggtcgaattgaaagtggaaacgatgcaaatggaacaaagggacaacgccagcgcacgggtggcaccagcggacgcggcacttgccgagttggcccccttttgctacgattacgccgccatttatgacggaccgaaggtgaagggatggccaaccccagcagaaggaatggcccgaccgattgcttcttcccatggcttctccaccgtttgttctcttctttcaaggccacttcgccctttctgatgcggcccaattgtgccctttcctctgattcgacgggcgatcagtcgaagccctcttttgtttcctcccaccgtcgcgtcgatgtgtttttcgtttcggacttgagcacagaaactgccgggggctttcaagtccatttttaattaattttttaactttttatcaa

SEQ ID NO: 54120 - DNA, 513 bp, Heterodera glycines
actacatcattcctacaccagacgttgaacgtggcatttggatgtaacgaacaaatctactctccacgtgagtaaactgtttcgtagtgggcgcgtctgttaaaaattctttttagactacatccttcctacaccagacgttgaacgtggcatttggatgtaacgaacaaatctattctctccatctgagtaaactgtttcgtagtgggcgcgtctgttaaaaattcattttagactacatccttcctacaccagacgttgaacgttgcatttggatgtaacgaacaaatctactctccacgtgagtaaactgtttcgtagtgggcgcgtctgttaaaaattctttttagactacatcattcctacaccagacgttgaacgtggcatttggatgtaacgaacaaatctactctccacgtgagtaaactgtttcgtagtgggcgcgtctgttaaaaattctttttagactacatccttcctacaccagacgttgaacgtggcatttggatgtaa

SEQ ID NO: 54121 - DNA, 753 bp, Heterodera glycines
atgcgcagccaaaaagaaatgaaaaaaggagggcgacgacgacgatggccttttgatgtgcacaaaaacatgatgacaatcgctcaaatccaaaaggcaataaaaatttcttctcaaggttagaaaattcctttcaaaatgtttttattgatttttaattattaaaattaattaataaaaaaccattaaatgttttcttgtaaaaaacgatatttttaatagattttcaaaacaattgaaaatttttgcctatatagcagggggtgggacgcgaccgcgacgcgacccgcgcgattcgcggcgttttattttaagattttaataatataaaaaataatcaatttgaaaaattgaataaaaaaaattatagtttttgaaatattttcaatttttaaatgatattttattttatttttatttttatattaattaaatcataacacgcttttaacaattttaactttctaaaaaataattgcccaaaaataagaaaaacgtaacatttttattgctaagaaatttaaaaatatttcctaaattatataatctaactaattttaacattaattttaacgtttttgtcacttttaaatttgttcaaatattgtaaataaaaaattaatatgctttattttaattaattaatatttcttcaaaattaaaaatatatcgcttttttaggcgggaattatggacggaattgctgcttttgtgtaggaggttaaggcgattaattgaacaaaaacaaataaa

SEQ ID NO: 54122 - DNA, 263 bp, Heterodera glycines
atggccaaatatggaccaaaatatggagaaaaactgccaaatttaagtttttaacccacaaaaatcttaataaatggttatatatcaatatttgcttaaacaaacttaaaaaatacactaaaaactaccaaaaaatggatttaacctaaaaatgcaaaataaaatttatttcagaagcgaacaaattgcaaaaagtcgactattttaaaagtcaggaaaaagggccaattattgattataaagccaaaaatgaccaaaactaa

SEQ ID NO: 54123 - DNA, 989 bp, Heterodera glycines
atgcaattaattaattttaattttaattttaatttagtgccggtgttgccgttgtcgaattctcaaggtaatttaaatatttataaataataatttaaattatttgattgcaaaataataaaataattaatttgattaaatttttatttatttattctttaacagatttgaaatatataaaattctgaatttaaagggttttatgacaaaaaatacaactacaacaagacctataactacaacaaaaagccagcctacagtgtcaaaaaaccggcctacagtaacagctacaggaaactaagcaacaatgatggcaacgcaggaaaaaagcccagctatggcggcgacacggtgaagaactatgactacagtaaacaagcagcggggaatggacagtacaaaagcggtgctggccagcaacagtacggtgatcaatcagcggcggcatacggtggctacaacaatgactatgacaaagacaaatcgagacctgcatataattatggagacgcaaataaaaatggtgacattttagactgttttttatttaaacttattttaaaaaacaaggatatgatggccacaatgaaggaggatatgactacaaaaagccaatctaccattatgatgacaacaatgacaaccacaaaaatggtaaaatgagttaaatattaaatttttgttttcaaattatgaaatttaagaggataaaaacaggaatgcttataaatactgtaataagccaaaaatattgcataataaaaataattataataaatatttaaatgaatattttttatattccatagagaaggaaagttctggcagcagcagcagcagaaaaagcagcagcagcaaaagcagcagcagcaaaagcagcagcagcaaaagcagcagttcggaggagtacggtaatgaaaagcacggagaagacccttacaatccggaaggaccaatgccaccatacatttatccaccttacaaagtaa

SEQ ID NO: 54124 - DNA, 547 bp, Heterodera glycines
atgcccatgattcagttcgtattttattcatcatccgaagaaaacgcgcatcgcaaggattacggtaggaggtggtacggtattgattagctgtgattgagttagaaaaatttggcaaagtcggattggttggcttttgcctagtaacaattttgctgccgacagggattcgcattcttcgtcggcactgttcggaattgcctctgctaatggctttgacaacaaattgtcggggtcgagattcccgaacaaacaacacccattattccgatagctttaaggtcgattgacacggaaatttcccgatgccagtgaccaaaaagccgagaaccgagactctcgagtaagcatcatttatgtgtagtgtaatgtccgactgataccgattaaattgattatatttttagtgaataaagcagaaatattacgcgcaatttatcacaattaaataaattacgtaattaaaatgaatttcgagggacgggaaagaaaatcagcgaattgccgccaatttattattatttttgaatgtattataattatcaaa

SEQ ID NO: 54125 - DNA, 799 bp, Heterodera glycines
atggatggtccaattgctgccactgaaaattaccccaataatgaacaaaccgttattgagccaaatgataaattgaaatttcattgccccgagtgcaattacgaaatgtgtcgcaaatgcaatgcaaaatgggtggaagagcacaacaatttgacatgcgaacagttcgccaaacaacaaaatgagcaaattcaacgaaatctcaagtaatgtaaaaaataaataaatatagcatttttaggttccggttgtgccgataggcgccgccgggaaaatttttggtatttttaatgaattttattacaacgtatcgccctttttagacttttctcggagacctctaaattcaggacaatctgaaaattcatgacattttttgatttttcagataggtaccctcaaattcaggacaaatctgaaaaatcagtagacttgatagccctgcagaagaagcaaaaaaattcaacgactaattttaacgaaaaaaaaatcaaaatgttaccccgccaaaatttattttatttagtcccgtcatttgagtcctaatggtagaggaaatttcagtaccgtcgcgaagatagatgacttatttttcggaattttcttcactaaactcaaattttggctcaaaaaatgacgaaaaaagtcataaaaacgcaaaaaagccataaaaatgccaaaagatattttaaaaaattttaaaaaaggtcacaaaaaaatgcattttagaagcttcaaacaaagtatagaacacataagtcatttgacttaaattcccatccctaaatatgaatgtaga

SEQ ID NO: 54126 - DNA, 718 bp, Heterodera glycines
atgtgttcgtcagaacaccgtactctattggcttttcatttcttactgtcatcgtatacagtatcaacgcaccggtgctttacaaaatcaggtaacattttttgaaaattcaatttaaatttacatttttgaatagcactgaatatcgcgcacaattcaacaagcatttgccatggattaacaaattactttgccaaactaattcaaaccaggtcagtgtgatcacagtacaaccacattgacgatcagagtcaaggacagaatgtgatggaagcaacagaaatattccaatggaattatggcacacagttttaaatttattcaaaaattaatttgttgaattttcctttcacattaattaacagttttaataattccaatttgttcgttttaataataaattcaaaatttaactgggaaaatattaatttgaaatctttgaatcaaaatcgaacaatttttatatacaaacttctcctttctatctgtaaagtaagaatccgaaaaattctttggcagcaacaattcccctatgtacacagttacagaactgggactgaaatggctcagtgcgaaagggactcatgtcatggacgcgggggggggggaagtttgggcaccagaaatttgggcatcaaattaaggattgtaaaacataaaaatatatttttattgtctaaaagttcaaccatctaatttaaaaacatagtaaattaaa

SEQ ID NO: 54127 - DNA, 661 bp, Heterodera glycines
atgcgcctctgtctggcattatttattgccgcttcagcattgtcacttggccgatggattgaagctggaggtaaatcgaattgattaattagatattgggttggcatatatttattatgtcgggtttttattagtgtccagaatctttataagattggctggagaaaaatctgcttcattggtattttaacgcagacatctcttttttaaacggacaataattatgtgctaacctaatactttaaaataacaaaaagcttaaataattatctaagctatttattaacgcaaatttcaagtggtcgaggatgtaaaagactacgtcgatgccttttccgaaataagcgcaccggcagcaaccattggcgagcagctcaggaaaatttcagcccgagtttcaaagctggttcagttaggaggtccggtcggaagcctcgcagcattggctatgcagaaagcccttgaagtaaagttttataaaattctttttaaaaaacaaatattaaatattcagtattacaataataagcataacgtaatatttattttcacttctctaattgctccatctcttttagccggagagcgaggaaatggtcgcgttgaaattgttgcactccaccatggtcaagagattcgatgtattggaccgtcgagttga

SEQ ID NO: 54128 - DNA, 325 bp, Heterodera glycines
gccggtgccgaactctaggggtagccgcatagcttgttccgagttgatagccgaaattattgtcccgagtgcagctaaaaatttaaattttttgaaactaaacgcataaatttaaacaaacaatggttgccgatgggtgaaaaattgagtcgattatctcaaaatgcgtcaacaccatccaacatctggcgctgtgtcaagccgatatatgttcgagagaagtaaaggaagaacattggcattccaggagaagacggccaagataattgagaaaaactcgatttgtgcatcttcagcgatttcctgagtggtgtgtgaatctaaa

SEQ ID NO: 54129 - DNA, 1375 bp, Heterodera glycines
accttctccgactgccacaaaatgtgccgaacaatggcactttgggtttgctggaccccctcattctcaacatggacttgcaccgtccgccctttttccccttcgaccccgactctcatcccctcgggtaattgtgcccactcaataatatgccaaaatcttttatttttttttccagcgaatgtgccgccgaccaatcgaatccacgccaatttacacaatgcgaaggtgggaaaacagaaacgaccgaatgcgagcagaaaattgtgagaaataagcggacattgtgtcaagaaatgacaattccttttaagagggatgcccaacggaaaatcgacgaatgccgaaaaaaccaaatgcacccactaaatgccattttctacacaaaattggcaaatttgtgcgtcattaacctttgtccagcccttcttttaatgccaaatagagacgaaaaaggcaaaaacgaaaaaaataaaaatggaaaagcgaagcttttaagaggggccgaccgttctgtacgagtcgcttgccgctgccgacttttacgaattctccggcggcgattcctcctcccaatgtcccttttttgacaaaagtattggcaaaaagtgccaaaatcagacgaaaaatacatcgaatggcaccgttttgaaaagcatagctgcttcaaggaataataatggtaaaacaatgccaaattgcaacacttggttcgtttcccttcagtttactcctctccctctgactttgtccccctcctttttccgatgttcgacttttttgccgatggtccgtccgcacttttctttttgtttaatttcacaattcaggcccattcacttaccttcagaatttaactgaaaattacgtgcgattgtttggaagggttgtctcattaacgggcacaataattgacgaagactttgacggaattggcgaccaacggcaaaagcagcggaacaaaaagtgcccaaaaacatactgcggcgcaaatgccttttaattcagcaaatccgtcggcaattcgtcgaaaatgccaacgcattttttccgaattctcttccgttgtgaggacgatctttggcatttgaacggaatcaattgcaaatggaccaacgccactcgcgtgctcgccttcgttctgcccaatgttcagagagatttgaattgtttggtcagttgcggtggcttttccctttcgatttgctcttttaaattgccaaagcgcgccgacgaatatcttttggtgaacaccgcgagggtccgcgacatcgaattgcttacggacgtacaattctttgcggaacgaatgtggtacccaacggaggatcagttgcagtggcggacgaacatcagcacggaactgtggcattga

SEQ ID NO: 54130 - DNA, 2261 bp, Heterodera glycines
atgtgcccatctggtcccccgggttaccctgggcctccgggagatcgcggagaggacggcctaccggggcaggacggagagcccggcaacccggggctgtcgggcagcacgggcttcctcggaccccagggaatgccgggcgagtcggggaagccgggaacgatcggagagccgggcatgccaggacttccgggagtaattggacagaagggagacaacggagcaccaggtgaaaagagcttgaagatatatgaatgagctctgggaagtttttgagggaaaaaatatggacgggccgggtttgaaccggtgtctctggctttttagacctgtgttctgccaaatgaactaccccccatctttcctttgcttctttccaatttattacgattaattgtcataccgttgaatccattaatctttcgctcggggaagcatcttctcaatctcggactgttaaacaatttagttactaattgttgtttaaggccaaaagggaccaatcggaccggcgggtccgccaggacggcccggaatcgacggaaagccgggactgatcggagtgccggggaacggcggcaacacgggagacggaggactgcggggaccgccaggttttggactgaggggtgggaattatttactaatgaatgggcattaatttaggcacttcgggagaaccgggattggacggagagccagggagagacgcaaagtgagtttggcatttgggagaagggcaccattgactcaataattcactctcccaatttctgtgcagttattgccgctgcccccgtcgcacgggcaaagccacgtttttggcattgtgaagccgagccaagggcagagaatgatgaaggacattttgcactttgtgttactctccgtcaaaaatgttatatgaatgaaagaaataaagcaaattttgagtggttggggagcgcatttggcacgtgaaattgccaaaattggatggcattttattagtggcacttttccacgcatctctgccatgtctctctctccccgccctgctatttcttcgttctcttctcctctgctgctgtctgttctctttcccccgccttttcataaaattcatttttttatttatcccatttttctcttttgatatgccttttcccttttctttccattactttttccttctttccttttttcccctcccttctcttttcatccaaaatcattctccgttagtctgtccaaaagtgccaaacgatgtgccaaagggaagggaaggcgaaatttgctatcggagaacgaacggagaaccgtcatactttttcgaaggaaagaaaattgcaggagagccggacagcaaggtattagttaattggcgaattattagttaattgatggacgaacggacggaaacattcgttgatgaaccaaccaaactggacagatttacaaagcggacaagttcaagcaagggattgggcaggcggaacttgactcagaaaggactttcgcggtgaaagttgtctccacggggacaagcgcacgcgcggttaatttggcaaagccaccgtcgatgattaagcacgaattaaatatgttgaagtggttcaatgatttggaggcgaataaacccgtcgatgagcactcagtggtcaaattattcaagggggaaacggtggaggacaaaagtcggatggtggtggaacacgaaaagctgctcccattgcacgtggagttgagaagagatttctcgatgatttacgtgatggaatttggggacaacactttggacaattatttgaagcaatgggacgaattggcaagggaaaaacaaatgggggaacagcagataaagcaggacgcagaacaactgctggccaagttggcaagcacattgtcaacatttcacagacgtacacactaattaattaataattgcggaaaagcgattctcggcttaccctcgcgtattcggcacattcactcccctcccctccctcaccgctgtttagatgctgcacatttgcatttgaagccgggcaattggatcttcgtcagaggggagaacaaatggaagttgatcgaccttcagtcggccatccccaacttcgagcagtacaaacctttgcaaatgggaaaagaggaacgattcccggaagattttatggagttcgcgtgcaattcgctgaacaacgaaatttgtttgaccaaatttattgcaccagcaaatgaacggccgagcacttatgcgagccctgaacatagcacggcat

SEQ ID NO: 54131 - DNA, 570 bp, Heterodera glycines
atgtcaatccaggatccatcgtccgccgatgtaaaaagccaatcggcgcatttaaatgcgaaaattatgcacaaatcggcaaatgttttggtccaaaaaacattttcaaataaaaatttggaaacagagcaaacagaaagcagagtcaataaaaagtcaaaaaatgagcaaaaacagcgcaaaacggacgaacgacagaaggaaaaagccgaagggaaaagcgaagaaacggaaaaagaaaaagccatcgaaaacgaaaagaaggaaaagccgaaacggacagatcaaacgacacttttggaggtaaaattaagccatggacagaacaaatcacccattaaatgcttgctcaggcaatgccttcctcctccaacgcccctcagaaagtgccggtgccattaattgacagacagcgaacacatacggtaatgacagtggaggaaaatgtacgggccggcatcgttgcctatttggacacaattggaccgtcgaatgagactgggagcagcagaagtaaaaagcctcagtccatcgttaaaccgatgccacaacagcaaagagaagacgggg

SEQ ID NO: 54132 - DNA, 534 bp, Heterodera glycines
atgaccgagatggaccggacgcggtcattggagagaaaagcattgcatggacacgcgacagtgacaagtcgaccctcattaagcactcaaatggaagaggaaatagccgggactacaaatatgataataaatggccaagacggaagggatgaggaaaaaaaggagacaaattggaaagaggaagatggaggagaaagaaggagcgggatgaatcagagggatgaagacgatggaagaataaatgagaaggaagaagacgatggaggaagaaggagggggatgaatagcagggaagaggaagaggaggacggaagaagaaaaaggggcgggatgaatagcatggaagaggaagaggaggacggaagaggaagaaagggcgggatgaatagcagggaagaggacgatggaggaggcaggagcggaattaatgagagggaaaaggaaggggaggacggaagaggaggaaggagggggatgaatagcagggaagaggaagacggaggacggaagaggaagaaagggcgggatgaatag

SEQ ID NO: 54133 - DNA, 934 bp, Heterodera glycines
atgggtaccaaaatggaaggatgcgatagaaattggtgccgctttgataatgtgagaatgattttttatgtttcgttgatttcggagcgttagttggggtttcagccgagtttattctacaaaatggggggcgggtggaagccgtaaatccgtaaatggaaagccggagttatggggacgcatatccgaaagcggctcaataaaaaagcgacaaaaagtgccgtaataaaggggacagtgaatgcgaattgtttaaattttcaattttctaaaaaggtataaattcatatttttaaattaatttctctttctgtgccagggaggtcacctgtgttcggtttacgtttgtggacaatatggtggaaggacagaatggcatcatgattggagctacttctggcggtagtttcacattcatttatatttctcgttgagattttcttttatttttattttacccatttttgtagcttgtggccggtcctcagtgggtcgtgtcggaggatggcaataccttaggctgggagtgacaaactgcaccaatgtcatttttgcatccttttttaaaatagtatttgcagcagcaatttttggctctggccccccccccccccgaccccaattacgaacgacaaacgacaaatttggcattttgtcaccgaatttgtcattacgacaaacaaaattttgtcgtttatcgtttaaatatgccatttttccgttggtcgtatgtctttgtcgtgtgaattgtcgtccaaatgacaattgacaaaatgctaccgtaaatttgttgtttgtcgtcgtcactttgcttttgggtggtattgggtatgcgttttttgaaaagccgggatccgccgctccagaaaagccgggggattatgggatcggtgtcgttcggaaccccgaccctagtgcaactcattaattttga

SEQ ID NO: 54134 - DNA, 1185 bp, Heterodera glycines
gctcaatcgtctgatcctcgcacctcacattgacacgtgcgatgagatcaacgatattatgatggcgaacgtgcctggtcaagcgcgcgaatatttgtcctcggacaaaccgcttgacgagcggccactggacatcgatgaaatcgagttagaagtggcagcgttgaaccgacgcacagactctgggatgcctccccaccgtctgcgactaaaggtcggaagcgtcgttgtcctccttattaacaaaagcgataaggaaggactgatcaacggcactcgcatcgttcttgaagaacttggcgacgatcgtctggtcggtcgcgtcattaacagcaactctgttggtggccaagttaagttcttcatcgaaagaacacgcaatgtctacgaggacaaaacgcctggcggcttaaaatatgagcgtttgcagtttcccatcaaacctgccttcgccatgaccattctcaaaggtcaaggccaaacaatcagcacagtcggaattgaccttgaaagggatgtattttcccacggtcaattgtacactgccttttcaagggcaacggacgggaacaacgtccgagtgtacgctcccagaagggagaccgatgcacaagacagagtcaaagtgctgaatattgttgcaacgaaaatgctcattttgcaataaagcaaacgagttaagtccagcgcgtgcgcactttatgatgtcactccgttctcatctgcacttaaaacggacacatattcaaaaaaagtgctgccagctggactgaaggaggcaggtgggccatgacgtgcgagttagggcacttccggtttccattgcattgaaaaatgcagtgtgtcaaggtgaaaccaagtgcatgtcggctgacgcaaagaccctaacacaaggcctaggtagcgaagctcccaaagcgcgaagcgctttaagcaccaagacacatgtaagcacacacccgctagttatatactactaaagaaacaaggcaactcatttccaaaaacaaaatctccttacggggcgtcgggaggggttcgaaatttcgaccttggggacaactttttgaggcgcatctgggaaaactataggtttttcgctccgagggccaactgagcgccaacggcgctgaaacggctttttcaaaattttttttgaagttgctcggattcaaaattttttta

SEQ ID NO: 54135 - DNA, 508 bp, Heterodera glycines
atgggcggaaacattcgcatcactttcattgacgagtgccaaatttgtagtcaaagtgaattgacaatgagcaaattgatcacaatgagtccacagcaaatttcggtgccaaaaattgcgcaattttcaaaagaattttaaaaattattttaagcaaatgagacttgactccgacgaatcggacatcgcttggtttttgggaagtgtcattcatttgttggctttccaaacttatccgcttgaggaatggcacagtcggaacaaaacattggccaaccaatgccaattggacggcactttcaaaatgccgcaggttttatttaatattttatttaatgtttaattttattaattttgaatatttattcagacttccgaatcattttgtatgtttctgctccaaaacagcgtcaacaaaatgctattttctgctgaaaagctccaaattcctactgattttcctcatggtttcgagaaagagtacgccattcttggccaaataatgatg

SEQ ID NO: 54136 - DNA, 755 bp, Heterodera glycines
atggaaaaagtcggaagaccgagtgacgattcaccgactgtaattagttgccgcaatcagttctattgtatttcccagtttgtttccctagcgtttttcaatgtaaagtataaaaaagaacaatgccttgaaattcgggaatgaaattaacatataattagctaatggttcgaagaataaatgcatttgaaattttcacttttttcgtcttttaaaaaatttcatccttaacatttaaaaaatttttcagcttcagagatataaactgtggtcggggactttcgtcaacaaatgtcgccaaaagtcggaaaaaatcttaataaaaattaaaaggttaagaaaattgggtatatttaacaacacacagatttcggccgggggtcgttttcgcgcggttgcatatacgtagaaatgggtaggtgtattagagaaattttatctatttttataaatttaaaagtcatttggtgtcatgcgctgcaaatcggaccttcttaggggtgtatttttcgtttttattgcatttttcataacaaattttggcaaaacgccaaaatagttgaaattattatttttttttaaaattttgtaaaaaaaactagaaaatagttgctaataactcgaaaagtagcttaacaacagccgaaaaaacatgtttttcgtgcgtgcattccaagctatgggaagctcaggaaaaaaatagtgaaaaaactataaattggagccctagttattattgataggaattgaataaa

SEQ ID NO: 54137 - DNA, 1701 bp, Heterodera glycines
atgggagctgcggccgctgtccaacgttcattcgaaatggagaaattggcgaagcaaactgtcaatgtccaactcgtctggcagagaccagaagtgcgaccggatgaagtgcaaacgaatttgaaaaaggcacaacgcgtctctttcgaatggttgatcaacaacaaatcggcggttgccgatttccttgaggcatgggaggaggacacgccggtcgaagcaaaagttgcgcgtgactcaagagcccaatgctgttcagttggccgagtaattggactgtcagtaaatgaaaccgctccgggtaactttctgatgaacgtgaaaatgtttttgagttacagggctaaaaagggctacgacaggggctgggaagattgggaatccattctcgatgaaagggaatctaatgtgattccaattcctaattacggaggtctccctttcagagaacaggcatttgaactttcagttccgtcggacattgcagaagggcaatatcccgtctcaaaaattttaaaaatattgatgggaatgggcaaagacggagcggaacaacgaccaaccgttaggttgtcaagtaacgaaattgcggtcggtaagttgaacgaggaccagcgaatcactcacggattgtttttggacgacgaatcccgtgtaattttcatgcaggcaccggcaggaacgggaaaaagtgtgtcagtagcggcctgcatcgcaagcgtgctcaaaaaggaccgtgacgctgcaattttggcagtttctcctttgaatgtcgcagtgtgtgagttggtgaaggacaccatggaaagtttgtcagaaaaggtgccaatgttggcacttttctctgggcaaggaaaagggcgttacatggacaggatcaggcccctgggggacaatcttttagttgaagctgtgcaaagggatggaaatgttccttccgctgaaggaaccgagccgaaaaaatggagtgataataaaacatttaagcaatacgtcgatgactttaacacagcaccaagacgggcacgcgaacgaacgaccactgccgcgcttctgaaacagaccaaataccgagtgtacttcatgacattggctcttgctgaggagttggcattggatttgggcaacgtaacttatgtgttggttgatgagtgtgggcaagccacgctttcggcagttttgtcaattctcacacaattccgatcggtaaagaaaatacttctgacaggagataaacagcagttacgggtacacttaccgagtcaaatgacagttattcgtggtaagtttgggtttgagtcaattttggaagtgctggaaacagcaaaaggcatcgatcgcaccgttctctcaaagtgttaccgattgcacagtgccattgtacggtgtttggacgcgggagtttactctccagcaggtgatcggttggtaccaggaagaccggatgttgaaatgtcatcgtttttaaattatatgggcccacgcattgtagccgaaaattgtccgatcattttaatccatcaaaaatcatcgactcaaatggaaagtatctcattttcctctcacaatcccgagcaacgggaaacagctcttggatttttgggaataatccagggaacctttttcgattcaaagtcaggaagccgagcttgtccttgtcatcacgactcgctccgcggctggacgatcatcggaagctga

SEQ ID NO: 54138 - DNA, 145 bp, Heterodera glycines
  unsure (1)..(145): unsure at all n locations
tttggcaccaattaccaccgtttttccatgtgaacgaatttcatttcctttcagaaaaggagttaccaggggtaaaatgtaattttcacccatccaccattcttatggacttgtgattttggccanaattaaggtaaaggagttg

SEQ ID NO: 54139 - DNA, 469 bp, Heterodera glycines
atggattaccttttggcccggtgcaacggattcgactcggccaccaattgggattggaacgacgcactttcacccggcgaacttcaagtgttgcatgtttttcattgtctatttggctcgttttgttcagcgactttccatcggcagagtgctttaccataagccgagggtcgcttttctcgacgaagccacgagttgtcttggctttgacatggagagcagcctatacaaagtgctaagggacgaaggaattacggtcggacacttttggacgctcaaattcgactcgttcggttttacaattgtttaggttgtctccacgggacagcgttgttcgctgaagcaattccacgagttggaacttaatctgcgaggacggcattggactttggtcgagttggactcggtccggtcgatggtcactgagccgtcgttgggaggagcggcggaggagggcagcagggcatga

SEQ ID NO: 54140 - DNA, 1281 bp, Heterodera glycines
  unsure (1)..(1281): unsure at all n locations
atgcaattggcaatgttctgcgtacatgttaccgcaaccataatattcttgcaattatatttggtaataaaaaactattgttgaacgcatttattttaaaataatttttatattttttaaaaataaaaaataaaaattccaaataaaagcaaacacttttcacatgaatttatattagattgatacaattccgaggtccttaaaaactgaataggtcgctcccaagcacaacaaagtagtgctgttcgagaccgaaaattccccgagactcgagaccgagattttttcaaaaattttcttattcgcttaaaatcagggctcacataaaacgaaaagaaattcaatttgatgccgtcatatatttattttatatcgtcgttggaccacccaattatcacataatttgcagggtttcactgaagcgggcatcgaatgccaacttgacggacactgcaaagataatgccgctcaactccttcgagtacggtgtgctcaaaatgctacagttgcaccttcaaaaanctgctgcanccaagtgtacgcgaacccgtacgccaaatgcccaatcaaaggatggcgtagaaaagggtacaaaggcaatgtgccggtcgaaatcggagtgccatcaaagaaacgtgacgccggtatgagaaacgttaaattagaaaacgcgaaatttaaagtcaaaagtatcattggcaaaaaatggcgaaaaagtgccatttccaacacggcgcatgaataatgttgccatttgtaggataacatataaatccgcgaaaatcaattaagcggtagaaataagaaacaattgaaatgaacgaaaatgatacctttaacctcttttaaggctgttctaagggcaatccgtgtaaagaaggttacaaatgcgtggcatacaaaaagggggacgaccacggcttctgctggcgaggcccacaaggagatggaggcccgtccaatttcgcattggcagttgcgatcgctggcctcgtcattctgctgtgatcggactactgatcagagaacactgatcaatgtgatcacaggccaatcgatcggaaggcaactgtttttttagggacagttcaacctctttttcacattcgggcttttactttatcgtaaattgttaaataacggcttccaatctttttgttttccttctccattttttggtacctttttgtgcttaattttctttttccctttattttttctatcatttttctttaattgtgttggagcaattggcattttcctccaagaaaatgaattaaa

SEQ ID NO: 54141 - DNA, 89 bp, Heterodera glycines
cactgttcaaatgccattccgatcggtgctggtaaccaacgggatgtgcggcgatcaatggtcattgatcttcttaatgacaatcaaga

SEQ ID NO: 54142 - DNA, 3790 bp, Heterodera glycines
atgtgctctttagcacagggttcttccggcacattaagtcataatgggaagggtgtcgcaatgcaccggtgccccagcgatgattgtgctggtaaagatccccctcagcgggggtctcaaaaagggaatttgaggagtgtgcgatggactcccagcgaggagaaagctgtcttcgagtattggtcacggttggaacagcatgccatgttaaatggtagcgaagcccgggggacctgtgccataactagaagtcagtttctcattcattgggatggcgagagagagtcaagatccttgtcggatggtgtgcccgagtacccaatgaggacggaaagggcgtactatgaaagggtccgactcttgcgacaacgcggatggcaatgggattgtgctaatgaatgcttagtaattggccaatgtgcagagccatgccgtaagccaaacgtggtagcgattaaggctgataagggtatgaagagatcgctggttaagggaaagcttttgtccctgccccatgtaatgggcgaaataaaccaagtgagcgtgcaggttgaggtgcctttgccaagtgtacccgccagcgtgccccaggtggaaggagttgaaagcaaaggttttactgaaacggaaccgtcgaataaaccttccctggaagggaatccggcggaagaaggattaaggaaaccggagcgagtaaacgtacctgttcatgggataatcagtgatagtgaacggaaagacctgaaagaccggttttggagcgcctataaaacggccaagaggtctgtgggttttagaccggctctaaaaatcgaaccgaatagggttaaccgtgcccagtgggaagtactggattcctgcgttgttgaggtgctcaaaaagagggaaacctccaatgggtaccgcggttgcgtcctccggcatttgaacgttgcagtttatgcggcgggatacgtgctggcggaaggcaacaaggaaaggaggcaggtgatcagacgccagtcggcggaatggttgcttcgccaaaagtccgaaatcaacaacatccgtagacacatcgggtggattaccgatgagttaacacggaggaggacgggaaagaacccaacatccagacagttgagtaattttgcatggttgcaaaggcgataccaggttttgggtaaacccgtgagggaaacccgggacttggaagtccaacgagaaagacttgtaagtcgtcttcgattggctcaggaccgaattaactcttccatggatcgtgaagagcgagttcgtaaacgaatgttacccctgcggagaaagttggaagaacctttgggtgactctaaacttgacacaaagcaggcacgaacattttgggccagcctgattggagagcgaaaggaatttggaaaaatcccggagcttgaaaactgggccgaagaagtgaggagcaaagtcaccgatggacaaggtttcgcaagtgaccatgtggatcaaactgtttggaaaaagatactgggtaaggccaggccactgaaggcgcccggaccagatggaatccccaatttactttggaaacggttaccatccgcaaaccaggcgttatttaagtggttaatggggatcaagcggaaacagctcagtgtccccagttggctcacaaaaggaagggtggtcctcctacccaaaggaggtgacccggtagacccggccaactaccgaccaatcgcttgtttgaacacgcagtacaaactagtgactggtatggtgacggcatgggtatcggaacacctgaccacatactctattttgccgattgaacaacgagcgatggtgtctggcacttgggggtgtacccatgctatggtgattgacagagcaattacgtcttatgcagaggccactggactaccgctttatgtaggctttgtggactttgcgaaggctttcgactcagttagtcaaccgtggatcaggtacgctctaaaggtcgctggagttcacaagcgaatccgatgtcttattggaatccttatgaaatgttggagcgtaaggtatgaagtgttcaagagcgggagagtgttaaggagtgcgcctttggcagttaagaacggagtgttacaaggagacacgttgagcccgctgctcttttgtctctcagtagccgttgtttcttctgcagtaggcagcctctttgattttgaggtcaccatacctggacgaggagtgatgcagcagcagaaccacttgttctatatggatgactttaaagggtttgctcctagtgaagcgtccttgactaggatgttagtaacattggagcgaaccgcttcagccctcgggttgaaaatcaataagaggaaatgcgctctggtacacccccgtgaaagagagaacgaggaaactggaagtgatatcccggtccttggtctacgagacacttataaataccttggaatcgaagagagatttggtatcgttttcgaggatgcgtgggaccgagtccgtaccaagatgtttgagagaatgcgcaccttgctatgcacggaacataccttcggggagttgcgtgcggccttcgctagtacgatcgccccagtagcgaggtacctctttctcaatgtaatcgttggtgggcctagttggagtgaaaccctgacgaaagctaaggacatggacctgcgtatccgacgcctcctgtgggaaagaagagataacgagccgggatggcggtttaagcattgtagtgctgaccgcttgtacctccgcgtacagtacggtggacttggcttcgtgtccgtagaggacactttgtctgagtctatcatttactgttgggcttacgtgcaatgtaggcccgagttggagctggctcgtgaactttttggaaccttaaacaggagtgctagaagcggtataaaacagagcattgcgaaaggagcgcgtaaagtgttccgaagttatgcccttctctcgaaaaattccgcccagcgagtatctgaccttgatggggatgcctccccaggattccgagtaggggaaatgatattcatggaaccaactcggggtgccagagcaatcgtaaaaatcctccgtaaggagaatgattcgcgacgcttggctgcctggaaaggtagacctatgggaggtcgggtcgtgtcattgccagagctcgaccaggttcatagctaccactggttgatccgtgcgaggattggcaggcgttcgttccgagactgcattgcagcacaggagggacagttgaaagcgcgggagcttatgtgtccacatataaatgcgaaagcaaagtggtgccgacgatgtggggacggtcgtgttgaaaccgagcagcatatccttagtggttgtgcttggtcacggactggaactatgttagatcgacataacggtgttgtacggcaagtacacacggctttatgcaggaaatatggactgcccgtttcttctcatgtcgttcctttgcatgcggtaatcgagaatgaacatgccaaaatcctgtacgatgtcgcgttgcatacttcgcctgctggcgtcctccctagggaggatgggagtacgagttatacgggtctgcgtagcaccaggcccgatatggtaatattcgataaaaaagcacgtacgatccttattgtggaaatttcggtgccatggagagagaacctggttaaacaggagctcataaagtggcggaaatatgccataaattctatgatcgaaccattggaactagcggaagctgaaataccgggacctaacctgaaacatgcgttaggccttgcgtacg

SEQ ID NO: 54143 - DNA, 2971 bp, Heterodera glycines
gtctgatcacctgcctcctttccttgttgccttccgccagcacgtatcccgccgcataaactgcaacgttcaaatgccggaggacgcaaccgcggtacccattggaggtttccctctttttgagcacctcaacaacgcaggaatccagtacttcccactgggcacggttaaccctattcggttcgatttttagagccggtctaaaacccacagacctcttggccgttttataggcgctccaaaaccggtctttcaggtctttccgttcactatcactgattatcccatgaacaggtacgtttactcgctccggtttccttaatccttcttccgccggattcccttccagggaaggtttattcgacggttccgtttcagtaaaacctttgctttcaactccttccacctggggcacgctggcgggtacacttggcaaaggcacctcaacctgcacgctcacttggtttatttcgcccattacatggggcagggacaaaagctttcccttaaccagcgatctcttcatacccttatcagccttaatcgctaccacgtttggcttacggcatggctctgcacattggccaattactaagcattcattagcacaatcccattgccatccgcgttgtcgcaagagtcggaccctttcatagtacgccctttccgtcctcattgggtactcgggcacaccatccgacaaggatcttgactctctctcgccatcccaatgaatgagaaactgacttctagttatggcacaggtcccccgggcttcgctaccatttaacatggcatgctgttccaaccgtgaccaatactcgaagacagctttctcctcgctgggagtccatcgcacactcctcaaattccctttttgagacccccgctgagggggatctttaccagcacaatcatcgctggggcaccggtgcattgcgacacccttcccattatgacttaatgtgccggaagaaccctgtgctaaagagcacattttgggataatttctcgcaggcacagacatagcaatatgacttgaaagctcaggtatatgttgtaaaaaactttttctcatatttatctgtgcagtacgacccaaaagcgttcaaccaataatgtaataacagctcctcacgagctatctccgcgcagaccccgaccagatacccaaaggctcattacaagttcaacctggttaggagaaacctgggcagaacgacagctttataaggcagagtgcttatccgacacatcattccagaggtaccaccccaaccaccccttatctgacgagcaaagcactcgccagaccagctccactagcccaggctggcactagtaggaactgttcctccggaactacggcgtcatcagaactctccgccaaccatcatccacatcccaagtcgcccgggggcaccaggtctatctttacctgcataaaacatgcctactaacgtatacatgagtaggtattaggaaaggagttaagctttggagaaatcgaagaaataatgcacgataatttatcgcaacaactggaaaaagagatcaatatgatcaattgctgagatcatcaagatctattccggtttgttggacgaatggcgccgcaccttcttcccagacggaggggctcccccctccttttgcgcggcagacggcccatcagcgtccagctcaatggtttcggcccctttggcaatgccatcggtttcgtcccctttttgctttttgccgccgtcctccgtacctggaagtcaaagtattgcttcgccgtcaatcatgctattatctctaacccgtccccgctttctctctcttctcccgctgcttttggcgtttcagagacttcttcgctgcctcattggcaccagccctaactggcccgcgcggctgcgtgccgccacgagccgtcaagccgtccatgaacagcttgatgtccctgagaactccctcaaaagtcgcaccttcgaaatggcaaacgaatgtggtcatatttctcttgaggaaaaagcaggttaagaaatgaaaatgaacactgtatagatatcatcgggatatacccgtatgaggtcagagaaaacacagggtccgcttcacgtattctttggacccccccccctccagtgctagccaacaccggaaggggctcggattagcgcaacccgtgcagcacctagggactttcgcgacctgtaggccaactcctaccaggctccccggaggttccgagtatcgccacacgtgcgcgtcggtagttagccgacgaggcatttggctaccttaagagagtcatagttactcccgccgtttacccgcgcttaatcaagtttccttggcttaacattcagagcactgggcagaaatcagacacggtcaacgtccacaaggaccatccgtctcctctgttttaattagacagtcggattccccgagttcgtgccagttctaaactggtcgttcagcgccaaccgaagtgcataccctgacgagcatacacgcagctgaagcgctccacaagcagctctcaccactagtccacgcaccatccccgaaagaacagcacacagccacgggcaaaagccgcctgtttcacgcaacagcccggctgacccgacctttagagccaattcttttcccgaagttacgaatctaatttgccgacttcccttacctacattattctatcgactagaggctgttcaccttggagacctgctgcggatatcggtacgatcaggcaggagattcaaatagcttccctcgcattttcaagggccgtgtggagcgcacgagacaccacaggaaccgcggtgctttacgggcgcaacatccctatctcaggctgagccacttccaggcacgcacaccctaaaccagaaaagagaactctggctcggactccacacgacgtctgcgagttcatttgcgttaccgcgcaaaacagctcttgcgaaccgtcatt

SEQ ID NO: 54144 - DNA, 331 bp, Heterodera glycines
atgttcgccgggggaaagttcggtggagccatcgcaaagggacgaaagttcgctgtcaaggaagagaacaaaactcggaaaagtcgcctctcattcgctttacctggtcaagtctctgtactcgtcgaggactctgtcgacactttcgaaaggggcgccggtgcatttgtcgtgccattcggtgtgagcggcgccaatgaatcgcagggaaagacgcgcgacgcgaacacttccctttgtgctgatggcgacatgtcccttttgagcgaaaagaaaactcaattcacttttggacaattcaaaaaaatattttaaatccatgaaaattaaa

SEQ ID NO: 54145 - DNA, 477 bp, Heterodera glycines
cgtttgggcccccgtttttgggccccggggtcgtttgggcccccgtttttgggccccggggtcgtttgggccccaacccaaaaattgaaaaatgtgcttttttaaaaattaagattctaaaaactacgcctgagggaaccctcgccacttggtataagttaggtttaattaacattcgctcattttttacaattttacttattccaaatcctattattttttaatagttaaccaatttgatgtacattctgatttggacatttttcagaaatggctaaccaaattgcaaccaaaaaacaaaaagtaaaattgtcttacgaaggccacctttacaccttcgctaaaatgagttctgatgggatgacaaaattttggagatgcgagttcaaaaaatcaatttcacattattttggagtttctccggggaatttctcgcaactatcgaatgaacccgtgaatttctgttaatttttacat

SEQ ID NO: 54146 - DNA, 133 bp, Heterodera glycines
atggattccgtgtcgaccattgccaaagacggacacggcgtggtcaaatacttttgcgttgcgtcgttggatttgcccgacgacgggggagacaacgaaatcgttgcgggtgcagcacagaacaaccagcagg

SEQ ID NO: 54147 - DNA, 741 bp, Heterodera glycines
gaaacagaggaaaggctgttgaattggaggatgtgaagttccatcagtgcgtccgtctgtcccgtttcgaaagcgaacgcacaatcagctttattccgcctgacggtgaatttgagctgatgagttaccgtctctccgctacaataaaaccgttgatttgggtcgaggtccaattggagaagtacgcacattctcgtgtggaatatatcgtgaaggtgctgataatgtcattaagattgggtcggcgcaattttttgaaaaattctatttccttcatattgtctatttttagttttaaattatataatatagagaaaagactgaaaaacttttcctaattaagggtttggcaaaaatcatacatttatctaggatttgaagtcgttcggcaaatctgataccatattaatttattggtttaaaataccccacaaaagtcattcgctaaaaaatgcatgaaaagagtggatgttaaaaaaagtgggctaaaaataaattatataaaacacattcaatactagtcgaaatggccttaatggttttatattgtcttccattaaattttaggcgaagtcccaatttaaacgacaatctatcgcgaatcacgtggagataattgtgccggtacaaaacgacgcggattctcccaaattcaaaagcaccgtcggatcggcccgttacgcaccggagatcagtgcatttgtttggaccatacggagttttcctggtaccaatgaatga

SEQ ID NO: 54148 - DNA, 856 bp, Heterodera glycines
atggcaaacgctcatttacgccgtttttcctctccaacaactgcagactttgctgctcatttgctttgtccaattcattgggtatggtctaaccgaggccttgttttccccaaaagttgcaagaaaaaagtgcaaagcttgacaagtttttacaaattcttggctggccaatttttaaaattctgtcattttatccgacattttccctcccaattttttcagaatttccaccattttcaacatcgtcccaattgttctcgcctatgtgtccttcgccatgatgctgttcttcacactgaaaatgttccggcacaacaattccctgcttcagcaaggagcggtcttggagagagtgatcaatttggttcatcatgagccatcgtctcaaaacgacaaccaacaaatcgcgccttcggcgtcctcgtcatcgtcaggcactgaaaatgctccgcaaaatgatcaattgttgctaattacgggaggagaaatgccaagccatggcagtgacagtggaagtgccacagcgggacaagtgccaagccatggcagtgaaagtgccatcgctgaagaagggccaagccatgccgttggaaacgacagtgccagcaatgactccgcagcggattcctcctttctcatggacaccttctctccgttcgtcaattttctcatcgcgttggcactgtttctgttctccgtcggtgctgccggcaaagttgtgccgaattcgctgtttttctttgtcatttcactgttggtgtccgcgttgtgcttcattggtgccaccgatggtggtgcccgtgaatgttacgcttatgctttgatggcgctggtcgccaatttcgtttcgtggtaa

SEQ ID NO: 54149 - DNA, 61 bp, Heterodera glycines
gccaataaacacgaatgagcgaacggtgaaggatccaaatgattatttggagaaaatttga

SEQ ID NO: 54150 - DNA, 411 bp, Heterodera glycines
atggcatacgaaaattctatgaagaaaacccaaattggatggaacacgttgcggctaccatcaacccgatcaccaaatacaccggcggggtccgtaaagcaattgcagacccgggttgggtgctagagaatagtatagagagaattgaatttgccattttaaattgtaatttttgtaaggaagttatctttaaaatgaaaaccttttcagatttattggctcataattgagcagtccgtttcaatataattagctaaaaattttcagaaatttttggacaacatcttctccaaaaaacacctcccgaagaaaacgaagaaattacaagtgagttggttgattatatatgtagtaattcatgcagtcctgatggagaaggagagtagatgagagagagagaagaggaaagaa

SEQ ID NO: 54151 - DNA, 214 bp, Heterodera glycines
atttagaaacgggcgcaagcgcccgtctgaggccgcgaagcggccttaatagcccaacaaatttataaacgggcgcgaagcgcccgtctgaggtctcgaagctgccttaatagcccaacaaatttagaaacgggcgcgaagcgcccgtataagcccaacaaaattaaaaaaacgggcgcgaagcgcccgttcgaggccgcgaagtggcctaaaa

SEQ ID NO: 54152 - DNA, 111 bp, Heterodera glycines
gacgtctccgttccaagtactaagaaggcccaacgttgcttaacttgccagatcggacgggatggcgtgctttcaacgtggtatggtcgtaagcgaaaggacagcaattaa

SEQ ID NO: 54153 - DNA, 88 bp, Heterodera glycines
gacgtctccgttccaagtactaagaaggcccaacgttgcttaacttgccagatcggacgggatggcgtgctttcaacgtggtatggtc

SEQ ID NO: 54154 - DNA, 620 bp, Heterodera glycines
atggacacggacgacggaatgcgaaggtcgtcgacggacagaggcgggcggaagagaggcggcgacgcggaagacgaggaagaggagggcgaaggacgactggtggtggcggaggaggacgacgacgaggaggagaagaagcacagaagacgcatggaacggtgggaccgcgtggacgattgggacgatgacgatgacgacgacgaggaggaagcggacgacgacgaggaggacgaggacggcagccccaacggcgaagtgccgcccccgccccccggcacgctcagctaccgacgcttcgggcaggaggtggaaagggggaggagagagaattggggaccatcaccgttatgcttttcccccattcattccagaacgttttggttgagcgtgagacgcacacaccgccgactttgtggacactttgtccggaacagagagaatggggaggcaacgggtatccatctggcagtgacgcgggaaaagtgccaacggattctgacgagaaggcgcaacgggaggacgaagatggctcaactgattgggaacgcgcgggcaacaagaagcggtccggtatggccatcatgcaactcaggggatggcctgagccggacgaggcg

SEQ ID NO: 54155 - DNA, 414 bp, Heterodera glycines
atgctgaaaaagttgccaaaacccttccttattgtctacgatgacctcatgggcgacattgacgcgaagaagttggctgatctgtacaccaagaagtcccaccacaacaacttttcggtgatattcctcacccaaaacctgtttgacaaggcaatgagagtgccaaggtccaatgcgcagtacatctttctgatgcgtgcgcccagcgatatgctgagcattcgtaatttggccagccaaatgtttcctcgcgagcaagggtttctgatggacgcgtacaagcaggcttgtgccgatccgtacgggtatctgttggtgacactacacgcaaacacagacaacctcttacgactgaggacaaacattttcccagacgacgaagaaaagattgtctttgtacccaaaaatggttaa

SEQ ID NO: 54156 - DNA, 1619 bp, Heterodera glycines
atgaaatattttgttttcggtatttttgctcggcttttttactccttttcctttccgtcaatttcaaatgcaaatgcttcttcatcaatgtcggtaagtttgctgcttctcacttcccaagttctgtagggtgccgtgtcattagttagtcaaaaaccattcccacaggggaaattggcaccaaattttggaatcataataagagttaaatatgaatcaccaataaggacagctaatgccggttaaggacaaaagcacagagtaataattaaacaaattgttaatttttattttaaatttaaattgattttataatgttcaatcggtgggcgaaagggttagttgttcatgtttagaaattactggggtttaatgtatgaagagacctggtgggactcgcggaatttccgagttttttttttggttcgaagttcctccaaaatgtaaaattcaaaaaccggaaaagcttattcggcacactaatttgtaagcaattgtttttcacaaattcgcagattgacgacaatgcttttctcgcctttctgaaggggtggaaaagctttgacaaattttacaccgaagaagtgctgcttttgggccagaaaaaagaagtgttggcccaaaagtttgaagtcctcctcgccgcgcttcattcgttgcgatgggattggaaatgccatcggattaaaaatgaaaaggaaaagtgcaaaaagtatcgcaacttcgcgcactcattgtacgactatctgttccgtgtgtatgcggtttttcccgcggtgaagccaattttcatgcttaaaaagcaaaagtttgtgaagatcggcacattggccgagttggtgaacagtttggaccgaattcggaaattttttttcgatacggaattcgccagaagcttcgagttcaaattgaagaagctgttcatggtgtatttcaagccaaagctgaaaaaagagctgttggaaaacgggaaaaactcgccaatttccccaatacccgccggtttgaaagtgccaaagttcataaattttgatcgcaaattaaaagcaatgcatattgatcagcaatttgcggcatttgttaaggaacagccgaattcggcatctaattcgggcccacttttcaccctagtggtaaatgacccatatggcttcatacagcaaaagttggcacaaaattacgaaacagcttttggagccgtgtattatttgagaatgaattggcactgtgccaaaattggcaagaaatttgacgaatttgggcagcttaagtgccaagaatatcgaaaatatttggacattttgtgtgaatatttattccgtttgttctccggtattcccgcaatgaagccgatttttaagctgaaaaagcaagaaaatgaagaaatttatgcaagtttaattgatgtcattgagaatttgggggaaattatgaaattctttttcaattcgcaatttggccgggggggaaaattcaaatttgagacatttcttgcgaagcattacgagccaattttgttgaatatggatgaagttggggattacgtttcaattggacaattgggcgacaattcacacgcaaaatttggcaaaaaattcgaatttcaaatgaaaaacatt

SEQ ID NO: 54157 - DNA, 1041 bp, Heterodera glycines
gctaatagagcatctaaagagctttcgaatgatacaacaatgttggatttggttggcaaagaaaaaagttatagtccaaaaacatgtgttcgtacgaaaacggcctggcgcctacaatttgtatataaaacagaataaatgttaaacgctgataaaaaagtaatagacagggcccggatttttaagttttcaccaaaaacaaaatctcaagactggatataggtatcgggctgaaattttgcatacgtatgcaacctgggacggggcatctgggaaaaataaggattttccggtccggttgctaactgagtaccaggggcttatttcacacttttgcttgcgtttcttcaaataaaataaaaaaacaaaaaaaaccaaattattttttagatttttaggttaaaattagaccaatatttttacaaaataaaagtaaaagatttttttaagttaaagtgttgactaaaatacaaaaaaaattccaggcctctacctataaaactcttctaatcactgttgtaactcttctaatctctgtaaggccaacaaaatttgaaaaacgggcgcgaagcgcccgactgaggccgcaaagcggcctaacaagctaaaaaacgggcgcgaagcgcccgttttgagcctcgatgtggactaaaaacccctaataatttttgaaaaattcaaaaaaatctctccaaccaattcgatcaatttgaatcgcttcacagcctaggtagcgaagctcaagaagcgcgaaggatataggtagcgggctgaaattttgcatacgtatgcaccctgggacggggcattcgggaaaaatacggattttccggtccggttgccaactgagtaccaggggcttatttcacacttttgcttgcgtttgaaggcccataacttttttcggattttaagttgaagtgttgactaaaatacaaaaaaaaatttcagacctctacctataataggaagggctgcagaaattggcaacttttcagtaccaactttgtccaattcagtccccgtcgaataactcattaa

SEQ ID NO: 54158 - DNA, 673 bp, Heterodera glycines
atgccaatgggacatgccaaaggggagagaatgtgccaaagaaaaaaggccaatgggaaaatgccaatgggacatgccaaaggggagagaatgtgccaaagaaaaaaggccaatgggaaaatgccaatgggacatgccaaaggggagagaatgtgccaaagaaaaaaggccaatgggaaaatgccaatgggacatgccaaaggggagagaatgtgccaaagaaaaaaggacaatgggaaaatgccaatgggacatgccaaaggggagagaatgtgccaaagaaaaaaggccaatgggaaaatgccaatgggacatgccaaaggggagagaatgtgccaaagaaaaaaggccaatgggaaaatgccaatgggacatgccaaaggggagagaatgtgccaaagaaaaaaggccactgggaaaatgccaagaagtaaaataatcaatgggaaaatggcaaagggaaacaaaagtaaaaaaaccaaagagaggaagtgaatgaaaaaagatttattaaaagatatttattaaaaactgataataactgataacgagcggaatcaggaacggcttaatctgttggcacgaacgaggacaatgccaatgacgccaccgttcggcggcatgcgacggccacaacatttgcaaacagttcgtgcctaattaagacaataaa

SEQ ID NO: 54159 - DNA, 469 bp, Heterodera glycines
atggatcgtcgagattctcgaagaaggagaatgagagagaaaagagaagagggaaaacagagagaacgagcagagacgagagattgttattttgtagaggaagatggacaagaaagtgaaagaatgagattcttaaagtattttggctcgagactctcctaccgacatgaagattattaagaaatttcggctcattgacaggaaattttttttagaattccgtttttaattattgggcctcaaaatcccgatttaaaaacgcattcgttcattgtcaatgtgaactccacggtacttttccgttatggggtcgcactttcaaattttaaaaagttaactataggagcgaatttttaggttttaacttattttctgaaattttccatttacaaatcatttggcagataatcatacgaattttaatacaaaaattggaaatgtatctcatttgttaattaacaatcaatga

SEQ ID NO: 54160 - DNA, 1843 bp, Heterodera glycines
atgcagcaggcattggacaacatcgacgaaagcaacgacaccgccggatttgggacttctcatcttcgatgtgccattgtccaagtgcaatcatccatggctgtcgcaatgctgaagcgattcaccaagaattgcccttggtttttcggcatttctaacggaactccgacagggagtgatcgccgtctccgattgggcgacgaagtcgtcattgtcaacttcgcctggaaaagtggctacgaagtcctgtggcatctcgaccaggacggcacttctcctccatggctcaatgccggaaacatcaacatccaagcaacggcaatcaaagccaacatcgccaatccgacgaacatcgttcccaaaatcgggattgtgcttaatgtcaaacgccgtggaatgcgcaaaacgaacgtcatccaaagcctaacggttgtggcacccggcatgaaagttgcacaaagcttaccaggctgggctcttggtgagaaggattggtttagaaccgggcaagctgtgcttgtcgaaacggttgaattaatgagacctaatttgtggaaagtcaatcaaatttatgcactgccgctcaattgcccgtttggccaagtgaatgatcggaaagcctaccatccttttgtggctgttggcattgatcaatccccaattttgcacaaatttccattcagaagaggggattgggatgccaccattgcgcaaggcgaacaagcaattgccgcggcagtcacagcatgtttggacaagctggaggaggacatcctgcggtttaccatcactgccgaacctcaagtggaatatggagcggaagccgacactgccataatcaccattcgacatcgcttagacaacaagcaggaaatggtcgacatgtcaaaaatgtggactgaagaccagccaatccatgtgcgtgtggcagccaaaggggccaaaccatgtgccaccggcttcatcatgaatgttgaacgacaggaatcggaaacgggactcagcattgtcgccaaactcttcctagcgtaccaagaagccaagaactacgattgtgaggaggcatgggaccgaataatggatggggaattgaccgaaattgagcctttgcattctaggaaaatcctaatgcaaagggccgaaaaattttcagttaatttattcactgaaatggcgaaaaacacaacgacgggactcggcacaattatgtccattctaatggcacgccaaggggaacgaacgcctccacaaaattcatgggatgagctattcgtagctaaacaaccagcattaaatgatttaattggaggacagcgagagacggctaggctaatgcttgattcagtcccccgcgtcgtgttcatgcaggcaccacccggcacaggcaaaacaaaagtgtctgttgacataatcgccgcccatctgcgcaccaatccggacgcacatgtgctttttgtggccccgctgaacgttgccgttgtgaaagcagtcgaagagatggccaaaacgatggaacgaatgggatggcgagaggacatgttggccttattttcaggatccggcaaaaagaaatacatgctggagctgaacaaaattggccctcatttgttggctgcagcgttgcgcgcaccccaattgtttgaagagctgaaggatgatcagaaacgcacagtgctccgctacatcaaagcctgtgagacgtcgccaagaactgcgaacgagggaaaagctgcgcaaatccttttgagcaaggaaaagcgacggatcatcttctgcactctttcattggctgaacagattggcacaatctttgatgaaaccgacatgatcatcgtggacgaga

SEQ ID NO: 54161 - DNA, 702 bp, Heterodera glycines
atggtaaaatgggggtccggcggtgccgataggcgccgccgggaaaatttttaagtattacaaccctattgataatgcaattgcgaaaatagcgattacttctcatcagaatattcataattggaactaaacttgactattttttctaaattttggtttaatgagcatattataaattattttaaaaaaaaacagatttaacaaaagcttttgtcttaatcatagtataaatttttgaaataaaatgttttaaaattacgaatccatccaaatcaggacaatttcaggaaaaaaggacaaattcacaaaaggaaattaatatattttttttttaaataataattgataaaaatatttcgtaccctttcccaaataaatggaagaaaatgcggcaaaaatgagaggaagaacaattcactgacaattgcaacggatgtcagcaaattattctaaagaaattctaataatattttagtttttcaagaaatcactttattaattttagcatttttgttgtggacgccattttacgattggaccgataaaaaacgacgaaaaaaacgaaatggcactgattgtatttaaaatggcacaaaatggcgcgccatccgaggtacaattggacggaaatgccaagaatgcagccgaaaatttcacattctaataattaaaaaattaatattattagggccaagatgcaaa

SEQ ID NO: 54162 - DNA, 1302 bp, Heterodera glycines
  unsure (1)..(1302): unsure at all n locations
ccctccgccaatggcatttcatcgtntaattcctcacagattgctcaccattcccgatgcaaaatacctgttgaccncaactgtgaacaaaagtttggaggtgcctaattgcctggctttgttcatttcctgcttttctctcccccttaggtccccggctgtccgtcgttgccccaccgattggtgggcactttctgttgctgctctgctctcccctctttaagtagtcgattgtcccttccccttttccgatggccatttgtgacatttccgccgaccccggcggttccatcgaatttatgaccgaatgcaccaccatcgacaaaccctttgtcatttacgacgcggacacaaacaaatgccatgagaagtgagtcaaaagcggcttctctcttctaattgccatttgacttagcttcgatgcttcttccggctgtctcatctgttccgttgataatatgcccgcccaactccccgtcgaggccactgaacagtttggctcgttgctgctcccttatatgatggatttggtgccaaaaatgcattttcttaaacacctcccccattcctttaagctaaattgtaacactgatcagccgttcgcttcgctgcaatgtcgcgacgaaatcaaacgggcgataatcacttcagatgggcaattaacacccggctacaaatacattgacgagcttagattggagcagaggtgagaagggaaaaaaggagtgtgagaaagataagagagaaagagggagagaggagagagagagtgggcggagagaagagagagagaggagggggagagagagagaaagagtgagaaaaggagagagagtgaggagagagaaggaaaggggacagactaatcactaaaccaattaaatcacaaacttccactgtgtttagacggtctgcgcacaaatcgcgtgttgtggctgttagttcaaagcgtgtgctgcttcttggcgccggaatggtctcttttctttgcatcaacaaactcaatactctcgaccatcgtttcccttttttctcccaatttgacctcattaaggtgtccgaccccttggccaaatattacgcctcgcgatcgaatgtccaattgaccgtggccagcgattcgtcaaaggacggccagcgattggcttcgcttggcagtaacattgagtcggtggtggtggacgtgaacaaagagccggaagtgatcaattcgctcatttcgtccgtttttcctcctgccatttcatccaagaaaatcttccattttaaagggaccacgaattgtgcatttcgctgctcccc

SEQ ID NO: 54163 - DNA, 464 bp, Heterodera glycines
atggcagagctttttaggcccttagatgaatggatggtctccactttgccgagtcgaccaggattatacattctcttcggattattttctgaggagcaacagcttcgttggctgggaaggagtctttttgagtaccccgaaccgcctaacatcaccaatttgtcgtccaatggcacttattccggcagttccgtcttcaagacatgtggagctgagaaattgcgatggacgacacttggcctcgattacgattggactagcaaagattattcgatggaagaaaaagcactgccgatggaaattaaacaaatttccaaattggtgatcgatggtgcgttttggttgtcgtttctgcacattgagcgattgttgagttcagtgcttggttcgttccccctcgtgccggatgctgcgattgtcaattactatccgaagaatgcctccatttctcctcacgcggacac

SEQ ID NO: 54164 - DNA, 337 bp, Heterodera glycines
atggatttgttagaaatcattgcccagaaaagaaaacagattgaggatattgcaatcgaacatggggtaacattattagcattttgatctcccaattaataatggttctcagagtggtgcgaaaatgatcagacattctgatctgtttaagaaagagaaggacgcttatttggagcgacaaaaacagctgggaaaggaacagcacctttctgtcaagggtttaaacaccgaggaacttttggacgcaaagttttcattgaccggctcggattcgatgccgcgtcccgaagttgtgcgtcttgagggcccgagggcagcccattcggctttttggtga

SEQ ID NO: 54165 - DNA, 733 bp, Heterodera glycines
atgaatttggctttgaatccagaagaaggcgatgatcctgcttatgggcagattttcatcgtagatactgagcatgcaatgagagcaatgaggcatgccaatgtaggtattgaacctcaattgctgagaactgcgtatgaagtgattagaaatgtgaatccgtttgctgaagcatacatgatgatgaaagaagaagaagacgaagaagttgagagagccagaactgagaacagagagccagccgagatcaagcttttgtttgagaccggaaggcaattggacagacgtttggggtacaatgtacctcgagcgaatgaagttgctgcagtttatgtacctggggctgacggtgaagtacctaatgccaagattgtggtgagagaacgtggaaaggaattgaagattttgaagagtacagattcaatggtgactccaatgacttacccgctgttttatccgcgtggtacgcttggttgggaccctgaaatgaagcatagaaatagtaacagaagagtaacgagattgcaatatgtgtgctacacagtcgcaattagagaaagagagtttaacccgattttgtatggtggaaagctctttcaacagtattgtgttgatgaatatgttaagattgaaggagatagaatgaattggataaagagtaatcagaaaaagattttggctgatgcatataagaatgttgataatatgttaataagaagagcacaagaaagag

SEQ ID NO: 54166 - DNA, 315 bp, Heterodera glycines
cgcttattctggtacacgtcagaataattccgctcattctggtacacgtcagaataattccgcttattcttgcacgcgtcagaataattccgcttattctggtacatcagaatgattccgcttattctggtacacgtcagaataattccgcttattctggtacatcagaataattccgcttattcttgcacgcgtcagaaccgctattctggtacatcagaataattccgcttattctggtacatcagaataattccgcttattcttgcacgcgtcagaataattccgcttattctggtacacgtcagaataatt

SEQ ID NO: 54167 - DNA, 49 bp, Heterodera glycines
ggaagctactccagaaggattcggtctccccataaatctgggcgcatcg

SEQ ID NO: 54168 - DNA, 386 bp, Heterodera glycines
atggctttgaataggctcccggacagtggacattccgacagtggacaatcggacaatccgacagaggtggacaatcggacagtgggtaatccgacggtaaaatgcacaaaaagattaagaaaatgccatcgccgaagtgaaccgattgggcaaaggtatagattattggtcccgaaaattattttttaaataaagtttaagaaaattatttttaggggtaatctgaggcgccgagcacgaatccggccttattttggctcagtctcgaatcccgaacccggactcgaacaaaagttcgagaattcaatttttcgtacttcgcagttttagttcaaaacccggctaggtatatacgtggaatcaaacaggatcttattaatacgtca

SEQ ID NO: 54169 - DNA, 2173 bp, Heterodera glycines
atgaattgtttatttttaatattattttttgctttttgtccactctttcgcattgccttcttttcccaactatcatcatcagctgaggtttgttggtgttcttttggactgtgttcaaatcttaatttgaaaatgcctcattttaagccccgttctttaagctaattaaatgcgcacataatgagttaagaattcaaccgaaaatctgtgacagtaaaaggagcccggaatttaaaaaaatcgggatcgggctttgggattggtggattcgggccgggactgaaatccagattttgccggaatttcaatctcgaaccgggatacaagcccgattttgttgggatcacgatcctggtcattttctcaaaaaaaagcctgggttgagacccggaaaaataccgcgggatctcgatccctcccggctctaatattaacgggcaaaatttaaagaaaaatgatattgtaagccaattttttcatcccaaagcccaacaatccacttttttggggctgtacttggccacaatcgcatttaaattcaaccaattgaaaaattccaaaacgcatgaccaatgaatgaattttggcattggtcagtaatctaagccaatgaaccttttagtttttttagtgtttatatttcaaaattttgtgcagattgacaacgacgcgcttgtagcttttgtgaaagggccctccaattttgtgcagttttgcgccgccaaaggtgtggccaacaatgaaagcaaagggcttttggcccgagtttatggcacacaccttggcatgctgtaccacatgagactgaattggcactgtgccagaacgaacaattcgatacacagaatgctgtacaagagaaaatgcgaatactttcgcaaaagtgtggatattttgtacgaatatttgtcgagggttcacaacggaggaaacgcggaagtgacgaggccaattttcaaggccgaatccacttctattcagctgacatttgttgatgtcgtggagtgtttggccacaatttccaatttttatttttgtgatcaaaaaatgacaaataattacgaaataatgaaagaaatggccaagttcagtcagttcaaattggaaaatgaggagcagcaattggattttaagagcggaaaaagtgccaaacaaaaaaacaaaaggctgaaaacagatggaaaggcaaatggaatagaatttgagcaaaaaatggaaaaaatgttcaggaagataataatagagaatgctaaattggcaaatggaagctcatcatcggcattttcatcgtcgacatttccatcatctgcgtttccgttaccgatttccatgtgcaccgtacctatttatgatgccgctttgcgcgtgccaatatatgacatgagcgatgctgtaagtttctcgaaaaaacaaatattcgggttagggctgccattcgacaaaattactcggaaatgcttccggaaaaatgcgtcagcaatattaatttccataccaattcaggattagttttcaaattataaaactactgtatctctttttaaattcactgactcattttccggtcaagtttggaaaaataaagaattacagaagtagccaaaccagattgaatttttgaaattggtgcaggaaaatgccaaaagatttaaatggttgttatttcgtgccatttttgataaaaatctcaacacttgcagattgaagaagaattatttcttaaatttgtgaacggaagtgccgatttttccgcacattttgctgctgtgccattagatgaaattaaaaagtacgaaactcatcttggtctactgtatgcgatgaaaacaaattggcgttgtgccaatgccaaaaataaaattgacaacagctgcaccaaagatcgccgatacattgacattttgtatgaatatttgttcatgattcgctatggaattaagtctgtgaagccgatgttcgagactcttgtagggcaacggtaatattatgtttaaaaaagcaggaagtaaaagggaaacccgaaaaacggtaattaaccctctttagtcattcgtcctaaattatttttaaaattttttcgaaaataatttaaaccgctaaacatttaccccaattttaggaggtttttgcatttcagtccccttaaatataaattaattggtaatcagttgga

SEQ ID NO: 54170 - DNA, 77 bp, Heterodera glycines
atggtcatttcgtttctctaccaaaacccgtcttcctatgacgccgctgaagagataacgaacatgacatgggcaca

SEQ ID NO: 54171 - DNA, 740 bp, Heterodera glycines
atgaaggtgtcatacgtgaaaagtttggacatttttcttggcgtctgctttttcattgtgttcgcctcgttgttggaatatgcaactgttggctttctgatgaaacgccgacggcaaaaaagttcgtccacctcctcgtcggtgatgccacgctcatccaccgtttgttttcgtgaattggaggacggcacgctgaaaatgttggcaccaatgcatcataatcaccatcaagtcaataattaattaatttcttattatttttataaattttatggattagggatggtaaattgacccattttggaattcatttgtatggcaattattaaaactatgatacttaaatgtgtcgggattattcttgggcccaaagacataatcccgaattcccatataagtaatttgagagacggccaagcactaggcctcgagtcttcatttccatgccaggccggaaacattttcaaaaattttttgaaatttacaattcgcagtttttgccaaaaaattttcaaaaacccaactaaattttttctgcggcgttttttttataaatttttttaatgcttgagttttttattaataatattttgacgataaaccaatgtttcaaatccccaaaaatgtaatccgagagacggccaaaattttggcatcgaatcttccagacctggtcaggccggaagtgtttttttgaaaattaaagtcacattttttgccaaaattatctgaaaatccaa

SEQ ID NO: 54172 - DNA, 1318 bp, Heterodera glycines; identical to SEQ ID NO: 23473

SEQ ID NO: 54173 - DNA, 669 bp, Heterodera glycines
atgaatgactcgcgaataattcgtggcagaaaatttaattgctcattaacatggcttttggatcactacaaactttcagacaaatacgcaattaaaaagaaaattaaggtatccatttttaaaatttgaaatttaattatttttaaatttcatgtcaaataccctggccatccaaaatttgtgttcgtcacagccgccaatgaaaaatattacccttttcttcggacactaattgcaaatttaaaagacaaatttggatgtaaacagaaataattgcttatgatttgggaacagtgtcaaaaaacaaagaatgggtaaaataatatattataattgtaaaattaataatttatttaaatatatttgtatatttaaagttaaacaacaattttccgaaccaacccggattcgaacaaaaagtcgaaaattttcaatttcagtaaaattcgagctattccacaaaacttgatgaggcggggggggggggcggtaccatccatcggtactatttattatattacctttttaaattcaaatgcaaatatttcttaattataaataattaattaaataatattattataattaggtaggggttttctctgaagctttcttttaatgagaatgaactcaaaaagatgaatttaattagcaaaactaatgaataaa

SEQ ID NO: 54174 - DNA, 131 bp, Heterodera glycines
atgtcctccgtccgctccatcagtagcaccgctcgtgctggcaatgtgctcgtgctgctcgatttgtatgcctcggggtttgcctcttcaaacacttcgccaactattccgatgctcacttcccgaacgat

SEQ ID NO: 54175 - DNA, 1699 bp, Heterodera glycines
ttcctcctatcaagggcacccttttcattcatttttcgagttttcatccggttcaaaaaccggttttttggcatttccgcaactggagacctactttctcgtgcataactcgtcgagacgaatcgattggtatatcattggtgccattttttaatgggaccttgactatagtatatccaagtctattttaggggtttccgagtcggtgaacttattttccggatttttatgaaatttaatttatttttttctgcacattttgtgggtcagcgaaatttcttcattaggacgtcattttttgtcactagaaatcactattttggcgtttcatcacttaaaatatgtagtttaaattcactattttggcaattttgtcactattttttcactttttcgacattttttgaaaaatttgggctcccggacatttcgaaaatgaccgtttcgccaatgaccgtttcgacaataccttttcgacaatgccgtttcgacaataaaattaaatatatttttttaaataaaattcaaatttctgcaaaattatatggacggtgcggatttgggatcaatataaaaaagtttttttttcgtttttttcaaaatagcattatgagaatggctttagtttgtcaattttcggcgcaaattgcttgtttttttaaattaaaaattgaaacattgttttacacctaaatagttgataatgaattagaagcttttaggtaatagtaaagtttatcccccccccctttttcaaaaaaaaattaaaatttttaaaaatgcttaaaaacaggttttagggggttttcggggtcgctaatcacgaatccgacatccatttcgaccaattccgaaccccggacccgaattcgaacaaaaaatcaaaatttcatttttcaccaaaatgcatatttattgcacaaaatcgatccaaatgcatatgcgcataaaatatgccttaaaaactgcaaaaatggcttttaaccctaaaaaaatgccaaaaattgtgtaaaaattctgaattgactttaaaagcttcaaagaggagggaaaagaaggaatgacttttatagtacgatgcagcggggaaggggaaaaaattacaattgcccaaatgccaaatgttttttctcctttataaggggtgcttttctcatcggactgattattttttctttgaattaacaatctttgcattactaaattgcttaatttgtctcttcgttgctcaatcctctgttccaaaattccattttgtttttcatttttgaccagcatattgctacccatgcactccgtcgattgtcaaattcatcaacgacatttaccatccgaacgttggagaaagcggcgacatttgtttggacgtctgaagcagatgtgggctccggcgttgaccatttcgaaaggtgagagtggacaaaacgccgacaaaatatcgacaaaacaaaacgaccgccataaccagactttttggaaaagtgtcgatattttgtcgtgtgaaatgggatttttcgaattcggtagtgccgttttaatctttatccccccccccatttcagtgctgctctccatctcttcgcttctctgtgacccgaatccggactgtgcgctgcgacaggacattgcgattatgtaccgcgacaaccgtgaggagtacaaccgaaatgcccgtgaatggacgaagaagtacgcgatg

SEQ ID NO: 54176 - DNA, 679 bp, Heterodera glycines
atgtcactgcttcgtttttcccaacttttttggagcgcattggtctcgcttgctcttctgttctatggcatcatggaaatgctgcgctctatcgaagaatataaagtgagcgagcgcaacacgtggcccacatcaattcaacccgacaaaatcgtgaccaaaattgcttttcagttgaaatccgattgattttttggatcaaattgagatttaagttttgtagtgttgaggttctgtgttcacgagttgtcaaaatatgttttgtctgcgtcgcttaatttgtttcttttcaagatcggcatctattcgtatgccttcgcttctatcttctgctgggattgctctgttgtgtactcatccaaattgctgctccattggacggacttttggacttgcgtcaacttccaagcggatcacacaaatgtgccgttgatcactttggtgagtttgttttgttgtcacatttaccatttgattcctacatttttcaaaattttaaacacttttaaaggtgctcagcattgtcttgttgtgttcgtccgtcttcgagattattcttcacaaattcgtgctgaatgatgtcgacacggaatgtgccaatatgatctttcatcagcaccagaagaagaacggaagtgccatcgaatgaacttaagcagagacgagtagaacgatgcca

SEQ ID NO: 54177 - DNA, 492 bp, Heterodera glycines
atgcacctgcatgccttccagccggccaacacattttttgccgaaaattctgtggagttgcgaaggaatccaagcgatacgattgttgcagggccgagttgtgcacttgccggttttgtggcgcttatttctttggcaattggccgttcacccgaacgctttggtctgacggggtgcttcgagccaaacggaattattagccaagttggcggcatggaaaagaagctaatgaggctcgtccattctggaatcaataatgtattggttccgaatgacaattataagaagcaaatgccatccgagatgcccacgatgccggccatgacttgggtcccatccctcacattgacttttgttgtgcatatcaatgagctatggcatagtttgtttcctcttttcttggatgctcaatgaaatatcaattttaatttgttagattattttattttttttcgatacttctccacattttgtgttttgtcaaaatggtga

SEQ ID NO: 54178 - DNA, 54 bp, Heterodera glycines
atggcaagcaatcaaaagattctgttctttgtgagaatggccaagacgtttgtc

SEQ ID NO: 54179 - DNA, 159 bp, Heterodera glycines
tttttaaattttttaaaatttttttgaatttctaaatttcccggttggtcctggttcccggtcccgaagaaaaatcgaggtcccggtcccggcttctcaggtctcggcaagtcccggtcccggttttgccctaaattcccggtcccgcttcactctagt

SEQ ID NO: 54180 - DNA, 665 bp, Heterodera glycines
atgatgaatatattaatgatacctgattttaaaggaccagaacacgtccattgtgggaaatgtggcttcgacttttatttctacaatgtcaagtggcaagactgtctggtggatgcggggatgggcccaggacagtgttggttaggagaggataatatagtaattttttatttttgatggagtggattttgattttaagaaatttgaaataatttaaaataagcataacttttcccggcaaagattgggcgcaaacgggcctaggttttcttttttccaacagtaggtagtgcttgacacttagcaatatttaggaatttagataaatatttatttcccaactcaaaataatgttttaaatgcttacagccgcccggggcgctaggcaaatacaatgaaaaattgctttccgagatggacaaagtggaaaaaatattggatgatccagaacgcctacttgaccaaatagtcggaatcgttgaagatgaagatacaattccgttaggagcagaagtaagctaaatctggatattttaattgtgtaggaccgcatttgtagtgcagaattgtaagaaaaatcttgaaaataattttttaatgttttattattaggattttttgcttatttcgatatgtggaaaattttttggaaatagtaaaactaa

SEQ ID NO: 54181 - DNA, 580 bp, Heterodera glycines
atgagctgtaagtgaaaaaacgtcctcatggattttgcgatgaccgagaattttggaaatttataatacaataaaaaataataatttttgattaaaaacaaaattatttgttctaagaaacagaaagaaatgaattaatttatcttaaaattatagattttatcatattttccttttctcttacaatatgaaattaattattttttcatatttttaaataattaaataatattgaattaaataaatttttgccaattcttaaaatacaaaactaagacaatgttagttagcactaaatttaaaaatactgccaatttcaataaaatgaaaacatttttttaaatttaggctaacattttcttttggtttttcgggacggattattttcacgaagaatggacaaattattggtaatataaaaataaaaatgaaataatataatatttatttttaaatttttagatacatccgatttgttcatttcttccttttcttccattgctgatcatttgtttccatgctttactttgaatagcatcggcaccacaatttggtttttttagacaaatctgttaataaa

SEQ ID NO: 54182 - DNA, 890 bp, Heterodera glycines
atgtcaatttcgaccaattcaataaattgtggagatgattttacaccagcagaaaacaggggtaaaggaaatgggagaaaaatttaaattttgaatatgaattaaattaaattattctaaattaaagatttaatttatttaaatttcagaagtgaatggcgatgcaattagtttggaaaatgatggacaatttgatggaaacagtgaaacgatcactgatcaacaacaacagcttaaggtgggcggaagaaaagctaacagaagaaagaattggagaaaaattgaattaatgtgagacaaaagcgattttgttaatttaaattcaggaatttcatgaaaagtttgccaaattggaaacggaattgaaaatggccaaattggaaacggaattgaaaatggccaaattggaactggaaaatgtgagtttgctataaaaatttgagtaaattataagtgccaaaattttctaattatttttagaaggcactaaagttaaagcaccaggaattggtaggcgaacagaaggcattgaaggaaaaagtgatcaaaattgaacagaaaaacggtaggtaaaatgaaaataaataaagaaaaatatatttttaacaggatcattttttacgaaaagaattataaaaatgtttaaatttagattttaaaattaaaatgtcatcattcacgacttcttcatcggccgacgaattttctcctctccaacgtaaatttttttcttaaaatgcataattaaaatacaataataataaacatttttcaataattaaatttgctaaaataaatttttttttttaaattaatttttcattttcagcaatttttccaaatctgagcacatcggaggaaatgagtgttctgattgcccgaatttctga

SEQ ID NO: 54183 - DNA, 1239 bp, Heterodera glycines
atgggcattttcacctccccttttgtggcccaacttcggcacaaaagcgggtcgcccattgccgaatgttacgaagtgcgcattttgttgtcatcgcttatggcacggattaacttgttggagcgaagtttatacgaatacaacgacaatttgccagctccaacacgaaaagcgtgcttagagaaaatagtgagagcgaaaaacgaattttacgcaaagatcgccgaaggaaatttgtcgcatttgagaaaaacgttttgcgtaatgtaccagtttgccaaatttttggagaaaagtgttgccgtggggcgtttgggggaggcaattgagcgatgggaggcgacggaatgccaaaatgaaaatgtcgtcaaagagacaattttggcacatcgggcgcagaagaaacgcactatttttgatattataatatcagctgtaaaaaaggaggaagtgatgagacaactcagagaaatcaggggatgctacacaaggataagcagatatttggaggaccagagaatgttcaagaagctgctgaaggaggcggacttttatgagcagagaggtaaatttattatttagaagcaattcaaagcgattaagggactaattgccataaaacaatgccaaaaatgtgtaattattaaagccctgaattttaggttttacctattttttacggataatacttgatgagagaagcacgaaaatcatattttctccgaacaatttttgaattagattgactttttagcatccaaaaacacttaaaacggggatcagcacttttttagcattttcggtctttatcacctattttggcctttttccagaaatttcataccaaaaatgcaataaaaacgtaaaatgcacccctaagaatcggtcccagaaatttcagaaaaatacgccccgaagaaccgatcaagaaattttcaattacaaccctaagtatcgaaaaaattttttttttaaatatctccaaaatttattatttattttttcttgacaagttgcaattgttcagacgaaatttttgcaccttttttgcacctattttagtacctatttcagtatttttggcacataaaaatcccagctctagtcattatctaaattcgcaaaacttagaaattttgggccgtttttatttctcaacatttgtcttctgtgtgggtgcattagattaagatagcttttaacattttgattactctgatagggttttgctatataata

SEQ ID NO: 54184 - DNA, 1520 bp, Heterodera glycines
atgccaatggcactttcggaaacgcaagagaaatcgtggcattgttttgaaaattggatccaaaatttgcatttcgatgtgctaaagcaaatgctcaataagcagactatattcttcgacaacattaaaagatgtatacaattctctgagttttacagaatcatggacttttatttaatttttcctgttcttaggctgtttattctaattagttataattagggtaggtcgggaccgggaccaaaacacggacaactgagtatcgaagtcccggttttgaccagttttgaccggaccgggaaattcccggttttttcccggttttcccagccaaaaagtcccggtttttcaaccgaaagcccggtcgaggttttgcccaaaattcccagtcccgacctaccctagataattaatgccataattaattgagcacccaaatttcagtttttgaatccaagccaaaagaacatacggataaattgatgcttttcctacacaacaaacaaaacgtggagaacattttacgccttttgggcattgattttgaagccaatggcagcagcgacggagatccgacggaacgaacaccgggggcggaagacgacgattggccaagtacggacagtccaatgggaagcaccgcttcgcccgtggtaagtccatcgacagaaagaaaaaaggccaagcggaagaaggcaaaacgaagcaaaaaccaacgcaaaacgtcaattgttgagcatgaaattgacgaagaaatgtttttgtcaagtgaaacgcccaaaaatgggacggaaagccaaaagaagcaaagtgaggaggaggaaaagccatcagaacaagaagaagacgaagcagtaattgaagcagcggaaattgaagaattaatcggggaggaatcatcaaaagatgaagcagcaaatgggggaaaagcacaagaaaaagatgaagcgaaaattgaggaagaacctacagcagaaagggcaccagacaaggaagaagatgaagaagaagaagcagtaaatgaggaaaacggaccaaaagaagacgaggaggaagaaacagtggaaaccggagaattaattagggaggaaccatcaaaagaggaagcagtaaaaggggcaaaagcacctgccaagcatgaagcgaaaaatggggaagaacctacaggaagtgcaccagacgaggaagaagaagaagaagaagcagtacatgaggaaaaagcaataaaagaggaaaaagaatctgaagaagaagaagcagcagtaattgaggaaaaaggagcaaaagaagaagaagcggtaaaagaagcattggaaggggaaaaattaacgggggataagaaggcaccaaaagataaagtggatattggaaaaaaagcatttgaaggtaaagcagtaattgtgaaggaaccaatggaaaaggaaccgctgaaaaatgaagcagaaaaagcggaaaatgaaaaaatgccggaacattcattagcaattccatcagttcagaaagcggaaagagagatggat

SEQ ID NO: 54185 - DNA, 2526 bp, Heterodera glycines
atggcaaaagaaagtgtcactgtgccgggagaggatgcttctgtgcgtgccattgtccatctgctcgaccttggcatttacgcgaacgagatttggcaccgattgaacgctattagacttgttgagcaaatatggccagaacttggcattttgcagtcggaagtcgctaaaattgagggccaatgggccaaaattaagggcatcaaattgtcattgaaaagccaatggacggaattggagaaatatttgcatcaaatgctaaagcaacttttggtgctaatggacaaaaagaaattccctggcattaattatgatggtgttgctaatgataatgagggagaattgttgcgcgaaatccgtctgctgaaggatgaaatgcatttgcgtaatttggcattttcactcgccgaaagcaaaagcgcacaaacaatttggcacagtttgtgcccagctcaatccgcatcgtttttgtcgttgctctttagccgtacgttttaaaatgaatttctttaaataaatattttaaaaattatttatttcgaaaaaacactcatttttaatgagagaattattttcagttttttaaatttgaattttattttttaagatttgttcagaaagcatttgcatcaaagagtgaattttgcgatgaaagaaaataatcagcagaaaattggtaaattcataaaactatttatgaaaataatctaacaattcagatgttaaactttattatgaattccgaaacaataaaaatttgaaaagattcgttccatttaaaatgtccgccaattttgcgacgaaaaaattgaaccaaatttcggagttatggcaacacatggcttttggggaggacagatttaacgaattggacatttacaatttggtatttttaattttaaataaattgcaaaatgaattatttatttagaaaaatgaaattgcaaagggaaataattatctgatttttgatgtaaatcaaaaagccatggttgaaaatataatcagagaaatggatgaacttctcaaaaattgggtaaatatttaataaatttgttgattttttaaaacttgatttttagtcatcaaaaataaattgccatttctccgacgaatggctgtttagacccaaagaagaagcgaaactcagtgccatttgcataatgccatttgaatttgacatttcgtcctttttgggcacttatttttcgagtaattcgtcagtttgccatgaccaatcgctgttctgtcgactgtccaaagtaaataatttattttttcaaataaattttaaattctattttttcaatttccagaaggaaaatctattggcactccaaagaattcaaaaagattatttcaactccgtgccacaaattcatttcacttacaaaactctgcctgtaaccattatggccattttggtaccaaaccttggccaagaagtgccaaatgggtcattggatgtccaaaaaatcaaaacaatcgcacaaaaatttggcgatgaaatcgaaaaattgatcagagctgatcatctttttgacgaaggccaatttcgaatcagccaaagagtgaacgaccaaacaatggagcagttggccaattcaattgttcacgcaggtaaaagggcggacaatcaaaatgaagagataattaggtaattaactgagtgttaagtgccaaaagaagcggccaaaattatgcaccaatgggtaatgttcgatcagttaaaagacctgctgttgaaggaccgacaaaaagcaatgaacctgagggaatctgtgaaaactcatttggccatgataaaggcatttgcaagtgcgaaaaatgccaaataaagtttaaaacccaatttttgaaattttagactttacaactcatgcaaaaattcattggtttttattggacaaattggacacaacacaaaaagaagcagccagcactgtgcttaaccgcaacattaataatcataataatttgttcattaattttgcgtttcttttggcttatttggaacaatgggccaaatgtaagaccattttatttggcaatgaaaatttaatgccaaatttcagctaatcacattaatggcgagcatatcggctttttgaactttaacattttggttgtaatggtaacgaaaattgtgctcgcccactcaaatgccgcactgccgatattaatcgaaaaattcttcatcacatattcaacatggcataattatatttaaatagaatctctcaaaaataaaatgcgattaattaatactagttaattaactaattaattgcaggccctggccactgccggttcaattgacagaaatttgtgtccacagaaagggcgaatttctgagttggatgccgggcagagaatggttcacaaaaaggcaacattcgcccaaaaagatgctcaaggcgatccatgccgaattggcaatggccatcattacgccgacattccctgaacgaaatttggcacaaaacgcaaatatttccgctttaaaatgcatccaaaatcaaatga

SEQ ID NO: 54186 - DNA, 548 bp, Heterodera glycines
atgttggattttgatgacaaagaaaaaagttatagccaaaaacatgctgggcccaaatgtgccggcccaactgaggtaaaccgttgtataagaagatctaaaaaagaggagtaatcgttgtcgcaaatgcgcaagtttagactaaattcagcggtcaaattttagcgtgtatcgcaacttgtctaggaatcgaaaacttttgggtgtttgaagaaaatgaaatatgaaattgaaaaaatttatcaaaatcggagaaagttcggaatcgaataataatttgttcattttttgatctttttccaaaaccaataaaattttaagcatttttgcaattatggcttattaaagttgtctcatcagagacagagttggcaagacccagttgacccttatcgtccgtctcctgggactttctgagaaaaacaaacttttttcgcgcatcgcggattcaatttgccccggtcgtgtcccacccatggtacggacaagggatttatttgctcctcgttttctcgcattcttaccttttttgggcttctcgtcgagca

SEQ ID NO: 54187 - DNA, 177 bp, Heterodera glycines
atgcgggaccgggaaccccgtaaaaaccccgcgtgagtcccgatcccgtcgggctctagcaaaaacaataacatttcagcatttttgggcgtcaagcgttttctcaagacatttatgatcaatcccgccgctgaaaaaagacgttcgctttcggcaaaatgcttaaaagataataaa

SEQ ID NO: 54188 - DNA, 626 bp, Heterodera glycines
atggcagagaaaagtatgagagcagcagagaaaacaatttttgaaagtccgtgcttacagccggaggggatgagaaggaatgtgattaatgaattggagagccaagaggagcgagagcgaaggaagcgtttcgccacccggactcctccgagtggccaagcatttgcaaatacggtttgggcggaaaaagattggaaaaaggatgatgagggggaaaaggatgaaaaagaagagcctgtcttcaccaaaataataaaaattcaacggaagttaaaagaagcaaatgaagaattaaaaatgctggcaaaagatgttgaaagattggtcagcgcagaaaaaagcattgccgaaaaggaaaagaaatgggacggttttccgacaaatgtcaacgaatttggggaagcagggacgtccaacagatggagataacacgatgacggaagatggcgcggaggtcgcggaaaccgcgggcgctggacgacaaatgcacgggcacgaggacgacaatggcaaacgaacgagtgggatgtgcgcggacaccagcaaacggagacagaacaaccgagaaacgaaagaggactcacaccatgggaattcacaaaaatggcgggatatggcccgggata

SEQ ID NO: 54189 - DNA, 1136 bp, Heterodera glycines
atgttctttttgatgtcgtttgggatcaatggaattggcctctactattggtacttctttttcgatgacacaattaaaggctcataatttatgttatgtgcataaaatgttgataattttgtacaaattaaaaaatatatataattttaatgattcggatttatttttccagtacatatcccaattacccttatattttattcggcaaactttaattttatttctattataccattcataaattcgtccaacctgttaaaatcattcagaaattttaacagcagtagttaaatgaaaattcgtgttaattatatttggataagcctatgaatggcggctctataatcatgtaaattaaaaaagcaagaaaaataatttaattttttacaaaattttttagaaaaaactttctaagttttttttttatttacatgattacagatgaaattttgtaaaatttaattgattttgacaaaatttatttttttaacctctctagatgaatgtatgaaaagaaccgatggaaaaattcatatgttttaaatagcctaaaacatattcacattcaagcttcaacgccaccaacaatttttaacattggaaatcattttttggtcggcgcttttccctttgcatttgccccgatgctttgccaagcttaagcttgatctaatcttcaatttaatttaatttttctacctgataacctccagcgcttggttgaacaatgtcatcactcccgttaattcatctattttggcgccaattataaacatggccaaaacagagaaagcaaaaagaaaatggcgatttttgaagaatgaaaataatttagaggattgaattagaactcgatttttaacaaaccaaattataatggttttttaataattaaattaggttgtatttaaaaaaaaatttaatggctttttgtttgtcctaacgactatttataaagataatttatttaatcacatttgtgcactttctcaagatttgacctttgacatgaatatgtctgaccatgttagcttcatttttattcataatttattaacaaaattcaagacaatttggacataaaaagcgtaaatgatagtgaaatgtatgtttaaaaaatatttatgaaaaataaa

SEQ ID NO: 54190 - DNA, 1358 bp, Heterodera glycines
  unsure (1)..(1358): unsure at all n locations
atgggcgaagtgcgtttcctacgtccnaaatattacgcggccgcgctcaaacagcgcgaggaggcggaagcggcagccaaaaaggccaaggaggaggcggaagcggaggcaaagaaggccgaggcggaagcaaaggaagcggagaagaaggaagcagaggcggaagcggtggaaaagaaggaagaggaaggagaggtggataaggaggaagtggaggcaaagaaggaggcggaagaggacaaaaaggaagcggaagaggtcaaaaaggaggaagcagcggaagtgaagaaggaggcggaagaggacaaaaaggaagcggaagaggtcaaaaaggaggaagcagcggaagtgaagaaggaggcggaagaggacaaaaaagaggtggaacaagacaaaaaggaggcggagaaagacgaagctgtaaagagtgaactgtaaacagttctgatggatattgtgatgtctagggagggagccatcattagcccctaaatttgtttgttttccgaaactttcttttctgtcttctctcttttttttctggcgctaaaatggctcatggacaattatttatttgttgcaaattcagtcacagtacggtgcatgcactacagtacaccacacccatactatacgccggcaggcaccatcagtttctctctctctctctcaaccaaaattgtttttttgtccaacaaatttttgtgtatttttttgtatcatctttttctctctctcttttttttcttgtaaaatgtaaatttcggtgtttctcctttccttcctttctttgctttctctctctctttatttatctgtgtcaaaacatcaacaacaaaaaagaaaatgttttccatagaaatcatccactgtttttttcttgttattgaccattttgttttattttcttttttctattgtttaaattatttgtttgggctttctcaaaacaaatgggcatttgtgctgcactcacaactttttatgtgtcaatttgttgttgttgtcgtcatcataatgatggacaacacaaaaacaaatatcgcaacttttttctccctcttttttttgttgctttacccatggaattaaacaaattttcatgtgtttatttattgtttaattcttgtttaaggttttttgtccaactatcttttagaattgtcacaattttcctttgaaactgatctttctggacatcataccatggacaacggacaaaccggtgaacaacaagcagtgcatttttatttccaatctaatacccataagattccatgtatcattcgagaggaatgcatcctaatatggacactgactgaggaaaaaggacggagagaggccccctccaaaataaa

SEQ ID NO: 54191 - DNA, 659 bp, Heterodera glycines
aacaaaaaaatcgattttttcaagtgtccgtttggggtactcaaacaattatggggagcaaaaatccaacgcagaattaaagtacaggctatagggaagctattccggaaggattcggtctccccataaatctgggcgcatcggttcggggggactgccccgaaaacaaaaaaatcgattttttcaagtgtccgtttggggtactcaaacaattatggggagcaaaaatccaacgcagaattaaagtacaggctatagggaagctattccggaaggattcggtctccccataaatctgggcgcatcggttcggggggactgccccgaaaacaaaaaaatcgattttttcaagtgtccgtttggggtactcaaacaattatggggagcaaaaatccaacgcagaattaaagtacaggctatagggaagctattccggaaggattcggtctccccataaatctgggcgcatcggttcggggggactgccccgaaaacaaaaaaatcgattttttcaagtgtccgtttggggtactcaaacaattatggggagcaaaaatccaacgcagaattaaagtacaggctatagggaagctattcccgaaggattcggtctccccataaatctgggcgcatcggttcggggggactgccccgaaaac

SEQ ID NO: 54192 - DNA, 268 bp, Heterodera glycines
atgcatgttgattttgatcctctacaagtagattggtccacattctcgtccgagtatgtgcaatttggtggatacaacatttatcgggggttgccctatcagcgtggagcgggagttggcgcagtgttcagaagtcttatgagatatttgctgccgattggaaagcaaattggctcagcaattggacgtcagggaatggaaagcggaaatcaagtactcaccaatgtgctagagggaaaagacctcaaagagtctctcgttagtgaga

SEQ ID NO: 54193 - DNA, 861 bp, Heterodera glycines
atgcttttgataaacaaggctcggcgatgggccagagaagagtacattaagcgaaagactaaagaaaaacggggcgtccgtgacgaagagctgctcctacaggccatgttgacagatactggaacattggttgacctcaacaacgtggcccaaggccttctggcacgcgaaaagagtgctgcaacgagtaatgtaccgttgagaatgtcagctgatgataccaattcgtaccaagaaaaattggatgagtacttttcgaaattaagtgacaaaaatttgaacattcttgatgaattgggcatgacaaaattgaacgccgaaatcaaaaatttgaccgaagaggaacgtgtgatccttgaagccacaaaggaaatggggacggaagcatggattcaggcgtaccgtgagatacgtcttgtttgccaatttaactatgacgtcaatagaaatcgttttgttctgaacaccgacccacggtacgttaaaaaggttcaagtctcgcctcaacttgcctacattctcggtttcaacaacacggagtttattcaatctgaaaacgaggcaaaattcatgccggacatgagcggtggtgtgtcatcattccacgtttacacgccggatcttattgaaccaatgatgattggagatgtgacggccccagtgttgcgcatagtgaccatacgcggaaaccccgaccaagtagttgaagaacaattttttgccatacagtatcataaacttttattaaaggagttttctgaaattctgattgagatacgtaccaatagcggcatcttgatgccattccaatacggaacatgtacattaacattacactttagaaaaatgtcctatttttaa

SEQ ID NO: 54194 - DNA, 923 bp, Heterodera glycines
atgcttcttaccacgccaatttcattgtcgtcaagtgacgacgactgtcttctgatgtttgtccgttgtccaattgcgcgagacaaaagcaaatggacaaaatgggaaaaggaagcgattggctggcacatttgtgatcagcggaacataattgacagtgcaatttatggtgaggacgaaatcggagatgggtaagcgaatgatttttcaaaaaattcaattttattgtgttcaatttttaggcttctcgacgcaactcccggcccaagtgatcagcagcagaagtgaatgaatgaattgatgcaagtgatcggtcttattgaattgaagagttgaaaaatgaattttaaggttatgacgtgatcataaaatgttctttttgttgcaatgataaatttacttgtgtttttattatttattagggtaaaattcaacaatttctttgaaaccaagattagttgtaagaaattttaagcatttatctattgcagttcttacgaccataaaaaaaagacacgaccataacttttttttttgcaactttagggcgaagcatccaaattaaacattcttagtatcattcgatagccctaagaatcctctattagcctgcaaaatttcgaaaccacccctctttttcatgttttccgctatccctgaaaattcttttccaaattggtcagatatttagttttttagaggatttaattctaaattttttcggaatttcaaaaatcgccacgcgaaaacgaccctgaccgacaaattacagcattacaaaatttcaaatcatcaactgatttattcattttgctaagctaatttaaaatccaacgaaatctgtcttattaaatttgcctcaacaaatgtcagaccgccgaaaagaagcggaggaaaaaatggcaaaagcaatgtaaaataaa

SEQ ID NO: 54195 - DNA, 568 bp, Heterodera glycines
atgatcaaattaattggacagaatgaggcgaaaagttggcgaagaaaagtgatgacattgcggtatagatttcaatgtccatttgcgagtcttgaagtgttcgtcgatgtaaaagtcaaatcggtggctgatcagcgcaattccgaggccaagttgagaaggtgggagcaaatcgaacaccgaaagccaacaatcggcggagatgaaactgaaaaagggggaaaacaaaattcaaattgaaaattggcatttttaattattttacattgctttttccatttttttcctccgcttcttttcggcggtctgacattcaaactcggaaaaatagataaaataggcgcataattttaaaaaattcataaaaaattaagataaaaaagctatgaaacgtttctctaaagaatcagcaaaaaaagctttacccaatacccattaaaaaattatgtgaagtgaaaaaaaatgctaggtggaatgttactttggtaaagaaaaatcaaaataattcaccaaaaacaaccaaattttcagtgataatatcattcgacaatcctagtttatggtatca

SEQ ID NO: 54196 - DNA, 675 bp, Heterodera glycines
atggccgaaaccaacccaaaatggaaagaggctaaagaaagagaggccgctgctgaaactatgcggcggatttatgcatcacagcagagagatcattcgccctacatcaccgacagggccaaatttgaagtttttgacaagttggaattccgtgggccttgggatgccgatgtaaattttttatttcaagaaaaaatttacatttgctgccatttaaagatactccgagagttgcataaattagcgtataaaggaagtgaatttgagaacgatgtttgggttggcaagttccgtggagaatatggcgcacttgagccggaggggatgaattttagtggagtgaaaagggataaagtgaaggacggagtggaagaattggtcaaatggatgaacctctgcgatgccactaacatgccaacccaaggatttgctgcacaagcatttctaactttctttagttaaaatggggaggggggtgagagaatttcaagtaactaactcatttataccaatagatccgcctgcacccttatggggacggaaatgggcgcagtggccaattattgattaaccttattcttcgccgtaactcacaaccccccttcattatcaaagaggacttacgcgaaaaaccaaggcctgttcaaggtgggcaaaaaaaaaatttaaaataaa

SEQ ID NO: 54197 - DNA, 1471 bp, Heterodera glycines
atggcaaacggttcggacaaattcagcaaattgccgcagttggccagcccgtcgctgtaccaaatttgcctcagcgttgacgtggacacgtgtaaattcaagggcaacgagatcatccatcttgaggttagttggcactaaaattttggggcaatccttcggaattagtgtcccccggcggtaaaaaaaaattgagacccgaattttgaaaaaagcctggacctgggttccatgttggcctggacctggatttcctggacacgaattcgggttcagaaaaacccaagtttaccgataatggccttgacctgctcgtatttacataaacattgattccatctatgattttgcatcaagcaaatgattttttcaaaaaaaaaaaaaaaattaattttgtaaaatttattggcgttaaaacgtacgttctgaatagtgtagaaatgattagcacattttcttaccttaaaaaattaaagaaaatttttatctctttttttgggcaccaattccgaaggatttacctaccccaccaattttggggcaaatttcactttcctcccccctcaccaacctaatttttccctctctccattttcagattacaaagccaacaaatttcctgacactccacgcgggtgcattggaggtggaaaaggcgtcgctgaagttggaggatgggacgggtgagtgaggtggcggagcaggtctttcaccccagaccctcgaaaaaaaattttttttgaatttttcgggggggggggggacacgaggtttgatgtaaaactttgatttctctcacgtaaattttgaaaaaaaaacattttcaacttttgcctcaattcggggtcagatttaaaaagtgtatggaaattcccaagcgcccccgaaaattttttttttcatattttgcaattttttttttgcacagttttgtcggatttgaagcgcgagttggacaccaaatggacgctgctcacccttcagtggccgaaagaggtcaaaccgcaaaaggccgagttggaatttgcgtacagtggccaattggcgacgaacatgcaaggcttctacaagtgggcgacggggaaaaacaatttaaagaaacagaggggaaaataaataaatattccatttttattctgtttttgaatgtttcctttttaggctggaaaagtttttcatgatttttggaaaattttttgaaaaaaatcgttgaaaaatttttctaaattttttttattggattttactggacattggtttgaatttggatcattttttcctcaaactttatgtaaaaatgctgcgcaattttttaatgtaattttctgatgcaaaacaatcattttaattgttttgtaattttttttccttcccatttcacaggtcgacgtacaaagacagtgcgggcaacgaaaagattttggcgtccactcaatttgaggttgttgtccaagcgttaaaaatgccaata

SEQ ID NO: 54198 - DNA, 152 bp, Heterodera glycines
atgttgccattattctggcaagagatcaataccaatggaaaagtatttagggagttagagtaagtaagtaaaaattgtcattttataggtacgtatttttgatggctgatttaaagaaaaataaaagagatacagagccagagaaatagtga

SEQ ID NO: 54199 - DNA, 1272 bp, Heterodera glycines
ggcacggcggagacgcgtgggctcatatcagtggttgaccggcccgaccccccagagggcccgatcacttatccggccacaacaaagtgagaaaaattcaaaaatataaaaatattttttctttagccaattttttcatgacaaatttcagtaattttaaaaaaatatatttttttctggcgtcgttttgcctaaacgtactttcaaaaaaaaatatagttagtttattatcagtccaatcaaaaataattgagaatttatcaggattcacacatcaattcggaatttatggcagggtgcaatatgtttccatcccagaaaaaaataataatttaaatactgcaaattttcctatacgtttttctagtagaatatctaaaaaaaattcttaaacatgtttttttaagaatttttctttgaaattactgtaaaaatctttttgaaataaattcttttgagaaatgataatatttaaaaaatgaaatttcgagcaaatttataaaaatttaaaaaaaatgtgcctgatttttcttttgcaaataattatcaaaaaatgcctacctatgccccttcctctcaggcattccatcacactgtcctggcgcccgccaaaggatgatggtggcgcagaactaagcgcctaccatatcgaattcaaaggattggacgaacgcgactgggaacgtgtgccagatcacgtgacactgccgaactacaccgttcgcaacttggagaaaggcgctcagtaccaggcaaaaattaatttaaaaatttgaaaatttcgtaatttttaattattattttttaatttttctttttacagttccgcgtctttgccgagaatatggttggcatcagtgaaccgctgaatggcgaaccggtgaccgccaaagatccatttggtcggtttttgatgagaattttttgattaaaaatttatatttaaattttttaaagaattaataacacataaaattttaaataataaaaaatgttttttcatccatttcttttaaaacaaatataacaattttattttattgtgatttcaaagattttgataaaatatattttaatattttttcaaatttgaaaattttcattgaaatttaaggttgattttaaaaaaaaggatcaaaattagcaaataaaaaaattatgtctacaatttttaaatatttcgaaaatttatttttatttatttattatattaaaaaaattgcgttttctaggcccacccggtccaccttccaccccggaagtgacagcata

SEQ ID NO: 54200 - DNA, 549 bp, Heterodera glycines
atgatcgtaagagcaaaaagttctattccacagagaaatacaaacttcaaattttataaattaattgaaaataaagtgagactgcccacgaagagcacattaaaataatcatgttgaatatatacattcaattacagtggcaataattaacattaacatgaagtaataaaatttatttaaacattttaagtataattcctctgtaattaattttatagcactcaaaagatatactttattttttatacaaattaagaaacgtgcaagaagtgcgattgtagaattaatttataataatgtaattaagaaacttttttcaaattcaaaatgagataaaaagaatgggtccacaagcaaataacagcattgattgttgccgcagaagcaagtaaataggatgtgcaacttcaacttattaaatccgatctttgcgacaacagcatttagaaattttatttctatgatataattaataattttattaatatcattgtattttagaattaattatctaatttttataacttgaacgcccgtttagcaaataaa

SEQ ID NO: 54201 - DNA, 1155 bp, Heterodera glycines
attacgccttttgactggttttttgactgggtccgcctctacagaaactccctcaacaatgacactttgtttcttttttcaaaactatttttcaacgcattggtgtcgcttggctgtctgtgcattgtcatcatggaaatgttacgctctgtggaagaatatgaagtgagtgagcgcaacgcgtggccaccacagcaaattcaacttgataaaatcgcgtccaaaaaattgcttttaaattgaaatccgttcggatttttttgatcaaattgagagattattacatagtttttttgttccttttgtcgcgttaattttcagtgttcgcacgtgttgtaacaaattgtgtcgcataatttgttttgaattttttaagtcctcgggcattttactggccttcgcttctgtcttgttttggggtcactctgttgcgttctcattcaatttgctgttcttttggtcgcacttttggacttgcttcaacttccgtgcggatcgcacaattgtgccgtttgacactttggtgagttttgtttttgtttttattggcatttaaattttcgcgcatatcccttcttttaaggtgctcagcattgtcatggtgtgtttgtacgtcttcgagcttttctacagaattcgcgatatcgccacgtatgccatcgaagaggatgatgatgatatatgagataaattggattatgcattttcttggtaaattgttgttattccattgcatttctgttgtacccgtatgcataaaaatttgatttggtgacctgctttgagtggtgttataaaaaaaaccaaaaatgtcaaaccaatttgggatgtttttgcccgtgaaatttggtccatttttgcgacaaccattcgccaacagttcatttccagagcggtatttctagagacattggccatttggacaatttcgtcgtctcatttcaccgacaaatctctccaatcattcaattgaaggctgtcgcccaattgtccctttccgcgacgtacgattgactggcgagggctgatggaaaatttcgtcaaaaaaaatacagtcaggtgtaaaactaggtaggtaggtatgtcaaaaaatctgaaatttttgtcgattcgacctcgattttggcgtttcgtcccataaaaacgaatcgagta

SEQ ID NO: 54202 - DNA, 626 bp, Heterodera glycines
gccgagcaccggtttattagccgatgcttttcaggatgatatttatcaatttttcatcggtggagtttacagcatttcatttggttgcatttgctgttatgtgaccatttttttgattgtcaggcttaaaaaaagcggtaaattcattggcatttgtcttaaagtgcctaatttaaatacactatacatttgttacagtaacccagcaaacaaatacccgactgttacgttctttggtcatcattttgtccataaacattggcggctatttgggcactttgatcatgagtcagcttattggaaccattggccaagtgtatttgtgagtttttttttctttttttccaaaatttaaacccccaaaggtccccaattggagtttggcaatttactttttgtgcttacattcttttaaatgttgttgccggatcaaatgctattgttctttttttaaacaggtccaaatttaatttattaaaatatttaattgctgatttaatttaatttaaaaaatttattttttttcatttaaaacttttcattaaaatattttttaagcacagaatatcgtcaattgtttaaaaaggaattgcgtgcagtgaaagatcatttctttaaaaggaatg

SEQ ID NO: 54203 - DNA, 457 bp, Heterodera glycines
gtgtatagggcaaaataccatcggtggtcgaatgctaaatcgtccatacgaatgggtctttggcatgattcaaagagggtctaataaggtccggtttttccctgtgcccgatcggtctgcagacactcttctgcccattatcgctgaaaatattgaggtgggaagcacgatagtatctgatgggtgggcggcatacggagggattaataacatgcagcagcaatacaaccacgaatggataaatcatcaaatttacttcgtagatcccgccaaccctcaaatacatacacagggaattgaggctacctggagggctttaaagcaaagccttaaacatttacatgggactacacccgaacttttacctacttatttgtttcagtacgcatttcgtcgttatcacgaaaacaaaaaaatatttcagcatattttggaagaaatgcgccataactaccct

SEQ ID NO: 54204 - DNA, 766 bp, Heterodera glycines
ctttatctgcggtgattgttggcttttggtgttcgattttcttgcgccttctcagctgggccttggaattgcactgatcaatcgccgctttgaccgtatcgtcgacgaacacttcaagacacgcaaatggaaattgggcaaaatgcgaatttgccacaaaattggaaagaatggcaccaagcaaatgcaaattgtcaattccgatggaaatccattgccaattttgcaaaatccgctgccgaacaaagtcgtcggattccgaggcattacaatcgcgtaaaaatggattagattggaaatgttttatccacattttctgcttttcagttacatcgatcaaaatgtcatcgcatttctccgccattttcaccgttttttcgccgtttgttcaacggatttgtacgttatcactgaaaatgttcgcatttcggaatttattttgttcgacatttggccaacgcttcgcgatgccattcatgtgattaatgtgacttccatcgtttttcgccgtttgcgccaattggtcccgtcacttctcaacgattgtccatcccttcgcggtgtctctttctgtggcggcagtttgcccgaatttccgcccgatgacagtgccaatgcgtcggatggccaagcggtgaccaaatggctgttctcgcctcgtccggatggtctgccgaagtttctcagatactctttgaatccaccggtgattcaatggtcgtcaacgatgaaacagattagagcggtgattatgctgcatatttaa

SEQ ID NO: 54205 - DNA, 1195 bp, Heterodera glycines
ggaagacagcagtagtggcaatatcattagcaacagagtaggaggaccaccaccaatgacggcacattgtggtggcaattgtcgaatgctgacaggagagccgaatttgttccgacaaggagcgcatcagcagcagcatggctacggcacttatggttatggcggtggaggaggaacagtgccatcgatacattcggcttgccatccggtatgatcatggcataataatattttaattaagggggtcttcaagggaatatgatggatgtctattagaggaaaaatacggtatctgtccgattttgcagatctgtcataagtcatgcatacattcatgcccttcaagccgatcaccgtcaacaggatcaattgaccagcagaacaacaacaacaattttggcagcgggggtttttctccatcagaatttcatcaccaacagcacaaccaaccgatgccgtcaatggactcattaaaaggcaataataattttaattgcttcccgtccaaatgccgggcaaattgcctgggggcatgttcccgaatttttgatgctcaacaacgccaacagcagcaacaaattcgcgaaaattttggtgtgctatataattaaattattttgaaattatataaaaaaattaagtgccgagcaatggcatcgaaaatgacattgatgttgagccacattaccaagtggaaatgggtggtggtcaaactaaactgagtagcccagaccatggcaataacaacaacgaaaatataatgtccacgggcaggaatgtgtgccaatgttcgccatcagcggcaaacgtatgcgaatgccaagagtaagtgacaaatggccaataaactttgaaaacaaaatattacttagtgagatatgcatttgaaaaagatatttattgaaaaatatttcaaagaaataattaaaagaaattatgattttcttagaaaaaggcctggttggtctaaaatttcgggtttttcttatatttccttttcataaacccacatttcttgcccagaccctgctacccaatttgtgtcgacacgtgcgagtccaactgtcttcaacagcaaatgcagcaatcgcctgcaaatcagcgtgcacaatgtgcccagttttgtcacttggagtgccaacatgactgtgccatggaacaacaacaacagcaacgagtaccagcacgaaaagcg

SEQ ID NO: 54206 - DNA, 683 bp, Heterodera glycines
atgttcggccgaaattatggtaaggaaaacaagcataaagcatacggtaatgaaagggaagcatacggtaatggaagggtaagggaaagaagcatacggcattggaagggaaaacaagcataaagcatacggtaatgaaagggaagcatacggtaatggaagggtaagagaaagaagcatacggcattggaagggaaaagaagcataaagtatacggtaatggaaggaattcgaactttgaaatgttttcaaatcattcgctaattacccaacaaaaatgttacagaacaaagacaaagaccgcatttgtgtgcagagagtgggcgaagtgaattcggagaccgaatttgtagagaagtcaatgggaccaattcgggtggacaaatgcacggggcaagaagagaatgagccgacaaagggaggcaaaaagccccggagggacaaaccgaggacagaaagacagccgagacgcttttggaaatcgtagtcaaacggacggacggacggacaaagaaaaatgggacaaagtgccgacagacaaaactgagagagaaaagagagagagagagataagagataaagcggagagaatgccaaagcgatgtgagaatgatgtacaatgtacataatgaaatgatagctattcactcgttgaccattgacaaatgtgtgctaattgtaga

SEQ ID NO: 54207 - DNA, 287 bp, Heterodera glycines
atggtgccaagccccgtggtggtgcccgatgttgaggcggatgcattcaggacgatgttgggcttcatttacacggacgatttgagtgggatggacggcgacaatttgttcgacgttctttacgcgggtaaaactttatttttgggttttcccgttcaatttaacccccaattttagctaaaaagtacaacattgtcggcctggtcaacgcctgcttggacttccccatcccttcgctgcccaacgttttcttcgcctttgcccaggcgcgttttctcgaagaaaag

SEQ ID NO: 54208 - DNA, 1683 bp, Heterodera glycines
  unsure (1)..(1683): unsure at all n locations
atggctccgtctcctaaattttttgacaggtttcacggaattggtacgcatatgatggtgtttaacgatcatctttcaatattttattcatttacagggttaaatatcttttctctttattttattttttaaataatcattttttagtttcaaaattattttaattaaccaaaatgaacagaaatttgaaagttgaaaatctactgtcatttggccataaagtgatgattcattgaaaaattaaataatttatttaatttattattttaataaaatttgtaggttatttttaaatgatcttaattaagcatatcattgtcaatgtctgaacctgttattttttatttataaacataattatttttattttttcactaattcatttaaaatatttatttttttactttcatttgtttttgtgtgtgattttaatgttctaaagaataaaatttttattctttattttctgttgtgaaaaatatactcctanattcaattatttactgttattatatgcttatttctcgttgtttgcgttaccaattattcttcttaattctttatattttatattactgattgttttttcagcatttcacgaacattaatttaccgctgaatttcgacgccttgaatcaatttttatggaaattttatttttattgcatgtaaaaggttttatgattatgttttctaaatattcgaattttttaaatttttactagaaacgctatttttaatatattgattaattgagacagtttgcttttatgtgtcatataaataattaattaaaagtaatgaattttatctgatataattattatatatttctgcttaactttttaccttaatgtcatttttaggttacaggttcttatttgcatccatattttattattattagaataaatgaaacagataaatgtgccgaggaatacatgacatatgtggatggctatacggaatccaaactgttgttataaatgttaaattgtgcaggttttggcgagatatttatttctttgtagttgaatattattattgggttttttaaatttttttatttagatttaaattaaaataaaagtttttgaaaatttgtcgtttttgatttgtttttctcgcctgaatccatttcttaaatttgatttcttacaccgaatgcttataaacaacattaaacaataataaaattgttatattcaattatgtaattgtatttgtacttttttaatttataaaattatatttctttttaaattcatgaaattcgcaaattattctttttccatatcacatttaaacgaatattgtattaaaaacataaaattcatttagaaaattattcacatttatgtagaaatttaaggttaacttgtttactttcttgttaaaatatttctatactctcgctctcggccgcaaacgccgtggcaagagatgtgataaacctacccgacatcttcgattctggatcggcttttaaagttaaattgtgtttctttctgtgtttatatattattattattattaaaatttattctctataatattttcaggaaacaaatcaaatatttggtatgtcaattatgaagaaattggcagcactttttcagattattgttttatcttggggatgataataatttcggattccgcataaatctaattaaatagaga

SEQ ID NO: 54209 - DNA, 913 bp, Heterodera glycines
atgaaaatgattgtaaaaaaggtaaaaattaaaattcatcataaccttttgttaatggttaattattttttataaattataattacatgttcattcttcttttattatttttaaataggaataagaaagaaaaatataatttgcttaattgccttttaataaaaaaggtttaaaaaatctccataacaaatttattagtttgctaattcaaattaagcaaaaagtttaaaaagaataaaactaactttataaaataaactcgaagatattgataataattacagcattatatcataattaaaaactaattaaattttaacaaataaatgtgaaaaaaatgaaaaatcaaaaaacaattgtcgaaaatgaactatttatagttattttcgatttacaaattttttctatgttttctctcccccgggggatgttaagcaaaggactctctcctttgcttagtctctcttctgttggctgttcagtcattggtcttcagcgaccgccgcgaccgaacggcgctaatgtattcaattttcccttttccctccttttttcagcagaagcaacagtcagccgatgaaatcgccgtctttgccccctccctctctgttccgccaatctgcatttctccactgcacatccatcgcttcatctctgctcccccactgcttggccttccgccgtcccatctgccgtctcatccgcccccactctctctccatcgcacatcattcacaccacctccgcctggccccacggcttggaccatgccattgaagaacgatggacggaagacatttcacatcgtttaaactgttgcgaccattcgatccgccccctcccccaccgatggacgattttcttttccccgttttcattctattaatttttgcttcgctcatctcaactgaca

SEQ ID NO: 54210 - DNA, 436 bp, Heterodera glycines
cataaacacaagtctgttgatgtcaagttctactgtctgtgccggttccagccaggctacgccttcaacatgtattgtactaccaatccagaccgccggtttggcccatcttcccaaaaggctcaaaaatggtctgatgtgctcggcccattccgtcgtccgcacgacgaccatctgacaaacatcattaatggtgacgacctctggtaaccgatgccaccagacaacgtccctgagtgagtgcacgagaactagggcacggagcccgttgtcttggaacgtccgtccaattggttccacttcgtcatccccgacgaatgcgatgggagcgttaataataacccttttttctccaacgccatcccaggggcgcctttcctcaacaggaatttgtgaaatgccctttctctcatccttcgattcttcctccttgttt

SEQ ID NO: 54211 - DNA, 1230 bp, Heterodera glycines
atgtcggacatttatgtcgaacgcatagaaacagctaaatatgcaattgagttatatctggacaagccattgcccattcttccgcaaggggtgttaacctctcaacagagacataatttaatttgtgatcaaagggaatggaaagaagttgcggacgaaattcagacgcaagtggacgaaataaaggcagcaagggcattgtacaatcaagaggcttctacgcttcacggcgatgaaaaaactgagtttcaacgccagtatcgtgcatcagtcaacgcaaacgatctgcaaaatttgttgcgaagagcaaatcataaattggccgatacccgcacgctgaaagggaacattgatcgtcttcttcaagatgggcccggaggaacggcacgccgaaacattgccttgccaaaattaagcctaaaggagttcgatggcagtgattgggatgacttttggccattattcgaatcgacaatacatgctgatgctgatttggattacgtacaaaaaatgagttatttggattccctgttgaggggtgaagccaaaaaggtcattcaaggacttttgcccttctccagggataattatgatctctcggtgtccttattaaaggacaagtacgggaagaatgaaaatttgatcagagatttacacaatcagttggcccggctttcaaattcgaagtctcttggcgacgacatgaaacttcaattggaattggaacgagtttgccgacaactcgagcattacaaccaggacttgagttctcctcaaatttatatgagtctggaacagaaattgtccaaaaaggtgttgaccagatatgtagacttaaaaaacgtcaagctgagtgcaatgcctcatggttcggattggtcaaccgacctatttagggatacatttaaagcggctattgagcagcttaaacaaatcaatgacatagttcaaagggctaatcccgaacaaactcaacatacatacaagagagagaaacataagagtgaagtaaaagaatcgaccttaaatctggccgtcatatacaaagatcaagagaaaacagacgatcgccaaccatcggttgctgttaagccaaagccatggcgtggaacttcaacttcatcggaaggatcaagctcacgctcatcctccaaatccagccgatacggaagagccccaggaagaaaagccggttcaccatggcccaatgaaagtcgaagaagagaataa

SEQ ID NO: 54212 - DNA, 4956 bp, Heterodera glycines
atgtgctacatttgcctattcaataatcacatggcaagaaattgtccaagaaaacttagaaaatgttttctttgtcaacgtaccggacatcacccagcattatgtgaaaaacggaaactaatggccagaggacaagtcgcaaccaccacgtctaagaagcaagaaaacacatcaaccaatgtgtttgccatacaaagctgcatgaaaaatccaattcagcccttaagaccgattgatttaattttacccaacattggcaaagaaaaattggaaataaacactagatctgttgagaacttagacagtgatcatatttttgagaactccaacactgccaatctagtacaaacctaccaaaaggcaatgaatatggctgaaaaattttggcaaaattggaaagattcctactcattgggtctaagggaacgtcatcaagggaacaaacacacgccaggaaaagcaccaaaacttggggacgaagtgatcatttctgaaccacaaactccaagaaattgttggaaattggggaaaatagaagaaattttatcacaacgaaccgcaagagtcagaatttcggaaaaatcaattattgaacgtgctattaagcacttatatcccttagagttagccgaaaaggccaataattctgactctggcattaaacaacaggaacacagttttgtgaaacaaattcattataattgggcaaagggacctcctcaaaataaggcgcttgttaaggcaaattccccaaatcactacagatgggcaaaacaaccaccgaaaataataaatggtataactaatgtgacatgtatttcagaaatgaacaaagacttcgatgccgtgtctcttgattgtgaagaaatggaaagagatctcgaggacgaaaacaaggaggaagaatcgaaggatgagagaaagggcatttcacaaattcctgttgaggaaaggcgcccctgggatggcgttggagaaaaaagggttattattaacgctcccatcgcattcgtcggggatgacgaagtggaaccaattggacggacgttccaagacaacgggctccgtgccctagttctcgtgcactcactcagggacgttgtctggtggcatcggttaccagaggtcgtcaccattaatgatgtttgtcagatggtcgtcgtgcggacgacggaatgggccgagcacatcagaccatttttgagccttttgggaagatgggccaaaccggcggtctggattggtagtacaatacatgttgaaggcgtagcctggctggaaccggcacagacagtagaacttgacatcaacagacttgtgtttatgggtgctccgcgaatcactcaaaggggaggaagtgcgctgtataagaagcgatgccaacaaccattttctgatgatcgtagttcgggcgcaacaaagtcaaaaaggttccgtcctgttgaggaccaaccatcgcacagcgaatggactcaggaaattcgaccaattcgtcctgttgaggacccaccgtcgcacagcagatgggcgtaggcaattcgaccaatccgtcctgttgaggacttgcagcaacatcagtccagctcaaatccacgtctccaccgccaacagcagtttccggtcaaggccgtttacgatttttggaaattggaaagtatcccgccaattccgccgttcatcaatgacagagcaccattttgccgccgtgtccgggttgaagaaagaggcgaattgctaggattttttaatcagcaattttacttttcgaatttcaacgaagcgtatgaattcgtcatccacggaagaacctaccgatgtgtggagcagtattactgtgcccaaaaagcgttgtatctgaaacgtttcgacgcggcggatgcgattatgctggggacaaacagatatggcaaaagaataagcgcatttgagatgaagaaattcgcaaacatgaacggggaggacgaagtgactgtccaagaatggactgagctcaaaattggcatcatagaagaagcacttaaagccaagttttcggtgcctgatcttaaagatgtgctgttgagcactggatcggccataatttgcgaattatcactcgaccagttttggggggtgggttgtagaccgggactcatttatgacaaatggccaacagcggacatacaacagtggaacggttcgaacacactaggacgattgttgatgcaactcagagatgatttgaaggaggcaacaccaaaaggtacaacacgggctgttcagccaaattatggatggccaaaaaatagggaagaaaattttcaaaatattcctgttgaggaagacgtattcgacttaaaaagtttcaaaaatctcgaaataacaagcacagacgaagctaaaaggggggataaaccaaaagattcgacaaatgccaactcaatcagtgaactattgatgagccacgcagacgaagtggccgagacggaggaaaagacaaatgagaaatttgcattgtcagaaaggatgaaccagtggctcaaatatgcgggcataaattgtcaagtcctagtttttggttcctaattatgtcaattggctcaacacggttcggacttggaccttttcatctacaagttcgaccaaacatcagttcgtcttgctgacgaattgggaaagattcgacaaattttaaggcaaaaatatccgcgaacagagatggaattgagagcgagaggaaacaccccggtattaaaaattaagttggaattccacgttgatttgacaattggacgatcagagaaattgaatggtgtctacaattctgtgtggctggccacgttggtccgaattaatgacctgttcagttccgtctgcttattgattaaagaatggggaacggatatcaaccaaccggaatttggttcattcaatagcctgtccttggttattatggttcaaagttacttcgctgaacaaaagttgttgccaagcctgtttaggctttatcctgatatttacaaagaagacaagatcgtcaaattctacgacgcagaattccatcaaaaattagcagaagatgcgaaggcaaagtgtccgcagtcaacttcatcgttaattgaggtgttaaccaactttttcctttggttggatgatattgacttcgccagagtgaaattgtcagcaaaaagcggtaaaattgataggacagaaggcaatggattgcagtccgttataatcgaagagccttttgatgcaaaatcaaactgcagcagaagcttaacagataaggagttccaaaatttcaagggtctgttaagacgcacaaatacgcatctcagagcaaaagactggtatacagtaaaacgcctgtttaggctaaacccggtaaatgatgtagcgtggtcaatgaccgacgaatcagaagacgattcgttcgataaaattgctgttgagcaaataaatgaatcaatgaaaagatttgcgggaattaagccagacaacgtacgaacaacacataatgtgcgcagaagccaaactgaggaccgagatttcgagagaaacttcggattcccaaaaggtcagtcaagaggcttgagaacatttacaaatagcaaattcacatttgggctattgagcctttttatgttgttgggcgtaaatttatgtcaaaaaccaatgatttgtcacagaaacgtgccatcaagatttgtcaaaattggtctaaacaatagtgcctgttcagggatatctcaaatatttgaaagaggtacaaaaaatttagaacttacattgtatcgtcctgaccaaaaggaatacaccttttgggggcatcaatgtttactccttaaacattcggtccaattttggacgaatttactgaatgatccattcgacatcaaaagtcaagaaatgatgccgatttctgccgaagaatgccaagaaatctccaaaaccaaaaaatgcagattcggaattctagtaggtgactcagacggtaccatgataacagaaaataaactcatttatgagcattcttggtggtcttggggtaaaaagtctgttgagacggttaattgcatagtcaacaatataacaatcattggatatcccggatcccaaagaattgattcgattgtcggagacctccaacattgtcaatatgacgacggcagatgcagtttacacgattctattgtagtttgggatgttgatcggtatcacacatctgcaccatgggcggctcgacacggacattgcgtttttaaaagtttttcaaagaaaaatggaaccatttatcgaataggttggatcagtgacccaccggacttagccctaacatttggggaaaatccgacatttattacttcttgtttaagaagattggtagttagccaacaaggattcgcaatcgaagaaagagaatttgtaaacttcaaccgacaattggacagaactcgccgaaatgttaattttgatgaaccgttggacggcgaagttcgcacatcacaattagatgctcaactcacagcacgttcgatgttcgcagataaagaaatgagaaaagtattgcaggcatattttaaacttatttgtgactccatttttggctcagcatcgagcactgatctgacacatctcaatccgaatttttgattcgtcagctttcggacaaccagcaaatcgaagcagaatggatttcaaaaaacattttggaaatttggccatgttcctcagtatatgagtacggattcgcacaatccaaggataaatgttacaagaaaatctcagtaaaggtgacattagttaggaaagacaagccaattctggcttacttgggcccaaaagccctcataataagtgcagaagctagaaaagttgatcgtcagacagatcgctacaaacatatcgttcttgaaggtcgactttatgagattgatcaagttttaggtattaagactcctgttaaggaaataa

SEQ ID NO: 54213 - DNA, 661 bp, Heterodera glycines
atgcgcacccgtccgatctggcaagttaagcaacgattgctgactagccaaaaggttcggtgccgtgatgaaacgaaccagcactgcttaccccgcggcacccggcacggtcccccgaaggaatggatttaattaaattctctccttcggggatttttttccattaggtcgtccgttagcgttcgattgctctagtcaatttttcaaaatttttgttgaaatatttgtcgtgctctgaagggcgtgggagggggggggggcgaaggcccaccacgaggccgcgaagaggccgagtgagtaccttcggtgcaggaaaattattaaattttaaaattttttaattgctttttaaatatgccaaaaaatgtaggcttaacttttttagtgaaaattcgatcactcatattttttgctaattgagcagaagcgtaccaaactttgcagggatactccccggtaaaggactaacttacactgaaatgagcgccgagctagctggctcaaaaaaatttttcgaaaatctgagtctttcgtttttatttatttgcaaaattaattcataaatattttttcagaaagggttctgaaacgcaccaaattttatttacatgttagtttaggcactctgatgctttttctatcaataatggaggtgaataaa

SEQ ID NO: 54214 - DNA, 217 bp, Heterodera glycines
atggccgcgccaaagtgggcggttcccgttttttgggtcggtgtttaaataaattagccagccactcacagttaaattaataaattgtaatttcttatgtttttagttttcatttttgacatttattttaaacactaaacacaatgagtacaagcacatcgagctcatcattcgacgacagctcttcagaccaatgtaacggcaaaatggcatcgta

SEQ ID NO: 54215 - DNA, 1471 bp, Heterodera glycines
aaatatacgtcgttacaatagtatgttcgcctgtgcatcaattagttgttttcggtttaaatttcaaagtcctggcccgccatgctataaaatacaaggacaaatataccataaatttaatcagaacgctatgccaaaagataatgaaattcctacaaacggacagttatattttattgattctgaagaagctatagatattcgttctgaaaattataaaaaatgccgctctgaaataattgagtttcttgaaacttttttaagaaaaataaacccttttgcacagtcctttttaatgatgaaagaggtttataaaaaagaagaaaataactgtaaagaaaatgggttaaaaattccaaaaattatgataaaaggcggtacagtattccaaggtgtaatgaggttggagcaattgtagtttgtgatgccaatgatgaaattccgccagcgagaatagtggtttacccgaaaggtgaaaaacaattaaaaaatatttatccgttagacaaatgtgtagaccaaatgtgttatcctttattatatccaataagaagcgaagggtttaatgtaaacatcaaaaatttaactgggaaaaaaatttctttgtgtgactataccaaattttattgttttttcgggaaaatgtaaattttttccctcatttttacgcaaaaaactttcaacaatggttggtggatcaagctgctaaaatcgaatgggatcgcttagaatatataaggacgcatcagatggaattgtgtagcagtaattgtttaaatgttgaagatcttcttaagaatagagcttctaaaacaggcgcataaattaaaaaaaggtaattctaccgtctacttttacaggagggccaaggagtgtgcatgaaattttatggatgctttagctatagtcaacgaaacaggcaaacctgatttgtttatcacgttcacatgtaattctaatgattacgatattttaaaatgccttttgccgaatcaaactccatctgatagacctgatttagtttcacgtgtatttcatttaaagaaaaatcattttttagatttaatttttaacaaacaaatttttggtgaagtgataggagattgttgggttatagagtaccaaaaaagaggtttaccgcacttaatttgttaataaccctacacccaaaaaataaatggcatacaattaatgatatagataattttatatctgctgaaattcctgatgaaaaaaaggatcccgaacattataaaataataacaaattgtatgatgcatggaccgtgtaatgaaaaatcgccatgttggaatgaaaaaaaaagaaaatgcaacaagaaatttccaaaaccttttactgaaaatacaaaaattactgaagatggttatcccctttataaacggccagataatggccgctgtgtatacaaaaaagggaaaatgcttaccaatcagtttgtagttccttataa

SEQ ID NO: 54216 - DNA, 1277 bp, Heterodera glycines
  unsure (1)..(1277): unsure at all n locations
caattaggacaatcgtttaactatacttcttttgcactttgctttcgttcacccgaacatattgtgctggtctcccaccgtgacgtcattgtccacgtcaacgaattgttgggtggcacttgggccgtcgtcgacaccgctaccgtaaacaaatatgtacagtatgagaatgggaatgtccaacagaaggaggatgacgatattctgagcaaattggttattgagcacacgggagttcacgtgcgctataaatatcaagtgaatccccatcagccaggggtaggcgcggattatgtattaatatcacggtcatccaaatttcttacaccacaaaaaatcagaaacgtatgggaaaaaaagtgatccgtgattgccacatcttactgtaagttcaagttagaacttttgcctagtcgaaataaacacataaatctccttttctttcttatttaaagcaattgctacaataaaaaagaaaaaaaaaatttgaaaaaattttgtccaaaaatgtggacccaaaccttactagtaccgtaaaaaagttattttttaatataaagtcacactaaaaatttgtctggcgaataattgtgaatttcttgtttggagtattaaacacgggccccgccgggattttgccgggacccaggccccggtttttttggacaaaccaccgggaccgggagtcccggtcccggggccccgcccgggtccattttccaagtcccggccccggtcatttgggtcggaaaaacgggactaaatttcaccagtgaaaccgccccaaatttgaaaaatttaataattatttttggcgaaacgtcttttatttaaaattttgaagatggaatttgggattttctacgatttaaacggttaaaaagatcataaaatccacaatatgtatacaggntctttgggttctagtncggttttatgcgtcccatgccagattatgcgtcccatgaatgaccatccccagagtatttgctcttttcttgcatttataaaatctcgaggcttttatctttcgcttggtaccaagaatatgggtattgaaaaagtaagaaaaaagttatggcctaagaaactggggatggtcattcatgggacgcataaaaccgactagaaccgaaaatagtgctaatattagacatttttttctttagaaggcaaacaattacatcggtgaagcaaaacgattgttggcaactgttgagccgtttttgagtccaattcaccgcagacagatggtcattagtaagttgattatgtga

SEQ ID NO: 54217 - DNA, 991 bp, Heterodera glycines
atgtccatttttaaaaatggatttgtatctaaaatatggcgcggccaaagctgctaccattcgcatttggtcgctgtgccgctgatgggagacggacagacagacagacacggtgattgtcggttagagaaacggggcataaaaatgaaagtttttttttatgttttccggtgtgaaaaatggggggggggtggttatacgatgtgtgggtatgtgtatgtatacatacacacaataagtcgaggaggaaatggagccataaaaccaaagtttttgagagagagagaaacaggcagaaaaacggggacaacggctggaggagagatgagcaaagagaggcagccctccgttatcgcttctcctgtgattgttgtgtgaactgctgctgctcaattagaaccacaaaatttttaaacacagaaaaatttgtggcggaaaatggaaaaaatggagggtggataaagacaacggacaaatgagagaaagagagagggctgagacatggaaagaaagacgagagagagagagagagagcgggtgacagacggagaaacgaaaagtcaacggttttactgaaaggggggagagatgagaatttggggtcggggtcggtttagtacgggccgttttagtacgagcgcaagtttttggctataacttttttctttgccaacaagatccaacatttttagtatcgttcgatagccctaagtgtcctctattaatctgaaaaattgcgaaaaattttgttaagcttcaaaaaagttatggccagaaaaactcaaaaaaccagattttcaaacttttttggctcaaactttttttaaacttaataaaattttttgaaattttgcaggctaatagagcatccgaagggctctcgaatgatatcaagaaagttggattagcgtatttggcgtaaatttttgcgcgttaattcaaaagaaacgctgatcactgccttttttggagaccaattaacattaataaa

SEQ ID NO: 54218 - DNA, 107 bp, Heterodera glycines
agaaggttgttgagaagttggtgaaacatgtgacactgctaaatgcacttcatgatcgaggcgtcgacaacaaccaagagaatacaagcgattacccaaatttttga

SEQ ID NO: 54219 - DNA, 2708 bp, Heterodera glycines
atgagcagttcgagctccgttttgcaagacttgctcagagatcacagttccgaaattggcaattggagtgaaattgtcaacaaccatcaggttattttttcatttaattgttttttgaatataccttttggatatgccaagtaacgacattcctcaacttaccacaaacacaaatttggatcaaatattgtaaataagcaattatactggaaaattggaaattgcttggaccaaattatgctttatgtttatcgaagctgaaaattaggttttcgagtccgccaatttcatacaatatacacagattttgctaaaaattctggatgactgaattttcggttaaacttcgaactttgctccatccctttctaatcaacgaattcattgacaaatgtcatcaatttttctactgtttttcgatgtaattttgttggccatccaaaattttccgctttttaggatgagagttcgaaacctgagccatttaccaacattgaccacaacggaccattctacatttttgtgcccaatttaacgcttgactatgccgtggacagtgtgaacatggaagtctacaaaatgtttggtggacataaaaatgtatgcaatttagatagtgaaaacggtacttttaccgtttagtgaagatgttttatcgcatccatttttatccgcaaaatttctcaaaattgatttttcgcggattcgattccttttatattatttgaaattgcaaaaaatggcccattttcagcgcgtttcagatactctaaattgaaccgattcagcaaaaagattatccatttcaaaaacaaaaaatagaacaattttactattttaaacgccatttttgccgatttctccatttattgcatcattacaattattactagtagtcaagcaagaaaaacaaaatgatatcattagtctgtctctccaaatttgtcccccaatttttcagcttttcgctgtctacgcctatcggttggcgaagaaagtgtcgcaatcattcatgctgatggcacgggacttcgaaagctgtgttcaagtgttgaagatggaggagaaggtaaattcaatggaaaaaagcgaatggtcgaacgaatggaaggcactcacacaaatagagcccgaacagtacaatcgatacttatactttttacgcactttttcgaaaaccagaattcgctttacagcttttcccacggccctagtctctgggtcttgaatgaattttggaaaatgatgcaaaagacctagagttctgttaaaaaccaagaattttgtctggaattctgtccgggtctcaggaccgtcacaggatttcggctttgggaaatacggggtgatgacgaccttttttcccatttttatgcggcgcgctttttcaataattttttggggaatagtgggtttttgcatggacacacccattaagattgtcaatagcagcagcaaagaggttgtccgtcttgagtacgtgttgccgtccgtcgccccgccaaaaacgtttcattacaccactgaacagttggacaaccagttgcagtgctacaaaaatattcacccagcggaaggtgggattttttagtttatacgttttgcggaatttccatcgggttactgtattagaaccagcttgtgtattgtattctgtatggaaaaattggtgtgtaatgtatagcccaagtccggtgctacttaaaaagtgttgtccactccaaactaaaaactaaaggggggggggggctctcttggtttgcagaatgtttgtgataataaatcgtgaaagctttttcccatggattttcggggttgttgatcacaaatatgacatcaattttgactaattcctagcccgaacttgaacaaaagtcatgaaaattcaagtttctcgattatccgcttaatttacgtcggggattcagaatttgttgaatatggtaatacaactaattttatttccagaaaagccaaagaagagcccattcggcgatgcaaagccgatcaacaccaccaagaagttgttgagtgtggaggagaagctgcgcgaggagtccatcgccgccgctgctgctgccgccgctgccgttgcagcggccgctgcctctgccgccgctgcgtccgcctccggcacttcgtctgccacaactatgtcatttgttgcaaccgcaacgcctgccgctgctgcttccggcacttcggttccggtcgctgcttccgactccggtacttcgtccacaacaaatgcttcgttggttcccgccgcaacgcctgccgctgctgctcctgctgcttccggcacttcggttgcggcacaaccggcccgcggcggtggcgcaatttctgcttcccgaagttccactgcaagcgcgcctgctgttgccgccgcagcacgttctgcaatgtcgtccgtctctcgaagttcatcgtccgcaactgcgtctgttgctgccgccgcaacctccgcaacttccttctccagcggcacgccgtctgttggtgctgccactgttgctgctcctgctgttgccccggtgtatacagcgcacagcaacaaccacaacaataacatcaacagcagcaccaacaccattggccatggccatggagcggtggcgtcggcggctgcggcgaagaagccaaagggcaacaacaagaagaagaagaagtctttctcaaaaaatgtaattataaaaataatttga

SEQ ID NO: 54220 - DNA, 1263 bp, Heterodera glycines
atgaccacggaaacacacacgccgaggaagaagaagccaacggcacttccaacggcactttttcagtcaccgtctctcacccgtaagtttgggagaatatggaattaaatgccatgtttttggatataaaatggaaaaaaaaatttttttttcttacttttccgagcatcaactcttggcgtaacagttagtaatgtgtgagagctaaggttttcattagagcccagacgggatcagaattccgccgggatcccggcttatttttcaaaaaaaatcgtaaccccgacatttcgacgtttttaaattcccagactcaagtttctatgtcgaaaattgctacctctggaatttcttgtacctgttgattttctgtttgtttatcgttgactgcgcaattctttttttttctttttgtttttttttgtaatttcttaatcacttccctttttcctgaagggatttgcgattggaaaggattgctgctgatttgctgctgcgtttggtcatcgttcccgggtgcgttatgcttttggcattttgaagaaaattcattttttacgcttttgcggcattattttttgttttgtttttttctgatttcttttttttgtgccattttcaccacaattttggcactttcacagaaagcgtattcaattttcaccacaacggcaaccaacaaagaatcggacgaagcaaaagggcgacgaatgtttgacttttgaggacttcaaagtggcgaatgacgacaggggatggatccgagtgattgaggggggcggagtcaggaagaatggacaacgcaaggtggaaaacaattattaatattagctaattataatgtacaaaaaaacaccaaaaaaataatctcaaattcgtattcggatcattttgagcaggaaaaaggcatttacaggcacgcggattcgaaccgccctcgctgggtggtatggtggtgtctatctatgctcgagggctctgtgggtcctcatgggttcgaatccgcgcgcctacaaacaattttttttttgtgtcaacaccaaaacctaattgtaagacacgaaatttcgaatagggagttgatgaatgaatctgcgtgaaacaattatcattatattctaaaaaacaaactttccttaatttttaccaaaattttggttgaatatgccaatttcaggcaaccaggacagagcattggttgaagtttagtcgggaattgttcacatatgccatcattggtgagcaatttgtaaattaattaaa

SEQ ID NO: 54221 - DNA, 441 bp, Heterodera glycines
atggcgacaggcgtggcgacaaatcagcaagggatgctacccttcccatcacgcaatttgcggagtgtatccatcccggtacggacagcgcgggacagaatcgagagagcatccgggactctcgccgctcgaattgcggaggctcgagaagtgatcgaccaagaccttaccgaaggggaggcaggctaccaagcagcgcgacttttggccatggagagaggactcaaggaggcaactcaaatcttccaaggacatttcgagattggaatggcagcagcgggagcagaacccgcaggtcaccaggacttcttctacgacatactgacgacgccactgccggcagcaacgaaacaattgcagttgcgaacccatccaacaccagctgaactgcttcaaatcgcggatgagcacatcggagacttaacgggcactcgaggatga

SEQ ID NO: 54222 - DNA, 363 bp, Heterodera glycines
atgaacagagctgcattaattttcttgaggtattaattgtacctgagtgtacctctcttccctcaaattagctgcttttttaaaaaatccaaaaagtggggacttgtaataccaaacgtttttacggatacgctcactacgttccgcgccccgaaattaaaaaaaacaacacttattatttcctattaaaaaaatttcaaaaattcattaataattaaaaagtatcaccgaaatcaaatcatatctttttgcaggttggtgaagcaattgcgtgagaatgtgctcaaatccatcgactttgaggagatggccggcgatgtgaacaaacggcgactcatccaaaagtcggtgttcatcgaatag

SEQ ID NO: 54223 - DNA, 64 bp, Heterodera glycines
atgaactcgcagacgtcgtgtggagtccgagcgctggtgcgaagaagcggaactcagtcggccg

SEQ ID NO: 54224 - DNA, 1487 bp, Heterodera glycines
atgtccattgaaggggatgacgttcgcgggtgggaaggacagacgatgttctacatggacggcacctacacactcccccaattcaaaacaaaattggccacccttttgggcgggagggcggcggagatcatgttcaccgggaccagcgttgggcatgtgcaggatgagcaagagtggctgcgtttggcagatcacgtgaatacaattaaaacacattccaatttgagtccagggtcggaattaggcaaacctatggtcagatgtggaccaggaacctcgagattttacgggtagtgatataaaagttgaatagggaccacaattctgcaccgttgctcactactgcattagcatcatgtctattatgaaagaaaatggcatatagttatgagcaatgaaaggcaaataaaaatttttttttaatttttgggagtttttaaatatttgcgccaaaaagccatttttaacgtgcgccaaaaagcacagcaccgcaaattgatgcagcagttttgccaatgacatattgcaacaacactgtgccaaaatcgaaagggtgaagcttgacattaacatggataatctaaaaaaaattagccggtaattttttatcaaaaaacaagttagaaaaacatagaagttccaacttttaattcgtaaatttggattttaaaccaaattcacatcaaacgacatataaagtacgcacttaattgaaaagtcatgaaattttaaaatttcgtctattcgaccacaatttaggcgtttggggcccgaaatgaatttaaaaagtcgtatttttactgcccaatttgaccctttctaaaaaattaaagctatttaaaaaatacgaatcgggtttcttctattctactgagtcagaatctatgaaccgaattattgtaaacactgatgaagttttctttttatggacatgcccccaaaaaaaatgttccgtcgcgagttatcgaggtatagttgaaatgccaattttgttttgttcattttttgtattgtcatgccacccccgtcctggctgggactgacccggttaggtggtcgattggcacatgagttacagcaaagacaaatcgatatttcgggttttcgtaaacgttccgctttgattttctaaaaaaatgagtgtagtgactttttgtgtccacaacaccgaaaaagtccgaattgaggttatgacgaaattttttaaaattttgtagattaatatagaaaccaaaagaactaatcgaatgttaccaaaaacatggttgataatgagaagagttgttagcaacgacgccgagacggtcggcgccgaaattagcgattttcattcttttttgggttcactaaaattctgagtgcatgtttgttattttagtaataaaatgtgattttaagcattctcggtccgccaacagttgtgtcacttgatgggcaccagcagcgtggacgggcttccgtctctttgcggagtcaagttctgaacg

SEQ ID NO: 54225 - DNA, 73 bp, Heterodera glycines
tgaaggtcaacgaactgagaaacgtgttggagaagcgcggcatggacaagactggcatcaaagccaatctgat

SEQ ID NO: 54226 - DNA, 2298 bp, Heterodera glycines
atggacaaacaaaatgcaaccgatggcgaccaacagcaacagaatgttgcaccagttgatggtcaacaggcaaacgacgaaaccaccacaacagtagccgatgttggacaacaacaaaagcaacccatggtaaccggaaacgaacaatgacatttccctctcccccaatccaaaaaatgatatatttaacctgattattacgataatcgtctgtttgcatggcctgtttgggccaccgagaagttgccaagacggtgatgttgttggcttttatgtgaaaaaagcgaattggttcgcaataaataaacgggggacacattttgcacaacagaccaacaattgtactacaggaaacgataaccaaccacggtgatggtggtgatggtattgatcatcggaatgctcatgacgagacgaccgtccagccggtcaccgacccaattacgactggccaaaccggagatggtggcagtgacaaaaataacggccatggaaatggtggtgaccatcaaatggaccatgatgagccggacatcatcatcgagacgcccaagaaggcgatcaagactgagtgtgttgaagatgttgtgctgatcggccacaccgcttctgcgtcagccgtcggcagtgccgggcgtggtgcaggcaatggacacaaagccgcagagagaagtgatgaaagtgactgcaactgccgcaacaacaccgtcttcggcaaattgtgctgcgccatcaacagcagtttccaacaccgatcagcaaccgaaagcgccttcagcggtggtggcaaatggtgggacggcaccggaaaccgctggttcagctacggcgacaaaagttctatcagtggcgacaacgaacgcaaacaccgccgtgacgaacgccccgccgttgttgacgtcgtcctccgctggttcaactggtgatgacgtgatactgctcaacagcgaccaacagcagcaacgccagggcaaaattggcaaggagaaggacgctgttgctgcccagccgagcgatgattccgccggtgggaagaagcagtcggctgccacaccgacgggaacgacgagcggcacatcgacggcacaactggtggacgggaacaatttgtcgtcaagcctgtggatccgcaacattaccaccacgacgaaagcggcagacctcaaagtacatataggcacattccacttgattttttaagcctccatcggcttttaatcatgaaaaaattaggaataacgactcacaccccccagggttcaaaaattcgatcatttttcatgtcccaaaaaaaaaaaatttcgattgctaatgccagctaagtgttctggttcctttaaactccttggaaaaaattggcgtatcaaaaaaaaaacagtttctcgcataaaactgctctctgtacaacttttgtgctgatgccatgccccatctgtgttccacaccaaatggatggatgatgatgagatggttcatcaacaaaaacactgtttttaaggcgctgttctcaaagcacggcaaagtaatcacggcgaagattttcaccaccaaaaacaaacagtcgcccacctgttttggctacgtgacgctggccgatgcggagacggccaatgtgtgtgcacagaagctgaaccgctccaacttcaaggggcgcatcatcaacgtggaaaaggcaaacgcacacgcacaattattattagtcttatcctctccacccatcgaccgatcaaacattgctaattatactggtcactctgatcaagcatggtgacagaaattttttgactgattcttgtgttcacgagacttaatggctcgtgggttttcatggccaaaaatacgattaaattaagttggttttaaaatttcgtcatccctttttaatttaattggtgcttgctcattaattcccttttacgaatttggtgtgtgacaacagcgtcgtcggtctaccccttcccttcccaacactcttactcaccacatcgtctataaaaaaaaattgttgtaggccgaccgctccaacctgtcgcaaattggcacgcaacagcagcagcaacaacagccggcggcggcgagtgacggcagcggcgccaaaacggggacggcaaagagcggaggttcgagcaaagcggctggcgggtcgtcggatggcggcaaagggagcggcgctgaaccttccgcctcgtcctcctcctcaaagaaagtgcgtccgcggatcactgccgcgaccgcatcgcccacgcaacggcagcaccgcaacaacaacactaacagcgccaaaactgcccgccgcgg

SEQ ID NO: 54227 - DNA, 2954 bp, Heterodera glycines
atgctttctcccttctcctacgatccgttctatcgccgttcgttgtggcctatggccactcatgttggcaacgtcctttcgcccttccgccagttggagcgtgaactcgaccacttcttcgaggggatgcagcccatggtgggcttttactaatcaaaattctttaaattttagcttttttgttttttagcttcgtgaccatgtcgctcagctgaacgtctcggacaagggcgacctcacttacaaagtgagtgggcacagaaatttaccgaattccatggctaattttcaattttttccttaaaattttcaggtcgatgtcagcggcttccgccccgaggagatcaacgtggaggtgattggtaatgagatcatcgtcaacggggaacaccgcgagcagaacgacagtgagttttgccattgttcgaataaatttcctccattttgtggccatgtttcgcgttttcagatccatatttttgcaaatcctcatattggggttattttgcgtcccaaaatatcacgcactgtccttgagttttcaaaaaaccaaaagcgtaccttttcgggttagggcctttggttggggggggggggggtttgtcctggtatgttccgaacctgtgattggtttaaatacagtttttcatgtctgaccaaatgctgttttctctgtgtttcattgcccccctccacctcaggcgaatcggtccaccgtcagctctcgcgccgcgtgctcatcccggagggcatccaaaaggagagcatcaagtgcgagctggacggcggtcgtttgttcatctgcggaatgaaaacggctggcgaaggcggacgtaccattcccattgaaatgaagaagaaggcggccgtggaccagcagaaggaggaggagaagcagcagtagaaaaggacggcggaagtgaagacggactgactgtcggtcgaccgaatgatccattgacattgatctttttattttgatacttttgcaaagtgatctataaattatttttccttcaattaagcgtttctaattaaggggatggtttttttcacgggaattagtcccaatgaattcataatggacatcgctttgaagaaatttcgttttaccaaaataatttaagatggcagaaattttggaattgtgcagtccaaaatgccaaataacagttctgaaaaagaaatccggcaaaaagagagagccacccataatctgatcactgatcaactgtctaaataataactaatcgttttcatatgaaaagctcgacaaaatcaacacattcggattgcttgcacactgttttgtttgtttttgcacagaattaaataatgacgaaacagaaaaatggagcagcgagattggctagagattcatatcaatttaataattaatcatatgaaaagtgttgttgttttgtgtctctttatttaattgtccttttttgtacgtttccatcgtttcgttcacttttctttgtccgttcatggcacacagcaaactccgatcaccacactgatcagcaagtcaatcatcagtcacagttccgtcatccgctcgtcatttaatgccgtagtgccattattggcgccaaactggagcgtcctggtcggcaccagtcaattccatgaaattttcaggtcgatgtcagcggcttccgccccgaggagatcaacgtggaggtgattggtaatgaaatcatcgtcaatggggaacatcgcgagcagaacgacagtgagttttgccattgttcgagtaattttatcggggttttggattttggtgagacaaatgtcagggcttgagtgttaatggattcatttaaatgcttttcggaaccatatttagccaatttaggcttacatttagcgaatcagagaaatatcgagaaacttcttttaatttggaaaatttatgtccgtatttcggtaatactggggtttgttccccccctttttttggcaaaaatttcaaatttttaaaagtcacgtaaaacattttttctggggttttcggggtcgctgatcacgaatccggcatccatttcgcccaattccgaaccccgaactcaaattcgaacaaaaagtcgaaaatttatttttcatcaaaattcaatttatttcaccaaatctattcaaatgcacgaaatcaacaacggaaagaatagattgacaattattcacaaggatagatttcaattctgagtgtaagaaccagtcgcggggtctataaaattctgtgaatgattcacagtaaaatgttgataaccctggggcagcattgagatggaattgtagccccgcccaatgaatgaccatttcgtgcatttgaatagatttggtgcaataaattgaattttgatgaaaaataaattttcgactttttgttcgaatttgagttcggggttcggaattgggcgaaatggatgccggattcgtgatcagcgaccccgaaaaccccagaaaaaatgttttacgtgacttttaaaaatttgaaatttttgccaaaaaagggggggaacaaaccccagtattaccgaaaatcagttttattggcttgtttatttaaatatttccagcgaaaacaaacttcattctgaatgctcaacggaacggtggaagcggcggtcactgccgcggtggccgacgattggacactttgcatgttgttgaagctttgtaacccaaagtaaattcccttgaagctgtgtaacccaaagtaaattcccctgtgcttaacggacaaatggagagttaacaatcttcataaataacaaagtgaagaaaagtgaacgagggaggaaggaaggaggagtatttatgcaaaaatatgaggggtcaacaatgaatgagtggagcgggaaaataacaaaaacataatgccacacatattcaaatgatgtctcccggacattaaccttcgtaaataggtgcaaattgagacaaaaaaa

SEQ ID NO: 54228 - DNA, 158 bp, Heterodera glycines
gtccgttaagcacaggggaatttactttgggttacacagcttcaagggaatttactttgggttacaaagcttcaacaacatgcaaagtgtccaatcgtcggccaccgcggcagtgaccgccgcttccaccgttccgttgagcattcagaatgaagttt

SEQ ID NO: 54229 - DNA, 402 bp, Heterodera glycines
atgcaccaatttccgaccctatcagtcctttctgtgtttccttttggtaggtcctttttgtcgggatttataacaaaattttagtgttttcagcttcccagtgtcattctgttctgctcagtgatttacgaaaccttctccaactgttctctgcttaaagaaagcgatgccgagaacgcgcaaaagcaaaccgtcgacaaagtctcgaaaatcagcgctattaggggcttaaagaatgacgaattcactatccgtgacttcagaggctaatggaggaagcaattgagaaagtgcaaattttgcgacgtcattttttgaaatgtttgttattgtactgtatatatatatattgtatatcgctgtttcgttcaacaatttcacccagacgggggaaagaataaa

SEQ ID NO: 54230 - DNA, 1132 bp, Heterodera glycines
atgacttttcagaaggtagttaggaatttttttctgaaaattcggatttttccagaatttctggaataactttttttctttagaatatagaaatcccaaataaatcccataaaattctcccgattttttgcctatttttaaagctttaattcacttaaattgaccggtcctccattgagttatgaattttcaaattttaacccaaatttccaaggaccaaaaaattgccaaaaaataaagaatttttaaaaaattattatgggtttttagtccacatcgaggctcaagacgagcgcttcgcgcccgttttttagcttattaggccgtttcgcggcctcagtcgggcgcttcgcgcccgtttctaaattttgttgaacttggacgggcgcttcgcgcccgtatttaaatgttgttgagctcatacgaggtacaaaaattgttggaagatgtgttggaagaggtacaacagtgattagaagaggtgcaacagtgattagaagaggtgcaacagtgattagaagaggtgcaacagtgattagaagaggtacgacagtgattagaagaggtacaacagtgatagaagaggtgcaacagtgataaaagaggtacaaatctgattagaagaggtacaaaagtcattagaagaggtacaaaagtgattagaagaggtacaacggtgattaaaaaggtacaaatgtgattagaagaagtacaaaagtgattaaaagaggtacaacggtgattaaaagaggtacaaaagtgattagaagaggtacaacggtgattaaaaaggtacaaatgtgattagaagaagtaaaaagtgattaaaagaggtacaacggtgattaaaaaggtacaaatgtgattagaagaggtacaacattggtcagaagaggtacaacagtgattaaaagaggtacaaaagtgattaaaagaggtacaacagtgattaaaagatgtacaaaagtgattaaaagacgtacaaaagtgaattaaaagaggtacaatagtgatcagaagaggttcaacagtgattaaaagatgtacaaaagtgattaaaagacgtacaaaagtgattaaaagaggtacaacggtgattaaaagaggtacaaaagtgattagaagaggtaca

SEQ ID NO: 54231 - DNA, 177 bp, Heterodera glycines
atgaattttatagtcagttttttggatgctaattgtgggcctttaataatttaaattgatgaatataaataatctttacatgctcatcgtgcaggacgaaaacacaaccataattgagaagccgatgagcaaaaatggtaaaagtgtgagcccagcgcggaccacctaaacaataaa

SEQ ID NO: 54232 - DNA, 235 bp, Heterodera glycines
ggtgcaccaatatttgagtaaattgcgccaaaaatgctagtgctcgcctaattctaagcctctgccacgcgttcagcatcaaataagcatcatcgacaccgagcgcaagcaccaaaaagggcgtaacacaaagcagtgacccttttaattgggaaaattttaaaaaaaacgacaaaattaaaattaccgaaacgaaagccgagccaaaacattccgccaagggctgtgcctgttt

SEQ ID NO: 54233 - DNA, 1889 bp, Heterodera glycines; identical to SEQ ID NO: 23541
  unsure (1)..(1889): unsure at all n locations

SEQ ID NO: 54234 - DNA, 501 bp, Heterodera glycines
atgccaaaacaacaccaacaacaacaacaacaagatcaacaacatcaaactgatgtgatcgaacatgatcactgctacgcgcgccccacaaaccagttatggaaattgaaaagacaaaaatacatgttgacatttaaactatgtaaaatgtgtgcacaagagctatacaaccgtaaggacgacataacagagtgtaacgatggaggtgtggacttgaactttcacctgtgcaaacattgtacaatgctcaacatgcgactcagcgatatgaattctgtgcaatttatggcatatcatccacgtaataacaactacaacaacaccaacaaccgcaataaaaacagaaacaataaaaacaacgataatgacgaaaatgacagtcaaaataacttttggtacgataattacggtcctacatactgtagaggtggtccaagaaacaactacatgcaaggaaaacgaaagtgcttggaaagaattgacatggacgacatgaattga

SEQ ID NO: 54235 - DNA, 725 bp, Heterodera glycines
atgtctgcaatgataaagctgaaaaaattccacgaatttacgcagaaaatcatttgcatcggtcgaaattacagggatcatgcattggaattgtatacaattaatttttatttatttatttattttattttttacaggtccaacccggtgccaaaagaaccgctgatttttgctaaaacttcaaatgctttattactttctggtggagaaattaaaatgccgagtggatgttcggagctgcattatgaggtgggttcagttctctactacagttaacgcaatccaatcaatgcccattcacagtttctgcctacattcttgtttgtattgagagcttgaattttatagaatttttttaaaattttaattcgactttttgctcggtgctaaattaaatgttagatataggagcgccatctaacctaaagacgcatttccttttataaaataagtttaaggtggaacttggtgtggtaattggctccccgggcagtcggataaaaaaggaatcggcctttgattacattggcggttattgcattgcattggatatgactgatcgaggaatgcaagacaggcttaaaaaggcggggcatccgtggtttttggcgaaatccttcgacacgtcgtgcccaattggcgaattcatcaacaaaagtgttattcaaaacccccatgacattgaaatttactgtttgggtataatgaaccctataattttttaa

SEQ ID NO: 54236 - DNA, 531 bp, Heterodera glycines
  unsure (1)..(531): unsure at all n locations
atgaaaatacgcatattattcattccaattatatttttgatcatcaaaattcatcaaattaaaacggaaaataaaaaactaccgcaaaaatcatttgatgaaatatttggagaaaaatgggaagaaaaagaagaaaaacaacgaaatgaagagaataaaagagaaatcatttcaaaatattataaaataaaagagaaaataaaggaaaaaggaataaaatattcaaaaaaagaatgggataaaataaacacgaaaatagcgaagagtttggggacaaatgataattatattaaaaaatggattaaagaatttggtcttcaaagaaataaatgtcacaaatccaaaagtgatgaacaaaaacttgaaattgttcaaaaatttattgaaatgtcaaatgaatataagcaaaatagaaaatattcaagaanagaatggcaacaaaattatgaagaaattggcaagaaaattggcgtanaccgtgaaacaatccaaaatggaagaaacaatttggcattagcagtaaacgaataa

SEQ ID NO: 54237 - DNA, 151 bp, Heterodera glycines
aatttttttttgtggatacttttgtcggattctgaatttgttcaagaattcaaaaaaaattgtgatggtcaatttttgtaatgagtcagaataatttttgccataattactcatgctttaatttaaatggattttaagcaattttatttgt

SEQ ID NO: 54238 - DNA, 167 bp, Heterodera glycines
aattagccaatttataggtaaaattttgaaaaattttatgggaatttaatccaattcttaggggtgtaaaagtcgcgtttcgcgccaaaaagcgaaatgcgaaatgcgaaacgccaaaaaatgcgaataatgcgaaaggcgaaatgcgaaacctaggcacatccctg

SEQ ID NO: 54239 - DNA, 305 bp, Heterodera glycines
gtgcttccgtctgatcccgaaaatccaccaagttctgataaaattcctggcttatcagttggtgcacacgaattcacgtgccatgtgatcccttattttgatattcagtgatttacgatttgttatttgaaatttatgatggatgaatatatatatatattttttattatttcatttgaaatttttcagcaaaattaaaaatttttacagaatttgacatatttttccattgctaggcaaaatgccaaatttaaatataactttaaaatcaagtacatttgaaaaaatcaagtgcgtacattgaa

SEQ ID NO: 54240 - DNA, 740 bp, Heterodera glycines
atggcgctggaagcaatggacttggacttgtcaactgacggcaacgacagcgagccatcactggccggtgattttgattttaaaaaattaacaaaaaaaagtttgaaatgggacagaagaaaggcacacatcagccaaccattggccatcctgacaatgagtggcgaaataaatagatttgctcataaattatcataaataaatatttttttaagatttaaaacggccagaaaatatggacatttctttaaaaatcctctattagaatggccctgtttcaaagctaaaattggaattttgcttcatttagtatttttttagcaccaattaaggcattttgacagtattttgcgatttttaagcacttaattgacaaccaaataaataattattcttaatcaattctgttgcagcacgtttgtcgtcagttgagaacaaccagaacaaaattctgcgaattctcgcggaacagaaggaaatgattgggaaattgcttaaggtggaaaaatgttgattaattaaaatttattacgcaaaaatgaattaataattaattccgaaatattataattaattgtgaattttcagattgtggcgggccccagcaaatgaaaaatgccgtgccgcacctaatgatcgcttacagagctttaacacgcttaatcttaacttaattttcatcgtatttttcatttttcttaaagcgataaaatattttaaatgcagagatggcaaaatta

SEQ ID NO: 54241 - DNA, 255 bp, Heterodera glycines
tattctctttgaacgtttggttgctctccgtcctcacccgtggggcctgttgatcacattcatcgagctgatccgcaaccagcgctacggcttttggaagcacgaatttgtttattgtgccaccgaaattgaacggtcagtgagcatttatttgtttggctcactaattcatccgcttttttcagtttgttcctcagtgttgcaaattcctgcagtgtaagcggaccggaaagccatcactcgaacggaatttaa

SEQ ID NO: 54242 - DNA, 450 bp, Heterodera glycines
acaagtgctgtttctgctgcagcctcgccgtgtgcccggctttgcctaccattggctggacatcattggccatcgcaatttcatcggccgtctgctctcggagagccaggatttggcgcgtacaagtgccatgtacacccaactgctgctttgtcatctcaagtttttggccccctttttgcgcaatgttcaactgccaaagcccattgcttacatctacaagggcactctgcgtgtgctgttggtgcttttgcacgactttccaggttttacccagtttcaccgccattcatcattcggctttcaatttttaaagaaattctctgcgaatactactacatactttgtgatgtgatcccggccaattgtgtgcagttgcgcaacttggtgctcagcgcttatccgtgcgacatgcgtcttcccgacccgttcaccgagacaatggcccgg

SEQ ID NO: 54243 - DNA, 238 bp, Heterodera glycines
atgatcacctccttttaccgtttttcggtccacggaaaaggaatcaatgtgaccaatcctaattcccaacttggtgaattttcatacaatccagaaatggattcaacatttcaaaattggctcgaccgttatgggcctttcatccaagttgacgggaaggacctccccgatcagatgcaagttcggctcctgctcggcaagctcggatcggaggagtacaaccgctatgcccaaaagg

SEQ ID NO: 54244 - DNA, 709 bp, Heterodera glycines
gaaaaggcttaaacatcgctcagacaattttcttggcagcattttattcaaacgtggaattgatcaattttcatcatctccgcttagcgataaaagtgatcgtttttcatacagtagtccatccaatttgtctgatcaccgttcggaagaagcgaaaagcaatgcatctgaaaatgactcgtccatccttagtgaacaaacagagaatgaaatcactccagcagctgactttgattatggacaaccgagcaattcttcagaacatttttcgtacagtgatgaagaaatgtcctacggtagagcgactactggagcccatgacaaaagaacacaaccaaatacagttgaactgagcagaacaccctccgataaagtggttagaaaatttggaaaagtgtccaaactgtcaaatcttggcgaaaagttgcatctatggcatttggaaaaaacattggatatgcgtctttggaagttaaaaatgaaggatgccagtatcgtaagacatttttccggtaaaaagcatgatcaggcttttccatccgattcttcgactggatcaagcatcagcgaccaaaaataaggctttgttgaccacaatgaatgatcaattagccaattactgtatcattaatttgcaaaattaggagaatagatttatttgcttattttcttgtaaaactatttctatgactggtttaaattcgtaaaa

SEQ ID NO: 54245 - DNA, 541 bp, Heterodera glycines
atggttctcgtcagcgaattttgtgcccaatttctctcctgcccgacaaagtcacttcgcgatcgactgaaccacccagaggaccgagtccgagttttgcagcaattgattgggaaaaaggtccagacaacatacaaggatcggaatggaatgcgcaaatctttcctcgttggtggaatgactgaacgaggcgcggcatttgaacccgcatatggacgtctgcgtaagccgttcaacattaacgtggcagcgcatttttatgctcgtcaccgtgtcaaattgcactacccctatgtgccatgcatcattgaaggctttacgcgtggtgaggaccgttattatccgatggaactgcttgaaattgtcgacgacaaaaagggagggcgattatttggtcgattgttcactgaaattgaggagcaggaggaggaggacaccaaaagtgaagcttcacattcttccaactcttcctatttacaatttaacggtaaaggctgcaaatggtatgaaagcattgacgaaattaccaacactgggcgtg

SEQ ID NO: 54246 - DNA, 327 bp, Heterodera glycines
atgaccaagcactcggccattgtttcctcctgcgaaacgccgccttcgtccggcgcccaaacgccgacagcagcgacagacccacaaaatcaagctgtaccagaaacagttgcagcagaggaacaaacccagcagcagcagcaacctaaacggaagagttcgttgaattcgatggtcgcctcggcactcgccgacgcaccggcgactctcgcctcactgtttaatgtgccgagttcatcgtccattgaattggcagcacaaaacagtgaacaacagcagcggcagcagcagcaaaataatgaacggaaaagcggagaacaagcgccg

SEQ ID NO: 54247 - DNA, 793 bp, Heterodera glycines
atgtccgccatgtttaagcaaaacaaaagcatggagagggtgcgtttcgcacaactgccgaactggttcccaaagagcttcgggcacgagggggtcgtccaaagtgttgatgaaaatctgaaaacaattttatttattttaataaaaaaatttagtgaccaaccataggaatctttatgtctttaatgcgtggaaggcagcttatatgggaatagtaatccgaaactgaagcaaagttgtgcacccgacgactgtaaaattcgtcaagccaaagaagcgaagtcgacgaccagattttctgaaaagataactaactgtagctgttttttaaacaaaaaattggtaaaagacaattcgttaaagccactcatataaccttaaaatgtattttaagttttaaacttacaaatggagataaaaccaatgttttttatactaattttaaataatttaattacagacccaaaagacctcgaaaccccataaaaagtagttttacacgaatttttgaaaatttttattcttttgaagaatggggtgaataaaccaaactattaccaaattttctaattttttttctttctacgtttgaaaatattttttaaaataaaaatttttagttttcaggacaacaaaatccatctcaacccacccgagtgattgcttactcgttcatccaccaatcccgacttcacatggggcagaacaaccattgcgtaattccgtcgaagtaatcgtttaacactttcagtgattatgtaattgtacaaacgtcgcccgccttgccaatcga

SEQ ID NO: 54248 - DNA, 1123 bp, Heterodera glycines
gtggaaatggtgaaatggaagcgatgttccgagttcttgccaagttgtacccgcgaacttatttcattggcattggcttcagtatgggtgccaatgtgctgactaactgtttggcttctggactcgatccttctatttcttcgcgcattcttctcggcatttccgtttgccaaggctattgcgcttcggagtgctttgagtcgtttttttcacctttaattttcccttttagtgcttcttcccttttattcgattggcaaggcgggcgacgtttgtacaattacataatcactgaaagtgttaaacgattacttcgacggaattacgcaatggttgttctgccccatgtgaagtcgggattggtggatgaacgagtaagcaatcactcgggtgggttgagatggattttgttgtcctgaaaactaaaaatttttattttaaaaaatattttcaaacgtagaaagaaaaaaaattagaaaatttggtaatagtttggtttattcaccccattcttcaaaagaataaaaattttcaaaaattcgtgtaaaactactttttatggggtttcgaggtcttttgggtctgtaattaaattatttaaaattagtataaaaaacattggttttatctccatttgtaagtttaaaacttaaaatacattttaaggttatatgagtggctttaacgaattgtcttttaccaattttttgtttaaaaaacagctacagttagttatcttttcagaaaatctggtcgtcgacttcgcttctttggcttgacgaattttacagtcgtcgggtgcacaactttgcttcagtttcggattactattcccatataagctgccttccacgcattaaagacataaagattcctatggttggtcactaaatttttttattaaaataaataaaattgttttcagattttcatcaacactttggacgaccccctcgtgcccgaagctctttgggaaccagttcggcagttgtgcgaaacgcaccctctccatgcttttgttttgcttaaacatggcggacatttgggctttctcgagggcaattctctgaggcctcgctcgataacttggcttgaccgtttcatcctccaagttgctgcggca

SEQ ID NO: 54249 - DNA, 363 bp, Heterodera glycines
cttattttatgcttttgcttttcttctcttaattacccgattagtgataaaaaaattgactgaaaaaattcacgtctcattcaacaacatcgaataaaatttgtcgcacaaagcctgacaatctaggcagaacgagccgtaataatgcatatcagtgcctccgaatctcgaatcccgacattttatgtaggtatccaccgtgcgctgaaatgggaccaaaggagccacaaatgcgcaaactgttgttgggatttgcagttctgggtgccaagctaaccaagaaaatgccgcgttgtcattttttggaaattgattaaaataattaaatgttttatatcattcgtataaatactagcatggcta

SEQ ID NO: 54250 - DNA, 3030 bp, Heterodera glycines
atggtaatttttaaaaatttacttcaatttatttaatgaatttgaccaaaattttctaaaacatttttaaatccaatgcgaacaaaaattaacttttcgagttttcatggtgatccattttatgataacaaaaattcacaaaaacaagaaaaaataaatgttgttatttaagccaaatacaccagagaaagttggccaaaaacaatcggaaacgcagtcgaaaaaggagccgaaaaatgcgaaaccgacggaaaaatcgacacagtaagaaaactttacaaaaggaacaaatacgacacagaacggacacacctttaaacaatattttaataaaatttaaataaaaattcaaaaaaaaaaaacaaaaaattctttcgtgtttttaatacggccaaaaagtcgtcgtacaaatgaacattaaaagtgatttaatcaaaattaatttgattaattaacattttttgtattacatttgtccaaacaggttgcaaatgctgatctccaacgaaaagctgttgacggtgatgatgaaatatgtggagatgaagctgaaggacatgtccaagcagtacaaggagttccatgaaagggtaagcacagggacaccattagcatgggaattctcatcaattatcattcattacattttttggcaacgaagaagctggcgctactttaaagtggcgaatagggatcagatttatacggatgataattccaaaagttaaaaaatatatttaggaaataacaaatatttgtgaaatattggaacagccaaaatatttatgaaaatattgagtaagaattgaaacatttgcagtgctaaaaaatgaatgtttataaataagccaataattattcactggttgaagttgcaataagcacttttctatgatatgcctttttagaattgataaaatttaaaaatttaattttagacattaatagggattaatttagactaaatgttttctttcatttaaaggtgaaacaatggaaagatgacgtgcaattcataaaagcggcattcggagaggataaacaaatgtacaaaaagtacatggaaatggcggtcacttggccagagaaaaagtcgaaagggacaccggaaaaagtcccaaaatcgttgaagcagacccatctggacaatttggcacaaatggccaacaaatttgaggagttccgtcaggtggttaagcagtggcctgactcgggctgcttcatgacattcccgctggagaagaacgttttcaacaaggtgagaattgccagattttattgagttttaatttaaaaacatctatgaagagcagacaattgtaaagaaattacctttaaaattttttactgacaagtccaaaaatcaatccacaaaaggttttcctgttcgaccacgcgctgacgctgaaggaagatgatctgcagaaggaattggccacgggactttacactcacgcggaattccgcaaagaatcgccggctgatttcttcaacaacccggactggtcacagaagaaattggaggatgccgaaaaggatgacgatgaggatgaggatgatgacaaggaggaggaggaagaagaagaggacgatgatgatgaagaaggtgacgtgagaatggcgaccaacgcattgttggaggtactgcttgggagggacggacttgtggatttggacatgggaggagagtggtgttaatggagcaaaccaaaacaagtttaatggccagaaaaagtcagcagttgggatggagctgagaattaagaaaggatttggcagggcgtatcttttggctttgagtgcgtgtggtttaaggacaaaagcgatacgcaaatttcatattgaacctctttttaaaatagtgcttcattctcctaaaaaagctacgtaccatttaaattaaatccgaaagtttctcttatttcttaggcacttttgaaaggccgtgatggattcgggaaggaggcaacgctgaatctgcgcaatttgccaaaatgggacgggaagccgaatcagagcaaaagcatgtggcaaatggcgaagaaaattgtgcggaatctgatcaaatttgttaaatggcctttacgtattttttgggaatatagcaacaaattgacgagaaaggtgagagagagagtaggttctgttacaaatacaatttattcttaatattttatgaataataaataatacgtcagtattcagtgttaaactacagtaagatccttttcaaattactgtattattctgtaattcccacaggtgcgaaacgcaatgaaaagtaaggaagaaaaagaaaaaatgagaaaaaagctggaggaggtgaaaaaggatggcatgctttacaaaatttaccaaatgttggacaactcaaaaaacaaggcggaaaattttgatgaaaaagcgaagaaaaacatggaaaaggaggggatgaagccggacgagccgaccattgaccactcggcacacgaacagctgacagacaaagacaaacagcagcacccgttcactttcctgcagggtgaatgatttggggggggagggtaattatgctccaaattgggtaaatagtgaactataatgccataatgagcattaatgaggtaattgaagatcatactaattgatagaaagaggatgagagattgtggagcttaattagcacaaaacaaataacattgaatgcttacttgattgtcactattggaatgatgtattgaagggtaattaaaaaatcacaataattgggatttggtggtgcttttaggggtaaatgagtaaaatttaaattttgatcatcaaatatatgtatattagagaccggacaagagggtcggtcggtcggtttcagttaaaaaccgaaaaaaaaaccgaaaccgaaaaaaaccgaaaaactcaaaaatttgtcggtcggtcggtttcggttaaaaacccgaaaaaaaccgaaccgaaaaaaaccgaagaaaaattttcggtataccgtttcggtttcggtttttttgaatttttttatcttttcccaaaaaaaca

SEQ ID NO: 54251 - DNA, 409 bp, Heterodera glycines
gacggggcatgggacgtgagcaaatattgtgatgacatttcactgcgaatggtcagccaaagtgaagacgcactcgacttggagttcgacctggtcaacgtggaagcgcccattgccaatgctttgagacgcgttttaatatcggaggttggcgagacgaatttggggcattgaccggggattcgattttcaggtgccgagcatggccatcgagaaggtgttcctctaccagaacacttcttgcattcaagtcattaaattgttccgtttttcttagtttggctgaattcacaggacgaagtgctttgccaccgactcggtctcatcccaatttatgccgatgctcgccaattcactttccctccaccgccaaattcgtccgcaactcagcaaataaacacagacattt

SEQ ID NO: 54252 - DNA, 320 bp, Heterodera glycines
tgccaaaaaataattgtatttttcaaaaactgccaaattaactgttgaaaagtttcaacaattgttgtgaaacaatcaaaaataataaatgtattaacaaattttaaaatccattaaatccttttccattcctttcactcggccattttcctcgctaccaaaatgtacattccgtccaattcataaaacaattcgttgtccaattggtctctgttttgttccggggttttcccctttcatttcgaattgtgccgacctttctaaaatcagtccggcaccccgcaaacattccatcatcagttttcgactgacgaaaaggc

SEQ ID NO: 54253 - DNA, 1416 bp, Heterodera glycines
  unsure (1)..(1416): unsure at all n locations
ttccacgagcatttcgacaccgatgcctatctgaaagtggcaaatgccttccttggtcacttttatcgccccgtcaattaggacttttacgcgcgtgtggacgacgcggccatgcaaatggttctgttccatctgcccaacatcgtcgcccgcctcggctccctcccttcgctgctcgacttcggctcgggccccaccattcacgtggcggtgtgctttcgccacacggccgaagaggtgaaaatgggcgagggaaaagcaatgctttgaaacggggaatgaagcagtacaacgaccgacagatttatctggcggattatctgccccaaaaccgtgacgaattgtgccaatggctgagcggacaaagcaaattcgattggagcaccgtaatgagggtaaaagcatcaaagggggggggggggcggcagtccaaccgcggacattttcagataatcgctgctcgtgaggcggtcccattgagcgaaataaggcaaatggagcagaaagcgagggaaaaggtgcgcgagaagtcattttgcaaaagaccgtccaaagggtgtcgattaattgccctaatttgttcttttgtccatcctcccttttgcctccccaaggttttgggttgggcactaattttgcgttggnaggtggcccccccgttaatccccccgccctcccttgaatatgcccccccttcccctctcccctttccttcagattcgtgccgttctcttctgcgactgccattcctttccctccgtgcaaatcccccgacaaaatccgacgcgacaaaactttttcggaatttcccaccgatggacagtaagaaatctaatattttttatttcattcaattctcccacaggccatcacaacattcttcaccttgaagtactgctgcttgagcagctacgaatacgcatggcaattaatcatttgagtgcccatttgcgcccgacggagtgctaataatgggcggagtgttggaggaaacgtaaaaaaaggggggcggggcgggcaaaagccatttgacaattcggtggaagtccaaaagtcaaatggcaaaaggttaactaactgatcaaacattgattgtgatcggagcaataattttaattggttttacaatttatttttgctttcttttcgagtttttggccttctccgattaaatatttgaacttttccaatgctttttcagttggtgtgcttttggtggccgacagttcaaatgccttttcgtcagtcgaaaactgatgatggaatgtttgcggggtgccggactgattttagaaaggtcggcacaattcgaaatgaaaggggaaaaccccggaacaaaacagagaccaattggacaacgaattgttttatgaattggacggaatgtacattttggtagcgaggaaaatggccgag

SEQ ID NO: 54254 - DNA, 863 bp, Heterodera glycines
atgccagagggagggtatgagagagctgaaaatcagagtaaaatagcggtgaaatattttgagtggcttgcccaaagaaaaggagtaaaagtgcggcatgcgtgtaacggaggggaagtagaatttggtgggctgaaagtggactgtgcgattggggcagagaaaaaaataattgagtttcaggtaaaagtaaaaatattttctttttaaacaatacttaaggggtgtgcatttcacgggtgtccgagatgttttttaccttggactatagcgccaaacggacggacaatagaagagaatcaaagtagaaccgaaattcgcatggaaattttgagggaaaagtgcaaaaatttttcaatcggagaagtttgggtagaataaaacatttagaaatatttattaattgttagttttaggagtgtgacgtgaaagaggaattgaagaaaaataaggagatgaaaaaattctttgaaagtgtgccggacaagggaccgatcaatccgagggatgcttatgccgggggaagaacgatgccattttgtttgtacgcaaaggctaccgaagaaatggagatctcaatgtttgacatcattagtttgtacccctttgttaattatggtaaaaatctgcataatttttgttaaagtttcctttcgcttaagacaccccataccccgtcggggtcccgaaaattatagtgagcaggaatttcaatgtgaattggacagtgctcgatgacgtgccctatgatggacttttgaaagtaaaagcgatcccaccgaaaaatcttttgtaccccctcctccccatgcacatcaataagataaggtcccaggggccggggtccagacccctgaacctga

SEQ ID NO: 54255 - DNA, 902 bp, Heterodera glycines
atgagtcattcttttagcagcacagagcgcgaccaaatggcacaacaaacaacgggcgaagaaatgaacaaaatgaagcaacaaatgaaggaatcgtatgaggagttgaagcgttgggatgaagcggagcgggtgacggacaacataatcccggaagatcgtgtaatgacaaatggcactaggcgtgagcgggtgtaagcccttatataagccctcgtgagggagtgtaagctcgttatataagcatggggtggaagtgaaatagaagctcgcgagggagtgctatatgagatttgggggatccctgtcctggatctcaggatcaattgtttggttctcgcaatcagtatgcgctcgggagtctcgggtcccgagcagtctatctaagcctcagggccagttgggtacttcaattatttgcaacattcacaaagagccggccacaagtactcacacgcataaagatcaagaccagatattcggtaatgactcattggtccgattcctgaatcaatttttccttttgggtcgtaatccgaggatctgatctggagtcttaaagagccagtctcaaaattattctggattttgtagtattatctgctcgaaagtaaagtctcgggtggtgggtggtacatttactccttctaaagttcgggcaaatttgtgttgttccgaaaagtaaaaaatcactgcccaattttcaggggctcatgagagacgaaaaagcttacgagaagataaggatggaagaaggaaatgaaggctgatggaagcgggctgtaaagattttcaaaatgatctgaccagtgatcagagatgtctcctattttctaaaatggttaagtattttcatccttaggatgtaccgtatgactcacaaattggggtatctgattaaa

SEQ ID NO: 54256 - DNA, 959 bp, Heterodera glycines
atgaaagaatttatggaggcgtgccaagtgttgggacaatatgccaacattgacctgaacgaaagaagcattcaaaacattgcggaaagcatcgatttcaacaaggacggattcattgacctgaacgaattgctggaggcatttcgactcgtcgacatcggaaaattgtgaaaatttggggaaaaatttccggatttttgtttcactgaaccttatcaaacctgatttgctcattttataaccatgatattcaacgattcacaaaatgcattcatatgtattattttaaaccgatgtaaatatttatattaaaaatattaatttttaatattttgtaattttcgggaaaggtggcaggtttttgccattttcgcgggaattaagttgactaccttattcaaacagctagttttttgatttggcattgattcgaaaacggcatttaatcgggataaaagccaattgttaattttaatcagataccccaatttgtgagtcatacggtacatcctaaggatgaaaatacttaaccattttagaaaataggagacatctctgatcactggtcagatcattttgaaaatctttacagcccgcttccatcagccttcatttccttcttccatccttatcttctcgtaagctttttcgtctctcatgagcccctgaaaattgggcagtgattttttacttttcggaacaacacaaatttgcccgaactttagaaggagtaaatgtaccacccaccacccgagactttactttcgagcagataatactacaaaatccagaataattttgagactggctctttaagactccagatcagatcctcggattacgacccaaaaggaaaaattgattcaggaatcggaccaatgagtcattaccgaatatctggtcttgatctttatgcgtgtgagtacttgtggccggctctttgtgaatgttgcaaataa

SEQ ID NO: 54257 - DNA, 886 bp, Heterodera glycines
actcaacccaacagcattccaatcactggcactcaacccaccagcatttcaatcactgggactcaacccaacagcattccaatcactgggactcaattctcctgcatttcaatcactggcactcaacccaccagcatttcaatcactgggactcaacccaccaacatttcaatcactggcactcaattctcctgcatttcaatcactggcactcaattctcctgcatttcaatcactggcactcaattctcctgcatttcaatcactggcactcaacccaccagcattccaatcactggcactcaattctcctgcattccaatcactgggactcaacccaccagcatttcaatcactggcactcaattctcctgcatttcaatcactgggactcaacccaccagcattccaatcactggcactcaattctcctgcatttcaatcactggcactcaacccaccagcattaaaaccgacagcggctcgaccgcttagcggcctcgcactcttcttttggcattttcttatggcataacagttcttccttgtttcttgactttttcttacgcacaacatttttcttctatacaaatttttcaaacaaattctcattcattcatttaaaatttcattaccatttacataagcaaaacaatatctttcatatcaaaaccaaatcaatttataacacaaacaacaaagaaagaaaaagaaacatttttaagactgttttttacataaaatgacaaaagaaaaaaatgtaaaacaaaaacatttcatttttcaaagcatttatacaacacaacacaatgttaatattataggattttcttagtgaacaaactaaggggtgtcctctttcttttgttaaatattttatacaata

SEQ ID NO: 54258 - DNA, 1724 bp, Heterodera glycines; identical to SEQ ID NO: 23568

SEQ ID NO: 54259 - DNA, 173 bp, Heterodera glycines
atggcctctcctactgagaatttggaagatgaatcatgggttgaataccattattctgaatcagaagttgaagagcttgacgaattcagtcttctgcacagtcaaatggtgccaaaccgagtggtgccgtgctgcgtgaattgtgccgaaattatggtcagatcagatcacat

SEQ ID NO: 54260 - DNA, 1008 bp, Heterodera glycines
  unsure (1)..(1008): unsure at all n locations
atgaatgttgttgaattctccccgatggaaacacatgcaaattcggcacatataatctatcgagtcacacttctgcctcaatcatccacacttgtcgaattgtcaatgaccaatggacaagaagacaaagaagtcactgtaataggaagaaatgatttggatgagcaactaagaattgagcctactttaacatctagcaaaaacggacaaatcgctgtgccgatcacaaacttttcgtcaattccaattacactggaagcgaatgaaagtgtcgcattggtcgagcatgtcgatgaatggcacgaattggaacattcgtttttccctccgttcttcgtcagcagcgtcacacatgaaaatgaaaacatacgcactgaacaaatcaaagaaatcttacgaactcgtattggcatgtctcagcaacacgaagcggacaaattggaacgtttaataattggtttcgaacaaatttttgcactcgatgacagcgaactgacacaaactgaaataactcagcatttcattaacaccggcgatgcctcaccaattcgaggccggatgcgtccactgccatttgcacatcgtgaaaaagtttcaatgatgcttcaagattatttgagcagaggattgattcggccgtcaaaatcgccatgggcaagccccattgtccttgtcccgaaacgtgatggaagcttaagattttgcgttgattaccgaggaattaattcggtcacagtgaaagacgcatacccgttgccgaacattgattacattcttctcgcattgggaggaaaaaaatacttctcaaccctcgacttcctttcgggatattggcaaattaaaatggacgagaagtccattgaaaaaacagcgttcgtcacagaatttggactgcatgaattcacggtgcttccgtttggactttgtaatgctgtagcaacttaccagcgnatcatgtctcgtctttttgaagatctgatcaatgatttttgtcttcgtttatcttga

SEQ ID NO: 54261 - DNA, 439 bp, Heterodera glycines
aaaatctataaaaaatttaaaaatgagaattcatgcgagattttctggaaataagcttaatagggcctagttaagctgtaaaaaaaaatttggggcgatttgaaagagaatagaaagaaccaggttcgatgaagttttggtaagccaaaaaaaatccaaacatttaaaaatctataaaaaatttaaaaatgagaattcatgcgagattttctggaaataagcttaatagggccttgttaagctgtaaaaaaaatttggggcgatttgaaagagaatagaaagagccaggttcgatgaagttttggtaagccaaaaaaaatccaaacatttaaaaatctataaaaaatttaaaaatgagaattcatgcgagattttctggaaataagcttaatagggcctagttaagctgtaaaaaaaatttggggcgatttgaaagaga

SEQ ID NO: 54262 - DNA, 1756 bp, Heterodera glycines
atggtgagccagtgacaaaggcttggtcatatactgtaggtagagatttacccaaatttagaaatttttaaactagcttttggaaaacactgttatctagtaacataaaaaatagggacttttacagtgtgttgcaaaaaaagtataaggacagattaaaagtgagcaaattcctaacaaaaaccaacctgaaactgataaaacaagctaagataaataacaaaaaaacaaatgtttttattatttctattgatttcgcgggcagaaaattgcagcttttccttgtcctttattttccttatatttttgcaacacaatgtacctaatgggatatcgttttataattttggattatattaaacaattttgatattgtatcataaattaagaccgcaatcacttaaacggtaaaaattggtgagaaacagagcaaatttcataccatggaaaacgggtacattgacgtgacatctatcgaagaacaacaggaatatgcggaaactgagcatcaaaatacaaggtaatgtcaaacagcgacaaacgaaaaagttttatagtacacatgtgaacagcattcttttttgttgtatttagtgcgttttgatcgtgttgcaaaaggtttttgactttttgttcgattccgggttcggaatccgagatccataacgcgaaagcccctagaaacatatctacgacttttgaaaacaaaaaaaacattcaaaaaaggtgtaccatctaaattagatatttcccataattcacagctctcatctcaatggcggtccgtccgacgttccaaattgacccgcgaagtggcgatcgatcggattttggatgaacgcggcaaaaagggtgcaacggaacatcagtaccttgtcaagtggaagagtgtcaagcagtgctgggtcaacgcggacgaactgaagaaattcccgtcacttacggatgcgtttaaggttctcttttttggcactttgagacgcgaacaattgaagacattggttccctctctgtttaaaattttaaataactcatataaaacgccttccctggtgttttaattgtctttgatcacgaatctgacatacatttcgaccaattccgaaccttggaccaagctctaacaaaaattcggatacaaaattttcacattttacttttgtggataatgttttattttgtgccatccattttcagaagaagaggggcaacatactcaatttcgaggaagaggaatttgacgagatcatcagcaatggcaccagcaagcgcgacaacagtccgtacaccgaccacgactacgcaggcacgcgccaattggcgacggcgaagggagcgaccggcaaacaccaacggcagaagggcggcggagggacggcgaaagagccgaaaaagaaaacggcacttgtcagtgggaccgattcgggggtccgttcatcggcacggccgcaccgtccgaccaaacgttttggtgggcgataattatttggacaaatttgatacattttcacttacagacagacaatgaatgaattttaaggattgagtttatttggtcgttttttcagtagaggaaacaaacgaatcattcattcgtgggacttcgaaagtgcgccgaacatcgccacgcaaacatggcaagaaatcgactgcggagggaggaagcgaaggggaagaatcggaggatgacgggaaggagtacagcgtggaaaaagtgttgaagaagcgtgtgaagggtggaaaaatggaatacttt

SEQ ID NO: 54263 - DNA, 1417 bp, Heterodera glycines
ggcggtatgggacgtatagtagaaatagacgagtcgaaattttttcggtaaaatttgttgtttgagaacatgttgtggtttgttggtaattttctgcgtcattggttgcctctattcgtcgtagatttgctgtgagatcattaattcgtcgtgtggagtattgttgttgtttttgttgctgttttaattcgttgccttttgatcagttggatttgacgtgttttgtcaacgtttcatttgtgaattcaaaaacgcacttaagggccaaatataacagaggaagaatgttgcaacgccaatatgattgggtgtttgggatgttggagagaggcacaaacaaagtgcgttttttcccggtcgcggaacgtgatgccgctacgctcttgccgttaattgctcaaaacattgaaccgggaacattgattgtgtctgatggctgggccgcttacggagggattcaaaacatgcagcagcaatacgatcaccactgggtgaatcaccgtgttttctttgtagacccccaagaccggcaagtgcatacgcaaggcattgaggcaacttggggtgcactgaagacttctctccgacacttacgtggttcaaatgaggaaatgctgccgacatatttgtatcagtacatgttcagaagataccacgcaaacgacaaaattttcattgatccatccaaattggaattcgccgccatctgcaggtgcctcggaaccgtccactgatttgaatgagggagtgtttgcaggtgcgcgtaattaaatcgtaaagaaaaaagatggaatatttttgaacaggtgaacaatcagcacaatacagagcaggccatgtttatcgtcaaaagcatttacaagaagaacttggcaaaagattttgtcagaggcatttggaaaattccggtgagttttctttaaatcaatgttttgttgatctgaatgttaaaatcgcttagttacacgagaagccgggtatcgacactgtgaacacattgctggagctgctcgaaggaatgatgaccaaaaacagcgaaagcgcgcaccaagacaacgatgaggaaaacagggaaaacatggaacgagtgatcagtttgtttggaaataggcgtctaccggcagccaacattgacgcacccattgcttcgactccccaagaagaccagtcgaaccaactcttgtccttggtattttgcttcatttctcgttacgttccgcaactaatatttgctttggttttaggctgggtatggtccggttgcgcctcgtgagtcatcgaccgaagatcgctcgcttccctgcttcgtcgacagaatggcggaatggtgtcgatccgtggaagggcaaacgatgttcgtcatgggcgccattgtctctgcacatctcaccgctgaactgagcgccatgcctgaagc

SEQ ID NO: 54264 - DNA, 921 bp, Heterodera glycines
  unsure (1)..(921): unsure at all n locations
atggcaagaaatcgatccttcgaggtaggaagngaaggggaagaannggaggangaccctttggaggacagcgnggaaaaagaggncaagaagcgngngaagggnggaaaaagggaanacnnngngagnggggcgacangaaaaggggngaaaaacagaanncncnaaaagnnnaacaaaaanaggcannacganagacnnnaaggcncgnnnaaggncaaaggggcngggnangacgacggnaggaacacnngggaaccgcgngagagcnngaaacacnnggaagggnncaagcagnacgagaaggcgcaacaaaaggcggcggagaaaaacaagnnggaagccgaagagacggaggaggacgaagaagaggaagacgaggacaacgaanacaaagnggagaaagngnnggacagacgcgagaagggcggcagaggggagnacagagngagncggacgnaaggcaanggnggaaaagcaccannngcaaannagaacaaagggaagggctatgacgacagttggaactcgtgggagccgagcaaaagcgggaagcattttgaggtcgtcaaacagtacgagaaggagtggaaacagcaacaccagcaggagaaacagcagccggtgtctgcaaagcgttcgcttcgtttgtcggtgggtcacaaattgcaaagcgacgaaaactgcacaaaggctgtttggtgtattaagcgcaccgaacaaacaccgacctcaaagggcactactccgtcctcatccgtcagtgtgtcgaccaagcgcattcgcgtggtggtccgaaaggagcaggacgacggaccggcgcacgtggaacagaccgagatggacgctgtctcggtggagaccaaagagttggcgcccaagacgccctccaaaaagaaaaagaaacgctcacgctattga

SEQ ID NO: 54265 - DNA, 986 bp, Heterodera glycines
atgacttttgattttgaaaagagaggtgacaacgccgacgatgaggacagctctgccgatgaatgttcttcaagcactggtagcggtacaccaaacagcgaatattcggttgggcatggcgagcggcaattatgccgaatttgcatttgttggttgtgatcccttattttttcaattgttttttttaccacaaattgggtgccattgctataaaggatttaattcgaacccttctcccccatgcatgttttttcaaacaatttgtattcattaaaaggtggatgagataatcgggcacagaattgaaaatgggacggacaaatggagggtccgatggaaagggtgggcgccgaagtacgacacgtgggagccgcgtgagaatttctccaattctatgcatcttctggacaaatttgaagccgaacgacttgccgaacaatgcaaagagaatgtgagttgctctgaacgtaagcattctcattaaatagtggaaattattttatttattcattttgcgtttctccgttaatgcctattattattctctaattgtgcattttaaaatatgggcggtgcttttgaattttgcataaagtttactgtttttaaaggctctctttttaaattgttattcggttaaaatcgccatttttctttccttttttttctttattgattattgccttttttctgtccctccgttactgtttttgttgtatcctttttcatcctttcaggaggctgttgcaacccatccaatgtccaataataataatcagtcggattatgtccaaaagttgcgtccccatcgttcgctgtgccttcctccgacttccgccgctgtgccatcggccggcagaaaaggaccaaagaagaaaggaagtgccaaacgaacgacggcggcaaaaactcccgtttcaattccacttttggaggccaaggcgatgctgcacacgtcgagagtccgagtttttattcttgtgtaa

SEQ ID NO: 54266 - DNA, 1861 bp, Heterodera glycines
tgcaaaaactttggcagggcacgcgcttcgttctcagtcggcttgggcccgactttattcccagcgatacgtttgaggtaaaaacggacaaagtgttggaaaaacaaatgccaacttttcccaatattctaattaatgccaattcttaaaataagtccaatttctgggttcaccaaagaagttggtctaattgtaagataactgatttttgtgttattttttggcaataaaacatgtctaaatggaataaaagacaaaaaagccgattagggcatccactcgttgattatttattttattgcaaaatgtttttgtttgttttaagccttccactttggcacttaatttggccgaccggtggcttctctcccgactgtcccattgtgtttctgaatgcgatgtcggcttccgcacttacaacttccggcagctgacctccgccattcaccacttttggatccacgaattctgcgacatttatttggagtcggtgaagagtatttttgtcgtcaacaatgccaacaaaaagggggcggacgcaattgcggaagagcgaagccaaaacggcaccgatgaagtgacaacgcaaaaggtaattacacaaacaattcattagattattatctatggtacactacatttccaagagcaggtcatcccacctctaaaatttaaaaaaactttcagtaaagtctaagaattttttaaagatattaaaagaaaaaaatttaaattttcggcgactttttggaaaatttttttgaaaaacaaacgtcatgaaattttgaataaaaaatctaaaaaatatgcaattttcttgtaatttttcttataaaattttaagcttttttgttgaaaattttttttattaaaaaggagtttggcttatattttcattttcattcacatcgaaagttttccttgggtgacttattcctgtgtttaaatttgtttatggatttggcttatcccccccccccaaaggctgttacgactgctcggcatgtgctccatttggcggtggacagtgccctccgtctgttggcccccattatgccgttcattgcggaagagctttggcagcggttgcccgcccggccgtccgaacgtgcggagagcgtttgcgtggcgcactacccacagccggcggaggtatcataaaaatgctctctcgccatggaattgtttgataaatttcatttttcaatgatttgaatttaaaaaaatgcaattgtgtcccctgttcagtttccgttccatgacaaagaagccgaggccaactatgaggtattgcgcgaaaaagtgatcgccaaagcaaattgaaccgaaaaaattgttaatgtgaaatttgtttgaaaatattgtcaatttgaccccagaattcattcattgcatgcctatcaaattgaatattgttgttttgttgaccttacattattcttattccgttcgtattcacctttttgtgaacaattggatgaaaaaagcattttatttgttccgacttaaaagcgtaaaatcaagggttaaatataaaaccaattgaattatttaaaattatttcttttccacttcttttttattattcaattttttcggatggatgttcgacaaagttatggccaattggtttcaacgcttggccacaaaagttttttgttaggtggccaaaatgtggcggataaatgttgcgaaggcaccggaaaacaacaaaagttcgataattttgaggaagagagcttcgaaaagttgggacaaatccgagatgcgctgaacagtgttaaagtaagggcgtggcgagggaccaggtaaatttttgatcataggttattgcttaaggggtggcaccaattcaattaat

SEQ ID NO: 54267 - DNA, 765 bp, Heterodera glycines
atgcaagagacgcaaataattgtcggagtggcctctctgtgctccattttggccatcctcgccaccgttgttgtggtgccatcgctgtactcggagatcaatgagatcgccaccaaagtgcacgacggtgttcaggtgggaacaaaatgctaacaaacaggtgctaattttgaatttgctccaggctttccgcgtggacactgactcggcctggaccgacctgatggacttacaaatcacagtcacgccgccgtccaagccgcgtcagaacccgttcagctccatcttccgccagaagcgtcagttgcccggccactgccaatgcgcgggtgtgcaacagccgaactgcccgcccggcccaccgggaccggccgggtcgccgggacagcctggccagcctggacagcccggaggacctggacagcccggagtaccaggacaacaaggcgagcaatattagatttaaaaaaataaataaattacaaatgttttttaggtccgccttgccctgtctatacgcccccgtgccaacactgtcccgcgggaccccccggacagcccggaagccaaggaccgcaaggccgccccggagcacctggtcagcctggacaacctggacgcaacagcggacaaggcccgcctggacctcccggaccccagggaggagctggccaacctggtcgccctggaggacctggccaacccggacagcccggagcaccaggagttatcacgtaagaatgatcactgagctaaccaacttaa

SEQ ID NO: 54268 - DNA, 1262 bp, Heterodera glycines
tggatcaaaaagcaaagatttccattccaatgacgtcgagaaagcgagagcatgcagaaggggaacaagagatagaggaaggaaagagtgtgttgagtggagagagtgttagtgatggagaggagggcagaaacggagaagagacgaatgaaaaagaggcggatgaaagagaaagagagcgggacagaaaggaaaagaggccgagaaaggaatgggtggtggccggtgttcccaaaaattgttcggatttgtacgtggtggggattccatacgatttggaggatgaggcgctcaaggagtactttgagcagtttggaagcgttgaattgtcagaggtcagtgagtggatgagcaagggaagagaaggggcgagaaaagaaattcacgggagggaacctccgggggaaaagcggaaagggaaagacgggagaaagtccgtggtgataagacaagtgtgcagtgtatggaaagtgcgacggtcagtcagagattagaaaacgaaaaccacagtcaatcgcttaacaccgaaccattggggcggcctttttttacaatttctcttccgcaaatttcacatttcccataactttcaacaaaaaaaaaaacttttgcagataaagcgggacaaaagcggactgtcgcgtggcttcgctttcgttcggatggcccagtacgatgaccaagtgaaagttctgtccaagcctgtccatgtcatcgggggacgcgaatgtcacacgcgcatttcttccacagacaaagtgattggacttacaatatttcttttgttttcttcggtatttttgtgattaaccaactaactaacatagtttcttggtctatttggtaccatgaaatattcagaaatggggagagattggatttagtcggttggactcaaaaaatatgggcaaattaatatttgttttaacatttttcaagttcaggctgtcgacccctacgtgaatcgctctctgtcggtaaaaacgtttcattttattgttttgttagaaaaattgagtcaaagaaaagtttccaaatttgaaattgtcgctgattgtgtcatttcttaaggccaaccctcgcgttttcgttggaaatttggaaagtgacatcggcaaagaccgtcttcgcgagttctttttggagcacattcgtcgtttggacaaaacagcggacatcgtcgacctttactacccgaaaccattccgaaactttgcctttctcacgctcacttcgtcatttgctgcgaaagaattggtcag

SEQ ID NO: 54269 - DNA, 225 bp, Heterodera glycines
atgttcttgcagtgcattattcgttgctcctttataaaagaaaagataatattgttaaactatgcaataatttattttaagattctattgatgcaaatttagtgtgttgttttttctaaagatagtttcctttgttctttgtaaataaaaaatatagctttttataaaatatttttatagttgggagtcaatagcaattaaatatgtttaatttgtttaaataaa

SEQ ID NO: 54270 - DNA, 90 bp, Heterodera glycines
acttcaaagggctgcgccctcccatagacacgggctcgtgcgggaaacacccgcaaccaacccgcaaccttttggtactatatactactc

SEQ ID NO: 54271 - DNA, 656 bp, Heterodera glycines
ggagtgtcctttcttcactgtgaactatgccaaattttggaaccatcggcagaagcacaagcgcgcgaaccggttcacctgcaagcactgttccttctcctccggctcggtgcaatgctatgcggagcacatggaactgcatggggacacgggcacaaccgctacgatcacttccatcatcaaccaaaacattggcaacaacagcaatgttgcaactgaatttggcatgatgccagaggcattggtggccatgccgaaacatgcaacatcgacggtgacagcaacaaccgcaacatcttcgtcaggaattcgatcatcgccggaagcggcaagcagcggcagcagcagcttggacggtgccgaaacgttgtccgaaaaaaaattgtctatcatgccgacgaaaattgtccatgaaaagagcgatgatgaggaaatggaaatgacgacgacggcgtcgatttcccaagctgttgctgcttcgctcgttgatgaagcggtgcattttcttgtttttgtttctgatagttaaatgcggggttgagcctcgagctccccgatcaccgacatttttgggcctgctcaccgatcttcgtcctcactgacggtccccgattcccgagaatttcttccggggctaattttcgaaagtatttgaa

SEQ ID NO: 54272 - DNA, 2074 bp, Heterodera glycines
atggaaatgcatcggaacagtgaatgccgtccgttcacttgtgcactgtgcagcttcggctgcttttccgccgattcattgcacgcgcatttggcactccacgcgtccgcaacaacgctggaaggaggcggcagcggcacttataataatgagagcatacagcagcgaatggacccgccgccggacacgcaaacttctgctgctggcggtccaattactgatggtgggctgaagggggggggggggggggtcggtttataagtcattttttatagatttttttttctaattattttttttattatgattttttaaattttaatttgtggcttgtgacaaaaaagaaatcaattacctattttatagattttctagaaaaattgaaacagtaatattatagttttatgtgggttagaagctctttttcttcttttttacacaattttaaaatgaatttttttaaatgtttatatattttttactagaaaaaaaaactgaaccctaaaaatttagaaaacaaaaaaattttcagaaggggcagggagggtacgatgctggggtggaacttttgtgcatccccatccctccctctacaatatcccaaactacagtatgttaataataatatttctgttgattttgtcttttttcaaaattttgtcaccattttttgaaatgacatttatttttatttcttctggattattcagctccattttctgctgtgctcaataacgctgctgctgcagctgctccatcagtgccaacaacagtctccacggtgtcttcatcgttatacgcttgttctcaatgcaattttaaatgtatgagttaattcatacatatgcaaattaaatgccatggtctcccgtgtcaactactgatcacaggcccataaacagaacaaaaattcggagcagtaatccgaagaattttttttttttttttgcacttcgggccaaaaaaatgatttgtcattcggggtcaaattaaaaaaatatttataataaattggggtccggcgatgcaaaattcaacgcttatttgttaggttctgctgacaccccttgtgttcgttcgtgtatgtgttttatttacattttaggcgctgaattggaaccatttctggcgcatcgcaaggaacatgttcaggtagtggtgataatatgtaattgttatttttttcttgatttaatttagttaattatttttttatttagcaaatacataaattccctttacagctgattcaacagcgtctaatgacaatcatcaaacgtgcagcagtgatggaaaattgttgttttgggaatggagcgacaacgataaaaatggacaaaatgccaaaggcaaacggtgccgggaatggacgaacggttgacaaacagcattactgtacccgttgctcatttcgttgtgagtttttttttgtataattaagcaccgtcgattggctgagattcacttactccttggaaatttggcattgtgataacatttttttaaaaaatcgctaaaaatttttattttttttaattttctaagaaaaatttgtactaaaatttttttttaagttaaaaaaaattttaatttattcccggctgtgtttcggcgactgtgattttgattaattatccaaacaggtgaaaaaaacactatactgtaatttgtcattacagggtcaaaatctaaatttaaggctgtttgttttgtcttataaaaaggacattaagatattttaaatttatttctttctttttttctttttatttattttaaggaaagtttttttaaattcaatttttttcacaatttatatttgattagaaagaattgcataataaatttcgtaaaaactttttaacttgaacaaaaaaaaatgggaagcgtattgaattaatgtcctgagttcaaagtgaattaatgttctgaatttcaaaattgagatccatttataactgctcatttctattggactgttcgttcacaggtgacagtgttcaagcattcacacgtcactgggaacaccatcgcattgacaacagtcggcctggcattttccagtgcagcgcat

SEQ ID NO: 54273 - DNA, 1387 bp, Heterodera glycines
atggacgaacggttgacaaacagcattactgtacccgttgctcatttcgttgtgagttttttttttgtataattaagcaccgtcgattggctgagattcacttactccttggaaatttggcattgtgataacatttttttaaaaaatcgctaaaaatttttagaaattttacactatactgtaatttgtcattacagggtcaaaatctaaatttaaggctgtttgttttgtcttataaaaaggacattaagatattttaaatttatttctttctttttttctttttatttattttaaggaaagtttttttaaattcaattttttcacaatttatatttgattagaaagaattgcataataaatttcgtaaaaactttttaacttgaacaaaaaaaaaatgggaagcgtattgaattaatgtcctgagttcaaagtgaattaatgttctgaatttcaaaattgagatccatttataactgctcatttctattggactgttcgttcacaggtgacagtgttcaagcattcacacgtcactgggaacaccatcgcattgacaacagtcggcctggcattttccagtgcagcgcatgtgactacagttcagacacgcgcaatgtggtgctgttccataaacacaaccatcatttggtcagagtttttgaaaaaaaaaaaaatttgtttatactatttataaaacataaaaaatgtgtataattggacgaaaaactcgtcaaggggcaaattgtgctgccccgactcggactaatgttttttaaccaaataaattaatttatttttttgtcaaagtggaacaaatttgttatcattcaattaatcattaaggtttctctattttcttgtaaaatttcggaaaatttatcatgttccaaaaaaaaagttatggatgaaaaaattttgatataatttttgtcatgacttttttgaaatatggtatataaaatttcatgatttgcctataaatagagaaccctaaggactattgatgataccaagaatgtttaatttgtttgagttttttaccgtataattaattgcaggacattcctctgacatcgctgtgcaaaaacattgaacttgttaaagaacaacagaaacgacaatctgttgctgatgatgatgttgaaaaacaatgattgagtggccttattaatcaaatgatgcatgatgatgagcgagggattttgacttttatctgatccagttttttatcgataattcattcattatctcatcaggaaaatgatggcctaatttttcccgatcatccccccgggtatattccattcttttttttgaacacacacttttatttatacactcacttgctatttatattttttcattcttcagaaaaaaaagttta

SEQ ID NO: 54274 - DNA, 831 bp, Heterodera glycines
atttcacagatttcccgtgctgcccgggcagtcagcaagtggtttctgtgatgtccaaatacattggcactttctctgctgccggtgaggacgcgtctacagtatgttcaatggcgaaaagtactgtggatgggttaaaaagttatttgtcctcacgcggcggatgccccagcggaggagaagcacaaattgtggacgaaatcgatcggcagctgaggagtaattaatcgtcaaattataggaaaaaacccgttttatggaaaataattaaaagaataatttttgcgggaaatttttatgagaaaatacttaatttaaaatgcgcaaattaccttattaagcctttatgaaaatgaagatcacttatgaggacgagtgtccgtacaatttgggctttgcccgtgccatgttcgacttggccgctgctgctgctggccatgcgggcaccggcacagaatggcacagtttgaaaagtcaatttgagcaggaaagccaagcaatcaaagcaattagccaagcactgaacattgaagttacggatgtgcattttggacacccaagcaaaggcaaaccaaataattttaaataaatatttatttgaaaacttaaaagattattttcaaggaaattccgcgcaccaaaatgtgccgagtccgagccatgtgattgccaaccctggccaacaaagttcggttggccatggaaaggaagacgaaccgttgtcatccgatttcgacttttgaggaaatagaaaaaaggaattaattagaaggaaaattcatagtacagaaaacattttgttgattatttatgaagaatatttatttgttt

SEQ ID NO: 54275 - DNA, 747 bp, Heterodera glycines
atgaacactgcgatctcaaaattatttgaattgaggcctgacccatacgataattcgcaaagaaaatacttgcgtctttgtttggtaagtccatcggttttatttaccaattaggtatcatccttctacaatacattcagtttttgaacgtggaaaatgcatcagacttagcggatcttgtaaaagttatggatattgcattgattcgcgcagaactcgtaattcatcatactttcaaattggactgttaatttatattatttacaggtacttgagccttttatactccttgtagcagcgaatcgtgcactttttcaagccgctcacaatcaactttcaactcgtacgtgaattcgtccaaaattgctataaaaaatgtctcgagggtaatagtttagatggtgccacaccttttttaaataaatttttatagtttataaaagtcgtaaaaacacatttctagggtgttttcggggatgccgatcccgaaaatgacaccttcgagtgattttttttcattttttaggttcactgtctgctgaactgatttactgtctttcgcccaatcgtaatattcgcgagtcgttggccacttttggcattgctggcacaacccgtgctctgttggttgcaatatttgatgatgccaaagggaagaaaatgcgtgaagccgccaaacatatcaaaggcacaccggtgacattagaaaaattgagggaaaacgctgacgaggcactaatcagacag

SEQ ID NO: 54276 - DNA, 238 bp, Heterodera glycines
atgcaattaaggtgagaaaaaaatggaaaaaagaattccagctggacggatttgaaccatcgacctaaggatgtcttcaaccactacagtcctccgctctaccaactgagctacagctggcacacttacccacttattattattctttttattccattaattctgtccccacaagtcaaaaataataccagaaggaagtaaactagagaaattttgattctaaaaagaacaaatttaa

SEQ ID NO: 54277 - DNA, 262 bp, Heterodera glycines
atgtggaagaaggtaagtttaaaaaaatgagttgtaaaagaaggaagcggacaatgtccgaagaggaggggaaaagggggtaggaggaggaggaggaggaggaggaggaggaggaggaggaggaggaggaggaggaggaggaggaggaggaggaggaggaggaggaggaggaggaggaggaagagaaggaggtggaggaggtagagcaggaggaggaggaagagcaggaggaggagaaggtggagcagcaaaaggggggtga

SEQ ID NO: 54278 - DNA, 517 bp, Heterodera glycines
atgatgaatgaacctgaatggaccacggcagttgcccgttttggcatcgatggcaccggtgccggcggtatgatgccaactgcgatgggagcgcccaatttacggaatggttgcggaccgcagccgcttccgcgccgcttgttcagtccgtcgaggaaagccagtgccacataccaccaccagcatcaccacaatcaattgatggcattggcaccaccggcatcggcacagctaccagccgccgctgctgctactgctgccatctgtcccattgggggcgagtcgagtgccgccgacacctcccattacaccacgtcaaactcgtcatccagcggtgcacagtccgctgttgactgcaagcgaacccggggcggttgcggtgggactgctgctaccgcgactacggtcggctgtcctactgtaattgaccggctggcacccgcgaacggtgcatcttctgctggtgctgctgctgcacagcaaccacctgccgtgccgccaccatccgttaacacaa

SEQ ID NO: 54279 - DNA, 1272 bp, Heterodera glycines
atggtctacacaactcattacacatttgttgccttcaacaactgtgtgccaaagtgagtgaaatgccggaaaaggttttgtccggtttagtgtttcaatttatcccgaatcccaaaaaattttgttcatgaggtcgtaatttcaatcaacaattgatcaacccatcctctacaggattttacaggatcctgccctggatattgtatctggaaaatttttgtgtccgggattcaaaattctcgggcgcttgtttcgacggcacttttctttccccgccgattggcacttctatttactcccaactcacccagaaattggtcctatggttggtgcgtatttctgatctctcatgcccatctgtccctggttggccactcatcctccatttggctgtccgtcatgttggcactgatccgctacattacgcttcgtcgccggggcaaagctggcggtgtacaggtgcgtgccgtctttggttgtgactgatatttttgcatatttgacattctgatcaatagtagattgatcatccgtttgcctccctctctctaaatctatttctctgcctcttctctctccgtctctgtgtctgtctccctctctcattttatttctctgactcttttctctacatctcttttctttgtctctgtctctctctcgctctctcttctgtttctctctctctcactctctctcttttctctctccctctctctcatcggttctcacttactcagaccactgatgaatgcggcaatcaccattcagatcggtgttcaacactcgtacattgcgatcgcttcagtcgtcattttcgtctcgctgatgaatgggcccaactttttgacctataaaatttcggaacaaacgctggacatgacctgtggcgatttggtggttgatcagtacaggtttgccaaatgatcacccaaaaaatgacccaaaagatcatatacattaaggaatcacacggcctatgtgcccggcgtggccgatgttgcacttgaggtgggcgaggaattggatgggaaaatatggttaatcagagcagttgacactgatcagatcgacaggaacagaaatgttaagatgcttcgaaaaagcactagatcccgaatgattgggagggatcaaaagatatactaattgaacagtttaccggaaaaattctgaacagcatcagctataaaccaagctgatgggagcggaatgaattagactgatttgaatatgattagacgaagggagattggaagaggctggggataa

SEQ ID NO: 54280 - DNA, 726 bp, Heterodera glycines
atgtattgcttacaatggctgatgcctgttcttctgataccaaagcagattgttcatcccacttttctttttgaccaggctatgttcctctggttctacattatcggattcgtacttgagcggaggttcattttcaattttaattcataaaaatttccgctggaatttcacccattttggaaagtcttattaggtgttgttaaaatcagaggttccaattttaacataagtttccacatttgaagctgctgaaacgatttttttttattgttaaggccctgctatatttgtctcctcctattcgctttgactgttttcgcaatttgctacagtgacgaggaacgctgtgtgctgtggccaatttgtgagacggtcttaaatggcgaaatgtgcagaactgcatatgaaagggatcagcgatgaatgaccttaaatgaataaccattcccaaatatttttagtccgattggcgatttttttgatttcataaatgggaaaccaaatgcctagagatcgacattttgaaaaaagcctggacctggatttccatgttggacctggatccaggcctggacctggattttttgaactcattttaaaatcaaaaaagggtgaaaaatcaattgcttataacctctaaaatatctaattataaatataatgtgtttttaaattatttaatctggttttaaaacttggaaaaacatcgggcacttgaaaaataaa

SEQ ID NO: 54281 - DNA, 1870 bp, Heterodera glycines
atggaagacccaacaacgccaatttcatgccaaaatgcgacaaaatttaacagcgaagtttcaaccacttaccgtaatacgaatcagccattttcgattgtgtacggtttcggattttcagccggaacaattggccaagatgtggtaaaggtgtgtttaaatggaaaaaataacaaattacttttaaattttcaaatttaattaaattttgtaactggaattttttttaggtatttttgggtttcaagttctaagtttgtgagatattgtgcgaaaaattaatgagcatatgtaggggggattggcgagtgattggtttccccatggcaaattacccaaaatccctaaaattatattctaataataaaattcaaatttctcagcttggcttggcctccgattcatctgcgttcaccttggccaacatttattttggccaaactgttcagaaggacactcaacaaacgggtttcagtggcatttttggcctaagttacagcgcttcgggcaataatgttcctccggtgttggtccaagcccacagaaagggtgcgctcaaaatgccattgtattcaatttatttggccactgaagggaatgtgcattggaagccagggggaggtgaacaatgttaattaattaattataatataaattaataacgttaaatgaattattattaccaaaaaaattaatttgcctatttataatatatctaatcattccatattataagtgttattagtaatttaaaaatagtttataaaaagatcgcacaattgcaaatttaattttgcaagaaaagttttcacattgggcgatgcggacaaaaaacactgtggtgaaattgtcaattggattgacattattccaaacaactacggacattggaagttcgaaatcgatgtgattctttaagcaaatttttaattgaaattcaatgaaattaattacccaattaaggaaattaaattggacagcaatgttataattaatgggggccaaagtgcagcaattgtcgacaccggaacttcacttttgcttggcccacgggaggaggtcaccaaaatttataaccattacgacgcaaatttgtctgaccactcaattccgtgtgatcagaatgttggcccgatcagttttctgatcaatggacataaatacgaagtgacaaaggtgggaaatttgacagaatttgttaattaataattaaaaaggagacaaaaataatttataaagtgttttatttaaagcaagattttacagaacataatataaattaattcaaaagttatttatattgagtcagttctcagcctcggtaaattctaacacttcctgacatttcggcgaccttaaataatccaatcccgtgatatgtccaacccaaaagttaatgatttctctttttttttttttgctttttcccaacctcagaatttaagccccccccccctcctccccgtattgatccggaaaaagtctgagtgggggaaccttgacacaacttttttttcgtttcggctggtatacgattcataaatatacgccaaaacctggctataaatttgttgaaaatttaatttcactaaaattttaattcattatttaatattttttaattttttaaattcttttaggaaactctcatccttaagcgagggaaagacaacaataaatgtatttttgctctttccgactttgggactgcaacgaatttgtgggttttaggtgacccattttgtcggaaattttgccaagtaaataaataattaacaaaataaataaaataatttcgtcttttttagatccatgacatcgaaaagctgcgagttgcgtttcctgaagcaaaaaagaagcattaaataaa

SEQ ID NO: 54282 - DNA, 127 bp, Heterodera glycines
atgcaacggtgtttgacttcaaagatattgaatatgttatacaaatatcaattggtaaattcattgatttaacaaaaacatatataaaaacgcataatttcagtctttggcatttttgcatttgtag

SEQ ID NO: 54283 - DNA, 1360 bp, Heterodera glycines
atgtcatcatccatcgcttcgccagatacatttttgcgttcagaaactgatcaaagtaatggaaaaattttaaaaaaattacgaaaaaagaaaataattattaaaaataaaataaattcaaaatctaacttttatcagcaccagcagcatcagcagcagaagaagtgggcaaatacgaagtgttcagttggcacggaaatttgagtgatcaattgtcagctgaactgttcgtcactgatcagcagctgctgaaggtgggccatttttgaatggacaaatgatcaaaccgcggcgggaggggaggggaggccaaaaacagagaaagatttatggaaaatttagttcaaaatttccattcgtttttaaaggttttccaatgatataaaattaaaaggagaaagggccgacctattcctcgaacaatttgatggcattttgccaaaaccattcaattatgaaatgaacacaaattacaaattatttattgggctgtaattatttgttatatttaaggaatgccgagaaaaacttgcgaagtccgaattgaaggaaacgaaattgctgtggaataacggtgaactgaatgctgaaaatgtgagcaaaataaaaattaaatttcagaggacgaagtggctaaaacagagaaaatttcacttttttaaatttagagggctctcaaagcagagttggaaaagcagaaactgatgacggaacacattgaattgaaggcaaaagtcttcaatatggagcaggaaaagcagcaatttgagaaaaaatacggtagggaaaattttaaaaataattataaatttccagtaccgtaccccgagccttactgttaaaataagcatttcaaaaataattccttaaaaattcatattgtagtttctgtggatgtgttcaattcattggcggaacgcatcaaacaattggaaaatcagcagcaggagaagagagaggaggacagaaatggtaaaattgaaaaaacggaccgtaaatttcaaaatttcttctaaattaacattcagctgaccgtttaccaaaatgcaattaaatttcagtttctgttggccaattgttggagaaatttttggcaggggaaaagcagcaaaaacagcagaaaaaggacaacgctcagcagagattggatggaaaatgttctgtggtggacaaaaacaatgtcgcgggtgggcacaaaaataattgaaaatgtttaaacaaactcactaattaagcggttaataaaacaatatttaaatttcatttattttgagaaattaagaaacaaggattagatccatttgagttgttgtatgctgttaaaagatattatagtaaaaaaaatttgtaaaaaaataaa

SEQ ID NO: 54284 - DNA, 148 bp, Heterodera glycines
ttttaatagttaaccaatttgatgtacattctgatttggacatttttcagaaatggctaacccaattgcaaccaaaaaacaaaaagtaaaattgtcttacgaaggccacctttacaccttcgctaaaatgagttctgatgggatgaca

SEQ ID NO: 54285 - DNA, 817 bp, Heterodera glycines
atggccacttcgttgtttgtcaagcgaatgatggctaactcgtgctgttttggccttttgctgctctacgtgatgttcggtgggcttctgctgctgcgttttgagcgtggccaatcggagcgggcgaaagacgaattaatacggcgcaaaacggaatgcattcggcactttttgcgctaccaaaggcacttttttaataaaattaaattagcatttgcaatttttattgcaataaatattgtcttaaagtcaaagaagctgctgggcagtttcttaaattagccacgggatataaaaaatagaaaaagaaataattaaattggcttaaatttcagcgatggcattttcaatggccaagacagaagtaacgaatcagcagcaaatgcgccgactctcatctcagcagcggaacgtatcactgagcattgtctgttcggaatcgtcgacccggcggagggccggcggcgccaaacatggaacttccgaaatgccatcctctacggctttggcattctgacaacactcggtgagtgcgaaactggcgaatctgcggttaacacggcgaattgttcgtaattaaatttaaaaaaaaaaacaaaaattaaattgaatttgatttttaaaatatccttcagtggataaatgtagaatatgagaatgccaaaacttatcggtcatcaagtaaattagataaaaatggccttattaagagagaatttgtgccaaaggagggaggcacaatttgagataaaattaattcaaatattaattattctccttaaaaatattggccatttatttgctcgacagacaaaaa

SEQ ID NO: 54286 - DNA, 1208 bp, Heterodera glycines
atgggttggtaccccaacatggcctggcggctttggctccgttcgtggcgcaaaattgggacgccatgccaccacaaccgcaacaacaaatggcaatggcgagcgtttgcgcagccgttcctgccgccgatgggaatgccgccgccgatgggatttcccccgccggttccgttcgtccccctgttcgccaatccgccgctaccaatgccgtacccaccaccaccgattctgcaggtacttaagtcattcgcaaaatgctaaaatttcagaattacagaaaaaaaggaatttttctgggggggggggggggaatatgcatttcttgtaaataaaaaacttaaattttttcagcaatttagagacaaatggggttctttttgggcaaataatacttttttcaaatatttttaagccgattccaattcctccggctcgtccgctgtatggggctttcaacgcaccacaaatgagaccgccaccgttgatcaacatgccgtttgctccggtgagtttatatttttacgaacctaaattttgatataaaacattattactgtgtttattgtgaacaatcatttcgtgaaaaaataaaacattccgttacctgcaaatacaaaggaaaaacatatttgcggtaaaaaataaataaagaaatttactaatttaggttcgaaattttgtaatatatgtaaaacaaaacattcaaaatcagagggttgttatattaagaagattatcattccgaaaaatctgccacgttatcgtatcataagctacgacacagagtgttcagtatgtaaaataataaacaaaaaattatcttaacaaatttagacggataatttaatagaaaatgggaaaaatgaggggatttttgaacataaagtcgtttttttatcggctcgtattacatgttcggattgcgatggggaaaacaaggactgtgatatttgcgggccaaagggaattagacaccacacatggtgtacggttgacaactgtgaacccgtcttcgagtttttaaaatgggtgctatcgtttaaacattttgaaaccatttgttatgctcatttcgccggtaaaatcaaaaaattaaaaatttttataataaaattttagggcgttacgatgcgcactttattttgcacgcattaaccgaaatgggatatatacctgaaataattatttcagatctaaaaatttatcaa

SEQ ID NO: 54287 - DNA, 709 bp, Heterodera glycines
atgatgatgaaaagggaaaaagtgaagcttaataaaagttatgtattttgtaaaataaatttattaatttttaaaaatattttaaacttccaaaaccaacttcgataccaaaacacccaaagcgcacaaaatttcacgacacggatgacgaagaagcattgggggtggacccaagaaaaggatcatatttatatggtaaaaattcaattaatatttaaatatttaagaaattggtttagaccaatgtttagacaattgaaaattgggttgtaaaaatttaaatttaaaatatttttaagctaaccgtggcaaattacgaaaacgcaaacgcccattagaaggagaagcattcacagagagagaacagagaaagtgggaccaattccatgagagattgtcattggacaggaaaatagcacgggaagagagaaaaagacggcgaaatgaacggcgacaggggggaataaaagaaatgagcgaaggtgaaatagaatggggcagagaagacatagactgggaagggatggatagagagagcataaacatggaaatggcaaaagatgaaaacagacggagaaatagcgagaaggagcgaaactatcacaatggcagagaaaaagagaggtggaatgagaaaaggaaaagccacagccgagaaaagcagagcaatgatgagaagaaaagacgaagaggcagaaaaagacattga

SEQ ID NO: 54288 - DNA, 94 bp, Heterodera glycines
aattaccgtatatgctctaattatagcccggtctctattaatcccgcagtctccaattatcccccagtctacgaggtgttttgaaagataatcc

SEQ ID NO: 54289 - DNA, 1721 bp, Heterodera glycines
atggcatttctttcgccacgtttcaacgcgttggtcgacaaacatttcgatggccaaagtgatttgacaatttggaatgaaatagcaattaaaaagatcggaacacaagcaaaattgtctgtagaggagagcaatgccgaatttccactgcccgaccatccgatgcacaacaaaattcgctttgctaaactttggattgagtacctaattcaaaatcaaacattatttgacaataaaagcattcaattttcagttacattgaccattccgtcgtcacatttcttcgttccaaccaacaaatttttgacaaaggcaccaacttggatttggatttggatgttgaggccaaagatgtccaaccaatttgggatgttttttctcgtgaaatttggcccatttttgcgacaaacatccgccatatgtcattttccgatactgatcatctggacaattttcgtcgccgcacttcgccaacaattcttaccgaactcaaccaattgatttcaatctattccgatgctttgttgcccgatgcaattgctgatgatggaccaaatgcaactgctggccaagcgctgtccaaatggttgcacactccgacaaaagatggacagccaaagcaattgatttgctgtgataatttagaaccgccaaatatcaaatggattaccaatttcaaagatgtattgtggcaattttccaataaaattattgcaattaattgccattgtcctttcatttcccattttataggcatttctccgtgccaaaacttcttctgccagctacatcattcggtttgaggattttgaaccaacagaaaatgggtcatttgaattggtgaatgaacggaccaacgaaatgctgactttggagaaagaaaaaaacgatgatgaaaacatggagaaagacgacgaagatgaagaatatgctactgaggattggctgttgaagcgatgccaaattgggaagacaattcaatgggaggacgaaaattttgaaaatttgaacagtgtcagctttacgctttgtggaacttcctgcgttgggtgagtggcaacagcttttgtttttcttgatgccgtcacatttaaattgcccttaatttaggccattgtctgcaccaaaagcgagccaaatggacgcaaaaagtcagctgaaaatgaatcccgggcccagtggacagcggaagaaaaagtgagagaattatttggaaatgacaatgattgatcattaggaatggaaattctcggataattgcccattatatttgttgatttcttcgtttgtatacatttaatttgtttgattttttgattcactaaattagggttcgaaccccgtgggcggggatgggttttcgcgggggtttgctttgaattagcagcaaaaaatctcacaaaaaattaatttttatgaatgatgtgtttggctccaccttcctttagtcgatgtatcgcctcaattcaattcattttggcataaaaaatgaccaaatttagttgttttaactaatttctaaagaaaaaatagggttttttgggggccggcggtgccgataggcgccgacggtggaaaattttaagaatatattaattttgctaaaaattagccaaattttcagaaatttccctattttagatgaaaataaagcactaccccaaataagaacatttcttagaaattagaaggtatagaaaccctgtattaatcagaaaaaa

SEQ ID NO: 54290 - DNA, 681 bp, Heterodera glycines
atgaaagaaaaagggagaaaagggaaaagtcatcaaaatgggcagagccaacggaagaacgaatgcgaaacattcagaaaaaatgtgccgattttttatgagtttttgtttaggatttatgtcgaaggtcagaaagctattttaattttaaaaagataaacccaaaattccttttacagctgttgacccaacagtgacccaaaaaaggcccgcggaaatgccgaaatttcaactcggcacgcaaaatggcacaactctaatcgaagtattggacaatctgtgtgacattggaacattatgttttggcaaaacgaacgtcgtggaaaaagaccaaaacaaattggacgaattgtccaacaaatcaaagaagccgaagaaatgggacaaattaaaaaatggaaaaacaattggacaaaaaaaggcggaaaaggtcaaacaaaaggaaattcaaaagaaatttgacgaaatgatgagggaaaaggcagcggaagcgatggaaacgataaattcggcgggggaaggcattggccagaagaaaacacttttgcgatggctatggccttaaaaggggtgccgagctggttttttgttagcagtacatatgcttttggtatgaatttttgttctgttttatgtttatgggaatattaaaattttattttttgattaaatgcgaataaa

SEQ ID NO: 54291 - DNA, 648 bp, Heterodera glycines
  unsure (1)..(648): unsure at all n locations
ataaataagggcaatntcagaataaatgtaaaaaaattgctacaaatttctggaaaaaaaatttttctcattcagtacaaaagtctatgattcttaagttatagctaataaaaacatataattatttgttaacataaacaaatagcgatttcaaaaaattaataattattctgttctgagatttatttgtttgtttttcatgaaaaattttcaaatttatgtaaagcaacaaatttatttcgatatggcgccaaaaacgaataaaacgataatttaaaattgtataagtttaaaagcaaattattttaccgatgaatttaatttattcgcatttaatcaaaaaataaaattttaatattcccataaacataaaacagaacaaaaattcataccaaaagcatatgtactgctaacaaaaaaccagctcggcaccccttttaaggccatagccatcgcaaaagtgttttcttctggccaatgccttcccccgccgaatttatcgtttccatcgcttccgctgccttttccctcatcatttcgtcaaatttcttttgaatttccttttgtttgaccttttccgcctttttttgtccaattgtttttccattttttaatttgtcccatttcttcggcttctttgatttgttg

SEQ ID NO: 54292 - DNA, 1044 bp, Heterodera glycines
atgagtgagcatgaaattttgtcaaaatgggatttccaagtcccaaattgggcacagagtaaaggttagtcaacacgaaaactcttcatccattaaagaattttatttttcattctctcatctttaaacggactcattaattggatttattttaatttatttccatcaatgacttttcatatttttgcctttctccttaatttccatttttttaacttatttattttcaccgtcgcccatgctttttacaatatataattgtcatgtatttgcgctaattgcttcaaattgtcctccacgttacagcgtaaaagtgtctataccacaccctaattgccttaatgtctataccacaccctaattgccttaatcaccactaaccttttgtatacatatcatattaactaacacacaccgatcgtcacacgcattacctaccgtacatcgccgcctctacagtttgacacacacattcattgttttgcatcatattattgtgtactgtagtcgccgctcacacgctttgcgcgaaatgtgctgtggtgtgccgttgtgatgtatcgaaaccctttacaaaacagcagcagctccagcggtggcaacaacagaaaacagaacagcagcagcactgagcacggcgattggtccaggaatttgtatgtgttcgtgtccaatcattgcccaatcatcgacccctaattaatgttcactcatgccgtgggaaaatgaatttattattttttctattagcatttttgctttttgccgtatttgtccataccacgagacaaacagtgagactttttttgtcgttttgttttttgccatttgccatattcgtctgtgccatggggcgcaatcaatgggactatttggcattttgtttttgttttttttgccatatattttgccctcccctccctctgacattaaattttgttttcttctgagttgttatggggcttataatcgctgcgtaacttttcattagttcttttaaattaaacaaaaatatttttacacaaaagcaaatgccattaaaaa

SEQ ID NO: 54293 - DNA, 581 bp, Heterodera glycines
atgttggtttttttctccatttttctctgttttttctcctcttatcattttggacaagtgccgtcgttgtcgaaaatttgcctttcaaggagcacccgacgaaccaatccgtcattattggtacgttttttatttaactatatattaggaatcccattaactccatttttatggacaaaatcttatatttttcatgcccatttgtcccaggctctgatctgttactgcgctgctcaattgcccaccacggcgaaaattttaagttccatgtgcagtggaggacaaaccgaggcattattctgaacaaaaaacagtactccaatcatattcccggatattcaggcagatacaggcaagtttattgtgattatggaaactgtttttgttaatgatggtggtatcacacttttttctaaaaaagtgtttttatgtgtattcgaagtcgccaagcagaaataaattaatcctcaaattcgagtccaggattcggaatcccatctgcactattatattaaatttttgaatttgcgtataatttaaacagagcaaaaaatgagcgtgaaaatggtctaattaataaa

SEQ ID NO: 54294 - DNA, 2073 bp, Heterodera glycines
atgtgctcaattggtgatccggcacaccagccagagactaattcaatgtcgaatatattagctttactaacatattgtgctgaattcacatgttatgcattgatttggctgatcaagcatttccgtaatggacaacaccacggacagtcatttgcgggttgatgaaattaattacccctaatgaaattttaattgctttgttaattggctcatttagaatcggaaatgaacaaacgtttaatgatatcgctgagtgttattatgtcaaccagtctcatctgctttattggcgtaataatattaatttatattgtaaaatttttggttaaatatttttgctaataaaaacccttaatttaataattatcagaattcttctttgcgaaaataaaaaaattatttgtatttatctccaaaatacaaatgattgaataatataatcgagttacattcttttatatgaattttggattttttgtttgttggttttatttctggtactttgctcactattacattcaatgttactgtatattacagttcccatttaagacttctgtgttctttaatggcataatgccattgctcagcttaaacatttttacaattgaatacattgtttggcccatttgcaatggtctttttttgatggcatattccagctgtactcctgtgcttttcctgtgcaggtggggtttataattaattaattcccaatttaaaaaataattaaattaattaattttttcatattttagcactgaataccgcaaagcatttcgcaaatatgtttgcagaacagaacatggattaactgttgttgtgccattgcataatatgcctgcttaaaaactttgtttttttttcattttgcataattaattcggactcgatgacgtcatttcatttaatttttataatcaatgatcaacaggatttgataaaatatatttttcgcgaaatatggccagaaaatatggactaaaaaatataattgaaaaaatatagacattttttcccaaattagaggtgatatttcttcctttcagtattccagctgtttttgtcctaatggccaataaagctgaagcaacttattcccgagtccttgaggtgcacaattgtttttgctctattgacaaattcagcattctgctattttttataggttttgaatgcacgtataggagttggaccaacttctgttatgttagacttcgaaatgggttactattaatttttaacgtatatttattaaacatttagccgccaaaaatgcatatacaactatttttggagaaaacctacaaattcgtttttgcttgttccacttaggacaagaaattaatcgtagattgaagaccgggaaacttagccactattacacaacaaataatgaatacaaaatcttggttcggagtttggctgcgctctcttttctggaggaaattcgagttgtgccagctttttacttgcttcgacaacgagcgaatgagctcggcatacaagttgttccaaatgcaggacaaccagtcgcaatattcgattactttggacggtattgttaaaataaattggattgtttattcattgactcttctgtagtcactatgtggctggtcacgatggaagacctccactgtttcctgttcatacctggaatcaccatgatagtgttcttcaggacttggggcgcacaaataacgcccaagaagggttccatttggctttaagaatgcaatttaacagtgtgcatccgccattatcgaagtgaaaatcgcgtttaatcagcttaatattttaattatcagagttatcactgttctgaagaaagaagagcgaatcgcagccgataagctgcggcagtatgagttggacccaactcaagggataagaattcgagaacggaagaaaacataccgtgaaaatgatttggctatcagaaatttggttgaaggctttgatgccattgagaacccaaacgaagatgagattcttgctcatctcagatcgttgcaatacagacttatgcgcaatgattttgagaattgggacgacccaaatggtgattaa

SEQ ID NO: 54295 - DNA, 402 bp, Heterodera glycines
atgtccgatctctatctaaaactcgcctctttttcgtctccgtccccaccaaaaagtgcacatccgcataatcaccagtgctcagaatccgtggtgcgacttttggggatttgtaacttggggacccgacatttggggacccgacttttggggatcccgacatttggggacccgactttcccgacatttggggacccgacttttggggatcccgacatttggggacccgacatttggggacccgacttttggggatcccgacatttggggacccgacatttggggaccgaacgacatttgagcaaaagacacttaagaaaaccacggacatttggcaacccgacatttagggacccgacatttggggatttcaataaaacaaaaaaaaatttaaaaatttaa

SEQ ID NO: 54296 - DNA, 314 bp, Heterodera glycines
atggcaattgcgtctgattataaaaagttgcatgcgaagtcgactaaatgccaaaagattaagtgtgtccaaattttgtaaacgcatttaattgtccgttttaggctgtcaaaaatggaacagaaattattcggtcagaagccagtggaaatcatcggaaaaacccaacacaatggcattgtttggtatattgtacagttggagaagaaaaacgccattctgctgaaccatgactttgtgatcaagaaatatccacaattgttgctgaaaagttacggcttgtaatttataagttatcctatataggtaataaa

SEQ ID NO: 54297 - DNA, 599 bp, Heterodera glycines
atggtcggacagccgagaaaagagcgaaaacaaattatcgaacaattgaagaacaacagcgattttgacgaacagttgggcaaagtgaaagtgcggcggaagaaaagtgaagggcaaaatgaagacaaagaggaggaagtaaagccaaaaaaggaggaggaagaagacgaagttggaagacggaaaacgaaagacggcggaaggggaggacggggacaaacgtcgtcatcatctgatgaggaggacggagaggaaacggatgacaacgaactcaaggaggaggagtcgtcagaaggggacggaggagagggggacagtccgccgacagcgaagaggaggaagagggaattggtgagttcaatttgtattactatttaaaagagtacgcccttaggttggagggggagggcggtgtttgggtatgaccttctgatttagtcccaaattgtaaatattccttgcaaaatttgattttcaacattaagctgcatgtgaggaatgtcgaatgttcgtcgtccgatgaaaacgacaccgaagaggacagtgacacggacattgaaatcaaagaggaagaagaagactcggaagacggggaatga

SEQ ID NO: 54298 - DNA, 266 bp, Heterodera glycines
cgtccgttgccatcaaaagtctgtcgcttcttttctggcacaaatcttccgccaatttgcttcttcgtgcacttgccactgtttctggtttcgcttgggctctctacggtatcttttcccccttaatttaccatttaatttatcatttttcagcttcaactttgtttttggccggctccgaaccaccgaaccgacggtttctgttctattatccgcttgtgctgttttactttgtcttttcttggcttgtcatttcttttgcgtaa

SEQ ID NO: 54299 - DNA, 186 bp, Heterodera glycines
ttggaaaaggagatccaggcgaaagaagccgcttctaaaagggacaatgtgacggacacaaaagtgcagcccgacttaaaagggaacattggcagcggaacttcggcacaaacaaaacggaagagcaatgtggtgggattggaggaggacttcgacacgttggacgagccaatttgggaaacaatt

SEQ ID NO: 54300 - DNA, 783 bp, Heterodera glycines
ggaccaatcggaatcacagttccacgacatggcacttattaaggcaaagtgttggcggacaattttaaaattgtcaacaaatattttttatttgaatcaagttcagctttctcgcccaatggcgcgggttcagccaatttgtattcactgtgccaaagttgataggtttcgcaatggcactgcttatgtcatgggctgggggcaggagacaagcgaagcttttttcattaatatttaaaattgggggatggaaaaaggttggggttcggagaaggtgtgcacgagtaagccaaaaaaaattgccggtatgcgaaactcaggcggcgtcaaagcgtgcacaggtgaacaaggggtgcgccggcgcaccccccccccccccctcgttcgtcgtaaggggcggctgtaaaggagggggtcgtaacgaatggggaaaatttcaaaatttgaacaatttccttagcccggcggcgcctatcgacaccgccggaccgccccacccctttcccaaaaagttttttgaaaaaaggcaccgcaaaaaaagatcgtcgtcggagaaaattgggcgccttcgtacacgaaaaattggtcctggcgcaaaattctaaaaattttattattatcagatttaatccaaaatatggcccaatttttggattgaatcaaattaaaaatatatggataattttcgtctgctgtaattaaagtttattgtgtcaatgagtttagatgattgtgtgggcttaacgaggcctgccaaaatgttaaatggtcgcccagtgaaaa

SEQ ID NO: 54301 - DNA, 381 bp, Heterodera glycines
atgatacagggattcttaggtcttaacgatgtcaaaagtaaaaactgattacgtattcatgatcagcggccgaaataacccctaaagacatattttttgaagatttttggtgaaaaaatttttcaactcaaaaatcctatgctcacccctttggtccataatcccaaaatcggttttatttttgtaacaattcgtaagaaagtgataaaaatgtaaaataaaatttatattataaagaaaaaaattgcggatttttgtagtattttaattttcaaaaatttcttttcagaagggggttatgaatttttttctgaaaaatcgaaaattttcagaaattctggaataacttgttttctttttaagatagaaatcccaaataaa

SEQ ID NO: 54302 - DNA, 521 bp, Heterodera glycines
atggtgattagaagaggtacaaaagtgattagaacaggtgcaaaagtgattagaagaggtgcaacagtgattagaagaggtacaacagagattagaagaggtacaacagagattagaagaggtacaaactgtgattaggagaggtacaatggtgattagaagaggtacaaaagtgattagaacaggtgaaaaagtgattagaagaggtacaactgtgattgattagaagagctacaactgtgattagaagaggtgtaacagtgattagaagaggtacaacagtgattagaagaggtacaacagagataagaagaggttcaacatggtttaaaattatataaataaggaaaagttttttattaaagaataaaaatcgaatgcattgaatatttaagaaatttgaaatgatattattttttacagataaaaaataataatgaaattatttattaaaaaaaatttaaaatttacaaccaatcttcaaattaattaaaagcattgaaaaataactcaaaaataaa

SEQ ID NO: 54303 - DNA, 246 bp, Heterodera glycines
atgtggggaccacctgcttttgcgctgaacgggcgaacgattggggagagaaaggggaggacggacagagttttggtcattggaatattcaaaaggaaacgaaattcaatcagtaaaaaaacgaacgaagaaaaggacggaaaagccattgcaaccgaagcaaaacaaagcattgaattggatgtgcttacagccatttattcacaaaagagatcggatagaaataaggaaataaaatcaaaggca

SEQ ID NO: 54304 - DNA, 201 bp, Heterodera glycines
  unsure (1)..(201): unsure at all n locations
cggttgagtttcgagcacgtgctgaaacaccattggatcatcgcncattgcaataagaacaacgacggccgactcgtccaccgcgtccagcgaatgttggtgattggagaagcgaacaaatgggggacagcactcactgcctttgattttatttccttatttctatccgatctcttttgtgaataaatggctgtaagcaca

SEQ ID NO: 54305 - DNA, 142 bp, Heterodera glycines
atgaagcgagccaagggtttggacataatcccggacgactttgtgaacattgatgggctgcccgtggacatgcgctacgtgcacccgcccggacgccctcacggtgctcagatgcgcatttggagtccgcatcaatcgccag

SEQ ID NO: 54306 - DNA, 285 bp, Heterodera glycines
atgaaagaggaacagaaagtggaagaggaagacgaacataaagtggatgagaaagtggaagaggaacagaaagtggaagaggaacagaaaggggaacaggaagaggaacagaaagaggaagtggaagaggaacagaaagtggaagagaaacagaacgtggaagagaaagtggaagaggaacagaaagtggaagaggagcagaaagtggaagaggaacagaaagcggaagagaaagtggaagagaaacagaaagtggaagaggagcagaaagtgaagagaaagtga

SEQ ID NO: 54307 - DNA, 288 bp, Heterodera glycines
atgcccaaagagaagaaattggaagtacaaaattggagacaatttaggacacaaaacggaaaaaagaaattaaagggaggtgagctgcgaatgccgacaggggagagagaatggtgcggaaagcgtgaattttgcaaggcttgtattacagtaatatttttaggtgatgggccaaatttcagaatattctccaaaatttaaaatttataaatacagtaaaaaatagtgggaggtgaaatccgtgtttgatgctgtactcaaattaataaccattacagcgataataaa

SEQ ID NO: 54308 - DNA, 168 bp, Heterodera glycines
atggaggattactgtttcgacgcaacggcagcagcagcggcggagcagtctcggcgtcaatcgggagcggcatcggaccttgtgcaaggagacggcctgtcaagcggcttcctggacgcgatcatcacgaaggtcaaccgctcgcctcctcatcgcttcacggatgag

SEQ ID NO: 54309 - DNA, 1378 bp, Heterodera glycines
  unsure (1)..(1378): unsure at all n locations
atgcggaagatcgtctacttcaaactgttgcaaattgtgctcagtttggccttcgtgtggcaacttctttcccttcaccaattctgcggcacttttgtctctccaaaggtgttgcttttgctgttgacaatttatttgaatttaatttattgttccatgcttttcaggccttcctccatgacatctcaggtggccattgcaaacgcttcacgttcatcggaaaggactcaaagacgggcgaattcggcgcagtgttcgacgagcgcaagtggcacaaccaactgttcatgagcagcaccaatggccaaccaatcgaggaacagcaactgaaattcatggacgaattggccgagaaattgccccccgctggacgccactgtattccgataaccgtaagcaaaagctaatcacaacaaatacatgcaaaaataatcccattttgttctttcagctctcgccttttttctggactgagaaagacagaaatgtgctcgactacgttatggaccttttttccggccaactgctcatcgcaatgtgctcgcttctcacccttggcgtcggcttgttcagaatggcacgctctgcggcagaatatgaagtgagttcgacggatgggtggacacagcacatcagcccgacaaaaacgcgaccaaattgcttttcagttgaaatccgagcgattttttggtcaaattgtgatcatttttgcttttgcgcgatcaaattgcttttcagttgaaatttgtgatcagtttagcttttgcgcgaccaaattgcttttcagttgtaattcgatggattttttgatcaaattgtgatcatttttgttttgcgcgatcaaattgcttttcagttgaaatttgtgatcagttttgcttttgcgcgaccaaattacttttcagttgtaattcgatggattttttggtcaaattgtgatcatttttgcttttgcgcgatcaaattgcttttcagttgaaatttgtgatcagtttagcttttgcgcgaccaaattacttttcagttgtaattcgatggattttttgatcaaattgtgatcatttttgttttgcgcgatcaaattgcttttcagttgaaatttgtgatcagttttgcttttgcgcgaccaaattacttttcagttgtaattcgatggattttttgatcaaattgtgatcatttttgttttgcgcgatcaaattgcttttcagttgaaatttgtgatcagtttagcttttgcgcgaccaaattacttttcagttgtaattcgatggattttttgatcaaattgtgatcatttttgttttgcgcgatcaaattgcttttcagttgaaatttgtgatcagttttgcttttgcgcgaccaanattacttttca

SEQ ID NO: 54310 - DNA, 3432 bp, Heterodera glycines
atggtcgcgaacagaggcgaaatcgctacgcgagtgtttcgagcattgaccgaattgaacaaaacttcagtggccattttctcagaacaagtccgtaccattgaacaacaattggtgttataagacatttagttctttaggacaaacgttcgatccacgtttacaaggctgacgaggcgtatttagtcgggacgggtgggtgtcttgcctcaacctttcattacaaatcaaaaacctatttgcctttcagggcttccgcctgttgctgcttatctgaacatcgaacagattgtcgacacggccgttcgaaacgatgtggaggccattcacccgggctacgggtgtgtcagtggactgttatgatcatcggtccacactttgaatatttttagtttcctgtcggagcgtgccgatttcgcacaggcgtgtaaagacaacggcatcgttttcatcggtccaacgccggaagttatgcgcagaatgggagacaaagttcggaggagcgccttcaaaatatacttaccgccctttttaggtcgccgctcgtcaggcagccatcgaagcgggagttaatgtgagttattcaaaccgaatatttagtactttttcatcattattgccctgtttaaggtcgtccctggtacgccaggtccggtgacaactgttgcagaagtcaaacagtttgtgcaacagtacggatgcccggtcattgtaaaggcggcgtacggtggcggagggcgaggaatgcgcaaaatcgaaaaagaggaagaggtaagcaaatggaggaaccaacgccatttttggtcggcggaatggggagcgggtcactgtaataatttggcattttaaattatttactgtgaccgtctttcgaagatcattcgttttcacagattgaagatgcgttcaaccgcgccttttccgaagctttggccgcgttcggtgatggttcgctgtttgtcgagaagtacaacttcctttattcggctatggcaataacaaataagcatgtttgatgtttcagattcgtggaaagacctcggcatatcgaagtgcaaataattggggaccattacggaaatttggtgcatttgtacgagagggactgttctgtgcagcgacggcatcagaaggtcgttgaactggcaccggcacctgttttggatccggcaatacgtcagcgaatgttggacgatgctttgaaattgacacgccatgttgggtaccaaaacgttggtcagtgtagcgaatgaatctgatcacgaaatgattctgtaaaatcataaaaatttaaggaactgtcgagtttttgctggacactaaggggaatcattacttcatggaagtgaatgcacgtcttcaggtggagcacaccgtcacgggtgcgtttttcaattggaaaataatttaattacatttcattgaacgctttcagaagagatcaccggcgtagatttggtatatttactatttattacatattttcttttcgattatgttttacttttcgtttaggtccaatctcaaattcgcattgctgagggaaagtctctcgaggacatcaatcttcgtcaggactcgattcatgtcaatggggcggcaattcagtgccgtgttacgacggaggacccggcacgggggtttcagcctgacagtgggagggtgagtgactgatcgctgggtaaaaaagcaatattggttgctttgttcacaaacagatcgaagtgtttcgcagtggcgagggaatgggcattcgcttggacggtgcctcggccttcgccggctcagtcatttctccccattacgattctctgcttgttaaggttggcgacaatccgagagattgttttaattcatttttcgaaaggttatcgcacgggcaggagaccatcaccaggcttcggccaagctgatccgtgcattgaaagtgacccaacaactttttataatattagtttaaataatccatcctttggacaactttgattcaggagtttcgcattcggggcgtaaagacgaacattccgttcctcgttaatgtgctggaacagcccgcattccgcactggcgttgtggacacgtatttcatcgacgaacatcccgaactgttcagcttcaaaccgagtcaaaacagggcacagaagctgctgttttatttgggacagttgaaggtcaacggttctcttactccattggtcaccgaaatgaagccgaaaaatgtccaaccgactgtccctgtcgttccggcgggtaacggaaataaaatttctttgtccaatttcattttatttctctcattcaggtttgcatgatcaaccgcctgttggcattcgcgacattttggtgaaaaaaggacccgaagcatttgcgaaggctttgcgagcgaacaaagggtgcatgatcacggacacgaccttccgagatgcacaccaaaggtctgttcctaaatttgattttttcgacgcgagtgggtgcgagaaaatgaggtgcaagtccttgctgacttttcctttcctttagtctgttggccacccgcgtccgcacttacgacatggcgaaaattgctccgtttgtgtctcacaaatttgcgaatttgttctctatggaaatgtggggcggtatgaaccaatagcatttaactcacttaaatatttaattcgcttttcaggtgctacctttgacgtcgccatgcaatttctccacgaatgtccttgggagcggttggagttgctgcgcaagttgattcccaacattcctttccaaatgctttttcggggtgccaatgcggttggatactcgtcatacccggacaatgtgctcgacaagtgagttcatatattgctaggtggcttttaccctctgacatatatgcagattttgtgaattgtctgtcaagagcgggatggacgtgttcagagtgttcgattccctcaactacgtgccgaatatggtggttggcatggaggccgttgggaaggcgggaggggttgtcgaggctgccatttcgtacaccggcgatgtatccgacccgaacgcacaacgctacaatttggaatactatctgaacctggccaaacagcttgtgaatgcgaatgcgcacattctgtcgattaaagttcggatgggcagcaattttccaattgacacgttttcatttttgaggacatggccggtgtgctgaagcccgaagcggccaaacttctcatcactgcacttcgtgaccaacacccggatgttccgattcacgtgcacacacatgacacttctggtgcaggtgtggccagcatgatcgaatgtgcccgtgcgggtgcggacgcgatagacgcggctatcgactcgatgagcggaatgacttctcagccttcgatgggtgcaattgtggcttcgttgcagcggacaccgcactccaccggttctcaaatgcttatttga

SEQ ID NO: 54311 - DNA, 362 bp, Heterodera glycines
atggattcggacacggaggaagacctcgacacattgcaacgattcgacttttattatgaggttggacaggtccgtcctgtccttttaagcacaaatattgcaccaattcagcagacgctgaggtcaaacagagccttcgtttccgacctctcttccgaagaagacgacgaattggccaactttgtagtacattcagttgtgcgtttttaaaactgatgattgaatggacttttgaatgaatccgtcttcaggaatccgaagaggacgccaacgatcacgagtctttcttctcagaaatcaccagcggtctctactcaccgtcgccaatgcattcgcccgactcgcaatctgacgacaactga

SEQ ID NO: 54312 - DNA, 590 bp, Heterodera glycines
atgaacacggagattaaaccactgattgtgaaaatgtgcgaagaccctgagtttgacgttcgctatttcgctgaagaaacaaaaataggtaaataatagacaccgcattttttaaaaaagcaatttgccaattttcagaacttggaatggcagcttgatggtttagctgtttgaacctgagaaagttttgatggatggaatgcttctcattaaccgatcttaaatattttttagaatttaacaacaatcgtgtgtgtgtgtgaatcgaaatttcatttcggtctgtctgttttatgtattaaattctgtcgtttgagtattcgataatttccaattctgtccatttctatcgatgttaagaaattcgagattccaccgacaaaaaattctttttctgtttgatttcatctttttgattgctaaaaagtgctctgctttctcattaattgactgatcagaattgatgaattggcgcctattaaactaatcaagccaaattcttctccagtaaaaatggctaactcggccttatcaaaattcaattgttttgcacagactgcggaaggactgatttacgaaagggaaataaa

SEQ ID NO: 54313 - DNA, 236 bp, Heterodera glycines
atgcaaataaacgagcaaattaagccctccgatgacaatgtaattgctgcagcctcggaggaccaaaatgtgtatttgttcgatttgcgagggaatgagggcgacggattgtgcaccaaactgcgccaggaagggacagccttttgtgccgtttggaacccgcaaaaccataacatagtggcagtgtgcaacaaaaagacggggctgttggtgtacgacctgaggatgagcaacaa

SEQ ID NO: 54314 - DNA, 84 bp, Heterodera glycines
cttggttggatggatagagcacatatgggttcttaagaaaaatggttttattttctgccaaatgagcacgagtgccgagttatg

SEQ ID NO: 54315 - DNA, 936 bp, Heterodera glycines
atgattgcattaagaactgatattgaccaaaaagctagaattcttttcggattagcgattgatcaggctttccgatcagtccttgtgggttcattcattcattcacgaagacaaattttatgctatattacatgtaatgcaattaagaattatccaaaatttgcctataatgggttaagtaataactgctgatcagcgaatcaggtcgctgactggttaaaaatgcggaaaaatatttgtttaaatttgatcaaatgatcagtataatcagtcctcgaaaattgaatcatgaactgatcgcaactctggaataatatttgtccaggctaaatcatttgatcggtcctcaaaaattaaatgaatccaatcatacactgatcgtaatgcttggctgagcagcagatcaagctgactgtacaaatccgggaacaagatatacacacagatatctgatcaacagatctgtgcgcgatttattgcgctaccgaaaatgggttcaggcaataacgctgatcactgacagaatttccggaattaaatgcattcccgtttgatcagatcagagccgagcaacacaaagagagattattaatatgtgaattggtgaggggaagagaaatgaataatttcccaaaatgatccggaatgcttcgacgtatgatcagataaatttgtaatgatcaccgggtccgatcagtgtccgggcgcccgccgccgcgtccattcattcattaaattaattaattcattcactaattaatgcctcctcccgccgccccttcagggcatattccattcattaatttatttatggttgtgaaaatttctcaaatggctgattggattttggagatttggatttggggatttggatgggataaaagcaatttgtgctcaagacgtgaaattgtgcagcacagagattggttctgctga

SEQ ID NO: 54316 - DNA, 1304 bp, Heterodera glycines
  unsure (1)..(1304): unsure at all n locations
gtccctttttttgtcttttctgttttttgtccctcccattgccaaattgtccaccctttctcttttcgcttaggttggctnttgtcgtctccttcagttgtattatgttctgcgacttcacgtcgaggatgccagtcgaaaaatgtccgtgccaaaagcgccgccgtctcccgccgcttcgctggccgacgccggcagtgccgccctcgaaatggactttccgcttacaatcgctactgtaccctttcgtccagggcattcgcaactgtacagcgtgggatacggtagaaaaacaacaaaaaacacggctaaaattcaatttttcaagatttttgcgttgatcacgtggaaacgggcaaatacatttcgccagagtttcggcttggtcaagtttgggacggacgaacagaaggagagaaagactttgttgacgacgtggtgctgtacagacctgtgtacgtaaaagtgttggacagaacgccaaactcggcttcaggcaaacaaaaagaggtgtttaaggcattggaaatgccgcagaaattccgtccttctgactaattttaatttttagggccttcccccgcaaaatggtgccaatgccaaaaaagaaatgaacaataatctgctcctgtcgaattttccacacattgaaaatggcaattaaaaataacaaaaaaaaaataaaatttgatggggccgaagatggcattttgaaagtgcaaatgccatttagctggcatactgtagtcgtactgtggagggtactgtctttttgctttttctccgcttcttttggcgttgtctttaaatttccatcgatttattctttcaccactccaaagaataatttcttttatttgttcttatcaaaatcactcaatgcttcttttattattattattttgctaattttttttcgtctaaattaataaaaaaaaaagttcaaaaatcgctccgttcgattgttggcgatgtgttcgtccgttaacaaaaacaaaatgggccgttggggtgccacttcgtacattattagcaacatcgtcggctccggccttttcattacgcccacttccattctcaaccacacacaatcagtcgattggcattatgtcactgtgccataattttcgtttcaaatttgtaggttggcctttcgctcatagtttgggctctttctgccgcaattgccattttgggtgccttttgttacatcgaattgggcacaagcattcgtcggtcgggtggcgattttgcctatctgtgccacgtcaaatggttcaaaataaagataattaaagcactaa

SEQ ID NO: 54317 - DNA, 716 bp, Heterodera glycines
atgcctttcttctccccctcctccgccgtctttttgctgccctttcaatttcttttggttgtcctcggcgctgttttcgtcgtcctcagccaatgctgtggttgttcgaagaaggaaaaggccagttttcaacctccttccccacaacgagtaaaaggacgaaattctattcatttttagccaacttaattttatcacaattcggaaaatctgacttacattttcgcgttttcaattcaaaaaaaacaatcgtgataacaaaaaacaaattagccatatcaatgcaattaatcactttcaaaaaagatcacttttccagaacactggagcgccgccgccacaaccaccaacatttctttcaccagctccacaaattactgctgctggacctgggactgggcctcaattcgttccaagtgagtagtgtttgattaacagacaagtaataatgtgttccctttctcattttcagtgaatgaccctaaatatgagacgcttaactccttggatccgaacatttttttgaagagtgcgtcagcaaaaccgccacaaaaaccgccgcaggcaacgaatggaccgaaacccgtgccagtgccaggtaaaaaataattgtgaattcctttgacttagctaattgttttaccacctattcagcaaatgatcctaaatatgagacgctcaacgctttggatccgaacatttttgtgaagaaatag

SEQ ID NO: 54318 - DNA, 138 bp, Heterodera glycines
tgaacattttttccaattgcaaaatgaattgggcctggagaatgtcagcatttgcttggtggtgttcgccgacaattctaacaacacttggcgggtgcaggccatccccgtttcagacgtgagctcttttgacaacag

SEQ ID NO: 54319 - DNA, 1030 bp, Heterodera glycines
atgacgtcatcatgcaaagtaaaaagactccgccccttttcttgttggtcacgcccattggtttttgttttgctttgctaagaatacgactccgccttttttgcttttagtttcttttgtccagccccattttttttgctatttaatcacagtttttctacataaaaaaatcattcgtccatttaaaaaaattccatccacattcgttttttctgttcttcctgcaatgaattctcttaaacgctttcaactcccggagcaagggacacgacagcaagaggagttggattcagttgaaccgaaacacatcagcgatgtggtcaacttcaattcggccggcgttttttatgttttgggaaaagtgacaaatatgcagtaccgtgtttacaaagtccaaattaaattaattaattaaattattaatttttctgtttttaggcatgcccattccgttccaaggggctcatttgtcgccgaaaattgtccgatgataacatgtgtgaggcttgcggccaaaaagcgattgctcccatccacacggtgtttgttcgtcttctgctgcaggatgttgaacaagcagacattgctcaacgtgtcaccatgttttcgagtgttgctgaagagtttttgggaatgaaagctgctgaattgctcgccaaggagaaggagccggaaagccttgcgaaacacttggacgatttgattgctgtgaagataattgcgaaagtcaacattaaggttgttttttttttttttgcaatttattacatatttgacaaaccacaacataggcgaacagtcagacttacactggatttgattggattgtcaatttgttcaagaagtgccctggaaaaaatgacagtgatgtgccaaaagaaaaagatgatgatgatgacgttgatgagattgctaccaaaaaaacaaagaaaaattgagagatagatagatagatagataacggattcattttgttgtgagcttcaaaaaaaaaaggatttaatgtgtcctttacttttttaaaaatcca

SEQ ID NO: 54320 - DNA, 2751 bp, Heterodera glycines
atggataatatattggcgaataaaaaagtgctaacatttttgcgtattgcaaatgaactttgtggtgttgggaaagaggccgcttttgttgtttcgatggcttgcgctggtggacacattttacgtgatttggcgcttattccggtgagtggtgacggtaattatatgactggtaattttgagaagaaattaaaattttttgtaaaaatagactagaaaatcttggtggaatattgtcaatgcaatacaattcgatgcaaaaaattgaatggacgcataaactgtacttgagccgttacagacccgagtccttggaacaacacttttgttcgctgtcagtcactctttaaattacaggagaatctgctgaagttgcttcgtgagcctggagatgatctcgagttcgcttatcggctctatcagctcacattcaacaaaaagggaaagaaattattaaacaaactttgtcacaacagccctgtcaaaattggcaatatcatgcaaattgctgaaatggcatccgaattggcaaccaattacagttccaactgctcctacattgaacatcgtcgtattgatgaggattgccgagcatttcgacccgttgatttggtttgaactttaacaataatgatgtgtgtttagctagttgtaaaagctttcagcgtaacgtcaacaaatttggttttttggtaatttcggcactttcatatgctttttgccaggccttcgatgaaaatatttgcaatttttacgacatttacggagatgggaaaggctttttctacaaccctttgctcggttgtacagttacggtacggtcatcttttatttaactatctgtttttttgtctatttttagctttgtgacaatagtttcgctcgacaaactgataaatggccaaaaataaaccaaagtcgcattgtttcgtatagattctcgaagaccaccgaagacaaaaacggaatgttggaggcattttttgtctgtcgtcttccgatttcgctcattcatcaatacccaatcactgaagtttgttttagaaatgctcactttgtaaagtgaaattgagaaatgctatattgatgtagtttagctcacttacctattgttagaaaactcaataagttttggggggcatacaaatatgctgatcacgaattaatattagtcccggttctataactgttttgaagttgtcagaccctaacaataagaatggtagcgattacttctctcaccgagaggtattaaatgaagaaaatctgagttaaccttattcttcaattttaccaatgctgatgactattaaacataacagctcaatcaattcaaaatcaacattggcccaatggttgctgagaaattgctgtcctctgactttgttaacaatctttgcgagggggaccttgccagcttccaggggtacaacccggccaccggccttttgtccatcgcctgttccgcacgttccgcactcaaattgcgtcaactcaccgacgggacggtgaatagtctgtttgaactgctgaacacaatggacaaattgcgatggttcgacgaagaatcgggtgctttggtaggaaatctttcccttactttttccgtgattaatcactgactattttcagatttcctttggtcctggctttcaaatttctcaactgaatgcaaatccatctgagagggagaaggacacaatcgtcgtttcgtacatcgactccttcgaacactttgagcctatggttcaccaattgactgagttttctttgcagttctgcgagagtcgagtatttagctaacatttgtttctatttacaattggtttctttgtcatcttttgcagaactgtaagcctttgctcttcaccgattgtaagtctcgtcgctgcttcgtcactttgctcgctccgtccatcatcaacgacctcaagtcgtccattgactcacttttgcaattttttccgggtgtttcggttgaggtgtgttttgcactgtttgtatcattcgttggcttttgactttttttagaccaggcctggcaatatttctgaatattttgctggttataatgccattaggtcaagtggaagcgttttcgacaactcttcttatccgaccgattgctgtgcgatttgttttggcaccatcgatggccaatttattcgcctttccctttgtggtcatgtttactgtgacgattgtttcatcggactgctcaaaaacgccatccaatttcccgtcagttgtcaatccggatgtttgtatcagattctgttcgaggacattgcggttagtcatttgctctgacgtacaatacggatgccatttaactgttttctcaatttgtccatgattaattgtaaacacaatctttcagttgattttttcgcggaactttcgcggcgttgacgaaattcagcaatttttgacgccggtgttccgtctttctttgcactctttccttctcgcgcaccgtgaccaattcgtgcgctgtcagtcggagggctgccattgtttgatgccattgtcgaagggaacggcgaatggagccgttggcagtccgatgatttgcttcggttgcaaaatgaaacgctgcacattgtgcggggaggcagtccaccaggaaatcacttgccaagaggtaattggagcagcaacggcggattcatctacctaaaaatgtaatgccatttagcgacaagaacaaaagttcagcatcgaacatccggacctctctgcatggaaaaa

SEQ ID NO: 54321 - DNA, 917 bp, Heterodera glycines
atggcatcaaacaatggcagccctccgactgacagcgcacgaattggtcacggtgcgcgagaaggaaagagtgcaaagaaagacggaacaccggcgtcaaaaattgctgaatttcgtcaacgccgcgaaagttccgcgaaaaaatcaactgaaagattgtgtttacaattaatcatggacaaattgagaaaacagttaaatggcatccgtattgtacgtcagagcaaatgactaaccgcaatgtcctcgaacagaatctgatacaaacatccggattgacaactgacgggaaattggatggcgtttttgagcagtccgatgaaacaatcgtcacagtaaacatgaccacaaagggaaaggcgaataaattggccatcgatggtgccaaaacaaatcgcacagcaatcggtcggataagaagagttgtcgaaaacgcttccacttgacctaatggcattataaccagcaaaatattcagaaatattgccaggcctggtctaaaaaaagtcaaaagccaacgaatgatacaaacagtgcaaaacacacctcaaccgaaacacccggaaaaaattgcaaaagtgagtcaatggacgacttgaggtcgttgatgatggacggagcgagcaaagtgacgaagcagcgacgagacttacaatcggtgaagagcaaaggcttacagttctgcaaaagatgacaaagaaaccaattgtaaatagaaacaaatgttagctaaatactcgactctcgcagaactgcaaagaaaactcagtcaattggtgaaccataggctcaaagtgttcgaaggagtcgatgtacgaaacgacgattgtgtccttctccctctcagatggatttgcattcagttgagaaatttgaaagccaggaccaaaggaaatctgaaaatagtcagtgattaa

SEQ ID NO: 54322 - DNA, 616 bp, Heterodera glycines
atgaacgtcgaagtggcaccggacggccatatggtgacggacccattctacgcacaggcaatgatggtgatcgacgcgttcagtgtgtacggactaagggaggacgacgaagagacgggcgacgacgcggagcgagaagacgacaatccgttgcacaaatatcgtgacaattggacggcgatgttcaaccgattcaaaaaggtgctaatcatacctgtccatggggggggggggggtaagagaagagaagcaggaaggggataggcgtcactagggaaaattttgaaattttgagtacaatattttaaattttcgatgttgagccagttttttaaaagaaataaggattttaggagcccgccgagaaaaaattttttgagtttatgaaatttctaatgaacattagcccaaattttcagaaatttccctctttttcccctatgtctaggattttgatgggcacgtacgacgcgacaattgaattcgaattgaaatacgaagaaatggagggagtgaaagtgattcgcaatttcattatttatttattgccgttgatttcctttttcatcacaaatttttgctccattttcaatttctgttatgaacaaataccaga

SEQ ID NO: 54323 - DNA, 1788 bp, Heterodera glycines
atggccgacaaagaagaaagtgccggaggggaacaggacgacgtgtcctttctgagaacggtgaggacaaattctgaatttaattttaaatggacagtcgccaaattaaaactgatcagtgaattgtgatttgtgtttgaagtattaataaataagctgtggggccgtttggccggggggggggcttttcccctttcccccgagggtccgcccgcgccaaagcaacaaaagcacttccgctcactgaagaggctcttcgcccacccaaaacaaacagaagaggaagttgagttaagaatgtgtcttttgggggcatttgtgcagcaattttcggatcattcggtcgttcggtcggcggcgttttgacattttgccaatgagtcgattttttcttctgaccgatagcagtaagtgtggtgaggaaattgatgagacaattgatgatcagcaccatcagcagtttctctcaaaggtctctctctccattggaattaaaactttttccctttggaaatgcctttctttttcctccatgccattgttttacatttacctcccccctctccctctcgcccagggtgacatcgtctgtttgacctgcttggtatccaacagtcaacgggatggggcgggtgccgagtcggaaagggtttgcctttcctctgagggtttcggcaaccgaatgtgcgcgttggaaaatgtgtcggatagagacttccctccggacattgcctcgtgcatgctctacatcgacaacgctctgtcaatgcgagctttgcaggagatgatgaatgcggagagcggcgaaatcaaagggactggtggcaccggagggcacaaaacacttttgtacgggcacgcggtacaactgaagcatgtccaaagtgaaagtaattgcggcaagacatggctgctgggatttggggtcaatgtcgatgttaattgccaaattgttcattagtaattaccggtgctaatgatttccctgcgcttttactcttgactcttttctttgcccctttttatgattgccctttcccaagtgttcttggcctgcttgtcctcgtgttcctccaatgataaattggctttcgacgtcggtgttcaggagaccaacgcgggagagtcctcctggtggacggtatttaaagccttttttgtgctgccacttattcagccacaaaatcagattcatccggccagcaaacagcgatcggaaggagagaaagtgcgcgcgggggacgacgtcattctcgttagtgtggcaacggagcgatatttggtcagttggcacggcacaataaagcaaaaggcggaccaccgaagggtctccaaatcgctgttcccaccccaccccaaatcatcgtttgtgaatgccgatggcatccatatttaagcacatgacttccatgggtggcgagcagtggggggcgctgccaaccgccgtttaccattctcattttatggtaattgcttcttttcatcaaactctgtggaacgtcacttcggtcagctcgggaagtgttcgtattcgaaacatgggtaagggaaaagggcacagaataaggacaatcgggcgaagaagggcacggggggggggggaagcggcacattttgacgacgaaccgaaaggacggcatatttttaagcaaaaggatgtcactccttttgggggaatgaagtaaaggatttggtggttgtttaggctctttgttcggcaacgacgtcgtccgactgttccacggcaacgacgagtgtttgaccattccggagaatggagcgaatatc

SEQ ID NO: 54324 - DNA, 2386 bp, Heterodera glycines; identical to SEQ ID NO: 4402

SEQ ID NO: 54325 - DNA, 748 bp, Heterodera glycines
cgaaagaatgaagagcaaccggaagatgatcagcagggaaatacggaggaaggaggaggagaaaacggtagatcagcagacggaagaacaaatggagcacaaacggaggaacaaagacaaccagagaatcagggagagcacgaaaatggtaagcggaaatttaaaattaaattttaaaaatttaaattttaaagaaatttatccggaaaatccattttcaataaatgaaaatgatgacaaagaaaataatgatgaacaaagaagtaaagaaaaaggaatagaagaagcattaagagaggagaaaagggaaaaacaaaacaatggaatggagttttacccggaagaagttgtgataggcgagcagaataaggaacaaaatgctaatgagagtgataatgataatgataatgataatgatgcttcacaaaaagagtcagttgaaagagacaatggggacccgagagatcaggcagacacatggggagatgaaggagaacaagttggaaaagaagcagaaacagtaaaagataatgggaaaggagaggaggaaaagaaacgggaaaagagagaaacaaatagtatgttagaaagggagaaagaaaggagtgagagagaaaagaaaagagcagaggaagaaaaagagaaaacagagaaagaaaacataattgagggaaagaaagcggaagatgagaaaaaaagtgcagcaggaaatgaaggcctgttcagaatgtttcctgaacagcagata

SEQ ID NO: 54326 - DNA, 809 bp, Heterodera glycines
atgcctggggaggggatcagcaaaagtgcgagaaaaaacggctggcagattgatcagtgacgaaaaacgcaaatgtggtgtcagaggctctcggtcggttaaaaaatgaccaatggtcgacatttcttacactaattgtataaattatggtgtaaaaagcgtgaaattgaaataatttaaattgttaagaaccaaaaaattatttgggataaacaacaaaaaaaaaatgataattcgttcaaaaataagaaatttcacaactaattaagacggttagatagcctcggagcccaatgaaaaaaacgaaattgactcccccctggtccacttgaaaatatgaattgacccccccccccctttccatctcaatgatcaatgtcccgagatgagagaatttgggatttttcgggatttgaaaccattctcgagagagagctaaagaaaatcgcatctcaagcaaccaaaacataaactcttaggaaaacgagaaacatcgtcctcaacccaacaatttggagcccaaattcatgggtttacatggaaatttgttgggtggttctgttctgtgctgatcgatttgtgcgcgaaatgcaaaatgcgtaacttaaataaataatttttttggagacggtggacaacaaatccgaagacaatttgcgcagggaattggaggagaagcgagcggagagcgcaagaagaaaaagaagaagccattcattattcattgtgcaacatcagcagcagaaaatgggaaaaaattgcaggattaaaagcattttatgaacaatttttgtttgaaaaacaataaa

SEQ ID NO: 54327 - DNA, 814 bp, Heterodera glycines
atggaagaaaattatcgaaatacattaaataggatagaaaaactgcgcagaatttgtaaaaaattttgtatcttggaagtttgggtatgttattcatggtctgaaaattcgtatagcattttttaggagtgcgaagttcgagaacaattgaaaaaaaataaagaaatgaaaaatttttttgaaaatattccggatcgggggtatgttacaaatgaatcggtgaataatatttaatttttagacctattaatccgagagatgcgtatgtagggggtaggacgatgccttttgcactttacgccgaagcgacagaaaaacaagtcatttcaatgtttgacatagtgagcttgtatccttatgtgaattttgtgacaccgtatccggtagggatacccaaagtcattaaaaagttaaatccaaatgttatttggaaggatccgggtgatataccttatgatggacttttgaaagttaaagtcataccgccgaaaaagttgcggtaccctttattgccttttcatgccgtaggttatttatttttatgcaaaattgatttaatgtttaggatggttttttactttttccgacttgtggagagtgtgcacgtaagtctaaacaggattttgttagggtagaatgtttcaagaagtacagacactcagcagaaggacgggaattagttggggttttcacttctattgtactccgaaaagcgttagaactcggctacaaaataacgaaattttatcgagcataccattatgagaattttgacacaaatcttttcaaaaattatgtaagaatgttttgaaaa

SEQ ID NO: 54328 - DNA, 610 bp, Heterodera glycines
atgctttttgtccttctccgttttctgctgctctgttcactgtctatgccaattttggccatccgtaatttcactttttcaaaagtgaatgaccgcagccaattgccccaccgaatgcgccgaatggtccgcgtggaatgggacgggagcacgtgagtgttttgaaccgtactcaatgcgcaatagcacgatggattgacacccgaacattcagcactgtccaatacggtcgcacatcgcctcagtcgctgaacctttactttgcgctgcccgcggcgccgcgaccccccggcgccgtcccgtcgcccgtcactttcactgtgaccattgacagtttggacgcgtgcacttgcgtaacgcaaagtgtctacgacaacatgtccatactttctgttcaattccggaagttggcttttgaattttcagtttggccttcgcttggaatcggcgatttgccgatagaattttgcccgaggaagtcgtttatttgacgtggaacctttggcaaagcggcaacagctcagcggacaatgacggccgttccgtttatttttcggccacggattttaacggattcggaaatggttgattgattttgtttgtcatttca

SEQ ID NO: 54329 - DNA, 357 bp, Heterodera glycines
atgccaattgaaccatttgaattggaaaacaaagtgacaaatgaaaagctgacattgaaacagagcaaagaatacaatttggttaattggctgttgcaacggtacccaattggggagacggcgacggcgccagttaagtggaaaaaacgtgaaaattcgggtgctaatttgaactatatcagatttgatccgcggtatggcaataatgcgtgtgccaatttgaacattgtccgatttgatttgggtggaaatcattggattgggtgagccaacaaaagcaattttcaattgtcgaaaaatgaaaataattttaggccattgtcgccgccagcagtggtagaagaagaattggattaa

SEQ ID NO: 54330 - DNA, 356 bp, Heterodera glycines
atgaccaatttcaacattattggcatcagggttgccgcgggttacccgaaacccgacatttttctcgacccgaaacccgacccgatgattttggtcgggtttcgggtcgaaataagcactggtaagaaaggggttttggtgaaaattaggtggataaggaaattgatggagaaggagaaatttttgaaaaaaaattaaattattattttacatttaaagtgttcgttcttatggttgtgtggtttattggctataccttctgcctttctttatttttcgctagtgttcaattccccactgggatagaatattttatattttcttcaaattctttcaattgaaattaaattaataaa

SEQ ID NO: 54331 - DNA, 1894 bp, Heterodera glycines
atgctgtacggtagaaaatttacgctgctgaccgaccacaagccccttttggccatttttggatcgaagaaaggcattccgatctatgccgccagccgacttcaacgttgggcgttaatactctccaattatgaatttgacataaaatatgtcaacacaaattcgtttggaaacgccgacgtcctgtcgcgactgattgcaaactacccacggcccaacgaagacattctgatcgccaacatttgcgaaaagacagaatgctacgtcaacttcgtttttcaggccaaagttgagcaattgccgatcacggccaaagaaattgctgatcagacgaaaacggacgaagtccttcaacaaatcagtaaattcaccaacaaaggatggccacaaaaatgcgaagacactgatctgatgccattttatccaaaaagagaccaaataaccgaaatcgatggttgtctcacttatggcgaccgtgtaatcattccaacgacacttcgcagacaaattctgaaatcccttcattttgcccatccaggaattgttcggatgaaggccattgccaaaaaccatgtttattggccagggatcaacagcgaaattgagcgcactgtccgccaatgcgacgactgtcaaatggccgcgaaaaacccaacaaaggcacaaattcagccttggaaagcggcagacgaagtttttgagcgcatccatctcgactttgcgggcccatgcgaagacggccaaacgtatctcgttgtcgtcgacgcctattcaaactggccggaagtttgggagatgagttgtgcaacaagcgaaaagaccgtcgctatgctaaaatcgttcgtccatcgaatgggaattccccgagaaattgtgtccgacaacggaacacaattccgatcagcggaattcgccaacttctgcaaggaattcgacattcgtcacacgttcacgccgccatatcacccgatgtcaaatggggcggccgaacgattcgtcgacatcttcaagagggccatgaaaaagtgccgaaaagaaggcaaagattggatccaaaaagcacttttggcctacaggacaacgccaagtgcagtgctcgacggacattcaccagatgaattattccttggacgccggatgcgaaccaaaatatcattggtccatcccgccaatcagaaaattccgaaagtggatttgaaaaattttggaaattttcaacaagattaccgtcaaaatatgaaaaggcaattcaacaagaaaaacggcaccaaaaccatcactttccgaaatggagagccaatgttcatttggaacttgaagggcaataaggcaaattggttgcctgcgaccataattgagagagttggcaactctccgacttatcgaaccgatgttccgacacttcatcgcgcagtctaccgccatgccaaccaaattcgccgccgtttcccagtggacttggagacgccagaaattggccaaagaaatggacacattttggccggggaccaaacgaatcgggcccccgttaaggagattcaaaaagccaaatctccagttggccaatgtcaaaatgcgcagcgaaaatcagcacgcgccaagagggcacctcagcgactggacatggatccatcaaagccgaagtacgacctcgtccggccatgaatctcgcgcaggagggacttttctcaagaagggaggtgttggataaggaacacacatattattgattgtatttccctttctctccctctctattgtctctccctctgcccccttgaccagccccataaatatgtctccttttccctcactccgggcattctcccattcattccaccatttcattattttatttatttattccctgctgtcctccatatttatttgttta

SEQ ID NO: 54332 - DNA, 1324 bp, Heterodera glycines
atgaatgacccaccacggatgattattgcccatgggccgaacagatggtgtactgtaagaaagtcgagaaattctacaaaagcaaacagcagggcgaaggcgagcaactggtttttctggaaaatacacaaaattcaattcataaatttaaaaaaatttatttatttttgagaatttcgcatttttttcgtgcttgaaattggcgactttgcagtccttgaagaaatagaaattgtattttaaaaatattaaagtccttaaaaattcagagaatttgtactctaaaaacatttaaaaagccgtaaataaagaaagtttgtacttgagaaatctttttgtttccattaatttcccacttttgccctatttttgcgtttttttggtctttgaaaaatattgaagtccttaaaacaaagataatttggtgcgtgaaaaacactgaggtccttgaatacagataatcaagtacttgaaaattttttgaatttccattaaattgccattttccccatttttcagcttttcttctgttttttttttgctgaccaggtaaagcattgtgcgcgcaaagtgcagcttctcgtcgctgtccaaattggtcaaataaatggcgggccacagaaatgccaaaatatgcacagcaatggcaatggcggccaacaccaaaatcagaattttgaccacgccgaggcccgagccaccgccgacgttggacagctcggagacgaggttgccggacagccaaagcagcagcagccactccaccgagttcggcaccaccgaagtggtctaacgacagggagacggaaattaaacggaaattcataaaaatttgcaaaaaatggagctccaaggggtaaggtggaattcggcaccaccgaaatgaccaaacagagagacggaaaattagtaaaaaaaatttgacaaataacgtagggaggggcggaattcggcaccaatgaaaggcaaaaatagaaaaaataggaaaaaattcagaggatgagaaacgtcaggagttaagaaaaatggaatctaattatagtgaaaatttaaatgaacaaaaataattagcgtaaaaaagaaattaaattaaattaaatatttttatacaaaaatattatatattttttaagcttacttcataaattttgtgcgttatattcagcacgacaatggtcaacagaatggtgaaatacacatgagaaacgatgtggcaaacaaatttgataattggggcacgacctgagaaaagaaaattggggaaaaagtaattaaaaggagaggcaattaattaattaaaattaatccatttttaatgggttta

SEQ ID NO: 54333 - DNA, 2569 bp, Heterodera glycines
atgctttacctggtcagcaaaaaaaaaacagaagaaaagctgaaaaatggggaaaatggcaatttaatggaaattcaaaaaattttcaagtacttgattatctgtattcaaggacctcagtgtttttcacgcaccaaattatctttgttttaaggacttcaatatttttcaaagaccaaaaaaacgcaaaaatagggcaaaagtgggaaattaatggaaacaaaaagatttctcaagtacaaactttctttatttacggctttttaaatgtttttagagtacaaattctctgaatttttaaggactttaatatttttaaaatacaatttctatttcttcaaggactgcaaagtcgccaatttcaagcacgaaaaaaatgcgaaattctcaaaaataaataaatttttttaaatttatgaattgaattttgtgtattttccagaaaaaccagttgctcgccttcgccctgctgtttgcttttgtagaatttctcgactttcttacagtacaccatctgttcggcccatgggcaataatcatccgtggtgggtcattcattttgttttattttattttttataaatacagtaaccaattttttccccaataataatttcttgaaataaaataatgacaatttaatctcattttttattttttttgccaattcccacaaccattggcaataatttttgacaaaaaattcggcataactactcaagaatcactgtcgccctattggtttttttctcaatttttgcagtaaaatttgtaaaatttcatggcaattaaaaccgaaatgtcatcattttagttacgaaataaaaaaaaaaataaaatatacttttgaaatgttgcatacactcaattcaatgctgtttagacctgatgtacgacctgacccgttttctggtcattcttttgctttttgttgccggctttaccctccacgtcacctccatttttcaagtaatatacctaattaattagcttaagccaccaaaatttttgcagagaccaccccgtatccatttcccatccggaaaaaaaatttaatttttttaatttagaaatttttcaagttttataagaaaatttcaggaaaaaataatttcgaaataaaaattttttaaagattatttctttaaatagaacccccgtgggctctatttttcaacctccctcaaaagtgcggcttctttattttttgggggggggggggcactaatttaggggcgggctatattttaggaatacggtattgaatttcaatttgttttaagcccgcctaccaaccggtggacgaggacagtgccgaactgatgcgtttggcatcgcccagccaaaccttggaaatgctgtttttctcgctgtttggcctcgtcgagccggacagcatgtgaaaaatttgaaatttttttgaagttttttttctaattttaacacaggcccccgctccatttggtgcccgattttgcaaaaattgtgctcaagttcttgttcggcatttacatgatggtcacattgattgtgagtgcgaattttatttattatttttaaattatccaatattttttaattaaatcacaaaaacttttttttctcttttaatattttatgccattttaaaccagggaaatgaaaacatttgctgaaaataaaacctaaaatttagtaccaaaataaaatataacgcaaaaatcataaaatttgtaaaaaaatattttttgtatcagttagacaatttctatcttttattaataatttggcataaattgtgatcataaagaaaaaataattttagtgcctgggcttggatcggccaaactcaattccaagtatagacatgtccagttccaaggacataacggtgaaaatccgtaaaatccaaggacgcgtaaaaatttatcaaaagcaattaaaacttgagaatttttcaatatggtttaattaacttctaattgtatgacttatgcaattgtgcccatcaattaaaaaaataataattaaatttgaaaattgtgaaataatttgatttgtcccgcaggtgttgatcaatttgctgatcgcaatgatgagcgacacctatcagcgcattcaggcccaatctgacaaggaatggaagttcgggcgtgccattctgatcagacaaatgaacaaacggtcggcaacgccgtcgcccataaatatgctgacaaaatgtaaagaaattaattttttttaacgttaaataataataaaattaatatatatttaaattaaaaatttttaataaattttaataaataatgaaaaatttgctcatttgaaattgtcattttctcgttaatctttcagtttacattgtactcaaagtggcatggcgcaataaacgtaaagaaattcggacatttcgccaaattatgcgaacatttaaaattaaattttacagttcgtttctgtacccaaaaggcacagcaagacctacggtatgaggagaacattgacgcatttacaatggacgggcagcaggggaggcaaagtccgacatttaaggggggaggcgcgaccggggacgagaaggagcctg

SEQ ID NO: 54334 - DNA, 613 bp, Heterodera glycines
cggtacagcaaagaattggagtccgaaatggaattggaactgaaacagcgtgaccagaaaatctcggagctcgaatcggtgaagcatcgactgagcaccgccttggaacaactgaaggttggaaagagaaaggaaagcattaaattttaaatttattctttttatttggtcgacggaattaattcttcatcatttcaaaataatttaaattatcgaataataaaggaacataagttttttggtactttcctattatgatgccacacccaaaaatttcaaaaaatcaacaaaagcgcgcgctgcaaaccctgagaagctggtcaattagacgaaattttatcttaattgttgcatttatgcctccgatctagtgttacgtgcgccttgtttgtgcgtccttttttaattttttggatgtggcctcaaacaggaaataccgtttttttaatcaaacctttattcagaccaaaagtgaaaaggaccgacacgagcatcgcacaacggaggaacagttgcgaacgcgactgctcaattcggacggacagtgcacggaattgcgccacaaattgcgcgctgtggaacaacaaaatgacaatttggagcggagggaaag

SEQ ID NO: 54335 - DNA, 660 bp, Heterodera glycines
gttttcggggcagtccccccgaaccgatgcgcccagatttatggggagaccgaatccttcgggaatagcttccctatagcctgtactttaattctgcgttggatttttgctccccataattgtttgagtcccccaaacggacacttgaaaaaatcgatttttttgttttcggggcagtccccctgaaccgatgcgcccagatttatggggagaccgaatccttccggaatagcttccctatagcctgtactttaattctgcgttggatttttgctccccataattgtttgagtaccccaaacggacacttgaaaaaatcgattttttttgttttcggggcagtccccccgaaccgatgcgcccagatttatggggagaccgaatccttcgggaatagcttccctatagcctgtactttaattctgcgttggatttttgctccccataattgtttgagtaccccaaacggacacttgaaaaaatcgatttttttgttttcggggcagtccccccgaaccgatgcgcccagatttatggggagaccgaatccttcgggaatagcttccctatagcctgtactttaattctgcgttggatttttgctccccataattgtttgagtaccccaaacggacacttgaaaaaatcgatttttttgtt

SEQ ID NO: 54336 - DNA, 330 bp, Heterodera glycines
atgttaaagaaaattcaaaaattaagggataaaaaaggtatgcgcatagatctgctttattgacctcttattaggagaaaaattgcattaaattggaataatgtaaaaatcagtcaccttttagcaaatattagggggatcaattagttaaaaaaacaacaaaaaattcaaaaatgaagagataaaagaagtaggcgcgcgcgcacctatctaccgggagcttaattgctatttttagatgaaaagttgaaaaaagaatcgccaatcactccctccgcactgaaggctcaatttctgggatatgaaattcaaaggcagtccttgaaataa

SEQ ID NO: 54337 - DNA, 179 bp, Heterodera glycines
atgaccagcttcgccaagtttgacatcagtggccctgacgtggttccattgctgcaaaagctctgttctgctaacattgaccgtgcggtcggaacgtgggactttttgatttctgatttttgcttatgagatactgtttttagcacaatttacaccggaatgcataatgaacagggcgg

SEQ ID NO: 54338 - DNA, 587 bp, Heterodera glycines
atgcaatggttcccagcagcggttcggaaaagcgcaaggaattttgcaatttgcttgcagttcccaagtgacgtggtacattttgaaatttaaaacggaaataattaataaaaataaatggcaaaaagtgagagagaaacggcaaagaaaaaatccacaaatgacgaactgcgatgaacgacggactgtcaattggagaaataagcacattttgcacctgcacacatcattacatatttcacaaaattgcactattataaatcacaattttgcacaaaatcaaatttaaattaattaagcaaatccaaacacaaacaattgcacacagcacttattaaagcattctctacaattgtcgacaaatcaagcagtttcaaacaaaagtgtgccaagtaaaagcaaagccgaaaggaaaaaaaggacaaaagaaagagagttaaaaaagggagaaaaagtgactttggaaagtgaaaaagttaacgttaacagcagaaataaaaagcaaaaaatggcggatgttgatgatttggaagtgaaatttgaggccttaaaatgaaaagtgaatgacttggaagataaattgacaa

SEQ ID NO: 54339 - DNA, 906 bp, Heterodera glycines
atggcaactgccagcaattggcatgccacggactgcgtccgaatgtttccattatttctcgagggagaagccaaagagatttttcttaatattccgcctaataaaaagaaaacatggcgagatttaacaaatgccatggcggaccagacaaaaaaaattgacggtccaatgtggccaaaaaaattgttggccagagcaaaaatgggccacgaaagtataacagaatatgccaataaaatacgtgagttggtggaacaggcctcccccgacccaaattacacgagcgaggcccgagaatgcgagagtgtccattattttttaaatggactcccgattttcctaaaaaggaaattattttttatgaaaaaaccaaaaacgcttgttgaggcaatttccatggcaaaagaagttaaccaagcaagggaagaacttgcaaatgatgaaaagggagatgaaattaaacagcaaataaatgagataagggagcaaattaatgttatttcgagtcaaaataatggaaaaaacgaaaatcaaagagaatttgttaacaattcgtggcgtaacaattttggaaacggaaattcttggaatcgtgggagagaaaataattacagaggagggcagagagcacggaattttaataaattttatacgagaaacacaaatattggtccgagaaattcaaattttgtaccgcttaaccaaaacaattggaacagaaattggaatgaaaatggaggaaataatgatcgaaattggaacggaagattccaacgaaatttggaaatagccgaggaaatacgagaagaagaggaaatgacagacaaaagtacagtatcaatatggtgggaaatgaagaagaaaccccctcaacatcgttcagacgttcacctaccccggtattaa

SEQ ID NO: 54340 - DNA, 516 bp, Heterodera glycines
atggcggcagtaacaaaaacggtgccaactccaaaagttgaaaccccacctttttcaaaaagctggataaaattgaaacagactgagcagaaatacataataaaaagagtgaatgttgggaaaattggtacaaccataattccggttaccaaaacaactaaaactgtgaaaaatgccccaacaacaacggtcaaaactccgttaatgatttttactacaacaaaacccaaacaggaaaaaacacccaagaatatttcgaattccgtttttgagaatgaaaagtcaaagcagggaaataagacaaaaacagagacaaaggcgaaaaaggaagaaaaacaccccaaaacggtaaaaattggtaaagaattaaacgaaaaaacaatgcctaaggaggaaaaagttccaaaaattgtgaccaaaaacataaccacaacagaaacacctaaaatgaccacaataaaaacaatttcaaccacaactcccaaaccaaaagtgaatgaaatggaaatgaagtga

SEQ ID NO: 54341 - DNA, 386 bp, Heterodera glycines
atgaagtggaatagggaagggagggagaacgaccaattggattgtggcaaagccaagccaaatgatgtgctgacaatgagagcagtgccaaaggtgccctcgaaacagcgtcaatttatattgattttcttccaaggcacaaagagagaaaaaaaaataatgagagacagagagataacaaaagttatgactttttatttacataattttcttttattttacatgagtagggagcgaatttttaggtttttaattatttttctgctgctttaatttaatgagaaatgcacaatttcaaaaaattttcgttttagtgcaactattcttcactaggaattcactattttggagcatacgaaattttatctgacaactctacaaattga

SEQ ID NO: 54342 - DNA, 1470 bp, Heterodera glycines
atggtaaaagcagcaccagacgatgatgaatacggacaaatgattcgcaatgactttggtatttttgaagatttaccccatatttcatccatattcattgacttttttagctgcagctgaattttgctccaatttcgtcgaccattcatcgccaaaatttgacatttccgaacattccaacgaaaaacaaatggccaattttatgccttccgttgacactgacagcggagcgctcaaagaaagcctgggcctcagccatggtaattgttgtagttatttattgctttttcatttttcgctgttttttgcaacaatgcctttttgtgtttagccatgttgtccatgtttatgaacactttgcgtgatgataacgtctctgccataaatgatatgacaaacgatgacaagttcaacaacaacaatatcgctattccatcaattccgccgtggtcagccaaaaagaggcaatgctcttccagccgcgttacaacagcgccgtcaaaaagcgatgccatcacggcatcgtccaatttgatcccaaccggcagcagcagcaataacaacaacaacgatattttaccgacttcgtcgttgtcagtgcttatgcaacagtcgtcggttgcggccagtgcgcaacaacgccaacaacagcagcccatcgtcaaaatgtgccgtgttgagacattttcggccgcgcaccgactgcacaatgacaatttgccggattatttgaaccgcgaggtgttcggcaagtgcaacaacgggaacggacacgggcacaattacacgtggaaagtggtgctgaaagggccggtggaccagcacaccggaatggtcagtcgaatattggacgaaacataaattgggatgtcagcaaattcgaattggatatacatttgtgtttctcgcggatacccaaatttctttttgaatcgggagcagacaattctttctgatttagaaatgaaaattatttttacccttttttgggttttcattttataatccattgcaaaaacgaattctgtttgcatttgcaggtgtacaaccttgccgatttgaaacgagagatgaacgaagtgttggagcaggtcgaccacaaacacttggacaaggacttgccctactttaggttataatcagtcatatttggcatttttttaacaaattacaaatactttaagggacaatggaattgtgagcacaacggaaaatctttcggtgtttttgtacaacgaactctccgccacaatgagttcccccgaacttttgcacaaagtcgttgtctgcgagacggacaaaaactgtttctcatttgccggatattcatcctagacaaatgaaatttatgcgatagtgagaaaggattgattttcaatttaagtgactgttcctacatttaatattatttttccattatacttcaaaagtcacttctttgtaaatattgagatgtttttaaataataaa

SEQ ID NO: 54343 - DNA, 2267 bp, Heterodera glycines
aaaaacatccacgtctattaggggcaccgccaccaccgcacttccccatggtcggatatttggttccaatccaaaaaatagcggactttttgcgagccgatattcgggtaaaaacgaacgttagcttatcgtttttagatttaaatgtttgtatctctgtcaggtgaccattctttttgcggaccttcacgcgttcctcgacaacatgaaaagctccattgaattgcttcaaaaccgcgtgctttactacgaatgtgtgatcaaagcgctgctaaacgcactgaatgtgcccattggcaaattgcattttgtgcgcggacgttcgtatcaattgaccgagtgagtcttatttatctgccattttgatgaccatatttactgcgagaaacaccctttcaaaattaggacttacacaaaggatctgctgcggttttgtggtttagtcagtcttcgagatgcaacacgggctggcgcggaagttgtcaagcaggtgggaaatggagttggattaaatcttcaatttggcaaatgaatttattgtagagacaaagatttccaaatctgtcgggccggtcgagctgacactttcagaagcaaccggtttccgggcccggtctcaaaaaccggatttttcgaaaaattatcagttccggatcctgcaaaaaccgtacccagcccatggcttgttctctaatttacagtgacatctttgccgctattttatcctacaatgaatcatttcttatccaggttgacgaccctctgttgagcggaatcctttaccctctgctgcaagcgttggacgaacagcacctcaaagtggtcggtcaatttgggggcgtggatcagcgcaaaatattcattttgtgcgaggaacagctgctgaagatgaaatttgccaagcgtttccatttgatgaatcccgatggtgcccggcctcaccggctccaaaatgagcaggcattttttaatttaactcagcaatttgaatttcatgaccatttttaaaaatgcttttcatcgtttttctatcattttcagttctgaagagaacaccaaaattgatttgttggattcgcccgagtcggtgagtgccaaaattgattctgccgcgtgtcccaaaatgccgtcaactttgtccaccgatgctaaagaatccggcgttggcgacgaaaatggagttctggcattcttcaagcatgttgttgtgccaattcagtctgaggtactagaataaagtgccaaatatgcattttgtgccaagattggttccgcttgtatagtttcgttctttttgtttctattatgtatttctaatttctaacacatttgcacaggctcaaattgtgatcaatggcaccttttttgactcttttgatgccatacgaaatgcctttgtccgtggcgatctttccgaaagtgccctaaaggaatatttgaagaattttttgaacacaattttatcgtccggtcagtttaagcgtttattttatgctttcctttaacataataataaaaaaaaatccttttttttcttctttagtccaacgcaattgtcgtgacaactcgcattttgaggaaattgttgcaaaagcgtatccgtcctccaaaatcatagcgcagttggagcagtacaaggacgagggcacttcgatggacgatttgtgtttggacagtttggcactggacggagtcaaatgcgtgtcgacaccctttggccaatccctggaggtgtttttgattttttaccatttcgagttaactttttccctttattttctccttaagtttgtcgcttcgtccgttcgtgtttcttcacccgaatttctgttctcctccaacaagtcgtccaccgactttcgtccccttcgagttttgtggcgtttgtctccaaagggtcggctgacacttggccatttgagcgcactgttcactctcaaatggctgtccacttttggccatcacatcacaattttgctctccgatttggacgcttttcttgaccacgcgaagtgtccgtggacggaaatgaaggcaaattcaaattttatttatttcaattcgttaagtgtcaactttttaagagtcgtgcgctacagttcgagaaatggctgagggaaattctgcggtcattgaatatggaaaatgttgagataaaacattcttcggaatacgaattcgacaggtgcaatcattctccatgttccgtcatttgtccctccctaattcttttcagtgacttctccatggaaatgtatcaaatggcc

SEQ ID NO: 54344 - DNA, 60 bp, Heterodera glycines
atggagttgaatgatgcccaacaaaaacggaaagagcttattgttcgaaatctgcaagaa

SEQ ID NO: 54345 - DNA, 288 bp, Heterodera glycines
gatgcatggtttgtcgaagtgctcagtgcacatttgctgaagcacaaggacatttgtccgtttgcgctgtccgattggatggaggacattttggacacggaattcagcctgatttcggacgatggcactttggagcccaccgccaaattgttggttgagttggccgatttgactgtcggaaggggcgcacacaaaggggcggaggcggaagcaaaactcgaggagcatttgcaaagactgcgaacactttccgctaaatctgttcgttttcataggattctaatttag

SEQ ID NO: 54346 - DNA, 772 bp, Heterodera glycines
atgcaacaattcccttcaaatttagctttaaatcaagagattgagtcacccaatgcactgaacaacgacagagacgccgaatatcaggatctgcagagagtcgataaaaatgctagaacagttttgcacagagcagctctggaccagaactacagtctcgtgactcagctgtgtgagcgtgctgaaaaaattggactgggtcattatgttgatactatcgataagttcggaaatacaccactgctatcagcttgtgtggtgcataactaccagacgagtaggtataagcttcagtgtatccaggcactgattcagaataaagctgacccgaacaaaaagaatgatactacgttatggacccccctgacatggtgttctttctacggtgagactgaagctataaaaaagctgctagagaataaagggttcccatacttggtggataatgaaggaaggtttcctttagaccattgtggactgcaggtaaatattgtattaggtatagtttgtctgatgtgatgtgtaggataaacacggcaacagaaagaaagctgcgactgtacttattgaaagtcttgtgcagctgattcagaaatttgatgaaaacccagaaaaattggcttatgaaggttacacagattatcgcagacacttgggatcgcctttattaaggacttctgtactatactgggcgatttattttaagctggatgtggacggctatgtgaagaaattgctggcgatgaatggagtatatcccgaacttccgtaa

SEQ ID NO: 54347 - DNA, 962 bp, Heterodera glycines
cagctgagcccgcaaacccagacaaagaaaatgctaccaatagtaaaaataaccaccaacaaaacatcactactactgccaccgctactttatcatccgagacgccagctgagcaaattttagcagatcaagataatagtattgctgagaaagacgaagcaggtacgccgccgccatcaagtggattaggacagtccggtgatgctgctgctacatcagtgactcaagttgaagatggtcgaaatttacctcaagcagccgcgttgacctccaataacccaaaaattgttgctaaacaatcaacagtagcgacagatagaaggaaagagaaaataattgaaaagctgatcgacgaacaagtggaccgaatggtcgatggaacacatgcacagcagaagatgctacaggaagaaggtaaagacaatgagagtcaacaccgcatttcaacatataaactcatcgaagaagtgctacatggtgagcatggacagctaatgtcgcaacagcgcgaatccaaaatggcagctgaatttgcgtacaatgaaataactcagcgattcggcattagaatgggcccaggagtaatgcacgttgatttgagcaaacagctgtcctatgtgttggggtttgatcacaaaacacgcatttacaacaatcagtcggcaaaatatccacctgatctgtctggtggtgtccgtcagctgtacgtttacgcgcctaaactggtggaggattccatcataggtgaccgcatggcaccgttgctgcgagttgtcaacgtgtcagggacaccagggttggacatgccagaggttatatataccaatgaaatttttcattctctccaaaacaaacgcatttctgaaattaacattgaaattcagacagcatttggacgttacgtaaaatttggttggggaactacagtaatcacattacattttagacaaaaactattttag

SEQ ID NO: 54348 - DNA, 540 bp, Heterodera glycines
atgtctggaagtgaaccaatgtctaatgagatcctaaacaagtcagtaataacagttgacagagaagaatggcaaatttttaaaattttatagctaatattatcgggagaagtgccatttttattcggaagttttttcagaagattttgggtctcgatgatgttaaaatttatatccgatataaagcattgatcaatttctataatattacccaagcatgtatagcttgggtcggtttcactattattaaatgaattggcaaataatgtggcaaataattcagatttctcagcactattatgatagcatttattttcataaattagattaggtatttcaaagggattgacattgaatttttgtatatatttataaattgaatttattccttttgaaatagcctttttctcaatttggctatggtatttatttgtttgtatttttatatgtaaagaaatgctatcgtatagtgcttttttggatgggtcagttttagcttgcctgaataatttagccttttctttgatggatgctaataaa

SEQ ID NO: 54349 - DNA, 1064 bp, Heterodera glycines
aataaaaatggcacttctcccgataatattagctataaaattttaaaaatttgccattcttctctgtcaactgttattactgacttgtttaggatctcattagacattggttcacttccagacatctggaaagaatcaattgtttttccgcttttaaaaagggtgacaaaaataatcccgaaaactataggccaatttcattaacctgctcactctgcagggttatggaaagaattttaagcaaaaatatttacaattttctattaaaaaacaaaaaaatttcggaatttcaatttgttttgttagaaataggtctacaacgagtcaactaataacagttgtggaagattggtacgaggcaataataaatgaaaaaaatgttgactgtatttatattgattttcaaaaagcatttgactcagtgccccatgaattacttttatacaaattggaaaaaataggtataaggggcaaacttttgatgtggataaaggactttttgagtaataggacttttcgtgttaaaattggggatgatttatcctccagtaaaaaagttggctctggcgtcccccagggctctctgtccttggacctttattatttttgatttatattaacgatcttcctgatgctttgccatcaggagtgaaaataaaattatatgctgatgatgttaaattgtatatttgttataaagcaagaaccgaaacagaaattatgcataaagcattgcataatttatcagaatgggcaaataaatggcagatcagaatctcaattaaaaaaacttttgtacttcatttggggaataaaaaccccaaagaaatatataaaattgatggaaatataataaatgttgtggatacaattagggatttaggcataaatattgataataaattgcaattttccaatcatgtcacacaaataataaagaatgcatatttacgtatgcgttctttatttcgggttattaaatcaaaatcttctaggatttggattattttgtacaaaaccgggggggggccgttattggaatatgctcctgaggttggaatcca

SEQ ID NO: 54350 - DNA, 631 bp, Heterodera glycines
atgagcggtggcatttatggcggaggtgtgtgccttccttttgcaatttatgttttttgagagtgtccaacatttgttgttcctttttcagatgacgtcggtgcattggtgttcgaccccggctcgcacaggttttgatgggtgatgggtgcgcaaattccgtctttttgtacgccattatatatggcaataattgttaaaaatttgcaaaatctcgactaaaattgcatttaaatgacaatttttccatgtcctcgcctggccatttaaaattcttttcatttcatcccctggaatttcacaaaattcatttctaatactgaacctacaaaattacatgattttccttttttcgattttcgtcatttaaccattatggttttgttcagtttccgcgtcggttacggtggcgaggagttcccccgctttgacattccggcacgggtcggcgtctgtcctcggccttccgccggcactgacgcgtcccaaaccgctgacgccacaattgaagaggtggcctcaggacggggggccaacgccagcaacaaattcgaccattacattggcacaacaaagctgaatgtgccccgggccggcatggaggtgaagccgtacatgcgggagggcatgg

SEQ ID NO: 54351 - DNA, 218 bp, Heterodera glycines
catttttataatctttcaaatccctcactacgaaatggaagagccaaagcctgcccaaacgtcgtttttcctctggtgatttttggggttctgttgagggattggaattgaccgagcgattgtttaggatgaacgaaaacaggcacagattctatcagccggggatgactcaggcggacgtggcaaaggccgcaggtcgaacaaacggagggaactga

SEQ ID NO: 54352 - DNA, 1347 bp, Heterodera glycines
atggaaaccgtggaaaatgggcacgacgacacgcggcagcagtcgtaccacacggaacggacactgctcgcctcacagggcgaagaggacgaacggaacggagacgacacactgcagcaggtgggccgaaaaggagcaatgaaaacaacgggtgaccattggaacccacggaatgttgtccctttaggaagagtccaccgtaaatcaccagtcgccaaagaaaaaggcgccaccaaataacgctcgggtggccaggagaccgcgcgatttgcgtggactgttccctcgggcacaccgaccaatttcctcggcaagcgaacagccgaccacccaactgaagtcgaaccgattgttcgcgcgcattgacgagtcctttcggagccgttggcttaaactacgctcaaaatcgacttcgatggtcaacattacaggtcaattcgttgcttcgtaaatgatagttcgtgttttttaggcatttcctcctcgaaggctcctcctttttcccatgggactccgtgggccaatcggcatcacatccatcagccattccagtcccgtccgatgacctgctgcttcggaatggttgtccctttccttatgaaactccaccctttcattgcttttccgaaggtgccaaccccccaagtcacaatgggcgctgttcgttcgttttcccttgccaagtttaattatttcagcattggttcagtgttttgtctccctattgcacaacattccaattcatgtcaattgttgtgcccaatatttccacccggccaaccgtaaacagtttatgatcatcggtgccgagcagggcatttttgcaatggatctcacacacctcaccacggaggaggaagccctctttcaagtatgtctctgtcgaagattaaatttcgattcgccggtttgtcatttcgtccaattgttagcttcatgagcgtcgttgcacttggctttacgttgtcaacgacacactcaccgcactgcagggaaaaacaccgtatctgtacagacatgagatgttgcagctgttccagcaggaattgatcactcagaagttggccaaatcactggacaagttgccgcagaagttgaaaccgaaggcattgatgagcacacttcgaatgccggagacacggtcagttgaatatggagattggcctaccaagatttgcttggtgattggcccaggatcggggaagttgggtgattaccacaaaggtgttaaattattggccaattttgcttgcaaattcatgaattttagcgattgctatcagtgtaacgtggaaaggagcatcaatgacgaaaacctttacctttgttgtgccgttcctcacgctg

SEQ ID NO: 54353 - DNA, 1197 bp, Heterodera glycines
atgaaaataacccaaaataggaaaaacaaaagtttcaaaccaaaagaatcggatgctgaaggaaagtgtccgggtgatcttctgcgaacattagtaaggcagaactgatggtattgctgtgcgcacagacacgtcgaaacaatgtttttaacgaacggttctcttcttgtaggctacgaatgacctaaattttgagaatgcaatacactcttagcgattttgcgatagaaacttcttgctgttgctcaacttgttcttcacgcgatttattgattagtccgcgcaccatcttgaatagtattaaaaaatgattttggacctaaattggtttgcgatttaaatataaatccatctaattactagggaaatggtcgtttcggcgcccacggttcggcaccaacactagcttttggactataattttttctttgtcaactaaatctaaaattcttagtatcattcgaaagcccttcacatgctttagatttggttgatatcaatcaaaaaaatcattgtcaaaaaactagggctggcgccgaaacaacccctactcttttaatgcagtttataagcttttatatatgattttaagcaataatcttttttcaattttctgataaaaagatgaagttgaaaaatgaaaaatttgtaatcatttaatttaatgaaataaaaattgtatatggaatttgaataccaatttttttaaacatataaattatttttttttggcgaatcgttatttatatttcgaaaataaaaatattaaaacaacgggtcggggtcgttttcgtacggacccaagtttttggctataacttttttctttgtcaaccaaatccaacgatcttgatatcattcgagagttttgaacctttacgagatttttcgaaattttgcaggctaatagaggacacttagggttatcgaaggataccaacaatgttggatttgacgagttgggtgtcgtccgattgaacacaactagagcattacggtaccaggatttttttgcaaaaccgtaatcggactttcctggacctgaatctgggttttcgaccggaatccggaacttaaaaaaatttgagttaaaattagattacgtaagttttgatttgcctggaccgggaccgtgctggcgcgtaagattttttaaaattttatgccataattttttttatttaagtaaaaattaaa

SEQ ID NO: 54354 - DNA, 2781 bp, Heterodera glycines
atgcccggtggaactgctgcagtcgagaacgacgccgaagtgacacaggcgagaaaaggtgttttttgacgggcacacaaagttataaaacttaacgcattccacattgtgtgaatgctgattcactgttctgttccgagaccttggcttcggaacggagtccaaaatttgccgggaatcgaaaccaaaagccgggaatttgccggttatgagagacccccgaacatttaaacagcactaacgcttttcattaataggaaagccgagcccgaagaaacaccgtccgtttcgcaatgttttcaaagctttgggcgacggcgtgtcgaaactgaagttctctacgcgaaagcgcccagaggtttttgagtcctccataaacacacatccaaaatatacgattgatattaatttttggggagcagctcgttttcccctcccagaaatttataaaaaaactgaattttttaaaagaaaatatctcgaaaaaagatatttgaaaacttcaatagcgatttttaaaggtttatgatgaattgctgttttttctaaaaaaaattttaaaaaaattgctgtaaattttttctagaaatttactttaatttttcggggaggcgaaggtattgcaccctaattttggacactggcttaaaggccgctatttgccaatctctcctcccttccctcttctctcatgtgcagaagcagcagcacgggacgacactgtccgggacggatcagcgccgaccgcaattggcaccgactttcgatgcctcgattgccgagcagtcaacgttccaatgggcaacggaaggtcaatcatcgtctacgagtcaatgggcaacggaaaaacaggacgttggacagtacaaagaattgcccaagtttgggcacggcggtgggggcggccaccgccctttctgaatttcgccacgtgataagacaatgccatgaatttgcgctttacattttaaacttcaattaacttatctcattttctgcgtattttaatttcattttattctttattttcatttgcttgttcgcttatgtttttccttgtgtcttatggataaacttaattcttttccttttttacacaattaccgcattttccaataatttattgcctaggctaaaacaaaaatttaaaaaaaaatttttttttcatcacttaaattcttggtccgcgcatgtcctcatttgacagatttgtttgaatggaaatccaagttttaagtatgcccttatttcgaaaaaaaagaattctgcttaatgtaggactttgacctgtattttctggacaaaaatccaggacaagcaaacatggtttatcccatggttcattctgacaatatgtagctgactaagtttttttggttaaaagagacaaaaaaaataaaaatttgtccaagtcatcttcggaattggtgctttttggcaaagcctgtttaacaatttttttttctaaaatctaactccaaagagtgtcatttagaaaattccgaccatccaagtcccaattgcagtgtaatagaatatttaaaacacatgtttattcataagacggatataccaagcagcgagaaaaagcaaaaagctgatgaataaaaaatacgcaaaaagcacataaacaaaggaaatggaaaacagacaaaagaaaattatccaatgagagagactgtcccaaaaagcacccaattaaacccgaaagcactaatttataccataaaaacaatttatggtgtttgtctttggggacagcctctgaaaattgcataaaatggaaaaaaaacaatttgccaaagaaatttaaatgaaatgaaacgaagaggaagaagacttatgcataaaattccggcatttgccaatgttttcatcacattttcaggcaaccgggctcgtcttcttcggcgtgtacacattgccggcgccggcactcggcgagttgggcggccgagtccaagttcattttgtcggcgacacagtgtgagtgagacgagacaaatgggcagatggccaaattcaaagcaaattttaaacgccaaacttttttctaattgttaagataatcttggttcttttgttttgatgaaccaaacgttggcacactaataaaattaagtggaatttttaataatgcttaatttttgaatttttagttaaatttaagtgaatttagtggtctgaacaattttaaattttaatgatgagaagattatgtaaaatttagataagttctgcatttaaagcatgacggagaatttgggccaagaagtcgtaaaacatttttttaccaggtatggctctttttgctctgcccacaccgatggcacagaacggtgtctttcctgcgctattcggcgtccaaagggtacggtaattgaattggtttttactaattgttcgatcaaatcgggtaatcaaagagatattagcgattctgctccagtaattcgaacgtttgcaaatttttgatggtattttttaggttactaagaaaaattggttgataaatgcccccatttgtcggcttttcccctttttagcgttttcttcctccgattaataagggggaaaggagagagagtgcgggaaagagagaaacatgaaaggaaaaagaatgagagaaagcggaaagataaggcgatagagaaagggagagaaagagagagagagacggacgggggtaataccaggggccttatgctcgtctcgcggtttagtaaaccacggttaacgcgttaaccacagtttcatattttgaaatttaaaaataattaa

SEQ ID NO: 54355 - DNA, 1733 bp, Heterodera glycines
ggcttacttactaggatttggttcgaaaaaaaagccataaaataggcacttaaaaaatggaaaaagcttcgaatttagaggcctaaaatgacaaagatcaaaaagcaacaaaattaagtcaaaatcagtacttgagatagctaatttgaaaatcaaatattcttgtcaaaaaaataaaaactatgttttggagatgaatttttgagaaaattttcatttcttagggggtatatttttgaaaatttaactaaatgttttggcgctatgtttggcacaaattcaattgtgtctttttttcaggtggcaccaaagtgacgttgggcagcaacaacaaaaagttggagacggacacttatgcccattttttgtacaaccgggagattgtgtttggtgtcaaatatttggtcaaagtgcgcatcgatgccaaacagttaggacaacttagaaaggtgaattgaaaaaaatacatttttaaaatttgaaattgaaatgccattttttaaatttcattttaaaaaataaaaatttttcaaattgaataacaaataatttttttcattttttatgtttaattattgaaactataatttatacataaaaaaacttttaaaatatttttacttattataaaattaattttattaaaaatataatttgtttgtcataactaaatgaaaataataaattaaaaaaaaagattaatagtgataataaaaaaattttaaattacgaaaaattaaaaatattttaataaacgaagtttatttttattccatctttgagaaaaaaaatctaacaaaatatttttttgaatgattaaaatgattttagtttttatatcttattatatttaattattattaatttataattaaaaaattaataattaattaataattttataaatttaattaattgttataaatttttttaattgtatttaattaatttaatttaaatttttatagcttcgtttcattgaccatgacaatttgaacaaattttatggcatttgcacggacgcgccaattttgtacgcaatttggaagcattgccaaaggggcagtttaaaagtgggaaaattaaatataataaaattaagtcaaaatttttttttaatatcctaaatataaaataaaaataaagaatttgatcgccaaagagcagtatgttggcgatgtgttcgttatggtttcacttatgcgcgacattacaaatgtgggccattttattttctcaaattggtgaaatttaacccccctaattagtgatttaaaagagtgaaattatttatttcagaaataaaaaattaattttcgaacattttaaatttgaatttttagatttaaatttttttttaaatgggtaaaataaaaatttattgctgaattttagtttttaaattaaggtttttgatcatatattgtttaattattttaaaaattccctaatgcatcaaaatagagaaatttcccgaatttagggtttgtctgcgctgcaccaaacgtttgtcggcgcccgatgggtcgctgagttcagaaaattgtctgatcgatgatcggtggcgagtaaaaatcgagtgattttggactgaatttgatcggagagagtcggccgatgccacgggcgagtgagtaatgttgacgagaatgtttttagtattcgattttgaatttcaaaatttgaatttcaaaaattaatttaattatacaattcggaattttgaaaggacc

SEQ ID NO: 54356 - DNA, 939 bp, Heterodera glycines
atgccgaaaccattcgatttttccggagaaggaaaattttccaggtttgtttcaatctgaaaaattttaattttcactgggagtaagcgaatattaaatgatttaggttcggtcattatgttgattatatggaagaaatccgtaggaaagatgtctctctgtcatatgcatcagtcgacgatattttcaaaaacatgcctgtaaaggcgtattgtgcggtaacaaataattgtcaacattggagtgatgaattcttcaaacgaagtttgagattaaaaattgcttaataaactgagatggattataatgccaatataagccaataatgcgtttgctgttatgaagagggggagggaaggtcccaggattcctgtttttttgaagtagcggaatggttgtttaccgaaagtcaataattaaaaaacaaaaatgtctcagtgttttatctacttgtttgagtcatactgtaggttattaagatgctcatcgacacgatgaattctcgaaagcgccggagagaagtttggacgacatgaagacggtcttctacaggagtttgcacaaaaatgtaaattaattttttttgccgtgtttcactcactcactacaattttacagtttgacgatgttttcgacgagttcgactcccgtccatgtggcgctgtgcgttttactttcatattcctaattgttcatttctatacaattaacaaagattaattttacattataatggcatttttgttttccgtatctctgagtggtcttcgaattcgtttaggcttctctcgcgcaagtgcacagggccaagctgaagtcaagcgacgaatacgtggcagtcaaaatacaacatttgcatgtgaaagaccgcagttttgttgacatggccacgatggaggttcagttcaaacaaatttttgacaatgcgaatagaataaa

SEQ ID NO: 54357 - DNA, 645 bp, Heterodera glycines
ggcagtgtcaacactctcattcaaagcatcggaattggagggttaaggccgaacactctgctcttaagttggcccacgacagaagtgggcaaagacgaagtggccgactcggaatatcgaacattcactggtgaaatgaaaagcgagattgtctaaaaatgaatcagatcaaaatcacattgaatttccgatttaagacaaattgttggctggcgcggttaatggaatggcacttttggtggcgaagggaatacctgaatttccgagcaacgttaaattgagtggctatttggatgtttattggattgtccgagatggcggactgtgtgtgctgataacttttctgctggaacagaacgaagtttggagcagttgcaaaactcgaatcgttgcagtcgctcgtccgcaagaaaacagcgcaaaactgaagaagcaaatccaaaactacctttaccaattgcgaatcgatgccgaaattttggtggggggggggcggggggagtgatcggacggttaattttattcactcattgtcaggtgacaaaactcaatgacccagaactgtcgataaccgcttacgaacggactttgcttatggaggaaaggacgaaaatgctgaaacaaatccaacggcgaggaatgccc

SEQ ID NO: 54358 - DNA, 661 bp, Heterodera glycines
atgccatcgctcattttgtactcacttcctactcttatggtatttttacatctaaaatttttaaattaaatttatttttagttagcaaatttggcaattttctttggccaggctctgttcagttttgttccgcacattttgctcgtttttgcaattattttcttcgaaggaatgctcttcggctcgggctacaccttttttggcaaaatccatagaaaggtcatttttattaattttatttgtgaaagtccgctttagcacaaactgtgggcgtaagagtattttctagagatcgacttggacctgtatataggcccggatttttcctggatccaactccaggtccaggctattttttaggcaacctggattttgttggacctgtgtttttctggattttgtccaggaatccaggtcaaatatgaaaataatgaccaaatatgaaaaacttggatttcctgaacaaaattttagaatttattatttcaagtgatcgatgttttttcaagttttcaaaaaatgattatttagatataaaaacagattttcttttaaaattataaatttttggaggttcctaagaaattaattcattttttcaaacattgttttgcttttaaacaaatttcaaaaatacaggtccagccaggcctggatccag

SEQ ID NO: 54359 - DNA, 653 bp, Heterodera glycines
atgtcggggatcggggtcggggaccggggagctcggggtaggggagcaaccctaatttaaattaaatcttctcattaattacacataaagtgaatgtttttttaataaaaatttttttgatatttcgacttaagattgatgcttttttagagaaaagttttttgaaataaaatttaatgaaaaattcgatcatttcaacttccaaatttgctataaaaaagtaaacgaagaaaattagtgttttttacctgattttgatttgattcgcacaaaactaagttttacatttatatgttaaaataatatcaatccgaaaaacagaccccaaagttttaaatttaaatttcagctcctccaaaatatgttttcatttggagcggtaacaatgagaagaagaacctcgaggttgaccccagagtgatccgtctctccatagaactcagcgaattattccatggtaatttaaaaaatgaacatttaccagagctaattattaaatttattaagccaaagaagatcaaccggacaatgcgcaacaacaaggagaagaggtccaagccaaaaatgatcaatcggtcaatgcaaaacacggaaaacaggtccaaaccaggaaaaagctgcaagagtctttcttcgccaatttaattttctga

SEQ ID NO: 54360 - DNA, 1381 bp, Heterodera glycines
atggccatcccgcagaattctgtgattgtattggacggcaattattgtgccgatgaacagatggagtcagtgagtgccatctattggggcgaagatgcactcaaggtttgtcttgcaaaaagaaatttttgaaaatttgtatttttttaattaatacgttcaacccgccaatgcctttcgccaccaccgaacgatacaaatcccttaatttttcaaaatataacccggaaatgcattaaatagatcatattttggaaagttttatatagtaaatttttctctttaaaaatatcaaaaaaaaaattttttgttttttaaattctgtttgaaaattttttaaaaattgggcggaggcgagaactgttccctaaattttgctttgcttctttcctctccatttgaattaaatttttaagtgcttattgtagtggaagaagggggggggcaagacgaaaaatatttaaaaaaaaattccaccgagacttgtcattcattaatttgattttaaaagtgcagatccagcgtggttcatggttttatgccgactcctttcaaccaatccgtgccgattttgccgacgaaattgaggcgcatcatttgaaaagttttcgggacaacgtcatcccggaaacgccagtgttcagcgacgctgagtcgagcaaaaagccaggcacatgcaaaactatgggataattagcaaacccccccccccccaataatgtacgtttttccagtattattagtatttttaaggtatttgggatgccaaaaaatcaaatttgggaaagttttttttaaattacctttgctaaatattattttttaagttttaaccacattgagatggaatgacaaggaggtcaagtggaattcggttgtggacgttttcattgctggacggaaaggtcgaggtaatgcaaagggggggcgggggggaagttatatcgtggacccgaattttgggagaaactggggaatatgagaggtaaggaaacataactttgtaaaaagaaaatagaatttgtgggacacatttaagccatcaaataattgggagcagctcgtcccccccccccccttcaattttttttaaattctggggcgccccgttttttggttttagacatttcgatttgcccagtttccattggttttttggaatgtaattagtcaatcttttcactatcaattattaattttttttttaatttatgcccctcccctcccccttgacagtgttgcgttgggtgacccgcgcggagggcaacacgccattgcgccgtggtttcaaagaggaggcaaatgcgctggacggaatgccaagtttctctgatctcattttggttgtgcacggtaatttgagcattaaaataataataaa

SEQ ID NO: 54361 - DNA, 912 bp, Heterodera glycines
atgttaaaaatacccggtaaacttaaaaagtacccattcttctactcgaaagaactcactgttttagtgaaaagtgctaggtaaataattaattaatttgtcataaaaaaaattcacccgttcaagacaattttcgggcaattcactgttttgacaagcggcttcaacgtcctcaatgcacgggcgacgacttgaaaaacaaaatgatgatgaattcattccatgacaaatttgtcacaaaataatgccaccataccttcttagacatcgttggcacaacagaacgccaggcggaagacgggcaaaaaacgggtcccattgaacacagacaactgtgacaatattgaaacgattaaatgatggtgaatgctttttgaattttaggaaatgtttttaaactttgtatagcatcattaatagggctgggatttttagttttttaactattttttctgcggatttaactcgacgaaaaatgcacaaaaaacacatttttagctcggaaattcttcgttttaacgccactactattcatcactaggaatcactattttgaagctttgccactaaaaaaaaattattttggaagttggccactaaaatcatttttttccactattttgccatttttttgtcactatttagttaattattttggggttttttgccactaaaaatcccagccctaatcattaatcatcattttttttcactgaaaaatactggataatatgcctgtttttctggatgtttttacatttcgggtttggttgaacaaagtaaattgcggtgtttttctttcgagttagaaaaaaaagaagaaagtcttacggccaccattcctacccctcacccgaattgtttttttaaacattcacgtatttgcaaaaatttttttttaaatcgctgaaa

SEQ ID NO: 54362 - DNA, 2109 bp, Heterodera glycines
atgtgctccaaatgcgcgcattggccgaccagtggcgcactgctcgcttcccgcactgtgagcaaattcagcggatcaaccaggcgattgtgcagtttgagcgcacatcgaacgccgtgcgcaaaatgttgaaccgcaaaattcgactgaggtctgtccataaactgattttgttccattaatacactgcttgcttgctgataattgatcagccttaaatgcttttttttgtttacagagatcaaacacgctgtcaaaaggcggacacgcgctgggaatatgccgaggtttcttaatcttaccaagaagcgaacaatttcgaattgcaaatgttcaaaaattcataaaaaaaattcatacaaaattttcaaactcatgctagagccaaaaatactttttaaaaatgaccagcaaaaatttatcattaaataaaataacaagaaaaaaaaagttagatggaataagtttttaaaaaatcgaaataaaactcaccatctctcgagcggattcgaacccgtgacaaatgatgattaaaatgtaagcgggaaatggcattaaattatttttgaagtgttaattttgtaagcaaatttgtcatctctctctcctgtacatataacattttttttttgattgttcggttttcattttatgtgtatttatgtctaaatttgtatttttttccaggtgcttcgtcttcgtcaacagttagccgacacactgcttgaggacagagaattggaagatggcattcaggtcggtgccattgaacaaaaatcatggttcagttttgggtccttgtacgtctcgaatcactagcatttttttccaaaaatcctggcctggttcagtttagtccctggaagtctagaaaccctagcattttttttcataaatcatggttcagttttgggtcctggtccttctcagaagccctggtactttatatttggttgacaagatgcggattttctagcccaattttcatgccaattcttcttacacaggacctttgccatcgcgttgagcggtggaagtcgcgcgcaaacgcggcactcgagcggtcatttgccgccgccgctgcacaacaaacagtcaatgagctgtacgcgttggtcacggaggcacgggaggagttcaatgtgaagctggaggccgaagggttggaccgactgaaatcggtgagtttaagcaatgttaaaaatgccattttccaaaaaaatggcacaggaattggcacgctgtcaatggctggttaatgcgcaaacaatttggcgacaaattgaacgatgccataacacagcgggaaatggcattgcaacaaatggggaggatgggaaggaggaacagaaacaatcggtagatgaacaaaaacatcacaaagtgacggaggaggtagaaagggactcaaaaaaggacacgaagacggaggacgacaaaaatgcggaagggattgtggaagaacagtcatcaacaattgatgagggaatggcaccggaagaggagggagaggaagcggagggcgaggatgaacagaagcgggtcgaactgcacgagttggctgtgagttagttgattttaaagcaaaagaccggcggaggcggatcctgtcaatcccccccccctcctcagaaaaccgttgctgacgggctcaaatggtgcacgagttgtacagcagttcagcaactgaatgccaagctggagcactttctcaaccacggaaatgcacttgaccaacgggcggctgactttttggcatttgcacgcaatcaacaacaaaaacatcaacaagcattgccaacaacaactacggcacagtcgtcgtcgtcttcggcgggtggcggttgtgttgcaaatactgctccaacgggcgctgttgttgccgttgttggagttgagttggcgcgacagaaatgggccgaaatcgccgctgcaatgacagcgcaacagaataattgtgatggcaatgatgctgccgggaacggaggaccaccatcatcatcatcatcagcctttggcattgattggatccaatcgccagcaattgaccgttttcgagcggaactgcaggcaatggcaatggaggggcccagggatgggacaaattga

SEQ ID NO: 54363 - DNA, 3365 bp, Heterodera glycines
  unsure (1)..(3365): unsure at all n locations
ttgtttatttggaataacattttgtcaattttcactgtgttttcttttttgtttcagttataagcaacagtatttcaaccaggagccacgcgtaagttgactgttttttttattttttcttaaatttctgtaccgtttcccattcaggaggtcccaccggaccgcgtggaaagggaattttggcgcaatgtgatcgacattgacaagggtgtccaagtgaagtacggggcggacctgtgagtttttttttgtcttggaattccccaacttatgaaaaaaaagaaaaaaaaaaatttaattttcggaatttctcccaacaattcaggactctagggaatttgtgccttaaaactctaaccaacaatttatttggatgaattggcattttttcaaggagagagtgaattttgggaaattttgacaattcgattaaaaaaaactactaaaattcttgacaaatttctgaccctaatccctatattcaaaccctctcccccggcttttccatccaaaacttttttggatttttctttgaaatcctctttttttacaaatttttctaaatggtttatgtgtatgtatttgcattattgctcgacaaatgcgattttccggggacgggaaaaaccaagaatttcctgacgggaaattgttgccatgccaaacattggtgtaatgccgtatgtattttacaaatgtgctcctctcattcctcccccaatttgttgcgcagcatttcaagcaaagtcggcagcggttttccgcgccgtgaggacgcgtcggtgcgcggtgttgcggcggacgcgcgggagcgccaacagtacgccaaccatccgtggaatttgcacaatttgccgaaggtgcgcgagagtgtgctgtgccacatgaccaccgacatctccggcatgatcatcccatgggtgtacattggcatgctgttctccaccttttgttggcacgtcgaggaccactggtctgtgtctgctgtttggtggctttgtggccaaaaaattgtggcattttttgngatccagaatccggttatgccctcgtctgattccttattgtttttgggcaaaataatttgtctacgccgaattgaaacagttcaaaatgctccaaaaattttagatacagcgaatttctaactgtccccaaaaattatagaattttcgggattccgaatccgtgtacgcccactgattctaattgtaagactgtgtttttgggcatgggcatagtaaatccacatttctacgccgaatttaagcaattgaaaatgctcgggattttctggaatttttttttcatacctttgccaacaatttttattgccaaaaattctatgtctgtttggtggaatctaattatccgccttccacattttatgctgtattccatcaactacaaccattggggggagcgcaaaatttggtacggagtgccgggcgaagaggccgaactgttcgacaaagttgttaaaggtgtgccggaattttccatggaattttgatcataaattttcattttttcaacagaatcggcacctgaattgtttatggagaacaaggatttgcttcatcaaatgatcactcacatgtatttgtttttttaaataaaaattgatcatttttgaagccgtttatgccattattattttttgacagaaatccgcaatttctgatcgaccgtggcctccatgtgtacacgggtaaggagaacataatgccagaaaatgaataaattcaatttttttttgccggattttacgatttcatttctcccaaaaaatccactctctaggaccccgtttgaattaaaattaattatttaatttttgatccccccccccccgcttaaagtgcatcaaaatgcgggcgaatttgtcatcacatttccacgttcgtaccatgccggtttcaacgagggcctcaactgtgcggaggctgtcaattttgcaccgcccgattgggttccgtttttgggattttcgaaaaaaatttttttttttaatttagctaaaaatgggtcgtctctgtttggagaactacgcaaatgtgggtcgtacttgtgtgttctcccatgaggagctggtgatgaagatggtcactgttgcgcacaaactgagcattggttggtggtgctctctcttttttttccagaaaattcccaaaaagtggtaaaataaatccattatcattctcttcaccctcttctccaacccctccagcgatgtgcatggccacgctggacgagctgagttggattgtggcgcgggagaccgactttcggcaccgtctgtccatcgccggtgtgtgtgccaccgctttttgccgcttcgaggacattccggacgacgagcggtcctgtgccgtgtgccgtaccacgctgttctgctccggcctgtgctgtcgccatgacgggcgcatggtgtgcgcgaagcatgtgcagcagttgtgcaccgagtgcagcatggaacagtactgcttgaagtgggtgcttttttggtgccaacattttcaaaatttgcccccccggccattcataaaaattttagaaaaattttccaaggcgagtgcaaaaaacattttaaatggacctccatctctctgctgttttttaaaggttccgctacacattggacgatttggtgccgcttgtccaccgtctcacggagcgcacaaccgctttctttgagtggcgcacgacggtcacgcaactgttgaacgacacgactaagacgcccagcacggaagctgacgacaacaacagcagcagcagcaacaacattgacggcacaactgatggcaaattgatgaaaatggacgcagaagaaacaaacggcgatgaacggcttggaaatgttggcgacaacaacaacaacgacgggggaggaacggaaagcagacagaggaagaaaattggttagcgcaataaatgtagcacaaaatgggttagcaaaaaaaaaaaaaaatttttgtgatcggaaaagggtgcatcagtgatactgtaatttataaagcatggtgtacggtcggtcattggttgagtgtaaactgttatatgtacattacatatgcctaacgttttcccaatttctggagatttataaaaaatttgatgatactttttgaaatggtttttgaaatgctggattgtgaatctcgcattttttcgggagccgaaaaagctgtcaaacaatataccgagattttacagacaacatccaatccgcaacttgtccccccccccagtttttttaaattgcatacttacaagggaacattccgaactgtgactgctcaggtcgctttaaaaccacttttatcgtgtagagcatattcgatttactattgccaattttc

SEQ ID NO: 54364 - DNA, 213 bp, Heterodera glycines
  unsure (1)..(213): unsure at all n locations
atgaatataagcaaaaaggaagaaaatanttcggcaaaagaatggcaccaaaattataccgaaattggcaagaaaattggagtaagttatggaacaattcgaaaatggaagaaacaatttggaatgaatggaggagaaagattaacggagaaagaaaaaatggagaaaatgaaaacatattggcaaataaagcaaaaaagaattgaagattaa

SEQ ID NO: 54365 - DNA, 627 bp, Heterodera glycines
atgcgcgccttcgtctcccactgcggtttgaacagtgtcagtgaggcaatccaatttggagtgccaattttggccattccgctgcttggcgaccaactgtacaatgccattatggcacgtgtaaaaggcattgccgtccaattggacattggccaactcaacggggagggggccgaacagctgctggtcgatggaattgacaaggctaattagcaccagctaattatgtctttaataagtttaattgctttgcaggtactaaacgacccttcttatagccaaaatgtcaaattattgaaacgaaagttcgcttcggccccttttggggccaaggaaaaggtgatccgataggtggaattcgcagccgaattccccgatctgaacgagttgaatttgccgtgggaagaagagctcggcacattggcctattattctgtggacatcattctgtccattgctgcaatgttgggaatatttgcttggattcttttcaaattggcaaaatttttggcaagaaaatatttgatttctgtcggaaagggagggcaaaagatgaaaatgaattaattgattattttgataaaatttttgtttttatttgttatgttcttttttgaaattaaaaaa

SEQ ID NO: 54366 - DNA, 1449 bp, Heterodera glycines
gacgaacgcatcacagaaaaggaaggagatctatcggtggcatttgacaagcaaatgaatgcctaatttcgtcaatttaaaactgtttaaggtataaagcgtcgttcaatgtttatgcgatgggatggtcaaccaaattggacaagtgaacactcttttcgcttttattttgttttttcattggtttagtcacctcaaatttcgcttggccatcggcagtttcatcgaggaatacaacaacaaagtgtccattgtgcagctgcacgaggaccaaggcgaatttggccatctcggcactttcgaccatccgttcgttcccttccctttccttttatttcttccgtttagttacccctcgacaaaggtaagaactgacaatgagtaggctctatccgtgaagttcctccccatttgtcatcattttctcttttcggtgctgtggatccccgatccaaagtcggcttttcctgatttattagcgaccaccggcgattatttgcgcatttggcgaatcggcggtcacaacggcgcttcgttggaagttcggctggacaatgtttgttagggagttacaaataatcgaaaattgctgaaaatgcctcacagaaccgttcgtctgagtattgcgcgcctctcacttcggccgattggaacgaagtggacgtgtcactgattggaacgtcgagcattgacacgacgtgcaccatttggcagatagaggcatggaaaagggaatttgtagcaaatttaaatgccaaattaaagacagggcaagcagtggcgaacacggaacacgcaatcggagggaatgtgaaggtaacaaacgaacgcaccattgggggagacgaatgaatgtattattctttcttcgcctaacagacccaactcatcgcacatgacaaggaagtgtacgacatcgaagtgagaggggacagagacgacacccctccccaccagggatggcacggaattccgaaaaaattttggacgtcggaatgccatcctttctccccaccacccccaattgtgccttccctttcttagttctctaaactgtcctcgggacgcgacattttcgcatcagccggtgaataatgaaaaagaaacaatccgttaaaatgcaaattgacaggcgctgacggaagcattcgaatgttcggtttgtgttgcgaaaggcgcagcaacaattaattcgcttcttcagatctccgccacatggaatactcaacaattgttttcgaagaaccctccaaaaagcctttgctcagattaggtgggccaaataagaaaaggaagggaataattttaggttttagcatggaacaagcaggaccacaattacttggcaacattcgcccaaaattccaacgaagtctgttttttgttttttatacggtccgaactggactcaatgcttttcagatttacattctcgacattcggatcccg

SEQ ID NO: 54367 - DNA, 704 bp, Heterodera glycines
atgttaagctttcgaatgatatcaaaaatgctggatttggatgacattgaaaaaagttatacaaagctttcgtggaaaaacatgttggcgcccaaacgagcgcgcccaaacgcagtggacccggttagaataaacctcaaatttaggggtataaaactgtaaaatgacaaatttttattttaattacaaaactaaaaggcctaggccttataattagggcataaaattatatggatccatatttttttcctggactctgggaggcctgaaacgcacgaaaaacatgtttttagcttggcttgaagcttctaggatggatttctatatccatatttttccatatttcgatatttcaaaaataagcaaaaaagcgaaaatttcgcttttcatcttgatctttcgctaaaatgagtaaattttagctgttcaaggatttttttgctacttcacctacttcccatggacgaatcgagctgaaaacaaaagccgcagagacatgcggttttttgcattatgtaacaaattgtcctctttctgttagaaataaggacacttgggagccctgtctaaatgtgatcatagaaactcacatacttgcaaaaattttgagcttaggggtcgacaaaaccaaagggaggaaccttttggtcgcaattttttttaaatacctaatgcggcgctacttgcaaagcggtcctttttga

SEQ ID NO: 54368 - DNA, 410 bp, Heterodera glycines
atgcaaacagtaaaaggtacacactatattttacccttgattttatgaaatttttttagcttataacttggccaataatagaccaaacaaaaccattttgtgctcattttgaagggaaaattctgaagaatatttcttaattagtcaaaagtttaaaaaattgtttattggcaaaaaaatgaaccatgtgttattttatatgttagagacatggaaatagtgcgtcaaaatgagagaaaaagaaaaaactttgcccagtcgtaaaaatttttccaaagttgcgattttcttgaaattttcataggcccatattttgaccccatctatcgaattctcttttgttttttgaaagtttcttttctaactcgagatcggctcttgcatttttacaagggaaaatccccaataaa

SEQ ID NO: 54369 - DNA, 135 bp, Heterodera glycines
ctttagatgatcgtgataaatgatgcagcgcaatgttctttttcagcttcaaatttacccagtatttctgagtcaaaaaatctaaaggcccgtgcgaaaaatggggcgaaacaaacaataagcagttttactgag

SEQ ID NO: 54370 - DNA, 1014 bp, Heterodera glycines
atgccaaaaggcaaaaggacaattccaaatttagaattacatgcaacaatgctatgtgggaaatacataaattttgtgaaaatcgaattcgaaaaggaaattaagattcaaaattgcactatttggtctgattcaaccgacgttcttgattttgtaagaagtgaacgcaaatttgacaaattcattagaaaagggtacaaaatataaaaaagtggcatttaaaacatataaatggtaaaaataacccagctgatttggcgtcaagaggaacatcagtggaagaactacaaaatagtgaaatatggtggaaaggccctaattttctttcagaaagggaaaactcttggcccaaaacaatacgagaatatgacccaacgaatccaccagaaataaaggaaaaacaaaatgttatttttgagataaattcagctattaaggaaaaggatttttgtgaatttgaaaaacatttcaaaagattttcaaaatgggaccgtttaaaaaattcaattgcttacgcactccgggcctttaaaaaggaaaaccaaaagaaggtttcccaaaatatggaaaaaatttcggatatcaaaaataaaaaaaatggaaatgagataacaaaaggaattattaaattaatcaggcctttagaggctaaagaaatccctaaagctgaaaagctgatttttaaattaatccaaacaaattcgtctccaaccaaatctatattaagaaatttggatttgttcaaagatgaggatgatttatggcgcacaaaaggaagaattttaaaaagtggtttaaattataacactattaatccaattttcattccaaataattcatatattgcgactttattgatcagagatgctcatatgaagacaatgcatggcggtcgcgaattggtgaatagcaaattgagagaaaatttggattcctaaagcagaaggaaaatttatgaaatattaaaaagaaaaaacaaagaaaaatgcggaatttgtgcaaaatttgcaaata

SEQ ID NO: 54371 - DNA, 948 bp, Heterodera glycines
atgttggggagcaatatttacatgtttaattgtaagagcaattcatttggagttagtttccgacataagtgccgaaaaatttcttttagcatttcggcgattcattaaaagaagaagagtgccgaaattaattatttccgataatggtacaaattttgtattagcaaataaagcactaaaacaaatagtactcgaagaaaatatacaaaataaattatggtcagaaatttatcgtgatccgacggtacaaaatttttcatcaaatttgggaattgattggcaatttaattcgccatatgcgaattggcgcgggggagcttacgagagaatgataggacttgtcaagacacatttaattcggagtttaggaaaacaattattgagctttgaagaattaatgacatatttaatcgaagtcgagaggattgtaaacgaacgccctttaagctatataacccaagatgaagtgattgaaccattaaggccaatcgatatattaaatccgacagatggagaacctttctcactaaaattggatccaacatttgatcggaaagacgtgaatgaatattttgaaaagaaaactaaaagagaagaattatttgaaatttacaaaaaagcaatttttaaaagcgaaattttttggaaggaatggagtgaaaaatacctattatcgttaagagaaaagcacatcaataaaaataaagaaggaaataaatacccaaaaatcggacaagtagtaattgtgagagaccaggataattatccaagatcaatgtggaaattaggaaaaattttcgaaattctttctgataggactgttaaattaaaaataggaaaccgaatggcggaaagacccacaaaattattatatcctttagaaatagaggatgaaggcgaagaataactatgattttatataatttaattaaatatatatatatatta

SEQ ID NO: 54372 - DNA, 553 bp, Heterodera glycines
atgttcacaaaacccgttctgtttagtggtgtttatttgtcgtggttttataacccatatgttggctatacggacgattttggagaaattgtaagaaaaattaattatgtaattaataaattttaacaattacagtactccaacacgatagcttctgcacataattacatcgttattattggtctatccagcatttatttgttgtttcctgtaattctttgttggcaaacctacacaatgtcatcaggccaccaaacacatcagtcatcttgggcagaaaaaatggcaataaacaaatatattttaatgactataatgaggttttttgtttaagcaaaaatgcaaaatttttgaaaaagctaattatcttttcaatcatttattataaatattcagatttttatccaagtgattatcataagtttgttcaattcaattgcctccgtaatttacatctcaatgcaatttgtcagaatcagcaaaatttacatcatcgttggcacttacgcatgggttttttcgagtggttagcatatttattttaaaaaataaa

SEQ ID NO: 54373 - DNA, 296 bp, Heterodera glycines
atgaatgcgttggaaacgggaattcttggcattattggtgccgtttattgtgactatccattgctgatttatacaaccggagcattgggagcaggtatgtaatttttattatttctaattttattatatatttttttaattcagctttgtggtatgccgaaacaagtgtcgaaatgttgctggcaattaacagatgcatggaattattaagaccagagttggcatttgccatttttagtggtcaaatttttatcaatatttttattagacgattagaataattaattaataataaa

SEQ ID NO: 54374 - DNA, 1152 bp, Heterodera glycines
cattccaatcactgggactcaattctcctgcatttcaatcactgggactcaattctcctgcatttcaatcactgggactcaacccaacagcattccaatcactgggactcaacccaacagcattccaatcactgggactcaattctcctgcatttcaatcactgggactcaattctcctgcatttcaatcactgggactcaacccaccaacattccaatcactgggactcaattctcctgcatttcaatcactgggactcaattctcctgcatttcaatcactgggactcaattctcctgcatttcaatcactgggactcaattctcctgcatttcaatcactgggactcaacccaacagcattccaatcactgggactcaacccaacagcattccaatcactgggactcaattctcctgcatttcaatcactgggactcaattctcctgcatttcaatcactgggactcaacccaccaacattccaatcactgggactcaattctcctgcatttcaatcactgggactcaattctcctgcatttcaatcactgggactcaacccaccaacattccaatcactgggactcaattctcctgcattccaatcactgggactcaacccataaattcaaattaaaactgacctgtttaaaactttccacctaaatttgatcccgcaagtggcacgtcaatatcccaattgcatataaatattccactcgaacacaggcaaaacatgagttgtagcatttatattgctttttctatccatcaaaggatttttctttcattttttattactatcataacatgctttttattcaaaacaaatatcaaaaaccaaatcagattcttttcatattataagcaaggaaaagtacaaaaaacgtttttaagtaacaaacctttttcattcaagcgaattataatgcatttttttaatcaaacaattctccattatcgtttacataagcaaaacaaaagctttcatatcaaaatcacatcaattaacaaaaaaaaaatttagacaaaaaaataatgataaacacaaattttttcttacacacaaaaacagaaccttcatataccggattttccactcaaacaaacacaaaaatgtgctcattattttattaattattttatata

SEQ ID NO: 54375 - DNA, 1725 bp, Heterodera glycines
acgagtgaggagcaaaagtcgatcaaatcaatcatacatttgcatttacctcccacccaaagagtcgaagcggccggaattacagtgatgaacgaagcgggccttgacccgggcattgaccacatgttggccatggtattgctgtgattgatcaaatggcaccacacgaaaccaccgtttaggagtgcatcgacaaaatccacagttacggtggcaaagtgcgttcattcgtcagttttgcgggcggactgcccgccccggaggcgtccgacaacgctttgcgctacaaattttcatggagtccgcgcggtgtgctgctggccataatgaacccggcgcgctatctgttcgattcgcgcgtcgtggacattggcggagggggcgaagtattagacgacctgtacaaaatcgactttatgccgggtttttctctggtcggatacgctaatcgagactcgactaaatacgcggacatttacggagtcagcggagagtgccaaactttgctgcgcggcacactccgatacgaagtcagccaaagcggacaaaagaaagccggaagaaattttataattaaagggttttgtggaggcagtcaaagcattgaaagcgatcggatatttgtccatggagcggaaggactttctgaacccaatgcagggcccagacatggcctggaagcaaatcaccgcttctctgctcaatcagcaagtaatggtccagcagttggcggacattgcaactcaatgggaccaataatatatgtaaaaatgggcaattgagcagtcattccttttcagccggacattttccccgattcgctgatgaattttgtagcggaattgttgggaaaggagaaaaaacgagaactgaaggcattggacgaactcggactggtgagatcgaccacagcaacaaacatcctttgatttattcggccaatttcagttctccgagggaattccggaaagacaaatcacaccgttggacactttggtcggtcagggaaaccacctacgctcattattttaatggtggtttaatgcctcgtttggcaggtgccacacttggctaaagcattggcctatgaacatggcgaaagggatttggtggtgctgaaccacgatatcgaagcacaacttccagcggggacattcgtgagaacgggcgaaaaatgcatcgaaattggacgattccccccccccccccgcaggaacggcatcggatcagtttggtcgcttatggcgaccaaccgaccgaaggcttttcggcaatggcacgcaccgtcggatacacaacggcggttgtgtcgcatatgattttggacggtcagcaaaaagggaaaattaaaagagacgaaaaaacggaagcatttaaggggaaattcagcagcgagggatgcttagacccgtgtcaaaggccgtgtacaggtcataaataaggggctgacggacaaagatttagagaaccaagccataaccagggggcaaattggcaaaccaccgccccccccctttcaaacaaatttaacacatttcggtggtcccaatttatatcacacttaacaaattgtaattgaattcaccttaccttcgcccctcctccagggagtgggaaaacggggaataaaatgggcaaacaccaaaaaataatgcaataattaggcccgcattgcaacgactgaaagaatttgggatcaaggcgacaacaaaagtgagcgtaaag

SEQ ID NO: 54376 - DNA, 258 bp, Heterodera glycines
atggtcattaaggcacaagacgactttttggactgtttcggggaccccgcaatcaccgggaagtccaatttgacagatttggccgagaggaagtgcacttggatcacatgcgcactcgtcgacaaattgtccaaaacagcgcccgaaaaactcgctattttccgtgaaaattttggtggaaaaagtgagcaacagctgaaattagcgcgacagattgtgctggaggagcaaattgctcaacaatttgagcattaccag

SEQ ID NO: 54377 - DNA, 777 bp, Heterodera glycines
tgctctccgttaataatttggcacaatggtcagtcttctgttatttttgccatttgacctttcccccgttttcggtttgtgtttctaaaacgccgcgttctctccccaaaaaacgacggcaatcgactgagcaaaacaccgacactcctccaaatgaccatcccgaagtaaaaaaggccaaaatcgagtaatttgaattggagtttaaattaatgactgacttttgtttgaagggatctgctaaaaaagttctccaatgggtcggtttcttttccatttttaaattattattttctgtttaatcacccgatcatttaaagagggttcgatcagttttggaatgagtaagtcaaaaaaaagtattcttaaaatattgtaaacattcaagaggattccaaccggaagaggaaccatcgcccgactttgcaattggtgagtctttctgccaattgttgcttgtcttttggaatgggaggggtttgactttttctctgtaattgcctaatctgtcgcacattttatacccaaaattaagggatttcggcaaagagccaagaaaatgcgttttttgcattgcgaaagaagaggaagaagaagaggaagaggacaaagaatgagtggaagagagagaatgagaagacggggggagccgcgaaacaaaaagcaaaacttccagaaaatgttcaatgtgtcaaatatgtatactgacaattctaatttagagcacatcgaacatctattattaattcttaatatcaaatacacgaaaaaacaaaa

SEQ ID NO: 54378 - DNA, 655 bp, Heterodera glycines
atgcttgcattgcttaatgcttcattcatattgatttcaattgcgtgtgcgagtaagtgaacaagaagtggtgaatgagcaatgaatgaatgatgaatgacgttgcacaatggtcagtcaatttaagtaactgtggagagaaaaaaagacatgcactatctcatcgtttctatttttttgcaattctcctttttttggcataatgttgcaaataatcaattcaaattatattttccaagaattttcattagctcacttatgtatagggaacggatttttaagcgcgaaaaagtccaaaataagtgcttaaataagggcgaaaaaagcgcgaaataagtgcgaaaataagcatgaaaaaattccaaatgtagaggtgaaatttgttaaaattgctgttttctctatgtaaattagttaaaattaagtcaaacaattttatttactgattgcagttagaaatgaagtacatttagaaattttcaggatttaagggtcgattctcaggggcgtatttttacgaaattttttgggtggattcttaggagtgtattcttgaaaatttttaggtcaattctcaggggtgtatttttccgaaatttttttggccgattcttaggggtgtatttatcatttttattgcatttttgttaataaa

SEQ ID NO: 54379 - DNA, 866 bp, Heterodera glycines
atgtccaaatcgttggttgaacgaatgaagaatttgttgagcacgggtgaggacgcggatgtttattttttggtgggggacggtgatggaaaagaggcgagtcttcaaattaaaaattaatttattaattaaaaataagtgaaaattttttagattttgtaaattggtcgttttttgattgtgttttttatttcaatccttttaagcttatgccagcacataaactcattttgaggtcagcttccgaggtttttgaggcaatgttccgttttgactcaaaaaacgaaaaaacggaatttggtaaaatattaatgaataaaaaattaatttatggcattgtttcaatttgcgatttgattggttctttttaattaaccttttttcattgcccattttttgattactttactctttcactttcttcatttttcaaccggcctccactaattacactaattaattttcaattagcctctgctaattgtcccgtggaggtccccgatgttgaagcagcagcgttcaaagtgatgttaagcttcatctatacggaagagttgagtgaattggacggagacaatgcaatggcagtgctttacgccggtgaattttatttatagtaattaaattaaataattatttttaattagccaaaaagtacaatatccctggccttgtcaatccgtgtttggatgttcccgtcttcaaattgcgcaatgtttttttggcatatgcacaggcctgcctttttgacttggaggtcaaacttaagcggattttaaatgaatttcttattcaaactagggttccgggtgtcgggtccaaccgggtcttgaaaaatttttataatttttatgtattaaaataaa

SEQ ID NO: 54380 - DNA, 1705 bp, Heterodera glycines
tcaaaatttcattccctccaatttcctttcatcgttttcaaaatgatgtggatgttcttccacactcaaatcaaggacacggttctattcaaatggtggaaagtcgaaactgtcggaagtgagtttttggatgaacgaatgaatgagcgcgttctgtttaaaaggtcttctgatcacttgtttggtcatgtattttggtgccatttgcttcgaagccatcaaatggcttaggcttatgcttgaacaaaagtcgcgtcagccgaactccgccaattccgccggactcaacatgacagaccaaaacaaaacagtgccaatgactaagtgagcaatggaaacggagggcaggattatgcccattccctcccatcagtcgccggtacgccgaatcgctcctctcccgggtccatcttctccagagtgttctgttcacggttcaactgctgctctcctacctgctgatgctctgcttcatgactttctctgtttggattggaatggccatttgtgccggtgctgccaccggtttttggctttttgggaggagagtgccaatgttggcatttgcatcgagcggagcaacggggagcggacagggatatgcgagcaccggccgaacggaactccattaaaagccatgcattcattttccccaattaatttgcatcgaataaacgcatttggccaagtgccccgtcatgtttcctttctgtcgaatgttttgtcactttgtgtcaatcttccgcttatgtttcttcgcttgtatttgcttttgctttcggttatcgttagccatgccaaaaatggacatgaccttccacttccgtaccagtgagttcattctcctccgagaatggcttcctcagagtattttcggtcggtttgccctttcctctctctctccaattcccttctctcccttttgttagcttatctcttttctttgcttgctgtgctcgccctttcggtggcttatgaattgctgcgtgtgttcagagccatccttttccaaatcgctgaaagacgtcagagtgaagaggtcagtaagtcaatcagtcctctgcttttgctttccgataatcggtccaactgatcagtgatcgctttcccagtgttgttcgccggtggcgagtgctgccccatcctccggtgccattaccgcctcctcctcatccgtcgccgcctgcaactgcttgtctccccaactcttttacaatgtcccccaatggtcgtaagtttcccgcgccctcccgtagccaaaaaaatttcgatgggggaataacccaactttttttattttttttgctcttgggccaaaaatatttttccagtattataagtttttcaaaaaaccaattttgccattgaaatggtgtaggtgccgccggggaatttttttcgaattttcaagaaaatctcccattcccatcactttcagcttctcctcccaattggtctcccatttccatctcttccaatctctgctccatttcattcagttttttttgggtttctctctgatgcttgttgccatgacgtgagccatcaaagttaagcattgtccgcttctcccacttcgttcagttacaatgtgcccatctttgtcgccctcctcttgggccattcgatcggttactttctcaccgcccctctctatcgccatggattggctgaagaaaatcggactggcggagattgctgctgt

SEQ ID NO: 54381 - DNA, 3955 bp, Heterodera glycines
atgacaatccaccatcacaatttatcttcttcggctgtagcatcattgccttttaacccaccaatgcttccagcgggtggtgttcatacccaaaagcgtcagcaacaaagcatggatttggagcaggatttcaaagtgcaggaagcacgacttgagcaattgaagaaggacaagagagcgctcgctgcgcgccagcgactgttgcagaaaaaaacgcatcctatggcaccggaggaggcgaacagacacgctgaagaagtgcgagcagtacagaacaactttgaagttgcgaaaaaggcgttgcaagtgcagcagcgactggtggacaagcagcgacaacggctaaaggaacagcagcaaaaacaatcgcaggcgatctctgcccagtcaacttccgtattggctgacccaaatggcagcaacacgacaacaagcaacatgaccggcacacaacatccgtcgatgatcggccaacagcagcatagccaacaacggcagcagaaacctatgatggtggttggtcagcagcagcagcagttacccacgcaaatacaacaacaaaaagttgtggcggaacgaacgcgaccacccagcacaacaacaagcaatgctcagcaacaccagcaacagccaacaacatcgggatttttgtcatcgatgcaccttgttgaacaacagcagaaagtggcatcacagacatcggatcacggacaacaacgacaacaacaaacagtgacaacgccaacattgggcgagcaaaaacccatcattggggtgggacagcaacagcaagtgaaaggaacacgaggcagaaagcggaagaaggtccaccaactaggcctttccttttctattccttttgtatctgttttagcctttgccggaaaatgtgcgttcttccgtccttggcggtgtgccattcactgctttgggcactcaacttgagcgagatgtgtacgaaacggtaatgggcggggaaaacagcgatttgtaactgtttttaaattgttttcaggtggatattctcgttggtttcgtcgctgcaaaaatggacagcagtagcagcagcggggcacctgctgacgataatttacttgttcagaaaatcctgtcacaacaaaataataccaacaacggcataaatgccattgcccaacaatgtgatgccaattaaatatagattaatatttttacattttatacgcattgttaggtccagggaaggtcaaaaagaggcgacaaacgcagaccaaaacacgcagtcagcccgacactaccaacgaattggacttgattcaggagcgcatcaaaaaaacggtaagaaaaacggatggaggggaatttctacgcgaataaatgagttaaaacatggtcattttctactcctaaagttcaggttgagttgataccaccgatcaacaactacatggagcagtaccaggcaaatgacaagcagatgatgaagtatccggatcagtccgctctccctgaccacgaggggtcggagccgcctttgcatggcaatgcgaccggcgaatacacattgccgttcatgcccgattattacgacgaattggaaacggtgcgcgaatacgtcgacgaggagacccttttgccgccaacaatgggcgaaatttgttggaacgtcgatttggacgcattggcaaagtgagaggagaagagaaagggaaaatgggcaaatgaatgtatcagatgcctactatttaatgattagggatggaatttaagtcacgaaaaaaaatcaacaaaaagtcaactaaaaaattcataaaataggcaacaacaaaaaaaatcacgaaaaataaaccaaaaattatataatagaattttatatttgcccgatttcaattgccttttaaccggtccaaccttttttatcggcatcttctttgctgaaattcaaattttggacttaattccgaaccctattaatgataggcaatgtcacccttttaaacactgttaatttgaaatgattttaagagacaccgaagatccgtctccgtccgctgttaatggagagaattcggacgatgtgaaggatttccctcccgtcgcgtgtctttctgtgacatctgccggcggaaacaacgacgaagacgaaaaattgctcaactttctttccattgaccaaattggcaatcggtcgaagattgtgaaatcggtgacccttttgggtgccccggggccaagccaagagacgccgcttgagccgcactggtcccgctttgacgaagtacacaaccattgttttgggcattaatgccgacaaacttcaacaattttgttcaaggaacctcgggacttggaccgaatggtggacgttgtgctcaccgttgacccatcagtgatgccacgggacgaatttgtggattcgttgtgtcaaattctcggcatccctcacattgaccacatcaccgagttggacactccgccgtacacgcccgactcgccgaggaacgacggcggcggcggtggtggttattaccagtcgttggccgagcacaacagcaccaatcagcaacaacataaactgtactatcatcatcaacaacaaacgataaaaagcgaaatcggagagacaacggtaaggactgaactgaccgcaacgaacagaaacaatgggcaagggaacggaggaggaaccatctgcaaacactgcaactccgtaattccgcctggcaaaactccaattgacgacactcacggccgactgggcttactgtcggaatcagtaagtctaaagataaaatagtccaagttaaataaatggtatttaaaatggtcgttcaaaattgcgcttttcagaaggacgaaaagatacatttctgttcgatgcaatgctactacaaattcttggctttgtttcgaatacctttgagcgtcgaatcattggaaatggctgaacgatatgtggacaatgttagcacatttaactttgttaccaattaagctcacctattaatgacttttttccaccaggtgaccctcgaaactctccggcaaatcagtgccgataattttgccaagcgaataaatgccgggtttacaccccaagcaaagttccttggcgagcaacaacagcattcctccggcgccgctgcttcggcctccatcgttcaaactgcaacaacttcgggagcaaacagtacaatgacactaaccgccgcaacagttaccatcgacggcggagctgcgatcgcgcaaagggaatttctgatcaaatcgtcggaattgcccgcattgctaatgatccagcagagcatggagaagaagagggtggcacaggcactgcacgacggcggattcaaatggcgcggcttcggctggaacatttgcgacacgacgctcgtccagtcgttcaggcgccaatacgacggcacaaaacaggtgaaatcggtggcattttgccttgactttcttccatttggttgttctcttcagcaatttgcagcggttcacttgcaaacgaatgaaaaacgaatgaattggagcgaagactcgcgccaatgttccttctgtgaacagattggggacggagaccaacggttgacgggccgacttttgaatgtggacgcgaacaaatgggtgcacgtggtcagttgaacgaataaaaaacaatcggaacattacattgtttacaattcgttttttagaattgtgccttgtggtcagctgaagtgcatgtggcggaagacgtgagaattttattttgttttatcatttacatttaatatagcaaaaatatctgtaaaattagggcggtctcataaacgtcgaggcagcgctgcggagggccaaagtgaccgaatgccgactttgtggtctaaaaggggcaagcattcgttgctacaaattggactgtgccaacaacgaattggcattccatttgatctgcgccaaacattcgcatggacatttcgttaaggacaaa

SEQ ID NO: 54382 - DNA, 353 bp, Heterodera glycines
atgggcgtcaaactttgctgtgtaagtgctggcaactgaggagggtggcttcccaaatgaacgtgtccgcatggaggtggacgattggcggtggagcgtcgcggacgtcggttttctgcccttcccgcgaccccctcgggtggactcagtgcgccgtacaattgtgctaaaaaaatagacagccataagtgaatgagcaaatgaaaagcaatttcaatttaaattaactaattaacaataagtgtaaaaaagaaaataaaaaacggaatatttttaattcccaattcttctgctattttcaacaaaaattccaggaatccggccaaaaagatgcaaagaatgcactaacataa

SEQ ID NO: 54383 - DNA, 1020 bp, Heterodera glycines
atgattagaaaagaaaaatttcaaattattttatttctaataatctccctgtgtttggccataactctgatcaaatcggcatgcccaacaattgtacatccaacggcagcggaaggtggatttaaattcaatttttttgcattttataactgcaagctctgatcggtaagcatagggttaaacccaaaaccgatctgaatttattctgttgcacttcaaattagatgagagttcctctaaatgaatttcgaagaattttgttttagaaaaatttctgttttcttttttttttgactttttatgaaaattcgcaccttgactagggtgttgctccccaacatttttttaaaatttctccaaccatcccgactaattttgtcgaaaaaatttcctacctgtcccagactgttctctcaccaaatgtcagggcccaaccctaggtaagacaggccatttcaaggaatataaatttcatttttcaaaaagttctgatcgtttttctgtttggcaatgccaaactgaacacattttgagttccatttttggctttatgcattcgttaattccataaagaacgcaaagttggcattctgtcgtcgtcatctccgttggcgccaaacacatcgccagaaacaagcattggaaatggcatttttgaacctcatcaacaccgtcggcgttggcgccgtggaaaaagtgcaaaaaaacaatttgtgaggagtcttagcagcaaatcgatgaagagcagctcgtatcggaccaagtcaggccgacgtgtgatggaggaattgttgccaaaagaagtgcttaagaagaaatcatttctagaaaagttgtttggcattttgtctaaaaatgcctgtcataaaaatccttcgaattttcagggtgaaacaaaaattagtgcccacaagcagacgtacatttaagctatcacttaaccgggtatagttttttttgtgcatatttaaaaaagccaaatatttatgagtttttcaagaaaatatgttcgaaagttaa

SEQ ID NO: 54384 - DNA, 49 bp, Heterodera glycines; identical to SEQ ID NO: 51181

SEQ ID NO: 54385 - DNA, 656 bp, Heterodera glycines
gttttcggggcagtccccccgaaccgatgcgcccagatttatggggagaccgaatccttcgggaatagcttccctatagcctgtactttaattctgcgttggatttttgctccccataattgtttgagtaccccaaacggacacttgaaaaaatcgatttttttgttttcggggcagtccccccgagccgatgcgcccagatttatggggagaccgaatccttccggaatagcttccctatagcctgtactttaattctgcgttggatttttgctccccataattgtttgagtaccccaaacggacacttgaaaaaatcgatttttttgttttcggggcagtccccccgaaccgatgcgcccagatttatggggagaccgaatccttccggaatagcttccctatagcctgtactttaattctgcgttggatttttgctccccataattgtttgagtaccccaaacggacacttgaaaaaatcgatttttttgttttcggggcagtccccccgaaccgatgcgcccagatttatggggagaccgaatccttccggaatagcttccctatagcctgtactttaattctgcgttggatttttgctccccataaatgtttgagtaccccaaacggacacttgaaaaaatcgattttttt

SEQ ID NO: 54386 - DNA, 116 bp, Heterodera glycines
atggtcagtcctccgctgggctttgatgggtcacttcgctgggaatggcattgctgcagcgggtgggccgggcactgccaacaacaaccaccgaaggcaacagaacgccaacaatt

SEQ ID NO: 54387 - DNA, 750 bp, Heterodera glycines
atgtatatttatcaaaatttattctacaatttagggcataagattcccctagttcgtataaacaaatacaaataatatttaaaaggagatatgaaatacaattaattagattgagaatatttcttcatccgaccgttttaattggaagatactcgaggttcgagcaccacaccacatgaggcattaatgaaagctgtgccgcaaatatatttaaaaatataaattggaaaatttaaaataaattaaaaaattatttattctgaaagtgaaatagaaataggtttcaagaattcgccattgttcccgggctttacaactgtgcgactgcgtgcaaaccactgcttgctgcccggtcagcatcattatcgagcatttttgaagcgcgttggcattggtctagaaaaaagttatttttacattgcggaagcatcggaaaaaacattttattattaataataaactatagataaaatccatttaaatatcattttcttttaaattcttcgccatgaaaataaaataaacaaaatatggtttttaaaataatttctgactttgatataataaatgtgtgatgcaaaatgcagatttacgcaagaattttatttttaaaactttttaattaaccataattttattctttaaaaaaacataattatagaaaaaaataaataaaagccgactcgaccagatttttaatgactagggccgcgacttttagtgatgaaaaatttcgaaatagttaataaa

SEQ ID NO: 54388 - DNA, 1425 bp, Heterodera glycines
aattctataatttcaattaattgctttttgtgctcagattgcccccatttttacgatgccaatttcgggcgaactttgcacttcttcgttgggttgcccgtcagtttactatttgcatggaattgttaccataattttattcactatttttatgctggtaattacaaggagaaattataaataataattgataattaaacaattcattaataattagtaccaccgaaattcaccaaacaaacatccgatgatgggcaaaacggaaattatgaaagtaccgaaagacaagattttaaaatttgaatttcaaacccaaatttaggtgatgttcaataagggcgcatcaatttacagcggaccatcgatggacggaaaaaggccgcccaagaagaaaaagtcacggaaagtgccatattgggcaatgtattcggacaaatccatttgggcaattttggtaattgggcaaaaaagtataaagaaaattgtaaggaaaaagctaatttaaggtggcatcgttcggtaattttatgggcactcaactttcactccaatttatgcccacttacattaacaaggcaaacaattggcacttttttaatgggttaattaatgaaaaagttttttttcatcatgtctttttataattgttccgttttttcattgcgtcactttcgcaggtccttcacatgccaatcgaacagacggggatggcatcggcaatttcacccgcaattatgtttttcatcaaactttttgctgggcagagctctgatcggatacagtaaaacaaattgataaaataaataagtaaaagaaaaatgccaaatttgtctttagatttattagtgacggaagaaaattgcgcatttacaacaccctttcgctgggaatgatgggccttcttttcattgttttggcattgctcaatccgaacaaaactccggctttatgtttggtgaatttgttttgtggcttcgctgtctttgatcgttaaatctctcttttcccaggtcattctgatcgtctccacttgcattctcggctttaactcgggcggatttttcaaatcttcgcaaatggcatttgttttctaacaaaatgcttttgattatgaattattggatcaaattcgattttgaggtgtcgcgtcagcattcccacttcactttggcaaacatttccttcctgaattgcgtctctatgctccttgtgccgttactcaacgaaattattgcaccggaaaacgaaccaggcatttttatgggggttaatctgtgtggaaaatggcaattagtgaataatattggggggtttaatttcagaaaattgggccattgttctgtggattcacgggatcattctgctgttgacaaatgcctttttctgtgcgttcgcttcggcaaaatccgccgaatggacaaagga

SEQ ID NO: 54389 - DNA, 824 bp, Heterodera glycines
atggtattttaaattaatgataatgattttttgaattaataaaataataaatatttttaattaatagaataataaagtctaaattaaatattaaaattaatcgaataaaaattaaaataaacaaatattaataaaaatttaaataatttataaatctcaaaatgagttaattttaggattagacgaatccgggtatttgggcaaaactgggtccggatatttccgggtccagcaaagccgggtccgggtccaagtttttaaaccgggtacgggaggaacagaaagtggaagaggaacagaaagtggaaaggaacagaaagtggaagagaaagtggaagaggaacaaaagtggaagaggaaaagaaagtggaagaggaacagaacgtggaagagaaacagaatgtggaagagaaagtgtaagaggaacagaaagtggaagagaaacagaaagtggaagagaaacagaaagtggaagaggaacagaaagcggaagagaaagtggaagaggaacagaaagtggaagagaaagtggaagaggaatagaacgtggaagagaaacagaacgtggaagagaaagtgtaagaggaacagaaagtgtgagaggaacagaaagtggaagagaaagtggaagaggaacagaaagcggaagagaagaagaggaacagaaagtggaagagaaacagaaagtggaagagaaacagaaagtggaagagaaagtggaagaggaacagaaagtggaagagaaagtggaagagagacagaaagtggaagaggaacagaaagcggaagagaaagtggaagaggaacaaagagtggaagagaaa

SEQ ID NO: 54390 - DNA, 605 bp, Heterodera glycines
atggcacgacaaaaattggcgcagagaagacaattcgccggcgaaacattggacgaatttgcacaggaaattcgaagtttggtggcaaaagcctacccggacaacaccttggagatggacttggccaccttggctttgggtgatcgcgagaatgaagtgaaggaagaaaatgcaaaacggattcagcaattccgatcggaaatcgcgcgcgactttttcagagcgaatatgctcccggagataaaagagagggtcatgtacatggaggaacctcaaaacctgatggaagctcttactcaagcaaaacgagttgagcaaattcaaggaagcttggcgaatgatcagtggcggatggtgcaaagcagcaaaagcgtataaatgaaatcccgtggacagaaggaatgctagttctgttgcgaaaagtcgacaaaaaacataagttggagccgaactacaaagggccatatcgcgtaattagaattgagaagccaaatttgttgctaaaaaagttaaatcctgacggcacagaatttgaggcccatatggacagatgcaagccatatttccagcgcgaggtagaagagagaaatgaacctggcaatgaa

SEQ ID NO: 54391 - DNA, 1633 bp, Heterodera glycines
atgtcacgccacgaagcttttattcccgaaaaagctcgcaagtcccgcgaccaatcgtcaccaactccgcccccgattttggtgtcgatttcgtcggacgaatcggctgaagaggcttctgaggcgggaaatcaactgaaacaacaacaacgtccggtccgaccacaggacggccgcctgcacgagttttccatgaaggaggtccgagtcctcagcacgacggatgagaaagcaaaggaatcgattcgggagaaggagatccaggagcttaagcaaaaactcctgcttttggaggccgaaaaggcaagtgatgcgcgcaaggcggcgaaagctaagaaagaggcggaaaagcgagccaaaaaagaggcggaagcgagagtcaagcgagaaatggaagcgaaagcccgtaaagaggcggaagaaaaggccaaaaaagaagcagaagcaaaagcgcagagagaggcggaagaaagagccaagaaagaggcagaagcaaaagcgaagagagaggcggaagaaagagccaaaaaagaggcagaagcaaaagcgcagagagaggcggaagaaagagccaaaagagaagcggaggaaagagcgaaacgagagagcgaagagaaagcgcaaaaagaggcggaagcgaaggccaaaaacaatctgagggctccatccgagataagcctttgtgaggatgagttagagtgggaagaagcggaaaaaaaagtgctaaatatattgaaaaaaagcagcgagatagctaagaaaaaagaagaaaagaaaggggaggagaaagttgccagaggaataataagaaggaaacttacggtgaaagagaaagaggaaaaagccaagaaagacagtagtgaggcagcgaaaagagcggaaaataatgccattgaagaaggaagggaagaaattcggaaaatcgtgagagaagcagaagaagaagcaaaaacaaagaatgagaaaatcggtgaaagagggccattgataggggagaattcaaaaaaattgattttggacacaatggagcaagaatatgtgccaggaaaagtggtgggctacatagaagacccaagggaggaaaaggaagaggaatgggatatggccagggcattgaaaaaccgttcaaaagaagacgaagtgcgaataaaaaagagagagcaaagagaagaggggtggaaagagctaataagcggagaaagaaaagcgaagggaagagaaagaccgaaattggtggaaaaattcgtgaaaaatctgttgggcccagctgaaaacgacgtcagccgaaatcccgggatccccccccccgaaggtagccgcagaggcccgacaccgattccttgttggaaccgctacaaaaaaaggcctcgcttcgtcagtccaattcgaaacatcagtccggtccgaacacgccaaagcacagttggaacgcagacgacaaacgcatggcccagctgcacaggagatgtggtggaacaaatgcaactgatgaagacgaagctggacgaactgatcgccgctctcaagaaaagggaggaagaaaaaaacaatggaaacaacgagcaaattggcgagaaggaagaacaacagaaagaaaatggaaaataggaaataggaaagggagtaaaaaaaa

SEQ ID NO: 54392 - DNA, 1225 bp, Heterodera glycines
atgaactgctcgtcaaatttttttgattttgccgcaacttttgtccccgttttttttgcctgtaaacacgccggaacagttctttttgctttccaagcaaaaaaggttaggagaaagctgacgataaacgctccaatgtacgcggacgtagtggaaaattgcgagacgcttaggatgatcggctgctgctgccagttcattccgttgagccttccgccgatgctttgtccgatggtggcactgtccgtgtcgggcattgtcatcctcagtccggtgctaaagcattggttaatcattcgaaatgccaatttcagtcagtccgtacagattgacgcagttccatctgctgttgtggtgaatcgatgccctgtcgcttgcttccatttcaaattctcgaccatgcaaatttcctctttcaatttcattgtgccgttccgcgtattgttcatctgtcgaagaaaggattttttaatggattgtcaaaatcgttctccccacgggttaccccaaaaacgacaatgacaaaaatggtgaaaacgacgatgaatggtaacgatgaaaatttctgggagggggcctcattgcatttctgaataaaagagatttttgtaattataaggaagttaactttttcggtgtttagaaaggctaaaagaagatcagttttatttaagattgaccggtcactagttaaacagcctttaaaatattgttatatatattttttaggtttaacatttgagttttgtaccagttttgtgggagatctgacttttggggttattttgagattagtatttacggccttttccctagaacaaataaatggtgataatgtgaaagaaatatcgtcatatgaggtagataatgtcatgggtatcgcaggtggatgagcaacataattggaagtttttttgggaagtggatgaggtgtgggggcattatttttgtttgagtttgtttgttgttgttccaaaaagcccccaaacctcaaatcattgcacatggaagtcagttttttgtcggatgaacatttgtgatcagagaaacagtcggcggaaacatcgcagtgctttttcctttgatatcatcccgcagaatcaggcgatcattgtagatgatgaccataaaccatggttaaaaataagatttttgaaaaaacggcttttacattgtagagacaattaaaaacagagctgccaaattttcaatgcatatttggcca

SEQ ID NO: 54393 - DNA, 278 bp, Heterodera glycines
  unsure (1)..(278): unsure at all n locations
atgccaattgaaccatttgaattggtgaacgaacggacgaaagaaaagctgacactgaaacaggagaccgaagaatcatccaacgaaataatatataattggttgttgaaacggtgcccaattggggagacggcgacggcgccagttaagtggaaaaaccgcgaaaattcgggcgccaattttaactatgtcagatttgctctacggcatgccaattattcggatgccaatttgaacaatatccgatttgatttgtggggtgcaaatgatcccattgn

SEQ ID NO: 54394 - DNA, 671 bp, Heterodera glycines
atgaaccgccggtcagcaaatattttgaaaaattacaaaattttcatttaaaattacaaattttcattttcccccatccattttttccatgtttcagttggctttgtaacgacgtgtggatggacattctcccatcttttaactatgccaaactcggcctcaaaatggcattgctttccgaccgtttcgatgttttggtggacaaacatttcgacagaaaaagcgaattgacaatttggagaagtgtcgtaattcgcaaggacaaaggaccaaaagcaaacaatattggaccaaaaccgaaagtgtctatattaattggtggctatggcaaatttgtgggatttccattgccggaccatccgttgcccaacaaaatcagctttaagaaccttcaaattcagtcatccttaacttttgtgtacgctaaagcatttttctcttgctttaggtacattgactattccgtgatcaaatttctccgctccaagaagcgattctttgacagaaatggcaccaaattgaaagtgtttgtgcattcaattgatacggatgtccaaccgatttgggatgtttttatccgtgaaatttggccaatttttgcgacaaacattcgtcatttgggctttgacgatggcgatgctttggacaaaacttcaaagaggtgtgtctag

SEQ ID NO: 54395 - DNA, 404 bp, Heterodera glycines
atgcagaaaaattttaataaaaataataaaagagaattggaacaaggtcagcatcaaatcttaattttaaaatgaatacactgaaattcataattagtattttttactaaatgcaaatagaaaatctttaattataaaatcatcatacaaaatagagctcattgcgcgccataaataccggaactcaccgcctgaattcattatttttagaaagtccaaattaatttataaatactttaatcatttaaaataaatttaagtgaatacttattggaataataattgctttgagttttgcaatttctatattcataaaactcatggttcgactttggaaactgaatagaaaaaattgagaaaaactaaaaatcctttcaagtaagttctaagaaaaaatatcaaaa

SEQ ID NO: 54396 - DNA, 621 bp, Heterodera glycines
atgaaattctgtattttattatttttatttttgattgccctaattattccaattgaatcagaaaagaaaaaacttcagcagaaatcatttgatgaaatatttggagaaaaatggcaagaaaaagaagaagaaaggcgaaatgaactcaaaaaacgagaaataattggaaaatattataaaattaaagaaaaaataaagcaaaaaggaagaaaatattcagcaaaagaatgggataaaattaactcaaaaatagcgaaaaaattggggacaaatcggaaatatatttacaaatggattaaagaatttggtcttcaaaaacaaatacaaaaaagctataaatcaaaaactgatgaacaaaaattagaatttgtacaaaaattcattgaaatgaaaaaggaatataagcaaaaaagaaaatattcagcaaaagaatggtaccaaaattatgacgaaatttgtaagaaaattggagttagtcaaagaataattgagaaatggaagaaacattttggcattcgcagtaaaataacggaggaacaaaaaatagaaaaaatgaaaatttattggaaaataaaaagtgaaaatccaaaaatgaatgataataaaattgcaaaaacatga

SEQ ID NO: 54397 - DNA, 337 bp, Heterodera glycines
atgaagctacaccaattattcattttgattgtatttttgatcatcgaacttcatcaaattaaaatggaaaataagaaattgcaacaaaaatcatttgatgcaatatttggagaaaaatgggaagaaaaagaagataaaagggaaataattgaaaaatattataaaataaaagagaaaataaagcaaaagagaagaaaatacacagcaaaagaatggaataaaattaattcgaaaattgcattaatttttctaaaatctctttacattgtgaatttattttatttttattgaaaatatgtttattatttacgaatgagctccagtagaaagtaataaa

SEQ ID NO: 54398 - DNA, 639 bp, Heterodera glycines
atgcccgagaaaattgggcatcaaaatttattgactttgacgcctgccggattaggaaattggatatttgatcctttccagaaagaattgcacccgaacattgagcaactgaacaatttggaaaacgcgctcatagcacagattgaaaatgccgaaaataatgattcttccaccgatgcttcacccccttcagccggtggaaatgccagcgaaagtttggctttgtccatgaaacgccggcggcgacaatcaaaccaacagaatgccaaaatgatcgatgacactgacagagtgccaaaaatgaaacagcaacggcagccaaaattggcaaaatcagtgccagaaatttttgctgaggaaggcgaagtggcatcggatgaggaggagttggaagagatggaggaggagcagctgtccgcactgaaccggtcactttctgtttccgctgcccaacaatgggccggctttgacgggagaccaatccaaattgacaccacggacgagacaaagtccgaaaaattaaatcgaaaattttaaaaatttataattcttagccccctccttttgtttgcttcccatgccgccgcaagagcactcaatttgcgtattccgccacgatattttcaacgctaccagaag

SEQ ID NO: 54399 - DNA, 633 bp, Heterodera glycines
atgaaggtaaattttgaaaaattaaatgtttgaacgtataacatttctttatcaatttttaaaaattttaaaatttagtaaaattttggcctaaaattaataaaaagtgaataattttttatcaaatataatttttttgtttgaagttttatactattctataatataattaatcaatataattaaaaaattttaagcggaaagaagcattgtatagtttaaacaatgcatggcacaactttttgaaggcgggtgagaaaatggatggtggtgatgaaaatgaggaggaggaagagagtgatgaggaagagagtgaggaagaagagagagaggaagacgagagtgaggaagagagagaggaagaagacgagagagaggaagaagagagtgaggaagagagagaggaagaagaggagagagaggaagaacggagtgaggaagagagagaggaagaagagagagaggcgaatgatgatgaagtggttgaagagagtgaggtagaggacgtggatgtggatggcgttataaatggtggtgatggagcagaaaatggggacgggagaggaaatggaggaggaggaaacgcacgaggaggaagcggaggaggagggggaggaagtggaggaggaactg

SEQ ID NO: 54400 - DNA, 59 bp, Heterodera glycines
cgaatttacaattgatttcaaatcgctttgtaggacttccaggggcccgaaaattagga

SEQ ID NO: 54401 - DNA, 231 bp, Heterodera glycines
ccctaccggccaattctctaccaccaattccctactggccgattccctaccgccaaaggcatttgggccatttccataccaaaagtgttgaatattgataaacattgagattaaaacacacaagaaaatttattcactgctttttagacagctcgtcaagagctttcggatgataccaaatttatcaagattcgatcgttttaaaaaagttagaagtgtcaaatctctcaa

SEQ ID NO: 54402 - DNA, 257 bp, Heterodera glycines
aatctaataaatctaaatctaagagttaaaaaatggtccgccaacgcttccatataacatttgtttcatgtccaattcatccatatatagacctactcacgcacacagaaaaattaaattttagcacagaaaaatgaatctatgggtaagttcgatataaatgagaagatatgcaaggtaacaaataaataatttttttttgaccgtaaaataggtaggtaatttgaatttggcgctattaaatgtgatttatttat

SEQ ID NO: 54403 - DNA, 588 bp, Heterodera glycines
  unsure (1)..(588): unsure at all n locations
atgtctccaacggcatgtccccttttaaaaattcatggctcactccagcaaaaattatcagcaaaacgtactgcggcacacttgacaacatcgcctctctcaacaattccaacgaaacgacaacaatttttggacggcgcagcgcaattggacatcacagcactgctaaccagcactgaagtgtctgaacccgtgcgtgcagtcattcgccaactggacgcacttctcaagctcgcggtggacatggttcataagacgtcgacccaggacactcgcgcggtactggaggaggaccggcaagaacattcggtcgttctgatgggcgtgccggaatcggacagttgcctttcctctacacggcgcgcgattgctgaccaacagcaggtgttggacattctggacgtttgtgaaatcgaggcaatgccgaccaaggtttaccggatgggccaaagaaaggaaggaagaccccgacttctcaaagtggaaatgccaacccgaaagatgacacaaacatttctccgcaataaaaaccgtcttaaaaactccaaatttcaagctgtatctgtccgtnccgtctctctcccctga

SEQ ID NO: 54404 - DNA, 63 bp, Heterodera glycines
gactacgaggaagtggccattgacactgtggagggagatggcgctggagacgacgactattga

SEQ ID NO: 54405 - DNA, 1940 bp, Heterodera glycines
gtacgcatttggtgatccaaaaggcatcattctgttcatcacacaccgacgaaaccgaaaccgatttgcacagcgacacattgaatatgaattgtggcgtttgacaaagcataaagcggaaactgtgcgcattggatacccggaatgtacggaaatgatgaaaaatggcaggtgattaaagcgatcggtgggggggggggtaaaaaaccaatctctggcataacgtcaccctgtcatattttgaattttggttccgaaattagaggttctcttgatacatgggataactttaacttttcggcagagtgtccatttgtctttttttgaataattacttcttttggagtgacagaagcatcaaaagatgtacttttttcaaggcaatcatccttttctgttgcttactcataaaaatttcaaaaaaagttatttttgaatccaaattcgaaataaaccaaatttaaaaaattgtcaggcgatttttgtgtgaatgttcggcaaaaaaaaacaattaaaaaagcatttaaattagcactatttaatgagaaaaggggaacaccattaagcctacgaattaaaaactttatatttattatttaacggtccaattattttgggcattttttcaattattttattaaaaaactgaaaaaattcaattatgcgttttgtttaaccaattctcgaatatttcctcttcagattaacactcgatgacaactttaaactgcgttttgatgatcggacggtggccattgtttactttgtcactgatttctttaagccaagcgaagatgattgggaaatgcgactgatgatcgaacgttccaccgctattgtacgtataattgtaaaaatgccaaatcacttttcagaaatattcaaattaggccaattttccgaaaactaaaatttgtcaaaaaatgtaaaagttttatatttaaacacacgaaattgctgtaaatttaataagaaagtcaaggaaaaataaacattttctgaaaatttaactcatttaatttttgcgaaatattttcccgcacaattcgcatttttatggttgctgttcagaaaagcccaaccagcggactccaattggccagcatgaagaaaacgcagcaggtgaacatattttttaattttaatctttttactttcagatacaaatttccatttaaaataattagttaattagtttcactaattaaggtgcttgcgcaacccgggatggtcgagcgttttctgcctgaaaatccgaaaaaagccgctgccataagagaaacgttcgccgggctgtggagcttgactgatcaggacgatgcggccatcgaagccacgaaggtgaagcaattaataattgtttaactataagcatagaagaaaattgttttattttaatcaggcccaacctaataaatgaaattaaaagcttaccttttcttttttagaggcaagagaaatttttaaatagttcgtattattattattatagctcttggtaattagttcggcatgagacatttcaaaaaaagaatcgactgggtttaaaaaaattaatttttttatattagtttatccatcataactgaataactagagcaacgaataaatattttagttttattgcgtctcaatgaagataacaatgtttaaacttttgaaaataaatatgactttttaaaatgaccagcaaaaccacggagctcgtgattttgaagaattcattcattcataaattaatcacttaaatgagaattaattggatttgaattttttaggatgcaattgttaatccgagtaattatgtgctcaagccgagcaaagaaggcggtggcaacaacatttgggacgacgaaattacgaacaaattgctcaattttacctccgaagagcgctccgcgcatattttgatgcaaaagttgcagccgatgttttttaag

SEQ ID NO: 54406 - DNA, 233 bp, Heterodera glycines
atggccaaaaagcacacaattgtgcttacagtagtcggagtttgtatcgtagtggcagtggttgcctggggcattattcggttaattattatgtcataggcaaagcgaaaaaaccgttttcttacagtagccaattgggcggttcaaacacgagtggcattgttactgtgccggttcaactgtattcctcatccatcctgcacatatggctgaaaacgcgttcggccactcag

SEQ ID NO: 54407 - DNA, 353 bp, Heterodera glycines
atttttcaaaaagtccaaatccaacttcacataattctgaacaatcaactagaacggatctaacttcccctgaaaagcaaattggaaaggctcgtgcaacaaaaaataatgctgctggaaataaacggtaagaaaaaatttaaaaattttttatccctaccagtttctcccactttctttccggaacgggccaactccgtctggccaactccgtctgagccaactttgagtaaatataactcttgaagttattgaccgaatcaaacaatcttgatatcattcgaaagctcttcacaggctctattagcctactaaaaattacagaaaatttcgaactataaaaaaagatagaa

SEQ ID NO: 54408 - DNA, 306 bp, Heterodera glycines
ctcaatcacgttatcattcaaaagccctagatgtttagaagatatttataagctatttctcagtgattaatcagctctcaaaaaagttgtcagttgaaaaccgcaaaaaaggcagaattttcgaagttttttatttctatctttttttatagttcgaaattttctgtaatttttagtaggctaatagagcctgtgaagagctttcgaatgatatcaagattgtttgattcggtcaataacttcaagagttatatttactcaaagttggctcagacggagttggccagacggagttggcccgttccg

SEQ ID NO: 54409 - DNA, 777 bp, Heterodera glycines
atgtgcaacatccataaaagaggaatagatattggaacaatgggtgagcaagaacctttttgaagtgggggcatccattggggcaatggacaaattaatgttcgaatgggcgaacattggatggaaatagcagataaaagcgatgacactttggttgaaataactgaaaaagaattccgaatttaggggtgtaaaaagacaaaatttattcaaaaaagtaaaaaaattaggccaaatctgtattgagctaaaaaattttaaaaccacaaattcttgtcaagaaataaataaatttttgagattgccacgttttttgattgttcgagtcgtcgtcgtggcactgtgaagcgattttgtgtataaaagtgaatttttttgaaaactgatttttgacttttttgttcgaattcgtgttcggggttcgaattggcttaaaacagatgccagaatcggtttccccgactctgaaaaccctaaaataagtttatttaaataaaaaatatttttgaaaatctgagtacagataaaaaaatatcggaaaaaaagattagttttgccttcgaacaccttgaaatgtattgttttgcaattgtgcgggtgaaaatgataaagaatgagattttttgggatttttatgcaaaaatcctttgattttcaaattttaagtacatatttcgcacatatttcagcattttttagcacatatttttattacatatttcaggatttttagcacataaaaatccggtctctaacaatcaatatcctgcttactaa

SEQ ID NO: 54410 - DNA, 1601 bp, Heterodera glycines
atgatggaacaacttcggcacgatgagacggtgagatttttggaagggggaaggattgggtcaaatgtatgccatttttgtcatttgcatcttaaattacaaaaagttatggcattatattaatagtgcgtttgtttttactattttttgttgtattattttcaggcctcttcccaattcgctcctttcattttcatgccaaattgtgctccgttttttgcttggttactgtcacaacaacaattaccttacagcaacgggcggcggcacaaagcaacaaaaggtgccgacaatggcattgggctagggggaagtactgcttccgcctttgttgtgttcggccgaattggcgacgtcgcgcaacggaatggaactcgccgagtggagcattcccttttcgcacacccaaattggctgaaaggagcggaaatggttcgaaagcgatttatatttaaaaaaacaaaaaaatcgctgaaaattttgacacagggggaaacgacctgttccgggttaattgtgagtagttcatttctccaacgccggttctccccttcagttttcccctaaccaaaatttgttcctaaacaaatagtttctaaaaaaattaattcgaaatatgtgatcctccgtcctccatcaattttcaggtctctgatttgtgttccgacgttgccacaaaaatggatgaccagaagcagtgcgtcaacactacgacgaacaatggtcttgtccaccatcgtcgattgtcgtcaaaattggaatggctcgtatttctcgtggaggtacaaaatgtttattaattatttttaataatttattttccgattttagcagtgccactcggtggcatcgtccaatttgtcctctcttgagctgtctttggccccatcagaagccattttggtgagttttgccaattcaattttcaacatttgctccctttccattttggtctcgtttctcggcctctgtgttcgtcacgctgtgctccattttccaacacgttcaacaaacattttgccaaaatggcagtgccaaatttcgattttctcaaccgaatgtatgcacaaagaaattattgtaaaaatgaattcttgagattttcgaaatatgcttcacattatttccttttaaataattaaaatttattaattaccttcctaattaggtaataaattgtcttccccccatttagcccacaatttgtgtcccattgtcccactttttggccagcatttgcagtgtttacaaagcgcgcattgactccgatgagcgctggactttgctcaaatttttgcctctccgtttcttcgaaatgccagtaaaaattgcgagagaaaatggtagaagtgccgaaagcgaatttttaaaaaacattttgattttttaagaaaatggaaaagtctccggagacggacaacagaagctcggtgaacaaattgccgaattcaatgcgcgaacaattgctctgtcgcattttgccaatgcgcaagcgtcgcccaaaacaactccgattttgtcaaacaacaacggcacaatcggagaccgaattggcaatgggccaacggaagcgccgaaagccaaacggagagaagagataa

SEQ ID NO: 54411 - DNA, 304 bp, Heterodera glycines
caattgccaattgtcccttcctttttggccgttttttttatttccgtcgcttttcctcccctcccaaaatgggggaagttcgctttcactcggattacgtttcctccaccgcggaatcccaaatcatccaaattgtgctcggttttgtcgtctgttcggtgctttgttcgaattggtgtcaaattgcaaattaacgtggtaaaaacacacaaaacattttgaggtatggcgggtacagctgtttcggggagggccgcctcggttatgtgagcggattgaactttgtctgtttgatgattaacat

SEQ ID NO: 54412 - DNA, 1153 bp, Heterodera glycines
atgatgtggataaatacaaatcgtaaattgcgaagagaacttggacttgaaaatggcaataaaaatggcgaaaaaaaatttcttgaacgacaaaacacatcaaaattaattgaattacaagtaaaatgttatttagaataagttattaaaattaatgagttaaataaatctaaattaattcctgggctttataatagcaaaaataattaaatatttagcacttagttttttattcacagagaataattatacaattaaaataataatgaattgttttaaaatttttaaataaataaaaaaaattaacaatataaatattatacataattagcattttgatattcatttcaatgaaaattattagcaattaaaattagcatattaattgttttaaaattttgaaataaataaaaaatttaacaagataaattatataattagaattttgatattctttttccattgaaataattgcaattaaaataataaattaattgtttttaaatttttaaatatataaataaaatattataaaattgtaattttgtaggaatttcttatcttttattcaatgtcaattgaacaagtgttcactttttggagtaaaacaaaagaaaatctgataaacaaaaaatacgataacaacaaatgcaatttttttctatatgcaaaagtaattaatttattttttattttttaatttcataaacaataaaattttaggtaaaaaagaatttagctgaaattacacgggaacgaatgagtgaatttgttgcgacaagaattgaactggaaaatatgtgaaatttcttgacaaaattaattaaattcacaaatttttagtagataagcaataagaaaatataaaattttactgtatttaaatgtatttaaatattgcctaatttgctagacttcattttttgcttttaatgaagaggtccgatgttgtaatttaaaatttcggttcgattaaaaaaatccgtgatttcaagttaattattgttgtttttgccacatggtttgataagacaaaattcgttttttaacgtgtttagtgttctcagaaccacttagaaacattgctgccgtggtggccttatggaattattttttaaataatcctccgccagcaggaggagtcgaacttcta

SEQ ID NO: 54413 - DNA, 1546 bp, Heterodera glycines
atggatatggtcaaggaatacatggacttggtccaatgggtcgtcgaaataacaattgtgccattggtcgaacagcccattctcggcattgatccatcagcttttttggcacttttaagccaaattcagtcgcaaaacattgcttgtttcttgataagcaagcaacacaagatggacttggacaaattgattagcatggcaggcgactacttacaacgagcgttagttcttttatattttatttttagtacacttttgatttagattaatttaaataacgcgattaaaaaattgtaaaacaaatttaaatcgaattaatttatgttttatcggccctctataacttctattctaaaattattgaattttcaagcaaaaaggtttgcttgagttcaattgatttttcgaatgtttttgcagtcaattactcaaggttctttcttttttattatttttgtttatgaaatttgagcaaaatgccaataaatttcctaaaaaattacccaaaatatgccttttggtaaactttttttaaaaaatttacagacttggcgcaacgaacaaaatacgaaatatattcatcgatgcaataactgaagctatgatgcatgccgagaacaatggcggacagcagaacggaccaaatttgctgatacaaaatgccaaaatttatttaaaaatttatcaaacaattgcagtttgtatgcttgatgaatgggtgccaatgatttctgcagtgccatcgattgcttacccatggattgcgatgaaaacctttcttcgtcaaagtgctgatcagttgagtgaattgatcgccgagtggaaaatggccaaggagcaccagttctctgatcgtgaactggaggaaaaagccatccgcaaatttttcatgaaaaattgcaactgatgtcttgcttattattcgtagaatgcctcttattggaaattatatttacagtataacttcacatgatcattatttttcacgattcaaaaatagctcgagcagattttcctcttcaatgtaatccaaatttgaattactgagatagagaagaagcttgcccgccgaggggaagattaatagattaagtgaggtgataattgatcccataagatcaagcaaattagggggttggagaggccagggttaaatacatttaaattcaacagagttacggtgactaagctagaggacctacagagatttttttttaatagatgtcaaataatttgtaagactgaattagtgattggtcccaaggtcccaatccgaaaaatttcaaaatccccttgtagaatttcctattatcttattaagcagtttcgcagattacaagttcattctgggagtgttatgccggcgggctacagcccggactgctggacaagaggggattccatgcagggctgggcgtaactggattttcaattaaggaatccgtaattacgggggtacaaaaaccccataatttcccgtaatccgtagttacaaaagtttaattttttaaaataattttcaatttttattaaatgatccaataaa

SEQ ID NO: 54414 - DNA, 1499 bp, Heterodera glycines
cagactggtttaaactttggcagctcaactgatcagaatcaggttccaaaccttgggttgaacattggcaatgtgtccaatcagcagaactttttggccacaaaccaacaatttgctcataacaatatggcaccaaaaaactcaaacatccaaagtcagatgaatactcttggcgtgcagaagaaaccgaagaaacaaaggaaccgaagaaagctaagccagccaacatatttattggaaagtgacgcaaaaaattttgccaataatgtacaatactggacaggagggaaattttcaaatttgttatccaatcaaacagccgggccatcagtaccaaacacgctcaatgccaatcagctaaattctatgcctggaccatcattaggacaggaatttcagaattatcagctaaattcaatgcctgggccatcatttggacaacgaaattttcaaccaaattcaatgccaggggcatcattgcaacaacttcaaaattatcagctaaattcaatgcctggaccatcattataccaaacatggcaaaatcatgaaaccaatccaacgccaagacggcaatttgaacagcaaaataatacgttacatgaaattcacttgcaatcaaatatggtaaactcattgctttgtgcacaaaatgaacagcaaattggcattggcacttcaaaacagttcaccaccgtttttggcatgcaaacgccaaacattgaacatggaaatgctggtttttatgccgaacttctgacattcataaatcgtttaattgaatcggctgcaatctcttcgcacaataatggtctattacacagtacccttacccgattaagtgaaaattaccggtaccgctctagtctacaatttattaacagattttgtccaaaaatgactaaagcatattttaagaaaattttgaatttttggtgtgtcgatgttgataggcgagaaattttttaaacggaatctttaacctttcacccctaaaagtgaaaggtgaaaggaccaaaaagtgtggaaaatgcgaaaggtgaaagcgaaactagctctggtacactaccattttaatggataaatattagtaaaatctgtgcaaatgagttggtttttataaaaagtacaaaataaattatatatattgtttttcttttaaatatttaaacaaaaattcaaactttttttctttgtaattgttaatatattcagtgataaacgtacggcgcattgtcgatttgagtttggtttgtctcgacattatgccacattcagtggacacacaattagaatttattaaatcaaatgaattgacgccaaatgttgtgttatacgaaacaagaattggccataacattgatgcagcaaaagtggttaattgtttgaatgagcggttaattgctgcaattaatgctcatgagtgtcttgaagtgtttaagccgaaagttgccgatattcaaagagagattgagctgatgtttggacaaaatcagtaa

SEQ ID NO: 54415 - DNA, 396 bp, Heterodera glycines
atgtttgtcggatgttgtgccattctttggttttattggaaccacttcaaaaaaccaccaaaaaagaaaatgtaaaaaacaaataaaatttcaaaaattgaaatttattttttcagtttcatctccgccgattgttggctttgtgtattcgatttgcttacgccttcacaacttggccacggaattgcgatgatcagtcaccgatttggcatttacgtggacgaacacttcaaaactcgcaaatgggcgctgaaatttattcaaattcacagcaaaattggagagaatggcaccaaggaagtggaaattgtcaatgatggtggagaagcattgccaattccgcaaattgaaatgccacgcaaagtcatcggtttcgaacgcatcagcatcttgtaa

SEQ ID NO: 54416 - DNA, 260 bp, Heterodera glycines
agttttgggggcgcggcggggccgataggcgccgccgggggaaaaaattggaaattttgatcatttataaacagtttttcactgaaaattatccaatttataggtaaaattttgaaaaattttatgggaatttaatccaattcttaggggtgtaaaagtcgcgtttcgcgccaaaaagcgaaatgcgaaaagcgaaatgcgaaacgccaaaaaatgcgaataatgcgaaatgcgaaaagcgaaacctaggcacatccctg

SEQ ID NO: 54417 - DNA, 651 bp, Heterodera glycines
atggaaaatgcagttgcaaaaacgcacagtgcaatcgtccggaaatgggctgccttgttggcacttttttcgccggctctcaccttgctattaagcaggtgttttctttgtcttatttctgggcgcaggaattgggtactcaggatcaaatgatgcgcgaaatccatatcggaggtttaccatcgcctgaaattcgacctgtgttttcaaaaaatttccccacggttcttatctgaatgtcggacctcttaaatcttttcttaaacattcttaaatccaattacggtttcagaaaaccgcttaatttatcctaaggcatatataaatatataatacaaattgtgatcacaccgcaacaaaagaacaattttatatacatcaaacttcattctattttgatcacttctcgataaatcattcattcacttctgctgctgatcacttggctcgatcattgttgcatcacgaaacacgaatgtaaaaactttttaaaaattctttaagtttttttacgaattttttcagctgattttttttaatttcttaaattttttgaaaatttaagtgtcttaaaaagtttttctaggctagaaaatccatttagattttttttaatctaaaaaattctaaaaaacgcagttctgcaataaa

SEQ ID NO: 54418 - DNA, 949 bp, Heterodera glycines
atgcccgaggaacatcaaaacgaagacggtaataaatggaacagaaacggtccaagggtgggttacggtatacggagtaacgcctcaccagaagcgagggtggatccgaggctaaaactgcccctacccagacaaaccagataggatgaaagattcttaacaacaataaatcataaaacaggcatagattataatttttctccacggtggcacagaactccccctcccaaaaaagctccatggtaaaaataagtaaaacgtactatggtcaattatgttatatttaaatcatttttattaccacaaacaaaactttttatttttttaatgtcattagaattctaagttttattctattaacattttttgactttgtccacttttttggaacctaattatttacttgatttattatataaattactaatttggcctaccgaattaaatcaaaatgtttatttttgttacttctaaaacaattttggtgtatttttattggaaaacaattatgaattgttccatcataagttccattaaagccgtccaattcaaaattctgatcatatggtcttcaaaacgcagattagaatatataattattaatttttgtttattttagcacccaacaacacgacatttaccatggcattttgttttatcactcttttggccataattattctgctcaatggatggttgttgaacattgttttgttggcatattttcatatgcaaaaggcatcatactttcatactttaccctccctccatattacggtaattaccaaagaaatttagctgcaaaacgaggacaaatgcattcgacagaaattgttggttaagccaatgaggaggcgtacgttagtggaggaagacatcccagcgccaaatgtaaaaaaatgcattaatagtctcggtcatctagattttttgcaattgggattttgca

SEQ ID NO: 54419 - DNA, 328 bp, Heterodera glycines
atgctatttccaatagcggtaaaaaattcttgactatctacttttacatatttctgtaatttagctatggaatctgactcatcgcctcgaaattggtctttcaagaagcaacaattcgttagaagcgtggcataacatttggggggcccttcttgaaccaaacccactgttcagcaaatttgttaagcgaatgcttaaagaatttgaacgttggcagcacattgttgccgattttcacaatgcaccggcaaatgggataaggggaaagggccttaagagaaagtccatttatctacaacaagaacaatttgcggcaactcttcgctga

SEQ ID NO: 54420 - DNA, 467 bp, Heterodera glycines
atgttcttcatgtactcgcaaggaaccgcaggcgcgcaaagcgccggcgacggaaagccggcggaacccatcgccgaagcgacgcccccctcggcggacatcgctccgtcgaagaacgccttgggggcgaactccttgaagaaatcggagtattgttgtgccaatgttttccaaaatgaataccttagctgtgaattctttttgcacgtcgccgcatggccaaacggacgaagcgccgccgaagagagccattgggccgacggagacggcgccggaagcggacgaaacggcgcaaagggcggccgaggaacccatagcagagcccacggcattgttgtacatgacgaaaaagcaatgggagaggtggaaagtgccgatcgaaactgctgaaaaaggcatcaaaaagattgaagaagcaaatagtgaagtcggacgaaagccagccattgcattttgactttttaaaa

SEQ ID NO: 54421 - DNA, 1484 bp, Heterodera glycines
  unsure (1)..(1484): unsure at all n locations
atgacctttgccttttttgaagctcctacgctttttttgactgttactttatttcagtaagcacacatgcgtaaaatttaccaccgatctgagaaacaatccaaccgatgggatcactgtggttgacgatggggacacttggtcaaaagtcgggaagaaaggaggatggcaaaaactgtccctggggcaacgaaatgtatgtagaaataaacacaagcgagagattcctaattcacactaataattagggaggggaattatatggaaatccatatttttttctggactatggggggcctgaaatgcacgaaaaacatgtttttagcttggtttgaagcttctaggatggagttccatatccatatttttccatatttcgcgatttatgtccatatttccatattttggcattaagtctatattttggcatttttcaaaaaaatctctattagaacggccccccatcagataaattcggatttgaccacccaaaatcggaaaatttttccgaaaaagacattttttagcaaaattttgtagaaaatattgattaaatttaaattttcctaaaaattggttaatttatgttaaaaataagcaaaaaatggaaattttggtatttgggttggtttttcgcttaaaaatgagcaaattttagctgtatcatatttttttcttctaaaatggtattttgataccatatttagctatttttaataggtttactttacatttagcgaatttgaagaaatttttagaattatacactcaattttggaaaatttatgtccatatttttagcattttatgtcgatatttcgcgatttttggtccatatttttgcgattttatgtccatataattccccgccctattaataattaatttctcaaaaatggtaaaggaatttttgaaagttttgtaattgatatatacgaaaccgcaattttgccgatgggacggacgataataattggctaatattttgttttttgatagcctgggaccgttgtgcatgagctcttgcatgcaattggtttccaccatgaacaccaacgtgacgatgcgcgcaagttcatcaaatttgtaaccgacacaaaagatgacgacgtaattattttaagataacaaaaatgcttttctattaaaggactggaaaacaaatttcgagccgaaaaataggaccaaaaattttggatttgcttatgactttgcctcagtcatgcattatcgtacccgactaagaaaaaatgggtaatggaaaatatttataaattgaaaacaatttttaatttcacattttgttttatttttggtaatttacatatatccatcctcccagttcagtttaaagggcatggtcaccctcaaccgtttttacatgcgtacaactgggcagagggaaaagccatcattcaaagacattgcgttaatcaaccgcatntattngcatggtaaatgaatgcaaaaataatanaaataaa

SEQ ID NO: 54422 - DNA, 2378 bp, Heterodera glycines
atggggcaagaaaacaaaaatttgaacacacgtgtaaattatgctctttaccgtttaaatgcggaacggaggcaacaatacgaacaaatatatgtccaggcatgcgaaaacacgaaatttcaattacagctcgcaaaagcaatcttacaaatcaacccaaatgagggggtgagaaaaatatttgacagggatgatttgattgcacgatgggtaggagaaaacctggaaattggcttttgtgttccaattatcccagagaaaattttttgggaccataaagttgacggggaatgttttgaatggttgccaattaacgcagaaaatgtgactttctttgttaaacctgggacaagagagttaagtgtattagggaaaaggattgattgtgaaaaagttgaaagcaatcgaattatggacaatgaaacacagttgattattgtcggggagttaagcaaaaatcttgaaaaaataaaaccaaaatatcgaaatatgcagaatccacttattttaaaagcggggacactttttgagtcggaaaatacacgtttagaaaaggcaatgctggaatatcggtccaaaattaacacattgccatcggcaaatttgagggcaattcaaaggcctaatatttctgaagttataaggctgataaaggaagaagcaaatgaaacattaggggctgtatttggcaaaacaggtgattggattgatatggttaaaaatattccagaaaaggcgagagaagcagttaaccacctaaaagggatttcttatttacttattttaatcccgttgctgttactaatcgctcttgtgacttattttgggattaaataccgagtaattatttgcgctggtttccgagcagggactcttttggtccgaattataaggcgtattcttggcatgaaaagacaaaaaacaagagtagcagcagttccaactgctcccgaacttgactcgatggaccaagaggcctatgtcttagactatcttccaccaagacgagttgcagtaattactaatgacccaagaagacttccatctattcatattcagataaacggcctctcaacgacggccttagttgattcatgcgcgagtgtctcttattgccgagaaaagacagcactaagagcaggactgaaaatttcagaactaaatgatgaaaaagttaatttattgacagcaaatgatacaaaaattcaaattttggggaaaacttgtgccaaaatcagaattaaggatgaaatgtcaggcaaaattcgtgaatgggatgctatacttttagtttcaccggacaaacactgtcccggtccagtcttaattggtttaccattactaatggagttaaaaggcataatttcgtgggcagaaaagaaagttcggttaggagaagtttggaccaacataatatcagttgtgggtgcagaaacatccaaaccgttacgaataacaatggaaaagaccgaaatttttgaaccctggactgaaaatattgtcatggctcgggtaaacgaagttttcccgagtgaacaaaatttcttggtaaaaggagtgcaacaccaataccctggaattatagtgggtcgaactttggttgcaccgggagaaagcaaaaacgtaattttacagctaatgaatgcggggaaagcaccagttaaaatttatgggaattcacatttggctgacttagaaacaattaaaataaatgcgttaccaggtgatgaaatctctcctaaagattatattccgccagaggcgagatggagtaccaaacttcctactctcccaaaaccgggattgaatcgccctccgtctaaaagaatatgtcttgaggggacgaaactgagtaattcgggacaaatttcgctaaaaaatatcgttgataaatattctgaggcattcgtcggtgatgacggtaaaattggactttacaacggccctatgcaaaatgtgatggcaatgcttctgagcatacggaacaaagcattggatgtccacgatgaagcacagaatgcttggaacgaattaatgaaaatgaaaggaaaaggggagaagaaagaggaggaaggcatggattccggacttccagggttttcaactgctgattggcaatccgatcatgaccgttggcgtggacaaaatcgttggcgcggcggaagaggagcaagacgttggggacaaccatggcgagggcgtgaatggaaccaaccaaatcaaggagcgggcccatcgacatcagcggcatcacaagaaggacaatggaatttctcaaagatggcgggatatggatagaaaattggattttgagttggaattggttgcattttagattttttttgggccaaaatacaacaaaaacaaacaaaaaaaca

SEQ ID NO: 54423 - DNA, 289 bp, Heterodera glycines
atggctaaagaatattcaaaatatttatgtggatttagacagaaagaaaatattaattgctttgatgaacatggacaaatggtctcttttgggttagacgaaatctgaattggaaaattgccaaagaaaccgatattatttggacattttatacgaatatttatttcgactttatgttgcaggtttatgcaattaactttcgtagtgtagcggggggcccttttcccagtcgcatccccagtacaaatggtataccgtcaacaatagtcctttattgggtaataataaa

SEQ ID NO: 54424 - DNA, 638 bp, Heterodera glycines
atgtgtgcatgcgatcagcgtattgttatggtatggatacgatcagttggtgcaaaacaacggcaccagctgcagaaagaacggcgacactggaaatagtggtggtgaacaggcaaacgatggttcttcatcatgcacggtgaaatcaagaaattgaataagcgcaaacatttttatgataaaaaatatctgtcaaaaagtaccatcggcacttttgccgaaaattcatggaaataggcgaagggaggaacaaaaaagggcaatttgagcccattataaatattttcaatttataattgtaattaagtgcaattataatttagaaaccggagctggacgatgtggcattgcaactcagtcagaatcagttcggccaacagctgaaccaaaccgtcgacggaaacggtgccaatggcatttccggtgattgtgtcagtgctgaccaagtgccgactaccgcgcaaatcatcgcaatgataaaccagtactcctacacatacaatctgatcaacggaaaatccagcggcgtcaccgtaagcgattcatcttcgaatgccgaaatcaccagcgcaattggcacaatcatgcgccagacctctcagctgcagcaacagctgcagagcaactcgaagaaatga

SEQ ID NO: 54425 - DNA, 332 bp, Heterodera glycines
atgtttctgtcagcacaatcggttgctgaactgttctcaatcagaaattggctcaggttcgaaagggcacggcattggtcacaattttcccgtcattttttcaaaattcaatttaattattttttcagatttttggtcgtccgccaacgcattccccatttgatcttgggcatccaatttgcgtgggttgtcgaggaaaaaaagaaaaagcaaaaatcatcggccaatgccatttcgccaaaaaagcgatgccggacgatttgcaacaaaatgttgactgtttttggcatcaaaaaattgggcaaaaaatgaataattaattattactataa

SEQ ID NO: 54426 - DNA, 150 bp, Heterodera glycines
atctgatgagtgcccattgggccgactgagaacgtttggcgtcgcgctgggcgacgaggtgcaggaccaaaatctgatgttggaccgcattcaaaagaagacggagcgcaacgacggcgtcatccgctcgcaggaggaccaaatgcggaa

SEQ ID NO: 54427 - DNA, 87 bp, Heterodera glycines
atggcccgcgctcacttggcggcgctcaaatggctggcgctcagttggccatgcacccctcctataggtattgatttcatcgctagg

SEQ ID NO: 54428 - DNA, 643 bp, Heterodera glycines
ataataataaaataataataataaattaattaaacatttttataataatttaactaataaatattatttaattataaccctcgttcctttttcctttaaaatcaaaaattgggaaaattccgttaattgatttgtttattaggccttattgcagcactcttccccttcttcattgatttgtttattttgttcatcttaaggggtcctgtaattaatttggtttagttaaaataattatgcaaaaaaataaataaataaaaaaataaaatattgggctcataaattaaatttagataaaaaaaacattcaaagccaaagagttagaaaaaataaatttgcatcaaagtataaaatttcattgaaattttaattgtttgaaatttaaaaaaatatttgttattattttaataataattaactaattaattaattagaacattttttaaaatttataaataaatattatttaattatacggtcccccatttctttttcgctttaagtcaaaaattgggaaattccgttaattgatttgtttatttgaccccccttcccttcccgccacccgaactcgccatttcccttatccctcgctgcaacccttcctcgccactctcgctgccgagcaatttctcgccatttt

SEQ ID NO: 54429 - DNA, 1014 bp, Heterodera glycines
atgcactctgataaagaacccgagaaaacagcgcagctttttaccatggaaagtgattttgtaagaaaatttttagatttttttgtcatgacaccaattccgaaggattaccaatatttacatcgactccctcccgccgaacttcggcattccttcaccttcaacgacgtcgacagtgtcgtcggcttggtgtgcaaatggacagtacggacgtccacagcgcgcctgagtatcgtgggggcaccgagttgacgagaacgggcttggctcagatggcgaacgaaacatttgaaaatatgcaaaacaaagctaaaaaatgaaaatgcgcaaatttatgtaaaacagtaaaaattcatttttttaataaataaaattggatggataagcaaagccaaacaaaaaagagaaagaattcaatgcattttgaataataaaataggagtaacattttatcaaatatcaaatgaataattcagaaaattaattgttttgcaaattcaattaagcaagccatcactttttcaatatttttgatgagcacactttcgcgaaggcacattcaatttcacaatggaataattaagagtatagaatagagaatgttgaaagctattaaattgatttctttgtaagaagatatttttatcctgcgccaaaattcattttttgagaaacagggggtccggcagtgccgatggctccgccggaaaatttttcaaaatttgagagaaatttgtttacatatttacgcaaaaaatgacaattgagattttggtttctcttttttaagaaaaattgggaattttatgcgtcaccggatgaaaaagtgcaaacgttggccctagcctttttgcatttttatcggagacctcaaaattcaggacatttgatttttcaaattggtaccctctaaaatcagtacacttggtaaccaaaccatgagattttgtaaaaaaaaaactgaatttaaacggaggatgggcgcacgaggatagaaaattcataaaaaataaa

SEQ ID NO: 54430 - DNA, 420 bp, Heterodera glycines
atgggtgccggtccagacaaagaagccatgcaaaaagctttgttgacatcgcacgcggtgccaatgccaagcgacatggtgcagctgttcatccaattgtggcattcctccaaatttggcgccgttcctcaacaattacgtgccatcaaatgtccgtcccgaagccgtcgtcgtcggaaacgacaaaatggcggtgatttgtcactgtttgacctggtgatgttcatcgtctcagtttacgtagcttcatatgttgtcgaattgttgaaaaatttattggaaaagggcaacgattttctcgaattcaacattgtgtccatttccattactattttcattttcgcattcattcgtcaacagccaatgcccaaactcggtgccaaatttattgcagaaagaatcatcgaacgtttgggctaa

SEQ ID NO: 54431 - DNA, 272 bp, Heterodera glycines
attgcacagaattgccgaaaaaattcgagaccaatttccgaatgttgaccgactaccgtatatgctctaattatagcccagtctctattaataccgcagtctccaattatcccctgtattctgaggaggttgaaaaataatcccccatgggctataattagagcatatacggtaattgccaaaacgaaagccgtctttgtcaaagcgccttaccgagtcaaaaaatttggaaatatatctcatatgcaatttcaactaataaatttgaagaa

SEQ ID NO: 54432 - DNA, 436 bp, Heterodera glycines
atgtcggcaattgtgccacactttccatctacagtaattttggcttcaatttctctcttcttaaaaaattccaccagttttttgccatgtttttgcagtgccttttcaactttcttcacaaattgttctgaaatgccattgtccaaaagttggccctttttcaatgcttcacaatatttatcaacttccaaatatatttcaaccgaatcatcgccattatttttaacaattttatcatgcttttcatcattttgcattccgccaaaagcaatggcgcaattaaggaacttcgaaaataattggcaatattaaataaaaattaatgtacaatatattttttaaaacaattattaacaatttatcttttacagaaactcacccaagttgttttgcttgttcatcatcgaatttttcattaaactattagaaaactaaa

SEQ ID NO: 54433 - DNA, 582 bp, Heterodera glycines
atgccaagaataatcattttttttaaaattaaggtactggttcgcaattgtgtcactgcgcaaacattttatttccggtgagtttccaaaaaaattattaaaaatattattttatgacttaaaaaagtactagaataatccacaaacataggcattggaagaatggatctgatcaaaatatgtagtattgtaaagcgtgctggatcgtttcataaaatccgccaattttagcgatttttcgacaaaacatggcataactttgcttaaaggcaatcaaattttacattcttggtatcattcgatagccaagctttttctctactagcttgcaaaacttcaaataaaattatcaaatttaacataagttatggcagaaatagtacttattttcatacaactttttctaaaatttaccaattttttttttaaattttgcaggctaacagagaaaacgctgggctttcaaatggtaccaagaatgtaaaatttggttgcctttaacgaaaattatgccatgttttgtcgaaaaaatcgttaaaatggcggattttacgtaaacaaactagccccttgtaaaggtga

SEQ ID NO: 54434 - DNA, 1583 bp, Heterodera glycines
atgccgtccagcgatggcaaaagtcctccatcctcggagcaaagcaatgtgctcagtttggcattccggctttgctggtccttgtctgttgaggtgaggaaatgctttgtcagcgcattgacagcaattccgacccgatgctccaacacttggagtttatctgagtgttaattgattgccgaattaatttactaattagaggctactataatggtattatgcatattacaatcggtatttgccctttacagtatccactcggtgtaccccaaaacacagccgtcgaaacacagccgagatataaaaaaacagccgggaataaacataaaaaatttttttaatctttgaaaaaaatttcttagaaaattcgatgaaaaaatttcaaaaaatttccagcgatttttttttgaaaaatttttgaaaaagcttagttattcatcattaaattttgaaaaaatagctggaaaattttttgaaattattttcttcaaattatctaagataaaattctcaaagatttttttattgaaaaatttcttagaaaaaatttttttttaatttattcccggttgtgttatgtctcgactgtgtttcgctggctgtgttttgtcctgttccggtatccactacaccaaccaggacagccgctggtgttcgatgcgttgctgccagaaacgccggtgtcgccgctgttccgacgctcacagctcggcgagcggaaccggcgatggtaggaacggtcgcgcgaccttccatcgctcgctgtgctgttgctggtgtccatggtggaaaatttggccttgcgcggtgacaaaaaagcggcggccgcactcaatgggctttcgacatgctgtagcagatactgctccgatttgatgccctttggaaaaggtagcgccatatgaatttcctaatttagtgggtagaattttcccctaaaaaatccattgaaaatcaaatagctatttgaactttttaccgatttggcattctgaaatgagcctgccattgtcaaaattttctcgatattcgagaaagataccctagtcttgacactgagactcggttccaggcatagaccctaaaactcaatattttccttgactcggtatcgaaattctcgagcagttaggtaaaaaaaaattttttttttgaaaaatttgttttcttaatgccgctaaaaattcaaattttcccatggtgacaacttttcaataccctcgggctggcttgcgttgcctagaaattttcacttttctagccaaattcatcaagtatttcattagttggcgcaaaatttcgctttttttcacgcacagatgagaacatttcagcgccgccgcttccgcgcgagccaccgccgttcatcatcgacaccgtttcatcctcatcacttccgtcggcatagtgccgtcgtgtgacaattgcctctgcaacgagcaacctctccaatgcgccgtcatcaatgccacggccaaaccaacggccacaactgtgtgtgttcaggaaaggtactcggaaagtcggtaattttcggcaaaagtgtataaaattcaaaaaaaaacaaattttttttcaataaa

SEQ ID NO: 54435 - DNA, 740 bp, Heterodera glycines
atgtacccatgggattacattgaggtcaatgaaattttaaatttcgtttttaaactttacaatttatttttcagaaagtttttgtgtggttccgtaaatttttctgctctggtgaatcgaaaaagttcacacaagaacaacggtaagtggaggtgaaggatacatacaatatattgtcataatgccattaaatgaatgaataatgggtttaaattttcaaaaaatggaatttacaaaaaaatctcaaccaatttttatcacacagatcattgatcatctacacatataatttggtgtccaaaatttctggtatgtacgtcagactgaacaaattttaatactatatattagagttgctcggtaatcggtaattgttaaaaaaccggtaccggtactgaccggtactgcaaaaaccggtaccggtaccggtaccaattttttccaccggtaccggtaccggtaccggtaaaaaccggtaattttccaacgtaaaaatttttggacacaatttttcaaatacaaaatttttattcagttttcgcgcgagtgcctgttttttagcattagaattgttcagaagtatatgtatattgagggtgaccaagttttttttcaaattcaggataaagaacactaaaattcagatatagacctcaaaattcagattattgcaaaacaagggatcagcggacaattttccaattttgcgaaggggtctccggccatgtaaattaatgtaa

SEQ ID NO: 54436 - DNA, 557 bp, Heterodera glycines
atgacagctttgatggttgacgcaaaaatgcactttgatcatagagttggctggtcacttgtgtccatgcgatcaatgggagcagtccggacaaaatgtgatcccttttttggttggttgaaaaagtattttaatagaaatttattaattttattttatttttttgttattcttatttagtttatttaatatttatttcaaatttttatgtgtccaagcaatttttataaaaagaaatgattaaaacttcggttaaagaattagtccagattaattatttgtcgataatgatcagtcaaatgaatcatgtgatcggaatatgattttatttaaaaaaatgatggtgggaactaccgtagcgaaaaaaggatgaacaaatggaatttgccttctttgccgacggcattatgtgctgaaaaaattgaataaattatttttttattagatatttttttattgaaattaatttattttaaatcattataattttggtatatatatatatatatatagtagagttgctcggtaccggtaccggtaccggtaccgaccggtaa

SEQ ID NO: 54437 - DNA, 1137 bp, Heterodera glycines
atgaaaaatccttgttgcaaggcattgaggatatatgaagaacaatttatggttttttgtgtgatgtgtccatatgtaaaatcagatgatgtaaatcaaaaaacgaattaaaacaccataaatatatatttatatatataaatacatttattatgtacaaaatttgttgtatttcataaaacagtatcagattttaatgaattaaatttttctttttctttttttaaattttaagactgcccagtcaatttctttcacatcaagcggatttgaacccagaacccatttttaatgcaccgctaaatgaaaaattcacaatagaagtcgatcctgctctatccaatctatatatagcttatatgcaatttcacggagcaggacaaaacgtcgttggacgaatttttgggccataacttttttctttctccaccaaattaaacattcatgctattattcgaaagcatttgaaaaacgctattaaactagtaaatttccaaaaaaaatgtattcatgcacaaagaaatcagggcaaaaaaagttcgaaatactgggtttttgagttccttctggccataactttttttgaaacttaacgaaaatttttgaaattttacaaattaataataaaaaccacagagctatcgaacaacaccgaagaatgcttaatttgattgacaatgaacaaaaagttatggttcaaaaagtcttccgacgacgtttcggccgacgacgttttggggtgcaccggcaatttcatacatacatacagttgatatgttcccttgtaagcaccggaggtccggccgtcccgatatgatttacaaatcgctgaatattaattttttggctgttaaatttcaaaaaaaaaattgcttagtttaaaaaggttgtgcaccgaaaaggaggctttttcgacacttttgaccttttgtatgagatttattgcacgaaagggagtgtggagttggaaaaaaagttcgaaaaactagggtgaaaagaacgtgatcaaatgcatttcccggatataacctccaaaagtagatttcgtcaaaatgtttttttataaaaaaaaaaatcaaattttaattttacaggcagataaagaaatttatgtagataattaactttttattaaaa

SEQ ID NO: 54438 - DNA, 528 bp, Heterodera glycines
atgtcattaccaacaaaagcaacaacaccaataacaacaaatgttccgtcaaaagcagaggccaaaggaggacaaaacgggacgatttggattgttgcgatcgttgcgattgttgcgattgtggcgattgcgatttttgttgctgttgctgtaacggctgtagcagtaccaacaataacaacgattgttgctgctttaacgcaaagtgttgctttgttttgtggctaataattgcattggtatgcgttggcagcatcgctttatgtgccatcaaaatgcatcaaattactgctaatggacatggtgcacaccatagtattggtcatttcattggtggtacggtgggcgctggcatctttctggtgatttctgttattgctatggtgatcagctgttgtgtaattcgggatagctgaagtgatttaaacgcgctaatggcaaaacgtgcaacaacaaaaaaaaaaagttgaaaaatgtaacataaaatgtaaaaaaagaaaaaaatgctttttatttttccaaattaaa

SEQ ID NO: 54439 - DNA, 117 bp, Heterodera glycines
atgctcaaatcagcaaatgagctggtggacaatgcatcaaaattgccattggagaaacaaaatgccacgaaaatgtttgaactggtcaaaccgaatctgtttggcattgtgtgcgat

SEQ ID NO: 54440 - DNA, 93 bp, Heterodera glycines
aacggacaacttgggcccggcgaattgccattgagggaattgcgaagccgacaaatgttgttgctggacaaactgcgggagaaaatgcgactg

SEQ ID NO: 54441 - DNA, 772 bp, Heterodera glycines
atgcacttttttccggcaattgccaatttgtatttcgtcggcgtttacagtcgcaatgttgtgccacatattttgattgttgaacgcattttggcaactgtgtttgtccgctcatatgagcattggcggggctacctgttcacaatcatttgggctccgatcgctgtaagaaatttttgtattttcaaatattaacggagttaaaatttaccaaatttttaccccccccatttttatgtaggaataaaagaaactaatcctttcttggaaaaatatttttctgtcatcaaattatattataaaatatgtaaacttcttaaatggcaaaattttctcgcattttttttttataaatttgagttgggaatccattagtctgaaacccaaatattttttagtggattttttttgtaaattttattaatcttttaacaaattccttaacaacataaattttaataaaagaaaattcctcacaacattttcaatttaaatcgtatttaaaatatatttaaatgttttagttgaccgtttgcatttacattgccttcactacatctcctcatagtgtccgaccgcttgccaatttaattacaacagctgttgaagtgttgacaggaagtgtggaattggccattttcatgaaactttgcgcttataacttaaaaatttatcaaaaaatgatgcaaaatgaagggcaacacagcctatcattacgctaccaggcaattttgaatttttcaaatttaatttaaattaaaatagaaattaa

SEQ ID NO: 54442 - DNA, 819 bp, Heterodera glycines
atgtgtgccaaatcagacaaactcccgccgtcttccgctgcttcgtccttctcatcgcctgcgtatggtcggcctccgtccgccttcaccgccgcttcactgaaccgcgcggggtcgccctattcaatgggcggtggttctgagtacggcggcagacggaagggcgtcagttggtcggacgtcgtggaggagccgaagccgacgactcggacccggtccgactcgcccccgccggcgtcattcattcgccattcgatgccggtgccaaatttcatgccgaaatgattttcaagagtcttcgcaatttgacatataggcattgggcaaagacagtccttcgggatatggaacggacgaaggacggcactaccgaaacggcgcatcggacgatggcactttggacgggggacatgacggacggcaaaactatgacagataccgtcattcttcagtagggaacgagtgaaccaaagcggggagtaacggcttgctttctcatttcagcagaatccgttcgatcgtgccgatggttgggtttcgtccaacccgtggaccggatcattggaccatcggggcggccgaagccgtgacaaagagcgacaaggccctgggagttttttcaagcccgacctgcccacttattcggcattgggacggagtccggacaatttcaacccattccaaacgcatttgcatcgggaggaagccaaagggttgaggaaaagtcaggagagagaggaactgatcaaattccattcttacggcgatcacaaagtgtcgggcattgaaatgaaaccgaagggatggacaggaggcgaa

SEQ ID NO: 54443 - DNA, 444 bp, Heterodera glycines
atgtttgtcaaatgttggattgtaaattgtaatataaaatgtttggcacaaatgttttgcagtaattgtaaaatgtttgtcaaatgttggattgtaaattgtaagataaaatgtttggcacaaatgttttgcagtaattgtaaaatgtttgtcaaatgttggattgtaaattgtaagataaaatgtttggcacaaatgttttgcagtaattgtaaaatgtttgtcaaatgttggattgtaaattgtaagataaaatgtttggcacaaatgttttgcagtaattgtaaaatgtttgtctaatgttggcttgtaaattgtaagataaaatgtttggcacaaatgttttgcagtaattgtaaaatgtttgtcaaatgttgtattgtaaattgtaagataaaatgttttgcagtaattgtaaaatgtttgtcaaatgttggattgtaa

SEQ ID NO: 54444 - DNA, 1041 bp, Heterodera glycines
atgacaatgctccgattgctacggatcgtcaaaggtgcttgttttttgcgccaaaatttgaatcaaatgataattggtgaattttacagaaaatgggtccataattgtgccaacggatgtgtgctcccagaaaacatcggctgctgcgaaaatggtaaaccgattaagttatagcatagttttagctaagttataattatgatacagtatattttcctaccatatctttcagctacagtaacacccgacaaacactggcggcaccgaaatgacgaactctgttcaccatgtgccgagttggggctgatccggctgccaaccgtcgaagacttttccgcttgttccacgctggagcgcagtccaaagtcggcccgtggtgcatacggtggaacattcccgccggatactgtgccatcgccggactctgctgctggcggtgcaccgttggccccacatgaagaacctttgtcggcatctgtcaccccattgccgccaactgagtccgagcgaagcaacaacgacggcacgagtgccaaaaagatggtaaatacagtagtaccaatcggaactgttgctcttcttgaatattgggaaatacggcactatccggacagtttttggcaccggaatgccaaagattttcggtaaatttttctaacttgctgcgaattttttagtcaattttcgaaaaaattagttttttaaaaaaattttgaatgccaattttccttaatttaaagttttaattctaaattcaagagtttattttaagtttcccaagcaattctcggccgagtatggcaatggcattatttcattggaaatgccctcgtgttcttcctcaattgctacgttggcaccgcactcttccccgtcctcatgttcattgcatatgctctccaatttgtccccgtctagttcggccacatcgcatgaacgtggcccaacttatggagagtaatgaaaataaattagaaatttaaaaaaaattctaacatttaaaattttgggactgggattttaaatttttataaaaataaa

SEQ ID NO: 54445 - DNA, 1706 bp, Heterodera glycines
atgattttaccggctgtgagaaatcagccaagcaattctgatcagaccaagcaactgagtgtaaacgatgattccaatatgcttatgcgagtaaatccagctaataatttgccagaagtgatagcttcagtaaccaattctcagcagcttactgaccagaataatcagccgttgacggaaaatccaactgatcagtctgtaagatcaaatcaaaacaatcagcatgaaattcaagaaatattacatttaccaatgaaaaatcaacaaaacaataaaagagcagcagcaccaaattcacgacaagaatttggatttgatctggagaaagtgccaaaagcaaaaaagggtaaaggtttggcagaatggttgggtcatagcatagatcaaaagcagaaaattgctgtcgaaaacgcgtctgaacagccaactattactgatcatattaatttatcgtcacagacaacccaattaaacaatttgaataatccaacaaccaatcaaagtgtggttgatttatctgacaaaactttaagtacgaggcaaaccaatgaagtcggtccgttaaactcaatggacaattctgatcatcaaatgatgggaaacgctgttgttcagcaagtcgcatcagatcagtcatgccactcgacccagactgacaaattgtctgatcaaataacctttacaaaccaatttgacccgaacaatttggaaaataaattcaattagtccaatttcatcaattttcaattatcagggcaaaatcagacaaataatgataatcactctgaacaatctcaaccagttacacaacaaattaaagatgcacaaacacaaatattgccaaagcctgacggattgttaggctggctttatcgcaatatggacaactcagaaaatcatgacaattcgtttgaccaatcaaattgtcctagccagaaaaatcaaactaattattccgctgatacgtcaacagatttattaatgttaccaaatacagtaaatcattatattcattcaaatccaatgatgactttaagccaacaaaattactataatcaggaaaacccatcgacgtcaaccaatcaatcaacttatcctgatcacgcaaacacaatggctttgaacaatcaatcgatttatgctgatcaggcaaacacatatgcattgaacaatcactcaactttttctgatcaaacaaactcactggcattgaacaatcaatcaaattatcctgatcaggcaaactcattggcaatgaacaatcagtcaaattatcctgatcaggcaaactcattggcattgaacaatcaatcaaattatcctgatcaggcaaacacattggcattgaactattctgatcaggcaaacccattggcattgggtaatcaatctacttatcctgatcgctcactttttatggcgaaccaaaacaatgaagttaacggtcttattccaacaattgattctgatcaaactgatcaaactattttgcaatcaaataaaggctccacggacaacaactgcagcaaaatgtgcaagttcagcagggaaatgttccgacaatgctaagcatgacaacgccagtgcctgaacaaccattcgatgggacgcattcaatggtttctcaatatcgaatatttttgtacccattctttttggggtttttgttttttatttaattattaaaaaaacataaaaaacaagaa

SEQ ID NO: 54446 - DNA, 1187 bp, Heterodera glycines
atggcggacaacgacgaagagcatgagaggctcgccgaacaggggcgcgagtggaaagctgcgcgccgggcggagagcattgccaacttgtttggcggtgcgccgcccccggcccaggatgaggaagacgaggacgaagaagtggaggacgaaggggtggaggacgagcagcgccctcgccgtggtgagttacggaatttttttaaatactgattatctaataaattcagcgcgaagcgcagggcgacgcgggggtgatgaggacgaagaggaagatgaagggggtcgggggcggcctcggcgtcgtggtagttactttttttcatgctttttaaaattaatgctcgccgaacaggggcgcgagtggaaagctgcgcgccgggcgcagagcattggcaacttgtttgccggtgcgccgcccccgcccccggcccaggaagaggaggagggggtggaagaagaggtggaggaggaagaggtggaggaggaggaggacaatcgtcctcgccgaggtaagttactgaattttttaaaatactgattatttaataaatttagcccgaagcgcggggcgacgcgagggcgatggtgacgatgaggaaggagaagggggccgggggcggcgccggcgtggtagttactttttttcatgctttttaaaattaatgaattaagttcgctctgcctgaacagccaacgaattggagagaaaagtcgaatgatgaatattttcgattacaaacaaaccactttatattattgtttgtctcatctgaatgcatttcatttccgtggtttcctttaattgtggacatatatttttaatgaatcagcgcagccgaaaagtcgtatttaaatttctttgttgatgtattttatgtttcaattaggccgtgccttagtcgagtagaaatggtttcgaactgatgaagtcggcacttgtctgatttcgttgggtttcgcaatggttaattggtgctgcttcaaattttggttttgctttcgacttttgcttgcttccatcgcgcacttcaattggtagaaaaattcctcaatttttgataagacgaccaattgatgagttttttaggtttgccgccatttacgtcaattgcattttctttacattggtttgttatgttaatgacttgtcttattttgtttctttttcagtggaaatcatatga

SEQ ID NO: 54447 - DNA, 809 bp, Heterodera glycines
atggcgacaaattacattaaatatcggagttatctttgtgggaacaccaatgatataacaactattcaagaattaattcaagaaggaattgaaaatggcgaaaaaaaaaatttcactattaaggctaaaataaaagaataaaaataaacaaatataaggtaatatgagaggaggaattaaaaatatatattttttagggctgttgggagtgcggtaaacgtctgtcgaacccttgtttctgtgatgcttccttcgaggacaaattactatttaacataaaatttggatgaaagtggggagataaaaacgttttgcttcgaaaaagtcggaattaaaatattcaatcctttttaaacagtgttattttgttggtaaaaagaaataaagaatcaataactatatattttcacaatttaaacttcgattgagagtttatattttgttatttaataaaaaactttgaattagataatataaaatttttaaaaacacctcaatcagggttcttttgaattaaactttttattaaagattcattaataattaataaaaaaatatatatagtttttaaagattcgtataaagttttaccattatcagtatttgatttaacaattaatgaagcaagaaaaaaaagaaaagaacctatgattatgaatcagttaaaaaattgaattatagagctaaaaatattgataaacaactttgtaaagatgattgtttaactgtttttgaacatcttcaatcttttaaaacctgtccaacaacaatatctgttattcatttgttaagataaagtcgaaaataaa

SEQ ID NO: 54448 - DNA, 1295 bp, Heterodera glycines
atgccttgttgtgaaaaaattttaaaaaataagctcgaaaatttcaagagaatgtaattaaattaaaaatgaattttattttaataccttttctgaaacatttcagataaaaaaatagaataaaaaataaagcaaataaattttatttctattaattttttttagtgtttttgacgttggaggccaaaggtcagaacggcgaaaatggattcacttttttgacgatgtaaatgcaattatttttgttgctgccatcaatgaatatgatcaaaaactgcgtgaagacaataaaacggtaattttaaaccaattaaatctaatcaaaataattaattttttcttaatttaagaatcgactcattgaagcgatgggtaattaataaatttatttgtcttaaaaattctaaaaatgattttttttccccagaactttttgacggaattgcaaacagcaaattttttaccaagtcatcaatgattctgttcatgaacaaaaaggatttatttgaagaaaaaattaaacgagtttcgctgaacattctttttccatcttataaaggtaaaaaaatttaataaaaaattatttaattaaaaagcaatatttttctaattaattaaaagttttttttgcgaacataagatggacttttgtttacatatttttacatattccctgatttttttatatacaatattttgaattttttctcattttttttttctgtaaatattttgcatttttgaggatttttaagtataatttttcctgttttctctagagaattttggaaatttcggaattccggaactccggcgaaaagttaaattccgagaaagtataaaatttttaaaatgcataaatttctaataaaaactttcttgaccctaaatttggaagtttatagaaacagaaatttttgcttgatgaaaatttttgaaaatataaattttttaaggagacctcacgtatgaggacggtgttgcatatttacgtgtcaaattccgcaagttgtacagaaataaacggagtttgtacatccacgagacattcgccactgacaccaaccaaatcaacacggttttccgatcagtgcttgacacgatcttacaagaaaatatgcaagacacgggcatgttatgattatgatcagttttggtgttgcattgtatggataaaatttagaaaaaaaatatttaagcctaattaagaacattaatgcctaagccataggatgttatgattatactttgggaattgggttttagtggcgaatttaaaagagcgatttttcgta

SEQ ID NO: 54449 - DNA, 6801 bp, Heterodera glycines
atggtaaatatttcaataaatattggttctatttttctctttgcttttgccacaagcttatgtggaggcaagccaaatgatgacaaaaatgctgcctccagctcaagtgtgccaagcgaaacggaaaatcccaaaaacgaagagtcgaaaaagaatttggtgataattacggacatgggggcggatgatcaatttacactggagatgatcagcgcaacagaattggccggtaaagtgttggcaattgggacgacggagaaaggaagaaaagcggcattgtcacaatcactgggatttgagaaagtgccagtgtatgtgagaagcagtggcgaggaatacgagaaaatgctttttatgaatcccaatcagagtaggttcagtttgcaagttgaaacgtatgtcggcattttaccctgaaaatttttgttttagaggatacaaaaagagaggaaaacgaatttcaacattttttgaaaaatttgctggatgaaagattgaaaactaatgcgatgaaggttcattttttggtgctggcacctccgatcgatttaagtgcagtattgttggagaatagacaattggcaaaagcagttggacaaatacatattacggatggatgtaaaaattgtcaggaattgcaaccgccgacaccgcttagcctgaacaattttttgaggcaattaccaagggaacacaccaagccaacaacctacaatgttagcatggacgcattggcaactgtgtaccttttggaaatggccgccaatggagaagttaatgtcctactagtttcttcaagtttacttgctgaaaagttcggtgatggagtcgaatttggaaaaaaatttccaaatctgaaattgacaagaaaaaagaaaacattgggctttaaaattattgtagaacgagaaaaaaaatgtcaacaaaaaccacacattgacgagcaattcagtgctgccggtccaatagctgtgcttgcaattatggatatgacaaatgtaagggtggatggagtgcccgaatctgacaattttgtcctgtttacaactcaatcaaaaaaagtgagcttgatcaccccaaaaagtggagagcaaaagccagaacatggtgaataccaagtggaaattgggattaaaaaagcaacaaaaattagattgcttgtcaattttaatgttgacacatttggcaacgcaatgacattgattcttgagaaaatcaacaagcaacgccaagaggcgaaaaggaatttggtgataattacggacatgggggtggatgatcaagttgcactggcgatgatcagcgcaacagaattggccggtaatgtgttggccattgggacgacggagcaaggaaaagaagcagcattggcacaatcactgggatttgagaaggtgccagtgtatgtgagaagcagtaatgaagaactagagaaaatggtttttatgaatcccaatcagagtaggttcagtttgcaagttgaaacgtatgtcggcattttaccctgaaaatttttgttttagaggatacaaaaagagaggaaaacgaatttcaacattttttgaaaaatttgttggatgaaagattgaaatttatgggcgtaaaggttaattttttggtactggcacctccgactgatttaactgcagtactattgaggaataaaaaattggcagaagcggttggggaaatactcatcacgggcgaatgtaaaaattgccaagatttacaaccgccggcaccgcttagcctgaacaaatttttgtgggaattaccaagggaacacaccaagccaacaacctacaatgttagcatggacgcattggcatctctgtatcttttcgaaatggcctcaaatggtgaagtgaatgtcctactagtttcttcacgtttacttgctgaaaagttcggtgctgaggataattttgacaaaagatttccaaaactgaaattgataagcaaaaagacaatgggtgctaaaattattgtaaatcgagaagaagaatttgaacaaaagccacacattgaccagcaattcagtgctgccggtccaatagctgtgcttgcaattatggatatgacaaatgtaagggtggatcgagtgcccgaatctgacaatttcgtcctgtttacaactcgatcaaaaaaagtgagcttgatcaccccaaaaagtggagagcaaaagccagaacatggtgaataccaagtggaaatagggattaaacaagcaacaaaaattagattgcttgtcaattttaatgttgatacatttggaaacgcaatgacattgattcttgataaaagcaacaaacaatggaattacaaaatttcgtccgaaaaacaaaaggtataggacaaattagaaaaaaattgttctctaaatatgactcatattattcaataaccaatttaattatcctaattaggggaaagagaaaaaccaagatccaaatgatgagaaaaatactgcctccagctcaagtgtgccaagcgaaaaggaaaatcccaaaaacgaagaggcgaaaaagaatttggtgataattacggacatgggggtggatgatcaagttgcactggcgatgatcagcgcaacagaattggccggtaatgtgttggccattgggacgacggagcaaggaaaagaagcagcattggcacaatcactgggatttgagaaagtgccagtgtatgtgagaagcagtaatgaagaactagagaaaatgttttttatgaatcccaatcagagtaggttcagtttgcaagttgaaacgtatgtcggcattttaccctgaaaaatttttaattttagagaatcaaaaaagagaggaaaatgaatttcaaaattttttgcaaaatttgttggatgaaagattgaaatttatgggcgtaaaggttaattttttggtactggcacctccgactgatttaactgcagtactattggagaataaaaaattggcagaagcagttggtgaaatactcatcacgggcgaatgtaaaaattgccaagatttacaaccgccggcaccgcttagcgtgaacaaatttttgtgggaattaccaagggaacacaccaagccaacaacctacaatgttagcatggacgcattggcaactctgtatcttttcgaaatggcctcaaatggtgaagtgaatgtcctactagtttcttcacgtttacttgctgaaaagttcggtgctgaggataattttgacaaaagatttccaaaactgaaattgataagcaaaaagacaatgggtgctaaaattattgtaaatcgagaagaagaatttgaacaaaagccacacattgaccagcaattcagtgctgccggtccaatagctgtgcttgcaattatggatatgacaaatgtaagggtggatcgagtgcccgaatctgacaatttcgtcctgtttacaactcgatcaaaaaaagtgagcttgatcaccccaaaaagtggagaggaaaagccaaagcatggtggataccaagtggaaatagggattaaacaagcaacaaaaattagattgcttgtcaattttaatgttgatacatttggaaacgcaatgacattgattcttgataaaagcaacaaacaatggaattacaaaatttcgtccgaaaaacaaaaggtataggacaaattagaaaaaaattgttctctaaatatgactcatattattcaataaccaatttaattatcctaattaggggaaagagaaaaagcaagatccaaatgatgagaaaaatactgcctccagctcaagtgtgccaagcgaaaaggaaaatcccaaaaacgaagaggcgaaaaagaatttggtgataattacggacatgggggtggatgatcaagttgcactggcgatgatcagcgcaacagaattggccggtaatgtgttggccattgggacgtcggagcaaggaaaagaagcagcattggcacaatcactgggatttgagaaagtgccagtgtatgtgagaagcagtaatgaagaactagagaaaatgttttttatgaatcccaatcagagtaggttcagtttgcaagttgaaacgtatgtcggcattttaccctgaaaaatttttaattttagagaatcaaaaaagagaggaaaatgaatttcaaaattttttgcaaaatttgttggatgaaagattgaaatttatgggcgtaaaggttaattttttggtactggcacctccgactgatttaactgcagtactattgaagaataaaaaattggcagaagcggttggggaaatactcatcacgggcgaatgtaaaaattgccaagatttacaaccgccggcaccgcttagcctgaacaaatttttgtgggaattaccaagggaacacaccaagccaacaacctacaatgttagcatggacgcattggcaactctgtatcttttcgaaatggcctcaaatggtgaagtgaatgtcctactagtttcttcacgtttacttgctgaaaagttcggtgctgaggataattttgacaaaagatttccaaaactgaaattgataagcaaaaagacaatgggtgctaaaattattgtaaatcgagaagaagaatttgaacaaaagccacacattgacgagcaattcagtgctgccggtccaatagctgtgcttgcaattatggatatgacaaatgtaagggtggatggagtgaccgaatctgacaatttcgtcctgtttacaactcgatcaaaaaaagtgagcttgatcaccccaaaaagtggagaggaaaagccaaatcatggtggataccaagtggaaatagggattaaacaagcaacaaaaattagattgcttgtcaattttaatgttgatacatttggaaacgcaatgacatttattcttgataaaagcaacaaacaatggaattacaaaatttcgtccgaaaaacaaaaggtataggacaaattagaaaaaaattgttctcagatatgactcatattattcaataaccaatttaattatcctaattaggggaaagagaaaaaccaagatccaaatgatgagaaaaatactgcctccagctcaagtgtgccaagcgaaaaggaaaatcccaaaaacgaagaggcgaaaaagaatttggtgataattacggacatgggggtggatgatcaagttgcactggcgatgatcagcgcaacagaattggccggtaatgtgttggccattgggacgacggagcaaggaaaagaagcagcattggcacaatcactgggatttgagaaagtgccagtgtatgtgagaagaagtaatgaagaactagagaaaatgttttttatgaatcccaatcatagtaggttcagtttgcaagttgaaacgtatgtcggcattttaccctgaaaatttttaattttagagaatcaaaaaagagaggaaaatgaatttcaaaattttttgcaaaatttgttggatgaaagattgaaatttatgggcgtaaaggttaattttttggtactggcacctccgactgatttaactgcagtactattggagaataaaaaattggcagaagcagttggtgaaatactcatcacgggcgaatgtaaaaattgccaagatttacaaccgccggcaccgcttagcctgaacaaatttttgtgggaattaccaagggaacacaccaagccaacaacctacaatgttagcatggacgcattggcaactctgtatcttttcgaaatggcctcaaatggtgaagtgaatgtcctactagtttcttcacgtttacttgctgaaaagttcggtgctgaggataattttgacaaaagatttccaaaactgaaattgataagcaaaaagacaatgggtgctaaaattattgtaaatcgagaagaagaatttgaacaaaagccacacattgacgagcaattcagtgctgccggtccaatagctgtgcttgcaattatggatatgacaaatgtaagggtggatggagtgaccgaatctgacaatttcgtcctgtttacaactcgatcaaaaaaagtgagcttgatcaccccaaaaagtggagaggaaaagccaaagcatggtggataccaagtggaaatagggattaaacaagcaacaaaaattagattgcttgtcaattttaatgttgatacatttggaaacgcaatgacattgattcttgataaaagcaacaaacaatggaattacaaaatttcgtccgaaaaacaaaaggtataggacaaattagaaaaaaattgttctctaaatatgactcatattattcaataaccaatttaattatcctaattaggggaaagagaaaaaccaagatccaaatgatgagaaaaatactgcctttcaaatatttggaaaagcaatgacctttatgcttgacaaaattaacaaacaacgcaatgataaaaattatcggtgcccttgaaatgaaaatttgacgtaaaatgattaagcatgcatttcttcatcccttttttcgcggtgaatcaaccaaagttacagtatttggggcctgattaactatttatattattttccattttgatcggggttggtttcactatgttttactgtattttcctatttattaactttttactgttattctgtatttttctattcttaaatcataactataatatttccctttaattaaattttttttcgttatgctatattttcgtataaatgtttttccttcatacaaagaactgactggaaattctaatacaattataggtagagcatgaagcagaacgatatcccgcacgagaatttacgatttaaattaaattattgggtttaattcaataga

SEQ ID NO: 54450 - DNA, 246 bp, Heterodera glycines
atgaacttctacaacagcaacatcaccgtttttctggtgatatttgctttgactggcatttgcaaatttggtaattattaaatataaaaaagtattaatattttctgattaaaaaataaaagaataatttttattcacaggcactatcgcttcacctgtgcacaatgaagaagctgaattaaaaaatactcagccaatctttgaaattggttaaattaattatttttctaaaaaaataataataaa

SEQ ID NO: 54451 - DNA, 2219 bp, Heterodera glycines
atggtaaatatttcaataaatattggttctatttttctctttgcttttgccacaagcttatgtggaggcaagccaaattatgacaaaaatgctgcctccagctcaagtgtgccaagcgaaacggaaaatcccaaaaacgaagaggcgaaaaagaatttggtgataattacggacatgggggcggatgatcaatttacactggagatgatcagcgcaacagaattggccggtaaagtgttggcaattgggacgacggagaaaggaagaaaagcggcattgtcacaatcactgggatttgagaaagtgccagtgtatgtgagaagcagtggcgaggaattcgagaaaatgctttttatgaatcccaatcagagtaggttcagtttgcaagttgaaacgtatgtcggcattttaccctgaaaatttttgttttagaggatacaaaaagagaggaaaacgaatttcaacattttttgaaaaatttgctgaatgaaagatttaaaactaatgcgatgaaggttcattttttggtgctggcacctccgatcgatttaagtgcagtattattggagaatagacaattagcaaaagcagttggacaaatacatattacggacggatgtaaaaattgccaggaattgcaaccgccgacaccgcttagcctgaacaattttttgagggaattaccaagggaacacaccaagccagcaacctacaatgttagcatggacgcattggcaactgtgtaccttttggaaatggccgccaatggagaagttaatgtcctactagtttcttcaagtttacttgctgaaaagttcggtgatggagtcgaatttggaaaaaaatttccaaatctgaaattgacaagaaaaaagaaaacattgggctttaaaattattgtagaacgagaaaaaaaatgtcaacaaaaaccacacattgacgagcaattcagtgctgccggtccaatagctgtgcttgcaattatggatatgacaaatgtaagggtggatggagtgcccgaatctgacaattttgtcctgtttacaactcaatcaaaaaaagtgagcttgatcaccccaaaaagtggagagcaaaagccagaacatggtgaataccaagtggaaattgggattaaaaaagcaacaaaaattagattgcttgtcaattttaatgttgacacatttggcaacgcaatgacattgattcttgagaaaatcaacaaacaacgccaagaggcgaaaaggaatttggtgataattacggacatgggggtggatgatcaagttgcactggcgatgatcagcgcaacagaattggccggtaatgtgttggccattgggacgacggagcaaggaaaagaagcagcattggcacaatcactgggatttgagaaggtgccagtgtatgtgagaagcagtaatgaagaactcgagaaaatggtttttatgaatcccaatcagagtaggttcagtttgcaagttgaaacgtatttcggcattttaccctgaaaatttttgttttagaggatacaaaaagagagaaaaacgaatttcaacattttttgaaaaatttgttggatgaaagattgaaatttatgggcgtaaaggttaattttttggtactggcacctccgactgatttaactgcagtactattgaggaataaaaaattggcagaagcagttggtgaaatactcatcacgggcgaatgtaaaaattgccaagatttacaaccgccggcaccgcttagcgtgaacaaatttttgtgggaattatcaagggaacacaccaagccaacaacctacaatgttagcatggacgcattggcaactctgtatcttttcgaaatggcctcaaatggtgaagtgaatgtcctactagtttcttcacgtttacttgctgaaaagttcggtgctggggataattttgacaaaagatttccaaaactgaaattgataagcaaaaagacaatgggtgctaaaattattgtaaatcgagaagaagaatttgaacaaaagccacacattgacgagcaattcagtgctgccagtccaatagctgtgcttgcaattatggatatgacaaatgtaagggtggatggagtgaccgaatctgacaatttcgtcctgtttacaactcgatcaaaaaaagtgagcttgatcaccccaaaaagtggagaggaaaagccaaagcatggtggataacaagtggaaataggga

SEQ ID NO: 54452 - DNA, 664 bp, Heterodera glycines
atgacattgattcttgataaaagcaacaaacaatggaattacaaaatttcgtccgaaaaacaaaaggtataggacaaattagaaaaaaattgttctctagatatgactcatattattcaataaccaatttaattatcttaattaggggaaagagaaaaaccaagatccaaatgatgagaaaaatactgcctttcaaatatttggaaaagcaatgacctttatgcttgacaaaattaacaaacaacgcaatgataaaaattatcggtgcccttgaaatgaaaatttgacgtaaaatgattaagcatgcatttcttcatcccttttttcgcggtgaatcaaccaaagttacaatatttggggcctgattaactatttatattattttccattttgatcggggttggtttcactatgttttactgtattttcctatttattaactttttactgttattctgtatttttctattcttaaatcataactataatatttccctttaattaaattttttttcgttatgctatattttcgtataaatgtttttccttcatacaaagaactgactggaaattctaatacaattataggtagagcatgaagcagaacgatatcccgcgcgagaatttacgatttaaattaaattattgggtttaattcaataga

SEQ ID NO: 54453 - DNA, 246 bp, Heterodera glycines
atgaacttctacaacagcaacatcaccgtttttctggtgatatttgctttgactggcatttgcaaatttggtaattattaaatataaaaaagtattaatattttctgattaaaaaataaaagaataatttttattcacaggcactatcgcttcacctgttcacaatgaagaagctgaattaaaaaatactcagccaatctttgaaattggttaaattaattatttttctaaaaaaataataataaa

SEQ ID NO: 54454 - DNA, 599 bp, Heterodera glycines
atgttggagttgctgaaccaactcgacggattccaacccaacgacgacatcaaagtgagtggtggagcaagccaatcaattcacattcattttgttttcatttaacgcaggtcattgctgcgacaaatcgtgttgatgtgctcgacccggcccttcttcgctccggacgttttgaccgcaaaatcgaattcccagcaccaaatgagaagggcagggaacaaattcttcgcattcattcgcgccggatgaacgtcgagtcggtgacagaattttaggaaaacaaattattcctcgttttcagcaaaaatgtcaactttgttgagctgtcgcgctgcattgaggacttcaatggagcacaatgtcgagcagtttgtgtggaagcggtgagcggataaacattttttgaggatatgcgtcagcttatctcatttttacagggaatggttgcacttcgtcgtgactccactaaaattctgcatgaggatttcatggacggaattttggaggtaattagtaacaatttgagaaattttgggggaataagccaaacttttcaggtgcaatgcttgaagaagaataatctggtgtattatggctga

SEQ ID NO: 54455 - DNA, 87 bp, Heterodera glycines
ttttcgcccctatttcgcgaattttttgcccctatttaggtccctaaattggaatttttcgcccctaaaaatccgcaccctaataat

SEQ ID NO: 54456 - DNA, 768 bp, Heterodera glycines
gttgtccatgacatttacgaatgcaaacacaacacaaaagggttgaattgtgaacagtgccaagtgaattaacgtacatacatttgtttcaaatgtcctttcaaaataatgccaatttgaaggatttgtacaacgatttgccgtggcgccccggcagcggcgagcagtccaaagagcgtggcgaatgcgaatgcaatggacacgtgccgcggtaaaagccacaaaaatgatttaaatggatgcatttaattttaatggtttattttatgtgccatttcgattggtccgtttacaattcgactgcctttgcctcgggcggcgtctacgacaattgccaacaaaacacacgggacagaaattgcgagaaatgcaagctgtacttttacaagcaatcgcaaagcctaacaaaagctgttaatttgaattatacacttaaaaactctaaagatttaaaattccatgagaggttctcttcaagacccaaatgtttgtcgtccatgccaatgcgacaaaaggggcacccaaaacgacggcacatgcgtggcggaggatgacacggcacaccaattggtggccggacaatgcctttgcaaggaaaatgtgcaggggaaaaagtgggagaaattggacagaaaattaaaataataataataataaatttaaacaatgactccatttattcgttaatttgttcagctgtgaccgttgcaaagatggcttttgcgatttgtctgaggacaattcgaagggctgcaaaaagtgtcactg

SEQ ID NO: 54457 - DNA, 711 bp, Heterodera glycines
atgccgcgaatcgcggatcgcggtcgcgctccacccctggtatgaggctccaaaaaaatatttgactaaaaaatgaataaataaatctactaattcggggaaggttttagttcgagatcgaagcgtttgaaaataagggtagaaatctcgggaatttttcattccccattagttcgatttgcctgaaaaaaatgacgttaagtgtcaactttcgctgtcttttatatgcatagtttttcctcaaaaatcggctcatgaggtgttactttggcgcgactccatttaaagttaagactttttccggcaactttttacctcacttaggagcacaaaacgcacttattttttcaaaaatataaaggaatgctgattttaaatgttattaatttgttttttttattccttcaatttgctcagctattataaatctgtcgaaactgtcttaatattttgtagggtaggtcgggaccgggactttttgggttgaaaaaccgggactttttggctgggaaaaccgggaaaaaacccgggaatttcccggtcccgttcaaaactggtcaaaaccgggacttcggtactcagttgtactcagttgtccgtggtttggtcccggtcccgacacactctatattttgctccaacaaaatgtcagacaaccgaaaagaagcagaggcaaaagcaatgtaaaatgaaaacctcattttcaataaa

SEQ ID NO: 54458 - DNA, 1418 bp, Heterodera glycines
atggcatcggccgtcaaaaaaaggaaaaaattttcctccgacaatcgccgactcatttcttctaccggaattggtgaaaatgaacaacagaaatcacttggaaaacgacgaattctttttcgacatgcaaagaaaatgaacaatcgaattttgaggaaaatgtgagaattttttggcttaataatttatgaatttcattttaaagcctctcaaaatatttttcccgcatttcagttggatttgcactgatgttttgatggacattctgccattttttgaccatgcccaacttggcctcaaattggcactgatttcgccacgtttcgatgttttagtggacacgcattttgatggcaaaagcgaatggcccatttggaaattagtcgaaattcacaaagaccgtgggtcggaaccaaaacttcgtgtgtttaccagctatgtcgattttaccaatattatgaattttccgttgcccgaccgtccgctgcccgagaaaacacgctttaagcgtcttgttatcatgtaattaaattaaaatcattgttaactgataaaagcatcccattttcaggtacattgatcattcagtcatcgcatttctccgctcaaataaacaaattttcaatggaacacgattcgcattgagtttgtcagtgcaggcgtccaagaacgctgcccagccgatttgggatgttttggcacgtgaaatttggccaattattgcgccaaacattcgccgtttgtacgttcccgatgctgaccatttggacaatttgcgcagtcgcacttcgccgacaattctcacggatttcaacattaattccatcctttctggtcatctgttgcccgatgtgctcgatgattttgatgggccaaatgcaactgcttctgctggccaatcgttgtccaaatggttgcacactccgaccaccgacgggaagccgaagcgattgcgttgcgatgatttcaacgggcaaggaaacgccgaatgggtccacaatttcaaggaggtgctccttcttttcccctattttgtcattcatttgcatctttttcggcaactaaattttcaacatttaatgcgatttgcttttaatgtgtccgttttcccattgtttagccgtttctccgtgccacttcttctgtctgctacataattcaattctttgccttctcatcaacgccaattgtgccatttgaattgttgaacgaacggaccaatgagaagttgacactgacaatgagcacagaatacatatggcttctgatgcggtgccaaattgggcagacgtttcaatgggatgccaaaaatttgaacttttttgtcggcattcatttgtatggttacaaaaaatgcattgggtgagcatgaaaacagaattttttaaaatacatttaaaactcgaacttaaatttga

SEQ ID NO: 54459 - DNA, 1372 bp, Heterodera glycines
atgaacgccggaatctggccttttatgaagtccttatttgtaatatttgttcttgttttcgggtacgaacgacacctttttgttcttatttcgtcaactttcaaataaaaacgaggctgtgaaaagcgcgcacaatttgttataaagggcaatgcaaatatacaattaaattatttaaaaattaatttaaaatagataagtcgttttttaaatgtttacctcaaaaatcatatttttatccgtattttgaaaatcttgagattgctcccgatattagacattgaactttataatatctcgagaaaaaataaagagacagtatttttttttgaaggagagaaaaaaatgaaaagatttagtttcaccaaaatgcaaggatttgcgtttagtgagtggattttcttcgtataaaatgaatgaaaatttaaagtgtacatatgaaaaatgtgaaagtgccaaccgattatggttttcttacggtaaaattgtgcgcccctccgggaagcttttccattatttttattatttttaaatcggcttttcctccatctccgtaggcggtggcgacaaaaaaattaatcaacaaaattgttgggcggcggatcagcacagtgcgcgaccgctttacgcaatttgcgcacaaagcaacacccatttggtttaattaggatgattgaaatggcgcgtcaaatgggcataacaaattattattattattttgttatgtgtatttttgtattttcgaaccggaaaatttgatataaatttcaatcttaaacacataagtttttaaaaaagccaaagaagcaatattcatattgcaaaaaataaaattttatattaatataaagctcaattttgaagtgaaaattttgaatctactaggaaattccaaaaaaaaaaacttgttttttctttgtaaaaaatttacatttttagggatgcttttggattttattctattccgcagattaaaaataaaattttgggattaaaaatatgcaaacgattatacaaccaaaatttgcatattcttgagaaaacaaacgttaacaaaaagttttcatacgttttgttatagcttaaaattcaactttttacgattaaataagtaattttgaagcgatttaaacaaaaacttaaaagaatgggccgccggcggtgccgataaacaccgccgggaaaattcggtggcttcctgatttatgaacagagtatatgcacccggaacatgatggggggacccagcagggaaaatccttccgatttctgttcctatctctgattaggattgttcatttttgttttttgccaaaaatgccctatttggcgttatgttgcggaaaaaagaaatttaagtatttccaataaa

SEQ ID NO: 54460 - DNA, 833 bp, Heterodera glycines
gaaaattgttcctcttctaatcacagtttgcacctcttctgatcactgttgtacctcttctaacaattttgtacctcttctaatgactgttgtacctcttctaatcacagttgtacctcttctaatcacttttgtacctcttctaatcacagttgtacctcttctaatcacttttgtacctcttctaatcactgttgtacctcttctaatgactgttgtacctcttctaatcacagttgtacctcttctaatcactgttgtacctcttctcatcacttttgtacctcttctaatcactgttcttcctcttttaatcactattgtacctcttttaatcactgttcttcctcttttaatcactgttgtacctcttctaatcacagttgtacctcttctaatcacttttgtacctcttttaacaattttgtacctcttctaatgactgttgtacctcttctaatcacagttgtacctcttctaatcacttttgtacctcttctaatcacagttgtacctcttctaatcacttttgtacctcttctaacaattttgtacctcttctaatgactgttgtacctcttctaatcacagttgtacctcttctaatcacttttgtacctcttctaatcacagttgtacctcttctaatcacttttgtacctcttctaacaattttgtacctcttctaatgactgttatacctcttctaatcacagttgtacctcttctaatcacttttgtacctcttctaatcacagttgtacctcttctaatcacttttgtacctcttctaacaaaagagtacctcttctaatgactgttgtacctcttct

SEQ ID NO: 54461 - DNA, 325 bp, Heterodera glycines
atgccaaaagtagagggggaaccagagaaaaagagactcaaaagcagagggaaccagagaaaaagagactcaaaagcagagggaaccagagaaaaagagactcaaaagcagagggaaccagagaaaaagagactcaaaagcagagggaaccagagaaaaagagactcaaaagcagagggaaccagagaaaaagagactgaagataacgcaaatagaaacatgatttgaagaataattaaatagtaaaatcagacaaatgaaaaaaggctagaaatagggggaaaagaagtgaagagaagaggagagaatggataacagagagaga

SEQ ID NO: 54462 - DNA, 335 bp, Heterodera glycines
atgcttaagaaaaaaagacaatgcatcaaaggaggaaaggaaagaaaaaaaatagtgcgagaaaagagcgagatgaaaagagaaataggtaggtatcggaccggctcagttcggccccagcccagttttcgatctatcttttttctttgtcaacaaaatccaacaatcttggtatcattcgaaagatctttacatactctattagccttacaaaaagctaaaaaattttcaagcctggaaaaaatttatgaagaaaaaactttaaaaaattgattttttcagttttcatgttatatctttttggatatttgtctaattgccaagcaatagcttag

SEQ ID NO: 54463 - DNA, 256 bp, Heterodera glycines
cctatcatgctcgagagcattgtatgtgtataaaattatcaaaaaagagatagcatttttgggataacctctaaatataaaaatcctctgtgaaataaaatggcgattgtgcacagccctccgtctcatacgcaagcgcttttgtgaggtataaaatttctcaaaaaaagagatagccatttttctgggatagagtataaatttaaaaattccctcaaaaataaaaggtctattgcgcaccgccctccctatcatg

SEQ ID NO: 54464 - DNA, 304 bp, Heterodera glycines; identical to SEQ ID NO: 51570

SEQ ID NO: 54465 - DNA, 54 bp, Heterodera glycines
atgtggatcccggacaatcggacagtggacaatccgacattggacaatccgaca

SEQ ID NO: 54466 - DNA, 2012 bp, Heterodera glycines; identical to SEQ ID NO: 4440

SEQ ID NO: 54467 - DNA, 1095 bp, Heterodera glycines
tgaacgcttattttgagaaaaaacaggcaaattgacaaatgcaaggcgaaatggattgaccgattggcagaatcagttgcgattcgcagcgtttctccgagcgcggaacatcgccaagaagtcttccggatgatcgattggacggagaaggtgcactcctccgaattgcaagaaataaacaaaaacaaactcttttagctgatgaccaacttgggaatagtatgccaaaaaatcggtgatttgcaatttatacgattgctttctcagcttttatggttgtttctctcgtaagaaaatccacttggcactgaaacattgtccgatggaacgacccttccgctgcctccgattttgtttggtacgctgggcactgacaaaaacaaacggactcttttggtctacggccatttggacgttcagccggcggcgtttgaggacggctggtgcggcacctcaaaaagaccacggggcaaagaaagacttcaggaacacggaaccgttccaactcatcgaaaaggacgggaaattgtttggccgcggttccaccgatgacaaagggcccgtgctcggctggctgaatgtcatcgaaaccatgcaagggcttggcattgacatgcccatcaacataaaggtgtgtctgtctgtcgttgatggcacgcaataatgaatgagttggaattgtgcgtttgtcagttcgtgttcgaggggatggaggagtgcggctccgacggattggacgaatgcctcgagcagcgcaaagattttctctccggcgtcgacttcgtgtgcatttcagacaattattggctgggcaaacagaagccgtgcatcacttacggccttcggtctgtgccccgttcgcctttcgacagaatgcctttgtctccctcttcagcggtctttcgccgtttgccatcgaaatcagtgggcccaaccaggacctccattcgggcgtttacggcggcacaatgtccgccgcttttgccattttccgtttgcattttccgaattctcttcctttaaagccatgagccaatgaacgacctttgctggttgctcagcccaattgactgacacaaaggcgaacattctgat

SEQ ID NO: 54468 - DNA, 436 bp, Heterodera glycines
atgctctgcttcatcattggcatcatcaccgacaaacacgcccaaatcccacgggtggcccaaccggcgatgatgggacttatgctcaccgccatcaacatggcttttgggctgaacgccggtaatgcagcgaatccggcgcgggatttcggcccacgacttttcacacttttagctgggtacggttgggaagtattcaggtgagggagtgttgaaattgtgtccaatttcaaaatgcctttttcgtctgttgttcagttacaattctttcggttggttttgggtgccaatcgtttgcccatttttcggagccatcgtcggcacattggcctaccaattgctggtctcggcacagttcggaccaacaaaagagggaaaactgttagagaattcgacaaactcttcggcagagccatcgctggcgaaggcacagtga

SEQ ID NO: 54469 - DNA, 876 bp, Heterodera glycines
atgctcatccatccctttttctgttcagcttacactgacttggccaattcgcggctgtcccaacgtgaaagtgtgttctatgacggttccttccctttgctgctgcacaaccttcgtctgctgtcgtccgatgcgattgtgtcaaattcggacgaagcgtcgacaagtgacaaacagcaaaaggaaagcaaaaacggaggaacaccgacgtacgtggtcaaaatgttcagggtttgtggaggaaggaggacaacaaagcgcacaaaattttattttttgtttattaacaggacgaaattactatcaatttttattccgtccaacacattgtgatcgttgaatggatgtcaaaccccgtgaatgatttgtgagtctttgaatgaacaaatgaattttactgttttaccacattcatttcttgggcataaaaacataaattaatccgtttaagatttgccgatgcgacactttcggccattcttcacgcccaaaccaaccctatcctcgataaaagtttttgtgccaattttctgcttttatttttcaaaaactccagatgttccgaaggatttcggtgcgaaagcacagcaaattgagcaaaatttggaatcgattttggttgggacactgtgcgaattatgcggtgacaaaagtcttgtggaagtgaaagaggaggaaaaccaaggggaaaaggacgcagcagcggaggaaagcgacaaaaaagaggggaagagacggagagtgattcaattggagttggacgggaagaaagcgtgcatctgtccggtcagtctgcagatcactgaatgcgaggaccaattgctgcaccatcttttgtcctcgctgactcaaaaagtggcacatggcattctgcca

SEQ ID NO: 54470 - DNA, 864 bp, Heterodera glycines
atgggttggtcaacgcccgctgatgccgagtgccaatttgagcacatgaacacctgggatggccaattccacccatcggagaacgtgtggacgcacaaggaaatcgcactgtcctttgacggaaaagcgcaaaaaatcaaggactgcgaccggacacttgttgcaacggaccagggattcgcagtagatgccggcatgttcctcaacatgatcaacaatgcaaatggtcccagcggagtgcccaaaaaaggacagtcaccgggaggcgctcaaaaacggtcgctactaccggtggaccaattcagcgccgacactaacatgagattggaaatgatgaagcaaaatgccaatcaaacgaaggccatcatccccaaatcagtcgcagcggctccaaaaacggaagttccgaaaccggcagcgcctcgcccaacagttggcccagcaaaaccggagcagccgagccgaaaggcacaactgcaaccggttaaattgccaacgccaaaacaggcagcaccgatccaaaaagcgataaaaccaaaaacgacgacgacggcgcagaagtatcagccaccaaggccaacgacttctccaaaagctgagccaccaaagccaatcgtcgcggtgcccaaggttccaagcccggtaaccacgcaaacgatacaaccaacctctccgtcagaaggccaaccgaagagtcggaacagaggaagattccgaactcgctatgtggtgcgcagaaaccaaagcgaaccggaaaagttaagaatttacgacagtccgagacaaaagcgagcgacggtccacacggaacaactcgcgagtcaactgaccgccagccaagtcaacacaatggtgcaactttaa

SEQ ID NO: 54471 - DNA, 744 bp, Heterodera glycines
atgcgacgtgcttatgcattggcgagccgagcagtccgtccggatttggaagtgtttttgggcgatttatttgatgaaggcgttttgctgggaggcgatgaacaacagtttgtcgacacgcgcaaacgtttcatgaacatttttccgctcaatagatactccacaaatgtcagtgaaaatttgtacaattctaaaaggttttaccaagatttgtacctaaaaagttgaaaaattaactcaaattttaagcgaaacctaattgtctagttttacatttttgattaattttaaataaataaataaactcaatttcagcgcatttatttgcctggtgacaacgatattggaggagaaatggagccggtttatgcggaattgtacgaacgtttcaaacagcattttccaccacattttactaacggttcggacaatttcaaacgttttgtctccgtttatgaggtgcttttatgtcaattattctttttccattcaaagttgttactgaaattttgaaggttttatgggtccacaaaagcagcgatttatcttttaaaataaatgattgcaatttaatttttgttttttctgttcagtctgatgtgatcaattttggtgcagttaatcgaatttgttgtgaccaatcagatggaacaaacactgttcgcttattgctcagccattttcctgtcttaccgcacgcgactgtcaaaacggagcaggtcaataaagatgtacaaactgatt

SEQ ID NO: 54472 - DNA, 954 bp, Heterodera glycines
atggatcaactgcagaagcggttggccaaactgcaggcattccgtcctccctatttggacgagtacgaacgttacgaggcacagctgcgcgttcgctacgctgtggtacagttggccaattaccgtaatttggccaaatgtcaaatttcgaaccgatttttagtatgtgatactgttccgcaatttgcatgcgttgcaaagtcgtctagtacaatctgagcacgcggagcgcgagcaggcactggaggctgaacgttcaatgcgcgaaatggttgaaaaaatgcgcatggaaagcgaacaggcggctccattgtaggcgcttaatgaaatttctggccccaataatttggccaatcattcaattggtttgtctagccactttttaagaattgctggcattccgctgcacattgatgagctgaaccaagctgcagacgacgaattggaggaatatggacaaaatggaagacagcgacgaccaggaggtgggtggaaaaattggacacaaattttttatttcagtacaatatttaaaatagttgaaataaagtaattagagcttggatgggaaggagatcccgccgggactttcccgggatcccgatcccggctttgctaggacacggtttcccgttaatgcgtaaagacaatgtccctatggcggttgttcttttttctgtaaagtctcaatttccgcaaacagaagtgcgcgttttcggcaacatgactgggttgggactgtccgatgacgatgaggaggatgaggaagaggacgaggatgggctaggaggtggacgaatcattgaaatggaggatgaggaggaattggatgacgatgatgatgacaatgacgattatatgaacaattttatccgtggcggcggtaacggttcaacagcagcagcagaagggaacaccacaaaacgacaacgggcgttaattgagagcaaaaaa

SEQ ID NO: 54473 - DNA, 1766 bp, Heterodera glycines
ggtattcaaaaaaacttctcccaatggaaaggtattccctatgttcatttgagccatatctattataattgcatatcatagattacaacttatcttggaaagcgcgattttttggatcgtggtgaaactgtcgacttaataggtaattgataagtcagttttttttttaatcgctattgtgttttagatggaatggttctaattgacgatgactatataaagtcaagcaaaaaagtgactgtccaactccttgcggcatttcgctatgggcgagaggatttggatgttttaggcttgactttccgcaaagatttaatctcgcaattatatcaggttaatcgcgtattttattacccacctccaattaaagcatttgactgtttaaggtttacccagcaacacaaaacgagtccctaaggccgatgacgcgactgcaggaaagactgaagaaaaaactcggtgaaaatgcctttcccttttggttcgaaatccctccgaattcggcgtcttctgtcactttgcaggttcagatttttctaaattttaaattataatttcctttttagccagcccaaggcgacacgggcaaaccttgcggagttgactatgaaattaaaacaatggtcggaggcgattcgacgcaagagaagcccaagaaacagtcagtttggaattcgaaaaaagtcagttaatcaactaaatttagcaactccgtccgtcttgccattcgaaaactcacttactgtcctcaattggagcgaatccaaccgatggttgacgtgaccaaaaattttatcatcagccccggtggccttcatctcgaagcgtcactcgacaaagaagtgatttgccacggaaactcctattttggctttaccttttttagatgtattaccacggcgaatcaattgcagtgaatgtgcacatccaaaataacagcaacaaaactgtgaagaaggcacgttcgtacttttgttttgacatgacaaaaaaaacattttacagataaaagttactgttcaacaaatggcagacatttgcattttcacaaccgctcggtatacttgcgatgtggataaaattgattcttggtaaatgaaatcaattatttattaaggggaagtagacatcaaattatttgagcatattcttaattggccagggttgtagtcaaaaaattttggaaaaaatgctaatgggatatattctcattttccggagcgttgcaataaaatggaatttattacttttattttcaaaattcattttgttgattctttttatcatttttgcatccgatttttattccagcgaaggttttcccgtcgggccgggttcaaccctgtcgaagatttactcattgtgcccacttcttttgaaaaacaaagacaaacgggggttggcattggacggccaattgaagcacgaagacaccaatttggcctcctccaccacttttgccgctttgagggtttgaattgaaattaaccctattggcctccaatttttattctcacaatcagcagtctgtccacgagaatctgggcataattgtgcaatacaaagtcaaaattcgccttctcatcgctggcgcattgggcggagaactgtcggccgaattgccattcactttgactcacccaaaaccaacggattcacctcatccaacggagaaaaaggcaaatgtcgccaattgccatgagcaacaaacaccgccaacgaatggggcacaacagagagaacagaaaggaaatttcgtggctgat

SEQ ID NO: 54474 - DNA, 124 bp, Heterodera glycines
aaattgtacaaaacttacgtttttaaaaaaaaaatttaaaaatttacgacttttcatcaaaaatttcggaagtcggaattccgaccccaaaaatgtcggaaatcggaagtctttccgtgccata

SEQ ID NO: 54475 - DNA, 647 bp, Heterodera glycines
atgagcatttttatttctttgtttgctgttttttgccttggcctccattccaccggttaatttttcataaatttataaactaaaaaaaacaattaattattgcattatttagcgctgcaatgcaaagtgggccattacagcaattatggtgccattattgaaatcttggaatgtcctccgctgaaaacggaattttgcattgcctacggttgtcagaagggtataaatttggacataaaattcttgaaaatttttcgaatattttttttaaagaaccaaatgacgtgtacatgggctggcaatgttcggaaagtgacaaatgcccggatttaagtggcgctaatgcttttgctggtttgaaccttaccggatgcaaatgcaaaattggggagaagggtgccaatttgggcaatgaaaatttcacttttccgatcgatgacccagcgagttcagagcagaatgatgcctatcactcttcgatggagtctccggataaatcatcaggtaattagagatcggacaagcggataaagggtccaatcggcttttccgttgaaaaccaaaaaatcaaatcgatatatcgattcgatcttgatcaggcattgtgactttctgatcaaataagggttggattctcgagaaataaa

SEQ ID NO: 54476 - DNA, 683 bp, Heterodera glycines
atgggtagtaagtttattttaaaaaaattatgagcccataattaatattaaatacgtaggggtttaaccagaataaaacttaatttatttgtttgacaataaatgaattgaaattatacagtgatcaatggaattttttgtttaaatttaaaaatatgtaagtaattttaatgccggcggtgccgtcaatatgcgaaaaatatgttttttattgcaaaaatggttgtttatgaatcaacttttaattaattacgaattgattgcaaaaatggggtgagctgtggaacattgggctcagtgtgaactgctcaaaaaagctgagaaagtttgccgccgtgggcctaattcaattcatttcagagggctattgataaagtaagtgtgcaagagtaatagagaagtgttgatggaattaatgacttttaaaaattcgtaaaagaacagtaaaaatttaatatttttttgtttaactttgtttgtctttttttgttaaattcttttttagaaattaaaaatgggtataaatttaattaaaatttataaattatgtatttatttagaaaatatggatgtacaaaaaagattaaaaatgcttgggttttaatcaaaccaaccaaatttgctcattaatattatcatgagttagttgggtaggtggaagttaaatgttttttttacagtaa

SEQ ID NO: 54477 - DNA, 1519 bp, Heterodera glycines
atggacccaggattttggctcggtgagggcggcgtttccaaaaaaattatgacaagtggggcctggtaatgctgccaggcgccgccgtgggaaaaattcagaattttggcactattttttaacaatttgcagcaaaattacttttttttgtgtatttttgaaaatttagcaaattttcttggaaaattatgttagggaggtcggtcttggagctgggttcaaggtttttcattggttaagcctgccgctctgtccaaattaggccaaccataaatgcctgggttatggacagtaaaatccaggcggagaaagtaattgtctacaaaattgcatgagaatgtttacaggctcttcaactgcacaccaaactgatgaaggacgcggtggacagcgacgtgaagcaaaaagggggcgaaggaggcggcgattcggccaaatgggacgaagtgatggaaaagcgaaatgggaaaacaaaaaatggattttaaatggtgcccttttcaaggtgaaacgcgcaaaagcggaggcggaccgacgtgccaaattggacacggaaaaggaaggcacggcacgcgacgcaatcaaagaattggagaaagtcggtgttgaataatggggggggggggggttagttcatttgaaaaaatactcggcgaaaagtaaacaagacagcccctcccagcttaaatatacgaaatttattagaaaattgaaattttggtgaaactctttcaaaaatgtttcagaaaacgatatttgggttccgaaattaacagaatttttttttgaaggtattgtaatttttagaattttttatctagtatttttttgccaaaaatctaaaggacaacaatgtgaattttttctgaattcatggcgcatttattaatgctgattattttgctattttggattggaaaaaacttcaatttgtacccaacttttggcatgaaatttatgttcttgatttttttgcggcggtaaataacgcgtgcgaaaaatgaaatgcacccccaaaaatgggatttaatttttggaaaatggttgatgaacacactccacttgtttgcgacaaattttcaccacccttttcagctcattttgaccggctcacagaacagcgttggcgacgacgacggggaaatgcctctgttgctgaacgcccgcgagacggccaacaaattgtcgagtcgccttgacgagatgaacttgctgctgggccgagagcaggcgcagatgcgcattttcaccaactacaggcaaaatccaaaacgaatcaaaaaaattttgttttacaaatgcctatattttgaatatttcagcacctgggaaaacaggaattagtagctgttttctccaaaaaatttttttaccatttcgagaccaaatttcaaaaaaaaaaatatgagaaatgagggcttggaaatttttttggaaattttatggaaattttaatgtaatttgaaaagaatattgcttaaaacttattattattttttttaaacagacaataatacaa

SEQ ID NO: 54478 - DNA, 1040 bp, Heterodera glycines
atgcataaaattaacaaaaattgtgaaaatattgagagtgaaaaaattttgatgtacataacaaatttaaataatttcgggagtttttacacatttagagaaggccggctttggctttttttcgcattttttaattatttttgggggggggggggggggggtgccgcaaaaatagaagagaagaacaatttagaagccacgtgacgaaaaattgcacttcattgaccaaaccgtgtgccattgcccgcttggcaaatttgaattaaatgtagtttaaataatgtttaataataaaaaatatgtacataatttaaattattttaaaatatttatttaaagctcgtcagtggtcatctaccgcatcgcttgcggcgaaggactttaccaagtaattattgttggagcagctcttttcctcgcccagttagattggaattttaaaaacgaaatttaatttttcgaaatttttaaaatatttttcccataaccaaaaagaaaagcttttcgaaaagccccaaacaaatggtttattttcagcatcttttggcctacgaagtgccgctggtcaagcatttgttggcgcaccgttggcaaagccaagctgacactgactgtcgtcaacaaattgcggaacatccgatccacaccatccaacatcaatcagctaatgcgataaagccacgggtaatggaaaaattatatggaaatcatggatttaaaaattacattcaaatttcaatgaaaaaaaatgttggtcccgcgttttcagaccgaaatacccgactggcacactcatcgacaagggcgtggtcagccccaaatgttctgagtcctttttggcctcgcagcgtgcgttgcaggtgccttcctctgttttttgaacttttaaatcaaaatttgaaattgtttttccccagggaactgctcgagtgccacggcacgccattttgatggacgacaacggatatccaacggacaaaacccaacaatcacatccgtatgtccaagcagacgaatataaattgtttaaaaatgtttga

SEQ ID NO: 54479 - DNA, 1504 bp, Heterodera glycines; identical to SEQ ID NO: 23778

SEQ ID NO: 54480 - DNA, 369 bp, Heterodera glycines
atggcttcccaaccccacttctttttcctgctgctggtgttgccaacaacatcattccccagtttctgctgctgtacgtcctgttgcatcaccgcggtggtggcacgacggttcagcgacggcattcgtgccaaaagcgcggatgatgagttggcagagcaggatgaagcggaagcggacgatgccgacgcggcggcattggcggacgatggagcggaagaaagagatgtaagcgaagcgggcgcttgaccttcggccatacgttgccgaaattttgccacagtggcactctgaaaaatgccaaaaccgtgattttaaaatttaaatatgccatttcttaatgcaaaaaattgttccgataaaaataaa

SEQ ID NO: 54481 - DNA, 1834 bp, Heterodera glycines
agaatggcgcccttttccctttcgcccgtcgaccgaatgcgtcaaagtgtgttccgagttcgaagtcgtcttgcggtcaatttgttgtcggaagggttggccacctttctgctgctgctggtcggcaatggcattggggcacaacacattttgggaggggggaagctggacaattacatgcaggtgaattccaaggggaagtgccaaaaatagagtggccaatttggcacggctaactcagcggagacaacgagaattaggcacaacagacaaattgggggtgggagaacaatttagctaatttgagtgtcatttgacaacttactccgccacccgccaacggcaaaagcccaaacaaagagttttcggaaagttctttcatagcggtcgttttatgtaaattagaatttttcgcacccaaccgcaacctttggccaaattctttctgttctatgggaaggagcagattttactgcatatgttacgagccatttcattttcctttctttgtaaattgattttttaaaattatcctaatggagcacccaaaatcccaaatccgatcacttttattgtacgggtcaaaactttgctttgatcggttggaaatttattaaaagcagtttttctggccaaatcaagtccggagaatccaaatcaggcctcagatttgatctctgaattttctctggcattgtactgctccatgtcgttgacaagaagttgaagcagtacagggtcatagaacagcaactgactaaatctgaggcgatattcggattctccgggtttggtttgcccatgaaaacatcaatttcattttattaggtcctttcagaacaatgttgtacaaagagggtgctgaatcttggcacttttgagcacccattttcagacaggacaactttaaaaaaataacccatcggtcttggtggctctttttcagcttgtcagatagtcccaacattgctctacaaacccataatttgttttgcacctttagccttttcttggccaagaaatcagtggttgaatttggccacttttttaagtagaccgatcagtttatttgagtctaactatctttttaaaatctaaaaaatgggagaagattgtggagaataacggagcatattttgattaaaattggttcattagttaatttgttacgatttttttaaataaatttttggtcgctatgaaagaactttccgaacaccccaatattagagccttgaaatttaggattttggggaagggaatgtatgtaccacagccggcaccccggagaaaattctgaagcgttaagtgtgatctaaaaggttaggaaaatcatattagaatttaattttgaaaatactttgataaaatttttaaaaaatacaaaatccttaaaacataaacactgtaaacggattcctataagtttgtttcaattcactcctactaaacagtatctcgtttgcaaaaaatactttgacactgacgcattttccgatatcgcccaacctccccttgtggccatgactttgatagtggtcacataatttcaccttttcattgtgccaatttatgtcaggtgtgcttcggctggggcatgctaatcgctcttttggtgttcgccacttaccacacatccggtactactaaatgatgtggtgcccagttgtgccaatttccccccccccgtccaaaggtggccatttgaaacccggccgtgtccctcgccttcgttagccttggcaaattgccattcgcccattttttgctgtatcccctcgccaaactgtcggcgcctttttttgctcccgccctttgctcccacatctacaga

SEQ ID NO: 54482 - DNA, 1234 bp, Heterodera glycines
atgaaagagtaagatcaaacccgttcatttgttagcttctactttttccctcataatttcattttcagttgtgtcgccttcggattcatcgcccaaaggcaaatggcattggatgagtacatttgcacccgcgacggcacttatgcgtggcttagcaatagccttttgtggaaaaacggttcccacacaattgacaagagatgtaaatacggtgctggcgatacggtcggatgtggcattgatttggctaatcgaaagattttcttcaccaaaaatggcattcgattgggtaagaacaacgaaaaagaagaaagtggaggtcaataaaaatggacattataagaaattaaaaaagaatcctcataaaaatgtaaattggtgctaagtcaagggataaaaagtgcaaaaatcaatggctctaatgcactttatgagtccaatcaattgacaatcccgggtttttatacaataactttgttaatttcttctatttatgtgataatgagggatatgtggtcctattagaggaataaaattaatttataattagtttacttatttttgtttatttttatctcacaattttccgtgtcaaaaggctcatggtaaaaaaaatagggtcatggtcatggttaaatgaccaccaacttcgtggtcattttaccaaagttcgtggtagctcttattctgcgggttttaccaccaacttcatggtcatttaaccataaccacgttcttattctacgggccctggcggggatgaaccgccacggcgagtgccgataaagcaccagtagtgtgtgtgtaaagggggccaatacctccactgaattattggtctcaagacaatggattaactttcgagtctcggttcgcaaaatttagtgggtttctagggagttccgataaatgtttgatttttgagtatttttgtactactcactttgtccgtcacgaaatggacatggatcagatggaggccaagtgccaacaccgcggtggccaacacgcactcggccaacccgagaattttgaggccggtcggaatgcggcaacagcagcatttccatttctcgtggtcaggatcgaagtccattagaaaatttttcgaaaatttaaataacacagaaattaaaattactaaaattgaagagggattttatatttaagtttatttgtcctatgagaaaccttgggaaaaagttaaaaaatcaaatttaaattagagaataaa

SEQ ID NO: 54483 - DNA, 974 bp, Heterodera glycines
atgcaaaataatcaatttgcacttttggaacggatcagtgaattggaaaagcagcaactgaaacaacaaaaacaacagcaagacgagcattacgataatgaatacggtacttgtgttaaaattaaaataatttaaacatttaaaattcaaatcattttaagcttccgagcaattcactcagttacaaaatgatcagcagcagaaaattgaaactaatggattggaaaagcgacagcagaaagtggtaagtatgaattgaggaaggaaattttttatgaaagattgtaattttaccaatttagggttggtcccagatcagattcagtctcattccaaaacggattagagggtgctttaaatggatttaaaagattttatgtttaaaaaaatatgtaaatttcctccccgacaagagattattgctgctccccgacatgttttaaatttctcaagctatcctcacaaattatcggagaattcctacccgactttttcaaccccattaattttagatacctcaaaaaattttcatcactaacagtgtttttttttcaattttccgaaatttatggcaataagaaaaattaaaaaacaaaattacagatttcaaattattgggatgccaatttctgtcacagtgacctcgaaataattggtgccgattgtttgacggtccgtcacaatggagatataatggtaatgcatggtaagtcttgtttttgtacgaaatttttttgtaaaaattctggcttttagaaactgcactcaaaacacttttttcagaatcccgaacggatttcaaaaacgcaacttattgttagataattcaagaaaaaagtgaaaaataattttactgtctaaaagtaacaatttctttaattttcgagaatacatcaaaaatctggatagagtgaaacggatgtgtttttgaaaaaagatttaaattctttctaaattcctcgggtaaaaataaa

SEQ ID NO: 54484 - DNA, 904 bp, Heterodera glycines
atgccaaaacggtgcgtaacaacaattcgtcacgtttcggcaaattcatcagaattcattttaaccgtgccggacgggtggcttcgtgtgacattgaacattgtatgtcatgcaaatttttgtttaaataattattttattttttttaaattaaaatatttattcaaataaacaattattgattttcattttaaatgtatttttatttatttatttattaacgaaaaaattatatttttatagaaagtacatcaattgatttccaataaaatattttttccaatttagtttcctgaatgatttatttcattatatttttgtttaatttatttatacaaaaataaataaataaatttaattataatttattttataaaaagtacatcaattgattttcgaataatatttttttccgtttagtttcctgttgataaaccaaaataagtatattttacttgaaaacatttaaaaggaactcagttttttttccattaattatatcatataaattttaaaataattataaaaaaaaatattattattaattatttgtcgtggccgaaacggacttctatttttttggttccatcaaatttcataatttcattttttttcgattattcgagaaaatctgagagtgaaaatttcgaaatgacaaaaattttgagtgaaaatttcgaaatgacaaaaattttgccgatcaccagaacagaccaattcagatttgctcgagaaatcgcgtgtgattcgccaagctcccggcgaacgttgctaccacattttctaccaaattttctccgaccacaagccggaactgcggaagaagcttaagctgaccaagaatttgaaggactattattttgttgctcaagctgaactgaccatcgacggaataaatgataag

SEQ ID NO: 54485 - DNA, 662 bp, Heterodera glycines
gtgttctaaaattcattgattgcccttgtcaaaatgatgatgctcaattttttgggcaatttcacaaatcgaaaaaaaaattcataaccctaattcatatggtgaacaaaacaatagaagcagatgaaaagctggagagcccatctgtgtgctgtgttcgattaacattaattggtatttgtgatgatgtgccatgaggggggatgccaaaatgtcaaacgtacattatttgatgaggcgaaatgttaaaatatattttacattaattaatggaccaatgattacacttttttaattttttgtttttaaactctccctccctccatatccattatcttatttgtaaatgatttcacacattttgtcatcagcaaattttttctcgttaaagaatttagttccctccttccgccctccggggctgtttcggcttttctcacgtcatatccatggaactcacaacattgtgacaaaaatcttccagaaaagccacacaaatatcgtgtgccggcattgccactctgcgccggagggtgcggcacgcaatccggcaaattccggcacattcaaaacaatatttaatgtgtctactcgtgctaatggccaaagtcaattttctaggaagcttatcttttctttcctaattatcatttaaaatatta

SEQ ID NO: 54486 - DNA, 1175 bp, Heterodera glycines; identical to SEQ ID NO: 23785
  unsure (1)..(1175): unsure at all n locations

SEQ ID NO: 54487 - DNA, 777 bp, Heterodera glycines
atgttcgtccaagaaatttcggcctttttacataccgtaaataattttcccaagaaattggaagagcacaaaaagctggaagaggacttggaatggacgtggacgagcgaaagcgcattggaatttgaatggatggtgagtgatcaatcagggttttaaatggcgaaaatagggaaaatgtttaattatattaaaaaattagcttaattttacatccattaaatattagattttttaggaaaaacataaaatttacttaaatttcttcaaacatttttatagcaaaaataaatacactgaaaatttttaatggtctacaaaaccaaaactttaaaatattttccatatttttgaaattttcatataattctgttccagaattcttgctaattatggaaagatgatttaaattttatattgacagtcaataaatttataaaatctaataaagaaactgttttattttagaccaaattaaaaattattatttaattgttaattgtttttaagtcaacgtaaattaaattagattaatctaaaaaaatgtttaaaattcatttaaatgatttacaataaaatttcaatattttcccaataaaactttcagaatttaaacacggaaaaaatgcatttggagcgccagttggaagttgccaaatattggctggaggaacagcgccaacgcgcggaagagacacaacgcaatttgaagagcgcagaaaaggaaaaagacagccttatcgaacggattgaggcactaaaggacaacttgaagag

SEQ ID NO: 54488 - DNA, 997 bp, Heterodera glycines
atgaactcattaaatggaacagcatcatcgtcaaaccgaatgcagcgcgaacaaacaggtcaaacaaatggtgatgctgctgcagtacctcgtgggcatccggctgcacaacggaacgctgcaaactcgtcctcattggacgccgctgctaatggacgacaagcgcagcagcatgccaacagcgcagcacaaagacccgacagaacaaaccgaccgcaacgcggtgaccaaacacgtcaaacaagcgctgcaaggccaacaagaccaattgtgcaaactgtgcaagggcaacctgctgaacgagatcaacaacggctgcagcgaaacaatgaaggcaccacagaagatgaagagaatgcactgcaggcaaaccgcgcgcagcttacattatctgacattgcagtaagcatgggttacggacaaatcgtgatttgacagattttagcttcacatatgtagattgaaaatagagctgctggacatttttttgaaaaaagcctaggtctagattctacgttggatctggacctggcttttcaggacaaaaatccagacttgccatggtctctggatccagccaggtgtggacctggatttttttgaaattttttaagggctaacaaaggtttaaaaaaatcaaaaatctgaacccaggaaaaatccaggccaggatccaggtccagttcgagttttgttagaatgagatgaaatttttacaggcaaaagcagtaaaaaaaggcttccagtatgtaaacgtcataattttttgatcatttaaaatttcttctaaaaaataaagcatgaaaatttttgagacgaaattttcaattggaaaaataattgtaaaattttgccgaattgtgcttaagccataataaaagttagcaatattttatcaaaaattttaaatgctttaactattcaaaatatatatcataaaagaaaaattttctaggcaggaaggcaaggaaaaatgcacaagtttatgcacaaataa

SEQ ID NO: 54489 - DNA, 814 bp, Heterodera glycines
atgagtgccaaaattgaggaggtgaaattcccagagcagataattagggattaaattttgcggggaaaaaaattcggtggcattttgaaaatctattgtgttatttagaaaattcacttggaaaatagatatattcgagagttttgttaaacaaatttcgccagtaaaataagcattttcaacagtcgagaaaataaaaaaattttcagtctaaaattttgaaaattattcgatcaaatttattttttttctttatattccaaggtcgatgtcattatgtcctccgatcccatgggctatatgctggtcaacgagcggatgttggagatgagcccgcaaatttcttcgccgtgttagtcactaataaaacaattttattttccaatgtttacctataaacatttttttttaaactattgtattttttccacatttgtaagacaagccaatgtgatggagttggagatgtacatcgatgaaaaggcggtggcaacggcaacaaccaatgccgcgagcagcggaaacgggaacatttgtcaccgaccgggtcggcgccgttggtaataacttttctcttaattttgtctttttcgtcattttttgtttgttactcaaaatttattttttatcaataatgcgtttttttgttattttgaagctaagtgtaataatttattaacttcgtaaacggtctcttccagtttttgcattttttagcacaacattgagtcagacaatgcaaaacggcgaatttgattgtactacaatatgttgttggtcgacactcagaaatgattttatgcgttcaatgcta

SEQ ID NO: 54490 - DNA, 890 bp, Heterodera glycines
atggcgcaaccgaacactccaaccgttgaagttggtgggggaaaggggtggggggctgaacatggaataggggtgcactctcggcttgaaataccctaccttgcaccttttggtttgcaatagtctaaaatatgtatcaaacgattcctgtcttgtgcctgtaactttgtatcaaattgtcgccggccacccagacttagctttcacaaatggcattttgccaactaaatctaaatcggattattcgccaattattctaaaatgatgtttttgctggatgaaaatgtaaatacatggttcctgttcgttcttcgatgacaaaattatatgtccttgaaaagtatcgttcgaaaaaacattattttattaaaaccaatttttaaatacctaaaagttttcctaagcctaaataggccgtttttacggtattgtgttttctaagaatttttattccaaaaatcatgaaaaatttttttatttcatattttatgtaaatttttttaatttacagccctattgaccagaattcggaatcgtccgattttgtataattggctacctgtccgcgtccatgacgcataattcattttaaatcaatttttcccttattccggtccgctgatatcatggatatttttgaaaattatagccctaaaaactctcctttgatttttgaaaatgtatcatccctcaccaagcaaagagtgacaaaacatatcgccaaaaatgactatattgttttttaatcgctaacattgaacaatatttgtgaatatgcaatttttcctcaaattatttgtttaatattggactaaatgttatttttttacatgtatccactttaaggtcctctttttgggtttaaatttcaaacactttaactagtgtta

SEQ ID NO: 54491 - DNA, 1171 bp, Heterodera glycines
atggtttaattttattatttttggcactttagaattttgacggcaattctttcttaatatgaccgttaaactgggaaagccattttaattaaagtattcaaattttgtagaattctctgctctgtgcgaaattgaatgccgcagcggccacgatggctgacatttatggtgcactgcttctgcatgcgattttcgatggcagcaaagtgtgttatattgaaaaaaagaattttttattttcagttttaaaaaacagggttaggcgcaggtgttccatattcgaacccaaagtcagcgaggggtggtcagccatcacatttattaatgggattaaccctcgaaattcgacatttttttattacttttcgcaaatctatgttcgtgttgtgttttgttcaaaaaaatcacgagtatggttaggcggcgccggataaatttttgttaatttagaaattgtttgtttttttgcggtgctgacaaatttttggaattttgagccaatttatgtaaataggcggtcgtttacctatgcatttttaagcgtttttgtctgaaattatgcgcacacttcgtttttaattgccttcattcatttcaggattacaccatggtcagtgttagcttccgtcgcgagcatcagccatttctgtcggagtttggggcgttgtgtaccaacctcagacattttctgttggacattaaacagtacttggacgaacgtttcccggcggatttctaaatacagcccattttttcaaaagcgccgatgccgctctaaattctcgacatttgttgttgttgtttaaataagaattatcttccgagactgtctgatttgttaaattttcaatggccgagtaaagattaaatgacatttagttaattgaacacacaaatttgcaaaaacgcaaaatgtgcactaaatttaccaaataatggaatttgtaaattgattgaattacataattttaatttttccaaaactgctaaaaatgaatttacaaatgataaattggccctaaactcaaatcgagactaaattctcgaaaatctctactgttctccttcatttttgcttttttaaagcaaaaattttcttaaaatgacgaataattcttatgtgaatttattttgttacgatacccattaattgattttaaacaatttgaaa

SEQ ID NO: 54492 - DNA, 594 bp, Heterodera glycines
atggttgatggaacacatgcacagcagaagatgctacaggaagaaggtaaagatagcgagaatcaacaccgcatttcaacatataaactcatcgaagaagtgcttcatggagagcatggacaattaatggcacaacaacgtcaatccaaaatggctgctgaatttgtttacaatgaaataactcagcgattcggcattcgaatgggcccaggagtaatgcacgttgatttgagcaaacagctgtcctatgtgttgggttttgatcacaaaacacgcatttacaaaaatcagtcggcaaaatatccacctgatctgtctggtggtgtccgtcagctgtacgtttacgcgcctaaactggtggaggactccatcataggtgaccgcatggcaccgctgctgcgagttgtcaacgtgtcaggaacaccggggttggacatgccagaggttatatataccaatgaaatttttcattctctccaaaataaacgcatttctgaaattaacattgaaattcagacagcatttggacgttacgtaaaatttggttggggaactaccgtaatcacattacattttagacaaaaactattctag

SEQ ID NO: 54493 - DNA, 464 bp, Heterodera glycines
atgcagcccactttggcacactgggatgtcattcccaaactctttgtgccaatgagcgtgggtttaatgaaaattgcgccgcgtaaggccttcctctaccgtatcccccccattaccgtattttcgctaccgtttccgtcctcagatgttcgttttgtcgctgctgctcttttacatgctctcaatggctgtgcttttcactcgccttcagcatgggtggaatctgctcgattcgctgtactttaccctgatcactttggttcacttttagcttttcccacctgcccaatcatcaattgtaattccccccccccttcccccaatttcaggtgaccatcggattcggcgacttttgtcccccgtcaaacattgccgaaggcggcgactccgccaatcattacggcggttggattctgttcattctggtcggtctcacattgtgcactctaacggtaaaaccctag

SEQ ID NO: 54494 - DNA, 152 bp, Heterodera glycines
agaatttggcacttccgtctgtcgatgggtcgccgccacttggccattgggttgggttgcgcatttaatctccaaacttttgccaaatttcaccaccatcagtcttctgatcaccaccagcacaagtccaaatggaacttccattcttcgtt

SEQ ID NO: 54495 - DNA, 766 bp, Heterodera glycines
atggcttctgatcgatgtgccgtggcactcaccttctggcttggcaatggtgtgaatgtgcagcccagctactacaacagtggcaaagtgtcgcttggcctttcccagttgaaaacgttggcaccgaaagttaaaactgtgcgcattgaggtggagccgttcattcccatttcgttggccaagcaatggatcagtgaggcggccaaaaacggcttttccatcattgtcacttatcataaggcgacagtgttgggctccaacgatgcaagtaagcagaaaaaatgccaaaagcatggaaaatgtccaagaaaatgccgaaaatgatatcgcgggtcgaaaattggatttttcagaaatctcgacctcgcttttgaattgttcggtcatttattagcaagacaaaaacaaaacaaaaagttaaattaaaatttttttaatttagttagattattttttaaatttttaaaattaaaataaaataaaatgaatttttaataaatcatatataaatatttaacctaaaaatcttaaaaataaattattatattatttattattattttaagatgagttgcagcaagccgctaattggtggaagactaattataaatcattagcgcagtccggcaaatttgtgctcaatctgatgaacgagtggggtgaccacacgatcacatcaagtgcctacgcaatcgcggttaacaacgcgttgaaaattgtgcgacaagtgtacagcggaacggtgatcattgacgcgcccggttga

SEQ ID NO: 54496 - DNA, 638 bp, Heterodera glycines
atgaattcgccaaccaatttcaataattttcattcaactactaaatgtgttccgcttgaaaatggctctgatagagagaaggattcgaccagtaacaacaatcacaagagaaggaaggataatgttaaaagtgagttgatagacaacgccatcggaagtccgaaatcgaacaaacgggcatttttttctgctgattgtgcactgaacccaacggcattggctgaaatgatgccgagttcgagattaaggtttaaagaaattactaaatgactgcttacccctgataacttccttcaaaaaatgtttaaaatcagaaaaaggcatttgcaataatttcagcatgggaatggccggccgtttgcgtgacatcgtggcgattttccctcaaaatgatttggcttctcctggaaaactgctctttcgggaacaaatgacaaattcggaccaaagggtattttctgccaagggacaagcggatgttccggggatgaacgccaaggaaataagctttgtcgggcgggaagaggcggcgggcgaaggattcgagtacattttggcaattgtggacagacggacgggccgagcgtcggaaatcaaacgaaccgcactgatcaacttccaactgagcaaagaacgcg

SEQ ID NO: 54497 - DNA, 1514 bp, Heterodera glycines
atggaagcgtttgtcggttggctggtcttccaactaccgttgaaatacgatacatatgcgtacagtcattatggtggacggtttgacatggtcatcacatttcgtgagctttttcgcagaggatttaatccggaaatgcttcgaaaggtaattattctttctttgccacaaatcttttactctctcttatcttttgtacatggttttctctgctttttattctcctctctttctctctgttagcactacactattcgtgtacatcatctcctcttcagtatatacactatttccattttccacgacttttccattttctctgctctcttgcttacagtaatttgtcattgctcacctcactatacagcgctccgccactcttttttatattaaaaaaatgaattattcacagggtaacaaaatgtacgagatgaagattggagcacagaagaagcggaacccaaacatcattttccgtgactccttcaacctgatgccatgtgcgctcggtcagctggtccccgcctacggcttggacgttgaggagaagccattcttcccgcacatggccaatcgtcccgacaactacggacgacagatcttcccgactcccgaggactacctggctcaggggatgatgccagagaaacgacgtcagttcgacaactggtacgaacaacatcggagtgaaccgtttttgctggacgaggctttggcgagctactgcacaaacgacgtggaaatattaatggcagcgttggtggcgtttcggagcgaattcttcagtattacgaggcgggaatgctacgtcgtcggagttgacgaccgagaaaatcatggtggtattgacgtcctaaagcagtgcatgaccatcgccagtgcctgcatgaaacatttccgcaccaatcaccttccggaaaatcacctggccattgtacctgagcgggggtacgacaacgcacaaaatcagtcactgctcgccctccgcttcttcaagtggtatgaggagaagcacaaccttaaactacagacagcacactcggctggcggagaaaagagggtggccaactactcccttgatgcgtgggttgaagcggagaagagagccatagaagtgaacggtaatttcaactccaaaattatttgaatgaaccgaaaaaattgaaggatgcgtttggcatggatgcagcaagtgttttccggaggacaacatgctgttgcccaatgggaagtcggccggtgaagtgcgggagcgggatggaaagcggctggaatttcttcggaagcaacttgggcgtgtggacgtctattgggagtgtgagattgagcgaatgctggcagaggatgaggagatgcggcgtgcttttgcaagctatgtggatgatggaccactggacatccgttccgctttcatgggcggacgcactggcccgctcaagctttttcataaagcgcaagaaggggagagaatttcatatttcgacttcacgtcactctaccccttcataaagtga

SEQ ID NO: 54498 - DNA, 274 bp, Heterodera glycines
ttccgggcgtcttgtggcggcggtgttgcagcgactgttacacgcgcgcgccgcgcacatttacgggctcggctggttcgcgttgcgccatggcgagctgttgctggccaacggactgcacttggaggtgcgcgagttgcgcgtccattcgctgttcaattggtggtggacaacgacggcaccgacggtggacagcgcggccaacgacggcggtggtcaacgcatggcactgaacgtgcgtgtgtccgtcggcacaattcgtgttggcaaacag

SEQ ID NO: 54499 - DNA, 194 bp, Heterodera glycines
atgcaagaagaactttctgaagacagcgatgatgcaattaatttcttcgaagatagcattgaggatattgtggaaaagtgagtaaacctttcaacaccttaaaatactgcttttattttaaggataaattgttctgaaactaaaataaaaaagtgggcagcgcagcgagtcaatgtggcagacgccaaaacacg

SEQ ID NO: 54500 - DNA, 607 bp, Heterodera glycines
atgagaagtaagggtattccatgtcgtaagaaactcgacagtgaagacttttgtgtttcgtgcgtccaccgtgcgaaaaagcccagccgcaatttgtacctccgtgttgtactccaagattgtgatgacgaggaatgcgagcaggaaacaacagcattttcctatgcagccatcaactttttgagcattgccagcgtggaagctttttacaacctgtcagagaacgcacccaataagttggaatcgattttgcagtcaaaaatagatcaacccttgctcgtcaaagtcaacatcaaggtgggttcatgttttttttttgctaggtgtttatcccaccttagctagtccattgtgttccatgcaaaaattatttcagctaaaacacgcatattttaaggaaaataatgatacggcgatgcttgattggattatttcatccatatctgtggaaaaaccggtggcggtgaaggttttggatgacaaaaacaacgatgatggagttgaggaagaggcatcttcaagcgagccgcctaaaaagcgaaccaaaaacaatcaagtcgagcgtgctattggtgaagatgctgacgacatccatacgattgaatga

SEQ ID NO: 54501 - DNA, 672 bp, Heterodera glycines
atgaatcaagccgtgtacaacagaattgtgtcactcccgtggaggcagctccaaatgttggcaaaaagtcgtggaatcgccgccaatcaaaaggtgggttttatttgaaaagggtgggaaaatcagtttttacactgctgacataaattttcatcgcctttggcaaaattaatcagccgaatttgatgatttagggggggggtaaattttgaaaaattgtggttgtgcgataggggctttgaaaatttgataaattttcaaaatttaaatttttgggggggggcttgagtttgctttgttttttaccaaaattaaacaaaacatttttttttgctttagaaacagattctcatcaaaaaattgactgcaaacttcagcggcacaaatcaacaacacaacaccaacacaaatggacaaaacgatgatggggacggcactgacaatgagcaaagtttcggcgacggcacaaatggacaaagcgatgatggggacggaactgacaatgagcaaaattttggcggcggcggcggcacaaatggacaaagcgatgatggggacggcactgacgatgagcaaagttttggcggcggcggcggtgacaacaatgttgaggaggagcaggaggggggcagcaacaacaacagtcaactgagtttacccgacgggtaataa

SEQ ID NO: 54502 - DNA, 1789 bp, Heterodera glycines
  unsure (1)..(1789): unsure at all n locations
atgtgccagccaacgcatttttttcttccgcttttcatcttcagcgccaacaaactgttggccgagaatcttgctggtatgaattagtgtattgaaattgattaggaaagatttttgatcaggttttcacgtgttaaattgttaaaatacacagtcgattattcatatgaaatatttaaaatttaaaaaacaatttcagaagctctcaagtgcaagcagggattcgaaatgcgtccaatggtcgaacaacaaatggatcctgacgaatgtgtcgatgttgcgtttcctcgatattgtgaagcctcaatttgcacaactgctggtgataacattggcgtacgtagccaggcccttggcttcggggggggggggctgaagtcaaaaactcgatttttagggggtgtattttttgttgttttttgttttaaatcccgaattaggaaggtgtattttataaaaaatgttagccgtttttcgcaaaaaaaaaggactattttttgccattaaaatatcggatttttttatttatgaaataattaaaattgatttaaaaactaaagaattaaatttgtttatttttgaataaaaagcaaaaattttccttattttaaaatctttttttcgataagaaaaattgatttttttaatctcaaatctggaaaactttttgacacagttacttttctttaatttaaaaaaagagtccatcctttggtgtttgttcatttttaatgcgttttgaattttaaaaagttattttaaatttttttaaaattaattggacacatcgcctcagaaaatatggctttctctattataactcctgttagaataaatcataaattttctggtcttcatatacagacaaatgagcagcaacaacaaaaaaaaaactcttaaaaatttttcattgctaaacaatgaaaaattgtcctatgaaaattanatgttatttcgcatttaataattcaaaaattttctcaagatgagatgccaacttttgcgagcattcattggaaatgtgttgaagaaaaaaatgccacagaatgtggcgaaagaatgaaacaaatttatgagaaaaacggtgacttaaaaaatgttacatgccaatgccattatggtgaagaaggtgaagattttggcaacaaaaacttcacgcttccgccgcctgccgacccagcggacaaaggtagacgaaaaaaatgagagaaatttgtgaaaaaaatcccaggagaaaattcgaaaatttttttaattgtttaaaactaatgagggaaaatttgttccttaatgagagtgtgccgaaatggaactttggaccatgaaaattgtgtaatgaagtataaattgggggggggggggcgggtcattgtggtaaatttcggcttttcacactgacccttaaacatatcgaagaataatacattgattaaagttttagaaacactttaaaaaattagcaaaaataaataaaaaatattatgaatatatataaaaaaattcaaattttccgttaattttgatttaagaccaatgaaatatttaattaattcaaacggaaattagattcgcttcttctctactcattttgaaagaattttttaaacgaactaataaaataaaagatgaattttgttaagtgccaatgtgcaagattggcatgatccattcggccagcaaaagaggtctcatcgacattggagtttgcaaaaaggatcaccattattgttttgcggcaagctgctcaataaagggtaaacacatattgagttcgacctgtacttggtag

SEQ ID NO: 54503 - DNA, 58 bp, Heterodera glycines
ggattgctggggtcgtgggttcgagtcccaccgggcgagttgccttttatgttctaca

SEQ ID NO: 54504 - DNA, 1195 bp, Heterodera glycines
atgtatacgaccacaaccacaactacgactccaacgccagctcctgttgtcgcaacggttggtttaaaaacagaaaattgttattgttttaggaacagagaaaaattgaaggattcaatttccaaaaattttcctctgaacttctaatttttgatcaatctttaaaaatttaagtgattttgaaaaaaaatcttcgaaaattgtttcgttttattttgtattttttggatcaaaaatttgtctgaaattgctatgcaattttaaatagtctttttatttctatctttttagtctttttatttgcgccataattataataaggtgcataatgaataaatttttttttagtttttcccaacttgggcagagacatttggacacggactatcaataaaggtacttgaattctaaaaattggcacttttttgcaataaaaattgccctttttgctaatacttcagaattgcggtgccgacgaaaaataaatttaaattttatttttgtctttactaaagtaaaaaatgtgctgattacgaatatctgagctcagattttgcaaaaacattaattttatttgtgattttcttcaagtacttgatttttcaaaattttttattatttaaaaaaattttcttgtaataattcggactaaaaatgcgctgatcatgaaaatgaacttagattccgaaaataagggccagtaattaaatttcaaaaaatcgtaaaaaactaaaaacttgacttctccagacattcaatagcgcattcgaaagatctttttcagttctacaacacatttatatgagtttttttatgactgacaaattttttttaaattttggaaaaaatcaaattgatgaaaaacatatattttgtaatcagcacattttttacccatgaaaacacacaaataaaattttaaactttatttccatcgggaacaaccacaattctgctgccgtattacccctttttttttgtcttttttattttccgttatgttttaataatgctcatttgtcattattattatattacatatacattatttcaggcagaaggaattacttttcatgcatgtctccggggacgcaaaagtactaaacagtttgtgctcactggaaaccaatgccttttcaatgcaattggctgttattttgttttttgttatgatggtaatgagtgttttatttga

SEQ ID NO: 54505 - DNA, 998 bp, Heterodera glycines
atggttaacgtgaagaagggcaccgtcattcgttgtgacccggcaatgcgacagttcctgaagcatttggacgagacacgggctctgggcaggccgttcatcgtcaaggtggttgagagatcgtttttcgtgaaatatttcattctccattttattaaaattttcccattttaatttttttttttttttttgaggcttaattgtattgtaggtgttcaatccagtttctttagccatcaattttttcttcataaaggcccacatttgtaccaagcaaaagctttgtctaaaaatttttttctttaattcaattctgagccattcttgaaaagctttcgttcggttgataccaagaaagctgtcattgaccaaataagaaaaaattggaggcctaaaagtcgaattttgaaaaagggtttgagtttttgtcattttttaatttatcccgttttgacaggaccttgacgagttttgtttgttcgtggagcgtgacattgtgccaatgttggagcagagaatggatgcccttatggatgctttaacacccgacactcaaacataaaacccacaatttttgtttctcatttcctcaaatgtttattgaaaaatttaattcgcaattctgttaattggctaagagttcattctgtgatgctattattatacaaaattttttaaaaaacaaaatttacacattttttcaaaacattttgttgatgaacgacgctaatggcaaattggaggcggcacagaaacaatttgaggcaattttggccagcttttctcccaccgccgatggcaatgaacaatcgcagcagcagaaggagcagtttttgcgatgggttcgccaacggttgcgccgtgaaaatgcgatgccagcaaaagacacactgcagcacagtgacaaacggcatccaacggatttgtcggtgcgcaagcaacttggacgtatcgcaaaacgcctgcgcgaattggtacacatgtcattgtgcctgtag

SEQ ID NO: 54506 - DNA, 732 bp, Heterodera glycines
  unsure (1)..(732): unsure at all n locations
tcgttttttgccctacgaacaaatgaaaggcactcaattgatgatgaatttgcgaaaaattttgcagagaaaatggacagaatttaccacaaaatggaggaacaacagaagcagctggtgaataataaatttttgacaaaaaatatgagaatttttaaattttttcaggcgattaatacggcggaaaaaattgtcaattcggacgaaattcaggtggattttagaaagcattgctttttttggcggatcttcggttggccccagaggcatctcatactcacataattttttggcacctgagaaacgctgaatttggcgattgatcaaaatgaaaaaaatattttttttcagtcatttgtcagcgcagcgacccatgaaaaattggcattttttgtgtgcggaattgccgtttgtcttctgcttttgctgatcaagggaaatgccgacaaaattttgacgggaaaatttgggcgaaggaatggaaaaagcgacgatgagaaagaggtggaggaggaaaagcggacggatgaggagggaatggaagaaaattgcagaggcggaggagagataggagcgcgagaggaggagccaattttggtggccaatgatggggaagaggaggaagaagaagaaaaggaggaggaagaggatgaacgagagaannttgtggggaaaggaatgaggagaagagagagaggaggatggaatggaggcacttttgagggaaattga

SEQ ID NO: 54507 - DNA, 683 bp, Heterodera glycines
gactcctaattcatggtaatttttcaaaatataccctgatcaggatcaagagtcaaattattattaatgagaaaaaaaatctggttgatcctggccaaatttattcaggatcaggatttcccagatggactcggaccggatttagaattaaaaatcttctttttcaggactcctaattcatggtaatttttcaaaatataccctgatcaggatcaagagtcaaattattattaatgagaaaaaaaatctggttgatcttggccaaatttattcaggatcaggatttcccagatggactcggaccggatttagaattaaaaatcttctttttcaggactcctaattcatggtaatttttcaaaatataccctgatcaggatcaagagtcaaattattattaatgagaaaaaaaatctggttgatcctggccaaaattattcaggatcaggatttcccagatggactcggaccggatttagaattaaaaatcttctttttcaggactcctaattcatggtaatttttcaaaatataccctgatcaggatcaagagtcaaattattattaatgagaaaaaaaatctggttgatcctggccaaatttattcaggatcaggatttcccagatggactcggaccggatttagaattaaaaatcttctttttcaggactcctaattcatg

SEQ ID NO: 54508 - DNA, 383 bp, Heterodera glycines
atgcttcaaatctttttgacaatttcatttctgttgataattggaagtgcaattagcaatggaactgacgaagtgaaaagaggtaaaatttataaatataaaatgtaaatttaatttaatttatttgcaaattaacccaggattttgtccaaatttatacaaaaccatgcttatttattggcaaaaaaatgcattgttttttcattcgattacaaaaaaataattaattaaaaaaagggaaaagatttctaaaagaaaaattttcacaacatttattgtttagtggaaataagtctacgggatttggtggatgatgccatcaattgggcccaccacattggcatggcatggcgagcggacaaaaaatttccgcggtgatttaa

SEQ ID NO: 54509 - DNA, 374 bp, Heterodera glycines
atgttgttgttattaatgtttgtcgctggtgccattccaagcaacaaatgtgttgacattgttggtgcccccgctgtagaagcagaaactgcaccaaatgttgttgttgtcattgatgatgaagatgatgatgataatgaggatgatgatgaggtgccaatgccgcaatcaatgaccgccaccggcggtgcgccggaacgagacggcggtgaaagaaggccaccaccaccgctgttggcaatcccattggctttaagaaattgggtttgtaaaaaactgaatacggtacaaactgtatgttacagtagtaaaggaataagaatacggtataactgtagattatacagtatagggagtgataagttcggaataaa

SEQ ID NO: 54510 - DNA, 924 bp, Heterodera glycines
atggctcagcaacaacaacaacaacatcagcagcaacagttggcaccccctccgtccacctctggctccatttcgccaaactccggtggaccgttgcaactcggtgctgctgacccaagctcagtggagtccaaccagtccaacaacgtgttccatcacacgaacatggccattggtagtaacggtaagtaaactagtgacaattcctggagggaggttacacttggcaccccctccacccaaggagtgtaaaatttcttaagaaaaattcgaaaaatttgtctagtggtacccctccccaagcccggaaagttttcgaaggcgtcgtcgtttgggaagagtgatgtatatctcttaaaaagcaactccaaatcccccgcatttgtgttgtaccttaataagaatgacggaattttcattccacttctgtccaaaccgaatcccgaattctgttccgaacccgaggcccggccgactcggtaaattttccgtgatattttttattccgaacttatcactccctatactgtataatctacagttataccgtattcttattcctttactactgtaacatacagtttgtaccgtattcagttttttacaaacccaatttcttaaagccaatgggattgccaacagcggtggtggtggccttctttcaccgccgtctcgttccggcgcaccgccggtggcggtcattgattgcggcattggcacctcatcatcatcctcattatcatcatcatcttcatcatcaatgacaacaacaacatttggtgcagtttctgcttctacagcgggggcaccaacaatgtcaacacatttgttgcttggaatggcaccagcgacaaacattaataacaacaacatcattaataataacaataacaacaatgttgcgccgactgttgcacataatag

SEQ ID NO: 54511 - DNA, 952 bp, Heterodera glycines
atgacgaaaaaaaatctttcaattaaagaaaaaaggataatgttaaagcaatttgatcaaatatatggcaaattaaaaacgaaattaaatgaaaaattggaaggaaaaaggacaaaatgccaaaaaataatagcaacacatttgggcattgatattagcaccatttataaatggaagaaacaattaaaagatggaaaattgattaaaaatcaaaataaagatgagcaaaaaagagaaattgttgaaaaatattttaaaataaaaattaaatttatgcaaaatggaaaacattcacgaaaagaatggaaagaatttagagcaaaaattaaacaaacattttgtgtggattatacgacaattgaaaaatgggccgagaaaattggcatcaatcaaaatatttcaaaaggtgaatttaaagattttaacgtatttttttaaatttacagagagaaaaatgttaacaattgctgaaaaaatggaagtgattaaacaatattatcaaatcaaaaaacaaaatccaaaattgaaagaagatgaaattgccaaaattttaaacattccaaaaaactcattacgcaaatacaaagctgaatttggcattaaaccaaaaaacaaattgttataattaggacgatcattattatccgaagaatatttggaaaatttcagacataaaaaatattcaattttttacaaatgtttttataaataattttttttcggtttatgaaattattaaccttttttcatcgcttataaaaaatatttgataaaaatcgttgattatgctaataacatttttaattggtctagttgaaaaaccaaattaatttttcatatttatttttattttgaaaaatgagtaaatatggcaaaaaaaaagtaaatttttagagaaaaattaattaattaaattcaataaggacaatttttaaaccaaatatttttatca

SEQ ID NO: 54512 - DNA, 1727 bp, Heterodera glycines
  unsure (1)..(1727): unsure at all n locations
atgaatatttcaaatggcgtccattatggttcggcttcaattgtggacacaccgtcctggctgctgagcatctcattggaattggccattctcgagctagtcgtccatctgatgtccatgctgatcacggttttcaactgcattatggtgttcaacagtggactgttgcacaccaatttgaaatgggtgttgttggcacaaagtgtcagcagttttatggtaattaaaacttaattaggcatataattaataaaagttatcgaaaaattttccgtatcaataccataaaaattgaatttttttataagaaaagaaaaaaatccaagcaataatttattatataataatgttaaactttctaaaaattaaaaaatgtctcagaattttttatcatttaattaaaaatgttttaaacaaaatttatttaatgacattctaaaaatcatagattacataattaaattttcctataatacgaccatagccaaatgggcaaaagttcactcaaaaaacgaaaagttacaaaaagatttaatgaaaaggtaaaaactctttgagatatcatttttacaaattatttaatataaaaaaataatttatttttattatcagcatttttaaaattattttatataataaaagtttttcattaatgtgttatttagccaaatttaaaatttaataaaataaattctcatttaagatttttattatttttttcagtcagaattgtgccgtttctcggtgatggttgtccaagtgccatctgnggacatttttacaagaccaccgtatgccaacatacttggctcactttacgttttctcgaacacatatcgcatctttcttgcttatgttctgctggctgaacgtacactagctaccgtactcttccgcgactatgaacagtatgacaaagtgtgggctaacatcagttggctggccattactgtaatttttaatttttattataaataaaaatatttaaaaattaaatattcttcagttatctctctcatttgttgtcctaataacacaagacagttctgcgcatgattacaatcgtttcacattaccctcaattatcggattatttgttttgcaaattgctgcaatcgtggtaataatttatatttcaaaaattaaatcattttttaaatttagttattacgtcataattaccatagaaataaaacacgatataacagcggcaaaatttggacattgaaagaacgttttcaagtaaaacaattttctcgcaatattaaattaagataaattattatttatatcggtataaagcattttaaattattaattaattggtttataaatcatagttaaattattttatgttaaatattttgcaaaataaattattttataactgtaaatattgaatttttttttaaaattaaatttaaattttaagacaaaaattaagcaaaaaaaatttttaaatataatatttaatttaattttattcattaaagttatcggaaaatattcgcacactgaagcaacttcgtccaacttttgttttctacacaataaatgtgctcttgatttatggcatcaaatttttattcatttttnggattggttgtgaacgacgtgccaacaaaaattgcttttatgttccaaacgctgttgctcgccattgtaaacattggcattgaatggacagttataacgtaaacaaaggaatttttcaaaaatttattaaa

SEQ ID NO: 54513 - DNA, 983 bp, Heterodera glycines
atgtatggcgacagaattgtgataccaaaagtctgccagaagaaaatcatggatccgctgcacaaaggccatccaggtatcaagcggatgaagcagttggcccgacaatatgtctattggccgaagttggactctgaaattgaagaatttgtccaaaactgccagccgtgccaagctgctgccaaggcacctgtcaagacagatttgcactcgtggccaaaggcagaacatccatggcaacgaatcaatgtcgactatgacggccccttttacggcaaagaatttttaatcgttgtcgacgcattttcaaagtacccggagtctttgaaatgccaacaaaatcaactgccgccactgtcgataaattgcgttatctttttactcgacacggaattccagaaattttggtgtcagataacggcacacaatttgccagcaacgattttgctaaatttactgcggcaaacgggatttcgcatttattttcagcaccatacaatccaatgtctaacggacaagtggagcgatttgtggacacctttaagagggcctttcgcaaattaaaaggggagggagtcccaggaaaggacgtcattgaaacgtttctggtcacttatcggaccacaccaaatgattcgctcccaaacatcaaatccccggcggaaatgctccttggtcgcaaaccgcgaaccactctggatttactgaaaccgccgctttcgcaaccctcggaaagagacgcgaaaatggaacggaacttcaatcgacgttttggcacgaaacaacgaacttttcagataaaagacagggtgtacgcgcgccaccgcctctcccataattggagggcgggattaatttgcgattgcaaaggcgtgatttatggtgtaaaattcccggacggatcaatcaatctgtatcatgcgaaccagctcagggaacgccgaaatgtggaaaatttggaagtctctgaacattttgaatga

SEQ ID NO: 54514 - DNA, 424 bp, Heterodera glycines
cattcacaaccacttgaaggaagtgtttgaccgaatcccaaacgtatgggtttcgggtgaaaattgaaaaatgttcatttttccgagagcaaataaagtatcttggtcaaattgtggacaaaaatggccgccgtcctgatccatgtaaaatacatgcgatcactgagatgccaccgcccaaggacatttcagcgctccgttcattcattggcatgataaatcactatcaacgagttcgtcaaaaacgatgcgtttcttgagaacaccactggacgacatgctcaaaaaggaggagtgggactggaatgaaaaatgtcaaagggcattcacaaaattgaaagaaattttggcatccgatttgctgctgacacattacgaccctaaattggagatcgttgtcgcggcagatgcctccgattatggc

SEQ ID NO: 54515 - DNA, 581 bp, Heterodera glycines
atgcgtgagcttgggtccgctgaaacttgggaaaatacagtaacctcgtacactacagaattacagtatccggaggcttcatcaaattatgccaataattggtatttcattgtttttgaaaaactttgcgccattttttgtgtttgttttttcaattttttagttttttgaaaatcggatcccgagttaatcgctttcgccccctacatacaaattccatcccggaagcgattgtaggaggggatagagctttggaatttgtcaaatggatcccggcgaaggggcggatggtcggacggttggaaaaagccttccgcaaatgtgctccgcgttcttggcaatccaatgggacgtcgtcgttccctgaccaattaataataattagttaccattaaagaaaaaatttcaaatttttcagtatttttaaacttatttttgttaaaattattacgtctaattaatttagccgacaaaaagaaatagagagacaatgaatcatttttagaaagatattttattttataataatctgttctcttacatttaagacgattgtttttgtgtaagatgaaatgaataaa

SEQ ID NO: 54516 - DNA, 455 bp, Heterodera glycines
atgaagaaccaccagcagcatactatcaaacgcaaccatcgccaccaagggtactgtattttgaataaggaagggtactatctactgtatgagaatgactgtatttcaatgggcatgatatgctactgtgtgagaatatggaaggacactactgtattcaacatacatgagagactatactgtatgagaatgggcaagagaggcaaagaaaggcaaaaggagaattcgaaagggaaaagatagagagagaaaacaacaatgtccttttttcaaggacgtggaaatttttcaaggacacacctaatctgacaatttcaccaagcaaaaaacaaaaaattaatcatcggtgcattaacatgtttgtaacacatgttttatatttttttgaaaattcataaaaaattttgaaatttgtcaggctaaaaatgagtataatcaagaattgaaaattacta

SEQ ID NO: 54517 - DNA, 1294 bp, Heterodera glycines
ctgttgctgtaagccgatcatcatcaaattgccgccaccacctgttaaggtaattaatttagatgctctattcgtatgaagcacccactatctccaattacacgcttaattacgcggggtggctctaattaagggaggggcattctaattagggagcctaactatgcttattaaataggggagggtcaaattaggggagagtcttttagtgagataggcatatttaatcctcttaatgaatggcaccaaattaattcttccaatcccatccacaccacagctttgcccatgctgctgcggatgcgggtgcggcggcggatgctgctgctgtatgagaatttttccgcaaaaaaataaaattaattttaaaaatttctcaggcaagccatgctgttgctgctgctgcaaaccgtgctgttgttgctgctgtaagctagctttttaaaagaaaaacaatttactagcgcctttcgagagtcttggggctttactggccaaatccgacaaattcttggatttgcttacataaatttattacggttacagtagccgaactcgagagtcgtgtactcttgctgctccaatccgtaaagttttttgaaattagcatttttctcacttgaggttaagcattcaaaattttacaaaaacaaattacggttacagtaccccgctctattaagaaacctttccattttcaggcaagccttgctgttgctgctgtaagtttaattttttttttctccgctgcggtttttctggactagggaatattttttgaaattttaaaattttctctctgccccaggcccgtgctgttgctgcggtggaggcggtggtggccgtaagcggcgcagtgttgtggacttgatggcacgcaaattctccgacgtgttgttgccccagcacaaccaggcaaaccggatttgtcaataattttttgaaacaaaaaaatttggaaattatgagaggcatactgtacaaaaattgtactcactctacgttctacggtatattacaggatgccatgatgtctggcatgaatggcggtggctgcggcggtggtgcttcgcaaggcgtttcgctttccccattgcacgcactgtgctcacagattccgccatcgcagcgtgtaagtttactgtaaaaaaacggcggttttttccaattacggtgggtttttttatgaaatttcccgatcgttttcagggcccggcctgccaacagatcactcagcatgccgccgcacaacaattcccgctcagcaaggacattttcaaccgtcaacagcagg

SEQ ID NO: 54518 - DNA, 1102 bp, Heterodera glycines
atgtttagacacttccaaactttcattatgaatatcaagtatgtcgtacttttgaaagacgtccaataattgagcttcaagtggttgagtcgcacgatctaattatatgtttaacggatgtacatttgtcaattcatgatgctgtagaaccatttaagtttgtgatttacctttttttaatttggtcctctattttcaggctcttggatgtatgttctaagtacaaatcaatttccgcattttctcattttgtgacagaggtgagcaaagacgattatcaatagtttttgttttttcagagccaaactattcatattgcaatttccgcaagaaagcatttacacattttcaaatatttattgggtgaactttgtgaaattaacgactgtgcaccgattactcttcctgagaatgcccaagccgttgtgtggtatgtgttaaatacactttttttttgttagattttcgtaaattatcctctgtaatatcaattttctaaccttcgtgctccgcataatggttttcctggtcactacttactgttaatacttattggtaatttttaaccaattttaaggtgcggtgtcaacaatttaattctggcatttaaatgcgagttccaattctgggacatggaccatttcctccacagagatgatttgatcgacgaaaaagtaacaaccaatttatttttgtgagttcgtcatttagagcatgagtctcgcaaaaagtccgacaaaagtggaaaccattcggactgagtcaaacgaaattgctccactgattgtcgctatgtcggacctgcaaatagtggccattcgtcgagaaatcagcacagtcgaattttttgagcccaattctggaaagatgattactcattttaacaattgcaaattttcggaccaaatactttcattgagtaagttaaattaaattacattcattttttcaaaacaatagcataccaccatccctacttgatcggaatattaccaaaaaatctgcttgagattcgctctgttaatcctccgatgctaatccaaaagattcccctgctgagagtttcgatgatttgtccaggcggcaggttaccaaattgtaa

SEQ ID NO: 54519 - DNA, 1206 bp, Heterodera glycines
tgaaatgaattttataaaggaaattcgcaaatatcttcattcatatatatgtatgtgtacatgtaaataaatcggatgtataaaaaatgacaaaaataaatgcgaaaatctaaagttttttagaatttgtgtaaaaaaaataataaatcataaattggtatttttgcacaaaattattcggtatccagacaattatattcattagagtccggtaaaaaaaaatttccgggaacgggatcgggagttcaattttttttccgggatcgggaatcccgtgaaaatcccgctcccgttaaaatcccgcagaaattttgcgggagtcccgggcgggagcgggagtaattcgaatttaaaactgaagaagcgaagtgatgtgattaagctgtgctcactgctcaacaaaaacccgaggttctctttgcgcgccatgaggagacatttccgaacatgagcacgggtcggaagaaccaacttcatcggacgtgggcgggtgcccagttttcccattcggtactgtgtaataggaagcgcttcaacatcgcaaaggtccaggatttgcatggccgtacctttgtcggcggtggcattgtttcctttcttttgcaccttatgttaccgaacttttcagaatctcatttgataccggaaaattaccgaccttttggaaaaaatctataataattcctctctttaaaaaagggataaaagttgtcccaccaactatagaccaattgccctcacatgttcactgtgtaaaattttagaaaaatttgttgtcagggcaattactagtttccttttaaaacatgacctaatctcagtacaccaatttgggtttgttaaaggtcgttctactgttacccaacttattttaactcttgaaaattggtttgacggtatttacaatggaaaaaatattgactgtgtttatattgattttcgtaaagcttttgatgttattccccatagcttacttttatataaggttcataaaattggcattagaggtaaaatccttaattggatttctgattttttggccaatcgctcctttttagttcgtgttgaaaattcgttttcttctgaatacaaaatgtgctctggcgtcccccagggctctgttctaggacctattttgtttcttatttatattaatgatttacctaagaaaattccgaaaggaatttttatcaaactttatgcaga

SEQ ID NO: 54520 - DNA, 885 bp, Heterodera glycines
atgggactccgcgaaattccccgcccgggcggttctcccgcacaattttttacttttatatagttcagaaattgtaaaaaaaatttttgaaattaaattccattttgcagagaccggaaaatacgttgccatcgatctgagcggcaaaaaccttcgcattctcatgctgacactgcagggcaaagacaaagagccgataattgccactaataatttcgttgtcccttatccgatcatgaagggcagcggagagcaggtttatttgtgtccaaatttatcttatttgttgctgcaattttgccaaatttgggttttttaggttgggcatttgtattttttttttgacattttctgttactttcaacccatcccccaattatactatagtattttggtatttttttgcgcaccgaataaactggatttttgcgttgttttagacttaagttgtcccattgtccaaattccatccttccaataatttttaaaagatttgctttttcaattcaattgcaacttttggtcctgagtttttgaaaaattcaataaaaattgactagtgaatacattttctttcttttcagctattcaatttcattgtcaactgtcttcaaaaggtatgttttttaaataatggtgacaaattaattattgttcgagcgcttgtaatatatttaaaattttttttgaaatataaacttttgtagagcccggaaaacacaatttatgtgacccgcctcccggattgggacacaaatctttcgagataaagtttccgatcccgcgggatccaatccaacaatttcctaaatatctcggagtttaggactgctaacgggtacaacaaaattcccggaatcccgtcccgcatcgggtacaaataaa

SEQ ID NO: 54521 - DNA, 1095 bp, Heterodera glycines
atggacgccgatgagcagcagcaacaacaacaaccgcaacacaaactcccattttccgtcaaacattcgtcatgctcattttcaaccgctgcggaattgaattatgaattcgcagcctccggcacttcgtcctcaaaaggtgggcgggcacaggacaaatgaagaataaaattgagttgaaattgtaaaaaatgacaaatctaccgccttaatgtaatatagccccccccccaggccagtatctaggggggcggatggggggacacgtgcccccccccccgaaatgaaaaaccaaaaagttttcaagcaaaaatgggcaaattttctgaaaattttgcacattttcttatttttttttgaaaatttgagccaaaaatggcaaactttgtgatttttcggcgcaaaatatctactaattcctgctttttggctccggtgctagagattttgaatcaaaaaaaggcggcattttcgaaattttaattatacgaaaggttgagcagtattgaaaattaaaatgtttgcattttctttgcaattttaaaatgattttgcattaaatttgcttcttttcaagcatagcagcctaaggagccaggctcccgcatttttggctcaaactttgaaaaattaaaaggatttaggtaatcgcccttgggcgatgccaataggcgtcacgccaggaaatttttttttaaaagtttaacaaaattttaagaaaattgtgttaaaaatttaaaaaattaaattattcatcatcctccatcaacaggcaaacagcatcagcagagagccggcaccaaaaagcgcaagttggactggaaccggcgggacgaggacgaggactatgtgagcagggcaaagttgtcacggcatacagtgccagtgccgtcgtcatcgtcttcctcgaaaaggaagcaaaagcgtagcggaggaggcggaggccgaaaggcaacggcaccacttgcggcagcagaaacagcgggcatggtggacgaagcggacgacgatgacgaggagggcatggcagcggcaatggtggcggccgaagccgaacaaatgttgctggtggagaagcggcgatcaaccaggaag

SEQ ID NO: 54522 - DNA, 1546 bp, Heterodera glycines
atgaattcaaatttactgcttttaagcatccaaccaaacctttcaactcgtgacaaacaactaaaagcttggggacgacttgtgctcgattattgccaagcaaatcgtatttacaccactgatttggacgaaatttcaaagtcggatttattcaacaatcgtcgactgaatagtgagtaatttagcattttttaaaattaaagttagcatgcttaaggacatttggatctgtcagggattcgggcagtgttcgactttctcgaacttcaaagtctgtttggccttttgttcgtaataatttctgcccattcactcccttaagaacacgtcgagtggaaggataaggacaagacgcgctgcaacatttattggcgtagaccagaagagtggggccaattgctttacgagtgggcaaattcaattggattgttgaacactgtggtcacattgtacgagttgacccaaggcgaagacgtcgcgaaagaatgtgagttggcaaggcgacgaagaaaaaataaattggaatttggtttttcagctttttacggtttggacaaagacgtgctgttaaaagggctccaacatttggagaaccaaggcaaagctgtgctgattgacattgacggcgaaaagggcggtgtcaaatttctgtgaacaaagctttgtgttcaccgtttctatggccatggaaaagggttcgttccgtccacacttatacaatttcacaaaacaaccttccaggttcgaattttttgcgcaattccgacattgttgaggagggggacaccgtcgttgtttatgttaatgcggctgcacagtacagtgttgtggtgaagcgggggcacactttgcacatgaaatacggcgcactgcgccacgaatttttgatcggaaagcggtgttatctttaggatttacctaattccctgggttgaatctcccccccccccaattttcagttatggcaccgccgtgtccgcctcggccggttatgtgtacgtgttgaggatcaacccgagcatgtggacacggactttgcagaagagcacacagattttgtacacgccggacattggcaccattctgctgctgttggacgtgaagccgggcgcacggatttgtgagaccggcacaggtagaacggaggggggggggaaggcaactcggactgaaacacatggcattttaaggcagcggttctttgtctcacgccattgccaccgcagtggcaccggacggccatttgtattcatttgacatcgatgagaaacgtgccaaaactgttcataatgatctcaaagtaatgcttttaaagagggtggtcgaccaagtttatgaaactataaatttttcaaaaacaagaccaattggcaatgattttttgaaaaattacacttacctattaattttaaaatgaaaaatgagtaaatataacttttaaatttgttgactgaacccagcaaatttagtatcactcgaaagtttttaacagattattagtctactaatgattatgaggattacccaaactaaaaaatttaggtaa

SEQ ID NO: 54523 - DNA, 758 bp, Heterodera glycines
  unsure (1)..(758): unsure at all n locations
tgtcttttaagccgagttttgcgctttgtccgtgccaagtttctctcccaccaccttttgctcgccttcgcttgtgtcttgtacatttttcttggtgctttaatgttccaacttttggaagaacgccattttcttggttaaacttaatacattcgtatttttaaaattgtcaaatttcaaaaaacagaatcaaaagcgcgtcacctccgccgtgtcggcgctgactctgaaaaatacgctgaagcggtgtggacggaaattcagaaaaatttgcaggaaattccatgggacgaaattaatgaaaataaaatggtggccgaaattcgggcagcaacggaggagaagtttcataattatgtggacacggtttacgtggcccatcgggcagttcggcacggctttgaggaagtaattatcacactttcctccccccccccccttctcaaatttgcacccaaattgagaatcctccgacttgggacttcaagaattcactgttcttcaccgccacaatgctcacttcgattggctacggtttcgtctgtccgtcgaccttcgaaggtcggcttttcggcgtcctctattgtttgatcggtttgtccgtcgtttgttggccatttgcgttaattgtccttttaattgtcagggattccgttgactttggtcactgtggcaaagtgcgtctttctttttctgttttttctcaactcatttgcctctttttttttgttcaangcgttgccaaatntcttttctga

SEQ ID NO: 54524 - DNA, 1262 bp, Heterodera glycines
atggacaatgtaaaaatggacgtacacttaaaagtgagtgtgcaaagtttgcccaattttagccatggattttggtacttttttttgaaatttggcaccatttctttgtaaagccaaactccggtgcataaaaattcaagtaagtctgagaaatgtaattacaatttcaaaaatgagggatttcttaatttatagataaaatttttcctccaaactctacatcaagcaagctaatatttcttctttagcgtgatctagcaattggaaaacgcctttgttttatgggcattttcacttttttggccgaaactataaacaataaaatttcgaatatattgtaagtaattaaccttaaatattaattataaagtggattttttattattaaataatattgcatttattatttcagattgagtgcttttactgggcatgtcgcttcaaaatgtgttaattggcttagtaacgctgtccgacgaaatttaaggctcggtgaagcaaatgagcctaatccaacaccatttttgcgaacactaagtgcttcagaattggtttcactacatgtaatgaattaacaattaatttatttatttattactgattttcgcttatatatttgaaattgaatttttagttccaaatgtctgaatttggcatttcgatcgaacagattttacgcttttgggccaatacgatgaatgtttttattgatgacaacaatttaacggctgttgaccgaatggaatcgcaaaacgtaattgatccgttgtttggagcatggctggaccaaattacgcgttaaagaaattatgggtcttttttgggagcgaaaattacggatcgtgttgtggaaattaagacgttttgagctctgagattacgggttacaaatttccataagtgaaatacaattttgtccagccctagttagaaaattttaagtagaattttttaattttcaataaataacatacgtattaaccgattcttgacctagaaaagaacaattttctaaatttataagggttttttcaatattattggtttaatgtatagaaaattaagaattatttttagcaaaaaaaaacaaaattaatataatattttaggtcaaacaacaattgactgaattaaccagagaagctattcttgggttgttgtcaacaaaaattgagttggtccaatgcgaaaattgaaatgaaaaatggaacaatttctttaacatatggccaaaaggacattgaaatttaaacatcaataaa

SEQ ID NO: 54525 - DNA, 913 bp, Heterodera glycines
aagcactaactgatctgcggcttattggaacagaaaccgaagaagaagaagtcgaacagtcaccaacagaaattggctatcatcaaagagtgccaatcgatcagcgtgaagatgaagctgaacagtcggcaatggaatttgcgcctgatcaccgccgaatgtcaaccgatcagtgtgaagatgaagctgaacagtcgtcaatggaaattgcgtctgatcatcgaccaatgtcaaccgatcagcgtgaagatgaagctgaacaaccgctgatgaaattgcagtccaactgaccagcaaaaaaatgaagcgtcggaacaagagctgttggttgactccaaccctgttgatattgaagaagaagcgagtccaatgcattcgccacgttcccgatcaccatttcgatcagcagaattattcccggatggggaagtaacgacagtgaaacaatttgagagcgtcacagatccatctggagatgaacacatgcatttttttgttgaatcttccgatgataaaatggcaccattctcccaaatgcatggagaagagcgcccatttgcaccagaagaagtgtcaagtgaaggccatgaacaaatattgcctcttctcatgacggaagtagctgatttcaacggaagaaggccatgaaagaggtgaaaatgtggaaacggaaaaaattccgcaagaaattgaagcagtatcatcgccagaaattgacggacatgtaacgaccgaaattttggagacggaagatgttcggcatgaagttgaagcagtaccggcacaaatttcatcagaaagacaggaatatgatgatattgtggaatcagaagttctgcatgaaattgaaggagtaccggcatcaattcccctagaaagacccgaaaaagatgatattgtggagtcagaagaa

SEQ ID NO: 54526 - DNA, 274 bp, Heterodera glycines
atggaattaataaatgccactcttgacaaactgtacaacaatccatcttcccccgcggctttttccggtgttactgcactgtggaaagaggcgagaaaaaagataaaacaattaagtaaaaaagaagtgcagaactatttggaaagtcatcgtacctacacgttaatgcgcccccgacgggtgcacttccggagagcaaaaactgttgcagcaggattcatgacagatgtccaagtggatttggccgataaaatcatattctgatagagaacaa

SEQ ID NO: 54527 - DNA, 829 bp, Heterodera glycines
atgagaacggcccgggaggagttggacgccgaatggccggatgtgttgcgggtgaattacaaaaaaaaaaaaatttaatgctaattaatgatgcttcctaattcagctctgtgagctgctggtgagagaaaagaccgccggacctgccgagctcagagggtatgtccatttttgttaaagctccctcctcaaaaccaattttaaaaaataattgaaatgggcaattttttgaaaattgctgctaaaaatggacaagctgagcaaaaaaaaaactcaagcagacgagggggaaggggattaatccaggaaattcaaaaacaatgcccacctggtttttgctaccactccgatcacgcgttcattccagttgttcaccaaaggacaccttaaaatttttaaaataaatttggttaagcatattcggcgcttcgctgtgggaacaaaaccaccccggagacgccgaatatttgttgggggaggaggaagaggaagacgatgatgaggaggaggaggacgaagatgaggaggaggacgctgatgggggcgacgcggcgccagatagagaggagggagaagcggtggaagagaatggggatgaggaagagggggaggaagatgagaaccagcagattgaatttgtttttaaaaaaaaaacattttgatttttttttttgtttgataaatttttgttgtgttgacagaaagctttttttccccaatcggcggtgttcggttccatgccagccaacacattttttttgaaaaccatattttaaaattttgttttttcctgtttttttgcacaatcaataatttaaaacaaaataaa

SEQ ID NO: 54528 - DNA, 781 bp, Heterodera glycines
atggacgccaaatcaattgacgaaaaaatgttgaaaaaaatcatagacactgagaagggtaaaatccatgtgttacggcttgaggcgggaggtgagtgggcggaaaaaagcagaatggccatctccaaaaccaagaaatctgagttttttcaaaactcgggaattatcgggttaaatcccaaccggcacggatcaattggcaaaatgcagtcctgggaagaggaaatagacgaatggaaatagggaggaggaaccataaggacattcgttgctcagattttttgtgtctgatattcgctgcataatgaaaatgcaccctttctaagacaaaggtacagagctggccaaatccaaagtgttcaaagaccgttctgtgtgtcatcttctgttgaccatttacaacacaaatatatccaaattagaaagcttattgaattccatggagaaggaacaagggtaagcggaagagaaaatgcaaaattaaaatacaattgaaatttcgttggtgaattattaatttagttataagttgtactcgataaaggagctgaaaaacgaagaagcggacaatgaacaagttgagaaagaagaggaggaaaacgaggaggaagaaggggagaaggaagtaaacgacggactgagggaggaggaggaggcgggacggcactatgcactcagcttaatcggccaacaatgccagaagagttatggcataaaatgaaagatgaaggaaagaaaagctattcgttccttacccatattttctaccttttagcgttta

SEQ ID NO: 54529 - DNA, 1329 bp, Heterodera glycines
tatcatccggatgtcacaggttccaacgaatcgtgcgcaaagaaatatttggaaatcaaagaggcttatgacgtattgcgtgatgaaaaggtggggtgatgggattaggggtggtctccatccaatggaatgtttttctgtggtttttaccgtgctgaaattcagcaacgagaagaacacgaccgatggttagcggccgaagaagttcagcggcaacgtccaattaacggacgacagccgtatgtacgcagacagaaagtgtacgacgatttgtggccaaacaatggaaccttttcggatgaggaaatacgaagggttggtagaattcaaaagaagggggcgggtaaaaggaggttgatggtgtcggtaaggtgcacttcattcacctctgtcattaaatttctaaaaaatttccaacgcttcaaagtgttatggtgaattattattgttttttttaattttaccaactttaaatttttcaagaaattttggtattccttgttttgctacccccccccccctccgcccccttgaaaaattttaaaattcaaaaaatcatagatattttgttaatctatgaccagatatcatcagcagatgtcaaacaaaacaccattttcgtgatcagtgaccttgaaaaccccaaaatatgaattttttaaattttcgagggggggggggggtagcaaaacacggaagtaccgaaattttctcataaaaaaattgtcttaaaatttattaagagaaattggacgacttatcatttcatttgtggggtaaggcttcataccctttgccctattcggctgcatattttccgttaattttaaataataacaattgtcatttatgacagatttggcgcagtatgagtggcaacagcgaatttggacggtcgaattgggaatttgaaacggaggtgaagcgtaaacgacagatggcatatgaggaacagacgaggagaagaaatgagtgggcgaagaacgggttcggccaaaacaatggtcgaaggtgaaaatcgggaaaaatggaggggggggggagtttaccattgaccaattaataccaagaactttagtgattggactgaccaggaccaatacaaaatcattggcaaaattctcctctgttatgtgctcatcactttattcatcgaaattttcaggttacaatgaatttttgtctttatttacatcagatatattttaagcgcttcccttggacttttccgagacccatttctgccgccatataacagagaagaagacatcagaaaaaggattgaagaaagaatgcgaagaatgccgtaggattgacatgataatttaa

SEQ ID NO: 54530 - DNA, 2625 bp, Heterodera glycines
atggagaaagtgcaatttgggaaggagctcatggaggagtgtcctgaaattgctgccaaagtgcaagagagggacaaattgaagtaccaactgaacatcctgaagagggtgagggcccgggcagggactgattaacctttttctttattatctgcgattagacttcctttctgttcaaattgcccattttctgcaaagtttaggcgaatgccgtgccaacagagggacaccaaaccgaaaagaaattggcaacggatgggaataaagtcgccaataatcggacagttccaaatgggccgagtggcagtgcgcatttgcaaatcgaagactttggcgattcaatcatcgaacgactgagcgatgttttcgcaaaggccgtccaaaatgtgaggaagtcgaataaaatcgcattcattcccatttttgaggcttacccaactcttggcatggatccttcgattatacgagtcaaagaagcgaacaacccgaagtttggcgactaccaattcgaaatggtcatgcaaatttcacggcgccttctcagcgaacaaagcgtcaaggagccgcccccggtggtggccaagaaaattgtggctgcgctggagcaaatcgaattggtcgaaaaggtggggaaaaaaggaatggaagtttttgaaatgggaacggaaggggcggttgagagaattgcaaaatccattgaacacagcgaaaacggacattttgctttgtaattgaaaatcttagtgatccgaccaaatccaccttttcttgaaatcaagccttcatttcttctacctttttcattccattttttcttggcttttccttttgataatctcccattttcagtaccaactcgtcaatgcctatattaatgtatacatcagccgtaaacatttgggaaaacgaattgccgaaatctctagaaagggtttttcgcttcctaaaattgccaagaaacatgtgattgttgactattcgtcgcctaacattgccaagcaaatgcatgtgggccatttgcgttcgacgattattggcgaggcaattgcacgtcttttggaatgctttggatttacggtgagaaagagaaataggcgataaattaatcatttcatttataattaattaaatttgtgttatttctcaggtcctccgtttgaatcacatcggagactggggcactcagttcggaatgctaattgcccatctgaagaaatgctttcccaattatctgaatgaaacgccgcctatccaagacttgcaagagttttacaaggtaaacggaagtcatcacttttttgggcacggacaaagttggtgagttaaaaatatgataagaaagggtaacagtgacgaattgggtaggacagggcaacacaagaacattggcattacataaataccatgaaaaaaacccaaaaacaaataaattttatgatacacagactttttagcaatcgaaagtgaaatttgacaacgacccgcagttcaaatccgaagcctaccaatgtgtggtcgcactgcaaaactttgagccggacacagtgaaggcgtggaaaatgatctgtgacgttagccgaaagggtcagtcaatggacaaacaaaatttaccctaatatggccaattaatttaccaaagcttccctcagtggccatggaataattttgtgcttaatttttgttttttcctctcctttaaagactttgcaacaatttacgagcgtttgggcatcactgaccttgtcgagcgtggcgagtccttctaccagtcgcgcatgcagtcgttgatccaggagttgaaacagactcaactcctcgtcgaagacgacggaagtgcgtctttttctctttcatttctcactactttccctcatctaattattcacttttatcgcattctagggaagcttttcttccctcacgagtgcaacattccgctgacggtggtcaaaagtgacggcggtttcacctacgacaccagcgacttggccacactgaagcagcgactgtctgaggaacgggccgattggattctttacgttgtcgaccgtggccaatccgaacatttggaggtgttaatccttaaaatgcacattttcaattataaacaatggtatttattcgttctgaagaacgttttcgctaccggaaagcagctgaagtggtttgatgcggcacaaaaacgcgtggaacatgtccaattcggattggtgctgggcgaggacaggtgacagaaagcgacagtggcattgagcaacaattgccaataatttgttgcaggaaaaagttcaaaacgcgttccggcgaaaatgtcaaactgacggaattgctggacgaaggcgtacgccgagcggaggaaaaattgcgcacaaaaggcaaagaaggagtaaggcaaagggattttcaaagggatttctttggtaatatttttcaggagttcacaccgcaagagtttagagaagttgccgagtcggtcgcttacggatgcattcgttacgcggacatggcccagtcccggaccggtgactatgtgttctcatttgacagggtccgtttcgagggggaccagtgggggtcataaggatacaaattggaccaatccattatatcgatggatttattaaa

SEQ ID NO: 54531 - DNA, 282 bp, Heterodera glycines
gcacattccaaagttgcaacaagaaactgcggaacaatgtgatgtttatgcatcacatttgggcccatgtggcccaacaaaagcccaccgactcggaagaacagtttaccaacatgcaggccgagcaacataacgccaacagcatcatcaccaacggcacgaacaacggcaccgacacggccaccggcgacgagcagctcagcgatgtcagccgacttcacatgtgcccagagtgtctgttggaacagcccacaccgcaccgggcgcacctccattaccacc

SEQ ID NO: 54532 - DNA, 99 bp, Heterodera glycines
  unsure (1)..(99): unsure at all n locations
tcgtcgatgagcagtgtgatggcngagaacaacggcaactcgtacaacgagtacagcgtggttgatggtcaacagcagacggaagagcaccagcagtag

SEQ ID NO: 54533 - DNA, 366 bp, Heterodera glycines
  unsure (1)..(366): unsure at all n locations
ttttaagccaatttattcacaaaatacatttttttttgttgccgaaatgagcacggaacgctattccttctctctcaccaccttcaggttttgtttttgaaaaatgcataatcaattctattggtcagattgttcctttataactgaaaatgtagaactcttaatgtaaataatttccgaaatagaaaaaaccgattttcatacggttttggactatggctaaattagctgcttttttcaaacattgtaataatatgcatattaatttttttccctctctcccacagtccctcggggaagttgatgcaaatagagtatgcgttgaatgccgtcaagggcagtgcgccatctgttggcaccccngag

SEQ ID NO: 54534 - DNA, 919 bp, Heterodera glycines
cagagaagaaaaaattgaaacaaaagtcatttgacgaaatttttggagaaaaagggggagaaaaggaagaagaaaggcgaaatgaactcaaaaaaagagaaataattgcaaaattttataaaataaaagagaaaatcaagcaaaaaagacgaaaatacccaagaaaagaatgggataaaattgaaagaaaaatagctaagaaattggggacaaatcgaacgaaaatttataaatggatcaaagaatttggtcttcaaaaacaaataaagaaaagctataaatcaaaaactgatgaagaaaaaatagaaattatacaaaaattcattggaatggcaaatgaatataagcaaaaaagaaaatattcgccaaaagaatggcaaaaaattcattccgaaatttgcaagaaaattggagttagcctttcagtaattaagaaatggaagaaacaatttggaatgagtaaatttataacggagaaagaaaaaatggagaaaatgaaaatttattgggaaataaaaaaagaaaacccaaaaatgagtgacaaggaaattgcaaaaatgatgaaaattgatagaacgaacatttcaaaatggaagaaactgtttggataaaagaatcattgaagattgaaaggatgattataagaaaaattggataaatttgccgaaaaaattatcagaaaaactatgacaatttctagttttttttctaattttttgtatttgtattaaaaaaattattttaattaccctaaattttgaaatttttcttagtgaaaataagtgaaaacagtcaattcaaggattgggagggtatcattaaaaactgaacaatgttggaactgggctcccagtatgcctaaattttcgattttagaggccctgtaaaactccttggggttttgctagggtgaaaaata

SEQ ID NO: 54535 - DNA, 368 bp, Heterodera glycines
cgttcacatattttgccatctgtcaaccaatcatcatcatcatcgtcagcatcgtccgtcaacaagttcaacaacaaaacgttcaaaatgtctgcggaatcgccaacaacatcacaacgccgtgctcgcagtcgcaagacgaagaaacgtgcggccagcgctggcgagaccaaaccactgcgacgctcggcacggattgcggcacagaaagcggcgaaggaaaaggcagccaaagtgacgttttcggacagcattcctactccgtcgtcactcattcatttccccttttttcagcagaaagctcgtgacggctccaccgcgtcaacgaagtctgctggtcgtggtcgtcctagtcgctcgccgaagaa

SEQ ID NO: 54536 - DNA, 169 bp, Heterodera glycines
cgcccgtcctgaggccgcgaagcggccgaatatccccaaaaaaataaaaagacgggcgcgaagcgcccgtcctgaggccgcgaagcggccgaatgtcccccaaaaaattaaaaaacgggcgcgaagcgcccgtcctgaggccgcgaagcggccgaatgttccccacaaa

SEQ ID NO: 54537 - DNA, 750 bp, Heterodera glycines
atgctgtcaactctggtctttgccagcactgtgttgatttttgtgctctttcttcttcaggtattttttttttccattcaaattaaagtttaccaccccccccccccccacagcttctcctttttgggttgaaggttcgccatgcggtggcaaaccgcttgttgcggcgacagctcgttcgtcagcaacaaaagagtaagtatttatttatttttgttttcataaaaaaccatattttttcttagagctgaaaacgctcagatcgctgcgtcgccagggcgcgcaggagacgccgctggtcgtgttgggcggccgccgcccatttgtggcaccgcaccccgccggcgcccccctggtcgaggtgaagcgatttttgtttgtttttttttcaaaattaaaatttgttcaggcgaatgagccgcctgatgatgggccggtgtacgatgttccggccggctgagtgagaaagaattccggacagtgcggagaatttaggaatatggattttaaatttaaaaaatcgcaacatcagtgaacaatttttgaaattttttccttgaaagttaccggtctttcaagtcaaaaatttgtaaattgtttaatattggtcagaaaattcttgaggctaaaacatgccacaaagtgcttaatggatagcagaaaatgcgctttttataaatgtttttccgacacgaatgagctccagtgatatacgcgaatttttataaaattcagagattctgtaataaa

SEQ ID NO: 54538 - DNA, 805 bp, Heterodera glycines
atggatgatttttacattgtactaccttcgaacacaccgggaccagggaacagtacatcaaaattcacagttcgactccccgagactttggaattgggcacaaattggtcagtagctctctcatcaattatttacccctactcattcaccgcactcggtataaacggtcaagagtttattaaagtatgggaaaacgacagcagtgtccctactcaagtttatttaccggacatgaattttaaaaccgccgggggcctgggaaataaaattaacgaggcattcacacatcattacaaaatcaaaaaacaacgtggaaagagagaagccaaggctgaagataccaaagattcaaaaattgatgtcgcaaagagggccgcagaacgcgccgggagagacgtagaaagacattttaatcagatcaacaatatatcgaattccatccaaacccaactaaacacactacgagaaacaaatcctcaaattttagaagagcctgatataaaaatttggtttgacaaaatggttgagatgggaaccgaaattcaaacatcccgaaatgaacttaaatcttttcaataagaagtagataaagccaaaaacataacattggagcatgtgaaaaagaatgacatgaaagaagcaaagaaatcagccgacgtcgcaaagggaatcgccagacaggcaaagaccaaatatacatcaactctcgaggaatataatgataaatcggaaaagggttttagcgggatggtggttaggcttaacgaggcgctcggtgagcattttaaacgtaaggaaattgaaa

SEQ ID NO: 54539 - DNA, 264 bp, Heterodera glycines
atggtcgcatcagtttttgtggatgatggaagtgaacgctcattcatccgtgccaatgtggcaaaacaattaggccttccggtgattgaaacggaagaatgccatttgacgggtttcggagagaaagaagccaaacgctacgtgagcaatgtggtccgcgtaggatttctgggagtcaacggagatccatatatatgcgcactcaatgaaatggaattcattgtgaaagcgatgcccatcataacgctgaattcgaaggattaa

SEQ ID NO: 54540 - DNA, 488 bp, Heterodera glycines
atgaagtcaaaggccaagggcgctggggcccatcgtgaagtcaaaggccaaggggcagagtgcccagcagaagtcagaggccaagggcgattacgtgcacacgttggtcaagcgtgggaatgtcgcggctcgaatttagccgcgactgtccgatgatcggacagttgtcgaatggaaagagagcgacgagcgaaagggcaaaaaagggggaaaataatcagtgggcgatgaaacgatgaaaaatgggcaaaaaagtggcaatttggagagagaataacagctcaatcgaccaagcggcgcacatgaatgaacacagaaaccggccctccccgcccaaacatggtccgatggggacaaaaagtgcacgtgaatggagacaacatcaaccaatgcatgtgaatgttctgccgcaaatgaaggaagtcacagcgaagaaagaagagaaggaagagaaaaagacagcccatttgatcagcccatttctctaa

SEQ ID NO: 54541 - DNA, 3384 bp, Heterodera glycines
ccagccgctcccctacgagtcggcgctgaacttgtggccattctatgcacctgctggttcgtgttcatacaacaaattgacgagttgcgatgccatcagggcatacgtgcttacttgtggaatttggtcagtgaagttactaagtaattaatgaagtcaatgaattaattaattttttatgatttccggaggactaatatttagaaaaaaaaaattcctgaattaatttagttacaaaaattttcttgaaaatatatataattcctaatttcaaataattttaagtcaactgtgcctgcaaaaattgtttacgtggtagcaaatttgtgccttctcatttgtgttccattgcgcttcaccggtctcattagggtaaataaagaaaataaccctcctttataagcaaaccaaattcggatgtttttcaattttaggggtacccaaccccttgaaatccccgctccctaaaagatcggagacaaaaattttcaagaaattttaagatagaagatgctctgttatcgttcgttttgcctggcagttgggcctatgttcttttttttgccaggtttttaaaaaaaataaataaatattttattttaataaaagtccaaaaagggagataaaagccgcttacacttaaattttagaacaacaaaattaattggaccatttgttcaaatgatttacacaatgattgctggagatttggtggaattttttttattattaatatttaaataatttctcagtttcggtttgtgcttatttctacaatttttatggtaccattcacggaaagttcgtataaaataaattttaaatttatatttaaaattttctttttcaattttagcaatgttttttcttggcaaagacatttcaaccaaacaatatctgaatgaatcagacgccgaattctgtccactgagttacagcacgtcgaattacgactcattttttagcacatttttaactttatttcgagtttgcatgaatgcaatttttgtaagaatttttatttatttattttatttatttatttaattttgggcacttttttagtacgaagaattggcatgtgcaaattatgaacagatgatgaaaacactggtatttaataatattaatttaaaaagataaaaaattttattttttagttcgtcctgttcacatttctcatggtactttatttaattaggataatttaccaggaataattaatttaatttaaaatgcttaaaaggttagattaataatttaatttaaaaaatgtttaacagtttatcatgatgatcactcttctgatagccatgataaacaacacttacagtgaactaatagaggaggcggaactgacctggcgtcaacaggcaaattttaagacatatattttaaatccaaaaaattaaatattatttgttttaattaagtttttaaaattgatttctattaaagcagaaaaaaataaagttttttttttaaattaatgacttagatagagaagaagctttcctgagatgaagattagtggatcaattgtcgttccctaattgatccactaatcttcctctcggggaagcttcttgttctttatctcattactaataattaaggttctctcattcatttagtttgagtaaattgaaaattgagcaataaaatagtttttaataataataaaaaataattttattaaatttccagcaaggccagattgtgatggtgctggagcgtgccataaacgcggaaaaattggcggcatgccagctggaatattcagtgcagatgaatgtgccgggcagagaagcgcgcggactgatggtgatcaagcagaccaccaagacgagggcacaccagcgtaaacaggcactcagcaactggaaggtggggtttaaacacgaaaaaaacacctaaaaatatatctgaatttgttcatcaattaaacacgaaaaaaatatcaaaaaatatatctgaatttggtcgtcgatatttaggtatcaaggattttaaaatatttttatccttaaaaattggtaaatttacacgatattttaaaaaattttcattcaccgaaaatttatcgggattatatccattttcggtaaattggtgaatgaaattctcgttttttgccttttccatcaccggataattacatttgcccgagcactaattttttaaacagaaattcgtcaaactgaaaaatatcccaagaaaatatttttgattttctgaaataattttcagttggttggccgtaaagtgatcacgatggccaaggagttgggcacccagtcagccttgtacttgttgcacagccatgatcggctggtcgcgaacgataccgtaggcggtggcgggaccagcgtaccaagaacgccctacagtagcacgcgaccgtactcggtgtttggcgggagcacggcaacattggtaaaccatcatcgactcatgacaagcattggcaaacggagggcggaagaagaagtggaagaaagggatgcaaaacaacgacggcaacaacaacaacatgaacaacagcacaaagaccaactggaacaaactcagtccgatggtgatgaatcaagtgttattgaacatgtactgcaaacaccatcacctagaaaggttggtaatattaagtaacgataaatttatatatattttttattattttgaaatccattgaatcggctttgatcgaatccatctgggaagttttcaatccatcatcatgatatttttttaaagaataaaataaggattttaatatcgaaaaaacaaaaaccctaaatatgaaagcctaaaaattcttaactaaaaatagaaaattttttaatttgtaaatttttatacactaaacttaggaacttttcttaacaaatcttaaaattagattgtttgcaattctttgaaaattttttggaatatttttttacagttaaattttttcatatattttctttcgcctttgaatttccaaatttaaaattcattaaataaaaaaaagaaaatttttttgaggaagggcgattgcggcttataaaacattcgcattgaaaataaatattataaaataaattaaattattttttctagcgccgcccatcagtgccaaattttcagcaaccaaggctgagcataccaaccatggaccgtcaccagcaccaacaacaacatttgatgatgttcgcggaccagtccaaactgcgcgacgttgtcacacatgcgacggtgaacaacatgaagttgaggcgtgcagagctcgaagaggcacaacaacgccacaaaaaacctgtatcggcgcaatttttaaaatttcttaatcagtttttgatccccttaacagatattgcacgccgaggttggacaccagcgtaa

SEQ ID NO: 54542 - DNA, 421 bp, Heterodera glycines
atgccgagcagtacccaacagattcttgacgacgtggaatttaaagaacaaaacaaaaaatctgttgatcagataaatcaaaatgctccagatttattgaattcgacaaatgatacaactggcggcagaaaaagggctcgtcggcgagttcgtcccgacctattcagagccaaaaatagtccaccgacaaatagctcaaattctgacagaaaatgaaaaaaactgcgtaaatgaaaattctcttgctgaccagtgaaaaacatttttttttgtggaaatatttatttattttatttaaatatttgtttgaatattacatattatacatatagataaaaatgattttaaacttatattataaaatatttaatcttgaaaagttgcaaacgaaattgataccaattttaagaaaatgaaatta

SEQ ID NO: 54543 - DNA, 2008 bp, Heterodera glycines
atgtgtcaacagcaacgaccttcttacccccctcagtatgggccttcgcctcaaccaccaccctattcgtacccatctgctggtccggtagaacctggccaaatggcggttgccattgtggccactgttgtggtcattcaattccgtgtggcattaaaggaggtagaaaacatataaatttttaaaaataatatttgctggagcaaccaattttggcacttttcccccctgcagtggatggtcaagctggcaatggcacttgcccgacatttgtttggtgcatggcaaaactctcgtcgcgagtctcgagagcaacaagatggcggcgcatcgagagccgtagcaaggggcagtactgatgccattcgacaccgacaatatgccgataaaaatgtacatattttattttaaaaattaattacaatatttcaaaaatccccccgccctcccaagagccctcccgaaatactgcaattaaatcattttaatttagaggaataaaatcaaaaagtctcggacttggtagaaaattaaatttttaaaaatttccgttagccaataatagaaaaaaaaattatttttaattattttttaaacttttatttgaggttggttctgataaggacaccgctgttgaggaggaaaatgacaattttgtccatgtccaatgtgctgaagtgctttaccatcccaacgaaattggggaggaggaaatgctcaaacggtcacaattattttacgagctcatgaaaacgcggcgcagcgtccgttgcttcagcaccaaagaaattccgttgaaaattttgcaaaacatcatcaaaacggcaggtgtttaaaaagtgtctcgccaaaatggcaatatattttttaaaattttactgggactaagtgacatttcgccatgactcctttggttttatgccaaaataaagcttattcataggcccaagcaagcgcctatgcctgacctagcctgaagcttaggcctagcctaatccattgtacgagttgtaatgacaccaaagttccacataccaatagcacccagactctggtcatcgttatgctccatgttttctattttgtccataaattttggttttttaacattcaatgacccatcatttttgcaggcacttcgccaagcggtgccaatctgcagccgtggaccttttgtttggttaggaatgcgcgaatcaaacgtgcaattcgtgaggttgtggaagaacaggaacaaatgaactacagcagacgaatgggtgcccaatgggtgttggacgtggcaccgcttaacgtgaattggaacaagccatacttgaccgaagcaccattcctgctggtggtgatgaagcatgtgagacggaaataaatgaaaaattaaacaaaaaaaggatattccatcccaattgatttataataatttaaataaaatttaaaatttcgaataaaggcctatcaacttgatcatatgggtgatcggaaaccaacatattacagtgagcaaagcacatcaattgcagttggaatactgctcgctgcaattcaggtgcaatgcttaattggattatttgcattttgccattattaaatgacatttaattaattaattcaattaattttatttaattgatattctttcagaatgccggtctcgtcactgtcgtcacaacacctcttaatgcgggcgcagcgattcgcgaaattttgcaaagacccatcaatgagaaggtcgcaattttattaaaaattttttttatttgtttttaggtttctcttttactgccattgggctactcagctgaagaatgttatgtgccggatattcaacgaaaaccaattgaagatattatgcggatatattgagattttgtgtttaattaaccatttttaatacatatcatttagtaagcatttttaaattgaattttataaaatgatttttaatggaaaattctatacaagtttatgcctgttttattaattgttttgtttttatgaaaaaaataaa

SEQ ID NO: 54544 - DNA, 3978 bp, Heterodera glycines
atgacgtcacctccaccgcaacaacgcgagctggcattcagacgcccatgggatataatgtgccaatgatttcgatcttgaatatttttgaaaaaaaaattttttttcaagggttggcaaaacgccaaggaattcgctggccggtgtctcaccaaaccgagtcaccttttccccgttcaccagcttcaatcttacaaaaaccaagcaaatggtcctttaaaaaacattttattatttatagaaatattttttttagactgacccaacctcactgttaattgaaactattgacgatctgaggtacagttgtcaaaatttgttttcatcaattatgcttgtaattgccaatttttatttgtttaataatcattagtagcggagaaagattaaagcataaatattatttaatttaatccattatcatcaggcgttaaaaaattcgatgaaaaaaaaattattttaattaaattgtttatttgttttcagggaattcagtgtgttcatcttcaagaagcaaacccacattggccaacaaaacaagcgtgaaacattagtggatgccattttcaagcggagtatgcgcgagtttcacatggaactgtgcgcgtacacaactttggtgtatccggtaaattttgacaaaaatatttaaataaatttaaaattttaaattatatttaaatgggctgttcatttgaggagggcaacactgtgctgaaataccatgacatgatcaacacttttgagggcttactgtccaaaatgtgccatgaggagcaagtgacatttccgacaggtaaatttgtcaaaaaattatttaatatattttttaaatatttaaaatataatatttttttaataaatttaaaaaaaaatttttcgctgtaagtgttgggtgtgaatgcatttcgcggtttccttaacgagttcatgcagcaacggaagcgacgcagcagttcaaggaggacagcagcagcagtgctaataaaggtagggcaaaaaatgtgtgtaaaagacgtattaaatttttgaaattttggttttgtaaaaaatttgttaataataaaaagatttgtttaacattgtatttatttttcgattttttgcctttaaaagtgaggataaaatagaatagctttttaaaattatttaatatgctgaattcttctaaaatataagcgataaaacagccaaaaaaaggtgggaaaaaattatttatttattaaaaaaagaaatacgaaaactaaaaaaaaattatattggaactattgtagaatggtattaaaagcttaaaaaggccaaaaaaaaaattaattaattaattatcatttattttaaataaaattttcagactgttaaaaagaagcgccgccggtccgatattacagtatgtgccaaaaattgaattcttttaaaaaaaatgtttgcaccttattttaagcttcacaatggtcatcatttcaatttggaatatgttcatattccgacatattgcgaaatttgcaatatggttggtatactgtaatttatggattaattaaaattttaaaataattccaaattttaagtttatgtggcatgctgaaagggttagtcatgtctcgtcttaacaatttatataaatcaatttttaaaaattaagatttttatttgtgtctcatgccgattgtcttgccataaaaagtgccataccaaagtgaattatgtgtgttccagggcaacaactgctgttggcgaaatgccagtaagaaaaactcaaaattatataaataatttttatttgaaataaattcattaagcataaaaaaaaacagaattttttttatttgggaacccaaaatacgacataccttgagttccagattgattgaatttatgtcaactaaattatgcacttgataattataaagaaatttttttagaattcctccaaattcttcggtgccgacctttccaatcttttgcttgatgatgcccaaacagtgcccgttttgctcaaccgtctgttggcaaccattgaagtgaaagcgttgttcaccgaaggcatttatcgaaagagtggccaattggcactgatcaaacagacaagacggcaaattgaactcgctgaaggtagtgagtgcaacataagtatttgtaatgatatttccaattgtaaaaataattttttttttcgcaattaataccctcaaaaaatgtcgggaattaatttcaaaaattttctcagcatgaaaaaatttcatcaaatattaaaactttgaaaattagaggagagggcctttaaaaaaagttgtttttccttaaaaaaaatttttttggaaaagttttaaataatttaatttggaaaagcgggtggttagcacttagggatttttgagattttataaaaaaatatataaaattctcatttttcctaagatcccgactccatttcatttgacgatgtgccaattcatgtgttgaccagcttggtaaagtcatttttccgggaactgtctgagccgctgatcactgctgatctctatgaaaattttgtgaacatttcaggcaattaccgtactcaatttccgctccttaattaccgttcccctccaacaactgtagaaataaaagagaccaatgaccgtatacggtgcctacgcgcaatggtcgaaatgttgccgaagggcaacaaatgtgtgcttgacagactcgtctaccatttgggtgcggtaacacaatgggggtttacggtagccatgcttaataaaaaggggaattacgatgcacctttttttggtacaattccacttgttttttagcccgtgtcgctcatcaggaatctgtcaataaaatgtcggcatcaaatttagcagttatttttgcggtaataatggcactttttaaaataattgcataattttttaattaataactattgtaattaattagtttaaaaaaattaaatataattttcagccgtgcattgtccgccgtaacacatcaacaatacatgcccaagaacaactaatggatgtgcaaaagcaggcggtgagtcaatgttttcggagctttttggggtccaattttaattttgacattattcaattttcagatttgcgtgcaaacactgatcgaagacaaacttcgtcattgccaagaaacactttcccaaattattgaactggaatcagccagtgaaaaagtaggaatttaccaaatttctataattttaatcataaaaatatgccattattttatttatacaatatttaggtgacagagaatctgagactgatcgaagtatgtttgaatatattaataaaaaaaatttaatcaggcttatcttggcatatttttgttgttgcaatattccaacattccaacacattttcgctcgtttaattgcgagagccctcctgcacccgctaatgcgatttctaaatccgtatttcctaaaataaatccatcgagggctctatttttctaccccctccccctcctccaaagggctttatttcagtgaggggttctatttaagcgagtctatattttaggaaatacggtattgtatattatagaagcatcgcttgtccgccagtgccgccgtttcaacggaatgcattgctgtcgatgatcaaactcgcgctggcactccaagcgcaactggtgccggattgctgctgaacacatccgcaacaggcgacaacaccaccaccaccacaaatgcccacatggaacaacagcagcagaacatggagacggcacggcaattgtttgaggagcagctggacttcctagaccgggagaaggcacggctgttgcaagaattgccaccgcttgcgcccgtggccagctcggaggatctgacggacgaagcggagcgtgaaggcggcggcaccggaacggatgtgaccgcagcgacaaataatggaggcggcatttgcggatcagtacaatgccgtagagcaaaatcctcggggaggcaacgttccgttg

SEQ ID NO: 54545 - DNA, 1002 bp, Heterodera glycines
atggaagtggaaggagatgaaaaggccctcgggtcatcagttctgagtgtggaagcccaaatggacccaaatccaatgtcaaactctgaccaagtcgaaattgaaaatgaggaagtggataaaggcgagaatgggcaattttcaaagaaaaattctcgcgattcagatgaagaggaaaatttcggtggtggtaagaaaatggtagtttgccaaatttgggaggacggagtcattgtgattcctttcggtcaagacgaaagaccgggattcgtctttgtggctaatgatttattaagtgaaatttgggaaacgttggccgtgattggatttcaaattcaaaacggatcaacgccgaagccgaagcgacttcaattgcccaagtgacaatgtcacgaacggataaggacgtcagcatcatttccgacattcgaacaaatcccaaacaagggaaccggttggtttacgttgaatttgcggtccccggttttgaggtctgtcaacggctctatccgcaccaattgtcgttacgcgatcaccagcaactccaaattggcgcattgatttttgccacaaccgttcaaattgatcgaccaccggacttagcaattggacagtttggactcttcatattgccggccaaacacgacaaagcttcggatcagaaaatcatttctcataggccaatttgaaacccttcccaagttccaattccccttcagtgccgcaactgacattcatttagctgaaaaaggcatcgcagcggcattgtcgtcttgtttccttaaaaatcggataaaaatggaagagttcgccattgagacaactctccacattttggacaataacggaaggacagttgttgccacttttgaacattttcttgacaacaaacgtaagtttgttgatttggttgaattttgggaggaagatgccgcaattcaagcgagattgaaaggagtaagaaaaaattgtgccaatggacggattttagaggtgaataaa

SEQ ID NO: 54546 - DNA, 531 bp, Heterodera glycines
atccgaagatgataataaagctctccaaatttgtccggttccactttgctccgacgaaattgagctgaaagaattcgagtaaaacaaaatcatccgattgaccatggccgttgcagattcgcaggcgctaagcacaacttcatggccctcacaaatgaattcaaaatcgccatcggagtcgtgatttttggcagtttggtacgccagcagaatccttgcctgaaagacccccccctggacatatttattcacctctaaaatccgtccattggcacaattttttcttactcctttcaatctcgcttgaattgcggcatcttcctcccaaaattcaaccaaatcaacaaacttacgtttgttgtcaagaaaatgttcaaaagtggcaacaactgtccttccgttattgtccaaaatgtggagagttgtctcaatggcgaactcttccatttttatccgatttttaaggaaacaagacgacaatgccgctgcgatgcctttttcagctaaatgaatgtcagttgcggcactgaa

SEQ ID NO: 54547 - DNA, 417 bp, Heterodera glycines
atgcccaaaaagtataaaaaggcgaaaaaggacaaagttggtcctgaccttcctcctgctcctcccccgtctatcgaaccaccggccgcggccattcagtacgaggatttgacctctgatgaggaattggactcgagagccgccggaggcactgccactgctcatcttgttgatcagcagatggaatcccttttggcactttcacccaaaaacaacggcgctatgttggcactttctcctgactcgattgatcgtcttcttgaagacacaaatgccggagaggtgaacgaaaattcaaaaaaaaaatgaaaataatttaagtctgtgcccataacagcggagtccattgaaaaggccctcgggtcgacagttttgaaagagggaggcgaatttgcccaatcattcgggcgaaaatga

SEQ ID NO: 54548 - DNA, 1490 bp, Heterodera glycines
  unsure (1)..(1490): unsure at all n locations
atgctcgaaattttggaggatgtgcacagcggtggtgtcaaacagcatatcactctgctcacacaacgcgcggttaattattagcaattggaggggtaaatcaatttttttgcggttttctactcttattgttaggcatttcaattttgcatgtgtttaccatcacatgtacctacatttattcatccatttatgtttttaaggattacatgtgccatgtaacaacaattgatgaccaaacagagacagcgaggcaacagcaattcgagcttaagcaggttctatctgttgtaaaaatctccgcctttaacaatttgtgttttttttcagattgaggtgaataacatagccgttagtatgggcggattggctcagcgtgcttccgttcttcatcgacgcatgttacaaaaaaccagcaaaacgagagtaattgaaaaaattgactcagttttgcctgaaaatcgaccaattgacacactgactgaaggcattcataacgcttggttggacctgttgttttttcatcagtaaaacaaaaattaataatttggcgttatttgtttaggaaacaatttggcgacccaaatgcaattcttttggttgttgtgggcgaagtgaaccaaaaccaattcgatcaacgatttgtggaatatgaaatggagcaaaaaacgacgggacaaatcaaaattgttcgtctcacacttacgcaatgttcgcaaaagtaaaacaaaaggcaaaaacaaatcggaaatcaactaaactaacaataagcatttttcaaattacaggctgaaacttgacccaaaggagtacactcttcatttggacgcccttaaagtcgcggttgtctatttccgggctggttatgcacctgaggattatccaacccaaacggaatgggaggcgagacggaccatcgaacgatcgacggctattgtattaacccaacgcaacgtttaatcttctttcataaacaacagacattcagaaatgcccatggattggtcttcaagtggcaaacacaaaaaaagtccaacaagttggtggattgttttttgtttgtttttttcgaaatttaaatttcaggttcttgatactcccggtgctgtcgaacgttttttcaagggaccagccgatgaacagaaagtggccgcaattcgtcatgtcttcgcaaaaatgtggggattggatcgtgacgatgctgaaacaaacaaagttatgcaagtgagaatttacactttcagtgtctgttatcagtcagttttcgtcttacaaaggatgccattaccagtccccagcgttatgtgttgaagcctcaacttgagggcggaggcggtaaccattttggggaggaaattgtgagcaaattgcgcactttgactcccgctgaacgggctgctttcattttgatggaaaagatacagccactggtagtaaaggtaggcgtttttgactaattcttgnagagnttaaaaaagcgttattttaaa

SEQ ID NO: 54549 - DNA, 971 bp, Heterodera glycines
tttacaggcgaaattacttcgcgactgaccgcggatacgaccacaatgtgcgtaccgtatcctaccgtactacagtatccgtccctcctttaggtcggatacaatcgctcttaacgtgaacagtcagttgtttgtgctttcttttcaacaaactgtgcgtcgtcgcttcagtctttctgcgtaacactgtccaaatgggcggttcgatgctttttatgatgactctctgctggcgcctttctctcgtcccttttattgtcgttccaatcattttggtcgcctcgaaaatctttggcatttattacgatgttagaaggcactccaaattttggacatttgtctgtttagtttctgagtgaaaaggctcaagacgcggttgcttattccaacgatgtggcggaagaggtcggctgaaagggaacagcaaatggaattggggatcgcacgggaattggagatggcatgggacccattgaattggggatggcatgggaattggagatggcatgggacccattgaattggggatggcatgggaattggggatggcatgggacccattgaattggggatggcatgggaattggagatggcatgggacccattgaattggggatggcatgggaattggagatggcatgggacccattgaattggggatggcatgggaattggggatgtcccaaaaaggctggcttttcattcactcatcgcataggttctctcaacgatgcgaactgtccggtgagtttttcattgattgaatcattcacaatttcttttctgattacttactgattatcactttccaattgttcgactttatttttccttttcccctccattcgtaatgaaaggtctttcgcttgtgaagaatacgaatgcattcgattttatgacaaattaaccgacactttgctggtcacaaaacgtaaagcagttgcttacgttgcgtatttgtgggtctctga

SEQ ID NO: 54550 - DNA, 501 bp, Heterodera glycines
atgtgcagtttcttatgcttgcagttgaccaatgcgttcaacgcgcgttcattcattccgatcacttggccgtccaagccgcccacgaggagaagcgttggcgcgcacacgcgatccaacacattcattgcaaggtcgggacgaccgccacgcgacacaaccgcgccgatgggcgtcgaagtgtcagtgagtgcggcagcggctgtcaacgcggcaccggcgccagtgctgttcaaatgctaattttcaaaaaaagaagtccatcctttagcaatcatgtctttcatttatcacgaaattttttttattggtcaaaatgaatgtcaggttcgtgatcagcgacccggaaaacactaagaaccatgtttttagagaaatttaaaaatttttaaataattttagaaaaatgttcgaattaggattcggggtccggaattcacgaaaaaaggatgggatttgtactcaatgcctccaaacaccccccgaaaagtgttattataa

SEQ ID NO: 54551 - DNA, 142 bp, Heterodera glycines
atgaatgtgttggatcgcgtgtgcgcgccaacgcttctcctcgtgggcggcttggacggccaagtgatcggaatgaatgaacgcgcgttgaacgcattggtcaactgcaagcataagaaactgcacattgtgccaggggcaa

SEQ ID NO: 54552 - DNA, 1396 bp, Heterodera glycines
atgcatatgatgatatttacaactattggtgaaagcagcaatcgaatcaatgtttatgtggtaagacaatattttatgtgaattgaaggaaaggtctacatacagaaatggcaaaaaaaagcaacctattatacagttaattgtatagttcaaaaaaaaacccaggtcattaattccgccccgtttttatagtcaaaacgccattgtaagccagctggatatttgtgtgggggtcatttttcacgaggtttttttgacacatatgattttgggaatttgaagacttccattaaatttttattgccataatttttgaacgggaaggtctaataccgacacggttttttgagagaatgaaaaaatgtaatctaagggtttaagatatggggaataaaatggttatacgtataattgccaataaaatgtttaaaaatctggtcagttgatgcggtaaattagattcgtgagcataggtatttaaaaaaagaaacaatgctaaaaaatgcattatcattagggcttatattcatagttttttcatccctatgatatgaaacggaaaacatgtttttattttggcgttttgcccacattttaaaacaaaaatgcaataaaaacgaaaatacactctaaaatttaattatttatttattgacaaattttctaaaaacttatgtatttcacctttttttttggttttggataaaattcacgattttcacccatcaatttgaaagttttagcaactatttttccatttttagcaccttttggggtttttttagaaactaaaaattagctattttacagtttttgcaactataaatataagccctaattatcatgcatttagaatcttattaataatgaaattgaatttttagcataccgtcgtcaaaggcaccaacagcgtatatgaagtaatatgacaattaaaaaaaaataaatttaaaaattctcaatttaacagttttgttaaaaacggtttaaattccgaattctatttaaaattaatacatgttatcataaaatcattatcagcacaagaacgatacaaaaccgattggaggacatgcaatgaaactaatcggatggggcgaggaaagcacggacaaaggcgagctggtcaagtattggcttggcgtcaattcttggggcactaagtaaaaattgtcaaaattttgtaattattctgccgaattatttagctggggactgaatgggctgttcaaatggcgccgagggacagatgaatgcagcattgagtcatccagtgtcgactttggcactcccgatgtttaaaagggtttaatggactgagttcttcttaaaattttccttatcactgatagggaatcagattttttgtgatagcctaagttagctgaaaaataaa

SEQ ID NO: 54553 - DNA, 381 bp, Heterodera glycines
atggacgcgcaacagcttcaacaattgcttaatgcactgcaacaaatggtcacaaatgccgcaccgcaaaacgccgcaccagcaaatttgagcaatgccaatttggcaagctctattgatgctcggctttcagcattcaattacaatccggaggtcggcaccacatttgaaagttggttcaaacggtacggaaaattgatcgaggacgacggaagcactctgcctgaggcctcaaaagtgcgactccttctcggcaaacttggagaggaggagtacaacaaataccgggacacgatcagccccacacagccggaccaagtgaattggaatgacaccatttcgcacctcaaaagcctttttgctgaaacccgctcgctgttc

SEQ ID NO: 54554 - DNA, 1524 bp, Heterodera glycines
tcgctcgaatcgattataaaagatggtggatctcatgcaccaataagaagaaagagaagcgcaattgagccaacatcacctcctaatgcacgtattgtgccaaagtcgcgtccgaatgtcactaaaaaagtcatagtaccaacatctcccccacgtgtgggacaagaacatgaagaaaatgcagaagaaatctctaattcattaaccaatgtgaccaagccaccggaaaaacaacaaaaaattgaaaaacaacccgaagtcgtaaagccacaaaatgaaaaacaacctgaagtcgtaaacccaaaaaatgaacaaataaatcaaacacaaaatatttcgcaccaaaatgcacctagtccaaaacctccaccacctgcttcaattccgactacgaaaaaacacgaagaattaaaaagcaccattgatccaactccttcagtttcaaaacctccacctccattgtcagtttctaatccggttgaccagaatagaaacgtgtcggtcaatcaaagtgtttcaaaaaaaaaaaatattcctcctccatcagtttcaagttcatcaataaatgtgcctaaaaagcaggaagaattaaaaaacagcaacggaccaacagtttcaaagcctccgcctccatttccagtaactagccaaactacagtttcaccagttcagcaaataacttctgctcaaagaaatgatactaaaccatcatcatcatcattgattaatgaggagaaactgaaggaaattggcccgccaccaaaacaaagaactgaaaaaagtatagtcgagacggtctcaccgacacctccaccagctgtacccacgcactccaatgctacagcgaaaaaggccacttctcctcctcgagttattgccaccgacattattggaccaccaccaaaacagagaactgaaaaaagcttaaataccaaacatgtgcaagcacagcttgttaacgaaataatcccagagactactaaaaagacaacaataacaacaacaactaccaccacaattaccgaaccaccaaaagacacaattgatgattttattgggcaaattgaaaaaccaacgaaaagaaacaatgcagagcagttgcttgctgtcttgtttggaaacgatgaatggaaaaaagttaacttgagaattcttaggcaaatcattgaaggagttgagttacagtatcatcccaattttgaacgatttaaagcggtttttacacatccgagaattgaatatatctcattttcgcctcagctcggctatgtgttgggttttgaaaattctcaatatgtaagaaataatgaaatagccaaatacggaagtgatctccgtggtggattcgcaagctttgccgtttacgcaaaaggtctaaccgagaatatgattgttggaaattcattgagctcactccttcgtgttgtctctgtgtcgggggcggtaccaggcgaatatacggaaaaaatttacgactcaccgctctatggcacgtgttctaccaaaagaagtatcagaaattga

SEQ ID NO: 54555 - DNA, 2872 bp, Heterodera glycines
atggacagcaaccaaatcaccagaattttaacgtcgtccgaaataacgagccgcaagttccttggatgcttcccatgcgatcaactacctgagccgatggccatacgatttccggcatcattgattgttaatttggaccctcatcagtttcccggctctcattgggttgcaatatttgttaatggattaaataagaaggtcgattactttgatagtctatcgttacccattaatgaattggtagttaaatcctttcttaatgtctttcctggaatttattgtaaccagaagccctatcaatcagtttcatcaaattcatgtggacatttttgtatttgttttgtttattttttatccattggactaacttttacccaatttttagacaaattaaattcttttcataatccagaaatgtttgttcaaaattttattcgcaattttccgataaaataaaaataatatatatttttatttgccttggatctttttggctcactccgtagaagggatttagtggagggaagggaaagcaaacactatatgccgttcagtgccagtcaccaatgactgcggagggaaccgctttctttcatttaaatatgctcagagagtggtatatgccaaaaggtcaacagggcgagtgagctttgccttcacaaaattggcgaatgctgattggttgaaggagaggtcaggaaccaatgaatgccgatgggagtcattccattcctccccgaataaatggttttctgaatgtgtaaatagagcgagtgagctttgccttcacaaaattggcgaatgctgattggtcgaatggctcttttcgtattctctcttctatgatgctcattggcggaatttttgtgcaaagacgactgaattaaccaaataaacgattttttgttgaatatattataaaataatacaaatattttatataaaataaagaaattacaaacgaaaattcatcgaagagttgcttcgggaaccatacaacgagctttcgcccccacaaaagtcggcaaaagattacgtcaaaaaactcgactcggaaattgaacacgttccaaaatttcaatgggttaaaaacaagtctcgcttcgccattgaagacgtcccttccgacccagagggcttattgattggcatttttcaacactgtatggatgaatcgattagtgacagccggtcaagaggagttgagccgacacacctcggctgcattgtttccagtgcactccttacttcggatatatggattccaattcggcaaatgacttcagacacaataaacaccattctcaaccgctttaacgacgtggctcaaagcaaaaaacaggatggtgtgacgctttggggcgacccatttaccgtaaccatgacaacagtcaaccgaaacggactaccagccaaacgacaactgaaaggaggcgcagcgcggaagttaacacatgtccaccacagagttcacgaacagtgtctaattaaggtttttaattaataaatatttttaacttatataaatttagatcgaaaattttgatggagacaactattgtctattttatgctttgcaagcaacaatgattcgttctgttgctggattgacacgccaaagattttatgactacatgaatgggaaccgtggattccatggaaggctgaaaagtgaagcagtggacatgatgaatgtcgtcaaagcaccgccaaaacagccaagttatgatgctgaaagatatgtcccgcgggttattgattggtggaacaacgttaaatttgctggcgtttggaaattcaaggcattcatctttggagcaacgggccattacaagcctctgttcaaatacggcccggaggattatgttgtgccaattatcctttattttgaagatgggcatttcaacggggtgcagaaaagcggaaaccttttcggaaggccttattgcttgagctgcgaaaaaacatatgaccgaccaaaacagcatactttaagctgcaagtctcgctgcattaaatggttaaaatattttaaataaaaaattttcaaattaatttagttctcaaatgggaccaaatttcccttgcaagccagccccgggctttcgacaaaaatgcaatggatgcaataaaacgtttttcaacgacgaatgcctgcagcatcatctttcttccaatttttgtcaaatgagcaaagagtgtaaatattgcggggtcgtttgggacatgcacaacaacaagagaaatgggcgagaggtttttttttaatttgttttaatctgttcaaatcaataaattgtataagggtcataagtgtggtgaacgatggtgtgaaaattgccaaatttttcatgaatttgagcgaggttgttttattcggcctttggagccaaacaaaaagaaggaagcagtggggtggcggcttgttacgttcgatgtggagactacgcagcaccaagccgtcgaccctgattttccagaacgacgaaaacaccaagtcaactttgtcacagcaaacgtcgcttgtccgagctgtatttcgtcgggaatgtggaaagaaagcatgcgtggcaaattctgcaatatttgcggctttcatcggacaataacattcagccaaaagccattctgtgagacaacagtcgaccgacagacaatcgatcgtcaccctctcgtcgcattcgtcaaatggattctctataaactgccaaagaaatacgacacagttgtctactcacatttcggtggacgctttgacatggtcttggtctttcgtgagctcttcatggaaggactaaacccgtcaatgatcaaaaaggggaatcgcttatttgaaatgaaggcaaacattgattggttcactatttgttaa

SEQ ID NO: 54556 - DNA, 820 bp, Heterodera glycines
atggcaaaccatccgttgcaaaaattgaaggatgtgtcaatttatcgtaaaaaattcttccaatggtctacagaatggtcaaatcaacggtccaaaacgtcggatatttggtctgacacttcaaacgcattcataaagttgtgttttcaatttctttcaatttttttcgtcaaacaatttagtcttacggcacacggaatcagcaaaatatttgtcagaaaatcatttgtactgtctgcggcccacacggaaaacattgtcgtacgcggtgcgttagacagaaatgagctgtaaaaaagcttcttgctaaatgccgccgcattgttgggcactataaacattcaccattggctacaagcattttgaaaagaattcaaaaggatttgggcatctcagttcatacacttttacaggttgtactcccaaatgtacattcaatccaacgcataatttttaataaattaaggacacgccaactcgatggaacgcggcatatcttatgatgcgccgaattgaggagcaacaagaagcattggcacattacgcaattcaaaatcgaaaatttgattttacatttgatggcactgaaagcaatttgatgaataaacttctgaaagttttggatccaatggagcaattaagcagattattctgcctaggaacgtcttcaatttccgttaagtacccgttcacaaaattaacaattcaaaatctggaacaaatggagtttgaaaaccacgacgtaagcgaaatacgggatcaaattgtcgatggattgaagacaaaaatttttggctgtaaagatgaaaggtctaaatag

SEQ ID NO: 54557 - DNA, 455 bp, Heterodera glycines
atgaccatccaggatcacttcgagtggtgtgacattgccgaatttgtgcttgagaatggcgataacgcattgcgaatagtcactcgccaaaacattgccattctgatcagtggacaacaaatggccatcgtcaaaaaactgatcgagaactttgtgatcggtggggcaaaggtaaaaaaatgagagggacataataaaaaaagagacagcggttggagaaagcaattaactaattattcgtttagcggcgtcgttttgtggttgcagtttcctcctacggcactcgccagcccaacattctcagtttcgaggcgggggattacattcagctgatcgaccaaccacactcggaaatgccttcgatcggcggccaatggctttttggaaaggtgggccaaaaggaaatgatgaaaagcgggtcaatcaatcaatctaatggttctaaactctgttaa

SEQ ID NO: 54558 - DNA, 277 bp, Heterodera glycines
atgaagcaaatggaacaaattttggatgctaatatcagcgattttttgatatattgtgaaagaaatgtgagagtttttgaaaaattaaaataaaatattaaatatttttaaggattattttcccattcaaattgcgtttgggattagttttgttgaaaatttaatttcttatacattaataattatttgtggctacaaaatggccttgctcataaaaatttggacaaaaactgaactcgaaggaaacaaattaaccggcaaattacaaccaacctga

SEQ ID NO: 54559 - DNA, 187 bp, Heterodera glycines
atgggacaactgaactcctatttcttctcgccggaagaccattcgtcgtccgtttgtgctcagcccgtgctgatggagaaggaggaggagggtgaaaagtcgatgaacgacctggtgaccgcttcgtccccaacagaagttcgtcctgcttctcctcccgcttcttcctccgtctccgttccgccat

SEQ ID NO: 54560 - DNA, 1246 bp, Heterodera glycines
atgagcaatagtccagagcagttgggcacatggtttttggagagatgccaatcccattcccatctgcactatgttgggtgcgaaaatggtgagaagcttggatccgggacatggaccggtcagccctctttagggcctacaggtgaattgccatttagcgctcaacccaataacgtgccaacacctggactaagggagggaggagggccatgacgtgcaacgttagggcacttccggtttccattgcattatgcgatgtgtcaactccaattattggaggaaaccaagtgcatgtcggctgacgcaaagaccctaacagactaaaacgcgcctaggtagcgaagctcaagaagcgcgcagcgctttcccaagcgccaccctcgcatgcacacacccgctagttttaaatttaaaattgatttttattataaatattttgataatgaagtagtgtattttgaataaatctcttaaaaaatataaatttgtaggtgagtataaaaaatgttcatcagatcctatgtcgcttttcccacgggtgtaaaaaatttcgtttaaaccacagaattttatatgttaattattattttaaatattatttttcattacaattttttgtttttttaatattgtcaaattacaatgtacatacatttagttttctccttttacgatttattatatttttgtaatttgaagtcttaaatttttatattgcatatttgtcagttattgtttaagggttaataattacttataattaattgcgttaatttagtacagaaattataaataataatttttctcacccttattttcgatatttttatttccataatcgattatatgccttttccgttatctatttaatgtatttatttttcttatttatatataatcatttcatatgactcggtgcttaattttagtttctaatgagatttattagttttgataatttttagtggattatttcgcttttttttcttgtcaagtaatacccgttttactcctgagtatgttgagcatgcttttcattaaaaatcaacaaaaataattaatatcttttaaattaatatttttaaaggaaattatttataatatgattatatagcaatttcataacaatttatttaaatattattacaaattcttaatttatgaattaaaaaaattttaacaatataggtctaaatatgaaaattccccatagtcttttgaaagaaacgcgaaattgccgggggca

SEQ ID NO: 54561 - DNA, 975 bp, Heterodera glycines
atggccaataagctcattctcctgccttttgagcattaccgaggattagttgcagcgagagagggtgtcggcgttgcgaaaggagacgacgatgtggcagagcagacaaatttgggattcgtcaaacgacagctggagaccgtgaagaggaaacggacagcgaatgtcagcgaacgaaatgtactgtacaaccagcagctgaggagatatttgaagctgagaaaggaggtcaaggacaggcccctcaaggtacagctaagcaacggtgcgcaactgctgaataagacggtggaaacgggcgtacaggtacggcctggccccgacgagccgaaggacaactccgtattgattagcagtctcatattaatttcacaggtttggcacaaagtcgtaatatcattcagctgccactgactgtttcgtttgtattcagtaaatcgctgatgtcgatcccgtagctcatgtttcacacgtagaaactcaaacgcccggaagagacaaaagttgtcattgtttgtcagctcgaaagttgtcccatcgcagatgctgtacgggatgttgaagtcgggtctcctccctttgccagccagcttcttcctctgctttccgctctcgatcgccgtgatgtcgatgacgaacgattcttcgcagattgagggcctttccttcgccttgttgctctggtcgacaatctcaaagcgcgtcagaattgtctcagccattgttccgtcgatcttcttgatgtttttgaagtgcacggcaatctcgtagtcaaggtggcgtgccgtcagaaggaagatgaagtggttggccacgatgttcatggcttctgctcccttcattgcgtacgtaagacacaacaggaacaggctcttcaacacgtcttctgggtagctcgaattccaaatgtagtccagcataaaacggcccaagaaacggtatgctaaaatggattttatatttatttagaataaa

SEQ ID NO: 54562 - DNA, 784 bp, Heterodera glycines
atgctgaaaaagttgccaaaacccttccttattgtctacgatgacctcatgggcgacattgacgcgaagaagttggctgatctgtacaccaagaagtcacaccacaacaacttttcggtgatattcctcacccaaaacctgttcgacaaggcgatgagagtgccaaggtccaatgcgcaatacatctttctgatgcgtgcgcccagcgatatgttgagcattcgtaatttggccagccaaatgtttcctcgcgagcaagggtttctgatggacgcgtataagcaggcgtgtgccgatccgtacgggtatctgttggtgaccctacacgcaaacacagacaacctcttacgactgaggacaaacattttcccagacgacgaagaaaagattgtctttgtacccaaaaatggttaagaagcaaatggttggacagcgggtgttggacaactacgagtatctgaagtcccttgggaggacgacatctcacaagaagaggcgtcatttgttgagcagtgcaggttgtgaagagctgttgaccctggtggagatttgcttaaacctacttaacggatccttctgtttgacgcggaaacagaaacaaaaattgttgccttttgctaacaccattcgacggttggcacgcgtgagaagtgagcagagtgcgagaaagctgatcttacaacaacaacaaccacagcaggagggaggttcactgtttgcccctttgttggcacccatactgttagaggcggctcgttatctgctgcacaaagatggccaataa

SEQ ID NO: 54563 - DNA, 545 bp, Heterodera glycines
atgcccccactgacaacagccttatccaagctgctgaactgtaaagctgagaatttggcagagtacctgaataacccggaagctgtgaacaaggcgagtgcatacctgcgaggaaagaagctcaagacaacctactcgaacaagggcggcactacaaaggaggtcgagtttggcaacttctcgaaaaagtctgcttcggagacgtacgccttcgagggattccttggcaagtgtcttttctgcaagcattccctcactttggaaagttcagaggtcaaagttcaccagtacttctacataaagcaccggatccgcctgttgtaccctcagctgaagtgcatcgttgagtaccacagcaaaggtcattgcaagtactatccgttgggtaagctttaggctgcgatgaaagcccataatctcgcacggtttcagagttgttggccatagaggacagtgcagagataacaggcgaaaagccaacagacaccaactacttggactacctcggcttccgaagtgtttggcagccaacccccgtctattga

SEQ ID NO: 54564 - DNA, 811 bp, Heterodera glycines
atggctcctcgtaagcagaatgagcagtttttggacgaaatccagagtaaattttaaaataaaacacaaaatataagcattttatagaagcgaaccacgtggaagaagcacaaaacaatcaaagaaaacataaaatgggtaaaatttttcacaaattttacaaaaattttggatttttttctcatttttccatgtttcagatagtgatgacgacgtcaagttggttgactctcagtcatctcacgcagaggaacgccctgtgctcaagaagaggggccgaaagtctcgctgggaaaaactgctggaggacgtgaacaacgcaaagaaagccaaccccgcagaggttgaagtcgcagatgtcgacgaacgcaaagcagccaacgtcttcgactacccaacaattttctggaagctcgcacgtccaaaggtaatgtttgctctggtggcagccctacaatgttcttcttccgttgcagtatggggtgttcacctttatgtgcaacgaatgccgtaacgaaaacttcaagcgaggcgacaagcgcttcatcctcaacactggcagtggccaagagaagctggagttcacccaaacattctgccaagactgtgccaagttgaactttgactgcaccgacctgatcatgaaacaccaaaagaaagatgacggaccatctgcacagaagaacggaggacggaacacctattttaagatggaaaagtgatctctgatcattcattcattgatttttcgttgaaatgagcaactctttctttgtaattttgcccagcaatacgccgggatttgtcggca

SEQ ID NO: 54565 - DNA, 2227 bp, Heterodera glycines
atgcaccatggcatgatagcggaaatggaacgacacctgacccgaaaaaggtcaatacagtacccggatgagggggagattgttgacatggaagtcgttgaggaggaagagcctgaagaagcaccattaaatccgttgaaaaatcgcacaaaactcgcccaacttagcttgaagcatgagcgagacaaaaaagagagagaggaggaggataaaaggcgacagcagcgagaagagcagcagcagagaaagcagcaggaagagcagagaaagcagcgagaagagcagcagcagagaaagcagcaggaagagcagagaaagcagagagaagagcagagaaagcaacgagaagagcagcagagaaagcagagagaagagcagcagagaaagcaacgagaagaacagcagcaaaaacagcgagaaaaggagcaagagaaggcaaagaaatctgaggctgaccgcgtagccaaagagaagaagtcagaaaaggagcggttggcaaaggaggaagaagaacgactcgccaaggagaaggcggaggaggaacgcttggccaatgtgaaaaaggaggaggaacgcttggctagagagaagaaggaaaaagaagacgtacaactcgccatggaggcagaggagggccgtttggccaaattgaagcaacgagagttggagctgctaaaagagctgaagccgtggcgtggtggctacatgcgactggtccacggcaaggacccgacccccgacgttcattatctgcacgagaaggatgattatcactttgtgaatgctgtgcacaagtacattgtgcgacatccggaacttccatgggactcgccggagtttaacccatcagcaaacattcaacaaaacatcgcagaattccggaaaatctttgagcgcgaagttttcgacgaaaattatgagctaaagacaagagaggagaagaatgagctgatagagctggtcaagggatttcgattctatttcgcggacgagcttggacgttttacgctaaggattttcagcgacaaaatatcacacatcactttgacggatcagctggcctacgtgttgggctacgaacagcagcaagaaattcataacgaagaccaagccaagtacgctgttgacttggccggtggtgtcagtcacctgtgcatctacttaaacagcggaataatcgagagcatgatttttggcaactccttcgccaatctcctccaagtgattgcggtcgagggtacgtcgggcagtgtggtcgagaaggactttcagtcaccgttgttccacaaaattgtggctagagaggtggacgtactggacgttgagattcgtacgctcacaggacggtagtgttgtgattttcaaaatattttccctactttttttttggtttaagagaggtgccttttgaatttggccaagttgtgctgactcttcagtttaaaaaagtcgtaactttctgatacaatggtccgagttatattcaacgggtcgaacttgcggttggagaattatcatcagcagggtggcagagggaagagaaggcatgaaaaccttgctggacaaggcgtccgcatcgctacagaagggcatagggagaagaaggaggaagagagggacgaaagccgagatcattttaaaaccctcagacattgttggacaaactgttccccagagagctctgttgaaaaagaaaagatttgattcccttggttattattaatcggcatgttgtataaaaaagttgatgctgcgagtgcagaggtggtcaatagcggattggacttcttcagtacaccgccaacaaactgtgcggtgtccaactccagctatcgggagtacttgacgctgaacccgatcagctcaaggcctttccattttaaggcaattgtttggcaatgtataactcttatcagtgtttgttcagattcatccgatcaccagctacatagacctcagcaaagtgtttgtgtgcacggaattcaagctcaagaaaatcgcagaagacggagtggtagttgacgtaccagccaacgcggctgttggccttatacaaatgcccggtgcaactttcatccgcaatctgaaggtgcacatcaaccagcgtgaggtgtacgactccaaccagctgtacagctacaaggtgtacctggacaccgagctcagttaccctgcggcaggcaaaggatgcctactttggcgtggcgggctattttcgagacagtga

SEQ ID NO: 54566 - DNA, 365 bp, Heterodera glycines
atgatcagcaatgtcgagattgacattgagctcgcactgcagtcggacgactttatgatccaccaggacactgcgaataaggacaagtacacggttgagattgttgactgcagactgatcgtgaagactgtcgatttgatggacgggctgagtcttgacattgccaggaagttggacactgagcctgccagatacggaattcggaagtcattcatgaaatcgcttttcatcactggtggtcgttatgacttctcggccaacctattcacggagaggtgccacgaagggttgtcattggcctggtgtccaaccagaattatattggccataatcagaagaatcccttctattttaatcaccacaac

SEQ ID NO: 54567 - DNA, 80 bp, Heterodera glycines
atgaggtgcgcatcatttgcaaacaacaatttgtcatccaccgaatccaaagtcgtgaaggccagtacagactgtgcaag

SEQ ID NO: 54568 - DNA, 332 bp, Heterodera glycines
atgcgcgactttgactttctgaaggatatgcactgcaacataacagaggaatttcgacgaactgttaacttcatagaaaattgttataaagacggattcaaacagccgctgattttgttttgccaacgagcggtaagaaataattgaatttaaatttaaatagacattcaatttattaattatttaaattaaattgaatataaatttagtaaacatttaatttattttaggattatatgacacatgaaagtgaagagaacaatgagaagaaattggaattaaagcaggtaacaattgaattttattttcaaaaattgggtaaattggactaa

SEQ ID NO: 54569 - DNA, 1362 bp, Heterodera glycines
atggcggacctgcagaaatttgaagactggtacaataacaactatgaacaatgcttcgaccttaaagaaaaattacccgaatactgctgcaatgacgtccaaatccttatccacgctctcgtggaactgcgcagggaattcaaacaacttacacaacggcacggaaaacacggaggaatcgacattatttgccaagccattaccatcgccagcgcctgcgtcaaaaattatgcactcaatcacttgaaaccaaactcactcgccatcgtcccggaaaaaggctacactcctcaacaaaatcaaatcgctctggccatcaaatacctcgactggtactcccatatcaataacgtcaacattcaaacggcacattccctttacggcgaatatgtgtttaagcgtgaaggacagatataccaagtggacggctacataaaaggcacaaatgggaagcgggacaaaattatagaggtgaatgggtgtctgtggcacggctgcgaggagtgttttgaggagatggacgacgaaaagatgtcaaacggaaagacgctgcgggagattagggaaagggaagagaagaaacatgaaatattaagccgttacgtcgacttggaggttatttgggaacacgaaataaatgagaagctgaaaaaggacacagcaatgagggagtttttcgacaactggaaggaccgctcgccaatcaaaatcagagacgcttttcatggaggacggacaggaccaatgaagctactccacacagcaaaaccgggacaaaaaatcagctacaaggacttcaccagcctctacccgtggaccaatttctctacagactatcccctcggccaccctaaaatcatcagtatcccaccaaatgagcagacggtcaactggcgctctccatccgacaacccctacaaaggtctgctcaaagtgctacttctacctccaaacaacaacatcaacgtcactgttatgcccataaaatttgatcaacgcctcctcttccctctctgtgagaagtgcgccaaatacatcacagcaaaatatcccaatggcctcaaagacaacgactattcctgcccacacttcaaccctaacgaccgcgcctttgtatcaacctgcactcatcttgagttaaacgcagcactggaagccggctacacagtccgcaaagtcttccacgtcctccaatacgaccaatggagcgacaatgtcttcaagtcttacgtgagtgaaatgatggccctgaagatccacgcaaccggcttcccgtcatggtgcagcagcgaagaggagaagagtgaatacattgaggagtgctggatgaaatttggaattcatctggagaagagaagatga

SEQ ID NO: 54570 - DNA, 757 bp, Heterodera glycines
atgtcattccaatctctgggactcaacccactagcatttcaagctctgagactcaattctcaggctttccaatcgctgggactcaacccaccaacatttcaatctctgggactcaaatctccggaattccaaacactgggactcaacccaccaactttcattggcattccaatctctgggactcaacccaccagcatttcaatctctgggactcaacccaccagcatttcaatctcggtgactcaaatctccggcattccagacactgggactcaacccaccagcatttcaatctctgggactcaattctcaggctttccaatcactggaactcaaatctctggcattccagacactgggactcaaatctccggcattccaaacactgggactcaacccaccaactttcaatgacattccaatcactgaaaatcaagccaccagcattccaatacttggactcaacccaccagcatttcaatctctgggactcaattctccggcattccaaacaatgaaatctccggcattccaaacactgggactcaacccaccaactttcaatgacattccaatcactaaaaatcaacccaccagcatttcaatctctgagactcaattcgcaggctttccaatcgctgggactcaacccacaagcatttcaatctctgggactcaaatctccggcattccaaacaatgggactcaaatctccggcattctaaacactgggactcaacccaccaactttcaatga

SEQ ID NO: 54571 - DNA, 973 bp, Heterodera glycines
atggaaaacggagtgacaaagtgttgttacagcgccattccgaacaatgatcggacagtagcagaaaatgagcaaggaaatgggcgggaaatgagtagcgacggtgatcaaacgggagcagcaaaaggcatttccatgggcaaagggacggcggcgccgtttcgcgccgctgaacgccgtccgatacgttttgccaattttggaatgggcgccagcctacagtattcgtgccaatttgcacagtgacttggtcaccggactgaccgttggcattatggtagtgccacaaggtccaattgatcatgagcgaaatttatttaaatatcaataattttacatttttaaatttaaaatgtttaaatttaagggatggcttatgccactttggccggcgtcgacccggtttatggcctttattcatgctttttcagtgcattattctacatgttttttggcacttccaggcacatttcaattggtccgtttttggcttttgtattttttaaattaataataattgtaatttatgtttttaaatgactttcggttgaatttattaattgccataatataaacattcgtaattatcggcaatcataatttcttttatcaaaccacttaagatggataattaattaggtggctacttatgaatttactttatattttaaaatttaaaatattaaattttatttccccttaggcacttttgccgttgccagtatgatggtgggcagtgtttgcgcaaaatttttgtcacccaattcaaacaacaacggcacatcggctccggagacgattatcggaaacgatgacatttttttggacgatcaaatcactccgctggtgttgaccagcacattgacattcggggttggctgttttcaggtcactcattcaatttaattaattaataattttaatacatttttataaattttgaattgttcttagttgtttaaaatataattga

SEQ ID NO: 54572 - DNA, 297 bp, Heterodera glycines
aacttaacaaattttataagtgtctgatcgcccgaccctttccgacttagtttttgaagtcagcagaaacatcgaccgacaagtggacgcagcgaattgagctcggaatttcgtgcactataaaaattttgaagattcgatcatacaattctcttttttcgattcattcaatatttaaaaatatcattatttttcgtgaaaattgttatttatttatgcgattctggtaaagtattaatgaatttcgtattttgaagccttaagaatgtaattttaagactttttcgctaattttta

SEQ ID NO: 54573 - DNA, 313 bp, Heterodera glycines
atggacgcggcggaaccaatcaaacaaaaaaggatttacaaaaagcaaccaaaaacaccaaaaaaatgtttaatttgtggacgaggtgcagcgttcaaatattacaatgtgcaaagttgcaatggtaagaataaaaatgaactttcaagcatttcactaaaatataattattaattaatgagtaaacaatttgttgcttaaggatgtaaacaattttttcgccgtatagtaaatagtcagcgaacgttcacttgcacagaaacaaattcgtgtattttaagtgatggtaagtaattttattaaatcaaataaa

SEQ ID NO: 54574 - DNA, 784 bp, Heterodera glycines
atgcctctggcgccgctgctgctgcttctgctgttgttcatgttcctcctccctctcttcctgcttgtgatggctctgtggttgtgttgctggtactgctccaggagctacgactgtgccctcctcttcaccgacgaggccgggcgagaacgcctgttgcttggcaacttgttgctgttgttgctgtcgcaagtgcgcgaccatcgcttgcattcgcaaccgctccaggcacagccgttgctccagtgagtcgaccaggtcaatctgggcatggcactgctgcgccgtcgcactgctcgtggcgtcgtcaacggcggaatggcactgggacaaatgggcgagaaaggcgggcaacgagtcgcagggctgaaaaacaaaaacagggggcatcagtcgccaattgccgtcttgaaaccagagaaggaatggcaatttgtttttatctatcggtccaaaaatgaaaatgttgtcgggatttttcggcaggattttcatgcagattctcattagttagggaaatacaagtttccgcgtggctcagtcggttagagcccatccctcattgtttggagagccgtgggttcgagtcccacacacccgcctgtcgatccccaacaaataattgccgtccacgggtgcactacgtcccccccccccctcggatcagttcccttaaaaaaattttcctttataaattttcgaactcttaatgattcatcataaaattttgaaaaaaaacaatggttcatcagaaattttttgaaaaactactataaaaaattaa

SEQ ID NO: 54575 - DNA, 199 bp, Heterodera glycines
ctcaccgccgagcagtgcgtggtgcagctgctgatgttgtggtggcactccgacggcaccggcaccgccgccgagcaacccgagtgccgtcaactgttgccacagctgcaagtcaatgccgccggcatggccacctatggcgaattgctgagccagccgatcctggaccgcaagcagcaacagttgctgctccaactgt

SEQ ID NO: 54576 - DNA, 2472 bp, Heterodera glycines
atgcacagcactgataacaacggcaatggcaatggtaacaatccgtcaaacaataccaacaccatcgacgagggcagcgacgacggcgggcacagaaatggcgacggtaccatcggtgccggcggcgaggctggcacaagtgggaggaacaacgctgcggctggcaccagctacgacaccgccggtgccgtcgtcgtcggcgatccgcaaagtcaacagcagggcactattgcgccgaattccgtgccgcctcaccacattcttgcccacgcggtaccccctccccccgccgctgctggtggtggtggtcagccgcgtgacgtgccgccaccactgctcagcaacagtgccgtaagcgttggtggtggtctctcgagactctcgacgggagcttcggaatgagaaaaccaataaatatccttctgcagactgcctgaggggtggcgtacctttgccaccacacctttccgttataacagcgcccccccccccctcccccaacaattaccttaatttacccgggaaagacccgtgagactgggagattcacgatgaaacggcacaacacccctaagaatcatttttgttgagtctcgagtagttacgagaattgctaaaacggaggaccaagtcaaagggatttttccgaaagtttttatggcaaattttaccaatgtttaacccaaactattgacgaaagcgctaacttttgttgttattattgtatttgttaatatgctgttacgaatggattggcaaaatgtcaaaataaaataaaaatctaacggaaaaaattgctaattaaccactaattactcactgccccccattgttaacacagttggagcagcaactgttgctgcttgcggtccaggatcggctggctcagcaattcgccataggtggccatgccggcggcattgacttgcagctgtggcaacagttgacggcactcgggttgctcggcggcggtgccggtgccgtcggagtgccaccacaacatcagcagctgcaccacgcactgctcggcggtgaggggggcgcagtcgccgcagcggcggccgccgcggcgacagcgattgcagcaacaacagcgggcggtggcgtcggtaactcgctggagatgctccagcaacagttccaacgggcggcggcgacgatgacagcgagcagtacaacaacggcggcggcgacggcaccgtcgtcacagctgctgatgctgagacaacaccagcagcaacagtcggccgcgtcactgatcgcggacgacccaaaccatcatcatgaccagcaacattatccgctgtaccagaatggtcgctgcgcatggttcaactgcgaccaggtgggcagcagggaatagctcgtttcctcccccgaaatttttttaaaaaaatccaaaaattaacaaattctttacaaacaaaacattttatttaattttttatagtagtttttcaaaaaatttctgatgaaccattgttttttttcaaaattttatgatgaatcattaagagttcgaaaatttataaaggaaaatttttttaagggaactgatccgaggggggggggggacgtagtgcacccgtggacggcaattatttgttggggatcgacaggcgggtgtgtgggactcgaacccacggctctccaaacaatgagggatgggctctaaccgactgagccacgcggaaacttgtatttccctaactaatgagaatctgcatgaaaatcctgccgaaaaatcccgacaacattttcatttttggaccgatagataaaaacaaattgccattccttctctggtttcaagacggcaattggcgactgatgccccctgtttttgtttttcagccctgcgactcgttgcccgcctttctcgcccatttgtcccagtgccattccgccgttgacgacgccacgagcagtgcgacggcgcagcagtgccatgcccagattgacctggtcgactcactggagcaacggctgtgcctggagcggttgcgaatgcaagcgatggtcgcgcacttgcgacagcaacaacagcaacaagttgccaagcaacaggcgttctcgcccggcctcgtcggtgaagaggagggcacagtcgtagctcctggagcagtaccagcaacacaaccacagagccatcacaagcaggaagagagggaggaggaacatgaacaacagcagaagcagcagcagcggcgccagaggcattcgccgccgtcaccatcgtcgcaaaatcagcatcatttttgcaccgccggcggggcaacaaccgcaacgccaacgttgacggcattggacgctgcgcaacaacaaagacaagccatcggcatgccgttggagaacatttacatcaaagaggtggggtgtgcagcttgctcgagaatctcagtctcggcttttttgggtctcggtccaaagggcgggggaatgaagtgtacccttctcgagagtcgtttctga

SEQ ID NO: 54577 - DNA, 1078 bp, Heterodera glycines
atgtgtccactctccgatcattctttgggaatggttaaccactaccaacaattcttaaagaatttgcggtgcattcgccaaccgttggacgaccttttgaaacaggacacggactggaattggtccagcgaatgtcagaaagcctttgatcaggtcattggcacgcttcagtcggaccaactgctcacacattatgacccatcacaagaaataattgtgtccgctgatgcctctgagcatgggatcggagcagttatttcccatcgttatgcggatggaagcatcaaggccatcgcgcatgcgtcgcattcgttggctccggcagaaaggaattatgcccaaattgagaaggaaggcttagccttaatttatgccgtgcaaaaattccacaaatacctttatggaaggcattttatcctgcaaacggatcataaacctttgctgtcaattttcggcaacaaaaaaggaattaatcctgcaccgccaatcgattgcaacgttgggcattgattttgctcgcttatgattttgatattgagtatcaaaacacatcggagttcggacaagcagacgctttgtctcgattgatctcaaaaacgacgattgaagacgacgaagtgatcgtggccaatttgatgaatgtggaaacggaacttttgaatgctgttgtaaagcaatttccgttgaattccgatcaattaattgttgagattggaaaagatgaagtgctaaaaaaggtcatgaagtaccttcgcactcaatggcccacttcaaagaatatgtctttagaaatcattccatttcaacgcaggcgagaagccttatcaattgagaatggatgtattatttatgctgaccgggtggtgatccccgcatcacttcagaaggaagtcttgcagcaattgcaccagggcacccgggaatgaaacgcatgaaaaatctggccaggcaatatgtttattggcctggaatggaccagcaaatcgaagacacgaagaacccgtcgtggatgaagctgatcgagcccccgaagtgcccgctcaatcgacgaccgcctgatcgctacactccatcatga

SEQ ID NO: 54578 - DNA, 119 bp, Heterodera glycines
atgagaaggaagccggggccgggatctcgagattgttttgaaggtcaagaatttcccgagcctctcgaaatgggaccgttcctcgagactcttagtgaccaaaactcgagaatctcgga

SEQ ID NO: 54579 - DNA, 573 bp, Heterodera glycines
caattccagaaaatttattttgttgaagcatttgatcatgcagcagcacacgtacacggaacagcctcaacgccaggcaattaattaatcgaaacttttcgcaatggcataaaccaattggattttgtttagaattaccaatactacccaaatccgcctcccccggtggtgtaagtgccaattgttaaacaatttgaaattaaattaatcagtagggataggaaggaatttgaggcaaattgtttttttaaacaaaaatcgtccatttttaaaaccaattaagcgcactcattagctgcctaattaggcactgccaaattgcttaaggtacgaacgtcgttacgtggagagggacagcggcccgcgctgtgtgccgtgctgctgctgcattccgtgcattccgatccctttgtgcttcgactgcggctgctgaacaccggcggagaagcaaaacgaatgttttgggaaatgcgcgaaaatggaaacgcttttattacaactcatcactcaattaattacataattaattgtcattaatgcaaatttacatttgcgaataaattttttcagatc

SEQ ID NO: 54580 - DNA, 117 bp, Heterodera glycines; identical to SEQ ID NO: 53938

SEQ ID NO: 54581 - DNA, 171 bp, Heterodera glycines
aaaatcaatctgatttcactttacaaatacgctcccttgacttcatgtgatgttgaacgatcattttcaatttacaaatctattttgactgacaatcgctcatgtctatctcccgaacatcttgaaatgcaacttatttgcaatgcgaatttcaataatgatttggattaa

SEQ ID NO: 54582 - DNA, 1268 bp, Heterodera glycines
atgacgatttgctatggtggtaacgcggtggcaatgagttcagcggtcagcggaagtgcatcggcaaatgctgcaaaagttggggatggacgcgtcgaatgtgccgccgaatcgggcagtaaatacaatggcacggggacttttcaatggatggtaagggaataaataaagaaaattcaatggaaaaataaaagataattaattacaggctcagatttggtgacgcggatgctttggtcgttttcatcgtttcccccgaggacaaattccgattcgatgagcgcgcaattgaaaacgaacttcagcagatttccgatggacaaattgaagttgagcgaatgacgtcagaagaggcctttgtcaagtgattgaccactgtaatgacttttgtttaactgtcccccccccccttttcttgaggttgtttctcgacgagaatgacttcactttgcgtcgtttgtccgatcgtcgtgcggttgccctcgtctattcgtcgaatgggcatttgccggaatggacggacgacgaatgggagacacggcggagaatcgaacgatcgcgggcaattgtaaggacaacagcggaaggaattcatttccatgggaaattgtcggggcatttttaattaattatgcaattagcaaaaagagcattaactaaatattcgtaaaaagtatgctttttagaaaacatcgacggtgtttagcgatttgagcacctcaaaagcagtgaggcaggtgattaacggataagatgagaattgcctcaattaattaatgaattcaccattaattaatgtccatttgcccttttgaagctgctcgcacagcgcggacagatcgaacagtttatgcgagacgaagaagacaagcaaatggtggagacaattcggagaacatttgttgagcaatggcctttggaagagggcgacgatccgacccgacaattgatacaggtgagtaaacacacgaaaatgggccaattaaaatggaaattgcaaaatgttgggtcaaatcaaagcaaataaatcattttcctttccataaatgtctcttcctctttctcgtcctttttctttcgttcacttattttggccatttattcagttggccatcgctgaccccggcctttatgtgttgaaagcgcaaaacgaagaaggaacaccaaattatgttgacgagggactgagagagaaactgcagcaattcacgcacgaagagcgagcagcacacgaactgatgcacagaattcagccggtgacggcgaag

SEQ ID NO: 54583 - DNA, 336 bp, Heterodera glycines
atgcctttacatcaaaatttaataattaagttctcattaaaaatttatggttatgaaaatcaaaatttccacattaatcaaaaggtaattttatttcgaaaagaaaaattaaagagacaaagcgtttttaaatcacaaaatttaattttaaattcgatattttcgattgtttagcatttattcataaaaatggacacgttgccaaatttggactatgccgaagaatacggcgacgacggcaccggaagaagcatcgaattgcagccgaccattttgccgaccgagtgcaatttgtcagcagcaaacattgccgaacagaacacgtggacaatgtga

SEQ ID NO: 54584 - DNA, 725 bp, Heterodera glycines
atgtccttattttggccaaatgattatgcaaaatggtttggatgtgtgtgcatttgttatcgaagtgctgtgccaaaaaatgagtggcaaagaatggcacaaaactccgcaagaaacgaaaggaaaaattaaacgaaatttggccttataaaaagataaggaagagctaatgttgaaaatgcgaaaatttaaataattttctttcatttgatagataatacaatttttatgcttttaaataattagaataaattcgtctttctgtataatttttatttttttttgagtttgctaatattttcaatttttttccttcgcttttcctttttctttaatatttaattctttcttttttttatttttttatattttagttttattttcaaaatcgatcatccaacaataatggccctttgttgcccggcaaacttcataaaatgattcaattacagcaaagtgccaacgcctacccctcccattggcacactgtgccgtgggctccgctctcagtttcggcctgtccaaaatttatctcattggcttttgagtgcgaaaccaattaaatgttcatttcccatttcacttctatcgcaaatgccaacaaatttaacgcgccattggccgctcctaatgaaagaaacaaaacgggtgcttacttatgtttttgcgcgtttttcttctttcaaaaattcataaatttgcgcgaaatttctatttaaaataaa

SEQ ID NO: 54585 - DNA, 915 bp, Heterodera glycines
atgccaaaacaaaacgaaatcgttttaaaatattcctttctggacttgacttggtttcttgatatcgaagctgttttctacgctatttctaaaacggttataccaaaccccagatttttgaatccggttttcagaaaaaatgccttgtggtgaaaacaatatttcacatttcactccataactttgtgagttcggcacggatcgagaccgggataagaccattggaaagagcagctcgagctctacaagaaggtatggaaagaaaaaatagttatttctgggactttttcagaaatcagaattaattctccaatgtggcccaaattttaggcccccagccacagccccttgcttctcccagttttaagtcttggatttgtcaaataaattcaagacttcaaattaataatcaaaaattctcttaaaatttttttgaacccaattcaaaaaaggaaaaaaatttgcagtcaaaaaattattcgaatttctccaattttgtttccataatttccgaaagttattcggtatcataatgccaaaacaaaacgaaatcgttttaaaatattcctttctggacttgacttggtttcttgatatcgaagctgttttctacgctatttctaaaacggttataccaaaccccagatttttgaatccggttttcagaaaaaatgccttgtggtgaaaacaatatttcacatttcactccataactttgtgagttcggcacggatcgagaccgggataagaccattggaaagagcagctcgagctctacaagaaggtatggaaagaaaaatagttatttctgggactttttcagaaatcagaattaattctccaatgtggcccaaattttaggcccccagccacagccccttgcttctccccagttttaagtcttggatttgtcaa

SEQ ID NO: 54586 - DNA, 736 bp, Heterodera glycines
atgaacgatgctatgagcttaggaattcatcggttgtggaaggaatattttgtgcagcagctgaacttatcaaaagactcaacggtgttggatatggcaggcggtacgggcgatgtggcgtttcgaattgtacaagaaatgcgcaaacaaccgatcggcaagggatcaatcactgttgccgatatcaatgatgtcagtgatcactgtttctatttatctatgaatttctcatgttttttttcacagaatatgctggaaacaggaaagactcgagccaccagagcactctccccatctgaccaagcccgactttcatgggtctgtgctgatgcggaaaatttgcaatttgaagacaacacttacgacttctacacgatttcattcggaattaggaactgcacacatttggacaaggttcgacggtgtcattttgcaaatttggctaataatttgtcaatttttgaattggtcgagtttgtttctgattttcttttgtttctaaggtactttctgaggcctatcgtgttctgaagccaaatggtgtttttgcttgccttgagtttggacaaattgagaatacgatgttaagacggatctatgacatttacagcttccaatttattccagttttgggtcagcttttagttggagatttcaacagttataagtacctggtggaaagtatcagaatgttcccttctcatgaaaagtttgctcaaatgattaatgaggccgg

SEQ ID NO: 54587 - DNA, 2887 bp, Heterodera glycines
atgatcggctcaaaattcatcggcaataaagccggcatgagctccattgacaaggagcaagtggcgcgcataattgctgagaataccagcgcaaattttgagggttatgaaaagaaaagggcgagtcgcattgatgaacaaataaaaagaaaccgacaaaggcttgattcattgacggaacaacaaataaaacaaactcgagaagaggtgggacaaattcctggaaatttaactaaattattaacaatgaataataaacatttagttggacagaattgttgaagacatggagaaatggcgtcggctggacaggattaaagtgcacattgacatggacgcgttttatgctgcagtcgaatgccgtgacaatatccatcttcgagacgtgccaatggctgttggcagcctttcgatgctggtgcgtcattttattttataccattttaagagaccatgaattatgagtccatgcaaactttccttcattgaatggtttaggtatttgattattctgtagttttaccaaaaaatccattgataattactgccgatttaagagcacttccaattacgctgcccgtaaatttggcgttcgttccgcaatgcccgggtttattgggaagaaactctgtccccatcttctgattgtgccttgtaacttctccaaatataaacgggattcgtcagtgtttcgggcggttttccagcgctatgactccgaagtttcaatgggaagtttggacgaagcctacttggaccttacccatttcatctcacagcgaaaagaaccgggtgggttttttcgccttttacttttatttgaatgtttagtaatctgtcgaagggttcgttttatgggcccatgcgtttgtcgccttcctttggtagcaaatcccagtgaaattgggcccgaagtcgaaaaaactccgacaatttgtgcaaaatgtgggaatgaacgtattgaagttgttgactcgattgaatttggacaagacgttgactcaattgtgcgccaacttcgttttggtatgaaacgatgcgtggggaaacgaattgttgcggactaatggggacaaacctgtattctgtaggggcatcctaaaagttttttttgctctcattgtcagtccaaaatttgaactaactattcacaatcgacgacatgaaaaaaagagagcatttttagccctttttattttattcataaataaactaaaaagttattgggaatcggaatggaaatttcagaagtggagcaagcaacaggcttaacatgcagtgcaggtaattttccaaaatgagttgaaactgatctctgtttctccgtttatttttttcgttgccatttctcttcaggaattgcctcaaattccatgttggccaaaatttgctctgatctgaacaagcccaatggccaatttcgccttggaaattcccgagaagagattgcctcgtttatgcattctttgcctgtccgaaaagtgcccggcatcggtgcggtcaccgaatcgttgttgaaagggttggacgtggtcacttgcggcgatttgctggagaagcggtccattgtgcatttgttgttcaccaaacgctgttccgagtggctccttcgcgttgcgcttggcatttccggccacgaaattgcggacgatggcgagacggagcaaaacgaccaaaatggtggggtcaaaaacagtaaaactcagaatcatcagcaaatgatcattgccatttgtgtccagacgaggacaacccgaagagcacgagcattgagcgcactttcactccgacaaataattcggacgatttgctgtccattgtccgttctctatgtgcccgtcttatccaatcacttccatcctctgaaattgtgggaggtcgtgctgtgacgctgaaagtaattgcgtaattttttttttttcatttttttcactcagataaaattcgccaattttgatgttgtgactcgctgcaaatcggttaattttgttgtcaccgccgtcggccaactcattccaattattgaagcgatgctgcgcaaggaattcaaagagcgaagaaacatggcggtgtgttgttattgttcattttaacaacaacaaaaaatagtcatactttttgagattcgccttttgggcgtaagactttcccaattggtttccgctgatgcaaatttgggagaggaggcgaaaaagggcgttcagctgagtttggccgggtttatgtcgcgacgtcctttggccaacaaaaagcgacgagacgaaccccccgaggtggtggaattaagctcatctgatgagatggaaacgaaggaggaggaaggagacgaaacaatggaagtgaaaccaatgccattttcggaggaaaaagagccggaaaatggccaaaggaaaagtgaaagcccaaacgacggatgtgacaaggcggagacgagcgaacgcagtcggagcaacggccaacgtatgcaatcttctgacgaatgaatggaacggatcccatgtgattttgccaatttcagaagcaagggaacgcgacagcgcacatggagacatcattgtgatagaggacgatgaggagggggaggatggcattgtgaacattgacgaatactttgactttgttgacgacgacgacgaagtgattgactgcacaaagtcagggggagagaaaagggcaaaaaacggaagaaaagggggaggacagaaaagaaaaagacggagggaagagagcgagaggaaaagggatgggaacagaaaaacgaacaatttgttcaaatatttccatacaattcgttaatttaacgacttttgccgtacaaaagaatctgatctctgaaattgacaaatttcattttaaaatttttcattatttttaactttcgtgcaaa

SEQ ID NO: 54588 - DNA, 158 bp, Heterodera glycines
aaccaacaaaatttataaaaaaataaaacaacggaggcaaaaatcactcggtattttgagaatttaaaaactcgttgtatttcttctcaaagtcgaactcatattcaatgccaatttcgcgcagtttcgccattctctttcgcaattcccccacaaat

SEQ ID NO: 54589 - DNA, 685 bp, Heterodera glycines
aaggtctcaagtgcaagcagggattcgaaatccgtccattggttgaacaacaattggaaccggacgaatgtgtcgatgttgagcttcctcgattttgtgaagcgtcaatttgcacaacaggtgatcactgatcagaaaggcacagatttttcgtagaaaaaaaatcattaataaattaattaaatattaatggtgaaaacagtgcgaaatgtcaaaaaatgtataaaattaaaaaaatcataaaagttttatttttgaatgtaaacaaaaactttttcttatttttgacattttttcgaaaagtccatgttctccaaaaatttattttataaggtattaaaaacattttattatgctattcgatagatttttggtttttacaaatacacaaatgaggaaaaaaattttcaaattatcaaaaagattttgttttatggaaattaattttctttttcgtgttttataattcaaaactcttaagatgaggcgccaaattttgcgagcattcattggaaatgtgcggaagaacaaaatgccaaagaatgtgccgaaagaatgaaagaaatctatgagaaaaagggtgaattaaaaaatgtttcatgccaatgccattatggcgaagaaggtgaagactttggcaacaaaaggttcacgcttccgccgcctgccgacccgacggacaaag

SEQ ID NO: 54590 - DNA, 1380 bp, Heterodera glycines
atgtttcctgaaattgttgccgacggacttgggcattgcaaaaaggtgaaggcacatttgtcgctgaagcccaatgcaactccaatttactgccgaccgcgtcccgtcccattcaacaccaaatctgttgttgaagcagaattggagcgacttcaatcgatgaatgtcatccgtccggttgaacacacaaattgggccgcacccatcgtggttgtgaaaaaggccaatggttcaattctcgtctgcgccgacttttcgactggcttaaacagcgcactgcttttgcatcagcatcccctgccgcttcctgaagacatcttcgccactttgaatggaggccgaattttttcgcaaatcgactttcgggatgcttatctacaagtcgagttggacgaaaattctaaagagttgtgcacaattgccactcatcgaggaaattttcagtaccaacgtttgccatttggggtgaagtccgcccccggcattttccagtcaattatggattcgatgttggctggttgtgcattcgcagttgcatatctggatgatgtgatcgtggtaagccgatcatcagaagaacacaagaagcaccttcaagaggtcttcaagcgaattgccaagtttgggttccgaattaagcctgaaaagtgctccttcttcaaaagggaaattaagtaccttggcttcatcattaataagaatggaagaaggccggacccagccaaaatacaggcgatcgctaagatgcctgtgccaaccaatttgtccacacttcgttcgtttttggggatgataaaccattatcagcagttcgtgaagaacatgcgtttcatccgccaacctttggacaatctgcttaagcaagatgtggtctggagttggtccaccgattgtcagaaggcctttgatcaggtcattcagattctgcaatctgatcagctattggctcactacgacccatcgcaacaaatcatcgtgtccgcagatgcatcagagcatggaatcggagcagtgatttctcaccgctattccgacggcacaatgaaagcagtctcccatgcttcacattccctgtccccagcggaaaagaattattcgcaaattgaaaaagagggactggctttggtgtatgccgtgcagaagtttcacaaatatctttttggaaggcattttcttctacagacggatcacaagccattattgtccatttttggcaataaaaaaggaatcaaagcgtgcaccgccaatcggttacagcgctgggcaatcattcttctggggtacgattttgaaattgagtaccaacaaacattgagttcggccaagccgatgtgctttcccgacttattgcgaaaactccgatgccagaagacgacataa

SEQ ID NO: 54591 - DNA, 639 bp, Heterodera glycines
atgcgctttctgaaacagcagcaggcacaactccctaatccccccaagccccaacaaatcctggcactatctgtgattttgggtaggtcgaaatttgttttaatgggatgtccttcttttattaggaatgtttatttactttcttcttatgtgctacacccatctcataagttaaaggtcattcactcattcatttggaccgttttattatttatttgtttgcatttgacgtcaaagaaactcatttatattattttattatgtattcatccgttccctaaggagttacttactagtgctgttcgagagcgtctcggtctcgactcgagaaagtctcgggtttttgggtctcggtctcgagtctcgactcgagaataaggataatgaatataaaaattgatttttcgtttcagcaaattattggctattaaatgcacaatttaatggatgtgtttttggaataatttcaatgattgatgaggacgagaatgaatgagtcaattagtctctcaacacagcagtccaaaattttcctactaagtgcgttacataattgagtagtgagtgagtgccgtccgaatgcgcaaatttcgccccaggaaaatttttgcatgaaacaaattaaaaccaatgaataaa

SEQ ID NO: 54592 - DNA, 373 bp, Heterodera glycines
atgccaaaagaaccttcgtcccgcgcatttcttttcaaaaaatgggtttccaattacatgaacgatgtttacacaactgattcaaagataatttattgtcaagcatgtcaaatagaggtttttgatacaatttgcgatattggaaaaattctttctggtcaaaaaatcaatttcggtatgccccccaatctgatttcactttacaaatacgctcccttgacttcatgtgatgttgaacgatcattttcaatttacaaatctattttgactgacaatcgctcacgtctatcgcccgaaaatcttgaaatgttacttatttgcaatgtgaatctcaataatgatttggcataatattttttgctttttgaataaa

SEQ ID NO: 54593 - DNA, 2517 bp, Heterodera glycines
attaccccgaggggcgtctctcccctcttttttctctccctttacgcccccaacttttacaatttttctttgtccattttttgttttttggaaattgcttctgccaatggtccctcaccgttcactttgcccaaggtcacttctccgctaggctcttccgtccattggcttcgttcggttggatcatcgccattcattttcatttgtctcccccgggggcattcattcgttcgcactttcccacccatccgttcattttttgtctgttttggtcataaaaccgtccccctcccttttttgttgttacatttcggcacttttagaggccataattgccaatttcgttatttctccccttttccttggatttattttccctttttatttgccattcgtcgccccttcggcaacgatgtgactgacccttcccaaaattgtctctttcctccgcttccttcggcaatgcctttttcctcctcttcctctttcggcatcttcttccaacagcagttcgtcttctttttccctctattttggttgttgttctcctctccatcggtgagttaattagcaaaataatcgcgcatcattagggcgtaattaattaacttggaggaatctctgattcactcccgcatttgatgtctctgttaaggcatcgccagttccgatcaacagcccatcttctgtgtccgacccgtccattttgatcaccgtaaaaacgacaagggcaaaccatcggagccgagtcgaagacgcattggccacttgggcatcgatggccgggcgtaaaggggcagaaaatacggtgaaaatttcgttgccaatcggacagagggaaaatgtcggggattttgacgatgaattgacagggaaaacccgggaaagcgggagaaatttacggattagcatgtttaaaaagcattgttatttttgtcccattttccggatgccttaccataagaagtcaatgcgattgatttcccacacaattcgcttatttcagcagattttgttcgtctccgatgcgaactctccgtcccctctcatccaatcgaccaaatgccctccgggacacacaaagtgaaccctcaattacttatctcctccaatgcttaatttagcgctgcactgtgctgcaaaatggcagccgaacttcgaattgcgcttcagcggtcgccggagtaatttgggcggacatttaaaatccttccccactaaatcgaaccggggggggcaattaaaggaccattgaccattagttaagtatttaagataaggttacttttgaggtcagcaattatggtcaattggtcatgtcagtggtcgctcatttccccccggggttaattgctgccttttccatgaattccctcccttccgtgccttatcgcacgaacaaatcggtcagaaaaagtgatgggcaaaactatgcacacaaatgggtttaaatttttcaaataattggaaaatgaaaaaaattcggagaatcgaaaaaccaatttaatttctttttcaattttgttgacattactactgtaaaaaagcttatcataatgccaaatcacactttaaaatcgcctatcaccatattacaaaaagttcgctgactttttgcctcccttttcgaattgttttggcattttaagtttttggtgccatttcgacgacgacagttttgtgctgctcgtcaatctgcgcgcctttctccgacagtttaggccccatctcgacgacctttacctgggccgaccttccacctcagctcccgttgtgctgccccaacttgatgaccgtccccaactcttcgccccctttcggcaccgaaaaagtccattttggttcggcaccggcggggctggcatttgtctgtccgcgctaacacttcgcagactgcgccgattcattgccacgggcgaaacccatcagcaaaggggcaatttccaatgggtctgtgcccaactcggcgtgccggacgacgtggcacttggattcattttgggtgagggcgcggggggagcaaatcaccgggggaagggcaagcggaggactgaaaagttcaatccaacggatttaactgtcacaagaccaaggctcttctagaaagctgatttctcgagtcgagtctcgacaccattagtaaaagctaacaacaattcgaatgttgtttttcagagaattttcttgccatccctctgactcggacggaccgattccattcgcatttgaaccgaatgggcgcaattccgcgctctcagttgagcgatcaggtagaaatttcaactgaaagcgggccaaaacgcacaacactttggacagatcagtctgagcggttcggaaaagggcgccaattttgtgaatgtgccggaaaatttccgaccgccgcacgacggcgacggaaaaagaagcgatttactgcactttcgctcacttttcaaattcattttgctgagagaaggacagaaaaggagagacaaagaagcaacaaaagaaaaggaggacaaatatttgatgaaa

SEQ ID NO: 54594 - DNA, 549 bp, Heterodera glycines
atgagcacttcgatgctgaagacggcgtaccgcggcatggcaatgtttgagggggaaatggcggaggaaagggcacaagggaacaaagattgcatcattcttacgcttttatgcgggaaaatattggactattttgagcagcagctgaaagaagcgaaaatggacgggaaaaatgaaaaaggggagaaaatggccaaaattggcaaattttggaaattattcacgcgaatttttgaccttttcaagaaaaaaagcgaaatgcacgacaaaaaaggcattctgatcaaattgagccaacttttgcgttatttaaggggccaatttggggagcaaaaagtgtcgaataaatggcaattaattggggaactatttgagcagggatttaccaaattgtacaaggaaaatgaggaattccgaacccattttaagaggaacatcattcaaatgatcggattgttcagagaaatttgtgaaattgcagaagagaacggggaggaattcttttcgaagcaattttggaccttatttggtggaccttttgtaaattaa

SEQ ID NO: 54595 - DNA, 326 bp, Heterodera glycines
atgactatggtaattatggcaattactttattaattaggcgtaatcaaaaaagtgaaatcattcggaaaaaggcgatcaatttcactgtccgtgcatttcgcctttcccctattaagaaatgaataataattattaattgcctcctcctgctcgtataatgtctatttctttcagcttttccactgggatattcttttttgggcattcgataagaagtagtgattttatttcgttctgcggcgtattggtcgtcgttttgtttaatattttttcttaattaagcaaatgttaatttatcgcatcgctgtcgtattttcataataaa

SEQ ID NO: 54596 - DNA, 399 bp, Heterodera glycines
atgacttcactgtacaaagaattattaatgaaatcagttggcaaagatgaaagtcgcggctacaattcaagccaaattcacattttggcaatgcttttgagctacaaaatacaaattgactttatgattggcatagggaaacagtttgaagaaagaactgaaaaatttgaggaccaattggaaaattacatgaacgaatttgttgtcgaaaggccagaatccggcagcgaagaggaggaattatgcgaaatgcacaaattggcacattcgatagctaaaaatggcattttgagggaggaaagtgccaaatggggcaaatttattgagcaatttgtgggcaatgcaacgaaaacgccaactgaacgggtgaaaaatgcaattataataatattaatttaa

SEQ ID NO: 54597 - DNA, 1236 bp, Heterodera glycines; identical to SEQ ID NO: 23904
  unsure (1)..(1236): unsure at all n locations

SEQ ID NO: 54598 - DNA, 100 bp, Heterodera glycines
ttggatttgcaacgacgtttggatggacattttccccagttttgaccgtcctcaactcggcctcaaattggcacttctttcgccacgtttcaatgcgttg

SEQ ID NO: 54599 - DNA, 1509 bp, Heterodera glycines
ctctgctcgaatttctggcagtcgcttttggcctggtgtccattcggtcagtgaccaaccgccactttctgtgcatggactcctcgggacagctgtatgccgcacctgccagccgatactcagccgactgtgtgttcatggaggaaatgagtaagagaaaggaaacggggatgagagagaatacaaaagagagagagacggaaaagaaatgacggatgagagagaatacaaaaaagagagagacgagaaagaaaaagggggatgagagagaatacaaaatgagagacgggggagagaaggaggaccgagataaaaactgtgcagactaacgatatgagtttttagtgcacaattactacaatttgtactcgtcttgcgtctacggaagtgcgcgaagtccgtggtttgtcgcattgcgacggaacgggcaacagcgacgaggacggcacagccgaagacggcaaaagtcgtcgcattttgtcattgtggagacgccgaacaacaacagcaaaacggacggagtgagtcatttaggattgatcagagcacttttcactgatcactgatcagtcccttcagagcaccgttttggatgggttcggtcactcaaagacccgcgtcggctcttgggcctggaaatacttttacggtggggttaaatttcaaactgacgcgatcagcgctgactccgctcatccgccaagatctgtacagcagcacaacgcatcatcgtcggcagaagcatccctggaggggacataagaaattgcgttgggagttgcccaaagaggtgacgtcactgaattggatagaaagagactaattaggcagcaattagtggtctaatgatgaatttttccggaattcggatagaaattccaaaagctgagccatttgacccacgaaagtcgcgagctaattacatttaaatggtcacaaagcacttgttcaggttgtactgctcgatatgaatgaaagacatcgtcgaacacaaagaacggcataaaatgccgtcaaatgaaatgggagaaaagttgtgccaaaatggcaaaagcggtgctaatgaggcgggagacgaccaacggcggatgagcagtgattgacccgcagaacagaacagcacaacacaaaccgatctctccactttgattgtccattctcaatttattaagcccatttttttctttttgataaattctgccaaaaattcctcgcgccaattcatttggcgcgactttcgccgtcggtcggcgggtgatcccttccccatttatgatgataaaattcaaatccctcctttcccgtcgtccttacttcccgcgccagtccgtctcctttcttccacattttgggtgggcgaccacctcggaagtggagaaatttgtggtctgtcggatgatgaatggacccatcgctcgttttgctgggcattcattgcccgtcgtcgtcgtccttgtcaatggcgccttccccccattggacaccgactgatccacccccccccccccc

SEQ ID NO: 54600 - DNA, 585 bp, Heterodera glycines
  unsure (1)..(585): unsure at all n locations
atgaaattattaccactattctttttaattgtaattttaattatcaaaattgaccaatttggagcagagaagaaaaaattgaaacaaaagtcatttgacgtaatttttggagaaaaatgggaagaaaaggaagaagaaaggcgaaatgaactcaaaaaaagagaaataattgcaaaattttataaaataaaagagaaaatcaagcaaaaaggaagaaaatattcaagaaaagaatggagtaaaattgaaataaaaataacgaaaaaattggggacaaatcgccaatatatttataaatggattaaagaatttggcctctataaattcaaatcaaaaactgatgaagaaaaaatagaaattatacaaaaattcattggaatggcaaatgaatataagcaaaaaagaaaatattcgccaaaagaatggcaaaaaattcatgccgaaatttgcaagaaaattggagttagcctttcagtaattaagaaatggaagaaacaatttggaatgagtaaatttataacggagaaggaaaaattggaaaaaatgaaaatttactggaaaatanaaagagaanatccgaaatga

SEQ ID NO: 54601 - DNA, 1760 bp, Heterodera glycines
  unsure (1)..(1760): unsure at all n locations
atggtgcagcatgagaaggcttgtgaaaaagtggtgagtgcnggcacaaaatgagggcgactttggacccaatttcagttcgaccacccatttgcgtcctcctcatccgctcccgcctgtgctgtggctgccgcttcttccgccatgatgccctcctcgtgctcttccgcggtcatcggcaccacccattccccatcatcatctttccatgctgctgggaccaatgccggtgctgctgatggaggtggtggcactcttcggcgccaccaatcgccgccccttctcgcccatccgccgcccgctcttccaccgccgctcctcgatcaccaacgggcccaacaaaactgtgcctccgcttctgctgcctcctcttcctcctcctccctgaatccgcatcatcatcatcatgttggcggtgttcatccgtccttctcttccatcatcaccaccaacatttccggcccacaaatccaaacccaacagaaacagtgccaaaatgtgtcgccgccccaggcattgctcgaggccgaacttccatttagcgactcgcaatttgacggcaccgttgaggtgggtattgttcaaaaatcatttttaaaaccaattttatcatgtagagcatactcgattgtaattttttataacttaaatttttttaaatttcaaaaaaaaattacaatttttttagctatttttcaaatttatggttgattttttatattaactcttttcttacttttattactggttttttatttacaaatgcaaaacaaatgaaaaatttgatggaattacgaccaattttcaagatttactaacaataagttttttttaattttcaacaaatcgctgaaaaaacttttttattttttttcgtgtggaatcctcccccccccccccccaaaaaaattatttttttctcgaaaaattgcacatccagcagagaaaggtgaaaattaatatgtttttttatttttaggcacttttaaatttccgccagaattattgggatgccaatgcttgtcatgagaaactcgaaatcattggcgacaaaagtctcattgtccattataagagaaatgagaatggtattttatcataatttacttagttatattatatattctccttaaaagatggtatgtgttctgttttcgctaaacatccgattttgctgttcaataattcgtccgacattttttactacgaaatttcaatcggaaataagaaaaagtaagagattttttattttttgaataaatttattaggaatataaaaatttaattatttttattattattaataataaatttccagtgttttgttattcggattcgccgtcaaacagcagaaaaaaccactgtatggagatgaaaagggcacttatgcatatgacaattatggcaatattttcattaacggaaaacaaaaggaatcaaatgccaaatatgcctacggtgataccgtaggaattggcatcaattcggccactcgacagatcattttcacaaagaatggacaacgtttgggttggtaaacaaacagttactaattgaattattgtcttataaatgagctatttaattgcctattttacattaattattttttatatttaaacttattgagaaacctttaactttttcacaggtttctccgattttttcgttgctccatcttttgttggccaattgttcccattcgtttctttgcgcaactctgatgacaaaattgaggcgaactttggatccaatgtcaa

SEQ ID NO: 54602 - DNA, 1268 bp, Heterodera glycines
atgtcatccaattttctcgaaaatgacattgatgaggaaatcatcgatagcagtttcgatttttcccgtccctatggcccaatgcatttcccggattccgacttgaccgccccaatctcgaacgaagcattggcggagtttaggtttttagagggatcattatttttgtatttataagaatgagtagggcatatttatacaaatatctattatttttattttaaccattaaatttacagcgcatggcttagcgaaaaccgggagggtcgaggtggcttgacaccactatctgatcttgtgcggtttgagacctcgaacgcagagactgagacataccccgaccagccgatgccgataccaattcatatgggtaatgtaaaaatggtcttttttaagtaatctgtatatggtagcaattttgatgacaatttcaggaaatcgtgaatggaatgtccagggacctcgcatgaatcagggatatcgcggggattattggcgcgggcagcgtcgaatgccattcccggttggtggtcgtcgtggggggcgtcattggcgcggacaaagtggcaacaatcgatacgcagcccaaaatggtgggtttgaagaaattgtggtatgcaaaattcggtttgtagaaggtgcggaatgcatttttggtgtgcaagtcggtattcagggggtgcaaaatgcctttgtggtatgcaaatgtgagtgtgtagggggtgcagaatgaatttgtggtatgcaaatgtgagtgtgtagggggaggatacggtataatatgtttttgcaaatttataccaaaatagttctaacttttctttattaagcgaactttgaaccaatcggaccaactccgctaaaccaaggtagaaaattccccactccttcaccatacacatatttaaaaacttttagttcgctcacatttatatgggagtaagtaatattttttcaattataaatcaaatgactaatcatatacagtaccagatggcatgagacaactgttcaacccggctcccccacctccggtgttttatgtgtttagagggcccgcccacctactgaatgaccctcgcctgtttgagcgcgttaacgggggtagtgttatttttatgccgcctcaaaacacaaccttaaaaaacatgattttagcgagtcctcaaatgccgatgggtctccaatatgaccgaaatggagttgcgattttcaacccggccgttccaccccccggatacgagaaccttcgccccccgggaacataa

SEQ ID NO: 54603 - DNA, 255 bp, Heterodera glycines
gactatgtggtggttgagttggaattcgccgccaccttttccccgctcaattggtactgtttcgtcgtcgatgccgcgtcccccgcgctgtttaagcgccgcgtgcgcgcgttggccaaatgctttccgaatgtaattatgggagacgagcgcccgatgaaaagtgacggggagggcatgatggaagcggtgttggactgttttgagcgattggacgcgccacaacgcaaatgggaatatgtcactctgttgcaa

SEQ ID NO: 54604 - DNA, 840 bp, Heterodera glycines
atgcctttccgattaacaaccgccggcgcagtcgccggtcaaatagcggacgttcttctcgcacttattcaaggtgaaaaccaatttatgttattttatctaattattgttataatatcttttaaaagacacataaaaatataaaactaattgatagtgtcaatgaattcaactctataggtctattcaaaatcccgttaggtctcgttctcctcttgctcgtgatcgccctgctactggtagagccatgtctgttggtggtgctaacaataagaaagcacaaaaggagaaaactactgaagaattggaccgggagttggagcagtacatgcgtgggaataaggtttctgtccctctttgtattttggaaattctcacctcttattttcagcatcctcgcatcaaattggattcttgaactcttttggatctatgaccgtatcgtaagcatcggatgtttcactaaaaactgatctgccgtttatttcatcatattacaaattcaagaacgtatttctatccattatcggttttaaggagtttgattttgttttgtttttcttttgataaatgtatgtgctgtaaacaatttgtttgttcctgaaatgtattaaaacataaaaaataattagattaatttttgtcatctaatatttgaacataaattagggtaggaaatggagcagagtgaaggaatctcggtcggtgagcagcagtcattggatttcacaggtggacaaagtttggcatgaaatgccattgcctttccatttttaaggtgtgcactcaattgggagcgaatgttcttttgccgccccatccgatgatatttctgtccga

SEQ ID NO: 54605 - DNA, 1208 bp, Heterodera glycines
atgtctcggctcgagaaaattcccttgtctttgaagtctcggggttttaattgggtcgagagtgtagaacttgagaacagtcttggattgtttgctctatttcgagtctcgtctccaacaacactactagtgttcaatgatcagatcgggacaccactttattcatgctattttgtttccatactgtatcattttatgtgtttaactacggtattgcgttgattgtacatattacacttttgtatttgcataaatggtacaccacattttgatttttgaatttttttatcattcagtattgaattacaatattccttgaattgtgtaacttatgaaattccgctacgaatattaacatatttaaaattttttagttaacaattgctatacttctaggacctttgtacgatttcgagtttctaggttgagtctcggtccgtccgtcctgttctttgtgcggaacagtaaaagaccaagccggggtgggacttgaagccacaccccagtaatccgtgccgtactcttccaattactatgtaggcaaaatttcgtttaatagcactagaagtgaccaaatgatcatagcattgctggaacattcctaagtctgccaaggggggaaaaagtcctaaaattgcttacaataaattttttatttctcttgaatatgatttatccaagtattctcatattctctaccataattttaattttttttaagttttttattgtattttctggtttaggaatcgcttttttcttgacaccagcgggctatcactgtattgaagcgaaatccactggttactgtttttgatttgtatggttgaactacggtattgcgcttttgtgtaagtgtcataccttttttcattctgttttaccgtttaatattacatacattacaatattacatataaaaataattttacagtatgcattgttcggaaatcacaaaaatattcttagaaaatgtattatattcgctttggcgttttttgccgagaaggaatcacattctgaagtcccttttacgaaatgaacatcaaaaaatggaattctgttgacaattaattggtgtttattctaaggcccggatgaactcctaaaatagtaaatttattagtgatcaaacaaaggcctagaaaaagctggtcagaaaatttaaaaaaatcaccaagcccaaacactcctccagctcctacaaa

SEQ ID NO: 54606 - DNA, 175 bp, Heterodera glycines
atgcttcattttatccttacattctctcaggtcaaacagttctaccggactgagggatttgaatttttgaaccgaatcttccaatgtcctgccgagttggagcaaatcaccggattagccgagttacagagacaagcggacgcatttcaatcggaagttatcgaaatggacgaca

SEQ ID NO: 54607 - DNA, 803 bp, Heterodera glycines
atgcaagcagtgacgcgtccacccattgttttggagcgtggagtttccgggcgtgtaaaatggttcgatttcagtaaaggtttttcacattttctcgcactttgattcaccagaacggttgtgtttcttgtccaggttatgggttcatcacgcgggatgacggaggtcaagatgtgtttctgcacgcatcatccatcgttcgcaaagtcaatatgtacttcgtgctgattgagggccagcgggtgagtcggactgattttgagtcgaccgagggattgggacacggagaatcaggggagtacaacgatccccgaattcaggtagaattcgacgtcatcgatggtgagaagggcagggaagcggccgctgtgtcggggcccggcggaattcgcgtgggcaccgccatccaatacaacaacactgcgcgcagtcagccgttgccggccaatgccaacaattccgccggacggatgttcatcgccggcagatttcggcgccccgttggcaaggttttgttcggtgttaaaatgcgcttttttggtcccctcacttttacaccaaacaaatcatttttcgggctatcaaaatggacttctaatggactcgtatgtccgtacaaatgtgtcctgccttcggctgattccccgccaaatttgttttccccatcagccgaacaacaaagccaagtcggccgtcgcttcggtccccgcggtggtcaatggcggcgacgacggtgcaaagggtccgccgctctctctgtccggcgtcactcgcaaaggccgtcgcatgttcaaagcgaatga

SEQ ID NO: 54608 - DNA, 538 bp, Heterodera glycines
ctttgcagatcattcttccggcactgaccttgacgttcagttccccccacacattgccaaaggcagtgaattcattttccgtttgactgtcgtcgaattgctcaacgttcccaaggagtacacggacatgttttgtcagttcaagtaggccaaatgcgaacaatggcatcccattcttcgttttataattaatttccctccagttttctccatcggcacgacgaagcattttcaacagagccagtcaaagggactgcgaagggcgaacatcgcacgttaccgtataattatgtacaggtggcataattagcaaacgcattgccctatcaatggaccatttgcaatgattgcctaattgttccaattgcccttttgaggagttcaaagcggtggtcaactcggcattcatccattacctgcagcactttcccatcattttcaatgttcacatactttataccattttcttttgtttcttttcgcgattttctccaaaattatttttcactatcataataaaataaacgattaattaata

SEQ ID NO: 54609 - DNA, 1594 bp, Heterodera glycines
atgcaactgttcgggttagtcaattcgctaattttgcgcgaagcggaaacgtcccgtcgcaatttgaccatccaacgctattcgatcaccacactgagtcagagcagcggactgatcggatgggtgccgcactgtgacacattacatcagctgatcaagtaactttcagtttattagtcaatgctcatgatctacttatgtcatttttatttaaattgataaaacaaatattttttgtttccattttgtttagagactatcgcgaaaaacgtaaaattccgatttcggaggagcacaacaaaatgcaaaaagtgtctgttgacgttgagaaaagcactttgctgcaaaaggtcgaagcatttgaggaagcattgcgcaccacgtcgggtgacgacttacgacgaatgctttggatgaaatcgccaaagtgagtccagtccattcagcgcaggaggggacttatgactatactttttagtaccgatattaatataattgaattcaagagtttctgatttatgttaatatattgtagtttcattcagttctgagatttggtttgatcggcgtaccaattacacgcgttccatggcttgcatgtcaatggtcggctatattctcggtcttggtgacaggtacggttgagttgggattttcggggaaccttgttttttaaaggcagtttctttagacacccatcaaatttgatgttggatcggcttagcgggaaaattgtgcatattgattttggcgattgttttgaagtggcgatgaaacgggaaaagtatccggaaaagattccgttccgactcacgaggatgcttgttcaggtggaaaaataaacaaaaataaatagttgactgtcgacattgattatgtgaaagcctaaaacatgagctacctctttttacgttcaaagattattttctctccccaggcaatggaagtgactgggattgacggtaactaccgtatcacctgcgaacgcgttcttcgcctcttgcgaaaccacaatgacagtgtgttggccgtgttggaggcgttcgtctacgatccggtgcttaactggcgtcttacacaagaggccgggacagcgcgacgcgctgcgggcggaacacatcacatgccaaccggcgcactgggtgggggatgggacatttgaagcacacatattttgaaactggcaaaaaaaactgatttttttacttgtttccttccaaactctaataattttcacttaaagcggctcccactgaggacaattccgatgcgacgcacttaaacccgcaggacaggtatgactgacccacccaatgccaatcatttaactttaacaatttcagacatgtcttccaacacccacacagagggcttggcaccagtcgcggggacagcgaagcgatcagccgagtccgtgccaaattgtgcgggcgcgacttcaacccgtgtgtggagatctccgtgcaggaacaggtggttatacattcataactctaccgatgcgtataattcgcaggccgatcggctgattgagcaagccacgctgaatgataatctgtgccagtgttatgtcgggtggtgcccgttttggtga

SEQ ID NO: 54610 - DNA, 435 bp, Heterodera glycines
tccgaaattgatcaatcgacgtttccaattcgtccaaatcccgtggcgacaatggctgggccttaaatttatttttgattttcaaaaaacccaaataaaaatgcacttttgtaaaagtttgtatttttgcaaattttcccaaggtttgacaaatgatttgcggccattcagctgagtaacacctctccaattggtccgcatgaatcagaacttttcttattgagttccccgtcatgtcctttttcctgaacgcttccctccaggccctgatgctccggaaaaattcgttcgcaatttccgcgttttccgtcgatgcttcgagctctttgatcagagcatttccaatgccctggaagacgtgaaaaggcgccagaattattcgttcaaactcaattgattgtaaaagtgactcatcgacagttcccatggtgagcg

SEQ ID NO: 54611 - DNA, 1775 bp, Heterodera glycines
  unsure (1)..(1775): unsure at all n locations
tcgacccattcatttctgatttgccaacttcgtccaattcttttaccgttcaaaatgtgaatatttcgtcgcccaaaggtaagaaaaattgctagtcacgttaaaaacccagcaaatagctttacacactattagttaatttttttgaaaaatggaatggaaaaggatatattacaattattgctcagtgttgaattttggttcgtggcttgcgattgacccaaatggacattaatccgtgatcagaaaatcgaaacccatccgaaaagtctttatttttaactactacttttgttaaaaagggttgtgtgaaaaatttaaaaaatggttattccgaagatagattttcctggaatcaccgtagaaatatttaattttccttttttttttgcgcagtgctaaacagattccgagtgccctctccaacgacagtcggacttgacgaggatgtctctgccccggtgattgcagcggcgacaccctcccccggagagaatgtcctgccgaggccttcgcttccaattccatcgccgccccttcggcctctttccccttctccgcccgcttcaccgccacaacaactgaaaagaaaggacgccgacgtccattcgcccgaagggtcggaaagtcgacgcgcgaaagtggcgcgagtggagtcgccggatgtactcaaattctttttcatcgacgcttatgaggacgccttcagaaatccgggcacgaatttgcctaagttttcgaattatctgtcccttttttacaggcaaagtttatttgtttggtcgggcgaaggaggaacccagcggcactttctcgagttgctgtttggcgctcaaagacatttcacggaaattgtttttcattaaacgggaaaaggtcgcctattcctttgcgttgtgctaattgtcttttcccattaattgtaagattctttcctcgggtattccggcgacggtggaagacttggaaaacgaagtgcgaacggtgttcaagacgaaattcggaattcgcaacatcaaatgcaaaccggaagtaaatgatggacataaaacacatttctcaataatatttgtcgatttgtttagctaattaccaagaaatttatctgcgctgatgaatctgtgcccaaagagtgccaaacgatggaagtttgtgtaaatgtgagcaaacaatttaaatgtgtgcaaaaatccaatgtttggccatttcagtggaaccccgaacgaatntccgtccgacctttctggtgattgctttagtcatgtgatgaacacgacggcaacggcattcgaacgactgatggtcgaatgtgaaatatacggaccatgttggcttagcgtaagaaacgcgggtataaacaaacattcaaattggttagacttattctacaaaagttccgcttctaagttctcgctgagtcgccagtttcgtactgtccattggaatacaatgtcgacatgagcgaaatgaagtcaatctcaatggcactgaactgtgccgatccgctccctccaataagcattatttctgtgaatgttttgacggcattgaacccggaaaccaaagagagtcaagtcggtcgtcccgttttggagtttttttgtttggtcaattttccaccttttcagatcgtaatggtttctctcattgagcacaattgtaacttggaaaagagcaccaatttcgacgcaaaaatgatgctgaacaaacgcttttgtgtggttgcgaagcttaaaaaggggctgaccttaccattcgattggacagccaattga

SEQ ID NO: 54612 - DNA, 851 bp, Heterodera glycines
atgctcaagcggatcggcgaggacaaaaacttggcgatcgaagtcaatgggtaaggaaacaataccaaattatgctaattttcttcccattcagatgctattggcacatcccggagagggagggagagtctgggcaaaccatgaaagtgaaagacttcaacagtctgtacccgtccaggtaaaaaagaaaataaaataatcaataattaaggaacatgttcaccaactcccccgtcggtcatccaaaagtcatcctaatggacaagaacgtccactggacagcgcctgaacacattgtcgacgaaggcgtgaaaatggagagaatcatcaagtgcttcgttgtgcctccacgccattgcctctacgacattccggtcatcccaatgcggtggaacaacaggaccctcttctcactctgcctgaagtgcgcggagacgtaccccaagggtctggtggacgctgactacaactgcccgcactttgaagacgccgaaaggggtaactgtcgagtttgcttgcccataattttatattttccttcgcaggattctcgaccacaatcccgcacatcgagctggaggcagcgctgcggttattactagggtagacatatataaatacgtttttttttggattctcaatgctctaattagtaggaaaacattttcttttttgtgtttgcgaacaaaagttgggatttttatattttttggatttttcttcatattacatatatgtacatattttggactttttcgtacatatttcgcaatttttcgtatatatttttattttttgcatattttgaggattttagagaatttatagaaaattttttgtgaaaaattaaa

SEQ ID NO: 54613 - DNA, 763 bp, Heterodera glycines
atggccggcgacccctcagcacaacagcaacagcagcaaccgaattttcctgcgtcgcgcatttccatttcggttggtttatctgtttccctcaatccattcattcccctactaatttaccccccccccccattttcagtatagtaaaccgtttgagcaacagcagcagacaattatgagccaacaacacgagcaacggcaggccatcatggagaggattcggcgccggctgctctccgagctgtccttaatgtaagcggccaagccgctaccggaagacatcgaacattgcgcagatacaacgcgcatggattgacggacgtcggctggcttctgcttggttggaaggagcaaatgctgataaggtgatcagcatttggacggttccgggggggcataactttcaaattgctttttggtggtcaacagcgaataattttttccgccctttttcagccgattgaccggcgtggtcgcccagtcgtgcgtgatgggcggaccaaacgccaaatttcgaggacggaaattggtgctgtagttcgatcgcgacgcatcacagcttttgtccgtcaaggaatgggagcggaatgatgggcgtcccagcgaattggcacgggcgcaaccgggtgaccgcgtgttgctacaacgactgacacgcaaagcaagggcgcggccgtcacttcgctcgacaacacctttttattttcttgctcatttggacagttttccgtgttgcagatattggcgcacaccggaaatggta

SEQ ID NO: 54614 - DNA, 62 bp, Heterodera glycines
caaatggctctttgatggacaaaatgaggcaaattggacaaatggctaacggaacaaaacga

SEQ ID NO: 54615 - DNA, 885 bp, Heterodera glycines
atgagagtgccaaggtccaatgcgcagtacatctttctgatgcgtgcgcccagcgatatgttgagcattcgtaatttggccagccaaatgtttcctcgcgagcaagggtttctgatggacgcgtataagcaggcgtgtgccgatccgtacgggtatctgttggtgaccctacacgcaaacacagacaacctcttacgactgaggacaaacattttcccagacgacgaagaaaagattgtctttgtacccaaaaatggttaagaagcaaatggttggacagcgggtgttggacaactacgagtatctgaagtcccttgggaggacgacatctcacaagaagaggcgtcatttgttgagcagtgcaggttgtgaggagctgctgactctggtggagatttgcttaaacctacttaacggatccttctgtttgacgcggaaacagaaacaaaaattgttgccttttgctaacaccattcgacggttggcacgcgtgagaagtgagcagagtgcgagaaagctgatcttacaacaacaacaaccacagcaggagggaggttcactgtttgcccctttgttggcacctatactgttagaggcagcacgttatctgctacgcaaagatggccaataagctcattcttctgccttttgagcattaccgaggattagttgcagcgagagagggtgtcggcgttgcgaaaggagacgaggatgtggcagggcagacaaatttgggattcgtcaaacgacagctggagaccgcgaagaggaaacggacagcgaatgtcagcgaacgaaatgtattgtacaaccagcagctgaggagatatttgaagctgagaaaggaggtgaaggacaggcccctcaaggtacagctaagcaacg

SEQ ID NO: 54616 - DNA, 875 bp, Heterodera glycines
atgccgtactgttcaggcaaattgactgtgatggcaccggtgccggtggaatttgaaacggccctttgcgacgcgacgtgccgcgaaggggacacgctgaagctgaaggcggtgcttcttggcgagccgatgcccgacgtcacctggttcatcaacggcaagaagttggaagagtctcagaacatcaaaattcacgccgacgccggcacgtacacagtgacaataaaggtactaaggggcagacgaattgtgacagaatgccaacaaacaatttattgtgccaaggacatcaccatcgactactcggggctggtcgtgtgcgaggcgctcaatgagttcggcaaggcgtcgtcgcaggcgacgctgaaggtgctgccgcgcggggagccgccggactttttggaatggctgagtaatgttagggcccgtcccggctcacaggttggaggaggggaagcatgcatatttgaaatattcattttatttttattctctgcctcataggtgcaccacaaagtcgtgtacacgggcgacccgcgtccgtccatcgcttggttcatcaacgggcacgaggtgcgcgactcgagcgaaataagcatccaaacggacagcaacacgtccgcgctggtgatcaacagcttcagcccggacaaacacgtgggagagatcatttgcaaggcggagaatgacgcggggtgagaagcattttgaaatggagggaaaagccattaaatggtaaataatgagttaatgactaatgcataaatgaaaataagtttaaaattaaaattttagtcattttatcaaaatctcacataaaatttaaaagatttctcggaagtgtgaattggaaaatcagaacacttttctttaaa

SEQ ID NO: 54617 - DNA, 1165 bp, Heterodera glycines
cagtacagtcagctgtttggcactgacgacacttcggtgccaacagtcgtctcatccaatggcattttgactcaatcggcgccaatgtttggcaccgccggtgacgccaatcaaacgttgaccaccgatggaatttcaattgcaacaaccgcaacgggcaatgccgatgactgcgccaccggcgattcgtcgtcgtcgaccccctctctgcccgacgacagttgcggcgacgcgcgacgaccgtcggcgatggcaaaacgcgtcgacgacggcccttccgcgccctataaaatgggctatttcggcgcaacatcgtgggcaatttcaaattcacttttgtgggcttttcaagccaagactttccaaaatatttaattgatttcccccccccccccattttcagttatgtcattggcaatatcatcggttccggcattttcatcactccgtccaccgtcgtccgttgcactgattcggtggcactttccctcttagtttgggtggtcggtgctctgatcgcttttctcggttccctctgttacattgagcttggcaccagcataagagaagcgggttgtgactttgcctacatttgctacgtgaaatggtgattaaatgccgggcccatttattcacaataattcatttattttttattcaattattattatttttacatttttcattttattttctattttccctctcttcccccaggcattccattgccttctctttcatgtgggtgtccgttctgatgacttaccccgccacaattgccgtcatcgccgaaacgttcggccaatatttaatggagggccttcgccacttttacgccgtccccgccgaatgggcgcccgtggcacagaaatgttttggcattgcgcttctctgtaggtgctaatttcaaagcaaaccaaaggcatttgccgacaattctcccagggcttatcacttggatgaattttttcgcaattggcaaattcgccgcacgttttcaaattgcggcaacagtggccaaattggtgcgcatttccatttttgggaaatatttattttttattaatttaatttatattaataatttaattgatttccaattcacagctctcttgcgctttaattattgtgatgggcttttatcatttgttcttcaaaggggcgg

SEQ ID NO: 54618 - DNA, 358 bp, Heterodera glycines
atgacacaatttttatttttaaataatttaattattattttcaaacatttgagcagtccgaccacacatccttgggcaaatgctggtgagcaaccgtattgacagcacaaaatcacacaaaacattaaacagacggacagaaatgaaaaagttgacattcttttaaaataagaaaataataatttttatttttttaaaattaaaaagatattttttgccaggaaattggaatgagacagtccgtcatcattgcctgaatattaatgcatatagaatttgccacgtaatccatcgatttgacattaggaaatggcatttgtattaattttttccataagtttaaaaaatgaacaataaa

SEQ ID NO: 54619 - DNA, 687 bp, Heterodera glycines
atgacaattgaaactttgagcatagtttatgtgaaaagttttcaaaaatttatcgtgacttcaatcccgcggaatcccgcgggattggcaaaatggtcgggagggatcccgattcgggatcccgatgaaatcccgatcccgagcaatcccgatgaatttaaaaaatcgctcgggacggatcccgaggtcggtatcccgaatttaatcccgcgggatcccgaagaaatcccgcaggatccctatcccgtccggtctctaatttaaaacctccaaaaaaaaaattcaatttctattcttttataaaatgacatgacaatttcttagttttttttttttgcttttaaattgctctttttgtggcacggtttttgaaaaaaactttttgggaacattggggggagggggagcggcagtgccgataggcgctgccggaaaaaaaatttgcaattttgagtgcgatttgttaacaaattttgtcaaaaaatgattttgactgagggttttttgaaaaaaaatgtttaagatttgaagaaaaagaacattttgccaaatatacctaatttttcaaaaaatcatgcgtttttgtcacttttttatcaaaagaccacaaaaatcctcaaatttctcaaaaggtgttgtgactggggagagtagtccactcggcttggaatattttttttaattaaa

SEQ ID NO: 54620 - DNA, 1155 bp, Heterodera glycines
atggaacaagaggcattttacacggtgggggagttcgacagaagcaaaattgaccttaacaagccggcgatgactgtcgaagaatacatgcaacaggtgggcggagggattaggagttgacttttgtacgaattgtataacactgaataaagagagaggaacggagttgggcaaacggtgtaccgttttgtctctcatagcgtccgccttttctaaaaaatatcaaaaaggcctttttggcaagaacaagctgaaaaagttgctgatttgcaactactataatttttgctgatataggtttgccgaatttattattgtttccgtttttgtattatttttgttcggcttttgcggcatggaaatttatttgtcggtagcaaatgcgatcattgtcagcttgtttgttggctttttataatgtttttattccttcccaaaggttgtcgttggccgtgagcttttgcccgacgtcgccgtcgcttctcccgaagtgctcaaacggttcagcgccactcccttaagaaagtctctcacaaatcttccgggcatttgcgatgactcacgaaccttcacctccaggttcgggccgaacaaggagtggtgtgtagcgaaggtgcgtttgaatggctcagaatgcttcaacaatggtgggggtgcgtgaaaactcacagcccggggatacattaaattggacacattaaagtgaacatattaaattggcacccatcccggaacatcgtatctttttcgaaaagtattgtggcaaactgttggttgattttaaccatttgcatttttctaaaaatatttcatgcttaattagtaattatcggttggccttttttcagagcaacgaattctctcagagcagatccgagtttgagtgcgtcaaagtgcctgatgatgaccccctcaaagacgtccaattgccccccatggtgaatggtaatgccctctttggtcattgtccctttctttcagaatgattggatgcgttggtgccaagtgtgtttcgagagccgattggagggattcgcaattgcgcctgagaatgagaaacgcttcgcccaccacaaaggcactccgccgacggtgtcactgatcacgagcctcaaagaccaccaagtgaacgagctgatcatccaccaaataaag

SEQ ID NO: 54621 - DNA, 570 bp, Heterodera glycines
atgacggtcggaggtggcactgatcaggagaaggagacgaagttggcggccggaagtggcattgacccggagaaggagacgaagttggcggccggaagtgccacagatgcggagaaggcgaagaagatgacggccggaggaggcacagaggctgggaaaggggagatgacggtcggaggtggcactgatcaggagaaggagacgaagttggcggccggaagtggcattgacccggagaaggcgaagatgacggtcggaggtggcactgatcaggagaaggagacgaagttggcggccggaggtggcattgacccggaggagacgaagttggcggccggaagtggcattgacccggagaaggcgaagaagatgacggtcggaggaggcacagaggctgggaaaggggagatgacggccggaagtggcattgacccggagaaggagacaaagttggcctccggaagtggcacagatgcggagaaggcgaagaaacagtggcccagaagccagccgttggaaaaagtgaaacgtcgcattatactacgaaacattgaaggagccgacttatga

SEQ ID NO: 54622 - DNA, 527 bp, Heterodera glycines
atgattgcgttaaggtacacttacgacaaggaattgggccggtgtttcatgaagtcggccatctccgattcatacaaacactcgggaatgacttccggactgaaggcgaacactcacgcgggacagggcgcactgctgaggaacattcgaattgcgggaggaactgcgtcagctgttgtgcacttgcccaacacggaggactgcatgcagtactgcacaggtgggcagagggtcaaactggggaagagaggggaggggagcgaacggaggggtaattgggtgccaatgccatcgttagttgggcaaagcatttgcattttcaattggttttttcaatgatacattaaatgctaaaatccattccccttatagcctatggcattttctcgtggagtcctttgcctccctcatcaacaacaacaacggcttcgtccaacgtcggtcggtcggcctcgtccattgttccgacttcctctcaacagcaacaacaaggcaagtggccaaatgccaattgggccatccgcgcc

SEQ ID NO: 54623 - DNA, 688 bp, Heterodera glycines
atgaaaagtggaagtgcaagtgcaaattcggcaattcctcacaacccatgccatttccatttccccttggtgaaggtgagctgttcagttctgcatgagaccgaacacttcccgagactgaggcccaaaaacacttcacatagttgaggctcaagaattttttcaacaatttgttattcacttaaaaaatttaaaaacaaaaaattactattttattttcaattattaaatataattaccatgctgatgggaacagtggtcattagtacacagaagccaaatggtttttaccaatgagaaaatattaaataaaattaaatttttttttgtcctttttaggtccaaccactgcaaaatccaccatcattcatagtaatgaataaaatcagttttataaatttcctttgtatgcagaatttttaatttgttatgtattttttagtttcattcaatgggacaaaatcaagtaaagaattttcttaattttattttatgaaaattttcatttacttttaaatcagaaaatgggacttcaaaatcaggtaactgtacgtacataaagcagacccgtgcatcagcaggccttacaacgcgttcatagttttggcccgagccaaatgagttcgggccggtcagggctctttagaagcgggcttttgcctaaaatctcgaggctaaaatttcaaaa

SEQ ID NO: 54624 - DNA, 292 bp, Heterodera glycines
atgactttagtattttttgtaattatttggcaattttttcaattttcttttaatcaatggacaaaatgtgccaagatttgcttcatggccatttttaaacaagtaaaaaatgagaattaatataaaacattatgtgcagtttgttcatgtttttagcagtgatcatcttccgcttcttcttcttcctggaggccaagcggcacaaatggcacatttattggcatttccaaatttgtgatcattttgccctccgtttccaccgaaaatataaaatgaaattcgccctaaatta

SEQ ID NO: 54625 - DNA, 1956 bp, Heterodera glycines
atgggcgaactgttgcgcagaaaagtgcagcaaaatggggagaatgaattgtgggcaaaaattggcaaaaagatggacgccggagaaatgattcccatggtgggcgaagtccaaccttttttttaataaatatttattcaaatatgttattaaaaattttatttattatactactcgtataaaatatggtgcgtttaatctgcaaaatttcattaaatttcaaaaagttatgactaatgaaattcaaaaaattttggttttcaagtttggttgctttagcgtaaaattataagcaaaattttgtagtttttttaaataacggcatagcacctaaaaatacgccttaaatggttgcaaaacaataaattttctattttttttaaatcatcatattttaaggaaaacctcattttatttcgtaaagaaatttttcaaataccttttttaatctggcatattaaaaccaaaaaatgcactcactaatttactaattaatgccataatttgtaaattcactcactaatttattaattaatgccatcattagtgtgttttcgcctttgtcagagaatatgccgtgaattgatttacgcgtctgtccatgaacgctgtcccaacagttggggcttcgtcgtggagggctttccgcgcacgttggcccaggccgaggacatcgaggcacagctgggccacattgacttggcactgctcatcgactgcacggaacagttctgcaaggacgcgttgcgaaagcgttacacgcgggacaaggaggagggagcggagagggcgggtaattggggaaaaaaggggaaaagccaaaagactaatagccctaattgacgaacaattagccaattaacagcggataatgaagaaaaaaggggaaagccaaaagactaatagccctaattgacaaacaatagccaattaacaaacgaccgattattggagtataaaacccctaattgtgcaaccaattagcaatttgaaatgttgctcaaattaacatccagggaacgcccttctgatcaaatgccatttgcgcctatgtccacatcggttaaaaaaatgttttttttttcaaaagtagctaacctaaattaaaatattgttttacaaatttaaaatatttgaattaataattattttaaaaattctataagaatgcgagtatcgaatgttatcttttcatataacttaatgctttttaactaggattgaaaagaaattggaaccgattttggacatgaacttaaagcttatggtcctcccaaataatgcgataatgaatcgaaactctgccttagattaattttggaattaaattcggtcattgaatgtgaatcaaaaatgaaaaaaaagagacggggtggacaatcaagagtaattagtgaaagaatccaaccccaaaatttgaccgttttatttcttctaatagtcaatttgaaggatttctagtccaataaattttgaaatttttgaattttattatgttgtaataagcatgtttatttatttttcttgactcttaagatgatgacgagggcgtggtccgaattcgcatggcccagttcaaggcaaacactctgccgatgctcaaacatttggacgaccagggcaaactacgcgtggtacgcttggaaagagcggcacacattggggcggtgtctgaaatggcaccgatgggaaaggtcggtggtctgcggcccagcaaattagccaattaaaaacagcaatttttaattgtttttctttttggaaatcaaattacataaagttgaatttaaacgaaaaaaggactcttaaaattaaactctttttgataaattgtcaaaaattgccatttttagaaatattttatgattggcatacggcagtgccagaaagtgccgttggaagatttttgggtttttgacgaattccccagaagaattacgcataaatatcgccgta

SEQ ID NO: 54626 - DNA, 648 bp, Heterodera glycines
atggcggcgattcatcaaacgcagcaaacaattaatggaataagtacgaaaataatttatatgaattttaaataattaatttgacgtataattttgagtaattgcaaaataataataatgtcaataataatggacagatacacttttataggcttaaaattccttttaagaatgggcaattagtcattttaaaacattttttaggcttattaaatgctttcaacgaaattccgtcaacaattgttggcactgaattcgattgtgcaatttgtcttgatccaattccgagtggcacaagtgtgaagcctttgccagcatgcaatgttaagccaatttagaattttaaaaaatttaaaatttcattttttagcatatttttcatgaagattgcctaagcacttggtattttttgaaaactcaattagattattttcatataattaaattttgacgactcaaacgaacgaatgtttcttatttatttaaggcttcaaggtgggaataattcatgcccaatatgtcgttatgtcataatgaatatgccagccgaacgtcaacaaaatggttaataggggagaacaattatatcaaaagattagctaatgaattaattagctgctaattccaaggtaaaattaaacaaataaa

SEQ ID NO: 54627 - DNA, 722 bp, Heterodera glycines
atgaataaacttcatttgatcctgaaaaagatctcagcaaatgaaccaatcaaagtaaaaataattatttaaaaaatgattgaaatttttttattaaagaattcttcccattcaattgaatattttgcaaataatcacgaatacaatttgatcaaataccgtatcctatcaatttatcacaatgacccaccgttgagccaactgttaaacaaactaattatttctgtaatgagcgtgataaatggaatagaaaaaggtaaaattgtagtcaatcttataataatataaaataagaattttttttaaattcagataaaattgatggatttgggataaaaattttgaaacagcgcttaaaatttgtaattaattttgttgcaaaacgtctccaaatccaattcgacgaacgaagtaacttcgatttttggtcagaaaatggtcaaatttatctgttgcgagagatgagtcattttttggaaaaggtttttttattgtttattttttattgatttaaataaataattgcttttttaaaattaatttaggtcaagatatgcagtcaaaatgacaataaatgctggcataattgcacgaaataccatgaaaatgacaaaaaatttaacgagaaaaagcggacaaagcaatttttgcaatttgtggcaaaaacaattgaaatttgcgaggatggcacggcaaagagacgaaaacgtgcaataaattaa

SEQ ID NO: 54628 - DNA, 1078 bp, Heterodera glycines
atgcatgtctccggggacgcaaaagtactaaacagtttgtgctcactggaaaccaatgccttttcaatgcaattggctgttattttgtgttttgttatgatggttggtaatgagtgttttatttgatttatttaattgagaattgtgaaaaggaacaaaaatattcaaaaattataattattagggctgtcaaaaatatgcaaatgcatatttttcctggattctacgtagtctaattactaggaaaaacagcttctttttggtatttgcttttatttgcatatttttgcatattttgccatttttcgtcaaatattttacgatttgaataccccataagaaaaaaaatatgcatattttgcgactttatgcatatttggtgcatattgcacgaatttatttgtatatttttgcgcatattttggccatttttcgtgtatattttttacagccctgataattatgatataggtgtgtggccctatgaaaatggcttgttttatgatgtatcgaattttttccaaaattaattttgagatttttacaaattcatttgttttaacgatgaggaacatttggatctatattatatttattattttcaagtttttaattataaatttccaaatttttacagtgaaacttgggacccaacactttgccgaatggggctgtgacccagcgccgataaataaaacatacgaaggctgtcgtcccatgtaccctgatcattatgaagatgaaaatgtttggaagtgccattgcgaactctgcgacattaaaagtcgtgaaatgtgcaacgaacaccacggttttgaggaattctacaagaagttcaactcgacgaaaaagtaagaacacaatgcaatatgatacgtggaggctaattctgagatcggcaacaatctgaccaatcataaaaacggttctgctggttgatttatttacgcattcaattttctaatctttactgtagatcatcaaccttggaatttactcatataaatttgtaggcaattgaattttttgatccaataattggtaataattttctttaaattatttacaattaaataaa

SEQ ID NO: 54629 - DNA, 483 bp, Heterodera glycines
atgcgcgatttcaatggtcaaaagatggacgagaacagcccaattatggacgaacggtaatcacacaattcataaagtttaaagcatttttggaattaatcctttgaaaaaagggaaaaaggcggagagttcagcccaggaaattttaattgtaaaacaatttacaattttatcgggcagttttattttactttatacatatgcacttcagtgaattttctttgcctttaggccgtacgaaatggacatcgaaattgcgtacgactgaagagaatggacagaacgccgtcatcacagccattaaaagaaactaaccaaacaaattaataaccaaattcattatttaatatagaactaattatcacctactaaatagttaattagtgagagagagaccctttttatcactgccactttaatttatttgtaatttactctaaggatggaatcataattattttttattcgctatttataaataaa

SEQ ID NO: 54630 - DNA, 67 bp, Heterodera glycines
ttgatgacaattaatgctttttttaatgtttttgactttaaggacaagtaaaaattttctaagcttt

SEQ ID NO: 54631 - DNA, 383 bp, Heterodera glycines
atggctaaacactccccgcaacaccaccacccaaatcaacggcagaacacgctcgaggagttgggcgagttcgacgagagggactttgtcccacgttctgagatgctcagacagaacagagtaagtgcaagctgacaaagtccggtgaagaattgagtggggttgcctttaacttcccccccccccttctcaatgcttttccgttccgttctttcgccgttcaccggaaaaaaggaaagtggaaaatgtgtcagtgaatcagttcttatacaattttgaccttttgtactacaattcttaatgctacagaactttattttcaatacactgtattactgccgcattttcctttagccgttcaatgccaatgcattttacgcaaa

SEQ ID NO: 54632 - DNA, 654 bp, Heterodera glycines
  unsure (1)..(654): unsure at all n locations
gcagttgcncctgtatgtatctcggaatttcgaaattttcaggatttaaatgccgtattngctaggaggagggttgaaaaaaaaacaaagcccccgagggttctatttttggaaatatagtattggtaatttttgtgatttgagtgtttgtttttgtttagaaacgtgcattctcgttcggctggtacgcctgtaattgaatggttggccgcgcatggggcgcaaaatgtgctgttgcacgccttcagtggcaatgtgaaaaatgctcaaaagggcatcgaaaagggcttcttcttttccattcctccatcctttactctctcaaaagaaaaggcagtgaaagaatcactaagaaatataaaaacaacattgaaaaagtttcaggaagcactgatccagaaaatcccgttgagtcaactttgtttagagagcgattcgcccgtgcttgggccagttgccgaggagcgaaatgaacccaaaaacattaaactcagtgccgagttcatcgccagaattaagaatgtcggaatttactcttttttttacttttttaaattaatttaaaaattgaaaggtttccacggacgaagttatccgagtgacaactgagaatgcgaagaaattgttttcgaaattgaaaatttgatggaatac

SEQ ID NO: 54633 - DNA, 662 bp, Heterodera glycines
aaacaaaaaaatcgattttttcaagtgtccgtttggggtactcaaacaattatggggagcaaaaatccaacgcagaattaaagtacaggctatagggaagctattccggaaggattcggtctccccataaatctgggcgcatcggctcggggggactgccccgaaaacaaaaaaatcgattttttcaagtgtccgtttggggtactcaaacaattatggggagcaaaaatccaacgcagaattaaagtacaggctatagggaagctattcccgaaggattcggtctccccataaatctgggcgcatcggttcggggggactgccccgaaaacaaaaaaatcgattttttcaagtgtccgtttggggtactcaaacaattatggggagcaaaaatccaacgcagaattaaagtacaggctatagggaagctattcccgaaggattcggtctccccataaatctgggcgcatcggttcggggggactgccccgaaaacaaaaataaatcgattttttcaagtgtccgtttggggtactcaaacaattatggggagcaaaaatccaacgcagaattaaagtacaggctatagtgaagctattccggaaggattcggtctccccataaatctgggcgcatcggttcagggggactgccccgaaaac

SEQ ID NO: 54634 - DNA, 1499 bp, Heterodera glycines
  unsure (1)..(1499): unsure at all n locations
atgcatcgcgaaatccgcgaaacaatacatatgcaactgcacagatgcagtgacagttggtgtggtcctagcgacccaatttacgggcggtgcaagaaggggttcccagccccttactcaaaatgtacgattttgcgcccggacaggcccgcaatgtatttccggccttcaccaactgatggtggtgcccaattagaggtaaacggcctgatatacgacaactcacatgtcgtgccgtataatccttatattctgctgcgttaccgagtacaccataatgtactgtttgcatatggtaacaaagcaaatattaaatacgcactcaagtacccttttaaaggcccaggacattgttatgtcgagtgcaaacaagagtccggcaataaaatcggaattgatgagccggctcaatatgccaagatgaacttccgtggtgcaacggaagcatatgccattgttcattcactgccatttgccaaactttcacatcaggttgtcaaacttagcatccatatgcctaatcaacaaccgattgtgtacagggcttttcagctggtgagcaaagctcaacaaatccagcaaggcaaactgccagagacgcaatgttctgcctattggaaacaatggcaaaatgaatggaagcatgatccgaagctcaaggacatgctttttgaaaaagtccctgagcattttatatgggcaaaggacaaatggaacaaaaggaaatataacctaacaaagagaccaccaatcggtcgaattgttcctgtacccccatcggacccggaaaggttcgcgctctattcacttatgcgtcactttcctggagacccagaccatcttaagatggttaatgggttgctttgtacctcattcactgaggctgcaataatgcatggtcttcttgaagacgacaaaatttgggacaaaactctggcggaggcagctctatcgcgctggcctgatcaaatgaggtggctcttcatgagcatcctcgtttatggccagcccagtaatgccgtcgaattatggaacaagtacaaagaccaaatgtactttcctcaaggcattaccacaccggcacaacgccaagcagcagagcttgaagccctagccgacattgattggcggctgcacagctgctttaacttaagctgtgtgcattttagcctgccagacccgccaaactcaattgccaaaaatacaaatgcggcaattaatgagtttttctttggcgatgatgatttgaatttaccgcctggccaaccaaatcctcggcctaagcaaatcactcctccgccactcaacagcgaccaacaaacggtctttgatgctgttgttaaggctattcagtcggacccaagggattcgactgtcccccgccgtttcttcatatacggcgatggtggcacaggaaagacattcctgtttggccaaattattaggcgcttgcgaaaggccccatacacctacaaagtgcttgctacngcatccactgg

SEQ ID NO: 54635 - DNA, 873 bp, Heterodera glycines
atgattaataaaaatattaaaaataatatattttttatccttcctttggaagtttggagtattttatatatttattttcaactgctgaaccccttgacagggataacaaatgccgacagtttggagaacagtttcgacgaatttgcgcaattggtcgttcaaaatgagaaaaaaccaaaggtttgttggaattcgtttaaaccaattaaaacatttaacggtcacagaactgcccacaaatggatgacaatttgttggagaattcacttgcttcactcaaaaagcaattggacggaaacggtggaaaaatgaaaaaataataacggaataattaatgtcccaattaacaaacagagtccaaggtcaataatcttgaaaatcagctgaaggaattgatgcaaaagcaaacggacacttctgagcagcaagaaatggacaaagcgcaactgttggcaaaaattgacgaggtgggagagatatggggacaccggacaaaagggcgacagaaaaagtcgcgactccgttcatttcttttcataaatgaacaaagaaaaactgacaaacatttagaagaagcatcattcattcaatattgtcaagcgattcgcttgcttttaatgttcttttccgtaaattttttattgaaatggttcaaatatcaaccgttaatttaaagaaaaaaaaattggatattttttttacaaatcgttacacgctggcttttgttcttgtccgtaaatttgttgaagtcgttaaaatatgaacgtcaatttaggcgctcgaagtgcagaaaaatgcccagcaaaagacgatggaatatctgaacaaaacgaatgaaagactgaaggcgacgggtaaagaaaaaaaatgaaa

SEQ ID NO: 54636 - DNA, 75 bp, Heterodera glycines
tccaagtggggaattgaacccaggcgaaaaattatgaaaggtagaaagtttaaccactacaccacatgtgcatgt

SEQ ID NO: 54637 - DNA, 456 bp, Heterodera glycines
atgccgggttccgggccgggttggattttcaaaaacgatcgggttccgggcccggcctctcaaaacccggtcaacccggataacccggtcaacccggattttcccaaaaatcgccgggccgggttgccgggcccgggaaaacccggtacccggcccggcccggtccggactctagaaaatacattaaacacaaaggttgtattctctctcctattcaaaacgaataagtgataaagatagacaacggaaggaaaggcgagagaacgcaaagagtgttgccccaggagagaaaaagcgagaacagagaagcaaagacaaggagtgtgcacgttagaagaagaggaaagtgagacagtttagcagacacttcacaaaaccccttgggggaccacgaaaagcgaccgaatcattgtgaaacgacgaacgcaacgcaacgcaaggcatagagacaataaa

SEQ ID NO: 54638 - DNA, 130 bp, Heterodera glycines
atgccttccgctcgaacttttgttcgaaattgtgcctctcatccctgccgaaaatgccgcaccgaatgcgctctcgtcctgtcggctgctgcacaaacttttgctgccacgtgtcttaaaatggaaagag

SEQ ID NO: 54639 - DNA, 1077 bp, Heterodera glycines
atgaatgaaatattccccttggatatgcgtggattcggaaagggcgtcgccaatttggccatttacggtaccgcgtgcgctctcgaccaaatgtttcctgtaattagtttttttttgccaatttttcatttctattttattttcgcagatttttctcaaccaaattggccaaccgcagacttttgccatttttgcgctgatcggtttttgttcactgtttttcacgtggcgatgtttgcccgaaacgcatggcaaatcattggaggaattggagaaacaattcaaattaggcgattggaatgcgctgaaaaagcgccggcaaattcacaaaacttacgacgcagcgatcagaacagcccaaaatggatcaatcaataatattcaaatcaattgagaacagcagggtctcctccgtattttggccatttattataataatgaattattttggtgtttttttttgggaaagccgtaatgaatccaaaaaatttaagcaaaattcgaatatttaatgtggcataagatttttgagttattatgattgttagcaattttctcttttttaacataatgtcccaacagaatttatcagtacgttccggtaaaaaggcatttaaaaaattcatcgtttttgaatttacacagaaacaaattaagcagcaaaaaaaaacatgaacaaaattgtcgggagggatcccgatgaatttaacaaatcgctcgggacggatgccgaggttgggatcacgaatttaacaggatcctgaaaaaatcccacgggatcccgatcccgcccggtctctaatctaatgcacttctatgacataaaaatatatattataaaaaaaggacaaaaaactttttcactttaaattaaatctaaccaacatcggcggtgcttgttcagttgccaagtgccaatggaattaagaaagttatcaaaaaaacgagtaattgtttcgaccaaaacaaaggcttctcggactcgcacctgcaaaatttgtctacagttatcgagcgaaaagcttaaaactgttcataagtgaacccaattttcattttttaataatacgcccacta

SEQ ID NO: 54640 - DNA, 267 bp, Heterodera glycines
actaatagagcatctgaagagctttggaatgataccaattatgtttgatttggatgacaaagaaaaaagttatagtccaaaaacatggtggggcccaaccagggtagacacagagtttccatccacttccccgtcccgtttttcccatccacggaaacagggacccccgcagcctgggatggacataaaaacactttaataacatcgaaccggagaagctgtgttggactaaaagaagagttcaatactgtaccacaatccaataaa

SEQ ID NO: 54641 - DNA, 2038 bp, Heterodera glycines
  unsure (1)..(2038): unsure at all n locations
atgggagtatgttgatcagggggagaggggggaatagggcctaacaaaaccatgcgaaatgcacaaaagaatggcctaaaattgtgaaagtattttcagccagaattgccgtcaaactcgagcaaagcactccaagagtcgccgaccctgggcctgaactttgacgtcgtgattgacaaggaccagcaacaaatgcgaaccgtacacctggtgagtgggaaatgcgccggtgccgcccccccccccctcaaataataaaaaaattccaatactcatggtatcattattttttgaaattttggcccaaaaaaggggcaaaatttgtcactttttggctgaaaccctctacattttttttcccttttccggtcccgccgcaatcccccccccctcacctccccgaaaattaaaaaatatatatacttcctgctccgctctttttcttcctcttcctcatttctttttttaacagattgaagatcgcagatcttcgccatcggaggcctttcaagcaaacatcgcgcattcgccagttggagggtaattatgtgaaaattgattaaacaaaatggatactttttcatgattctaattagaaacacataaccataaccacaaaaaaatttttttttccttttctgcctattgttttaaaaagattacgaattttgttaacagtaataagattttttttaaatacacccattttcctttaaaaaatttggaggatttccccgcttcataatcacggccctatttcctcgtgtagtcctctcacccttgattaccatataaaatactgatttatctctaacttttcgggaaaatctgaaaattcttctgtttttgcagcacgccttcgccgtaggcttggcggaaatttcctgcacttcatgaggcgttttcttcgacgccgtggcactacaaacaggtagtccatatgaaaaaatgagtgaaaaggcttgcaaacgaaatttcattacgagattgaaaaaaatcgaaattttgaaaaaaataaaatggataatgaagtgcgctccgcttaaaaccttgtctgctcttcgattgcttgaagaatcggaccctcataagtcaacagacaatttctcattcggttttgatgtgctaaaattgctatattannacaggcaaaaaaagtgcttgagagagtggcttcgtcagtacgaggtctctctttctagaaaaaaatctgtttcagccctgaactcgtatacagaacaattgtaaaaaaaatggcacaaaaacaggttgcacccagacacagcaaaaccagcagcaggccatcagcgccaacaacatccagctcgcgcctatatttagaacaatgtggagaggaaaaatgtttcttgtttaaaaaaatattgtttgcaagcctttaatatggaaaggaagaaaattaaaaagctagaaactaggaaaaactccccaattatagtcaatggctcacggcgatgatggaaaagtttacgacgccccaatggtcggcgtcaccgtcggcctttcaagaagtggcagctctgggggcctcttactttgaagtggctgaaacagaccccttcgacgccaattcgagaagaaactcaattgtcatcactgccggaggtggcacgctggacacactggcaactgactccatcatcattgcccgctgtgccgccaaaaaaattatgcgtgagcaacaaaatagttatttggatagggccaacctccacttgaacatcgtgtccacggtttgttttaactgttgccccaaaaagctttttaacttttttaaatcaagttctgaaacagaaaaatgaaaacagtgcaggtggggaattataaatcccttcccggataggtttaccccgcatcgttgctcttcctgaaaaattttttatcttcggtccaaaacttacaagaaaatttttctccatctgataattttaaactttctttgagctttttttccaagacaaatataaaaatggcaattagtcaaaaaattttttttacaaattttaaaatctcaaataaa

SEQ ID NO: 54642 - DNA, 124 bp, Heterodera glycines
atgggtgcgacgcttttcgccacggcttgttgttgtgcaaaacggcggatggaagcacaggtaaagaatggacaagcaaacaacaaaagtgaagagacctcaattctgatcagtgctgatcaaa

SEQ ID NO: 54643 - DNA, 1053 bp, Heterodera glycines
atggagttgaggggatttaaccccggggaaaagcaagaagtgggcgtgttcttctacaaccaggcaattggctaccacgacctcagtgagtggtgacaaaagctcaaacattgtaaaaaaaataattaattattactttaaataatttattagccaaaaagtgtcgacttttgttctttcgtttgaatttaaaaatattttagtatgtaaaaaatcaattaatgaaagtaaattactgtttaaaatcttagttggcaagaatgtgctgaagattatattgaacaaccaaaacatcagcttaagcagcacttatgtgagttttagcttggtatttacttgtaccatattcttactaaatgtgcttaattactttatcaatatgactttagcggtgcttaaaaatgggtttcaaatttatatttccaataaaggctccactttatatgatataagcttgcactaacaatttttaatgtgtactttgcattaatttttgttataattaaatttgagtccgcttttcgacaaggcgctcaaatttgtcatgaatatttatttagccaaaacaatggggcattgatgtacaagaagacaatcgtacaatgcatggagctctaagagcgaataccgtactgaacttcacaattacggtgaaggcgatcagcgattttgagttgattttgagcaggaagggcaaaaaagacgcggaagaaaaagcacttttaaagcatttattcaaacaaattatggtctcggaacaaaaacagcctttgcccgcgtgggccactcaatacgttacggtaagtgttactgtaacaaatcagttgaagttattaagaaaaatttaaaaaatatttaagataacttacaaagggatggcaactccaaaagcgcaagtgttttgtgtgccggaaaatcgttgtaccatgaaaaatggagaaatggcgtacgaatatgtttttaataaagcaaattccaccaattaatagcaattaaattatgttatcgtttttttcattttcattccctaaaattgcacattttgaaatttga

SEQ ID NO: 54644 - DNA, 1873 bp, Heterodera glycines; identical to SEQ ID NO: 23953

SEQ ID NO: 54645 - DNA, 542 bp, Heterodera glycines
atgactttttattcgaagcatgtggcaatatcaataaaaacattcatgaatttaaaagtttatataagcagaaatgacttttttgtcggtgttcgttacctaaaaagtaattataaaaatatttaatactttaattcaatttttgattgaatgttgataaaaataaaataaaattattcttaaaactcgtcattcttaagactgaaaatccgagaaatagtttatcgtttgttgtagaagttgagcgggaccgcaaattttggcaaatccgggaccggcacttgcatggacaaatttattaatttcaaaataattttggatttttttatctattatctttgaattcaattaaattttaatcagctatgctgaatgttttaaaattaaaaatttaatcatacttttcgcaaaagttgataaggttttttttttaaataaaaccaaaatgcttcagacataagatttgcacatcaaaaaatttctttaaaatctatttaattttattttatttagcctaaattaaatgataactatatgtaaaa

SEQ ID NO: 54646 - DNA, 313 bp, Heterodera glycines
tcggggtgtccgggggcttcttacaccggacacacggttgaaaatattgtttcgacctttaaattcggacgtgaaattgaactgaacgagtttcgaaaaaatcgtcgtgcattttatgaaccggaaatattttgcggtttaaatttcaagcggggtaaaagcatgacagcgttaattttctggaccgataaagtcgtaattacgggaactaaaaacaattctgaaattgaggaaatgtatcatcatattctcccctatttgaaaattgctcaaaagaatttaatgagacgataaaaattttttatttattgag

SEQ ID NO: 54647 - DNA, 2398 bp, Heterodera glycines
  unsure (1)..(2398): unsure at all n locations
aagtgaatggcgatgcaattagtttggaaaatgatggacaatttgatggaaacagtgaaacgatcactgatcaacaacaacagcttaaggtgggcggaagaaaagctaacagaagaaagaattgcagaaaaattgaattaatgtgagacaaaagcgattttgttaatttaaattcaggaatttcatgaaaagtttgccaaattggaaacggaattgaaaatggccaaattggaactggaaaatgtgagtttgctataaaaatttgagtaaattataaatgccaaaattttctaattatttttagaaggcactaaagttaaagcaccaggaaatgataggcgaacagaaggcattgaaggaaaaagtggccaaaattgaacagaaaaacggtatggtaaaatgaaaataaataaagaaaaatatatttttaacaggatcattttttacgaaaagaatcataaaaatgtttaaatttagattttaaaattaaaatgtcatcattcacgacttcttcatcggccgacgaattttctcctcttcaacgtaaaaaatttgttaaaatgcataattaaaatacaataataaaaacatttttcaataattaaatttgctaaaattaattttttaaaaattaatttttcattttcagcaatttttccaaatctgagcacatcggaggaaatgagtgttctgattgcccgaattgctgagctgaatcgagcgaaaacaacggagccatctgtcgcaagttgtgaagtgtttggacaagacggatacggtagggaattttgtataattgagtggatacagtatgaaaattatacattaaaagaaatggttttgaaatttattaatcaaataaagcgaaaaatttgggccctattgctgcagttcacaggacaataataaaagaaatggcctaaaattatttgaacacttgaaactatagcattttatagaagcaccacccaaattaacattctttgtatcatttatagctccaagagtccttttattctgtaaatttcataaaatttgttttgttcaaaaaaagtaatggccaaaaatatttagaaaataacttttttatttaaaatagagccaaaaattattattttaaattttatttcataaattttattttgaggaatgaatgatgatcagttcagtctggaggaagaagaagaaggaaaagaacagcaagaagacaggaaaactccgacaaaagatggtaatatacaaatattagaagacattttcagctataatttgctaacttaacgacaatttaaaaaaataattgaaaattgcttcaaatttcagtttcggaagatcatttgaaagcaattttggagagaattggtgaaatggagaagcagcaacaacagcagacaaaaggcgagggcaatttaacgaaaatgaaatttttgggcttttctttggtaactgcgcaattggacatttttcgaatcctttaattattgagaacattttgactggcaacagcagaattaatacaatcagagaaaatcttaaaactcgaccgattctgcgaaaaaatgccaaaaccataggaatataattattaaatttattttattttcatttaaataaataaataattaattgttttctattttaagctgctgaggaacggttcttacaattgcaaaatgatcagaagaaaattttggaaaaaatcagtgaattggagaatcagacaaagaaaaaggtgaatgaattggaagagaaaaataaagtaaaaatattttacggtaaaaataatttttaatttatttaataaattattatataatattattaaaaaatcgaattatttactttcaggggtttttaaaattccaagaaaattgttggaatgccttcgcttgtcacgaggacatcgaaatcagtggtgacaaaagtctcattgtccagaatatgggaaattataatggtatttntaaaatttacataaaaattcaatttcccttaaaaaggttggcgctccgtcttcgctaaatatccgattgtgctgaataagcatttgtccgactttttttactacgaaatttcagttatgaaaaaagagaagtaagcgaattttggtataaaaagtgaaatattttaaaatttatttctttattcagttggggcttcatcttcggattcgctgttaaacagcagacaaaattggatgaaacaattctacttgaaaagggcacttatgcatttcacagtgatggcgaagcatttgacagtgatggcgaactttggattaacggagaaggaaagggaagaaatggcaaatattcctacggtgttggcgataccgtaggaattggcgtcaattcggccactcgacagatcattttcaccaaaaatggacttcgtttgg

SEQ ID NO: 54648 - DNA, 612 bp, Heterodera glycines
  unsure (1)..(612): unsure at all n locations
atgccgtggccattgtccgcggttgcgcttcatcggtttagtgctttggcattgggcggtcgggcaaggtccgctaatgaccaccagcagcagcagcagcacaacgggttgcgggagaaagtgggccaaggccgggcacaatttggggaccgggaaaggcacgccgaactcggcaagaagttcagtctgttgaagaagtcgactagcaatgacggagcagcncatgggatggtcaacttttgtgttatctatcgaccatttctcgtgttcggctcgcaatcagtggacattcttttgttcatcagggtaattaattaattattaattgagcaattaatttttgatttttggcactttttcactctccagggccttttggaaggtcatttcaatgcaaaaacaatggacgaatatttggagaatggcaagcaaactgagaccaattcgtacttgttgaccactcatttgtcacttcgaaagctgaccattcaattgctgacagtgggagaacattttggatacaaatttcaatgtgaagaattaagaaaatgatgaaaactcataattgtaggctgttaaatttaatatgagttatctccggattttttgcta

SEQ ID NO: 54649 - DNA, 411 bp, Heterodera glycines
atgttcctttcatttccaactgatcaccggcagcagttgttcccattcgtttctttgctttcccccggtgatcaaattgatgcaaattttggaccaaactttctctttgcgaacacataaataaggaagagacgaagaacgatcagacaaatttatcatgctcttttttatgattttcgaatatcatttcacttttctcgttaaacagcttttttattccagggacacaaaggaattccgcccttcgatacaaaaattgcaagtttatattagcgataaattgaaggactaaaaagttcacaaatggtcaaatatggacaaatatatggattagaaacctcaaaattccaaaatattcaatttttgcttaaacaaacataaaaaattccattaaactaaaacaaaaataaa

SEQ ID NO: 54650 - DNA, 695 bp, Heterodera glycines
gctctcctttgggccgatgagaaatgccgtcagaatggcattgactgctcgggggacaatcgtcgtgccgtgcttggccctgctctgttccaaattcgttttccactcatccccaaagaggacttttcggaacaaattggtaagcattttaaatactttcatttaattaattgatttgttttttagtgccttccggcgttttgacaaatgacgaaatgtttgccgttttgctgtaccattcgagtcgcgaaattgcaacagaatgccaagctccgtgcgagctcaaatttgccaccattcggcgcaattacatttgcaagcggacttttttggtgaaaattgaacagttttctgcgcttccacgtgcctccgataagaattacgagccaattgacagcgccgtggtggacatcaaagggatccgatggcaattggcctattcgttttttttattccaagtgaacaaaaaatccggttactttcgcctttctctcacgtgcaaccaaaatgagaaaggtaatactcagctgagaaatcttaaagtgattaattgcgcaattaccaacacaattaagctgccgattggaagtgccattgttggacaatcacgcgaacaatggcacaacaaaaaacgggcaaaaaatgcgttgtctgggagagagatgacatttttcgtcgctgcaggccagacttaa

SEQ ID NO: 54651 - DNA, 1717 bp, Heterodera glycines
atgccaattctgcttttcgagtgcgttttcagatttttcgaaaaagtccattttttgcaggccaatgttgtcaagacggaacagcagcaccagcagcagcataatgaagaggacgggcaagtcgaatatggtaagtgaaaaaaaagtacattcatttattgtcatttcaaatatacgaattatgttggttttttaatttttaattttgaaaaaacttaaatgcgcttaaatctaaagtttttgaatttttcataaaatttctccgactctattcatcttgtaaaaggtttggggcttctacttttataatacatattcttacctatttgggagtttttatttatacttattaactaggtacctatttttatacctgttttggcaaaaaatcttaacaaaattgcaataaaatcaaaaaatatacccctaagaatcgaacagaaaattttttcaaaaaatacacccataagattggaaacttttcatgaaaatttattccccaaatttattatttttttattaacaaaatttttaatgtaaaatggtcaatatttttctaagtaaatattaaaatatttaaattattcgtttacaaagcaatagaaccaaaatttttcatctttgtttgctcttttccacaaaaaaatcgtcaataaatatttttatttacctatttttatacctatttcgggatttttttacctaaatttcccagccctactaattaatagcaataaaaggcaacaaaaaattaatttattttgttttaattgttgacaaaataattcaaaactcttgattaataaaaaaatttaatgacgaatttttaaatttatgtcccaatgatgtgcactttttttgattttgatttcaattcataaacacaaaaatgccgaaatgctaaaaactagagtagagcgggaccgggaattttgggcaaaaccgggaccttttcgggttgaaaaaccgggaatttttgggtgggaaacccgggactaatcccggtcccggttactcagttgtctgtgttttggtcccggtcccgctctactctactaaaaactaataatgctttgcccggtttcagttggccaactgactcggtttcaaaatgatcagaatactattttgggacgaattgtccaattggagacgcagcagcagcaaatggtcaatttgggcgtcactggacaatcggacagaaaaatacacaaaaataagaaaatgccgtcgccgaagtcagccgattgtgccataatccacaagacgttatttgcatgcgagtggtcaccgtgtcctcctccgcattgtacaaaccgttggccgggtccatcaattgctaaatcattttttaccattttatggtgccaaattattaacaaagttttagcatcaatgttttttttttacttttttttgaaattaacattttacaagagaaataatctaaagtgactttttagcatattaaaaattaaatttcaaattgccaaaatttgttaaagaaaaattaattaaaatactggcaaaaatttcaaatctcaagacaaaataatgaacaattttgaaatattaaaataattatatacgaaaatttgttgattttgacaaaaaatttttaaaaatattttatagaaaatttgaaaaatcctttttctggattattaacaggagaataatttgaagacaaatttaaacattttttagaaaaaataaa

SEQ ID NO: 54652 - DNA, 947 bp, Heterodera glycines
atggctgatccaatcgactcgaaatattttggttttgtgccagccactgaagagcagcagggtaatggggaaaatcacaataaaaaggaaatgcaattaaaataaatgattgaattcaagaacatacattaaaaaggggtaaaatatgccaaagggtacaaaatgagttttatgcaaaaaattctaaacgaaaggcagtttattgctatttttattttacaaaatttacgggttgaaaatctgtaataaaatgaataaagattttcaaaaaaaattccaccggcatcgcttatgatgatgatctcagcaaactcgctttatctttgaaatcctaaaaatgttcaaatggttgaaaatctaatatctaaatgattctcaaatgttttccgtcaatttttaaaatctgcttaaccataattggattggactacccagaaatctaaatttaagcaaacattaaaaactgagtttcatttaaatgggactttgccaaaacaggcaattctgctgatgtgttctgtttgggccaatttctgcccagtggcgccgtggagtcgtcgtcatcaatcggtgctgctggtgatcatcagcagcaaggacagcagcagcagcagaacacggcgatggtgggctaatttatattagaacccaaaaattgtggccaagaaaattgaaatatttaaaaaaaataaaaaatatatttttgcataagaaatatttcttaaaataaaaaaaaataaaaaattttaatcattgaaattattatgtttaaaatgaatattttatttttagagcccggaattttaaagattctgggcttgggtatgggcttagacaattgaccaggctgggcttccctgtcaactcgggtccggtcccaaattttcttggcgcccgccgggctcgggctttttccagaatttgtggaagtttatttataaaataaa

SEQ ID NO: 54653 - DNA, 1321 bp, Heterodera glycines
atgcctcctttaacagtacaatcagtaataattttttcattggcagataaaatcaaatctagccaggaacgcggaagacaattggtgcttggtcgacgtccgtggcattcaaaatttcgtccacaacggcacgatcctcccgggctctctccgccgctttgtccgatttgctttcgggcatatttgtcacaacgacagttctcagtcgtcgttcctcctcgaccgcgtcgacagccgcagcctgtgaatgaattaggacggaggcggtgcttaagagggagtgaagctgcttaataagaacttggcgtagtcgggaatggagttgtctgtgtcaatttctttggggatttgtagtgggtcaaggtcggataaaaatttttttggggcagtgttgtcagaaggaggagaaaaatttgccattctctttgccatcgattaggagaggagatgacaattttgaaggaatgacaattgttgagttgaagagtttttatagattttttggaattttcaggctttttggaaacaaatgatggcatcctttttctgtttccaaaacttgttaacaatcgcagaaaatttcaaaaatttaacccgagggcacttaacggcaccgccgaaccaacaattcctttggttttacaaaaatttgagtcaaaaagctcacaaatttgtcattttcatgaaaattcaaaaattacatttgtacattatatctttagtgtcaggatttaacaactcaagcaaaaacgtgaagcattgattaagaaaattcccgaattttaattaaagagtgcattttgctttatagattccctcccatcaatccgcttcattttttgagtcaaaattttgctggacacatttcatttttggtgatcccacaaattctttatggccactcatttttcaaatctatccaatttctttttttgcttattttatttgtaaaattatttttaggtataatttataaaatttaaatttagtttaaaacaaaaaaaactgatcactgatttgtgtgtcctgccaaaaattgtgacgcaaaagacccaattccgatcagcagcaggggcatttttcccatctttttgaaagttttaaaaaaatatttttaattaagggagtttaaaaagaaaactataaaccttttttgtcatttttaatgataaaaggataatatcatatgtaaaataatttcaattttctcattatgtacctctttaaatgagttcacaaatatttaattgagcataatatttattttgtttatttagcgcccttttagaaattttatatatttttttgttttttaaataaa

SEQ ID NO: 54654 - DNA, 667 bp, Heterodera glycines
atgacacctgcacgggacctggactcaatcactcccgcactcgcagagcaagaacgccaacgcacattggttctccttggcctcccggaaagcaatggttttcgcccatcggaacgtgtacaggaggacaggaaagtcgccatcaaaattctggaccagcttgatgttgaggctgagccaaccgccgtcttttgcctcggccgctacgacccgcagcgaacaacaccgcgcccgctcagtggtcatgccaacacccacaccaccaacatgtggcacttgggggatggaagcgcgagcgtgctcgactccgttctcaacagaacatggcccgtctgttcgtccgccctgcgctgaccaaagaacaactcaagaaggaatacgaagagtgcgtcagaaaacgtcaacaaaactcagctccaatggcaccggcaagctcacagacaaatggcccgactcccgttgtcgaagatggaccaaaccaggaggaggccagcgacgacatttccaaaccgccggaggtttttgaccaaacaatcctcgtctgttatgaagcattaaactcattaccacccaccgacaaaattgttcacgaaatgcaatcgctcaaaaaacaattccctcatcttttcaacaaatagttctaccagacctccaacaatttcttcaa

SEQ ID NO: 54655 - DNA, 461 bp, Heterodera glycines
atgccggaccaaatgagatttgggacgagaaaattggaggaaaaaggtggcaaaaaagagaggcggatgaatgagaggcacttgacgaatggcaccaaaaaaaggtaagacgaagagcatttctgtcgatcattcttactccatttcagaaggggaatcagccggcggcggtggactaggcgcataaagctataatttgaaaaatgcaagaaaatatgttttaatgaatcactaaaaaaatcaatggattaattttaaataaaaataaacagctattttttattataggtttttatgggcatttgaaaattgcatttaattttgtttgatacgttagcttacttcatttagcacgtcgctgatttcactcatgaacccgtcccaggcatcataagtggcgaaaaaggtgaccatacaaacgtcccatggctgtttggttttaaaatatttaattaaaagaa

SEQ ID NO: 54656 - DNA, 2083 bp, Heterodera glycines
atgggggtctgggtgagaaaagagaagggaattggtgagggatcagaaatttttgataaaaaaaattaaattatttacctcaaattttactatttttcttaagaaaaatttttgtttaaaaacttttcgatatccgaaaactttaaaatattaataattttgcgatttttctgcttaaaaatggaagccctattaatgaacatttagaaaatataaaaagtcaccattgtattttaatttaattcattaattttcaagaaatctttgcccttgtttggccttagccgatcggatgtttttgtcagcgcaaaaattaacattattcgacctgaatccgcaaagcaactgttcatgacttccgtcagtgatattgatgaacaacagtttcattctgtttctgaatatgcacaattttgtgtggagcagtgcgtggcgcaatttgatgggttttacctttattttatttttgtttattaaacatacaataaacttacataggattacccagaaaaaattgggcctcggaattccgatgtccgaaaatttttggatgcctcggaattccaatttacgaaaaatttggggcctcagaatggcatcccaggtgtagtagaaaactaccaatattggcgacaagcaaaaagtaaacaaattttcgttcgtccgtcaccacacaaatcagttacaaatgtatgtgtatttatttaatttgcttttcagctacattgatctgtgcatggtgcactatgtcaaggatttttgtaaaaacatctccaatacatgcacaaataatagaagagaccgtgaagaagtgtatggcgtgttagaacattattttttgggtatgtcaaagacgagaatattgaatcatttgatgattatgggataatgccttgacatttgcaccttggacttttgtgggccaccagccaaaaaaagatattagtggcccaagattccaaccaaaagacaaacctaagaaaatagttttatcatcaaatttaagaaattttatgcgctctgataatgaagcaaatccaaatggacccaaactgaaaaactttggaaaatgtcatttcgataaattagttggactgaaaaagattgtatagaaaaatacagacaggtcaaaagtattggatcaaaaaaaatttgttcatcttttttaaatccgattttctcaaaaaagaatggtggcacaaaagtcttataccccctttttggtggggacaagtaatggagcaaaatgtttaatcaccaaacacttcgttccaagttagcaggaaaatctttaaaaaatctctaagctaatttttactgctgatcaaaaatgtcttttataccaatttatttatttatttattgtcaataaagaaaaagtccacaaaagggaaaaatccgcttacattgaggccaaaccattaatttaaaaaatgtcctcaagaaagcgcaaaacaattaaaaacgagatcgccgccaaaaaataaaatataatatgaaatcaatacaaataaataaatagcgaccaaatcacttttagtttgaatggattaaaaattcgactttaatttttccggtctattttacgggaatagagatagttttaattttatttttaaattaatttaatgagtttatttcaatgagccttttatcgagttggttccaaattttagttacccgccccgcaaaaggtataaattttttgcctaatttatatttcgagttaagtctataaaagggaatgttaaagcgttcagaaggtttgaatatttcaaagggattaagatctgttcggccataaattattttatgagccatgaacagatcagacagctttcgcctgctttcaagtgtcggcagttgaaggtattctaatctttgttggtatggaatgggtggaaggctgcatttaaaaagaactcttttggtgaaatatttttgacatttttcaatttttttaatattttttagaagagatggattccaaacctcaggagcatattccaataacggtctaacataagttttgtacaaaataatccaaatcctagtagattttgatttaataacccgaaataaa

SEQ ID NO: 54657 - DNA, 864 bp, Heterodera glycines
atgtatgaacagttcacaattccattggaaataaataattgttccatttcacaatatcaaatgtcgaaagaccaaaaattgctatcggactcaaatattgcaccaaaagtaaaataaaaaaaataaataaaaaataataatttatcaccaaaaattaaataaataaatgaggggaagcaaaacttatgcttttttgttcaaaaataaaaaagttagtgtaattgacaagatgcattcatccaacttttttgtccattgtttgttttgccacccggcacattttgtcgccttgggcgaattttgctctttttttaattggttaggtacattcccttaattaagtcattaattctcgcttcaattctcttttctgaacactttcccaaaagtgcgtaattcgttcgatttgtccggctccaggactcagtggacaatccgtcagtagtcaatccgtcagtaagtgggcaatccgtcagtggataatccgtcagtaactaatccataagtaaatttatttttaaaatacccagatttatttaaaatcatgtgaaaattaatttaattcgctaaaaatctgaattaataatttgtgttattttaaaaaatatatgaaataaccatttttaaaagaattaaatgataatttctcgatatggtcaattaattgaaatataaagtaactagaaatgttaagaatctaaaaaaaatatatttattaaatttaacaatcattttttcaagatttttaatcattgctcaaacaaaaacttgctgacgaattgtccactgacggattacccactgacggattgtccttcactgacggattgtccttcactgacggattgtctactgacggattga

SEQ ID NO: 54658 - DNA, 561 bp, Heterodera glycines
gccactaaacctgacaccgtcggcgtcgctttgaatgattctccgttgggtctgttggcttatattttagagaaattcgtatgttggacaaacccttcatttttgaaattggcagacggaggactcggaaagtgaattctttttttaaatttcttcgtttggattccatttttagaaaattcactcgagacgaccttttgacaattgtctcaatttactggttcaatggaaacattctctcctcgcaacgctattacaaagaacacttcgccagtgattcaaataccgaaaaactgtacaggtccaacgaatgcttataaattagttttttttgaattttattttttcattattttcagaaaatacgtcgctgtgcccacggcgtacgccgcctttccctacgatttgggcggtgttttgccccgtgaaatggtctctcgtcagtacaacctcacccaaatgaccctttttgaagacggaggtcatttcgcggcattcgaatgccccaaagaattgggcgaggacattatccgttttgcgcagggattgtccttggattga

SEQ ID NO: 54659 - DNA, 311 bp, Heterodera glycines
gtcgacttccctctgaacggcttcttcgggcggggcaatcccttcgtcgacaatctgtccatcgttccgttctctgtgaatgtgtcgaacaaagaattggctggtctgaaggacaggctgaccaaatgtcgaattggacatgaacagctggaggatgtgcatgactttgagtatggttttcccatcggagaattgatggaatggagggaccggtggctgaatgagtacgactggagagaagcggagaaaaagctgaacgcaatgggagaccatttccggacgcaaatcgaaggcttacaagtcggaattgg

SEQ ID NO: 54660 - DNA, 531 bp, Heterodera glycines
atgtcagacaaccgaaaagaagcggaggaaaagatggcaaaagcaatgtaaattaaaatgaatgctaattttgaattttaaattttgttttccttttttcagcttcatctccggcgattgttggctttgtgtcttcgatttgctgccaccttctcaacttggccttggaattgcgctgatcagccaccgatttgacttttacgtggacgaacacttcaaaacgcgcaaatgggcgctgaagtcttttcgaattggaagcaaaatcgaaaagaatggcacaaagaaaatggaaattgccaatttacgtggaaaagcattgccaattccgcaaatgcaattgccacgcaaagtcagtgtattcaaacgcatcgagatattgtaaattagcgattgtgtaagatttaggcaacatttcccattccatttccagtttcatcgaccacaatgccatcgcttttctccagcgttttcgtccacttttcaccacctgtccaattaatccagggcttccatttgttcttatttattaaa

SEQ ID NO: 54661 - DNA, 814 bp, Heterodera glycines
atgttttccgatttcagttggaagattggattgactggcaaaagtacggaatagcgccaatttgcttgacacgcacattatttgctgctcccgactctttgcacggcttaaacgcaacaatcgttggatgggaaatccaaggatgttggtgccatgcctttgtttagtgattaatgaccgagagagagactaaggggcaccgaaagactcgagactctcgagcatcattatggattttcctaattggggacacggtcctgcgagactctcgagtatcactaattcaattaactagctaattgattgaaaaaagttcagctgttgggaagaatattcatgatggaaacatacgccaacaaagtgaacaggtcgtgccattctgtgttaatttaatcttacaaattgcgtcctgatcattagtgatgttctaatcaaatatttttaatgagtcgaagaatcgggaccgagtgatcatgaaagcgatagctcaaaaatccgagacgacatcattattaattccttcttctaaaatttcgtcacttccaaaaaattcattattctttgcagcttggttttaaccttttttcttgtaaaaacattaataaacctaatttttttttcattataataatattcagagattcgaaaccgaaattctcgaacattgttaattcaaaaatctgagacgagacttgaagccgtgaccctcgagcatcgctaatgatcagggctctgatttatggataaaaaatataatttacaaaatttgattcaaattaatcaatttaattcaccaaattcggtttaaattaaa

SEQ ID NO: 54662 - DNA, 702 bp, Heterodera glycines
atgaactgcagtgatgctgctgctgctgctgaagatgatgtttgtaaggagatgaagccattagggcagggaaaaatgaatttttatataaaattacgatttctgactgaaattttaaaaaatttcattgaaaatatgctttcaagacagaaaataatggtggaaaataatgggctattttcacgggttggccaccaaattgagttggcgtggaatgaatgtgccatcgccggcagcagcagaagataggaggaggaggaggcaaaaatgaaggaaatgatgccgaaaaagatggcaaaaaaaacgaattcattgttttcgagggcattttggtgggataaaaaaaataacagcaaatttggaatttaaaattcaaatatttgtttttgaaacatgttttttgggtgcttaatgatattcccgagctgattagagccttgaccgattgattgaaaggccgggatcagattataaatacataaatatttaacaaaattttggtaggtctgaagttcttaaggtttagaaatttaaatccgactgaatatcccgaaattcggaaaaacctgggaacaagacggacccggattttcgaaatagatgcagacaggatgtgccaaacaaaaagccctgattaacaggacgccgggcactattgtatttttcaaaaatataacgacccgaaaccggattaggacttta

SEQ ID NO: 54663 - DNA, 1014 bp, Heterodera glycines
atgattacgggaagcaggtgtgatgaggaacgtgattgttatcgtggcgaatactgtggcgatttggtaatttttgtaaacgctataaacccttaatatggctctgttttcgttaacgatcgcgctcttccgaaaatttcttaaaaaacttaaaatttctaagaatttcaataccaaattttgcgctacataaaaagtggcggccattcaatttttttacatttaattattcatgctttttattaaatttttgtttttacagtttccttaaaaccactcttttcctgttatttttattatcaccatattattcgaacaggtgccacaattcatattcgattactcttaatagaccccctttttgtgccatattaaattgcaaaatttctgtggaattttttttagcaaaaatccatcttaggtttatgaaattaaaaatatttgaatggctgcaactttttaagtagtgccgaaattttattatacaatacattttttagaaactttgttgtcttccacgtcgagctgcacaacctgatgaaccatcacaaccagttcggcctcaaccatcaccaggccaaaggactcgtgaacccagcgctgctggtctcaaaaaatagcgaaaatttccaaaaaaaattcctcaaaattttcacagcctactgttacaatgggcaacaatcctctgtgagatgcgactttcaaagcgattgcctggaaacacaaagttgtataaatgggttgtgctgtgttcggtcgggcagtgaatggaaaagtgagaaaaacgaaaaaaaaaaaatttggaaaattttttgaaaattttttttgaggcgcctgtggtggtgccatggcggtgtccaactgttttcaagatcgtagttgccatgacagtcttgtgtgcacttcatcggattactgttgcgaatgcccatatggacaaacaaccgggcaaatgcacacatgtaagcttttcgtttgcaaaaaaaaattaaaaaaattattttaaacaaatta

SEQ ID NO: 54664 - DNA, 99 bp, Heterodera glycines
atgccagtccaaatttcggtgcccgtccattgcgaattggcaggcggtgacgggctggacattgtgaatttggtcgctggattcccactcattttcacg

SEQ ID NO: 54665 - DNA, 467 bp, Heterodera glycines
atgcaagtaccaattatgtgggatttttttaggtaatttaacgaattaaattttatttatttagactgaataatagttctgcttaaagaattatttttattaaataaaaaattaagtatagtataagatttatatattttttaaattattcctgcaacttgtttcgtcgataaatgcgaaaatttcaaaaatccataataattggaaaatttttcaaaaaataactatttatttgcttttttaatagtcgaacataagtcaaataaatttaaccaatttttttcgaaataacagatttttaaagaaagaaaaatcaaaaattcaaagaaatgattttttaatattcttttaaattgatgaataattattttcataaccgaattaattaattattaaaatttatttttcagaaaaatttttaattcagtcaagacgtaattgattagcttttttgagttttttgataa

SEQ ID NO: 54666 - DNA, 1056 bp, Heterodera glycines
tttttgattcacttaattccttcctttctgaaaatttacaattgctctcccaacaaattatttgccccttgcaaagcctggcgaatttcaaatggaaaagtaatgggccaaaaacattgttatgccatgatcaccggggagggtatttggactatgaaaggtgggcgaatgttgaattttttaaatttatcattgaatgactcctaagtttaaaattgtggatttatttaaagcttatatggaactcgaatatgctctaagggcagtgaacaaagtgctgaaattcccttttacgccttcttccattggtggcacattgacattttcgtttacttctcccaccgtttcgtcactattccgccctttgcttggactaatcaagcacacaaacacggcgttctgattttgggtaatatttagcggttaattatattttagagattccattttatgtaagtctaaatgaatacacattttgtttttatctcgttgcattttcattccttggtcaatttaggaacatttatcattgaaaaggctgaaatttgccagcaaactttttccaatagagaaacaatcgacagattaatcgcatcactcgtcgattgctgtgtcgtctttaagtttggtaatttcacaaatgaccccctaatttgcattctaatattaataaatccctttttaaatgggtggttaatcaacatcgaaagtgaagtgaattcggactctgtcgacaatttggaatactttctgttctctttgcggaatgctttgcatgataatgttcacaaagatgccaaaagtgttatatttttgtcttttgtcggttcttattgggttttaaattgttcagttgtttggtatgactcagtgacaacggacgggaaattatcgtggcaaaatgcattgaatgccaacaatttgtgagtgtactttttgtggtgtaatagtttaaaattcgattttattcagacgatggggcaaaagtgtcgatgccttctacacaaattacgcctaggggaagaacacattcagcaaacggttcgaacttttctt

SEQ ID NO: 54667 - DNA, 610 bp, Heterodera glycines
atgggtgaaaatcacttttgtcttcaaaacgctgacctccaacccttttacgggtgctctgcggcttttggcaaagacgatggaagcgggacttctcgtgaagggcactggcgattcataagtgagttgggctgacgggcgaaaatccattttgacattttaaaatgatttcgctttggagtttggaatgagtcgagatgggtgtccgaatctgatcctcctagccgaaaagcccgaaaaagtattttatttgaaaaaaaaattcaaaattttttcttttttcaaaaaagggctaccatcacaactataatcgaattttcagactttttatttgcgacgattccgattgaggaaaaggacgagaaaatagagctacggtacgttcattcacttcactaattgcagcatttaagctgattattgctcggggcaaagttgtcattgttattcctttgcatttccgttttaaagcaacaacttcggaatgttcccccatctttcagtttcgattgttctcatccaattggtctcgttgtgacgatctccgatggcattgagtcgctccatttttgtcaacattcttttgacgacaatccgtccgatgaaacaa

SEQ ID NO: 54668 - DNA, 243 bp, Heterodera glycines
tgatggcggatggaattgcgtccaaccgatggaaatccttcgccgttacgctttgtccgttgccatttttgcccccggatggatttgtgaaaaattttccggccaaagtcatcgcatcctttttgacaacagttttcgtttttggaattcgttgagtacatttttgtatccccatgctttgcgacaacggaacttccgaaccagattttgcggttgccattcgcatcggaacgcccccaattg

SEQ ID NO: 54669 - DNA, 974 bp, Heterodera glycines
tattaactaaggcaatgtcatctgattttggaaaccctctgaagaagttcaaactcgtgtttcttggtgaacaaagcggtacgttataaaaatttattgccatcttcattcttcctgtcctccttaaattaccgttaaatacaaaatgttaatgtcttaattttcagttggaaagacttctcttatcaccagatttatgtatgacagctttgacaatacgtaccaggccacaattgggatagattttctgagcaaaactatgtatcttgaggacagaacggtaaatgagttttccaattctaaactcgctttttaaggtcagacttcaactttgggatactgctggtcaagaacgctttcgttcgctcattccgtcgtacattagggactccacaggtggccaaaactcgaattttttaaaattaatttatattatttttagttgctgttgttgtttacgacattacaagtaagacttctcttgggaaatacaaaaatagaaatttaagtttcctactaagatatttaacaaattaatgcgtatcattatcattcatttttaaagccccgtaaaggtacacagagtaaaatggatgcatataagataaattttgaattgaattgatggcaccgctgtaaaattgttcagatgcgaattcctttcatcaaacgtccaaatggattgacgacgtgcgcaccgaacggggcagtgacgtcatcatcatgctcgtgggcaataaaactgatctcgcggacaaaaggttatgcaatttgccgttctactcaaatactttttaaactgataagaatttaattttcgttttctgagtttttattattacgccatttttagacaagtttcaacggaagagggcgagcagaaggcgaaggagctgaatgtgatgttcatcgagacatcggcaaaggctggttacaacgtgaagcaggtggaccaaccgaacgaacaacaatga

SEQ ID NO: 54670 - DNA, 124 bp, Heterodera glycines
ttttccataatccgttttttgttttttgctttttcccgaacgatcattgatcaaattaatacacttttagtattaactaaggcaatgtcatctgattttgaaaccctctgaagaagtcaaactc

SEQ ID NO: 54671 - DNA, 609 bp, Heterodera glycines
atgccgaacggaaagacgctgcgggagattagggaaatggaagagaagaaacatgaaattttgagccgctacgtcgagttggaggttgtttgggagcacgagatcaaccagaagctgaagaagaacaagcagatgagggagttttttgataactggaaggaccgctcgccaatcaaaatcagagacgcgtttcatggaggaagaacaggaccaatgaagctactccacacagcgaaaccaggccaaaaaatcagctacaaggacttcaccagcctctacgcgtttaccaactttacgaccgactatcccctcggccaccctaaaatcatcagtattccaccaaatgagcagacggtcaactggcgctctccatccgacaacccctacaaaggccttctcaaagtgctgattctacctccaaacaacaacatcaaagtcactgttatgcccataaaatttgatcaacgtttcctattcccgctctgtgaaaagtgtgccaaacacatcaccgcaaaatatcccaatggcctcaaagacaacgactactcatgcccgcacttcaaccctaacgaagcgccttcgtgtccacttgcacccatcttgagttaa

SEQ ID NO: 54672 - DNA, 223 bp, Heterodera glycines
atgctcacctacaagccgaaagaggagtttgtcgacgcaaataagtactcaaatgttgtcatctccctcttcactacatcaatggcgcgtctatacctttacgaaatgctcaaaagagtggccgacacccccggatgtgaaattctctactttgacacggacagcatcatctaccttcatcccgaggacaacggcccactcccgacagaaaagggacacctcg

SEQ ID NO: 54673 - DNA, 1099 bp, Heterodera glycines
atgcggtccgcgacgcaatttcacggaatcttgaatgtggtcttggtcaaacgcatgatactaaataaataaattcagtttataaaatactatcattttctataaacctaactaaattcaaagataaatgtaatattaaaaatattaaaaaagtttttttaaaattaaaaaattgcaaaaacttattatctataattaaacataaattataatatagtatttaaaatatgataaaacttttttgaaacttttaaatatttgatgcaggcactaaaattaataatatatttaaatatgaaactttaaaattaataaaataacttgtaacaaatataaaaatataataacaatgaacgatctaaaacaaattaacaacagaaagcaacagcgaacaaggtttcataaaggatggaggatcacgagaaaaataaatatgtaaatttatataaaaaaaattaaagaatgacaacgacagcgccattcccgactacgcaaaactgcttattaagcagttgcactcgctgttggccaccgcttcgtctctagttcaatctcaagtgacggcgaatgacgcgattgaggaagaccgcagacagcgaaccgttgtcatcaccaatgtgccggagttccaatccgggaaagcgtcggagcgtggggaggcggacagagcactggtcaatttgattttggacacagtggacctcgatcaaacgccagtggtgttccgtgtcggcatgcgaacgcccaacagagcgagaccgctcaaaatggaatttcccacgcgacatgcggctcggcatgtgctcagaatgaagggcaaagctttggcgttgaatgctctacatggtgcgcgcatcagggaaagcatgaccaaggagcaattggccgaacgccggaaattaattgagcagtgcgcacagaaaagaaaagaagacgcgggagattggattatctacgcgaatcaggtcatcctgcgcagtgacattgacacaattcgtaaaaatttttaaattttcatgtcaaatcaccaaaaaatcatataaatttttacaaaaaaagtttttgctttttccggttggtagaaaatttttataaaaaa

SEQ ID NO: 54674 - DNA, 631 bp, Heterodera glycines
atgttggcagttggaggttggtgaaatatttttgacatttttcaatatttgtttgaatagatggattccaaatgttaaaaaatgccaaaatatgtgctaaataggtgctgaagccgaaataagtgcaaacgaaggaaattcatttgacgtttcatggcaaaattttgcaatgaataaaaattcagaaaaaagtcattgccaaaaaatgggggaaactaaaataaaaattaaccaaaatgatgaagaaaatgtagcgaacaaactcgcctcccatcgcggggttcgtcaactcgacgattcgtcaactcattccaaaaattacttcaaaaagcattttccattgcttttcatggcgatgaacaatttttaacactcatttagagcgattcgaatccctaacctcgaagtcgcataaaaccacgatcgcgtaacacaattactttttttaatatttaatatctgttgctgccttatgaaaaattgaaaaagttccaaatgcgttagaatatttattaaaaaagaaattttataattactttaaaacaaatgcattggaaggaaattaatgaagtttatgcaaaatttaattgttacaaaattctcccaataattaacaaactaatattaaata

SEQ ID NO: 54675 - DNA, 1075 bp, Heterodera glycines
atgctacaccaattagtccaacgacaatgggtgcgtgctgaactgtcgcatcgacttgggcatctgtgtgaaaaaaaattgcagcctgactgtgtgccctcggcccaaggatttcgggtcggtgccatgagaagtgccaaagcaaaacgaggaaaacgaagaatgatcagagagagcagaggagagatgaacagccaattcgaaccactggtgatcagtgctaattgcctaccgattgaccgatacaatttatttgactggtcgtaagttttatttggcgaaaagatttgcgttaaaaccaaatggaaaaacaatgcttttgatgaaggtaatgcaacattttcattgttcaaattcattttggcaattttaatttcatattggctttcttacaagacaaataagatctataatttttatttgaaaaattcattcagactagttgtttacataaggcaaaaattgagaacttataactccaacagatttgaacaactaccaccccgattttcccagccaaaaatcagagtcccagccctaatttataggtttaattttgtaatttaagaaaattggggagcagtggtgccgataggtgtagccggaaaaaattattattttttaattttttaacatattttaactagtaagtcataatttaaagggacttttaggcaaaatatgtgaaaaatgaaaattcacgagataagatccgatgatgccgttagacgctgccagagccagaggcaaactgacattttttaatgataattaaaattaaaattggagataattaatttgtaagatttggtttttgtttttacgaaaattttcgcaatttttggaaaatttatcacaaaaaagcctaaaaagtttaaaattacattcacgaaaatattcacaatatcgaaatccagggcatttatgagagtgatggagtcaattatccacatttctaagtttgcttttcctgattgaatattaaatcaactcttgagaaagcctgcgtaatttgtgaaaaatttgaaatttttattttatttagaaaataagcatttaatctctgcctaataaa

SEQ ID NO: 54676 - DNA, 220 bp, Heterodera glycines
ccgggactcaaatgtcccgctcaggccaaaaattttttctatttccgggaaaaaatcgaaatttttccgaaaaaaataccagtcgatagagctcgaaaaactatgttttggaagtggtcttcgtttttctgggaaaattcgttaaaaattcttaaaatgcaaaaaccaaaaaaacgttttttaggcctagctcgaaaattttgagactctagaggtcccc

SEQ ID NO: 54677 - DNA, 619 bp, Heterodera glycines
atgatgaataaatttgtgattctaacaatggcatttgcaattttggcattaaatttcattggaattgcaccggcgggaacagcagaaggccaacaaacaagcaaaacaggtaaaagattagtgcaaatttgctttatggaagtgcgtgccaaattgtgtgaatttaccgttttggcaatataaggcacaattcaattattattttgtttctagggctttatttaaatttttttggctgcaagcgaaaatttataaatttaattatttttaatttatttgatataacaattattaaattacgatttaaaatataaaaatataataataaattgaggatcaccaaaaataaaatagaagtataaatttgtttttaaactttgttttaaatggttttattcacgcaaatttaaaaagaaacaccgggtctaattaggcacgcctattaattagattacataaaatacaatggttattaatttattaaaaccaattaaattgatatatttattccctctcttccgcaggaagtggcatttcttccgcacatcgaagtgacgttggcactgcctatgcaatgattgcgaatgacacgacgccaaatgatgttgccacattttag

SEQ ID NO: 54678 - DNA, 1086 bp, Heterodera glycines
atggcggaaagtgacgaagaattttatttcgcccggcacattaaccgtatgaaagagcgtgacaaccagtcaccgtttttgcacaacacaattgtcaattgggagaagcagaaaccgtacgaatgggaccgtcagcaaatgcgcatttgggtgaaacggcactccactaatgaggcggctaatgagcgtgagcaattaggtgctaataatgtcaatcaaatgaccaaaaagcgtaaagatatttaattttattttatttaaaaattcaaaaaacatttagattaatttgctttgttttcgtttctgacaggaaattttttggatcacggtcacgattcacgggaccaattcagggtcacggtccacggttcacgggttttttcagtgacggcgcaccactagaatttagtgtctattttaagagcccggatttgtatggattttaaacttagcaaatctggcatcatttgaaagctctatgtgttctctatatttatatttcaaaatagaaatgaatgattcaaaaataaaaaagttatggcacacggcgccaaaaaagccaagaaaaagtcaatttttgaggtttttggccataacttttttgtaaactgacgaaattttttgaaattttgcagcaaaagatatcgaacgatactaagcgttttaccctcgtccatattttgcgattttttttttgcgatataccgggttctagtcatgagaataaaaaatttaaaaaaatgacgtccgtatcactggcgcataaagctgttacaaattgccaaaaaatttcaaaatgccaaaattgtttggtgtaaatgccaacaaaaaattttcaatttcctcatttgccaactacgcttttctgcagtgcatccgctttacccacttgcgaagcgcaacgcaaccaatgaacgtctggtgcggaatgtaagccatctgctgatgcttgacgcggcatttgaccgcgaggcgcgcgaactgtgccgacagttcgccgcgcgggtgccgttgcgcaattgggccgcaattgcgaagaacatggacgatgaagcgattaagaaatttgtggtccgcccattaaaa

SEQ ID NO: 54679 - DNA, 1228 bp, Heterodera glycines
atgttgaacgcggtcaacaagttggagttggacagggccaaggaatgtgtgaagggcgcactgttcattcagctgttcattgagcaagtgttttcggaggaacaatcacaaaaattgcaagaggccaaaggtgccgtttatttatgttcatgcaaaaattatagaatttaaatttaaaaaaattaacaaaattaaatatttttaaagatttaattggttgaaagaaaagttttttatgaaaaattatagaatttaatttaaaaaataataaaataaaaatattttttaaagattttacctttcaaaactaaaaagagaattaaagaaaaaaaagaaaaaaaaattaaaaaaaagagaaaaaaaaaattgacagaaatattttgtatattttctttaaaaaataaaaaaataattttaattttaatttaaaataaaatatattatttgaaataattaataatttcgacaattattatgtttttcattttttagttttttacattagttgataatttaagttctcattcaataattttcttgaatttttttacaacaaataaaatattttggatttaaaattcatttcaattctttgaaattgtttgagccaaaaaagtgtatagataagcttcagttgcatattaacttttcaaggccttgaaaaaagttctgatttgtccttgaattttttggaatttaatttattttagacaacgttgacaaactcaaagatgagcttgcgcaattggagcgcaaatttcaagcatttaaagcccaacagcagaaagcggagagaggtgccaaagaagtcaaagaagcctacgaacggagacgaagaactcggcgcggcattggcaaaaaaagtggggaaaaagtgccgaaatcggcggccaaaaacagaggcaaagccaaaatggaagaagcgcatgatcaggatgatgatgatgattttgatgatgatgatggtagtaataacgatagtgaaagtgataccacggaaagtggtggtaatgaggaagaagctgaatcctcgtcggcaaagaacaaagggcgcagtgccaccagcaagtgggtcgaccgagcggtggtgggacggacgttagccaaaaagccattaaatggaaattttttgaaagaaaatattcataatttcgcccagaatgaaccaaatttttaatacttgatatcattcggtagccctaagagttttctattttcatggaaaata

SEQ ID NO: 54680 - DNA, 1231 bp, Heterodera glycines
atgtcgggaattacgccgaaacgaaaaacgaaggcgggcaaatcatcaaaatcatcaaaagaagatgaggaaaagcatgatgaaatgatgatggcatcggaagatgaagaaaaaatgatgaagaagcaaaaacaaaaacagtggaaaatgccgacaattcagccgcccccgtccgcccggcggaggagcagcaggccaagaaatggtatccaattattgagcgcggactttcaaaaaattcgggatcagttcgggattagataatttgacccgtaccgggtttcaggactggatttaatatcaggttttccaggacttctgcttgatccggatcccaaattttgatccggatgctggcccagaatgggtgaaagtaggataaaggataagagaggatccctaaatggggcgcccccgtatctcagtctgggaatcagagtcccgaggcctaaaaatgtcgaattttctgcaattgaataaatttagaaattgcaaaataaatgcaaataggttcactggctccctgaaaatgcgtcagtgaaaatttcaatgtcatcaaaacatgttctttggcttttcggggtcatttataacgaatccggtatccattttggccaattccaaagcccgggcctcgattcggggtcggggtttggaattcagaacaatgttcttatagcattttgcttttatactatgtacaaatattttccggtcatgggtacactcccaaaaaaaaaaaaaaaattaaaattggcagaattttgtttcaaaattttgaaattaaatttaatttatgtacccccccccccttcaaaaaaactcttttagcatcatcaacaagcagcagaaacaccaaccgccagcatgagccgttgagacaaattgatgaggactcgcgggagggggtacacagctcggacggcagtggcaccagcgccgccggcgctggccgtcgccggctgaccgaaaacgataatagcaacagcaattattatgttaatgagtggattgatcagcagccggaaggatatgatacctacaatgatcggatcagcaaattgcgtgccaaactccgagaggcggaggacgagtacaaaaagcaggagaaaggattgaagggaatgctcaagtgaaaattttgattattttaatttataaaaaatagaatttttagcatttgccataaaagatagcttacattaagccattaaaagtttcaaaaacaaaa

SEQ ID NO: 54681 - DNA, 638 bp, Heterodera glycines
atgtccgagacggggagtaaatttggtgctatgacgttagtcaaaaagccataaaatgaaaaaaaaatttgcttgaaagcaaccaaatttttttaattccttaattcgatagccctaagtattttcgattagcctgtaaaatttcaaaaagtttctttaagtttcaagaaggttatgatcaaaaatgttcaaaaaaaaacttcgttttttgagcttctcaagttaatgaattttgaaattttgtaatagaaaacacttagagctatcaaacgatatcattattttaaaaattggttatttggacgaagtttgaataattttctgtcaaccattttccatttgatggttttttgttgaacgtaccaacaccgtagattttcataaaaatggaaaaaaaatttacagaaattttttaaaacaaaaatgaaattcttagaaactcatttaagcacattttcattcgattttggagtgcaatagatgacattcgtaatgcttaaacccactgaaatctacaaaatattgggtttttagaaatattacttattttttagtttaaatttttatttattgtaaattttgaaaaaattttcagatgttacatttcaattagcgcaaaagtccgccgtatcttttga

SEQ ID NO: 54682 - DNA, 591 bp, Heterodera glycines
atgaatgctgaattgcccgggactgaatcgagcagcaacgattcggccttctcggaaattgaactcgagaacaaaattgagtccgagattgtgcagaaaaacatacgcacttcgaaaacgccattgaaaatttcgacgcgacctgtaagggttgaagccaatttttggcattttgaaattttttaattcgtaaattaggatggtactgaatttgtctcaatttaggaggaaatttttttttacaatttttggaatttgttatgattaggagggattcggatttctatggacaaaagaaaaagaacaaaatttggaaaatgtggagataaaaaagcatcatagaaatatcaaaataagctaaaaattcgtttaacgtgatttttttgacgaaataagtgtgcaaaaaatggaaatccatataaatccggtccttgtcatggttttttttgaaaaattagaaatatttttaaaacaaatatttttagactcgattgaattaaaacattaaatcaaatgtccttttattaaatttgttttttagatgtttaattgttttttaaacagcttaccccttaaaaatttgtatttaaa

SEQ ID NO: 54683 - DNA, 1406 bp, Heterodera glycines
agagcttacaacggtttgccacagcatttgagcaacgaatacgccattaagtttctggttagagcgatgggcaatcctgagctcgcgttatacctcgagcttgtgagaacgccaggcatgaccctggaccacttcgtgtcacttgccgcgcgtgctgaatctacgcaaaaggcaacacaacgattttcgaggccggacaacagagaaaggacttggagaacgaacacaccgcaacatttttcccagacgaataatgggccctcaagaagcaattttgaggaacggggccagcaaatgcaaaaatttggaacccaatcaaaccgaagttggagttgcttcaactgtaacagcccaggacatttggccagagattgtccccaaggaaaaatttttcgcgcaattgagcgaactaactcttctacgacaattaatcaacaaggcaaacaacaaatgggttataatcggcagcaaatgcctgagcccaacgaaaacccaccaaatcggcactaccagcaaaagaattatttgaagcaaaattgcttagttctgcaagaggaacaagttcatcaaaacaatttcattgttggtgaattgaagcaggacctggaagatttttttgacgaaataaggaaatgcgcgacggaagacaaaaattcgaatttttcaaaagtcggaaaagtaatggcagttttggttgaagtttttggaacgaagacgaagacaatgctcgacggaggcgcacaaatttctgtaattgaggcaaagttcctctacaatttgataagggacaaaaaattggacgttcggaatttgagtgttttgaaagcggaaaatcgcatttccgatgcgaatggcaatcctttggaatgtttaggagttatttgtctgccgataaaacggcatgagaattcgagcgaggtcaaagtcgcgatgcatatcgccaaaccgtcgattggatttgaccttctttttggcacgaatgcgcttaatgaattgggctttaagatgtacgatgccatcagcgacactgtaattgattttgaaaaagtgaaccaaaataaaatcgattcgctcaccgtgatctacaaaacggtgttggaaccacgggccacgaaagtcatcgaatgtggcttgcctgaccaatatgaagggagagaagttttattgacatccgatcaagaaaacgatcagattcgtttggaaccaacattcgcgattggacgctgcaacagattcgcggtgataataatctatttttcgaataactaaggagaactagttatcatatttcagcccaatcatgcaatttcaaggaccatttggttctctgccgttgcagtcgccaccactagcattgatcggaccccaagtggtcccacctttgaaccttccgccaagacggagtg

SEQ ID NO: 54684 - DNA, 1170 bp, Heterodera glycines
atgtcatttgtgaactattctctggatagaatggaagaccaagtaactattgcaattgttgaaagaaatttattccaaaatataagcgctcctccaaattctaatgccccaatctcacttattgataaggttcaccaaggtgtaatacgtcttgaggatgctaccaaccgcagtttaagggtaattaataggagggcgactcaaaatactgatgccattaaccaaacaacagctgatatgaatgcaaacatggacacaattacgactaggttagatcaattggttgataaagtggatacacttgaatggtcagacaccaatgataacaggacatcactacaagggaattgcaccatggtaaggcgaactgtcttcgaacccgaagaggacgaagaaattcttaatgttctcactactatagacccatttgctagtcagcttccggcttgcagggatgagaacctaaccgcttttgataattgggcccaaaaattccgggacctcatagaatatgctggaacaacttggactgaaaaagaaaaattgggtagacttaaattttcgctcgaagggtcaattcggaaaatttttgacaaattaccgaacaataaaaaggatacggtggacaaagctttggatgccattagggaaaaattggactctcccgagcgtaaggaaatgtcaaaacgtgcattagtcacgtgtaaacaacgcgattccgaaacagttcgggaatttctttctagactttcaccacttgtctcttctgtctgtgcgggtcaggatgaaactcaaattcaatcccgacttaaagatgaatttttggaaagggttaaacctaatttaacatttctgattaggcttactggtgtcactaaaaaccaagactttgaggcagttttctctcaagctcaggaattagagcttcttttaaccaatactaatgaatccaatatttctgatcctctcaaattcgcggtccatgctttaaatcaggcacctgcgaatgcttcttggacaaataatggtgatcgttcatcaaatattaattcatgggtaccttcctatcctaataacgtgaataaccgtcaggttagatataaagaacgatcaagctctcaacagcagcaaggatttagtagaggaagggaacgaagtgggtcgaattag

SEQ ID NO: 54685 - DNA, 657 bp, Heterodera glycines
gttttcggggcagtccccccgaaccgatgcgcccagatttatggggagaccgaatccttcgggagtagcttccctatagcctgtactttaattctgcgttggatttttgctccccataattgtttgagtaccccaaacggacacttgaaaaaatcgatttttttgttttcggggcagtccccccgaaccgatgcgcccagatttatggggagaccgaatccttcgggagtagcttccctatagcctgtactttaattctgcgttggatttttgctccccataattgtttgagtaccccaaacggacacttgaaaaaatcgatttttttgttttcggggcagtccccccgaaccgatgcgcccagatttatggggagaccgaatccttcgggagtagcttccctatagcctgtactttaattctgcgttggatttttgctccccataattgtttgagtaccccaaacggacacttgaaaaaatcgatttttttgttttcggggcagtccccccgaaccgatgcgcccagatttatggggagaccgaatccttccggaatagcttccctatagcctgtactttaattctgcgttggatttttgctccccataattgtttgagtaccccaaacggacccttgaaaaaatcgatttttttt

SEQ ID NO: 54686 - DNA, 162 bp, Heterodera glycines
ccaacgcagaattaaagtacaggctatagggaagctattcccgaaggattcggtctccccataaatctgggcgcatcggttcggggggactgccccgaaaaaaaaaaatcgattttttcaagggtccgtttggggtactcaaacaattatggggagcaaaaa

SEQ ID NO: 54687 - DNA, 917 bp, Heterodera glycines
atgcgtgccattggtggtgtcctcccccgtcgtgccgtcgacgaattccgtcggttgggcccaacaatttgcggacggcacactgaaccggcggttggcacaaattatggtggccaaacggaccaacgtttgcctggcggtcgactgcacacactgtgaccaaattttggaggcaaaaaaaaaactattttaatggcattaaaaataatggaaaatggcaaaaaaaaaaaaataataattttggtaagtcacgaccataaatccagttttaattttcaatctatttttttggtgaaaaatatacaaaaaaattaagtgttttttaaatcgacgttcaaaaacaagcacctttaaaacagacaaatgaatatccaaatttgaggcaggtatatctaaaaaaatttgaaaaattctcgccaatctccccgattcattgcaaattattattattattttttacaaataataatacactgatatgtcatgcatggttcatttttcagattgtttccgccgtcaaagaccatgtctgtgccgtgaaattgcaccacgacattgtggtggactttggcgctgaatttgtggccaaattgcacaaaatggccgatgagcaccaatttctgattgtggaggatcggttggtaaaacatctaaacaaatattaccgggaaaaccatgacaaattcttaccaagaaaaaaaaagtaccattttcccccgaaaaccctggcaaaatattatccccgataatttttttttatagaaaatttgcggacaccggcaaaacgatggaaatgcaattggccggcggtcggttgccggcggtggcggattgggccgacctcgtcaccgcgcacgccctgcccggcatggcgtccattttggcactgaaaccggtacattaaattgctgtaaaaa

SEQ ID NO: 54688 - DNA, 173 bp, Heterodera glycines
gcccaactcagcaccgacggggcgctgacggacggcgcttacgcggccaaatgtgcgcggattgggcgcgaatgtggggactaaattggtggccggattcatctgtcagcagcggtgcagcggagagagcaacgacgcaacagaacagcaacaatttttgcattggacacccg

SEQ ID NO: 54689 - DNA, 136 bp, Heterodera glycines
atgtccaaacaatttcttctgttggctttgctgcttttattgctcccaatcggcacattgcaagaatgttcttgggatgtggatctgtgtacgggcagttgctcaacaggatgtgaacaattaagtgaaccaaaag

SEQ ID NO: 54690 - DNA, 378 bp, Heterodera glycines
atgccacaacactcaatcatcaaatcattaccagtgccatccctccccacacccaaaaaaatgccacaaacaataaagcatcgcctgcgtcgtgcactgctcggcccatgttttgccgtcgttctcccaccaccaccaccaccaccaccgaatgctgttggtgccaaatttgtgccacctcctgtgccgctgatgtgcacttgcgacaccgttgtcgcaattgcgttggccccctcccggctgtcgtcgcgcatgttggccggcaaagatacaccggcgttgccacgccgtgcactcagcacgctggtccgtgccactgtctacgactacgagctgggcaaacgccgcaaactgtccgcctcaatgcgaaccgagtaa

SEQ ID NO: 54691 - DNA, 498 bp, Heterodera glycines
atgacttatttcgagtatttaggttagttcttttaaacagagaatttgggtccaaatgtgtaaaaccatgtaaaattttgtaagtagttaggaggtcaaaaatttttcttcgtttttcaagagtagctaatttaaaaaattggagccgttggtcatagggaatatatggaagacaacattttctgaaagcaattcgagtaaaatatttttgacatttttcaattttaataatatgtgattttagttgcggattccacgattcaggggaatattctagaagtggacgaatataactaacataaatatttttccaaactgaaattttctttgatttaataacacggaaaagtaaacgcatacggtagtaggcgttacgtgtactcccgtaagtccaaaaagccagttttaccggcccgttttttcaaaaaaaaacgagaccgggccgcccggtaaaagcacgtcgggcccgtccggtctactaaatacctattcaataaa

SEQ ID NO: 54692 - DNA, 1270 bp, Heterodera glycines
aggctacgaatacggacaggcattcaaaggtgaacgggcgcccgcattccgcgccatttgacacgaaagtccctcaaggcatttaccggacttgcaacagcggtgagcgcggcaccctttactggaccggcaattgggtgaccttcttggactcgctgctccaaaccgcgctgctggccgaacgtgcagacactctccgactgccaacacgcgttcgctatttgcgcattgaccccacccggcatttggaatgtgtggaagagcgaggtacagcccagacaaagtgctgtcccattccgaaatgccttttaagatggcattcaagtggtggagctgcgcaatgacattgccaccaacggatgcatcgccgggggcgtcgaatgctgcgatttgacggcgcacactgtgcagcgaagaccccaaacggctggccaactgtttctggagaagctgtacttcgtcaagcacgtcgacaacaagtccgaactgtttagatattctaatgacaaactctcaaaatcatattgtccattctttgcagttcactcgctgattctccccgcgagcgtgaaattctggccgaatatcgcaatttgctgtactccatcattctgaatggacttcgccaatggagcaagtcgggcgtactggcacaaatcacgaacggagaacagttcgaacacgcgctgaaattgttggagggaaaggaggacattccgacggtggcggacgaagagcgaaagaggaaatttttggatgactcaaagtcagtgaatacgcgaattgattttccaaagaatgagtcatctctaaataggtgttcgttggtcaatgcgttggacgaacttttcaaccttccgacgaataaccccttgggggaggggcaagacaatgccaagaagttcgagcaggtcgccgtcaacaagctgagtgccttctacaagacattcgacaacgaccgctactggtcccaggctctgctgcacgatcgattttcaaaatcggcacaggtaaacggaggcgggagggtaggcaaaagcggcgctgatttgaggacatttgtatggaaaactcggccacacaccggaaccgcgcctgcggcgtcgaactgtcgtcgacggatgtgttgaaacattgtgtgaacgggtccaagtcgcacccgctgttggaaatcgaatggacgtgcgtcgggccgcacatggagcatcaactgtttctggagaagctgtacttcgtcaagcacgtcgacaacaagtctcgaactgtttag

SEQ ID NO: 54693 - DNA, 675 bp, Heterodera glycines
  unsure (1)..(675): unsure at all n locations
atggatatttttgatcaaattttaganaatttaaataaactttacatgccaaaaaaaattccaaaaaagaataggacgggaggcggtgccaatgccaatgcaaatgtggcgggcggtggtgccaatgcaaatgtggcgggcggtggcggtggtgccaatgcaaatgtggcgggcggtggcgctggcggtggtgccaatgcaaatgtggcgggcgatggtggtggcggtggtgccaatggaggaaatgtggtgggcggtggtgccaatgccaacggggccaatgccaacctggcgggagacggaggaggtgccaatgcaaacgtgccgggcggtggcggtggtgccaatgcaaatgtggcgggcggtggcggtggtgccaatgcaaatgtggcgggcggtggtgccaatgcaaatgtggcgggtgatggtggtggcggtggtgccaatggaggaaatgtggtgggcggtggcggtggtgccaatgccaacggggccaatgccaacctggcgggagacggaggaggtgccaatgccaacgtggaggggggcgaaggcggcaacaatgcgaacggggccaatgccaacctagcgggagacggaagaggtgccaatggcaacgtggcggaaggcggtggtgccaatgccaacggtacaaaacttttacttatttcatag

SEQ ID NO: 54694 - DNA, 931 bp, Heterodera glycines
atggcccagcaccgactgctcgaccaaattcccgaactgctcgcggatgtgcctgtgcctgattattgtgtgtttggtgaccaaccggtcggggaagagattggcgatggggcaaggttcgaaccggaccacgaattgactatcaatgcttttattggacccgctggaacaggtgagtcagcgaataattttttataccaaattcagggttgctttaatttctgtggcatttgtcaattttagtctttgttgtcaccaaagtttgaaacttagatttccaaaatctgacaaacaaaaattttttgctactaatagtaagtgttgactctgtctgggttactaaattaacgatatttaccaaaatccattcattgacggaccaattaaacctgctattttttactatttcttcgaaccatgtcgcaaacgaaggaccttctcttccaaataatctctgaagtgtttttagtttcgccgttgcacactgacccacggcataatttgttctgtcaaattcgaggccgaaaatttgttcgtctgatttctccccaaaatcggaaaggactttatttgtacgacgatttgatgagacagaataccagccaagtgcttattttgctctatttaaaaaattatattgcaaattcctttatttgttaggaaaattaaatcttttcgtttatgatttattccgcattttaggtcgatgtggaatgtcttgacttggagcagttccctgattttgcaaatgtccaatgctacgattctgttgtggaggccggtgaatgtttgttcattccccgcggatggtttcaccacgttcgcggttcgaatttttttcaaaaaaaagaaaaaccaaaaacttttcagcgttggagccaagcatttcaatcagcatttggtttgggcacgagtttacgtaaagaataaa

SEQ ID NO: 54695 - DNA, 234 bp, Heterodera glycines
ggtctacattcaattcgcagtgtttcgcccagccatcgattaacgttcatttccaactcattttgtctattgtttgcttcagtgtccgccattatccaacagtgacgtggaagaagattagaaatatacaagaaaaatttcaacgcaaaaatacattttatttagtgataatcgcaatcggtgacaatttttattaaaatataagcgttttctttaaacaaattttcattggtc

SEQ ID NO: 54696 - DNA, 1302 bp, Heterodera glycines
atggaattacaatccataacgctgggagtgaagttgttaaagtacgtgctccaacatctcaaactcaaaccaacacagacaacgatttggactgacagcttgtgttccgttgaacgaattaaggagcataagaaatgcgatcgatttttttcaaatcgattagcaaaaatacgtggacagtttgaagtcaaacatttggtcagtgcagataatcccgcggacgtggcatcacgcggcacaacaccaagagagttgagcagaaatttgttatggaagcatgacccaaaatggttatcagaagaaaaggccctgtggccaaaaccagcaaaggtttatcacccagatgaagagaagctcaggggaagtgcggaagatgaagaagtgaaaacagccgcagtcatgaatgaggtgcctttccaaccaaccattgatgtgaaccggtactccagctggaaaaaggccaaaaccgtgggtgcctatgtcttacgctggatacattcggtggcaaaaaacggatacaatggaaatttgttgccaattctgagcaaaatgggcccaaaaaagcacgggaaccaagacaagggcgtactgtcagtgcccgaattatgtgcatccgaacatttgctgatatgggaagcacaacaacaatttccaacggaggaaaaaacaaaggaaaatcttcgtgtgttcaaagacaaagaaatctggagatgccgaggacgcattggagaagcaacagtaaaggaggaaacgaaattcccgatcttcttgcctcctgaagcaagggccacaaaactcattgtgctggaagcacattggaaaatgaaacatccaagtcacagtactctgttggggtacataagggaaaagcactggatacccaaaggaagaaggttcatcagaaacacgatattgtctgagcgacacggatgtttgaattgccgcaaagagaggcttaaaccatatgcctatccacaaatgccaaacttgcccagtgaacgagttgcgatgataaggccatttgagaagacgggcgttgactattttggcccattaacaataaaaggcggagttaaagtctacatcgcactttatacctgtctcgtaatacgagcggttcatttggaagtggccgatgattgtacggcaacagaatttttgaggacctttcgaaggttcagctcacgccgcggcctcccaagccttatgtggtcagataatggcaccaattttattgctggagcagagtgcataaaagaggaatggagaagagaaatactggtggaaaccagccactcagga

SEQ ID NO: 54697 - DNA, 900 bp, Heterodera glycines
ccccgccgtgaggcgggacagttccaaaaattttgtaccacattttactgtggaaagtccaagtactttattggccaattacgtgtcaatgagcacagtcgcctttggccagttgtgaaacggaaaatggaaatatcagatggggtgcgctcttttctaaaaattcctcttttcgtctaaccatccctcccttttgtgcactatttcgtttcaaaattgaatcatttttttttgtcttttgaaataaattgtgaaaaatatacgaaaaattattttcggttttaattatgctgtacaatgcttttaagccccgccgtgcggcggctccccttttgtgcactattttagtttttaaaattggttccggactttttggctttttgaaataaattgtgaaaaatatacgaaaattattttagcttttaattatgcagtacaatgcttttaagccccgccgtgaggcgggacagttccaaaattttgtaccacattttactgtggaaagtccaagtaccttattggacaactacgtgtcaatgagcacagtcgcctttggccagttgtggaacggaaaaatgggaatatcagatggggtgcgctcttttctaaaaattcctcttttcgtctaaccatccctcccttttgtgcactatttcgtttcaaaattgaatcattttttttggctttttgaaataaattgtgaaaaatatacgaaaattattttagcttttaattatgcagtacaatgcttttaagccccgccgtgaggcgggacagttccaaaattttgtaccacattttactgtggaaagtccaagtaccttattggacaactacgtgtcaatgagcacagtcgcctttggccagttgtggaacggaaaaatgggaatatcagatggg

SEQ ID NO: 54698 - DNA, 388 bp, Heterodera glycines
gcttaaaagcattgtactgcataattaaaagctaaaataattttcgtatatttttcacaatttatttcaaaaagccaaaaaaaatgattcaattttgaaacgaaatagtgcacaaaagggagggatggttagacgaaaagaggaatttttagaaaagagcgcaccccatctgatattcccatttttccgttccacaactggccaaaggcgactgtgctcattgacacgtagttgtccaataaggtacttggactttccacagtaaaatgtggtacaaaattttggaactgtcccgcctcacggcggggcttaaaagcattgtactgcataattaaaagctaaaataattttcgtatatttttcacaatttatttcaaaaagccaaaaa

SEQ ID NO: 54699 - DNA, 213 bp, Heterodera glycines
atgaaacgaaaatttttgttaattctaaaagagacggatgaaaacggaagggaaaaagacgagggaggagaagaagaagaggacgaagagagcgatgatgggaatggggaggaaaagcatccgccacctccgaaaaaggcacggctttccaccgaagcggaagaagaggtgccattgcctgcgttattattatgcaattattcatggcattga

SEQ ID NO: 54700 - DNA, 669 bp, Heterodera glycines
atggccgtcactttgcacacaacggtgggcgacataaagttggaattgttttgtgaacgttgtcccaagtcttgcgaagtgagtgcgggggaatgcacaattcactcatccattttaaatgttttttcagaacttcttggcccattgcgcttccggttattacgacaattgcattttccaccgcaatatcaaaacgtttattgtccagactggcgacccgacaaatcgcggcaccggcggacaaagcatttgggacgcaccgtttgaagacgaattgcatgaggacctcaaagttggttggcattttgccaccaaataattaatttttttaccacagtacgatgcccgaggaatgatcggaatggcgagcaacggaccgaacacaaatcgttcccaatttttcatcacttacgaaaagcagccgacattggacctaaagcacactctgttcggcaagtcagtcgtgtcaaattttctataattattaagaaattggttttctgttgaccaactgttccgtttgtcttcagggtcattgacggatttgatgagcttgaagagttagagaacaccaaagtggacgcgaggtatcgcccggtggtggagcaacgaattcgaagcgtcacaatccatgcgaatccaatcgcggacggagcggcagaacaatga

SEQ ID NO: 54701 - DNA, 1134 bp, Heterodera glycines
atggtgggtgaaaacattttattttttgggtcattggatacccatttcgccatgatgaagtttgcccgtgcatgcataaaattttttttttttattactctcaccgactgtaccggagttataattatggcattgacttttttttttgtgagacagtttagtcatcacaaattattgaatatttatttttcagaattttgtctctagggcaatctgtcaagttatggaagagaaataaaatttgaattataattattattcttttggtcagtttaccctaatctcaaattttgaatgatacaaatccttaatgatatgacaaacaaaaaacagaaatcaagccttaattcactaatcacaaagggctctttgcaaattcaaaaagcggaaggattttgcgaattcctcattaagctcacaggaaaggagaattttgaaatttttgataggctcctaacatggatttgtttttttaatccttttggctttcttaaacctgatcaattttataccaagtctattctcagactgagaagcttggagatctcttagcttcaaagatggaccatttccgaatttttaaggggtactgtaactgtattggcaaaccaaaaaagacaagtgagaataatctaaaggttcagaaaacactgggtttaccatgcgaatgtggctccttaggtacccgataaatccctgattttttaatggaagaaatcatcatggatagagataggtttattagcaaaaaacgaaatgaaactttcagtacaaatgactcacagcagcttattaacaaggagacctcacaggggaagctgaaggatttaatatttgaattattgaccgctcatccgagccatttccaatctgagtttttatgatcaaagccctcgggcaactctgtcaagaatgaagggacaggagctattaaaaaaaattatttaattgcagtcgaaagtgttaaaacagttcgattatcctcaagtgaacagtgagaacctttaatctttaaaacgaaccttgtcgtcaagcaaagctaaggttgagagccaagaggtgccaactatcactatttaacctatcattggtcatgtggattggataaaaaatttatataaatttataaataaa

SEQ ID NO: 54702 - DNA, 403 bp, Heterodera glycines
  unsure (1)..(403): unsure at all n locations
atgcttnttcgaaatntaagtggaataatgaaaagaaaaaattaacttttaaaatatcgaataacagatgatatttattattgggttatttgatctacacgtgccatacattatcgacgaacttctgcatttttaaatcaagttttgttaatttcaaaaattaaacaaaaatttaaaaaaattataatgaatattatgattaatgaaatattaaaaattattttatgataatttgaatgataaaaggcaaagaaggcaaaattaaatatatagggttatattttcatccgattgagaacaatggtaaaatgattcaaaaatattttgctaaaattagattttcctcttgccacgggtaaataattctttccaagaatgaaaaagataatttatgaataataaa

SEQ ID NO: 54703 - DNA, 2326 bp, Heterodera glycines
atgactgatctcccgaaggagcggtgcacctcattccattctcgttccccaacacgcgcaaatcccactcgtcctcctggggatggattgccggcggcgtgccagcaaccatccggtgctaccagtgaaggtgctgatgtccagcccagaatatgaggaagggaacgagtgagaacgaggattggatttggggggaaaacggaataagccaaaatccgggccctggataaatggcctccccaaattggtaatcccttgggcgcccactagatcgaatacgcgtgcggggatgggcgagaaggagtaaaataataatataaatattggccaattacattaataataattccgccgcgttctgctctcggctctcgctcgccgattaactgcccgctcaactgaccccttatcgagagaatgctcccgattaaatagttggacttatggaacggaataaagatggggaaaagcggggataaatggtgtgagaaagagattgaacggatgtgataaattgcgccttacaatacccaatttaaagaattaaataatttgccacaaaatattcaaaatggcgaatgctttggcattttaattgagccagaggatgaggaggccgaaatagagcattactcactccattttgaaattcatgtgaaaccaatgggaaatgagtgccaaccgtcacaggcggatgaaaatgatcaaaatccaccggcggatcaaaatgatcaaaatccaccggcggatcaaaatgatcaaaatccaccggcggatcaaaatgatcaaaatccaccggcggatgaaaatgatcaaaatccaccggcggatcaaaatgatcaaaatccaccggcggatcaaaatgatcaaaatccaccggcggatcaaaatgatcaaaatccaccggcggatcaaaatgatcaaaatccaccggcggatgccgaagacaatcggacaatattccgaaaaatctcattaaaattgtacaggccaaacatggcacaggtgtacacggttaatttgggcaaaattgacccgcccgaattgtattttaaccgcacaatttttgtggccaaagaaaatgatttgaccaattatcatgccttattgtatgccctaatgcacaaaaatcaagaagattctgatcaatattatgatctgttgggctatgtgcaactgattaaaatcaaggacgaagaagaacaagaagcacacgccagctcacaatcagaaaagaaagtaaacgcaaaaagcgaacatttttaaatttgaatttggcattatgtcccaaaatcggattcgctcagttggacgctcaaggttgagcgccagcaagcttttccactacatatcacttttttatttgtcatccaaatccaacaatctttgtatcattcgaaagctcttcccatgctctattagcgttacaaaaagcgaaaagattttcatgcctgggaaaaaaaaattcaaaaatttcgacttttcgcaattttcatgtataaccttttttggtaattgtctaatcgcgactcaatagtttagaaattgcttgcttgtaaacatgttaagagctttcgataattatattattattattatgcaattttcagttcaataaataccaattgaaaattccaattaatcaaagtgcgcttttcaaacattgcattcataccttgacgttgcaaatttgttcttttgaaaaggtacatttattaatattgcaaattatttactaataaatgaaaattaaattttaaaaaataattgaaataattttaattttttgtatcttaaatttcgaaatatttcaatttactaccgaaaaataaattatcaaaaaacaataataatgtgtgctaatcacttaagatgctgtttttgcaaaaatgcgttaaaaacgaaaaatatacccttaagaatcgatcctaaaatttccaaaaataagcacccctaataaatgtaaattttcttaaaaattcatctccaaaatttattaaatttttgttgacaataatttttgattttaaaaattatttattcaatattaatttggcttaatttcgttacctttttgaataaatttgttcattttacacccataaatttgaggctttttagtgcctattttggctgtttttaaagcctaaaaatattagctctagtaatcacatccaaattatagaatgaaaatcacaatgaaaaaatggagaacgaagaagaaactgagccgaaagaatgcccaatttgttatgaatcatttgatgatgatgacaaattagcaatgaaattgcatgaggattatcaggctaataatctcaattaa

SEQ ID NO: 54704 - DNA, 763 bp, Heterodera glycines
atgccaaagcttctgacaaatttttgtgcattaattttaatttgtcaaattacatttttggcttcaacaaatccattggaagaaacgcctcaaaaaagcttagccaaaaagcgtcttaaaatccttgtttattcgcccacaattggatggagtcacatgcaatttatgggctcaattgcggacactttggtcggggcaggccatgacgtggtaaatcatatcgataattaaaaattggactatataatttaggaaatgaaaaattttattggcaagcattaattgtgcatataattgacatattttggggaaaaccgtaaataatgcctattttgtctttttgttttttatggctgaaattaaatattcaaaaatttcaataaatatattttaattagaattttttgcgaaataaataatttttgaagggaaaaatgatctaattgtgaacaatttcccagaaatttcacaaaatttagcacctttttcgcgttttgatgaacaaaagggccgaggcattgcccaaggaagtgtttaatgtgaccaatttacacaattttttgccaaattttgttcaaatgggcaaattagacatcaacaaattggacgacctcaaagagccattttacggcaaaagtttcaacacttttctcttccaaacggtttgtgatcatatgaaaaaaaatggaaaaatttgtaattaaacaaaaattacagaaattaaacgaacaatttggtaaaattctatgcgaaatttgccgag

SEQ ID NO: 54705 - DNA, 231 bp, Heterodera glycines
atgggggtctgggtgagaaaagagaagggaattggtgagggatcagaaatttttgataaaaataaattaaattatttattttcatttatagtatttgttcatatacataagtggtcaagtggctaaactttattactttcattattggtctcttcggttcaattccccgatggaacggaaaatttttttatattttctttaccattattttaattgaatttaattaataaa

SEQ ID NO: 54706 - DNA, 1107 bp, Heterodera glycines
atgcttcctgcccctttggtcggtttcattttgctgttagggcattttgtgtttgtttctgtcggttccaatttccacgtgctcaaaaaacggggatacgacgaaagcgaaagttacagcagtgaagaagagccagtgagcatgaatcacaacagttccaaagaatttgaagcgtaacgccaattttaagacgtacaagcgccacgggtatggcgggcgctttggtggcaaacgccaccgttacccaccggcgcatggcaagggacaccgcccgtcgacgtacgatggcttcccttacggcgattctccgcttcttccccaagtcatcgccgcccctcctatgcctttctcgcctttgcaattgccttccatttcgaaagcccaaagcgaccttggcgcattgcaagtcgcttctcctgttttggaaggctctccaccgaaagaatcgcctcctctcgacgcttcccaacctttgaacggcgccacggcaattcagtcgcctgctgcagcgcccgagacaaacataatgaattctttggcggcttctcctccattggcaacaccgcagcaattggcatccctttgggtgggcggaagaaagaaacggtcctttaaaggtgcgttgtcgcgttaattttgcgcaagccatgaaaacccaaaaaagaaacaattaaacagagccaaagacaaaaaaagcgaaagaacggaaagcgatcagagagaatgagccgcaggggacggagacaacactcgcagcggacacagaagagacgacggaaaagccgacaaagaaagcggcaaaggaaaagccaaaacaaagaatgatggaggaagtaagcgaacagcggcagaagagaagcattaattaactcaaaaattgaaatcacagaagggcgaaaaggaagcggagaaaaagaaaggaggagaagcaggcaaagaaggagagcaagtgggcaagacgaagaagaagcagcagcagaaggcggagaagcaggaaaagaagcggcacagaaaggaggaggaggaagaggaggaggaaagccttttgggcaaaaaggagcagcataacgccgagttcaagcagggcggcccgcaattccgcagcac

SEQ ID NO: 54707 - DNA, 128 bp, Heterodera glycines
atgcatatgcccattttagcggtaagattaaaactattaaaaaaaataattttattcaggcattaagattcacatttcattttgagagaattagctagtttggaatatagccaaccagaattaataaa

SEQ ID NO: 54708 - DNA, 886 bp, Heterodera glycines
ctccgggggattgtggttctccggccaaggacctgcccctccgggggattgtggttcaccggccaaggacctgcccctccgggggattgtggttcgccggccaaggacctgcccctccgggggattgtggttcaccggccaaggacctgcccctccgggggattgtggttcaccggccaaggacctgcccctccgggggattgtggttcaccggccaaggacctgcccctccgggggattgtggttcaccggccaaggacctgcccctccgggggattgtggttcaccggccaaggacctgcccctccgggggattgtggttcaccggccaaggacctgcccctccgggggattgtggttcaccggccaaggacctgcccctccgggggattgtggttcaccggccaaggacctgcccctccgggggattgtggttcaccggccaaggacctgcccctccgggggattgtggttcaccggccaaggacctgcccctccgggggattgtggttcaccggccaaggacctgcccctccgggggattgtggttcaccggccaaggacctgcccctccgggggattgtggttcaccggccaaggacctgcccctccgggggattgtggttcaccggccaaggacctgcccctccgggggattgtggttcaccggccaaggacctgcccctccgggggattgtggttcaccggccaaggacctgcccctccgggggattgtggttcaccggccaaggacctgcccctccgggggattgtggttcaccgggcaaggacctgcccctccgggggattgtggttcatcggacaaggacctgcccctccgggggaattgtggttaaccggccaagggacctgcccctccggggga

SEQ ID NO: 54709 - DNA, 91 bp, Heterodera glycines
atcactccccaagttcgcactgctctgttcggtcccaatcagaaccgccgcttcttcgactgatcggtcccttcgcttcgaccattccatt

SEQ ID NO: 54710 - DNA, 239 bp, Heterodera glycines
atgggcgaagttcgctttcactccgattacgtttcctccaaccgcggaatcaccaaaatcatccaaattgtgctcggttttgtcgtctgttcggtgctttgttcgaattggtgtcaaattgcaaattaacgtggtaaaaacacacaaaacattttgaggtatggcgggtacagctgtttcggggagggccgcctcggttatgtgagcggattgaactttgtctgtttgatgattaacat

SEQ ID NO: 54711 - DNA, 1186 bp, Heterodera glycines
atggaaaggcattttcatgttcaaaaagcatttcaaaaagaaaagcatttggcattatttgaaaatgcggtgagtttggcgttatgtcttccgtttgttttccgtccctcgtcagattggcaagtgcccttcggacattgtgcggttccctttgaagtcccattgaaagagcaaaaagatgatcagcacacagacccaaaaagcaaacaaaagtgatcaaatccaaggcgaaaggcaattagcaaaaggtaccgctgcgattatcatccaaatgttccagtaagagtactgtatcatgtaccataacagaaggacgatgccgacgagcagaagaagggcggcggcgacattgtacaattgttcaagtttcagtggacgaatgttgaacagattgagcaggaaaaggatgctcaaaagatcaacaaaaggcaataaaaatgaaaatggaacccaaaaacaaaaccaaacaaaacaatcggacactgacaaaaggaaaacaaaatcttatcagcttattaagacattgccaaggctcttatgcagtttaacccccataaattttttttcgtatttcatgattaaaatgccaattaataggttttcggggtcgctgatcacgaatccggcatccgtttcgaccaattccgaaccccggacccgaattcgaacaaaaatttgaaattccaaattttcaacaaaattcacatttactgcaaaaaatcaattaaaatgccacgaaatgtgtgagtaaaaaacaagaaattattggattctttcacaaggatatacaacgctaatttgggaccaaaagttaaaaaactgttcattgtgaaattttggagttcttccattttcggttttatttttggggattcggaatggtgacagccgttcaaaaacacagtgttggcccattacaccacagcaccaaccccccccccccccctctggttccccttccccctccactctaggaatttgaacaaaagaacggcacggcagcagcgattggtggatacaaaaggccttaaaattcacagcaagcaatggatggacaaaggacagaagactgagtggagggagcgacgaaagatggccaacgaggttgcaatggagaaatttcaattttaccaaataagcaatgccgattgaattaaagttttagtaaatattcaattataataaa

SEQ ID NO: 54712 - DNA, 453 bp, Heterodera glycines
catccttttcctgctcaatctgttcaacattcgtccactgaaacttgaacaattgtacaatgtcgccgccgcccttcttctgctcgtcggcatcgtccttctgttatggtacatgatacagtactcttactggaacatttggatgataatcgcagcggtaccttttgctaattgcctttcgccttggatttgatcacttttgtttgctttttgggtctgtgtgctgatcatctttttgctctttcaatgggacttcaaagggaaccgcacaatgtccgaagggcacttgccaatctgacgagggacggaaaacaaacggaagacataacgccaaactcaccgcattttcaaataatgccaaatgcttttctttttgaaatgctttttgaacatgaaaatgcctttccatttctttatttttcccgttcgaatgcttttcctctgccgtccttt

SEQ ID NO: 54713 - DNA, 850 bp, Heterodera glycines
atgcttttggcaatgccaaaagctgtgcaattgccagtaaaagtacaaaatcgaacagaagaggacaaaacaaaagggcagaaggacggcgaaaggcgacgaatgggaagggacaaatggcagaaaaacttaacggagggaaagttggggaaaaagcagggaaatgggaccattgaggaaacagacggcacggaaagggtcgtggacagagaaaaggacgatcgcaacgaacagagtgggacacaacgccaaagcgaacatttgaaagggacgaagaaacaaacggtcaatggaaaatgtggcactcaaaaaccagcaaaatgagcaaaggacgaagagcaattgggttggagcgacgaaaggcgtaaaaagtggagaggaaaatggcaccgaagaggggccaaaggggcagagagaagggcagccaaagggacagcagaacagcggaaatgaccgcgtcgacgaacgcggacaaaacagccaaagcctaagtcattccgtcttgggagtgccgaattgggcacttaccacgacgcgttcattggctttgacattttggcacggatactccgcttcctcagaaagcaaagccttggaatactctgacatcagaagaaggaaaacggaacaaggctaggaggagcaaagttgggctaatcaaagcaaatcccaacaaaacgactgatttattcgagtgggggttgagagggaatacggatgaatgaatgagcaaaacgggcatttgctctcttcccgcgtcgttcggctgattttatctcatcggaggcgaaaatgggcggggacagaccaaaggacggcagaggaaaagcattcgaacgggaaaaataaa

SEQ ID NO: 54714 - DNA, 1130 bp, Heterodera glycines
atgaagggatacgccgaattatgtgagaagagaagcgattggcgcatagtcaactgatgatttgagaacacattcagatgtggccgacccctttctcagttgtgtttctgctgagaaacagcgattggagcaaaaacagtgagtgccatggacaaatccatggagagggcacgggaaagggttcgggaagaaatgtgggaaaggattcggggagcgtaaggggtaggacatggaatgtgccgcccctgtgcataattcagaaaatttaagcagcagccccccacaattttttgcgccaaaggtactcgctcggccgcttcgcggcctcgtactggtgccttcggccccccacaattttctgcgccaatccaccatcatttaatcactgggactcaacccaccaacattccaatcaacgggactcacccaccaacattccaatcaacgggactcaactctccagcattcaatcactgggactcaactctccagcattcaatcactgggactcaacccaccaacattccaatcaacgggactcaactctccagcatttcaatcactgggactcaacccaccaacattccaatcaaagggactcaacccaccaacattccaatcaacgggactcaaccctccagcatttcaatcactgggactcaactctccagcattcaatcactgggactcaactctccagcattcaatcactgggactcaacccaccaacattccaatcaacgggactcaactctccagcatttcaatcactgggactcaacccaccaacattccaatcaaagggactcaacccaccaacattccaatcaacgggactcaactctccagcattcaatcactgggactcagctctccagcattcaatcactgggactcaacccaccaacattccaatcaaagggactcaacccaccagcatttcaatcagtgggactcaacccaccaacattccaatcaacaggactcaaccctccagcattcaatcactgggactcaacccaccagcattccaatcactgggactcaacccaccagcattccaatcactggcactcaattctcctgcatttcaatcactggggctcaaccctctagcattcaatcactga

SEQ ID NO: 54715 - DNA, 1620 bp, Heterodera glycines
cattgatgaactgatcgacgtgatccagggcaaccgggtgtacatcccctgcctacacatatacaacaaaattgaccagatcagccttgaggagatggaacgactcgcccggctgccgcacagcattgtgatcagttgcgagctgagcctgaacctggactacatgttggagaaggtgtgtgcaaactgccatcggagtgtaattttctgccaactttttggagactgaaagtgctaaacatggattttatattcggcattaaagggcaactgatccttacttttttcataacttctcaatttgcaattatttacaatttttaatcttctgttcatttgtttccagctttgggaatatctcgctttgctccgaatatacaccaaaaagcccggcaatgcgccagaccttggtaaattatgtttttcttaaattttactaaaccatccaaattttaagggcctgaagatggcataattctgcgcggtaattccacggtacagtcttttatttgtattaatgttttacttaattattgagttaacccccgagaattttgggacagggcgttccccttcgcccacaaatgataataaaaagaaattctcagaaaaaaaagattttttcaatgatttgatatcaatgaaatgttttattcttctaaagttttctttttgttggtactttttttgtcaatagaggtaaatttactgaatgattaattgcaccccacgaatttacaattttcttttttgaaaactgaaaggctccaatttaatttatttattttaaacaacatctaaaactctatacatcgtggcaagtaaatcatgcaaaagtgcccgtaaactttctttctgtgtgcccaggttgagcacgcgtgccatgcgctgcaccgcactttggccgcccaatttcgctatgccattgtgtgggggacgagcaccaaattcacaaacgcaccacaacgcgtcggcatccatcacaagctgcaccatgaggacgtcattcaaattatgaaaaagaattgaaattgtttcatattttattgtaaatgtattgtactgctcccgcggccgttgttgtttttgttccaagtgattttatcatttgttttcgtttggtaaattattttccacgttttatgtgagtgaaagcgcaaaggtcttttctacctagaaccattttgcttctttcatttctgtttgtgctttattccaaaataattttaaaaatttgtttttaatgtaataaaactagcaaaaatgtattgcgcaaatgccaaaaagtgttgtcgaccgttggtgaatcattcgcgtgccttttccatacatcagtggagggcattcaaggcatgtcgggagtcgaattggacaatggcaatttcatctaaaagccgagattttgagcaaattaaaaataactggccagccgaaacatgctacttgttgacattattaatattgtcgagaactgagtccactttccgccccctcaatttgacaatggcattttgaacaaaaaaaatgtttaagagatggcaggacgttgagcggcgcaacaattacattttcgacatctatcgaaagcaacaaaatgtgatgaaggaacccgagagcgga

SEQ ID NO: 54716 - DNA, 165 bp, Heterodera glycines
atgaaattgccattgtccaattcgactcccgacatgccttgaatgccctccactgatgtatggaaaaggcacgcgaatgattcaccaacggtcgacaacactttttggcatttgcgcaatacatttttgctagttttattacattaaaaacaaatttttaaaatt

SEQ ID NO: 54717 - DNA, 863 bp, Heterodera glycines
atgaacaacaaccataacgatgatgatgatgatgaggctttcggaggaggccaggctgagcaagcaggaactgcacgcggtgttcaatttctgcgaaattttgccacaactccaacagcaaggcttcattccggagaacaaacatgccaggtgtgcacgacacgaaaatgcgcaccataacgcatgggatgggaaattttgcacatttcgggcacgattgccaaagattttcggggattattctgccaagaaagtgccgaaaagtcagggcatgggaaaatgccaaaaaagccaatcgtactatagggagcgaagctgtctctgataggaaggatattcggcgtcggtgacccggttggaaatggtgccgagcgcgcaactgcatgggttcgggagtaccgaaaaaggccctcctatctccatgtgaggggcggtgggttctagtacaccgggtattcgagattgtcgagatcagtgtcccatcctcctgctgttcccctcgctgatttaatggcattaaagccagctaactagcacaactttttcagggatatatgcaaaaagctggtggacatgctgaagccgatgttcaggaaacgggcggcccagtctgcccatgcgtctgttgtgccgatgccgtcgaggccacgccggcacgttgccacggccacgctgttcttgcagcagcgaaagcgatgaattgatcaaagaaaatgatcaaaaacaaaaacaaaatatggagcatgatgaagagaaaaattgtttcgtccgtcgtttcgttcacgctgaatctcttcccataatccgaatgtttttttttcacaattctcttcaaaaccgtcccaatcaatcgtcataataaa

SEQ ID NO: 54718 - DNA, 998 bp, Heterodera glycines
atggttgcgcattatttagaatctaacgaaacttttttacgaaacttttactatctaacggtaccaagcatgttagtaagctaatgagttgagaaaagttatacgaatctttatcgaaaaactacatgagatggcttttagctgttttgtttagcatttatttatttggaaaaataataaaagtcattaatatgaaaaatttatgaaacaattataatttatttaatttatattttcatatttatgtatgatttccggtgacaaaggcaattattgctaatacataattaaaagtcaaaaaaatctttgaaaaagctgctctcaaaagagaatatctgtgacgttttctccgcaaatccacggcaacaattttgcaaaaaaaaattaaaaataaattatttgaagatattgaaaaattggaaatcatcagtgcgttattatgaagtattttaagagatttgtaactttcaattaaatattaaatgttgcattgtcggaggatttcggagcttatgggggcacgaattaaataaaatgaacgaaaaatattaaatttattaaatttttgaaagaaaattacaatttaaaatatacagaagataaatagaaatagaaaagaaggctatgattatggtggttatggttactgtacaagtcaccacacgcaaatggcagtcggaataattatggaatttgaaatgaaatagaacggatacggtggtggtgaattgtcagtcaactacagtatggagggctctggctgacaatgatgagggtggtacggtaaagccattttgtggttggtattatgattataataatgataaataataatacacgttttgcccgtcgggtgaacctgagatgcttccgggaaaatgcttctcgcgccgtcgccacagaagaggaaaagcgatggcacagaaagagagagagagagaggagaagcaaattgcccgtccagtgaatggttaagtggtaagaaaattatgcaaaaa

SEQ ID NO: 54719 - DNA, 1339 bp, Heterodera glycines
atgcgaaagtgcacgccattcgatcgccgattctcatcggattgcccgtcgcttgcgactggttcagtcagtcagaattggccaggacagaattccttctatgttttaatggtatttattaaggaatatcaggacattagacggagttatgaccacaggctgccaactgtgaggttttagccaggcctaattttcaaaatgagcctatgtttcttggaaaaatcctcacaaattggtaatttttaagttggcagctttggaggtcggatttatattttctaaaactgccaattattggttaaaattaacttcagaccaaattcgcaataatggatttacgaatgcgatcgaattgcttcacgttgaccccgtcgcaatgggatttcacccgtgttttcatgtttcctataggtctgtaatttattcgtttccctttgtctcattttggtataaacaaatgcttttttggcatctgtctcattaatataaatcataattttccaattttaggcgttatatctatcgtcttcgcgtcatttcgacagagcaaagccttaattacccaaatcgcttcttcgcccatttgtcccatgtaattccctcggacccttcgctggcgtccctctccgaattcaattacagttggaccattccgccgacttttaacatcgaaagggcccaatttgtgtgcgacctcctgaaaagacctggacagaattttgcctcatttttcttacaccaaatgcgccaaaggataaataacaaagaatacaaatcagtgaccaggagacgtcaacttttgcagttgcaaatcaacaaaggtatggtgtaatattgcaaaaaaaaaagattttcggaggcctcggaacggaaccgccgagtcccaacccaaataagagacaaagacgaaccttatattttgtttttcacaacaatttttacggccctttttaaaatttttgggaacacaaaagtcgagctccgtcggaaaatgaaaaaaaccaatgcaaattttagaaatactagtactagagagtaaatggcaacctaattgcagatgcgattatacgtttcttattcggatattacataaaatattaatttctaccgcaggtgaaccctatcatgattttactgattgtgaggacgaagcgcagttttataacctggactttgttgggcatggtttcatgaggcaacaggtaattattatttttgttttataatgaaaaatcaatttctgtaggtatcgcgaggaaaagttaaagaaaatttgttcaaaaagttaggcaagggcataaggattcgtggcaatcatataaattatgaagaaaataaa

SEQ ID NO: 54720 - DNA, 1211 bp, Heterodera glycines
atgacaataaaagcattctttatttttgttcgtgaaatttggccaattttttctgaaaacattcgccacttgggctttaacgatggtgatcatttggacaatttgcgtcgtcaaatttcgccaacaattctcactgatctgaatcagttgaattcaatctattcctttgatcggttgccctctgcgtttggtgatggttttgatgggccaatttctgctggccaagcattgtccaaatggttgcactctccgagaaaagatggacaacccaagcgattgcgttgctataattacaacgaacaagcgaacactgattggatcaacaatttcaaggaggtgtggtccggggggggggggggggtggacaaaacgtagcccgcaaatttttattttaattaaaaaaattatttaaaatttagttacctagcctaaatcaaaaaaaaatagataaattcgaaaaaaattattaagaaaattcaaggaaatgtaaaaaagtcgtttttttatttttctggaaattcagaaaattagtttttatacgagacggcgacgttttaggggcgtacccggtctgtggatggcattctgagttattttctgaaacccgaccccaaaaaagttataaatcgaaaatttctgaaaaattccgaattttatcaaaaatttcggaaatcggaattcagtgccatccctggtgtggccataattcgacaaatcactgattgttgttttccaatcaaattgtttagcattttcttcgtgccaatgccatttcttccgtcagttaccaaattcatttttctgttcctgcgccgtcaatgccaatggtgccgtttgaattggtgaacgaatggacaaaggaaaagctgacattggccaaaacaaatgaatgggacatcgattggataatgaaacgatgcaaaattattggggagaccgcggcggtttattgggaagacggaaattgggacaacaattgtaataatgtgtccattcgtctttttatttgttccaattgcattgggtgagcaattaaaaaaggcatttaattttgtttaaataattaaaatttcgcttaatttaggccattgtctccgccaccgaaagaagaagacgaagcaggacaaagcagcgaaaaaggggcgtcgtctgctgacaaaatgagtgacggacaaaagaacaaaaacagtgatcagccgcagaagaaatga

SEQ ID NO: 54721 - DNA, 1056 bp, Heterodera glycines
atgggggggggggggggttagcacctattttggcactttcgaattttagcaacctattttggcctttttcagaaattttatagcaaaaatgcaataaaaacgaaaaatacacccctatgaatctatcccaaaaatttctgagaaaatatacccctaaaaattaaccaaaatttcagtaaatataaccctaagaaaggaaaaattttccgaaaattcgtctccaaaatttatttatttattttcttgaccagttgcaattgtgcgagcgaaattgattaaaaaattagtcacttttggaattttagtgcataaagacactggatttttccaatttttaacacctattttcgcaactatttttgcattttgggcgtttttagcacctattttgcacttttttggcacctattttagtacctatttcaggatttttagcacctaaaaatccggtctctactaatgaacgaccaattttttgtttagttttctcggacaacaaagtgcttctgtcgcattatgacagaattttgtttggcgccaatttgaaaagggatgaggacgacccaattgtacaccttttgctcgccgatgtgatcatttttgtccgatgggtggaggaaaagttgggactgacgcggcggcgttcaatcgccaccaaacgcatcgaaaaaagttgggagacgcgaatagaactttttgagggcttttacgacaaaatttgggaagaggacgagagaaaggtgcgccaattgggagaagtggtgacaggattattagacaagttgaagcagtgcctggagaaggacacgacgaaagtgttggaggacgaattatgggcacagataatggagaagggaaatgcgaaaacgattgacatggaaaagcgacgggcgtacgaaaagtggaagcgatcactgcattgggacataattggaacactgatcagagaagagccggcatttgccgatcgcatgaaaaacggtgcaaattttacacatttattagggcaatgttgatttaaattaatgaaaaaagcccgaaatatttaaaaataaa

SEQ ID NO: 54722 - DNA, 1110 bp, Heterodera glycines
atgacccgttttgggccagtgaaccaaagggccagtatttcgccgccccgtttggttgcgccggagttcgtcgtgctacaaattgggcaagctgctgtaagcagccaacaatcgcaacaaattccagaaaatgtccatttgattaacaaagaagagggggaactttcggattctgggggtgaatcatcagatgaaattcaatttgttgcaaatgtccccgctcgcggacaaaatccatccgcagcttctgagcaacgccgggcccaatcttcagtgccgagaatggcttggaaccgacgcccaccactttctgtcagctattatgtttttaatggggtgcaatagaatttattatttatgaaatatttttttacttaaatttattaaaaattgtgctcatttaaagcgacgttccttcggcattggacaccaaaggcagcaatatcgtcacattttgccagtatgtaaaatttaatttaatctattaaaagaattttaatatgtcaaatttaatttaaataactgatggaaaattttgaaaaaggtccgcatttataatggaaaaaataaaaaatttgtagaaatgtactctaaaatcgattaaagaaatcctctttttttaaatactgatttatgtaatatttttgattatttacattctctctttcgttaaatttttgttattacaataaataattcatgcccttcttattaaataagtgcctttttcttttagccggtccgtatcacgcccggaggtcctcctcagccactttttccgccaattgttcaacctgttcagccatctgttccgctaaacgttccgtcgccattatcagtatgaatagaattttctgtccaaacttaatttctttgctgattagctatggaaaaagaaacacaaaaaagcattttctccgtacaattttgctttaactgactaaattaatacaaaattcatatttggatgttttggtatataatgcatattgcacatatgtatttttgcagtttatacagcattttaaaatttcttaattacttcgagtgccaaaagaatccaattataatttattaactggtcattggactcccgtttgaactttctta

SEQ ID NO: 54723 - DNA, 708 bp, Heterodera glycines
atgaaaagtaaaattttaaaaaaatttggtcggtttttagcaagtttttttaataaacagtacattgatactttagaaaaccatacaaatttattaaattaaaagcaatatttaatgttttttagtaaaagaatccaatgaaccctcgagacccggattttcttcaaaaaattgaaaaaaaatgtggccatttttggtagatttttttctaaatagtaaattgctaatttcgaaccgaggcattttttaaagccatatgcgcgtaaaaatgcaattattaaagattaaataaaagcccaatgaaccttaaaacccctaaatttgttcaaaaatgcaaaaaaaaaattgaccgatttttgcaaaaattgagcagaaatttaacaaacaaaactaaaagaaattgtactgtttgacacaatggtgtggtgaagaaggtggagatggcggttttgggataacaaaagtagaattggattttgaatgaatattttcagcgagatttggaggaatagccgatgaaattggaggagggggaacagaaaaggccgattggggaaaagttgaggaagaattttggggaaaagaaagggccgaagaagggaaaaaacgacgtgctggtggagtgcggccaaggtttgagtggcttgaatgtccaaaaaatgaaataaatagtataacaaataaaagaagttgaatatcaacaataaa

SEQ ID NO: 54724 - DNA, 1669 bp, Heterodera glycines
atgtaccgccccagtcaaactccccgcctgacactgtcatcggcgcgggtcgccgggccaccgggtggcccgacttaacaccaaaatggacaccctttcgggcgcactcccgttttaccgattaagtaaggaatcgatgaaagtagtggtatttcactggcgccttgcggctcccacttatgctacacctctcatgattcttcacaaagtcagactagagtcaagctcaacagggtcttctttccccgctaaatttgccaagcccgttcccttggctgtggtttcgctagatagtagatagggacagtgggaatctcgttgatccattcgtgcgcgtcggtagttagccgacgaggcatttggctaccttaagagagtcatagttactcccgccgtttacccgcgcttaatcaagtttccttggcttaacattcagagcactgggcagaaatcagacacggtcaacgtccacaaggaccatccgtctcctctgttttaattagacagtcggattccccgagttcgtgccagttctaaactggtcgttcagcgccaaccgaagtgcataccctgacgagcatacacgcagctgaagcgctccacaagcagctctcaccactagtccacgcaccatccccgaaagaacagcacacagccacgggcaaaagccgcctgtttcacgcaacagcccggctgacccgacctttagagccaattcttttcccgaagttacgaatctaatttgccgacttcccttacctacattattctatcgactagaggctgttcaccttggagacctgctgcggatatcggtacgatcaggcaggagatcaaatagctccctcgcatttcaagggccgtgtggagcgcacgagacacacaggaaccgcggtgcttacgggcgcacatccctatctcaggctgagccacttccaggcacgcacaccctaaaccagaaaagagaactctggctcggactccacacgacgtctgcgagttcatttgcgttaccgcgcaaaacagctcttgcgaaccgtcatttccctagcctggcgtgggaatgttaacccacttccctttcggcaaccggatggaccaactgcgcaagcacagaaaagtcgtcatccgtagtgtgttacggcgttagccggtgccttaggatcggctgacccacattcaactgctgttcacgtggaacccttctccacttcagtcttcaaggatctcacttgaatatttgctactaccaccaagatctgcactggtggaagctccggccgggcccacgcccaaagccttcaacgcaaccaccacgaccctcctacacgtcatggccagactacgcgacaagcacgtgtacaagccaatgacggtggagtataggtggcccgctccagcgccatccattttcagggctagttgattcggcaggtgagttgttacacactccttagcggattccgacttccatggccaccgtcctgctgtctatatcaaccaacaccttttatggggtctaatgagcgggaactttggcaccttaaatccacgtttggttcatcccacatcgccagttctgcttaccaaaaatggcccacttggagctcaaacattcaacgcctgggtacagagtcaagcaaccctggcttcatacccatttagagtt

SEQ ID NO: 54725 - DNA, 823 bp, Heterodera glycines
atggccgtcttcgatgatggcattgccgccgggcaccagcaaggacagccccggcaccaatcgacagcaacgggggcggaggacgtgctcatgtacgaccacccgttcaacgacgggtattttattcaaatttttaaattctattttatttttttggccgggccaagccgaagaaaccgtttttccaattttaaccgttttctcagaatttggttgtttgttttttttggtagtgtatcacaatgagaaaaaattggtaaaatttgcagccattccgtacttttttcaaataaaatattttcccttacatttttgcctatgtgtaacggagtcccttaaaattggacaatttgtaaccgagttttttcgcatgaaaaatcgcaagcgaggcctaaattcgcatttttctcataattttgggccgttaaatttatttattccgatcttttttagcaatttcccaaaatttttcgtatactgaatttcgttttccagcaggcctttgaacagaaaaaaatattcaaaaagcggattccgaggacttatttttttcatcgcccctaaaactgtatccaatgcattttgcaaaattaaacttctttaaattttatgggcggattttaaaaaaaagattatgctgtttcggaaggcgtcgctggggaggattttcaaaaattaacgtgcccagacatttgcgcctgtgtctaaaatcgggttcaaactgatttttttcaatccctgatagtctaaatagcattttataactgtaaatttttgaaaaatcgtcaattattcaaacagcagaattaatgttcctaataaa

SEQ ID NO: 54726 - DNA, 282 bp, Heterodera glycines
gtgatgaagcattgcattcggtatggatgcggttggaacagctttggaagacaatgcccgatgaagaacaaatgcgaaaattgttggaacacaattttgtgtcaaattggcttctcgacacaggaaaaatcgacgaaatgaagcgggtcagtttggtgaaatttggtttcaaataaaattcccatgcctcaggaccgtgaagaacaacaaggagaaattggagaccagcgggagacggacgaagatagcaatggagaagaagaacaattcgattttgaataa

SEQ ID NO: 54727 - DNA, 366 bp, Heterodera glycines
atgagcgaaccgatgcttcttttcttcttaaaagtcgctgccaaatcaaatttggccagaatagaacttctcaatggtgttgtcctggagaaagttggagtaatgcgatgtaagtgttttttttgcgattggtgtatataaaaaatggggtccacttcatttccctcccccccccctgtatcagttcacccccagctcggttccccaaagaaatttttttttaaatttgctaatttagaaattttttaagaaaaaaatcttagaaagtttatataagaaaattttctttaaaaaaaatttttcgggaaattttcagcgattttttgaattttttttttaattttcaaacctaaaaatcttaataaa

SEQ ID NO: 54728 - DNA, 273 bp, Heterodera glycines
atgcagatagtttggattacggtatgaattttccgtaatttaatccatcactccaatttaagttgatttccattaatcattggaaaagttaattacggacggagtgagaaattgattttgcaggtcgaggccatgactattaaagcatgtaaatgaaggaaattaattgttaattcgtgacatttgtaacacagttttcagagagtctctgcctttttatgccaaacatttgacagtaaaatattccgataaaatttttctcagttcaataaa

SEQ ID NO: 54729 - DNA, 892 bp, Heterodera glycines
atgtccggcccaatttgggcttcgatcagtgacacggccaaagatttgttgcgccaacttttgtgtgtggacacaaacaaacgcacaacgccagaaaaggcaaattttataaaaaaaaatttaaatatttttattcaattttattttatttttaataatttttcctttttggtcacaattttttcaatggaaaattattaaattcattttttattatttattctttaatttggccactaattagtcgtaataaataataaacacatggtttttcaaattacaaaattccaattttattttttattttaaattatttttcaaattaaaaagtgcattttctcacaaatgttaatttatttttaattaaatactaattataataatataaatttaataacaatttgctgtctgtcacagtgtcttcggcacgattggttcaagaagagtgtggccccgcgagtgcacttgggcgacaccattgagaacattcgccgatttaatgcccgccgaagactaaaggcccgttcatttttaaatagataattttttctttttttaaattaatgaaaatgaatttttcatttttcagcttttttttttggacaaattttacccctcattttggaagtagtttgtggaatttcaacttttccataattttttttgacctatttttaagtaattttaatcccacataactaactaattaaattcgccatatgttacagggatattaattacacggttccatatgtttaattatcctgaaagttgtattccgaaaatctttttcaaaaggttttcccaagaataccttatttccttcatataaggcctaacaatttataaaatttcataatattttataccaattttttgtttataaaataaa

SEQ ID NO: 54730 - DNA, 983 bp, Heterodera glycines
gaattgttggatccgggcaaaggattttacgacaaagatgaggacaaagtcacattggccattgatgtcattgtggatgagccaaaaactgagaaaattatttccgatccaaacaaatccaacggcacactttcgatggaaattgaaaaactatcggaatttgcacgagaaatcgtttggagtgaacgtaaaagtgaaactgtgtacataaagggaatgccatggaaaatattggcagaaattgaaaagaaaaatgaaagcactgagaaatggttgggcttttatcttttgtgcgatgcttctaaaaaaggtttgcttatcaaattatataatagaaatataattattttgtctataaaattggtgtaattaattattgaaaaaacttatgtaagcagtaatttttaacataaaattaaaagtgattttttaaaggaaatgcgttaaaatataaatttgattattatttaatttgctttaagatggaaattggagccgcaaatgttcgggaacacttcgaattgtctcgcaaaagaacggtgtggaggattttaagaaagaactcgatgaaacagtttttaacaatgaatcgaagtcttgggggaacaatttcatttcatttgtggtgagtggaaattaattagttaatttacattttaatattgtaatggcaaattaaggaattaatggacccaagcaaagggttgtacaacaaagacgaggacaacgtcaccttggcaattgattttacatgtgaatagcgtaaacatttcgagatggattgaaaagtgaaaagaaggaaatcagcaggatgagaagagagtcttggagggcacaaaattttcttggtgcttaaattttatattttttttatgttttgtaaagtattttggtttcataaagcaacatattacaatgatagggatggatatgcagaaaaatgccaaaatagttgccaaaaaattggaaaaaatgtcaataaa

SEQ ID NO: 54731 - DNA, 1004 bp, Heterodera glycines
atggcgaataaatttttactcgttcctcaagaaatttatcgtggtctcacctccgtgtctgacacgggtgatcttaatctggatgctgttagacacgatttgaatcgagccaggggtgagcgaacaaatccctcaacaaaaaatgtcaattacaaccaacaacttaggcgatatttgaaaatgaggagggatcttgcggacagaccagccaaagttgagctcaccaaaggaatcagtgtactgatgaggagaggtggtgaagatgaagatggtgaggttgtggacactacaccccgaccccctgctccaccaccaccacctccatcgccagggagacgcactccgcgtggaccccctcctccaccgactgggagacgctctccctctggaccaactcctcctcgtccctccccacccggaagtcctccgccccgtcctgaacgcccccaaagaccaagtagagcttctcggagaggtggtcgtctggagaaatggcggaaaagtcgatacaatatacagcaacggcagccggtggtgcgggaccttctagcggaagcagctgctgccccattgcccgaaagtgacgatgaagatgactatatgctggagagtggattcgcgttgccagcgccgtcacaatattatggcgatttgcctgtgctgcccgacaacgcgaacgaaattgaggagatggacactgctcagcacaggattgccaccagaagaaaattacaaaaggatgaggcaaatgataatgatgatgatgatttacgacgcaaaagatttttggtttatcaccgttcacctccacggctcacatccccgcctcgtttgaaaacaaaaattgaaccaagaccacctccaccgcgtcctaccgccaagagagaaaaacaacaggcaaagctggattggaagaaaaaccaacaccctactccagcgcctcgggcgaaaagagagccagaacttaagctggacccgcggccatccacgtctaggcaagccgg

SEQ ID NO: 54732 - DNA, 1434 bp, Heterodera glycines
atgtcaatgcttttcatgcagatgataaagccttcatccgctgatgattataagctttctgtgatgacaatgaatgaacaactgcttaaaaagcatatagtttttatcaccattgagttggaaaagggctcaatctctattcttgtggcagatttaaagtataaaatcgaacaaaaaattggtattccacccgaaagacaaaccttgagatgcaaaaaaccatatggcattccgtgttctggtgaaatttcgcataatgaacccgttttcttgtcgttggacgaatttgaaatttcagtgtggaatccacacaaaaagcacactgtttgggtgaacagcgcggacgctgtgagagttttgaagaagaagatccaagttgtgatcagcattgaccccgcaagacaaaccttgtaccaattcgatcttgctgagctggaaagtgccattggagagaaaattaatgaacgagtactggttgatgcaacggacgagaaacaagaaccgagaaaaattgaacgagcaatgagaaatgtaaatggtgctttgattgatgaagtggccagtcataaaacaatgagcgaatatggcattgaggaaaaggcaaatatttatgtatcagtggatggatttgaaatcttggtgcaatatgaagaggagaaaattggcaaaaacggtgttgtgaaattgaaatcgaacccctactacatttatcgggtgaactccaccgacactgtggcaagtttgaagcgcacgatcacgaatcaggttaacaattttcaccctagtcgtgctatttcggcatatgaactgacagtgagacttggcagccattatgacattgcgcttgaggacaacaaaacaatgaaagattgtggcattggaagacttggaaccgtttacgcttctacttttgaatttgaaatttgtgtttggtatggtggcaaaccgtacaccattgtggtgaacaagggaaacactgtgcagacactgaagcagaaaatcaaaggcataattggcattccgcccgagcgtcaaacactgagacgtaaccttccaactgccaaagtgcttgaggacaataaaaaaacaatggaattttatgtcattgaaaaaggtacaatcgttttcttggccttggatgaatttgtcattcatgtgaattatttgttggagcaaacacacaaaaaaggtctgaaacttaaagaattgaaaaaggagaacacgcgcaatgtttgggtgaacagcgaggacactgtggcaattttgaagcataaaattgatgccatgatgtcatggattgacgtatttcactacgaattcatcagtggccacgaatgccttactgcctccgggggtgatgagaatgtgaaaacagtgaaacaatgtggcatcgaagaaggacacacctttaaagtgaaggaaatgaagttatga

SEQ ID NO: 54733 - DNA, 607 bp, Heterodera glycines
atggcacaaaatgatgacggcacaaatggcacaattttgtcgaataaatcggccccaaattcgatggatttcgcgtcgttgacttccgaaaatgagtcgctgcttaatgtgttggtcggttgtgctatgatggcactttcctcactttgtttggctgccaattcgctggtcgttaaggttttctgtgcgctttcaaagtcaatttaaatttaaacattttattgtttccttttttagaccattgttatggacaaaaatttgcggcgccaaaacagttacaaatttatgttggcactttgtctcgtcgactgttctcaatcggtcgtacattttatcaccggatttttcacaattgatcagagcaatttcgaccagtttctttccgaagtgattatcgtttacattataattgttttttctacgattccttaaattgaggcgctcggagtcatcgcaacgccaagttacgtgttctacgcaattgtcacaattgtcttggccatccatcgtttgacggtgatcagctcgtccgtgtacttggaagagcttctgttttccacgattggcgttaaagtgaaatagcagaaaataattaattatatattta

SEQ ID NO: 54734 - DNA, 863 bp, Heterodera glycines
atgctcaaggacaccatccgtgagatgtctttggacgacttcaaccgtcgtcaaattcgccaattggccccgtcaatgctaaacgattgtcaatctctcatctctgtcactttctatggccccatttaccccgaatttccgcctgatgacagtgccaatgcgtcggatggccaagcaattaccaaatggctgttcttgcctcgtcctgacaatttgatgaaggagctgacaatatgcattgaggattcagcggtggagcagcaatggttggcagccgtggaacaaatcaaagcggtatttaattgatgtccaatttaatttgttattttaatgttttatctttttaggcattttccaatgcttcttctcctgtttacttcgacattactgtttactttccgccgccgtcttcgctttctgccgttgtgccatttaaactgaccaacgaaatgactggagagaaattggaaatgtacaaagaagatgtagaagaagatttaagttgtttttccctcattcgttgtccaattgcgcccgatgataagagagagcagatgattaaggaattggacaaacgatggaatcgaattaacatttttctcatcggcgatgggtgattgattaacaattttaaaaatccaaatgcttatttttgtttttcttttcagtcttctcgacggtttcccgggggcgagtggcgatcagaaagagcagaagaaatgaatcgatggttgattgattgatgtgattatgattacctatgcgatctaaatgttgggcttagccatttaaatgttgttgtatttgatttttttacaaatccataaaaacgaattaggctttgtcaatattttgtaaataaa

SEQ ID NO: 54735 - DNA, 912 bp, Heterodera glycines
  unsure (1)..(912): unsure at all n locations
atggcttcaataaacgatttagattatgttcgagattatgattatgtttatgatttagattttgatgaagttgaagaatgtgttgagattttagatcaagaaaatgaaagaaatattaggaattatgatgtgtttgaagagcataactatgctaagagacaaagatttgtggatggtggtcccagtcagggatcaatgaatttggatgctgaggttgcggggtcatcccgtatgactgacagtcaatttgaagataggagacttgagaatttgcgaaagaaaagagagagagataggattagatggcataataagtcacaagaatccagaaatgtgcgcttagaacagatgagaaatagaaattgtaatgcaatagcagatgaatctgtagcacaaagacggatgcgtttagaacaaatgagaaatagaaattgtgttgcaatagcagatgaatctgtagtacaaagacaaattcgtttagaacaaatgagaaatagaaattgtgttgcaatagcaagtgcatctgtttttgagcgacagttgcgcttagaacaagatagaattagacatagagtaattagacaaggtgtagttaatgtttacgcagcaggatctcatgagaatgctaatgaacatagacttagccaaatgaatatgcgatgtgaattttgtgatgcattgcattttgttgaagagaaagtgattggacgcggtaattcattcaaggattgctgccactatggtaaagtttttgtccctgaaattcccgaacaggattttcctgaggaattaagggatttgttcatgaaatttgatgcgagacatataaatgtttttgagaatattagacacttgaatagtagtgtgtcgaatggttctatgaatccgcttagatatagatatccanaataa

SEQ ID NO: 54736 - DNA, 934 bp, Heterodera glycines
atggtgacgggaatgccaaatgatggcggcgagttcagtcagtccaaatcgccctccacaccgctgctatcacatcgccaacagcaatatcgccaagaaggtcggttccatgatatactggtttttgtcatgatagcataatgttgacaagaaaaggaaacctctttctttttactgatattattcttgctgttagcttcagtcttcaaattttatttttttaaattttttaaaatatttaatgtactaattacattaaaagcttcaagaatggcctattcaatactaaatctttaaattttttcaccagaaagctctaaatggtaagtacgctcattaaaaaattgataaaaaatctttttaacgcttattttttcattaatatgcaaattaaggctttttaattgcgctttaaaaatatgcttatatttttgtttcccaaagccttttttgaccattttgaccagtgatatgcttcgaaaattttaaattctgtctctttttaaatttaaaagatcgaaatgattttgggattaaaaatggacaaaagatttagaaaattttaatttaaataatggataacatttttaatttttattattaaaaaatgaacataatttttcattcttcttatttttaaatttaagcttctcgggatcggctcaacaaatatgcgagtgccgagtcaagtccataccagcaacaacagcagcaaagggtcgacgattatatgacgggaatggcgacatcgacaacgacggcattcgcgatgaacaacaatggcacgaccacgggaggaggaggaaaagcatcgtcacgaagagcgagcagggacagcggagagttgatcgcaggaggcaatctgatcaaccacttcaaaaatttagtgcaggtgattgttaaatgaatatccatttcctattaaaaaaataaa

SEQ ID NO: 54737 - DNA, 2419 bp, Heterodera glycines
atgggtcgtcatgatgatctgtggtctttgttctacatgttggtcgaatttctcaacggttcgttaccgtggcggaggataaaggacaaagacgaagttggccggatgaaggaagaagctgacattcgtgaattgctcagtggaaagtaaaaaattttctcaattttattatagaactttgaaatttaaaaaaaaacaatgttaaaaaaggttttcatccccggcccgagtcatggaatggaacaacgaatgtcttatatagcgatttttattttccgtgcccaaacaatggccatccttagtttcataggctacaacaaaaattattcttaaataagctgaataattaatttattttttacaaattagagttaaagcctaagaaactgagggtattttttgattgagcctataacctggaatagagcctatttttctgcatttggaaaaatttcttttacctttttcgacttttttattttaagaaaataaaaaaaaacattgttttttctaataaaataatatttaattatgtttacagcccaccagaattgcatcattttgctgatcatctaaagggcttgggctactcagacgagccggactatgaactgttggagaactgtttgcaagtcgccatgaaaaggcttggcatcggcattaatgatcctttcggttagcaattatataattaatcgtttaaaaatatcttttctaacggataaaattttgaaattcattagattaaaaatttgctttttgagttatcccccctcaaaaatgtcatatccctgacaaatcaaaacaccttctatggtaatttttaggcgcaaattaagaagatattgtccaaactgtaaaatactacatagtttatctattatttcaccctttgattttgtatatattcgaaaaaatcctgaaaaatatttatagaaaaatgctttcatttttcgggatcatgacgtttttttaaggaggggggcataaatgaaaaataccagaattaattaaaacattaaataatccctaactttttaattacccattatcaaaacagttatgttaaatatttcaattgaccattatcaaaacatttataattaattaattattttaatatgcctatttccaaaacgttcaaatttaattcttgtcaaatagccaacatatttgaacatttattttttatttaaagattgggagaacaactacgtgaatatccatgacaacaatcgccaaaccgttggcttacaacaggcgattggggatggtaaaatgaccagcaaaatgggcggacgctcacacaccacggcagtacgcgagcatgggccagccggggagaaggccaaccgaggcctggacacacaggtccaataaaaaaagaaggaaaagcattgacaaaatgccaaatgcgaaaattttcagaaaattattaccaaagcctagtgatgttaaagaccgaaagttttccgagaccaagacttgtccacgacatttaaatgaatatctttttttaacttgtaaaaaatgttccaaaaactgataccgcaatctcgagaccgacaaaaaagaaccccgagacctttctcgagtcgaaacttgggacgagactcacgagcatcactactagagcctgaaatattaaattaaaagttttttttgcggttggaattccgtttttttctaatccataggctttaaacaaaacacagtatgctcctttgtctaactgtcaaaattcaataataaaagataaaaacaaatgcaatttgcattttaggcaccggtaaccgatgaacagatgacgcgcgaggactgtgacgagcaaacgggcaatttttatgcccaaaatgtggcagctgcgccgcacaatgactcatcacatgggcgggacgaagcaaagccgaagtacaaacggcaagagtttatgaggtgagtagagaacaaaattgttcatatttaaatatcagacggatagataaacagttttaatgaggtatcattataagcaattaattttttgaatattattaaattacgaaattaatttaccaccatagagaagtgaagagaatcactacagccttggcattaaacattcgggaaattaaccgcggtagctaataggctaaaatattttgactgcaaaatttcaaacatttcagaaaaactgaaacaagttataaaagtcttaaaaattttcaatttctggtcttcaatgattacaaaatctagtactgtcaagcatcaccaattaccgcaacttcgacatcgtgtgattacaaaagtgatttgaattgttgtagggcaaagatcgatcacccgaacgtgcaaagcagtgccgcagcgatcagtgcggtcaatgaacggtccaaaaggtgcccagccagtccgccagaccagtggggaggtcgcg

SEQ ID NO: 54738 - DNA, 727 bp, Heterodera glycines
atggcgaaggagcaaaagagacaaacgttggccgaactgatcgcaatggaaagtgaagcgcaatcactcgcgaagggcacttccatggcgcaactgatcgaaatggaacgcattgatcggggagagtttgagcaatttgtgggggaaatgaacgaaaatgaatatttgattggtgaagtgttcgagcagcagcaacagaataaaatggcaaagcagcacagcatggttagcacggggagttgaggacgaacagctgagactgaccgtttgagtcttaggacatttacaatgaatgagtcgggcgggttggcattcgctgacggaacctaacagctaagggaatgaaaacttccaaaattttaaagctaaggatttgtggtaatttgccccagaaaagttacctttttttcttcgagttgtaatgcttttttcaagattttttgataaaatgtgttttaagtaaatggggcaattatgccgggatgtgttaattcatttttaaataagcagcataaattaattatttaatattaaattaagaatgagaagaagggaatgttcaaaaaaatggtaaaaatgttcagcaaaaacaaagataaaatgaaagtccaagaagaaaatcaactgggaagagaagtaccgaaatttgaacagtttaaaagagacagacccggcaaatggcacaattatggagaaattgcaatgcacattaaggagggtcagtcag

SEQ ID NO: 54739 - DNA, 363 bp, Heterodera glycines
atggctttggaaatttgtgcatttgacaaccaaccaaccttcacattgtttttggccgtagtaacctgctctattaaaattggaccagatttaccaattatctgcggatggataattgtgcagaaaaggacggacgacctgctgccgtcagcttttactgctgctcacaggttaattcgacttgttaatcccatttttctggatttgctgttcaattttggattttggtttaatttgcagatcacttttttgaacaaaaatataattacaaaaaattcgcaattaatgtgggacgtggaaataatagttctctcatagagcagaaattttattttataaaatcataacaaattcactaataaa

SEQ ID NO: 54740 - DNA, 1528 bp, Heterodera glycines
atgattctgtacgtttttcacatttcttctcaacatttacccttttccttctcttttttgttttagtctgttcgttgtgccattgtttgtcgggtttgtcggatgttgtgccattctttggctttattgggaccgcttcaaaaaaccaaaaaagaaaatgtaaaaaaataaacaaatttcaaaacgtcgatttaatttttcagtttcatctccgccgactgttggctttgtgtgttcggtttgattacgccttcacaacttggccacggaattgcgatgatcagtcaccgttttgacatttacgtggacgaacacttcaagacgcgcagatggacattggcacttattcaaattcacagcaaaattggaaagaatggcaccaaggaaatggaaattgtcactgatggtggagaagcattgccaattccgcaaattgaaatgccacgcaaagtcatcggtttcgaacggatcaacatcttgtaaaattggcgaatatgctaaaaaattatacaaattttccctatttattttcagtttcattgaccgaaatgccatcacttttctccgccgtttttgccagcttttcaccaattgtccaattaatttgaccatcgacccgtactacaatgaccgcattttggagtcgattttgcgcaacatttggccaatgctcggaaaaaacatttatggcttggaattatctgcggatgtttttcgccgtttgcggcaattcgtcccgtcaattctcaacgattttccatcacttcgtgttttctccatttctgtcgccgatcacttcatcgaatttccggccggtgacaatgccatggcatcgaatggacaagccgtggccaaatggcttttcactccacttcaaagcaatgtgccaaaagtgttccaatgcgcattggaaatggatctcgggaatttggcgtcgaatattgaagacttcaaagcggtgattttcaataatttatttggctttttacattcttttgggtttcgtttaaaaattttatgcccaaattggtccatctcaaccgtaaaagttctctcatctttttgttttttttgtcctcctcccaactgtaaaattgtcattcatttcgttttttcccacattttaggcttttgccaatgcttcttcccccgtcaatttcattgtcatcattcggtttattccttcatccgttgctttcttcgttcttgtgccttttgatctgaccaacgaattgactcgggagcaattgacactgaaaagaattgacaatagcgacgacgactgtctgctgctgttggtccgttgtccaattgcgcgagatgcgagcaaatgggcaaaatgggaggaggaagcgattgattgggaaatttattatcaatggaacagaattgacattcacattttttatgaggaacaaatcggagacgggtcagtgaatgatttttcaaaaattcttatttataatagtttttctattttcaggcttctcgcgcaattcccggcccaagtgatcagcagcagaagtga

SEQ ID NO: 54741 - DNA, 758 bp, Heterodera glycines
atgacttccaattctactgatggttggggatgtaacaacagtgggtggggtcaaagccaagcaaaaatgacttccaattctgctgctgatggttggggatgtaacaacagtgcgttgcgtccgaaccaagcaaaaatgacttccaattctgctgctgatggttggggatgtaacaacagtgcgttgcgtccgaaccaagcaaaaatgacttccaattctgctgctgatggttggggatgtaacaacagtgcgttgcgtccgaaccaagcaaaaatgacttccaattctactgacggttggggatgtaacaacaatggctgggctccgagccaagcaaaaatgaccaattctactgatggttcgggatgtaacaacagtgtgaggggtccgcgcgaattttctcggagtttcagtggacgcccaggatttaatcgccaacctgtggttttcttttgtgttgtaaatttcggcacttcatcttatttctttagcctctaatgaacaagttgcctccaattcctccgtccacaatacttttcgtcgacggcattgaaaataagaacaagaaattgccattgctttctgtcgaagaggtttgctgtttaataatcgatttatatagtagtacacatgaacaaaatgggtcggtacactcagtttcaaaaacattaccaaaattcgaaaaagcgaattttcagtatctgtttgctgattgtgatccgaatgatagcaataaggtttttaatccgagtgtttga

SEQ ID NO: 54742 - DNA, 402 bp, Heterodera glycines
atggacatcatgcacaaagcaatgattttggcctgctttggtaagtgtaattttcgttcgacaaaaataccgtattcaatgggaaattgagaccaaaaaaaacttatagtattctcgttgctgttgccattcgtcagtactgcaacaaaagttaattcttggtacagtaaccagtggtggtcaccagcagaagaaagcggaagcattgaggatgaaaaagtgagaaaatggtgaatgggtgtacaggagagacgggtgccacgcttcgaatcccgaatgtttttttcgtccggaaaaagtgccgctttctttttggccaaccgaccttttcctcaacccttgccaaaaccctgtttttcacaatgccataaaaatttttacaaaaatttacaaaagtaagaa

SEQ ID NO: 54743 - DNA, 2247 bp, Heterodera glycines
atgagattcttcgaatgtcttatctcaattagcacttttcatttgtcaggcattttgacccaacctgtgttgaaattgcatctgatgaatgtgatggacgattactgcaccggctatcagacatactgtagcaaactgaagccgtacctgaagcagaacctggactttgtgcagcagagattggccaactcagcggccgatgacccctattggcaaggggttagtgaaaaaatcggaaagaatggcaaaatttttattttattcaccattcaggtaaagcgggcctatctgcaaatgaccggcgtttggcatggctttagcgatgcgcagtttaacgtgtccattgacttttcactgaacccaattttgatggtaattaattaagtaattaacacagagcagcattaattattaatgaaactaataagaatttaacgcgatcaatagcataaggttgatggataatttaaggagtcagtgttttaatcagtaggacaaatgtttgtttgtatgctttttcttatttttatgcgcatatgcaattaagaaaggagctcactaatagcatttctgggctaatatctgcaattaaccgaaccgagatgctcaattagtccaaaatgattcacattttgattatgtgttcagcttaatgcgcatggcgatttctacgagttggagaccaaattcaacagaagcaaagacccgcgagacgaagccactggcggaagatgctcgggactggtcaaagtgagtttgtttcaaaaaaaattatgcccaaaagagtttgacattttctaacaccattttacatgccgatccgcaaccacggcaattttaatttccgtatttttcaaaatagacgcagttcaaaattctaaggaagtcaaatgtcctacatgaattggttaaagttttaattacctttatagaaattttaaaaatttagtatgtttttttaaatttcatttcccattttggggtgggaaattccctccatgctccgccccgcccctttcttcattatggacctgattcagtaccaatttaatcgagaattgactaaaagaccgagagacaaaacatttctcgacacgacactatcaagcgttctctattgagacgaatacgttgaattattttacagtaggaaagaacagtttccccattttgaagattgcgcctaacaatgccgacattctgttctcccaagtcacaatgtgcggctttgaaagccttcttcgtgtgctaaaactgtacaaatttggttacggtaggctttttaaatagaatttagtccgatccgggtcaattagcgaatatctggcacaaaagcttgaatcaaaagcttttaacacacaaagaaccacctattattaagaccgcgcactgtaccctggccacacgactaccatatccagctacccaggcctattgtattcagccgacgattttgcactgatgagctccggattggtaaaccaaaaatttggaaatcttttaaaaaatttgctttttaggctatccttgagacgacaatgaaaattttcaacaacacacttttgaacgaaataaaaccagacggagtggtgggttaattaagcgctggggctaattcaaatgtaaaaaatttcaactgtccaaatttttaaaaaataaacctctaaaattgactttttgacaattacaataaactcaaaaaaaaattctgtccgcgtcgacactgtaagaatttttccggtggcgtttcagcactttccatgctttgccaataaaatttttcttagggagtctattggttcggcatttaagaaatttttaattttgattttttggaaaaataaacatgacgcccggtatcagaattcaggctaaacggcttttaaaaatccaataactgggcttagaatctcgctaaaaccggatttggcccggtaatccaagcccggaatgttttcacagctcgaggaaatggtagggtcggaacgcaatatctcaggaaaattgccaaaattggcgagggctgccatactttgattaattcaatctgctttatcagcttcattgttgggtacgagcaattgttgccaatcaaatggcacggacagcgcgcgagtggtgccacattttcaagcggttcaattcgggcacgtacaacaaccagtggctgatcgttgactacaacaagttcaaaccgtacaccgaattgcctgaccatggcctattttatgtgctcgagcaaatgcc

SEQ ID NO: 54744 - DNA, 2825 bp, Heterodera glycines
  unsure (1)..(2825): unsure at all n locations
caaaaagtttaaaaaataaattttttaaattaaaatttcttaaatanccctcaggggcaacgaattttatnggttcagctggaaaagttgtccacgcgcaaaaaattttgccagggaccaacacaaagntggtggacgtggacagtctgaccaaactgatgcggtgagtatcatggaaaactgtgacaaaaaaaagctttttggcatttttttgaggggtttcgttttcatccgatggcattttgctttttatttggccgaaaaaaaagaaattacacaaaatattgcaaaacatccacaattttaaaaaataaaatttaaatttgaaatattctcctcctccgtcagttataacgattacacccgcgacccgtacagccgttgcaattgcacgcctccgtacactgcagaggcgggtcagtgcaaaaacaaatgggaaaatttgtttaattgaaaattgacaaaatttttttttgaatttagcaatttctgcccgaggcgatttgaacccggcaaatggcaccttcgaaatacccggcatgggacacgtcaaccacgcggcacttgattataaagtcggcatggattagcatataacgcttaatggttttaaatttttttcgaaattctgaggttttccattcttttatatatatatatatattttttttttttgcaaaatttgatattcgcttttttaaatgaattctaagaaccgggataagaatcgcaaactcgggatttgagtcggtaacccaatcccggattttttcgatcccgactttattctcataaaatttaattagtctttgatttaccaaaatagtccaatgttgagcatctgaaagtttttaaaatttttgcacctttttcataacattttccccacttttagtagccaatttctgttaaatctatgccattttagtcaacccaatgattattttgtaattttcattaaatttttccccgcagggcaccggctacaaaatgttcaaaaaattgcaattccgcgcatggagcggaccaacttatgacgatgtgcccgtgtttgattggcttgaatgcgatttggcaaatttaaaagaatgaaatgccaaatttcgacgatagcgaataatttatgtttgaacatagttcgactcacaatattaatactatttttatgcaaatttggctgattttaatttctaaaattttaataatttaccttttttaataaatttttttgtttttggcgtgcggtcgatgccccggtcgggttaagctggtaatgtttttcccccacaaaagtcaaatcgtacgccggcactcatccggtccaatccaaagtcattttgacaaaagatatgacgatttttttgtcgaacatagtacgaattgaggcagtacaagttggcctagtatgaattggcttttccgaaaatgatttaccattcaaaacagcaaaaaatcattagaaagttaaagtgccatttcttaaaattcgcgacctcaatacctaacgctcggaattgtttttctttgttttttaaaatttttatcgaaaaaaccaatgggatcactccaatgatggcgaaattaaagatggtgctggacattaataataataaaataattaaaaattaggcactcacaatgaaagtatttaaaatttcatatttttttcatttttaacatatattttattgactcaaaaacacacacaatgagcacaagcacaccgaacacatcactcacaacattcgacgacaaattacagcagaccaaagtgacgacaaaatggcatcgcaattaatgattgtaaaattggaattgggaatgaaagtctcgactggacttgagttcaggcctggggttttccaggtccaagtttaggccatttttcgacaacctgggtttttctgaaccttccagaaatccagctcctgatcaatctggaaatccttgtggttcagttccaacatggaacccaagtttttgttacttttttgaagaacattttgtcatttacacccgtaaattagagggtttttagtgcctattttggttttaggatctaaaccctacctgttttggcagtttttagcaccatcatccctactaatcaattaataaaataaatgctgtgtaaattaattaacatttgtaaatgcatataaataattaatcaatttaataacttaaatgcagtgcaattaattaatattataaatgcaattgaactaattaatgaacggatcacttttaagcattgtttggcaattcactcagttcaaaagtggaagagttgagcagaaagtgtgcgcaattggagaaaggacagaatattgtaaacggtcagggtcgttttcgtaccgccgttttcgtacgagttcatgtacaagcgtcagattcaattagaaaaacttaagaactaatagaaccaaaatctatcattttttgtttcccattcataaaattttgtagaaaattcataactttaaaaaaataacaaaatccgggactaaataggtcgcatctcatagtttaggaaaataccagcgagaaaattgttaaggttttcgggactgacattggcattggcataattgtgatcagtttttaaaatttttgcaccttttttcataacattttccccacttttagtgccaatttctgttaaatccatgccattttagtcaacccaatgattattttgtaattttcattaatttttccccgcagggcaccggctacaaaatgttcaaaaaattgcaattccgcgcatggagcggaccaacttatgacgatgtgcccgtgtttgattggcttgaattcgattt

SEQ ID NO: 54745 - DNA, 929 bp, Heterodera glycines
atgttgattttgatccccttcaagtggattggttcacattttctcaagaattgcacgttcaatatggtggttataacatctggcgcggatttccttatcaaagaggggcaggtgttggttcagtgtttagaagtttcatgcgatttcttttacctattggataacaaattggttcatcaattgcacggcagggactagaaagcggaaatcgagtgttaacaaatgtattgggaggtaaagatctaaaggagtcactcgtaagtgagggtaaaacgaggcttaaaactctcctggaaaaggcagcaaataatattgaaaaacaaaaaggacaggggtttgattttaaacgttataaaaatgaaccaacacaaaaagttgggaaaaccaggcgaaaaaatataaataaactccaatctccagttgggccaccattggtatcattccatgaactcaaccattggaatgagacctgtagacgtaacctttgcaaatgctgaagaattgagaaaaaaactatacaatgaagcagctaaaaaccctagaggaaatcccaaatttcatgttggagatcgggtccgaattgaaaaacacaaacacgtgttccaaaaaggttatttgccccggttcaccaatgaaatatttactattacggaagtacattctgagagatcacctattgtttacaaaataagcgacgataataatgaaattattaagggatggttttatgcaaatgatttatgtagaatttttgaaaatgataataaattgtatgacattgaaagaattttgtcaaaaaagaaaagaaaaggtgttgaacatgcgttggtaaaatggaaggggtatagtccccaatttaatagctgggttccattaagttcaattactgtgaaaaatatataaaaactcttaaaaaactttttttttta

SEQ ID NO: 54746 - DNA, 1081 bp, Heterodera glycines
gccataagtacgcctgctccgcctacgagctgtgcagcgacgacttcaacgtgttgaaatggactgctgccgcggttggctcacggacggactttctcggcacgaaggagcgcatcgaacagggcaatttcttcagggtcggactttgaattcttataattaaactaattaaaccaatgccattgtacaaaatcgcaaacagtttaatttacgaatttcgcataatttgtttaatattcttccaaaaatagactcatcgaattttgacaaaattttttgaaggttataaatgtgggatttgcatcagcgaaaaaaaattcgaaagtcggctccgaaattttttttttccaaatagcaaattttttgagttttctctgcaaaaaaaagcctgagaaacctgataagatttcttattttctcaaaaaaattttttcaggatgttctcgacaaggcattggccatcaacccggaggagtacactgtgagtcagaataatgggattggtccaacgactttctctctctctttttgttttttttgctcattgccccataaaattgccccgtcttttcgccatgcacgcagtcttcttttcctcttcagctgcttcacatgcgcggcaggctcgtcctctcggtggcttctctgtcgtggattgaacggaaggcggccaccgtccttttcggcccgccgcccgaagtttcactcaacgaggcgatcagagtgggtgcagcagcactgccaaattagtggtcggaaatgcttttgggcttctcaaactcttcctccaccgcatgccgtgccaaaaacgcgtttaatggtttcccacccccttgaaggacttcacggcggtgttggagttggcgccggattggctggagaacactctcttcctggccaaggcgtatttggccaacagcgacagggaaagtgcggtgcaccatttgaaacagctgatcgattcctaccagcagaacgaaaacgacaaggaccagcccgaggcactgaaggaggccaaggcgctgctcaagaagcacgggagaaaatgacctcaatgaaaatcacccatagatcttcttaa

SEQ ID NO: 54747 - DNA, 268 bp, Heterodera glycines
atgcatttcatacccgtggagattgatttaaaaaactggccacaactttgcttaaaaagcgataaatgttacatttggcatcgtttgataggtttgataacctcagaattaaaaagaaaatccacagatcccggcttttctgtccgacttaaactcccggccccgacaactcaattcataattaattgtaatttcgaatattcgcttaaatatttactattctgcagcttgattgtattgcagcgggggaatatattaaagaataata

SEQ ID NO: 54748 - DNA, 558 bp, Heterodera glycines
atgaatctggcgcaaattctgtggaaaatattttttcgaatttttaattttataattttcttgtaattttacttacttgaaaaaacttctttcacatgttttaatgtgcgtaatgtgatcatggatgatgcttgttgtgcaatgttgtcaatttgtgcagcgttcagtctcgggggaagctgaatatttttatggaagctcaaaaatttagcagtaataatttcaaataaaaaaatcgattaatttcattaatttatttttgaataaaaattttgaattattaggattaagaaaatataatttggggccaacttttatttcaaaattcagccaaaatgccaggcaaatgtatttttagtatataaaatttatttttaaaaaattgaatttttcgattaattaatataggaaataatattttttatttaaaataaattggttttacatatttaacgctaaaattagcttcaggcctcattttctgctgctggttaatcggctcatcattatctttggagaaagcgttcttaaatattaattaacattataatttgttta

SEQ ID NO: 54749 - DNA, 311 bp, Heterodera glycines
atggaaataatatttatttgtaataaaaatttgaaaattaagtcgactaactgtgctacaaatggtcaaggaactcaaactgttaaaacagcagatgcaacccatgatgaagctggaaaaattgtaaaacattagaacaaagaaattttgaattttatcataattaaataataaaaattaattttaatttaaaaaatgataaatttagtcgcgtgattcatcatcaagttccgatgaagatgactcaacaactgcagcctcaaaatgctactgaatgaagcaaatgtaaaaattttcaaaaaattaataaa

SEQ ID NO: 54750 - DNA, 1088 bp, Heterodera glycines
atggagattgtccgagttttggagagtgccaaggatcggctgatcatcgaacgggctcaactttgcgcgacggagatggagcgcgtgttggccatttgcaaacggcgcaaggcggaattgcagcacattttggagcagtgccgcatttgggagcagttgcgctcctcaattgaactttggcttgctgatggtcggtttggagtttgaccataattgcgtcaaggctttctttagcgagtgatcgcctttgttttgggttgctcgtcgtcgaattgtcagatggcgaattgacagaacaactcgaactgtgcgagcagctggtggacgagctgaacagctggaaaagcaaattgcaggagctgaacagaatatccaatcagtgagaaaatggacagacaaatggacaatttggcgaatcgtttagacaattggacacccaccgaagggacaatggtcacaatttgtcgcatcaaagcagcaaactgaacgcccaatggaccaaattcaacgaccaattgcgaattcgccgcgccgttttggaggcagccaaacgatcgcggcacgactttcagacggcacttggacatttccaacaatggctcaacaaaatgaacatggaaatgcgcaaactgaacgaagagacggacaacctgcaacgactgaaggacaccgcgcgacggagggaatggttggcccaggaaaaggtggcaatagtcaaatgacaataagaaggcaccaaagcgataatataagaaaattaaaataagcggatacggtaattaccgtaaacgccagaggatgaacagtaattataaaaaacatttttaggaggcccgcgtggaaatcgacgcgcaccgcgagattatggaatcggtgcggcgcatgggacggaaacttatggaggagcagcaacgcgaactgagctcatcggcaggagaagagacaccgccgccgagtgggaacagaacgacggagcaaatgaaaagtcaagtggaaatggtggagaacgaatggcagtcgctgttggaacaggcgaaaagtgtgcgggacagattggaaaatgcgcaggaagaatgcgaacggttaac

SEQ ID NO: 54751 - DNA, 528 bp, Heterodera glycines
atgaggaaatcagttggccaaagaaatcagccaaacgttggcagtaataagcgcttaaatcaattagcaaatgatagaaacaagcagcagcagatgaagccggtgaatattgagcaacaacaattagttaatgttatgcaaaacaacgtgcagcagcagcagaaaaagcgtttggatgggcatagaaattaccatcaaaatgtcaagcgctggcaagcaactgctggagaaaaccagcatgtgaatggcaaacgtgccaaaacggtaaacaacaatggcaacaaacgaatgccaaaattcaccgaagacaaaaagcgccgcttgaaaacagttcatcacgtcaaatttgatgatgaaaaactgcaacatgtcggcaacctcaaacacaatgaagatatggctactaagaaggctgaaaatgccaaaaagcacagacacacaatgccagcagcaaaaagtggcgacacttttacagcacacgaagagcaaccattgagtttgctggataataatccaccagtgaacgag

SEQ ID NO: 54752 - DNA, 906 bp, Heterodera glycines
gatgtcgttggcatcggttccggtgcgtttgccaacgttttccgcgcccgtgaattgataacggcggcgccggccgaacgctaccgccacgtggcactcaaacggattaatgtgagtttcaaaaatatgttttttgtaaatttgtaaacctcctagccatgaaaggatttccgttttttttttgttgcttaaaaaaccgtagtaaaaattttcaacccacagtatttgatttgttggtcctctcgtttttgccccgattggtcacgcctcgacataattttgtatttcgcgcttcatttttgtattctttggcgttatgtgttctctttattagcccacaatatttcaaaaatttcattaaatttcaaaaaaaaaagtcatgctcttctgatcgtttgaccgaaaattttttcaaaatttaacgattttttttgaaaattggaggctaatagagaacccataacgtttgctcaaatgaaaccaaattggatcggttcaaaaaagcatgaatgggggcttgtgctacaaaaaccgttactcttggggtcggggtcactttggcgcacgttataaattggggtgcgccaaaatggccgcgccaaagtgggcggttcccttactcttgggccttgtttttcgatggattttttttttttttaattccgttttttcagctgtcagccatcgaaaaggagaaccagctgatgtacgaatcggtgctgaacgaggtggacattttcaagtcgctttcccacaccaacattgtcaaatgcttctactcattcaccgaagtttcgccccattcggtgggcctctgggggctttcaaaaaaaaaattttttttttccagggtgtcaaatatttggtgctcgtgttggagtatgtcaatggtggtgacctggagac

SEQ ID NO: 54753 - DNA, 1051 bp, Heterodera glycines
atgtcggttggtctctcattcccttcacagcgacaacaacaacaacaacaaacaatcagcaacgacgacaattgcgcaacgcttcaacacagcacatccatcgcccgtgcacacgttgactccgatcacttctgctgctgctgctgctctccaatcaacacaatgggcttcctcttctacatgttcgtggctgcggttgcgttcggcggtggagcggtgggtttgggggtggggggaattcgcgttgttgctgctttttctgaatccaatcaaatttgtatccattccaaaatgtattgtttgtccttaaaacaatggacaaaatttctcgggattgagctttcaagcagggtaaattcgagactcataaaagcacggaaaatgcatttggcttatttatgtgttttttgctggtgtgagacgaaaccaaattttagaatccaaaaattgattttgagccttttcagaagtgccattaacatatacaacgttcagtttgaccaatttcggacccgaaaacccaaaatttcattgttccatgactagtaaaatggtttagttggcccgcttttgcctccgttcgtgttcattttgtgtctaatttgttcccattttcttttcagtactgtggcatgatttacaccaccaaacgggccagggcatcggcgggcggcggctccaagaaggacaagaagcagaaagcgtcgaagagctccagcggtgaacaatgatcgactcgaggacggccccgcggatgaacgaacgatggaattcgagcaacaaacgcttctccccttctaactgctgctgatcccccaatatgacgctgtttcccccctccccccaaattatatcatttgtatgtgctttatcaccctctgatctgttgtccgtgataagctttatgcgctgtccatatcagtgatcaaatcgttgtaattgttgtaatgatatatgtatgtatgtcctatatattgtatttgtatgtgctccaatgcaacacccaatcattatgtgtacataatatatgttgtatgaatgtattcggaca

SEQ ID NO: 54754 - DNA, 1082 bp, Heterodera glycines
atgggaatggtcaacagtttcaaagaggtgtgtggccatatttccgtaaaatattttgcttaattgccatttgctttttgtttcacattgtttaggcatttcttcgtgccaccactcctgtcggctacacatttcgacttgaactttatgattcaacggaaattgtcacgccatttgaagtgatgaacgaacggaccaacgaaatgctgacatttgagaaagaaggaaacgatgaaattgtggatgaagatagtcaatttactgatgctgtttggctgttgaagcgatgcccaattggggggacggcgacgattcagtgggaggacagaaagtcggacaaattgaacaaagtcgatattcgtctttatggaaattgcattgggtgcgtggcaaccgtgtcccggcatttgcgtttttgtccaaaaatcgggttttttcaatccctgcttgctgatcgcctaaaacaagcgatacaaagtgatcgtatctgatcatttgatcgtcaatgaatttatgatattaaaattttcaaagagcagagttaatgctctctaataagtgagaagactgtgttttaattttaatgatctttagatcagggattgaaaaaaaaaattaaatttgattccgatttttttgacaaaggcgcaaatgtcggggttccgtggcaacggcatttttgtttcgtttaaagtcattcaaatttcacttaatattcaggccattgtctccactaaaggcgggccaaatgaacgcaaaaaatcatccgaaaatgaatcccgagcccagcggacagcagaagaaaaagtgaaagaattattaggaaatgacaaatgattgatcataggaatggaaattgatctgataatttttccttatatttatttgttgcttctttcatttgaatacatttaggtaatttgtctggatttttggaacttttacgcagaaaatcttttttgtctttagaaattcattgtctaatgttctattttttgtgctttacttttgcctaatttttcaggacttttttgcatttcttacgtacgttttttgacgattttttatgactaaaaattaaa

SEQ ID NO: 54755 - DNA, 120 bp, Heterodera glycines
ttcgaatttaaaaattccttcgcttttcccaatgtccccacttttccttctgctcagtgcttttgctttgactgcgtttagcctttttcctccttcgttcgctgccaaagatgcgcaaca

SEQ ID NO: 54756 - DNA, 719 bp, Heterodera glycines
atggccaagaaaccccaagaacgccgttcccaaaaattttttgataaaattattctggttggatatttaattcccaatttttgggctgatgaggttcgatttcgaaagacgaattcaatttcatttcttggcattggaattcaaaaattaattagtcctccattgccaatgggcagggccggattagaacggatccaatcaatgcaaatatctttaaatatttaagaaattttttaaattaacttccaattttttaatttagaccaattagcgtgttataggatgagccagcccattttccgggagccgttttaaaaatttaattttttttttaaacattttccaattttttagccccctcagcaacatccggttcagtccggtgagtgagctgcctcgtctggagcgttggttccgctccgacccgaaccccacacgccagaaactgttgtcctacgcgaacattctgaacgcggctgcctaccgacgggcgaacaacaaagtcacttatcaggtgggtagggagtgaatttaaaattgaatttaaaattttaatttaaaaattttcagcaaatttgcaattggttcgccaaccaacgccgtacccaccagcgggcagtcgcctcgcgccagtcatcctccgccgctttgcaccaaattcaaaatgttgccaacggtgcacaacgcccgacccaagcattggcaatgctgccgcttaa

SEQ ID NO: 54757 - DNA, 446 bp, Heterodera glycines
atgtccaatgaggcggaaaaggagtttacattggcgggaaacccgaaggcaccggctctccacgtggtacttgactggatccaccgatcatggcaggaaatttccaaagaagtgatcatcaaatcatttgagggttcagttgaaaaagaaaacggaaaaattcctgaatttttagtctgtgggttgacaacgccattggacggaacaggagatgaaaaaatagcttgcttcaagccgaaaggggcaattggatcgataggaaccaaacttttgcgcgagtttagagcaactgaaactatgaaagatgggcgaaatgatcacgaagaagccggcttatctgatgatgatgtgatgtgagttggatcaagtcggagatgaggatgaaattcttatttgttagcgttttttactgttatttttgaaaaaaaattgatacaattttccaa

SEQ ID NO: 54758 - DNA, 1616 bp, Heterodera glycines
atgcaattccgtcgcctgatcactgtgctgcagctgctgctggcgttgttcgtcgttgtgttggcattgtgtgccaatttttgttacggaatggaaggaaaaaataaagatttacaaaaaacagcgatttctaactctaagcagaaaaactcggtaacttccttgttttgctacccccctcgaaaaattttaaatttcaaaaaatcatagatattttgttaaacctatgaccagatgtcatcaaatgtcaaaacaagcactattttcgtgatcagtgaccttgaaaaccccaaaatatgaatttttaaaattttccgaggggagggaaggtagcaaaacacggaagcacctaatttccaacagcagcagagtgggaatggttttaacaatgccggaactcatcagacgccaaagtcaaccaaggatttatcgtcaaactatgtcaaccctgtttttgcaccgacagcaacttatccaaataataattctcgcttttctgaaactctcgaccatattttctcccagcagaagtagagtcggggagacatgaatttttaatttgaatcaaacggaacaccaaaatttatttaaaaaaacttttagtttttatgatgattttttatggaggaataatgtccaataagcaaatggagccctttgtaactttttaaatttgctctctttttttgacaatttttcattgtaaatctttaattttagttgttattttctttcttatggctatccgtctattttttaaattctctctgtatttttttatttttctattttatttgttgtttatgcatatttaacatatttatatacaaaagtgtgcataaaagaaagtattttgacgagaaagtacaaaaataaaaaaagtgactgaaaaaaactattttttctgtaaagcctattttaaatacaatgttcaatagccacttacaaaacaaaaaaaaaattgagaaaatatgaattttctaaaattttaaatttcaaaaatcattttgatcaatccttaaaataagtttttttctaaatctaattgggacaaattcacagatgccccccaattcgcgaattacattaaaatagaccaaaaagcgcaaaactttttcatctttttcggacaaaattcgattaagcattaagttaaccatgaagaaagatatttaaaaattttaaaatttaaaattttttccatttaatttccggtagaatatttgccaaccctaatattcaagcataattatttgtatatttggcgtaaaatcaatcttttacaaatattaatcgcaatgatggaaaataaataattttccctctccatttttttataattataaaaattttatgaacaaataaatgttgttcgccaaaatattatttttcaatattattataattttttatatagaaaatgatggaattttcggagttggagcaaatgaaaacgacgatttgtttatgaaatatggcaacaggcatcttcaacgaaatcgcagaatttgggaaaacgaaaagccacccaaaacgatggaaaggaggcaaaagcaagaaaagtgaaagaggaacagcagcaacccgataatgaagttcaattagggaaaattaaa

SEQ ID NO: 54759 - DNA, 700 bp, Heterodera glycines
atgttttttaattttctcagttggttattttattatatttgtcaatgttttttttgacacaactaaaaatttatttacattttaatctcaaaaattttattatgctttttgatagttcagttcaaacacagtaatttcaaccaattataaaaactttcctgaattcgtttattaatttttaaataattattagcattattcttttttataacaaatgatttttacataaacttttggcataattattattctttgtaattattttctttctttatataattataatcatataaaatattattgaataattttctcaatatgctttttttatattttctttattcagtaaaattattattttatagtttatctttttatattatgtcttttgtgaatatatctttttaaagtatgaaaaagtaaagaattattgttttttattagaaattaccaaaaaaaaattttagctgagtttttttattttctagattgattatattttgtttctataaaaaaatatgataaatttaatactttaatcaatttagatatcattagtgccatgccatacgatagctctatataatttgatatttttttctaaaaaaagtccaaataatgattaaatttttgtcgaaacattattaattagaagaataattttttttttattattttgctattttatatgaacaataaa

SEQ ID NO: 54760 - DNA, 114 bp, Heterodera glycines
ttgtttcgacaatattattactcataccttttcacaagcttatcaatagcgtacctccttcaaattccgaatcctcttccccgtttaaattgcttgggataaaaaaatccgatt

SEQ ID NO: 54761 - DNA, 1000 bp, Heterodera glycines
ctaattgatatcattgaattgactgaaatgcgacgaactcacgcagttttgcatttggtaatgaagaaaaaacttttattcagtggaaatgatcagttaagaatttggagttattccaatgcttatccgatcaatcgcggcaagatctttgaaaaagaaataaaaatggatattctggctctaaaacaatgcttactgatttgtcctaatgaatggcccattcatttagacggaaaagaccaaatttttttctatgcaaaaaggaatggaaacataaaggtataaattagtagaattaattggtcatttatgtgtcaacacttaattcagataattcttaaacaaaatgtaataaaatcaaaaaatcacccctaaaaattgatccgaaaaattacctcccccccaagaattggaaaactttctcaaaaattcctctcccaaatttatttattttttcttgacaaaatttttaatttaatttttttaaatttttttttttggtaagatgtcaatgtttctaagaaaaactcataatatttaaattattcgtttacacagcaataatccaaaatttaacctttttgtttgctttttaactgccagaaaattgtttgtaaaaatttttttacctatttttatggctattttgttaccgattttaaggattttcggatacagaaatacaataaaatcaaaatacaccttaagaatcgagtcgaaaatttcaaaaaatacactcctaacaattggaaaattttatcaaaaattcagaatttaatattttctttcttgaaaaaacttttattatgcttattattttattggaataattttataatccttaaagtttattttggtccggtaattgttctcactttccattttcagttgttgggcaccgctaccgtacagttattgcgcgaaacttatgaatataatactgtcattgacttctcagacttagcccaaggagcacggttttataagcgtcatgagaacg

SEQ ID NO: 54762 - DNA, 1931 bp, Heterodera glycines
caaattttacattaaggattaaattattaaaatattttcattagtgtgaaggcggagtcacgatggcatgtgtgctgggccaatgcgagtgcaaattgggcttccaaccggttcgctctttaagccaaaagtcatggcactatttaaaattaattgttgttcatcattttggaacaatgatcatcggtacccgagctgtgagcgaagatgcactttggaggaggtaaggacaatttgattgttaattatataatattattattggtttttttttttgcagttttgttacttactcaaaaaaaacaagggcttatttgacgaaatttttctcgaagatataataaaaacacaaaatttctccatttaaattgaacttttcacaatggtaaactttaaatattagcatttttcggattttgtgttcctattttttatgcctatttaggcgcctaattcgagatttttctagcctaaaaattgagtctctaatttctataaacaaatttattgttgattgataaaattattttattaacattatttttttttggtaatatcagggattttattggggtgataatttttaaaatttattattttttgaatttttttttaaatgatcaggtgcccgtgattgatcgatgtttgaaaaaagttgaacttggagagcgttgtatgagcagcaaacaatgtggcgatgcggcagccgagtgccgttttggcatctgtcagtgcctttgcaccttcaaacagacggtcagtgccaaacttagaatccggtaaaagattatgtggaaacatgaaaatgggtgggatcacatgtggaaaatcccatcttttttacgattccgtaaaaacccggtcggtgttaatccgaattccattgtgaaatggaaaaagcctaaaatacatttttcaaccaaataaaagattctagagattttagagaattttttctcttttgtttatgattgattacccactaccaatttgagcgcttcggtgagatttgctttctgatttatgacaattgaatattttttcgaatattaccaagttttccattagaaaatgaattttcgttcgaaatttccaataaagaatttttagaatttatttaattagaatttatttaataggtttgctagagaaaatagtcaaactgaaagttttttctgctcagaaagttctttttgaagataaaaaaaaatttaattcataaattttttttttatcatactttaagaaaggcgggggcaggggataaacgagctgatccaagctaagagtgataagaaacagagaataaaccaaaggcatgaaacatttttttttcagggaccataattatttattaaattagcttaaaacaaaatttactttcttccgaatttattttttcccgcgtttaggagagaaaattgtaagaacgggaaatggaaaaaagcatatgggaaataaaaatcattaaagggaagagatgcaccgtgacccacggtcacgattcacggtaccaattcaaggttattccgtgaaaaatttacactggataaaattgaatatttatgaaataaattttgttttcatagagaaatttggtcattttttgggcaaagtttgctaagaaacaaagcaaaattatcttttgaacaaaacccacctaccaatattgtgcgaaaaacaaataaaaagcaaagtttcaaggatgaccccagttaaataaaaaactcattaaaattttttttaattcgctcaaataaagttaatttgcgcaaaatcagtttaaacaaatcccatttgcaaatttgcccttgaaatattttcagaatattttgggcggacccccgcgctgcaccaatccggacgacccactcggcttcagcaatattctgacacgcgttgagcaaatcttccaaaatcggcaaaggagt

SEQ ID NO: 54763 - DNA, 600 bp, Heterodera glycines
atgtcggctcgcaaatgtcctctgccgctgattgccttctcatccctcactaaagccggcactcctttgccgattttggaagatttgctcaacgcgtgtcagaatattgctgaagccgagtgggtcgtccggattggtgcagcgcgggggtccgcccaaaatattctgaaaatatttcaagggcaaatttgcaaatgggatttgtttaaactgattttgcgcaaattaactttatttgagcgaattaaaaaaaattttaatgagttttttatttaactggggtcatccttgaaactttgctttttatttgtttttcgcacaatattggtaggtgggttttgttcaaaagataattttgctttgtttcttagcaaactttgcccaaaaaatgaccaaatttctctatgaaaacaaaatttatttcataaatattcaattttatccagtgtaaatttttcacggaataaccttgaattggtaccgtgaatcgtgaccgtgggtcacggtgcatctcttccctttaatgatttttatttcccatatgcttttttccatttcccgttcttacaattttctctcctaaacgcgggaaaaaataaa

SEQ ID NO: 54764 - DNA, 545 bp, Heterodera glycines
atgcttaaaggatgtctgtacgttatcttagtgctgattgctgttagtttgattcggttgggcaaatgttagaggcgatttaagccttttggcccttaatttctcctgaaaacttagaaaattcaacataactctgcctaaaagacatatttctgttcgcaaaataaacagaaatgtgaaaaaagatttattctttcttatttagtttgttttatctgtttatttttggtagttgttgagattttgttcgtttttatcaagtgtctctattttaaattaacaccccatttttgaaaaaaaatcgtaaaacttttttccgtcatcatttcggtttctcactttcagaatcttaatattttcagaattgctacgtacagtcaaaaattcagctcgatcggttcatgggaagtggtcaaactcccaaaaaacagggtgtctttattttaaattaacacagtgtagaagctttttctaagcaaatgctaaacaattggatgcattggaaaaaatgagcttctaaattttgttttagattttagactaaa

SEQ ID NO: 54765 - DNA, 61 bp, Heterodera glycines
agacatccattttcaacaagacgcgccttcgcggagacaagacgtagagcaatcattcaaa

SEQ ID NO: 54766 - DNA, 913 bp, Heterodera glycines
atgaatccaattgacgccataatattgaatgcccactatgggctaaaacacccgcaaacaaagttgaacatcacccttaacgaggcaattgcacttggactttatgacccagtcacccgacaatttctcaataacaatgagcagatggattattgggattccttagcattccattcgccaaacactgtccacctctacgtcaaatttggggctataaaagtgacaccgatggacttggatcatgcactgaagtgtaagtgggcgaaaaagtttctaaatacctaaataggattttcggcccaaaatgcgaatttaactaattttaaaaatggtttcgttttggccaaattttagatttagtgcgaccttaacaattcttggtacttgttaattatcttttcaaaaaaatttttgagaataaacttcttttttggtttttagcgtcggaaaacccgattctgacatctattttggttccgcgtttgaatttgggccaaaatagataccagaatcggatttccgaacctaaaatccctaaaagttttctttaaaaaataaaaaaaaattttttttttgaaaatctgtaaaaaagtacccaataattttcaatgtttcctgggtttcattaaacattccaattttctttatcacctatacaattttgtttaacaatatttcccattaagattttttggaccggtacgtcggagtgttccgccttttggaataccaaatttctctgccggaggccctcaaatacggctacattgaaattcgcaagccacaaccgacatttgcattgacgttgaccgattgcatcgaacagaattggataaacagagaaactggactgttcattgcccgtcccgaagaaccgcatggatttggcgaagccaatgcgtttcaatggtga

SEQ ID NO: 54767 - DNA, 996 bp, Heterodera glycines
ggctatgatgcatcagcagatatttggagtgtcgcctgtatggtcagttgtttttgtgataatttattaccattagtaaatttcttcactaaaaaaggctttcgaattggcgaccggcgattatttattcgaaccgcacagcggtgagaatgacaagattcgtttgaattactgttggttttctttttaaggcggaacttacagcagggacgaagaccatttggcacatataatcggtgcttttttgttcatttttaggcaatcgtaacgaattgagggcattaattttcggtttctgctttaattaattaaaaaaggaatggtttccgcatttgacttttgctacaaataattaagcccaatcattggtttatttttggattaacagaactgttgggcagcatccctccgactgttttcaaaaagggtgaacattggcgagaattctttcataaggtaaagagactttcggaattcgaatttaaaaaagatggaatttgcagactggtcgattgctccatattccgaatctgaagccctggtctctgcttgaggtgaatttttctaaaatccatttttaaaatgaagaaaacttcaggtccttactcagaaataccagtggcctttcgaccaagccagatcatttgctgcatttttggttcctatgcttaactatgagtgagtcttttgttttcaacatttacattattagctgcagtctaaccaattccaaggcgttggtcacaaaaccttaaggcctcttatttaggggccggaggaaagaaatatgactttttgatgaaattagtaaaaaaaaatttcaaaaaaaattcccggattgctgtgtttgggggcgggagtgtctccccctcattccctttggcaagctcgctttcatttgtaatttactatttaatttgttttttcagaccgtctgaacgcgccactgcagggcaatgtttggagcataattggctcaagaacatagatgaataa

SEQ ID NO: 54768 - DNA, 104 bp, Heterodera glycines
acagcacgccttcttctccttgttggcactggtggaggaggacagtgtgatgttgtgctggctgttgattggcaccatccggtccggtggcacttgtctgtgcc

SEQ ID NO: 54769 - DNA, 535 bp, Heterodera glycines
atgattgcttccgcgttctttcgagtgaaaagaaaggccaataaattactgtaggttgcaaaaatactagaattttcatgtttttaaatccttctgtaaaggactacgggtacagtacagccattagttcggctattctttttctattagccaaattgttcctcaaatcggtaatgtgacccttggttttaccgtaatcaatcaaacaattatacagtaacatatcccttttaccataatgagacataaggcagtttactgtaaagcactttgtactgtgcgactaatatgtcctaatgcatgtgataaacacaatttttttttattattaccatttatttttatttaatatttacagtaacggctctaagaaactctaccgtaatcccaggagagaataaaaattaattgtaaggcaatcattattttcgcaccagcaaaacgccttcagcagtgtgatcactttgttggacacgtacacggaccggcattgcactgcgctcccatccatggtagtccaccaacaaataataaa

SEQ ID NO: 54770 - DNA, 1679 bp, Heterodera glycines
atgttgtccgccggtggccgtgccgcaatgcttggcctggagaagagtccaccgccagtgcttgtcacccttcaagtgcagcccgggcgcgaattttccatcggcgccgtcacgcttgtcaaggaggagcaatggcacaatgacctgcttggccaggtcatccccctcccacttttttgtggatgaaaagccaaaaattgcaatgtaaaaaatcgatttacctccaaaaatgaggtctctattttaaagattagccctaattagtatataggggcgaagccttattttttttatctctctctcctaataatgacgacaataattcaagggaggggattgtaattttaggaaatatggtaaatttttggcatgcaaaaattctaaaattttcgttaaaagatttcggggaggggactgtatttaaggaaacacggtaaattttcggcaagcaaatatgccaagattcctcgtcattgcctagttttgctagcttgaatttggtgtccatactcacatattttttttcaaattaaaaaaaaacgccaaaggaatgatttgcgaatttcaaaaatttttgattttggtcaaaatttttattgaaatatcatttggccaataatttgtttggcccaccgttttcagaaaccgttttgtgtgcgcaagaatggcgtctgcgttgcgcaacgctttccgcaaccgtctaattcaatccggactgaagcggaaaagtcgggcaaaaacatcaattccagcattgcgggcgacaagttgccattcccagtggccggcgaaccgtcccaaatgcgtgtgatggcattggccggttccggggctcaggtgggaaaaacgaaaaaattgaataaatttctaccgtaattaaaatgactaggtacggtaacaagaatattttggatgggtgtttttttttgatcttgcccaaaatttatttgctcaatttttcatatttttttgaggaaaaaaaataaaatttattttttttcagtccataaaaatttttttttagttttttatggtgaaattatgattaatccttaattaaatgaactgcttcggtgttaacagatagccccttaaattttcgaaaaataataactttaattttaaaagagaatgaaaatcgtgaattttagtaaaattaattcttttaaaagaatattcattttcttttaaataattaaaaaaaaaataataataatttattgtgatttaatattaggaagaatttatttcaaaataataaattaattaattttcagaaataataaaatattaattttatttatgatttatttttagaaaatattttatctaaaaaattaattgattttcgtcgaatttaatttagaaaaagaatttaaaaataaattaattgttcatcatcaaaattattataattatgaaaaatgatttgatttacatgctcaatatttaaaaaaaaaaccaaaaagatttttatttacattttcatttttaattatgttcagagcacattggacattgagggtgttgttgcgacgccgaacgactatgtgttcgtggtccactacttcagcccggacaacccgccaattgttgtcgatgtactcatccaaaatgaacattttggcgacgcgttgttccactactgtccgtccatgagcggatgccggacaattgtg

SEQ ID NO: 54771 - DNA, 678 bp, Heterodera glycines
atgacgctgacccacaaaatgtccagcccacgaaatgtccaagtttcgaatttgagtttttttattattcagatgggcctaaggttaggcaaggggtaatataaagggtatattcgtattcagcgaccccgaaaaccctaaaaatcctaaattagactcattttgttattataaattttgaaaaattttggacatttcgtgggtttttactcttttggacatttcgtggcttggacactttgtgggggcgccaaacatgatattcaatatcagaaaactgatgtcattatgccaaaaaccccgctaattcaaaatttttggtaatttgatctcttgttttccattcgttttttatctctttgaattaaataacaataaagtaataacattcaagcatttataaagcattacgaatggattccgaggaaaattcgccaattcacttatcttaaacacctgccggactccattatcaagtcaggaaaacaaaacttacgcaaaaaagtgaatttgcaaatctatttttaaaagaaaaattatggaatgtcaaatgtgcagcaaaagacaatgtgataaagacgagcatatgcaatttataacatcagcagggggcgcataccgaacataagattaaattaattaatgaatttaaacaaacaacacacaaaaaatccataa

SEQ ID NO: 54772 - DNA, 248 bp, Heterodera glycines
tggcgcccccacaaagtgtccaagccacgaaatgtccaaaagagtaaaaacccacgaaatgtccaaaatttttcaaaatttataataacaaaatgagtctaatttaggatttttagggttttcggggtcgctgaatacgaatataccctttatattaccccttgcctaaccttaggcccatctgaataataaaaaaactcaaattcgaaacttggacatttcgtgggctggacattttgtgggtcagc

SEQ ID NO: 54773 - DNA, 194 bp, Heterodera glycines
aaaagtttggcattccgcttgaaagacaaaaattggctcatttgtataaaccagacgatgtttccgatagaacagaatttagttttggtgactgtcaaacaatgtacttctataacattgtaaaaggcgataccatttttgtgtcggaagtgtttgaaatttccgtaaattaccaattctccattcctaataat

SEQ ID NO: 54774 - DNA, 2559 bp, Heterodera glycines
  unsure (1)..(2559): unsure at all n locations
atgagtcatcaatgtggagaaaagttttgtcgcctatgtaaacaatttcacgtaaaagaggaagacgacgagaatccctgcagtagctgttttatccaacctcttaaacaacaaaaaatcaaaccgtaccggatcatagcttacgatttcgaggcaacacaggacaaaaaagttggaaatagtttcgaacacgaagtcaactttgcagcggctaccgtcatctgcaccaattgtattaataatggagaatggaaaaactcactagagggaaaacaatgtgctatatgtggccccaaccgtacaattacattctcaccatttgattacaaagagacaacagtagatcaaaaaattgtcacccagcaaactctacgggaatttgtccaatggctactatttgaacaaaataaaaaatacccaactgtagcctttgcacactttgggggtcgctacgacatgacaatgatcatcaaggaagttattgcacaaggtacaatttttaatattcatagattatatattttttaaggtgttcacgatccacaaattatcaaacaaggaaatcgtctttatgaactcaaaattaaggataatgagcatgccccactaacaattttccatgacagctacaatttgatgcctatcaaattatcgggtctcatcaaatcatttggactcaaaattcaagtgattaattttcataaaaattatcaattttttttgttttaggataaacaacactttccacacatgtttaacaaatcatctaattatgaaaatgttcttactaatttaccgccgcgcgaagaatactgtcccaatcaaaagaaaaaaactgatctgcaaaagttcaacgaatggtacaacaccaattatgaccaacactttgatttaaaagaaaaattgcccgaatactgctgcaacgacgtcaaaattctcacccacgccctcgtcgagttgcgccgggaattcaaacaattaacacaaagagaaggaaatcatagaggaattgacattctttggcaagcaatgaccatagccagcgcctgcgtcaaaaactttgcccttaatcatttgagatccaactctctagctatagtcccggagaaaggctacaccccacaacaaaaccaaagtgcactggccaacaaatttcttgactggtactctcacataaacaacgttcatgtacaaacggccagttcccgctacggagaatatatgtttaaacgtgaagggcagatataccaagtggacggctacattaaaggcacaaatgggcagcgggacaaaataattgaagtgaatggttgtttatggcatgggtgtgaggagtgttttgatgatatggatgaagagacgaggatgccaaacgggaagacactgggggagattaggctaagggaacagaggaaacatgaaatacttaggcggtacgtcgacttggaggtggtatgggagcacgagatcaataaacaaatgaagagagacaaagagatgagggagtatttcgaaaactggaaggattgttcacctatcaaaataagagaagcatttcacggaggacggacaggaccaatgaaactaatccacacagcaaaaccggggcagaaaatcagctacaaggacttcaccagcctctacccgtttaccaacttctctacaaaatatcccctagggcatccaaaaattatttctttcacgaccaatgagcaaacggtcaattggcgttctccaactgacaacccctacaaaggattacttaaaattcttctccaaccaccagacaacaacgtcaaagttactgtaatgccaataaagtttgatgagcgcctgctattccctctctgtgaaaaatgcgccaaagttattagcaacaaatacccaaaaggtctcaaagacgacaactactcctgcccccacgtcaacaccaacgaccgcgccttcgtatcaacttgtactcatcttgaattaaatgcatcattggaggctggctataccgtcagaaaactttttcatgtcctacaatacgaccaatggagtgacaatgtcttcaagtcctacgtgagcgaaatgatggccttgaagatacacgctactggctatccatcatggtgtaataatgaagaggagaagagaaaattcattgatgagtgctggagaaaatttagaattaaaatagaggataacaaaatgaaggctgaccccggaaaacgatacattgccaagctttgcctcaactcactctggggccgcttctccatgcgaaatctcctctcaaaagcaataattgacaacgacgaatgcctgatccgccaatactctgacgataaaaagattgaactaattgatgtcgagctaatggacgaagacaacgacgtgtatatgctcacctataaacctaaggaagaatttgtcgacgaaaacaagtactcaaatgtcgtcatttccctcttcactacttcaatggcgcgactatacctctacgaagctctgaaaaaggtcgctgacgctcctggctgtgaaattctttactacgatnccgccagtgttntttnt

SEQ ID NO: 54775 - DNA, 562 bp, Heterodera glycines
atgccgaccaaatttgcgagtgagtgggagtagttacccccccagattttgggggtgacaattcagtcccgtcgtttcagtcccaggcaattcagtcccgtagttttagtcccaggcaagtcagtaccagaccaattaagtccgacccatgcctattagagttttttttctgttttgcatgactgagctagtagtacatcaaaatgttacgcttgactgatttcataacaattagctcctgcctattattaaatttacacatgtgtatttgtagtaattatctctcgtacattatgcatgaccaattttatgaaaattattcaaaatgttatgcttcggtgatttcatagtaattatttatgttacaattgctctcaaattccattttttacagtgacctattttgctctggttaccgtcatcaaaataattattgctgccctctattgagagtataaatagacgagcattcccaaccaaaagtccatttctcccattcattcaaaaaaaaaaattttcaatcccactccactttacattattctctgaaaacaaaaataaa

SEQ ID NO: 54776 - DNA, 1519 bp, Heterodera glycines
atcagcatccatattccgaccatcgacaaattcgagaaaaatatgatgatcaatgaccacgtcatgcaggtaaatttggtggtactttaattagttatggttttatataattaatttatttaaaaatatatttatttgtttttaatttaaaataattatggaagggaccccaccggacctaattggtcttctgttttattaaaagatttgccgaaaataaagctaatttgcatataaatttttaaaatattaattaaatttcttttccattttccgtaaaattccgctttctcaatttatttctgtcatatttttcaaaaaaatatgtgaatttttaggatgagggaagggataaatttgatatttctaattttccaaactttttaggattgaggtgaggggattaatatggaatttctcattttcatggatataattcaatcataaatcttaaaccaatttttaatattttaatgaattctcaagttgtttcctattcttaacggatttttttttaaattttcaaaggtatttttttaatttttggctctctttcaataattttatatctctttccatagattcgcaatatccatgtgaacttggacaatctgcaacccgaaaccgaattggatctgagcgacacaagccatatcagatcaggagttggtcaatacatatcggccaaatttctagcccaacagatcagcacgtaaaaactcgcagaaataacaaattaatgtaaaaaaatttttctaaaaataaaaataaattaatcatatttttaaatttttgatgaaaattggagaaaagagattaatggaaaatttttttttaataaatttacatcgaaatgccaaaaaaatgattttggccacttcttgcaatacttattagaattcgtttttttaaaagcattgataaagtgcctatttttctgtaaaaataaatccagacccaaaaaacctagttccaaaaaatgcctaggcctctgccctttgtgctaaaagtttataaatttcataatttttttttttttaattttaggcgaatcaaaaatacgcagatgaatgaggagggatcaagagaaagaggaagtgtagcgcgaatgattgctatgatggaaaaattaatttttaaactgaccattttctggcattatgcttttgtgccatttatgcataaaatcgaattggaatacggaattttttcatttttttatgctgctcgagaccgagaatcccacctttctcctgtcgagacttgtctcccaaagcagcatttcatcttatcatcaataaacttattgaattttaaccttcggcgtctatcgccggggagcagctcgtccccgcccccctcgccggaacgaaaatttcatgattcttattatgaattcaaaggaattaaagtgggccaaaaatcgcaaaatgcttatttcgaaaaaaatttctcaaattgatcatggacaattaaaaacaaagcatttgaatattttaagaagcgtgttttgaataaa

SEQ ID NO: 54777 - DNA, 96 bp, Heterodera glycines
ataaagtcaacgtagaagcctcaaaccaagtggaaaatgcttttttatgcttaatatatcgaaactagtgcgcaaaaaaaggcatatgcctcagaa

SEQ ID NO: 54778 - DNA, 507 bp, Heterodera glycines
atgacacacgtatttttcgatcccgagtcggttgattggtcatcttttttcacttcacaacatgggaggggacagaagcaatactttgtcgggagcaagtaccagcggggattcggtttcctcggtaatgtggcacgtttcttgacccctattgcgaggaatattgcctcgagtgcaggacatgaggggctcgccgcggggcagagagttctgagtgacatcgctcagggccgtgatttaagggatgccgtcagggaacattcaagacaggggttgactaaccttaccgacaagttacaacaatgtgggaaaggaaaaaaggccctgatcactaataagatcgaaaacgggtatttgatcagttaagtttcatctaaaggtataaatagaacaaataacacaaataattaaaaaatgtcaactcttacgaaaatagacaaggcgagtgaggatggtctcgaggggggcctttcgctgtttgatatcccccgacgaacgttgcaatta

SEQ ID NO: 54779 - DNA, 1060 bp, Heterodera glycines
atgcaaagttttacatggaaacaaaaacattccattttcagttacattgaccattccgtcatcgcttttctccgctccaatcatcaaatttttgacaaaggcaccaatttgcggttgtggatgtcttcttcgcagaccacggatgaccagccgatttgggaagttttcgtccgtgaaatatggccaatcttttcgacaaacattcgccacttgggttttatcggcgatgaacaattggacaatttgagtcgtctcatttcaccggcaattctcactgatctccatcagttgaattcaatcaattccggtgatttgttgcctgatgtgatcggtgattttgatgggccaaatgcaactgctggtcaaattctggccaaatggctgcatactcctagaaaagacgggcaaccgaagcaattgcgttgtcgtgatcaaacttcaggaacggttgcatgggtcaacaatttcaaggaggtaaaatgaactgacaagttttaataatctgttctcgatttggttccaattttagggccttctgcgtgccaccacttcagccgactacaaaattcagtttattgttgctccgccatcaatgtcaatggtgccatttgaattgacgaacggacgaaccaacgaaaagctgacaatgaccaaatcaagcgaaaatgcatgggccagccaatggataattaagcgatgccaaattggggagacggcggcggtgcaatgggaagatgaaaattggaacgatttgagcactgtccaatttatgatttttggcaataattgtatagggtgagtaacaaaaagcttttgactttgcctaaacaatttaaatttcgttaatctaggccattatctcctccagaagaagcgggacaaagcagcgaaaaagggacgtcttctgacaaatgagtgacggacaaaagagcaaaacaacaacagtgatcagcagaagaaatgaattaattaattgagaaatgatacgtcataatttatcagtgataaaaagtattttatgaaaatatcacaaatatgtataatatgtgcatatatttaa

SEQ ID NO: 54780 - DNA, 895 bp, Heterodera glycines
atggatgagttgggtatggatgttgggtctatggatgagttgggtttggatgagttgggtttggatgagttgggtatggatgagttgggtatggatgagttgggtatggatgagttgggtctatggatgagttgggtatggatgagttgggtctatggatgagttgggtatggatgagttgggtatggatgagttgggtctatggatgagttgggtatggatgagttgggtatggatgagttgggtatggatgagttgggtatggatgagttgggtctatggatgagttgggtatggatgagttgggtatggatgagttgggtatggatgagttgggtctatggatgagttgggtatggatgagttgggtatggatgagttgggtctatggatgagttgggtatggatgagttgggtatggatgagttgggtctatggatgagttgggtatggatgagttgggtctatggatgagttgggtatggatgagttgggtctatggatgagttgggtctatggatgagttgggtatggatgagttgggtatggatgttgggtctatggatgagttgggtttggatgagttgggtttggatgagttgggtatggatgttgggtatggatgagttgggtatggatgagttgggtctatggatgagttgggtctatggatgagttgggtatggatgagttgggtctatggatgagttgggggtgactccttttaagtagcgcaaaatgcccatggcaaccaaattttgcaggaacgcaacccccgtcgtgaggacatgtcgaccacgcaggactggccaagtgtttggcccaccgcgcagtccttccgttcatcggtggtgccgttgcccgtccgcatgggcttccgccgtaggccggaacg

SEQ ID NO: 54781 - DNA, 1280 bp, Heterodera glycines; identical to SEQ ID NO: 24086

SEQ ID NO: 54782 - DNA, 138 bp, Heterodera glycines; identical to SEQ ID NO: 50950

SEQ ID NO: 54783 - DNA, 751 bp, Heterodera glycines
atggaccaactctcgcgcctgtacatgttgggcatcgctttgtgcgctctgttccttatcggttgcctctttaatttactgatgtgctgtttgggtcgtagacgaaccgctgccgagacaggcggcggcagtgcggcactgcaaatgccattcagaacgaagcggggccgacgacaccacccggcgcaacagaaagtggtgaaaaagaaattgcaaaaatcgaaaacgaagtgccacacgaaaaaatgggctggtgccacataaagttttttgtttttggtaagatcactagcaaaaatttcgcctaatttgattgtccgttttcacgtttactcattgtacgtaattcggcagtcattagatccgtttcaactttggccttcaaattttaaattttgattaaaattgaatgaaagcattaacttttgctttactgaaattggccaatgctttgagatgagtgccgtcggtggtcactcctcccacacaacgctcacttcctcgctgtacggaggcgtcgcaaatgaggcgaaaaatggaaatgggagcaaagcacagcagcaacagcagcaagtgggcttttggataagcgaagacggacaacggaacggagggcggcacaattggtcaattggaacaccataatgataatcctaattagaaccataataataataaatgccataaattaattattttgcagaatacgccccgatggtgtccagcttttacgaaggactgccaaacataa

SEQ ID NO: 54784 - DNA, 1458 bp, Heterodera glycines
acgctcactctccgcttcttcgacctgatcaacgatggcaacatccaacaattgcgtgtgctgatcgattcgctggatgccgacgagctgaacattttgctgcggtggacggttgatccagtggagcgcgacaacacccgatcacgatcagctctttggagtgcctttttacgacaacacaccgaaattgttgatctcttggtagtgaaatgaacaattttatccgtcggcactaattttgtatggcattttcagttggagaagggcgccgatccggatgagccagtggctgaccaagtgaacaacataaacacgagtgagtgggtggtgttgatgatgaaatcgttgttaccatgcatctaattcgggtccctggattcggctcggaattggtcgaaacggataccggaaaataattatatttttgcttgctctgaaaataatggtgtttccccatttgtgcagatatgacgcctcttttccttgctgtccgccatgccaatttgccgctgtgccgtgtgctggtcgcgcgtggtgccaacattgacttgggcacggactttgccacaacgccgctgatgcacgcttgcaaaagatcgcaaacggaaattggtagagagacgaaattttgaaaaaatacgtaattttttcccgtcatttttccccccacagtcacatttcttgtcgagaatggtgccaacatcaatctgcagaatggtgatggggcaacagcactgatgtacgcgtgttacacgggaaatgtaaggaaaaatttccattggtgaaatgttttccaacatttttccatttgaattcaggtggacattgtgcgcttgttgctgacacatggtgcaaatgtcgagcaaatggatttcgaaggtgggttttacagcagtactcaaaaatgtaatgaaattgtctctaattttcaggatactttccgcttattgacgcagccattggcggcagtttggaggtgtgccgtctgctggtggaagagtgggccgcagatgtcaaccaacaaaccgttcaagagcgatacactcctgtgatttgcgctgccagtaaaggacatttggccatcggtgggagagaattgtggcaaagtgccaaaaatgtaatctccctaattttcagtgaatttcctcgtcgaacatggcgccgaccttcaacatgttgacgtggagggacacaatgctttgatgtgggcagtgatcaaagggaagacggaagtggcgcggcatttggtggccatcggcgcggacattaaccaacggaacattgaaggtgagcagcagcggaagtggccaaattgttgtgctaacgagcgttttattcgcccatttcaggcaaacgggcacaggatttcgcggaagagagcggaaatgccgaaatggtggccatttttcgtacgacggcgacggacaatgggcgacacgcggcggagggcaccgaaga

SEQ ID NO: 54785 - DNA, 101 bp, Heterodera glycines
atgcctcctttaacagtacaatcagtaataattttttcattggcagataaaatcaaatctagccaggaattaatccgtgttggctcattcgtggccaaaac

SEQ ID NO: 54786 - DNA, 1746 bp, Heterodera glycines
ggtggaaaagaaacgacgcgccaaatgcgttggcttttggccggcgcttcggctggccttgcggtcgatttgagcctttacccattggacacaatcaaagtattacgcctttttttatttttggtttttttttgttccaattttcttagcctcccccccccttcccccttacgttctctttgttggctttcaatttgctattctttcggctttttaaaaatctccataaaaattttttcaaacaattgccgaaattccctccggctatacttggacaacgtaatgccaaatacctcgtatatgatcaatccaatttctttcagaccaggatgcaaagcaaagccgggttcagggcatcgggcggtttccgcaacatttaccgaggggcaccggcggtaattttctaaaaaaaaaaaaaatttttttttgaaaatttaatttgtcactgtctctcattgtcaggtggctgtgggctcggctcccggctcggcactgtttttcatcacatattgcaatggcaaggaaatgcttgcgcaacgaattggcacatcaattccatgtaaaattaattttttttttttttggtagaaataattttttaaaaatttctctgaggggaaatgacgcgggaataaatgaaatgtacccattttgccgaccgttaaaaatatttcatccgcccaatttggtattatctttgtttgacagtgccattggtggacgcactgagcgcaacatttggcgaattggtcgcgtgtttggtccgtgtgccgaccgaaattgtgaagcagcgcagtcagacgagccgggccagcggactgttacaaattgtcaccgaattgtaccgaacacggggaggcatcagaggcttttacaaaggtgagagcagcgttggttgacttggagatggatattttagcaaatttgaaaaaaaaacgaccagaatggcaaaaaatagtcatttttttgcgaaaacggttacaaattcctgcaaaacccacctcctattcgggatttctaaaaaagaaagaaaactacacccctaaaaatattttttgaattcagccctccccccccgaagccaagggtctggcacgcccatggcaggtcccctccaagggtttttcgggaaattttcaattctgctggacattacccttgataaggtggtataatgtgtgcgacgccctcaaaaattttggcaatcgaaattttttcaacggctcaaaaaatttcggcattcgtaattcttagtccaaaaatgttgaaaatctgcattgccgacacatcgctctggtacacattttttaaggttatgtgagcaccgtggcccgagaaattccattctccttcatcgaattcccactttgggagtggctgaagcgtcgtgtggcccatcggatgggccattgttcgccgttggcatccgccgcctgcggcagtttggccgggctgacggccgcggcactcacaacgtgatttcaatttaacaaaaaaatgaagaaaaaaaaaacaaatttgaagcagattttataaaatttttgcatttccctaacttattgcggaatactccccctaaattcgatcccctgaaataaagccccccccccttcgagtggggtaaaaaatatatttttgaatgttttaaaaaaatttccggcttggaattgatcaattttggtaaaacgagttgattttttacagaaaagatttccaaaaaaatggctcaatttgtgtggctcaaat

SEQ ID NO: 54787 - DNA, 1331 bp, Heterodera glycines
atgtcacctccgcctttctacatttttaaatcaccaatggttgtgatgcgatcgtttgatttgatgcgaaggcttatcaacccgttcaaccgtttatggtacagttggtacgactcggcctacgacatgaacaaatttatggacggtgcagttcaggtagaaaaaaaacgaaaaattgttcaaaaagtgaatacaatttttttctttttaaaatcttattaggtttttctatagaaagtttcgtttttttagagaaaaaaaaaatcttaccggaaaaatttaaaaaataataattttgtgcgggaatttccattgtacgaactgctatgacactgatcaaattacctacatggaattttaaacctaaaaaagccaaaattttaaatacaccccaaatttcactcatttcttgtagccccagatcatttcattaaaaaattctggcgatttcaaaattctgatttagcatttttggattttccggagatagcgaaaccacaattagagccaaatagtttattatttaatttattttcaaataaaaaaaaattaggcggcactgctcgcggcgctcaatctgcgcgaacggcggtttgacaaatttcgcgaaattgcgaccgaacaattaacggtttacatgcgccaacggattccgaaaatgcccgcggatttgttggaccaacgactgcagttcaaacgacaccatgtggtcaacgggttcatccacacgtcagcctatgctcaccgggctgtccatgaaagtgcgtttattgttagtcagtccttttttaaaatttgtttgagggttaccaattggaaaagtgcgcaaaattaggggccaaaatccggcacttgtctgctctggaacagcttcctccctcctccggaatgatttaaaaattttgaaaaaaacagtaattcatcataaaaatttggaaaacgctagaaaaaaaatttgttttttttaaattttatattaaaaaaataaaagagtgaaatcacagtttttggaaatggaccaattttggacccttagaaaccccattttacacaaaaatctacaacaactttgattttttaaacccataaattgaacgcaggttagtctgattgtgagttactttttccgaatcaaatttatcgaaattttataggctaatatagattcacttaggtcctatcgaatgacaaagattgttggttcaattggaacaacagtaaacagagttataccacaaaaatcggattggggcccagttgactcacaatcagccgtaattatgagtcaataaaaattaagcaaaatttccatgaattttttttaaaataaa

SEQ ID NO: 54788 - DNA, 1354 bp, Heterodera glycines
atgagcaaacttggtacggcacagtgctttgttgcagacccacgctgggagatcaactcggacattgtgtggacggacgacaactcggggttattaacacggctgtttggggtcaatgcatttttaaacttcgaaaacgcaaaattatatattttaccatgaaaacaggggtggagtagctgtttgctatattgcgagagtgaaaaattgtatgacaaaaagaatttgttaacaaacatggttgttttatcccaccgggatcgtttcggcgccgatgttttggtgccatatttttcagaccctccgattcttatccaaaaaaaaacataatttttttaccaaaaagtttgaacaaaataacatataaaatgaacaatgcttgtttgttggaatacactaaatgtgcaccaaatggatttttgtgactaatttaacagtgatttaactagtatttttgatccatgcctaaaatatatctttgttttagacataaacctcgcattgaaattcccccatgcctatatggccagcaaaaaccatggcgaacggaggacggcactgaggaggcggtgaacgaatgtgtggcactcagttacaggccattccgaaagcgaattgagataaaattggcggacgaaggacttacggtggggcacatttatgggcatgggacgggggcatttgtgattcgatttaagtcttggttttcttttatataatgagatttttttgaaaattcctacaaaaattgtgtcctagttttgtttgttattaaaagcaatattttctacatttttaggacgaaattctggacaattttacgcctccaattgttgtctctgaacttgttgcaaaccgtaaagactgtgcatcgatgtaccgaattcgaacaaatatccacaaagtaattttgaaattttagaattttgagaggggagcaccccaaaatcacgccgctagaaatttttgaaaatattttcaaaaatttctagcggcgtgatttcggcggcgggattttgtcctgttcccttttgagagaccattttcatggttcattcattcatttggattcggaatttataacctctcatttttgtcagtgcatttggtgtttcttacattttttaaagggattacagcaaatgatcattaccgatgccaaattgctgcgggcagagactgaaaaacgatttgatcagtgggaaggtaaggctgctattgatggcattctttaaaggggttcgccatgacagaatttccatacgaaagtccaatgatcttggtcaaattttgaaaactttgccgagggtggtgcgccggaacaccccttatgcatgtatatgattctaataaa

SEQ ID NO: 54789 - DNA, 319 bp, Heterodera glycines
atgccaaattgcccattcctttatttggtgtggaacaggtcaacacgttcaattcggccaaggaccgaagcaacaattgatcgtcccacaccaattaaaacagtgagtgttcccagtttaaaaaaccgtccctgttttcagggtcaggaaccagaagctttttaggtcataggtttcaaacaattccctatatactgaaagtcaaactggtaaatttttgtaaaaaggggccttggaatggaaaaaatttggttgaaaaatcggttttttttttaattttttcaacttttttttattctttttaaagacattttgccaa

SEQ ID NO: 54790 - DNA, 1919 bp, Heterodera glycines
atgcaccggcgttcccgatctcggtcgagatcaagagcccccgaaggtaaaacattttcctttaaaaatatacgtcttaactcactaaatttcaaagaaaattactcttccgttacatattttttgttcaatttacagaccattctctgattgaagcatttgagccggctccaccaatgcattcccgacagagtttacaggttaaattgtcgtcatacaaatatttttgtagggtcaaatggaaacatgcaaatttttgtgtccaattttccttatctctgttttgtgatctattgattttggagttgactctctgcatttttcttatctgttttttgcactccgattacaatatttaccatcacattgggtggtccattttgcatattaattatccccccccccctaatcattggtttttttgtggttggggccctagcgctgcgcctcccccacaattacaccattaactggtggagttcgacatttgaaaaaaaagcttttgcctgtatccaaggaaaaacctttggtctgaatccaggtacaatcgaactcaagtatgaatttcgcaaatatttggatctgcgcatgtaactaaaaccacaaaaaaaaaaattattttcttgcctcttgaaaatgttttgggttttgcaaattgatttttttgaaatttaaacatcgtattaaatacaatactgttaccatatatttttgttcagcaaaccagacaacgattgttggcaactcggttcaacccgcccttgaaccaacaaaatactccgatgcaggtttttaaaaaaaaattttttttttttttttttgcaaatttgcaattcgtgccaataatttcagcgccataatgggcctgctaatgtgatgcgaaattcattgggtcaatcggcacctgcccacaggagcgttcaacggcctaccgatccgagaactcaggcgtgggcaccccgtccaaatttgtcggccaaccgggcatctgaccaagcaatggccaaccaacggtgccctgacgactcggtaaatgcacgaactcaacaaattcaggtcggtgcggttagaaaattcgaactttgtcatatttttcaacatcggtttaggcaaataatccaatgatgccaaccaaccgaagcaatttgtcattgaatcagccaaatgttacgccggtacaggtttgcaataggaatgagcaattcctgaaattgcatggttgtaaatttttagcgtcagaatgggccatcaaatgtcgcacaaatgttggcggcccgtcgagctggagctgttacgccgaatcaggcacttttttttaatacaaaattcggttaattgtaagctaaaaatcatttccatttttttgaggttaatgttttagggcttttcggtgtcaaatgatacgatttgacatccattttgacccgaccctttcgaaccccgaaccttgacttgaacaaatttaaattttcaacaaaatcaaaaaacttgttgaaatggatgtcggaattgaattttccaaccttgaaatttttttgttttgttttgaatgggtggcccaccatcgacactattaccaatcctccgaaaccatttttttgatttgtctatataaattatagcgactggcaacaaattccaccagcagaatcgggggacaatcgtctcaattggggcccttccagcaaatgaaaatgcgaatgaactggagcatgcgaccgccctccgggcttgcagttagcacgccggtccaaccacgtccaattgggcaggcaaacaacagcagtacgtcgatgctgcgtcaattcccaatccgaggtggacgcggacaaccgcagcaacagcaaatgcgtcgcgcgccaccgccagggaattgtgatgtgccatcgccaccgcaggtggatattgttgaacaataa

SEQ ID NO: 54791 - DNA, 879 bp, Heterodera glycines
atgcctttggcggatgaagaggacaatgtgttgccacatgttcgtttcaattatgacttttttatgctcaatttttgccatccaaaaattaatatttccagagtttgttgcccgattatgagaatagcagtgagaacaacaaccccgaaaacaacaacagcggcggcggaggaggtgcaacaacgacgccaaatgcaccgcagcgacggcacgtcattcattcggatgacagcgacgacgatgacgaggatgatgaagatgaggcagacgattatcggggcggcaattctggcacacatgcacaggtgtgttgtgaaatgagctggctctattctatacagggatcgaagtgggataagcagatcccgcgcgagattttgcgggatataccagtccgtaatcctgcatttttttggcaatgcataattaatctcacgggatcaccataccattccacaaaaattttgaatccttatctcgcaataaaagcaataaatctgaaatttgcgatctctaattcaatatttttaagaaaaaaaactataaatgcggaagggtggcatttttttttttttttgaaaaaacgtgtttccaatttttttttatttgtttttcagccgacagcaaaacggggacgcattgagacgacgtataacttcaacaccacaaccatcgtcaacaacagcaacaatgacatgcatttgttcgatatgccaagcacttcggcggccgccgccgctgctgttgctgctgacaatgaacaacaacaaatgctggcgatgatgcccagcagcagcagcagtagcagcaattgggtggacacacaaaatgcactggcaaatgacatgtaatataaatattaattagacaaataattaa

SEQ ID NO: 54792 - DNA, 891 bp, Heterodera glycines
  unsure (1)..(891): unsure at all n locations
atgaaggtaatttttggaaatttctggaaattattattaataaaaacattggagtttagattcggtttctacaaatttatcaaaaatttcaaatttttctttaaaaaatttatatccaaaatttcaaatgccaacaccgctttaaatgttgaggttaccggtagcccaaccgttctttacaatacaaattcagtaccggcatcgccggcggttgggctactgtaacacggcaccgtatcaactctcatctataaattttttaaggattcgtccgaaattgtgctggcatttggccggcttgaatcatccgcactgtcatcagctcattccattggatttgttggctgtttgggcgacctattgtttggcgctcagcaattgcttaggtttgaaaaattaaaaaatttcaaaaaaaaatttttttgaaatttctagcctgngcttcgagttcgtccaatgagcttacactggtctggttgcacaatgggaccaccgaaagcattttctgcaggcaaagcggcgcccaaaaatgaggtgggttagaaaaaaaaaaactaaaaaatggtaaaataatttaaaaaaattttccccaggtggacgagctgaagaaagcggaagatcttgagggccaaaagattgaggaaaaatcaccccaaaaagccaagtgggaaaaatatctataatttaaaaatttttttgttttccctaaccaaaattttttagttttttttggtcaatttttttagaaaatttacggaaactgatgagccgttgaaaatactttgctcagtcaaaatccataaaattcataaaaaactaattttgcttcttttttttttaaattttaatttaaagtttattattctctgaattctttaaaaaatttttgta

SEQ ID NO: 54793 - DNA, 943 bp, Heterodera glycines
atgaggacattttcattttctaagatctggcccctccaaataaggacaaatcttagaaataaggacacttggcagccctgttttagagcagaaagttagcgccttcgcatgactcgttataaaactgccataaagggctaaaaataaaaaatgccaaaaatgatcacttcaaaaaatttatatatttatgaaaatccaaaatatttaaaaaacgaggacgatatagtattaattaagctttcactgcagattggacttaagagttggcgctttttttaaatttcacatcacgtctttttgttttatttcaatggttttaaaaacaccataatgagtttttttcaaaatatagttggaattagaaaccgaaaacacgaagcaatattatgttcttaattacaggtttacaatggttgcgtcaatacgattcaggaagaaatagaaagactttgcaatcaagtggttgtaagtttttttacgtttcgccgccaaattaaataaacttgggttttttagaaattgatcgaaattttgcatacaaaagattttttgtaaataatttcagttgacaagggaacattccgagctgtgagtgggaaaatgcatataagctatataccattggatagagcggggtcgacttgtattgtgaatttttaattttagcggtgcattccgcctgcttcaaaagttacagggcctcaaaatttgaaaatttggtgcttcagggtctcatgtttccacttgttaatcgcttgtatcatccattctttactccgactttacgatgagcaaaacacgttgattttcatcaaagaaatattctaacacggcctaatcatataataatacgtactttcaataatctatgaaatgttaattactgatgtgattattgtcatatttttggcatttttattaaatgaaatattgactcaataaa

SEQ ID NO: 54794 - DNA, 1449 bp, Heterodera glycines
gcagatgctgaacatcccactgatgctgctgttgtggacaacttcgagacgcgcgctcgccgcttcttcgacctgatcaacgacggcaacatccaacaacttcgtgtgctgatcgatgcgctggacgccgacgagctgaacattttgctgcggtggatggttgatccagtggagcgcgactacacccgatcacgatcagctctttggagtgccttttttcgacaacacatcgacattgttgatctcttggtagtgatcaaacaaatttatcacggcactaattttgtatggcattttcagttggagaagggcgccgatccgaatgagccggtggttggccgtgagaacgacattaacacgagtgggtggtgttgttgatgaaatcttttttaccatgcagttttttggtgtcattcagtgatcacgaatccggcggcaccatttcgaccagctccgaacttcgttatctgacaataaaaattggattttttttcttcgaatttggtcaaggattcgaatcggaattggtcgaaattcggatgccggagagtttggcaaaaaactgatcacaaatctgacatccatttttgaacaattccggaacacgaattcgaacaaaaagtcgaaagttcaaattttcgaatttcacaaatttcgtctaaaaaatttaaatgatcttttgttgctggatggtgactttcagtttgttactgtgtatttaacccttttcaagaatttgaactttcgactttttgttagaattcgggtcggaattggtcaaaatacggatgccagagattaattatatgtttgtctgtcttggacataatgttgtttccccatttgtgtgcagacttgacgcctcttttcgttgctgccctccatgcacattttccgctgtgccgtgtgctcgtcgaccgtggtgccaacgtggacttgggatcggactttgccacaacgccgctgatgatggcttgcaaaagatcgcaaatggaaattggtagaccaaaaatttgaaaaatgcgtaattttttccgtcattttttccacaacagtcgcatttctcatcgagaatggtgccgacatcaatctgcagaatggtgacggcgaaacggcattgatgatcgcctgttcaagggcaaatgtaggggaaaatttttcattggcaaaatgttttccaacatttccatttgaattcacaggtggacattgtgcgcttgttgctgtcacacggcgcaaatgtggagcaaacggattacgaaggtgggttttacagcactcaaaaatgccatgccacggattttgtctctctaaatttcaggattccgtttcgcacttaagaacgctgccaatgagggccatttggaggtgtgccgtctgctggtggaggagtgggccgcagatgtgaaccaatcaatcatccaagatcgaaccactgcactgatttga

SEQ ID NO: 54795 - DNA, 481 bp, Heterodera glycines
atggttaaatttataaaaaatttttggggtgtgttaaacatatgaccatgactgtaaccgcaatttaatttacaattattttcgtcagttaattttggctttttaacaaatgctttttatttttgtgaaattttctttttctcagcactgattatcggagtgcgttcaagcgtgagtttggcttggtcaagaaattgttgcgcattggaagcacgacaacagtgcccattgtcagtgccaatgttgtccatgttaattccaatagtcggcagcaacgctttcgttctcaacattcgccagcgattgtctgtgctgcacactaacgatgcctaattgactaattaaaattgttagatggactatacaatttcacattagacctctttttttgtcttcctcaactgagcttacaacttttacttcattgatttttcaggaagtaaaaaaaaagcaatttattgacgaattaaacaatagacaa

SEQ ID NO: 54796 - DNA, 494 bp, Heterodera glycines
atgagccacccagcaatttggaagggggtaagtgattttaagagtatttctgagatatttttatacaaatttaaagctgacaaatgggacaattggcatgctttaaacaacggatggccaacggaggagacggacgaacaaaaggaaagggtgaaaatttggttttttggaatttttatccttttttgtatttttaattggtttaattaaattcagagtccaagcaaatgggtgctcgagttgttccaagggatgcgcaattttttgtctgacaaagtgaccaaaaagtttacagaacgctgaacggaatttcgattggatcagctcaaatggagggaataacagaccatatttattgaaagaaggaattattggatcagtaattttaacatttttatcgtttttttttgtcattttgatgatctactctgttaattttcaaaaatgcttttattattaaactatcgtattgaacggatcctcttacaaataaa

SEQ ID NO: 54797 - DNA, 65 bp, Heterodera glycines
aaactgatcagaagcgcaccaaactttgcagggatactgaaaggaagagaaataacctattttaa

SEQ ID NO: 54798 - DNA, 1296 bp, Heterodera glycines
gtttataaaattgcactttatggatgcgacagggctgttgagtcacaagattggcaacatttgaccatagactcaatattacgcttgacaatcgccgcttatgcttttgtttcgctcatttatatcatccaacggttgtaaaaaaaaaaactaattttataataaaaaatgtaaattattaatgattattatttaataatgaaattttctgcaaagtttcagttcatatgtcggcaatttacgagcaacttttgatcggattaccagaaacacaataaattttgtgtttggtgtgatttggttccgctttcttttgctaaaggctctttttataattgaggcaaattatacaacaacaaaaaaaaattaattaattgtattaaatgtattatttatttattcagcaattttgtcgtgatcaaaccgatgtagactccgttatcaagaatttttgccctccatacatgtaaatttttaagggaataattttttgatatatttttaaggaaattaggaattcttgtaattatttactcataattgagaaaatgctaaatataaagccgaagtgttggagttaagaagtttttttttcttagggctttattaaaaattaaaaaactgtacatatttttttcatgcctcgaaattttacaaataaattcaaccgcttgaagccaagtccccccaccagcctaaaaaatgttttaattgccgaccctaagaataataaaaaaatataacataatggtaatgaatttggtggagatttttagttatttaatttttattatgcagattttgtttcgctgaaaaatgcacgagatcgcttcttaggggtctattttctgtgtttattgcattttttttaattttaggcataacaccaacattttggtatttcatcattatttacccactattttgggttttttcgctagtgtttttttgcaaatttttcggttattttttttaccacttttgagtaattgtttttttttgctccaggtcctatttattattttaaaaatttatatttattttagcaaaaatggcttcagttgcagcaaaacatcgttgcacaaagagcagcacatttggtatcgtcttcattatggtcttttaaaatcggcaattgtcacctgtgcatccgaactcattcccgttcttctcgttgcccattggtaaaaaaaaatacaaatttttttaaaaaaattatttttgaggatcgcatgtggacaagcaaaaaagattgcccaacaaagtttgacagaccggatgatgaacaagaaaaaa

SEQ ID NO: 54799 - DNA, 199 bp, Heterodera glycines
atgcaaacgtaatttctctgaaaataagtctcttattttttgaggatacgattgttttattattatcgattttataggcctattgggtataaaaatatcatataatttcagaactttatttaaaaattctttatatttctgttcaacggtgaacactgagtttattgataaatcaattcgattttcaagtaacgcctga

SEQ ID NO: 54800 - DNA, 465 bp, Heterodera glycines
atggtagcagcgacgagtcagagaagagaaaatagtaaggaaattgaagagaaaattttatttttttattcaaaacaatttaatgattaaaagaggtacaacagtgattagaagcggtacaaaagtgattaaaaaacgtacaaaagtgattaaaagaggtacaaaagtgattcaaagaggtacatcagtgattaaaagaggtacaaaagtgaaaagaggtataaaagtgattaaaagaggtacaacagtgattagaagaggtacaaaagtgattaaaaaacgtacaaaagtgattaaaagaggtacaaaagtgattcaaagaggtacaaaagtgattaaaaaacgtacaaaagtgattaaaagaggtacaaaagtgattcaaagaggtacatcagtgatgagaagaggtacaacaaatggcagaagaggtacaaaaatgcattaataatttttaaaaattgtaaa

SEQ ID NO: 54801 - DNA, 1351 bp, Heterodera glycines
atgcgagcgctccggctgcaacttccacatggcgcaggcattgttcagaaaagcgaggagcttgggcatttttcatttatttgccgaaaacaatgccgaagcactgggtcaaagaaaatcggttcacaaaacattcaggtaggtattttcattagcaagtctttttttcaaaatcagatcagtcctctctttggcactcattcctccactttacattcgccaagcatttacaaccattatcaatgaagcccgcttggagttcaaggatggctggcgtattttggcaaaaactacattggtgccactcaattcgagattgaccatggagcggaggcatttgaaccaaatgcagatgtaggacgcttatttcttcgacgcactcgaagcacaactcgtaaattcaaatattttgtcatgaaatttatgaaaatttttatcaattttagcgttcagtgtgtcccgggcgtccataatgacaggcagtggaccaatacaattcggactgcattcgccataaccatcaactccgacgatcccattttccgaagagagcatcttgcagcttattcgacgttgggaacacgccattgtccgtcctccccgcttccccatatcgttttggaatgtgcacaccagggctcaaatggcacttgaacgaacaaataacggcatggaagccgcacacgtccaattcgcagtataaaaaatattttcagaaaacatttttattttttggtattttcagctagagctcaaccaccatccatcattgagtgacttcattgctgcgttcacaaaggacatcgacaaacaactggacatcggacgcgcagaacagctccagaaaagtagaaaacgaaacggtacaagtagtataaggccacaaatgtggtggtaaattttacccccacattctgcccttcgcagcgcgccggcggtcgccccctccctccccattgtgggagagtgttgtgcccttcgcagcgcgcgccggcggtcgccccctccctccccattgtgggagagtgttgtgcccttcgcagcgcgcgccggcggtcgccccctccctccccattgtgggagagtgttgtgcccttcgcagcgcgcaccggcggtcgccccctccctccccattgtgggagagtgttgtgcccttcgcagcgcgcaccggcggtcgccccctccctcaccattgtgggagagtgttgtgcccttcgcagcgcgcttaaccccttttttttgcacgagttgcgctcaaatattacacaaaactatgcgagctataatttaattagtcgcaattatttaattttgtaagattgaatttttattaaatatatttagatataga

SEQ ID NO: 54802 - DNA, 463 bp, Heterodera glycines
atggaagggtgttctttaattgagtcatttcgtcatgaagacttaaaatttggctttacaaaatataaaactaaattttattttaaaaatcctttcataattaatgctgaggaaaattttaaagatatcctcacatcgttaattgaagaaaaatataaaaatgagcaaggcaaattcagaagcattttgaagctttcttttggttttgaatcattttattgccctcttcgataccctagcgaaaacacggccgaggctttgttccaacacgtattattaaaagaagaacaatattcacttttttatcctttggatggtgttataacactagaagtaactataatcccagatgtctacagtaattcaagaaattgattttattaagaataatttaacaaaaaattggaaaatagccgggaatatacttaaacgatcaaataatcttgaaatctttgcaaataaa

SEQ ID NO: 54803 - DNA, 1459 bp, Heterodera glycines
atgaacacaatccgcgacattaagaatattgaattggtttgtggtagtcgaatttttgtggttcgtgctaaaattgcaagtgttgggtctacggaatacaatgtaaataaaaccaaatagaaaacatatcttgatttttaggcttgcatctcttgtcgtaaggggaagtgtaactgtggtatggagaaggtaaagtcttcatttttgagattgtcgctcttggatgatacagacgttttttgggggtgttgcttttttcggtgtgaaaaatgtagaaaagagtgacggaatggtatgaaaaatgtttaaacacaaaaatttatttttttaggaaaaggttaaaaacttggttgggaccatttgtactttgaaggttaatgtgagtgtgaaagaatatggtggtaagaagggaatttattatactttgattgatatttatgaaatttgatttgttttgtctataaatgaaatgtggatgcctcccgaagggttgttgaagaagtaattaaagatataattaggttaactaatgaggccaaagacttttcattttctgctcataataccatggttgaagctcaaattattaaggataggaattcgggaaaatctgaaatcatattttggcatgaaaaactattaaacggagttagaaaaatacattcacaatttgataaaataaaaaatgaggaaaagaatataaaaatattaaaaaaggcatggaaaaatgtctagacagaaaggacccagtgatgtgccaagaattagccgaagatgccaaacaatcaatagaaatagctaaaaaatataggcatgaaattggacagacttatcgtaactcttattcacagccagatttaggaattggagatatggccaataaaataaaagaaataatgcgagaaaatcaaataaaatttgaaaagccaagaccctcagcagaatttagagacgaattcattgcatataaaatataataaaaatatataaaagaaaaacagaaaaataaaaaataaaaaatagaaaagctaattccattttgttggaagctgctaaaagagagacagagagagcatggcgagatgtcgttgtgctatcggatgatgtaagcgattttgccaagtcttctcgagaaactcttaatcgtgcaataaaatcaagagaaaaagctccttacgctaatggtgttcgggaattgtatcttaaaatgtccgattcaatttgggaaattttcaaattcctggaacaaatcaatttggagtcagaaaaagctgaatctgcgtggcgtgagttcgaaagatgcaaaacttttgaccaggcaacaaagcttgaggaacaatctcaaaattctttaacagaagcccgaagattacattttgagtcccgaagggtgcaaagccaaatgttaaattatgaaaataggctccaaacaattgtttgggagcatatgggtatataa

SEQ ID NO: 54804 - DNA, 753 bp, Heterodera glycines
atgcggattttaatccttagcattgtgcatacggatttatctgcggataacgatttatctgcagatagttagcattgtgcataccagcatgactgacaaaaatttcgtggtaaataattagtgcataagccaatttgtagtgattctcgacaatggagggatttatcggacggatttgagaccataacgggggctgatcagttcgaaaaactgaaaatttccattagacagtaaattaaaaaaaatttatccttccataataggcagaagcaaggaatggttctcatcgcttataacattctatcaatctttcactgtatttaggcaaaccctttccaatataagcactaatggcatttttatttatcaaaaataatagtaaaaaaatatgcaaaaatatttctttgaattaaagctgacaacattggcaaattggggcggaaactgtattatgccacagtgcaaaaacagaaagtttgtgttcgagaacatcaaagtgaccggtgtgacggcattttgtgtgggatcaatcaaaattatggcgacacggcgataattaaaaatgtgaagatcggtggcggctcaacaaatgtgtgcagcttgttcaaaggaaatgatcaacagaaacagccttcggtgattcacaactacaaagtcggagaagcgggcgacgggaagaattgtgtcgtttcgggcagctcaagcggctaatggaaaaagtgatcggagagagagagagagattggatttaca

SEQ ID NO: 54805 - DNA, 170 bp, Heterodera glycines
atgcttttcctctcttttccgtccctcgtcctccgccaaattcgcccttctttctgtcgctgcttttcctttctgctgatgttagccatgctttttgatctgatcagcagcggtcgatcacttccactgggcccaaccaacgaaagggttttcttctccaacgcattacg

SEQ ID NO: 54806 - DNA, 449 bp, Heterodera glycines
atgacattccaatcactgaaaatcaacccatcagcatttcaatctctgagactcaattctcaggctttccaatcgctggagctcaacccaccagcatttcaatcgctggaactcaacccaccagcattccaaacaatggacttaaatctccggaattctaaacactgggactcaatccaccagcattcaatcactgggactcaacccaccaacattccaatcaacgggactcaatccaccagcattcaatcactgggactcaacccaccaacattcaagtcactgggactcaacccaccaacattccaatcaacgggactcaacccaccaacatttcaatcactgggactcaatccaccaacattccaatcaacgggactcaatccaccagcattcaatcactgggactcaacccaccaacattccaatcgcctggactcaacccacca

SEQ ID NO: 54807 - DNA, 70 bp, Heterodera glycines
atgattgaaattatttcatttttggtttattttgtcttaatatttttttcgccaacaccggacgacgaag

SEQ ID NO: 54808 - DNA, 70 bp, Heterodera glycines
gtatacatttgagacaattgggcaggacaagaaaagaatgaagttgatgcctcatgaaactcggaattga

SEQ ID NO: 54809 - DNA, 174 bp, Heterodera glycines
atggacttaaaaaatgaggtagaaatcagtaagaaaataaaaaattaaggagaatgtaaataaattcttataactttcattacaaaaaaatatattacagacataaaatataaagtaaatatactcttgggagtactaacaaataagatgaaaaattaaatcaaatcataaaca

SEQ ID NO: 54810 - DNA, 365 bp, Heterodera glycines
atggcggcaattgagacgaaaaacggaaacattcaaccgaataatcggcagaatgactcagcggaatttttgagatttaaccctccggcgatttttatcatttcttcggatgacgaagaaacaaacggaaagaaaggggcgacggagggaatggcaccggcggaaggcgaaacggcacggaaaagggaaaaaggaacagctgagaactgagaagcattgctttaaacgcacccattgatctcacttgacagaacagcttttcctgtgcacaaccaaacatttgtttattttttgcctttttccatttattttaattttattttcacttttttaaatttatttatttatttattttgcgaaataaa

SEQ ID NO: 54811 - DNA, 358 bp, Heterodera glycines
atggcggctggttgttggcacaacggcattcgcccgaccgacagtatgaaccaggccataccttacagtaagaaattttgaaaaattatccattcaaaattgattcccaaatatgcttacagcttcgcactgacggttctaaacaaaagaggaagttgagttgtttcagataataaaatgctaattttttgatcattttaggtaacgttttggcgggtcgggagttatttcggctccaaatgcaataaaaaaaattttaattgtccatcaattttagaaaattgatatcttttgaaggagctagactttctcttgtagcctggaaaattcaaaaatttcgatatgaaaaaaaaataaa

SEQ ID NO: 54812 - DNA, 2946 bp, Heterodera glycines
atggcaaaaccattcctcccaaacagagatcaatcctggcgagtctggctgtacacaggttggttttacaataatttgttattgaacttcacaatttaacaatttattttggacataaaggaaattatatattaccaaagagaacgaaaaactttatttttttttcatatcgaaatttttgaattttccaggctacaagagaaagtctagctccttcaaaagatatcaattttctaaaattgatggacaattaaaattttttttattgcatttggagccgaaataactcccgacccgccaaaacgttacctaaaatgatcaaaaaattagcattttattatctgaaacaactcaacttcctcttttgtttagaaccgtcagtgcgaagctgtaagcatatttgggaatcaattttgaatggataatttttcaaaatttcttactgtaaggtatggcctggttcatactgtcggtcgggcgaatgccgttgtgccaacaaccagccgccatttcgaacccgggatggccttgtctgtcttaactacggcttttgtcccctgaatggtaacaacccaaagtttcgaattgaaaatcaggtaaaatttgaacaattcttatgctaaaggaatttatgctttgaaattttcaggtccaacaatgttatggtaaatacaattaaattaaattttaatttaaaaaaaaatattttaagatttaattaacgcgtaggtaaaatatttaggtggcgcagatgctacttgtgaggccattggtgccttggcatatgactgcatatgcgacagtgaagattgcactgtaaaaatggaataaaaataaaaatcaaaatttttaaaaatactttaaaaaataatttatacaaaataatattaaatttaattgttgaataaatttcttcaggttaataacccaatcagtttctgttgtccgtcaaggggtaatgctaatattttttgctacttaagggttatgccacccctcaaaattggtcaaaaattttcaaaatttctttgggtttcaaggatgctgatcaagattttgagaattcagggctttggataatttaacccggatgaatccttttgccgttttcattgtttaaattttcagcttttgcttgtattcaaccacctaatgagggctttacacccccgggcggtggatcaagtttgaatcactggtaccatgatccgatcacaggtaagcttaaaaagcattgtgccgaaatcccaaagcccaaattttattttaaaataaaatagaattctacatcgattattttaattattttccatttatttatgtcaaatgacccctccaattattatattttaaatctaattcaatctatcaaaatagaatttaaggcgagtgccgcgaacttaagtaccagggatacggaggaaatgcgaacaattttgccaccaaagaccattgcgaagtagcttttatctcatttacggtatttacccaattttaaaattttttagagttattgtaaacaaagtgagtgctttttttgttgaagtaagaaaaattaaattttcagcttgcagccgaggccttcctctgtatagggaccgtaccatgggtgttaaacaagagccagtatactgtcagggtgctgacaatggttgtacaagtccaaactatgtgggatttgcaaatttgaaatacaaaatttaaaattattttaaaatttgaaggtttgcacggcaatgggcacccttcaacagtgctgtccaactttcagttacctaattaggtgtaataaaaaaaaacaaaaattattaagtgcatatttgttcacgaaatggtgcaattccaaccgaagtgtacaacactgccggtggccttcctacagaatatttcgatgttggagtgccggacggtagcgaaaagttaccgtatttcctataataagccccctggggttttattttttgaacccccttccccccaggaggggggctttatttcagggagggagcactaattgaggggggggggggctttatttgtcaacctctctaaagaggggtattcagggggctctaatttaggaaatacagtattgaaaataaaattaaaaatcatgaaatttcatatttttttaaacttttctaaggaagcggtcaaacatatccacgattttattatgatgccagagagggaagatgcattcaattttctgtgcgttttgctcattttttttgttattttttttcttgggatttatttcactgcttcagtttcttggccaaggcggtaacttcaacaatttcttgtcccaagatcattgtgaaaaattctgctcaagaagtacagaaaatttttagactaagattttacattaactaaaaaattttgaagtatttcagttatatgtgttaaaataagttgtaaaaaaggcattgagtatttttaaatcattcccattaaacaaaaatattccatgaaaatattttcggtataggttagcgctagagctgctcgagactctcactctctactctcgttgttgatcaattctcgttctcgggtctcagggtcatttatcagtctcggctcaagagtctcggaaaattttgaggctcaagcagccttagtgtagagcacgatgggtgtgcttgttgtaaagggaaagtgcgggacggatcaatttggcaaattcgctaattcaaaatttactactaattaaatttcgtctttttttgccctgatcatagtctaatgccaacgacaattaaattcagtcttatgcagtgccggcgagccgttgaaggacagtagcggtgagcgaaacatggaatgttcgccgaccggaagtggcaccaattcgtgcccgtcaacacacagttgcgagtcaaccaccggctcaacaacatttggtggaatttgctgtccacggactcaatatgtttgcaa

SEQ ID NO: 54813 - DNA, 4327 bp, Heterodera glycines
tgcagaaaaagcatgaataaaattattttacttatggatttgcaaaatgcatcttatactatcactgtttcgagatttcgaataagtgtgtaaacttggggacccgtgcccggtttttttgaattgtcgggtttttattgggtttgcctgaattattattttcacttaatagacataagatttgatataaaaatgcataaaattgacaattgttggtgactcatcagaaataggaacaaaatttacaatttggttccggcatcgcctatcggcaccgccgatcctctcgtgtttttttttttgttgttaaaacatacagtaaaaaataaataattgtaaaaaagtaacgtatataaatgctgaattaaaattatttctcctagaaaaggcagaataggtaaaatcacacaaattcaatcatatgctataaacttttattccaatttttgagttttcgcgatagaaatcctgtcttctttacaaaaaagcaaatagtgtatttttatgtcaatcatttttcttttatttcttggccaatttgcggtccaaattcattgtttaatttcggccttaataattatttttcgtttaaaaaaaggataaaaacgtatgctttattaagcacttgccagacattttcattcaatgggtgtgacggcaattccaacaattttgctacacaacaggactgcaaggattactgtcgagttgagaggtagattttaccatcatttaagagaagaaaatttttatcccggcgaaaaaatgtttcactgtcgagcgggataattagttaacgaaaaacgaaatcaaaagtctgacttatggccaagacctcgaaaaaatccactttcggaccgcaaatgtcgggacacttaattttttgactttttttgcatttaaattaattagataatgtgttaaaaaattctttaaaaatattatttccttttcagctgtccggacggtggcgaagttggcaaaaaaaaaaaaattaaaaaatacattattaaaatttaaaaaaaaaccaggtttggaaagagcccaacggcgctgtgcgcccatgcacaacaaatcggcaatgcccttccacacactactgtacccctgttactgtattttcgggcaccgtataccaaacaaaatcactgtgttgtccatccaaaaattttgtttgctcacaaccaaaggttaaggaaaataactttttttactggaattcttacaaaaattttaggaccaaggtgttagatgtagcagtacccgaatcacacgacattttttcaatgctgacacaaaaacttgtcaaccatttgagtataacggatgcgagggtaaaaaccacacaattcaataattatttttaacgtgaaatttaatcgattaaaaaattaattaataattaaagaaaaattaaaggtaatcggaataattttgccacacaaaagtcgtgccaaaattactgcttgagtgaagcttgctctccgggtactgttgtggccagagactcagacaggtggattcgggaaccattttttttaaaccgaaatttttgttttataaatttcaacctaaatttttagttttataaatttcgtagagcttttagaaaacccataaaataaaatttaattaattattaggcttattcaatgcacaaatcctggtggaacaggacgggttagtggcggttgtcctgatggatactcatgcttcagcaggtccttcttcaaatccaactatccgatagttcagctacatttttcaaaaaatgcatcaaataaaagtttttaaaaaaatttatatgatgaaaaattattcccataaaaaaatttatttttaaaatgacattttttgcttttcaacccgaattttattatataaaagccgacaaaattgtttttttttaaatttatgatcagaattggactgaattaaagagtctgatcgaaatttattaacagtggcaagagaatttgtaaaaattaatatgaattttattttttaataactaaattcttatttaaaaataaataaattcttatttttttgtttaagccttatgcccagctggctcttcaccgttcatttccgcattgtcactacagcctatgcaatgcactccaagtgatatattttaattacaaaagaattttaaattcatttttttaataaaaaaagagtttaattacaaaattcaactttcaacttgtttttcatttttagttcaatcattaaaaagaatttttaattgttttttgtccaaaaatctcaaaatttttgttgctttttccaagtttttgaagaattttttaagaggtcggacataatcggtgcattttttaattgaattttggtaattaattcttcaaaaatgccggaataagggcgaaatgtccagaatttgaacataggtatgtgcacatcatatttatttgcctcttctgaagcattaaaaataattggcattaattaaaatgtcagagaatttaatttcgctcaaaacaataaaatcgcagtcttatgcgaaacaaaataaaatgtttttctgatagatgtggatggctcttgtcctggaaatttcttctgttggttttccactacaacgtcatcagtgaacgcgttttattgttgccgttcgccggaaagcagcatcgacacgggatgtatggaagaatgtggtgctaggtcgtttgataaatccgccaatttagtttttcgacaaaaaatggcataactttgcttaaaggtaatcaaattttacattcttggtataattcgatagccaagttttttctctattagcctgcataattcaaaaaaaattggtcaactttggaaaagttgcatgaaaaaaagtactatttctgccataactatgttaaatttggtaattttatttgaacttaagcaagctaatagagaaaaagatgggctatcgaaaggtaccaagaatgtaaaatttgattgcctttaatcaaagttatgccatgttttgtaagcatagacaaaaacagtaaataggtgacatataggaaaatgattatatcaatgttaattaagtgaatgaattttagaataattatcaatttcaaataccctaattcattttcctaatatattaaatagagattttttaaagaaatcgttatataacgttctttttaatatcataaattgaaaaaaaaacatttatagtgccatacattcattttcattatgaaattatttcattttcagtaaatattaggaaaaaattaacttagattgtcctccacaacttgtgccggtgcctggcgaaggcgctacaccctacagatattgctctccgtcggcaccaattaacgatggcattcaggtccgagacatattatatttataatagtattttttaatgtttaaattgtatttttaataaaataatcacatataataatacatatttgaaaaagggatgcggtataaacagacattgccaatactcaacaacactcgaacgctacatttgttgcggacttgagagcgatgtccgactaccaagtagccggggggatttatcggtggggggcaattcggtttccgcttttaggaaaccataacttttttcttttctttgatgacttataagactaaaaaaagttatgacatacggcgccaaaaagccaagtaaaagtcaattttttgagcttttttggccataacttttttgtaaagcgacccaattttttactaataaacagaaaattaagaaaaaaaatggaaaatgaatgattctctttaaaattctacttaaaatttttaaaatttaacagaaatctctagtgaaaggacatcttttttttctgaaacaagttgtcaccagaaattttaattttgtttttaaaaatatgctgtattcttggaaagcttaatattttcaaattacctgtaaattgtttggtacaaatgttgattatgcttggcaatgcaaatgtccgtgcctgcggcgcaaatagtgcgcgaaaaatttaaaaaaaaagctgtctcattaagtattttaaattgaatgcatagtgaattttcagatgtatgtccgcctcaaccagcaaatcttgttcccgttgaattggccggtaactaccgtacctgtaatccatacgccaggtccggcaccccacaggtcagtgattcctttcttcttatttattttcttcacattattttaacgcgtttttaaatcaagaatttttgaatttttaaggcctgcccagagaattctgcatgtctgtacacaggccaagacaatggctttatatgttgccgagtgcagctgcaaagttcgcccttt

SEQ ID NO: 54814 - DNA, 399 bp, Heterodera glycines
atggataattatgcattggctgttcagctggataaggaggacaaatggccatattttgcactagttcatcaaaatttaaaactgaatcagtatccacgcttaggcagtataatttcagtaccaaaagtggaaaagcttgaatattttagttcttcgaattatgagttatactcacaaaacccaaaagaggaaagtgggactatttataatattataaaaagtgtaagaaatgagataaaagcaattgatgtcgattttaatgtatatgatgatgagagtaatgatagcataaaccagcgattctttccgcatcaaattggaccggatctacaaaatctggaccttgtagatgaagcatgggcgcagataactggattcaaaattcaaaatccgctagaa

SEQ ID NO: 54815 - DNA, 430 bp, Heterodera glycines
atgaatttttatatttttttccaagactttccaggttttcaagacatttttagttttcagatcaaccagaaggagtgaccagatcatgaattaatacaaatgttgtattagcattattttttgtcagatcttatcaagtacacaaaattaagtgtctccaaatttgaagttataattttaaacgccgaatttgtgcgaattttcatgaaaaaatgcaccaatagtttttcttctacatatttctcaattttttttgtggttcttaatctttataagggcacacatccatctcaaaattcgtctacattaacgcaaaaaaaacagtctaccagcgaaaatcagtctttgatgatcatacagaatgccttcaatgcgctcaattttggttttgatttcctcgatggtgttgcttggaagaagatcactgaat

SEQ ID NO: 54816 - DNA, 397 bp, Heterodera glycines
atgccgcaggtaatgaaaaaagtcattttcggtgataatatgttaaaaattagagaccgagatttccgaatctgcagtgccgggctgactttttcaggagctaccggtttcctggccatgcctctcaaaaaccggtcaaaccggattttcaaatttctggacccgggaccggtttacgggttagtcgaaattataaattttcacatgtttatttaggaaaaacccccaaaatttcatcaattttatgtagaaaatcagtgcacacaaaatgtcaccgccgaaaattcgtcgggatataatgtcaccgaaaaaaaaaaaatttaagaaaatttaaaaaattttagtttttttgagcacccagcagcgcctatcgacatcctatgaaaaaattaataaa

SEQ ID NO: 54817 - DNA, 383 bp, Heterodera glycines
atggcacttgaacagaggaagatgtacgaaaaacggagagccgagagaaatgcagagaaggagcggatgcgttgggaactaccacgcggaatggctccgagaaaggtgcattatgccacgcatcgagggatcaacaaaaggcggaaatggcaccgtggacggcaccttaatgagagccaaactgggcggaagtaccgacatccacgtgcccatgacatttctccgctacggcaaccaaatggcgccacaaccgaattgctggccccaagttcggagatggaaggacaaattgggaatgacaagcagacacgggaggagagccaaataaaggagcccgtacagtcccagcgacgaaccaaggccaaagatccgctggacgaaca

SEQ ID NO: 54818 - DNA, 708 bp, Heterodera glycines
atgcgaaaagtcgaaaatctcttgaaggggagggatggtctcgcgcgcccggcccgagtacacccaaaagcaaaaactcttgtgcgagcgattaaccttttgtaccctctagaaattaacccttctgcggaggacgaagtcagtcaaattcaagtgactgccattatggattctccaagtgctgtgatgcaaggcatgtacttgcaatctgtcacaatggagtccagtttgcctccagggacggtgatgcaggattctcaaatcgtcacgacagaatcgagtctatctccagtcagagggaggaatgagcggcaaccaaggaaggagagaattcgaaagagacagtcgaccgaagacgtcagaggcaagcgcaaaccaaagacgaatgggccatatgatccactgcgcccgggcaactacagaattcctcgccgaaacccgttctttccgtcacaagttgcgtacaatgagcaaacacgcacgtatcgacgacgacgggggaggacgattgatctttcgggattgaggaagttgttcgctggattgggcggcactgaatttgtgagacgagagctgcaagagaaggctaacccggctctaagagaagaaaggctgcgaaaagataaagtcaaattcatggaagatgacgcgaggcgcgtcgctgagagtgaaagaaaggcagcacaggagaaagtggaaaaatcatga

SEQ ID NO: 54819 - DNA, 672 bp, Heterodera glycines
atggccgaacattcggaagacaaattggacgaaactgaacgcatttttgaaattgcaagagtaatgtggaaagcgatcaaaaagcatgacaaagtgcgaaaaagggatgtaataagtcaaaaaaaaattgaaaaacatttacagaatgccgtgggcattgtgccgcggttgcgcttcatcggtttagtgctttggcatttggcggttcggcaaagtccgctaattgaccagcagcagcagcagcacaacggggcaccactgctggagttcactgccaaaatgaggccgaacattgacccgcatgacccaacggaatggcaaacgatgctttggcatttcgaccaaaatttggcgaacgcagcgatggatgcggaggaaggccaaaaagaggcgaatgaggggggaattgaggacggaaaatgggagggggaggaagagcaaaatgatggggaagaaatcaaattgctgagagaattgggggagaaagtgggccaaggccgggcacaatttggggaccgggaaaggcacgccgaactcggcaaaaagttcagtctgttgaagaagtcgactagcaacgacggagcagcccatgggatggtcaacttttgtgttatctatcgagcatttctcgtgttcggctcacaatcagtggacattcttttgttcatcagg

SEQ ID NO: 54820 - DNA, 778 bp, Heterodera glycines
gtgatcgccggccaggtgtacgaatggagctccaacataatcccattccaaatttggggcggcgatagtcagttttatttttttgttactttttcgagagtctcgtctcgttaattgcttttcccaaactgtttgatgcacctccccaatttagcaaagtttcaaaatctgatcagaaggggcattaaaatgtgcgtgcatcgattattccgccgtaattgcctcccccccccctttctcccgcttttcaggtgggaggagtcgacctgcttacggttccgcgagaatgttcaggcaacagatgcgattagatatgtgctagagcggggcgacaggtctgatcagagagcgataaggaaattgatcggagaatggaagagaaagagtattagctgatcagagaagaagacatgattgatcactaggcactgatcagaggagtagcaagggaagtgatcaccgtctcggataactccgatagttctccatgttgggctcattctgtttgatcagcagcgtgtgatcaatgtatgaaatccctgctcattttagctgcttcactgagtacatcggtcgcaatggcggcttccaggacattatcatcggctcggaatgtgccgaggtttcgtgttggtgccaatggcaaaatttaatggttggcacttcctctgaccatgtaggaatatgtggtggcacacgaaacggggcacgccctgggctattggcacacgcattaaggggatcagtgccgtaaaaaaccaaaatagataattgcttg

SEQ ID NO: 54821 - DNA, 661 bp, Heterodera glycines
gtgatgatattgtgttgttgaaggagggcacaagagtttgtggctctggtggaattttgggtatcgataaattgtccgaaaaagagggaattacaattggtttttaaaggaaatgtgccacttctacaaaacaaatcttacttccaagtgcacatccatcagtcgggtaggccaaaattccactaaaattgaattgtttttttttgatgccaaaacaaattcaggaatttggggaatcggattgggcaccagaaaaactgatctttcaaaggcaccaattgcggacactgcgtggatgttgctaaatgatggcacaattttaatggacaatgaaattgttgggaaagtggagcagcccattggagaaggggaaacaattgtaaaaatatttatttttcaaatccccttaaaaaaggcgaataattaaagaaaatttcccattttcatggcgtcgcatttgaccatgttgagctgcacttctacagggggtggcgtgccgatttggactggtccgatcaaagcgtccgatgttggactcgttttctacccgtgtttgtgcattgatgagaattgtgttttggatatctgcttcagtgcggctaaatttagcccaaaagcgccattgggctatcaggagataatgtctgaacagacattgctt

SEQ ID NO: 54822 - DNA, 1776 bp, Heterodera glycines
atggcaacaaatcggctggacgtcctcgccttggtgggtctttgtttaggatgattagccagccaaatgtcttctcttgcgttttttggttacatggcattttacgcgttaaaattgccaaaccgattttaatgactcctttaaaagccatgtaaagacgcataaatcaaagaaaactcaaaattgccaattttacaagaaatccgcttattttcaggtgatttctgtcccgactcccgcccgatggttcctccgctggtcattttctgcacttacttcttggaccactgcaaaacatacatgccgtacagggacttgtaccaaattgaggggtaattctttaacgaaacgggcaaaaagaaatttggagggcaaattgatgaccatttgattattttgggccttaaattgaaaatttccaaggaaaacattggttccgataggtgccataagtaaaaattgcattttcgacaaatcattagtggaatttcatcatttttagaagccccgctgaagtggaggccgtcacaaagcaatttctcgccgcaaacaaaagctacccgaaattggtacaaatttacaaattatactaattattatttgcccctttttaggacgcttttcctcccgctgtcatttccgcttgtgtcaacaaatttttgatgcaaatccgcgacccgttgatcccctattcatatggcaaggagatttgtgcacttttggaccgctgtttggccatcgatgggcccattttggagggatttgccggcattgtcgaggatttgccagtggtaagtgtttccatttgctgacttttttagacctattcccattaaaaggcgcacatggacacgttgggtcacttgtgtcgccattggaatcgtctggtcgcgaattcggtgagaaaatcgtccaaaatttttgcatgaaattcactgacattcgtaattatgccataaaattcgttggcccaattttccactggggttttcattttgagacttttcttccatttcatttggttatggggcaaattttatggtccaaattgctctttcctgaattttcagcatttggcaaaattctttctactgacaatgagtcatgcatgcgttatttaaaaaattttatgtccattgaatttttggcataatttcctagtttgattgtcgaacccttaaaattcggacaactctgacaattattgaaaattgtttaagttcggtctgctgaccatcgacgcgctgtcagttccgcttggtccgctcgttttcggctccgctcgccctgactgtccgccgctgctgcgccaccgctgcgtcagtgccatggcccaattgcttcggtttggcaacgacgacttctggaccgacacttctgtccgcacactgaccaccagcagcagtgggggcacgccaattgtgcgcaatccgtcgcaacgctcggcacggagtgcggtggtggcggacggcggcggcggaacgccacagcagcccaattttggtaatactaattcattttgaaaaatggagtacgtggtcggtacccacattctattatttcagaaacctaaagtccaattggtttaaaaagatgacatttgaaagataagactcaatcgcattccattagcagataccgctaatgcttgattattcgcaaatctacacggtcagcaactaacatgtttatcttgaaatttgcgaaaaagctatcgaatatgatcaaaaattcaaattttgataaaaaaaaaacagataattcgcttctaattaa

SEQ ID NO: 54823 - DNA, 598 bp, Heterodera glycines
atgttggtttttgagaaaaatgaatggcttccttccgcgtcggctaatgacacaaaaaaggtgggataaaaaatggggggataactaacaataaatagggctcggaaaatacggatacaaaaaaaatcacgaaatatggccataatgccccaaaatattgaaaaaatgtggaattgaaatatggacataaatcgcgaaatattatagaaaataatggaaaatatggatattgaaatccatcatagaagcttcaaaccaagctataaatatgtttttcaggcagcctagtcacagtccaggaaaaaagttgggatttccatacaattccgaaccctaacaataaatgtggtggtgctgatttctattaaaaatttcagcagtttgttctaacaccggtttttgaacgaactcatgaaaagaaaagaactcaaccatcgacgacggtaactgttcagcaacagttgaggaacacaaaaaacaaaattggacaaagtcatggcacaacaactgcaaaaagcacacagcaggttaagttgggaagatgaaagaaatttttttaactaaaaaataattcttttccttaaatacaaaaattaaa

SEQ ID NO: 54824 - DNA, 3080 bp, Heterodera glycines
  unsure (1)..(3080): unsure at all n locations
gtctattaacaaactaactcttccaaggtcacacatgtggtgaatttggtgaaaaggattatcgcctttttcttctcacatgttggactttgtgcattggttcgtcttttttgactatcctctatctaatggggttaacaatttttattgtttttaggtgataggatatgccatgttaggtgccgttgttttccgtgccgttgaaggcccacatgaggtggataattaatccacttaataatttaaaaaataaaatttaatatttaaaataccatttcatactgttttcagcgttacatccaaagtgagattactggagctcggaggtgcttttacaatttgttgaattaacaatcaattaattcaaattcataaacaggcatgctgttgacgtggcatggaatgcgacatttcgtgtgaacaaattagacaagacggaatgggaacggatagtgtacgagcaggtaaaataaaaacaaaaatgccaacaatttataaatttaaaaaaattcagacaaaatttttcaaacggaggtgcctttgggccatccatcgaggctatgacggcaaagagtttggccgtgcagctcaatggacattcactggctcatttctctattctctatcggtagaaaataaaaatataattaattattaaatatgaagtatgccagtgaaattttttgagtcttaagatggaattataacattaaagcgaaagttttgaagtcaatcaatttatttcttaatgcgtaggtcaaaccctaattaacttcaagaattctcctaaaaattgatacccaccagggaagtgtgccgaggcactcaaaatctcaaaaaccgaaattccaacggctgaaaaattttagtaatcggaattccgacagttcaaaaaatttcggaatctaatttcgaatccaaaaaggtcggaaatcgggattccgacacattattaatgagtgaaacgttttttgggccaattaattaatttacctgatcgtaatgacgtaaagttggcatatttaggtgacatcatcatttatattcaattacattattaaaaatagtaataaaaaaattttttataaagatcatcacaacaattggatatggcaatacatctgcaaaaacttatttcggcaaaacactgaccattctgtttgcaatcattggcatcccattgatgctgctgttcctcacaaacattggcgatgtgatggcaaaaatttttaggtgaaaattaaaaaatataaatttttaaaaatggaataaaaaattttgtttccatatnttaaattaggtttctatatgctcgctcaattcgtcttaaatacaccatcattttgtggcacaagcgtcgtcaagcggcaaaaattcgacgtgctaattcttgggttgccagctgacccgttcaaatcatccatgtaaggaaaagtgatattgataattaattgctccagttctaaatatttttgttccctttaaatttaaattatatagcttaaaattggaataataaaaaagttaataaaatggcattcgataaataaaaataaataaatagttgtagccaaatatatttcattaattattctgatcaaaaatttaacttaaaaattaattaaagatatcttatttaaaaagagagaaaatatattttcatttttttcacatagaataagtctcaaaaaattgatctctgcgcaatatcataaaaaatattttattatttattaaaaattaattattcaaaatttataaatatctgcgcttttttaacaacagatttgagcacattgcgcttccagcaacaggacgaatgctcgttggagtcaattggccccagtggtgccaatacactgccggtcaatggcggttttgtcactggcgcagcagccgatgttaatgaggtgataaaattgaaaattaataatattttttattgttcaattcttagctattagcagccagagcccatttggtccaacttgaagtcaaggaaagcgtcgaagcccaacttcagcggatatcggtgatcatttatgacgtggattatgagaaaatttttggcaacatttcaaactcttagttttagtgatgtatattaattaatacatatttaaccgctttaatagcccaaaaaggacaaagctataaactaattaaactctaatttatatgtattgaaaaaaatcattaattattgaaagtttcaacaaaaggtgcccctctcgttggttttgctgacaatgcttgcctatctggtgactggcgccattctcttctgtctgtgggaggagtgagttgaaacaaacataatttttattaattaaatatatttaattaaatttttaaaataaataatatatataattcaataataactttataaaattcttcagatggacctttctggacagtttttatttttgttacatatcattgacaacaattggtaaaattattatattttttaatattttattattttttaattatatatttgtttttaaggctttggcgacaaatttcctggcgaagcggttggcagtgacaaggaagcgcaggagaagctggtcatcacaaggtcgtgccaaatatagacgacgactggaattttgaaagaaaaaaaaactcggattgaaggggcttggcaatggacttttaacgaattactggaacaaaaaactgttccaccgtttcttaagtactgtatttcctgaaatagagcccctgaggcctttatttttcaaccacccctcaaaaaggggctttatttcaggggggacactatttcagagggggggggggctgtataataggaaatacggtaatgtaaggaaaacgcagccaaaatttctccgatctctaaaaaatatatatatatatattaattgattttttagcatttatttgttggccggaatggctttgctggccatgtgcttcaacctcgcacaggcaaaaaaaaacaattaaaaaaacaattttttaattttaaaatgttttttcaggaagaagtagtgaacaaagttgcatggttggccaacaagttcaggacgagagaagaagaatatgag

SEQ ID NO: 54825 - DNA, 2841 bp, Heterodera glycines; identical to SEQ ID NO: 4541

SEQ ID NO: 54826 - DNA, 308 bp, Heterodera glycines
atggcccacttggagctcaaacattcaacgcctgggttcagagtcaagcaaccctggcttcatacccatttagagtttgagaataggttaaggacatttcgtccccaagtcctctaatcattcgctttaccgagtataactgcttaacgagctccagctatcctgggggaaacttcggagggaaccagctactagatggttcgattagtctttcgcccctatacccaagtcagacgatcgatttgcacgtcagaatcgcttcggacttccaccagagtttcctctggcttcatcctgctcaggaatag

SEQ ID NO: 54827 - DNA, 1260 bp, Heterodera glycines
atgcctgaagacagcaaaacgatcgaaaacaagttcaatgaattatttaaaaatggagagcagcgcacatttgaatttcaaacggtgttcaaaaaggaactgctctacgtgattataaataatgtcacagttaacacccaacagaaacggcaacttccggtttgggccgcgaattacatccgggtgagtacaactgctgctggatgctgggatattagtcaaaaaagcatcaaatggaaaattttggacgaaacattatttattattattcatacaataacttccctcaaaatgaaaatcaaattttaaattttattcatgttttcggtagctccaaatgttttctattatactgcaaaatttcaaaaaaaattcattaggtttcgaaaaaagttatgacctgacaaacaaaaaaaaaccaagtttttttttgaacatattttaacaaaataaaaagaaatgaatttaaattatttatttcattcattttttatctaaatattttaccgtttttaagctcgaaggaaatgttacagcatttggcgacccggattatttatatattgaccaggtaattaatatattaattatttatttttaaaagattttaaatcgatcaaataactttagctgagtggcaagatgaaaatcatcagcggcaaaatcgaaaacactgatccgaatgaggtaaaatatttatggcaaaaatgtacaaaaaaaaaagatataaatatatacaatttctctaatattctaaatgaaaaaactttaaaaattttgttaaaagcaatccacgaatgtttcggaagaatacagtactacttaaattgaccgtaacattcccagtcaaatgggttaaggcaaaacataccaaaaaaaaatccccaattatttttttaaataaaatatcgatttttttttggtttttgccatgacaaaattgttttgtaattttttttatcatagctcaatttaccaagtcaaaattccttgtcgataaaatatcaaaattcataaaattttcatttttaggcctaagaatttttcattttttccaagatttttctggtcaaaaccaaaatgctttctaaaaatataaaagtgctgaacgatttcacaataaaattgccgaccttgttcaattatggcgattctgtcgagctgtacgcgaaacgagaaaaagtcgccaaacatgaagacaacaaccgcaacaattttacgttcattttcatgcacgagtcgctggacgaaattcaatga

SEQ ID NO: 54828 - DNA, 523 bp, Heterodera glycines
atgtattttttaggaaatttgtattttgaaaaaagcaatgtgcctggattccatgctggacctggacaaaaacccaagaaaatacaggttgcaggaaaatggcctggacctggactttgatcaaagaaaaatccaggcctggatccaggcccagcaggcagatagatctctagtatttttaagatttttttttcagcaaattgtatattttggtgctagattatttgggttcaataaaaatcaaccatccaagagcagattttggatgccgttaaaattctcgagaatagaacccggacgagtcgggttcctggaatggagcccggatttttctgagtcccaaactgagtacatttgattgaacccagattttttctgggttcctacataccggatacatttttcaaaaaaaaactttgtctaaatcattactaagacaaaatccagtacaaatcagaacccggttcaacctcaaggatcaacaaccaagagttcttttacgtataatacatgccatgctgaa

SEQ ID NO: 54829 - DNA, 534 bp, Heterodera glycines
atgaacaaggaagaatggaataatgaatggaaagttcaaaaaatctttcgtgaaaaacacgactaccttaaaaccattaaagaaatagatgaaattctcgatacattaaaagacgtaaatttggaggtaaaaaggagattaaaattacttaaagaaaaatcatcttcagactcagacccggaagatgaatcaaatgattatgaacatgaaaatgaagacgaagttgaagaacaagaagaagaaaaggaatatgaaagtgacaatgaagacgaatcgccagaactttccttgaatgaccaaatacaccatgatcgtataccatttgtcaattaccgatcaagattaaagcttccaccccaaacgcttacgcattttaatggcaaattctcccaatggcccagtttctgggatgacttcaaatcctcagtggacaatgacccaaatttagaaaatatacaaaaactcaaataccttcgagggctcttacatgatgaaccgtacagaatagtgtcaccgtatccccttaccaataaa

SEQ ID NO: 54830 - DNA, 442 bp, Heterodera glycines
atgtctacatcggaatcaaaaaatggtaaaaatctcaattcctcccttaacattaacaatctttcacctacagcaccggacgaaggcgactgcgaaatgcccgatgaacgtgttctacacctcgagtgctttgagagcggtgattatgatgtaaataattgttgaaaattccatttttttccctcaattttaatccatttcagatgatggaattgtacggaccggaccgtgctaaagaaatgctgatcgacttgcgcgactatgcagaggcgcacggaatgccatgtaaacatgtgaagatgctgttgtacaaactggacaaaggactgatcaaatggaagggaaccaagccatgaaatggatgatgagtgatcagatattttggtgacaggacgaaggggggatgattgaactcattggtgatggatgtgatttaaaaaaa

SEQ ID NO: 54831 - DNA, 614 bp, Heterodera glycines
ggtgcgacttttggtcgtaaatcggagtcaaattttgatggttttagttccaactttgttggcttctgaggctctctctttgcggtaggacgcgatggtggtggttcaatttttgctttcgcacgaggcgggagcggaagccggggaggtgaaggtgggtaatgaaccctgtattttttgtgttccgaatcatcatcatatgcttcgtccttttttaattttcttctgatggcaatcctctgctgagcagtgtccatatgctcaatttcacgttgagcattgtagggcagcataggcaagtcgccatagtattgtgttggcgctggcagcgctaacccactctccaacatataatcatcatctgtatcactttccggtaagggggcagcagctgcttccgcaagaaggtcccgcacaactggttgccgtcgttgtatatcatttcgccttttctcccactgctccaaacgaccatctctccgcgatgccctagtcggtctgggaggacgttgtgggcgaggcggaggacttcctggcggggatggagcgcgacccggaggacttggtgggcgccgatgacctctcttaggcggcggtggtggatgtggtggagg

SEQ ID NO: 54832 - DNA, 979 bp, Heterodera glycines
atggcagatgccatgcaggacggcgcacgttggaagaaggcgaaaacagcaatcaatgtgctcggcaacctccttttggcggaatcgttagacaacacttccgctaatgacacttcgctgaaaaatgataccgtagacatcaaaaaagaagaagcaaatgtggaggaagaaaaggtgcaggaagagcccaaagaaaaagaggaaaacaaggaggaccttggagacattgacaaaaccctcgatgagttcttcaacagtattaaagcatccacttcaaacatgtagaccatcattgtgtgtaaaaatgttaaacacccaagcattcaacgataaagacattggctttaaattaccatttggtctaattatttcgggcccatcgtcgtcgggaaaaactcaatttctgctaaaattcattgccgaatcggaccatttaatcaccccaaggcctgtatcgatgctctattgttttggtgaaatgaatgcggcggtgcctgtacttcaaaaggcgggagtcgatgtgtacgcgggagtcccatccgaggaattaatcaaacgtatcccgaagccccttttgctcattcttgacgatctgatgttgtccatcgatgagagatacctatccgatttgttcactaaaaaggctcatcatcaccaatttgcagtggtgtttgtcacacaaaatttgtttgagcgcaagataaaagtggcccgtctttccgctcagtacttggtactgatgcgggccccaaattcgttgctgtccatccgcaacattggcgttcagctctttccgcgtcagcttgacttttttcttgacgcataccgcaaggcgaccgcccggccctatggctatttgttgattgacatgcatgcatcgtcagacccatcgctgcgccttcgcacaaatatatttaaggatgaacaggaggaagatgaaggcacagtcgtgttcattcccaaaaatggagcggcataa

SEQ ID NO: 54833 - DNA, 1731 bp, Heterodera glycines
atggcgaataaatttttacttgtccctcaagaaatttaccgaggtctgacctcaatgtcggacacgggcgatattaatttggatgccgttaggcgtgacttagaccgcgccagggtcgaacgaacacatccttctcgcaaaaatgtcaactacaaccagcagcttaggcgatatttaaaaatgcggcaagagttaacagacaaaccggccaaagttgagctcaccaaagggataagcgtgctgttgaggcgaggcgctgaagatgaggagggtgaagttgtggacactccaccccggcctcccgctcctcctccaccacctccgccgcctgggcgacgtccatggcgtgggccaattcctccaccacatccaccaccgccgcctaagagaggtcatcggcgcccaccaagtcctccgggtcgcgctccatccccgccaggaagtcctccgcctcgcccacaacgtcctcccagaccgactagggcatcgcggagagatggtcgtttggagcagtgggagaaaaggcgaaatgatatacaacgacggcaaccagttgtgcgggaccttcttgcggaagcagctgctgcccccttaccggaaagtgatacagatgatgattatatgttggagagtgggttagcgctgccagcgccaacacaatactatggcgacttgcctatgctgccctacaatgctcaacgtgaaattgagcatatggacactgctcagcagaggattgccatcagaagaaaattaaaaaaggacgaagcatatgatgatgattcggaacacaaaaaatacagggttcattacccaccttcacctccccggcttccgctcccgcctcgtgcgaaagcaaaaattgaaccaccaccatcgcgtcctaccgcaaagagagagcctcagaagccaacaaagttggaactaaaaccatcaaaatttgactccgatttacgaccaaaagtcgcaccgccacctcggccgaaaaaagaacctgaattcccgcttgaccctcggccatccacatccaggcaggctgtacacttgcctccagcacccaaaattataccaaaacctgaaccgacaaagaggcctgtgccataccgtatcccgaaaagagagccaaaaatagttgaacaacagccacagccgctgcaacaaccccttcctgcttctgccgtcgaagaagaaatgcccaccgttcctccgcctaggcgggggaccaaacgccactaccccgtaaatggtgagaatgatggtgaggtgcgcattagaaaacgggtgaggcaaccgagaagggtgagagtacagtactcgcctgaaccgggcccatcaacttctgcacaaagtgatgaacaacagcaacaacaacaacgtgaactgtttgccatcccgtcaaatcagctgaccatgactcagcgggtggaacgactgtacatcaaatgcaaccattatgcggatcgtatgggcgttcggggaaatacaattaacacagcaaacggcaaaccgttggcgcatagcaatttgcgaatggccctcaagtatataatagaccggagagcgggccgccccaccattaaaccacctggagcgaacctattggaagagcggcttaggaaggacccaattttgtattcatggacggctccgccaaagagaccgtcacagagcaaaaccacccggacggaacggacaatcaagaaggaatttcgcccgaaaaaatggagctga

SEQ ID NO: 54834 - DNA, 1196 bp, Heterodera glycines
atggacggctcctccaaagaaaacagcacagagcacaaccaccaggacggcaccgaaaatcaagaaggaatttcgcccgaaaaagtggagttgatcaactccacgcttgacaagctgtacaacgacccatcctccccagcggcgttcgcaggtgttacagcgctgtggaaagaggcgcgaaaaaagttgaaaaatttacggaaaaaggatgtgcagcattatttggaggggcaccgcacctacactctgatgcgcccccgaagggtgcgctttccaagagccaaaactgttgcggctgggttcatgaccgatgttcaagtggatttggccgattttcaggcgcttttgcgccacaatcggggtcaccgatacctgcttgttgcggttgatgtgctgtccaaacgcctgtttgttgtaccgctgaaaaacaagagagccgacgagatgttggaggcattcagacaactcatcgaccaaatgccaatggtcccacatcgcatcttctccgacaaaggcacagaattcaagaacagattgctgaaggaattcttcgatgagcaggaaattgagaaacatgagccagtgcattcatctgtcaaggcatccgttgctgagcgggccatccggaatgtgaagcagagattgtaccgctattttgcggaaaaggagacgctgaattgggtggatgcagtacagaaaattgtggatggaattaacaacgctccgtctcgtgttcacggaatgcgccccaacgatgtcaacttttcaaatgcgcaaaaggtgtggaagcgactgtacggacaccctactcttcaaaagcggacgccacgcttccgtaacgaccagtttgtacgcatgagcagagagaaggggcaatttgagaagggatatttgccaaattacggggacgaaatcctggagattgacgaggtgttgaaagcggtgcgcccgattcggtacaaactgagggatgaacacggggagaaattcaagggcagcttctatgagcaggagctggcgcgcgtcagaaaagatgcggagacgagctaccgcatcgagaaggtttacagaaagagaaaactgtcggatgggtccaccgagatgcttgtgaaatttataggatatcccaatcgggaatggattaatgagtctcagcttgtataaaagcatatgtattttttcattttgttgaaaaa

SEQ ID NO: 54835 - DNA, 423 bp, Heterodera glycines
atgtccaaaagtgcggtgaccaccgtcaccgaatggtcgcctttctttgggaattgcgacaaaagtttggcgtgcgccggcactcgctgccgtgccaaagccattcgatcggtcgctgtgacccgaatccgtggcgacgtcgtcgtggcggacgacgccaactgcgaggagaaaaaatacttggaggaacggctgacgttcaaacgaagacgagtcgaagtcagtggaattggggacgaagcggagggaatggcactgattggagacgaagcggagggaatggcaccgattggagatgaagcggagggaatggcaccgattggagacgaagcggagaaaatggcaccgattggagatgaagcggagggaatggcaccgattggagacgaagcggagaaaatggcaccgattggagagagatag

SEQ ID NO: 54836 - DNA, 324 bp, Heterodera glycines
  unsure (1)..(324): unsure at all n locations
atgttaagacgaaaatgtgccgacaatggaaatggacaacaaaaaancgatgggacaaagttcacaaagtggtcaaaacattggtgggaattggcaactcaaaaatgggcaaatcggtggtgacagttaagcaaacattggctaatgccaacaacggcacaagagaatgccaatgacagccgtacaaacaacacaagcgaattggcttcagtaaacaggcaatttgccattccttccactccgtcgtcctatctctctccaatcggtgccattttctccgcttcgtctccaatcggtgccattccctccgcttcatctccaatc

SEQ ID NO: 54837 - DNA, 1315 bp, Heterodera glycines
ccacgacgacgtcgccacggattcgggtcacagcgaccgatcgaatggctttggcacggcagcgagtgccggcgcacgccaaacttttgtcgcaattcccaaagaaaggcgaccattcggtgacggtggtcaccgcacttttggacattggcagggaccggtggagacaatacggacggacacttcgccaataccaccaattcatgcgcaacctgctccaacttcgcgtgccaatggtaatggcaaattcaaaaaaaaaacgaagaaccgaaaataggaagtgtgcaattccaatttcattttcatactcattatttgttcacagattgtcattgtggatgaaaagtcagcagagtttgtgcacagagaacgcgcacggattaattggggacaatggacaaaagtgaaataattattattaagcaaatgataatttgataaaatagtatgtgcagtaaattaattaatattatttttatttttttagatgaaataattatattaaatatttattattgttattaacaagcaacattattttaattataattaatcaaattatttgttgttatagaaatgaagaattttattaatattctttgccttaatcattgtttatttaatttttaaataatttattttaattaattaatttttctttttttaattttgattaggtcgtccaattatcacttgatcaattgcccttggccatcttccaaaagcgcatttcccttctgatggactccgaattggccaattggccctccgattgggacttgtccatgcgaagtcaccccgaggcgactcaggccgaatatgtggtggtcgtcaactccaagccgtactttctggcccaagcggcggtcggcgcattctccctaggcattacataaaatgttcagacagacaatccgtttggcaccgaattcttcgtttggctggacgccggctacgggcacggggaccgcgccattttcccgccctcgtgggaatggcgtccaacattcccgcgcggcaaaatgtccgtgatcaaagtgagccgccactcattaggcatgcctaatcactctcttcagttaacgccgcccagggatttgttgtcacgctattcgctgaagcaactctatcgggtgggagcacaaaagccttggtccgctgctggtcagcggcatttcccccactttagcaggacgtggcggtgctaagcggcggatttttggcgggcgaccgacgagcggtgacgcaattgcacagagaacatcaccggatgtttttggaactgttggagaagggacgagtggacgatgaccaa

SEQ ID NO: 54838 - DNA, 214 bp, Heterodera glycines
gttaatggagaaaagaatgtttgattatttttgtcagagagcagctgcggaatggctgacgaatttgccaagccgaaatttgacggcaaaatcttccaaaaccccgacagcttcacaacatggaaaaacccgccttcggcaggagacccgagaagttggcgggacttcattaaatggaaatgggatgcaaagagcacgaaactgcccaatttga

SEQ ID NO: 54839 - DNA, 282 bp, Heterodera glycines
tcaacaaataatattcatttttcgcatttaacaaaatcaacaacagtggccgatcggtggatggtcaggtcacacatcaaaaagatacggacgcaaaaatcgtaaccgatcagaacagacgcaccgcggggcccatcgtcgatttgatgttcaacgagcgcacattttgccaattcttcttcagcaacgagacgaggaagttgacgcccagcgaaatgttcgagaccagttcgtcctgcgacatctcaacatgaccaattgcaaccgccagacagagcacct

SEQ ID NO: 54840 - DNA, 462 bp, Heterodera glycines
atgttcaatttcttttttctgctgatcttcgcttcttctgcccaaaattcgtttcaacaaaatgtaaaataaattcgacattattttgtttaatattttatttttttgtcaaggaacatttttgccattcactccatggtaccaatgtctgtgttgagtgtggcccatttgcgacggacaaacaaaaatgtaaatgaaatgaaacatagaaaaataatataataaataattggaggacgatctcggatcatttcaaatcgttgtcaaataattttaaagattgtgacaattgatcccatacattgacaagggaagtctcgagacagacccccccccccccccctcctccttcgtccattttacggggggggggagcaaaagaggggggggggggggggtgaagaactgataacatcaccaactgttatatcagccatctgatcaaaagctgtcatgtctaaa

SEQ ID NO: 54841 - DNA, 1148 bp, Heterodera glycines
atgcctttgaaagtgccgcactctccgccactccaatcgctggtcattaacaattcttcgggagcggaagaagcgagaaaaggaatgccaattgctgtagtggtaagtcgttaatacattaccatcaattaaaaaaccaaaaaaatttaatttctattcactgaaaaatgagaactaaatttaattggttgtaactaatcacaataaaaagaattactgttggatgagctgttaaattttgttagtttttgaatatttaagaatgcatcgttgtcaaaaaaagtcgaattacacaaaaatgaacagcagcgaccggcgaagaaattgaaccatacgcaagccatgggacatcatgataaagtgcagcactttaattacataatttaaaaacgattggatatttttcagccaacaaatatcagcgtcgccaataattcaagcagtgattttatgattttaatttgcgtattttaattaaaaacaaattatttatcagaaaataatgggacatcgcccaccaatgttcttgtgaccagcaaaaatacaactgatggtgagtgttatacctatttacgttttatttttatcaatttgtgagcaattgttgaatccgataacttttcaaatgctttccaaataattttcaacattgtagtcattgtttgatccacaaaaacaaaaaaaattaattagactttttaatgaacaggtgattacttgcgcgtgcttttccctccgtcaccaatgcctttgaaagtgccgcactctccgccactccaatcgctggtcattaacaattcttcgggagcggaagaagcgaaaaaagtaatgccaattgctttagtggtatttacgaatatttcctcatctttgaaattgtaatatgtaattaattttcaacagcagcgaccggcgacgaaattgaacaatacgcaaccaatgagccaacatgatcaagtgcagcactttaattatatattttaaaatcaattgaatatttttcagccaaaaactgttcgcgtcgccaaaaaatcaagcagtaatttttatgattaaaaatttcgtatttaaaaaaattaatcatttattagtgaataatgggaccacattaatggctaatgccctgctgatcagtaagaattcaactg

SEQ ID NO: 54842 - DNA, 1261 bp, Heterodera glycines
atgttatttgctgaatctgatcttttcccgcgttttggcattgtctattacgagacaaaaatcatccgtaggcaacttaccttcgggaatgggtatgacaaaaaaaactatttatttagattcagggacaagaattcccggctttaaaatttatattaattttgaactaatacttttatcttttgcttctcggtcttttctctgtctggctttactatgacttatttattccactaattatttgtcaatttgactttcaaattaaaggacgattggagttggtctttttacatctgatcacttttatttctattcgagcggtggtgttgtttttggtcacaacatcggtggcttcggaggatttcctccgtttggagagggcgacaccatcggttgtggagtcaacttaacttccaaggaaattatgtacacaaccaacggcaaacgattgagtgagtaaaaatattatgctattcgagaatctcggtctcgactgtggcattgtctcggcttaatttttgagataaatctgggacctttttatgatcattttatgttttaaaaagcatcactctagtcacattatgcgatcgggttttatattaaaaataatcactttgattaaaaggcaccaaatcattgaaaaaattatcataattattatataaaattttctaacttaatttatgggatttttttgtataaaaataaaaatttaagagagttcggaaactccataattaattttatcatgataatcatcttcagaataaaagaatgtttgttttgctatttcagacacatcaaatatgttcgtcgtcatcaaagacatgctgctgccggcagtttttatgcattcagttggagatacaattgaggcgaacttcgagccgaatttgcaattgcctaatccctgagcaaatcatacgaagatgggaattaaaattacacaattgtaatttttcaatacaatccaaacattggataaattcatttcggcaaatgccattcgtcttttctttttaaaaaaatattgaaatattaaatgttatatctgcgacagcgatttttaggtttgtgaatgactttttttttaattgaagagttttttgtgatccgattgtgccaatagatgaaatcccgatcttatgatacttaaatcaaagaatttatgtaagtgttaaatggctcctctaattgcgaaatatgcaacaaaaaaaaagtcacgtgtagattgcgaaatcgatggggaaattgcgaa

SEQ ID NO: 54843 - DNA, 1422 bp, Heterodera glycines
atgaaattttggcgtttgacatttatttttatattttcgttcatacaaaaatccacatcaaatgctacgactgaaattcaggcgaagtgtatgttttaaatttatcaatttcactaattaagatagagacaaacgttttggtaaattattaaaaatttgaaattcaccgctttgcatgccgacaggcgcctccaaagggaaaaattggcactgtttctttttagtaggattataaattgtacgcactaaaaatgccaactatgcgcatatccatcaaatgaaaaatgcccagaacaaaactgccaaaaatagctttgaaccatcaaaaaatgtttaaaaattcaaaattaattttaaaaacatcaaaacaatagataaaagcattttttatattgaatttttttaacgcttaaaaattactttttttatttaaacattttttccaaaattcttacaaaaactcaaaatttttcggttttgaggatgtgtttttttaaatcccaaaagtataataaggtggattttccgcttctttttttcaatttttttttgttaacatttacaaattggatgaaatatgatctaaaacgaaaaatggcaaaatataaaaaatcttgcaaaaccaactttttataattctacttattggattttgagtcaaaatctttttttttgaatttcgggatgaatattaaaaagaagtgaattttatggaccaactgcgtttaatttttaacaaataaaaaatcaatttactttagtaatgttctattttttaaaatttgatctctaatggcctaatcatcccattatttttcagactcaaattttggttcagtgataagtcaatttatggagaatcgtgagaaaattgatcaaatttttgcggatttggtaatttaaaatgttttttgttatatctttttcattggacagaaaaaagagaaagaaaaaagaaaggagcaaatgctttctgaagaagaaccgctgcaaattgtaagtcaatgaatacgacgtttaacttattgacaaatcgaaatttaaaaaaaattaatttctttttatcattttcatttttatttagattagagatacaataacaattgactaccaatggaacacttcggactgtcaaagtgatcgtatgattttgattccaacaattattaaagtcaaacattatggaaaaaagaaaggtaaatccggatggaaatatcggaaatatttttaaaatgttaaatctttttttaattaaaaatttaaaaacataaaatttattattttgaatctaaaactgtcaaccttttttccccaggtcttcgcattgttcgttttgcctttgtgtttccccctcaaaatattggagcagtttattttgaagtgaaaattgtaaaattacaaagggaaatgaggtaaaagtaa

SEQ ID NO: 54844 - DNA, 1667 bp, Heterodera glycines
  unsure (1)..(1667): unsure at all n locations
atggtattcaggtacaaaaagtccttccacgaagcctgtcggtcggacttcgcctccctcggcctcccattggacgactgtgtgcacagttcattgctgattttcaacgaattgcttcgcatcgccgattacgaatatgagcaaattcggattcaccattcggtggacgggccaattgtgcagttgggcagtcgcgcggattcaatcattggccaaaacccaatcggatggcttatcgtgaaaatccggcctgccaccgtggagtcgagcacttcgcgcactttgatcatcgattgttttttctcagaggcaaatttgtttggtcccttgcccttttaattattagcaaaaatgattgcacacttatccataaacatgtcattttcccttaggttgtcaagcgttgtatggatgcattgcccagcaaatccgcccattgccaggcaattctgctcgaaattctgccccgattggccaacttcaccgactcctccaattcgcacccattccaaaatgtgcaggaggcggctgatcattttatcgccatcaacaacaaattcccccaagcgcttctgacccttggccttttgtcattaaaccgtccgcttgaaatgcgcactcgaattccacggatttttcaaattcttattcaacacatgcaaaccgcggtcaacaagttagttcattctgttttaatagagtttcaatttttgatgattttcgtcaccttttgaaaactaaaaaatttggtcctttgctctgaagttgacgccgtaagaaattttaaaatatacttcgaataggtcgagaaatcagtctttttttaaatttaaaatcgaagtatacataaatcttaaattcggtaacattgttttgtaaagagcaagctcaaataattaaagcataaaattttaaacggttggaaatttgcctaattttcagaaaaaagcaaatgccaatgctcgactttcattgtttgtcgctgcttattcagtctcaaaagagccatttgtgcgaaagagttcgcgagtcgctgccacttatgttttccacgggtatttcagagggacttatccaagtaaaaaatgggtgaaaatatccaaaaatttaattattttttaggctctccatgtcacaattgaacacattccggagctannagccgatgtttttgacgggttaatggatcatttgtaccaattacttatggtaggtactgacttgcattgaaagaaattccacattttggtttatattatttaaggatcgtcctcgtcccagcaaattggctcctccaacgcctccacccattccaattggtcccattcagccgaaaaacatcccacaaacccaattggctctcaaaacactcggcgaattcaacttttcccggcactctcttcagatgtttttgcgttatgttgctctcgtaaatcattttaaaaattattcaattaaaaccaaattttaagggctatttgacaagtgattccacgaaaattcggctcacttccgtgtttagttgtggcgaaatgttgaaaccattcgtggacatttacgagcatgtacaaacggagcaaaaggcggaactgtactcattgatccgtaatgtgttggaatgtcttgtcaagacggcaattgttgacacaggtcccgtcattggatag

SEQ ID NO: 54845 - DNA, 49 bp, Heterodera glycines; identical to SEQ ID NO: 51181

SEQ ID NO: 54846 - DNA, 140 bp, Heterodera glycines
atggaccccactcgccgggggtgtgttattttttactgtaatttgttaatttatttttaatttttagtgcccccggcgaggagctaagctctgaagatttggcggcacttcccgcgttaccagggctcctcgcattttaa

SEQ ID NO: 54847 - DNA, 101 bp, Heterodera glycines
agcaatcgaacgctaacggacgacctaatgtcattaaaatccccgaaggagagaatttaattaaatccattccttcgggggaccgtgccgggtgccgcggg

SEQ ID NO: 54848 - DNA, 1508 bp, Heterodera glycines
atgcgcgaccaaaaagagcgaaagtatggcggtgacggaggcggggcaggccaaatgctgactttgctgacttctgcttctgctgatgctgcgcatgtcaaatccctcgccgctggcggagattcggtttttgctccccccgggggatttgggacggagggaaagggaaaagagaaaaggttggccaaagcgacaacaattaatgcacaaaacactcctcactcacccaacaaacagcgcaaatcgcttaaactaagctcattacccttttggaagtccataaataaatggggaaactttcatatggaggagtaaaagcagagaaagtgaggaaaaaaaaagaaaagagagaaaacttaaataatgggcacgacttactttgataagcgtggggcggggaaggagaataatggcaaaaacgggggtcaaattcattttttgttcattcaatttaagcggattaaatttttaaaaattgaatttgcatgagattaaaaagcctttaaaaataattttttttttttttgctttattatttacagacagtgcttggcataatataataagcgatttggacatcataattccaatatttttgtaaaaaattagttaaaaatttaataatttggtgttttattattcaaaatctgttaacaaatcacatacaaaatttcaaaaattttcccggcggcgcctatcggcactgccggccccccaattcccaaaacttttttggaaaaagcacgccgcaaaaacattattaatttttaaattttgaataaaatttttcaaaatgctgatttacgaaattttcagttgacaggccttcgtttttacgctaataaaatattgttttaagtcaatttttcatgtttttattgcgtttccttcacgcaaatattagttttagaaaaatcttatttttggggtcagaatcttagtttttaggccattttgtcttattttgaaaaaaaaacttgggaactctgatctcttgaaaagcagcaaaatgcttataaattagcagagtcccatttttgtgacaataaaaatgtttgtcttttcgagtttcctctcattgtaaaaaaatttctaacataattacctattcttctctttaatcattcgaaaaaccgtcaaattgtgttaattgtctcaaaaatgaaccgacggtaagcatttcaaaaattaaatccatttccctgttatttttatcgaaatttcagctgggtgtgtaacgatgttttgatggatctcttcccattttttggtcgtcttcaactcggcctcaaattggcgctgctttcaccgcgtttcaatgcgcttgtggacaaacatttcgatggaaagaacgaattcacaatttggagatggattggatttcgcaagaacaatggcacagcagcgtcagaattatctgtgctcatcgattatgccaattctgtacaatttccttggctcgaccttccgctgccacacaaaattcgcttcaaacaccttcagattga

SEQ ID NO: 54849 - DNA, 205 bp, Heterodera glycines
atggcgctcctgggtggatcccctccacactgccgggaccactggaccaaggagagtccaagtccgtcggtgaagggccaaggagagcccgagggaccggtcttccgagggaggcggaatgtgatgccagaaggaacggagtgtgggagaaagtgggataaaggacctgagagaacctctaaaagaggcgcccgtagctcagttg

SEQ ID NO: 54850 - DNA, 572 bp, Heterodera glycines
atggcaagggttgaaggaaattttttgcaaaacaatgttacgcaatatatctcgaatgatttggagattgctagcgtaaacacatacaaaattaatttaaacaattgctggtaatagtcttaaataaattaattatctactaaaaaagataaaaatctaccctaattatgcaaaactcatttaatatttaatttttataatttgaataattttaccaaattatcattgatataaattgaaaatctaagaaaaaattttgaagtataaaattcactcaatttgataatttaaaatacacgaacaaataacataatttacaaaactataataccatagtttttcatatttacgtaataaaaaaatcgaatgaaataattatatataaagtccaaaattttttaattgaaaatggatttattaataaaaactgataatactatagacgattttaaagtataattatttaatgttaattatataattgttacagcttttgcaagaaataaaaaagtttgactcggaagttatcgggaaatatatgattaattaaattccaaaatgttaataataaa

SEQ ID NO: 54851 - DNA, 759 bp, Heterodera glycines
atggcatgcgccgcaattgcagcgcataatttgggctttgataacacacgggtcaaactgattgtcgatccaatgtattaccataattaagatttattgttttaaattttaataataaattgattaattaaggcttcacaattggcacattattgagtgtgaaattggtggcgagaatggcttccggacgagaacacgtcgagaatttgcggcccaacatggcggagtgagcagtggcgagaacacacttttggcatttttgtcaagcataaaaggcaattaattaaatatttaaatgtattattttattaattttattttttaaaaattatttcaattaattctgaaatcgatttgcagagactttgtacaagccgcccggtgtcaacatttgttagtccaatttttacaaccgatgtgttaagataatgtgatcatttacctttcattattattttttattttaattatttaattttaaaagttataaagcatcaatttttattaaaaaaaagatttttaaaaaaatttaaatagaaatgaattaaattcgccaaattttccatttaattcttttaactcgctcttttcgtctttgaaattttcttttgcatttttgcacatttcagtttttgaacaattttttccgtttttttttgtgcttcggctcattaaaaaaattatatttttttatatttttaatctcaaagcattatttataaagcatataaaatacctttttataaagcattttatgaa

SEQ ID NO: 54852 - DNA, 1131 bp, Heterodera glycines
atgatgatgatgagctctgctgctatgctttttgtgatgatcactttggcattgatcagctttggctgttcaatcggagctgtcaaatcggagggcgacgacgagtcgggcgcagtgcgccacagccatgaattgatcaggtgtgaaatgtggcatttttaagtctctaacataattaacacaatcagaaataatatagttttaatttaaaaatttattgattttgatctttttttattaccactttaatggttgattatttattttatttttttggtcatttgaaatctatgaaaaattcattgtgagaaaaaaatatttctcgtttttctttaaaataagattttaaattttttttaaaaatccgaccgaataaattccacaactttttagcccgtacaaattcgggcccctaaattatttatacataagtcatattttgctaaatttataaattcacaaaatcaattttagtcgtattaaacgctacggctatgggtacaacagctacggatatggcggaggctgcgcatggtcagttatgcctaataaattggctaattagtaaatctttcattttagtgcccccgtgccggtgacgtcatcatgctacagctgtggcagcggcggcggcggctatggctattcttcgtaccaacctgtgccaccaccaccgcctcccatgcagccatcgtattcctcttgcgcaacatgtggcggtgggtacggcgggtacggtggcggcttgtcaggctacagtagcagctggaacaacggtgggagcgcgtccaggtaaacgttcttttttctcattttttatcaaaaattggcaatttaaacaaagattcattaaaaattgattaagcaatgctttatataaaaaaatttattttaaaatcgtaaaattaaaattttgcaaaaatatttttcaattttttaaattaattttttcaatcattttcatttaattatgatttgaaaaaatcattttttgcagctcatggaataactacggcagctcctcttccatgtcagttggcaatggcggcggttacggatacggcggcggaatgtgctcagtgtgtggccgaaaacgcaaataaaaaactttatcattttactgaaaataaa

SEQ ID NO: 54853 - DNA, 490 bp, Heterodera glycines
atggttgacattggagaaccaccctcactcaacactcgcctcgtcgacgaatcaccaaacacaaaacaacaaattaaatttctttttgttcccatcacattggccaatttggagaacggcgatgatcatcgtcatcacctttttgctaaatttgtattaatgataatgatgatgaccgcattttggtgagaaaattgcaaattttgacgaattcctcgaattaattaaaaaaaaaaataataataataggaacattgtttgagtattttgtgcaaaataataagaaattttatgacaaaatcaaaattccaattccaactgaaatattctgcatttttttaaatcatttttttcaaattttgagaaatgtttacttggaaatgtcgtcaaattaaagcaaatgatgcgtcattaagcataattaagaaggcaaacttgaactaaaggaaaatgccaaatacaatataagaagcggttttaaaaaataata

SEQ ID NO: 54854 - DNA, 1529 bp, Heterodera glycines
atgctgctgctggtgctactgctgctggtaggtggccacaagccgtgtgaccttcaatggccggggcagcaagtttcaatgtcactttttattgtgatgaaaaactctccgctttttttgtccaaattggcggaacacctcccattattctcttaatttggcggggggaaaggatggagccaaaattggattggacagtttgtccttgacgagaaaatggtcggtgtagtaggctcttctgtggggttcatcaaaaaagcgttccacattcttattccccctcacacatcacatgcttatacaaattgcttcattttgccgttggtgtcaagactctcgacaatcaccgcgcccgcctttgtcgcccaattttggacccgatggacctcgagactcttgaggacggcggccatcactttcgttcggcagtgcgcaagaaccagaaccatggccttccattccccccccccacccgttcagcatcagcgaattcggtgaattccaaatttagaaatgagatatgggagaagaatgtggcgaagctgcacaaaatgcaaaaagtgtcatcaatcatttaatcatttaacaccggaaagattggcgggagggggcgtaaaataatcattttccatttttcgtgcaaattgaaaattgagaatgctctgccgctgatgcccacgcaaaattttgttcactatgatggaaccgatggatgaaaattagaattttgtgcaaatgccgagaaaatattaaaaatccaaaaatgatcatttgattaaataaattaaatttaaaaataatttttcaaaatttctgaatttttaattcttctaggatttctcagcctcagtttcatttgttcatattggctcccatttaaataatataaaaattggcttccattttaataattagctttcaaaattaccaaataaatgcttatttttaaattttgtgtatttaaaattatttttttaaacattaatttctttttttgaaatcagaagaatattttatgtttaattcatttgatcttttttcagtttacactaaaactccctctgattgtttctgatcagctcatatttttgctcatttcgtttttttcgatcatcaaatggatgggacaggtaaggtacagcatttgctgttaatttggtaattaaagaaggttttacgattttgtgacaatagtaataaaaatttgatttgtgcgcgccggccgaacaaaacaaaacgaaaaaaatggacaaaaaaatattacgaataaatgaatggaaaaatgaaaaatgggagcaaaaacagaacattactaacgaaaaagattaatgaagttgaattttgtaaaaaaaaaaaattaaattaatattactttgggtttttttttgttcgaatttgaaaaactttggaaaatggaaaaaattattcacaaattaatattggttactaataatgtatttttaagaactttattattcaaatggacccgaaaatatcgagacccgtttaaattttgagtaaataataaa

SEQ ID NO: 54855 - DNA, 961 bp, Heterodera glycines
atggtaacccaggcgaacagggacctgctggttcgccaggggagccaggcaagcctggtgcacctggttatccgggccagaatgggccacgtggaccgcccggaccagccggaccaaatggcgagccaggaaaacctggccaaccaggacaaaacggagagcctggcgtactccggtgaattttcagcatttgcaattttcattattaattttttcattcattcagctatggaccggtcaaggttggccctccgggaccgcaaggaccgcccggctatccaggagggaacggagaaccaggacagcctggcccacaaggctatcctggggagcagggacagcccggagctggaggtccgtcaggatcgcctggaactccgggagaaccgggcggccaaggagagcccggagcgcacggcgaaaagggacactgcggtaggtttttttgtggatttggcagaaaatttttcaatattcaagggtctgatttttcggcattgatacgatcactgatcaattgatttttgattaattttttgtgtgttcagatcattgtcctcctcctcgcactgctcctggctattgagcagaagcgaaagagacggcgagaagctgatcagagtggaaaaccaaaaagaaatgcaatcaaaaattgttttgcccttggattattcatggaataaaaaattttgtttaaaaaattatttaatctgcaaaatttacaaaaaatgaaatttaaatcctcgcttattaatgcaatcgctgcatggcgagaaagtaacatttttctatttttttcctgaaaaatagtttctaaaattcttttgcttttgttagcttgtttactttgttttagagaatgagaagaagattagcaaagactgaaatcaaatatttaaaatgtttacgaacaaagaaaaactaaattttataaaaattcgaatcaaaaatttaaagtaaa

SEQ ID NO: 54856 - DNA, 2505 bp, Heterodera glycines
atggcaattgctcccaattcttcctcgacttctttgctaaatgattcattaatacattgggtcgtttttttgaattccatcgaactctgtgttttgtttgcgtcttttctgatttcggcattcaacctaattttgctctccaacacggcattgcttcatccaaatttgaaatgcattcttttggttcaaagcgcagtcattggattggtacgaatattctactgataaaaatataataaatattattattttggatttaattttataaagcttaataataaatataatgtcatcagtagggatgtcaaaaatatgtacaaaaagtggtcaaaatatgtacataaatatgttaaaaaaagcccgaaatatgaagaaaaaaacaaaatatgtatcaaatatgtaaataaatatttaaaaattgttatttttttggaaaaataattattcgtagagggtaagataggcaccacaaaatgtaacctaattaggcttatgatcatcttttagtatttaaaattaatttttggtattttttaggggtagattttcaaaaaaattttttttgttattttttcacaagaaatttctagaaattttcaaaaattctcaaaatattttaaaaagtcacacgatttttgttcgtaaacacaaaaatgaaagtgtttttcctactatttagagcatggagaagccagggaaaaaatatgtatttacaaaattttctttttattcagtatgaatgctttcgtttcatttttgtgttgtccaaatttgtctttgccgacgcgttttaccatggagcagtccccgtgcaaattgtccaaatggcattaattccgattcgcaataaaatgggccacgttttggtggccgaacgtgtgtttgccacaattaactttcgaaaatatacggagaatcgcagcaccaccaaacagttcgcaatttgctggattggcattttggtatttttgaaaaataattatttgactaaattttagggagtgaatattcagttaaatcaaatctgaaatttaaaaaaaagcatattgcctaaaaacaattgaaattaataagattttgaaacaaaatttaactgatttgatgcttctaaacaatgaaaaagaggattgtcagaatgaatgacttgaaattttgtaggaaaacagtttttagtagggattatcagcgtacaaaatttcgaagtttttcaatcacgtatcaatttttcaaaaatccgtttctgtttaaaaacttgaaaaatcaagtcaaaaatgtagtgcttttttggttttagaaacatactgattttgaaaaaataaaaaattaagctgtaaaaaattataaaattttgcaggggtagcgcttatgccttcgtattttcttgtgaaatttcaagttacgctgacaacaacaaaattaattgtctaaataaagaaattttagtgaatataattcttatttttattttttttaaattaaaaataattttttaagaattaaatttgacatataaatcatacagcgttttaaatgataaaataaaaaaaaatctttgaaattaatttgttttgatttcaattctctgtccattgcagttgggcatttcaatttggaatatgtatgttcagcgaggtgatttttacttcatcaatttgaccacttttgtcaccagttgcattttcttcgctttgggatttgctgaaattttggtaattaaaatttaattatatatttttttaaattttaattggataatttgccaacaaattaagtccatgactgctcttcatttgtacaatttgcgaaaatatcaaagtgagattaactttacgctgaatgaacgctttcaggtcagtaaatgcgactaaaagattagttaaaattccataatttttatttatattattaaattattattaactattatattggaaaaatattagtgaaaattcaatttttacaatgttttagttgtctgaaaatattcgcactgcaaaacaattggcgccaacaattttacaccattttttgaatggccaatgcgttaaatgtagtgacttttctaatttattttggttttttggacaaggattatcagcagagttttgcctatatgttaatggcattgcaaaataccattagctgctcatgcattgaaatcactgttattacgtaaaattttaaatttttataaaaaaataatttaaaaaaatatcgagtgcgtttggacgcactaatcacaagattttctccacgctaatgaatcaatcatttaggccaattaatttttaaaaattattcagccatcacccaatgattaaacgtaaagccgtcgtttggctgaagaatttcttttcttttgtgaagccttcgtctgtggccgattcttcagtgccaattgcattgcaaaatgggcaaagtttggtggatattcgtggacaaaaattgctgacggaatcggagatgcaaatttatttcaaaaagctcgaagaagcatggaaatga

SEQ ID NO: 54857 - DNA, 560 bp, Heterodera glycines
atggtgtaaaattgttggcgccaattgttttgcagtgcgaatattttcagacaactaaaacattgtaaaaattgaattttcactaatatttttccaatataatagttaataataatttaataatataaataaaaattatggaattttaactaatcttttagtcgcatttactgacctgaaagcgttcattcagcgtaaagttaatctcactttgatattttcgcaaattgtacaaatgaagagcagtcatggacttaatttgttggcaaattatccaattaaaatttaaaaaaatatataattaaattttaattaccaaaatttcagcaaatcccaaagcgaagaaaatgcaactggtgacaaaagtggtcaaattgatgaagtaaaaatcacctcgctgaacatacatattccaaattgaaatgcccaactgcaatggacagagaattgaaatcaaaacaaattaatttcaaagatttttttttattttatcatttaaaacgctgtatgatttatatgtcaaatttaattcttaaaaaattatttttaatttaaaaaaa

SEQ ID NO: 54858 - DNA, 327 bp, Heterodera glycines
atggctaatgaaattactgagagctacgctgaacttatcgatactccgcctgctaaagtattgtattgctactctgagatgaaccaatcagtcattgagctgatgaagcgcggaatcgagacacataatggcgttccggatcaagcactgatccagaatcagccgaaaccattgcttgtgcttgatgatttgatgcttaatgtagggaatgattttttggatttgctgttcacacgcggttcccacaattggaatgtcagcgttatttttgtcacccaaagcctgcacggacgtaatattaagaccgcaagggcgaacagtcattag

SEQ ID NO: 54859 - DNA, 508 bp, Heterodera glycines
atgaatgagaggattgaggaaatcagcactgaaatagccaaatctaacgcattcgtcatggaagccaaagtgggttttatttaaaaattcaatgcttcgtttttatttgcaggaaaaggtcaaaaaagcgcaacaaaagttagagacgtacaacaacgaagtgcgctcgcaggagaagcaaatccgtgtgaaaactgccgaaattgaggacttgaagaagcgcgttcgccatttggaagccaaaatcgagtcaaaaacacgggacagggaggaagcactgaaaaatgcgaaggatttcgagaaaagagcccaacagttggagaaggcgcacaattggatagccgaggaacggaaacacttcgccgtggagggcacggcgtacgattttcgcaattacagcttcgaaatgggcaagcgcgagtacgacgagcgcaagacgcgcagcaaagacttgctgagaacggtgaacccaaaggcgatggaatcattggcaacggcggagaaagag

SEQ ID NO: 54860 - DNA, 968 bp, Heterodera glycines
ttttcagcaaaagttacgcgcccttaactttgatccgcacttggaccaccagcttgagcaggagcgtgttcaattggccagagaaagagggcaatgtgcgcaagaattggaccggtttgaggccaggtattcattccatgaccgtgcttactctacaattccaaatttttctcaagaaatttcaaactgcgctttgactatacaatgccttacaacggattcgaccggaacaaagtgaagggcgtcgttgctaaactgtttaaaatgaacgaacaaagatatgccacggcattggaagtcgttgcgggtggtcgggtgagtcttttgaaattaattttgccaaaaaaacgataaaaattattttgattgtatccttctctcttttttgagctgtttcacgttgtgatcgacaaagtgaagaccggcgaggatttgcttaaggcggggctgccccgtcgggtgacaatgcttccgctggacaaaatcagtgcaaatgttctcgaccagcggctaattgggcaggcaaaacgaatggtgggcgaggagaacgtgttcttccccggagagctgatcgaatacgaacgggaaattgagctggccattctcagcgtttttggcaattgcctggtgaaaactctccacttgctcgttgcgtgtttcttgaattgagtgtttgtcaagatttgcggggacatggaccaggccaagcagctgacattcgaccgggccataaactgtcgtacagtgacattgtccggtgaggatttcaagccgaccggtgtgctgactggcggattccggaagccggacgcgtcaattttgactgcgctcaacgaaatcagtggacaatatgaacggatccgagagcttgaccaccgaattggcgcaattgaaagtgattgctttcccgatgttgtcagtattttggaaggaattttcaggggaactcgcaagactgaggcccctcc

SEQ ID NO: 54861 - DNA, 885 bp, Heterodera glycines
atgcgcctgattcggcgcgatattaagaagcgcgccaagttcgacatgttcaagctcaaaccgattgccagagtcaacaagtgcgccatctcagcgttctttgtcgctggactgaacgacgagctggttggtccacatcacgttcgtgccctggccaaagcacacaatggccccaaccagctctaccagttccagggtggtcacaacagcccgcgaccggccaatttcttcgttcaggctttgcagtttgtgcgcgtaatgattgggatgttgccgctgcaactcgatagcccgatgtcgtcacccgaaaagccacaacggacgcccgtcgttctgcacaacccgctggagccgggggtgtcgatcgagacggtgcacaagatgaccatcaaggagctcaaggcgtgcatcgaccgcgcaggcttcagcgacgtcacgtgcattgaaaaggcagaactggttgaactcgtgctcaagctgtacgctcgctgggcgcggctcaatccgcacgaagcggcgagccatggccccgctaccacctcttcaccgccggtgagctcacattccacaaactcgccaacgatggcggacctgccacggtctggctcgactcgcgaactcgactcgccgtcctctgtggacaagggacgaagacacagcgagggcagtctggagaccgtcgaggagttccccgacgtgcagcgcgccttcttcccagccatgacaagctcctgctccagcattatgtcggacgctgagctcacccaggcgctcggccatcgcacaagcggcgaagatgatgaggatgacgacgacgacgacgaagaagacgtcgacggttacgacgaacagcgagaagaaagcgaggtggaagagcacgtatga

SEQ ID NO: 54862 - DNA, 339 bp, Heterodera glycines
atgtggtcgatgatcaaagagggctacgaagggctggtcatgacggtcattcgaccgcttcgtgccacgtacacacctgctgaccttggtccaaagcgtgcaatgttgcgagatgtggtgatgcagcgcacagacatgaagctgaagaaccccggcggctacacgctcgaatgcagttggtggcgaccgaagacggatcggagcgagaagacgccgtgcattgtcatcttgcacggcaacagttcgtgtcgcttgggaggtctcgagatcgtcagctacgcgattccagcaggattcagtgcgtttgccctcgacttttcaggctcagggctgtcggag

SEQ ID NO: 54863 - DNA, 812 bp, Heterodera glycines
atgagcattcgcaccattgagctgtgcgtgtccattttggaggaccattttggcttttatgtgtcagcggttggtgccgttctgttgcgccagcagttgccctttgtactgcttgcgaaggagttgcatggacgggttcgacccggcgaggtgcataaatgaattctttcaatttggcacgattttgtaaatccgttgacaataaattcactcgggttaggccttcaacttaatttaaaaaattttttttgtcagactcaaaatatagggggttggctgggttatcttgtggtaaatttaaaataaaaaattttcacaccgcaaaatttataattcagatgaagcgttccatcgccatcctggaccaacacaatctgctcaggtgcggattcaccatggattctgacaaattagctcattttaatgggaaaaaatcgttccccccgacgaaaaatttattttttttcaaattttgtaacttaaaaaaaagcctcgaaatttccaaaccctcgctcgtcactttagagcagtacattgcaatttgatgatggttttccatttgatcatcgcctctcattttcagttttgagtcgcccgcgcgtgccggtgccgtcgtcctctacacagtgttggccccgcgtgtgctgaatttggtccgtgccccgcgtgccattctcaccgtcaaaacgctgtacagcagcggtgccatggaggcaatctttgaggacgtgttggcccaggggcggaccagctgctctcagtgcattcgacgggtggccaaatgcatggtggacaacctgccgatggacaag

SEQ ID NO: 54864 - DNA, 1499 bp, Heterodera glycines
atgcatcgcgaaatccgcgaaacaatgcatatgcaactgcacagatgcagtgacagttggtgtggtcctagcgacccaatttacgggcggtgcaagaaggggttcccagccccttactcaaaatgtacgattttgcgcccggacaggcccgcgatgtatttccggccttcaccaactgatggtggtgcccaattagaggtaaacggcctaatatacgacaactcacatgtcgtgccgtataatccttatattctgctacgttaccgagtacaccataatgtactgtttgcatatggtaacaaagcaaatattaaatacgcactcaagtacccttttaaagggccaggacattgttatgtcgagtgcaaacaagagtccggcaataaaatcggaattgatgagccggctcaatatgccaagatgaacttccgtggtgcaacggaagcatatgccattgttcattcactgccatttgccaaactttcacatcaggttgtcaaacttagcatccatatgcctaatcaacaaccgattgtgtacagggcttttcagctggtgagcaaagctcaacaaatccagcaaggcaaactgccagagacgcaatgttctgcctattggaaacaatggcaaaatgaatggaagcatgatccgaagctcaaggacatgctttttgaaaaagtccctgagcattttatatgggcaaaggacaaatggaacaaaaggaaatataacctaacaaagagaccaccaatcggtcgaattgtccctgttccacccaaggatccggaaaggttcgcgctctattcacttatgcgccactttcccggtgaccctgaccatcttaaaatggtaaatggtcagccttgtacctctttcactgatgctgcaataaggcacggtcttcttgaggatgacaaaatctgggataaaacactcgctgaggcagcgttgtcacgatggcctgatcaaatgaggtggctcttcatgagcatcctcgtttatggccagcccagtaatgccgtcgaattgtggaacaagtacaaagaccaaatgtactttcctcaaggcattaccacatcggcacaacgccaagcagcagagcttgaagccctagccgacattgattggcggctgcacagctgctttaacttaagctctgtgcattttggcttgccagacccgccaaactcaattgccaaaaatacaaatgcggcaattaatgagtttttctttggcgatgatgatttgaatttgcctccagggcaaccaaatcctcgtccacagccaaatacccctccgccacttaacagcgaccaacagaaggtctttgatgctgttttgttggcaatacagtcaaaccctagggattcgactgtcccccgccgtttcttcatatacggcgatggaggcacaggaaagacattcctgtttggccaaattattaggcgcttgcgaaaggccccatacacctacaaagtgcttgctacggcatccactgg

SEQ ID NO: 54865 - DNA, 366 bp, Heterodera glycines
atgaaccgacggtaaggaattattttgaaaaattaaaattttcgtttccaatttttcagttggatttgtgcggatgtttggatggacattctcccatcttttgaccgtgctcaactcggactcaaaatggcattgctttccgaccgtttcgactttttagtggacaaacattttgatggaaaaagcgaattgataatttggaatgacattacaattcgaaagggcatggaggatgaggaaaaaattggagcaaaagcgaaactatttatgcaaatcaaggacaataaggacaaatttgtggaatttccgatgccggaccatccgttgccaaacaaaatccgatttatggaccttatgattatgtaa

SEQ ID NO: 54866 - DNA, 613 bp, Heterodera glycines
atgattttcggtgccattctcctttccggtctcgcattgtggtggctcatttgcttcttgttcctctgctttttcccttactgctttcgtccgattcgacgtcttaccacgaaacgccgttgtgggactcattctggcacttctaaccctttggccgattcctcaattcttcgccgtccgtcaaacaccaaaagtggcgttgctcgtccgcctccttcgtttgctcttccattcagtcggcccttcgctcattccgtaagttcaatgtgaacattttatcgtattttcaccttgtcacccttcaggccaatttatcgtctgtttctgtctcggccgtctgatcatcctcaaaagcacattctcgggtgggaattccacatttcacacttttaattgtccttatttttttaatttaaattttctgactttcatttatttttcttttcattatttcagtcgctgttaacaccgccttgtgtcaatcgatctgaacttttcctctgagcttttccggccgctctttgccacttccacttaatctcttccatttcttgcattttcactttaaattaattaataattttcgccttttttaatttataatttgttaata

SEQ ID NO: 54867 - DNA, 607 bp, Heterodera glycines
atgcggcgtgttgactccatttcactgttctcggaggacgcgaactacttggagtttttggacaccatcaaatacaacgaggagatgacagttgatgtaagtaatgacattaaaaattattgaaattagaaaggtaaaatatggcgaaatacggataaaaaaatatataaaaattaaaacatggacaaaatgtaacacaggtcttacaatcagtaaaaaatcattagccatcgtacaaatcttttttcttagaatactggtaattttgtcatttaatgacaaaaataaaaatctgtcaaaatacataatttttgccgaaaaaggttaaaaaacaagaaataagcgcccaatctatgtcataagttttttgcataaaattattcttccgaatataatgttcgatttgttaaaaaaattaaaaattaattttatatattacctgtttttgcttttaagaagcttatgaatctgcataagctcatactgcagaagcattcacctaacgacgaggcagcagggcgaattcgaacgacggaagttgaggtcagcggggagccgatgcttcattctgatcacgttccaggcgagtgattacaaaattaataaa

SEQ ID NO: 54868 - DNA, 954 bp, Heterodera glycines
atggaagcaaagggaaaggagcaaaaagcatacaaaatgagcacaaaaagaggcacaaaaaatggggaaaatgggcaaaaatggcacaaaaattgggacgaagaagaggaggaggatgaagaagaagaggaagaagaagaggatgaagatgaggaggaggaagaggaggatgaagaagatgaggaggaagaggaagaagaagaatacgaagaggaggaggaggatgagtcatcaacggaagagattggcacaagtgagtcggccaaagtgccattcgtaggccaccgaaccggggagcattggcaccccaaaaatggggggggggatagtcgggaggatccgcaatgaaagccacggatagaaatgagaccaaatgccgactgacgcacagttttatgcccccgggcgcaaggcgaagtgatcaaaaaaagatgaaaaaagagtacaaattatttcgaaattcttctttaactggaaaggtttttaagaaataagtttgaattagtgatcgtagcagaagagcctgcctggataaagcattaaagttttaatgattaacaaatgacggggaccaaataaaggggaaaaagcattgaaaggattggcattcagaaacaaagaaacaatcatcggcaaaacagcagaagtcttcgccgtacttttgggacaccaaaatgcggaaatacgaaaatgaatttccaacgaaaatgaacgcagttttagacaaagccaccgtcgttggcacggcccaaagcaaaacgaaaagtggcaaaagtaaagggaatttttggcaccaaatccgaaaaggaaattgaccaattcagatatttcttggggaaagggtaaagggtcatcgatgctgcagcttctttacaattcccgttgttgacgacacaaaaaaacaaatttttagggcggaaaaaccgtacaaatcggaaaaattcgaattggtaa

SEQ ID NO: 54869 - DNA, 286 bp, Heterodera glycines
atggatttgtgcataatggatgcactgaaagatcaaaacgatggataccgttacttattggtctgtattgatgtgcttagtcgacgcatttttaccgccgaatctgagtctaaaaagaatgaacatatgatcgaggcgtttgaaagggtgttcaaaaaggcaaatgttctgcccaacaaactgtacagtgatgctgggctagaatttcaagcaaagcgtatgttagactattggaaaaagaaggacattataaagcatgtgatgtattccccacatctgcatgcag

SEQ ID NO: 54870 - DNA, 272 bp, Heterodera glycines
ccaatctgtgtcattttgcgaaccaacaagtcaaaggcaatttgcgcttgtccgattcccatccaattcaacgctcattaaccgaacttggcctcatcacttatgtgctcgaatctgttgtttattacatcggtaaaaggcgcaacaaaaaaaacattttgacacattttatgataaaaattgtttattaactcaatatttttatttatttagccggtatgattgatgaagaattgtttctgatgcaggacattgagaatgcaattgtacaa

SEQ ID NO: 54871 - DNA, 1010 bp, Heterodera glycines
gaacccgatttgcatttgatccggcgcatttccatcccaaccctggagacctatgtgaacaaatttgggggcatggcccaatttcggagtgcgtttgccacccaaaagatgttcaagctgaggatgaccgacatccgggagcaggacttcttggagccggccatcattcattacattgcggagcatgtccatccgagtttagaagtgagtacaagtactggctgacgttgtttttctgtccttttcctttcacccgaaatttaaaaaaatattttttaaaataaattaccattgcacaaaaatgaataaattaattaaaaaagaaataattgtaaatactatatttctaattcatcaaaaagcacgcctcctaattatgcgatttctaaaacaaaaatacaaccccctaaaaacgagtttttgaattcaacccccccccctccctcccgaagccaagggtctggctattcccttgataaataaataaattttttgtttattttcagccagccgctactggtctcgagaattccatgtcaagactgggtgggtttggggctggtggatagacagatatgctaaacacctctaattgtgttgcttttttctatcctaaagttaattgaaaattttcgaaactgaaaattattaatgtgtttttttttaatttctcattttattttatttttttaaataatgttttcgccccgtgcaggtcaactgtttgacaaagtgtgcactgaaaagggtgtgcatgtgaacacggattatatcatcttgggaaagtaagtgattaattacaaatactaattttatattttaattatttattttttgtccattaattgcttgtactaattgcaattactaatacaattagttaattaattgttttttaaacaatttagcgtttgtgaagtgatggaaaatttgttggcaatgaccgccaccattgcgcgttcgagtcggtcctatgcaattggacttcgtggtgcggataatgaggttga

SEQ ID NO: 54872 - DNA, 567 bp, Heterodera glycines
atgccggtgccgccgcccgactcggcggcagtgggcgagccggaccggatgaccatcagcagtgaggagcaaaatgtaaaaattaacaaaaaaataaaaaataccaaattcattttcaacaaaaatttttagcaaaaaataaataaaggaaaaaattaacaaatatttatatttatttttaattaatattttaaatttttaaaactaaaaaattaatgaaaaaataaaataaaaatatttctatacaaaaattaattttaattttgttttatttgtaacggatgaaaattaacagcgttttttaagggtgtgaaaaatatgtcaaaaaagaggcgaccacatccggcacagctgaaaaagtcggtgctcctctcgatcgccaatggcacagaaaatgacggcggcacaaagtcgccccggcatggctcaatgcttcgccgtttctcccgcgcagcttcattcaaaaaagctcgtgcgttaacataatacagataaaatggattggcggaaaatcatcagaaatcgcaaaaaacgcaaaaattgggcacaaagcacgacaaaatgaca

SEQ ID NO: 54873 - DNA, 350 bp, Heterodera glycines
caactccgtctcagcaatgttcaaaaagctataacttttttctttgttggccaaacttaacaatcatggtatcgttcgaaagccctagatgtttagaagatatttataagctatttctcagtgattaatcagctctcaaaaaagttgtcagtttaaaaccgcaaaaaaggcagaattttcaaagttttttatttctatctttttttatagttcgaaattttttgtaatttttagtaggctaatagagcctgtgaagagctttcgaatgatatcaagattgtttgattcggtcaaaaacttcaagagttatattgactcaaagttggctcagacggagttggcccgttccg

SEQ ID NO: 54874 - DNA, 430 bp, Heterodera glycines
atgattttgcaatgcaggaaaggggtcagttgcgtctgagccaagcttaatacatcataacttttttcaggctggccaaattttataaatttggtatcattcgaaagctctacatgtttagaagcttttgataagttatttctaagcgattgaacaacttataaaaaagtcgaaacatgaacactaccaaaaagtcagaatttttgcatattttaatttataacttttttatatgtcagtatatctttgtgatttttaggaagccgatagagcttgttaagagctttcgaatgataccaattttgttggatttggtcaacaaagaaaaaagttatgatgctctaaacttggctcagacgcaactggcccgtttcgtttaccaggccaatgtgccaaattttagaggagggagaataaattaattaataaa

SEQ ID NO: 54875 - DNA, 390 bp, Heterodera glycines
atgcgtccatctgtgaaaagcaaggcttactccatgtaagacaataggaaaattgtggaaatttcatgaaatttggaaattagaaaattttttttggaaaaaatggtaaaatatatttttttgtagaattagcatacggtagtcattaaatgacaattagccaaattaattataaaaatgactaaatgctttattattgcagaatttggcattggcaattagattaacaaatttaatttttatttttttaaatggcaaaaattgaatttttgtagaatttggcctactgtagcttttgctgcaatgtcatttcgaatggccgatgctttgtatgggttcagattgcatatggtcaccgatgggaagggagcgttttcaaatttgagctaa

SEQ ID NO: 54876 - DNA, 1435 bp, Heterodera glycines
atggacgcattggaaaatgtgttgcaggagaccggaagaagtgagggcgttgcggcagcgattagcaccgataatggtccgtccgttagccatttattgggataaaatttgcaattttaaaataaaatttggcaaaatatctttgtttaattgttattttatagtgaagaaggcacgccgagaattgaaaaggcatcagctgaacagacgagaaaagaagggggaggaggagaagcagcaaaagaaaccgagcagcagttcaccaacagcagcgagcacagattggcgtgaaatggcattggccattcaccggcgatatttgcaggtgttttttaggctaattgtttttggagcaaattatccaagtttcaacaatttttaacataattagaaaaatataattgaatgttatgagactaatcccaaaattttgcaaaaattattatatgattatgatagaattgccatcatgaatttaccgtatactgtgcttttgaaaaggtgtacgccacttgctactgtgaggtcagccgactgtcatctgtgcgcaaacagggcagttgctacgccgcttacaaagtgtgtgccgaagttttgtcgtaaattttattatttttttgacatttttagggataaaattttggagtttcgtaaaaaaaaaatcttttttcgataattactatgccaaattcagaaccgtgtcactgtgcgctttctggacaataccaacagcaacaatggctctgatcagcagcagcagcatatgcattatttttatcctaccaaatgcttgtgccaattggactggatggccaaagcgatttggccatgttttccatgtaaaaaaattgaatttttacaaaattatgattgggttgattttttggatttattacagtacacgattttatgcaagtttgatttatgcaacccactctaaactctttagaatgaaatgtttttaaattaattacaaaaatcataaccttaattatcatcgtcataatttttttttgcaaagcgcagacaacacgtggaaggagcatatttgtgtggagtgtgttgatgaccatgggtctgtttgcacctttttccctaataaaataagtaattaataatatttaaacgattatttaattattcaaggcattgtccaatgcgtttcctcgactaccgtacaacaaatggcgagggcaacaacggtggtgggtaccgtaaatctcgacaatcggccgcctcctcctcacatcgaacgtacgctattgaaatgctggacgaaaacatggacatttgtgtgtgccatcgggagtacaaccattgtgtggctaacaatttggacggcgaaattcccgaaataatgccgggcgatgacctgaacctgttgaatatcagccatctgactgaagtcggttggcacattccattgttggcataa

SEQ ID NO: 54877 - DNA, 465 bp, Heterodera glycines
  unsure (1)..(465): unsure at all n locations
atgtcgaacaagggaatgagtttcctgggtgcagcagtgttcagcttgttatttgtgttgatggtcaatgaaaattgggcggcgtctactgatgatgatgaggaggtaattaaaattttggtacaaaataaatacatggatgttagttagttgacttttttcacttatttaaaacagtacggaattaagtttgtagggagaccgtgtggaaagtttaataaatcaaaaagattagtgcttattaatgaaatggaaaggaaccataattctttttataataattccaaaaatggataactccataatcacttaaaaaatggtaaccaaaagggcgaacgtgtggaaccgttttattaccgatgtgcgacatttttataaattttataatgaaaaatataaataccatcccggttcttttagcctaattattggccacanggtggagtggngctgacgnttttgtga

SEQ ID NO: 54878 - DNA, 1219 bp, Heterodera glycines
cagccgactcatcgtccgccgtcctccgcgctcagcgctgagccgttcatgaacgccacgtcaggtgtgtacattgagcaaatgtacgagagttggcagctcgaccgtggctctgtccacagatcatgggacgcgtttttcaccaatgtcaacgcgggcgccgcgccgggccaggctttccaggtttaattttgttggcttttttgacgggtttaccgagctatttgctttggtggatgaaagaattcggtggggtctgattttttcgctactgtttttggtggtggcgttggaaccgaattgcgaatccattttttgttgctaaaagtcctcaaatatggggacatttggaagaaatttgaaccattgtcgaattcacttccaatttgaagaaacattgtcagttttttggggctttgaagtttttcaacggaacgtttctttaaccaaaatgaaatgtcaaactcattgtcagccccattttttccttgtgccaagaaatacccaatttttactaagttttttttacacaaattttttttccaggctcccccgtcagtcccgtcgcttagcaccgttccgcacgccacggttgtgccgcgtgacatgcgcgaggtgcagccgcaaacagcaggccaagtgatcccggccgatgaactgacacgtgccatcaatgaccatctcaaaatccaagtattgatcaggagtttccaggtctgtttttataaatcgcaattcaatgtaaacaaatcgaaaaagttggtccaaaatccccaaaataagccattttgggagtccaaatctgtaaataaatttctgcacaccggaccgcttgattaggttaaatctaaactcaaatcccgaatacaattttttggtttccatgtagagtattgtaacagaaatactgtcgtttttatttataccttggttgtggctgtctccgttctcttagcttaattgtaaaacattcacgatccgggcatgtgaagggtaacaattttttcgaattaagactcgtggccacaacattgccgatttggacccgctgggcatcaacagtgcggacttggatgacacaatcccgcgcgagttggagctggacttttacggcttcactgagcaggacatggaccgcgaattcttgttgccacccaccacattcatcgggggcgaacgcgccacattgtcgttgcgcgaaatttacaaacgacttaag

SEQ ID NO: 54879 - DNA, 1211 bp, Heterodera glycines
gtatttggacgtccaagtgatcaatttcctgcgccgaaatcgccgcctgttcagcaccaacatctcgctgcagttcaaccttctgattacggaatttcgcgcttggcaagcgatggcacggcacatttggcccctgttgaggaacggactccgcacgctggtcagcctgaagcgcaaacaactggcactgatgcgcaaacacgtgtcgccaaccgtcctcttcgactatccgaaccttgtcgaaatcctcaccccgattttgcccgaacgtccgaccgttgacaacaccaattatgctgctgatacatcggcccgtgacctgtacatgtggctgcacatgtcgcgccctgacggtcgtccgaaggtgttcaaattgaccaaatggaacaatggatgggaccaattcgtcaacgatttgtgctcggtgagatttgtggtggatcaatcgatggggacggatttttcaatttttcactgaccttttttgggtttttattgcagttcacacgacgataaaataattggacaattttaataataactttttctagaagcatccaaataaaacattcttggtatcattcgatagcccaaagtgtcctttattagcctgcaaaatttcaaagaatttcattatatttcaaaaaagttgtaaccagaaaacttcaaaaaaaatgaattttctgtacatttttgaccattactttttgaattttgaatgaattttttaaaatcaacttaggactaatagaggactctttggactatcaaatgatgccaagaatgttgaatttgaatgcttccaaaaaaagttatgctgtattaaaactgtcaaatgtttttatgatcgtatgaactgcaacagagtcccttttttgatcattaatctgcaactgatctgatcgcatttccttttcacagtcattcactgcagcgtccgtcccggtcaactacatggtgctcacttcgttcgaattcaactacaccaggagtgaagaaatggtcaacattcggacggaggaaaggctgacgctgatgagcaatgtgcatccaaatccagctgtgggtggcgttgtgtccttggtgaagattctgcgctgtccggtggagttcagtaacgctgccatggtgtcctggcttcgcatggcgcgcgtgagcaacgaacgtcccccgaattgggtgaccattggcttctcggatgacgaaattgg

SEQ ID NO: 54880 - DNA, 704 bp, Heterodera glycines
  unsure (1)..(704): unsure at all n locations
atggccccgctccaggaccctccgacaagtccagacccggatacctggcttttgcaaaatcttgccccactatctggaaccgggtttttaaaaatccaatacccggttcgcaacccggtaggtccgggtccaactttgcacaaaaacacactagtaagaatgggcttctgggccaaattttgttgacaaaagtctaaggaatgaaaatttgtgtaaaattaatatttactttaataaatgtatttataaaatgtgtctgtggtctagtggttagcctctagggttcattaacttcctttctctggttcaattcgctcgcatagcccccagtttttgccaaaacatccgggcgcggggcctaccttaattattcaatgaaaaaaagaagattaataaacattttcagcaagcaaatttttgttttaaggtctcaattaaaattgcttaaagaaaaagagcttaaaaaaatgtttgaccaaaaaatggagcaaattcagaaatggaaaaccaatgcatttctggcaaagactgaaatggaagaacgccacgaattggaggcgcaattacgcaaaattcaaacacaaaaagccgcacaaatcgaatgctgctgcctgccaaaatccanatcagccccagcacttctttcacataaatttttgaantttggcatccagttgcaaaacattggcgtacagttcatctaa

SEQ ID NO: 54881 - DNA, 363 bp, Heterodera glycines
  unsure (1)..(363): unsure at all n locations
atgcgaaaaatgaaatggataaaaatgagaaagaaagcatttcatatgaaatggaaattaattcagggaacatatcgaactgtcagttcagcaaaaattctcaatagtattacaaaaatatatattaaaataacttaataaaaatatgctatatggaataataatttgaagaaaaatccaaataattcatcatctgtcgagcgggtccgaacccatgcaaatggtcattaaatgagggaaatagacctgtgcgtatcccggtgccaatcaatgccgaagatattttttcgagatcccgcgngattattggatgtgcttttaaatataactattttttacattttgaaccaaaaatttattaaa

SEQ ID NO: 54882 - DNA, 1177 bp, Heterodera glycines
atgccaggacaacataataatattaatgaaatgaattgcttcgtaacccgtaatattgagttaataattcaacagcaacaacttaaagaagaagtagaaggactcaaaacagaaaaaaatcgactattgatggagacacaacgaattttaactgatcaaacaaaacatattgaaaaaaatgacaagctgatggacaagtgcatcaaattgcaagacaaaaacattgaattacaactacaaaacaacaatgcattacgggaacacatcgagataaagcagaatactgaatcattggtaaagaaaagagagatttggaggaagaaatattgaggatgcacggatcagaaaacagggaccaagaaagtatttgcgctttgtgctatgtcagacaggtcacaataataataaatattaaaaacaaaagaataattttggctactttagcgcaattatgtttgtattccttgtggtcactttgcgctttgtaaccgatgcgctgaagtggtagcaatcgaaggtacctgtcctttttgtcgtgaacaacttgatggagtgtttaaaatttttagctcgtaatgataatacgatcgttaaatacccgaacttatgttgttaaattacatgtttataaagtgattatgatttccaatgcatattgaattgttaaagcttcaccagaattaacaaactaatcataaaatctcttatgttacggtggcctaatggttagtcttccagattgtgaacaaatgttcggttccccaagaagctggcacatttaaaaattatttactttaaggagggacaaatagttaagatgagggggaaaaattatcgataaaaatggggtgggggacaaatggtcgacaaaggacaaatggtcgacaaccgaaaaatgggacaaatggtcgacaacggacaaatggtcgacagaatcgggggcaaaaggattaaggccatttgagctccagtgaacactggcgctcaaatggccggccagagcgctgggactgaaatgtcccggcgctcagatggccaccaaaacggggtcttacactactgactgcagcgaaaagagcacaccaacaagatttgaaaccatcatgattaatcaaaaaatctaaaaaaagagttatgtttagtttgtgtacttactttaactacctacctattaata

SEQ ID NO: 54883 - DNA, 444 bp, Heterodera glycines
atgtttgtgatcggacaaaatactcctatgagttgctcctatttaagtagctctctacccttccaactatcaaaaatggaacttgaacaattttttgaactacccatctttcacgccgacgattctcttcagtcggctttgtctccagccaactttgtgccaacagacaccgtcccctttggtccaaatgtcgatgaagtgccggaactgggtcccaacctgcacgaccaggtagtggaggtggcagaagacgtggtttcgctgcgtattcttctgaccccggcggccaaaagcgcgtcgactgccaccaataatatctcgttaagtgggttgggtttgccaaggaccccaatgattgaacatgtgttgatgatttggtaatttgatttctggatcatctgtcttcagccccctacttcatagtcgttgtcaggagtcaataaa

SEQ ID NO: 54884 - DNA, 901 bp, Heterodera glycines; identical to SEQ ID NO: 4555

SEQ ID NO: 54885 - DNA, 315 bp, Heterodera glycines
atggaatccgttgagacggcgtgtggacagcgtccgtttggatgtgcgtcagctgttcatcgccaccctggcaatgatcattctgctgtttcttctgcccaccatcatcgtttacttcgtcgtgttcggcacagtgagtcaaaaatgatggaaatttgaaaattgccaacaaatttactttttagctttggctgttcgtcgactccgtctgtcgattgctaaggcatttggcgcggacaattcgtcaaacactgataaaattgtgaacgatagcaaattgtccaattttgtaaatcgaaaaaatagttaaataaa

SEQ ID NO: 54886 - DNA, 1729 bp, Heterodera glycines
  unsure (1)..(1729): unsure at all n locations
tcgttgctgaagcgttcgctgattgacaattggcgaaaccccggcctcacccgagccaaactcttccagaagctcatcatgggcgtgttcatcggactgttgtacatgaacacacagttgaacggtgtcggcgttggcaatttgaacggggccatgttttagtgagttttttttgtttgtctcttccacttgttacagtattttgtcaagagtacatttttgtaggttaagcgatgctatgaaaaacatatcatttttcaaagttttcgtccttttttccatttttttggaaattttttttgtatatctttcctgaaatcatttgttttcattactcattactagagtttttttgtaaccattacaaaaaaaactatttaaattgtaaaaaatgaatttaaagaatttttattagcaaaaaactctaagaattaagaaaatcattttcccacatttttttctttgtttattttttgggatttattccattttttctttttcaataaccccaatgtcacatcgttttcccctccttctgaagtatcatcgctgaactgacctactccacgctgttcggtgtgctcacctttttccccgccgactttccgctgctcgcccgggaataccacgacggattgtactgctcgggcgcctattttgtcgctcggtccgcctcctatttgccgctgttcaccatcgacggcattctgatggtgaccattgcctattggctgatcggactggtgcccaccgtgggccgctttctgatcactttaggtaagccgtgggggaggggaaggagtcaaggacgtattccaacagggtggggttgagttgggtgatataaacggagcaacagaggggcaaaaaggtcgtcgtcacgctgatatcccaaacgttggcattttcttagtctcctggtagtaagtctccgcgtgagaaatgggtganaacctattcctttacactgtccggacaatcggtcaatggacaaaccgtaaatggacagttcgtcaagttattttattttcttgatcaaaatcaaaaaatatgcgagtgtacgattttttaatgcttggttttttacaacatttctaattacttgacaattcaattaaatttatcattatatagaaaacatgtttaaatttacaaaaatcttgtgtttttattgctgacggattgtcggggagccttcaaaatccatgcgtttcgggaatgttcaaatataggctttatgtttttcatttgccattttgattatgtgctctcctccgccaggcatttccttcctcgtcgagcagtcggccgttgcgtttggcgttatgttgtccgccgtgtgcccttcttaccccgtcgccgtctccgtggccggcccaattctcaccattctgtcgctgaccggcggactgtacgccaacgttggctcgctgccgtacttcatcagttgggtccgtgccaaactcctaaaatctgagtccacgcccccattttgtcgctgtttcaggtccagtatttgtcctggttccgctacggcttcgaggcgttcgccatctctcaatggagcggtgcgtttggcgacgacgaagcgcacgttcgttcggtgctcgccgctttctccttccgcccggaggccttttacacggatttgggcgcgatggcactgttcatcggcatgttctatctcatcggctttttcggcctgcttttccgcgtccgaagggcgcgc

SEQ ID NO: 54887 - DNA, 2378 bp, Heterodera glycines
tcgaccccttccaaaagatgtgccattgtcggcgcgggtgcgtgtggcctcgcatgcgcccggtaaacaattcaaagaccctactgtaatcacagataccgtatttggtgtcaacgatttatcatggggcgtaggacggatttaaaaaatgatttatatcccgactatctcggtttacgttacggtttacgggttgactgtcctaataatggtaagccatttcatggttcccctgttagatgggcacttgcttacggcttccgtcccgtagtgatcgaacgacgacaaaatttgggcggcctctggcgttacactgacgatccgttacccgacgaatgtataaaaactaaaaaatgctatgtgtctctgccattttggcatttcgtttcctcccatttccccgcaaagtggccaccgtaatgcgctgtacagtaaccaactcgtccaaagagttgaccgcgttcagcgactttccaccggactctcagctgcccaattacatgcggcacgacaaaatgctcgcctatttggcggcatatgctcggcaccacaacttggagcagtacatccagtaatatttgggataaattacaattaaaacttctcgcccaaattttggcagatttggcaaaaaagtgaccaaaatttgtcggtcgccaaattatgccgaaacgggacaatggacagttcagtgggaaaatgaagggaacggagagcaaattgaagacactttccaatgcgtattggtcgcaattggacaccacgcgaagccgaattggccaaattgggaagggatggcccaatttgggggaaaagtaagcgaaaaggggggggatttaaaaagaaattacatcaaaaaaaaagattttccattcgcatgactttcgccgtgtttcgcctgacatggaacaaaaaagtgaatgtcgtcgtcggggccagcgattcggctgcggacatggcggtggagctgagcagagtgtccaaggaggtgaggggcaacagcagcagataatttaaaattaaattttcttgttgccgagatcggttcctcagattagggttactccccgacccctcggggggcaaaatgtagagctccgcggaccgtcgggggggggcacgtcaggggtcgggtcagggaatgggcccaaaatactgggtccgagaatgtctggtccgaggaccgttgggggggacacgccgggggtcgagttggagaataggcccagaaatgtcgggcgtcggggggactcaaggagatggacatgttgggagtcgggccggggataggcccattcggggtcggggagaaaccctaccttagatatatccatttttattggaaatggacccgaaaaaaaactccggttgagctaatttattttgtgggcactaattggcgattctgattagccaacaaataactgctgatcagagggcaccaaattgcggcatttgatttccaaaattgccaaaaaggtgcttttgtccacccgccgtggcttttgggtgctgcgcaaatgtgccgagaaaggccttcccgtggactccgtgctgaccacgcggttcagcgcgctgctctcgcgctacgcgccccgccgcttcgacgagtggcgccgcgtcagatttttgcaaaaggtgctgcacaatttagaggccaggacaaaaatttaagttctcggcattttgtccatttggccataatccgatatgactgactgaacttatttgaaaagcgtgccatgctttttgacattccgtttaatcgctttcatatttctgtctgtattggttacttatttatttaaatttatgtttggtgccttctcgtatagtcaaacggagaaagtgatcaaattgatcagcggtaggagggcaattgatgaccagcaaaagttccctaattaattcattaattaattgatgccaggggttggatcatgcaatgtacggcataatgccggacatttctccactggtcagccaattcttcacggtcaacgacgagttgccaggccgaatgttggccggcatggtcaccgttaagccggacattggccattttacggaaaacggtcactgatcattgactattacactgatcacttatagttgataaatgcttctttgcacaggcattgtatgggcggacggcacgcgcactgatcaagtggacaatgttttgttgggcaccggctatcgctttgacttcacactgatcgagcggggacagctgctgatcagcagcattgatcagtcgtcggacaacggcacgacatcgatggcacagctgtacaagcacatgttcccactgggcagctccgattggaacacattggcaatcgtcggaattgtgcaggcagtgcaaaatgccaaaa

SEQ ID NO: 54888 - DNA, 606 bp, Heterodera glycines
aaaatttattggaaccaatttgacgatgcgaggaagaagcaattgaatgaattttatgctgttttggctcaaaatcgaagtgttgatcaattcttcaactatttttttgatcaatttggcttggcttgtgatcagttttttcatttttgccagctcggtgacacaataatgaactgttgtgaggtgctaataatcgcaattaaattttaattatatatttaaaaaaaaagatttttgttccaatttatttgattcgtcgtggtcgttgctttcggagcattgaattgtaccaacaaaattttgatgagctcggaaaattgcgcgttcagctgcgtcatccgtaccaaatggaccccaaaatgacaacccaagaagttttttttacaattaaaatttttagtgaacattatttaaaaatttttattaaaaattaaaattttcattaaaaattatttaaattttatttttcccaggaaattatggcttttattgcggagtataagccacaacttgcgccattcccccgctactatttgtacccaggcatttggacaaaaatgcgtttaaatgccaagcacatcagcctgtttcctgctaaagaagttg

SEQ ID NO: 54889 - DNA, 174 bp, Heterodera glycines
atgcaaattgtcaattccgatggaaatccattgccaattccgcaaaatccgttgccaaacaaagtcatcggattagaaggcattacaatcgatgtaatgccaatgtttcgcgactccattgattgtgatgtttttgaataccatcgcttttcgccgcttacgccaagtcaaatg

SEQ ID NO: 54890 - DNA, 400 bp, Heterodera glycines
atgccgcgcccgcgtgcctccctcggcaccgccgccgcaatgccccttcatcagcagcagaaaatgccacagcaggaacgagcggtgcccgcgggcggcgattgggaaggcaccggcgcacagcaacaaacaacaaccgccttttgctttgtgccgttgaaacggaacagcggcggcggcaccagtcaaagtgagggagaaatggcggcggcagaaagaaaaatgccaatataaacattattaagcatattctgataattgggctaacaatttaagttaaaatgtcattattttggcgttttgcaattcttatttgcattaaaaaaaatttatttgatattttgtgacaagaaaattaaaaaagaaaagaaaaaaatcattttaaaaatcaatttataca

SEQ ID NO: 54891 - DNA, 1217 bp, Heterodera glycines
gccaatgtcgcccaacatccgccgatggtccaaccaccgcagcaccgtccccccgcttcccatccgatgctttcgcataaactcgaatttccctcgcccacccacgcgtcgcctgcgtccgttgtgcatgtcgttacgcaccatcagccccaattcttcggtccgtcgcacaataacagtctgaacgccaatccgatgaacaacgggacgactccgccagccattttcgacttccaaacgcaacagtttcgggaattcgatttcatgaacagtccggaagacccgatgccgtccagcgagtcgggcggatatggcggcgatggcacagcatatggtcgcgtgccaatgggtggctatcatcaccaccatcagttgcacgcgcatttgcacggaggggagcacatagcgtacgcggaaggggacggatgcgcagtgaacgaagtgacggcagtgcagcaccaccaacggcattatggtgaggggagggtgaagtgctgctgcttaactttcgtttcattaagcctatcagcagcagtgcccttgcaaagagtgttttgccgcgtgccgtcctccgcccccaccggtgactcatccgccgtaccctccgccgccgctgccgtcctccgctgctgcggttgaccaggcaaatgcgcaacactacgcaatgtgcacttatgacaacagcagaaaaggaatggccagtggctgctgtcagcgagccgaagcagtacaacaaaaccagcaacaacagcagcaacaacaaagacagcagcagcatttgtatgaggctccaatggcagtgcaacaaacgcagcagcaacactttagggaggagcagcacggacaacaccagcacgtgcttgtccagcatcacccacagcagcatcagcaacctccgcactttcaccctcagctgcagcaacaaatgcaagcagtacaccacggggaaatggaaattgggcatgggaatggcggtgccatgcatcaggtggacagaaacggcaccaccatgaccttttatgtatccttttaaggttgttcatcatggtcatcccaatgaaaatgaagcgcaaagagtggggccgccctccggcggacatttgtctgctggaatgctggaggacattgagctggacgaagtgagcagcacgtttagcgacttgaaaatgagcggaggaagagagggagacggagcaggaggaggaacaagcagatga

SEQ ID NO: 54892 - DNA, 394 bp, Heterodera glycines
atgcggtgcgaaggaggcgagcaactgcgcaaacggtaagggaatgaatggcacggatcgagttagcttatctctccttccatttattaataggagtaggcttttcgcgtgtttttctttcagtgagacaaataaaactgctgaacaatcgaatttcgaaatcccccctccccaaaaatttaattttcgcatcacataatttgtttttttagagaagtgcgtttgtgagaattgcaagtgcggcgccgactgcaagtgtggccagtaaacgacaccgaagaatgggccggagggttgtgataagaagagcaaaaaacagttaccttatttaatttgatcgtgaccgaccataattttgacatgtttattttaaaatgctgattgatacaataaa

SEQ ID NO: 54893 - DNA, 676 bp, Heterodera glycines
ctcctcctccgacttttcattctctgtcgaacaggtgggcgttctgtgcgaaattctgcaacgacacaatttgttcgaccgactggtgggacattggcacaattagacactttggcacttctaatcactgcccaaaggcacaatttttatggaccattcccccggtggacgaatatcgcttcagtgagggagtgctcaaagctcaggcggttatttcttttcaccggcacaatttcaaagaattgtatgccattctccagtcgcacaatttttccccagaaaaccatgccgaactccaggtcgttggaatggggcaaagaaacaattttaattgacattcaaattttaaaagtttaggagctttggatgcacgcgcattacagcgaggtaaaaaagtacaaaaagaaagggaattagacgaaaggccaatcgaaagggattcaaatccgaccaaagaagggcattattgcttcctataattaaggcagaaaagattcggggacgcgaattgggagcagtgggaaaataccgaatcagaaggaaatttcctttgccacggaccatttgggacggggaagaaacgagttattgcttcagagtgagttggaaagggacgagttggagcagtaacaaaaattggcgagaccaaattgccctcccttccaggagaggtccc

SEQ ID NO: 54894 - DNA, 1960 bp, Heterodera glycines
gaaaaagaaaataaagaggatgacagagagaaagatcttctgaaggggagggaaaggagcgaagaggaaaagaaggagcctaaggaggaaaaagtaaagaacgagaaaagggaaggcgagaaagacgtagaggcaaaggatagagagaagaagaaggagcaggaagagaagagagacatatcagtcaaagagaaaaagagggggccaaaagcagagaagggagagaaagaaagggaaaatgagagagaagagaaaaaggaggcgaagaaagaaaaagaggaaacaaaagaagcgacggaaactgatggagaaagtgaacagaaaaaattaaaagaagagaaaagagaacccaaagaagcaaagagggagaatgagagacaaagggaatctgaaatgaaactaaaagagaaaggggaaaaagagacaggaaagggaaaagaagcagaaatggaggaagtgaaaaaggcagaaaaggaaacaaagaaaggagtagttaaaaagtgtaaagaagaggaaaagaaggaaaaggaagagaaggaggcgaatgaggagagagtggtgttaacagagacaggaacagcggaagacgaacagagcgagaagaaagcgaagaacgaggcgaaaaaggaagcgaaaaggcaggggacgacggaatcggagagggacatgcggatttcggaaacatcatcagaggaagaagaagcggtaccatcatccggaggaaggtccgaaaaggaggaaattcggacgaaaaaggatgaacagaatgaagcgaaaaagagcgcagaaaaggaggagaagaagcggaagacggaagaagaaagagtagggacggaacataaagaggagacggaagtgggggggaggaaaaagcagagggacgaaaagaaagaagagaaagggaaccgggaggagaaaaaagatgaagagaaagaggagggaaggaagagacaccatgacgaaaagaaagcagaggaagagaagatgaaaaagcaccgggaagagaagaaagaccatttcgagatggacgagttgaaaaagtggaagaacgaacatggtttcgtttctgatgaggaagagaagggaggaagagcggcactgaaagaaaagttaacacggaaagagttggaagagatgaaaatgaatgcgggaaatgaggaggaaaataaagtaagaagaaagttgaaggaggaagaaaaggaaaagaaggcagagggcaaagaggaagcagtaaactcaagcaatttggcaagtgaaaaggtaaaggaagaaaaggaggaggaggagacgaagaaggaaacgctcaagaaggaagagaaaaaggaagaggaaaagaaaaagagaaaggaagagcagaaggaagaaaggggagagaatgaggaagaaagaaagaaagacaaagggaaagataacaaggacaaaagggatgagaaaaagacagaagaagaaaagaaggacaaagaggaggccataaaaaaagaggaggggaagagggacgtgaaggaagagataaatagagagggtgatgaagaaaagagcaacaatgaaagaaaagggaaaaaagaaagggagggagagggagaggggaagagtaagctggaagaggacaaacagaaaaaaaacaatgaggaaacgaggaagagagaaaacgaggaagagaaaaaggcagatgaagaagcaagagaaagagagggaaaaaagacagacagtgaggagacagggaagaaaggaaaagaggaagagaaaagagacaaagaggagacgttaaagaaggaagaagagaagagagacagtgaggagacagggaagaaaggaaaagaggaagagaaaagagacaaagaggagacgttaaagaaggaagaagagaagagagacagtgaggagacacagaagaaaggaaaagaggaagagaaaagagacaaagaggagacgttaaagaaggaagaagagaagggagaca

SEQ ID NO: 54895 - DNA, 851 bp, Heterodera glycines
atgcgtgtgacggtgtgccttacagctcgaaacaagggacaaaactcaagccgtacgtgctggtcaacagaaagcgatcgataccgcaaattgtcaaccaatttgctggaaattggtgatcaatttcgctggctcgatatggatgaatgatgacacaacggaggactacatgcacaaaatcatcggggcaaagctgttcgttggcgaacgcctcttggtttgggatgcgtttggcagccataagagcgagagaacgacgaaggtggtgaatggattggaagtggagacggtttttgtccctggtggctgcaccaaattcatccaggtaccaaatcatccttcacaatgaaattcatttttcttccctaggctcccgatgtctcgtggaataagccgtttaaggagcgaattcgacacttctacagcatttggatgtccaatgaggccgaaaagaagttcacgtcagcgggaaatccgaaggcacctgctcttcatgtggtacttgattggatccaccgatcatggcaggaaatctccaaagaagtgatcatcaaatcaattaagggtcagtttaaaaattaacacaggaaaaatgcctaaacttttaagtctgtggactgactacgccattggacggaactgaagacgaaaaaattgcttgcttcaagccggaaggagcaattggaccgatagggatcaaatttttgcgcgagtttagaggaaatcaaacaatgagagatggacgaaatgatcaggaggaagccgcctatctgatgatgatgtagagatggatggagtgggagatgacgatgaattgctcatttgttaaattttactattgttttttgaaa

SEQ ID NO: 54896 - DNA, 75 bp, Heterodera glycines
atgcgcgaactgttgttcaagaccgccaaccaggaacagcacactttcactcttgaggtcgaggagaacgaaacg

SEQ ID NO: 54897 - DNA, 339 bp, Heterodera glycines
aatgatttggctggtgctgatgatggtgagatgttggtgcagcctatgcacatgaacgatcatccggcggcggcgcaagcgggctatgtgaacgaccacgctgcacaccatcaccaccatcatcatcatcaacaccaccagcagcagaatgggatgctcatcgatcacaacgtgtggcagcagattcttgctcccgtacaacaacagattcagctgacggcgcaggattacccggccatccgtcgagtgggaacaacaaaaacatttaaattcaaatttatgatttcccctcatttcagctcatggcgctgggctttccgcgaaatttgtgcatcgaag

SEQ ID NO: 54898 - DNA, 751 bp, Heterodera glycines
atggggaaaacatgcatttttaggctgaaagaacgtgagaatgaaattctacgcctacggaagagtccgaatcgacgccacagcccacagcacaggaaaagtgagacgaacgggcaattttaagacctaatgagcgaccaatttcaactgctttttttagggaatatctacccgagtttgaacggcaacactcccatcacttcgttgtcatttctcgggtgcggtgcgatgagtacacccaacgatgaagtatcataaaaaaacattcacaaaagattaattataagcaaaaatggattaggagagcgccatgaaactttatgttggccatgttgagtatgaacgccaaaaacggcatatttttgatgagaaatttcaaaacccatgttttagtatacagaggaatttcgcatattagtattcgccagttattgtacaaattgatgattatgcgtttagcccggcggcatgaacttcaacatggccacagcaacgccggcgaattttggcattcgaaacgaaaacaatgacgcggagcagaacatcgaagcgctgttccggacgcaaaatgtgcaggaggagacgccacttgcggggcccgcgttctgtcctacgacgccttaccttttcgcaatggcggggagcaacagcgaaaagtgagagacaaacgaaaaaagcaattttcagacaaattaaccaaatttagacgcacgggagtaacgccgaaatacttctgaactgatctaatgta

SEQ ID NO: 54899 - DNA, 1166 bp, Heterodera glycines
atgaagaagcccgccgttgtcgaggtaaattcactcagggtatttgatgggcggggagttctgttgatttctttgccctttaactttgtgaatggcattcccatgacccattggcatgcattttctgaacaaagaggcaatcccttcccatacggcaaggcggtcattcattttcattccaaacactccaaaatgggaaaaaatctgagaaaaattcctgtcgaatcgctttttgaaactactaaaagtcttcgatttgacatccgctgggccactgttcgggtgtccgcctcatttgaccactatgttcttaagtgccaatcagattggctcttaaaggaaattgagcgtctagtgattttacatcgaaaagtattaacggctggagggaacatatccaattctaattaatgacaattacaggctttccaatttattaagattgagttcgtggcggatgaaaaagaacgtctgttccaagtcgtttctcagttgaacagcgaacgccgttcgattatccaccgcgccattgcgtcctattttggggttgacgaaaagtttggggcgaacttggtcaaagacggtgccactgaccacgaacaattctgtgggaagctaaacgctatggttgaccagttgatcgactacaccgacgcagcaaaagtcgcagtcgcaggagactgtaagatggcgagcacagaaaattttgaactttttatagcatagcaatcccccaagaaatcccaaaagtgacacttttatttctggttttcgagctcatcaattaaaatctacatccattttgtttgaggattggtttcatcaattttaacagtattaattactacatttatcactcagttttgcatcaacaaggccagtgtgcgtaccgatctcttgcggatatgaatcagatctcaaatctgaaggcgcacatttctgagcttagtgctcagaacttgacccaacaggcgcaaattggtgcacagcaggttcagattgatggctttcatgcccaagttggtaatcagcagaatcgccttcaggctcaagttattgctcaacagaatctgatcggtgaccagcacaatcagatcggtggccttcatgttcaagttgctgctcagcaacaactggatcggtggccttcaggcccaaattggtga

SEQ ID NO: 54900 - DNA, 205 bp, Heterodera glycines
attaatggaaaagcttaaaaatttcactcttgacgatttattcaaagtattggctctaccagacaaagaattcgaagaatggctcagagaacttaagcttctacacaccactcgtttttgtgactgtggcaacgaaatgagctacaaatggattaaagaccggaatcaaccgctttggaactggccagcatacgaatacaattga

SEQ ID NO: 54901 - DNA, 383 bp, Heterodera glycines
atggattatgcggcagacaagctgacggagacgagagagtatggaaaatattcgacagacaagcagacggtgacgagaacatacgggaaattataaagcagagaagcagacggcggtgagagcgaatgggaaattgtgcggcagacaagcagacagtggggagaaagtacgggaagaatggagaaaaggacacgtacgcaaaagaggaagaagcatgagctggctttaccaaaactcaaatcaatgatcaaacgaagcgtggcagagaaaaataaatgacttttaaaaaatgtattattatgtttccagaaaattatggccagaagaattgaaaagaagaagaaaaatgcttttttgacaacactctcaccaaatttgggatg

SEQ ID NO: 54902 - DNA, 1290 bp, Heterodera glycines
atgataccggtgatcactcccggcttcacggaaagtaatagtacatatctattaaattggcacacagcaaaaatcatcaaaaatgcacttgacgacggtatttatttttttaattatttaaataatttctaaattttgtaaaagttttatttaattatctttaaataaaatactttaatttaattgtttatcatgtttatttacatatttaaaatattaaaataatttccaattctatgcttttcctatttttagcatttaaattgtttcattcttcaaaaagtggaaatgaaaaattgtctatgctctttgaacaacaaataaaattccacgaaaaggtatattggtaattataaaattggggacaataattaattaggtaaataccgtatcctataaattacagtattcacaatattttgcgatcacttgtgtcgcatccgattcaaatatgtttaacgaattttgcggatttgttgttacacgcatacgcattcaacttactcgcctcaccgactgcaggcgtgattatgttgatttttgtcacgtgcttttgttaaatggctgtccaccgtatactgcacaaaaatacacaaaaatgtacggtagtgggaggttatggcgttgtgttattaaagaacaaataagctaaagttgatttttcccaaaattaaatcattccgataatgcagtttaatcttttttaaatttggaatttttggatgcacctcggaaatcgcgaatatacggtagtaggttattattaaaatatgaatttatttagctatagtttttgccaaattaaatcattccgaaaatgcagtttggtcatttagaaattttgaattttttaaacacattggaaaagccgagactaattaccgagtctcaggatagattcattttgtataatccgcccaataaaagaaattcggaatattaaatgtctgttttaaaactttggagaaaattctttaataaaactaagaactatatttagcaggtgtccccaaattaattttatattttgcatttttcccatttagttcatcaaaaattttctacaaaacttggcttgtcagtgtcaaaatgaagaataacacccaaattcaaagccaaaaaagcaatgtcggaggacagttacagtttgaatttgacggaacaaaaaattcaaaaacatttcgccagaaacaatataaacaagggacggatgagaccgataatcaacgtgattttgtcaatttagaatctgaatacattggcaaacagatagtagatgacttaatttaa

SEQ ID NO: 54903 - DNA, 635 bp, Heterodera glycines
atgatattaattgtgtgtggtgagtgatgagggtttagtgggcccaatcgattaccaattttatcagattttattgcaatcctttcagttcatcgtacaaacatatttctttacatttttctaatatttatttttatttaattttttaactaaatatattaaataataaatgcacggagaatatacaaaagattcgcacgatattgaggtgaatgaaagaaactataaaatttaaaaattctttgtttccttctttaaccattctccattcattttctctttttatttgatggaataaaataattttttttttttgaaatttcagtaaaatttcaaatgttttttcatccaatcacttttcttaataaataaataaataaattttaaaaaaacaactttttttactggtcgtcggtcccactgccacccaatatttttctaaatgaaaatgaaattaaaattttttatccaaataaaatattaaaattgataatttagtcacttttgtcattgaatccacgcatacaacagaacgcgacactaaaaccgagtgcggacacaaagctcgtaaagcagcaatggaagcggaatgtgaacaaatcatgcggggtaaaagcaacaaaaaactaaattaa

SEQ ID NO: 54904 - DNA, 156 bp, Heterodera glycines
atgattgcacagaattgccgaaaaaattcgagaccaatttccgaatgttgaccgactaattgccaaaacgaaagccgtctttgtcaaagcgccttaccgagtcaaaaaatttggaaatgtatctcatatgcaatttcaaccaataaatttgaagaa

SEQ ID NO: 54905 - DNA, 309 bp, Heterodera glycines
agaactcattttagcgaaggtgtaaaggtggccttcgtcattacaattttactttttgttttttggttgcaattgggttagccatttctggaaaatgtccaaatcagaatgtacatcaaattggttaactattaaaaaataataggatttggaataagtaaaattgtaaaaaatgagcgaatgttaattaaacctaacttatgccaagtggcgagggatccctcaggcttagttttaagaatcttaatttttaaaaaagcacatttttctatttttgggttggggcccaaacgaccccggggcccaaaa

SEQ ID NO: 54906 - DNA, 990 bp, Heterodera glycines
atggctatcaacctgcaggacaagcgtggtcttctcaaccaaattctgggagaagccgacataacagtaacgactagtggcctaacgattagcggtcctcgcctctcctctccccgttttgtcccatttgatgagagcggcagatgcaagtcttgtaaagggactgaagtggaggtggacattatggtcaccaaagagggtatcacaatttggtgtacgcgaatcgcccgagtacaattcgtcccgtttgatatcatatacgacttgcccggccactgtttcttccgtgtaaagaacaaggcacgcgtgttcaacatcccctacggggacttgccggccgtcacatacccaaaccaagaagcactgatggaacagcaacaactgctgcagcagcagcagcagaacgacttgcgacaaaaggccaacacggcgctggacttggtggagagtggactgttggctgattcgttgcgtgaagatgaagtgcagaaggctgagctaaagcggaaggcaaaagttgcactcgatctgattgatgccggcttgactggcgatgcactgcatgaggagggacaacgttggaagaaggccaaaactgcactcagcgttcttggaaacatgctgctggccgattcacttccggaaaagaagactgcggagctcccgctcccgccagccgaaaaaattgaatcacttccacttccgccactcgaaaaaatgaaaacgcccccacttccgccaacactcccaccatcatcaaaaatggaaagtgatgagcaacaattctacgatagcatttctgcggccaccacgatgatggacacttcaatgcagcaggcgccgctcaaaagaaagcaaccgactccaaaaggcaaaaccaacggaatgaagaagtcagccgaagaggtacagaatctaggagacattgacaagacacttgacgaattttttgagagcgtcaacgcagcgacgaacaatttgtctatataa

SEQ ID NO: 54907 - DNA, 2426 bp, Heterodera glycines
caaacaatcattaccaaaccagtggtgaaattgtgttcacgatttccaaattcaaagcattttcggaaggacgaggaccacattatttttacagtgacaaagtgttcatcaacggaatgccatggaaaattgcgattaagcacgccaaaaagggatctcttggattttctttatgtatctatggttataaaaatgtaaacgaaattttgatttacatattcagacacctaaaaattgggaatatgaagaaatcattaaaaaaataataaattaaagtttttttagattttgctattagctgcaaagcagaattcgaattatccattgtttcatcctcaaaaaacgatgaagaaattaaaaagtcattttttcatcatttcactgatgggggaattagggattgctggcctcaagacaattatgcatttggaaatttaaggaaaataaaaatgatttgtattttattaaaaattaattgaaaaagttccaatttttattattgaataaatccagattttataattttaatattaaattttagaaactaatgaacaaaggaaaagttattataatgtggaggaggacacaatgacattcaaagcgaaagtgaaagtgggaaaaccttttccaattcggtaattaattacttgtttcatttgagtgttaaaataacacaaataaacaaaaagtttattaatttgcaattttctttttgttgtgcttgaatcctaacaatttttagattttggcggctcaatcaaatttttttaaaactttattttttggagagaatgcatatgaaactcccaagattgaaattaattctattgaaaatgccgagaaatgttttgaacaattaatttccgtgataaattcaccgaatttcgctgttcatggtaaaattgaaagaaatatttaaatgccaataattatttagaagattgtgttcaaaatgttcttcaattagccaaagattttgatttgtctgccgttgaaattaaccgatgccgcggtcaaattctttttaaagtgaccgaatttaggtcattggaaataaataaggaagtgaaaagtgaagaagtgtccatcggcggaatgccatggcaaatttcgattcaccgtaatgctattgactatttattctatcaagtgtccagtcgtggaatttatggtgaaatgaattcattaattttgttgataaattgaaattttaatttcctgaaactccaaatcttgattatttcactttatttttcagattggaattttgaagctgctatcgaatttggcactgtttctgccacaaaaagcgatgaatggcttatgcggagaggaaatttggaatcatttagtaaaaacagtttatgggatagattttgtagatattatgaggtatattatgcttatttttttattttctcaatagtgaaacttaatgaatttttagacccagcaaatggcgtcgtatacgacgaaaaagaggatgcaataacactcaaagcggaaatcattgtgaaagccgaactgaaaaagccaatcatgtaattaattaacgattaattaatgccatttaaaataatccatttttagtgagtttcaagcagaagacaaattaatggttaatggccaagtggtgaatgtgaataaatatgtaagaaatgttcaagattttgttttttgaatttaacgaacaaaccctaaaactagtaattgacaatgataaaaatgcagtgggaaattttgaaaaattaatttccttagtgaattcaccgagtgccgagttggacggtaattttgcaaggagcagaatgggcatggaattcccatcgaaaattgaatgaaatgatattttacgctattaatttgcaaataaaactcttaaatctgattaaaattaaatgaatctaataattttaaattataattaagatgattcggtggaaaatgttcttctgttggccgatcgttttcagttggattctgtcgtgaatcgttgtgcacattttttggtcgaaaaaagcaaaaagccattcattcacaaaattctgctggcacattattactgaataattggcatgaaggtaaaaaatataaatagatttaataatttccaataattcaggagaaattgatgaacgatatggttcatggtattcctgttgaagaatattttccagtattaattatctcattgaaaaattcaaaatcgatgaaaaagcatcgaaggaaaataatcttaagaaaatttatgagtataaaagtgaatatggttctgtcaaactcaaagatttctatcaaaaaatattattattttcgagcatttaaagtttgacgctgaattgatggatgaactgaaaagtacatcggaaaagaagaaagtgattcggaagaaagtaacacggaagggagtgattgagaagaagaaa

SEQ ID NO: 54908 - DNA, 312 bp, Heterodera glycines
atgggcaccataatttttttttttgaaaattacaaagggattaagtgcacaatccgaaactttttgaacaacagttccaacattggcacaacaaaagtcaaattgtatcggacagtgcggcaaaaacggagtggcacggaacggacaaatgagcgggtggacagagtggcagcggagcgagtgcagtgccagcagggcgggcacaattttttgtgtttttcgacagtggcactcgcgctagcgcattggttgagaagcggacggaagggcagcggagcgagtgccttttttgggcatttgcctcctctatag

SEQ ID NO: 54909 - DNA, 817 bp, Heterodera glycines
atggcggcggtgccatccccggcggcggcagtgagtacggcaatttgccaccgcagcagcggtgccgaaaaatccaacagaagctggaggagttggaggccgacctgaacatcaaggaccagtcccaggcgggcatgcagaggatgcacgtggcgtacagccaaaacccgcagttgggcgacccgacaaaggtgggccaatggcacagaagcataggcatggcatttttcggtttattttttcaaatattttcatttttcatgaaatttttgggccagggaaggcaaatggttaaccttttttgcttttaagtcaattttttatgaatttttcttcggtgacattttccgatgtaaattcctttagattttttttgaaaaatgcaaaaaatccttaaaacgcaatgattttaagcaaaattttcccactttttttgtttctcaggcagcactttagttttgggttaaaaaaacaagaaacccgttttttaaaaattcaaagttccgctttggaaccacaaatttctttaaatttttattgtttttgaatgaaaattgaacaaatagacaatgtttaaataaaaaaccaaaagaatgaattgcgtttaaaaatttcaggtggcggagaagttgttgcagaaccaacaggagatgcacgtactccagcagcaaattcaacgattcaaggcatggcaaaagcaaaattcacaaaaaaataatcgaggatttggttttacggcgggactttcggattttttaaaagaaagtttgaaaaaaattttggtttttaaaactttgaaaaaccgctaaaaaataaa

SEQ ID NO: 54910 - DNA, 688 bp, Heterodera glycines
atgtctgacaaccgtggtgcctccgttgcttcgaccggtacgaccaacagtcaggagtctcaagtggcgtctccagtgaaagccggaaaagctactacgaagacgacggctagcggaaagggcggcaaagcgaaggcggacggaaaagtgaaggcgggcggaaaaggggcgaagaaggcgggcggaaagggtggaaaagtgaagattgctgcgagcggatcgaagaacacgcgctctgctcgtgctggcgttgcatttcccgtcggacgtatccatcgtttgctgcgccacggtacagtttttggagagagaggattttcaatggaattttctgaatttcctaatcacaggtcgccatgctcagcgcattggggccggagcgcctgtctatatggcatcggtgttggaatacctggcggccgaagtgctcgagctggccggcaacgcggcgagggagaacaaaaagttgcgaatcaccccgcgccatttgcaattggctgtgcgcaacgacgaggagttgaacaaggtcagatgcagtcggtggtttttgcattttttgaaaatccattgaaattttcagcttctcgcggaggtcaccatttctcgtggcggtgtgttgcccaacattcacacggaacttttgtcgaagatgcagcagaagaagcagcagaacgacgacagtcagtga

SEQ ID NO: 54911 - DNA, 576 bp, Heterodera glycines
atgcagtacaatgcttttaagccccgccgtgaggcgggacagttccaaaattttgtaccacattttactgtggaaagtccaagtaccttattggacaactacgtgtcaatgagcacagtcgcctttggccagttgtggaacggaaaaatgggaatatcagatggggtgcgctcttttctaaaaattcctcttttcgtctaaccatccctcccttttgtgcactatttcgtttcaaaattgaatcattttttttggctttttgaaataaattgtgaaaaatatacgaaaattattttagcttttaattatgcagtacaatgcttttaagccccgccgtgaggcgggacagttccaaaattttgtaccacattttactgtggaaagtccaagtaccttattggacaactacgtgtcaatgagcacagtcgcctttggccagttgtggaacggaaaaatgggaatatcagatggggtgcgctcttttctaaaaattcctcttttcgtctaaccatccctcccttttgtgcactatttcgtttcaaaattgaatcattttttttggctttttgaaataaa

SEQ ID NO: 54912 - DNA, 508 bp, Heterodera glycines
gcttaaaagcattgtactgcataattaaaagctaaaataattttcgtatatttttcacaatttatttcaaaaagccaaaaagtccggaaccaattttaaaaactaaaatagtgcacaaaaggggagccgccgcacggcggggcttaaaagcattgtacagcataattaaaaccgaaaataattttcgtatatttttcacaatttatttcaaaagacaaaaaaaatgattcaattttgaaacgaaatagtgcacaaaagggagggatggttagacgaaaagaggaatttttagaaaagagcgcaccccatctgatattcccatttttccgttccacaactggccaaaggcgactgtgctcattgacacgtagttgtccaataaggtacttggactttccacagtaaaatgtggtacaaaattttggaactgtcccgcctcacggcggggcttaaaagcattgtactgcataattaaaagctaaaataattttcgtatatttttcacaat

SEQ ID NO: 54913 - DNA, 183 bp, Heterodera glycines
atgcaggaacatttgccgccggctgacgcaagctttgagctgcgcgcttcctacaatgaagccaagtcggttgctgatggacatgtgacggagaaacaacttttggatgtgccagcgcaaatgacgaaggaagtgcttgcgatgttggaggagaagcagtcgctgcgattcttgtcaaaagag

SEQ ID NO: 54914 - DNA, 424 bp, Heterodera glycines
atgagcacacagtttttaattggtgatgttatttgggtgaagcgcggatctggcgtccaatggccagccctggtgagtgttccgttccgttcgttcatccatccttttagccgctttacaaaatttgccattttaattttttaaacttttttaccccactttaagattaaaaatgttagcgcactggaagtgacatatgttgaatttccaattgtcagcggcgacctgcagcaaaaagcagagattaaaactgtgacaaaatttggggtaagcagtgaaataaaacactgatttaaatgctgttgaaatggatttataaaaaaggcgtttattgcggtcgttgatggtcgtggccacttactccccccccggctctattgcagttcacatgaccataaaattgacaactttgatacataataaa

SEQ ID NO: 54915 - DNA, 363 bp, Heterodera glycines
atgaaatatgcattctattattctattatattttccgccttttccaatttgcatgtaaaagcattcccgccaaaagataaagaaggtaaatctgtaaatatattgaactttctctaagttcctgttgtattcctaaaatacgaaattccgctggctatgccccttagccaattccatgaaatgcttatatatattcctcctcttaataaatttcaaatttaaggcaccagtaatggaaaaattgtcaattctttggcagatcaaatgaaggaagtgttggacaaaggagaatattcggatgttcattttttggttgggaaggatgacaaaaaggaggcgagtcaaaaaaagcaaaaaccatag

SEQ ID NO: 54916 - DNA, 706 bp, Heterodera glycines
atgggcctgttttcgtttgcacttgccgactgtttggccacatttcatacatttgccatactgttcgactgtgagacacctgtgccatttgacgagcagcacaagcgatacgtgttcgaacacagggacaaaccgcggctaatctacgtttcggaagatggtagcgctatacaggttgacggtgtggtgaagcaagggaaatttgtgatgagcatcgagacgatgtatctcgataagcgaaacggagttgatcacttttgcacattcctgcgcacttttggcatttgtttcttgatgtgccattgaatgtgtttatttgttgcctattcagagcagtaaattgtttgcataattctgtttaattattttttgtttacaaccaaaatattgatccgcatttttatgttataattttaattcatttttgaaatttttatttaaatggcaaacgaagacttccgcttgtccgaatgcatccgttttattgagcgaactgcccaagagtatgattgtgttctgccggttccacggcttgggtttgtcacggaaaattttcttaataattttttttaaaatagctcaaggcgcgatgagcacctggatgcctgtgttcttatggaatccgtgggctcaggccatcggctctacattttcgagtttgaggattgcatccaggtatttttaaaatatgaggtcaattaattaa

SEQ ID NO: 54917 - DNA, 240 bp, Heterodera glycines
cagattgcggatgaaagttgcaccgggcatttgtataaggccaacagccacgttggctgatacgtcaactaccactccgtcttctgcgattttcttgagcttgaattccgtgcacacaaacactttgctgaggtctatgtagctggtgatcggatgaatctgaacaaacactgataagagttatacattgcccaatatttgccttaaaatggaaaggccttgagctgatcgggttcagcg

SEQ ID NO: 54918 - DNA, 815 bp, Heterodera glycines
atggctcctcgtaagcagaatgagcagtttttggacgaaatccagagtaaattttaaaataaaacacaaaatataagcattttatagaagcgaaccacgtggaagaagcacaaaacaaccaaagaaaacataaaatgggtaaaatttttcacaaattttacaaaaattttggattttttctcatttttttcatgtttcagatagtgatgatgacgtcaagttggttgactctcagtcatctcacgcagaggaacgccctgtgctcaagaagaggggccgaaagtctcgctgggaaaaactgctggaggacgtgaacaacgcaaagaagtccaaccccgcagaggttgaagtcgcagatgtcgacgaacgcaaagcagccaaggtcttcgactacccaacaattttctggaagctcgcacgtccaaaggtaatgtttgctctggtggcagcactacaatgttcttcttccgttgcagtatggggtgttcacctttatgtgcaacgaatgccgtaacgaaaacttcaagcgaggcgacaagcgcttcatcctcaacactggcagtggccaagagaagctggagttcacccaaacattctgccaagactgtgccaagttgaactttgactgcacctacctgatcatgaaacaccaaaagaaagatgacggaccatctggacagaagaacggaggacggaacacctattttagatggaaaagtgatctctgatcattcattcattgatttttcgttgaaatgagcaactctttctttgtaattttgccaagcaatacgccgggctttgtcggcaataaa

SEQ ID NO: 54919 - DNA, 1079 bp, Heterodera glycines
atgcacccactgacaacagccttatccaagctgctgaactgtaaagctgagaatttggccgagtacctgaataacccagaagctgttaacaaggcgagtgcatacctgcgaggaaagaagctcaagacaacctactcgaacaagggcggcactacaaaggaggtcgagtttggcaacttctcgctaaagtctgcttcggagacgtacgccgtcgagggattccttggcaagtgtcctttctgcaaacattccctcactttggaaagttcagaggtcaaagtacaccagtacttctacataaagcaccggatccttctgctgtacccccagctgaagtgcatcgttgagtaccacagcaaaggtcattgcaagtactatccgttgggtaagccttcgctgcgatgatgcccataatctcgcacggtttcagagttgttggccatagaggacagtgcagagataacaggcgaaaagccaacagacaccaactacttggactacctgggcttccgaagtgtttggcagccaacccccgtctattgaagcgagatgaagcgttcgagaccgtcgcaggagttccccgagattgagttcaacgtaaacacgatgggtgttacggtgtacagccctagacatctgaagacccctcggtttgtgccatgggatcagccgggtcggtgtacacgctgcaagagtgggaacgtggagctggactacatcatccagccagagggagtgaccatcttctcttcacggctcaaggatgacggagagaactttctgccatttgatgagatcggtaagggtttggactattgcgaaaaagtaatcagcagcttaagtggactttggcgacaatgccaagtttcgcgtccggtcacggaacaaaatgttcaccctgccactgaaacacccggaagtttaccaagctgcacaagtcgcagcggaagcgaatgaactgctggcagaagttccaccaatggctgacaacaatgatgatgatgataatgttgacccaaagtgataactcagtgtgttgataagccattttgttatcattcgtgatggattacccgaga

SEQ ID NO: 54920 - DNA, 414 bp, Heterodera glycines
atgctgaaaaagttgccaaaacccttccttattgtctacgatgacctcatgggcgacattgatgcgaagaagttggccgatctgtacaccaagaagtcccaccacaacaacttttcggtgatattcctcacccaaaacctgttcgacaaggcgatgagagtgccaaggtccaatgcgcagtacatctttctgatgcgtgcgcccagcgatatgttgagcattcgtaatttggccagccaaatgtttcctcgcgagcaagggtttctgatggacgcgtataagcaggcgtgtgccgatccgtacgggtatctgttggtgaccctacacgcaaacacagacaacctcttacgactgaggacaaacattttcccagacgacaaagaaaagattgtctttgtacccaaaaatggttaa

SEQ ID NO: 54921 - DNA, 857 bp, Heterodera glycines
atgaagtaccccgggagcgagcccggtactccgatcagcactacacgccgaacggtactgagcagcgtcgccagcctgttcgacccgctcggcttggtctgcccggcgaccctcaaggcgaagctgttcttccaaaagctgtgggacgacaaccacgaatgggacactcctttgtcccgggaggaagctcgagaatgggagcacattttggcaagttgggagggggaaagtaacgtgattcctcgaggcgtaactgcgggcaggggtcacccgcttcaactgcatgtgttcacggatgcatcggaaatcgcatatgcagcagcagcttacatacgaacgggaggagaaagcgggtgcagctcccgcctcatcatggccaaatcacgcctcaagccgaagaaagcggctaccacgttcacaataccaagaatggagctgatgggcattctgttgggggtccggctggcagcattcatcgagaagcaactccaccatccaatcgcggggcaacacatttggagcgactcaatgatcgctctccactgggtcagaacggcttcagcgcaaccacaattcgtggccaatcgactcttcgagatcagaaaagcgacagcaacgacgtttcactacattcgaactaacgaaaacccagcggatttggcaactcgaggggaagtgcccaccctcttacaacacaatgatcagtggtggaatggtcctcaatggttgcgcgggccgagaacggaatggccaagcgaattggagtttcagcctgatcaagagggcctaccctctccggcggggcaggaagaaggacaatcagcattcattgtccgaaagaagcatccacaggcctc

SEQ ID NO: 54922 - DNA, 751 bp, Heterodera glycines
atgcccacaaaaatccttttatctaacaacaaagttttgataaattacgcacttcacaaagcttttgccatattgaccaattggttgtgccttctccgttcgccatgtgttactgaaaagactgtcctcgtttttggtgtctttggcttggttactgttgttgttgttggcattgtgttgttcatttttcaaatttgttgtattctgtcgccaaaatttgaatacatttcgaatggaaatggacgacggttcggcacgccatttgccctgggcgaccaattcgtggagcaactgttgccaattgtggtggcgcaacggcacaaccacttcgtcaatgtcgcaaataagaacaaaatgatgggtggcggaatacctgccgtgtgatttattttataaataatttattttatttaaatatatatataccataattggatgtccggacaatccgtcattaaatattgacataatcaaaaaactaatacgaaaatatttgttcgaatgatattccaaaaagttttgtatgaaaaaaaggttggaacttattataggcgtttcaacttagctatttaatggtttaattattattttttacttcagtgaaaatgttttgaattattcttaaaaattgtacaaattacaagaattcattgttacagtaatgcccacctgttaaagcagtcgttgtacggtataagttcatgacgtcttttttgctgtctgttcctctgtataaattgatgtcttctaa

SEQ ID NO: 54923 - DNA, 1901 bp, Heterodera glycines
atgaatgttaatcattgggagggattggacgccggcatgattactttcaaagatgggaatgaggtataaaatgtaattattaaaaagtaaattatttaaacgaccattttatcctttggcccaatgttaagggctaatatttgtcggactcggaaagtttagtctggcagatttagtctgcgacaagtttagagcatcataacttttttctttgttgaccaaatccaacaaacttggtatcattcgaaagctcttaaccataagctctattgcctttccaaaaaacacaaagatataccgacatgtaaaatagttataagtaaaaacatgaaaaaattctgtcttttgtgaagtattcatgttgcagattttttataagttcttcaatcgcttataaatagctattgaacagcttctaaacacactattatttttctcctaaataatgttgctttcttaaaagggttatatatatatataacttggaatgtaatttttatttaagaaaatcgtaaaaaatatgtaataaaaatgtacttacttcttaaaatggttacaaaaaaacttaaatgaaaaattaaaaaagatttgagcccaaaaacggaataggcagaaatgccataaaacttcaattacgcttagaacatttggaaatttaattaatttattgtctttttcgcggccaatagatcattttttggtaaagaaatttaacttttgcaagtctggtttagtttttcaagaaacactgttcaattttatcaaaaatatgttgaaactttgcggaaaatattggcataaatctaactcaatgcttcaaaattccaaaactttatccacctataaatctttttttttacaaatccgtcttttcctagaaatttcaagtcacaaaattacaaccctagcaataaaaaatgaaaattcatttgatcgtttattattttaggtgttaggcgcagcgacagtcgaagtgttgcgcaggcagccgcctttggatccgctttataccttttttaatcgagatttctattactgtagcgacgacgatgatggcaaatgggtgattagagaaatttgcttgaacaacgatgatgacaaatgcgtcaattatgaagccaattaccgtagcgaggatggccaatcgttcattagaaaagatcgcttaggtaaatgttaggagagaaaaaagggcattttcattgcgataaacgatttctctactatattttttaattaataaagaaaaaaaaacaatagagcaaaatctcctgtaagattttataaaccattaagctctctcattgaagcactacaacatttctgggctcgagaaattaatgttaattattattagggcaatgatttttatatttttacatatttttttgctgctaattatgccgaaagaagcagctacttttgtttggcgtatattttgacatttttgggtaaaaactataagaaaaataaaagagttccaaatcaattttaaaatcattgggtttcaatgctgtgctatatttttttgttttttaaattttttttgtgtcttactttttttttgcaaaagttaaatcatttttttatatatttaattacgaatttataaatatattttttattaaggaaaattggaaatttgcacattcattgatttctctgagtgacagcgccaatcggtttaataccttccccagacttatgtttccattaatataattaacgcccaaaaaaaagaaataggtgctaaaaattgaaaaaatttggagacgaatttatgtgaattattaatttcttaagggtatatttttctgaaatttttggggccatttcttagtggtgtatctttcgttttattgcactttcaaaattatttataagaaatattaattaataaa

SEQ ID NO: 54924 - DNA, 998 bp, Heterodera glycines
cactggaggccggttacaccgcccgcaaagtcttccacatcctccaatacgaccagtggagtaacaatgtcttcaagtcctacgtgagtgaaatgatggccctaaaaatccacgccactggcttcccgtcatggtgcgagagcgaagagcagaagagtgaatacattgaggagtgctgggggaaatttgcaattaaacttgacaaagaaaagatgaagtcggagcctgggaagcgctacatcgccaagctctgcctcaactcactctggggccgcttctccatgcggaaccttctctcaaaagcaataattgacaacgacgaaagccttattcatcagtataccgaagacaaaaagattgagctaatcgacttggaaatgatggatgaggacaacgacgtattcatgctcacttacaaaccaaaggaggagtttgtcgacgaaaataagtactccaatgtagtcatctccctcttcacaacatcaatggcgcgtctctacctctacgaagctctgaaaaaagtggccgacactcccggatgtgaaattctctactttgacacggacagcatcatctacgttcatcccgaggacaacgacccactcccaacaggaaagggacacctcggtgagctgacggacgaaaagccagaccacgacattttggaattcatcagtgctggctgcaaaaactacgggctgaaacttcaacggaaagacaatggtgaaatttgcttcgacttgaaaataagagggttcactctcgacgaacagactgtacaaaaaatacactacgacacagtaaaagagcaaattttacgttatggttccgatgaccccgctgaccccataattgttacatatccccattttattcgtcctaatcttatccaaggcaaagtgtttactcattccctcacaaagcattatcaacccatattcacaaaaggtattattaatgattcattccaagtcctcgaatttggttatcgaaaataa

SEQ ID NO: 54925 - DNA, 497 bp, Heterodera glycines
  unsure (1)..(497): unsure at all n locations
atgtatttcacattaaagatcattaaatcggagaaaggtgagggagaaaaaggcgacgaggagctgatcccgatcggatcgccggtctgcaagaagccgagagatgcgggccacagatgccatggccgagctggcggaccaatcgcggccaaaaaccttaaggtacttactgtaagaaagctaatcaaagggaataaatactgtacaaattttattctagattattatatgtgatagattattagtaactttaacttaagagagagggcgagagaatgagagaaaaaggtgagagaggaaagagagagagaaaaagagacagaacaaagtaaaagagaaagtaaaaataactttatttaacaatttaaaaattatatattttcagtggtattttgacacggagacttttgaatgtttggcattttcgtacaacggctgtggcggcaacggaaatcatttcgactcgcccgcagattgttgngacaaatgcaaacttg

SEQ ID NO: 54926 - DNA, 1367 bp, Heterodera glycines
ttacttttgtttagtcgtctcaaaatttcaacacgtggaaaatttcgtcggctaacaaacgatttgagtaagtccaattaacaaatgcctcgatattttttgcattttcacttgagaatctgttcgtcataccctcaatatttgattgttcccgcttctgtgtctgacgatgaactgaagcaaatgcgacttggcagaatttattaccgctttcccactttggtgtggcgttgtccaaagaatggcgcagttctgctcagaagcagccaaccgtccattggttttttcgggatgtccaacgagtacatttattttcccttttttatatacttttaatttaaagcaaagacatgcatctctacgagaggattcgagcggccatttcaaatggtcccttttccattttacggtctcttaattttctattttttcagatgtcaatatgaaatttctgattgtcgatgctcgttcgtacaccgcggcgtgggctaaccgtgcaaaaggcggaggctttgaaggagctggtcacttttttaaattaaagccaccgtttttatattgaaaatgtctttttccgtctaaagttcccactgttttcagattcctatgccaatgccgaagtcgtcttcatgggcctggccaacattcacaacattcgctacagtttctaccaattgcgctctttgatgaacgcttgcgggggcgacccgaacaattacttccaaagtttgcagtcgaccctttggctgcagtacatttgccaattgttttctgcgacggagcggtgtttgcattcgctgctgcaggaaggtgacattttcttttctaatttctatgagcgatgtttgaaattatgttgcattcgtttaggcgtttctgtgcttgtccattgttccgacggttgggaccgaacgacgcaaattgtttcgttgtgtatgattatcgctgaccctttttatcggactttcgaagggtaatgcctttttaaacacttttaaagacgggaacagcaatttaattgaactggcttcttaaatattgtatttatcttagtattttcttccaaatttagctttgaaatgcttgttcaacgccaatgggttgagtttggacataaattctcggacagaggcggcgttttgaatggcgacgacaatgagaaatcgccagttttcttgcaatttctggattgtgtctatcagttgtggaccaaaaacccggaccaattccaattcaaccgacgatatctggttgttgttttgtgttgcttttttatcccttttatggctctcatttggcagatgaaacttgtacaacacactttctccggtctcttcggcacgtttatattcaattctttgaaagaa

SEQ ID NO: 54927 - DNA, 1078 bp, Heterodera glycines
ttacctacatcaggtcgttgtgagcccagcatggaatgagccgcaatatttcatggcaggatgtctaatggacaattgcacaacaatttaccaaaagaagggtgtcaacgtggtgatcactcgcttcagttggaatgatcacgattacctcggattccgtttgccacatctgcatgaagccattaaacggaaccgtgatcaaatttttgcagaaatgaggtgaatttttgtttcttctttttcagttaaaattatgggaacaaaaaattctgaacttttaaaaatattatttgaacattttcgaaagcattttcaacaaaagcatgtggaaaaagaggttaggtaggcgtttggttcatgaaaatgatcaccgattttgtgtcaaattttgaagaaacgtgaattttaaattggtcggtgacaaaagcctgggggaaattttaaaatttgagtccaacttatttctaagtcttcaaagttaagtaaaatgcactcaaaaattatttttagaccaaaataaaatttcactcgagctcattacttttatttaaaattgtttacagtaaaaaattcaaattgaatgggggcactgccgatttacgttcaattatggcacttaatttgcgaagcacatttaccgaaacagtttatagcaaagatatgtggcaaaattttgttttggttcacaacaggaagtttttcaacttggtaagtaaaattggagaaaaataaataattttttttaaatataacttaattttcttatttaccgcattttctaaaacattaaattaataatttttgatacaaattgtcaataaaaaaaagcttaaaatccaacatttaaaaataataattttcccattcctaaggcgtgtacgattccgcttggcattgctggcgttgagctgcaaggactgcatgcatacgacaatcaaacggaattgttcaattcgcaatttttcaccgttgcgaaccgttacaagttgattttgatgctttaaaatgattaaatgtttttggcatgcaaaatgtaacattgcttctgtcctacaaaaatccaatgttgaagtgataa

SEQ ID NO: 54928 - DNA, 1420 bp, Heterodera glycines
atggacagcggacagcgccggcgggtgaacggcccggcgctgaacggctcgctggagttggaggcaattgcggcggtgcatgaactcgcctcacaggttttaattagtttagagagcatagttccatgttggatttgatgtcatggcaattcatacaaaagaatttcgtgcaatttttttaatttttcagttaaaacagtcaaaaaatcagaataagaaaaagttgaataaacttgaaaacgttagaaaaaatttttttttttttttttttgtatttctgttgaaaaaattcatttgggttttttgagaaaaaaaactgggtttcacttgataatttaaaaaaaaacttctttattttgatgtacggcggtcaaatattttaccatgttcacccatccactaattttgaatgttaaatgaaaaatggtgtatttatttcttgatgttagcctcgcagttgggtgattcatttaattgatgatgcccgagttggtaaaacgattgttcatttcttccaatttttgcatgggttcaattcccattggcgccgcgaggcattttctcccattcctcagtgggcaagagattgtgaatgacgcgatttaattgatcgttggctcgcaaactctaatcagacacagagggcaaagtgatcagtggttcatgttgatctcccattgtacccgcttcaccatcgggcattgggttttgcaatggactaacaatttagtttaatttcattttataaaaaatgctttttatttattttagtgtgtgtgtgtgtgtgggattttaggcgctaatttgacatattatgctgaaaatttattgaatgcaaatacgtttttatgcgaaaaattatttttgaaaaaaaaacatttctcattccgtcttccagaaataagaatttatttggtacttatccttttttaccccctcttgaaaaaaaatttacttctaaatgggaaaattttattcgctttggtcagatttttgcaaatttgactccaagttaatgcgcattagtcaatctttcgtcatgattttttttttatatatataattttttccgcacactttttaaaggtcaaacaaatttctgtctctgaaattctgccccgcacttccgacctgatcttcctgaacatcaaaacgtacgaaggtatggggtaggcaggcgtaaaaaaagttacaaatttttttttgagaaagttattttgcttatgttagaccatccttacactttggaattgaccatgaaaggatggcgcgtttgttccacgcacaccgattgtatgaatggtaagttttgcaatttattattggcaaaaaaaaatttaaattttcaaagttttcaggcgattatcacaacgtggcactgcacacgcgctattttcagaacgcaaaggaattgcttaag

SEQ ID NO: 54929 - DNA, 640 bp, Heterodera glycines
atgtttgttgcacgttcccagtgttgtgcgcctgttacaaacagtctaaagattagtcgctcttttgcggtcccttggaggcaatttttcgacaaattaaaagcggacagaatcaatgcgcaagtggtgagaaattagggggtggcggatggataaaatttcaacaatttatttgggaagtcgataatgcactttttaattttgcgggccaataatttatagggtctcaaaaattgtccgattgtgtcacattttcaaaatctttcgacatggttgtggtggtggtgggaccctaaaaatctccaaaaaaatggggggtccgtttcgttacattaaaaaaatcccaaaaaatgagtaattccattttgaatttttgcagaagcataagccgttggacgatgaccacaagcggtacgcggatgacgaatggcattggatgccgacgggcgaaagcgacattcaaaaccaagcaaccgtcacatttctctcgcgcacattgaagaaagagaaattggtgcgttaagaaaaatttaaaaaatttttgttaggtagcttatgagggaggaaataataggtgatcgtcgttccaccctggtggattaaaacaggactccaccgacccggtttttgggatatttga

SEQ ID NO: 54930 - DNA, 661 bp, Heterodera glycines
aaacaaaaaaatcgattttttcaagtgtccgtttggggtactcaaacaattatggggagcaaaaatccaacgcagaattaaagtacaggctatagggaagctattcccgaaggattcggtctccccataaatctgggcgcatcggttcggggggaatgccccgaaaacaaaaaaaatcgattttttcaagtgtccgtttggggtactcaaacaattatggggagcaaaaatccaacgcagaattaaagtacaggctatagggaagctactcccgaaggattcggtctccccataaatctgggcgcatcggttcggggggactgccccgaaaacaaaaaaatcgattttttcaagtgtccgtttggggtactcaaacaattatggggagcaaaaatccaacgcagaattaaagtacaggctatagggaagctactcccgaaggattcggtctccccataaatctgggcgcatcggttcggggggactgccccgaaaacaaaaaaatcgattttttcaagtgtccgtttggggtactcaaacaattatggggagcaaaaatccaacgcagaattaaagtacaggctatagggaagctattcccgaaggattcggtctccccataaatctgggcgcatcggttcggggggactgccccgaaaac

SEQ ID NO: 54931 - DNA, 473 bp, Heterodera glycines
atggctaaatcggaagacccggcacatttggagcgggcgagtcgaatgatggaagtgggccaaagccattggaaggcacttttaaaaggcgaagaattggtaagtgtgaagctaatcatttgccaaacattgcctaaagcaatgccaatttcaatttttcagtccgttcgaaagtgccgccaaaggccaaccgcaaaaagcttctcccaattgtcctccgacagtctcaacacttctcagttttatcaactcattgcgaaacatttctgtgaagggtttccccagcaaatctgcttggaggtgaattactcggacgaggactacctgatggagggtgccaacgactacgtggacacgtactttgacgacggcgacggatacgacgacgaaacaaacgcattggaggaggagggcacatactgacgggggggggggggggaagagacgaaaaatgatcaatcaaagagggaaga

SEQ ID NO: 54932 - DNA, 1226 bp, Heterodera glycines
gccgcgtcgtcgaaattgacgaaacattagttgtcaaaaggaagtacggggttggccgggtcttggagaaacaagaagtctggctgttcggcggtgttgagcgcgactcaaattgggagcgcgttttcatggttcctgtagaatcccgtggtgcggctcgccttcttcctctaattcagcaatatatacttcctggcacaacgattgtcagcgatgaatggcgtccgtaccgcggaatcccgaaccttccgcaaaactatgtgcattggaccgtgaaccattcacaaaactttgtgaatcccgcaaatcgtcttgcccatacccaaaatgttgaatccatgtggaaaaaattgaagaggaatttcaaacagcaatttgggaacaagactgaaacttacgacacctacttcccagaatttggcgtcagcgtttcggtgatcgtgaaaatgttttttataatttttggctgcatgtctctgagttttatccatgcgaacattgaattttttttgttttttttcttttttcgtgcgtttggagcgattttgttggataaatgtgaatttcgaaaaatttgagttttcgatttttgttcgaattcggatcaggggttcggaattgggtgaaatggatgccatattcgtgctcagcgaccccgaaaaccttataacaaatatttttatgacttttgaaattttctaaaaaaatttcaaaaaaggtgtgataccatcggtactatttaccgcaaaaaggcgttgaaagagcttggatggactggagacggcagtttaccagttcaaggcatttctcgacgaacaaccaatggtgcgaacgcttctttcaaaaaagacaaaggcccatttgctgcttcaccactttgttccgtttgcgcgccaacacggatttttgggccttttggatgagcagggtgggaccatatcatttttgggggttcaattttaaaagttgtgatttttcaggagatgaggcactgcattccgtgtggcggcgacttgagcaactttggaagacgatgccggactctgaacaaatgcgacaacagctggagcatcatttcgtctcgaattggctgctggacaccggcagactcgacgaattgaatacaaacacaaataacccccggggggtggggagtccgttttcagttttaacaagttgctgctctgctgatgctgctgctgcacgaatccattcccaattgccgg

SEQ ID NO: 54933 - DNA, 1326 bp, Heterodera glycines
atgagcgcggaccaaattaagcaactcctcgaggccatgcgtgtgcaatcggatgccattcaactgctaatgggccaagcaccacaaaacgccacgagtcttaaccacgcaaatttggcgagttccatcgacggccgaatttcaaaattcaattatgacgccgaaaccgggaacactttcgaacagtggttcaaaaggtttggagttctgattgaagaggatggtaaggacctccccgagtcgaccaaagtcagactcctccttggcaaactcggcgacgaggagtacggcaaataccgcgacagcatcagtccgacccagcccgacaaagtcaattgggtggactcgatcaccaagctcaaaggattatatgccgaaacgcgatcattattcgtccggcgctacgaatgtttcaaaattcgtcagcagccaagccaggacatctcatcgctggtcgcacacatcaacgcgtcctgtgaaaatgccaatttgagtccgaccaaagaacagctaaagtgcataatcctggtcattgcactcaacgacgagcaccacgacctgaggcaaaagtgtctcaaaatgctggaggacgcagaaaagacaggcacggacatcactctccaaaaagtggaagaggagttgaaggcgattcaaatcgttaaagaaagtgccctttctctgcttactcaaccggtctcaaccagcgccatccaattgcgacctcagcaatggcgagagaccagcaaaggcaaacataaggcaaaaccgggacccaaatggccacatcatgaaccggcacccaaatcgccacatcatgcgccttcgcctaagcaaaaatcggacgacaaagcaaaccgaggccatccatcgcatccatgcgcatcatgcggaagcaacgatcactggcgatcggactgcaaatttgccaacgcattttgcaacaaatgcaaccggcaaggccacattgcgattgtctgccgtcagcgctcgtccaacacggcacacaaatttcagaaccgatcatttcacacggtcgtggccaagtcacaatgcatggtgattggcacaacccaaggccgatggtggaagatcccggtcacgatcaatggcacaaatttgaagatgaatggagacagtggagcccaagcaacagtcatcagcttcaaaacgtggatcaaattgggtcaacccaaactctctccaacacatcgaaacccgcaactgcaatggcaccgcattttcaaccgaaggaaaatttcattgcaccgtcagttgcttcgatcggccatccaaaacactgatcgtttacgtcagccagtgacttaa

SEQ ID NO: 54934 - DNA, 409 bp, Heterodera glycines
atgaaatataatcaaggtattcatttttttcgattaaaagcgtatgaggcgcttccggaaaaatttaaaaaacttttttttttgtagattatgcaaaataaacaataaaaaattgaaatttctgagaattttttgcaaaaaattttggaaattccgttagtaagggagctccgaagaacctgctaaatgcaatataattttgttgagaaaataatgctcttttaaaatattttcgaattttccctttaatgtgccttttctcttttataattcattaaattaattaataattatttttcttattttttgtacatatttaccattgaaacttcagaaattgcactaattgtgataacatgtgcagtcacattcacaattgttggtgcaccttaataaatattaaaataaa

SEQ ID NO: 54935 - DNA, 461 bp, Heterodera glycines
atgcatcgggacggtgtgaaagcaagacatgccggaaatgggggagaaatatctatttttggtgacaaaaaattaaaaattgattgtataattggggcacaaaaaagaatcattgaatttcaggtgggaaaattttaaattttaaaaaatatttagcatttaggggtgcgcttttcacgggtgtaatacatgttataaaggttatatgatacaagcaaatggatttacggcggaacaaaattatgataggactcaacgaaaaatggaaaaattaagaattgcggggaaaaagatgagatatactgtagaggaagtttgggtaggtgtataaatacattttggtcaaaaaaatctaattttaggaatgtgatgtaagaaaaatgttttataaaaagagtgcattttatgacacgcaaatggtcaaattttttaacaccttactcgtaaataggacctattaa

SEQ ID NO: 54936 - DNA, 487 bp, Heterodera glycines
atgtcaaaagaatatgcggactcagaaatcttagaagttgtctgtgcgggtaattaataaaaacgaaataaaaataaatgttagttttaggacctaaacaatacgctttaaaattgaaaaacaaaaatggagaactttggtataagacaaaaattagagggatgacacagaataagaacaataaaattgattacgaagaatttaaggacatggttttaaattatcaggaggaaaagaaaatactgtttaaacatccaaataaattcgggtatttttactaatttttttagaaaataaacaatttctttagaccaacgagagaaggttatgtgataagtcgtaacgttacaaaggattataggccgattcaaaagaaggggttagtttgacagtttttattaacgaaataatatataaatttaggattattttgaacgatgaaaatttaagtgttttgccttttggttgttggtgattttttttttga

SEQ ID NO: 54937 - DNA, 1013 bp, Heterodera glycines
atgtcgagcaatttgctgggccgatttaagctgatgttgagcacgggcgatggggcggacgttcactttttggttgggaaagaaaaggaggtgagttgaacccacaaaagttgattaatccaaggttccgttctaaaattttcagcgcacggaggaaaagcagggatttgtattcgtttttttccaaaaaaaaaaccaaattttttgccattttctggtcaaattttagtaaaatgagggtcagacggtgcttcgccgccagggaaatgtttataatttaattgaatctttatcctcattttttttaatttttgaacaagttccatttctattccgagtttttttagcttttgaaagcacacaaatgcgtgatgatgttcgcttctgatgtgtttgggtcgatgttccgttttgatgataaaaacgcaaagacaaaaagtaaaaaaaatcgaaatattttttaaaaatgtttttttttcatcattttttagcctctgccgactgtcctcacgtaattgaagtgaccgatgttgaagcagaagcgttcaaagtgatgttgagcttcatttacgcggaagatttaagcgaattgaacggacaaaatgccatggcagtgctttacgcaggtgaaaaatttaaaaaataaataaataattatatttaaacatttttagccaataaatataacgtttctctgctggtcaaagccttattggcgtttccaattaatgaattgtcaaatgttttccttgcctttgacgaagctcgtcttctcaacgaaaatgtacaaatcgaaatttatacaaaatatttttaattgttttattttaaggatttctctcgtcgctgcttggattacattgaccaaaatgccaaaactttatttgaatctgaggaatttttgcaaattgatcaaaatttgttgtgcgaaattatcgaacgtgaccaattgaaaatcgccgacgaactcatcatttggaatgctgtactaattaattaattattcgattaaa

SEQ ID NO: 54938 - DNA, 374 bp, Heterodera glycines
atggcaataaagattgctgaatatggaaattataataataaaagaggtaataatctcttttcttccaaaaagaaaggaattggtaatggaaaaactaaaatttaacattttaacttcgatttacagaggtcgatttggattttaatgacgtaaaatgtgaattaaaagggcttaatgatctgattacacttttgctcctaaacacaacaaatcacggctcttcacaccacaatgacggcaagcaggactgggcgagcagttggcgtgcccgtgcctcgggcactcccggcgccgccgtcgccgagtttgcagcggccatcggtgccgtgccgtacaataggccggcgccaggtgtgagcgcccgttggtgctga

SEQ ID NO: 54939 - DNA, 1211 bp, Heterodera glycines
atgctcacacatcatcggaacgaccatcagaactccggtcaacaacattcggtagacgaaagtgaggaggagcgagaaacggacgcacttccccaacaacaatggcacattgaacgcgatgccaaaattgcgtttgtcgcattggcacagttgcatcggcgaacaacggcgagctgtgccggcaccacaactgccggcggtgcatcggctgtcagtatcataacccggtcggaacagtcagcgttcagcaacttcgtcaagcaacaacaaacaccgcaacagcacaaccatcaacatcgacacgtgcagcaacaatcgtcgctggtgcaacaacaacatcaagcagcatctgttcggcagcaacagcggcaggtgtggatttaaacgtgcccgaaattggaacagaatcagttgcaggctaacgccctccaaatagtggcaaatcccattttcgtaaattaacggcatcccagctctaatcattacaaaaaaatcacagcccggcatggttttgttggccactcatcaacaagtgccctcctcctccaccgctgttatttcttcttcagtgccttccgcctcctcttcatcggttgctgctgctactgttgtagttcatcaacaacaaatgccgcattcgaatgtgccggcaatcggtggtggtggtggtggtggcattttgatgaacaacaacaccagctattgttggtccaacaacaaattcagcaacgacaacaacaaccttactaataacaccaacagcaggtggggctgcttattgattttttaaacaaatttggcatagtacaaaaataatggcattaacgtggtcagaattgttgccgaagctttaaatcgagaattatgacattctgatcggagttttttttttataagttttgccatgaaaccgcaataacacgatgtaggtgtatcaacgatatacaatttatatatagtagaacttttgcgcaactccaacaccaccaccagcaacatttgtcctcctcctcttccgtcggtggcgccaccacgcctttgtttctgcaccatcagcaccaacgggcgctcacacctggcgccggcctattgtacggcacggcaccgatggccgctgcaaactcggcgacggcggcgccgggagtgcccgaggcacgggcacgccaactgctcgcccagtcctgcttgccgtcattgtggtgtgaagagcc

SEQ ID NO: 54940 - DNA, 538 bp, Heterodera glycines
atggcgtcatttggtgcgctattgaaatggacctattggaaatttttttaaatttaattttctgacccaaaaaatgaaatgttccaatcggtaccatttccccccccccacgccgatttttttttaaactcccaaataaattttaaaaactggcaccacacactcacctccgtcgtcgcctcgtccatggcaatgcgtcgccgcttgaacatcggacagtcgagcacaaatgtttcatactcaccgccctcgccgcatacgtgcagcccgtacttggcatgcatggccaccaaatgggcacgcatctgatcaatgcgaggaaaaacaaaaaatatatattagaaaattaaagaaatttttagaattaatgcatcacgagagtctcgactcgtgctctgccaagattatttagttttattaagcattaattaattttgatgttggatttgaatttgggacctccaaaacatcaagtttgctcattacacagtcaaagttccaattttcgaagccctcagaaataacaaattcacactaa

SEQ ID NO: 54941 - DNA, 830 bp, Heterodera glycines
attgccgagttggacagttacatgtaccaaagtgtgggcagtgagggaatcaaggttagtgagactaaatatgtatgctttaaaataaagaaattgaatgcaatttaaattttttttaatgcatttgcaatccaaaaattagaacaaaggtgccataatttttttaaattttcggcttcaaatttttaattttccttaaatttcatttttttgcatttccgaggtctcctttgtttggaaaaaactcctaggcctgttttcctgcaattttcagttttacgcggatgcccttggcctgccgctgttccaacgcaaaatttcggggcgtccaaaatgtgtagagagcaacacttatgtgcaggacgaggaggacgaagtggaggatttgtaccaccttttgaagacggtcaaagaatgggacccggaaattcggggtgattttttaatttaattgtgcattttttacatctttttgcaaacaaaaaatttttgctcaattttcttaaataaaatttcataattaaatttacaaaaaatggcattttttgacgaacgatagcaaaatgaaaatttaaaaaaacctacaatttcattcggaaaaaaactaaaaaaatttaaaatatttattggaaatgaattattttttggattttaaatttaattttttgtttttaggcgtttccgcgggcgcgataaacagcacttatcaaaaattgcgtgttgaacatgtgtgcgaacggcttggactcgtcccgctgtgcttcctgtgggaattggaccaactccaactgttggacgccatggtcagtgaatggtgctgcacaaaatga

SEQ ID NO: 54942 - DNA, 864 bp, Heterodera glycines
atgctggacgtgaacaaaaaagtgccagaattcgacgcgctccgggacaacatggccaagcaggttaaagacagacacgattcacggaaatttaacaaattgaaaaaaatattagttatttcttcctcaaaaaaggcgttaaaattttccgcaaaaaaaaaaaatctttaaaatatggccaaaatttaccaattttcccctacggcaaaaaaactcattaagaaaatttccaaaaaaaaaaaaaaacagttttcccctaaaattaagtggaatagtggatctaaaagtcaaaaacgcgttcatcttctctgatgaataaacaaaatgccattttaaacgtttttaatttttcccgtttcagtaccccttcgagttggacccgttccagcagcaggcgattgtccgcatggagcagggcgcctccgtttttgtcgcggcacataccagcgcgggcaaaacggtggtggcggaatacgcggtggcattgtgcaaactgcaccggacgaggtgagttggggtggggtggcacaattctgtttttttttgacaattatttcgacttttttttaattgccgggaaaattaaaaagtgatttaaaattttagaaaattcttcaataattcgtttttaccccgaaatatgtatatgaattatgtcctgacttttcgctgtctgtactcctacataaaatataatttctaaaaaacgaattggtcggttaaaaattgccaaaattcttcgcccctctccaataatttcaaaatttttagagtcatttacacttcgccaatcaaagcgttgtccaaccagaagtttcgcgatttccgtctccattttggcgacgttgggctggtcaccgggcg

SEQ ID NO: 54943 - DNA, 60 bp, Heterodera glycines
agagcccgggaacagctgcatcggatgcaagtgcccacgttgctgtacacttaacagttg

SEQ ID NO: 54944 - DNA, 2020 bp, Heterodera glycines
  unsure (1)..(2020): unsure at all n locations
ggttttttgataggtccaaggagggttaaattttcaaaaaaggggcttttttgtgggttttttggagaaatttttaagttttttttgttaaatattttcataaaaactagaaaaataccaatttttttcggaaaaatcacaaaaatacgaaattttttttaatgaaaatatgctaaaaatatggtcaaaattctttaatttttcccccggcggcgcctatcggcaccgccggacccgtaaaaatcttaatttacaagcaaaaatttgctcaaaatcgcaaaatttggtcatttttcggacaaaatctgttaacaaatcgcattgaaaattacaaaatttttcccggcgcggcgcctatcggcaccgccggtccccctgtcccccaaaagttttttgggaaaagcgccgcaaaaaagcaacttcgtttttcatgttcagaatcccaaaaaatgcttatttctaacaaaaaaaatgctcaaattgatcatggacaatcaaaaatataacatttgaacattttaaacgtgttttgaataaattttgtaaaaatgaggcttttgaaaattttaatctggcagccctggttttaaatgttatttttgcattttccgtgtttggatttgctgctgttctctgtccgtgtccattggtgccgtcacacttttgcctttttctgtgctcggctcggaagttttggagcgataccccgacaatttctacttgaaatggcttaacgcatcgctgatcaattctctgtggaattacgtgttcatgctcagcaatgtgtcgctttttgcactgctaccattctcttactttttcattgaggtacagaaaaattttgaatttttccagtttggtttttaagaatgtgccttttttcccttctaaaatacgaaattgaaccacaaaaaaaaaattaacccttgttacatagaatgatagtatcaaagtttgcatagattttccaggtggttgggctacaaccttttttttcttaaaatagtcatcacgcctattattttttggttcttttaataatttaatgactggtttttcgtaagcaccgtggcgcagtggaagcgtgctgggcccataacccagaggtcgatggatcgaaaccatccggtgctaccagctttttttaaatttttttccatccttttgtttgtgttttacttttctctttttagtctcagggctttagcactgctgcctttcaccatcttcaagtcgttcagccctttcccagcaattccgcccccgcgtcagtgcgtcgccctctcatcgcgcgcttttacgaaactgtcgttgtctgtgcattggtcatcattgtactggtcggaattgctgacatgttttactctcatctttttttacaggtaattgagtgtctgtcatttcattttaatgttttgccatttgtcagtccgttttctctcttttagccttcgtacatttcgctctctctcctgtccctttccctctctttgtccacccctttgctgtactccttcgcgtctctttttggcgtttcgctgttgctcctttctgttccgctcggatttgcaaaattattcgacttgttcagtgaaatgcttatcacccaaaagacaacaattgggctgagtgcagctcaaactcggccacttatggtattattaaaatggcttaattttcggatgccatttttcttttccttttcaaagacaaatatgactgtgcttttcccattcgattcttacgaagtgaccactcctgaacgattgcaggtgccaacacttccacaaataattcaaaaacgagtcttccaggctttaagttgtattcgcaaggagactaagttgcgtccgttccaacaccaattgcatttgtccaccccatttttaaggttttcaacagcgataaccaattactctgctaacgtcatcttttctgatcacaggcaccgttcggtcactgaactcaattcgccttncatttaacgtgtcggtgcaatcgctgccactaatgaccatgc

SEQ ID NO: 54945 - DNA, 181 bp, Heterodera glycines
  unsure (1)..(181): unsure at all n locations
tatttttcctacacaaacaatattgtgacagaatatagcaagaaaaaatgattgggtgtgtgtgtctatcccaagatgacgattttccatggtaaaaaatgtaacaccaattaattcataatcagtcagtcatanaattgactgtttanagcgtgacgatgaaaatgcatttttacaagac

SEQ ID NO: 54946 - DNA, 363 bp, Heterodera glycines
cagaaacaactccgttcagcgcaagcgtgcgcatgggcagcgaaggagaccgagcaagtggtaatgacacagcgctggccaggcatccgagcttcccggacttgggaagaaccatctcgccgctggacacagctccgagggcagtgcacaggcactcacacgagcactccggatttcccggttaggacacttcctcaggccaaaggccttcgggcgcttatgtctcgtgttttttcgaatgcaagcacactggtccccaggcaaggagttccgatccacgaactcatagggcttgtcaaccatggcaatacgccactcactcgtataccaacaccaccaccaactttaggttcagcatcccca

SEQ ID NO: 54947 - DNA, 66 bp, Heterodera glycines
cataaacatttatttgatttattttaccatattcaaaatttgatcaaaatataggtggtcaaaagt

SEQ ID NO: 54948 - DNA, 97 bp, Heterodera glycines
atgaaatcgtggttccttgtcctggtgttgctgctcgccttttgcctggttgttcgcctcgtgatttgtttggtcaaatgcattaactgctgctgct

SEQ ID NO: 54949 - DNA, 308 bp, Heterodera glycines
atgccgtcctctccgatgcctttttcgctgttcgtcgtccttttcctattcgtcccatttttgcccggatgttcgtctttttatttggcgcctccttcttctccttgtgtctcctccgatatcgccaaaatctgtgagatttccacacaaattcatttaccaaattctgcattttgtttgctttttcaggcggtgaaccatccgttgcgcattatttcgagtgctgtggagacaatggcgcaggtcggcacacgaaattggcacatgacaaatgttttgtggcacttttcggcttctttgtgccttga

SEQ ID NO: 54950 - DNA, 338 bp, Heterodera glycines
atgcattcggttgtccatattcatcaattgtgcccaaatcggtcggttgccaaaacaatgaattgctaattctttctttgaattcgtagtcaccattttggtaccactgcgttctttcaccgcttttcaagtccaagtggagtccgcgcatctcttgcacacggccctttttcaaagaaattcaaaatttaataaaatttttagaaatttgggcctggaaggcacttggagtcctatcaataaaaaacattatgaaggcacaaaattaatggttcgacaatttctgctatttgtgtttcgagttttgatttcggctttatgattcgctgtccattgga

SEQ ID NO: 54951 - DNA, 1142 bp, Heterodera glycines
atgacccggacaaaaaccctaaagaagatcctccgaaaaaacgccgtaattaatgaatatttatttttgtgccaaatttttgttcccattttcggcactctcgcactttttgacggatgcatcaccggggcaagcaaaaactgtacggcaaatgtgaaaattgattacgatgagatttttcaattgtccaaatgtttttggggagaaaggcgccgaacagcttttaagggcacgtaagtcgggaaatcttgaattttaattaattttacataattatgatatttgttgagttgccagcccagaatggatgggcataattgattttgattgaggacaatccataattatgattgatggcacgcaaatatcgtagaaatttaattaatatccataagttttgtgttttgattaacgattttcatgattttaggtcgttaattacggattgtgttcaatcaaaatcattttttgaaggcacgtaaaccggaaaaattcaaaactttaaataattaggatgaattagtaaggtgcaaaaatccaaaaatagatgaatattaaatgacttttataaataggaattgttggataaatttgaaagtttttaagaaatcaaaagattccttaggtgccagagatgaattttactggattttagtttcgaacaaccagaaaattgggagggcataccataaatatgtataaaaaaatatttgttgctgtttgttgttaaaatagtgtttttattttttacagtatccaaatcaaagcatccgttgatggttacggtatgagtggcgcttcaccgttcacttttcccgtggtgttcaaaaaccgacactgctgggacccaattaattactacacttcacaagatttcgagaacataacaatcacattgagtggcgagtgagtcaataaaattgaaaaataatgaaattttaaagaaccgaagtttggacttggaaaatgcacacactttttgaaatctgatcaagacggatcagcagagtctcttctgatcttattatgtggatatatggattaaggaaacgaacccactaaaaaatttttggatttatcttgctggtccaagtgcattctcaaaaaaagtctagacaaaatccggtcagggcggtaataaa

SEQ ID NO: 54952 - DNA, 450 bp, Heterodera glycines
atgccaagctgcggtaacaaatattatgaccatgtgaaacattgtgccatggtctgtaattggtagggatgagatttttaggtagaaaaattgcaaaattggcactaattacccccaaataagcgaaaatatgtaaaattttaaaaaaatttcaaaagggaattttaattaaaatttcatcaaaaaataattttttatgaccgacaaagaaggcgattacaaatgacaaataatgagaaaatttttaattaaaattggtaatgaaatttgcgctgtttctaaaactcaaattttaatggatgaataattgaggatctttcagtcttagggggggggggggggctaattttttgaaattctttggttggatttttcattgaaaatttcatccccacgcatttctaattaaaatatttcttatttttggaatttttaggtccatttctataa

SEQ ID NO: 54953 - DNA, 92 bp, Heterodera glycines
atgcttgatcagagaatgattagagtgatagcgaatgatcagagacgtagagtgattgatcacagagaaagagtgatagcaaatgtgattaa

SEQ ID NO: 54954 - DNA, 610 bp, Heterodera glycines
  unsure (1)..(610): unsure at all n locations
atgcgcgccttcgtctcccactgcggtttcaacagtgtcaacgaggctgtccaatttggagttccaattttggccattccgttgcttgccgaccaactgtacaatgccattatggcacgtgtgaaaggcattgctgtccaattggatgttggtcaactcaacggggacggggccgaacagctgctggtcgatggacttgacaaggctaattagcatgaactgattatgcatttaatgactttattgctttgcaggtgctaaatgacccctcatacatacaaaatgtcaaattattgaaacaaaagttcgcttcaaccccttttggggcaaaggaaaagctgatccgatgggtggaattcgcggccgaattccccgacctgaacgagttgaacttgccctgngaagaagagctcggcacattggcctattatagcgtcgacatcattctgtccattgcggcactgttgggaatatttgcttggattattttcaaattggcaaaatttctgacaacaaaatatttgatttctggcaaaaagggagggcaaaagacaaatgaattaaactaattgattatttcataaattcattattacttgtaattaataaa

SEQ ID NO: 54955 - DNA, 1461 bp, Heterodera glycines
atggcggacaacgaagtgaaactgagtggccatagtttgacaggaccagtgaccagtttccaggagtcgacattcccaggtttgcatttggtgatttggggcacctttttggggtgatttgtccctcttttattggcactgaccaatagcaaaaccgaaaaataatatttgattttcaaaaattattgattttttgagccatgcccaacacatccacggcacaatgcggacgaggcatttttgtgtatggatgaattgggatatggataaattgtgtgggataagttggtttaatccccgatttctaaatttattcttgtctcaagttgaataagtgccaaaatttattgtgtttggtgattcgtaaaatgcggagaataaattttttacaaaaaattttcctaaaattgcattgacacagtctcgtgtcatctaaaattttatacagaaaatactcattttttttctttcagcaccaattgttgcccaactgtccagcgtgttctccgcgcccactgccatccaggcaatttcgtggcccgtcgcgctggccggaaaggacttgatctccatcgcaaaaacgggcagtggcaaaacgctgggcttcactttgccaggtttggatttccttcccccgatttttagtgctgataaatgtgccccgccggtggtaagcgttattcaacaaatttcaagtttcaccctgttgtttggtttacaaaacaaccatcatttaaataaaataaattttcatccaaattcatggtatatgtttctgattttgtcaaaattggtggtcatgttcggtgatcagtcaaactcaaaaccaacccagacaacatgttcataaacaaacttttaggacaacaaatttttgttttcttcgaaaatgggagagaagagagctatgggtttcattacccattatataaaaaatatattttcaatgaaactaagaaaaatgaagaattttgaattgatcataaaccggtcaaaatttcgccgagcaggttggcatttaatacaaccggttccatggcccgacctttccaaaaccagtcaacccggattcttcaaaaagtggcggtccggttttgccgggcccgataaaaacatgtaccgggcatggccagggtttcgcatccacttacaattagcaggaactctctgtcccgggttttttgtgaaaaatactgggcacataagttttaattgacccaatttttctttctttgattaccatttcattttcagccattgtccacgtgctgaacaaccaacgaccgcagcagcagcgtcgtcctggcgaaggtccggctgttgttgtgctgttgccaacccgtgagctggcccaacaggtggagacggttgcccgtgaatatggccaactgatgcggctcaatgtggtcgcgtgttatggcggtgcatcaaagtggccccaaatgggtgcgctgaagcgcg

SEQ ID NO: 54956 - DNA, 557 bp, Heterodera glycines
atggccatggttggtggcactgtttgcccgcgaggccggcatttgtggcgatggtggcaacaaattctgttgtacggcatcaatcattgggccgcagcatgtgctgaccgcggcacactgcttcatgtctttcaaaggcgaacagcgagaaaatatgcacgaagaggtaaatgaaatgatgcgactaatttttttatgttcctaattaggcaccctaattaatgattatgattttcaaatacatagaaaataggaggctgatttaaacaagtacctgggcagtggaaaacaaattttcaactttgaagtagggatgcctcccccattccagcggtgctatgtcgttataaaaaagccatgaaaagcccaaagtgttttccactagcctgtcaaatttcaaaaaatttcactatgttttaaaaaagttttagccaaaaattttgaaaaactggttccgggtgtattttttggccataactttgttcaaacctgattaaattttttgaaacttaggcgagcttatagcgaattgttagagatatcgaatgataccaaga

SEQ ID NO: 54957 - DNA, 685 bp, Heterodera glycines
  unsure (1)..(685): unsure at all n locations
atgcccgatttgctggtcagcattgaacagttttggctgtccgattattggaaggcgttgaaaccgacggagcttctcctcttttatttgttccccgtaacggtaaaagaaacaagcaaaaggaaagaagcataaattaataatcttcagaaaaaagagaattgcgaaggccaatttatcgtgccgaacataaaccaattgttgtggataaacgcgggaaaagtaaacgaagaaaaaatgggaggggcggaatcaaacgcaacgggggggggggattcaaaatgcncaatttcgatggatggcaaattgatcaaactttgccaaattctatcccatttttgcattcgctttcactctcacatttcagagcaaagaacaagtggcgaagcagaagagcggaatttggctgtgcagggcatcgctgctaattgacatgagcgaaagtgcggaagaatatccaacggaagaggaaacatcgcccgaggtgctattcgaacacgacgtatttgtgggggcggagaaagtgcagctgtactacgaaatcactgtgcagcgggagaaccaactgaaaatgagcacaggtccaagggaaatgccaaaaagggagaagggaggagacaatccgcaaaatgtcattttagccaatcccatccccaaaatggcttttaggcaaagtgaaatttga

SEQ ID NO: 54958 - DNA, 312 bp, Heterodera glycines
atggtgattaaaagtgctacaacagtgatcagaagaagtacaacagtgattagaagaggtacaccagtgattagaagaggtacatcagtgactaaaagaggtaaacagtgattaagagaggtacaacagtgattagaagaggtacaacagtgactaaaagaggtaaacagtgatttaaagaggtacaactgtgattagaagaggtacaaaagtctaacttgttatgagatgtacaaaaataatttcataattttaaatataattttatagaattaggtttattttaaaattttaaaaaaacaaaataataaa

SEQ ID NO: 54959 - DNA, 280 bp, Heterodera glycines
atgttgttcactggcattgaccgactaattgtcttaatttttggtgaaatgtaaaaaaacgataaaaaatattcgcctttacattaaatttgttacagccaaaacaagcgcaaaatccgactgtatttgactacgataatatttatttgctctattttctgtatagatttatgttacactttttatcagaatattgaattgtatggtgatcagatgatcactggaaattacattgattttttcatggtttttcaaaacaatcttttgtcataaaattaaa

SEQ ID NO: 54960 - DNA, 466 bp, Heterodera glycines
atggccaaattggacaactacgataatgatacggtaattaattggtaaagtgttattttaatatttttacaatcattttgcagttttatttggccttcaaagatgcccatcccagctggtctctgattggatgtgcagcaatttttggaatcactgcttcatttggaatcctgtttcatttgtccgtgatttttgtcaccatcaaaacaaagtgataattaattatcattattttggtaattttaaaatttaattttttgatcactgaatggcaccgttaattaccttttggcactttgctccttttttgagttgcttcacctaactggccattttctgtttgtgtacaacgctttgtctggacaaaatttcgttgagtatcgtttggcagcaatgattttattcattcctgtgattggattaggtaattcataaagctaaaattgtataaatattatatattaaa

SEQ ID NO: 54961 - DNA, 131 bp, Heterodera glycines
aaaaagatccagtgatttaatgtattattttataaagtgcaaatttttttttttcattcattcgtttgtttctttttttagtcataatcattatatgatttaatgattcttatatttattaaatatcaaac

SEQ ID NO: 54962 - DNA, 1491 bp, Heterodera glycines
atgcgtcagacacttgcattctttctgcaccttttcgtcttcgtcgcttatttggccaacggtggcttcggtaggcagtcaaattttgacggtgctgggacgttagtcaaaaaaccatcaaatgaaaaatttttgtcagaaatttatttataacttagcctagtatgtacgaatttttaaaatcttgatatttttagatagctctaagtgttttcaattatcatgcaaaattttagaaaaattaattaagtttgaaaaaagttatgacttgagaagctcagaaaaccaagttttttttcaacatttttggccataacttttttgagacttaatgaatttttttgaaattttgtaggctaatagaaatacttagggctatcgaatgatatcaagattttaaaatttggttgcctctgagcaaagttatatcaaaaaatcttttcatttgatggttttttgactaacgtcatagcaccattttgacagaatatgggtgaaaaaataataattgttttaaaatgccggcagatgaatcgctgaagaaaaagcatagattaatgttcaataaaagacaaaatgtgcctttttaataaattttaatgtcatttagagtcctgctggtgggaattttgtgtttgatttgttaaaagatttttgtcaaaaatctcacaaatttataatgggaattgccttttatttttccagtgtttaaaaaaaacttttttatttaaattatttatttttttccaaatttctcaaaaattcagtctttacccagtgcttttcttttaagaaattaatttataaatcaaattcaacaggtctcaagtgcaaacagggacaagaaagccagccaatcagcagaaacttcatcatggccaactcctcatgtcctgacaaagaggcgaaatattgtgtagcggcaacctgcacaattggtctgagaggacaaaatgatactgtattttgcaattgccatctaaaaaggatggctaccgtatcccttcaattgggtcatcggtgctttatttttcgccccttccgtcaaaaaaaacattttttttttaaacgttcataacatggagttaaaacaataaaattttaattggagatggtggtattttccatcacagcaggtgcgttggagaatagagaatttttatcacgattttatggacagaactcattaatttaattaaaatttagttttttagagtttacaatatacgaaaaatttaaaaatatacaagaattttaattcagtgctgagtattttaaaaaaacataagcaattaagctgagattcccagtttcggagcaattatgtggttttgtcaccaaatcaaaaatgtcgaacaatgtgaggaaagaagcaaaaagtatggcttgtcgtgcaaatgccattttggtgaggaagggcaagatcacggcaacgaacagtttacgcttccgccgccgatcccaattgatcagaacgagaaaggtatctga

SEQ ID NO: 54963 - DNA, 758 bp, Heterodera glycines
atgctaaggaatcaaatgctaagattaatatttgaagaagaaaactattcgcaatgttttatcggtaataatttaattgtttgttttataaaagatttttcaataaataaaataaaataatttccagtggctattaatttgcatttttctgctttttctcttatgggctatcacaaatggagaaaagtgtaattattcattcattcattcattaatcatttataatttttgctgatggttttgatggtttcccatcatttggtgacaaatcagttgttacatacatatcagtcaaaaccattttttgattaaatataatggacttactaaattactaaaatcctaatgagaatcattgagattgaatttaaatgcaaaaaattgaaatggttttataacacatataagaaatgttgaaaactattctgataggaatttttatagtatggtgacaattttttttagaaaacttggattttttatttgattttttatcaaaaaatatgaattttttgctagcttttttcaaatttatgcttttttatccttttcattactttttttatgtgtttcaatcttttttgtgcctttcgcatttatttcgtaaaatatttacggaaaatccaccaaaaacaaaatgcattcattcccaatgaatcatctccatcattctgtcacaatttctattcaccacttattcgatctgctgcaaaaccaaatggattcattttacgattaattaaaaaaattaaaataaa

SEQ ID NO: 54964 - DNA, 899 bp, Heterodera glycines
atgtcagaagaaatgaggcagcgattcaaaaatgtcctctgcaaatgccaaattggcgaaccgtacaaagacatgaccaatgatatgccaaaaatgacgcttccaccgcctaagccaacatcgccaccgacgccaacaacgacggagccaccgagtgagccgttagaattgggttcccggatgctcgggccaacgtccggacaaatcatcacagtagacaatccgtcataaaatttttgggcaataatgatcaaaagtcttgtgaaaattattgtaaaatttaataaataatatttacatagattcttaacatttctagttacttcatacttctattaattgaccatcttgagagaaatttcatttaagttttaaaaaatgattatttcatatatatatatatatttaaaaaaaaaataaatctagttgacggattgttcactgacagattgtctactgacggattgtccggggagcctgctgggccggggatgtcggtgctatgtcgttatataaaaaccatcaaatgacaatttctagagaatgatagcaagatcactttattttgttcgttttaagaatgttttgatcagaatttttgatgatcaaaatcattgtatttttaattaaaaaacttctgttagaaattattcttgttttttattttcttgctattcgtcgatagacctatgtgtcctctaaaaacttaaggctaataatttataattaaattcttatttcaaaaaatttaattaagtttcaaaaagttatggccaagaatgtttgaagacctgattccctgtgtacttttggcattaactttgtggaaacttgacgaaattttttgaaatttttactttctaattgttgaaattttcttttgatggttttaaaaaaaa

SEQ ID NO: 54965 - DNA, 770 bp, Heterodera glycines
atgcgagggggcgcgtcatatgaaattcatacaaatgagaggggtaaagttgtgcatggacttcatcaataaagtcaagaaaagtgagcatttcattctgctgtcgactctcgctgtcgacaaggtacatggaaagctaagcgggaagaagttcgagcagttagtcacatcagcaaatcactctaaaattgattatttggggcacatgagattgtagatcgtggagctatcatatgcatattatatttattagagtgcagcgggaccgggaattttgggcttaaccgggaccgggaccttttctggttgaaaaaccgggactttttggctgggaaaaccgggaaaaaaccgggactagtcccggtcccggtcaaaaccgggaccttggtactcagttgtactcagttgtccgtgtccaggtcccggtcccgctgcactctagtatttataatatgctaccggttttatttcctaatataaaatcttgaataaaaaataaattggaaaagtggtgccaggccaagtcgtctggccaagcatcttaaaccaatttgtgccattaaattcttttatttgaccgaatccaaataaaagagctttcacaaaatgaagaataaattccttacattaaatacatatcatttacagttgcattcggcaccattggacgacttactgcagtgccaatcagtttctgttttacgatgctgattggttagggaaaggaatacgaataatacgattttaaaaataataacttaaatattata

SEQ ID NO: 54966 - DNA, 214 bp, Heterodera glycines
atgactgagctttttgaagaagcgtgtccaaggtaatttttttctctgtcttattaactaataaacaattattagttacccgttgaaacctcgtgaatttatgacagaattattgaaagaagaataccgaaaaaactcaatattgtaaaagaagaaattggaacgagaaaatttttgtccttcactacagacttttggcaaaatctgcgcaaaa

SEQ ID NO: 54967 - DNA, 708 bp, Heterodera glycines
atgcaaaacaagagaaaaataaatgggaatattcaagtagttaaatatttaaaaaacaatttgaatatgaagcatttgtttaaaaaacaatttgagcaggtatggacgtgtatgactccaaattgtgaagggagagctgagtctcaaggtcgatcgagaacgcttcatgaaaccgcaccacacaatcacgctccgaaccaagtttatttcattcactattccatatgattattagataaaaatagttttaattcagagaaaattggaaaaaacgggacggacaagatgtgcagttaacaggcgatggaacaacaacaaacagttcagcgaggcaatggatttggaaaaaaaccaacattcgaatggcacgtgccgcgacagcgtacatgaatcaggccatatcatatgctattggtttttacaatatgcgggtgaatttacatcggtatgttaaaagcaacagatgaattttcaatgcatcgttgggcttaatattgaattattttaggtttataaccctattgtaaaatttcttttttaacaaaaggagattttgaatagcaaatggctaggaatgagttcaaggataaagcaaaaaaaaaaaaatttcagaacttaaaaatagtgataattattttcttacaagaaattttttttgcgaaaagcacattgtattagctaactgaaatgcaccttttgttcaataaa

SEQ ID NO: 54968 - DNA, 57 bp, Heterodera glycines
gctatagggaagctattcccgaaggattcggtctccccataaatctgggcgccttcg

SEQ ID NO: 54969 - DNA, 661 bp, Heterodera glycines
aaacaaaaaaatcgattttttcaagtgtccgtttggggtactcaaacaattatggggagcaaaaatccaacgcagaattaaagtacaggctatagggaagctactcccgaaggattcggtctccccataaatctgggcgcatcggttcggggggactgccccgaaaacaaaaaaatcgattttttcaagtgtccgtttggggtactcaaacaattatggggagcaaaaatccaacgcagaattaaagtacaggctatagggaagctattcccgaaggattcggtctccccataaatctgggcgcatcggttcggggggactgccccgaaaacaaaaaaaatcgattttttcaagtgtccgtttggggtactcaaacaattatggggagcaaaaatccaacgcagaattaaagtacaggctatagggaagctattccggaaggattcggtctccccataaatctgggcgcatcggttcggggggactgccccgaaaacaaaaaaatcgattttttcaagtgtccgtttggggtactcaaacaattatggggagcaaaaatccaacgcagaattaaagtacaggctatagggaagctattcccgaaggattcggtctccccataaatctgggcgcatcggttcggggggactgccccgaaaac

SEQ ID NO: 54970 - DNA, 1019 bp, Heterodera glycines
atgaatatgagaaaagacgtaaaacgaacaataacattgatcggtgaattgtcatcataatacacatttgaatattgcaaagttaacctttcggaccaaaagctctttaaaaagcgataaaaagggctctcaaattttaactttttttattttacctaatctttgattattaatttatttcatatcttttcgttgtttatgtaactcatttaacatgcattgtttgcttaaaagaaacttcagattcggtgtttatctcttaaaattaccgcagaaaaatttaaaaaacaaaaattcaagggccggatctaaacagaacaaaactgttgcatacatttacatgcacttttcggtttgatgttgcatcccatttaaaaagaacggtgaacaaagggcgatcgatacgcataaaaatcgatgtaatttttatgcatttggggaaagtttggcgacgaaatttattgtgtttaagccttcagaataagattgtttttttggtcaaatttattttctttttgcattgttccatttacataaatccatttgaggaaatcttggctcaaattgcggcattcatgcccattatataattcttgcgcctagttttgcaattcttccatttgttgattaaaaaaaaaatttaggccccaaaacggaaaagtacctattactattccccccaccccaaaccccgtaacattttttaagtttctcgtaatattttttataattttatctctgtattttattacaatctaaaaacattgcctataattcggactccaataattcaacccccgtttatttcaactctaaaaagtgtttttcccgttgcagcgtttttcggagtggacggagcaggaccagacggacttctgcaaacaccttctgcagcgcatgtgtcaccaccaacacggccaaattgaccaatttttgggcccaatgcttcggcgggacttcattgcgttgttaccaagtttgtttttgttttgtctgggtttttcccatttttagtgcca

SEQ ID NO: 54971 - DNA, 950 bp, Heterodera glycines
  unsure (1)..(950): unsure at all n locations
atgcaaaatgagaaacattcacgaaaagaatggaaagaatntaatgcaaaaattaaacaaatgtttggaatttattatagaacaattgaaaaatgggacaagaaaattggcttaaatcaaattctttcaaagggtgaaatttttaaacaaattgttatttattaattaaatttaaaaatttttattatttaatatattacagggcagaagcattatacatttgcggaaaaaacggaaaaaataaaacaatattatcaattgaaaaaccaaaacccaaagctcaacgatcgccaaattgcggaaattttaaatattacaaaaagatctttagaaagatataaatctgaattcaagagaaaaagtgaaggtgtcacggattgactgagaatatttttaagctttcagggccattcattgttaggttttgataaatttaaatttcttaaaaatttatatattattcggcatttcattcattttccaatttgttgcttatgtaagagttaaaagtattatgcataatgtttgaaggttgttttttttgttctattttttgttgtaattgccagggaacggatttatatgtgccaaaaaacctccaaaatatgtgctaaaaagctcaaaaaaggccaacaacatatgtgccaaaaattgaaaaaaaactgtcaaaaaataagtgaatttatcaaaaagatcacatttttttatccatttcgctagtacaattctaatcaaaaacatttcaattctttgtgacgtaaatatntttctcgctctccaagatttacttatttttctgtttttcatcgataaaattcaaattttgccttaaaaatgaaaaaagtcattaaaaaatatcaaaaagtgaaaaagaaaaaaaaagaaaatttttgatcatttttggatatcttgccaagaatttgagtgcaaaaaagctactttcgtaaaaa

SEQ ID NO: 54972 - DNA, 562 bp, Heterodera glycines
atgaaaatattattaatatttttattattatgcgcattaatattcaaaaaagcaattaaccaaattgaggctggcaaaataatccaagaaaaaagttttgctgaaatatttggccaaagatgggacgacggagcagaagaaaacatctgtcaaaatgatcaaataattcatggagaaattgctgatcagaataaccaatttggacaaaatgttcgacaatttgatcagatttttgataaaaatgtggaagtgaaagaagaggagagtgaagaaatgtccacggattatgatgaattgggcgaccaattgccaatgccaacaaataatggacaaatttatgatcaaattcgaattttaaatgacaaacagaagagagaaattgtggaaaaatttcataaaattaaggagaaagttaagcaaatgggaaaaaaatattcaacaaaagaatggaaaaaaattgaaagaaaaattacaaaaaaattgggcgtcagtcaaaagaaaatttacaaatggaagagagaatttggattaatcaaaaacagatattcggatgaggaaagac

SEQ ID NO: 54973 - DNA, 555 bp, Heterodera glycines
atggccctggagccgataaagcttacacatttatcagtgttaaatgcacatttaattcttttgagggaatttacacgtatgaatgtctataaagtattgtaaggatattatttagaatatgcggctagagaaatagttgaaaatagaaaacagtacaacacagggcaataaattttctatagtgtttaatgttttcgaatatttctaagttaattaattaaataaacgcgaaagtgaaccaaaaagtcgcgaagcattctaaaataaacttgcgtataattatgtccttgaataaatcaaccaaatatattttttaaacctctttttgctacaattttcaaatattgggtaaaaaataaattttcatagatcattgtagacttagtgcatggccctggagccgataaagcttacacatttatcactgttaaatgcacatttaattcttttgagggaatttacgcgtatgaatgtctataaagtattgtaaggatattatttagaatatgctgctagagaaatagttgaaaatagaaaacagtacaacaatggaca

SEQ ID NO: 54974 - DNA, 253 bp, Heterodera glycines
ttttgggagatcatttgaaagcaattttggagagaattggtgaaatggagaagcagcaacaacagcagacaaaaggcgaggagaaattaaaatgaaaaaatatttaatcgaattaaatgtttccattttaaatttaaaaattaatccgatttttaagctactgcggggcaattgtcaaagattttggaaaaaattgctgaaatggaaaaacagaacgaaaacacggacaaaggcgagggaattttagcgaaga

SEQ ID NO: 54975 - DNA, 622 bp, Heterodera glycines
atgaaagaaatcgggtaagcgaattttatataaaaagtgaaatattttaatatttttttttctttattcagttggggcatcttcggattcgctgttaaacagcagacaaaattggatggatcaattcgatgtgaaaagggcatttatgcatatgaaagcgatggcgatattcggattaacggaaaaggaaagggaacaaatgccgaatattcctacggtgttggtgatactgtaggaatgggcgttcatttggccagtcgacagctctttttcatcaaaaatggacttcgtttgggttagcaaataataaataatataattttacgattttaaattacaatttggttaattgtctattttatctaatttattttatgtttaaaataatcaaaaaccccttaactttttcacagataactctgattttttcgttgatccatcttttgctgatggttcatttcatccattcgtttctttgcgcgcatttggtgacaaaattgaggcgaattttgggcccaatttcaaattcgatttggcaactctctgaaggaagaattaattatttactaatgttttcgatcaatttgctcgtttttatcatttttatgtttttcttcttcaa

SEQ ID NO: 54976 - DNA, 1571 bp, Heterodera glycines
atggcaattggcaacggataccacaacatttcgctggagcaagacacgcgaattcgctacaattacgcacacggaatggtggacgagttggactggcagcggatcaaaacagatcaatgctcgggaaacattggtgattaaaagaaatgggaaaatgggactaattaatcagagactaacaaagtttagacagttgcaatttggcggacgtggtcagtcggaatgggacgataattaattaataaaacgatattaacaccacaatttgaaggatttgccttccgggttcaattatggactgaatgtttatgacatttaccaaaaatgcggtaaatgaaaatattttttttaataactatttaaaaaacgcaattcagacggtggcccggacgaggaaggccgacaattggaccaattaattgccaagcaaagggccgcaaaatggccacaagccccgccgccgaaatttgagtttctgtcggaggaaagcgacgttcaattgtcggaattaaagtgcgaaaatggtcagtcccacgcaaactcattagtaaatactttaatttgttaatgctttttagtctacgacatgagaagctatctgaacaaggcggaaggtaaaaggcgaataatttgaaatttcgaattattttcccatttttagtccgcgaagctttgcacgtctcaccgaatgctcatcagtgggccgaatgcgggtaagaaaaaaaaaaacaaaaaacacttaaaaaaagaaaataataatttattaattaattcatccatttaaggggcatccacaattacaagacacaatacggtaggtgggtttatgggatacggtaacaaatgcaatgcattccatgggaagtgacaaatttaaataaacacaaagccaaaattgggattagaaatgcaatacagaggagacaactgatcagcagatcatgatcatatgcaaatcacttgggagaggaaaaaaagaaatgctaatgatgaaattgagaaattgacccaaaagaaattgccctaattgataagtgagttaaatttattgcccaattaccttttttgggtaggccaatcaaattttaaaaagacaaaaaacaattttttttagagggcgttgaattccacgtgaaaaaagtgctgaaggcgggtgtgccagttctgctgttctacggcgacacagacatgcgttgcaatttgattttgggctctaaattttgtgccagtctcggcatggaagtaaaaatacgagaaagcccccctaaattattattacacgaaatttagctggaaaaatcggccaggccatggcttttccgaggccaagtgggcggctttaagacaatgtacaaaggcggactgacttttttgacaggtcgaattcaaaagaaaacataattttaaaaaaatttaaattttaaaatttttagttcgtggagccggtcatatggtgaaaattatatttaaaaaatgtaaattaaaaaaaatgtcgttttaaggtgccccaaaagaaaggcttcgaacttttgcatgtcatcgaagcatttatggaggggaaaatcatttga

SEQ ID NO: 54977 - DNA, 638 bp, Heterodera glycines
atggcaaaaaatgtccacaaaaatagcacaatgatttggcgtggcctcaaattgcgcacagtgccaatgcaaaaggaccaaaacattggaagcattattatttttgagtcatcaattgcttcacagaaacagttgaatgtttttaattattttaagcaaaagtgcgaaattgaatttattttaaaattttaatattacacgtttataaaataaaatttgtattaaaataatttttaaaataattttaagatataatttgagtgcaggacaacgcaatttttctgtgctttttgcatcgaatcaaattgctgagccattcactcgcttttctttggaagaaaatggtgagaatattattattttatatattttaaattggcattctcggctttcccaaaatgccattctcagacttcgatggccgtgccattcaaaatgatttcctccgttcaaatggtccgtcttttttgtcggattatgccgacctttggcttcttggacttgacatgctgccgatggcacaccaaacagaacaaagagaacagcttaagatggagctgttcatcagccgcagctccaaatgcttcatggaagcatgggtagaaaaacaactcgatcagaagggacccgttttttag

SEQ ID NO: 54978 - DNA, 225 bp, Heterodera glycines
atcttcgaaaatattcgctctttttcggcctgttatcccaaaattttttcagttttgcgagtaagtttttgtttaaaatatctaatttcgcgtttattatttgtctttttggtgtctgaatttgatttatgaacaacaaaattcgtctttgattcactccgtttatgggccatcagtgctcgaaatgggctcttcggagaggctaatgcttgtctgtgagtttgg

SEQ ID NO: 54979 - DNA, 351 bp, Heterodera glycines; identical to SEQ ID NO: 53910

SEQ ID NO: 54980 - DNA, 478 bp, Heterodera glycines
atgccaatggacgagggcgcattgccatcggtgacggtgatgcgtgccaaagggtcgctcactgtgctggaggtgggctcatcaattagatcattaattaattaatttttaattttatttcagatggaccacccaatcgtgtccatgttgccgctgcacgcgtcgccctacgccagcgcagcacaacatccgcacgccatggctgtgctgttgcgcaacgacctgctggttgtggacatgcaagcccaagggtacaaaatggcaattaataataaaaattaattacatttaaataaagaaataaattaattacattataattaattgattatgtattttatttgagcgaacccgaatttaaaaaaaagttatttaaattaatttcaaagttatttaaataatttctttctttcagatatccctgttttgaagtgcctcatccgatggatttgcacgaatcgccagtcacaatgatcaa

SEQ ID NO: 54981 - DNA, 126 bp, Heterodera glycines
atggtcaactgctgcattggcagagtcagagaggggtcacaaagagttcgcacagcatcgaatatttccttcattttgggcgtcattcttccccactgcacttctttcttcggtttaattacccaa

SEQ ID NO: 54982 - DNA, 883 bp, Heterodera glycines
atgtgccgtgccgttggtttgctcgataaataaataaataaattcgtgctctttcagatgggcttaatcattttttcacgaaaatcttttttcaacccacgaggaatttatcaaaaactttctcgatttcaagccattttcaggttttcagatcaccattgaaggagtgatctattttgtgttaccaaaaccaaaatagaaaatttttttattaagaaatctcattttttggcattctgcattgctttgcacaatataaataattaatttgcgaaaaattttatcacattgtttagatgggctctgcgcaaattcgggcgattgtcccaacaaatttctttgtgcaacatttgcggattcgaaattgagtgccaattcgtccaaaactggttactgtatcccgggaataattattggcaaaattgtgaaaaacaatggcaattttcaacccgattgttcaccggcaccgcaaggagcacaaaaatgtagcgggcttaacggaatttattatgtggacaattaatgatgacggatttattttgaacatttttgatggcatttaatgagattttgaaatagttttaattcaatcctaagcttttttttttgcctttttgaaagtcgaaaattcgtttcgttttttaatttacatatttataaaagtttttgaattttattattaatattattattttctggcgtaaaccctgctgccaacaacaaattgagttttgactcccactgaaaaacgcagtaaaaatccaacgctattgtttatattaattatatatatatatatatatatcaaatgtttaaaccttaccaaacatttgaacattccaaaaattagaaaattttccaacaaccactctaaattgtccaa

SEQ ID NO: 54983 - DNA, 1136 bp, Heterodera glycines
atgtcggcatcaccagcaccaccaaatgttccggacctgagcgagttcccgccgttggaaaagttaacattggaggatgtaaggaaaaagaacaaaattgcctcggcaagcccaagtggaaactcaaatatttctaaggaaacctgtagtagtgcaataagtgtggatttagttgcttcggcaagtcaaataacttggggaggggaaaaagggaacagtgggcaagaaaaaggggaaaagaatcaaaaattaaataaaaatgttgcttcggcaagcccaagagattatgaaaaatttgcgaatcaaggatttgacaaaaacccggatgaaatggctgaagaaatgatggaagaattttcaagttttaatgtgagagaaaatgaagaaaaaattgttgaatacctggtttgccaagtagaagaaaatatagtgattggaggaaaattgaggacaatggcaaacaatggctggccacattttgtagcaatctcaaatgaggtggctgaaaaggcaagagagtttaaaaagaaattgcaaatgggagacatagttggagtgaaaaaatttgagtggaaaaatgattaccgatacttagcaaaaagagaaactgacaaaagtcatttcaacaaaatgtggtatgtgcaaaaaataaacagtcaagcaacagtcattgacctcggtcatataagatatgcaattctgagggaacataccacccccccccccccccgcccggtccaattgggtggcctaagaatggggaggaaaacaattccatttaggtgttgtttggaaaattttacgactttgatgaacactttatttcaaatggctttaataatcaaaataagtttttttaaacagttaaataatgttttatattttttttatttttaataatttgtttcaatttattcaaaatgctaccatttaactcagttatttgccgtatcacttcaattaccccacccatcattagtgttcattaatttttgcagctgtctctcccaaatcgatcctccgtttttttcccgggggccgctgggatttaagcccaatgaatttgtgtgatggaatggacccaattagtacacaattttcattcctccacctttttcccaaaatgggctactaaa

SEQ ID NO: 54984 - DNA, 2015 bp, Heterodera glycines
atgcatgaaaaagccgaacaaaccgcaaaatcgcatcagtcaaattctgccgcttcttcccaatgtttgtccaaattcggcattggatatttggccaaaaaggagggatttccaatccttgcgattatttgcacagccaaagtgttgatatggcgaattactacagcaaacacattttaaaggccaaagaattggtagttgaccatgtgggcgatgttcggctggtcatcaacgtgtccggggttggattcaaccattaattaatttattgatgaattaaattatatacataaatttagcgtcgttttgagacatggaaatacaccttggaaaggtttcccgaaactctgttgggctcaagtgagaaggaatttttctacgacgaaagcgccggcgaatatttcttcgaccgggaccctgaactgtttcggcacattttggccttctacaggaccggcaaacttcactacccaaaggtgggaaattaaattatttggatgatattgtaaagtaattaattaattgtgtagaccgagtgtttggttgcctacgacgacgagttggccttttttggcataatgcccgatctgatcagcgattgtatgttttgccatttgcaattaattggctgaaaatcaaattgttttgcattaaaaggctgttacgaggagtacaaggacaaaaagcgggagaaccaagaacgactgatggaggagcgcattgacgcgcccgacaaacgcaagaaggacttgacactgcaggtggggggggggggggtgggtaattagcgcagagaaagggaaactcgactaattaggataattaattaggcagcagagtcaaatctcagtcatttgggttaattttaggagaaaatatttttcatggaacccgggaggttcaaacccccgttttttcttcttaaacaattttgttttgatcctattttttcaccaggattttctttttaaaatattgggctaattataatgtaattacttttcataattattaatgctaaaattttcagcaaaaactgtggactgcctttgaggtgcgtgaaatattttttattatttaatttttatttatttccaaattttccttctcattgtcagaatccccacacttcctccgtggctttggtgttttattatgtgaccggctttttcatcgccgtttcggtgctttgcaatatcatcgagacaattccatgcaaatatttggccaacaatgtgtccatcacttgcggcgatctctacgaaaaacaggtggacaaattcaacgctattattatttatttatattttcatttttaatgtatttttaattatattttaattgatcttgcagttttttgtgcttgacactgcttgcgtgatcattttcaccgttgagtatatgctgcgtctttttgctgcgcctgatcgttgcaaattcgtccgttccattatgtctctgatcgatgtgatcgccattttgccctattacattggcctggggcttcaggtggccaaaaacccgatcatttcatttatttttgtttttaattttgaatgttttctttttgtaaaggaaaataaggacgtcagcggagcatttgtcactctgagggtgtttcgggtatttcgggtcttcaaattttcaaggtccggcacatttcccctttttcatggcatttccctccccccaggcattcccaagggttgcgcattctcgggtacacgctcaagtcgtgcgcgtctgagctcggctttttggttttctcgttggccatggccatcatcatcttttctacaattatttactataccgaaaaacgggtaaattcgaaattaaaattggcaattaaaaaattgcataaatttgtttgtgcataaattgcccattttcaggtcactgaaactaaattcacgtccattcctgccgccttttggtataccattgtcacattgaccacactgggctacggtgactttgtgccgcatactgtacatgccgaatttgtgcattaa

SEQ ID NO: 54985 - DNA, 1103 bp, Heterodera glycines
atgaacatgtaccagcaacaccaccaccaccatgttaatcagctaaaatatacggacatcaacaaacaatccaaccaattgtattcatgtacgaccgccacaacgtcggtgacaacgccgcactgcaacggcgacgacgacgacgacgacaacggtgacgtggaggaaggcattggcattccgatgcgacagtcaaaaggcaatttccgaaatggtaaattgttgaccgatccaacaatcttgatatctttcgaaagctcttcacaggctctattagcctaataaaaattacagagaatgtctaactgaaaaaaagaacagagacaacaacacttttttgtgagctacttcagcatttagaaataacttatttgttggcaatacatatcttctaatcatttaaagctttcgaatgatatcatgtttgttatgtttggtcaacagagaaaaaagttatagctttgtgaaatttgttgagacggtgttgactcctatcgaaatgggagaggcaattaggacattttaaacattaattacaacagtccagcaaccacttagcaataattaaaaccattagcttccttttgcgtaatgatttagccaattcttcgccatctccgcccgtccgaattgtcgtgtcggaagaaaacgacgaatacgagccaacacagcagcagaagggcaatggtcaagatgaagcaggggaaggacaccaacattatcaccaacaacaatggcatggccatgatgaaaatgatggcgatgaactgttgggagacgaagcggcggacaatgagaggcggaagagttcaacggaagaggatgagggagaagaaatggaggacaaaacggaagaggaacggacgaggaggaggaaagggaggagggacagcagcaacgacaatggcaccacagaaatgcccggcacggaaagcgtcggcaaaagcagcagaagtcgaagcagcacatcggcacgggacaaccgctgcagtccgaccgccgcagcggggcggagaagacggaaacggcgcggatgggcgcaaaaaaggggcaaagcgcaagcggaggaggaagaggaggaggagtgtatgtccactctttga

SEQ ID NO: 54986 - DNA, 1055 bp, Heterodera glycines
atggaccaatttttggcaacaaaatgcaaattcgagaaagaaaaaataatgtcgaaaatgaatgagaaaattagagaggaaaaatatggccaaataattggccaattgaaacaattgcgactctctgaacttcaatttggacggcagaaggaaaatgtaggcgaattgagccaacaaacagaagagtttatcaaaatcattttggcacattgggtcggaagcctcgaggcaattaaggttttgaaattttatggaaattaaaaaaaaaccaaatttaaattaaaaaagaaagttgaaaaaattgttgtgaatttcatctacaaataatttcttaagtggaaattttattttttttttgtaatttttggcagagagataaacaaagacaaataataaaaaaagaaaagaaaaaattgtacattgtaattttagaaatgtttaggtttttttgtaattaaaataataataaaatttattagcgtgaaattcgaccgtcggagttaaacaaagaactggccaaattgaacgaaccaaaagacaatttaatagtcatggagaaactgttcgatttggcatggtttttgtgcgcaaaattgaaacatgacgaaaagcggtacgaattggcaagatcgaagacaatttggcgaatgatcgattggaactattacgaagaattggagtggaaactgtgcaagactcgggaacttattcggaaaatattagtcaaggaatttcaagtgccaaagtcaattcattcagccattaacagactaattgactaaaataataataataattagagtgctcattttgcagcatatgctgtttttctttgttgctaacttggggcgtgataataagcatgaaaaacgcattcctaacttggtttgaggcttctaagtccacttttttcatgctgatttttgcagatttctcgattttttgatttttgtgctgatttggcgtttttatgcttttttatgctgtttcgtcattttgagcaattttttaaaatattttcagcaattttcaaaaaatttattaacaaaaatgca

SEQ ID NO: 54987 - DNA, 1665 bp, Heterodera glycines
atgctttttcgttctgcccgctctgttggccaacactgtgctgccggcggaggtgcaattggagccgaaggcgggcgccaagcagtgcgccagggacatgcagccattgcacgacggggtcagctgcgcggaggacgcgcagtgccaagctttggccaccggctttttctgctacagagggcactgttgcgcaatggcaaagcgtaaattgcgaatattatggcaaatataatttatttcgacgcgaatagccggaaaattttgaaattgccaattaatttgcgcaaatttatcaacttttcttccactcattgggtttttgagatcaacaagccgcggacatattaagccatttggtgtccaatatgccggccgattgccatttgaaatattaacaataaatcatcctaattgtttttaatttaaacagcgtccctctcgagttacggtgccgcgtgcacattggcagaacattgcaaattcacaaacagcgaatgtgccaacaacatatgctactgcaggttcgggtacagctttgacggctacgaatgcatcccgcgggggacggagtgtaaaaatttaatttaattaaaaaataatttaattaataaccaaattcccgccggattattctcagatgatgccccgcaatcgtcaaatttgtgcctgtccggccaaatgctgatcaacggtcgttgctacagttacgtcagttacggtgccacctgcgattactgtacaccaccgttttgcccttctcatcatcattcccttttaatatttggccttttaaagcggaacaatgcaattacctgggcggcttctgctaccagcggcgctgtgtgtgcccaccgggccaaatttacaatggccaaaagtgcgcggacgacccaaacattccgtcaaacggtaagaaaagcgaagggcaaaatccacttatttgttaggggaaagcaattaaattatttaataactatttatttatttgttgtcaataaagaaaagatccacaaaagagagatgcgttactttttggacatccaaataaattaattgtccaaaagtaattaaggaaaataaaaataaaagagagaccgcacaattaaaataaatataagtcaatgcagctcaatttatcaaaattatcgcagcgcttatgtaactaattaattaaagatttatttatatattttttcagtcatttggccttataattattctaaagattttttgagttttgttttaaaattattatttttgcatgttctttatttaattaattccacagtttagttgcccttcccgcaaaggaaatagattttttggcaaataaaatcatttttaacaaattaaaaaaaaatttaatttttggaaaaatatggtattccaatcgtagtccattcattttatttcattaattttcccattttcagctgcttgttcctcgaaccaagtgcgtgtcaatggccaatgctttccgctgttgggcgttggcgaacggtgcgtcagcgatttgcagtgccgcggacggccgggcgaagcggcactgatctgccggaacggcgtgtgcagccaaatcggccgaagttgggagccgacggaggagcagcgggcattccgtcggcacttttaattgaaaataataaatgcatattcaatttataa

SEQ ID NO: 54988 - DNA, 101 bp, Heterodera glycines
atgcgacgaaacaacgctttgctgtttctgctgtacggagtgggcctttccgcactgcttgtcgagctggtcgatgcgtatttgtacggcggaaacattgg

SEQ ID NO: 54989 - DNA, 595 bp, Heterodera glycines
atgcacactctcatggtgccgtttcaggagaagttcagtcggctctgttcgctggagcacgcccaccacgagcacatggaacgcatccgcgcattgaacgcggacggagaatggaaactgaacatggaaatgcgggagccgggacagaagttggctcggcgcattcaggagttcgacacggtgttgctgaccgcgatgaagaagatggacccgaatccggtggccatttacttggtcggtgatgacggactcgagtccaacctctgccaatgcttttccaataaaaacacgcgtcgtgccacactttaagcttaaactgtgcaacgaaattggcacagcgatggccgcccttcgggtgcaggatgaaacaattgcggtggcactgccgcgtctgatgcttttatctgctgccaaaaaagtgctaggcgaaggcatgcgtttgctcggcattgagcccatcgaaaggatgtgaagtgaacggacagactgaggacagacaacgaggcgacgtggtgccgaaactttttgttattgtttattttttttcacccatttcactgttgttatttctgaagatttgtaacaaaataataaa

SEQ ID NO: 54990 - DNA, 764 bp, Heterodera glycines
atgtataaaaaacaggcaccattcaccggaaaattcgacaaacatttcgtagccgggggtaaatacacttgcgtgtgctgtggtgccgctctgttcgtgtcggagcagaagttcaactcggggtgcgggtaagaggtcaaaaattgaattgaatttccaaaatttgtgctttcgcagatggcccgccttctccaagtccattggggacgatcaaaacattgtccgactgcccgacaattcgtacggccgtcaacgaatcgaagttcgatggtaaatgtctaaaaattactaaatttccttttcgtttaaatttcccataatttagtgccaaatgcgacgcacatttgggccatgtattcggtgagttttattactacgaaattgtaaactatccgttaaacatttgcaaattcatcaaaacctaacaataagatgacggaccgccggccgacggtgggcagagatactgtatcaacagtgtggccattgactttgtgtccgggcaacagaaatgaggaaattgagaattgccctttccgctgtgatccgtcattgaccggtccatcatttgttacgagttcaaggggttttctgtgtgccgggctagaatccctgagatttatttacaaattaatgaaaatgccggacagaccaattaatattttttttatttgcttgtttggctatttatccaatccctttttcatttatttgtttgtgattttttggcttttgtatttatttttttcggttttcataataaa

SEQ ID NO: 54991 - DNA, 262 bp, Heterodera glycines
ggaacatcggcgacccgcaaacttcgtggtaagtccaaacgccatgatttggtttatttttgtttcttgaggctggccaaccgaattcgcaaccaaggactgcccgtactgattgattatgatgatgaccaactctgcctgtcccatttcttctttcgttttttgagtgcataattttgattgacataaatttcttgtcactatttttctatatttattcccagaaaattaattttctctgtataaaaatggacaccaaaaa

SEQ ID NO: 54992 - DNA, 1006 bp, Heterodera glycines
atgatgtaagtttaatttaaaaataattcatttaattatattttataattattttaacaatatatttaaaataaatgtttaataattgttgaaataaatttaatatttagtgatatcaaattgacaattgtaattgctgatgcggttagaaatgtcaatggaaaatcagtttggacattggttggtagcgatggttacgattttatcaacatcacaatgtggggcagcaattacgaaaaaatggcacgagaattcggacaagaatttaaagttaaatttataatttaattaaaaattatatttattgttaagcaaaaaacatatgtatttaatacttggggagtacaaaaagttattccgaatttcaattatggtaatgttgattatgaattaattgcaaaggaaggatcgacaattaccctgatcaccgcggaacaatatcaaattttatcgataaaaacaaccaattatttcacatttttgcgtgagaaatttgcactcgataatgatggtttttttccaacgccaatcaaaaaaatgcgcgcaggcgaacagtttgtgtaagttaataaatagggattttagctaaaacaaaaaaataaaatttaagtgaaattgaatgcgaattattcgaattaaagcccgtgagaactgtaatggcaaaaggaaacgaagcacgtgtcattgatgcaatgattaatgaaggaaataacaaaactcaattaactgcttggaatattcttgcggattttcttgaatatattttacaagacaaaaaggtgtattaaaatatatattttttaaaatattttttaaaattaagggatatgttttaaaactccaaggcttactcacgaagaaaggctttccggttcagaatatttcttttgtttttaccaacacttctcgaattggatttgctgaaaaacagcgaccagagaaaattccattgaaattggcagaattaactgaaggactttgtgaatgtaattttaaaaagttttga

SEQ ID NO: 54993 - DNA, 788 bp, Heterodera glycines
atggttaaatcaactgctaatgctaatggtaccacggaatttggtggacctaaagagcaagtggtgaagcacaactatcgagtgtggtgtgatggatggtgagttgtttgcccaatttgtctttttcatatgacatttagttacgacatggtccatttcggccatgctaatcaacttcgtcaagccaaacaaatgggcgcctatttggtggttggggttcgtttttgaactcatttctatttccatgtattatatcatcatttttactttttggtcaggttcacaatgacgaagaaattggaaagcacaaaggccctccggttttcaacgagaaagaacggtaccgaatggtccgcggcatcaaatgggtcgacgaagtaaatttggacatttggtggcacttggctaaaatgcccactcacttaggaactttcagacaaaaacaatatctttttcacccttatcttttaacttagaaactattatttctgacttttttcagattgtggaagcagctccatatgtgaccaccttgaaaactttggatgagaataattgtgacttttgtgtgcatggcggtatttatttattttttgtaaaaattccttaaccccttccaattttgtccattagatgacataactttgaccgccgatggaaaggacacttatgccgaagtgaaggaagcagggcgttacagagaatgcagccgaaccccgggggtttcaacaacggtaattaagagagtattcatttgggtgtatgacttaaaaaataatttaaataaa

SEQ ID NO: 54994 - DNA, 928 bp, Heterodera glycines
atgcgcacccgtccgatctggcaagttaagcaacgattgatgactacccaaaaggttcggtgccgtgatgaaacaaaccagcactgcttaccccgcggcacccggtacggtcccccgaaagaaaggagttaattaaattctctccttcggtatatttttttccattatgtcgaccgctaacgatcgattgctctagtcaatttttctaaatttttgctgaaatatttgtcgtgctctgaagggagtggaatggtgaggatatattgtattgcttacaaattatttaaactaaataaaacatcactttttatatttttattaaatacgtatttaatgactttttgattttgttctgtatggtccgagcattcatcgattcaataaacaaattaaataataatttcttatttcttttaattaacgatttaaaatattagcgcgtaattatcttggtcttatttggttattatgttgtatatttattatcaaatgattatgttcgggccaggccgttttcgcgttgctggggacgttttcgcgtgagggcctgtttaggactgaagttctactaataatacctgcagagcattagaccgtgaacaaattattagaatatatatttgtcagtcttaatttagtttctaaaattcactttttcatttaaaatatatattgaattaagcacccgaagtaaaatgggagtgaaacaaattttcaaaatataaaaaagtaaaaaattctcttatatgcaaccacacgaaaacggcccacgcgaaaacgaccctgaccggattatgttatgtcctcttgctgtacacagacgctaataatttacatacttaaatgaataatttgctttatgtcaaattcaaaaaaattcatgaatttattttttattatacagaatatttataaaatgaattgcaaa

SEQ ID NO: 54995 - DNA, 1572 bp, Heterodera glycines
atgcccatatttcgcgcaataaggtcggcctcacgctcgcgctccgttgacaccaacagtcgcacgggctcgcccgcatcgccgcgccgggcacggtccggctcggccaactcgcggcgcagctccagcgctggtcgttcgcgctcggcggggtcgcggcgccgctcgcgcagcagcagcagccaatcggtcgccacaaattcgtcattgggtggcggcgccggtgctggtgacgatcgctcgtcgctcgagcgtgagaagtcattggactacagcgatattgtcactacggtagcacagcgcgtgggtgggcgggggtacggtatgaaaataccgtatttacgcaatgagaactctcccctgtattagatagaacccccctatgaaataaagccccgatttcaagggtgaggtaaacacaaaattctgagctaatatttttatttaataattatttagagtgaggtattatgatggaaaatggaaatatgtaaaacaaaaaccgatttttgaattaaaataaatttttaaacaaaaaaaataaatttaaaaaaattattcaaaatttttacagaaaaaaaatcgcaaaaatttcagcgcaaggagcaaaagcagcgcgagctgtcgcattccccgacgccaccgccgttgaaaaaatcaaaaaaagctgtgctcaaaaggctgaaaaagggcaaaaaggacaaggacaggcaccgtgatcatcaacaacatcgatgttcgtccaagaagaaggtgaagcagtacgggaagcaacagcagcagctgaagccgaagcagcaccaaccgcagcagcagaacatgacgtcgccccattcgtcgtcggggtcgtcgcccgaggcgcgacaccgccaccgtactgaagagtccgatgtggagatggccagcgacgaggaagaacaacaacagcagacagagcacgagcagcagcaggagatgaacacgaaaagtagcagcaaaaccaagcagaagcaccagcaaattgctgttggggggaagaaggtgtgtgggtgggtggttgggtctggtatcgggaaaatgtaaatgtgtaaaaaatgaaaatttcaaaaatctattgttagccatgttacgacaattatttattgttataccgaaaattattaaagtaaattcgattttttttctggcttttggcaattttttccctcgttttttttttggcttataggtcgaaaatgctaatttattatttttttatttgcgcgaccaaatgccggaaaatttattttcactattaaacctcaaaattaaattatttaaacattttaaatcattcgatttgattggtccagtcagtttcatactgctattaaaaattttttcgtggtaaaatcttttattttcaatctgcgaatcaggcaagaacaattattattaattaattaattaatttagtcctcatttgtcaaccgctttctccccgctggcgccggcgctggcactgttacgggtggcactccttcaatagacggatcgtcagtgaaaacaacagtaacatcagcggagttgcgaaggcgacacaattgtgcttga

SEQ ID NO: 54996 - DNA, 60 bp, Heterodera glycines
ggattgctggggtcgtgggttcgagccccaccgggcgagttaccttttatgttctacaaa

SEQ ID NO: 54997 - DNA, 519 bp, Heterodera glycines
atgtccaatcaggaatggacagcttcacacgtggtccaattcaaagttcaaaaattggcttttgtgtcgccttgcgaaaattatgcgcttttcgaaatgatcaaaaaagggcaattggagagacgaattggcgcaaatgaatcgctgaaatcgattgtattggggcgatggatgacggacggagtggaagagcagcagaaggacaacttcctcttgctgaagaaggatccgcatcccttccaaccacaagtgattcccggccagctgatcactcggccataaactcaattagctaatgagtctaatcataaaaaactgatcagtcgcccttctctcacttgccaatcgttctgtcccttttgagagtggccgtgcctttgctgaggatttgaagttggctgagcccggctcgcgcactttcaagacggcctcacttcgcattgaggacggagtgcacgtgtgccattattcacgcggaatgaaaaggcagtgccaatggaaagtcgacgaagtgctttg

SEQ ID NO: 54998 - DNA, 61 bp, Heterodera glycines
ctgacataataagcgtctgtctccttcttcattttgttccccttttgactgcacttcagca

SEQ ID NO: 54999 - DNA, 513 bp, Heterodera glycines
atgccaatgccgaattcaaatgatggaccgtatgaaagcgaacggaaaggtataaaaaatattggaattgcaattatttgtacgaagttatcccaaccaaaggctgacaatgaagcggatttacatcggcaaatgttcatcactgatgtcattcttcgtaattctgagcttctctgcacatcaattgcaaaattcgattcatttttgcttcgtctacgtaaatttggaccaaaattagccgctctgagtgatctcatctcatccacttcatctaacgacacttctacatcaccggatgaccctcatcaattgctacaattcagagccaaggaactgctcgacctttttcccattgttctggagatgtacgaacaggaactgtcatttaagcgggactcagtggttgatttggcagttttcgatgataaggatcttttcacggcgattatttcggcatggaaacatggcatttatattgagcctgcaattgtttcgttgctttatcctttttga

SEQ ID NO: 55000 - DNA, 1177 bp, Heterodera glycines
  unsure (1)..(1177): unsure at all n locations
atgaaagatcgncgcacaacagaaaagaggaacggagccaatggcaaagaagggtaggtnttcagagagcgcggtgcgccacgtaatccgcgggtgggattgggactttgagggacttccaaaattgcgggaataatcccgcgggaatcagtcccgcaaaaattaagagttctaatctcgcaatggaattcgaaaagttacaatttctgggtttagtgattaataaacaaaaaaaaacattaattggttcggctcgcgccgtaaaacggtttttttgttaatcaatctttggctttttgtgaattctttgattgtttaagcattggtcgacgaacaattcgcgcagttgcaaaatggtcagaaggcaattttggagcggatcggtgaattagagaaaaggggacagccggacaattacggtaggtttacgataagtgcattttgaattttgaagaaacaaagtttacgcaatttcaatttctttcattttttcagcttcaacttccaaggcaaatgaccaccaattcgcacaatttcaaaatgatcagattttcttcaattgctgggatgacaactttcgtcaaaaacaactgcaaatcgacaacttaaaagtcgtccatatgggaactagtaatttttccgaaaaattactgtcaaatttaaattgctagaaaattttctataatgaatatacaaattgaacagttatgaccatttaataatgtttaaatctcaatctttcttcaaaggtggtgaccgcactgtctttgccaaacattccatattggcggccgttccttcttcatctgtccttttttattttgagatttccatcataaaaatgaaccggcaggcgtatttattcattatatttttatatattcgaatacaattcggatattttttactgtattgattatttatttccatcattttgctctttttcagtaccgcctgctttggatttgccataaaaaatacgagaaatcttgctgggtcatttttttctgaagcgactgcttacgcgtatggaagcaagggcaaattttatgtcgacggtaccaagaccttcgcaaatcccacaaatgccttcgcaactggtcacacggtcggatgtggtgtcctggcaaacagggaattgtttttcacgaggaatggactttgtttgggttggtaa

SEQ ID NO: 55001 - DNA, 59 bp, Heterodera glycines
taaatatgtactaacattttcaaattttccatattactttctaaaaaattctctatagt

SEQ ID NO: 55002 - DNA, 848 bp, Heterodera glycines
atgacctggacccaggaaaaatccaggcctggatccaggttagtgaacgacaaaacgacttttttaacgaaaaaacgtcgttataaattcaaacgacgaaaaagtcgtttaagcgattacgacgataatcataaaccagcggtgaaaaacggctaaaaattcgttcacaagatgtggatgatgcgggaattgacaaaactccatagccaaagaagacaaaaagtgaagtttttttgaattttctttccaaaaatcaagcagatttatcttttacctatttttgaaacattttcaaaaaattccttccttaaagtagatttagaaagatttacttcaaacaaaaaataaacaggcagtgaaacaaaaaggcatttttcagttaaagtggtcaaaaaaagatttaaaaatgtttttagcaacctacccatatacacgttgcatgagacatgtacacattcataagttacatatttgtacaatatgtaacccattatgtgtacatgtgccatgcaacgtgtacacaggcaaaaccaccaaaagaaatttcgatttttgaccaccctaactgaaaatttcacaactttttttcgtgcaattagaaaataacaattttagtttatgttctgtttcagccactcataaacagattccattgaatatctttcgctgctcctcacgctccaaacgttatttcatcagagttgccaaatcgaacacgaattcgggtccaaagttcgcctcaatttcgtcaccagattcaagcaaagtaacgaatggaaagaggaacgcacaatcagcagatagagaaatcgaaaatgcagttgaatcttaacaaatgaagaattaaa

SEQ ID NO: 55003 - DNA, 2186 bp, Heterodera glycines
tcatttaacacttagggcctctattttctgcatactttcgctcatcaaataccatgggtttttgtgtcttcaaaattgtttggtcgactcaaattggtaaaaattttttaatttcaaaatttaatgtataaattaaggaatgtgaaattgacaaattttgtgacggaacaaatcattggggacaaactgagacacaacgagcttaaatacatgacggaatcaagattaaaatcgcacaaaaaggcaaagaaagtggtcaaggatgatgagaaaaaaacggcgggtgggcggagagacgacaaagaagagagagaaaaagacaaagaccgagaaaaagtgagagagtgggaggggaaaggagaaaaagtgagagagtgggaggggaaaggagaaaaagtgagagagtgggaggggaaaggagaaaaaatgagagagtggtgggaacaggagaaaaagtgagagagtgggaggtgaaagagaaaaagtgagagtgggtgggaaaaggaaaaaagcgagggaaaaagtgagagagtgggaggaaaggagaaaagagtgggaggaagaaggagaataaaatcgagaaaaaaagaatatggaaaaataccggtatttacggtattagaaccccccccccccctgaattacaaccccccttttgagggggtgaaaaatagaacccccgggggttctaataccgtaaatacggtataaaagggcgagaaaattaattctttatcaattcgaaaggacagagaacgcgagaagcggcgccggacccgtgacaaggaaaggagcggcgcggacagtacggaggacagccgaagcgcgacggacgaggagttggagcagtccaagaaaatttatgagaagtcgcacctgaagagtttgtcttttctaaattcatttattcttaattaaagtaatataatttaaataagtttgttttaaaaatcctccgcccccttcagaatacattcagcaggcaccggagatcatccgcgagttcatctccacaaaacatttgccaccgggcagcccggcatcggacatgtacaggtggagaatgatgggggagcacaaatcgacccaaagaatttttgaatctgttagcattttttttcttagacttttcatggtttcattaaatggacggaaaattcccggccccatgctattaagaaagtaatttaacaacttctccattgaagccttggcatggtgctgtaccaaatcctgttcaagttggagccattctatgagcggaatatgcagccaaaaagtgccaaaattgacaaaaaaaatacttaattttttgaaatttgtcttagaaataatggaacgaatcgcattggccaacgaagacgaccaaatcatacgcccgaccttcccaaaacagcaagtttctgccatcgaagaagcatacaatttccaacttctatcggtttggccaatttatatactgtagttgtgccgattacggtaatgaccaattgtttgcacaggcgctggaggcatgttggctggaaatcccggaaatgcgcccgaacatcaagcggatgaagacaatggtcaactcaaatctgaagtcgacgggcagcggcagtctggtggatcagatgatgaaaatgatggaggacgtaagagcaaaaagcgaaacgccataaaccgaaattagaggcccaaattcgcgaagaagcgatgggaaggaaattcagttgccaccaaactcattcgttacaattaatttgaattaattggatgagatgggttggcccacaattttggggcctaaaatgcattaatttgtcagtacacaacaaatctcgaacaattggtcaaagagcggacgcaactgttggaggaagcgcagcagcaggcggaccgactgttgaagaatatgttgccacagtcagtggccaattttattttggaaatattaaatagcgcattagcataattaattattaattacccaatgtaaatatacccaactcaaaggtcaattgccgaggacctgaaggcgggtcgtccggtgcttcctcaatactactcaaattcgaccgttttgttttccgacatccgcggcttcactcgcatcgcgtccacctcgacaccgattcaggtcagacacaattcgaacgatcgaaaagattcggcaaaatgtccatcaaatttgatccgctttg

SEQ ID NO: 55004 - DNA, 1287 bp, Heterodera glycines
atgccacgcgcttcggctgaccgccgaccggacgcgccacgaggcggacgtgcaggcgcgcctgatgcatgccaaggaggcgcaagtggaccaactgcagcagcgagtgcaccagtgtgcgcacgagcgtgacgaggctgaggcacgcgcgacgcagtacgcgcgcgcgtacgacgaactgctccagcagacggagcaattgcaggcggaacaccggcaggcggcggaggcgtgggaacgcgacacgcagcggcaactggtcagttgatgaataatctagcggaaaacctagaattttacaaatttgactgaaattgtttaattttcggtgttaaaaggtttcaaaaacagaaaacggtttgcccctgcttttcaggacgaacagagggccaaaattgtggatgaattgggtgcacagaatgcggcggaattggaccaagtgcagacggaggcaaacaacgcgcaaatgcggttgacagaaatgctgaaaaaggcggcggaaactcatcggaaattggtgggcagaattcgcggatgaattttcaatttttaaattgggggttagtagttcagctgaaaatgtgtattaatttctagagatatggccttttaaaaattgtgaacctggttttgggtgcttcatttcccccgagtcgtttccccttgaaatctaaaaaaatttgcaaaaaaaatattggaataaaatttccaatttccacgccctcattcattcgatgcacttaaaaaaattcgtgaacttccatttcatttttaaggaggatgagcgcaatcaactgtttgagaagcacaaattgttggaggacaatttggaggcgtacaagcgacgctttgtggcccaactgcagcgagcgatggacacgcgctgttcacagatgggcaaaggattgcgcaacgcatttgcggacattgtcggacagatgggtgagttggtggaattatggagtaaaaagaaaactatctcataaaggggcgggggtgccctatttccggcaatttttttagtgcctgaatttcctgcaaaaaaattttttggcttgcggagtcacccccccccaacatgtgccacacagactctctgaaaattatttttaatcttacgccgccaattttttttagatactgacaccgcggcgtcgacgacggcacggcctttgccattgtccgaccaatttgccaacgatgatgattgttccgtgctgatcgggttcgactcatcatctcccagacggggtaacggatcggctgacctcttcaattcatcggcgc

SEQ ID NO: 55005 - DNA, 502 bp, Heterodera glycines
atgttgtcgagtgcaaccgaccaaattctgagacgtcatttgttgcccgttaagccggagagtgagatgagcccggaggagcgcgcggagaagaaaaaggcggagattgaagcggaatttgcgcgatacaagctggtaaatttagggggaaaatggaagaaaaaaataaattgaaaaaattcatttttttaaatttaaggcccggaaattgcgcgtcaaacaacagcaagtgagttcaatgattgttatgtgtacaaagagtgtagaattttgtcggtgtaatttttcccgaaaaatgccggtgggcctcgaaaaacaacctacccgacccggattttcgccgaccgcgcctgggttttttgagggcctaaattttttttcatgaaaattctcagttcacaatcagcatttgttcaaaaatgtcgatttccattatcaaaaaataattgctttttcctccaggaaagtggtggcgccggcgatgaagcggctgctgcccaag

SEQ ID NO: 55006 - DNA, 610 bp, Heterodera glycines
atgtcgtcattcagttggatttgcaacgacatttggatggatattctgccatttttttgtcgtcctcaacttggcctagaattggcactgatttcgccccatttcgatgttttggtggacacgcatttcgactgccaatccgaattgaaaatttggagatccttcaaaatttacaagcgacaacaatttgtttatgaaggaattcacacttcgacaaggaaaagaaaaatgattgatgttgaaggagcgcctcaccttttggtaacaattttggtatttccccccccccccccctccattttgtgaaaaaaaattttttgtttaaatcagtgtaaatgccttttcctgggttttcgaggtcgctggtcataaattttgacaaatagcgaatcctgaatttcgaacaaacgtagaaaattcaaatttccgaaaagcccaggaacgacgttttacatggcataaattttattagttttttcgaaaaattgggcgacaaccataataattaccaatgtttccgtgcaggtcggtcgccacaataagcagtttccgtgccacgagatgcccaacaaaatccgcttctgtttcctccaaattaagtaatttaata

SEQ ID NO: 55007 - DNA, 119 bp, Heterodera glycines
atgggaaaaaatgccacccaaatcagatcgggtgtgccgtttgtcgtttcggcttttgcgagcgatgcgttagccaaaagtgcgcagtgccatcagtgtccccgaccaaaccggtgccg

SEQ ID NO: 55008 - DNA, 211 bp, Heterodera glycines
atgcctagatcaactgaacaacatccaaaacactgttctgtccatcgacgatttggtgatcggtgtgccgttgggtccgcctcgtttaaaaagtagtttttttcaccgaggatttcttaaaaaattgtaaaattctcatttttttagaccaaatggagcattttttcaatttccatggcgatttgcgtcattttactatgaacggctttga

SEQ ID NO: 55009 - DNA, 855 bp, Heterodera glycines
atgtccattctttgttattcgttaattgtttctcgggaattggtaagttgttaatgaatttaaattgcaacaagtgacattaattactgtgaattaaaaaaaattttttttttaattttgtaaggattaatttaggaattaatatgattaacaaaatagaatttaattaacccacctcatatttgtcagcaattcgatgctgcttggtggtcatgatcatcttttgtgtggtggtggtgctgtcgtgaataatttcagtgctctgaacgccgttttggcgttgtgtatctttaaaaaaaaataaatttcaaattgataaataaataaaatttaactaatttttttaggcgggggaatatgtattttttagtcctgaaattgcccatccatcattcccaccctccggggccgcacaccccgttaaaaatgcgcgcgacattttctcacaatgagcgtccgggggcgcccgacggcattggcacaccccacccacatataatggataatcccctcaatggcacaattttgcgtgccaaatgttgaaaagaaattggagaagacgagaaaaacaaaggttgagcagctaaaagcccatttaggaattgatcgacttttgatgggcggaaaaaaagtgcaacaactaatttatgcaattttagtttttgcaattacaatttttaatgaaattatttttaaaaaagaaagagattataaaaaaaatcataattatttattaaactaaaaatttagaaaaacaccaaaagacattataatttaattttaaaaaatgcaattaatttatgaaattttaaggtttttgcaatatgccgtttttaatgaaatttaaaaaataaa

SEQ ID NO: 55010 - DNA, 520 bp, Heterodera glycines
atgctcctcctccgcgggagggcgctgtgtgccgtcgccgtcgccacactggcaaaagtaattaggacaattcgtttcccgctcctccccgcacttgacaatgagggacgggacaccaccgcgtcacacgccgtgccgttgggggttggaaattgtggcacctgataattgtacatttgtcataaagttttaaatcacgctggagaggctttttttggggtgctagatcattccgtaaaatccgccattttagctatttttgcaacaaaatatggcataattttgtttaaaagtaacaaaatttttatacttggtattgttcgatagcccagtttttatctattataaaatttcaaataaaattatcaaatttaatataagttatggcagaaatagtacatgcttatacaattttttcgaaagttgaccaaatttttttgaaattttgcaggtaaatgaagggaaaaaaaaatctcgactatcgaagggtacaaagaatgttaaattttattacttttaa

SEQ ID NO: 55011 - DNA, 498 bp, Heterodera glycines
atgaacaagaaaggcagattaaacgagcccaaagaaaagaacgggaaaatttacgaaagccattcatttttaaagatggaattgttatcgaaagaggaggaagaatctctgaagaggttgaagagaaagctcgaacatcaacttctgagggtccagcaaagtctgaccgaaagcgaaaaatggaaatccggaacgtcggatatccagtgggaccacaggagtgggaagaaaatgaaggaagaaacgacgaaaaagggcgaagaaatgaaggaaaaagaggaggagaagaaaggaagagagggaaaagaaaaagagacggaaaagaagaaggaagagatgaagcagaaggacgagacggaaaccaaacgaagcctcagcgtcggaacaacgaaagacgatgaaatctcgattgtggattctgaagaaagagaaagggatgccttcgaaaacccgccgaagccgacaaacgagcgactgcattttgggagtcgactttga

SEQ ID NO: 55012 - DNA, 772 bp, Heterodera glycines
gctttctcagaggttatttccgatctttaccattatgttcatccgaaaaataagcgccaaatgcctatggtcagcaaaaaaacgtacgacattgtgatggcaaatgcacaggtgaattatatggcattttaaattgtttattccattttatttaaggcccttaattcagcaattatttacgaccgggacttcagctacacatattttgggtttaagacacttgaacgttcttatttgttgaaaattgacgggaaagttgttgagcgtccccaacacatgctaatgcgagttgccattggaattcattacgaagacatcacggcggcaattaatgtgttgtatagttaattataattggaaatgtatgtgtgtgcttcattaatcgcctcatttttacagacgtacaatttgatgtccgagcgatggtttacccatgccacacccactctgttcaatgccggcacctgccgtccccaactctcttcctgcttcctcctgacaatggtcgacgattccatagaaggcatttgcacgactttggatcgctgtgctctcatttccaaatccgcgggtgggattgggttgaacgtgcactgcattcgagcccaaggatcatacattgctggggttctttcccgtctttttttcttttggtttaaatggatttgcagactaatggcacttccaatggtctcgtgccgatgttgcgagtgtttaacgccatggcaaaatatgtggaccaaggggggaacaaagttaaccttgcaacagt

SEQ ID NO: 55013 - DNA, 882 bp, Heterodera glycines
atgacaaaagaaaaaactgaaatttatcttgaatatgatcgaaatcgtaaaaaaccacgtgcaataatgagtgaggaagaaaaagtaattgaaagaataataactgcaaatgctgttcaatcacatagagaacgaatgaaatgtagtgaaggtccaatttatttaaaagcaggtgaatatatggtttccaatgttgaagtctttagacttagtgattttaaattaaaatgcaaccactgccccgccattcatttttatgaagaacaaaataataccaaaggagttaatgaatttttaggctgttgtaactacggaaaatcaagtaatttggaagatatgttacttgattatccaatggaattaaggcttttgtttcaaccagaatttgaccaaattgattctacgaacatgaggaatttccataaagattttataaaaaacataagaattttgaactcttctttttcctgtgcttcgttgggttgcatgcggtttaaattcccagataaaaatatcccaatctttaaaatacaagggaatatataccattcgtataacacttttgctcaaccaaataattatgatgaattgccaacgaatggtcagttgtattttgtagatactgaacaggcaattgatattcgaacaaatgctattagtaacaaaattagttctgacaaaaataacaatattattgcaataatttcttatatcgaattatatctacgtgaaaattatatttattcacaatcttataaaatgatgaaagatgtttctgaagaggctgctgaacaatctgaagacattcctgatattatgatgttgtttggcatccgagaaggagtggatttaagaagatacaatataccaaaaagaaatgaa

SEQ ID NO: 55014 - DNA, 1185 bp, Heterodera glycines
acagcccgatggcttaccactgtccaaagtcttgagaaggaattagcaactgtggagcttgccatgttgctaactttgcccagttcattgaaaaataaagttaaatgtttgaaagatttgcatcggaaaaataatttgtacagtgatactgttaaaaatgaattcttgtcacaattcaaatcgccatggacaaacccatggcggcaaccagattttatgcattcaattagagcaaaaacaggtgggtgattgataaggttaatatttttagttttttaacattttttcctgagaccctcgtgacctgtaacgctcgaaaaacatgttttctttttggaaattttaaaaaaatatgctcaaagaaccgacaataaattttcaaaataggtacactcctaataataaaaaattttctcaaaattttatcgccaaaatttatttaatttctttttgctaacaatttttatttaaaaattatgtatttctctgtcaatatgatttggcttaattttgatacttttttgtataaattttttattttacgccccctaaatttgaaggtttttagcaactattttcccattttagcacctattttgaggtttttttaaatcaaaaaactattttggcagtttttagcacctaaaattgcatccctattcatcaatatttatgtaacttaactgtaagtgtctttttttagggagaaatgttctctcaaatgttgtgatcaatttgaagaatattttcaccgaagaaatgatcaatctgaaaattgaaaacaatgatcaattgggtccggacgaaaatagaatagtgcacagaaaagtgttcttctccttatatttggcaatgaacaaaagggagtttgacgaaattcgcaatcaaaaattggacgaagcaagaaacaaagccaccagttatctgattgaatgcttaagcgcactccattcataggaggatgaagcatgagatgaacaaatcggtaaatggcaactcgtacaatggacaactcgttaaaatttttatttaaaaaaacctaactaaaaatttgagttgaaaagttttttaaatttatttttgaaaagtttttggataatttctcaattttcgtaaaaaagtacaaaaaaattttaaaaacttgataatttgtttattgatgaatattgatatttaaatgaaaaa

SEQ ID NO: 55015 - DNA, 822 bp, Heterodera glycines
atggcacagcggtcagctgaagaagtgccattgttggagcatcaggagaatttcattgccgcctttctgctcggcacacagcaaaatgattgggacgagccggcattgtgcgtggagatttttgtcccttttttgggattcgtcgtccttatttacaaggacatgatacccttagacaggctttccttattcaaggacagcccctctttgatcaacagttccaataaaaaattattttttaaatcggatttatgtagagaatttccgatcagaaatgtcagtcggtgtcaacgaatttcccgaaagtctgatttggtgatgccaaaaaattaggatatcaaagaagggccagaattcagaatgggcttacatccttggcacaaacatgcattaaaaacggaattttacaccaaattaacacaattaattgcctaataaaaggggccgcctaatttgcgtgtaaaattcgtgggaaaaatttcaattattcgccccccttcctccaccaaaaaatgtctattttatttagcaaattgtcgttggcactgtgcgccggcgatttgtgggccggcggtttggagacgctggtggccacgctgaattgggcggtgctgtacatgctcaactacccggatgttcagcagaggtgggcggttgcaaaaaaatatgcaaaattaattatattattttgattaaatggattaccatttgattaaagcaatgattttaattttggaaaagaaatttcaatctgctaaatgataagctattgatctaatcaatgtttgagtcgatcaatccatttccaggcaaattcgataa

SEQ ID NO: 55016 - DNA, 410 bp, Heterodera glycines
atgtcaaacttaaatcctggtaattggtggtattattttgagcgtcaaggcaaagcaactgctaaatgtaaagccgatggatgttcctactcaaaggcattaaatgcttctctcagtacaactgtgctgacttttcacctcaaaaatcaccaccctgaactttacaaacaacgtgaagattttgttcaagcagagaagcaaaaaacagaaaagaagggacaaagtggaataattttcttgataaaaagtgcggcgcggaacgggatcccgcgcgggattttgcgggaccccagtgaaaatcctgaaaaagcatgaaaaaatgcatttaaaatgttttttattaaagatttttcgtgagcagaacatgaaataaccaaaaatttaattttggtcatttaaatgatcattaa

SEQ ID NO: 55017 - DNA, 848 bp, Heterodera glycines
  unsure (1)..(848): unsure at all n locations
atgtccgattgcaattgttccgccgtcgtttgcctcacaaatagtcactgttcgtcgcccagtgctccgccggtcgtccgcacttcgtacggcgatgtcattggcattctgcggcgtttggacagcggcgtccaagtcgaagtttttctcggcattccctttgcaaagcctccaattggccaactgcgatttgaggtgatcagtcaaaattgatcacactaaccaatcatcatcacttaaaatcagcagcatttcctaagggttttctctacggaatgatcgtttcagaagcccgtgccgccctctccgtggctttcctctccgttgcgggcattcgcttttggtccggctgccattccgctaaacccagagaattcagagtcaattcccttctctgaggattgtctgcagttgaacattttccgtcccgcgctctctgcttctgctcctttgcccgtcatgttttatattcacggcggtggctttgccgaaggctccgctcgccaatacggctacgacggatgggccgagaatttcgcgccgcagggaattttggtggtcaccgtccaatatcggctgggcccattcggttctgctgagtcttccgcctttttctcccgctttagtttgaatttgcttatttaggttttttatcctttgnccgtggaagtgttttgcccggcaatttgggcctntgggacatttgtcaggctttgcgctttgtacacaacgaaatccgcgcctttggcggcgacccgggccgcgtcaccgccgtcggtctcagcgccggaggggccgccgcggcatttatggcactgtcaccgcacagcagaggtggaaagcattag

SEQ ID NO: 55018 - DNA, 1027 bp, Heterodera glycines
atggcttttccatatttagtcaatgtcccattaatagaagaggtatgttttgtacatatttattctcatctccatttaagctcactttccttttcaattcccccccctcccgcccccaaaattgcttaattgtccccatggatcacctattggtaaagcatcgttctctcccagccgaactcttcgacgaaatgtcccgtttcgttcccggccttttttgccgtaaaactttgagcaaaacaaactcaatattttaccttttgtttcgattcacaaaacgcgcaaaacggtggaaaatcgaagtacaataatttaaattataattttgaaagtaattgctctaattttttgccagtgggaaataaattgcagaattgttttaggtttatagaaattaaaagaaattttggccaccttaatattttttacttttttctgagccccatgagcttacaaattatcgctacgttgttgctaatgagagacgattcattatctctcttctgccaccgcatggccacgggtttaagccatttaaataaataaataatattcaattatttattattctatcctcggaattaaataattacataaaatttttgaaaattgattcagaaagcggccattcgcgagcacttcactgagggcgttttgaatgaacttgaaatgcgcttcaatgttggcctgactttccatccgttgccgcttcatattgtaagcataatgaattgattttgtgggtcaattcttatgataagcccactaaatttagcacaaattatccttaaacaagtttttatttaatttttatttttttgccttttgataatgtttttgtgggttaatttcttttaattaaatattttaaaatcaaacagcaatgggacgtttgtatggtcacctttttcgccactttggatgcctgggacgggttcatgagtgaagtcagcgacctgctaaatgaagtaagctaacgtatcaaacaaaattaaatgcaattttcaaatgcccataaaaacctata

SEQ ID NO: 55019 - DNA, 1621 bp, Heterodera glycines; identical to SEQ ID NO: 24299

SEQ ID NO: 55020 - DNA, 159 bp, Heterodera glycines
atggctggtgctggcattgtggctttaccaacagcaataatcaaatcaggtaaaaataaaattcagaaaaatataataataataataattaattttttagggattggtccgggccttttaatgaatgttgctttaacatgtaagaatatttcattttaa

SEQ ID NO: 55021 - DNA, 2215 bp, Heterodera glycines
aattgagaatttatttaaaaaattattagattttagctcgggagggggcctcccttggatttttatgagttcgtaattttcaaaataagcctcaattttgcttctttcttacccatagaatcttggggataaaccttcttttttttggttaaatcgcgattatttagatttatagttagaaatacgctttaataagcactgaaaatgagttagaacttccttaattttttgtgccgttttttctcattttttgccaaatgctggagttgatatacatttccaaaaaatgaacataagcaataaaatacaaaataaataaaaaactagtagttcaaaaaatatggccacatttttttgacaagaattttgatttaaaacatgtatcttaatacgatttgtcctaattttgttgctttttgaataaagttttgttaattagtccctaaatttataaattaatgtacatagtaatattctcttcttattctggtaggtgccttggccgtggcgcatttggccaagtgtttgtgtgtttgaatgttgacacgggcgagcagttggtggtcaaaaaagtgccattgggccacacaaattcccggcatcgccagcgtgtgctggccacattagagaatgaattgaacgcgctgggctcgttgcgtcacgcgcacattgtcaattatttgggcgttgtgcaacgcaaggattgtgtgcacattttcatggaattgatggcgggcggctcgttgaaggaccaggtggacaaaacattctattgccaaggggggaagcatccctcgtttttcgacaactttttatggcattttctacttagcgcttattcattaaaatgacatataatttgctattttttcattgggattttatactgcaaaattgatggcaataatacacacacatgcagttaattgttcattcaagcgattaatcctttatcaataatcctcaatcagatcagcgagtatggcgcgcttggagagccggttaccattcggtttaccgctcaaattcttgacggtctcgcgtatttgcacgcgcgtgacattgtgcaccgggacatcaagccggcaaacatcctacggcacacgcatgcgcacgtcaaaattgccgattttggcgctgcaaaatttttgcaggccatttgcagtgaccagggcatcgatattcaggcacaaaatgcgcaattaaataatttattaatttctttattttataacacaaaaaataacttttttttcctctttgactgaattccattaaaaacatggtgtcattcgatagctaataacagactctattagccctcggatttaatggagcctcccgttggcaactctctgctgaaaatttaatggacctaattaactcaatgtgtctactacaattttgtcgtacgttttcagggcaccccacactatacggcgcccgaaattttgcgtgccgacaattgtcgacaatttgaaccacggtcagacatctggagtgttggaataactgtaagcaaatgcaaaaaatgagcccatgagctatttctaaaaatattaaattttcggtggtggaaatgatgacaacaatgacaccatgggcaggcattgatccagcagcggtaaaaaaatacattaggaagggaaatgggaggggatattgtgtcgggacaattggtcaatggacaatccatcaatactggacaatctgatagaaaattatatttttaagaggctgaaataagggcaaaaaacagtaaaacagagataccaaaattaaaagaaaattcttttactaacaaattgattttcgagcagtttcttcatttgtctttcgaacgaaaaattttattttttgggatttttttattgaatttttagggtgcatttttcaaaatttttgatagttcgatagagggttcatatttttaaattttttgcattttgttcaaattaaaaaaagcggaaatgaggcacgtgctttcgcttgaaggaaaatcgtgtcattgaccgagagtctcgacaagcaataaacctttattataatcttatttgtgatttatgatcaggttcaccttcgcattgtctttgctcgacctgatctcagctcattgcccgatggtttatcaacggcactgcgtgcgtcaattgaggcaatgcttaatagtgagcctgatcaacgaccacaggctgtgaagctactgaaaatgcca

SEQ ID NO: 55022 - DNA, 848 bp, Heterodera glycines
atgacgaagatagctgtaggttaactactatggtaaatgataaaaaataattaatttcattaaaaacttactttttttgttttaagttgaattacatttactaaattctttttttaattttttagcatcttttcttatttatttacgaaattaaatttgattgaattaattgaaaaaatattgaaattttgtccactgctcataattaataatgaatatttaaggtccttattaagtttacctggtacttttcacatacattttttaaacattcatttattcatagacaagttttagacaaaatagaaattcgaaaattttcggcttttagactcgttgtttgagatcgcatttataataaagaactaaacagttttggatttcatgatttcattagttttgcagtgagtgacaattcaatcaaatttatttttcacaattaaattcttacttctttgcatttccaaattaaatcataaaaattaaggaattgttggatccgagcaaaggattttacaacaaagacgaggacaaagtgaaattggtcatttatgtcattgtggacgaggcaaaaacggagaattccgatccaaatccaacggcacactttcgatggaaattgaaaaattatcgaaatttgcacaagaaatcaactgtgtacataaagagaatgccatggaaaatatgggcagaaattaaaatgaaagcactgcgaaatggttgagcttttttcttttgtgcgacgcttctgaaaaaggtttgctttagaattttaaaatgtttcaatacatgcgcttggagagattaacatgataattgataacaaacactaatatttttttattaaa

SEQ ID NO: 55023 - DNA, 1057 bp, Heterodera glycines
atgggcaaaaggacgggtggcgcaccccgtggaccaaaaattgtgccaaatgcatgcacgtcacccgagcggaaaaaacgccaaaccaaacactacaataaactaaatcgacccaaagtaagaaaaaaaaggaaaaaattttcattttttttgaaattttgagatcactgtatccagcagcgccccgaatgtgccgccgatcattcgctctcttgaaggggagcgcagctaccgcgtgaaggctgttttggcgacctacacccatagcaacaatagaatcggatattacgtagactggcttcgtaagtggttgggatgaaaattaaaattttttttcatttcttctcatatttttgtctctatttgtttggttattgatgagttgtcactgaatagctcctccataatcaaacagtccggggtttgaatgtttgttgccgagttgtctttgaatagctccgcgcaagcgttttaagttccgttcctccttttcatctctctctcttctcgctgtctctctcaattttaaatttatcacagtcctaaacactgtttattattaattaggtgcgaggggccaagagagttgggtgcagagcgagtcgtgtgattgtatggaactcgctattgacttcacaaggaaggcgaatgtccacgatgtgttgcgtggactacttggcgagccaattcccgagagtattgccaaggaagtgatggcgagtccaaaattcgtagaaggtcatttttttttgaattttcaaaattattctttaagtttgtaatttgttgggccgggaccccgcaacagtgctgaaaattgacgacctgaacatttcatttgctccatcactcaatgtccaggacattccgtacaaaaaagtattttggaagcgccggcacccgaggaaagcgacagtgaagacgaatgaaaggaaaaggctaacacataacaaattcactcatttttaacatttctcacaaatttcctcttacaaaacatttctcaccaatgtgctcttacaaacatttttcaccaattttacaattttaaacagaa

SEQ ID NO: 55024 - DNA, 510 bp, Heterodera glycines
atgccaaaagtaatgtcgttgctcctgacaccgaattatgtgcgatacattgacaccatttttcttaagaacccgtaggtgatctattcacccacaaagtttcattcggaaatcccacggacacctgggtactgctgcttctactgagcaacatcaaataatcggtcccaaggcgcccaagccacatgaagagacccccaaaaattttgagccaaaggacgagtcggcaacgaagaaacgcaaagtggaggaccgagagttgtggaaattggccaagggcaaatttttgctgacgacatatttgtgtcatggtaataattactaataatttctgcaaattttaattttgattaaaaattttgagatgattggaatcgtctgtacaacaatcagcagaaggtaaagcgtctggagggggaccgttttgccttcggctttgagatgtgtgaggaatgcgtgtgggccaactgccgcgcaaccgaccttttggcgccattgaagaaaaagtga

SEQ ID NO: 55025 - DNA, 1740 bp, Heterodera glycines
atggttcgaaaaaaacaaatattttctgttgatgttcagactccctcttcaacaccaccaaccttttccgatgttcgtccggtattaaatattgggttcaatgaacccatcagaaaaaatcatttgccgggttcaaagctcccaaaaaaaacggttgaaagaatgccaaccaatttattatgtttggatgaagttgatgatgattttttccgacaatcaacttcacaatcagcaatgcgaaaaaataaagaaagaaatgaaagaactgttgaaaaaacagaattagaaagacatttaaatcgccaaagaatggcaacaaaacgaaaccaaatgaccgttgaagagatagaattagaaagaagtttgaacaaagaaagaatgacaacaaaacgaaaccaaatgactgttgaagagatagaatttgaaagaattttgaataaagaaaaaatgacagcaaaacgaaaccaaatgactgttgaagaaatgaaattggaaagagaaatgagtaaggttcgaatggcgtcaaaacggagtgagatgtttttagaagaaattgaaaacgagaaaatatcaaattcagtttcgcatgttttttcaagaaaacgcgaaaggaattttgatggtttatattatcttgctgccgcagaccctaaaaaagctaatctttatctcctcggtgattttaattttaaatgtacgaaatgtgacagtttgcagtttcctgaggaaaaatctgtagttaaggattgcattttttttagttgttgtaaaggtggtaggcttttaaatcttttagaatgtgtttcgaaatatccggaagaaatgaaagcattattttttgaggaaaatcctttttatagtaattttattacaaatatacgtcgttataatagtatgttcgcctgtgcttcaattagttgctttcggtttaaatttcaaagtcctggccctccatgctataaaatacaaggacaaatataccacaaatttaatcaaaacgctatgccaaaagataatgaaattcctacaaacggacagttatattttatagattctgaagaagctatagatattcgttctgaaaataataaagaatgccgctcagatataattgagtttcttgaaaatttattaagaaaattgaacccttttgcacaatcctttttaatgatgaaagaggtttatgaaagagaagaaaataactgtaaagaaaatgggttaaaaatgccaaatataaatttagttttcagtctaaaagaaaattgtgataaaaggcggtacaatattccaaggtgtaatgaagttggagcaattgtagtttgtgatgccaatgatgaaattccgcctgcaagaatagtggtttacccgaaaggtgaaaaacaattaaaaaatatttatccgttagacaaatgtgtagaccaaatgtgttatcctttattatatccaatgagtagcgaaggatttaatgtaaatatcaaagatttaaatggaaaaaaaatttctttgtgtgactataccaaatttttattattttttcgagaaaatggtatttttttccctcatttttacgcaaaaaaactctttcaacaatggctggtggatcaagcagctaaaattgaatgggatcgcttagaatatataaggacgcatcagatggaattgtgtagcagtaattatttaaatgttgaagattttcttaagaatagagcttctaaaacaggcgcagaaattaaaaaaaag

SEQ ID NO: 55026 - DNA, 209 bp, Heterodera glycines
atgacgacttgtcatttagagatggtaccacgtttgtttggacgacaaattttgagtttttatactaaattaaattttagctaagaaactgtggggtagcgattgtgaccagacatatgaaaaagtctaaatcgggaccggcaatttttagaaacctggctttcaagtcactttttttgatccttaggaattttttcagagttaataaa

SEQ ID NO: 55027 - DNA, 153 bp, Heterodera glycines
agcgggaccgggaattttgggcaaaaccgggaccgggacttgccgggacctgagaagccgggaccgggacctcgatttttcttcgggaccgggaaccgggaccaaccgggaatttttaaaaattcaaaaaaattcaaaaaatttaaaaaatta

SEQ ID NO: 55028 - DNA, 951 bp, Heterodera glycines
tctccggcactgcgttcaccgctccgcgctgctccaaccggttcagttggctgtaccgcgtccggccgtccgtcctccacaggcctttccgccgtttggagggcaacggacggtgagtcatgccgttccctccacttttgttcgacgctttaaagcttcacgaatgatttctctcaatttgcccccaatccaaatcaaatgcggtggaaaccgcatccaatgccaaattcggtggctaatggcgccccatcattggactttgtccaggttttctgttcttcgatttccacaaatcctccacccttcagggcctttacaccgtttgtggggccggacatccgaatgattaattgtttgaaagaaatgaagaaaatttgatttgaaaattttcattaatttattagctttaacttttgggttttattaaataaaaaactaaataaaaatttaattatttaatattttcacttgaaataaattaaaatttgattttttttttaattttttaaattttttgaatttttttgaatttttaaaaattcccggttggtcccggttcccggtcccgaagaaaaatcgaggtcccggtcccggcttctcaggtcccggcaagtcccggtcccggttttgcccaaaattcccggtcccgctctactctaattattacttctaatttggcattcttttgggcttacgcttgtatttgaattacataaataaataaatttttggtttttagacttttgttacatacaaacaatgggacaagtactgacgatgcgaaagaatttaaaactcccataactttaacagttcaaaaaaacaaaacaagcgccaatcagtccctccctccgctacgatcagtctctccctttcccttcgctaatctcagtacgccgtctcctccctctgtcctcggctttcgtttcgagggttatggcgtgcatatct

SEQ ID NO: 55029 - DNA, 212 bp, Heterodera glycines
atgcaaagccgtaagcaaggcaacctcaagcttggaggtgtgctgatcaattcggtgaaccaaccgaaacggctgattgaatgccctattaaaatgaatggcaattctgtggaattcgcgctggactcaggtgctgaggttgtagtgatcaatgaagagactcatgaagggatcggaaaaccgaagctgagtccatgcaatgttgaagcgaa

SEQ ID NO: 55030 - DNA, 715 bp, Heterodera glycines
atgggcggaatgttggcgagttgtcaaagcgaagaagtgcgcgatcagatctccaaaagcaaagccattgagaagcaactgagcagtgacagaaggatggcatcgaatatcatcaaattgttgttgttgggtaaggaaaaggggcgacaaagtgatgggaatgatcagaagaagaacgatcagcagagtgacaagaataggaccattagtttgactatcatagtgatcagaaaagggctattgtcaaaataagtgataaaaaaaggatgattttataaaaatgatcgaacatttcgaccgattgattatctgagtgtatttaaatagaaaggttatcagagtaatcgcttagtgatggcagaacactaaagtgatcagtcaatgattgacggataatcttagcattgttcaggggccggagaatgtggcaagtcgacagtgctcaaacagatgcaaattttgcacagcaatggattcactgaggaggaaattaatgagcgaaggtgagaagacaaatggatgacaaattaattaatcagttataatgatgctaattaaggtccgtcgtctattccaacaccggtgcatttctctgtttttctttttgctttacttctgtttcagtgacttcaatggcagccattctcaaggccatggactcggtgctgcacattccgttggaagacgccagcaaagaggtgatccgattgattga

SEQ ID NO: 55031 - DNA, 754 bp, Heterodera glycines
atgaatattattcagagattttctctgcagtttgtttggctttttgtgagttttttttaaacgaagaaaagcaattttgaatattttttatttttgcaataggttgctgtgatttttacggaatttatgctttaaattttgaatgtgtgtttagtttcttttatggcactactgctggcaaggggaatgctcgctttcaaaagcaatttgctattgcgcaggagaaaatccatgcacgtcaaacagcgataattccacgtatataaattgtaatgccaatgattcaaatagagggtgggcttttccatgctttacgtctgaatgtcacagtttggccagcatctgtaggctaattcattcactagcgaaatcagtagaatacccattgattcagcccccggctttattattgcaaaattttatacagaaacaatcagttagtttatcattaatagagcccggaattttgaaatggccgtgaccgggacttggaaaatggaccgggacgggatcccgggaccgggactcccggtcccggtttgtccaaaaaaacgggaccgggagttccggcaaaattccggcgggatcctggttccgtccgggctctactcattatggtgccgggtcgttactcaaaaaaaacttggtttttcggacatttttggctataacttttttaaatattacgaatttttttgaaattttacaggcgaatatagaacatttaaggctatttattgatacaaaagattaa

SEQ ID NO: 55032 - DNA, 156 bp, Heterodera glycines
ctcaatgacgaagaaaaaacaattgtcacctcaactcagccaccgttcaacaaaataacggtcaatttgcaatgcgcgtggaattcttatgggcaaagagtttggagtaaaaccggcgtcgacggctaccccaaccgagtgatccaagtggaaaag

SEQ ID NO: 55033 - DNA, 321 bp, Heterodera glycines
atggaccaatattacaacgcggaattgatggcatttgggcacattgggctggcagttgacagggaaaatgaccagcaaacagtgcaaaatgaactgatcagcgcattgtcagaggcattgggacggcggcagcggaaaaagtgacaaaaattgaaaataaaaaatgccttttaaaggacaattagcaatgattcggccacgcacttcgatttggccaaattcaaagccgtaagcgcggcatttcgccaaaagaatgtggcaaaaacaatcgctgacgcaatgaaagaaattgaaaaagaaattgggaagcagaaaaaataa

SEQ ID NO: 55034 - DNA, 171 bp, Heterodera glycines
atggtaaagaaattccaaatattcttcggccgctcctatcggcgccaccgaaccggcaaaaaacatcttttattattttcatttgaaataaaattttccaaaatgcagattttttgtcggtcaaatgctgattttttaaaattgagttgggagccctggctttatctttga

SEQ ID NO: 55035 - DNA, 537 bp, Heterodera glycines
atgcacaattttcgtgaattaattttcaccaagaaattttacaatagtgaaaaacttgtgctcagaccgccccaaattgacgcattttgggtgcattttacgcgtcattataaggggagggacaaaccggtgcaattgtccactgattacctgaccattttgcatctttcaaaggatgtaattaaaataattttgaattattaaaaaaagatggaattttctttatgacagatcgaagcaaattcaacaaaaggatacaatgacaaattgctaacacaatttgatggacaattgggcaacggaagtgcttttctgaacgactcgaagataataaaggtacagaaatgataaccaaaaacccaaactgaatggaaaattatgaatacaatataaaaatttttaactcgaattatttaaaattacccaattaaaatgtataaaataccaaaaaattatttaatcatgtattcaaagtgactggaaaaaacaattttgagatagttagttccttgtatatcaatatactttattatacaa

SEQ ID NO: 55036 - DNA, 216 bp, Heterodera glycines
atgtctgaagcgaatcttcagcagcaaacgcacggcccaattgctggcactgactacgattcggcagatgaatatgtggtgattgaacaggaggaagaaaccgacttggaaaagaactcaactttgccggagacggtggctacgaacactaattcgactcccagtgacgtgcaaagtgtggcagcatcagtcggcacttttggacgcggtcgctga

SEQ ID NO: 55037 - DNA, 376 bp, Heterodera glycines
cgaaggatccaaaaatggaagattgaagccattttgcgaatagttcgagccgctcattgcattctgtgggaaaacagacgaaaccactgagttttgctccgtcgaggccattgccaatgtcagcgaccgcgtccaaaagtgccgactgatgctgccacactttgcacgtcactgggagtcgaattagtgttcgtagccaccgtctccggcaaagttgagttcttttccaagtcggtttcttcctcctgttcaatcaccacatattcatctgccgaatcgtagtcagtgccagcaattgggccgtgcgtttgctgctgaagattcgcttcagacattttgttcgttgaggtttaatgctaggaggggtgggaatgtg

SEQ ID NO: 55038 - DNA, 153 bp, Heterodera glycines
atggacgatggggacggagtggagcagcatcaatcaaccgatgggcaaggcttaatgaacacgtcaagcgatgagaagcaacctcagatcacaatcactgttatgtcggatggaggtgtcaaagtgacggacgtttgtggaaccgaatacatg

SEQ ID NO: 55039 - DNA, 371 bp, Heterodera glycines
atggacttgctgcgagaattgctgaaagatcacgagattgagcctgagccggaaacaatcggagcgaacgcgcagaacgctatcaaattggtgcccatctctgaagaaatgttacgccggcgagcgcacgacgaagaggcaagcaacggagaaccgcaagcggtgcgatgtgccactcagtgaacgtgaccgtgaccaatgaaaggatgattttgatggtcaattacggcgtctgacttttacatattaattgctgaagagaatattataaaccgctgtttgtttgttctttctgtattccaatcgcattgtttgatcttttacttggattcttcatgtatttgattagacctggaacagctgcagtttga

SEQ ID NO: 55040 - DNA, 164 bp, Heterodera glycines
cacttctttccattgtcaagcgcaatgttgaccgtcttcatcaattatgcaatgaatggataaataccggacacttctcatctattcccgaccattaccggttattgtacgcattttgctgtgccgttcgtgccaaactcagttatttacttaaggattatttc

SEQ ID NO: 55041 - DNA, 175 bp, Heterodera glycines
atgtggcgtctcaatcggatgatcatcgaacgtaaacagcattatccggacttggacactgttttccgcaaatatagccatgagtgagttgatcatgttattcttccctcattgaaaaaaaatttttagaattttcttcgaagtggcgaagactaagcagctgagggaacattga

SEQ ID NO: 55042 - DNA, 1097 bp, Heterodera glycines
atgcaacgactcgaatttgaggacgggagcgaaagcaacatggacccagcgaatgagggccatcgcaacggcgcacagcacgacgaaaatgtgcaggacggggatggtcccgtcgcttcaacgaacgaagagcaacaaaaaattgccagagtaaacgaagcaacgagaggaagcaacatggcgacaggcgtggcgacaaatcagcaagggatgctacccttcccatcacgcaatttgcggagtgtatccatcccggtacggacagcgcgggacagaatcgagagagcatccgggactctcgccgctcgaattgcggaggctcgagaagtgatcgaccaagaccttaccgaaggggaggcaggctaccaagcggcgcgactgttggccatggagagaggactcaaggaggcaactcaaatcttccaaggacatttcgagattggaatggcagcagcgggagcagaacccgcaggtcaccaggacttcttctacgacctactgacagcgccactgccggcagcaacgaaagagttgcagttgcgaaaccatccaacaccagctgaactgcttcaaattgcggacgagcacatcggagacttaagaacgatgcgacgagcactcgaggatgaagaagaagcaatcgcgcggtctcgattgagcgggtcattcgggaccaacaacagccatccggtgggggacgacccacctccactcgaaaatcggaacatagaagaatgtgagagatccttccaagtggcggccaaacgatggcaaaacggcggacaaggtgtacagcaacacaaccgaagaccaatgggacgagtcgcgacacccgtcatgtcgaatttggacgggatttttcagcggcgtgccaaagtgccgtccgtcgccagcatgagagtgacgaacacagcgcgagaatggatcaatcgaaatcgagacgagatgggggcgttccccccagcaacagcccatcggccggcactgatgcaaccaaaaatcgaaaagcagcaggctcacgtgaacgacgactatcgggagcgtcagacatacccgattcgacggcatgctcgagacgagggagaacatgatcggaa

SEQ ID NO: 55043 - DNA, 1970 bp, Heterodera glycines
atgccaaagggaaaggaactgggatcgggaggattgggggagaacgacgagggctgccaggaaaggaagggggtcaagaggtgaatgggcgcctccgtttggccccgcacgagaatttgccgaatgtgatggagtgtggagggtgcttttccctcctttccgagtcctccaagccgtttcagcacgaatttattaaagcaaaacgaataatgaataaaagcgacgaattgatcgaattgggcgatgggacgggggaattggaggaattggtcacaggcagaccgaatatgaagcggaggggagtggaaggaagagaagagaagagaagagaagagagcgaccccttggccgggggcgcttaaatagacaattttcgaagggggcgggcaaaaggccatgcacgtggacaaattgtgagagagacaaaaaatggacagaaaattctagaagcgaattgcgaacaaaggaaatgggcgcacaaaaattgaatgtgaattggcagatgtaaaaagtgagaaattgtgaaaggaaatctgagcacaaagttggccgaagatgagccaaccgatgagaaagatttgaattgtgaagggatgcgatggggcaaaaatgggacaaaggaacgggcaaaatgtgaatggtacgaaatggagaaatgcatatgagaaattagatggaaaaggggcaaaaattaggaatgatcaattttgaatgaattgatgaatcgggactcgccccgatcttctccaagaacatccctcattctttttgcttcgattgagtcccgtcccgttcatttgtgcaataggcggggattgacccgccttctcgtcgccaatgaaaaaattggcgacacacattctgtaaaaaataaaaattaaattaaattaacagctaaaatctaaacattgtcagaagatgccgtaaaagctaattcctatttctttagccaaaattaaataattgaaagaatttttagatattttaattttgttttgtataattacattttattaaatatgaattatttaatgtacttaagttttatatttaaacaatcttttaaaaatctttaattactttaattacaattttttttttgcctttttacatttatttgtaaataatttatgtgttttaaattaatattattaattcattctctttacttttatattttattgagtaatataaaatatgtacgtatatttgaatttaaaaattttagaaattatcattaaaaatttatgtgaaattttttatgaaataattatgattttaatacataattgaaattttttttaaagttggacaaatcaattaaatttgtttcatttctcgtattgcatcataattagaacatttatcatctgtaatattccttattaattttatttaatttttagtttatcaccaaaccaaaatttttatataagtcttaagtacaaaaattaaatgaatattttgtaaattttcaaaaactttgataaggcgaaatttaatataaaacgaaaaagtgcaagccttaaaacataaaataatactaaaattagccgcacaaaagaatatttaatctaccgtatttcctcgattataagccccggggcttctattgttcaacccccctccaaagggggcttatattcgagggggggcttccattcgagggggggcttttattgttcaacccttcatttctacaaattaatgcaattttttcagaaccttcttttattcaactttttacgaaaaactacgttgctttttaactttcaagtgccaaatacaaatcattttataattaattatggatgcaacaaaaaccttacctgaatcatcgactaaaaaagtacctacctattaaaaaattcttttcaaaattacctatcttaaggtttgctgctactgcagcaatccttgttctggtgcccaccaatgctggaagtgcaaaaaaccttgccatgcgatag

SEQ ID NO: 55044 - DNA, 567 bp, Heterodera glycines
agtaacggtctttgagcccttctcagcaacacatgtcccgccacccgggtcaagccaaaccgccgtttcgtctgccgcgtagacgtgtgtagctgaaaattagtcgtttgaaaaaatatttctcatttacctacttatttttgtgtatgagttgttgaatatataatatgaagttgatgatgatgtttttgtatgtatcgggttctttttgcgctactgttgtcggtcgacgtaaggaaaatttatgacggtgcatgaatttttccagccatcccttactagcctaagagaaaaatgttcaaaaatttttcgaaattttaccgcaaaattttccatgtcttcgtaggcggcgctcattttgattgcttgtgcagcaatcatacttcgtgtcacccgcactttcttttctcgcaattcagacacccactggaacacagcttcttcgaagttcctgtttggaactttccttccgcccccttccaaacgttttcgttttgacgattcggccctaaattaaacgaattaaaacattgtgacattacaggcatcttacactttcctcaaatt

SEQ ID NO: 55045 - DNA, 1231 bp, Heterodera glycines
atggatgatttttacattgtactaccttcgaacacaccggggcaggagaacactacgtcaaaattcacagttcgactccccgagactttggaattgggcacaaattgggcagtagctctctcatcaattatttacccctactcattcaccgcactcggtataaacggtcaagagtttattaaagtatgggaaaacgacatcagtgtccctactcaagtttatttaccggacatgaattttaaaaccgccgggggcctgggaaataaaattaatgaggcattcacacatcattacaaaatcaaaaaacaacgtggaaagagagaagccaaggctgaagataccaaagattcaaaaattgatgtcgcaaagagggccgcagaacgcgccgggagagacgtagaaagacattttaatcagatcaacaatatatcgaattccatccaaacccaactaaacacactacgagaaacaaatcctcaaattttagaagagcctgatataaaaatttggtttgacaaaatggttgagatgggaaccgaaattcaaacatcccgaaatgaacttaaatcttttcaagaagaagtagataaagccaaaaacataacattggagcatgtggaaaagaatgacttgaaaaaagcaaagaaatcagccgacgtcgcaaagggaatcgccagacaggcaaagaccaaatatacatcaactctcgaggaatataatgataaatcggaaaagggttttagcgggatggtggttaggcttaacgaggcgctcggtgagcattttaaacataaggaaattgaaaataaagaagtttcagaagctgaaaaagggccgcaaaaaagagagagattagccaatgaggatgttcaatttaactacgacagtattgatcaaaaatttattgtctatctttcctctgccgtcacccatatagatttgtcaaaacacctcgcatatgttctggggtttaagaatacaaggctatttcacgcggaagaggcgacttatatgccggatttgacgggaggtgtaaggcagctatacatttatgcaccaaatttaatcgaaaacacaattatcggcaaccagatggccccactcttaagaatagttaacgtcgtcgatgacccgggatcaattagtgaagttatatatagcaccgagtattttcatcgtctacaatcgaaacgaatttcagaaattacaattgaaattcacacaccgtttg

SEQ ID NO: 55046 - DNA, 1759 bp, Heterodera glycines
atggaaaattataaattaattgacgaacggtcgacgatttgcgaaaaatttggattcacgaagaacattatggaatttcggatcaatccggatgtgagacgcccggatgaaacgatgagggacgcaatcgacacaatgattaaggcggcttttaagactacggaagaaaggatgaagcggaaagtgcggatgtttggagtggcaataacgggtgccgggcttgcttccccggtttgggtaccgtacagggcgtacccgcagaacaatgcggatgttattatgcaggagattaataagttggggcagagcggggaaggagatgaaaataagaaaacgcttttgttgtcggagcctattatgatgaaaattacttgcgtgaccatgcccagtggagaggggccgaggaatgtacataaatttgatttcggattcaaggaacaccaacggataaagtaagttttttttttgaaaaaaaaataaaatagaaaatagaaaaaaagaaaaaagaaaaaattataattatttattaaggatttcgaatgtggataaattttgtttgttttatgcgttggtggcgtcaaagctttatttggaagtgcaccggaatatttttaatcgatttatgaataacatcgtgagacaacgtgaggcagcatacggacttttaagaaattgtggaattgatattaacgaatatagctatggagtggagcacttatcgggggttcagaattattgggtggggtttaaatgaaaaaatgcaaaattaataaatttttcaggatgagatttaccccggaaagtaccgggttgttgcgtttgagaagtctgcggatccgcggaaatcgatccgtgttttgtggaagggccctatgggacgagagaaggtcgtaccgatatttttggagaatggtcactgggatggattaaagaaatatgtttgctttttcaaccgtgggaggaagttctgcgttgaatgtgaatgtttttacgatcaggatgtttatcatacgatggattgccgggcgagatgttattactgcaatagagctggaggaatgccgtgtcaaaaggagagtggagtgaagattgaatgcccgaagtgtcgacgttacttttataattgggaatgctacacctatcatcagggacatcagacttgtaaattatggaggcgttgcgttatctgtgacaagacttatcgatttaacccgaaaaaggaccatgaatgtggagagacttattgccaactttgtagtgtgagccatgaccccaagcggggatgttatattatgccgatcgaggagaaggaagacaaggacgtctaccgaattgtcgtttgggtagatttaataaagaaaaagacaaaataagacctaactttcaggattcggagacttcgcaggattctatttacaagggggaccagaaggagcatgttattaattatatttcggtgagagttacgtgtacggaatgctgtgatgacaaaaacaggacgaattgcaaaatttgtggggaggagaggatcaaggattggagcgaggcggagggacatgagccgacccaggattttgtggagtggattttacctgcttttaccaattatgaaaccgcacttattttgccctaaacgccggacgttttgaacggctaatttcaaaatcttattttttaatccctaattttttaggccttttggcttttattacctctgccgtacccgggaaaaccccgatcccgcttattaatggattga

SEQ ID NO: 55047 - DNA, 1146 bp, Heterodera glycines
atgactcatgtctttttcaaccctgactccattgaatggtcaacatttctagcctcgcagcaagaaggaagaggcgaacagcagtattttgttggtacacgttaccaacgcggaggcggtcttctgcaaaatgtagcccgatttttgatgccagtggcatcaaatctactctccagtgcttcgaaggaaggaattgctgcaggaacacgcgttcttggcgatttgtcccaaggtaaagcattgaaagaatctcttgaaacgcatgctaagcaaggtttcgaaaacctggcaggaaaattacaacaatgtgggaaaggtggaaattatggtgccgatggtagaagaggacaacgagtgtcaaaggttaaaaaaattagtggcatcagctccagtgattctattattggcagaattgggactgttaaaggccgacggaacaaaatcatgcatcagttaagctccccttgacaccttgaacgcgaaagtctataaataggtaaagaattttgcaaaatcatacatttaggaactcattatcatcatatagcagtactaaatattccttattgattaatcatgagtattatcaaaaaaattgacaaagatagtgttgaaggtcttgaaggtagtctatcattgtttaaccttccaccgacaaatgtggctattaataaaacgagcgttcaggagcttttaccattgtccgctctcaaccagacaggaccctatctttttcgtctgttttccgatagtcaatattgtgatcttagcaaaacgtacatgtatttgctcacttcgatagagcgtaagaatgccgccggagaatgggtgccgaccgacgatgcgattgaagaggacaaacatgtaggtgttattcaaaattttggaagcagttttgttcgatcattgaaagtcaacatttctggtgtcgaagtgtttgatagctcaatatactatcactatcgtgcgtacataatgcaggagcttggctattcacatgagattcgcaaagcatttcacgaggctggctgctattatccggatgaaaacagtcaggataactactcaaacaaaggttttaccagccgagcacagagattctcaaacggaaaacagtgcgaaacaatggtaaaaactcaactttga

SEQ ID NO: 55048 - DNA, 56 bp, Heterodera glycines
atggaacatgactttatttttaaaatttttcccaatcgttatgctctattcacaaa

SEQ ID NO: 55049 - DNA, 1330 bp, Heterodera glycines
agtgatcagaagaggtacaacagtgattagaagaggtacaacagtgattagaagaggtacaacagagattagagaggtttcaacagtgattagaagaggtacacaagagattagaagagtgattagaagaggttcaacagtgattagaagaggtacaacagagattagaagagtgattagaagaggttcaacagtgattagaagaggtacaacagagattagaagaggtacaacagagattagaagagtgattagaagaggttcaacagtgattagaagaggtacaacagtgattagaagaggtacaacagagattagaagaggttcaacagtgattagaagaggtacaacagagattagaagagtgattagaagaggttcaacagtgattagaagaggtacaacagagattagaagagtgattagaagaggttcaacagtgattagaagaggtacaacagagattagaagaggtacaacagagattagaagaggtacaagagtgattagaagaggtacaacagtgattagaaagtgggcattcaaatagagcatttatggtaattaaggaattgtttttaatcaaaatagataaaaaatcgatgtgttatatttttcattttttaaaatataatacactttttattaatgaaaaacaaattatgaaatgtataataattgaatagttatttaaattgaaatgaaaaaaattttacaattaaattttaaaataatagctgaaattctttaattaaatataataaataatttaatgaaaatcattattcatcaaaaaatttaattaaactaaaaaaatttattattaataaaaccaaacatttaaatttattaaaagtaatgaaaattaacccaaaaaatacaaagaaaaataatgtacaccgcccggcttcgaacttcgcccccccccaaaaaaatgatgcctcagaatccccaatcacacagggattctgaggtcttgacgatgtcaaaagtaaaatctgatcacgtattcgtgatcagcgtcataaaatacccctaatgacatgtttttgaaagatttttggtgaaaaaattttttcaatcaaaaatcatgtgctcacccctttggtcccgaatcccaaaatcacttttatttttgtatctttttttaaaaatgtgatagaaatgctaaataaaatttatataatagagcaaaaaattgcggatttttgtagtattttactcttccctaatgacttttcagaaccgagatataaatttttttctgaaaaatagaaaatttccagattttctggaataactttttttcttttagagatagaaatgccaa

SEQ ID NO: 55050 - DNA, 1221 bp, Heterodera glycines
  unsure (1)..(1221): unsure at all n locations
atgatgaatacaaacaattttctgatcgtattttgctgcctttttctgttggtacagtttccccaatttgtgtataccgtgggaataaatactgtgtgttttcgatacggtagccagttcagagttcaagtattctataatggcaattgtgagttttggcaatatacaaatccattgccaaatggacaacaacaatgtttgagcgttcagtcaacaatttggaatagaatggataccaatgcatttgttgagttcagaaatgatagtggacaagtaatttaataaataaatcaattacaattttttaattcactcttagaagcgatccaaaaattttctcctaaaatatttaaaaatccgacgaaaaatggaaaaattaaaaaaaaaaaattttttttttatgttttgccaaaattctgtttttcaaattttcttattttcaatagaaaatcaattgttttgaatttattttccctaataaaaatgcaatagataaaaagaataacaaattaaaatggataaataacagttaataatggatttcaaaaaatacacactaaaataaaattttttttaattcttagaacgagtccttatttccaaggatgtttttgaaaatgggcatttaaaataaaacattcaaaaatctatttttattaaattatgttattcacacaaaaaaaatccaaaattttaaaatattctcaggtgattggtaccgctacagtacatgaattacgtttttcaacttctaaccccccaactttgaattttgaatgggaaaagaaagtgtgtttttggcggccaatgaatgtttctgtttattcggatcagcagcaaatcaccactattcaaacaatgactgattattttgatcacacaaattgtatggagattgatcctaatcagttggtcattggattagtgaatcctaatcctcagatttcattcttcgagcaaaatcatcaaaatagagtgagtgagtggtaaacaataaatttgaaaaaattattttattgggaatttctttacatatatttttagaaaataaagtgtttgaatatattgcaaattttgaacatgttttatttctcgtagttttttgaaattttcttagaatttcttatgaaaaatcaaaaaaattgtttattaaaaataatttttaactgattttttttagcatttcttatgaaaatcaaaaagaattgtttattanaatga

SEQ ID NO: 55051 - DNA, 941 bp, Heterodera glycines
atgcggctcaccggcgcccaggagggcatcattgtgcgctgcatccaacggctggacgaggtgtgcaaggatgtgcgcaaggcggcacgcattgtgggcgatccggcactgttcgagaagatgggcgagacgagtgccgcaattcgaagaggtgggaggggagaagggggattctttttatttggaatggcatttttagcatgccaaagtcacacaaaaattaataatgcgaaaatacgcagtcgggaaaaaaaatttttggatgcgattttatgtttgggttgtctatctccaatccaggacaggtctaagtttcctatgatttcgatgtcgccgaccacgaaaacagcatctatttcggccaatttcgaaccccggacccgaattcgaacaaaaagtcgaaagtccaaatttgcgaatttcgcatttttggtttaaaaacggctttaatgatcctttattgcagaattgatggtttcagtttgtttccgtgtaattaactctttttttgaaccaaaaatacgaaatttcgaaaacttggggattccgattttttgttcgaattctgttccggagttctgaattggccgaaatatttgccggattcctgatcagcgaccattttttttttgaaaaaggggggaacaaagcacagtatttatacccaaatctaaaaaatcggaacattgtagaaatttttgttgaagtatttttcaaattttattttcgaatattgcattattcaaagctattttaatttatttaaattaaagcaattaaattttcagacattgtgttcgccgcttcgctgtacacaaccgaggaggaatgaacgagctgtttttaatgggccttttttctcaatatcatttttctattcatttttgtttatttttctatcccaaagatttgtttttgtttttttttttgcttataaatta

SEQ ID NO: 55052 - DNA, 812 bp, Heterodera glycines
atgctttttcattgggagagatttgctgagaatttaaaggaaatgggtgggagtggataaaatttcttaatgttagggatgtggggggactgttacttcacccactgtcaagggacggcttttatggtgaaaattctactcaaaaaattatataggtatatttgccaatctaggtgatcactttctacggcacaattctactttctgctcactgtaagtgatccttccctttaaccaaagtgccaatgaatgaattataaagaaatgcgccaatgagtgtaaaacaaaaaattcacaaatgtaaagtaattttggagccttattattagggatgatatttttagggttttcctgttttttctgagtttccagtggctgcttttttggtggttgttaagctatttttcgagttattagagccttttcgaagtgtttatttctagagccgaaaagccttcggttaatgaaaaatattttcattgatatggatggtataatccgaggtgtcatcgaaaaactgcaaatcagaatttcgggcggaaaaaaaatcagatttttgggtaaaaaatcagaattttttgcaattgtattatttatccaatcaaaaatgtaaaatattattttttcagactcccgtttttaattttaacattcttggagacgaaataagcatatcgaatttattttgtttttcaaaaaactttttcgtcgaggagatttttagggaatttaattgtgatttgttaacagtaaaaaatcaacaaatttgcgcttttgagccagttttttaatgaaaaatttttcataataaa

SEQ ID NO: 55053 - DNA, 1278 bp, Heterodera glycines
atgttgtcctccgacactgaacagatcacccacggctcgttggggttccacgaaaagtcgctgattttggccgtgtgcccgccatggatgaacaacagttctttaaaaagatccattttagtccgttttgcctccactcacccggtggtccgtcctccgcgtcctctggcgactgttcgtcgccaattttgctcagatcccaaatgtgcagacggcgatcggtgcccgagctggccaaaatggtctcattgtggggcgaccattggaccttggaaaaatgtttttttttgtttaaatttattgaaaaatgcacaaattcacttgaaatatttcatctctgtgcgattcaaatgaatgcagcttcaatttcaaattacgaaggtcccacaacgcaacagtcttaaacagatttgcttaaaaatgctagcagatgcgtccaaactttgtctgccgatccggtggccaaaatgaattccgagtacgggttgaaggagagacaattcacctgggaagtaacaaaaattaatgaataattcagagacaaacaaaaaacatcacacattggcatagaataaagaaaatttggtaccgatcgaaggaccgaatcaaaatgcgtttttgtctatttctcaagatttacaattttaattttttctaagtattttgggagggaaacccatacaaattttcattaacttatctttcaaaaaatttttttttaaaatttagtgagatggggagggggcagtttcatccttataccactggttaagtgcctgatttttagcacacacatttatggactgatttttgctgtcccaatttctagcattttcggctacgagtaagatataatttccttttttccaataaaaaaatgttctttctacccttttttaacatcaatctccccccccccccccggtctccgcttgcctcggccgagtgtgcctccacaacatgggttggctttgtggagctgttcgtgcgcgtgtcccacaccatcagtttgtgatcgtcgccgaccgaaccaaagactgtgtcatgtaaaacgtgccttaatttgaaaattattctcaaaattcagttcgtaattccatgtttactaccatgccacgtccctcacaaccgcagtgtgtgctgtgaaaatggattttgcgtccaaaaagttggcattcgcagtcgccgcttgaatgtcccacaggcacacggtcatgtcgtcggaggcactcaacaaatgaccaggcaaattgttgttccaggataagcctgatttga

SEQ ID NO: 55054 - DNA, 1643 bp, Heterodera glycines; identical to SEQ ID NO: 24329

SEQ ID NO: 55055 - DNA, 899 bp, Heterodera glycines
atgcctcgtggagcagcagacggggatgaacgcgccattgtacggacggtccaaagatgtgccggagaagcgcttgtggaatgtggtcagtcaaatttaaaatcataaatgtcatatcgaattgataaatgatttattacaattaattacagttatcaaatattttgtttttaggatttagatattaaaatttgaaatttgccatagaatttcgatattgaaaatgctatatgtttttcttttctatgtaaatgcgattgagagtttaattgattagcaaaatattctttggttttccccaatgaataaaaacaaatttaacttgaattttgctcgagttttaggctggtgctgcgaattattgggctaagaagggcatgccgaaatcaaaggtcccattttattatttttttgtatgtttaatttaattttattattaaagattattatcggaatcccaacatatggtaacaaaaatttaaatcgaattacaaaaactttatttttattatttatttttaataaattgaggccgtggttggactctgagcaacccgcaacaattccgtgacatcgacgcaccggcccaagtggcaaaagcgacaaaatttgtcaaattggcgggcatcggatcatactttgaggtggaaaataatgaaaagatatcttatgttatttactttgggttgagcggtaccggtaccggtaccgaccggtaattaccggtttttttggtaccggtaccggtaccggttttttcaaaaatcaaagtatcggtaccggtttgtctagtaccggtaccgccggtaaaaatttgcactggtaagaaagggggtctgggtgagaaaacagtagggaatggtgaagaaggagaaattttttgagaaaaaaaaattaaa

SEQ ID NO: 55056 - DNA, 2223 bp, Heterodera glycines
atgactgatggcttcttcgcggacccgtccagctgtcagcacttttaccgttgcgttggtccaatggcttatcggtccgttttctctattattacattgataatatttaaatatttaaaataattttaaaatatttttaatgatttcataatttatttcattccatccactttatattcttttcaaatatctgttccaaatgttcagtttcgactgtcccaatgggctccacttcagcaaaaagttgtcaatgtgcgatcggccgaacgaagcaaactgtgaataatttacaaatgttttcctcattttcatcttttttattctgtaaatttttgtgcttgaactgcataaatttgtaaaaagaatttccgatataaaaagcgaattgattctcagctaacattgccaatttaatgatcatttggaggactgcacgagtcgctttataatcctttaagcagtccttatactgtagggatgggctaaattaattgtaatttttattaaaaatttaagaaattcttttataaaactgagaaaagatttttggcatttatattaaaaataaaacgaattaattcgccctaatgtctttgcaactctccaaacatttgctcagcttatctacggttttattcatcatttgttttgtcggtgagattttttaaatgaagcctaatgattaatttaattagtgctaaaactattggtaatgggggagagaacaaaagcccaattaagagattattgcgaatgtagcattttttgcttcattttaaacgatcggctcctttttaagccggtgacaatgcttcatcctccgcggtttctggtgccagtggcacttaccttcggccctgctacttcaccaattgggcacagtacagagagggccgggccaagttcatgccggaggattacatcccgggactgtgcacgcacattctgtacgcatttgggtggatgaacgaggactacacggccaagtgggacaaatcgcggaattattaaaattattgttttttttttggcatttcatcatttaaatagggaataaatggaattttagggccattaatccggccgatttgccaagtgataagcaaccaaatgggatgtatgctcgagtgaacggactaaaggttataataaaatggaaattctttacaaaatagtcataattcttttatttattaaagtaataaacctttttcgaaaattaattaattaattaattttaaggcttttgatccggtgctgaaaacgcttctttcatttggcggttggtcatttggcacccgactttttcgagaaatgacttcaaagtaagaccaaaaattgcggttgttttcttttagcatgagttaaacagatgttttcagttttgggcaaagataatctctaagcatccgaataaatacagtataccattgcttcaatttcgaagtcctacaaaatgcaccaaggaacaggaagaaatttttttttttgttctcggtcttccaaccctctagcatttttataagaaaattttcacaatcaaacttaggttagtttcgttgcgcgcgcgacttttcccaaagatattctcggatttcgggtcaaacatttttgatcaattaaccgttctcgaagtgttggctgaccggggcacccgctgcgcttcaaatgtgttcaattgtgcaattttccttcgcaatttatttaaacttttaatggaaattttatctgaaatatttgattattttatggacaattaatttgattaaattctttattttttttcctttttgctttaggttacatccctagtttctcaaatgaaataaattttttgatatttaattttcagaaaagcaagcagaaaaagtttcatcgattcggcaattgcatttgtgcgaaagcacggctttgatggcattgacatcgtaagagaatacccaaagggcggagagcagaagcgaaacttcagcagattttttaaggcaaatttttatgaattaatcaaaaatattttttattaaaaatattttaatttaagaaagtatttaaaaaaaaacataagttgatttcactaggaactgaaagacgccgttcggaaagaagcgtcttcaagcggaaggccgcgtctgctgatcactgctgcggttgcggcggggacggaaaacattgacaacggatacgacattccgacagtcggaaagtcgagcaaaatataataaa

SEQ ID NO: 55057 - DNA, 968 bp, Heterodera glycines
atgaagcgaaccaacgcatcaaacatcactccgcctcgcgcaaaacgttcaatggcacccccactggacctggacccaaacactgtcgcactcgcggaacaagaacgacaacgcaccctggtcttcattggcctcccggaaagcaatgccattcgcccatcggaacgtgttcaggaagacagggaagccgccacaaaaatcctggaccatcttgaagttgaggcccaaccaaccgccgtctttcgactcggacattacgacccgcagcgaacaacaccacgcccgctcaaggtggtcatgccaacaaccacacaccaacacatggcactcggaggatggaagcgcgagcgtgctcgactccgttctctacaaaacctgaaccgcctgttcgtccgcccagcgctgaccaaagaacaactcaaggaagaatatgaagcgcgcgtccaaaaacgtcaacaaaaccctgctcccgtggcaccagcaatgcaacctcgccagacaaatgttccgactcccgtcaaagaaaatggaccaagccagaaggaggccagcgacgacatttccaaaccgccggaagtttttgagcaaacaatcctcgtatgttatgaagcattaaaatcattaccaccaaacgacaaaattgttcaccaaattcaatcactcgaaaaacaataccctcgtcttttcaataaatagttctgtcagacctccaaacatttcctcaaaaaaaaaaatacattttttccagtacttcacattccaaaaaaaaaaaaaattttttttttttctcctacaaccctaaaaaacaaacaaccacttttccctttgttggaggtctgacttttctaatttctgcttctccattcaaaatttcaattcttttatcactgctttccatttcacctcatttccgccaaaagtgtaagtggcacatgtccttcttttggttatttttatttttgaataaa

SEQ ID NO: 55058 - DNA, 1044 bp, Heterodera glycines
atgggtaaaagaaatttaccacgcaagcttaattgcaaaaaggcgttgaaagagcgtgagaacaagcgggaggagagaaaagcgcagacggccaaggcgatgaaagcccggtgggctaagaaaagtgagttttttcagcaatttttatttcaaaaatcatttttttaaatttcagccgctccaccgccgaatcccaatgccgaaacgccacagcaggacgaagcagggccgtcaacatctgctgcaccgacagaagaagcgatggagccgcctccaccaactccagggctagtgccaacgccggacatggacgaggaaattttggaatatggcgttttgctgtcgtcgacaccggccacaccaatcggcgatttggtgccgttcccgtcaacaccaactgcgccaatggacaccggagagatgacaccgccaccactggccatcgacgagcgatcaccgcgcatcgaacagctggaaaagcaactgaaggaccgggatgacaccattcaatttctgcgcgagcaggtccgaaaccgagaagcgctgatcagtgatctgcgtcgtcagctggagcaatgtgcggcaccaccaacggcgacaccaaccaccagcaaaagtgagtgaaatttcgatgccttctcttttcacaattaattttctcaaaaattgatcattcattttttgtcaattttagcaacgccaaacagaggaagaccaaggaaggccatcgacgaactccaacgcagctcgcgaaaacggttgacggagcagattttggacgccattgatcgggaccgatcgagatcggcaagtcggtgttcactggagcgcatccaccgagaagtccggcacaaatacggccattatacaccaaaaaaaacaccagcgaagaagggcaaagatgaaatggaggccaatgacggcttgcttttgatgacccaacttggaacacagaaagcttatcagcggatgaaagcaacccttcgtctgatccacaaaaaattcgacattttaccgccattaaaaaaggtacatttgggttga

SEQ ID NO: 55059 - DNA, 2139 bp, Heterodera glycines
atgcaagcacacgacagtgacgacagcggcattgaggaacctgacaacgtgcaaggagtcgtgcaagaagggcaagaagggcaaggagtcgtgcaagaagggcaaggagaggaattggtagaagtaagttttgcgaatttcctcattcttttggtgccccgacatttgcggcccccagccgaaaaccacttgcgtctccgacttttgcggccaatttcttaagggtcattttccgattcatttcacaaattgtgcttgctcaagaccccatcagagcctaagtttttttatttctaccaatcctggattcctatatcgatcagtcgatactgtagagctccgaggtgtcccaataatgtttcgttcctattttcacattgtcgtaatgcaaaatcaactttttgatccctcttcattttccacattttttttctttcttgtttcagttaggggaaaataatttgataaaaggtgaaaggaatatgtttgattattttttatcgagtaattgacttgaacttagtaaaatgtgctgaatttacacctgagtaagtctaattttggtttgggctgaaatttcggaatgacccttaagaaatggccgcaaaagtcggaggcgcaaatgtcgagacatgattcgtttttgggagcagcttcccccccccccatatcagtccccgttttgtttctcctcgaaaattgatttctcaaacccaaaaattatattgaaaagttgaagttttacaaaatttcaacaaaaaactgaaaatcttttgctacaaagtatgatgaattacaggtttttccaaaaatttgcctaaaactcatgtctttttgaaacttataaaattttcacgaatataaggatgggtaataaaatttctaatttattaatttctaaattttttgagactatcttttttacgtcacggtcaatgtttgcggcttgctttctttttcaaaatgaacgaaaaattaaattagccgtattatttatcctttttgggtcacttcagtcccgggtccgttcattccaaagtattctccgccaaaaattattctaatcgacaaattgcttcaattaaatctattgactgatttcccatttttatagcattaacttattttttatttcttgtattaagataataacaaatttgtttcctctaatgaaaaaagggcacaaacgttttttcaaaaaggttattttcggtttcattttttgatgaaatttatttcaggtcggacaaattgattttgatattggggagctagcggctcaagtcgacaatgtccaagatgatcatgccctgctccagaatcaagtcgtaaacttgaacaaccaagttgtcaacttgaacaaccaagtcgtcaacttgaacaaccatgttggagcactcttgaatctggctacacaacagcagggtcagattagccagttgcaggttttagttgcaagatataaattaaaaaagtagctgggggatttttcatgtttagtaaaaagattaaaaagcgtttcaattttcaggaggcgcttcagcagttggtcggaccggtatttgtttcaaaatattgtcaataaaaaggcatataatgattttaatgttttttgaaaaaaaaatttaaaaaagtcctgaattctaggcgattggacaagccgcagcgggcagccaacaacaagaggagaagagcggcaaggaaaagcccaaggaaggcgaggacgaagaggaggcggggggcataactgtggccgaggacaaagaggaggcggagggcgagaaaaatgtgcccgagggcgaggacgaagaggaggcggagggcgaaaaaactgtggccgagggcgaaggcgaggacgaagaggaggcggggggcgaaaaaactgtggctgagggcgaagatgagggaaccagcgatggagagccgaaaacgaagcacccccgtttgcaattttaagacgatctgtttcttgccatttcaaatgttttttgaacgcaagaaaataattgttgaattgcgaaactaacttaaaatttgttgattcagttacattgaaattcaaaatttaattttcaaaacttgtttacattggcagtctaaaaatgtattctggcgatgggagacgtttttccatggcga

SEQ ID NO: 55060 - DNA, 49 bp, Heterodera glycines; identical to SEQ ID NO: 51181

SEQ ID NO: 55061 - DNA, 140 bp, Heterodera glycines; identical to SEQ ID NO: 54846

SEQ ID NO: 55062 - DNA, 1150 bp, Heterodera glycines
atgatgttgtttggcctcatctattcaacaatcatcgtcacttccattcttggcaatttgcttgtgattatcagcgtgttccgttaccgatcactgcaatcagtgcgaaatatgtaagaattttaaaatttaattattttttaaaattattttttttcaattttaggtttatcgtgtctttgtctgtgtcggacattgttgtttccatagtgtccggcacaattactgtaagttgactaaaaattcatttatgtataaaatatgcaaaatatataagtaattaataaaataattaaaaaaataatatgatagcatctttaagccaattaatgccttctcaaaaatttggttgtttggcgaattgttatgcaaattagtgcccgtcattcaggtatttttttttttcttaaaagtataaattgctcatctcaaattagaatatgattttatttatgagatgcaaagaaattaaaaattattcataattatttatagaaaatcatttgaaaaaaaaacaaataaaaataggggtttttggaaaaaatattaatattcataaatttctttttttgagaaaaaattcatcccacaaataaaatttatttatatgtccaattttttttcttaatttaaaaattaattccaaataaactcttaagaatttaaatattttaaaagttaagccaaataaattcaacggcatgaattttaatgaatttaaattattttaaatttaatccaaattttagggtgtaagcctttgcttctccacgctgactctaagcgcaatctcaattgaccgttttcggcttattgtgacgccacttcgacaatcaattcagaagcgttgtgcatgccgtattgtggcacttaacactgccatttcactgatcatatcgtatgataattaaaaaaaaagtacggtatttttaattaatttattttttcttagacttccgatgctgttcacacaaaaattggacacctatcatcgtttttgtggccaattttgcagcgaatattggggcagcgaactcggcgcaatggcccgaagtgcatacggtaatatattcggcggatttttgtacttaccgtaactcagcagacaaaacattaaaatttttactattaattttcaaatgacgctaaa

SEQ ID NO: 55063 - DNA, 347 bp, Heterodera glycines
atgaagacaaacgacgaaatggtccaaatattcaaatggatgaacggcgtcagtgacattcagtacacgcgcattggttcaacacacattcgttttgaggagggggacgaatggtcattgagcactttgaaactgttcaaaaatggtgagtcaccgcattaaaatatttaattgttttgttttttataatttaattgtatttattttctttagagacgaaaaacaaagccaacaaaaagctgaaaaagaacaaaggtcaatttgagatgagtttgtcaagagaatttgtcgaatggcttttgaatgatttggaagtttcgattatgctcgacaaattaaatttgtaa

SEQ ID NO: 55064 - DNA, 351 bp, Heterodera glycines
atgggactgaaaatcgatctgaaccgagctttcggaattccgacaattcgtgccgttgaaaacaaaaaggaattggaagcatgtttggcccaatatccggaggttttccaggacggagtcggacgatgcaaaaagattgcgtcattgaaattcaaggagggatgccaaccgaagcgatgcaagccaagactggtgccattttcacttcggaatgaagttgaaaaagttttggaccaatggcaggcggagaaaatcatagagccagtggcaaccagtgaatgggccacttcgctggtcatggtaccaaaggcaaatggcaagctgcggttgtgctttgactataaagtcacg

SEQ ID NO: 55065 - DNA, 577 bp, Heterodera glycines
atgacttttggcggaaaaaatggggagagagataacgcaaaagtgagagggtgttaaattcagccccagccatacaaaaatattctagctgcagaacaaagacaccagcaataatttcgggttttttctttaaaaatgtcaaattttcttgacttatttaggtattcttgcaccgttttctgttcgtgattttctttccgagttgtcagaccatcctttctctgttgctggatatcatgagtcattttaaagtgaaaatcaaggaccgaatggagaaacaattttttggaattattactggtcaattgttgcgccgtctcccagaacaaaaagaacacatgttgaaaaatgctttcacggtagattgagcagaaatctttttaaatatacaaattttcagtcattctacaaaacaactttggattatgtcgccaaatggtttcgcaccgaacgttatccggatcatattcaatggcttttgcttacagatcggcaattagtccatgagaatctcattgaattggcatcgactttttgtcctgatttgtccgatactttattcgatgaaattagtcaa

SEQ ID NO: 55066 - DNA, 200 bp, Heterodera glycines
atgtctcgggtttgcctcgtgcacaaaaacgaatcctttggattggaaatgagcaaatttcggccgggcattctttgccggtttccaaaagtctgaaaaaactgtttaaaaattatatttaattaaaaataatttatatattttttaatttatttttacagtcacctaacaatgcctgttgggccatgaggaatgactaa

SEQ ID NO: 55067 - DNA, 1403 bp, Heterodera glycines
tagcaattagcaacggcactaatggaatcactgcaacgccgcggggatcacgcgacgaaagtgcgacaacaaaacgcagacgaatagccgccagggatgactccgcggcacggaaagaggaacaactgcagcaacaatcacaacagcatacggtagcaacaagcgcagcgattgttacggctggtggcgacgctggcggcacggcgactacggtagcggcgttgcagcagcagacgaccattgtgtacggtagtgccatggaggccaagacgtcgctgaacgccacgcaacaacagcagcagcatacacagcaaaagccacaacaacaacaacaaatggtggtggacggtaagtcaagtttgcttactgtatcccagccgagactcttgagcattatttactattaaaagaactactgtttttgtatttttcggaataccgcagggttaaaaattgtatattacagtatgcctcgaacaaaaactattcaaaagcatttactgtacttgtagggctaccgtacaagcgaaagtactttaaattatctgtacagtgcgacagtatacctagacagacgtctcacaattagcattatttttcggggttacagtatacgaccataaaccaagttttgctcgtgttcagatctgcccactttgcgccgtgagctggaacgaccgccggcgattgtaaatgccgccgcagccgcaatggccgtcgccggcacggcgtcagtgccgtcctcctcctcctcgtcgtcgtcgtcgccatgcgttggccaagcagcgactgtgccatccacggcgaccacggcacaacagcagcacaatcatcaccaacaatcgctgccactgtcatcgctgcactcgcagcagcaacaacagcagcgagtgtcgtcctcgtcgacgtcgtcgctgtcgtcgctccgtgaactgctcgcccggccgcccattctgcacgtggtggtacaacagcaacaccaccaccaacaaacgcatgttgcctcaactggtgcagcagatgttgctgcttttgttgaagaacaaccgctgaatttgtgcgtgcgtgaccaatgaatgatgtggcaccgtaatgccaagaaaaaaaatgggtcacgccaaatttaaaaatgcctaacaaagtgccacaaattggcgatgactacaatgtgtcgattatggtagcaattggccccttcaaattgtggaatttgttttgtttatttaaattgtattgttttttggcatttcgtttgtttttttgtgtcttttcgaccttttcttttaatatttaggtgcattttttgtatatattatattaatattattatatttaacatatacataaatagcatatgttgtgatttattttttatttctatctttgtttactaaaaaagacaa

SEQ ID NO: 55068 - DNA, 1267 bp, Heterodera glycines
atgtatttgatcaaattcattttgcccatttctctttgtacgacattgaaagttttttatttaactgcattttttggcatccaatcgtacctctgtgaggaagtgctctttcgctatgccgtcgcattgtttgtggatggtgtgccgcgggttgtttttggacttcaaaattggcacaaggaattagtggggcaaatcgccgctggtggacgggggagaggttcagcggaggaggatggcaccgccggcactttgccggagggcaatgccgcgccgttaagtgttgcaaatgatgatgatgaagattgatctgttgttggtggccatttttggcatttcatactaagaaaataggcatattacacaatgtggttgaggttaaggcatcgagtgaatgaaagaatcaaaacgggtgcaccccaaaatgtcgccggaaggctttttggaccataactttgttcgttgctaatcaaattaagcattttatttatgaaaaaaaatttcaaatttttagattaatagagtttctcaagtgttttcgaacaatatcagaatgttaaatttttgagagaaagaaaaagaccactattattctagccaatttgaagtggagaaatggacaatttttaaagtgaaattcaaaaaatggaaacaaatattgatggatggtcgcatttactgcccttccactcctcaaaaaaaaatttttcaaagtctcagttgagatacattaattttgttgaattttttgtgcattgggagtgaatgagtgaccagcgccctcgggggggggggattatttgtgcattttaggaaaaagccccggaggggcgaataatcccccattattatggaaggggtggacgacggcggatggaggaggacaaaaccaatgaatgaatgaatgaattgggggggggggggaattgtttgtggagagaatggaattgccaaatcggagcatgacaagagaaatgggagggggacgtgcttttatgactcgagaaaatttgcgggggtcgagagaatggaagagacaaaatcttggaattggatgtgcgcaggaaatgccataggttagccgacatttgcggaccataattattactgaattgagctctctaaaaaattaaaataattcctttaaaaattaaattggatttgtttttcttgagaaactctttccattcttaattctaagtcacggatttctcgactcctgaaaaaaaatgttgactctcggtttgagcgcgcctatcagaataaa

SEQ ID NO: 55069 - DNA, 754 bp, Heterodera glycines
atgctcacaaaggcattcattagttgcagaaagcggcatgtgccagtcgttcacctccgtgccacgcacatacattcggacagcggacgagttggagccgttgtcgttcagcgcacggcttgccagcttccccactctggtgccagccgcttgctcgcgtgccgagtcgcccatctgccagctgcagcgtcgtttcgcacaacaagacgatgcggccagccgacggatggccgaccatcggacgctgccgtcgcaaatgccaattctgccgccaaaagcgctgccagccggcctgcccaagtcgctgagaccgtccaaattaccacccagtgagcacagaagggcacacttttggggaatggaattgtaacattgtcaaagggagtggaaaattgagctaatgtcggacaaagtgtcaaaaaattaagcaatttgggcaaaaaaataaaatgccgaataattgatatgccaagaaacaaattaaattattttggcaattatagaaaaaatgtcagaatttttcttggaaatattaagtattatttgttatcatttgataccctaacatttttgttttaggctgcatatttcattcttaattcaaaaaatgttatacctagaaaaatgatttggaatttttgagactaaactttttcgaaaatttaatttaaaattttgcaaaataattgaattgagataaaaaatttggtgaaatataatattcaaataattctttctgaaaatttgctaacaa

SEQ ID NO: 55070 - DNA, 1533 bp, Heterodera glycines
atggccaaagagccgggcaccggactgctcggcaaatgcgtgctgtgccttctgctcaacgccgtgttcgtgctcgccttgttcctcgcatttttaattggtcattttgcggccgacgctcatttcccccacagcaataaggtaagactcaacaacatcaaccaacaagcagagattggcatttgtttctcgaaattaacatttttgactatttttaaaaaattgtaagaaaaatttaggaaaatttctgtgcgtttccccctccacgtgaaacaacgcaaaattatgtttttaagtgaaaacctgttggcatcttattgaaaaattttcatggttttactaaaaattcaaattatggtgacctcccagtcgctcgaagaacgcggctctacaaaaggggtccattttttggctttccatcgggttttatataacccgaattatgatttatggaaattactatttcaaaaatcgaaaacttggccactttctgatgttatttttaacctgtaaaattttcaccgcccgcaaaaaatatctgcttattaattaacactaacaaaatgcgcaacagcttgtttaacattttttgcaagactaacaccagcaacactgctcatttattgcccggtgaggtgcctgtggctgacggcaccgatatccgcggcaaaacaacggcatttgacctacgcggaatggcaccaaagcactcggatggcactaacattggcactgatggcacgcaattatggagccagcgagaagaagagttccaaaaagttgggaatcagtgttttgctggtggaaagtgacttttgagagtcgaaattccctaaatttcgagggcctagacgaaaaaaactgagaattttgcgggaatttgagccgaaacactcgaacagccctgcctttaatggtgccgattattaatcctcacagccctttcttcaacccattccgtcaaatttcttatccaagcgaggatcacattaattgagttgatcactgagcctttcaccggtgatcacttttcgtttttcttaccatatgccaattgcgctaccgtattccaaaccatttacattacacgctcatcagagattgggcagcaattaaataattaagtatctctttttctgatctcagagcctggaacgacgacggcaacgtgtgccgtcgttgagcgaagtttacccgccgctgttggacggtggcgatccgatggcggacgaagcggacgacccgatgccgttgagtgccgcgacagccgcgcatcagttcggcaacgggccggtgatgcaccgatcggctggcattgccagtcaaaatgttccattgattccgttgcccaaaacggtgatgccaaggcattacaatgttgaggtgatcaggaaacaaaatatttgaaaaaatattccataaaatccattcatggattacataaattttaggagataaaaactgccgaaatatatctataaatgggaaaataggatctaaaatttgaaaagttaactgccgaaattagtttaa

SEQ ID NO: 55071 - DNA, 505 bp, Heterodera glycines
atgtgccgacccaaaaagcgtcaattattgcaattatttttgttattattttgttatttgattgatggacatcaattaggcccagtgcaagtaattgagaacaatttagaacaaactgaagaagtgaaagcgaaaaacattgaaatggcacaacaaattgttgaaatccgcgaaaaaaatgttaatgggaacattgaaaatgagctgttggaagtgtgcaatttgttgaaatgtcccagcgaaaatgttgacaaatttttgaaaaatcaacttaaaaaattacacccggacaaagtcggggctgaaaatgccaaattgggagcagaagcaacaataggtaaataaaatgtggcatttattttgcatattaattattttacaactttttttaaattttatttattttagtgattaataagttgcgacaatttgttatagagaacacgcgaaaaggtctttatcattacagacatagaattgttgagattttggcattttaaaaata

SEQ ID NO: 55072 - DNA, 244 bp, Heterodera glycines
aggtacatcagtgattcgtaaaggtacatcagtgattcgtaaaggtacaacagtgattagaagaggtacaacagtgattagaagaggtacaaaagtgattaaaagaggtacaacagtgattaaaagaggtacaaaagtgattagaagaggtacaacagtgattagaagaggtacaaaagtgattaaaagaggtacaacagtgattaaaagaggtacaaaagtgattagaaaggtacaacagtga

SEQ ID NO: 55073 - DNA, 534 bp, Heterodera glycines
atgagtgaagcaaatgtgcttgacaaaattgagaagaaacttaactatgaggcccgcatgtgtaaagagttaaaagaaattggactgcaaccgcatcatcagcatagactcgaagaagcgcgacagaagtttgctaaaggagagtgtctgacacaatgtgaacttactctactgtttatggaacaacaagagcgcttgcggcagaagcgcttccggcagcagcagcaactgcagcagcaaccaccgcagcagcagcaaccgcagcagcagcagcaaccgcagcagcagcagcaaccgcagcagcagcagcaaccgcagcagcagcaaccaccgcagcagcagcaaccaccgcagcagcagcaaccaccgcagcagcagcaaccgccgcagcagcaaccaccgcagcagcagaaaccgccgcagcagcaaccgccgcagcagctttctgaaatcctccatgagtcgtgccgctcgttggagcagcagcatcagcagcaacaaaatgtgcaacgcctggagcaattgcgccagctg

SEQ ID NO: 55074 - DNA, 487 bp, Heterodera glycines
tttttatttattaagaatactttgttaattgactctgatcgaattgagcaatggaaggaagaaatgaatttggtgttttttgcagtcgaaatgacttttgccccgctaattggcggcaatgttttggatcgatcggaattgttgaagcaaacagcgcagcagcagaacatcgtgtgcctgatcaaggagaaggcggaaagactggacttgaagcaaattgtgtggctgaccaatgcaacaattgcgtcacggcaagtttaaagcttcaaagctaatctcacacatgcattttccaaatcgatcatcagattcggccaatcatttcaaatcagtgattttgtgaactctatggttttttagagaccgagccatgtcgattttcggggcccggcaaaccggttcgggaattttggaaaaatccagtttgaccaattttagaaagggatccgggatcagatttttttttgaaaatgtccgacccgaaaaa

SEQ ID NO: 55075 - DNA, 259 bp, Heterodera glycines
taattaaatccattccttcgggggaccgtgccgggtgccgcggggtaagcagtgctggttcgtttcatcacggcaccgaaccttttggctagtcagcaatcgttgcttaacttgccagatcggacgggtgcgcatgattccactgttccaagcaccccaccaaaagcaaaacgatataaccaaaatataaggaaaaatttttttaaaaaattttttctccatcttcctttttgatactaaagcatcatagtgctaaaat

SEQ ID NO: 55076 - DNA, 210 bp, Heterodera glycines
atggaaggcggaggtggcgaagaaacgcgccacagaggcggaggagggaccaacgcggacaacgaggaggagaaggaggtggacacgggaaagcactgctgtcgggcggaagttggcccggacgacggatggaaaggctgcggagtccgacgaggcgacgcggaacggaaggactgggcacaaagaccgggcggaaaggaggacgaatga

SEQ ID NO: 55077 - DNA, 586 bp, Heterodera glycines
atgtctgcacgcgttggaattcatcatacattatgcttgaacgtttgtatgaacagagccgcccgcttatgcttattaacgaagaatacaatgatctttctttacctgattttgagcttgtaaaaaacatttgccaggtcctttataataattagtcttattgatttatctaatttttaggttttaaaaccctttcttatatttacaaatcaattatcacaacgtgacgaatcgctttcatcagttatttcggtctacaaatgccttcaaaattatctccgtgttaatggcgaagaaaatgagtccattctgagtttaaaaaatgtcataaaagatggattagaatcccgtatgcgagaacaccaatctaaaatgtaaattttggattcttatttgtcatatttgctaattataatagtttaagctttttgcgcatggccactctcgttgaccctcgtttcaaaaacaatcctaacattttctcgacaaatgaacgagctcaaaatgaagtgttattgcttgacacagtaaaaatggtaacgaatccatcacgtcgagggtctgattctggacaaccgaaaataaa

SEQ ID NO: 55078 - DNA, 341 bp, Heterodera glycines
atgttaaactatttatttaggggtttgtcgttaagaaaaaaataaagaatttttaaaaatttaaaacaaataatatatgcaattaaaattaaatagaaaaatatatacagaaataatataattatattataaaataatattggctaaacgaaattaaacaatatgaaaaaagcaattttattttggcggcgtcacgctttgcgtataaattattattattattattaaaaaattaatcttttaaagggtaccagcatcttcatgtgactgtcaagatagcatgaagatttaaggggttaatcagttattaagtgtttaatctattatactttggtttttca

SEQ ID NO: 55079 - DNA, 508 bp, Heterodera glycines
gttttcctcgtctacacgggtctcgtcctcttcgtttatttggccaccgacagtttccaaaacaatgctccgtttgtgttcaccattcccgtggtcgtcctcggttggttcactctttggacgcgaatgccacggaggacacgcattctcaccgctgtttctttcttcacgttggcattggcactgtacagctggtcaatgttcccaaaaaagtgagaaaaatgggaagagacagagagggagaacgtaaagagaggggggagagaaagagagagagttgggaagaaaatgagagacattcaaatggggagagagagagagttggtgatgatcaatgcttatcagtcagtcttttgtcgatcattaagtctgataatgccttgtgtccctctgttttgtgtcctcagattggagctgtccgccctgctcatttgtttcagccaattcgcctatttgctctccttctacaaatcccttcgcaaatggtggatcgctcttgcaatttcga

SEQ ID NO: 55080 - DNA, 438 bp, Heterodera glycines
atgagcttaggaattgaggccgagacagaatccccaaaaacccgggaatcgtgcacttccctaacctgtcattttgaacattggccaattagtgcaaattggcaagccgaaaacgaccatcgcaaccagcgggagaatgcgtttccacaactgaaaaagaataatgccattctcagcagttggcaagccctgtactttgtcatgtttcaatgggactgcaattgcggtcaatcggttgagaaggatgaaagcggtggccaaattgtttgcctggaaagtgtaaccggtgaggaaaaaaggcaatccgccgatcatccaattggggaacagagaataaatgggaaaaaggacgcagccgaacagagagggcaagcggtagcagtagaaagagtcgagcaagtacagcaaatcctaagaggaaacagtcaaaggaattga

SEQ ID NO: 55081 - DNA, 693 bp, Heterodera glycines
atgaacaagctcaagtttaaccagcagcagaacactcccaccaactttgaacggaaactgttcatttacgcgttggccaccttttgtggacatgcgctaatcgcctgtctgttggtaatatcaattaattaattagcgttaattgtaatagaaattcaaacgtcaatttgcagatctgcatttacattgcgtcaaatgcgcttaacgttcaaatggttttggcattatacacccattacccgtgggtactcgacacgggcagtgtgattctgtccagctggctcctcctgtgggcgggcgactcattccgtgaccaattattgcgcgactaccgtataccacgaattcgtttcgaaattcgcgctaacaatcgcgtggtatcggtgaagagaccaattgagcaaaccaatggaataaagggccacgaaaagctgcgaaaaatgccaaccgttgcatgaacaaacttttggatgcttcaccagatcatgttccgtttgaagatcttgcagtgttgttagcctaattgtgtcaaaatttcttactcatttgtattctcaattttaaacactaatttttcaaccccacacacagcagaggtattttcttaattttttaattctcttttttggtctattttttaaatcaaaaaaatcatttcatcctgttttccattttttaattttaaattgtaaa

SEQ ID NO: 55082 - DNA, 1243 bp, Heterodera glycines
gaatacagtaatcaaatagttttaacagaaaaccaattacaacccatctcacaatcagcagaagaaggagaggaggaggaggaagaggtggtggtggaagaagaagggcaccaaaatagtgaagaacatcagcaggaggaggatgagcagcagaaccgagtgattgtcaaccgaaggccatccgtccaaattggcactatgccaaatcaacaaatggcggacggacaacgcgaggagaagccgaccgcggaaaaaaaacaaacgcagaaaaaggcaatgaagccgaagaatacaaaatacccattcagggcaaaattattttcaaaaatcttaaataagtaaaaggaacctttggcacattgtagtatattttatttttcgattttttactataatattttttgtacgtttgccaaaagatgaaattcagcagaaaaaactgacagtgcggccaagttattcgacactgcggacaaacatcattcgtctgacccctgaaagcatgaagtgcaaattatattgcaagtaaatcccggcttagaaaaacattaaaaaatgatttacaaattaatggaaaaaattcgaaccatttgaaatatattttaaattcagagggccaaaatgcatttattgtggaccggagaattggacagaaaatcaacaagcaattaaaggcttatattcacattggttgcatcattttgttttttatttattttttattttttaggataaacaatgaaattttggcgatggcacggccgacaattcgaacctttgaggagtttgacctgatcaaacaatttaaaaagcaagcttaattaaaaaatattttgagctaagacaaatgcacaaaaaacagtaaaaaataaatatattccgattaatgacataaattcttaatatttttttccggcttttatataaattttcattactgttctttttaagtcagaattttcatataaattccacgttaagacaacacattcgaactgtcttgaaccttcaatgtgtgaaggagcacgacttttgtggtccgccattaattgaccacaccggcttcacctacaatcctgaactgttaatgcgtgaaaaatgtatttttttatttattaaaattgaaataagttaatttgtttttcagtgtattattttaattttgcggtccccgatttcggcacagtgtcagcaaaatcaattttggacatttgcaaagtcatttggttctcattgaaacatg

SEQ ID NO: 55083 - DNA, 1421 bp, Heterodera glycines
atgcctagtaaaacgaaaaagcggaaaagcaacaaagctgaagaagacaacgaaagaaaaagaatcaaaattggctcccgaaagagggacttactagcagtggcagcagctgccccattaccggttgatgatgactttgaactctcacaacaatcggggacctcggctcaggtccatccaccgggacctccgttgcctagtaaaacgaaaaagcggaaaagcaacaaagttgaagaagacaacgaaagaaaaagaacaagaattggcactcgaaaaagattgtcttcaccaaatgttaccaaaaatcagccaaaaagacaaaagaacccggtcggcgaagtactttccgaagagcagcgtcatcagtttgcggaggatcagcaccttttcaccattccaaattcgcaacttaccaatgagcaaaagagaagacggcttcagttcgtgtttaatcgtaaccccgtcaagtacggtgttcacggtgacaccgttttaaataatgcaggaaacccaataacggacagtagtgtcgcccaagctctcgactatattatagaacgcagagcgggacgaattccacaatttagacagcctccaggaacaaaattgatccgcgatcgcattaacagtgaccttattttgcgaacatggacggctccaccagtaccaccaaggggacccaaacggagattgtcacaagcagagcaaacgacagaattaaaccaaaaatcccaaaagctcagaggaatgaggcaggcgagaggcagggtacaagaaggaatgacacttccgtttccaatgaggggcgtcaagcggaagtcgacggcactgtcagcaatagaaacggaaatccccaccaaaagccaacgtctcagaccacaaaaatggaaaaatcaatagaaaatgtgttggaaagactctacaatgacccaaaatccccggctgcgttcgccggtgtcgaccgattgtggctggaagccaaaaaagaacttggaaataaaattcccaaacgcgatgtaaagcactacctggagggacatcgcacctacactctgatgcgtccaagacgcatcaattttccgcgcgctaaaacaactgccgccggttttatgaccgattgtcaggtggatttggctgactttcaagcactttctcggcacaacagcggcaatcgttatttaatggtggtaatcgatgtactttcgaagcgaatttttgtgacacctcttcgtaccaagaaatccgatgacatggtcgaaggatttaagcgagtcttttcaactatgccaatgaaaccacacagaattttctccgacaagggtacagaattcagaaatcagcagatgaaaaagctttttgatgaagaggaagtcgagaaatatgaaaggacccattctgagaagaaagcagcatggccgaac

SEQ ID NO: 55084 - DNA, 821 bp, Heterodera glycines
atggggcagctgctgccactgctagtaagtccctctttcgggagccaattttgattctttttctttcgttgtcttcttcagctttgttgcttttccgctttttcgttttactaggcatcggaggatcaggtgcgagaggctggaaatattctccatcaaagattttttgtcactaatattaatggccattttttggagctttgatcatgaatgttaccaaatttaaaatcgaatcgttttatataccctttttcattctcttctgttccatagtttatttaaaaaatgtttcctcatcctttccgtttatcgaccaaaatattgctacgggtcaaaagattgggtaaacaaatgcaatcgccgatgttcgagactctcgttccttatttttcattcatttttatcccttttccccaaatggcacgccatccatctctccttccgatttacaaacgaaatattcgtcgccaaaaccacgtacacattaagcatgtacgcgtaaatttttcatgttgacataattaaattataattattcaggtgtttgttactggaggacaaccgccaagttattgtatttggtgtttagcacttgggattattcttttattcgcttggttgatttggtaagaaaacacagaattttattcattaatttaaaaagttcgtaaatttcaagatgtcccgcgagaatcggatgacctcgaggatgcaatggatggggaacggatgtaagacaaacatttcaattgattaattctgaccttaattatttttcagtaaattttaaacctttctctaattcctaccgtatcatttta

SEQ ID NO: 55085 - DNA, 492 bp, Heterodera glycines
atgcctgccgaacaatcaacggagctcaaagacattctgcaggcgatccattcgcttttacaaaaaagcacacaaccaaatgttccatcccagaattcagaaatggacttgttttgcaaactcagcgcacagatcgccgaattcgtctacacaccggacgacaatcacacattcgagcagtggtttgaaagattcggcactttcatcgcagatgaaggaaagaatttgcccgaagcaagccgagtgcgactgatcatcaacaaattgggcgctgaggagtatcgccgctacacggagagcattcagcccactgcaccggaaaagataggttttggtgaaacaatccacaagctaaaagcaatttttcccgaatcaaaatccctttttgtcaggcgtttcgagtgttttcagcttaagtgcgcggacaatgacgcactttcgttcgcagcaactgtcaacccaatggcagaccgcgcaaaaattggattttga

SEQ ID NO: 55086 - DNA, 608 bp, Heterodera glycines
  unsure (1)..(608): unsure at all n locations
atggactgcggaggggagactgcccagtggcaactccatttggcacggtggtgccaaatggagttttagagttgtggcaccggtggactgaaaaaaaattcaaattntaaaaattcattttttttttgtttcgcacagatttgaagtccccaaattataggcttatttataaaaaatttagcttttaaaattaaaaaatatatataaatgtatagaataatacatggttttaaaatggaaactattaatatttggtggagaatgaaatgcttgggccgttggtcattcttctcgaattatgctgggcttaagggtgcccattggcctaaaagaggcgaggaaagagggaaatcgatgagtgaaaaggccgacgacagctgcccagcagctgccgaatggccttagcaaatgcgaaatgacaatttattcaaaaattacagtaaattacaaaatttagcattttagaaaaccattcggaaaaagattatttttaaagtaacacattaattaaggttcaaattgggacaaatttttgatgtcaattatctgaaatgacaacattttgatcatataattttttccaatattttttggaaatatgtaaacaa

SEQ ID NO: 55087 - DNA, 95 bp, Heterodera glycines
atgttggcggcggcggcaccgttcaaactgctcactccgctgccactgctcactccactgctgctctccacactgcccgtcggactgtacgaact

SEQ ID NO: 55088 - DNA, 831 bp, Heterodera glycines
  unsure (1)..(831): unsure at all n locations
tcgattcccaccgctttgttcaactacggccattccaaccatcactaccaacaccaacataagcagcttaatcaacagcgtcatcaccgaatcgccacaccatcagcttcgtcctgttcggacaatgccaatgccaccgccgtcgtcggggtgccatcacaaaaccatccgccccatcaaaggagcaattcagcgcttacaccgtcgccggttaacaggtaggggcatacggtatggaaagacaagcactacagtatcagggcatagtaccgtgggaaatgcctattttggaattaaatgtaattattgaacaagttttacccctggggggctttggaccatctctgacaatgacccgtgccaaatcccacacgagatgtgaatagacttttggcatttatcgggtaggggattggcattccctctatcccaacaagtttggcgttaaaatggcattttgtccctacgtacagttcgtacagtccgacgggcagtgtggagagcagcagtggagtgagcagtggcagcggagtgagcagtttgaacggtgccgccgccgccaacatgatgacgtcactgccgatgcatcatcaccaccagagccagcagcatgtgacagtgaagacggaacccggcatggcacctgcttcaactgctgacatttctgccaacattgtggccaccccgtcaacatcggaaagcagtgatggtagtggcagtggcacaacaccgaggacaacaacggcaccgccagcaccgctcattggtggagaagtcgcgcgggngggagccgaaagcgcaaaagcccaatggacggcaacactacggtaa

SEQ ID NO: 55089 - DNA, 857 bp, Heterodera glycines
atgagccaaatggttgcttcttcaccgcttctgcttgcgctccaacagcaacaccaccaccaccaacaacagcagcaacaacagcagcaaagtccgttcctttccgccgcgctcaatgccatgagcagttttgccgcttcaccggccgcgatggttgccgcttcgtcaccgttggcacacgcggctgtgtggcaccacttggccagcaacatgttcaacaacgcgttcagcccaagctgtcagtggggtataggaaaagtgggcgggcgacgcgacaaaccgatcatttagtgatcactaaaaaaaagttaaatcgttacaaaaattttgatcgatagattgatcattttggaccagtaaattgactgcaaattcattttccttttctaaatttttggagccttaacctaagaattgccaagcaaaaatttaaaaacacattaaaattttataaaaaatatttaaaaacgaattgtaaaaaattatttacaaatatttatatattaaattgaatttcaaatgccattacagtgaattcgttgtccaataacaacaacaacaacaacaacagcacaaacaatatcagccaactgttgtcatcggcgggcggtggtggtgacaattcgccgtcatcggtggcgaacagtgtcagcaacacaaccaccaacggaaacaatgacacaaccgcagcaacgcaacaactgcaagcaaacaagacaaataacaacaacagcctgtacagtcagctgcaaaatgcgttgacaacgccgaccattgtccacaaccatcaccagcaacaacaacaacagcaagcagttcggacaccacaactgtccaactcggccatgctgtccgcg

SEQ ID NO: 55090 - DNA, 332 bp, Heterodera glycines
ccgggactcaaacgtcccgctcaggccaaaaaatttttctatttccgggaaaaaatcgaaatttttccgaaaaaaataccagtcgatagagctcgaaaaactacgtttcggaagtggtctccgtttttctcgggaaaattcgttaaaaaatcataaaattaaaaaacccgaaaaccgttttttaggcctaactcgaaaaattttgaaaattttcgaaattttaaaatctggaaaaatcgagcttatttaactctacaataagtctgctggccacactcgcgctcaggtcaaaccctaatgagttattcgcctggtactgaagtgggaaaaaa

SEQ ID NO: 55091 - DNA, 1617 bp, Heterodera glycines
atgaaggacaaagcgaaggaattggcacagaattgggtgtccgccaacttcaaattattcaacagtaaaaattgtggaacgaaagtatgggagaaaatcacagcaaatgaaggcttaccaggcagaggcggtgaatacaatgcgcaagtgaatgaaaattgaataatttgtatataaggattgtttttattttcctttttgccagattaatgttggcacgactctcggtgtattgcttgacatattagtgacttatggtggaaaattaaatttgggaattgatggatcaaactgtgaacaaaaagacttcgaaattgaaccacgcaaattcccgaacgaagcggtaatcagaaaatcttattcttatataaattttctacaaaatttaaaaattaacagttttgttttagtctgagtatcggtcgaagcagttagctgcagcgcagaaaaaagtggacacaattaataaaagccaaaaatattggaaggttaaaataaaattataatattcttattcttttgcaaaatactcgtaataataaaaataaaaattaataattagtttaataagaaattgtttttttcaataaatttaccaggctgttatctacgaacctttcgctttgctgacagatgcggaattgaaaaaacttgatggcgtgtttccgcccatatatggtccacagaatcaacagctgaagacattggaaacgctaaatattgaaactcaatacagcaacgacaatgatttaccgcgtcaatttgacgcgcgggaaaaatggcctgattgcgcggatataatcagcacaattacagaccaaggtaatttgatttctcaaaaaaattaattcacttggaagttcaaattattcctatgttaaataggactttgcggttgctgctgggcagtggcttcagcttcaacattaaccgatcgcatttgtattgctcgccttaaaaagggacaaaaaacctcccattatggagggtcatacatctcagcacaattcacttgcgaattcactccaggaagtgacgggtaatacgatacaatgtagaaaatattgaaattaagagtatttaattttgcaggtgtaaaggtggttggcccagcatggcttggaaattttttcataaagaaacagtatctgggtcaaattatgaaatgtacgatggatgtaggccttggacaattgatccaatttttgctggaactttttttgaacgtttaccaattttaactatggaatatctttttgtcggtcccgaggcttcgtggaaaacaaaaagaccaaactgcaaaaaagaatgcagaatcggttggcatcagactgtcgaaaacggtaattcatgtttactttcaaatggttaattttataaagagcacatttaatgttttcttcattcaagttatgaagataattactacgactttcagaaatggctgatacaccgactgtcattggacatgagtgttggattgggtggcattttggaaatgagcaaaaaatgatgcgtgaaatcatggtcaatggctctatcactgcatcatatgccgtttacgacgattttcaaattacaatggcagctgatataaatcaaatttatgttgtatga

SEQ ID NO: 55092 - DNA, 1285 bp, Heterodera glycines
  unsure (1)..(1285): unsure at all n locations
atgattgaaaagaagctcactcccggattcctgcgcacaatcctcaccaaaaagggagaagacccggcacgctggaacacgacaaagttccgagacgtactcaacgaagctgttcgaaaagaaacccaaattcaagaagtcatgggcgagtacggacactcgcagcagcatccgcaacaacggccacaagctcaaaggcccaatttctcggcatcgaaattccgagaccgcgcaccaatcccacagcaacgggaacgcacattcatcacctcagcagtggatgacaatcacaaaaggctgatcaatcgacagcctcaacacaggccacagcaacaaaggcctcgcgcaccacaaccgcaacaaagaaacttgcgcactttcaacaatcaaaggcaatttccaactcaacgtaccaatgcgaccaacaatcaacgacaatttccaactcaacgtaccaatgcgatcaacaatcaagggcaatttccaactcaacatgccaatgcgacattcaatcaacgcaagcctccaagtccatgcatcttctgtgacaacgatcactggaatgaagaatgccggaaatacagcacaattcaacagcgaagagaagtgctgcgcacaaaggcattatgcttcaaatgcctcaaaagcaatcatcaagcaagcaattgcccacaaccgaaaagatgcttcaaatgcaaacaacctcatccaacggcattatgttatgcagacgaaaaaccaccgaaccaaatcacagcagcaatgttggggcaaacacaacaaaatgtgtcaatcacaactcaagacggaagtaacgaaccaacggcatcgacatcgcaaatgtgcaatgccgtaaacggaagcgacacacgcgcactactcatgaccgcaacttcaacggtcttcaatccagcacaaccgcatctcagcatgactgcggcaattttcatcgatccaggcagccacacatcattcatttcagcaaaggcagcacagctactggatcttccggtggtccacactgaagaatgccacttgaccagtttcggagaacgcgaaccaaaaagatacatcagcgacctggtcaagctcggatttctctgcacgagcggggaaaaactcatcttcaacctcaacgccatgaaattcttggtcaacgacatgccaatgattcaactgtcagagctggacaagtcagagttgaggcaacaaaagctcaatcctccgcatgaacaacgacaacctgacatcatgctncgaattgatgtctggcacgaactgcnag

SEQ ID NO: 55093 - DNA, 1122 bp, Heterodera glycines
atggtacgaatgacaaaaaaaacaacaaaaaaaagttaaagattttgaattttatcaaaaaaccaaagggggaacccttttgttttcaaaattttttgaaataaaaaatcgtgaatatacttttattcgccaaattatgctcaatgcttaatgtgttcatcattctgtatcaaaacaaacaaaaaaaaaaattagaccaaaaaaaagtgaaaaaattttcaaaagagtactctttttaagtagcgccacaaaattgcattgaaattttctaaaatttttcccacggcgcctattggccccgccggaccccaccccattcaccaaaagttttttggaaaaagcgcgccgcaaaaaaaataatatagattttttcattttgaattaaatttttcaaaatgctgacttttgatcccaaatgaagattttttgtcagccaaatgctgattttgaaaatttacagttggcagccctgcattttaggctaataaaatattgcttcaagtcatttttcacgttttattgtgttttctttgcgctactattagtttcagaaaaaatcttatttttggggtccgaatcttagtttttcacccattttgtcttattttgaaaaaaaaacttgggagccctgactaaaacactcgttgaattcgtttttcagacagacacccggactgggacaatcggactttgctcgaatggttctccgaaaagagatggaccgacgaagataattttccacccttttctgagaagcacttgcaaattattgaccaagccgttgccgaaatgaaactgctcattcgatatgcgcaactttttggcagtgatccgtcgcgcattgtcttccagccgtcgctggcacgcggcttggattactacacgggcatcatttttgaagttgtgatgaaaggtcacattatataactttaacggaaaggacaactgggcgttgaatgcacttcactttccccaagtcgtttctctactgaaaatgatctaatccgtgtttttggctataactcatttcaagttgcccaaaatgaacgaatttagtatcacttgaaatctgagctttttcagccatcaaaatttcaattgtaaattatgttaaaaaataaa

SEQ ID NO: 55094 - DNA, 103 bp, Heterodera glycines
gagaaaaggaaaaacgtgtgaaaatggataaatgtgattgaattgataatggccaatgggaaataattaaatgagggaaatgcgtcgaataatccttacaata

SEQ ID NO: 55095 - DNA, 1240 bp, Heterodera glycines
atgaaaaaactacacattcacaaaaagaaaatgtaaaatagaaaaattaaatctaaaaatttgaatttaattttacagtttcatctcctcagactgttggcttttagtgttcgatttgcttgagccttctcaactgggccttggaattgcacttgtcagccaccgttttgacttttacgtcgacgaacacttcaagacgcggcgttgggcgctcaaagccatggaaattaaagccaaatttgaagcggatggcacaaatggatgggaaattgtcaattgcgatggaaaagaattgccaactccacaaaaagcgctgccaaagaaagtcgtgggattcgaagccatttcaataaagtgaaatgaatgattaattttttgttttctgtttgtaaaacaattcctttattttcacagttacatcgaccaaaatgccatcacttttctgcagcgttttcgccaacttttcgcctcttctccaattaatttgtttatctacacggacgatgaccgcactttggagttcattttgcgcaaattttggccaatgattgcgaaaaacatttgtgccatacaattgccccgatatgctctcagccgtttgcgacgctttgtcccgtcacttctcaacgattgtccatcgcttcgtgttgtcaattccaattatgctgatggtttcttcgccaaatttccttgcgatgacagtgccatggcatcggatggacaagcgttggccaaatggctgttcactcctcgtcctgacaatgtgccaaaggtgttcaaatgctggttgcatccgtggtggtatgggaatttgtcgtcgcgcattggagccttcaaagcggtgattcgatttgattttaattggcattttacgttcattgggttcgctgacaaaaaatagtttggacggcattcaactcgtttttgacgaatgcaaattgcgtcattttatgatttcttaatcaattgtcccatattttaggcatttgccaatgcttcatctcccgtcagtttcattgttgtcatttggcgaccgccggcttctgttgaccccaatttggcctttgatctgaccaacgaagtgactcaggaacaactgacgttgaaatggatgaacgatgtcggccgttttcttctgatccgttgtccaattgtgcgcgacatggacaaatgggcgaaatgggaaaaggaagcgattgactggcaattcaatggccaatggaacagaatcgacatttga

SEQ ID NO: 55096 - DNA, 1071 bp, Heterodera glycines
atgatcgcgagaaacatttgtgccatacaattgcccggatgtttcgtgccgtcaattctcaacggttgtacatcgcttcgtgttgtcaatgcctattctgatggtttcttcgccgaatttccggccgatgacagtgccatggcatcggatggacaagcgttggccaaatggctgttcattccccgtccggacaatgtgccaaaggtgttcaaatgctggttgcagccgtggtggtatgggaatttgtcgtcgcgcattggagccttcaaagcggtgatgtcgatttgattttaattggcattttacgttcattgggttcgctgacaaaaaaatagtttggacggcattcaactcgtttttgacgaatgcaaattgcgtcattttatgatttcttaatcaattgtcccatattttaggcatttgccaatgcttcatctcccgtcagtttcattgttgtcatttggcgaccgccggcttctgttgaccccaatttggcctttgatctgaccaacgaagtgactcaggaacaactgacgttgaaatggatgaacgatgtcggccgttttcttctgatccgttgtccaattgtgcgcgacatggacaaatgggcgaaatgggaaaaggaagcgattgactggcaattcaatggccaatggaacagaatcgacatttgagagatttgctgagaagtgatcgatcaatttgaattgtgaagttggagaatgaatttgatcctatttgatgtgtataacattgttgttttgttgcggtgatcaacttttatttgtgttatgtgtatgcatttaggataaatttagggattttctgaaactgtaattggctttaagaaatgctttagaaggttttttttttttgaaaaattttgccgcaaaacaattgttaaaaatctgattgtttctaacccaaaaatgcactgaaattcactaaatattatttgtttatttcttctccaaaattgttaaagatgataatcggaggcgaaaattaattaatataggtaaccaatttttaaaaatggaaatttcaaaataattattttttaaaattcaa

SEQ ID NO: 55097 - DNA, 5333 bp, Heterodera glycines
  unsure (1)..(5333): unsure at all n locations
atgtcagacaacagaaaagaagccgaagaaaaaatggcgaaagcaatgtaaaattagaatgccaattttcaatttcaattttaaattttgttttcctttttttcagctttatctccgccgactgttggctttcagtgttcgatttgcttccgccacttcaactgggccttggaattgcacttgtcagccaccgttttgacttttacatcgacgaacacttcaagacgcggcgctgggcactgaaaccaatggaaattaaagccaaatttgaagcggacggcacaaatggatgggaaattgtcaatttcaatcgaaagccgttgccaattccacaaaaagcgttgccaaagaaagtcgtcggattcaagcgcatttcaataaagtgaaatgaatgattgattttttcttttgttgtaaaacgattccttcaattttatagacacatcgaccaaaatgccatcacttttctccgccgttttcgccaacttttcgcctcctgcccaattaatttggtcatctatacggacgatgaccgcactttggagttcattttgcgcaaattttggccaatgattgcgaaaaacatttgtgccatacaattgccccgatatgctttccaccgtttgcgacgctttgtcccgtcacttctcaacgattgtccatcgcttcgtgttgtcaattccaattatgctgatggtttcttcgccgaatttccggccgatgacagtgccatggcatcggatggacaagcgttggccaaatggctgttcattccccgtccggacaatgtgccaaaggtgttcaaacgctggttgccgccgtggtggtatgggaatttatcgtcgcgcattggagccttcaaagcggtgatgtcgatttgattttaattggcattttacgttcattgggttcgctgacaaaaaatagtttggacggcattcaactcgtttttgacgaatgcaaattgcgtcattttatgatttcttaatcaattgtcccatattttaggcatttgccaatgcttcatctcccgtcagtttcattgttgtcgtttggatttcggcgcctttggcttttcccgcacaatttgatctgaccaacgaagtgactcaggaacaactgacgttgaaatggatgaacgatgtcggccattattttttgatccgttgtccaattgcgcgagacacgaacaaatgggcgaaatgggaaaaggaagcgattgactggcaattaaatgatcaatggaacataatcgacatttgaaagatttgctgtgaagtgatcgattaatttgaattgcgatttggagaaatgaatttgatactatttgacgtatatatagtattgtactttttgttgctatgatcaacttttatttgtgttatgtgtatgcatttaggataaatttagggattttctgaaactgtaattggctttaagaaatgctttagaagtctggcatgaagatttgtggcaaaatttggtcatttttcgacaaaaatcagtttacaaatcgcattaaaaattacaaaaaattttccaggcggcgcttatcggcgccgtcggacccatcaccgtcactccaatctccaaagtttttttttttttttgaaaaatttgccgcaaaagaattgttaaaaatctgattgtttctaacccaaaaatgcactgaaattcactaaatattatttgtttatcctctccaaaattgttaaagatgatcagggaacggatttatatgtatcaaaaaaatcgccaaaatatgtgacaaaaactgccgaaaccccaaaatatgtttttattcccaaaaagtccaaaatatgtttttatatgtgctaaaaactcgctctgattgaaaggaaaacaagtaaaaatgttatttttgagcttttcatgcgatagcatatgcgcaaaaaaaatatgtaaaaacatataaatccgttccctgaagatgataatcggaggcgaaaaagataataggtatttaataattttttgacaaaataaattgtaaaaataactgatttgaagcaattttgcaaaatgtcctgatttttgaccccaaaatctaaatttttgggcatgatgttctgattttgaaaactttcgatagttataaaaagaaaagaataaatcataaaattctataacttttttgaaacataacaaatttttcgaaattttttacaggataatagagaatgccaagggctatcgaatgataccaagattgtccaatttggttggcaaaaaccttcaaaaataatttccgaaaatcgtcattttaatttttggacaaaaatagataaaaattcatgtagcccaacggactcgaacctcaccccctcctcctcactatgacccttcattttcttacaaaaaccatttcgccacacatgtaaactcttaattgataactcaaaattgaaacgatgtgtaataaaacataaaattcattctgtgtgttgtccttttccctttttttgtttaatttggccaatgaaaaattcacaaaatgataataaaataaataaggaattgaattgaaaatgtgcttttctgaattaattatagcaattagtaactgatgaaggaacgaaagaatgattgatgaattcggaagctataaaagttggtgccaaattttaagattttccattcattttcttaatccaaaaatttataaaataaatttcaattaaacagctttataaatgtttaaaattttcgttttattcaacgcttttttgctgatcaatttggcaataactgatgaacatgtaattaattgtgtaaagactggatgggaagtggagtacaatccgtataaggtaaaaagtaattaaaggctattctcgagagtctgtttcgtgtcgagaaaaaaaaactggctcaacatcgctttatttggtatttttttggacaaaatctgttttaacaaatcggattaaaatattttgaaaaatcttccccggcggagcctgtctttaaaaaaaaagtcactacatgcccggaagccttcgcaaaaatttcgattgaccccccncccccccccaccccgttctttgggactttggtctcgaattattatctaattttgggctcgagtctcgggaaatgttcggtctcgagcatcgctagtaattaattattgaaacattttggcgcaaaattccttaattattaattatttcggtttaattaaggcattcgtcgctcgtgcggtggccaaagcgaacaaagagtccaacaatacgtatcagtttgtcgatttggatgtaatcaatgtcatggtagaacccagagaagaagtgtatctctatgaagtgaccattttggctggacagacaaactgtgcaaaaaatgtaagtgccaaatggactgaaattggcacaaaaatgggcaaagtcggcacaaattttaccccccaaagtcgaaagtcgaacattccaagatcagcaggccctggggttgattgacatctgctgagatcagatttgtaccatggatttccttttttaaaaaagtcggaccgggaattgttgggattgctaaaaatgtgaaattcgaaaaaaataaaattttaaatttccgtaaaattaaagttttttaattgggcaaacaaaagcaggtgtatataattataggactttaaaataatgctgattttttaatgcagccaaagatggactactcaaattgtgttgaagtcgatcgggcaacgcgaaaggcattaattaatcctaataattattttttaattagcctaagccctaattactcttcagaaatacaaatattccgaatgtttatgtgccagaataaaatagaacaagaaaaaatgatacgaaaggatgtaattgggaaaaaattgatcatcaaattatcaaaatgagcatgttattgaataaaatgttctaattgacattcaacttccttaattatatgactcatttgtcacaattattgtaaattgagaaattttgtatttttaaatatttcaaaatccataaaatcgccgggatttttaggaggaaagggaaaaatggggaatccagtcccgattttttcgttttcccgtttccgaaaattttgttttaccacacttcacgttaaatataaaaagaaaagaaaaaataaataaaattaattctgtgtgttgtccttttccctttttttatttaattttcccaatgaaaaattcacaaaatgataaaaaaataaataaggaattgaattgaaaatatgcttttctgaattaattaaagcaattagtaactgatgaaggaacgaaagaatgattgatgaattcggaagctataaaagttggtgccaaattttaagattttccgattcattttcttgatccaagaatttataaaataaaattcaaataaatagccttaaaaatgtttaaaattttcgttttattcaacgcttttttgctgatcaatttggcaataaccgatgtgcaagcattgttggataatacagaacttctggacccgaatgacaagaggtttaaggtaaacaaaaaaaagtaattaaaggcgatgctcgagagtctcagtttcgaatcgagaaaaaaaaattggcccaaaagcgctttatttggatctgttacaaattgtcttaaataagtactatcggcactagggatggcattccgaggccccaaacattttcgaaaatcggaattccgagacccaaaaatgtcagaatcggaatttcatgccatcccagatcggcaccgctttccgaataatttggcaaattcgtttcattaattatttctgtttaattaaggcactcatcgctcgtgccattgacaaaatgaacagagagtccatcaaaccgtttctgtatatgcctgtcaacaagatactcaccgtaaacacaatgcatggaaataactatgtaatgaaaatggtggtcggagaatcaaaatgcgtaaaaaaagtaagtgcaacaatggactgaaattggcacaaaaatgggcaaagtcggcacaaataataaaatactcaaaaaattttcccggcagcacctatcggcaccgccggaccactattttaccatatttttgaaaaatggagaccaaaacggcaataaatagtaatttttggcgaaaaacggcaaaaaattttgtaaaatacacccccctaatttgggatttcaaaaaaacgaaaaatacacccctaaaaatcgagtttttaataaaataatgctaatttttaaaggagccgctgcagccgccgccaaagattgactacacaaactgtgaagcgaaagctgacccggcggcgccgaaacaggcattaattaattcataa

SEQ ID NO: 55098 - DNA, 1322 bp, Heterodera glycines
atggcgcaacagccgacaaacattggcacaccgtacagactaaaaaatgagaaggaaaagggtaaatgtcgacaagaaataaaatggacaaaacgtacagaagcatttttgaaggcattgtcagggacaaaaatccaatggcgaatggaaaataatgaaaagtggctggtatgagaatttggcgtcgtgcattgaacacttgaaagcggtgatttcaatttgattttttgaaaatattagttaaaataaattaatttctgacagttttaaaaataattggaaaaattgaagaatatgtgtacctcacagaattcgacgaatgatatatcattcgacgcctctcggtctgtaaggcacggatcttaaagaattttttggaggaaaccactttgggccgagttatgggcccgggactgaagtggccaaatggctgtgggactaaaccgtccaaaggtcctcaaaaaacagggctcccagatcaaaagtttcaaaagcctcatttggtaggcaaaaaagcctcattttgggtaaaaaagcctcatttttacaaaatttattcaaaacacgtttaaaatgttcaaatgttatatttttgatcgcccatgatcaatttgagcattttttttttgttagaaataagcattttttgggattctgaacatgaaaaacgaagttgatttttttgcggcgctttttttgagcaaatttttgcttttaaattaaggatttttacggtccggcggtgccgataggcgccgccgttggaaaaattaagaattttgaccatattttttgcgtattttcattaaaaaaattctttaaattgccaaacattatgccaatttatcaaaatttaaaagattctgaggattttccccaaaagcctcaaaaatcctcaaaatttctcaaaaaaccacaaaaagcctcaaagcctcattttgaaaatttagcctcattgacctatcaaaaaaccacaaaatgaggctaaagcctcagacctgggagccctgtcaaaaaatgaccgtaagggacggcacttcagtcccgggcccataactcggcccaaagtggtttccgacaaaaaattctttaagatccttgccttacagaccgagaggcgtcgaatgatatatcattcttcgaattcggtgaggtacacatattcttcaattttaccaaataatttataaatttttaaaatatattttaaaaagtgaaaaaattaaaatgagtttttatgtgaataggcatttttttgttgtttgcaaattagagcaaatcaagaaaacaatagacgaagaacaacagttatttcaaataaa

SEQ ID NO: 55099 - DNA, 182 bp, Heterodera glycines
atgcaatcaaagaaaaagaggagaaaattatgtaaaaattcacaagaaaagtttattttattaaacgtaaaaaaatcatttttaaagggttttgtcatggaaaaaacgcgaagaaagagtcgaaaacaaatgacgaatggaaaataatgaaaagtggtggaggagcaaccacttttatatga

SEQ ID NO: 55100 - DNA, 363 bp, Heterodera glycines
atgtatggcctatttattgcgatacaaaaggttggggatgtatgaagtattgacaaatcggcacaaaaatattgtttttattgtatagttcaaggatgtcatttcgagaccccaaaaacgtcggaaatcggaattttaaaatttggtatatttccaatttgcttaggaaaagggtgctattgcacttttttgcggtgcgcttttgcaaaaactttttggcaacatggcggtagggtccggcgatgccgataggcgccaccgggtaaaattttgttaatttttaatcgctttctcctttttgggtagaaattgtattttattcagaaactctttcaatggagaaataaaatggggaaactttaa

SEQ ID NO: 55101 - DNA, 343 bp, Heterodera glycines
tttcctttcccgactgtctccatccgcttcttctctctttccccccccccaaatgcccctctttccctcccttaatccctcccctctgtcaattcattcgatttcccattccaaagaactccaaatcagatggttcggttggactcttttgaccatttggctgttaacagtaatctgcatgactcgagagttttggcgtatcacaaacagcggaagaagaggctgaggaaagcaatcggaagaggaacaaaatgatggaagaggaaggaaatcaggaaatgatgaagaggaagaacaggagaggaaggaagaggaagaacaggagaggagggagaggaaggga

SEQ ID NO: 55102 - DNA, 706 bp, Heterodera glycines
atgaatgcttcgatcgctctggtccctgcactcgcttcagcaattgttccggctccgcgtgtattctctgtcagtctttgcccattttcaccctttccttcccaactgttgtatgattttgctctgatcagatgagaacctgcctaaacgaacttcgatcgccttttgtctgctgatcagtccggtggcgcggaaggacggcgctgagttggcgcagggatgttggagggacgacggcacttcgggagtcgaatgtgtgtgcactggccaattctgcaacataccgagagacccgagggcatccggtacggccgaacaacattatgatctcatcccttatggggtgcgtgtgcaaccactcttttttgccaacttaaaattctgtgccgccattccctgtcacttttccatcgttttcagatccgaattcttcaccagtgattggcctgaaaatgttacagagaaacccttttgtggattatggtaagtgaagcaccgttcgaatgtcaaaaagaacgatgttttagaatatttggacgatgaaaaagcggcgattttgggagacggaggaaagaaaacggaaggacgaggggaggaaagcagtgtggaggagacgcaactgccggagcagtatttggacgaagaagaagaaggcactgcaattgtttgttgtcctttcagtgtcaaacctaaacaacagatttga

SEQ ID NO: 55103 - DNA, 999 bp, Heterodera glycines
atgaaaaagtgtttttatgaaagtgcactaaggacaattgactatttggaggccgaatttgatcaaatgaagaaagaagacgacaaaatgaaaggtgagagagaggaggaggggaaagggaaaaagaaagagaatgagagagagaaagagaaagaggagacaaagaaagaagaggaagaagaggaagaggaggaggaggacggaggaagcactttcgcaatcgcaaagccaccaatcattttcgtgaatgatcttacaaagaaacacccgaacatcaacgacgaattcactccgacggacggagaacggaagagatggaagaaaaacggagggggagaaaaaggagtgcaaagaggaaaaaggagggagggcaaaaaagaatagagaaatcggaggagggcaaaaaggagttcagaggaggaagaaaagaaggaatggaggaagacagaagagtggggggagtgcgcattataaagaaaatgacgagcagcaaatgaacgtagttttacccaaattaccacttattccaattaaattttaaaattgaaatttgtatgtgtaaatccctttttttcttcgacgcctttctcccgtcctccgcgctcttttctctccctaagcgcccgcttcggtcagatacgcgtgaggatggaccggtttctcggctcgtagcagcagccagttttggttgtcgtcgtcgatgaattgcaatttgtccatccatccctccagcaatttgtcgtacaatgtcttcccgaatctcttaatcgtttcggcatttgtctctcccttcccaattcgttcttccccccccccaccttcacaaattcgtctccattagcaatcgctcggcttcgctccatctccaaaatctcccttagacgtggtgtcatgttctaaggtcgcagagcaaagaatacgaaaagagtgtcccttttccaaacctccgtgaaaatgttggtgaaaccggcgccgtgggcagtctgaggagaaacgtaa

SEQ ID NO: 55104 - DNA, 2108 bp, Heterodera glycines
atcgccgacctcaccaaattcgtcgatgtgttcgccgccaaatggcaaaatcacacttttggcttccgtctctatgggatgtgccaagtgcagaattcgattttttcgcattcaaatttcctcgacgtccattggacgttgacaaaatccgaagaaaatcgtttgtacgatgacaaattggccactttccgggaatttctcgacaaaactcagtacactgaggacaatgtggcaagctacgaatggattttcggcaaggatttcataagcccaggtgggagacggacgaacagaagcataatggaaccaatctttgatcggttgaggtggcattgaggaaaaccgacgcgtgctgcgccgtttccgtcgccttcggccgggccaaaaaatgttggacattggggtgggcatcggaggaggggcacgacaggcggcacgggtgggccaacagtcgcattccttcgccgaatgacccaccgattgacaggagttcggcttgcaagtgctcggctgtgatctgtcgtccaatatgatccaacatgcattcgaacggaatcagcgcgacaaggcaacccaaacagatgagaaaaggcgataagcacacttttaggaccatcgagtggagtatcaaatcgcagacgcaatggtctaccgctatgagccgaactcttacgacattgtattcagtcgcgattgtatccagcacattcaggtgacggagcgatgccgactttccccgcgatctatgccattcccttccccacgatcgatgctttccccgaaatcatgccgtcccccctcccaatcggtcaattccttttctccgcgatcaatgccatcaccctcccaatcgatgcaattccttttctccgcgatcaatgccatcccccctcccaatcggtcaattccttttctccacgatcaattccattcccgcccccctcccaatcgatgcaattccttttctccgcgatcaatgccatcccccctcccaatcggtcaattccttttctccacgatcaattccattcccgcccccctcccaatcgatgcaattccttttctccgcgataaatgccatcacccctcccaatcgatgcaattccttttctccgcgataaatgccatcacccctcccaatcgatgcaattccttttctccgcgataaatgccatcacccctcccaatcgatgcaattccttttctccgcgatcaatgccatcacccctcccaatcgatgcaattccttttctccgcgataaatgccatcacccctcccaatcgatgcaattccttttctccgcgatcaatgccgcgattgttcggcagtgccttaggcgccgctcttcgctcattcgcttcacttcctattttattgcaacaataaatttttgattattttaggacacaaaggccctcttccgtcacatttacgtctgttttgccggaattggcttgacattcgttcgcttttagacttggctaaagccgggagggcaattgcttctcacaatgtatggaaagggccatggagttttgcaaccgaagttccatgaatatgtgcgaaaaaggcagtacatgttgaagactttggatgagtacagagaggtgaagcaaagcaaagaaaagcaaaagaaaagggaaaaaagagaaaagaataataaaagaaaaggaaaaacaaagaaaagagttgtcgccggccatctgctgattatgaaagaccccttcatattatgccatcctttgctttttatttacgtttctcctcagactgcccacggcgccggtttcaccaacattttcacggaggtttggaaaagggacactcttttcgtattctttgctctgcgaccttagaacatgacaccacgtctaagggagattttggagatggagcgaagccgagcgattgctaatggagacgaatttgtgaaggtggggggggggaagaacgaattgggaagggagagacaaatgccgaaacgattaagagattcgggaagacattgtacgacaaattgctggagggatggatggacaaattgcaattcatcgacgacgacaaccaaaactggctgctgctacgagccgagaaaccggtccatcct

SEQ ID NO: 55105 - DNA, 1011 bp, Heterodera glycines
atgtcgaaacacggaaattacaacaccgaaaatgtcgaaaaccggaattccgactccaaaaaagtatgtttttgtacgcgtgggattgctgagatcggatttacgaaattaattgaagaatcgcgtaatacaatgtccatgtttttgtttttcttaaataattttaacttttcggtgggcggttgattgggcgtcaagaatcacaatcaagacgccccacgccttagtccgaaatcaattaaaaccgcgcccggaatcaattaagacatcaaatttcatagattcgacatcaacagcagaactgggtgtgtgtgtttgttgttcgacgcggttgcccctcccgccgcccgacgaccaaagaaaaggcaattaatcttaaattaattgcttgcactataattgttatttttggaacattttgggcaataaaaattaatggataaaatgaggaatgaataccccaagcattctcctctctctctcgccaattgattcggccactcctccgtccctatccgccgttgttttggttttcccatcccaatcggcaacaaaacaaacaaacaaaaattgacaaataaaaactaattatcttatcttccatataattagtaaagattcattgaaatttagttgttttttccaccgtttaattccttcaaattgggtggttaaaaagggtcaacagaaaaacaacccatccatcagcagaagcagaagtgagggaaaagcgccctcaaaaacatcgcattttttgccattttttcaaataattcttttatagcaaacacgtaaagtcaacaacagagcggtgcatcaatccctcatgaaaaaggaaaaaatggagcaacaacaaaaattgatgaaatcagtcaaatgattgtatacagataaaaaaatgggggggggaggaaaagacaaaacaatttgttgataaaaaatttaaaaaaatgatgagatggatttgcaggaatgggccgggttcgcaaatgataaatggacgaaatttaa

SEQ ID NO: 55106 - DNA, 138 bp, Heterodera glycines; identical to SEQ ID NO: 50950

SEQ ID NO: 55107 - DNA, 641 bp, Heterodera glycines
ctgtgtggagcttttgaacatgtgccaaaacattattttttcccgtctgttcatgatgccgttttatgtgctcaacaaatgggcggtttcattgcgccaagcattcacatgaggtaaatatatccatatttaatatttttaatattcgagagtctcggtttgaatcggttttttctctttcaccactttcaaatctgttttttgttatatttttctgtcaattgcaatcaaatgaatagataattttttagtgtttcgttgaatggttgccgtgatctgatcactctgtccaacgctgcgtccaaccacgacattactttgaacacagaaacaagcggacaatcatcagcaaacataccggtaattacattaaactgtttgtccagaagttttttctatataaaaaatggctgccaaaatggtgaccatctttctccgccagtgaaaatatatcgaaaaaatgttttaatgtgcaattggaatagatataattcgaaacattttttgtgcctttaagtgtaagcggtactctatttgatgtcatatttatttttagaaatggaaaacaattaaaatatttaaaattttgcaaatatttacgaaaatgttcacaaattcagatgctaattagtccaaattaa

SEQ ID NO: 55108 - DNA, 139 bp, Heterodera glycines
atggtccaatacaaattgtattattttgatttgcgtggtttgggtgaacccattcgccttttgcttcactatgttggccaacagtttgaagacatccgctttaaagactttgaagaatgggagaaaatgtacaaaccgt

SEQ ID NO: 55109 - DNA, 299 bp, Heterodera glycines
atgcctatagaaaaggatcaaaattctgttttgaatgaccgtacgtactttaaaactgttaatgatcttactattaccaaggggcatttgtttacttacaaaggtgtgaccaagccgaggacatgggtgcttcggttgtccttccaaaatttgtatgttcaatttgcgccactcccaacggtttatttgaagctcgtatagatcatttgagtacctaaattaggcattttttgcggctgtcctcaaataaaattacagaactcgatcgggatccaggccaggatttccctggtttttaa

SEQ ID NO: 55110 - DNA, 1352 bp, Heterodera glycines
aacaacaataataacagttatgcaaagcatcatcgatttatgccaaaatggtgtaaagtggacgatttgggcaggccaacgcctccgccacgccatgggcaccgcgctgttaccataaaagggcttatgctggtgtttggaggtggaaatgaaggaattgtcaacgaattgcatgtttacgacacaagcaccaacacagtgaggctaattgaaattaattatttgtttaaagattccgcctgaatttgagtcctggatgattttttcctttcatcttttggacaattaattgtaggccattttgagtaacctatatttttccactacttatatttttaataagacgtccaattgatgatcatcctcagtttctttggccataacttttttttctttacttgtcaagtcccacattctcaaattaggtaatcaaatgctggacttgaattaataaaaaaatagagtcaactaattgcaatttaccgtttagtggtgtgtgccagatttgcgtggccacagaccacctggttttgcggcttatggtaattttttgaacactatttgcacaacattttgttatattgaacccaattactgaaaggaatggtcacaaatcagtcgaaggttttcatctttggtggaatgatcgaatatggccggtacgaattctttgggttttaaataatataagagcttgacctttagaaaaagcctggacctgcatttcctgtagaaaaatctaggcctagttaaaaaccagggaaatcctggcctggatcccgatcgagttctgtaattttatttgaggacagccgcaaaaaatgcctaatttaggtactcaaatgatctatacgagcttcaaataaaccgttgggagtggcgcaaattgaacatacaaattttggaaggacaaccgaagcacccatgtcctcggcttggtcacacctttgtaagtaaacaaatgccccttggtaatagtaagatcattaacagttttaaagtacgtacggtcattcaaaacagaattttgatccttttctataggcatagttgttgatcattaatttcgccaaaaaaatatttacctatttatttattttttgttgttgtttttgctggccattcttgattttctaaattccaaaatgcatatgcaccttattagtgcaaactccgtaaactaaacatattttggggccctctaaaaaatttcttctaagaggggtacccttttggagggagttggaatttgttgacatagaaggcagattcgtgattaaacagcaaccccagtgaacaaacaaattttcacgacttgtgacaaaaaaaaaatttcggaggcccccaacaac

SEQ ID NO: 55111 - DNA, 1361 bp, Heterodera glycines
atggccgatctgtccttcgttttggagcagaggccaaacgcggaatttatgtccccgacgggtaaaaatgcaaaaaaaaaatgtttttgaaagaccatttttggtattacttcccaaattttattttcacaaaaaatttccttgtgcaggctcgtaaccggaaaaaaaattcaggggaggcacccaaagagatttttttttttgctcttccaccctatgcgtctcaatttgaatgttttctttaattttcattatttttgccttgcttttcaggagaagtgccctttctgcgtcttcagaacactctggtcgctgaattcttccctattgttgatttggtcggcaaaaaagtaatttttttcttcgctcgaaaatagttggtcgcaaattgataaaattcccgcatttttggcttaaatcaaagaaatttcaacagtggtatagccacaggtcgtaaaggctgcctaggctatggcccctttccttccctccgattcaaatcggacacagaattgaaaaaaattttgaatttacttttttgtgttctggggttgtaaaggtcctaaacatttctaccggcttacaattagtaaccgtcggcatacccgtgcagacaactttcacacaaaaccatttcaaaagctggaatagcacctgaaactgggccaaatgcaaaaaaaatgaaccaaaaattgtctgatttgtttaagaaattttcagggaattcgtccgtcaaatacgctaagcgctgctgaacaggcggacattcaggcattttgctcactgattgaggaaacgcttcgaaacgccgaagttggcaccgttttgagaccaatcattaattttcaaaattgcttttaccttatagaaatatttgtcatggcttgacgacgaatcctacgaattggtgaccaaaaaaaggtaaaaaaaatatatttccatgtcaaataaacatggaaatgagtccactggtgcaccccaaaatttcaccgcttaaattacgccggtcaaaagttctccaggtttcggcactcaaaaattcccccccctgaaaactttttttagcgatttttctaaaaaaagatttcttgttgttttcttatgattcctaaatttttttttttgaatttctaggtttcaaaaaattaaaaaaaattttctgatggaaacgaaggggggtggagtgaagtgcatcacaaaatttgccaacaattcctttccttaaggtacggcagcgtttacttgtggcctttgaattggctgctgccgacgctcaaacggcgcgaaatgcacaattatttggcggacatcggctggacggaccttccaatggccaaagtggcggagcgatgcgacaaatg

SEQ ID NO: 55112 - DNA, 964 bp, Heterodera glycines
atgacctccttcttcctcctgttcatgttgctaatgctcggtgtcaagtcgagtcgtgacggccgtgccccgattcaaaatggcttttggtttttcaaatatttgcttctcggattgctcattttcggctttttctatctgagggacggcggatgggcgactccgatggtaaatttaaaaattgcatttcaaaaaacctttttatgaatacaattttttattttttcagatgtggattggaatgcttggcgctttcatattcattctcatccaactggtaatttatttcagtgaatttttgcttttctaattcgacccgcgaaattcctaaacggcgaatctgaaagatttttcaaaaacattttttaaattatgagaattgcgtacgacatggcttattaatattagtttttacatcatattcatatatttttgttatattttttaggttattatcgtcgattttgcgcatggattggccgaaaattgggtgagcacttacgaggagaatgagtcgcgctggtgctttgccggaatgatctttttctcgctgctcacttacgccctgtccatcgccagcaccgttttcatgttcctttattacacttcggtttgtctttcattcctattttgtttttggcaatttccttttttgcttaagggtgcctcttgtgcccttccgaaattcgttatttccttcaatttcgtcctctgtttcgtcatttccgtcgtttctcttctgcccaaagtgcaggaacgaatgcccaattcggggctcatccaggccagtatgatgtcactgtacgtttgttacctgacttggagtgcgctcaccaataacccgggttggttatctgttcgaatcgagatcatccacaaactgttccaattgttcagacaaggagtgcaacccgtcgcttattcctcggcacaattccaccggcgacgcgggagggaattccaa

SEQ ID NO: 55113 - DNA, 595 bp, Heterodera glycines
atcagcagtgtcctcttcagtgaaaaggtagtttgccaaaaaaattgtgtaaaaaattttaaaaaaaatttaatttttcaatcattttgtttttagtactttgccgaaccccaccaattttggccagagcgctttttggacgatgagggaaaattgaaaaaatgtgacaaattaattccatttggagttgggaagaggtgaattaacttccttttttattaaaaataattttaatttattttaaaaataattttgcttcttagacaatgccctggtgaagcattgacccgaatgaccttatttttgttcaccgccaacttctttctcgcatataaagtgccaaaatatttataattaaaattacatttaaaattaataaataattttaggtgcttccgtctgatctcaaaaatcctccaagttctgataaagtccctgccttaactgttggtgcacacgaattcacgtgccatgtgatgccttatttgcacattcagtgatttaacagaattaatttgtgaaatttgttattattaaaaaatcttttttataatttgttttttggtggcctttgagtttatcatatttaaataaa

SEQ ID NO: 55114 - DNA, 538 bp, Heterodera glycines
  unsure (1)..(538): unsure at all n locations
atgactgacgaagaaatcagcgatcattatttaaaatttttgaatttaaaaaataatttaaacgataaaacaatgaacagatcaaatcaatttaaacagaagttgacaacagcaagtttttacagacaaattgttgaattctttaagcaacacagaacgccaaatggaaaaaatgaaattttgaatgccaaatttaaacaattcgatggattaatttcggaattcagccaattttcacttttcaacaattgcaaactttgggttttctggcgagagcttgtccaactgttaaagccagattcaagcacaaataatgacctcgaaaacaaagttaaaaactgtgaaaaaattgtgaattgttttggccaagggtggtatactgtaaaatctgatgaatactgtaacctttatttacaacattttcaacagtcccattttgaaatgctttcgcatttgttgcccaatgaatccgaaaggttacctgcatataaaattaaattanatattttatctagctaattaatttactctaatggaa

SEQ ID NO: 55115 - DNA, 2642 bp, Heterodera glycines
  unsure (1)..(2642): unsure at all n locations
atgggggttgaataatagagcccctngggggctattatcgaagaagtacggtaattagaattttaaattttctcctttaagttgtcctggttgcttaatggtccgctcagtttgctgcttgtgctgtctggcattgtgctgaacgcactttgtaattaaattaattaataaaaaatgacttttttaattgcacaatttttgcttgttttaataaaaaggtgtgattgtgttcgtgcgatttcgtcgaaatgttagcggtggcacaactcctataattcactattacttggtaaagagcaacccaaaactcataattttcatttctattttaaaaatatgttgaattttttcagatttctttggcgggatggcactcggcacttttgttcaacgcctttttgctttactgtctaccgacaatggtgcgaaactatagataaaggccatttcatttaaaaaaatgaaatttaacttttttattacatcttatatgttttaattattcaacaattaattattttaaattgtttatatattttatttttaaaatttaaaattcacatctcttaactttgtcaaataaatattattttccttttcataaatttctttgtttttctacaaatttgcattgcttaaatggttaaaagaatttagctttggggctccgtcgtctcatcgggtccctatgtgcatttgtacccgccaacctacgcattggcaaatgcgacacacaccggcactgtttggattgtacggttttttgacgaagaaattaacttttgtcataaaggctttattttcatactttctaaaaataggtccccgacggcagcaacgtcgcaaaattttgaacaatttattaactgaaatttcgcaattgcagattttggcactcactttggaccgctatttggcgttgtgtatgccattcaagcatcgaatttttagcaaaagaaggttaataatacaatttttgattatttgattttatttaaaaataaataaattgtttttagccgtgtgaagcgtctcgttgtcggcctttcaattggcgcgctgttcttctgtttgccacgctttttcgaggtgcaaaccgcggtggagtgctacgcgttggacggtggagcagcagcgcttttgtccagcgcgcacgctaccgtagccgaaacagaggtgctcatagtagcaaatgctaccgtaaccaatgaacagcagcaacaacaacaaatggacactatgtacggtagtgcaattacaaagtgcgacacgtttgtgcagcggacagggctaccggaggttgtgggaaggaaaatggaacttgtttttactatctattatttaaattttattgtattcgtttattgtattaaatcgctttttaacttttagaaccaactctaccgtaccatctaccatatccttctgggcagtgcctttgtgacaattttgccaggtaaattttttttattaacataaacaaaaaaatgataaacaattttaaatgaatatgatttatttttcagcaattttatttcataatattgattcaatcttataaacttttttttggcattttttgcttaattttaggctttttgtattattataattaattttatttttttaaatatttaaaatattttataattttggttctaggggttctcacttttgtgcttaccttgcgtatttcaattgctttgggcgaggcgcgccaccggcgaaaacggctaagccactgctgcgcccatttgcacagcgtcgatggcaccggcgccgggtcgaccaccgcacggacaacaacgacgacgatcagctgcaacacagaaagtaatgggactaaaatgaataatgagaattttaaattgaactgtaacgtactgtaacagttgtattcaaaatggtgctatgacattactcaaaaaaccaccaaaacaaaacaaaaaaattgaagcttgcaaaatttaaaaaaaacttttcgaagcattttctgtttttttctgatacttttcaatatttcgcaataaatcggtgaaatattttgtttaaaatagtaaaatcaaggagaatcgttggccgataattctgtgggcgaaaagcagcactaccgtataatgttaatgtccggggcgatgaccaacggcggcaaaaagccaagcctaaaacggtgaataaacattaaaaaagttattgttaagtaaaataaatttcttacctatttttgagccgtgtatttatattttaaatcatttttcaataataaaaattaaatttttatttaaatttaaaaaatcattttttcaggaaggaacaccgtgccaatgttatgctggtggtgataattgtcaaatttttgatctctgatattcttcccactgtattggacgtctttgaaacagtaaatttaaatataaaatatgtttatgtgaaaattttaaaacactttaatattttcgaagaaatatttaaaacattttaatataatttcattccaaaaattagctataaattaatcaaaaattatctctaattttgaaagaattaaaaataaataagacttaagttgagtaaaaaccaaaaataaactttttttttgttatttaaaaaatcagttttccctctttttgtaaacaacaaaa

SEQ ID NO: 55116 - DNA, 356 bp, Heterodera glycines
atggacgccgtggatcggtgcgctatcagccgtaccaaggacatttgcacggacctgcgcgagtgcgtgactccgatcgccgaaatgatggccgcccccatcgtcgttgatctgctcagaggaccaccccttttggttttcaaggaactcaaggctaaaggcagggacgccttttttgattgtttgggggtgttggactttttgacctttattttattttttatatttgtttggcattatgtttaattatttgtgaccattttttcccaccttttcttgtattcgaatttaattgcattagttttatgttttgtcttctccaaagaaaattgattgtttcttttttttaatttgga

SEQ ID NO: 55117 - DNA, 102 bp, Heterodera glycines
atgtacgccccatttttagtcattgtcggcggagttgtggttggactgcttctgctaattctgatcatttcatatttggtgtatcggcttaaaaagagagat

SEQ ID NO: 55118 - DNA, 989 bp, Heterodera glycines
agtctttcgtttttatttattttttgcaaaattaattcttaaatattttttcagaaagggttctgaaacgcaccaaattttatttacatgttagtttaggcactctgatgctttttctatcaaaaagggagatgaataaaatttttaaaaatttttaattcctttttaaacaggccaaaaagtttaggcttaacttttttttcagaaactgatcagaagcgcaccaaactttgcagggatactgaaaggaagagaaataacctattttaaatattatctagtcagttcatttaaataatttttatcccaaaaatttttttttgggttttcgggggcagtccccctgaaacgatgcgcccaaaatttatggggagaccgaatccttccggaatagctccactataccctgtacttaaattctgcgttggatttttgctccccataatggtttgagttccccaaactttcacttgaaaaaatcatttttttttgttttcggggcagtccccccgaaccgatgcgcccagatttatggggagaccgaatccttcgggaatagcttccctatagcctgtactttaattctgcgttggatttttgctccccataattgtttgagtaccccaaacggacacttgaaaaaatcgatttatttttgttttcggggcagtccccccgaaccgatgcgcccagatttatggggagaccgaatccttcgggaatagcttccctatagcctgtactttaattctgcgttggatttttgctccccataattgtttgagtaccccaaacggacacttgaaaaaatcgatttttttgttttcggggcagtccccccgaaccgatgcgcccagatttatggggagaccgaatccttcgggaatagcttccctatagcctgtactttaattctgcgttggatttttgctccccataattgtttgagtaccccaaacggacacttgaaaaaatcgatttttttgttt

SEQ ID NO: 55119 - DNA, 155 bp, Heterodera glycines
aatcgaacgctaacggacgacctaatggaaaaaaatccccgaaggagagaatttaattaaatccattccttcgggggaccgtgccgggtgccgcggggtaagcagtgctggttcgttacatcacggcaccgaaccttttggctagtcagcaatcg

SEQ ID NO: 55120 - DNA, 225 bp, Heterodera glycines
atggtacgtccttttaacatttacaagggtttctgccatatttgatggatttgtcctggaaaaacagggcaaatggctgaaaatattttacaatttggtgcttaaaatattaaaaataattatttaaagaaataatttaggtcaaggagttcgacggccgattgaacacgcttttggcccaggcaaaccattattcagtgccgactctgcacggaatcatgtcca

SEQ ID NO: 55121 - DNA, 2188 bp, Heterodera glycines
atgtgccgagttggacaattgcgacagctaatgaagggcctaaagtgccaaaagccgataggacccgggaataatacggactggtataaatggggtataaatattaaatgaaaataccggaccctttccttacaatgaaaaatgttttgaatttaagccaaaaaaaaaatttgtcaaattttcctcagaatgtgacacattttgacactttttaggattggcggcctattttcgcaatgatggcgtggtcttggtcttgcctgatgccaacaattatggcattgccaaatttaacacgcattttgccaatgttgtgcgatgttttgagttttttctaaatttgtcgattatttactcttctgtcaatatatttatttcgtattttgtctcaatgttttttcttcttcacttagaaattcgtacttgttaatgaacaaagctttccagtgccatacatttgatttacttttcttacgtctgttactacatgagaatatgggtaagaaattttcataaaatcgacaaagtgggaaaatttcaaagacaaaattttaagtcccagaagagggcgaccattggccattctgtttgtgttctccatcatgagaatggggttgctttagtgatgaatttttctttgaatcggttggaattttttatggtcagtgttctgaaatttgtggagctaatcgattatacactcctaaatttgaggcttatcagagatcggaattccgagggtcaaaaacttttcggaaatcggaaattcttgaaaaaaatataaaatataataaaaatttttaaatattttaaggctaaatttaaaattcttaaccagccaaaaggtgatttcaaaaatgtttttgatatatttctttatgtattttgctaaaaaaaataattcaatggattttcattcaaatttttttttcttttcattttacattttttttagaaaaatttttgggtaaggggactattacacattttttccggcacacttgtttcaaaaaatctttgagaacatggggagggggcgggggtccgtcggtgccgaaaggcgccgcggggaaatttttttgaaaattttagttcaatttattaacagaaattggtcaaaaatttctgaaaccggaaatcggaattccgaccccaaaaatgtcggaaatcggaattccgtgacatccctggtacacaccactgtcagacaaaatgcaccgtaacgccagaattgaaagaattttacgcaaaaggcactaaatttaaaaatcaaaagaccattcgttatttggaacggacgggacacttgagttccaccagccaaatttatatttaaaaattaatttttggtattttttagaagtacattttcaaaaaatttttttattttttcatttgaatttttataatttccaaaaattctcaaacttttaatttttggcactattatttaatttctgcatttgtctgtcctcatgttttgcaaaattgaataaagcggtacgtcctttgatcattatttatcactaaaaaagcttatcaatggacaaattgggcacttttatttatttggtgataaaaatgccctccttcctcacattaataaccaaatattacttttttttatttttaaaatgaaactaattaaacgaaaatatttgccacccgaattactttttgagttaattcattttttgcctttcaaatgccgttgggctaataaaagggtttctgccatattcgatggatttgtcctggaaaaacagggcaaatggctgaaaacgttaggcaatttggtgcttaaaatattaaaaaaaataattatttaatgaaattaatttaggtcgaagcgttggatgacaaattgggcactcttttggcgaaggtggcacatgaacgtagaaatactttgtactgtgccattatacgtaagtttccgacatttcgatcacatcataattttcttatcgtatattctctaattatcgctccgtctccattaatccccccgtctccaattatcccccccccctttctgaggaggttgaaaaataatccccccggggcgataattagagaatatacggtatatatattgtcttatctatgaatatttttcaaaaatattttagggttcgagcccgtgggcggggatggcttttttgcgtgggcggggctcgaaccctaa

SEQ ID NO: 55122 - DNA, 137 bp, Heterodera glycines
atggctgctggaccattttgtacaaacgctgcgcaccgtcgcccggctgaaaatgttgctggatacggcgagcaaatgcactgtccccattgctgctactgcgaccactggtattgtgaagttgtgcctgcatatag

SEQ ID NO: 55123 - DNA, 1050 bp, Heterodera glycines
atgtcaaacagtttctttgtgtttttgccgagcaatgtaacggattatcccgacaatcagcccaacaaatttcgggtccgcctcccgaagcctttacattttaatggctcatgggtctgtgggctgcatagtattagttacccctactcatggtcaaccattggcacattggacgaccaatggattgacattcacttcaccgatcgccgtgctagtgatgaggacagacagcgggtgatcagagttccagtgcccagggcatcgcatagtaaggttgaacagctcagagattttttgactgtcactttgcgaaatcatagtggtgcaaagttgttgccactcccccgtgaggaggaagagaatcgcaatcggacaaaacctctcggttcgccaccaccgttgaagagagagaaaagagctgcgccagtaattaatgagagcggaaaacagcttgactcccccttattgtacgatggaaatgatcaaggtgggattgacgagtctccgcctcatcatgaagaagaagaagaagggacaattcaggagtctccgcctcatcatgaagaagaagaagaagaaggggcgattcaggagtcaccgccccattatgaggaaacaccaaaagaaactgtgaaaacgcccgtcacaccaaaagtgccgacaccaccgcctgtcataagccctactaagccatcaatagtaaaaacgccagctcctccctctgatacaacaacatcgcctcccacaactgttaagccaccagtaaccgtccctcctccaatcacaaaacacaataacgccgtccgctcctccagccacaaagccaaagaccgagcctccaccaatcgtgcaaccaacaactacccctcctccaagcacaaaaccaacaaccgtcccaccgccgaccgaaaagccaaagaccgtccctccaccagccgtacaggcaacaaccacccctcctccaagtacacaaccaacaaccatcccttccccgaccgcaaagccaacaacaccgatccctccactgccagcaataaaaaaagttcctag

SEQ ID NO: 55124 - DNA, 79 bp, Heterodera glycines
atggcttcaaaaattgaaacaaaaaaacaacaagtgaagcttcctcacgaaggacatctttacacattcgacaaaatga

SEQ ID NO: 55125 - DNA, 131 bp, Heterodera glycines
tatggcacggaaagacttccggtttccgacatttttggggtcggaattccgacttccgaaatttttgatgaaaagtcggaaatttttttaatttttttttttcaaaaaactagtaagttttgtacaatttc

SEQ ID NO: 55126 - DNA, 84 bp, Heterodera glycines
atgtttaattactttattcctttttttattattatttccaatccatttttatttttatttccatttacaaatgcaaatccatcg

SEQ ID NO: 55127 - DNA, 630 bp, Heterodera glycines
atgctaatttcgtttgtgaaaagcgatcagaaaatgcaaatcagtgaatattcaaagcaaaaatatgaggcacaccttggcattgtgcattttatgcggaaaaattggcaatgtgacaaaattgaggagaaatttgaagaatatgaacggacagaatgccaaaaatatcgcaaatattttaacattttgtacgaatgtatgtacagagaatatgccggaattccaacagtgaagccaaaatttatatttaagaaagaaattgaaattgaaggaccactgatttatgcggcgaattgcttggccactatttcgcaattttattttaaaaaatgggtgggacaaaattatggatataaattaaacgaatttttcgatgataattttgaactaaaattgttggatgtggagagattgaattatgaagtgaaattggtaaatgaaccaaaattgccaattaatgaaatgattttgcaattggcaattgacacagcgaatgaatggcaaacaaatgaaagtttagacggaatattaagagaaaattttggcaaaaaattggaggaaatgcttaaaaaagcggaaaaaggaaaaaacaagaggaagatggctatgatgcggatgatgatgaaatga

SEQ ID NO: 55128 - DNA, 1445 bp, Heterodera glycines
atgggacgaattgtcgagttacaacgctcacacggggagattcgaaacgccaaaattcgattggccacaggaaaggtgctaagccggcccctaaatcgtctttatcccttggaagtgacttcctctgccgaacaagatgagagccaccagcagctgacaaacccgccgcttgaggaacatcacaacagaacccaaacagcggactcaagtccaatttgccagctgcgtgaccggcgcaattcacctggcccgactcattctatggtcactcgctcaaaaaccaaagcactggcctccgttctgtccattctgatgtgcctattttttggcgcttcccaaacaaacgccagtagcacgactaagccaaaacgtgggaatggccttccaattcgttgtcgtggatgcgaactgacctgcacaaaaaccggcgtggacattttgatcccaaatgggattgccaaattcttgctgtgttgtgccgatgggactcagtgcatcactcaatcaggcgttcggaaatcctttcatcgtttgcccaaggaacatcttcttttcgactacgattgcgaagcaatgtactggacgaaacggggcaacaagaaattggaagcatccaatgtccaggccgagatgcttgcgagctcatcgattgttggatatgccttgaacgactggcaaatcccgattgtcgacctgacgtgacattcggactcattggcggagcgagcttcttcactttcctcttccttttctggattctgccactgatgtgccacgtcaccatgttttggatcctacagcatctcttcaccctgctcgttcgcttattgtgttgtttttggccaagccaaaaggcaccgcagagagaagaatcccctctccttgccttctggttaatcctacttatgctcaatcacctttttaataattgcattattatttaataataatatataaattatataagtaaaacatagatttggttaatcctacttatggtcaatcaccattttaataattacattattatttaataataatatataaattatataagtaaaaaattgaattgaattatcctgctgtgatcattaacaattttcaaatccatttttactccgtttaaaaggcagtgttatttccattttttcattttaataattaaattttctcaattttacaataccctttgaaaaaaatcaaattgaattaattaatgcattttattataatccaatagaattagtaatgttcaaaaatttaatatcttttttatacagattaattttattttttgggtttactaaaaagcaggatttaaaaggtctttcagtttcatatttaaaatttatttattttttcatttcaaaatatcaaattaaattgttttatatttaaacaaacaattttcagaaaatagaaatattccaaaaatgcgaaataaa

SEQ ID NO: 55129 - DNA, 806 bp, Heterodera glycines
atggtactgacaattttggcaattttttgcttggcatttgttcatattggcatttctggcaaatacgataagtcggacgagcacaatggcaaatatggtgctggtccccctaatcttcatcaatttttgtataaactttaaaatataatctttcaattacagatgctacaacaagcaaataggacaaaagagctgcgacaaccaattttgtgaatgtatggaggtaaattaatttttttaataaattaaaataaattaattttaaaataacaactaaattttagagggccactgctggcaaaaaacgttgctcaatttgggaggggccaggcttctgtcgtcactaccgcttatacggagaatcagcctaccgcgcagcggctccgtaagtgttcattcattaattagaggcaattaatttacaattgggagatagtagagttaggtgttagatagttaagtgttggtccaacaaggctatgacggagtcagtcagagccaatcaggaaggggagctatagccttacatttttatggcatttttgctgggactaaacggatttcttgtaaaaaataaaaagttccaaatatggttattaatgtttcacccatttccagcccattttggagcagttgtggcaccgttttgaacagcgaaaaatatttgggatgtccttgcggcacgtacaaaacatgggaacgctgtggttttctgtacttgggctaccgttacctgtgttattcgtgctgatcacgaggccgcgaagaggccgagtgagtaccttcggtgcaggaaaattattaaa

SEQ ID NO: 55130 - DNA, 505 bp, Heterodera glycines
atggtagccatccctttagtcaatcttaagatgttgtccatcctcctagcaaacggtatggggatggtggccatccctctagcaaacggtatggggatggtgtccatcataggattcatcactatacgcagggattctgaggctttcccgaagaggtaaacgaaatctgatttcagattcgtgatcagcgtcctaaataacctctaaagacatatttctggaagtttttgggcgcgaaaaaatttccccactcgaaaaccatgtgcacccccctatggtcccgaattccaaaatcacttttatttttataactttttactaaaaaatgataaaaacatgaaataaaatttatcaaatagagcaaaaaattgcggatttttgggctatttttattttacaaaatatcttttcagaaccgagtagtgaatttttttctgaaaattcgaaaatttccagaatttctggaataactttttttatattcttgatagaaataccaaataaa

SEQ ID NO: 55131 - DNA, 686 bp, Heterodera glycines
  unsure (1)..(686): unsure at all n locations
gaggacgacttgcaaagtgtgganagtcaaatgaggtgggtttttttcgattgacggattntaatcaaaatttgaaaaaaaaattatttatttttttcattttcaaaaagaattgtcgcgctgacttttgccttgatcgtcatgatcatcagcagaatgggaatgcagctgatgatgatgaatgttgtgatcaggaaaaactcaaactgattgaacagcaggagacaatgacgacggcagaggcacaaaatttttcggaaaatttaaaaaaaaattttcaaaaattttcaggcccccctcgaagcaaagggtcgtccccgtccagcaatgttacaaattcacaccgttcagccttttcagtcggcggagaaagtgaagagtccagcacccaatgctgctgctgacgaagcctttcttggccaaatgcgcgaaaaaagttggcacaaaaaatgccgaaaaaaatttttaaataaattaatttggccaaatttcagaaaaagtggccggtctgatcgcccgtttcaatgcttttgcgccgacgacggcaacagctgtgaataatgagaacgctgctggtggtggtggttcgaattcgaaaaaaattggtggcgccgagccgggcaaagtgggcgaacttcgccaaaaatttaattgagaaaaattttaatttttgcgggaaaaataaa

SEQ ID NO: 55132 - DNA, 225 bp, Heterodera glycines
cttcgtgaatttgttgacggagctgacttcatggagaggattcagcagattatccgagaagaggtgttcgctcaattggccttcttttctttaaaaataattcaggtgaaagcattgcaagtgaaagcgaaacgagtggacaagcgcgaaattgaggaggaaagggcgagcccggccttctcttttagactgcacatgaattttacaaagttattcggcttttga

SEQ ID NO: 55133 - DNA, 328 bp, Heterodera glycines
atgggctgtgccgcggcaaaaacacaatttgccgtaagtttcttagttctttttaattaaatttaatctaatttaattattttttattaaaatttaaaattttcttaatttttaaggcattggaggattgcctaaagggcccagcacagtatttcaacgacataagccaaagaagcagcagcagaagtgccaacgacgacgacgagcaggacgaggaaatggcaaaaatgcgggcactgaacgaagtgtgccggcaaagggcggaggagcaaaattcgtaaaaaaaaattttgaaaaatttattaattttcggtccctaattttaata

SEQ ID NO: 55134 - DNA, 561 bp, Heterodera glycines
atgacgacaaatgatacggacaaaaggacgacagatgagacggaagagaacaaaatgatgacaaatgatacggacaaaaggacgaaaaatgatttggacaaaggaacgacagatgtatcggacaaaaagacgacagatgacatggaggaggacaaaatgacgaaaacgaaaaatggacgagacggcacttcaacaatttttgtgaatactatggagaacgatgagaagtcaccgtcatcatcatcatcaaattcttcatcgtcatcaaattaccaaaatatggatgctcatccggcaatggatgagaagcaagatgaggaggaggatgaagatgaattgccgtccccggcatcctcaaatgagaggagggacgacaatggaattttttgttcatccacgacgatgaagaacaacaacgaaacatcaccgccaacatcatcatcatcactggtgactgatcggaagaacatcagcatcccatcatccgcttcatcctcatcggcattggcactggtgaatgatgatgggcggaaaatgggggcacaattagtggtgccggcg

SEQ ID NO: 55135 - DNA, 1425 bp, Heterodera glycines
atgccgagattctcgacctgctcggggtttgtcgtgaatggcacacggataaaacatgcaaaatgccaaggttttcttgggcaacaatggcatttgtgccgagttcgtcgggaatggaatggcatgatatagaaagttttttgaatatcccttggagtctcggttttttactcaagaaatttctcggattttttgcaggaccgcacgcgtgacggtcaatgtacgccttgcggacctgacggagcaagaggcggaacgcgagcgggaggaagcggtgcgcgagcgacaattggaccagcagcaccacaaccagcagtttgaggtgcaacaggacgagccgtccgctcaactggaagcggatgaggaggaggagcaggacagtgccgtggatgatcggcaccagagcagaatgtcaccacaacacacggcacaacgccaacggcacaacaattttgatcgggacagtgataacaacaggagggcacatgccgtgccaacattggcacttgatggcaccggggccaaacaacctttacaggtaaaaaaatcatggcatctaatgcattctaaaatgccatggcacaagattgccagatggtcagtacccatggtgtgccaactcatgaacagtgccatttggtgtgccaaagtgccaaaacatgactcatatgtccacattgaataattgaatccattatttttggcacgatcataggcatcatttattaacaaatgattggcatgccaataatgacaccttttgaaattttgtttaagtttggcaacaaatttggcgatctgctaccatccgatgatgacgaacggcaccagcaacaagcggttggcttggtgcgcttcagtgccgacaaatacacgttccgtgcgcgcggacctctcgcggaaggccaaaccattggcatggtgcatgccaaacgcatggacggcacggacgaggcatgttctgtgtattattactgtacataaagcttttacagtaccctgctccgattactgtacttgattttcacaaacgaagatttttcagttttaatttgttatttaaatttttatagtaaaatttccttttggacatgttgtaacaatttctgaattataacattagaaactgggatagaatgcaaaagatttttcaaatccaatcatttttattgaccattttttgtatccaaaggttcatttttggcacagctcatcattctcgagaccgtgtgccacttcattaaaacagtaatttttattttacccatttttcagattgaatttgccgtcgaggaaggcattgccggctttgtcggcgtcgacgccaacacgggacgcctttttgtcggcccatggcttttgcgtgaccgttttgaggaaatccgcttttcagtggctgcccaacatccgtccggacaagtgctg

SEQ ID NO: 55136 - DNA, 2092 bp, Heterodera glycines
atggcactgtttttgcactgggagtttgctgaatcacacctggatgttggcacaatcatttaccagctgaggacacgttttgcgcgctttaaagtgcaggtttgtttaagaaatttcttttatttttttattagttcgaaatgattctttgacgaaaaggtttgggaaatttcaaaaaaaaaacttttaatcaaacctatcattgataaattttagtttaaaaagaattctgttttcaactccgttcagaaggaagtgagcaaagaattgcggtgcaaagcgcagaccaaaattgagggaatgttgctcaaatgcaaagtgcacttttgcctggccctccgtttcaacgattcgccaaaggatgtcgcttggctgtccaattattttcttgcaaaaattggcgaaaaacttggggaacagcccgaaaaggttgtttaaaattttaaatgaaaaattttacgacaattttccaggttttggacttgtactaccattgtgctctcgcgttggaggaggaaggcattcaatatttgaccaaaattaaccgagtcaaacaggtaatcatggacgatagccctgtccgtttcggtttgcgacattttggttatttcgatacagtcatttgtcaagaagtaagtaattctttttgaatttcttccaaaattttttcatttcccaactacgtctatcgacggcatttcttgatggcacaatattgtaaaattggttattttagataaaaagaaaaaaaattagattgaatttgaaatggcattgtaaaccataaattctatatcgaaatgaggaatttctaccgaaaggcgcaaaacgaaaccaagatgtacccgatatcatggattttctggaaactataccattttttgttgtttaactcaactttatttattaatgacattttgcaccccctaacctttcccaattttttcggctaattaaatttagtttattaatgacatttcacccaatccccccttttcagacgtactttgaaccgttggagattcattacaaagtgcatgcctatgccctgcgttatctcaaggcactcaattcatcgtcatttcctccccgcacatccgctcaatgtgcaaccgatttggccaacattcacgcctatttgacattgttccgttatcatggtgtacagcgtcgctgcttggaggacagtcattggtccgtctcggaattttatgataagcaatccattctggacaaaagtgcattggacaagaacaaccgacagattagtgaacaaccaaagagcattgatggccgccagctgactgcagaaatggataatggagaaattgaagatgtggtgagtaagaaactcactcatcacatacaattaaagggcacagtcataaccaaaataaccccaatcctctctctcccggtgtgtcatgacatcgtactataagacaattttttaataaattaatttttaccaaaaaaataatgaattttttaaaataaaaagtaagtaaaataaaataattattcaaacaattcacaaattttcaaaatatatgattaaaaggggggggggtcaggtgctgctgataagtgccgccgggaattttaataaaagaggttaaaattttcaaaaaaaatgcccattttccgccatttttttgggatccacaaaaaaaattgctaatttttcttgaaatttttccaccttctcccttggattgagcctaattttaggcatagggtaaaatgactaaattttaattgcttgtataacccttgttgtacaataattatattccaaaatgcctttctttttcaggtccattcattgtgttgtgcgtccgaattgcaacatgaaattgtgcgaatgtgtcgcactgctttcgacattattctgctccgatttccccattacaaagcctattttcgtgttgcgcgcgcattttttgatgaaaaaaattttgcccgttctacggacattctttttgacaaattgtttttgaccggacggaaacagagatgcaacaatttcttggaggtacaatggaaaatgtggatgaacccaatgtacttctgttcatttctttcaaaatga

SEQ ID NO: 55137 - DNA, 2616 bp, Heterodera glycines
atgcggcagtctttgatgtctgatgagccgaatgcaatgacattgttggagcaaattgcgaccacggagacggaaatttcggaaaaccaaaacgcgatggagaggggggacaccgatgaacaacaaccacaaaacaatgagtctcacaatgagcaggtaggtgtggtcggtgaaatgcatagatgaaagagaggcagggggggggggaatcaaccaaaatcaatcaaaggggtccgagggaggggggatcactgccaatttttgaaaggggacccagccatgtgtaaaactgtaaaccacgaattttgattccgcacaccaattttggcgttttcaataaaaaataattacggaagggggaagggtacggcggaaaaattttgaaaaattgagttcaatttgttaacagaacattttagtaattgggtcccattcgaggaaaaaatttttgttttttgaattttctattaatgaactgttaagaaaattgttcgaattgcaaaaatttcaggctacaatttgggaccggcaaggagtgtctatgtcccaagaaagtgaggcagccgccggcaccaccgccatgccggaaactcaagacgaaatcagtttacgccgttctacacgtttattcgacgatttggattattttggaaactcaaacaaacagaggcaaacacaggccaacgattcacgcatggatgttcgtttacaccttttttataattttttctaaattataataaattactaatcgaaaattttccaaaaaaaaattcaaaaaaatttttctttggttttttcaatatattttattattaataaataaaaaaaaagttaattctttttaggcattgactttgatgggatttgatgaacaagagttggaagaacatcaagcttcggtgtccaatcaccggcaatccatgcagtttatgcccgatgccatcaacagcccgcaacagttgtcaagtgttgatgaacttttcgtcaaattgattgatgaaacatcatttgaaacgacaaaattcccggatgttctctacacttttcttgcttgggttgcttttgaacagcagccatttgttgtcctaacattggagcaggtcgaagcctaccggtactgcttttggttgttttttttcgccacgattttttcaaaaacaatttttgaagggtgggacacggcggtgccgatgggattgacaaaaactattttttagtgacgtctatgcccggtggagcagtctgttctgtttgtcaaattgttcattcaccgagtcagatttggcaatacaccaattggctgctgaactcggctcacatcgggcactgtccattctgcaggcattttatggccgacttttgctgcaacagaaacaaaaagcaacggcacacgcgtcaaatggcaaaaccattccaattagagagaatgctgaagaaaatggaaatgttacggaatatcaatttcaccgacaaacatcagtggacgacgatggccatgcacaacaaaagttgttgcttaccagcgacaacgacgcactgttccgctgggtgttccatcgaattcaagctgagcagcggcagacacgacagactgtggctggtaacaacaacaacaacagtcggtcccctacgggtgtgcttttgttttaaaaaaaattcatcaatgttatttgaggcgacccttccccccccctcgccaaaaaaaatttttcacacattttttgaccaactaacctaaaagtcttcaaatgtcattttcagcttttgtaaacatgcttattttcagttattggaagaaatgaaagcattaacaaaaatgatgataatcacttgggacaaccaaaagactgctcagaactctcgaccattcgcagacagttggaggtgcgctataaatggtaatttaaatttaacatctaaaatgctatttctaatatccgaaaaaaaaaaatttttgaaatgccaaaaaatatttaaaattgcttagaatttttaatttttttcgtgcccccatgctacgggcctgaagtcatattactttttttcaggttaattgccaaccttttgcccgacgagcttagcctgcccaattcggaggctttccacttcattcacacttacacacagcttacttctgctttggctctcatggagccggaatgggcactgctgagccatgccgagttcgacctcagctgtttgactgtccgaaatttgaaggaattgttgcgcaaaagggtgcgacaattccaactgcaacaaattgactacctaattgaagccaaacgatatgaggaggtcatattaaaaaaaaataaaactataaaatgaagaaaaagagtttgaagatctaaaaaacgaaacccgaaaaaataagaaaaatttaccgcaaaaacttttttgaaaataaaaaaatgcataaattttttttttaaaagtgttgtactacgataatttgtcatcggtcaaatttcagttgaaaaatgtcctcctccaccagtacgattggacatcggactcggaggatgcgcacataaagcagaaattgttgatgatccaatgcattcgtgagacggacaactctcttttggacattggtgaatggatttccaa

SEQ ID NO: 55138 - DNA, 2000 bp, Heterodera glycines
atgtttcctccaattttaacaaatagaacactgaactcaaccaattcaacgccacttaatgacgatgatggacttcaacaacattcacactcattaagtcccataagtaatcaaaagtttcagcgcttttgcaatttagtggatccgatgaaaacccataaggaccttaaaatttgtaattttttttagttctttgcaaaattctatcgggtcctctaaactaatttttttttttatattaattacctaaatatttgttttttcaggccaatctgtagctgtaaatgttcacaccgattcgtcattggctgcttccaccgtaaaagaagcgtcaaatacacaatttaaactgttttacacttgccctgactgtcctcgtgatcaatccccggtgcgctctgagtgttcagattatgtggacgacgattggtcatccattgaagatggggacaatccacgaacatctcgtgaagcacaagtaaaactcactcataaactttttgttttcctaataatatatttattgtaattttttttttttggtacttttatattttgtggcccgaatttgagccattgaactcactgccaaaatgctggacctcctttttgtgcgagttccttctatccgtgccacaaaatgaaaagtgaaatttttttatgatagaaaaggataatttctgtttcggtcaacaaaaaaaaatcagctcccagcttaggtttaatcagctcttaaccgcccaaaaaatcgaatggagaatccgaagaatttttctttgttcttcctctaaaaaattttcaatgttatttttttccaaaattatagtctctatgggcgaaaaataacactgttttaatagttattcgccttaaactgactattttttcttctgaattttcgctaggcgccgtctggaatttttttttcattttcgtcattaaaaaaaaaccttttaggaagcggagattgaggacaaataccgaagtgctttgaactttttgcaagagggaaacattgaaagggctgtctccatattttcggcacttcttgtccacccggtgatgtccaaatatcacatcgctgactggtcaacatttgattggcaaaaatcaatgactgccggcgacggcacttcatcgcaacgaattgtgccaaatatggcaaaactgtatttcaacatcaatttggccatgagtggactggccaaggacccgttccaattttatgtccaggttggcaagtttttggcactttacctgttgagatagagccccaaaattttttttttttaaattactaaattcctccaaaaagggtccaccctttgcaatttttcggaggcctccaatagcaaaaattactaatttttcacattacactgtttttttgttgttgccaggctttaagtataagaccggatttcaaagatctgtggtttaattgtggacaatgtgccattcgtcgaagggattggcggtccgccgctttttgcatgacgcaatgtgaagacgaatttcgtgcgttggaagcacttttgctcgtccattatttcaacaacgattaccttagtaatttacaattttgtgaaaaaaaaaattgggtgaaattcatttatattttttaaaacaaaaatggactatttgtgttgtgtctgaccaacacttataccaaaactagagcaaattgggattgggttttttggacaaagtttatttagacaaaaataagttaaattggttaatgtggtatgtcaaaatgtgaatgaaaaactgagaagagaagaaatccaaatggtgtccaaagatcgggaaaagggttttaggagagaaaacacaagaaacaaaaagggttaagacgaagaatagtcggcacatcaaaaaaaagacaaagagaatgttttttgggaaatgcccgaggggatgggcgaagggattagtttgggataacaaattcaacatcaaagggaagaaagagagaagagcattgtaaagggaataaa

SEQ ID NO: 55139 - DNA, 570 bp, Heterodera glycines
taggctaatagagcctgtgaagagctttcgaatgatatcaagattgttttattcggtccataacttcaagagttatattgactcaaagttggctcagacggagttggccagacggagttggccagacggagttggccagacggagttggccagacggagttggccagacggagttggccagacggagttggccagacggagttggccagacggagttggcccgttcggagttggctcagacggagttggccccaagacggagttggcccagacggagttggcgagacggagttggttcagacggagttggccagacggagttggccagacggagttggctcagacggagttggctcagacggagttggcccagacggagttggccagacggagttggccagacggagttggctcagacggagttggccccaagacggagttggccagacggagttggctcagacggagttggcccaagacggagttggcccagacggagttggcgagacggagttggctcagacggagttggccagacggagttggccagacggagttggctcagacgga

SEQ ID NO: 55140 - DNA, 484 bp, Heterodera glycines
ctgttatatctgaaatgatagatcattaaatagaaaggaaggaaaacgtttgggctaactcttcgcttcttcagaagaaaatttattgatatcattgtcctatcagataatcgcgggcgtagaatttaaaaaaacaaagcaaaagcataatctattaaatgaactaattaaaagcagaattttttaagaatgtgcctgaatttgtctattaatttgtggcccgttaaatatgttttttcaataaaagcacatcaattttgaaaaaggacctagtgcagaaatgcgtatcgccattgtttttatatagacaatttttacggcgactgcctgaacctttcttgaaatttgagaaatttgttcaattactgacgcctttagatgtacggctattcttaatatatagcaaaatacagaacattttaatagaatagaatattttttaaatagatgggcatttattgcgaatatttgataggcaaaaaat

SEQ ID NO: 55141 - DNA, 682 bp, Heterodera glycines
atggccaattggcaaatgcgcgagaggacaaaagccggcacaatgtacaaatggtaaagcagaaagagcggacggatgcgcaggtaaatcaccgccgcgtcggcaccgaacaacaaaatgtaaccggcacaaatggacgcgtcgagcagcgcgagcacgcgcgggtaaagcgtggcgggcgtattggcacgtgctaacgcggcgcgggaggagaacagcacaaaaagcatggcattggcagccgcgccgaacagtgccaacacggaggacagcgagaggaagaggaagcgtgccaaagtgtacatttcgtactgggggagagaggggaagggcatatcgccaaacgaaatttaaatttgagagataaaatgtacttctccacaaagttgttgctcttccgacccttctccatcatccattcccaattcttttggttaaatgatcgaaggggaattagccgaacgaatcagttgcaaattggacgaatgagttgaaaattggcagccgaaagcttttattggttaaaggaaaagcacatgccaatgcaaatggaaatggaaatgagcaatttgacgagccactaaagagtaaattcgatatgatttgaatttcgaagaaacggcgggggaggggaagaaatgacaatgattttctatggtacagcataaaatgagacaataaa

SEQ ID NO: 55142 - DNA, 956 bp, Heterodera glycines
gtggagaagtacattttatctctcaaatttaaatttcgtttggcgatatgcccttcccctctctcccccagtacgaaatgtacactttggcacgcttcctcttcctctcgctgtcctccgtgttggcactgttcggcgcggctgccaatgccatgctttttgtgctgttctcctcccgcgccgcgttagcacgtgccaatacgcccgccacgctttacccgcgcgtgctcgcgctgctcgacgcgtccatttgtgccggttacattttgttgttcggtgccgacgcggcggtgatttacctgcgcatccgtccgctctttctgctttaccatttgtacattgtgccggcttttgtcctctcgcgcatttgccaattggccatcccttatatgtacgtgaagtgccttctccgaatgtgtgccatttttcctttcctttttaggctcattttcgccactttggagcgcctcgtttggattagcagtggcaaaatgtgcgcaattttagccccaattaacttttaattgccttttcagtcgaaattcgctcctccggcgaatgtattccgtcaaagggcgccatataaccgtggtaatttcgtcctttctgttctttgcactttgtgccaatggcttttcctcaggcttttactctcggcgcgtgtgccattctccgtttgccaacttattgggccaccacagtccacgaataccctcaggcagctttttgaattcaaatttattcaaaggcatttccaatttctgtgttcagtgcgacgactttttccgcacaaaaaccgccgggcccgccgattgggtgatgaactcgcgctttttctacgtgtacgacttccacttgctgtccatcgctcaaaccgtgttccccttcttcgtcctggtcgccttcaatttggtctgttctcggcttttcctcttcctttcccccctcccttttgg

SEQ ID NO: 55143 - DNA, 1045 bp, Heterodera glycines
atgcaaaatcagcctcccaagcatccctctctgttttccattgaccaaattctatcggccccaagcaaaaagccgcgtcgcggcttcctcatcaatgaattgcttggagaggtgcttcaagagggcggcagcagcagcagctcatcatcatcaaagtctgcaaaggactacgtcaaaaagttggacagcaccattgagcatgtgccccgcttccagtacagcaaagtcaagtcgcggttcagcattgaggatgtgccagcagcaaatcctgagggactcctggccggcatcttccagtactgtcttgacgcagcgatggaggagagtcgtggacgtggaattgaacccactcatctcggctgcatgatcagcagttcgttgctcaccggcggggacatccccattccggttcgacaaatcacagacaacaccgtcaacaccatcctcaaccagttcaccaaagtggcacagagcaagcagcagcaaaacgtcacactgtggggcgagccattcactgtggtggtgaccacagttgaccgtactggactgcccggccgaagggtgctgaagggcggtgctcgacgaagcctagcacctgtgcatcataaggtgacggaaacttgtttgattaaggtccaaacatcacaacgaaagaataatttaagtgaaaattttgttaagatttgcaaccccgacggacattgcctcttctacgccttgcaggcgacaatggtggacaaaacgtgcggttggccccgttggagattttacgactacttgcacagtcggaggggacaacagggatgtctgaggcgggatgctttacaactgatgcagcaaattggtgtacagaccggtcggaacacctatgatgctgagatttgtgtgccgcgtgtggtcgaccactggaacaacacgcagcagcagcaacgatttgcagtgttcatctttggctcatcgggacaatacaagcccttgtacaaatacatcaacgatcattacgacacccccattgtgccctatttgaacaaccagcattttgatg

SEQ ID NO: 55144 - DNA, 893 bp, Heterodera glycines
atggaattggatgaggaatccaaacacctttgtggaataaacacccaccgtggcctcttccaatgccagcgcctcccatttggcgtcaaatctgcgccgtctattttccaacatttgatggaccaaatcgtctcaggcatcccaggcgcatttgcctacctcgatgacggcataatcgcctccaaaacgcttgacgagcacatttcttcgctctacaagcttttcaaacgaattcaggaatttggcctcaaaatccaatgggaaaagtgcaaattcctccagcccgaattgctatttctcggccacgtcatctcagcgaaaggaattcgccccgaccccggacgatcagaagcaattcgccaaatgccgccaccacatgatttgagcacccttcgctcgttcctcggcgcattgaattattatggaaggtttataaagtccatgcgcgaaatccgcgaaccactggaccagcttctgcgaaaggacgtgaaatgggaatggaccgacgaacagcaaactgccttcaaaaaggccaaagaaatcatgctgtcggatcttttgctcacccatttcgacccgtctcttccaatcgtcgtggctgcagacgcctcaaaagacggaattggcaccacaatcagccacatttttccggacaaatcggaaaaagtcattgaacacgcgtcctgcaccctcaacgacgcacagaaaaactacagccaaatcgaaaaggaagcattggccctcgtttttgcggtccagaaattccaccgaatgttatttggtaggaaattcacacttctcacggaccacaagccattgctggcgatttttggctccaaaaagggaataccgatttatgcggcgagtcgtcttcaacgctgggcactgatcat

SEQ ID NO: 55145 - DNA, 65 bp, Heterodera glycines
atggctatctcttttttctcttggggatttgaccgcaaacttggtaccaacatttgccttctcta

SEQ ID NO: 55146 - DNA, 59 bp, Heterodera glycines; identical to SEQ ID NO: 52421

SEQ ID NO: 55147 - DNA, 59 bp, Heterodera glycines; identical to SEQ ID NO: 52421

SEQ ID NO: 55148 - DNA, 59 bp, Heterodera glycines; identical to SEQ ID NO: 52421

SEQ ID NO: 55149 - DNA, 59 bp, Heterodera glycines; identical to SEQ ID NO: 52422

SEQ ID NO: 55150 - DNA, 59 bp, Heterodera glycines; identical to SEQ ID NO: 52421

SEQ ID NO: 55151 - DNA, 1187 bp, Heterodera glycines
atggccaagggaatgacaatggaaatggcaacagaaatggcaatggaaatggcaacggaaatggaaaaggccaggggaatggcaacggaaatggccaagggaatggaaatggaaatggcaacggaaatgtaaatggccaggggaatggcaacggaaatggccaagggaatggaaatggaaatggcaacggaaatggccatggaaaaggcaaaggccgtgggccaacaacgccatcgccaacagtgagttcccaatttcattaattcccttttaattaaaaacataaaaaataaaaagctattagaaatttaatagaaatttatattaattgccccattaaattaattttctgtttcttttcctttttccatagccttcaccccccaaattccgtttgtgctatgacaaccacgagtgttgcccactatgggcttcgaatggcacctgcgggatggcaaagatttccatgaacaatttgtgcccggcctcatgtcgctatgacggatgccaaccgtaccctctggcgttctttcccggtaattaatagagaaaaagcgtaggagcgtgccaaatattgaagattaagcgccataaggaaacatctcgaaaaaggcttaattactatattaaggttgtttggacattcacttgcagtgcttacgctggtctttgcttgacctactcccgggctatgggcacggccacaaaggcaaccaatttaaattcactttgatctaagtggaattctcgactcgaaagtcgagaaatttttatcgtcctttgggggagatgttaaccaataaattatggattaattaaaagttaactatatttttatgaaaaattcaacccgaacacaaaaaaataaaatattttagggaagcctataaagcaaaagaatcccaagcaaattccgatgaaagaatgtgagcgtaacccgcatttcatggctcgtaactgcgcaagaacatgcaataagtgtggtgaggcaaaccgggagagatgcgcgtgagtcccttcttaatagcattgtttttgcactaattgcatttttaataattaattttgcgcttttttagaacactgacccccgtcgactttgtggatggggaagagtcgtactactgaacgatgcttcgaatataaacaacaaaataacaactgatggcttattgaatataattaaa

SEQ ID NO: 55152 - DNA, 404 bp, Heterodera glycines
atgggagtcgaaccaaggcagaaatcacagagaatgaaccaaattagactgtaagtttttcacttttttaagtttaaaagttaaattaaattattatttcctctcttaaaatatttctctaaattttcaaaaaaaatattttctctacccccctcctccccctcattcttaccaatgaataaaaatctcgtgtctcgttcaaaaaaagagaccgagacggcattaaaccaagagaatacgagacacgataaaaagcaacatcccatatataaataaaatctttaatatagcatggttttatgcttggtgaaacattggcgccaagttgcgtatttgatgaaggatggcctgcttctgattgttgtagagaacattatcgacttgactgctgcgcgattacaaaa

SEQ ID NO: 55153 - DNA, 1358 bp, Heterodera glycines
atggacgtgtaccgtgaaatgcgagcaaaggaaaaatgcaaggggaaaaccatttgcctttgcgaagccaaaaatttcccgtaagtagaaatcttctttaactgtacaaattaattaagagaaaaaatttcctacaacattttgctcgagaggggtggggggtggagtggctgaataggcattttgaaatatattattaacatttaaaagctgcattaaaaaattttcagtcagagttatctgaagggtgtttgttgtgttgtttgggggcaagaatgtgactgctgtaaaacggtaaaatttaataaaataaccagttatgcttatttgaaaaacagggaagacccaaatgcaagaaatgtataactgaaaaattggtacaaagtaaaaaataataataacgcgaatttaaaaatgcgaaagagaatcccgtgcaatgaatcccgggttgcaaacattgaataattagttaatgtttattaaaaaaataaataaaaagttttttggtctaaaataattaactttttttcgtctaaaaatacttaactattgttttaattgtactctacaatatttttaggaccctgaagttttacaacaatccacggtattatctcgaagaatgtttttaatatctttttctattttaatactatcattaggaagcgcatcgaaggtataaaacaccaaaatgtgatgctatggctaaaaaattgaactgcaaaaacacccagtgcaaattcgaatgcggaggtaaaaatgcagtcaatgttaccgtatgttgtttgtgtaataaaaagaaaagaaaattttaaatgataattatatatttttaatttgtttcgaataagcaaaatttttaaatctaaattcttatcaaggaaaaaccaaacaaattttgacgatcaaaatgggagttttcggaaaaaaactccaaaaaaaggggatgaaaacaccaaaaggtctcaaaatatgctctaataatatgcgattttttaagtattcaatgagacttacataaatgaatcttgtctggagaaatgctaccccttccctcgcttgtgcgatcataagtgccgcgctacaattgagatgaataagtgcaacattccttgctggagacctactggcaacctaccgtatgatcacgctcgaccattttgcaaagatgtaatatatatattttggattaaatttagaatattttaagtgattttaggtccgggaatttcggaatcttgtcacatttttgttacatgattagcatcgacaaaaattggattttgactctgtttaaaaagtgaaaaaaattaattgttttttttgtttttggaggttgaaaaattttcgtaaataaa

SEQ ID NO: 55154 - DNA, 812 bp, Heterodera glycines
aatccgatgaacaaatggcgcttggacctttgtgggtccgccgggtcgcggacgttgatgctgagaagtgcagcagctgaccagagtctgaacccgcccggttataatcccggactgagcactacacaacaagtgggcacgggatgactaatgaccataacattgcctcatttaagaatgaatcggccaacagagccgagcaacagcagcagcatttgttgagcaaaagggcgtgggatttggccctgcagccggtgaaatccttgccgatgaatatgtgggtgaatatagggaaagtccggtgactgaatctaggctgccctttaggtttatgatgtacatggcgggcaacacaatctccattttcccaattatggtcggttttcatgactattggtcaaaattgacatttgggcggggaatggtgggtgctatgacggactttgcccatttgagatggtcgtaatgatggcgtggagaccgatgaaaactttgatgtcagtcaatgctgcttttaaaccgctggaggtgtctaagcaatgaaagtcccttttttaattcatccctttaagcaagagcatgtcggctcactttggatccacaaaattgtttttgccttggggaatttatgcgcaattgcattggccgtgtacaaatgtatgctttttcgttaactttatttatttaacgttaattatttcaaatttcaaggtcacacgatgggtcttctcccaaaccatgcttccgactggctcgattttgttcctcccctcgaaagagctcaatatgcactgtttaatgacatctaataa

SEQ ID NO: 55155 - DNA, 4069 bp, Heterodera glycines
atttcaattgatcctgtgccaaaagtgtgccattactttcactttcattcggtttggcttatttttgttgattttgttctgttgttgctggtggcatttttcatccttttcctatccaaggccaaaaacgactctaaaagttggcattttctctgttattttggttacatttattctttcagagaatggtaaaaagggacctcaaatggaccaaatgctcgtagatgaaactctaaacaattcttcccttcctgacattgggaaaaatgaagccaaatttcgtgccaacgaagcaatggtccgagatgaacaaggccaactctctttttcgcagagatttgtcgacggattgacccgtcagatctctccgctttttctgctgtttgcttattttggctgcgttttgagtttttaccctttggctgagatggatgaaagtgatttgctctccgcccaaattaagtctgttgctttgcttttccatttcccattttcacaaattgtgaatttcagctgttctctgtccgctctttcgaatgaccgatggaagggcaatgagcatttggaaaattgtcgcgcgatccctcggattccgttttggcattacgccaattcgctcgccgtcgtattccatctcgcccttacactttgtgtggtttcgtactatttgacaaaattgcataagtcgaaaaacgatgaaaaagcaaaaagtggggaggaagcggaggacgacgacaacaaaaatgaattcgaaatggacactttggagaatggggaaagggaagaacgtcggcgaacgaacggacccagaacgaatcccagcagcagcgacagcaattgccgagcatcggtggctgattcgatgtattcgaatggatatgccgcaatcgattgtatgggatggccaatgggaaccgaactaatgattcattcattagcatcaacaaccaattcgatactgcataatgtggggaggaataggaggcgaaaactgagcagtttggaaggggcccgaggacggcacagatcgcgagtggagcggggacagttgtcgtcactcaggcaaaatgggccgaatgacggccccctcggaatgcatgccgccactccttcgctctactcggaatcgctctcagctgagtatgagctgaggaatcagcaactcgtaagaaacagaggaggaattgtgtccaaagtattctgattgccagcccatttctcccaatggctctttacccggcccaacatttcttggtgttcctcctcttcagctgcccgtggcagctccaactccacccgcgcccgtgatcattgtccaccattggcatcagtattgccccactggttcttgctattacttcctcaatttcattgcttttcgtttcttcagatggtgttcattctccacagaactgtggcagtcaccagccgaatgaggggggaggaaggaccgaatttgcaatgggaaaggagaacgaaattaatgggccggaggggaatagcggcaccaacggaatggaggaagggacggaaaaagtgaaggaggaagaggaggagacaaccagcgaaggttggatggcttttacgactactatttgcacattaacctaattgactacttattggcacattaaccgcttcccccccccccatcattaaggctcggattacccggtttccgatcacgacaccgccgactcaaacgatttttgctctgacaaccccgaccctgctgaagagcagttgtggaatggtcgtgcctttttaaaaaactaattttaatgctttttgtatgatttagaaagttgtcaaaaagccgctcaaagtcagcagcagtcggcgaaaatttgaagagagtgcgaaaactttggcaacaatttacactgactgtttgtgcatggcaactcattcaaaactggcctatttattttagaatttatttatttatttttctttgttcgtgcgtttcttttaccattaataagggtccataattttgtgcttttaattgtttaccctttgatctccatgtgaattctcccgcgttaattgtccaactcaattgttatcgttaaaaagcaattatgaataaaaaaaggtaaattattcaaatgcgtttctcccaatttatgttttgttcatttttacttcacttcccttcactgttaaagtgtgtttccctttttttggcttattatgtttgctaagcatttgcgcaatttcccttttggctgttcttttgctgcgcgtcccttgaggcgatactcaggtggagcatttcgttcattaattgtttcttcatacgtattcctttcattaagcccatggactgcaggtgcacagggacaacgagcggaacaatccgaacacgcctttccaatttacggaagccaatttggccaaaattacggtgctgttgaacaatttcccggagggacataaaggagctgctctcattcccgtgttggacttggcccagcggcagcacgggtggctgcccatttccgcaatgcacgaagtggcacgtgttttgggtcggccaacgttcacccttcaattagtcaattgtttcttagaaatgcctcgaatgcgcgtctacgaagtggccaccttttacacaatgttcaacagggaccccgtgggcaaatactttctccaggtgtgcggcactacgccgtgcatgttacgcggcgcagaagcaatcatcgaggcaattgagaagaaattgggttggtcaaaaaggcgaacttttaaccctttttatgcaaagcgaatttaggcatcaaaaagggagggacaacggcggacggactcttttcgctgcaggaggtcgaatgtctcggggcttgtgttaacgctccgatggtgcaggtctaattgccatatgggttctgctttgtaattttggtgtgaatttgacagatcaatgacgattactacgaagacctgacccctcgggacattgaagagataatcgacgagttcaaggcgggcaagcgacctttgcccgggccgaggagcggccgtttagccgccgagcccctcgccaaacaaacgacgctgacggagacaccgccggggcccggctttgggcttcagcagggattgtaaagatcgacgttgaacgattgaaaagacggaatagactcccttctctctttggtacacaaacgtatataagcgttctgctatttgtcactattatacaatacgcatcattaactttttgttgttttgtccatatatttaccatattatatttacagtatcaaaagaatatccttaaaatttctactgaagattttaatggaagctgaggcggatttcgattccggattgctcagtacggaagtgagtcatcgacggcgatccgcttcagtgtctgaggattattcggtgcaaaaaacgaacgacgacgccacggaatgtgagtgagttgttcaaccggttcaagggcagtaatactgacttttactggtcccataaaaaaaagaaaaaaaactgtttttttgcggttcttcggtccactcgggggttatcggggccgctgatcaagaatatgacatccatttcgaccaattactaaacccgggcccgaattcgaacagaatcgagttcaacttttcgaaatttggatttatgtttcgaatcagcgaccccgacaatgtccactttaatttggaaggggatttgggggcgttactcaaaaaccctcaaatggataatttttggtataatcaaaaaacataattttcaaattttgatcatacttatttgaattttaatcttataacatcaatcaattccgatagtatttgctttccccttttaggcaaattcgttgctgcgcaggtgttcctttcaattttcaagattaatcactgtctttcttaagttgggttactactccgatagatttatcccggctttcatccacgcgtgcaattcggagaagccccaccacagagacccggagatcactcgtggctattgggcccggacaaacgcaatcacttcgatggtcgttcaatttgttcaggcactttctgtccccattgtttccgattga

SEQ ID NO: 55156 - DNA, 186 bp, Heterodera glycines
atgggatttatcattgatgatatgaataaatgtctgtataggaaggacttgttaatgtgtctagaattgtcagatgaagcgaaaaagacgtttcagattgtcgagaaatatagagaagacgttggcactgcgtaccgtaacgcttatacacagtctgacctcggaatcggagaattagtcgataag

SEQ ID NO: 55157 - DNA, 76 bp, Heterodera glycines
atggcatccaaagcgtttggagttgctttcgtctggcgccaaccaaacggtggtcagatggtcctactcagattcg

SEQ ID NO: 55158 - DNA, 1475 bp, Heterodera glycines
atgccccctctgccctcaatgcgcgtcaaaccggccaatccctttgagtttgtcggtctcgattttgccgggcccaccccctctcggctaagcgacggatcactgaccaaggcgtatttggtcatcatcacctgtttcgtcacccgcgccgtgtacctcgaggcgactaccgacttgtcggccccaagcttcattaatgtcttgcgacgattcttcagccgtcgtggccgaccaaggcgaatcctgagtgataacgcccctactttcgtccaaaccagcaaagccctcgacattctaaccggcccttcggccgaaaccgaccccgtcacatttgccgcgcgccgaggcatccagtgggacttcattcccgcctactgtccatggatgggagcttgctatgagcgcctgatcggcctcgtcaaatcgtgtatcaaaagaacaatcggccggcggattcttgactacgacgatctgagtgccttccttgccgaaattgaagctagcgtcaacagccgcccgatcacatgggtgtcagaccaaccggactcggcaaaacccctcaccccgaaagatcttatccaacccggcctcctcaacgacctggacatcgtcgactctgacctcgactatgacgactgcctttccggtcccgagcgcctcgccgccctttggaaggcttaccgagaagccgccgaccatttttggctcaaatggagtcatgagtacctcctcgccatcagagagcgcgccgcatggactcataaaggtccccgccttcgaactcccgccaccccccacatcggccaagtggtcatcgtcgaaaccccggaacccgccccggacgccaccgtacctatcccgtctgatcaaagccccagtgactccaaaaacgtcgaaatgtctgtacatgaaatgccgccggtcccctcactttctggagaaccgacgatcagtaagcacagcggcatgcttacgcgacgaaaatcacggcttttcgcgatccctcccaccacaacaatgaccattgccactctcgtcactctcctgtgggtccaagcctccccagcacaaggaatctggccattcgatccggaccgtcccgagtcacccctaacatctaattgtgtcgggaatcacgtcaattgcacccgaaaaggcgtcaaaatctcgtcaaatcctgcggtacaaaaggtgacaatttgttgttcgaatgcctgctttgatcgtctcgccgcctctgagatcagctatgagttgtcctccgacctcctcgtcaacgagtatgtctgctccgcgacattcggtctctcttcgacccgcagctgtaccgccgaaattgcctgtccggcggtcaacgaatgtgaattgatcgattgttctatctgcatcgaccgacccgccaattggcggtgtaatccccggctctcccttgtcttacttctggtcattgggtcactgatcagttgtctgatcgg

SEQ ID NO: 55159 - DNA, 1679 bp, Heterodera glycines
gcatctgctcggatttgcaacacgaggattactccccgctgtacgcctggttcaactacatcgtcatcatcattatgctcccctctctctccgccttcggcgtcattaccaacgtggtcaatgtgttcgtttattcgcgctcgcgaatgagaaactcgtccaacacgtacttgctgtacttggcctgctccgacttcttcgtggtcatcaccggcctgttcatcttctgggtcgactcgggtcggcccttccccctttaatttcaccttttcatcgcttcattgttcagctcgttcctacatccctcaacttgtccagtctccgtacaccaccgtttacactcttccctttggtgccattgtgcttttggcattgtgccaattcctcccattgctttagggtacatggcccagtcgtgctccatttacttcaccgtcgcggctgctttcgactgttacgtttgtgtaagttcactcctttaaaaatgtcttttcatttctgattttttaggtttgctggcgctccaatgccaaaaggcattgtacggtaaaaagggcacaacgaatcgtcggttgcattgttttggcctccgtgctttacaattcactacgttttccacagttcaatcttcgccattgtatccacgagggaagcaaagttcggttggggggcaaagaatggcaaaggaaaggccgaaaagtgccgggaaacttcgaattcccattgaaggaaatgattgtcgagatttgccccaccactttgttcttcaacattaacaccgtttacaacggtctctcctctctcccccgtccttttcgctttatcccttctctctcccctcagtttatctttatatgatcgtcatgactttgcttcccttctcttggctgctcattctcaatgtgctgatcatttggtgcaaatcggtggaagcaaatcaaatgcgaaagaagaagaaaaggtgagcagtgaattgcctttggccattgcctcgcattaattaattaattattattgattaattaattaatctccgctcggccgattcagcaattgttcggtctcctccatccctaccaaagccgcccaacagaagaagcttcttgcgaccgactcgtccaagagacagctcagcgtgaacggcgatggcaaattccgccggtcgagtttcccccgagggccacagcaaagtttacggcattacggcccccatcggaactctcagcgataccagcgccagccgcatattgcggctgctcttttgggcggcactttggcccaatttccgccccttccgaaagcgacccctggctccgatgagaccatcacgatgattatggtcagtcggacggatcggtggaatgccatcggatggcgtcaattgtggggactcttgcaaaatctttccactgatcgatgatcagccgctgttttggcaggtggtcgtgctgtttttgtgctgtaacactctcgcccttatcgtcaatttgatcgagactttcttcgaacccgacgcccttctcttaaatcttctctccgatgccagcaactttttggtcatcttcaattcttccgtcaattgcgtcatttatgtgaatttcccaattttgtaaattaaatttattatccattttatttagctgattttcaacagcgattaccgagaagtttttctgttt

SEQ ID NO: 55160 - DNA, 212 bp, Heterodera glycines
cgctaattactattaatgacttcaaattagcgttcttccatccttccattccctttgcaggtgtattactctctcttcacttcactgctttctgtttgtctcggaaagactagcatcaacggattgatgcacaggtgttattgatattctgatggacatccaatgcgctcattgtcaggagtcgcatgttcatcttctccccactcccatct

SEQ ID NO: 55161 - DNA, 291 bp, Heterodera glycines
atgaaaatagcagtggggaaggaggagagacggaagagaaagagaggaaaaggaaaaattcgacggaagaaggagggggagaaagaggaggaaaaggatgataatagcattggggaaggaggagagtcggaagagaaagagaggaaaaggaaaaattcgaagaaggagggggagaaagaggaggaaaaggatgaaaatagcagtggggaaggaggagagacggaagagaaagagaggaaaaggaaaaattcgacggaagaaggagggggagaaagaggaggaaaaggatga

SEQ ID NO: 55162 - DNA, 96 bp, Heterodera glycines
atggccaacgcaatgtacgcggcacgggcgcgtgcggccaaggcggaaaagcgtcaagcgcagctgcgcaaggcggccagagcaagggcaggaaac

SEQ ID NO: 55163 - DNA, 1049 bp, Heterodera glycines
  unsure (1)..(1049): unsure at all n locations
atgtcggaccatccagatgctgcgctggccgacctgtaagccgctcgaatttaaaatttcacaaaaaatcggattttaaatttttgcaattttcagcagctgcgtggcaaacgacgtttggctggacactctgttttggattgaccgcgctgaagttggcacgaagtttgcactgatcgacgcgcgcttcggcaggctggtggccacgcatttcaaactgcgcaaatggaagctgggcgagctgggcattcatcgggcaccaagcggatgggacaggggcggcacggcggctgtcaccgttatggacgaccacccgttgatgaatcgactgccgcttgccaagtgtcctgcaccgaacggcgtgattggcttccgtgccatctacatttggtcttagcgaacaaaatttttttgcaaattttcaaaaattccctaattttccaggtacgtcgacctggaagtgatcacatttctgcagtgcctgcaacgcgttctcaacctcggcactgctttgcagttcaccatccattcgaaggatgtccgctgctgggcgctgatgtcccaacgcatttggccactgatcgcgcacgctgtcaccacgctgcacgacatgaaggacgtcgacttcgcgctgttgcgtcgccatgtgtcgccgaatgtgctgttcgactgtgtcaagcttcgtgtcatcaccaacacgcacatgttcccggtccaaccgccctccagcgctgtgcacatcaacgaactgctccaaccgcctgccactttcaatgagaagccgaagcatcaactgttacgatggctgcacacaccgctcccagatggcagtcccaaaattttgactattcgcaagtggcgacgcgcgcattggtctacgctcacgtcgagcctgcgaacggtcggtcggaaattatttttttttgcgtttttcgattccaaattttttttttcaaattttccagtatttcgaagcgccgagtgccattgcggtcaactacgtcgtcgnttgtcatcgggcatcgcgtcgcaacatcgagggtcgttga

SEQ ID NO: 55164 - DNA, 535 bp, Heterodera glycines
atggctgattcttggcaaacagaaacgaaggacagtgatgaaggtggtgacaggacaaactcagcacacgaaaatgagtctggcaatgagaattggcgactttctgcataccaaactcaatcgacagaggaagtgcctttgcctgatgatttgtccgccattcctgtgccgacggaacaggaaatgaatccggcatggctaaaagcgcaagaagcacttcgttccatcggtggcagaccggaccaacaccaacaacaacacgaacagccgcaacaatttgagggcggaagttacgaggcggcagcagcgctgtacggatggccaccaaccatgggcagttcgttcaattcgtactatcatcatcagcagcagcatatggcttaccaagaccaacaataccagcagcctcaacaacaacaataccgtccacaacgtccgcaataccgtcaacagttcaggccgaaattgactggcggcggcggcgcgtacaatagcaatggtagaccggtcccacttgctcaagtcagcgttccag

SEQ ID NO: 55165 - DNA, 1466 bp, Heterodera glycines
  unsure (1)..(1466): unsure at all n locations
atgcgagtgattcgcacaccaccgctgacgcggacaagagccttaaatcacggaatagtagttgaccgtgatgggaatgcgcaccggaccgggaatttcgaagcatttggaaacagaccgaactcgcccttagcttcgaatgaaaatgaatccatagcaaatgggaatgatgtgaatgatttagagcgaaccgcaaatcgtcgacttatcggtgtcggaatggaactcagcgcaaatgatgagcagttggagtatgaggaaatggacgcggacaacgaacaaaatgctaatggtgtggttctacaacaaaatttgagggaaaatgtgggaaatcaagtttggggtgaacaaattggtggagtggtagaagttggaacagtaaatgcaaatgcgaatgatgggccaatattttctacaccgcatgactcgcgcgattttggacttttacagcgcgatcttagactgcatttttctgaaaacttgagtttaattcccgaccgaaatcaaaggcgtgacatgaatgtcatgcaaaatcaacaaacggggcacagtaggaacaattttactgccattgaacgaccacagccaaacagttaccgaatgaatcaacaattgtatgagaatgccccgggtaatgctgaacggtaccgacctctccaaggcgtaagaccagtggttgccgaaaaccagcatcatttggttcgacaaaacccgccacctcatgcctacgctcacaatgacgattattatgctcagcgatttaaggcacaaaatccccaacaagctccccagttccaaatcacaaccanaatgtgcaattagaganaatcatccgattcagttcgaacaatatcagcagccagtccacnccggactnggtatttgatggcatgatggcacaggccattagaagcctagacagcttctcgtacacaatgactctgaactctattccgaatttggacggcaccagcggatcagacgcagtgaacgcattttttaaacagtttgatgtagcgacagaggaatggcctgagcataagcgacttcgcgctcttcgatcgaaatgctttggcaaagcagagagggcttacaattcagctattgccgaaaacccgcatgaataccagctaatcaggcggataattattcgacagttggacgacacagacgccaaacaattgacgtctttcgaccaactaatgcgcggaattcggcgccgaccaaacgagagtgtcgatgagctcgggaacagaatttcgggtttggtccgccgcgcttatccgggtttaaccgaacagcaatacgatgattattcaatcatgcactttataagagccatttctaatcccgagttggcgatcactcttgaaatgacacgcagacccggagcgacatttgatgaattcattgcacaagcagcccgagcggaagcaacgcaatcggctgccagaaattcgtttagg

SEQ ID NO: 55166 - DNA, 1194 bp, Heterodera glycines
atggacgtcaaaaagtttggaaaccctctttacacaatcgatgaagagacatatttgcaattcttcaaagaaaatttgttattaattcttgactcagcccgtaaaaatgccgaaatttcacgggcggaaaccaaaaacagatatgatttacgtccaaatgtttccatgaataaatttgcagtcagggatcgctgcatggtcatttaccctggctctaaatcaaaaacacagcacaaaaaattacattggaatcacttcggaccatacgaaattgtcaaaacactcgaatcatctgctagtgttgtcccggttgataaaaaatcggcagaaccaattactgttccaatagaacgccttgtgcgcgttccaatcggtgtacccgacatttctacccttcctcatggaaaaaacccctaccgaaatattttagctacaattctattggccagcttaaaactttcaaaattagacacaaaaggaatttttggacagttcgaaccgctcttacagacgcaatttggggaaaattctttaaagtcatcggaaaaaatcgtcgttaatcagttagggacaactgacaatttaggagaacgaaagatgcagcagcgccagcagaaagaaaacgacggactttcgtggactatgaagtgtgaaggggaaacccacgaattttgcggaaaaattttgtgcggcgagttggacccagtgctggacgcgaaaactgagccgggcaatgtggaaattggcactcctctccaagcccttttgagtctgttcatccttcgttcgggtgcaacagtttcatcttcggcggctaaaaatttggtgcaactgattctcggcaccgaacccggaatggaattggtcgtctacgaaggagtccgtaaagacaatgtccgtgccggcatctttccaaaccatgaagacgtggaaagagtctggattttgtggtgcgagaaatgtgccgtggcaaagaaactcctccaatcgtctggattcgaccaaatccgagtggaaaaacgttgcaaaaattcaacagaaaactcggaattacttcaggttgtcgtgccggaagctgtctcaaaattgccggacacggaacgcgacggttggggctcactgctcgaggagaccggttggaccctggagaaagtacgtgcgcaagtcattcaccggtgccgcatctttgtctaa

SEQ ID NO: 55167 - DNA, 1442 bp, Heterodera glycines
  unsure (1)..(1442): unsure at all n locations
atgtctgagctgccgaatctgtgcacacacccgaaaaccccggtcaaatgagcctccgcttagaataattcagactacggagcctcttgagcttgtttgcgtggatattttgtcgattggtccatcagaaagcggaaatcgctatgtgttggtctgcattgaccatttcacaaaatacgccatagcaataccaattccggacaaaagcaaagaaacgattgcaagccttcgtaaaggaatttattttgcagtttggagtaccaaaaaggctacacagtgatcaggggaaagaattcgttaacgaaactttaaatggaatttctgcaatacttggaattgagaaaaccacgacagctggttacgacccgcaagcaaacggagcggttgaacgagccaaccaaaccttaattaacatgcttaaaaagtccacttcctctcattggagttgggacgaacgccttcctttcgttatgttttcttataacaccactccatctgaagtcactgggtactcaccctttcacctgatgttcgggaaaattgctgatttcccaggagaaatggacgtcaaaaagtttggaaaccctctttacacaatcgatgaagagacatatttgcaattcttcaaagaaaatttgttattaattcttgactcagcccgtaaaaatgccgaaatttcacgggcagaaaccaaaaacagatatgatttacgtccaaatgtgtccatgaataaatttgcagtcggggatcgctgcatggtcatttaccccggctctaaatcaaaaacacagcacaaaaaattacattggaatcacttcggaccatacgaaattgtcaaaacactcgaatcatctgctagtgttgtcccggttgataagaaatcggcagaaccaattactgttccaatagaacgccttgtgcgcgttccaatcggtgtacccgacatttctacccttcctcatggaaaaaacccctaccggaatattttagctgcaattctattggccagcttaaaactttcaaaattagacacaaaaggaatttttggacagttcgaaccgctcttacagacgcaatttggggaaaattctttaaagtcatcggaaaaaatcgtcgttaatcagttagggacaactgacaatttaggagaacggaagatgcagcagcgccagcagaaagaaaacgtcggacgctccagccctgctatgaagtgtgaaggggaaacccacgaattttgcggaaaaattttgtgcggcgaagttggcccagtgctggacgcgaaaactgagccgggcaatgtggaaattggcactcctctccaagcccttttgagtctgttcatccttcgttcgggtgcaacagtttcatcttctgcggctaaaaatttggtgcaactgatcctcggcaccgaacccggaatgaattnggtcgtctacgaagga

SEQ ID NO: 55168 - DNA, 1109 bp, Heterodera glycines
atgtcggtccgcaaatgtcggtccgcaaatgtcgcactacgtcttgtaagagcttttcttttagtttgtcgactaccaatttttctttctctcccatgacaaatggtgtgttctttttcagaaggtggaacaatggcgccgcaatttctccaaatccgtaaataaacttacgataatacgtcatgaagccaaggaaagagtgcagttgttttttggttgttggaatgggcaattcaatgacaggccttattttgtctgcgttcatctttaagccttgtcgtgttaacacatggcccaaaaaaggtaattcctcagcggaaaaacggcacttttcaatttttaatttcagttcggcatcctgaatacgttcaaaaacaatcttcaaatgcttcaaatgttgttcaaacgtctcagacgcgaccaaaatatcatcaagataaacgaagacaaaatcattgatcagatcttcaaaaagacgagacatgaatcgctggtaagttgctacagcattacaaagtccaaacggaagcaccgtgaattcatgcagtccaaattctgtgacgaacgctgttttttcaatggacttctcgtccattttaatttgccaatatcccgaaaggaagtcgagggttgagaagtatttttttcctcccaatgcgagaagaatgtaatcaatgttcggcaacgggtatgcgtctttcactgtgaccgaattaattcctcggtaatcaacgcaaaatcttaagcttccatcacgtttcgggacaaggacaatggggcttgcccatggcgattttgacggccgaatcaatcctctgctcaaataatcctgaagcatcattgaaactttttcacgatgtgcaaatgcgatacaaacgaattttctaattcatgccaatcttcgacaagttcaacttgcgcaacattgcttttcgcctccaaagtaatcggaatggccgaataattgacaatcgggacaacaagttgtccattttttcctgatgtaagagttggctcaaatttcagttgttcatgaaaaccgtctcttccgattacagatacttctttatcatccagctcgcgcaggactgacaactcgacaagcgtag

SEQ ID NO: 55169 - DNA, 2836 bp, Heterodera glycines
tttcaatgatgcttcaggattatttgagcagaggattgattcggccgtcaaaatcgccatgggcaagccccattgtccttgtcccgaaacgtgatggaagcttaagattttgcgttgattaccgaggaattaattcggtcacagtgaaagacgcatacccgttgccgaacattgattacattcttctcgcattgggaggaaaaaaatacttctcaaccctcgacttcctttcgggatattggcaaattaaaatggacgagaagtccattgaaaaaacagcgttcgtcacagaatttggactgcatgaattcacggtgcttccgtttggactttgtaatgctgtagcaacttaccagcgattcatgtctcgtctttttgaagatctgatcaatgattttgtcttcgtttatcttgatgatattttggtcgcgtctgagacgtttgaacaacatttgaagcatttgaagattgtttttgaacgtattcaggatgccgaactgaaattaaaaattgaaaagtgccgtttttccgctgaggaattaccttttttgggccatgtgttaacacgacaaggcttaaagatgaacgcagacaaaataaggcctgtcattgaattgcccattccaacaaccaaaaaacaactgcactctttccttggcttcatgacgtattatcgtaagtttatttacggatttggagaaattgcggcgccattgttccaccttctgaaaaagaacacaccatttgtcatgggagagaaagaaaaattggtagtcgacaaactaaaagaaaagctcttacaagacgtagtgcgacatttgcggaccgacatttgcggaccgacatttgcggaccgacttttgcggaccactatttctgggttgaactgtcaaaaaaaaacaaaaaaaaataattttttcaaaaattgagtgactaagtagttttatttgtgatttttaccaagttgaacatcgcccttcaagagtaatcgatcaactttttgcaatcaacatcgaaagaacccattttttaaagaagtttagtttccatagataaatatattatgtagttgcacatttttaattttggacccatagttttaataacagcaaattacggacaatttttgagaaaaatataaactattttagtttttgtttgttaatttaattggtttgacatgccggaaaaaattaagctctcggttaactaaagcgtggaagtgaaacaagataaaaaattttcttggtataaaattcttgaactgacttttatatttaatttagctaattttttcgccaatttcacagtttaattataagttagaaattctataaaaaagaaagaaaaaagttatgtcaaataagacttgtctccaattgagacagatcgctttgcatcagcttaccttcactaatttcaatttgggaatattgaatttattaaaatttcttattatttttttctttatttagacagttctatcgagaaatagtggtccgcaaaagtcggtccgcaaatgtcggctaacccaaaaaagcaccttttgacattgacaataaatggccaagggaatgtcggaagagagattcggcaatttggtccggaagaaagtgcggtctataaaagtagaaacaaaatgccattccaagagaatcccaacccgaattgatctgatccatcagagagctcacttccgtcagcaaattgttcaaatgcagaaattggaagtggtcgaccgttatgcccaaatctgtcctcggctccaccaaaatgcaattctctggatattaattaacaatttaaaataaaaaataaaacaagtcagaaaactttgacagcttccatcggagtcgtccaaaagaattgagccgaaaatattcaaatcggtcaaaaaaggcagttcccacgtgtttggaccgaagtcgcaattggtccaaagcgacggaatggatagaatccattcgttgcgctgttcatggtccaaaaagaagtcggcattgtctaaacctaacctccaaaattaaacatacaaaagtcagagaactaataataattaacattttggtttttgttttcaaattctttaaagttttttgttgaaaagtttttgattcctggtaaattttttattatgtttttcgaaaggaaatgagggtggaaatcctcaagtccagtatttttagaccaaaagatgctaaaacattattttccctcaagggcattttttttgaaaataaactgtgaaggagtataaaaatgggtctacggtttccgcacaattgaaagaacagaccgttttttttcgagatggaatttcggcttttcttaagcaattcgtccaatagttttgtctccacggtgtttttctgggcccaatcaacgaatttaaaatgtttgtcgtccaatcggtctctgaacattatgggcaatggcaccaacggatcgttgaggagcatgaaattggagagaaggacggtggacgcttgcaaaatgagccgtttggggagacgggggtcattttgctgagagagagaggacggacagtcggtggagggagaagacaacacaattttgggcatgaacagctcgagtcggatttgagggcgaagttcggtattgccagcgacagaattggcacaaatttgaggggcatccttcacaagggagaacaaaggcattcaaattggggatttgatgtctcacaattgcgtttattatactttccattgcgtagaccaaccaacggaccgacttggcatcgggggacagctccaaaggggccatgaccaaatggacggagtcggggggagctggccaaaaagaatgagacgag

SEQ ID NO: 55170 - DNA, 494 bp, Heterodera glycines
  unsure (1)..(494): unsure at all n locations
atgccgaattgtttggcggttgtgcttctaccaccgtcaaatgtaaatggcatttataaaggcacgcgggccttgacttatgaggtggatacagtagggccttaccatatctcatctttaatgattactaaaaacactagattaaatctttatctcgcgagaaatatccgtgcgattatgttgtaagtccaaaggcaaaaaaaaggctntggatgtcccggcggaaattttccgattatcctntacgacaaattgctcattttaactttgcatttataataataataataatgtaaacatatttttttaaattttaggatgattttaattggtttagtcattattgcttttgtgactttttgccttctgttgagcttcattagttttaggggtattttttgattatgctgtctcaggtctgtaattattatataaaaatttggacaacttttcagaaggaagaccatctttaaagcgcatgaaaattaaataaa

SEQ ID NO: 55171 - DNA, 1042 bp, Heterodera glycines
atgttcaagtcgagtgggaagatggtcttttggcaaaggttagtttcattcagttggatcgatcggtctctccatttcaaaaagtgactttcagttcaattacgtttggttacgcgacaacgcccgccggcgtccgtcgttggtccatctcgacctcaacacgcggccccaggaaatcaaatgcagcagagaggcactcgaagtgcaatggccgccattcattgcctcaaggcgggtgctttgccttttgctttctttaaatactgaccctttccttttatcattttagatacacttccaattttcttcgtgacattgccctcgatagccccgtggaaaggctttacggcgctcatagaggcagacaaaatggtcaatttggcaggtcaaagccatcgatggctggcccactcaatggccatttgctggctttttctgacgcgcgagtgccaattgaagacggaatcgaattaggcaaatgttactggggagaggaagcgcaagagccgggcacaatttggccgcacctcgccaaagtcccttcggttgttgcggtggacagtctttccgggccggctaggctttccttcgtcgacgttgagaaagtgctcatcgaaatgaggaagcgataccccaaacatttggtcttcctcgggacttgtgttctcgagtacgccgaggtatcacaatgggatttcctttgtggtgaaatggaaatgttttgacagggccctttcttcgcaactcatcccgtcgttagggtggacgaccaaggccatattctgccggtttgtactggcatttgcagcgagttacaaaatgttttgttcaccagtagggctttttcaacaacgccgcgcgttccagcgcaattaccgtccattccctggacgaactttacgagtcgctgcaaaagtttggccgcgtttgcgcagaaaacatatgcgacattcagctgatgcccggacaacgactcttcttcaacaatatccgcggaatgatcggtgcgccggcacagacgggacgaaatctcagcattaaa

SEQ ID NO: 55172 - DNA, 970 bp, Heterodera glycines
atggaatctttaataaatagtaactaaattttcctaattttctccatcggcaccaccagacagactcattaattattttgagggtagcttttacgaaagtaaaatgacgtaattcatccatcatagttcattgatcaaccaacgcctttcaattaataagcaatttttttcaattagcgacgaaaagattttataaataattaatgaagtaattaatgtttggagtattattttttgacatccttttcaatattgtcccattccatctgccacaaatttgttaaaataatttgttcttcacagtatggcgcccccgaaaaattttgtcataagtatgaaaacttgttgacgggaatattcgggtcgttaattaggaatttgacatctatttcaaccaattccaaatccacacaaaagttacgacattttttgatgtgatacgagaaaatttgtcagattgtggaagtaagtgccaaaacgaaatttcaaaaaaaaacaactaataaacttataaaattaattatgaccaatttttgaaatatggatatggaggaccggcacaatgttcgatattattttttgtaaatttagtttgacttaattaatgattaacttttattctgttataactctcaaatcttaaatgaatcgaattcaagagaagaataattcaaaataatggaagaatttaaaaaaagttattgagtcaatttcttaaggatcttaaacggtaatgaaaatcaaaaatattcgcaaattgtggtaattataaatggtggtaaatagcgcaaatcatcataataattgaaaaaatggcattaattaattactggcaaaaatcttattgacaatttcttaaacaattaagcagttttataattataaattttaagtacaattaattgatccatcagttgctaatctgacgcaattgaaacctgaagcaaacatgaagaaatgcggtatttaa

SEQ ID NO: 55173 - DNA, 953 bp, Heterodera glycines
atgccaaagaagacacccggcgaacactttgcccgtttggaaatgcttaccgaactgctccgaccgcaggagccgaacgcgcaacggatggtggaggaattggacggcggagcggacgaattgggcgggggtattattaattactacgccgtttcataaaaatgaccccgtgttatacaaaaacagttaatacaatagaaattcgaacctataatttttagcttatttggtaacattcgatgcataatgaagagttggaaacaatgatttaattttatatctcaacagatagcgttattaaaagttatggccaaaaaattcgaaaattggccaaaccatcaaacttggatttctctgttaaacatttgttttttgaactttatcttgtcaatcatatcgaatttgattaactgaccaagtttcaagtcattccaaaaattacaccataagttatgcaattttggtctgaaaaagtgctaattttctttgcccatccaaatttatttaaaattcgcattttttaaacgacgagacaatttaatagcttattttaagacgcgtcatcagggctttcgatttcatttattacatcggtttttatttcattagcaatttttggaaaaaagaaaaatggatcttcttttatgatgcgaacctaaatacaaaaatgacccaattttatcctgcttttagacaatgatagcattgactgtttcgcgcaacagtctctgcccgaggatgggccaacaacttcgagcagtgcagcgacggcactgttcggctacggttttggttggcaacggcacggcgtgctgggccgtttgttggccgacattggccaaggcgagttgcccatcgaccttgaggacccggacggaacaccgatcgacgaccgattagagtgtcttcacgcgttcgacgccgaccattttcggcccgagcattacttgtga

SEQ ID NO: 55174 - DNA, 494 bp, Heterodera glycines
  unsure (1)..(494): unsure at all n locations
gattgacagatgnatagctttttcatgattcggtggatggtggtgcatggccgttcttagttcgtggagcgatttgtctggtttattccgataacgagcgagactctagcctactaaatagttggctcattgcttctgtgggcacaacttcttagagggattttcggtgttcagccgcacgaaattgagcaataacaggtctgtgatgcccttagatgtccggggctgcacgcgcgctacactggcaaaatcagcgtgcttgtccttccccgaaaaggggttggtaaaccggtgaaaatttgccgtgattgggatcggacattgcaattattgtccgtgaacgaggaattccttgtaggggcgagtcatcaactcgctctgaatacgtccctgccctttgtacacaccgcccgtcgctgcccgggactgagccatttcgagaaattcggggacggttagtgttccggcttcggtcggtatgcagactggaaccg

SEQ ID NO: 55175 - DNA, 160 bp, Heterodera glycines
atgatccagcagcaggttcacctacagctaccttgttacgacttttgcccggttcaagccactgcgattaaatcggttccagtctgcataccgaccgaagccggaacactaaccgtccccgaatttctcgaaatggctcagtcccgggcagcgacgggcg

SEQ ID NO: 55176 - DNA, 184 bp, Heterodera glycines
gaattttttttattttttgaatttttttgaatttttaaaaattcccggttggtcccggttcccggtcccgaacaaaaatcgaggtcccggtcccgacttctcaggtcccggcaagtcccggtcccgacttctcaggtcccggcaagtcccggtcccggttttgcccaaaattcccggtcccgct

SEQ ID NO: 55177 - DNA, 1486 bp, Heterodera glycines
cttatattctccctccgtctcgttattttcaattcaatttctcagcagttgcgcggagtgagttccaacgcctcagcgtttcagcaagtttcgtcaacttcgcttctctcggtgaccaagaaaacgcctgaacagttgcgcgccgaatcggaagaatgttataagcgactggatctgactttccagaatgctgaggaggcatttaaggttcgtctttatttagcaatgaaacaagaatagattaacaacctccctttatggactttgggccttatatttggcagacgaaatgtttacatttgagtcaaaatggtcatgcgggagggagtctttcaccaaaagttagcacctttaaaggtcttaaatcaactttagacaaggaatggccgtccgaacgcatatttttatgttccaactaaattttgttattttcgcagagcaaaacgaacagtgaactggtccgtgctcagctggtgttcgccttttgtcagaacaattggattgtccaaaacaacatgtcgttgatgcgcttggcccgcaaaatgcttggaaagcgcgcattcaatgcattgatgcgaagcaccttctacggacattttgtggctggcgaggacattggcgaggctggcaaaagaaaatattcattcaataattcaaattgaaataaatgacagttttcatttttttttaaacatgacctattttaaatttatattaaaatgctaaccttccatttctgaatgaacttttgatttactttcttggattctagttttttttcaataatgattcaattgaactcagaaccctctgaatatgttatcaataattaatttttaagtcccaaacaatttaaggtttcaaaaacggccactcgacttcagcgcttcggtgtcaaatgcattttggactacaggtgttgttgttgtgcatttgccaaccattaacaacggaacgtgcgataggggtgggcgagtggttaaacctacaaaaaccaactcaaaataaattactttttccttaaaatctgacccttattggtcccgtactaaaaatttatttatctgatttagtgtggagtcggacatttcggaggaggaggccaaagaaaaggcagtggaaggtctggacgaagaggaaacgcaaccactcccacccgtatgagctgttaatgttaaattaaatccatttttaatggcatttaggccctggacgtcttggccagcgcggttccgcctaaacatgccgcgcaattggaggacgcactcggtgatcaatcagtggcggaattggtggaccaaacgcacaaacagttcaccgtgcacaaggaattcggagaccgacgtgagcatgtcgtcagcgcacgtacatacttttatgtacgttttcatggcatttatggcacttatttcgttcattttgccagaatggttttaaagttgtaggactgggaaaacgtgaatttttgtgatttttttacgtcttt

SEQ ID NO: 55178 - DNA, 1061 bp, Heterodera glycines
agaaaaataattttaatgaaacccgaccaaaagagtgcaaaaaatactgcaacggcggaggaccaacagcagatcaaccgatttgcacgtcttcataaagcttactcggcagccaaagtgagttcaatttagtaaatgccgcgaaatttgaaattttatttccatttttcaaaattgataggctatttcttttttaatttttttgtcccaataaaattaactgataattaattgtgtgtgattgtaaatgggagtttttcaggaaaaacttatatcgttggacaacgatgtcaacaatttgaatgacgcttccgatgaaattctgctgatggacgacgaggcggcggccgattcgattccctttctcgtcgggtcggtgttcgtccatttcgaccaggttttacacaaaggggacattctaccaaaaatatttcaatacaaccatcgagaaaaatcattcctttttcttttttaaggacacagtgaacggtcggttggaactgctgaaagtttccactcaggcggagatggacgcattgcgttcacaagtcggaaccatggagagggagttgggcgaactgcgggcagtgctttacgcaaaattcggcgacaacattcacctggagacagaggaggacgaggagagcggcgatgcgacgagaaggaacgggagatagtgcatgaaagaggaagggcagagagagagagaaaggaaaagaaaaaacaatcgaattgaaatgggcgttgaaattgtcttctttttcccatttcccgacataaatgaaatgataatacctctttaatactttaaaatcttctggatttaggaggtcaaactttttcgtaaataatgtcacacaaaagtgatgagagaattgttgtttgagatccgtggcattcgctttcaaatcccttccactgccttttgcgtgtccgccaacaattgcttcatcaacacgtctaattctttcattgacgcatccgcaactgggtactaaatcgaacaaaaataaccacaaagttttcttggcaattcgattttaacctaattcagtgtctga

SEQ ID NO: 55179 - DNA, 45 bp, Heterodera glycines
atgcccccgtgccctccgtgtatgcccactttttgccctccgccg

SEQ ID NO: 55180 - DNA, 1483 bp, Heterodera glycines
atgaacgcggcgttggagcaactgttccaagcggctggcatggacagctccgcgttgatgatgggcctcggtagcatggcgacggcaccgccgccgaagccggcggcgccatcatcatcgcttcagcagcatcaccaacaacaccacagccagcaaaaaagtattgtgacgtcagcagcggcaaacatgcgccaccatcattcatctgctgctggtgctactgctactgcttcatcatcagtggtcagtgccggtggttcgtctaccaccggcgccgtttctgctgttggcacgacgccaacaaaaacggtgctcacaaaggtggagacggcaaagacaagtgcgtcgtgttgtgcgtcatatataatggtttatgtgtcaaatgcatgatggcccttttccttacttatgcaaaaacatcagtatatgaatgatccaataaaaaacttgcttaataaaaaaattattgtaattaccgttttttcaaaaaaaaaaattttaaattttgtacccctaaaaacgattttttcaacacaaaaaatatagaggatgagagaacttttggatcaattcccgaaatttaatccaactataaatttttaaaattacgagtcatttgcgaaattaacatttttcagtttcactcccgctggtcacctcaatgacggacggcataacaactcaactaaaacaacagcagcatcgtgccaccgaaagtccggcacgtaaacttggcatgtcatcaattggtggcgccggcaagggtctgaagctgaacgcggtgttggaaaagttgaatgcgtcgtcaagttcaagcagtacagctccaccagccaccaccaacagcagtgttgcgacgacgcccacaataccaaccgttacagtacctctaccgccaacaacaccaacaatcgctacagtaccacctctaccgtcatcatcaactacagttgctgatgttgttgttgatacagtgccatcatcatcaactacaactacagaaaagcaagcagaagcagcagcagcggatattgttgaatcggcagcaccagctgttgttcagcaacagcaaactgatcaaaaggatgatgataatgatcggacgacgactgaaccggaggaaccaaagcagcaacagcagcaggtggagacggtggtggcggctaatgttgaagcggaccagcagcagcaggaacagaaggcggcaattgctgtgccaccagaaacggtgacggcaccaaaaagtggcactgagtgtgacggtgatgatcatgagcatgacaacgacgatggtggtggcaaacatggacaagaggaagaggaggaggacaagcagtcgtcgtcgtccaaactggtgatggccgatgacaatgatgatgatgatgaggaggaggaagagaaggaaaagaagaacaattccgcggatgatggtgaaaaaaagaatgatggtaaataaatatagggtaatacaatagaaaataaa

SEQ ID NO: 55181 - DNA, 650 bp, Heterodera glycines
taattaaatccattccttcgggggaccgtgccgggtgccgcggggtaagcagtgctggttcgtttcatcacggcaccgaaccttttggctagtcagcaatcgttgcttaacttgccagatcggacgggtgcgcatgattccactgttccaagcaccccaccaaaagcaaaacgatataaccaaaatataaggaaaaattttttaaaaaattttttctccatcttcctttttgatactaaagcatcagagtgctaaaattaagttgtaaataaaatttggtgcgctttagagcactttctgaaaaaaatatttatgaaacaaaaaaatcgattttttcaagtgtccgtttggggtactcaaacatttatggggagcaaaaatccaacgcagaattaaagtacaggctatagggaagctattcccgaaggattcggtctccccataaatctgggcgcatcggttcggggggactgccccgaaaacaaaaaaatcgattttttcaagtgtccgtttggggtactcaaacaattatggggagcaaaaatccaacgcagaattacagtacaggctatagggaagctattccggaaggattcggtctcccataaatctaggcgcatcggttcggggggactgccccgaaacaaaaa

SEQ ID NO: 55182 - DNA, 861 bp, Heterodera glycines
ccttccacgaagcgggacacgccatcgtcgcccatttctctgaccattcgaatcctttgcataaagtgaccatcattcccagaggcacttctctcggccatgtgagtgtttcgcgtttgatttggaaaaaaacggttcattaattgcagacatcgcaactgccggacaaggaccgtcaccaggaaacgaaagcacagcttctcgctcaattggacgtgacaatgggcggccgtgtggcggaagaattggtttttggccaggaacacatcagcacgggcgcaacttcggacttgcggcgcgccacaaaggcaaaaagggggaattggcatgaaagaaataaaagcatttcattttaaggtggcggaacgaatggtgaaattattcggaatgagtgaccgggccggacttcgcgacttcactgttggacaatcaaaagcattcccatcgcaatgttctctttaaggtggaaccgattgaatctgagcaaggcttttgtgtggaaaggggcccgagcaccagcgaaacgatcgaccgggaaattgaaaatctgttgcagcagagccacgaacgcgttaaggaactgttgacgaagcgaaaggtggggagggggacaatatgaaagggtgtttggacaacagaaacaaagagtgtacattttaaaaatggcaatttcagaaggagcatcatttgttggccgaggctctgttggagcacgaaaccctgtccaaaaatgacattgagaagttgctcaagggcgaaaaagttatgaaaccgccgccgaccccgccgaaagggcaaaagcataagggacggacattggcaatcggaaagaaggcgaaggacgagggggggcgggcgtaa

SEQ ID NO: 55183 - DNA, 267 bp, Heterodera glycines
tataaaaataaaagtgattttgggattcgggaccaaaggggggtgaccaggatttttgggtggaaaattttttcaccaaaaatcttccaaaaacatgtcattagggctattttatgacgctgatcacgaatacgtgatcagattttacttttgacatcgtcaagacctcagaatccctgtgtgattggggattctgaggcatcattttgaggggggagggggcaggttcggatccggacggtgtaacattatttttctgtgcatttt

SEQ ID NO: 55184 - DNA, 448 bp, Heterodera glycines
acaattatgggggagcaaaaatccaacgcagaattaacgtttaggctatagtgaagctattccggaaggattcggtctccccataaatctgggcgcatcggttcagggggactgccccgaaaacccaaaaaaaaattttttggataaaaattatttaaatgaactgactagataatatttaaaataggttatttctcttcctttcagtatccctgcaaagtttggtgcgcttctgatcagtttctgaaaaaaaagttaagcctaaactttttggcctgtttaaaaaggaattaaaaatttttaaaaattttattcatctccctttttgatagaaaaagcatcagagtgcctaaactaacatgtaaataaaatttggtgcgtttcagaaccctttctgaaaaaatatttaagaattaattttgcaaaaaataaataaaaacgaaagact

SEQ ID NO: 55185 - DNA, 395 bp, Heterodera glycines
atggagaaggcctgcaacatttggagagattttattgattttagtgcgctaggttcgatgaaactttttaaaatataagcctaaactttttggcctgtttaaaaaggaattaaaaatttttaaaaattttattcatctcccttttgatagaaaaagcatcagagtgccttgattaacttgtaaataaagttttgtgtgtttcagagcactttctgaaaaaatacttatgaattaattttgcaaaaaataaataattaatgaaaaagtcagaatttcgaaaaattttaaaaacaacaagcgttggcattttttcaggtaagctctgctcggattggcctcccttcaatgggtcaatgtcagtaaaaatgcaatgggaaaagagtaaatctaaatga

SEQ ID NO: 55186 - DNA, 1928 bp, Heterodera glycines
atgtggtgccattggatggccaacggaaaaggattattgatacaacggtgggcggtatttgctaattatcagagggtaattaggaattgatttgctaattgtcgccattttcctttccagccctttgactttctgtgtccctattccattttctgtaccgtcggctgtcagtgctgccaaatcaaccacgcaaatgaccacctcttctcaatgccaatgctcgagtttcatctatgaaaattggtatcgtgcgcaggccccaaacctaaaaaaattccggagggaagatgaagaatttttttttttttgctcttcggtcttgaaattttttctcttatttaattttaatatgtccagctattttcttccccattctcctgatttctgaaattttttgagtctttgtctatatatatttttttaaattaaatatttctaataattcaaaaattacttttaaataaaatttgcataaattgccaaattcctaaattaaaatttaaattttgttgcattttcaggagccgtacattcctttcatggagaaagcatgccgtctctgtggctcggctgtcactatgctgtttttcatttttttgatcattgctacactgttcgacctcattgtgtaccgaatgtttgtgattcgagttttttatgccagcacattttcaatgcctttttcgagattgcttatccgtaagtaaactcaattcaatttcaaatgaatttagcaattttattttatttttaaataaaaatggaattagtcacaattaaaatcaatatgaaattgaactgttattaaccagggttcttgaccgaaacccacgtttaaaaaacctggattttttcacgacccgaaattttctttgaacgtccctacccaaaccccatcttccacaattcctgccctgaatttcaattcgggaatattttatttacatcccgataaatcaaaaattaatgaattatataaatttttatgtttatttaaaatttaaatttttttaattttaaagaatgctttcctattgggttcgacgatggtgctttaaaaattccagcgacaaagaaacaaaaatgcgaacggatttgcaaagaacagcgtcaaacaattaaatgtatcaatccgaacatcaaactcagattatatgagcagctgggtgggtggtggaagagaattttttaataaaacttaaattatttttattttttatattaaatttgcctaaaaaattacatgttttcatgttcctaaaattagaagccctggggggtttaatttatattccatatgactcattttaaatgttttgaggtaatacaacttggctttgtcaccttgtttgttgccgctttcccactagcacctttgtttgcgctgatcaacaacatcctgggtcttgaaaattcgaattcctatggccgtcaaaaaattttaaattttacaaaaattcttaattaaaattaattcagaaattacatggtttccttcaaatttactttttcatttactaaccctatctaatgattgattgatttcttttgatggtttttccactaattttttcaatgtttttatttatttaaagattactcaacaccttttcaatagaagttttatttttaaataaatataaatttttatttttaattaaaaaaaaatttttttttcaagacttctttgtcatttcccgcaatacaatcggaagcccagcagatgcccaactccgtcgctgctactccttgcgcctccaacccgttcaacaacaatcacttcccacaatcagatgcagaaaagtacaacaacaaacagtgttgaagtgcttcagaaaaatgagcgatgacaaatttttgctgtggttttgatggtcgacaaaaattccgaatgcttttttattttttaatttatttatttgatcgga

SEQ ID NO: 55187 - DNA, 4248 bp, Heterodera glycines
atgtccattttttattattatcatttaatcatttttatggcaattattcatggccaaatggcagcgccaatagtggccgaaagctacagcagcgccaagcaacagcggacagaattcaattatcaacaaaaattgcaatcaacccacccaccaacaatgaacgtaaggaaagctaacaaataagcactgaaaaatgccgattacaataaatagtgccatttttcgtcaaatttgggctatttttttgaaaaaattggcaaaaaaaaactttaattttttgtgcgcttttttttttattatttttgggaaatttttgtctcggtaatatttttcactttttttctactaaattttattaaatttgaacaattcaaaaaaaatttttgatatttttcaaaatatttccaatttttccctgatttttaccaaaaaaatatagcgttgaataataacacaaacattagctgcttaaagtcagtctgacgtcattccaaatgcattttttgccccctctctcttatctgatcactctgatcgcagattctacgccatcattgacgttcattgaacaaatcgggcgaatggaactggttcagtccattgttcaattcatggaaaaaattggcttaggaacgggcgaaaataataaaaaaagtaaaaataaatacattttaatatgaaattttaaatgaatttttttttaaagaaaaacagcgaattgagcgccgaagtgctacaaataaaaatttgaaagaacaacacagggaaatttttggcagaatggtgagacatttgggcgcaaccgtatgggtgccgaagaaatataacacacgttaccaaatccaacaaacatggaatcacccggaagcttttaattagcattattaaactctgttatatttaactgactatgaaaaattatattaaaaaaaacaatttcttaaattttgttttaatacatagaaccattttaacaacactgcctttgtccgaagtccaatcattcgacgaccttcttttgctaatgacccaccaattatatcaagcatcgatgctcgaccgatgacaattgcgagtaaagtttttgatttcattatttggatttccgggtttgtaccagccgtgatttttttttaaatgtatcattatttaaatcataacataattttgtgaatttttccattttcgaaaacccacaaaacttggcattaattatggttcgacctagtgtttcaattcggtaattaattaaagcctaaaattactaaaaaaaattaatcaaatacaaaagttcaaattaacagtgtttctaaattaaaaaatatatatatatatattatgctaattatggtgtaatgtgatcatttagaagaacaacgatgaacagaaacatcacaactcaatgaaatagcgccatcatttcatgaggcaattggtatttgttagaatattaaaaacatttttagcaatttaaattttttttttttgtgtaggtaaagaatggaaacaagcattgttcggcagaggtggcttattgacagaaattttcaattttgtcaacgataaacgcaaggaggatttggccaagaaacaagccgctccaaatttgaacggtgggcatataagaaaaaatttaaaatgtgaaaaaaaaagtgacgacaattatttctttgggggattttaattaattaaataaatttttgaggtagcaggaattaagttgctaatgaaaaataattttaaaaatttatgaaagacagcttaggtaattgaattaaattctgtaattcttcagtttatttggccataacttttcttacttgaaccacccatacattcttggtatcaacgtaaactaagagaatttttatatacaaaaaattatgtgccaaaagcaacagacaatttcttggatatacccgaaaaaaaagtggccatagaaactgaaattgtataaaatttgaaatccattagcagataaggccagcagggaattcagccaaattttggatgcattattgcgcaaggcgaaaagtggcaattttgacgaggaaccgttgccagaaataccattcattggcatttgcaaccgacttagctgtgccgacatttacaaagcattggaccaattccggaaaagtgaatttttctcaaattttcaggtaaacccgaaagtcttggcgaaatgtttggcagcaataaggcacaaaaaggtggcacaagtcgtgtcgaaattggagaaaatgtggtaaaaatatataaattacgcaaaataataattaaaaaacctaataattaattatttataaaggatggtgaaaatattggcattgatttttcatcccaaattgatggtttgtttgaaagaaaattcaaaaatttaaaataaaatgaacaaggtcaaaacaacacgtccaatgttcatccgccacaaattgctttatccattgactcgggcgcaccagattactacagttttgcggaacaaaaaattggcaatgccgaaaaagtggacaaaatacagaaaaacataagtcagattgaaaaattgctttatcttaaatttaaattcaaaatccttcgtttttaccaaaacaaaaatttttcacaaaaaaacaaagaattttttctattttagccagcaaattaaaaaaatatgttaccataaaatatatgatttcataacttctaaggttctatagaaaaatttctttgaaaaattctaggttaaaaaaaattttaagttttgataaatttttattttctcggaggaacgatctgctccggattggtattcattttatccaattgcacattttaagttgaattcacaaaaccgaaggtggaaagtgaaaaaaaagtgcagtcgtcaactcagacaaagattgacttcaacagggaattgcctgaaattgccgaggccattgacagtgtacccgagggtaaatttaaaaatattttttagacttttctaaaaaagttcaaattttagaggaagaatttccgggaggggacatgttggtttttgagaaaaatgaatggcttccttccgcgtcggctaatgacacaaaaaaggtgggataaaaaatggggggataactaacaataaatagggctcggaaaatacggatacaaaaaaatcacgaaatatggccataatgccccaaaatattgaaaaaatgtggaatggaaatatggacataaatcgcgaaatattatagaaaataatggaaaatatggatattgaaatccatcatagaagcttcaaaccaagctataaatatgtttttcaggcagcctagtcacagtccaggaaaaagttgggatttccatacaattccgaaccctaacaataaatgtggtggtgctgatttctatttaaaattccagcagtttgttctaacaccggtttttgaacgaactcatgaaaagaaaagaactcaaccatcgacgacggtaactgttcagcaacagttgaggaacacaaaaaacaaaattggacaaagtcatggcacaacaactgcaaaaagcacacagcaggttaagttgggaagatgaaagaaatttttttaactaaaaattaattcttttccttaaatacaaaattagagaccggactgtatcgataattatcggtcgatgttttcaatatgtatttatttttcggtatgttattgaaagatatcgatcgaaagaatttaaaaaagaacaatcgaattgatctaacaatgccattcatacatgtgcaaggggtgtctcaagccaagggccatacgacggacgattgggaccagggctgcacgcaattacggattgcggattacggaaattacggggttttgggagttacggattacgggttacggatttttgggatttttccgtaattttgatccgtaatttgacttttggattattttttcgagacgatttcttgtacgattatttttataaaaaacaaatttttctattttttatttaaagggctacgcgtatttcgatttatttaagaattaaaatagatttataattttttattatttgttgttaaggctatttgggtagttcgcctagaaaatagaggcatcacttttttgtcacacctatttttcacgcattttatgaaaattcataaaaccttagccaggtgaggggaggaattccccccttccccgcccgaaatgaaaaattaaaaatttttacaggaaaaattgggacttttaaatttttttttgtcgatttttctta

SEQ ID NO: 55188 - DNA, 942 bp, Heterodera glycines
atggcccgtcaatttgatcaacaccacggatcaaaatcggttgagtttttgccaaaggatcccgttctacttttgaacttcaaccgtggaaaacgattttggctaaatggaacgatcatcgaaagattggaaaagtccccgacgtatcgtgtccacgtcccggctctcggaagaaacgtccaccggcacgcaaaccaactgcgacgccgttatcctcttgaggaggacggtaatgatacgataaggatcccaccccaggctcaagaagagcaagaccgggacccatcgccgatccgcgagcctcctccgcaaccgccaccaattcgacggactcaggcaaagcgacgatctccgagtcctcctttggccccgcgtcgatcgcaacgccaacggaaagcgccgatccgcttctcgccaaacccctgagggttcagcttaaagaagggaggtgttggagtgttaaagaatttgaatttggcgcccatcgattattgattaatgttgtgacgtgtcaatccctccccttattcattttgtttatttaagcactccctccttccccacttggttccttctccattcattttgctattttacattttgtactgcatttgacctccgacataaattgtgtttattattttattgtgtgtccaaagttgagacacaacaatggtaaatcctcgacgctttcgcgaaagttgtgaaaacaccatatcctcggttgttgctttgctggtagattgtgccgagctaacggcatttgcattttcgtcgatgtcactgtcaccaatgaggtcgcatccgccacagatgacttttgatccgtatccttcaccatcgcttgagagtgagcatggtggaatggcgtgacaagacctggagcattttcgacatcggtgagcaccagacgtgggtttgttgtaaaagcaacagacctta

SEQ ID NO: 55189 - DNA, 569 bp, Heterodera glycines
atggacaacgaaaaaagccgagaaaaagctgccgttgtaattccgcacaacagccgcaacagtttcacaaaaaaagtgagtgcgcctgagggttcagcggacagcggaatcggcggcttttcgtcgggagagaatagcggaggaagtggacctaatgagggtaattatcatcgcttatggatcaaggaggattttgaagaacaattgggtaaagagacccatcggcaaatcgaaacgacggcatccgatcattggcccaaggagaggggagagactgatcagacacaaagagtagacagaatcgagactagtcagaaaggaaggggaccgacagtcgagactttccaaggagaaagggcagagactgatcagacacaaagaggaaagaaggtcgagagtgatcaagcacgaagaggacatggaatcgatactgaccatagaggaatgggacagagagtcgagactgatcaagacgagagggccgagattgatcaaggcgagaggcccgagattgatcaaggaaagagggcagaaactgatcaagacgagagggccgggactgatcagag

SEQ ID NO: 55190 - DNA, 936 bp, Heterodera glycines
atggtctttttgataatttttggacaaggatttcagattcaagcttctccgataaaaaatgtcggaatgcctaagaattgtgaaacttttttttttgcacttgttaatgatcgggacttagtctatgccattttggcttcaaattcgggtataaaaatgtggactgatttgtgaatttaaaatccttttttttgtgaccaaaacccaatttataaataattttgctatcatttttatagattatctgcgcttcttgtgcgactatcttagtctgattcagtgtgagggcggagtggtccaattggtgtccgaagaagagatggccaacaatgtgtccgccggcgttgagatgggtagcattttcgaattcgcaacatcaccaaaaatggaaaagttaaaacttattatttatcaaaatgtaaatcacaattacaatttttggaaaattaatttaagccattcatactcaaattttggttatctatacacaaattgaaagatgaaaatttctggcttttctcttgctgtttacttataattatgcgcgtcattcggcaatcaacatttccaaactaatttttttttcttatatttaaatacaaaatatttaaataatacttaaatttaatgaagtttttccactcttttttttaaattctttatatatttgttgtgttttatgttattcaaaatttgtgaagcataataaatattgatttgaaattgttttaaagattttttaaaattcttttcatttataatttaaattttgaatcaacggtaattttggaaaccaatgaaatttataaaatgtatatttaaatttttgcatcaatttataatccaaatagcctttggtaaaaacaatatttaattaataaaaatatttgagagattcttttatgaagaaaatgatgaaaaagctttgtgaataaa

SEQ ID NO: 55191 - DNA, 601 bp, Heterodera glycines
atgaaagcgacttcagcaatgttaaaattgatgttttcattcctttttataattatgatggattttacgactgaacaaaaaattttaatgggcgagtgtcaaaaaggtttgaatataaattttcaaaatttcaaatcaaacattagcattttcagacttttttgcaacggtccaccggttgcaagaaatggcaccggcattttttgctggaactcaaacacaaatgaaaaatggaaaatttttagaaaaagcatttgacacattgtgttgtattacaatcaaagctaaaaaggatgccatgaaaagggatgaattagcagaaataattggggaatttgaagcaaatcagcgcaatttttgccaacaattgaaaaagggccaaaacatttgggaagcgctggaaagttcggcgggcaatgccattgtaacagcggcgagaaatgtgaaagtgaacccccaaacatacgaagaaggatttcgaaaattgacgaaattaaaaattgtgagccctgaaaatcaaacagcaattggaacatttgtcaaacattgcattgccgcgttgaaaatattccgagaattcatcaccggtattgttaattaa

SEQ ID NO: 55192 - DNA, 321 bp, Heterodera glycines
atgaactgcaccgcgacagcaaaaactatcgggatgagagctggagttgaagtccaactaggaaagccgcacaatcatgacccttctccaacacgatgtgaagccgctaagatcaacagaagcgtccgcaacacagcattgtcatcacgtggaaatatgccacgcacagttgtgaatgaatgcctcgctggtgcgtcaaatgaagttattgcaagccttcccctaattctgtcaatggaaaaagctgttagtagagtccgtcatgcagccgggggtcaatttcaaataccaaaaacactcgcagatatcgagataccagcg

SEQ ID NO: 55193 - DNA, 330 bp, Heterodera glycines
  unsure (1)..(330): unsure at all n locations
atntacctccaaaatttgactatttctggaaaacttggcgatagtcaaagaatcaatttgttttggccacaatttacagcattgaatacatacacaaatnatataaattntaaggaaaattacgaaattctttgccatacctcgtaatgagtatagaaaatttttagatgctataacattaatatggcataaaattttgcatgcatgtgcatgaattgattaatatggattttatatacatatatttccatgaattatgttatatttgtataattattttatatttgtagcagatagtgctctcggtctctctagtcttgactgaataaa

SEQ ID NO: 55194 - DNA, 3049 bp, Heterodera glycines
atgtcttttaaacgcgtgaactccttccaacccaccgtcccattggccaagaaatgggatttccgatcaatcgggtaagtgatttttaataaattaaataaaaaaaataatttcttaaacaattataaatacaattataagataataccctttaagaattatttcaaaaaatttttttttgttcagaaataattttgctgaagaaatggaaaattataaattgatggattaccaatcgacaacttgcgaaaaatttggatttacgaaaaatattacggaatttcgtgtcaacccggatgtggagcgccccgatgaagcgatgaaggacgcaatcgacaacatgataaaggtggctttaaaaactacggaagaaaaaatgaaacgaaaagtgcggatgtttggagttgcaattacgggtgccgggcttgctttcccggtgtgggtgccgtatcgggcgtacccccagaataatgcggatgttatcatggaggagattaataagttggggcagagcggggacggggatgaaaataagaaaatgcttttattatctgagccagttactatgaaaattacttgcgtgaccatgcccagtggagaggggccgaggaatgtccacaaatttgactttggattcaaggaacaccagcggatagggtaagatttttccaattaataaaaataaaataaaaaatagaaaaaatcaaataaaaattaaaaaaaaaataaacaaagaaatttaaaataattatttctaaaaaatttaatgaagcaaaaaaaaaaattttttttttaaagaaaaaaaatgaaaaaaagcaacaaaaacccgaaaaataaattaaaaatattaaaaaataataatttaatgagccaaaaaataaataaaaattaaattttaaaaaatcaaaaaataaataattaaaaaatattaaataaataaaaaataaaatttaaaaaatcaaaaaaaaaattaaataataattaaagtaaagaaaaaaaagaaataattatttttattaagcaaagcagcaaaaaaaaaaaacagaaaaaaaaatttaaaaaataaattaaataataaagaaaaataaatggaaataataataattttattaaggattacaaatgcggataaattttgtttgttttatgctttggtggcgtcaaagctttatttggaagtgcatcgaaacatttttaatcgatttatgaaaaatattgtgagacagagggattcagctattgaacttttacataattgtggaattgatattaacgaatatagctatggtgtggagcaattgccgaatgttcagaaatattgggtgggtttaaatgaaaaaatgcaaaattaataaattttttcaggatgagatttaccccagaaagtaccgggttgttgcgtttgagaagtcagctgatccgcggaaatcgatctgtgttttgtggaaggcccctatgggacgagagaaggtcgtaccgatatttttggagaatggtcactgggatggtctgaagaattacgtctctttttttaatcgtgggagaaaattttgtattgattgtgagtgcttttttgacaaggatgtcaaacatactttcgagtgccgggcaaggtgttattattgcaataaagtgggcggagtgccgtgtcaaaaggagagtggagtgaagattgaatgcccaaagtgtcaccgttacttttacaattgggagtgttataattatcatcatggacatcagacttgcaaattatggaggcgttgcgttatctgtgacaagacatatttatttaacccgaagaaggaacatgaatgtggagagacttattgccagctttgtagtgtgagccatgaccccaagcgggggtgttatattatgccgatcgaggagaaggaggaaaaagatgtctacagaattgtagtttgggtaagttctacaaataaaatcaacaaaaagaagtctttaactccaggattcggagacttcgcaggatacaatttacaagggggaccagaaggagcatgttattaattatatttcggtgagagttacgtgtacggaatgctgtgatgacaaaaacaggacgaattgcaaaatttgtggggaggagaggatcaaggattggagcgaggcggagggacatgagccgaccaaggattttgtggagtggattttaactgcttttacgaattatgatacgtacatatttgcacataacgccggacgttttgacggtaatttcaaaatttaatttttaaatcctaaatttttaggtcattttgtttttaattacctctgccgtaccgggaagaacccgctaccgctcatcaatggattgaaaatttatgaatttaaagtgcaaaactcgaagaaacattcaaagctgatttggagagactcatgtttattgatgccggtgaagcttgagtcgctgaaggcgacatttaatttggactgtgaggacaagccctttttcccctattattacaacaagaaagaaaattatggaatacgattggaacatctgccaccgatggaggactattcgccgggatctatgaacaaggataaatttataaaattcgaaaaatggtaagaaaagaagggcaaaattaacaataaaattcttttgtttttcaggtacaacgaaaacaaggagacacctttttatttggatgaagaattgaaaaattattgccgaaacgacacggagattttattgttgtctattattgagtttaggaggatattgattaacgacattacgaaaggatttgaccccctgccgaggagttgtacgaatgcgggggttgcgatgaatatttttaaggcaatgtttttgttgacggagcagttatcgattgtgccggagaagggatatgagcggtgtgatcgcgccagtgtgatggcaataaagtatttggagtggaggagcaagcaggatggaattgagatacgacacgcggggaacggacgagaggtcaaagttggaaaatataaattggatggatttattgcgaataacggagctagggacaaatacattgag

SEQ ID NO: 55195 - DNA, 131 bp, Heterodera glycines
tatatgaccccgaaagcgcacggttgcgcacgggtgtttcccgcacaaacccatgcctatgggaggggcgcagccctttgatgttgccgcccggggacattttcccgcacaatcccaagcctataggaggg

SEQ ID NO: 55196 - DNA, 1353 bp, Heterodera glycines
  unsure (1)..(1353): unsure at all n locations
atgttggcaaaatcagtggaaatatcagtgaaaaaggcaaggactgatcagaggcacgagccaagaaggcaagaaacaattggaaggaacacagaagcgattggaagtgatcggcggaagaacggaaatggcaaacagccggagattattctgttggacgatgacgacgaaatggaggacaaacaaaaaatagtgatcaatttggacgacgatgacgacgatgaagaaatggtggatcaacaggcaaaaacgaatgatcaaacgccgagggcgacggaggacggaaatgccatggcaattgtgccgttcaattttggggacgatttgttggaagtgttaaatacggacccgacattttgggacgaagaactttttccaccaattcaacaaaatgaaaaaacccaaaaggaaacggacggcccgtcaaatgccaacattaaaaatgataacaatgataaggaagtgattgatatcgaagacgacgacgaaacagcgaatcaaactgataaaaatgataacagttataatcagttaatgataatgggaaacagtgaagcaccgattccgataaattccatgccaagtaaacaatcagaaaaaacggattcaaaaagcaaacagaaaaaagatgcaaaaacagtgccaaaaaaagatgcaaaaacagtgccaaagtctggtgaaaaccaaattggtaaaatggacgcactaaaattgatcagacaacagaatgccaatgccgcacaagcaaaacggacgagtaaaacaaattcaaatggaagggaaaatgtcaatgttttaatgccaaaagcagacgaaataaagggaatgccctcaaattcaaagtcaacgccaaaatcagcagcacaagttgagaaggcaaatcacaaccaacaacagagtgccaaaagaccacaaacagaaagagaaagctcagtgatgccaagttcaagtactggacaaaatgccaatgcagtgtcaaaagccagcgaagtgcatgccttaaaaatgtgtgttggtcattcctcaaatgccgtacagcagcagatgttaattgaagacgttgttggcacagtgtgcacggaaagtattcgcgcgtttgggcaaaatgccatcgattttggcttcatggcaaacgaagtgttcaaattgacattcaaagctaaaaatggagaaaaactcgccaatgagatcaatgccagcaaaggcaaattcagcgtaacaaaactgatcaaagatatgggagaaaaactgaaatattgtcgattattgggccgaattttggacganattttcgaggaaaatgccaaatttagtgccaaaattttggaagaattgccacggaaaggcggcaaa

SEQ ID NO: 55197 - DNA, 85 bp, Heterodera glycines
atgcacaaaatgcaccgaatcagcacaccggtgatccaaccgaacccatccttttccggctgtgaattggcagatgagccaaact

SEQ ID NO: 55198 - DNA, 1274 bp, Heterodera glycines
atgtcctggattgctggccaagccgggctaagtcgggatttttttttaaattttaaacttcgcaaacaaaaaatccagacaatcaatgtggaattcaaaaaaaataaggaaaatttttgaacctgtccaacattgaatttgtaacgtactcattccaattaaatccttcgctaattgcttggcaacaaaatgccaaaaaaacgattgataaattaattaaaatgccaaaatatttggacagttttgggtggtgttgttgtgctgctttcatttctggtggttgtggtcaccgccatttcaatgtccgccattgcgaccaatggtgaagtgaagaacgggggctgctattatttggttggacattttgaaccttggttttttaaatcattttataatttcaagatttctcgctccttgggtcccgaatttggcggtagcattggcctcatactgtacattgcgaatacggtcaatgcggtatatcatttttgattaataatggctgaaaagcagcagccgattcaattattgattgagattgattagcttccacctgatcggaactgataaagcttagttttttaaatctgatcttgatctgttagatcgatttaattactgatcgagttcatcgaagctaatggctgggaagcagccgtttaagttattgattgatattgattagctttcttctgattggattgataagagttagttgttcgcatcatttaaatctgatattgttcaatatatttaaatttgatcactgatcaagttattaatagctattctaatctggctcaatgacctttcatttgattattttgtaatcattaatcaattttcagactatgaactgtgttgagccgcccgaagccatagttcgtaatgctgcatacataccatacggatgactgatgaaacaaagatgcgaccaaggacatgatcagcaaccctcctcaataacggcagaactgctgccgttgtcattcgatgaaaagaccataaagttgattttgatggtggtgcggctgctgctgctgctactgctggtatagtttgaactactactgctactactgctgctgctgctgcccattattgaattcagagaaaagaaaagttggtaaatttgcttcataattataagatgcggaaaattacgagtatgatacttcgggattaataagcagatcggacgagataatccaccaaaattaacgaaagggcatttcaaagattttaactttgaattcgaaaatactaatatgcta

SEQ ID NO: 55199 - DNA, 342 bp, Heterodera glycines
atgtcaaacgcggaaaagcccagccaacgcgtgtacccacacccagcggtgtcacaaccaccgcaagacaatgacaaagagcagcagcaatcggagcaacaacagaaggaggagcagaaacagcaacagccaaacgaaagggaaaaatcggcggaccaaagggaaacgaaagcggcaaatgacaggaaaatgatgcaccaaccgggcctcaagttggaccagtacagaaagcaattggccgcaatgaagacgaagggcgctgcgccgacccgtgattggtccccgcaagagactttgttgttgttggaggggcttgaaatgttcaaagatgattggaatcag

SEQ ID NO: 55200 - DNA, 478 bp, Heterodera glycines
atgtcggggtcggagtttaacggagtcagcatggtagggatttggattttcaatttatatttttaaattaaattatagaaatttaagagagtgtatgtatatatgaaatactgtggcaggtgcttttcacactaatttcgcggcgctctttttcaaaaacctttgtggaaaattttggaaaattggttgcatttgttatcaaatttgtccaaaattaaaatttaggattttgagcctaagaaattttaaagaatattttgtcccgtcggtgccggtaatggcgagaaattttctaaaagtttagtggaatttacaaactgataattttatatcattttattttttagcaactactcaatccagccgccttatatttttattaaatttgcaatttcattttgcaattaaaactgactcacgaactttgaagtttgctctaggctaaagccgattttttggttttttttttgaaaataaa

SEQ ID NO: 55201 - DNA, 1957 bp, Heterodera glycines
atgtggggaacccttattcttgtcaagctcaacagattccaaaaacaaatcactgacgcgttagcgcctttcaccgttaccatgcactaccaacccaccaataactccatgaatcattaccagcgcacaaacccaatcgaacgggtctgtcgtcagcaagcggcggacgggcatttggtggtggcacgctagttaatcatagagacacatcctctgcgttgggcgcaaataacccgcgacggcctcgcaagctacctacacagaacacaaaggatgttaagatttctttctgcagttcgcacaataagatacaatataggatcaaaaaaatgcatcattaccagtttatacaatttgggattgttttcgattaaaaatttgtgctataaaatgtccgccttttgcaattttgtcatgttttttttcaggtggttaaaacgcgtctgcaaagttcgcatgggcacgaaatgcgacgtcaagtgcagctagaacgattgcaacggtggacatcatcgacaagttcgatcagttcagcaactacgaccacggcagcgtcgaacagcacagcgacaggttttttggaaaaaaaattttttctcgggggctaaatttgaaggggatcaatggcagaaaattcattttaaaaaacaaacgaaatgaaaattttgccgtttttcccaatatttatgccacaaattttgtaaaaccaaaaatttttttccagaaaatgggtttcccgcaaaaatttttttgttttttttcgtcggattaccgcctccaaaatttggcccaatttcacttaaaaatacatgtgaatgccctctttttacagcctcccgtttttcgctgtgccaagtcagtcaatgccaacaaaaaaaaacagaacaaattttactcggaaattgggactgagtgccgccgagcataaatttttccgttcgggcgcaaaaacgccgaaataaaaaaaagcaacgaaatttttagttgaaaatttactaaatacacgacaaaaaaataggtttcctcttagttagggatggcacggaattccgatttccgaaaatttgtggcctcgtggcctcggaatgccatccccgccatggacacaaaaaaatgccatggaacgcgtaaaaccgactagaaccggaaatttctgcacccactgcaaataaaaattgttttttttgttaagttacaccgatggacgtcgtgaaaattcgtctgcaaagccaagtgaggcccctcgcggagggcgaatgtttcctgttctcaaacggtttgcattttcaagaagttttggactttgataattttttagatcgtttatcataaattaataatttgaaaaaaatcgcacatttaattgggcaattttttgtctttatttaatcaatttttggttaaattttaggttggttttttcaaaaaataaataaaattttgagatccattggaccatttgtttgctggtccattttaggcttatataaaaaatttttacttaacaaagctaaaaagtagcaaattttgaaaaaaaaattggatgttcaattggacaatttgtctctgtttattccgtccaatggtcggtggtgggtttttcaggcatttttgggttccactgctattcgacatttcattatttaaggaccatttgggatttttgcggcccaaatttaatagtcggccttttgtgccaattcctggtgtaatttgtcccaaaaattggggaccagtcaaccaatttggtttcagtaccccattatctgggacagaaaaaaatttctgtcattttttggaccttacaatcagttaattttatctcgtcctgatccgtcttggaaaccatagttggttgcatcttattgaaaaaaaattttttttttcaggacgccttcgtgaaaattgttcgaattgagggacttcgttcgctctggtcaggattgtcgcccacaat

SEQ ID NO: 55202 - DNA, 3685 bp, Heterodera glycines
ggagccgggcgaggtggactggcagcgaccggcgatgggagcgatcggcgcaggcaagggcgccgggcgaggtggactggcagcggccggcgaagggagcgatggctcccttgtgttgagtgctggcagcggtcggcgaaggcaagggagcccagcgaggtggactggcagcggccggcgaaggcaagggagccgagcgaggtggactggcagcggccggctcaggcaagggagctcctgcctgcacacagtatgtcccgtgaccctcatgctgaagttaagggagtgtcgtggtgcgtggcttgtacaacacatgacacaaacttttcttcgcgaaggcatgttggtcttaaggcaagattttgcccgggtccacgcacctgtgattcaatgaattagatttcccaaatttcatgcccatccacttcaaaaagccttttaaataccgaacactacccccacgcccctcccccacccatcttatttttaccatccaccataaccatgcccctttccacgcccatcatcacccgcaaccatctcatttttaagcctattttttgcctattggctcaatttatttcctacgcgcgcgcgcgcgtgttgaaatggtactgagctcaatttattttctacgcgcgcgcgcgcgagcgtcaagggcgccgggcgaggtggactggcaacggccggcgaagggagcgatggctccctttggctgagtgctggcagcggccggctcaggcaagggagccgagcgaggtggactggcagcggccggcgaagggagcgatggctcccttgggctgagtgctggcagcggacggctcacgcaagggagccgggcggggtggactggcagcggccggcgatgggagcgatcggcgcaggcaagggagccgagcgaggtggactggcagcggccggctcaggcaagggagccgagcgaggtggactggcagcggccggcgaagggagcgatggctcccttgggctgagtgctggcagcggacggctcacgcaagggagtccatcgaggtggactggcagcggccggctcaggcaagggagccgggcgaggtggactggcagcggccggcgaagggagcgatggctccctttggctgagtgctggcagcggacggctcaggcaagggagccgggcgaattggactggcagcggccggcgatgggagcgatcggcgcaggcaagggagccgagcgaggtggactggcagcggccggcgaagggagcgatggctcccttgggctgagtgctggcagcggacggctcacgcaagggagccgggcgaggtggactggcagcggccggcgaaggcaagggagccgagcgaggtggactggcagcggccggctcaggcaagggagctcctgcctgcacacagtatgtcccgtgaccctcatgctgaagttaagggagtgtcgtggtgcgtggcttgtacaacacatgacacaaacttttcttcgcgaaggcatgttggtcttaaggcaagattttgcccgggtccacgcacctgtgattcaatgaattagatttcccaaatttcatgcccaaccacttcaaaaagccttttaaataccgaacactacccccacgcccctcccccacccatcttatttttaccatccaccataaccatgcccctttccacgcccatcatcacccgtaaccatctcatttttaagcctattttttgcctattggctcaatttatttcctacgcgcgcgcgcgcgtgttgaaatggtactgagctcaatttattttctacgcgcgcgcgcgcgagcgtcaagggcgccgggcgaggtggactggcagcggccggcgaagggagcgatggctccctttggctgagtgctggcagcggccggctcaggcaagggagccgagcgaggtggactggcagcggccggcgaagggagcgatggctcccttgggctgagtgctggcagcggacggctcacgcaagggagccgggcgaggtggactggcagcggccggcgatgggagcgatcggcgcaggcaagggagccgagcgaggtggactggcagcggccggctcaggtaagggagccgggcgaggtggactggcagcggccggcgaagggagcgatggctcccttgtgttgagtgctggcagcggtcggcgaaggcaagggagtccatcgaggtggactggcagcggccggcgaaggcaagggagccgagcgaggtggactggcagcggccggcgaagggagcgatggctcccttgggctgagtgctggcagcggacggctcacgcaagggagccgggcgaggtggactggcagcggccggcgaaggcaagggagccgagcgaggtggactggcagcggccggctcaggcaagggagctcctgcctgcacacagtatgtcccgtgaccctcatgctgaagttaagggagtgtcgtggtgcgtggcttgtacaacacatgacacaaacttttcttcgcgaaggcatgttggtcttaaggcaagattttgcccgggtccacgcacctgtgattcaatgaattagatttcccaaatttcatgcccaaccacttcaaaaagccttttaaataccgacgcgtgttgaaatggtactgagctcaatttattttctacgcgcgcgcgcgcgagcgtcaagggcgccgggcgaggtggactggcagcggccggctcaggcaagggagccgggcgaggtggactggcagcggccggcgaagggagcgatggctcccttgggctgagtgctggcagcggacggctcaggcaagggagccgggcgaattggactggcagcggccggcgatgggagcgatcggtgcaggcaagggagccgagcgaggtggactggcagcggccggcgatggcagcggtcggcgcaggcaagggagccgagcgaggtggactggcggctcccttgggctgagtgccgaggaacgctgtgaatgaactgttttggtgctgcagattgaatggcagagaacggctttcgtgcgagttgtctgtcgtttgacgtgatgcaggctactgtggtgcagcattgtcgtggcctcaattttcggatgttgatgcgcgtttgagcgtgtaagtcgcaagtgaactcagagctaggaagctgatgttccgtcctgagcacgacgttaaactgcttccagggaaacctgggttttttcaaagctgaaacttgtctgtctgtgttttccaaatctgtcaatattttgaaagatgcaaattcgtgtttgtcatgaattttcttgatgattgcacgcgaatttcctactgctgatttttttgtgaatatgatggttttcaaaaaaacaatttttcattttttagctatttaaatgttctcctttattattgttttcttttgcctcctttctgcttcccgcgtcagctccatcgacccggcgggcgtgtcgctgccttcaacttccgcggaggtggccgcggatgttgatgcgcttttgggcgagatggtcgaagcggtcgcagcggaggttgctgaaccgtccggctcggaaacgttgaatgcggtagattcagtcgatttctggagaattgttattttttcgtattaggatgacgaagtagtggtcagcggcctatgggcgagtcaagcaccgggcggcccgtgctcaacaccggcacgcgacga

SEQ ID NO: 55203 - DNA, 5960 bp, Heterodera glycines
atgcagcagctgacttttccaccacccaatgatcctggacgtttccgtcctggtgagggttatatggcaccgtggtttgtctgttttcctccgtccaggtcctcgatcctggttgccgggcaactcgtttgaggctaagagacggtcaagcgaaaaaaacagacacaaactgtaactttacgtgcgacgttttttccaagctgtaactttacgtgcgaggtccgtcctgagcacgacgttaaactgctcccagggcaacctggatatttccaagctgcaactctgtcgtccgtatttccaaactgtaactttacgtgcgaggtccgtcctgagcacgacgttaaactgctcccagggcaacctggatattttccaagctgcaactctgtcgtccgtatttccaagctgtaactttacgtgcgaggtctgtcctgagcacgacgttaaactgctcccagggcaacctgggttttttcaaagctgcaactctgtcgtccgtattttccaaactgcttacgcgcgaatttacgcattatttcaacaatcaattggtttcccatttcctttattccaagcagttttttgcctgctccatagcgcgcgcccttattatttcatgcatttattttgtcgtttaaccatttcattatttttcacaatataatatattaataatttttttcccttttagccaggtattttgcgtgtttatttgcattactaattttcccattttggacagctttcatcttacgttctttatattgttctcagcttcatttattggtaagctgtgtgtctacacgcgttttcccaactaataacatccccatttttcagacttgttcttcttattatttgttttcttctatttttcatttatttttcattgtccttcccgatttgtcccgtctgaccccaatgccttcgggctccctctctcccctttccttccccatccttccccagccccgccccctatcccgactttcgccacgacccgtatcccaaacagctctctttagagctaaccccgctcctctctctctctctctctcgccttcttcgtcttgccgtttgacggttggcaagccatcgaagaaaggtcagcagcatttcttgtgtaataataatctcaaatatttacctttttacagccaaatttgtcccggcccctgccacggcaaccggctttgtcgggcccgcacggcgccttgcccgcccacgttcgccaactccaactggcgttcgtgtcgctgcgtctccggtccgctcgtaccggccgaaggacatcctcgccccgccgaatctccccaaggacatcgacttggggattttcaaaaagccgattgccgtatgtttgtagtcaataattaaacaacattttcttaaattattctcaaatttagggccgggactggagcgaggactgtgccacttgtgcggcattcatgggcgccatgtcagaacacatcgacacgtgcgctctggcccgccttcgtcacctgattaaggagatgaagaagtttgccgctggtgccaaagacaacttggcccactcgcgtggcgtcggcatcgccctccaggtgccaaagccgtggccggtggcagaggaggatggttggacgggcgtcaccatcccgggctgtgaggaaaaatcgcccgttgctgagccggctatcgctgaactgtgagtgcaaaatacatccttttcaccaaaattctttccttaacccacatttttaggcgtaagccgaagaagcagaagcttccaaaggtggtgcctgacaagcgccagccttggctctgcaacaatgatggccggccgattccgggactggctccggtagattcgttcatttgtttttctcaaaatattgtttccttttttaggttgcgaaacagttgccggtggctccgcttcgcaagttgccaactgacatgccgcgccccaaaaacgtgtaccacacgatcgttaagggcaaggtgaactgagtgcgaattgcaatcctttatttttttgcttattattttcaggctgtcgcgtcaatcaagcttttggagctgtcgaagatcgacaagccacgcgtgccgatcggctacgcgccaattgctcgagccgagaagccagcgcttcaaaaccgtcctgttttgaacgctgtgccgaaaccggtgctccgcgaaccgagcgaggaaatgttcgtcgttgtgggacaggtgtgttctgtgttttttaaatcaattatcgttactgaatttttttcactttaaggccatcccaaaatcggcggtggagaaggccaggaaaatgcccgacgtggtgaagaaagtgccgccaaccgtccgccacagaagaactgtgtggaactcctcttcggtcagcttcgtcgtcccgtgcttttatgtgcttcaacagtacatcaaagcaacgacttccgcggttgcgtcttctgctcccgctttgaagtcgtcatcgatgagctacgctcaagctgtaatcattattctttattttttcaaatagctttttctgttttagttaacgaagccgcttccgagcaagccacgtgctgtggtcgccagtgcacccggcattccgaataagctgcgttttgaagctccacgcctcagtgaggagccgaattggcgcttattcgtcgggacgggctcgcgtcgtaacaacatcacgacaacgcccaacgcaccaaagctgccgattctgcagaagacctatgcagaagcagctcgcacgcccaaagaagctacgaaaaagcctcttagtgcgacggctcgctcctttacccttggtgatttcttcatcagcaagggtgtaaggggcgcatcgaaagctgaccgatgtgcgctgacaactgccgaagctgctcctaaacgacagcgaggcggcggccgtgaatcgagccgaagcgctactccaacggggaacgaagagcagcacgcctttctcctggactgcttccaaagaagtccaacacaaaaggaggaagcgttcaaagcactgaagaagcagttcaagaagacggtttcaccgcggacctatggccgatggtggcagaatttttgtgacgggaagcttactttgagccaacgcggaagtgagttttttatatactcgttagttatggtaaatgccctaactcaataggaacatcagaacgcagccagtccgttcgagaaagtgtgtctccagcccagtcagttcagttggaagaacaacatcaagttccgcaggaattggaagctgcaggcaacccaacttatgacagcgaactgatacgcactcaaacaagtagcgcgacaaatgaagaacagcacgccttcctactggactacttccaaagaagtccagcgcaaaaacaggaagccttccaagcgctgaagcagcggttcaaaaatgttgtttcgccacaaacctacggtcgatggtggagcaactttttgaaaggtcaactcacgttgagacagcgcggaagtgagtttattatttgtccactttcaagattaatttctgtctgcctcaataggaccatccgaacgctcttcatcagctcgtgaaagcgtgtcgccagcccagtcagttcagttggaagaacaccatccggccccgcaggaactggaagctgctggtgatccaactggggacagcgagcttattagtgctgctgtacgacagaaggaactggatgagggcttcggtaaaattgtaaccaaaattctcttacctttattcccacattatagacactccatcatcgaaacaatctcgaagctcacgagggcaatttggcaagtcaaggaaatgcgttttctgcacaatccctttgaacgatgctgatggctatgcaatgttaaattgcggacattcatgccactttgaccagccctttgccgaatggtatttcaattattacatttattaaacaaaacgattcataggtataccgatgtgccgaataagaaatgcaaagttgcacggtgcaaaaaggcaacagttcttaaatgcaatgaatgttgtcaacgcattggtatgggcatttacgaaaccggctgttattgcgcggaaacctccgcttcagtttatcacgcggatgaattggaagcgaggtgctctttcataatgcaaatttgttattttagttttattataggctcaaagcaagcggtggcaaatgcccagattgcggcacgcaacaccccggcttttgcatgttgtgtcagcggctgttcaagctgcaggcaaatgggcttcgtcagagcaaggtgttcctgccttgctgtgactcttacactcacttcgaatgctggtagtgtttaatcattttggatttttaccccatttccttttggcaaattaggtattcgcccgcaccgaagcagagctgcccagcaaagtgcacaaagccgtggcaagtcgttcaggacatgcattaccagtaagcgactcatacattttctttcactagtatttgcatttgtattttagccaaatttgtggtgtccaaaatgctgctccgttgcctgcagtaccgaagccaagaggcatcgttggtggacgcccgctgaagaatgccaaggctgcgtcgccaacagagtccattccatcgactgttgacacgacgacggccgcggcttcggatgtttccgccaatgaatcccaagcgctgacggactcgcatcttatgccaccaccatcgttggctcctcgccgcagcacacggatcagccgacaagcgtccatcgcaagcaatcggcccagtgctgtggcgccaaagcccattgctccagtgacgcactgttgcggaaccattcagtctgctcactttggatatggctgcggttccaaaaaggcgaaccatctgccttcatactacaactcgcttcgggatcaagtgggtttaaagtatttgaatccagtagattagttcattctatgtaggcacaacacaattgccctcactgcaatgcgttgctgttggcttccgaagcagttggaccaaccgcctattcaaagtgctgcgcaaaaggacgtgtcaacttggcggaccgctacaaagcgcttcgtgctcggccagccgaattggacaacatcctccaaaacccggcggggcagtacaaaggctggagggactcgctctttcgccacgtgctgagatacaacaacaacttggcattcgggaacatcaacatcacccgcagcgaagagcgaatcgacttgcatcgaatcgtgaagtgcaacaacatgataaactacatgttgtgggatttcaacccacccgatggcggcaaaccccatctgcacggacaacttttcacgatccctccagccgatgcgcgtactcgcctgggcgaaatctctcgggaacattcgctggacgtaagattgacttatgtttccaatttcggttttattttttattttacttcaggaacagttgatggcggccctttacggcgttcttctcgcaaaccacaagcttgctgtggtctacgagacggcagcggagacgtaccgtcagctgccggaagaagaccgaatgcagttccgaatgctattggtggacaccaacaagcggggcacagagcgaagattggatgccaaagatgcgccggcaccggacaatttgcatgttgatgaccgggccaacctcaggcacatccatcctggacggcttgagaccgaaacggatgctggaagtcgccttgtggctcaagtaagcttcggcgtttggtttcatgtcatataaacagtgttcaattttttccagatttttctggactgcggagcgaatgtgatgccaccgagcgtgtacgacgtggtgctcacgggccgtgctaccaccaagatcgtgcacatgaaatggtggaacaggaacattgatcctgccaatttcccgctgatcttttccttcggccaatttggctacggtagagtgtttttgtga

SEQ ID NO: 55204 - DNA, 705 bp, Heterodera glycines
gaattcgtcaaagaaaatggcatcaaccacctcttctcagcgccgtacaatccgatgtcaaatggacaagcggagcgctttgtcgacacctttaaaagggcatgtcgcaaactgaagaaggagggcgcgaaaaatgtggtgaacacatttttgacatcatatcggacgacaccgaatgactctttgcccaacggcaaaagccctgccgaacttttcattctgcgaaagccttgcacaacattggatttgctgagagcaaaaccatcgccaccactgatcagagacgaggcgatggaaaagcagttcaatcgtcgttacggtgcaaaacctcgaaagtcttgtcttggcgataaagtttttgctcgtcatcgccaatcgcaatcatggcgcgctggaatcgtcagccaatgtcagggagtcatttacgaggtaaagttcccgaatggcacttccaaccgattctacgcaaaccaaatgacggcccgtcacatggatcaccaaggcaatgatgagttgaacattttcaacgatgcttttggtcttccgttggcacagctggatggtcccaacgaagcagctctgccagctgttcaacaagcggcacctgcacaagagacagacgaagcaattaccgaacgaagtccagtctgtgtcggtcgccctcaccgcaatcgacgcccacctctacgctacactccgagctga

SEQ ID NO: 55205 - DNA, 867 bp, Heterodera glycines
atgcgatttcttcgacagccgttggacgaactgctgaaacaggacgtggcttgggtctggtcatcggaatgccaaaatgccttcgacaaaatcatcgaagtgctgaaatctgaccaactcttgacccactacgacccggaaaaggacatcattgtatctgccgatgcctctgattatggaatcggagcagtgatctcccatcgttttcaggatggcagcttgaaagcaattgcacatgcttcttgctctttgtcgcctgccgaaatgaactactcccaaatcgaaaaagagggattagctcttgtttttgcagttcagaagttccataaatatctttttggaagacatttcgtcctgccaaccgaccataagccattgttgaccatttttggtaacaagggcattaaagcgtatacagcaaatcgcttacagcgctgggcactcatactcttggcgtatgactttgagatcgaataccaaaacacgtcagattttggtcaagccgatgctctttcgcgcttaattgcaaaagcgccagtgcccgaagatgaatttattgtggtaacaattacagaaagtgcaaatttggcaactgtgaatgcctttacggcacaatttccaattgtccacgaggacattgtcaatgccacaaaatcccataatttgcttcaggaaattaacggattcatcctgaaccaatggccaaacaaagcgaatatatgtcagaggacattttacaattccatcgaaggcgagaagcgctgtcattcgaaaacggatgcatcatgtacgccgaccggattgtcgtcccagcatcgcttgagacggaagtgcttaaaatgctacatcgtggacacccgggcatga

SEQ ID NO: 55206 - DNA, 1707 bp, Heterodera glycines
atgaacgctttgcaactgggtggaatttcagtgaacgcactgaaccaaccgagccgtcttgtcgaggcaccagttgatgtgaatggcaaacccattgattttgtgtttgatccgggagctgaaatcaccgtgatcgacgaagaagcacatcttcaaattgaacgtccccgattgattcaatgcagtgaaagtgccaaataccatgatgtaactgaatgcaccctgctagggaagggttttgcgactttcacgttcggaggacgcacacaccaaggacaattttatgtgaccaaaaagggttcactgaatttattgggaattgacattttggacgcttttggcttattggacacattcagagccaaagctaaaatggcaatgaaagtgaatgtggttcaagcggaaaggaaggaccgaatgaagagtaaatcccgtcgaagaaggacaccactttgcttgaccttcagtcaaattttcgcacgtttttgcagaaggcctgggccactgcacgaaagccaaagcccatttggaactgaaggcggatgctgttgccgtgtactgcaggccacgtccagtgccattcaacacacgtttgattgttgaggccgaattggaccgattgctggcgcagaaagtgatcaacccaatcgatcacacccgttgggccgcacctattgtggttgttaagaaggctaacgaagcagcatgcgtttgtgcagatttctctatgggcttgaacaacgcattgcttttaaatcagcatccattgccgttgcccgaagacatcttcacgaaattgaatggaggaaagattttttctcagatcgacctgaaggatgcgtatctacaggttgaattggacgagaagtccaaagaactgtgtacaatcgccacgcaccgaggatttccaattttttcgcttaccatttggggtaaaatcagcgccaggaattttccaatcgatcatggattcaattttggccgattgtccattcgcgtttgcttaccttgacgacatgatcgtggtcagtcgttcacatgaggagcatcgaaaacacgaacgaagttttcaagcgaatcggaaattttggattcctgatcaaacccgacaagtgctcattcaatcagaagcagatcaaatacctcgggttcgtcatcgataaaaacggaaggcgaccggatccatcgaagattaaggcgatttctgaaatgctcgtccctaccaatgtttcggagcttcgatcatttttgggaatgatcaatcattaccagcagtttgtgaagaatatgcaatttcttcgacaaccattggacgagctactgaaacaggacgtggcatgggtctggtcaacggactgtcaaaatgccttcaacaaagtgatcgaagtgctgaagtcggaccaactcttgacccattatgacccggaaaaggacatcattgtttctgccgatgcctctgattacggaatcggagcagtgatttcccatcgttttccggatggcagcttaaaagctattgcccatgcatcgtgctcattgtcgcctgccgaaatgaactactccaaaatcgaaaaagagggactagctattgtctttgcagttcaaaagttccacaaatatctttttggaagacaattcgtactgcagaccgataacaagcctttgatgaccatttttgtaacaaaaagggcatcaaagcgtggatag

SEQ ID NO: 55207 - DNA, 645 bp, Heterodera glycines
atggcagcaaatccgacaattgacgaattgacgaaattgctggccaaacagcaaaagttagtcgaacaattgctgaacgctcaacagacaaatgtcgcgccaactcaaacagcccaacttccagcgctttcaaatatggaatgttttgatcttgatgatcattctgggaagaacatcgaaagttggatcgaccgctttgtgttggccctcgactgttcttcgccaaacatccaagaccaactgaaagtgaagctggtgctgacaaaattgagcgagggagcctacaacgaatacagcaaattttgtctgccgaagaaaccgaccgatttagactttttggagacatcggcacaacttaaatgtttgtttgccaagccccaatcggtttggatagaccgatacgaatgtgacgatgaagacttccgtgctttcgtcaaccgccacaagcgactgcttcgcgattttgaatttaagaagctgaatgaagagcagttcaactgcctcatgcttctgatcgcactgaaatcgccgagagacgccgaactgaggaaacgaatttttggaaagttgacaacggacggcgacaaagcaaatgtacgacaatgtcgtcagcgatttgcagatgttcctgtcgacaattgctga

SEQ ID NO: 55208 - DNA, 1600 bp, Heterodera glycines
atgtcgtattcgtattcagcgaccccgaaaagcctaaaacagatccgttttccggctttttatgagctttttagacttttggacaattcgtgggtttttactcttttggacaattcgtggcttggacaattcgtggcttggacaaaacgtggcttggacaattcgtggcttggacaattcgtggcttggacactttgtgggggcgccgcagaaatagaaaggaaataaataaaataagcggaacaattgagtacctttcccaataaatagttagtaaatcaaaataaaattttataaaattttcaaaacgataaaaagctattcttcagaactttaaaaaagagacagtaacaagagtgatttgattaaataaaaaaataataatattcaaaaacatattattattacttaagtagtgtgataatcaaatttaaaactgaataaacatttttatttataccaacaaaataaaaattaataaaacataactttaaataaatgtctatttacaaaatgataaatattaaatatgtaaaaaaaaattcggaattcaaagttatttcgaatattattgaaagaatatataaatatatttgttgttttaaaaaaataaacaaaaatttaatttatttttatattaaaaataaaaaaatttgaaataaaattatatgcaattaaacgggtttggttcttcggggtcaaaaattgttttcctccataatctatgtagcgctatttaagtcaaattttaaaaatatattcgttgtcgctgtcctcacaaaggatccaaagacaaaggcttggctttattattatatgcaatgaattcaaatggcttgtatttgtcaccggaataaatttgaacgatatttaaaattatgggtgtaatttgttaacagcttttcaccgaaaaaggaggatttttcgattttgagataattgtgttttttacttttcacaacgcttcttccgggcgcatttttccgagactttttcggaatggcggagaaaatgttaatgtgtttttccaaaattggtcattttaacgctttttgggttctctttttgaataaaaattttaaaaaatagaaagagagatcccggcgatgcctatcgacaccgccgggaaaaaaattgggaatttttgtgcaatttagtaccagattttgcaccaataatgcaataagttaataaaaacttggtataaaaggtcaaaaattaaaatttttgaattattttttcaaatgctcattttcaaggacttcttgaattcaaggatactttgaaaattttcacgcgagaagggcccaatttcatgtacgtccttgacattcaaggacggatggcagccctgctcatgtgttatttgaatcaaattttacccttaatcctgtaataataattatttttttaatatagttttaattaaattatatataaacattaaaaatactattgaagactcgggactcgaatttatgaaaacccattccgatccaaaaaccgcattattctattttaatttatacggactcttggactcagattatcaagatatttaggttggtgaaaatgaattcagatgtttttatatttatga

SEQ ID NO: 55209 - DNA, 225 bp, Heterodera glycines; identical to SEQ ID NO: 50965

SEQ ID NO: 55210 - DNA, 1400 bp, Heterodera glycines
atgaagaggtacaaatgtgatttaaagaggtacaaaagtgatttaaagaggtacaaaagtgataaaagaggtacaaaagtgattagaagaggtacaaaagtgattagaagaggtacaacagagattagaagaggtacaaatttgatgaagaggtacaaatgtgatttaaagaggtacaacagtgataaaagaagtataaaagtgattagaagaggtaaaaaagtgattagaagaggtacaatggtgattagaagaggtacaaaagtgattagaagaggtacaatggtgattagaagaggtacaaaagtgattataagaggtacaccagtgattagaagaggtacaatggtgattagaagaggtacaaaagtgattataagaggtacaacagtgattagaagaggtacaatggtgattagaagaggtacaaaagtgattataagaggtacaacagtgattagaagaggtacaatggtgattagaagaggtacaaaagtgattataagaggtacagcagtgattagaagaggtgcaactgtgattagaagtggtacaacagtgattagaagaggtaaacagtgatcagaagaggtagaacagtgatgagaagaggtacaactgtgattagaagtggtacaacattgttaggagaggtacaatattgtttaaaattaaataaataaggaaacgtttttattaaaagttaaaaatcgagtgcattttaatttaaaaattttttaataataaaatactcttttattaattaaaaacaaccttggaaattattaattgaatatttatttaatttgaaattaaatgaatttttttttacaaattcaaaaataaataatgaaattctttaatttaaaaaaaataaatttaaataatttaaaagaaatcttcaaaaattaattaaaaacattgtaaaataagccaaaaatacaaagaaaaataatgttacaccgtccggattcgaacctgcggccccccccccctcagaacatgtcccagaatccccaatcacacagggattctgagggcttaacgatgtcaaacgtaaaatctgatcacgtattcgtgatcagcggcccaaataacccctaaagacatgtttttggaagatttttgtcgaaaaaattttttcactcaaaaaccatgtgcacccccctttggtcccgaatcccaaaatcacttttatttttgtatcttttattaaaaatgtgatagaaatgccaaataaaatttatataatagagcaaaaaattgcggatttttgtagtattttacttttctcaaatagcttttcagaaggcagtaacgaatttttttctgaaaaatctaaaatttccagaatttctggaataacttttttcatattgatgttagaaaacctaaataaa

SEQ ID NO: 55211 - DNA, 688 bp, Heterodera glycines
ttgtacctcttctcatcactgttctacctcttctgatcactgtttacctcttctaatcactgttgtaccacttctaatcacagttgcacctcttctaatcactgctgtacctcttataatcacttttgtacctcttctaatcaccattgtacctcttctaatcactgttgtacctcttataatcacttttgtacctcttctaatcaccattgtacctcttctaatcactgttgtacctcttataatcacttttgtacctcttctaatcaccattgtacctcttctaatcactggtgtacctcttataatcacttttgtacctcttctaatcaccattgtacctcttctaatcacttttgtacctcttctaatcaccattgtacctcttctaatcacttttttacctcttctaatcacttttatacttcttttatcactgttgtacctctttaaatcacatttgtacctcttcatcaaatttgtacctcttctaatctctgttgtacctcttctaatcacttttgtacctcttctaatcacttttgtacctcttttatcacttttgtacctctttaaatcacttttgtacctctttaaatcacatttgtacctcttcatcaaatgtgtacctcttctaatcacttttgcaatcccaaattgcttcggatcgaaactccacaacccataa

SEQ ID NO: 55212 - DNA, 630 bp, Heterodera glycines
ccatacatattttattcaatttcatgacgactcagaacagtgacgaagaaattggtgcggaggctttgcaaaacggacagaacaatggtggaggaggggaagaagcaggagcaacagcagttaatgatggagaaacaattgctggagaagttgaaggcaacaaagtgaaggaattgaaggcgaaggaaggggaggaggaaaaggcagttgacaatggggatgagtcggttgaggacgaccgcgcattcggcacaaaaacgccgccggcgtcgcaactgcgccaaacgccgcctctctcggccagcattcgggctccgaccgtgcgcaagcgttgctccgcagtctttggtgcaaggacgaggtaaatttaaattgttgtcttggagtttttcaatggaccctaaaaaattaaagatttcatcgatttttttcaaatcgactgcaattttgtccaaaatttttgctacaaaaacagattttcttaattatgtttagccacacttccactagtggcggcggtggtggtgggctgtccgcgttgaccagtgcgatgttgggcaagaagccacgcaagcagtccgtgctggacaacgcccagtccggctggcgctcatttgtgcaggaggaaca

SEQ ID NO: 55213 - DNA, 1458 bp, Heterodera glycines
  unsure (1)..(1458): unsure at all n locations
atgttgnagacacatcacaactgggaatacgcatacggacaatcgacaaatctcaaatacgctcttaagtacccgttcaagggagcaagtttttcctatttgcgttgtgcaaatgaaaacaaaacgaatgtcgacgaaccggcttactatgccagaatgctttatcgttcacctgttgaggcctttagtcgcatcatgtcattccgctacgcaataatgtcacataatgtaatccctttatcaatccatttgccaggtcaacagaaaatttatacacgtcctggacttgaggcccaacaaattgcagaaatgttacaaaatggacaacttcaacttcctgatacagccctcacagcatattggaagcattggcgagcagatccaacattgaaaaatatcttatttgagaatatgcctgagaaattttcgtttaacaaaaaaaacaaaatctggaaaccacgcatcatttctaaggatccgaaaaggatggcaaaccgcagaccatgcattggacgaatttatcctatcttgcctcgggcccaagaactttttgccctttatctgttgacaaggcattttcccggtgaccctgatcatttgaagaaagtgggagaacatcaatgcgaaacgtttttggaatcagctcgacttcggggacttatcaaagactcggatgtttggatccgaacattgcaggaaggagccaactctttgactccagctcagatgcgacaactccttgcaagcatactcatttttggaaacacggaaaactgtgttcttgatggatcaatgctatggaatcgctttcttacgcacatgtacgactcaagatgcagtgagacagagaaagcgcggcgaatcgatcaagcactttcattgcttgagcgattgttggttcgccttggaaaacaatgctccgattttggactcccaacgccgttaaattcgattgtcaacgacccagatcgaggcgtaaacgacttcttctttcctgaaaatattgctgacgatgaacaagacgaatcagtggacacaagtgcatttgaacacgccaaacttaatgatgaacaacaacacttcttcaaccgaatacgcgatgtcgccgcaacaatgccgagtaattcaagcaagcgcttattctttttatctggtgatggtggaaccggcaagacattcctgcttaactatgtgctgtaccacatgcgaagattgcgtaagaaagtcattgcaactgcctcaacaggaatggcttcgactcgcttctattcaggcggcacaacagtccattcagcgtttcgattcggcataaatgttgaagttggccaacttcctacaataccttttgacagctattttggacggcgcattaccgaggcagacattatcattattgacgaaattacaatgcttgaaaaggttgttctggaaaatattgataaactctgccgaacatga

SEQ ID NO: 55214 - DNA, 403 bp, Heterodera glycines
atgccgacacttcaagctgagcaacatccgccaccactgtcgccacaaacaaacaatgtacagcagcaacaaccaactgtaccgagtccgctgaacgagcgccaacagagtgtacaaccaacgcagggtgaacatccacaaatccgggcaaacgccatcttgcaaccaaacgtggttcaagcgcagcagcagcagcagcaaagtcatcagtttttggcacttgaccacgacaatgacgatcagcttttgaaccaaatttttttggtagtaaaaatgtaaaaaaaaatagacatatcaattacaggatctcaccactacagctgaaatggaacctatcgctttggacaacagcaacaacaacaatatggttgttaacgatttttggttttgcctatttgtttaa

SEQ ID NO: 55215 - DNA, 6791 bp, Heterodera glycines
atgggaattgccgtgtatcaaaaggcaacaactaattacgcaaaagcggaatgcaacctaatctttgccaaaagcctcgtcaagccgctcaaattggtcaaccatgacgcaacaattccgaaattggaacttcaagcactgacacttggcgtcaaagcggttaaattcatccaaactcaacttcaatttgacgacgaccaagtcatcttttggaccgacagtcaaagctcaattgagaggcttaaatccggcagaaaagcagatcgattcgtgactaaaatcacgcccgttcaattcaacaggcattgactattttggacctctcaaagtcaaaagaggtactgaaattgtgaagatctacgtcgctctcttcacgtgcctcgtcattcgcgcagttcacttggaaatagcagaagattactctgctgaagccttcgtacgcacatttcgccgattcgtctcaagaagaggactaccgatgcttatcatgactgatcaaggaacgaatttcgtggccggatcgaaagtcatccagcaacattggacggacacgctactccctgaacatgttcaacaacaaatggcacaacaaggcgtaacttggagattcaacacagcacacgcaccatggaaaggcggaacgtgggaacgactcgttggcatcacgaaaaatgctctccgacgaacaattgggaaaaacctcttgccattggacgaaatgcacacattgatttgtgaaatcgaaaccatcgtcaatcaccggccgctcacattcgaatctgaccaagagccttacgtttcacttcgaccgatcaacttcctcataccgtacaaccaaacggagaccaactttcccgtcatcaacgaggatcaccaagatccggactacgagccaacatccaacagtcgtaaccatctcgtcaccatgctgcgcaaaacaagcaacatgctcgatcgattttggacaacgtggagaaacgactacttgctttcgttgcgcgaaagcgaccgaaccaaatcagcgaccggacccctttaccctaaggaaggggacattgtcattgttggggacgatgacttacctcgttccctgtggtgtttggcacgagtgctaaaaatccttcgggggcaggatggaaagatccgtactgcaatcattgagataaacgggcaacaaaaagcacgagcaataaatccactttattcactcgagattccagaaatcaccgagtccgactccgaactgatcgctccgctcatggcatctgaggacgttctctcattagtcggaagcgacgaagagcctcaaatgcccgacaacttcaagataccgaaaaagaagaatgtgatcaaacgctcgcaacgcttcatcaccggacgaaaccacggcttacgagaagtgacacagagcgcaaaagacaacgaccccgtggaaggactactgtacgccaaaagacccgacaacaaactcaagctgttcaaggatggaacgctcaaagtactgctcgaatcaatcacgctcttcaaacgagaagacggcaagaagatggcagatggactgcttgaactctacggaaaaatcccaatgccagaatgggacaaacgactgagagaatgcgaagagaaactacgaaaaatggacgaaacgcgagagaaaaaagacaaagaaagacagaaacaacgaaccgaaaagcgacgaattgaggaggaaaaacaaatggaaacgaagaaaaggaaggcagcaaaagaagagcttatcgacagaagcgaccccgcagttgaaaggaaaaagcacgatgagcatcgaatccgatgggcagcacaacgaaaagcagcagtggatgaacttcgccaacggataaagctacgcaaaaagcaatggtcagtagtagacatcgaaaaagaaatgaaggaaactgaaaaggacgacgaagaacatctgcgagaattggcaaaaagtggaagtaaagaggcagctcgggcaatggaagccaaaccatcactacggcaacaaaacaacgtgcaattgattaagaagcaacaaagaatgtccgacttctatccgacagatggagaaaaagtcctggcctactgcgagaggagatatggcacaaatctcatggcatcatggagacgcaatagagtacaaactgagctaaaagaacttttggagaatgagcgcatcactctacagcacgtcaacggacaacccgcacttttgcatcggatcactgagcacaaaaaaggactttgtggagaatttgtcatcggaaaaatttgttcatggcaatacttggacgaaatcgaattcaaagtcgccgcggatccagaagaagaacaactcgctatgaaagaaaaatcgccaacgccagaagtggtggtcatcgacgaagacgaccctgaacgagaagcatcgatcgaaccgcaattcatcaccgagcgtgccggacacacaccgcctttactgtttcgtcatccgtcacccgagcctcaacaattcatgaagcaccgcgcagctcacactcctccacctccgcctgtacaacttcaacctgcgcaactaccaaccgaagcaccaatcgaagcagacatcgtcgaagaatatcatgcagccaaaagcaaagaagagaaatacgtcgacttcaacatctttaccgaatgtgacgacacgcacatctcctgcgcaagaaatgccacctacggacgaattgccgaagctgccaaccgcgaaaaaatcgaagaattcgcaaattgccgcgctagaaccttgttcgataccatcatgctaaattggctgaactgcaacctcaaccggcccggcaacgaaatctggactatccacgaacaacacacgcagtccttcgactcatcagaagaatccgccaaattcttctacgagcaacaaattgtcaagagtcaacgcgacatcggccgagataagcaccttaaagaagccatcgaaatatggcgatcatcgtgcgacaacttccgagaaatcacagatcagtcagcgtggacgcaacttaaattcaagccaatcaaatcggcagatcagcagacaacggaattcgacaaatggattgaaaggattaatcaacgatcgtgcgaaatcacagcacgcgaccgtgccaagaaacaatttccggatcacatttacttcaatgtcagaacgattctgatcggcgacaatacagccgaagcatttcaacaccattttccaaactctcgctggtacacccactttccggatcaacgacttcgacttaccactggaccgcaagtcaaaaatgtgatcttcacctacgaggccacagaagaagatatgatcaaacaactcgcgccattacttcatcgtttcaaagacgacgacattgaagtgaccctcattctcagcaaagaagacaacgctgaatggttatggcacaaacgagagctgattagactgacaaaacatctcgacacaggatttttcgtgttcaataagcgaattggagaagcaaaagaattggcgaatcgcatcaaaatgactatggatgagcccatgcaactcaatgatgaaccaacaacttcgccggccatcgaaacacgcggcagaaaaccgacacgcaaaagaatcaccgtcggacaacgaatgatcaatgcgctaatgttcatcagcctgttcattctcctcgcaagcagcacagcatttgcgaatccaatccgccaaaagagatttggtggagttggagtttggcatggaagtaacctagccaagcatctctggccacgcaacaccgacatcgaacaacgcacttcaaaattggcaccatccgtccaacgttacattcaacgagtactcgcactcaacgcaaccgcaactccgccagcaaaacaattcgccacaactacggcgccgccaacaacgagaaaaccaaacacaaccacaacacgcgcaacaccaactacgaaagcaacaccacgcacaactatcacgggcagaacttggcacacaacggtacaaccaacgacgcaaatagtaccaaaaacgacaacgcaacgtccaatcaccactcgctcgaaatttttgccctcatcgaacttgctagacaacgaaattccgcaggcaccggactactacctcgcacttcgaaaaaagggcaaaaagacaaacaatgtccaaagcgcgccgcaacttgctagatctgcacaacgaaaaggtgatccgatcaacaaaaatggaatggatgtcttctggtgcggcgacagaggaagcaccctttgggaactcaaagggtcggaaaattcgccgttttgccgcccgccacctgttttgaccgcgcattggactccgcttaccatcgacctgtacaccaaaattcatcggcctgatcaagttcactcagcatggcactgcgcagtcaaaagaacgacggagcagtactacacaaatctgctcggcgaccgcttcatcaccatcaacaaaaccatgatggcagtttcaaggacattgtgcaaacaaatggcactccatcaaatttgcccgttggcaaaaacggaaatgacgatttctggcaataacacgtggtcaacaaacgatgagttggaagtgaacttccctggaccgatcgagggattgttcaaaggactgcaacgaagcacgtcaacaaattgctttgcgcaaccggcaacactgttcatcagacgacacaacctgcaactcacgtcaccaatccatcacgtggaccattgcgcatacactacagaattttgccaactctcagacaacagttcgctgatttggaatgccaattgttctgataacaattgccatgcctgcgacttcaatcacgcagaagaaatttctggagaattcacgaaaatcccgggtcaaacttcagcaatttggatttcggatgatcgacaaaaggccttgacattcaccgacacacaaccattggaggcctgcgacggcaaactcatcgtcctatccgaacaaaatttcggcattcgaaaggaacagtacgaacgcatcatgaacggctactacaaacgagcaaaacgttacgtcgaaccggaacaactcgcctctcaactgtcagccgctcaaatctcaaccaacatggcactttcacaactctacctcaaagagtgccaacgcaacttccgagtcgcaaacccgacattgcaagcgcgcaaattgctcaaccgagagaatctccaagcacgatggatcggagagacaacaatcgaagtcttcccgtgcattaacgtcagcctgaccaacatcagctaccgtgcaacaaaagactgttacaaattcatcccggtcagaattcacctcccaaacgctgatagggatgcatttctcgacgccgaaatgcgcatcctttcattcacctcacatatcgctagctgctcacatctccgctatcattatctgcaactgcagaaaaatcccaacgcatggctgaagatcgacaccaacaccggaattgcaaagcaacttccaccaacagctgtccaagagctttacgaaacggtcatcaatcgatcagacagcgatttcgacttaaatccgctgatcttccatcaatggcaactcgacaacgacacggacaacgcaatgttcccacacatcgacgaatttgccgacttagaagtttttaaggacaagctggagcagcacaaaagcggacgagcccaagctctcggcgcacttcaagatggaattgaagggtggacactgaaattggtcaaggattggctcaacgagctggttaactggtggatccgtatcgcctgcgcctacgcaactttcttgatgatccgcgacctcatcattccatgcgcactagcctatctgctcaatcccatccgcatcactttcatgagcctaatcggattccgacccaaaagacaaccgattcggcagcgccgtgatcaattcgaagaaatcgtcccgctccatcgactttcaactcccccaaagcgcccttcacttcgtcaacgcgcagatcgcccattcacgcctatccatctggatttggatgccaaaagcgcgacgttccgctcaagggcatcaagcgtcacattggacacgccattcggacgatcacgaccgatgaaactggccgacgactaagaaggaaggaagaagggcccatcgttttacgcgcggaatgttcgaactggaggaatttttttctagaaaattctccaattctccgccaatcaaaaattagattggccattgacgtaattcatgtgacccccgccccgctcatttcttatctattttagtaattataatttgtggccccatttacgatttcaccccttttttctccgaagttttgcagaatttgtttgttcactcgtcccacctgtcactcatttacgcatttctccttccatttcacatgcaattcattgtcggcccactcacttttgcccatatttaagaccgatcaaaatcccctatcggcacattcattcgcaacacaacttggggaggaaaaccccacattcccccaaattcctcccccaatcgatcatttatgtaaaaattgtatttttcattttgtatttaaaatttttggtttaattacccaagtttgagtttgaggtccgtccgataaaacatttttattgttgctgtgcacattcataatttggggttaattgacctgcgccatcgccacacatcaccgtcctaacccaactgcacccgaaactaccgtgttttgggtatttgtcgaccgccaactcaggcgtactctgacatcttggcacatcgttacctaaataaa

SEQ ID NO: 55216 - DNA, 268 bp, Heterodera glycines
atgtttctgctccaaaacagcgtcaacaaaatgctattttctgctgaaaagctccaaattcgcactgattttcctcgtggtttcgagaaacagtacgccattcttggccaaataatgagggtattaattaattaattcaaaaactaaaatttttccggttttcatttatttttagaatgctctccacgtcgattccgaaaagagaacttttgacggaaatggacaattgctgaaattggctgccaacttaatctcccattaattaaca

SEQ ID NO: 55217 - DNA, 1249 bp, Heterodera glycines
atgggcgttgaccagggcggctaccttaccaccgaaagcacccaatacaagttggtcaccacggtgattgaagctgcgatcagcttaggcatgtacgtgattgttgattggcatgttagcgcgacgtacacaacacaagcggtaagataaattggaaaattaatattaaaatttaaaatataataataataataataataaaattttattaatatatttttgaggttgctttctttacaaaaatcgccaaagcatatggcagttacccgcacatcctttacgagacgtacaacgagcctttggcattgtcgtggacaagtgatcttgtcccataccacaaaaaagtaaaaaatagtaatattttgtgcaaattagctaattaattgatgcttatgtgttgcaggtaattgctgcaattcgtaaatatgacacaaagaatgtgatcattctgggcacacccaactggtcacaagtaaaaataaacaataattgcatacaatttattgtaaaacgaacatttgaaaggacgtggacgttgccgctgccaatccaattagtggctactcgaatttaatgtgaatagaattgtaaatgctacgatgtgatatattttgggatttcattagttaatcttttttgacacattccacaaaggtacactttccacttttacgccggcactcacacagtttctggcctcggggcaaaactcaagactgcctacacaaaaagtggtttttggggtcataattggtttaaaaatgaatatttgcactaattgtcaggtctgcccatttttgtgactgagtacggcgcgtgcgaatcgtccggcgacggcacaattgcgaccagctccatgagcgcatggtggtccttcttggacggctacaaaatctcctattgtaactggtccgtctgtaacaagggcgagtcgtgttcggcattgaccaccagcgcatcggcgagcaatgtgaggaaaaatgaattgtgaatttcaaaaaacggtaaccaatggccgagactgtctgtgttggcaaattgcattcctcgaaatggaaaatgctaaatttttgtaaattttgtttaggtcggttcgtcttcctactggacaacttcaggaaaactgatccaagcttactacaagaagcaaagcaacggcaatttttttttttgctaatttggctaattaagacagaatttaattgcaggtgtcagctgctcaggttaattgctgcactaaagaaataaa

SEQ ID NO: 55218 - DNA, 292 bp, Heterodera glycines
  unsure (1)..(292): unsure at all n locations
agaacaacttcgaaancagtgccaaatgtacgttgaagtgacctctgcacagacgatgctgagtttttccggaacaacgatgaacaattggaagacgattttgttggggactttgggcgaagtcggtttttggcaggaaaaggattaattgtttttttttgtagtcaacacgaacaattatcagcagccatttcgacggcgcagaagagaggcgacttcggcaattcgcaacaaatacaaataaagaacagaagattaattggataattatttaaatcaactttttgtgttt

SEQ ID NO: 55219 - DNA, 682 bp, Heterodera glycines
atggccgatgatgatttagaagataaatatgtggcattaaaggcaaaggtccaagacttagaggatcgcttggccaatcgggtcccgaattatcttccccctggagttaaaatcccgaaatatgatgcgagcggtgattttttcaagtttttaaaggaatttaatgtgcttgcgacagcgagcaactggcatccgccggattgtgtccgctttttacctctgtttttggaaggggaagctaaggaaatttaccagaatatttcggcagataagaaaacaaattggaggacccttaccagtgaaatagcggaactgaccaagaaacttgatggaccaatgtgggcgagaaaaatgctgaataagacgaaaatgggaataaatggatcagtaactgagtttgcgaataaaattcgtgagttagttgagcaggcaagcccggacccgaactatacagttgaggcaagagaaagtgagagcgtacactattttttgaatggattaccaaccaaactaaaacggaaattattttttatggaaaagcccgatagtttaattgaggcaattgcgcaagcaaaaaaagttatccaagtgaatgaggaaattgagaaagatgaaaaaggggatgaaatgaaacaataaatagctgagctaacggaacaagtcaatgcaatttcgttccaga

SEQ ID NO: 55220 - DNA, 571 bp, Heterodera glycines
atgacatttttgacaatttcaatgtttctgtgctcatttttcgggactatttctggtcaataccaattatgttctgatcgagttcccaccacacccatttggttaccaaacgtaacagaatgttcagtaccggagtaccaaaaagctgacgagagaaaagttacactctttttaccggtccaaatcccaaagcaattcccagtttataactgctatcagaaaatgatgaaaatttgtacgggaaattttctttttttctggaaagacataaaaagtcaggattcgtacgtgaagggagtaagtcaccgagcttgtcagggatttaaagataacatgggacatacaatgaagagattgacagagaatttatggacaactgagaggccttcaaaagttgaatatgcatggattggtgaaagatgtgagacaacagtgaatgatttcattgaaaaaggacaaggcggtattctggatttttatttggtaacatcgtttggacataactttaatccgtacaacggatgggaagaaggacaaaaatggacatttatttgggaaattccggaaccaa

SEQ ID NO: 55221 - DNA, 616 bp, Heterodera glycines
atggtcatcatcgaaacggaccacgcggcattcactgagaaggccaaacggcgaaggcgcgaggaaatggccaatgttggcattttcaatgacaataatagcaatgttgttgtaactgattctaccctatccttaggacctaattgaaatggcaaaggattcggaggagaaagcgcttgcagaagaaatggcacattcgctgcgcaattatgagccggacgaatccatttttggcgctcctcgggcacaatacggtgaattctttgacagactgacattttggcacttcattttcactacttttttttaggaaaatgggcttctgcagttcgtttgttggtcccaaagacgggccaaacactttgccaatacgaattgcccgagggagaggcggcattttggtattttttacataatgccaaaataacttttattcaattatagcattgaactggtccaattccgttctcaatccgactccacctttgtgcttgtcggctgtgccgttgggttggagttgcgaccaaaacggtcccacgggggttgtgtttacacctttttactcaccgccaatgggactcgattcgaatttattcatcggacggcaacgagtgcg

SEQ ID NO: 55222 - DNA, 767 bp, Heterodera glycines
atggggccaattccctctgggcgagtcgaaagaccaattgacgaagctaatgaatggaaaacggacggaacactgagaaatgccaaatctgtgtgttaaggactccatttttaggcaaatagtttcatttacaattgaatatttaagtttttacttgttttaatacctacaaagcattaattaaaaaatttttttgcctatttttgtgcctatttaatgcctattttgcgatttttttaatgcctttttaggtgcctattttgcgactttttgtgcctaaaaacggaagtcctaatcatcacaatcacctgacgctgctcctcatccaaaccgaacatttggtcatcgatgggataataagtgtaaaaagtggcacggaggagggacaatggatgcggcggcattttggagggcggaaagagggaaaagcggagggagggggagggacggaagcggaggaaaagcatggaaaaggcaaaggcattgaaaaggaacagccgagtttcattatatacaaagaaaaagccactgattgaatgtgaccattttggaaggacttttgcacttcttatcaccaaactttgcactttttttcattttttgtttttcccattttattttatttcaattttcgcattttgcaatttatctttgccttcgcatacagaaagtgtcgtcgttttttttaaactttttatatgaattctgtataaaatatttggcgctgtatgaaaagtggccgtttttgaattttatcaaaaaataaa

SEQ ID NO: 55223 - DNA, 1436 bp, Heterodera glycines
tttgccttttccatgcttttcctccgcttccgtccctccccctccctccgcttttccctctttccgccctccaaaatgccgccgcatccattgtccctcctccgtgccactttttacacttattatcccatcgatgaccaaatgttcggtttggatgaggagcagcgtcaggtgattgtgatgattaggacttccgtttttaggcacaaaaagtcgcaaaataggcacctaaaaaggcattaaaaaaatcgcaaaataggcattaaataggcacaaaaataggcaaaaaaattttttaattaatgctttgtaggtattaaaacaagtaaaaacttaaatattcaattgtaaatgaaactatttgcctaaaaatggagtccttaacacacagatttggcatttctcagtgttccgtccgttttccattcattagcttcgtcaattggtctttcgactcgcccagagggaattggccccattcgccagtgaaattgaccgtcaggaccaattcacaatgctccgcgagttttggcgattacttggccaaaacggacttttgggcgtcaccgttccggcggagtttggcgggtcggaacgcaattactttgaccattgcattgtgatggaggtgcatgattaccaatttattttttcaattactaatccaatacagtattttgtaaactcattttgttacagtactcatgtcagtgctctctctcttttttaagagattcaactatcaaaattcccacttagcagggcttccatttttatgtaaatacatgttttttttcctggattctccatagcctaattagtaggaaaaacactttcttttttgtgtttgcgaacaaaagtgggacttttatttacatatttttacatatttcgggctttttctacatattacatatgtacatatttttatacatattttagactttttcgcattttttcgtacatattttgcaatttttttttcattttttaaaaattttttgaaaatgtaccccaaaaattcgatttttttcaaaaaaagagatatcaaaaattaatttttaaaatactaaaaggtgattctaagccaatttaaataatttttatggcattttatgcctatttcactttttactaataatttttttccaaaaataaccattttaaaaattttatttacatttttttattacatattagggggtttttgtacatatttaatacatattttagcattttttatatgtatttcgcgatttttcttacatataaatggaagcgctgctaattaggcacaaattcaaaaaccaaaagcgttcaaacaaattttgaacctataaatatttgtgtgcaggaattgtcacgtgccagcggtgccatcggcctcagttacggcgtccattccaatgtttgcatcgaccaaatccgacggcatg

SEQ ID NO: 55224 - DNA, 505 bp, Heterodera glycines
aaaatgaacgcgcggaaaactgcggacggaagccattttgtgctgaacggcacaaagttttggataaccaatgcacaggacgcggatgttctggtggtatttgcaaaaacaaacagtgccaaagcgaaacacggaattacggcatttatagtggaaaaagtgggcggagaggggagggcgggggatcaatggacggacaaacattttaaattaaaaaaaaggaatttacgggcttttggccggctcagaagttggacaaattgggcatgcgcggctccaacaccggcgaattggtcttcgaaaattgccaagtgcccggtgagtttatttttgacacaaaaagaggacggacacacacacacacacacatccgttttggcattcagcggagaatgtgcttggcaaggaagactgcggcgtgtacattctgatgtccgggctcgattcggagcgattgatttttgcggcggcacccctcgggtaacgaaaaatttgtgcctcattt

SEQ ID NO: 55225 - DNA, 579 bp, Heterodera glycines
ccaagtacaagcaataaaagaccaaaaattgcgcaccctcaacaaaatgcagaactgcttgaacaaatctattttttgttgagacgaaaagaaaaatttgtgaaaatttatatgcgtcattggattgtcattgataatgatgccaaggcatttttttcggttgtcaaagaatttcttgacgaaatgccaaccgaaatcaaaaatttgtacaaaaatgaaattgaaaatttgaaaataaaaattgatgaggaacttgccaagcacaaatacctaaataaaaaagagaaaaacaagaaaaaactaaataaaattcaacaaaaaactgctgccgcttgtggtggaaaagttgaaaaaattgaactggaaaaaacggagatggacaaaatggaggaggctctaaatcaggacgataaaacctttttcaaatatcattgccaattgatcagtcgctcatctgatcatttaaaatttgtgcttgagaaactgtcaaacagcgatgactttgagccgatcagcagcataaaaatgaacattggaatgcaaattgatcaaacatattcggaagcattcataaagtaa

SEQ ID NO: 55226 - DNA, 142 bp, Heterodera glycines
atggcatttttggaagcatttgcccattttccgaactatgaatttatatggaaagttgaattgtctgatgaagatgccaaagtgtttgccaagtacaaaaatgtgaacccggtcaaatggatggaccaaaaatcgttgctaa

SEQ ID NO: 55227 - DNA, 818 bp, Heterodera glycines
atgaacaagcgcttgccgaatgagcttatttgggaaattgttgctgcaattccgataatgtacattttcggaggtgttgcaaaaaagccaggtaattttttaaaagtatttttaaaaaattcaaaattaaaggagctacgcgtccaccatctggcatcaccgttgtcaaccgggcgttcgagattttccgttccaagcgccatttttacttcttaaaaatagttggtaatatttaaaataacaataaatctaaatttttagatcgatcttgctcgaaattttgagaggctctgcgcactgaggaagttaccgtgcggagaattgttcatacagttcggcttcattcaatttggattcgaaaatgaactggaagacgccaagtgtttcgccgactttttggtgtacctatattatggacgatctggccctaccgttacgacgagagtcgtgacttactcggcggtaagaaaaaaatataataataatattaatattatttagccgattaaaattggagagctattcggtgccattctgacgcatgtgttgggaagcgcaaatccgctgaccatgaagaagcggactgcaggcggttatttgctgcgtcaacactttccgcggcttctccaactctcggcaacagaaatggcatcaggtggcattggtcaactggtccgctccgatgggatggaaatgtaccggctgatgaatccgcaccacaaaggagatgttggtcaattgattattattgaaacgtctcaacaccccggctcgtactattttaatttttcaatcgaataagtgttttttgtaattga

SEQ ID NO: 55228 - DNA, 1015 bp, Heterodera glycines
cgttgagccgcttttacgcgaggcgaaaaaggtgaacaatcaaatgagtagaaaggatgttgttgagtatttggccacacagcgcacatacaccattcatagacaagcgaagaggcgctacaaacaactaccaacactcgcttctggactgcacaccgaatggcaagcagacctgtctgtctttgacaaattgtcgcgagagaatcacggctacaagtaccttcttatctgcatcgacacactgagcagacagctctttgttgagccggagaaaagcaaaaagagctccgacatggttgctgcttttgaacgcttttttaaacgctccaaatataagaacgtgaaaaacttttttatgtacacctcgccgcgaattcacgcagggatggcagagcgggccaaccgaaccatcaaagaacgcctttatcgctatttcacggaacggggtacccaaaaatgggttgatgtgatacagcaaattgtgcatggaataaaccactcgtacaactcaagcataaaaatgcgcccagttgatgtgaattttgagaatgccgaaaagctcaggaaaaaactcaagcagaacgctattggtgggacagcggaagcagcagcagcaaaacggaaacaaccacaaccacgttttaaggtgggtgaccgtgtgcgcattgagaagtacaaacacgtgttccaaaagggctacaccggacgcttcaccaacgaagtgttcactgttgccgaagtgcacactgaccgttttccggtcacgtaccgaatacgtgatgacgacggttccctgatcaagggccgtttctatgccaacgatctctgtcgtgtgctagtgcgcaaaaatgatgatgatgatgatgatgatgatgataccctatatgacattgaaaaggtcgtccgaaagaggaaaaagcaaggtgttgaatacgttttggtgaaatggaaaggctacagtcaacggcacaacagctggattcctgcaagctcgatgacatggaaaaatatataa

SEQ ID NO: 55229 - DNA, 490 bp, Heterodera glycines
atgttagcactttttgttatttacgtttacctgactgcttccttcacgcacatatctttagccaagattcgcactgaatcacaaattaaaggtaatttgatttaatcctcgggctgttagattgagtttttgtttctggactcgttttgcattgcaagacggtatggtaaaaaatttcattatttgtttttgaaaccatttcgcatttaaacagtttataagtttcgtactttaaaattttcaatttttaccaatctgcaataaaatttcagagagcgaatttgatgctttttttgtggctgacgaaattaaattgatcaattcacaccgaaacagtgccattgccgctcaactcaaaacggctaaggctggattccaacgcacaataaatctaattgacacaatgctgggcgaatggtatgttttacactgcatgtccgcttatttttcctattggcccgagtttcgggttggctctattgtactttag

SEQ ID NO: 55230 - DNA, 117 bp, Heterodera glycines
tttcttgcgcctttttccatcttcgtcatcttcaactttgtcggcaacaaatgaacagtcacaaattgcgccatcacaacagttgctcttcagcgcttacagaaatttgggtcttct

SEQ ID NO: 55231 - DNA, 597 bp, Heterodera glycines
atgacatttcgaaaatggaaaagagaaatgttggcaacaaaatattataaaagtaagggattttttaattaattcgaaaatatacaaaaaaatattatttaagagcataacacaaatgaggacaaattgcaaaagatgaagcaatatttaaaattaaaaaaggaaattcaaaaattaatgataaaataattgcaactgaattgggaattggacttcgcacattgctcagatggaaaaaagaatttgcttcaattttgggaaaatgattttttgaaggagtttatattattggtttgataagttttttgtgtgttatttgtacaattcaaatttagtcaattcgatttatccaattgtccttttttggcaaataagtcagtcattactttgtaaatcgtccgtaaaggtcaaaaataggcatttaatttatttgatcatttttgaattacaaattaatctattttttaagttaattttttataatattttataattcaataatataaataatcctattttatttttaaagaaaaattttcaaaccaattatttataaattttatttattataaaagttaaaaatgttaattgaataaa

SEQ ID NO: 55232 - DNA, 532 bp, Heterodera glycines
atgtggagaaaaattgctggctattgtgtggttgttgtcgtcgcgtttggcgccggaattggcgtttggtgagtcgtctgatcccctttcatttaattaatttctaatgccatttttccatatttaggtatttgcgtaagatgatgcgtaagcgagaggaggaagaggaacaggaggatgaggcgccgccgggggacgaggcgccgccgggggacgaggccccgcccccgccggaggacgaggaggacgcggaaaatgacggcggacaggtggaggaggaagaggatgacggcgggccggatcagcaacagcagcaaccgaaaaagaaagcgcttgctgagttcatcacacagcagacgactggcggtgccaattagcgacgacgaaaaattaattaattaacggacgattggctttttgttcctgcacattttacaacttattatttcttttttgctgatttgttctgcacatttattcaacctgttctattgaatttaggctttcatcaaacattttttggaaaaataaa

SEQ ID NO: 55233 - DNA, 351 bp, Heterodera glycines
caaatggttcggcagtcctccttttattacatgattgtgggcaacttgatcgttattgcggttttcgcggacagggccttaacgagacgctactttggcaagaagatggagccgatggcactgccctcgtggaatgcttttgtgaaaacggagttgaaagaaggcagggaactgacgatgccaattagcgacgacggaaattaattaattaacggacgattggctttttgttcctgcacattttacaacttattatttcttttttgctaatttgttctgtacatttattcaacctgttctattgaatttaggctttcatcaaaaattttttggaaaaataaaatatgaaat

SEQ ID NO: 55234 - DNA, 674 bp, Heterodera glycines
atgctcatttccaaggacgtccttgtcatccaaggacattttttatttccaaggaagagagtcaaattccaaggacgtccttggcatccaaggacgaatgggagccctgccataagttaataaaaatttggtataaaagttcaaaaatttgtaaacttttgaatttttttctttcggatgctctttttcaaggacatcttgaattcaaggatatttccaaattttcaagtgagaggacccaatttcaagaacgtccttgccattcaaggacgaacccgaaccatgatctaaactattagcgtcatttcatttcgtatttatttttcagattttctcattttatgtcgtacagttcaagaaaggttgtcacattattcatccttagtcaaggcgccttttttatcgacgtatttatcggctacaaacttcttcaaaaacacgagtccgcgcgtcattggctgtactccaattgccccaacattttgcttgcttattacaacacgcgtgatcattactcggacaagggccaattgcctggcaccgaacagcgcaaagaagacgtaaaacggtggaaattggcggcggcgatcgaaaacgaaggccaacaaaaggagcagcatcagaagacgaggaagggcaaatctgcggacagcacaaagggcgaagcacagtga

SEQ ID NO: 55235 - DNA, 947 bp, Heterodera glycines
atgccaacaaattggccgccgcatggcattgacgactctgaacagcttcaacacttgcgaaccgatgccaacaatgtgtactttgccaaaatcttggaatttgatgacgaggaggaggaggaggacagcacgggacgagcagtgggaagaacgacgccgcagggcgcgcgaggtgagtgccaagggggaggggctgaggacaaaattttaggcttttatctaacaaaacaccctgccaggcatttttatgccgatagtatacctaattcaccctcctccggcagaatttgctacaaataaaaagaatatctctgcggcatttagtgactgcctacattgaacacattccacgtggtgaacaggccaagccgatgcaaccacaaaacggtgccgtcgatcatcctcattttggggaggaggaggaggcgaagaaggacaaacagctgctggacgactcttccgcagcggaagatgatgattattttgaggatgacgacgaaaatgacgatttatatacagacgaatcgacggagggacagcacgacattcggcaccgaatctcaaacaaaagcccgggttcggcacggcccattgcgacaaatgaagcgagccgaggattagccgacctaagctcgaaaacacgaggtgcggtgaactaagcacacgaaccacggcatggacacagcggtccaattttgggctccaagtacaaatatgctggatttttcgtcttagtggtctgtgagttagtcaccaaaaggggggtctcaagttcaattcctccttgtgtttgtgtataaatttcaattttttaaagcaaataaataaaataataataaatacagaacgccaaaagaacaaatacaaacagtaaaaggtacacactatattttacccttgattttatgaaatttttttagcttataacttggtgaatactagagcaa

SEQ ID NO: 55236 - DNA, 483 bp, Heterodera glycines
atgaacagtgtgttggagggcatttacaatggtgtgccgatggtttgtgtgccattctttggtgaccaattttacaacgccgaatcattggcacgccaaaacattggcctggtggttgaccgtgaacaggacaagaaagctgtacaacagcagcttactgtagcactggccaaagcattgggacaaaacgaattgctggacgacaaattgaacaaagaattgtgaaataaaatttaaaaattttaattatttttgaattaatttttttttaagcaatcatccggaagacaaaattgatttggtcaaacttgaaaaggtcacgtatgaatttcgtcataaagacattgcaaaaacactgtctgacgtgatgaaagtgattgacgaagaattaaaggaagaaagagcagcttaaaaacggatttaggattggattgttggatttgaactaggattttcaaaaaaaaaaatttggaaccaatttaa

SEQ ID NO: 55237 - DNA, 575 bp, Heterodera glycines
  unsure (1)..(575): unsure at all n locations
atgactaatttntgagtcatttagaaatttttcatctcctaagttcttagaaaattttttttataagaaaatttaaagtaaaaattgttgaaaaatttttcagcaatttttttttgaaattttatgaaaatttactgtttttttgaaaagttttcaaaaaaacttagcaaatagttttttttttttttggaattttcttataaaaaaattttctaaaattttttccttgaaaaatttctaagtttgaaatttttttttgaaatttctgcggcgagatttcggccggcgagatttcagccggcgagatttcggccagcgagatttcgtcccgtccccccctggaattataggatttgcaatttcgaaaaattttaaaaaccctcctcattttcagaggcgagtcggctcggattttcagcgattggctcaacgacgccaaagcgcacttggaagtgcggctgctggttgagctgctctttgcccatgctcaggcgacgagaattaggacgacctattgaaaatggacaaacgaacgaaggaatcaatcattttatttgatgtgttttcaaaataaa

SEQ ID NO: 55238 - DNA, 345 bp, Heterodera glycines
atgggcaatgctaattattgtcaagatgagcaaaatgacttttttgtggccttgtttggctggtccttaaaatttgctgaattaggtatcctaaattttggcttcgtgggaaaaatgtgaaatttttagccattttcgccaaatttggcattttgagacaaatggcactgaccaataaaggtcctggacttatatttgttgccaaccgctatttaataaagctggggaaccattgaaaggtgcctgacaagctttattattctcaaaaaattcaaaatttttcaatggatacaaaaaaaatcggccaaaaattaaaaaaaattaatcccatcttattaataagta

SEQ ID NO: 55239 - DNA, 147 bp, Heterodera glycines
atggcagtggccaaattgtacgcaattttggcacggcaaaaatcgtcgtcggactatgatggggaggacggacaactgatggacgacattgactacgagaaagtggccacaaatcccatgatcgatgcggcagcgaagcaattcatg

SEQ ID NO: 55240 - DNA, 118 bp, Heterodera glycines
  unsure (1)..(118): unsure at all n locations
atgacgaagccgaatgcggatcttcttggggtcacccagaatactcgtagagggcttttggatgacggactttacagtgcggatattcaaagccttatcccctggaaacggngattgg

SEQ ID NO: 55241 - DNA, 838 bp, Heterodera glycines
atggcggagaaacaagccattggactaatgaagaagatggaagctaatagaaatgtgcaattaagtgaaaatgcaaaaaatattacaaaattaaaagaaattatcgaaaaaaacaaaaattcttcaaatttcaagaaattaacaaaggatcaactcaagaatattgtttatttgaagtttggcgaaatggcaaagcaaatgaaaggtttaaaaaatttatttttaaatgtttcgtcataatttttatttaaatttttttgaattaaaattaaaaaatgaaaataatttaattaaacaatgtattttatttacaggccatggcataccttacaataaacaacgatcaaaacgtgccgtcgattcttctccagctgatcagcttatgcttgacgttgatttggtcaccacgtgcatccttttaatcgcttatactatggtgatgttctatttgatccattttcatcgaactgatcaattattttttcacataatttttttggttttttgtgataattttattgcgaattgtctcctatttcaagcgaagccatggtaacgttttcccaaggttggattgctggatgatgatgacatattttgataattttatatgtcagtcatcattgctcgactatttaattttctaatcaattttctgatcaaatttttcagtgggagtatatgtttgtgtctcttctgtctctttttctctcttctcttttttcttgtgtgtcttttctgtttctttctctccttttttatctttgataaaaattttttgatgaaattacattgatttattgggaagtaattaattggttgaaagcaaaatattaaa

SEQ ID NO: 55242 - DNA, 415 bp, Heterodera glycines
tcttttggtcatgccattctccattttattgtttgatcaaaattgcgcgcaatccttctaattatttacatcctttcccaaatttatttttgatcagtcccaccctgaggggcccacaaatggcacctttcggtcaatcagtgccatgcctttttctgatcaaatgtgcacattctcttttgatcagtgccatttccccattcttctcttcatcaaattgccccaatttattttggtcaatcgtcttttggctatttcttttgatcagtgtcacccctccccatttatattgatcaattgacgcatatttcggctgatcagtcccatcgccatttttgatcaaattgtgcaaatttatttgatctgtcccattttccccatttccatttgatcatttgtaccatttttcattgct

SEQ ID NO: 55243 - DNA, 812 bp, Heterodera glycines
atggcacttgaagaagatgaagacctgcagcgaatgatcgaccaaggtccaggggagcagcggcagcagccgaagcagcgggacgggcaacaacaacaggagggggagcgacagggaaaaggagtcacgaggaggaagacggcagatgaggtagtaaaatccaagcacaactttaaaacaaagcttccacaggttttgcggaagaagagaaacaagaagatagagaaggcggtgggtcttgaaagggaattggaggaattgaagagacgcaggagatatgatcagaagccagaggggcgggagaaaattttggagacatgatcaagctctgacgttgacggaggatcagatgaaggcagtgtttgaagagcaacgccaaaggcgcgtgcgagtgaaattcgaagagaatgatcggcaatagcagacggagtatgagtcccgacctgttccattcttcttgggaatcgggttgagcgaaggggagagcagcagcagaaccactgggcaggaagcgggtggaggatgaaggaggaagcatcagggatgagatggcggaagagcaccaacagcggcatcacccgatgaagcagcaggaagaagaggaagggttgtgatgagtggttgtgatctgagagagcgcaagcagaagtttgaagatgaggagcggggatgggaggagatcaagaagagcagcgcctttccattatttgtaccattttacacctggcctccctccgcacccggatgcggttgtttcatttttattcttttacaccgccgggcggtttctttcctctttttattttttctga

SEQ ID NO: 55244 - DNA, 158 bp, Heterodera glycines
ccgagaaagttcattttgcttgtggcgaacaggaccaacggttggaaaatgaaggagaagccataagtcggggggaggaggaggaagacgaagaggaagtggagggcggacagtccagcgacagttcgtacgtcaaggtcattgcctttgcggacgga

SEQ ID NO: 55245 - DNA, 92 bp, Heterodera glycines
tcttgtgcactttatgagtccaatcaattgaaaatactcggtttttatacaataactttgttcatgttcgaacaaaccctatctttttggta

SEQ ID NO: 55246 - DNA, 58 bp, Heterodera glycines
gggcttcgccttcggcttcggcttcgagtgcaaagccgagcttcgcccagccctgatc

SEQ ID NO: 55247 - DNA, 411 bp, Heterodera glycines
atggcaccggcattttttgctgtgactcaaacacaaatgaaaaatggaaaatttttagaaaaagcatttgacacattgtgttgtattacaatcaaagctgaaaaagatgtcatgaaaagggatgaattagcagaaataattggggaatttgaagcaaatcagcgcaatttttgccaagaattgaaaaagggccaaaacatttgggaagcgctggaaagttcggcggggaatgccattgtaacagcggcgagaaatgtgaaagttaacccccaaacatacgaaggatttcgaaaattgacgaaattaaaaattgtgagccctgaaaatcaaacagcaattggaacatttgtcaaacattgcattgccgcgttgaaaatattccgagaattcatcaccggtattgttaattaa

SEQ ID NO: 55248 - DNA, 2061 bp, Heterodera glycines
atgccgtctccaaaagacatttcgtcactccgatcattcctcggcatggtaaaccattaccaacagtttgtcaagaacatgcgcttcactcggaagcctttggacgacatgctaaaggatgacatcgaatggaagtggacggaagaacgacaaaaagcattccaaaaattgaaggaagtgcttacatcggaactgctactcacccattatgatcctaaatttgacataattatggcagccgatgcgtcggaactcggaattggggccgtcatctcccacaaattcccgaacggtcaaagtaaagcaattgcacatgcctcaaggtcgctcactccagcagagaaaaattactctcaaattgaaaaggagggcctggcattaatttttgcagtgcaaaagttccacaaaatgatctacggcagacacttcacattgcaaactgatcacaaaccgctgatcaacatcttcggaagcaaaaaaggcattcggcagtgcagcgcaaatcggctgcttcgctggtcacttactttgctggcctacgacttcgacattgagtatgtcaataccaacgagtttggtcaagccgacgcactgtctcgcctgattgccaaagaatttgaatgtgatgatgaacgagtgatcgccgcgtgtaacatcgacgaggatcttggaactgttttggatatggcaaagcaaattctgccaatcaaatttgaaaatttggtctcagagtccaaaaaggacaaaacaatgcaaattgttatgaaattcgtcagagacggttggcctgatgaacgcaaattgacgccacaatcagaagaaattgagcttttcggcagacgaaaagccgatctgacaattctgaaagactgtctgatgtatggcgaacgaattgtgatccctgaaaaattccggaccaaaattttgacactgctacacaagggccatcctggaattaaaaggatgaaacaactcgcccggcagtatgtcttttggccaaaattggatcaacgaattgaggaattcgtcaagaattgtgcaccgtgtcaattggccgctaaggcaccgacgaaaacggatttgcactcatggccaaaatcaacgcggccatggcaacgaattcatgccgattatgcgggccctttcttcggaaaagaatttctgattgttgtggactcatattcgaagtacccggaggtattcgaaatggccactaaatcagcggccgcaacaatcgaacgactgcgttatctcttcacgcgtcacggtataccggaaacattggtaaccgacaacggaacgcagttcgccgccagtgaattcgcaaaattcacagaagcaaatggaattgcacatctcttttccgcaccgtacaacccaatgtccaatggacaagcggaacggttcgtggacacttttaacagagcatttcgaaaaataaaaggggagggagtgccgaataaagaaatcatcaacacattcctggtaacttaccgcacgactccgaacgattcgctgccggacgaaaaaacccctgccgaaatgctccttggccgaaaaccgcgcacaacgattgatctcctaatgccgcctcttccacagccaacggagagagacacaaaaatggagcaccatttcaatcgccggtttggcgcccgaccacagaaatttgtgtcaaataagccagtttgggctagacaccgactctcgcagaattggagagctgggacaatttgtgattgctccggagtcatctacacggtcaaattccccgacggttcgacaaatcgctttcatgcgaatcaattgagaaaccgggaaaacaccgaaaatggccacgaaccattggcaattttaaatgaggcattccatctgccaatcaccgcaccgaacgttggaattgtagggcaggaccttgagccaaggcctgacccgatcaacgatggtcaccaggacgagatcgaacccgagcaggcccctcgaagcccgacaccgccgcaacaagcgccgcgccggagtggacggaaccgccgagcccctgatcggtactcgcccggatga

SEQ ID NO: 55249 - DNA, 1000 bp, Heterodera glycines
atggccactgttctgtcaaaggatttgctcaacaaatggtcgtgcagcgtatggtaatcaaatggaaaatgattttttattgcaacaatttccccgtttttttggtaacatcatttcaccaacttttcatttttcagcacttttgacaattggccaaccgccccaaagtgcacaatttgcggccgtttgcgttccggcggcagcgcaaatgaaagcgaagtgcggcaaattcaacaacagaagcagcagaaggcgcaacagctgaacatcggtcgcaccgggcgtcagcgatcggtgggaaaaaattaaaagcaaaacaatagtttcggggggggggaataaaattgggggtccgacggcgccaagtttttatatttaattctttcgacactttcctttatgccctcccccgtaaaaataccaagatcccaacaaaggaatgcacttttcttgggtggttttatgcgctaaccaagaatatggagtcaaaaaatatcaccgtcttaatttgaaaaagtgatccgcccgtccgttccggcacaaaatttgttgggttttaactttttgatagagaaaagtcgagaatgctgaaactaaattaatcgattcctctcgatgaaagaacgattgataaagaaatgatatacctatgttatttctttttaaattcatagacaaaagcatatattttgcagtgttgagccatattgttgatcaacgcctgaaattaccatagaaaagtgctttcctttgttgggcttttgattttattatggggaggacggtataacggaaaaatgccattttttcatggactaacacaattttttagtaatttttttcaaattactgagcttggtaatatgccacaatgtctaaaatggtgtgcaattttcagtttgcattgtctgcgaatggtcggaaacagcaacagcacaaggacgacgccgacgatgagcaacaccaccaccacaagcacagtgaccaggacgacgagtga

SEQ ID NO: 55250 - DNA, 362 bp, Heterodera glycines
atgctaaatgctacacattttgcatttgcatttcaggtgcttttcctgtgcgtcgtcggcactcaaatcgcaatggcaagtgaccggtaggtaaatgtaccgtattatctctaattattaggaagcaacttttaatgacgaaaaatcccaaaatagttaactaaaatagtgagtagaaatgccaaaatagtgaagaatagtgacaaaaagtccgaaatagtgacaaatagtcacataattttcagccaaaaattgagcaaaaataatttttattcactgattgcagttgcaaatgagtaggactgggatttgtaagaccaaaaaacccaaaagagttacctaaaaaaaatttttaaattaaa

SEQ ID NO: 55251 - DNA, 817 bp, Heterodera glycines
atgacgacaaagttccggactccgtaagttgggccccgaactctaactttttctttgtcaaccaaacccaacattgtttctatcaatcgaatgctcttcacatgctctattagcctacatggctggggcccaaccgaagtgaaccccaaaattcactaatttttttaaatcgcaaaatattttgtaaaacggaattttcattactgacggattgttcttcactgacagattggtcttgattgattgtctattaaataattttctggagactttctgctgagtgggctaggaatgaaagagacgctgcaaaagttatgaatttgaattgaattgagttttttagttaattggttttttaaataaaaaaattccaaaaatttttaatttgtttttcaaaaactttttattactttttatatattgttcaggaagcaacttgatatgcacggaggaaatgcaaatttagccgacattactcatgggattagtgccgattcaaatttcaatttcatggttggccataatcactggcgccaaatggtcatattacataacagaaagtggtttgcacaggtcgaataaaaactcaccagaactgaatttattttttgggcaatcatcaagaattggtatcccgatgaaaaaaatgctgaaatttggcggcattttttctaggcttataaaatgcgttaacctcgaatctgaaagattttgaaaaatcatttattttgtctataactttttaaaaatgaagtttcttgcaaaatgagagcacagattcatgacctacgcattttttatcccaaacccattgaaa

SEQ ID NO: 55252 - DNA, 798 bp, Heterodera glycines
  unsure (1)..(798): unsure at all n locations
atgtcaaatgatgcttttattgccttctgcaaaactgaaatacgggaaaaacgagaaacacctaaaattgagccgaaaagaaaggaaaggccggtaaaacagaaagttcaactgaaaagtgaaatcaataaaaaggaaaatgttttgaaaactaaggaacaaaatgctacagtatctgttttaccgaaaagcactgtaaagctggtcaaggacagccaacaaaaaatgtcaaatccaattaaaattttacctcaaagtacacaaagtacagtgatcacaacttctaaacctcaagtcaaactctccacaacagtaatgcctgttacgacaagcaccactccgaagccaattactgttcaaagggttataacatctaccagttatccaaatgttaattatgatggacattttgagacaatttcagtgaaaaggcctcagaatgagcgaatttatcaggcaaagggaagagagtttaaaaatttcggaagtcgttctgaaagcactaccacaaaaaagcctattactgtcacaaaagttgggacgaatattccaaaaaatttgaccgtgtctaaacctgttaaaattcacaaaattgaaaggcncgttggtgtcaactgcgacaccaacaaaaatctaacaattacacaaaaacccaaaaatggagtcaaaaaatctcatcntcgtgccggagttcagaaaaattgttaccacaaccataaccacttcaacggtaaagcccatggtaacaagtacttctgtcactacgatttctacaaaagtcacgcaaaatgcgagtga

SEQ ID NO: 55253 - DNA, 409 bp, Heterodera glycines
atgcctgcctttttgagaagtgtgcttttcctctgtccttcgtttttcccacttttcctcccttccaatggacaaaaacccaacaaaatccaacaaattggcactccctgcacaaattactatgatgggaagactgactacggttgtgatgagaagagtgagaaattgcgcatttttgtagtcgccgacgcgggcggaaaagaggacgaaaataaaaagcacagtccgacgaagggacaacaaagtgtggccaaactgatggccgaactggccgagaaagaaggactgaatttgatgctgaatttgggcgataatttctatgagaatggagttacgaaagacactgtcaacgaactctttaaaacggtcggattggcgtcagcagagtgccgggaaaaaggcgttccgg

SEQ ID NO: 55254 - DNA, 861 bp, Heterodera glycines
tcctcttctaatcagtattgtacctcttctaatcactattgtatcttttatcacttttgtacctctttaaatcacatttgtacctcttctaatcactgttcttcctcttttaatcactgttgtgcctcttttaatcactattgtacctcttttaatcacagttgtacctcttttaatcacagttgtacctcttttaatcactgttgtacctcttctcacactgttgtacctcttctcatcactgttgtacctcttctcatcactgttgtgcctcttctaatcactgttcttcctcttttaatcactgttgtacctctcctaatcactgttgtatgttcttatcactgttgtacctcttccatttacttttgtacctcttttaatcaccgttgtacctcttctcatcactgttgtgcctcttctaatcaagcacagttgtacctcttctaatcacagttgtacctcttctaatcactgttcttcctcttttaatcactgttgtatgttcttatcactgttgtacctcttccatttacttttgtacctcttttaatcaccgttgtacctcttctaatcaccgttgtacctcttctgaccaatgttgtacctcttctaatcacttttgtacctcttctaatcgctgttgtacctcttctaatcactgttgtaccacttctaatcgctgttgtacctcttctaatcacttcttctaatcgctgttgtacctcttctaatcactgttgtacctcttctaatcgctgttgtaatcactcttctaatcgctgttgtacctcttctaatcgctgttgtacctcttctaatcactgttgtaccacttctaatcactgttgtacctcttct

SEQ ID NO: 55255 - DNA, 1116 bp, Heterodera glycines
atggccagaattcttaagcttcagaggggacgagacggggaaactcgttccaccctcattttgcttaatggaaagggaaaatggagggcaacgaaccaacttttcccaatggaagttcaatccgaaattccagaaactcagctcatcgcattcatcatggacatcgacatggactcagtctcactgcccggaagtgaagacgaagcttcagagcgatcggcacccaaatttaaaattccaaagaaacgccgcgccttcttgcgaccgatcggtcaacagcatagccctttgcaagggcctcgtcgaaaaaagatggaactcggcgactccggactacgcaagctctttgcggcgataagcgaagagcaaggcggcagcaaggcgacgacaaatgcgataacggagagccgacagatggaaaaggccccggagcacgtcagaaaggagcacgacaaggaaatggccagaagacaaagagaaaaggtccaacgaataccaacggaggaaatcaggcagaaattggccgctctcccacacatcacggtttcttcggaaaatgccgaaacacagagaaaggaacgaaaggagaacgaagtgcgtcgcaaaaacaatcagcagtccacaagcgaaggatggaagcaactcgccaagcaactggattacgacttgatggatgagcccgatgaaccagccctggaacggcgaaaggctaccgaagaacagtcggtaaaatgaagagaagccgaacgacgtcaaattgcacggaaaaaaggcatcgtgcaaatgaagaagcgcgcaaaaccgctgaagtttcccaccgaagatgaaaccttgctgagctacgtaaagcggttttatgacaaggataattgggttctctcttggaaaagccgacgtattctggacgaacttcatgacttggagaacgaaggacgttggttcttataccacgcagcaaatggcgctcaactcactatctcacgaacgttcgatggaacacgaccattgccgaatttcgatatgtggaggaaggacacctcgtgaatctgactccaaaccaagtcatcatccgccaaacggttccagatgagcccgaagagagtccagcgagaaata

SEQ ID NO: 55256 - DNA, 1616 bp, Heterodera glycines
atgtctaattttctcaaccatacgctgtcttcatcatcgacaatcctttcggcggcggccgctggtgctaatgaaacgaccgaacgatttcgactggcattggtaagtgtcagtttggtttaatattcggtatggtcttctttttcaaaatttctgctcttaaaaccctttcttgaccctatccttgcctaattttgctgacaggaacgcggttaaatgtccttttaccgataattggaccggatttaccattcttactaaccaacttctctcttccccgtgtttatggtatttcccaatttcgaatgtattcctcctttaaaattaattgatgattttcctttccagctctgtccatgtgtactgctccaacttcttcccccaacatttcctccattttcttcatttttgtctctttctttaggatgactttgtcactgtccatccccatttgacttgtgcactcatcgccgtctccgtctcgttggccacccatttggcgctgttcgtcttcgcccgtctctttgactttgcgttggcaaagtttcgcccatttgtccgtcgttgtcgtcttcgtcgtggaggaggacggtcattccgcgttcacatcagcgagtaataccttttattttacgtttttgtaagttcttccaattttatattgaaaatatgtttcagcaaaccgttcgaatattattttgaagcattttttgatgcgaaatgcaaaattgggacacccattctgaccaaattctggtccaatgtgaattgtttgtttgaattccaaagttttaatgcgttttttatacaaaatttttttttcaaaaaaattccctgaaaaatgtaattataggaaaaaaatctttaaaaacccaaaatttctcataagaatttatttgttttgcgccttttcacagtgcgccactgttgtcatccaacggaccgttcattcactcacaatttacgcaacatcagcaacgggcgagtggcaaaagccaactgctgcacaaagtgccaacaattgaagcggatggcggagacgacgacggtggcattgccaacgctgaaaaagcgaaacggacgacgacgcccgtcgccacgtctcgacaacgtcaccagcagcgcgggttgaggctgagcagcagcggcagcggtggtcgcatcggcacgcgacggacgacgacgacggtggacaccaccggcgctgccgcaaaagcggtgccggaaaccgctgccgggagcaaagcggcgccgaatgccaaagagacgacgacggccaatttttggacggacccgaacaaattcgtacgctttgttattgctgtactgtctgacaatgagccgatgaaatatgccatcccatttttgtgtacgcaatttgcaccactgaattgtgacaaatttcagttttcgttgacaaccgatgacgaggaggacgatgaggaggaagggaagaatggccgccgttccgccgctgggattgcctaacttttggacataccaatagcaataattacctaattagcaatattaattatttacgattttatttttacacatattatttattccgcctaattttgacccagaaaattgctttgaaatcaacaaataaa

SEQ ID NO: 55257 - DNA, 454 bp, Heterodera glycines
atgtcgacaacagaattcgagatcatcttgacaccaaatctgagcgtctttatgccaaaattgacgctttatctgcccaagttcaacgacttgggctggcaatggctacgcttccgaatggaaggtctgtcatcacttttggtcgactgtctgtggaggccgtgcccggacattttagagcttactatgtttaaattcgaatagcaattccattgaaaacgccaattaatcgaaaatcatttactgtctgtccgggactaattaattataaggggaacggatgaagcagacatttgggatcatttgtcaattttcagccacaccacaacttgatgaaagaggacaacgaacgacagaagaagagaaggcattttgcacacacacattagcctcctcccgtgatctcctcctcaacaatgttattgataaaagcggaacgaaggatagaaaataa

SEQ ID NO: 55258 - DNA, 769 bp, Heterodera glycines
atgatcgacaagactgtcgatgcggctgctaagaccgtcgatgcggctgccaagagtgctgccaagactgtcgatgcggctgccaagagtgctgtcaagagtgtcgatgcggctgccaagaccgtcgatgcggctgccaagaccgtcgatgcggctgctgaggtgataataggcaccaattccagagccaataatcacagtgcagatgaacaggaagtacttccctaaagttatcgatgagtgaaaaatataaacatgggaaaacattgagctgatcgtaattttttggcggcctccttgcacgcgtcgcggtcctaaatttgcagaagataattttcgacgtcgtccattctacccgttggctgtttctttccagcgtgtcaagacgcgctgtgatatcggcgtaccgcggttgtcggggctgttgggcgacctggattggttcaactcgggttgccgcaagagaacgcctacggggttgttgtggattgcgcataaagttcaaaattgagccgataaagataataaataatatttcggtagaatacgagctttgcttgcttagaccggatagaattcgtaaattttcaggacaaagtgaattaaatataagttttggactttgatttttcatgttaataagacaaaattcagtatactacgcgctaacaaaagaaaatttaaaaaatgcaaataataactactcaaaactggcgataagtgacaaaattattcaaaacaaagaccgaaacgtttaaaatgaattaaa

SEQ ID NO: 55259 - DNA, 1642 bp, Heterodera glycines
atgcgttcagcggccgcaaaacgggcggcagccggtgccaaaggcggcgcggatgagagcgacgaacagcggaggctggaaaaaataatggaggaggacgacgacgaggaggacgaggatgaggaggaagaaaacatggagtcactatcagaggacgatgatgaagaggaggaggaagacgaggaaaggtgtgcattattactaataattggtatggagtaaacaattatttcaaagggctgaagtttggttccggtttttcgagtagttttttttctgttttaaagttgttacgaaaattttgcgtttgcattattgtttgatgagaaaaaaaaatatattattttatcctgaaattcgttctatgtttagtgacgaggacgaggaggaggatgaggacgtctcggaagtgggaatgatcacagcggaggacgacgatgacgaggcacagcacatccgtgtgcgcactcaacagcagcaagtgcagccggaggacgaagactttatgcgggactttgaccgattgatggttgagtcattacaggtctttaaaaagagcgtgcttttttgattatctaaatttaatatttcagtccgcacccgccacgctgcacggaccgatgagcgatttggccgttccgccgcttgtccggcaaaaatttgagcggaaactcaaatttggtaaacatacaaaatctcttttgcatttttttttttattacctttcgcctcgattaattccaaatttagccgatcccactgagcctacaacggcgacgccaattgatcggcccgcttctcctgctggtgttttgactccttcccatggcgtttcgtctgtcgttcgtcaacaacagcaccatcaggaggtatgttttatgtgtgttgtacatcggcaataaaataattgccaatttaacagactccacggatggcactgatgctccgtgcttccgctgcgaaagggggcggcagtggcggggcaatggccaaggcgggcggagtgcagttaaaggtgtgtaaattggttgatacatttgattcaagcatgacattcattttcctaatcaaccatttggtttactctttatttattgctcccattttactgtgacaggctgtgcacattgcggaagaggtggccaatatggacgagaaatggcgactggcccaagaggcgcgcgaacgtgaccgaatggaaatgaaaaaagtgagtaggatttgtttttttttctttgcgtgccataaatgtgaacccacggaatgccgggttggtttcagttcaatgcgcacgtttccgtgccaatgaggtttaagaagccagggatttccagacttttctcagttgaccaaatccaacaatctgataccacagaaagcttaacatgttgaaaagcttttctaagctattgcttggtgattagacaatttgcaaaaaagttataaaatggaaatagaaaaaaaattcgaaatttttgagttttttcttaaatgttgggttttaaatatatattttcaacaatttatttccaggtcactttggccatgaatgagcgcatcagcgcggacgaagaagcggaacgtcgtcggcaaattcaacaaaaactgttcacgtatcagcagcagtcgcccaccggcggtg

SEQ ID NO: 55260 - DNA, 254 bp, Heterodera glycines
atcaatcggtcaaagtcccgcataaagtcttcgtcctccggctgcacttgctgctgttgagtgcgcacacggatgtgctgtgcctcgtcatcgtcgtcctccgctgtgatcattcccacttccgagacgtcctcatcctcctcctcgtcctcgtcactaaacatagaacgaatttcaggataaaataatatatttttttttctcatcaaacaataatgcaaacgcaaaattttcgtaacaactttaaaacagaa

SEQ ID NO: 55261 - DNA, 1330 bp, Heterodera glycines
atgagcgtgatcatgcaagtgatgcatgacaagtcatccaacattgaagacgctcggcaaaaagtgggtgagaattagcggaaatcgtcgggtcaataatattacttactctaaagtaatggttgagactgaaaattctcgagattgctcctaattaaatacaattaattaattgtttatttattttgcaagattttgttggaaaatgcctattacgcggtgatcccgcccgacgagcaggcatccggtgctcgggcagtacgtgcgcatttgccgcctgagtacgaatttgtacgccaacaattggccaccgaatttcgtgtcaacacttttcgtcgcatgaactggtccgatcccggctttgcaggtgtacaatttaatttataatttttaaataaaattcggaatcacttctatcgacgttagaatttgccattcgcctcttgtccaactcacaacgggtacaatttgacgaattgccacggctcgcttcgctggtcagcgcactgtctgatcaccacgattgggttggagtgcgcgtgttggacgaagttggtaattttgggacctttctacaatgttttttggttccatggtttcttttgtttctgtttactgctaaatcaccaagacagaaatcgtcctatgatttttgatttgaagatgtaacataactgaaaaaaccattttattggttgctctacctgttcaggtgctcgagtttattcgtctgtccatggagttgaacatgacgcgtcttcagcagcgaaccatttgctcggtggcctactttggccaactgttcaactacaacgtgtgcaacacggccaccctttttaaggtcgattatcattgtttacttgtcaacccaatcatcattatgcatccgatattccaggctctttaccaactgatcacttttgccattgcgccatgccccgttgacggtcctgaccatttggtggttcgtctccagcgcattcggctcgcgatcactctcgtggacactgtttgcgagttcttcgtcagcggcaaaagcaaacggcggatggaccactttctgtgcttcttcttcagattctgtttgtcaaaaatttatccccaatcaacaccaaaaatataattttcgtaaattgcagactacgaaacgcgcgaggcctggtccgaacatattgaagtgctcgacgaatttccggaagatgtggaaaatttggtggacgatgtcttgaacacttggcgtaaaggcgaacatttccccaaggggctggccgaggcccacgaaagagtggccgaggtggagcagttctacaaggccaaagtgcggtgttga

SEQ ID NO: 55262 - DNA, 131 bp, Heterodera glycines
atgagcacactgatgacccacccagacaattgcagaatgggcatatggggtggacttgcccaatggaaagagattttgagtgggatgaggggtaaagataatacaaaagtggaaatggaaataagggaaag

SEQ ID NO: 55263 - DNA, 967 bp, Heterodera glycines
atgcacagtaacttcaatgttcagtgcttggctaattgctttgattgtttggctttcctgctcaaattgacttttcaaactgtgccattctgtgccggtgcccgcatggccagcagcagcagcggccaagtcgaacatggcacgggcaaagcccaaattgtacggacactcgtcctcataagtgatctccattttcgcaatatcttaatggggtaatttgggcaatcattgtgtattaattagtctctcataaaaaatttcctgcaaaaaatattcctttaattaattccaaatttgcatttgccataatttgatcatataattactcctcagctgccgatcgatttcgtccacaatttgtgcttctcccccgctgggacatccgccgcgagaggatagatcactttttaacccatccacagtacttttcgtcattgaacatactgtagacgcgtcctcaccggcagcagagaaagtgccaatgtatttggacatcacagaaaccacttgctgactgcccgggcagcacgggaaatctgtgaaatttaaatatattaattaattattttctttttgaagattttggtttacttggcattgcattgcaacagaccaaaaagacaatcgagaagatggagagcagtagagaagacatagcaaaaaatattttgttttatttaataatgaataatttggtattttgttgtttttctgcccgtttaaatacccccctttttatttccttaatagacgtggtttttattagactaaaacatacaaaaaatctttttgcggaaattggtggatttttttataagctttcacgtgaattttaaaagaaaccgaaaatcgttgacaattttttttatttatttagcttttattttaatgtgtgactttatcaatctatttgcttcatgtcgaaattttatcttattgtctaaattttgctgcaaaatatttttca

SEQ ID NO: 55264 - DNA, 939 bp, Heterodera glycines
atgtcttctctactgctctccatcttctcgattgtctttttggtctgttgcaatgcaatgccaagtaaaccaaaatcttcaaaaagaaaataattaattaatatatttaaatttcacagatttcccgtgctgcccgggcagtcagcaagtggtttctgtgatgtccaaatacattggcactttctctgctgccggtgaggacgcgtctacagtatgttcaatgacgaaaagtactgtggatgggttaaaaagtgatctatcctctcgcggcggatgtcccagcgggggagaagcacaaattgtggacgaaatcgatcggcagctgaggagtaattatatgatcaaattatggcaaatgcaaatttggaattaattaaaggaatattttttgcaggaaattttttatgagagactaattaatacacaatgattgcccaaattaccccattaagatattgcgaaaatggagatcacttatgaggacgagtgtccgtacaatttgggctttgcccgtgccatgttcgacttggccgctgctgctgctggccatgcgggcaccggcacagaatggcacagtttgaaaagtcaatttgagcaggaaagccaaacaatcaaagcaattagccaagcactgaacattgaagttactgtgcattttggacacccaagcaaaggcaaaccaaataattttaaataaatatttatttgaaaacttaaaagattattttcaaggaaattccgcgcaccaaaatgtgccgagtccgagccatgtgattaccaaccctggccaacaaagttcggttggccatggaaaggaagacgaaccgttgtcatccgatttcgacttttgaggaaatagaaaaaaggaattaattagaaggaaaattcatagtacagaaaacattttgttgattatttatgaagaatatttatttgttt

SEQ ID NO: 55265 - DNA, 422 bp, Heterodera glycines
atgatcaatcgtggtaatgacactgacgaatgggctgtccaaaaaggagatgaacgaggcatcgtagcggaggtaaattgtgcatttttcattgaaatgaatctaacgaatggattgctcgcatttctttctgaaatggtcaccccctccccttggaagaattttttggtaatatgtagtaaggctggtctccctcctttttcgaaaattttttttatgttttcaaaagtcatgaaaaatgtttccaaggcctcgggggtcgcctgatcacgaatccggcatcaatttcgccaattccggacccgaattcgaacaaaaagtcgaaaattcaaattttcgaattttaggtttttgtttcaaacttcagaaatgaagtaaaagtcaataatgattcaataaaagatcatttaaactacttttag

SEQ ID NO: 55266 - DNA, 1490 bp, Heterodera glycines
atgcgaacggaggaccaacagctgttttttgctggcggggagggagcggcggcggcggaagagagcggaggaacaaaaaacgacggaggaggaagagagactgatgaagacgaggagagcgacagcagtgatcacaatcatcatgaccaacagggacagagaagagggaagaagaagagacaacgcaagcagcagaggagggaagcagcagccgccagacggttggaggaggaggagagagaacagcagcggcaagacggagaggagcaggcgcagagagaggaagaaacaggagacggtgatgagagagcacgttgtgtggcggcggaagagaaggagaacaacaacagcggaaacaacagttgtggtggaagagaaggagagtgctacgaaatagcggtggcaacggaagaagcagagagcggaaacatcaccgtaaagaaggaagcagagacggccaagaaaaggaagaagggcaaacggacggatgagcagcagcggaaaacggcagcagcagcaggaggccatgaagagcaacagtcgaaaggcccggtgcattgcgagtgcacgcgctgtggagccgagttcgaatcgaagaccaaactgcacgcccacctgcgcgacagtggtcacgcgacgctcaagacggtggcggacaaaattggggcggcggccgccgactcggcgacggacagcggaggccgacggaggcggaaaaagaaatgacaaatggtggtgaaaacgattctataaaagtgctgtcggtatgttgttattttgttgcacattattgtcgagtatattatacaacatttgtggttgaattttcgataatttttctctcttccatttcgacaaaaaaaaagaggaaaacaatttttttattaagaggaagaaatgagaaaaaaccatacatgaaatagtgaggggggggggagaccaaaaacaattgctcttcaaaaccgcttttttattgtggcgcgctttttccaaaaaacttagggaacaggggcgccggcggtggtgtaaggtcaccgccgagaaagtttgaaaatttggtgatttgattatcacaattaaatgaccaaccaacaggaggggtcgaccccccccccccctatttcatgtatggagaaaacaaaaatgaaaaaaggagaaaaggtcgtcatgaaagcatcgaatttgttcagcaaaaactccccaactgtccggcgtgcttaaatgtggggacaaaaaattactgtttgaaaggtgcatttttcgagtgcgaccatttaggcaattaaatttaaatccccccccccccgaaatggatgggtttcatttttcagtaaaacttaattttaatacgcgcactttttcgttgagctccttaaactgtgatttgacccgaccaccacactttgtcatcggcgcagtgattgcagcggctccggcggaaacaaatatagactgaaaaatggggaaaaaagctgactctcaaacaaaaa

SEQ ID NO: 55267 - DNA, 1645 bp, Heterodera glycines
atgcaaatgtcatcaacttctgcttgtgaacagaaatcatttcccgtagaccaaaaggtacgtggaggctggtgaccaaaaaataatttaattctcccaaaatttgtcgaattttgttaattttgcggtaatactggagaattggtgtcccggcgaaaaattaattgaaaatttttctttttctaaaagtcgttaaaatatatttatggaggttttctgtggtcgctgatcacgaatctgacattaattttgaccaattttgaatcccaatacacgaactcgaacaaaagtgaaattcaaaattctcacacacaaaaatcaattttgaattttcgactttttgtccgagttcgggtttgggattcgaaattggtcaaaattaatgtaaattaatgtcagattcgtgatcagcgataccgaaaagcccagaatgcatgttttcatgttttcttagatgaaaatttattttaaacaacaagtatttgatgaaaaatcatagacaaaatcaatgctttttcgaattttgagcccagatccgtaataaatttgggattttttttaatttagaataaaacgacgggaacaaagcgaacccgaacaattgaaacaataaccgttgctgaagagacggacaaaaacgaagaaaaagtggacaactcatttgacaaaaagaaacggaaaagtgcaaaacaaagagtgccgacgaacccgacgaagttggcaccgtcaacagcggaaaacggcacggaagaaaagggaaaacaaaaacgaaatcaaaagcaggggcaggtagagttcgactacgaaatgcgccgggttttgccacctcagaatttggaagtgacagtgaagaatggtgagatggagagagaggatttggcattggcacgactttttagagggatttggcaccagttttaaaatgattttggcaccgctttttcaaagggtttttgcgacaatttttatgacgaattttgcaccgtcttttagcgactcggaaacccttttaaagcatttctggcaccgttttggaaccacttaagacgatttttgcacctttttggggcggtttttgcatttttgagcgattttggcttataattgggggacaatttctcttttaacccgatttctgattttatttaggtgttcgttatctacagccatattggtatgtctttttggatggtaacagcgagaggacgtaaatattaaatttttcttttcaggggccttttttgcggttattccaagcggcgatggattggaaaaacaattgccgaagtgtacgccaccgagttcaacaaccttctccacccgctttacgcggttttcactcaaaattaaaaaaaaaaaacattttttttcagcaagccgcttgccggaagggtcgcatttttgtgaacagtcggccaattttcagtgcgaaccatcgcattcgtgacaacgaatatttcttgcacataaatcacagggtttgtgttgtttttttgtgtttggcgatttttccctttttagcggcctccagtcttttatcctcatttttaaggacggatcttatttttagaaaaaggatgtaaaatgcaaatttttgatggtgtcaaatgaattttaaacgaatttcaaaaatattataccaaaa

SEQ ID NO: 55268 - DNA, 1427 bp, Heterodera glycines
  unsure (1)..(1427): unsure at all n locations
atgcgtcggtggtcagctgcaccatcgtcaccggtcggacccccccaatccggatccatctccaattccctggccacccgatcatttgtgatcggttgtacaatgacgagggatggggtccggagaaagggcaaggcggccaatttacggtgaaagaaccccgganacaggtgggtgcactttgggcaatggacaaaatatgtcccccgataattaaaaaaattacgatttaaaacaaaattatgagggtgggggttagtgaatgtccccgaaatctgtaaactctactcgatttcccattttttcgtccgcaacattttcagttggcgcacgacattggcacaaggcattcaaaagacaattggatcattgaacgggacgaagagtacgagcagcgcattcgacagattggagaagacgaagaggttggtaagcggagattggataagcactcgtcccgaaaatttaaaacatttgaatttttatttattttttttttggaattttactccccccccccccctcatccaattgaatttcttgctccctaaaagaaaaacattttccctagtgcgcggtggacgagttcgacctgaaaaatttggacgcctgcctcaaggcaatgccggcctttgacccgctctgctggggctgtgcaatcaaaaagaagcgggaaatgcaggaaaggtgggtggtgtggtactgtgtaatattgggggggggggtgtacagtaggggcagaagggaggctatacgataaatcggtcaaattttaaaaactttggaaaaaactgcaagtgcctggggagggcgtgctgccttttttggtgatttttgagccgccaagcaaatttttttccgattaacgtggtactgtattaatatgggggtatggtaggcgtggatgaggcctgatactgtaaaccggtcaaatttaaattttggaaaaaacgacatcattcctctaactccgaatggaccattctgcttttttgagcggatttttagtcaaacaaattttttttcgccgatttttaaatccacatttttgggttttgtaaatttagcttccacatgccaattttttattgttttttttgtacagagattggctgatggcgctgcattgtcatcgctattccggcgacggatgggcctacgaggcgccgttgcccgactgggccaccaccgaaattgaagctgacagtgatccgcaacagggggaggaggaggaaaatgccatgaatggcgacggcacggacaatcaacaaaagcagaggaggagcagcagtacaacaacaacaccagcaacgacaaaaacgacggcgggggaagaaacggtgccgaaaagtgtggcaccaccgacggcgatgacagaggaggaggatgaagaattggtgccgaagaatgcgcaaaatgctctatga

SEQ ID NO: 55269 - DNA, 1204 bp, Heterodera glycines
atgattcaaagaacagaaaaaggaacagcaattttgttggaagcctcaaaaaaagaggctgaaagggcatggaaggaagtttcagtattggtagaggaagctgatgattattccaaatctgctcgtggagcccttaatcgggcaattaaatcccgagaaaaggccccctatgccccaggggttcgagaatggttcgtaaaaatgtcagattgtatctgggaaatttacaccgttctggataaaattaatgcagagtctgaaagggttgagacgatgtggcgtgagattgaacattctaaagatttcgatcagaccacaaaacttgaggagaaagtatttaagagtttaaacgaaaccaagaagttgcatttcgagtcccgtcggattcatactaaaatattggagcaagaaagcagagttcagtctatagtgttgggatttattgagcttcacgagtaaaatggaggcaattcagtataattgtcacgtaattaacaaatttgggatcaaaaaacatattacaaagtttattttttccggtacatctgattatgaatttaaacaatctctagaaaaaatattagaaaatgcatatataaaagaattagcaaacttcaaatcaattctaaaactacaatattctaattttctagtagccttgccattacggttaccacaggaaaatacaattgacgttctgctagaacagcctatattttcaaacttttttccattggatgatactgtaatttttgaaataatcattgtatctctaaatgtaaaaaatgacgacaattgaccaagaaatgaattttataaaaaatcgaattgtaaactggtggaaaagggaaagaaaaatgatcaaagaggcagatagtgtagttatttactgtaataatatttctaaatatgcgaaaatttttacaattattgcctttggtgcaccaggaatacatgtgttgtatgagaattttttagattctgttataaaaattcgggtgctatatctacaaatgtccaacgaatataaaaacatttccaattctttaagcgaggttgaaaaatgtagtcttaaaaaatgtcaagaaaatgaaattaaatcaaaaaaaagttttataaaatgtttcaaaattagaaaacagataaaaagtctccgaaacaatgtggatgaattgtttaaaaaaattcaagcatgtgcaataaa

SEQ ID NO: 55270 - DNA, 1767 bp, Heterodera glycines
atggccccttttctgtggagcattcccttgttggccattgtgtgctttttaagtgttggcataacagcgccaaacagtgacaacgagcagccaaacgatggagcaacaactgctgttgagcaaaaacacatagaaagtatggaaattagcaaggggcaattaggaatttaatcattttaatctcttaattgaagcatcctggaattaataattaatttggtcagttttaattagccaattagaatttgcgggccccaaaaaaattgcaataaattaattgggacacacaaaaagaccccaatttcggatttttgcaaatgtaaattattggagaattttatttaccttttgaaaaagtttgaacttttaaaccgcgtttttttggcctcgaaattcgtgcatcgaaaatttggcctaattttcgagcatcggcttcgagaagtaagccgagcttcgcccgtctgtccctgttttctatagcggatttctacagtataattgggcgcatgttttgtccattgttctttattttggattttctaataaaacattccttcatcaaataaaatggtataattctaggttaccgaattgcatattaaaaataattagtcctaattcacaccccaagatgaggaaaaggaagtgcaaattggaaaccatttggacaagaaggaagtggagaaggggaaagaggaagaggaagaagatgatgattgcaaaaagaaaaaatacaaaaagaaaaaaggagaagaagacaaaaagaagaaagataagaaaagagaaaaaagaagaagacgatgaagatgaaggaaaaataggaaaaaaaggacaaagagaaaaaagataagggcaaaaaagataaggacaaagagaaaaaagataagggcaaaaaagataaggacaagaaagagaaaaaaacaacaagaaagtaaaaaaggaagagcacgaaaaagagtaaaggcgaacaacagacaagaagaacggaagtatttatctcttcaagctcttttcatcatagttttcatgtgcctatctttctatcggcttcttcttttcttccggccttttctccttcctttctttgcttccaattctctttttctgtaactcttctttttttggtacgcataaattgaaaattctgctggtgctttttagtgctgtccgaaagtctcggttccgactcaagaaaagtcgggtttttggtctcgaatcgctactagagaaaatagtctcgaatagagcttctcgagaaagttacgagttcaaagaggggcggagagttttttttaatgagtttcaattactttctgtgcatttgaaaattccacttctcctttcctctctttttatggaaaataatttctatgctcctgaaaattttgataagccgcacaactaaattattccttctggcgtagtatcaaagatcccatacattataagagacaatctggaaatatgtcccagacatatgtgaacaaattgtctctaatggggatcttttgaaaatcaaattcatggtcaagagtgacataggcacaaacgtggcgtaagcagctcatataatcgcatgcagatgagtagagctgaacattaaataaggagaacatcatcggcatcattatagataatattgataataattttcaagagttcccagagtgatcatcagaacggacaataatcagaaacaaaagcagacaatgtcaatgagtccgagcaaattcagcatattacataacaaaatattcatatacgtga

SEQ ID NO: 55271 - DNA, 704 bp, Heterodera glycines
atgtcctcaaacagtgccactaccacgacgagcacggacaatggaatttccctcgttgaggccgacgaacgcggcgccgaagggggcgaaggcgacgatcagctgaccatcaactcgttgagttcgtcgttgagcagcagcacggcgacgacggacacggagggcgaaagtgagtggagagattggggaatgaggagggaggtgttaatcgatgttttttgttacataagttttcggggtcggataaatcctttttattattaaatgttaaatttacgatttgtgcttgcagtgatacaagacatacaattcgaggggttttttggtccgaaaatgattattttttcattccctatttaataagtgcatttcatttgttcccaaaggcggggcgggcgacggaggacgaaaaaggaaaaagagacggggcgacgggtcgtttagccgcgggagcagtgcgaaggaaatcgaacagtttgacgaggacgaagcggcggaggacgcccttttggacgacgaagcgccgccctacgcggcgaaaacgcgcgaccgcgccattggccgactgatcgtcttcagctgcattctgttcaccgtgcctctgactctgatgtacaccacatatcgctttttcttcatcggtaacatttacaattagcaattttaaagcgttggatttcattcttttgaatttggccaataaa

SEQ ID NO: 55272 - DNA, 1991 bp, Heterodera glycines
  unsure (1)..(1991): unsure at all n locations
atggcaggtaatccttaaaaactgtatttcacctatttcaaataccaaattcttagtaaaacttttacaaaaattctattcaataaataatataaataaagcatttatttttataattcttccatcctattatgcacgtccttttgaactgtttcacgacgaccatcataatgtttctaatcggtaattaatacttattttattatacaatatattgcgattgttacagtttggcgttgtgttattgtcggttctgcggttagcatcaaaactttgaatgaagtgattgaaacaagctttctgatcaacggcaacgacgatcagctgttcgatgagcaaacaaatgccgaattaatccgatgccatgaatatttcttaaagacgtcaattttagatacacttgacatgattttgtcaaattttgtagaactgattttgttaattggctttacgaatgtgcataattttttgaaaaagaatttcaagaagaaaccgaatgttttctggaattcgttnaaagaatcaattgacaacataaggtttttcacttaaaattaattagttccaaaatttactagataaattttccagcactgacggacccaaattccttatcgatcttaaaaaatctgttaaaaatcaaaaaattacagacaccctaaaaaactattaaaaaaaattaaatttatattaaaaaattgaattcgttagctaaaatagtattaacaatttaatcattttttattttgaaaaacttttttaagttttgctaaaaactgaatggttatgttttaattgggtcggtccattgcaatttaagtatacttcttcttctaaaaatgcccttccaaaatttttcgttttttttatcggtttgattttgcagtttcgaaacacgaattgtgccagaaataatgtgccaaacagtcactggcacccaggacaaccgcagcagctgcgccagcagcagcaaatccagtcgaccaatgtttgacgacagtgacggcggcggtgcgcatggcttaaaattgtttcaaagttgtttgttccatcatgatcagtacgacagatgggaaaggttgtacaatgaagagcagaggagagaatttttggaaattgaagaggaacaaatttggcgggaaatgccaaagcgaaagaaaataatggcacaagccgagcgagtgggtgccgcactgctgtacacaatgatccatatggaaatgagcaagttgttcgagagcaagcaggtcaaaagcgaaagcagcagctggtcagcgaagtccgcgcgggctatgtcgcaacttcgagaaaagcttaagcgcgtggaaaagccggcggttagccgccgtgccaattcggtatttagtagtaggaaacagcctgaacttgatggaccataaaatctaattccgatctttgttactttggtatttattatttgggttgtttatgcttatttatggcgcctatttcagtctatcaacctgcaaaatttcaaaaaatttagttaggtttcaaaaagttatggttaaaaagatgtgaaaacctggttgcttgtgtacttttggccataactttgttcaaacttggccaatttttttttttttggaatttggtgagctaatagagttttaggcctatcgagtgatgccaagaatgtttatggttgagtttgagagacttttatttacttagcaatgttccggattttattttaaaatttttgtgatttatagaaatttcatgaaaaattcaatttattttgaaaaaatagctttaaaaccgatttttaaaaaaagagattttttacggcattttattcttattcactctttttaaataatttttttatgaaagcaaaaaaaaaatttatttacatattttggtatgtacatattaggggtttttgtcatacatattcttgcatatcttgaaatttttatatatatatatatttttttttaaatacaatttacagctctagaaataaa

SEQ ID NO: 55273 - DNA, 1942 bp, Heterodera glycines
atgaataagggaacagttgagaaatgcattggcagagttggaggtgtacatcaggacggagccacgacggacggcgtggaacgatggacggcaaaaatggtgaggagcagtagcgcggaacaaatcgaccttaaacctttcttctttaatgagttttcgggtcaaaaaatatccgattctgatcatatcagcagattaggagaatgcaatggcatttgctttagtgtcccaatttttttgcgagtaattaaccattattaaattattaacccaccaaaatgccaaaaaaggtgcccactgaattggtttttgaaattgctaattttgtgcagtgccatcggaaatggacacactttcgtgtgtccagaaaaattgactacccaatggttaaaaggatgaaaaactggctaaaaaccctcaaaattgcggttgtaaattcaaaattaattttaaattaaacaataattaattgttccaatgcctttagattgtccaattccgcgcagcatttgaagaactgtgccacaacgtggtcaaatattcacaaaagaatcagcgcaacttgttccagcggatctacaaaggcaagacaatgttttaataaaaactttaaattaatttagttttaaaattaagagtttttcaaactgtcgctgattggtcgaatgccgaatgtccgtgccattgagagtcttggtctgagcccgggggacgccaactatgtgggttttagctgttaaatcataattggttcacagtctcaattcacgggttctgttggtctcgacttttgggggtatacgttttgcccttctcggggtcttcggtcattcacagtctcaatcaaattttgaattcttggggcccggaaattggggatctacttttgatgatcccgacttttggtgacccgacacattattctccgtctaattctcgatggcattctttttgcccttgtcggggtcttggccttttggctacccgacttttaggcatgtgaaaattgggggcccgaaacatgggactatacttttgaagatcccgacttttagtgacccgacttttgggtacccgacatatatgctccgtctaaattcttggtgtccttccttttcccttctcgggatcattggcctttccaagtctcgatcaaatttttaattctgaatacaaaatcatcgttttgccatttcagatcactcagttgaaggcggcttgtcagggtgttgtggacgcgtgctgtgaatcgaactcggcgagtgcggaggcctttgcttttctcactaaccgtatgtttgggagagagtactgtacttttgaataaaatctaccgtttttagacgtcatgacactgaacagtatggttttgggtggaatgccggaatagaactggtcaacaactctgctggattcaaacaacctgcaggacaaaacccattgaaaatttaatcaaaaaacaaattttcgaacgtccatatcttttttctactcatgaatcggttagcatttgcttataaaaagcttctcataagatctttcgatttataccaagattttccaatttggttgtcaaaacctttcagaagctcattttctgaatggtgtgttaagtgaaatttcataccatttagcacaaatttaatgggttttggttaaaaaatttataaagtgtatggcatagtgtttaatttttaaaaatttatttcagtgacgaaacacaaaaaagaattatcactcacttttgccgtttcatttcgtatttaatcaatcctttttcattggcacattcggacttattccttcacttttgtatttaaaatcatttgcatttaaattgagccccgtcactttttgtcaaatattttaaaattttaatgttgacaagtaaacagtttaatcctttcattcatttgctactttcacattacttacaaattta

SEQ ID NO: 55274 - DNA, 562 bp, Heterodera glycines
atggaggaatcaaatggtcaaattatgatggtaattaaagacatttaaaaattcaattagcaaaacattttttagcacagggaatttgttgataaaacacattgatgatgattataaactattcgagaaatgattaagtaaaaaatgcacgagaaatgttcaaaaacaaacaaacatttaaaatctgatcaaaaattaaattactaaagctgatcagatcaacaatgggaactgatctaaggagaccaaaaaattgaaaaaagcatctcattaatataaatgctttgttttttcagatcagttcccaagtgatcgacattggacttttttaaaaagaataattgattgaaatttttgatcagaaaatttaaaatgtgtgaaattggaagatgagaatgagagaatgtgttggagcatcgactaattagttaattaattaatcaattagctgctggtgccgctgacaatcggttttatcggcctggacacttgcaaagcgactgaattgccactggaacgatggaagtgacggcggaatgctgaaaagggcggaaatgaaaga

SEQ ID NO: 55275 - DNA, 921 bp, Heterodera glycines
atgacggcactgcattttgcggtgtccaggcgcaacctgcagatcacgcgcttgctgctctgcctgggcgccgacccgaacgtggccaatgcgcacggggacacgccacggcatttggccgccaaattgaacgagtaaattttttttttggggggcggggaggttaataattcatttttgggcctaaattttcggtacttcgtgttttgctacccctcccccctcgagggcgggtagcaaacaaaggagtatcaaatttttgttattcttcacccaaataaaggaccccaaaagtccaactctcgtttttgtcctcttaaatatgtcaaaatttttcagggttgatttgctgaaaagtctgatcatatgcgatgctcggcgttgtccactcaccaaggtaacaagcacagattttgctatatatataaaaaaaaaatttttttctttgccttccaaaaattttttcatggtttcaaattgggtaaacacatccatctctcacgttttgtgaatccacaaatacgcatttttgtgttaaaaaaattcgtttttttccccgtattttaggttggctgtgtgtccggttgtgtcaacgagaagcagttgcacgagctgaagaggacgtccaccagttcaatgcaatcatccgccaccggcaacaccacttcaacatcttcgacggcatcgtcatcgtcgtcaagcagttcaacaacatcggcagtggcgtcggccaccgcagctgctgctgctgctacggcaccaccagctcaaccagcaacctcttcacaaccagcagcaggagcatcaacaacggcaccaaagccggccagctacacgtcggtgacggtggaggattttgagaaccgggcatttgacaaggaacatttccgcttcaacaaactgttggacattcagcacaat

SEQ ID NO: 55276 - DNA, 355 bp, Heterodera glycines
ccgaaggattcgatctccccataaatctgggcgcatcggttcggggggactgccccgaaaacaaaaaaatcgattttttcaagtgtccgtttggggtactcaaacatttatggggagcaaaaatccaacgcagaattaaagtacagactatagggaagctattcccgaaggattcggtctccccataaatctgggcgcatcggttcggggggactgccccgaaaacaaaaaaatcgattttttcaagtgtccgtttggggtactcaaacatttatggggagcaaaaatccaacgcagaattaaagtacagactatagggaagctattcccgaaggattcggtctccccataaatc

SEQ ID NO: 55277 - DNA, 1249 bp, Heterodera glycines
atgccacagacagcaacaatgcgtgccatcgtcatcattggccttgtctcgagacatgttgtcggcacagcagcagccctgtgccaatggtggagtgtgcgttgatctgtgggatcggtttatgtgccgttgtccgagaccatttttgccgccacgttgcgcggaacagccgcccgaggcaacgtttggccatggcgaccagccgtccaattgcgttgtgagacggaataaattttttaaaatttaaatttaaattttttggatttctggtcccgtgattcgggtatattttttgaaaaaataatccggattaggagttcgtcctgaaaaacaggatttttaatcctgaaaccatctaatttatagaatttttgccataaaaacctattaaaaatttcaaatttatgcatgttttggatcaatttttgaaactctgtcattagtaaagcttttctgggatgccaaaccgaaaaatttgttttttgaagctttaggcacatcccattttattttcccgaaaaaaaaaaacttaaaaattataatttatttttgatttcaattttttaaaatattctttcagtatgcgttgagcacggaggacaaacacgtggtggccgagaagacgcaaatcagtgtgagcaattaaaatgtttgttataatttgcgaaaaattgaaatttaatgggggcgggggtcagttacggtaccacaaagtgcacgacatactgtctcaaattcgcactaaaaaattcaatataacgataaattaatgattggttacggtacccatagtgccaggacctactgtctggaagttcatattacgaaattaatttaaatattttgtgccattttatagtctttaagtgatttatgtatttgattttgcatttcattttttcacaacaaaaaaatcccggattttatgttatttttggaattgatagaaatttgacaaaaaaaaaattttttttttgaattttagaaaatttattttgaaatatgaattagtctttttgtcccacagtttttgctgcgcacggctgaccatcggcacggtccaccatcctctccagcgcttccgggcacaatgccattgttttatattggcgaaacatttggcgcaggcgccagcaccggcgctgaaccggacaccagcacattcattgcggcacagctgcgcaatggtgtgccacaactgaacgcacggctgggcggaaaacaggcgcggaatttgttacctttttta

SEQ ID NO: 55278 - DNA, 249 bp, Heterodera glycines
atgcaatggatggctttcaatctgcaagaaattagattggcaatatgtggtagtaaaaccccactcggccgcttcgcggccgagtgagtactttaggctcaggaaaataattaactggggttcattatttatttattttttgcaaaattaattcataaatattttttagaacgtgctctgaaacgcaccaaatgttaattaaaagttaaacaaggctctctgatgctttttctatcaaaagggagatga

SEQ ID NO: 55279 - DNA, 298 bp, Heterodera glycines
ttttactaccacatattgccaatctaatttcttgcagattgaaagccatccattgcataccggttctcggcacagcaaagcactaatagggtgtttgactcacttcaaaaaataattcattacccaaaagttttttacaaccacttattgccaatctaatttcttgcagatttaaagctatccattgcctgccgggtctcggcacagcaaagcactaataaggggtttgactcacttcaaaaaataattccatacccaaaagttttttataaccacatatagcccatccaatttcttg

SEQ ID NO: 55280 - DNA, 471 bp, Heterodera glycines
taaaaatttttaaaaattttattcatctccctttgatagaaaaagcatcagagagccttatttaacttttaattaacatttggtgcgtttcagagcacgttctaaaaaatatttatgaattaattttgcaaaataataaataattaatgaaaaagtcagaatttcgaaaaattttaaaaacaacaagcgttggcattttttcaggttaagttagtcctttacaatggagaaggcctgcaaaatttggagagattatatcgattttagtgcgctaagttcgatgaaactttttaaaatataagcctaaactttttggcttgtttaaaaaggaattaaaaatttttaaaaattttattcatctcccttttgatagaaaaagcatcagagagccttgtttaacttttaattaacatttggtgcgtttcagagcacgttctaaaaaatatttatgaattaattttgcaaaataat

SEQ ID NO: 55281 - DNA, 388 bp, Heterodera glycines; identical to SEQ ID NO: 51536

SEQ ID NO: 55282 - DNA, 582 bp, Heterodera glycines
atgaaggagaagcggattcaacaggaaaagaaccgcttcatgagaaaggatgtcaaggccgtggcacgtgcggaagccaaacgtgcgaaagaaaagacaaagaccgcacagacagaggagcaagacaagtgcgaaactcgaaaagattgggaagaacgaagaatgaagacgcatgccgaacggatggaatggttgaagaaggcgccaactgctcaaagggaacggaactccacacagagtgacccgagacgacactccatatctccgatacgtactgaggaaggagaagtggaaatcgtggcagaaatccgtggagagcggccaatgccaaaccagttcggaaagcggaagcgccccaactactcgatttctcctgatcggagatggaagcaaggaagagaacgttcgagatcaccggtctcgcagtttccaagaaaccgacggcgcctaccgtactccatttcgccaatcagaagaccacaccaggaagaagtacaactggtcgaaccagcgccatcagtggagatcatccggaccgtggcggtgaaaccgcgaatgaaaagtcctaccgatgcggcttga

SEQ ID NO: 55283 - DNA, 765 bp, Heterodera glycines
atgcatcacgcgctcaacgaacgccttgccgctttgcccgacgaaacggtaattaacaaaaaatcgggccaatcataaaacactttcataaggtaattcgtgaaaaaaaaaaattttttttttctcagcctttagaaattgttttaaattttagatgttttcaattggtaatcggcagggaagttcccctcccccaccgaaatgaaattttttcgaattggcaattagaaaattttgtattataacctttaaaattgcaaaaaaaaaaaatttttttttaccggcggcacctagcggtaccatctgaccccaattttaccttacaaattcgttttttttaattttaaccccgaaatggcaatttttggcacaaaacaaatgcatattcctattttttcgacggtacaaaattcttcaaacattaaagttaaaaaaaaatttccaaactttttatacgtatatcaaaattcaatgttgttttagttggtttactgcggtcacgagtacacggtggcgaatctgcgcttcgcgcgtacgatggagccgtccaacgaagccatccatcaaaagttggactgggcacagggccaacgggaggccgaccgctggacggtgccgtccaccattggggaggagaagcggcacaacgtgttcatgcgtgtgcactgcagcgccgaggtgcagcaacggtgcggcaccggcaccgacccggtggcagcgatgggccgactgcgcgagttgaagaacgcgttcaaggaaaaatga

SEQ ID NO: 55284 - DNA, 409 bp, Heterodera glycines
atgaaagtgttcaaattgaaaaggtgttcattttgatgatttcttagcgttttatttataattttgaatttattttaacagttttgtcacgattggattcgccacgaaggaagtgccattggacgggtcaattggtcaaattttgaacagttacgggtaccgaagcgatggctcatttggctgtaatggcatcaatcggccgtgcaaaatgccaatgtcattatttggttcgtcattttcccccgtggcaatgcaatcggcggacgtggaaatggcatacaaatcatcggagttttccactggtgacgtggtcggatgtggcattttcttggatactcgactgatcttcttgacgaagaatggccaacgaatgggtgggccaattaaaatgaaaaaacaaattaattaa

SEQ ID NO: 55285 - DNA, 231 bp, Heterodera glycines
ttgctttagtgacgtcatcgggcgaccattcgccgccggcggttgtctcagcgaaagttgcaaaggtgggaaggaaaccttaattatttcacaaatgccatttaatttcaggaagtgcctaattcgcagcaacaaaatggctgggatgccaaagtttgccacaaagacatcgaaatcattggggaaaagcaattgacgatcaattgcaagggcaacagatttggtatttaa

SEQ ID NO: 55286 - DNA, 1849 bp, Heterodera glycines
  unsure (1)..(1849): unsure at all n locations
acaaaaaaaagctaattgacctttatcattgtaccatttccttttttaagccaagcaaatcgcaaaatttggaaattatagtactaaaaacatttgcgtcgtgttattccattttatgtaatccatagcaaattaattaattgtttacagtacaatccgaccgtgccaatgtgttattatccgccaaataagggttacacaatccagtcaaacgtgccgggcaatttgaaactgaaatggacatcaaacacactgaacaatccgtacagtcgtccaaatttggacattgaagtgcaatatcaaaaaatgggagatggaatttatgtgcgcattggaacagaagacaggtgaacaagcaaaattattataatgataaaatatataaaaatagattaaatattgttttaattattactaaaatcaatttcaattatttgaagcaatttaaaaatccatcaacaattcttggaatgcctaaattattaaaattaacataataaaattattactaattattgttgttatacaaatttttaaaaaaaaattaatatgagaagtgcaaaaaacgaaattataaattgattcccaatttttaagattttttaattataaatttaaaattgaattttagatggcttcccccactgaatgagcttcgcaatccgtccaattttgaacaagtgatttcatcaaattcactgagttttgaacttggtaatgccaatgagcctttctcatttaaaattcaacgaaatgattcaaacaaacaaagcatttgggacacatcgattggtaaaactaacaaaaaaaaattattgttttttaaaaaatcttttttaggtggccttgtttttggtgaccaattcatacaaattgcaacttttttgtcatccgatcgcctttatgggttaggcgagaatatgcaccatgaattaaaggtaattacagtatgcacctgaattttaaaactaactacagtatgcaacaaacatattttgaccaatgaaattaaatagttaaataaaatatgggttataataataatttttaaatttgaaatttagcatgatttttccatctataaaacgtggagtgcattttcacgcgatcaaggaaatgaatattatgtaccgggctcatacaatggatacggtaatgtttttttttgtaaatttcttgaatctacaaaatttaggggtacatcccttttacgttggtttggagccaagcggaaaagcccatggtgttctgattttgaattcaaatgcacaagaatatgtcactgggccgggaccgcattttgtttacaggtgtttttttttgtaattatgaaaaaatattttctgttttttgaattgcccaataaaatttggaaaaattgattaacattaagaaaacatgaatattttggctgacattatatgtattattaaggaaatgccgattttctattctcctgttcattgagttaggcacgaaaaagacacaaaatatgcacattaatttttaaaacattttttaaaacaaatttttttaatgaatatttttttttgcaatagaattgaaaagaaatctgtctttaaaaatttctgccaatttttcatttttgtgcctatttaattccctatcgcgcggtatccgtgttcatccctgccttataaattatttatttaattgatttcctttaaaatatcttttttagaaaaattaaaaaatttacaacaaaggaaaactatctataaatttgcttagtttttttttagcactatattatttttattaattgatttattagaacgatcggtggccaccttgagctgntcttttttcccgggcccaacggcggagg

SEQ ID NO: 55287 - DNA, 168 bp, Heterodera glycines
tgtttgccttaattttaacttattacatagagaaaacggcaattttaataaatttcacctctacatttgaaacttttttccccctattttcgcccctatttcgcgaattttttgcccctatttaggtccctaaattggaatttttcgcccctaaaaatccccacccta

SEQ ID NO: 55288 - DNA, 494 bp, Heterodera glycines
atgttttgtgccaatttgtggtgccgttgcttctgcttctgctgcgcagcttttctcgccatttctgatcagtgagtgatcagtgccgccgaatgagaccattggctcggcaggagatttgagagggatgcattaaaaatgcttggaaatgatcaggcaataagaacctttgtaatcgcatatgatatgagatggcaaagaacaaaaaaaaatgatgaagatttagtcaattcaatcaatttttattttttggtataaaagatgaagacggcagtgccaacagatggtgccgtagaaaatttgaaattttttgttgaaattattaatttttttttaccggtctcatttcattgtcagtctttggtattcttctgtattttcatttcttgggcaaaaattatttttttacagtatgccaagcttgcaattgaatatgcgtgatcactactgatcagaagtggcgaaaaaagctgcgcagcagaaatagaaataaa

SEQ ID NO: 55289 - DNA, 457 bp, Heterodera glycines
atgttcggcataatgtgccgtccggttctcttcatggtctgtgcctgtttcgtattgttttttgtgcacatcacccaacctgaactgttcatgcccaaccatgccccaaccgatgaaaacgaaattccaaacatcggaaaagctgaaccggatgcaattggccgctttggacatgagcacccgcgcaactcggacacggaaacggaaaagcccgcgcacggattcgatatcggtcccgaattttcacccgttttggcatttgaataactaattttttggaaaatgaaaatgaaaaggccaaggacaggattaagacgtggaaaaaatcatgaaaaaatagttaatcggcttaatatccttgttcaaggacgtcaaaaagcaaggacaggagaaaagactttggaaaaccctgactaaatagttaatcagcttcatgtccttattcaaggacgccgaa

SEQ ID NO: 55290 - DNA, 962 bp, Heterodera glycines
gaaagagtactttggctgatcgctttctgcagttaaccaacgtgatttctaccgaatctgatgcccaatacctcgacaaacttgaggtcgagcgcgaaagagggatcaccgtaagtaaatgaacggctaatttatagaggtggccactcgaataaaaagtcaaaatcatttttcaaaattcacatttatgttcgaatctacatcgaaaacattgagagatttttttagatcaaagctcaaacttgctccatgttccataaggtaaagaaagatatgcgtatttcatttttatattttatttacatttaaggattttatgctcaatttggtgtaagttgaagactgcttgccttgccttttgtcgtctaatcagccattcattcgtatcgcggtcataatgggtttttaagcgaaccaattgggtaaatggtatcatttgattggcttatgaacaactttagaaattacaattactacctaattattagtattagcaaatcagtaaagaaaattaatgaatggaatggcagttagatgataaaaattatcggacacttttttttcacatttaagcgatactcctggccatgttgactttgggtcggttagtactttgattttcatttatttttgtttttttagcttcgaggttaaacgttctctcataacctgcgacggagcaattttgctagttgctgctaatgaagtgatgaaaataaaacattttctctaattttacaattttagggtatccaagcgcagacccttttcaattttcattcagcctttgagaataatttgagcatcattccagtcatcaataaaatagacatgaaggcaaatattgccaaagttgaggaagaattacaacaatcgtttgggtttcatgccgtcgaaatttttaaagtgtctgcaaagacgggaagaaatgtaccgaaacttttggaggcaattattcagag

SEQ ID NO: 55291 - DNA, 1230 bp, Heterodera glycines
gcttctggcgttgttggggagaacgtcgtccacatgctgcgcgacgcgttcaagcgacgaggcgacgtggacatcgacgtggtcgcactgctcaacgacaccacggggacgatgctcgcctgctccttcattgaacaacactgctacgtcggggtcattgtcgggacgggtaagaaaactaattttttgttgattttcatttaaatcccctattttttcttttcaggctgcaatgccgcatacatggagcgactggagaatgtgccgaaactcaagggaattgtcaactccgcggaaggtagaaatgggaggtgaagggtggccgtaaaaggcactaatttttgaaacaatttcagatggtctgccggcggagatgtgcgtcaacacggaatggggaggattcggcgacgacggcgcactggaccaattcctcaccatctacgaccagcagttggaccagcagagcctcaaccccggccgacaacgcttcgagaagaccatctccggcatgtacatggtgggaaagttttcaaattgaacaacaatttatgttaaaaagaattttcagggtgagatcgtccgtcttgcgctggaggacttggcacgtcgcggcctattgttcagcggcgacttcactcgaatttctgaacgcggctgcatctccaccaagatggtgtccgacatcgaagggtaaaactgtttgttctaaaaaattgcttaatttcacttcatttgcaggtttatgcacagcaccgacgggaacccattcgccaaagtcggcgagatgctgcgtgccattggtgagttgtcatttgatcatttttagtcattcaacatcccaatatcccatttcaggcatttcgaactcatcggccgccgactgtgcaaatgtcgcctacgtcagctcgttgattggcacgcgcgccgcccatctctgtgcctgtgggcttgccgccatcctcaaccgcatgcagaggccccgcgtgacgatcggcgtcgacggctccgtgttccgcttccacccgaccttcaaattcaacctggaccagaagatcaaggcgctgttggccgtcaaatgcgaagtgagtttcaagttctaatatcatttcggaatgattaattttcccctaatttcagttcttcatggtgctcagcgaggacggaagtggacgaggcgcagcagtcgcagcagcggtcgcattgcggatgaatcgtcttgtgggagcgtga

SEQ ID NO: 55292 - DNA, 58 bp, Heterodera glycines
gaatttggtgctccaatatccaaatgaagctcacatcgacgagctcaaaggcatttga

SEQ ID NO: 55293 - DNA, 274 bp, Heterodera glycines
ctcaacgacatcggtctgtaccacgacagcgcaccgcaccggtccatgtgggagctgaagccggagtaccgcaactacagcaaacagttggccaagaatgtggagcaaaaaatgcagcaacaacagcagaaggacggatgatggcgagaaatgttcataaaatgcaatggaaaatgaatggatttttttaaatttggacgggttcatttgcacgaaaaagtgttgcctaaaatggatggaacgagggcgagaaaacagcactaaaaatatttaa

SEQ ID NO: 55294 - DNA, 645 bp, Heterodera glycines
atgttttctctgttccgcggggcgtacggcgaaatgacgcgcaaagaggaatattttgtcgcactgttcggcttggacggtgcaggaaaaacggtgtttgcttaaataattatgtaaaaattccttatttttggatggcattttccacaaaaaagtgatacgtgccggccgtatttataaaaaggaatacaaatttaattaaaaaattaacaatgggccaccaaattcagcgtcgatttaaatgcctatttctaaaatctttcctaacaatttttccattggattaggcttatgttgagcgactgaaagcgcactttgaccggcactaccggtgccggaatttggccaaactgtcctccaccgtcgggctgaatcgtaagtttttacattttgccaaaatttacatgttttgtaaccgatttgccattttgttcacagatgtccgtgtccctctcgctggtgccgtgctcaatgtgtgggacctcggcggtcaggcggaactccgtcccctgtggcactcttatttggcggaatgccatgccctcatttttgtggtcgactcgtctgatgtgcagcggttgcccgaagtgtgcagcgcattgggtgggggcactgaaaaagcgaaaaaatggggggggggggggg

SEQ ID NO: 55295 - DNA, 91 bp, Heterodera glycines
atgacggttgtcattggtaatgccatgtgctattggttggtagggatcatcaccgtgtttttggctgtcaacgatgttaccatggtgtacg

SEQ ID NO: 55296 - DNA, 1184 bp, Heterodera glycines
atgcccagcaaagagaaagtggggacaaaaagagacggacgaattgaccttttaattctgttaaaggcaatcgaataccttcgtcatatcctcgacaattcgtttcgcatccgtcgtttggacctgaacatccaagtctcaaccgaattggtggtcaatgacattttggacgttttgaatggccatggtgaggagttattttgtagcattgttaatgataaacctttattctttttagctaaagtacaacttgaagaactgttcgtccgacgtcgttatgtgggcagcaaattctccggtctcgtgccgctcattcggtcgaatgccaaaacgttgaaacaaattggcaaaattggtttgggcgaggctatcaaagcactcagtgacgaggtgagtcacttttacagtatttgtacaatcctatcccattttgtgccgtttcagatccacctcgaacgtctctcgttaatcaacttcgacctggtcgaacaagaccagcgtttggacagcgaagaattggcccaaaactcgcgcttttacattcgtcggttggctggcattggcaccacctttgaccacttgtcctacacttgtttcaccggtttcgagatcaccaaaatgccagccctcaacatgctccgtcagtgcaaggtgtgccattcaaaatcaacatttgctgtaacggcaattcttttgatgccatttgcaggtcaaaagtcttcgtctgacgatgcaaagcggcgtggccatcaaagacccggaactccctcgcccgctgttgccgatgatgcagcgaattcaattggtcggcggaatggacgcgtcgtcggagagactgtcgttgctgtttcccgccctggaggagctcgaaattgaaaagcaggacctgatcactggccaccgactggaaaagcgagcgcgcgtcctctccaattacgcgcccgactttgtcggtgacgcatataattctgtcgcggccgcttgctgaaccatcggtggacgacgtaaagccatggaagacggagaagcgagcacattcctttcttttgacatttctttgtcagtatcgttccattgatcttattcattcgttacattatatgctcatttaactgtaaaatcaggacatgatcttcaccatccgtttgatatgtatgttttttaaatcattttccttttgacaa

SEQ ID NO: 55297 - DNA, 897 bp, Heterodera glycines
gatacatctgtgagcaattggatggaaccgttagtcaaccggatcgtcagaaagccattcaaaactttcaacggcctgattcggacgtgttcgcttttcttctgacaaccaaagcgggtggtcttggtctgaatttaaccgccgcagacactgctatttttctcgattgggacttcaatccgcagaacgacaaacaagcggctgcacgatgccaccgcatcgggcaggacaagtgggtcttatatttatttttttttatttatacaaaaaataaataaatttttttaatcaaaaatgtttgactttttttttctcaaaactctgtaacaaaacctttagattccctcataaagaacaaaaattcttcggatcccttctccatttttcgatttagacctgttaaaatcattcgtctcgtggcaaaacatacggtggaggagctgataaagcagagagccgcaaagaagctgaagctgtccgagaatgtcttgggaaccgacgaaaaggaaggttttcgagtatttcttgttcctaggtttttttttcaaaatattttcaggcccttcactaatgtttgacctgtccaaactgttgctagaggggctcaccgacctggagaaagagcagaagaagcacacacagtttcacattctgaccgacaaacagcttgaagagcggttgggtcgaaccgaccaaaacggacattggcaaataaaggttggccatattttatttatttattttttgataattttactttttgacagggcgacgacaaagaaaacattgaggatgagcaaatagaagatgaagcggagggaagaacgctgtacatgttcgaggggtatgactacagtgaacagcgagcagctgctgagaaagcgggcattgccttgg

SEQ ID NO: 55298 - DNA, 911 bp, Heterodera glycines
atgcaaaaagtaagaaaaataaaaactaactttcttaaagaaatataaaatgttcgggttttgtaattaacggttggggaggaaccctaacttaaagtctttttaaatttgttaggaaacgattgtcacggtttcggtaatgagattttcgtccatataacttttaattctattttgaattattaaaatcgtgcttaaatccatagaatttcaatttttaaatattctattctattcaattgggaggaaaacgagaaattttcagtttttttcagccctttactagacataaaaccaccggagaaaaccctgctctgaatatatatatatattggagaggcaaccaaaattcttttagaggcagacaatttggaggatacgtgcaaaggaatccaaattttattccattgggacaaaatcggacttggaatgggaattttggaaataatacggggagatttgagaatttccgacctcaaaggggaaattttgggaatttccgagggaattcaagaggaagaggaagtgaaaggcaaaaatacaaaataaatgccatttcggatgaggcggctcagccttcggtatccaactcccgaaggtccctgaccccgacaatgacatttttgacaatttcaatgattctgtgctcatttttcgggactatttctggtcaataccaattatgttctgatcgagttcccaccacacccatttggttaccaaacgtaacagaatgttcagtaccggagtaccaaaaagctgacgagagaaaagttacactttttttagctgttcgaatgccaaagcaattcccagtttataactgctatcagaaaatgatgaaaatttgtacgggaaattttctttttttctggaaagacataaaaagtcaggattcgtacgtgaaggga

SEQ ID NO: 55299 - DNA, 3714 bp, Heterodera glycines
ctaatgcccaaaaaccaaaagtcaaaacgtttctccaaaaagtcttcgtctgcgtcggcagcattgtcaagtccaccagcattgttggacatctctgctctaccaaacccggtctatgaagacatctcatcaccggaaggatcggtcattactggcgccgtggtagccaatacaattgtgtcaacaattgagccaaacttggacaacgcagttctgacaacgctttcgccggaagatgttgatcggatcttcgctgatgatcccgggatggcagaggaggttggccgaactgatcgagtatctgaaattggtccacagattaagagtatgttggataattcggccttcgggccatctgtcatgaatgagacccgtgcactcggcacgaatgagagcacttttgaagagattgcggtgagtagcggggctcttgaaaccatgggagcaatgatcagcgttctatccgtacagggagaggaggagagattgattgaaagagcaattgaagtgattgaagagacgcagaaaatgaaaggatcatttgggcaaatgatcatgaaagagatggaaaatgagggagagaagggtgaagaggaagcaaatagggacctcggtccgtctgtcatggatgttgtcgagattgaacggagccagggagttaattatgtgttggaagtggaccaagatggaattgaagtgtttaaggagaaaaaccccttaggcaagagacgccgaaatctgagtgaagacgaaaacggtaaagatatggaaaatgagggggatgacggaggaagtggacggaaaatggttatttgtcaaataacggacaaaatggccattgccattcggtttggcggaaaaatgaagggtccggatattatcggaattcctgagtcgttcgagttgggtgtacagctcagacttggtgacattgtgtttgtcacaagttatgccccaatcgagcgctttcccgattggctttctaatgcctttaagatcaatgccgaagccgaggccatgacagtctcatccgttcttcaaaattccttggaaaagtgcatagggattgtaatgagcatggtgagagaaaataaggatgtgccaagagcggtggacgtggccttccccgagagtcaagttctccagcgactgtatcaacaccagttggacagcacaattgacttggccaaaattaagcctggagtgcttataaatgtcacgttcgtgcgcatccatcgcccttccgacattgccattggccctaagggcatttacatcacaccagccgattttgagggagtttctgaaagggaattggttgttcaccaaccatgcattggcacggggattagcggttttgttaatggttatgagttccccttttcgacaagcactgatttgaagctatgtgagcatggaattgcggcagctgtgtccggagcactgctaaaagcaaaagcagagatggaggagttcaccattcatacggcgttgttcgtcttggaaagcggaaaagacaatattgtggtgacttttgaacattttgtacaggaaaaacgtaagtttgtgaatttgaccaaaatttgggaaatcgatgcagcggttacagccaaactaaaaggggccaaaaagccttgtgctgttggacgcattttggacgtccacaaatgtgttgtacaagaaatgtttgtactacaggcaaaggttcttctcatgtttcaattggctcggaaatacgatgccgagggcgactttgagcgcttagcggaaggccatgaggcgtcaataactcctagtgaatcctttcaggctttggagttgagagttgagcgtttttatggccacatgttcagctgcatgtcgagcgggtctgatgggaccagccgcatttggaaaatccttctggcacagaacaatgttgaaaatgaagacacctcttcggaagttttggcacgaattgagaggcaccccgccttgcggaagctggaaggtggccaaatacgcacggccgaactaatgctcgacaatgttccgagagtcgtggcacagcaagcgccgcctggctcagggaagacatatacattggctgcgattgttgctgccttaatgagcaacccaaaaaacaaaattctatgcttagcaccgcttaacgtagcggttgtcaaaatgtgcgaagaattggtcggggccttacaaaccgaaggatgtgatgaagttcctttggcgttattttcgggaaatggcaaaggaaaatacagggattatttagacaaaattgcagggaatttgttggaatcagtggtcacttcggaagatttctggaaaaaactcgaacagaaggagaaaagggaagtacacagatatttgcgggatgtgaggaaacgcccgcggattgccaaggaggcgctgatcgcggaatacgtgctgaacttggaccggaggcgagttctgtgctgcactttgggatttgctgaacagattggccggctgatttgtgaacggaacatcgtggtgttggacgaggctggtcagggaccattcgtgcaagtctgctcaactttgtcggctctctgtgagataaaaaaggttttggtaaccggggaccggtaccaattggcggtcaacatgcaaagcgttcccgagccggttagggtaggatttgggtttgacacagttctgataaatttggacaaggctaaagcggtggataggacaacactgctgacaaattaccgttctcattggcagattgtggcctgtgttgagcacatggcgtacaaaccccacggggaacgccttcagcctgggccgggttctttcaggatgctaatcgatttttggaaaatgccggtggcggaatcccctcttttattgatccaccaggaatcactaatggaaccggaactgacgagcttttcggcaacaaacagcggacaaactcgaacagtactggacctcttggccttgttggacggattccccggcagcatccgcataatttccttttatgctgggcaagctgcgcagattggcactgagctgaaagagcaagggtttagtcggtccattgtctctgccactgcagacgcaatgcaggggcacgaggccgatatcaccatcgtcacgacgacagtcaccaagcagcaacagttcagcaattggcaacgggccaatttttcaaaggatcgtaagagtgaattttggggtgatgcccaaagggtgaatgttgccctttcccgtggaaaacatggactaattgtaataggcgactttcttgaattgggaggcagcccaatttggtccagatttctgaataaggccattgagtttacggtggtaacttccccgtctgttgttaagtccatcaaaagcccgagttcgagctacgtccgtggacttttagtcgatgattctggtgaatcagtccaaaactatcgttttcatgctgattggttggcacccggtcgttcgtcttcaaccgcggctgttctgtctcgaaatgggaggccattgaacaatttaaatcgaccaaataatctcaatttccaaaattctcctatcaaccaatccagggacatctccaatccgccacttccttctcgtcatgttcagcgcgaattttcacgaactcgtgcggaaattcgatgttggcgttgtaaccagccgggccatgtctccactcgttgcaccaatccaccagcacggcagaactga

SEQ ID NO: 55300 - DNA, 3180 bp, Heterodera glycines
atgacggcattcttagcgaagctccggattgacgcgagtatagtccccttgaaaaatgaaaaatccgaagttgacccttcatttaatattgatttttctaaatccgttgccgaagggaaagacttagattctttaaaaaagctagttgaagagttctcggatatttttagcaaaagtcagtatgatttaggatcttttacaggaggagaacaccattttgtcacaacaacaggtacgccaatctcttcagcaccaagacgaatgccttacaaatacagtgatgagctcaagaaacacatttcgaagctgttagcagctggtgtcatgattgagtcggatacaccatgggtcacaccatttgtggtggtacagaaaaaggatggtggaatcagaccatgcttagactttaggaaactgaatgatgtcatggttcccgatagatatcccctcccacgccttgatgcaatcatggaaaaaatagggaattgcaatttttattcttcattggacctctccagtggctatttccaaataaaattgtcagatgaatcgtcatggaaatgtggtgtcattacggaagattgtgtctaccaaatgttatacatgccatttggtttaaaaaatgccacagcagctttctccagggcaatgactaccgttttattgggattagaagactgtgctctatcttatgttgatgacgtgttagtattcacaaaggatggcactctaaaagatcacctgagttcgctaagaaaagtttttgagcgttttagactttacaatctaaaacttagtccaaaaaagtgtaattttatcgcaaaagaaatgcaatttttgggctttactctttcagctggcggttatagaccaaccatgagcagaatagagctcataaaagacatgccaattcctggaaatgtcaaagaagttaaacgcttcctgggaaaagcaggtttttaccgtagacatatcaagaattttgctacgatagctgaaccccttttgagcctttcgaggcaatctgtcaagtttgaatggaaggaggagcaacaaaaagcttttgaaatgcttaagaaattcatttccgagtctccaaacctaatttttccaaattattccaagccttttcacatctttacggacgcctcagggtctggacttggcggtgtattaatgcaaaaaaatgaagaaataggcactttctcggctatctcttactgtagccgaacattatcggcatctgaaaggcgatggccgacggtacaaattgaaatgtgtgcaattatttacgcactgagagaatttagaccatttatttttatgagtgacattgaactgcatactgatcacaagcctttggcctatttactcaaaaaagcggaaacccatccccatttagctcggtggctcgttgaactccaaaattatcagattaaaattgtccatgtggcaggtcggcaaaacacactggcagatgccttgtcacgtgcttctgaggatgtgccaattaaggaggttgatggtttgccagagatggaagacatagtccaatttccaatatgtttttcggttcagtcaagatctcatatagtttttgcaccgtttgttaatacgataaccctgaggcatgaggatgggaatagctatcagatagatttggccgaagaacagaggaatgaccctgaaattttggcatacattgattttctgaaaaatggatcatttccggctgatttctcggaaagcgaaaaggaccaactttcaattttggcatgtaatttattgctaaattccggagttttatactttaaaattggaagtaatgtcccgcgaatttttgtccctgtgtcattacggtcacttatttttgaatccttccacagttccccattaggaggagggcacatgagtattaaaaaaacattaaaaaagtgtaaaaagtatttttggccgaggatgcattcagatattgttctctgggtgcaacaatgcataacatgccaactccgacataaccccactccagcttatcgtgctgaaatgcaagtggttcctgttaatactctctttgccaaagttggattagatttggccggaccattccccacaactgttaagggaaataaatatttgttaaatataatttgctggtttactaaatacgtaatttcggtcccactacctgatgctaaaggccgaaccatagctgatgcctttctaaagaactgttacttaaaatatgggggttgtactgaactgattagtgataacgcaacggcatttacttccgaattttttagagaattttgtacaatgttatacataaataagacatatgcgaccccgtattggtcccaagggaatgctattactgaaaggacttttcgtacatatcacaacattttgtctaaatatatcaccaaggaaaacccagattttgacgagtacattgaatttgcctcattctgttataatacgtcgtgccattcatccaccaaagagacccctttctttttaatgtttggtcgggaccccattttctgtgttgatcaaattttggacgttcgcgttcacagtcaagttgatttcaaagatgatggcgaatttactcacaaattagttacgactttaagaaaagcatggaaatgtgcggcggaggcaattgaagaagcacagaataagatgaaaacacaatatgacaaaacaatgcgacagcccaaaatcagcgttggcgatagggttttacttagaaactatgccggaaaagttggcacttccaaaaaatttcaccttccttggaagggaattttcagggtagttgagctgaatggtgtccatgctaccataataagctgcatttcaccgaaccagccaccaaaaaaagtacacgtcaatcaaataaaaaagtgctttgagctaatgggccccccatgcacatcgccaaaaactcctaatgacgagcaaatagtgccggaaaaattagcagttgatgatgaggaagaagtgcagagcaatgaaccgtcagaagctgataattcgaaccaagaaagcagtgaatcgaccgttacaaacagacaaaatgtgaccaaccaaacagttgcagatattagtggtgacaaaagatattctctgagaaatcgattggctataacaaaaccaaaacggttcactgaatga

SEQ ID NO: 55301 - DNA, 1791 bp, Heterodera glycines
atggatgatggaatgaatatctcggttattgataaaaatttttgggctgggaaaacttcagtcagagttcctgatatggaacgtgctcaagtcgaattgaaaaactttgaagaggctgttaacaggtgcctacgaaatattaaccgacgggcatgtgccaacaccaaagccttaaatgacatggccaaccaagtcaattcaaacctgtcagtattgcaaacgcagcttaactcattaaccgatatcaaccctacggcaaggaattcattggctttcacaaccccacgcgagcgcagtacgagtcggaatccacagcacgggacaagtaacaactcaagcaattcaagtgaagacggagatgagccagagttaggggcattgaacacgttgactggtgtaagtggacagttagaggtatttggtgatgaatcagttgtcgcgtttgatcaatggtcggaaagattcagtgattatgttggggctttgggaaggaattggactgaggatgaaaaagtcgctcgcctcaaaatgtcactcgttggcacacctcgccaactcttcaaacaattaagccaaaatgagactgcaaagttggacaccgcgataactgcccttcgacgtaaaatggattcaccccaaagacgtgaattaaccaaaaggacgctggcacaatgtaaacaacgcgaaaatgagaccatttcagaattcattaagcgtttgacaccgttagttgaaatagtcaattcgtccttaaatgattcccagaggaaggagaaaatttgcgaagaatttttggacagaattaggtctgacattggtttcttaatccgcttagtagggctaaattctgcaaaggatttagaccaggtcaaggcgcaggctgaagaattagaagcacttttggcagcggaaaagggaacaatttctgacacattgaggggtacggtaatggcattaaataatcaaaggcaagtccatactgatcagaggcctgatcagtctcccccacatcgattttctcgtgcaaacacaaccccattgggaaatcgacactcgtcaagagggtattcgaacggcagaggccgtggcggttacagaaataggacaccaagccgtaaccgatggtcaagctatcatcaacagatgcagagccaaagaagatggagcaacagacccgtttgtcactattgcggccgaactggtcatattgcttcattttgccgcaccagacaagaagaaatggcgcaccgtttcagccgtcccaatcataatttcagaaataatggagctcgatttgatgaccaacggagaacgaattcatcgcaggagcagctgagaaatgttactgttttggattctgatgcacttattcgagccatagctaatttgagtgtgaatgaatcacggccctcgggcgttactgtcaagaacgaaggagcgggtactctcaaaaccctggctgtggtagaaaccccgaaaaagacagaggaaccaaaatcagatccaaaccctgtacctgggacaagcagtgatagcttagttcccatcagaattcgaagttgggaaggaattgctcccaaaatttctaaattctccaaattcacaatgattatggtgatgttactgacgatggttattccaaacatgtgtcaaattaatttggctattcctatgccgaaaggtccaatgatgtgccaaacacaacttgtgggccatttatgggctcttccgtcctttctccctgtccaaccctcaggcctgactctattacggcaccagtcagaggtttaa

SEQ ID NO: 55302 - DNA, 589 bp, Heterodera glycines
atgggaaaaagggggaagaaaaatcgcaaaatgcgaggaggtaaggggggggggggggaaatgtgtgcaaagcaattggggacaaaaaggtgataatgtacttatttaataactattttggttttttatttcgcaatttttcgtacataaatttcccagcctcagtgatgatgttgcaaatggaataataattttaagtaattattttttaattctaaagccgagacaattagacggaatttaaatgcgtagaattatgcagaggagtcgaaattgggcctggaatttattggcttaattttaatttgaagacgcaacaacaaaatttttcggccgatcaattggacaaattggaacgcaaatttgccataacgaaagtcgcaaatgcttctgagtgtgcacaattggccgtggaaactgggcttacggagaaacaagttgaagtagggtttaataaggaaaaatctataatttaaaataataataataattattaaattaattttaggaatggtttgacagtcggcgcctttcactgtggcaagcattcataacgaaattcgtatgtgtaaattgcagaattttggaa

SEQ ID NO: 55303 - DNA, 2718 bp, Heterodera glycines
atgcatcgcgaagtccgcgaactaatgcatatgcaactgcacagatgcagtgatagttggtgtggtccacgtgaccccaactttgggcggtgtaaaaagggcttcccagccccgtactcgaaatgtacgatactacacccggacaggcccgcattgtattaccggcctagcccaaccgacggtggtgcccaaattgaggtgaacggcttaatatacgacaactcgcaagtcgtgccgtacaacccatacattttgctgcgttaccgagtacaccacaacgtgttattcgcatacggtaacaaagcgaacatcaaatatgcactcaaataccctttcaaagggcctggacattgttatgtcgagtgcaaagaggagtccggcagcaaaatcggtatcgatgagccggctcaatatgccaaaatgaacttccgtggtgctacggaagcttttgcagttgtgcattcaatgccatttgcaaaactctcgcaccaggttgttcatttgtccattcatttgccaaaccagcagcccgttgtatacagggcattccaacaggtgagcaaagctgaggaaattcagcgaggcgagctcccagagacgccatgctctgcctattggaagcaatggcaaaacgaatggcagcatgttccatcgctcaaggacatgctttttgaaaaagtcccagagcaatttcgatgggcaaaagaccgatggcttccgtataaaaggaagcctgccaagaggcccccaatcggtcgtgttgtacctgtccctccaacggaccgggaaagatttgcactttatgcgttgatgcgtcactttcccggtgatccggaccacttgaaactggtcaatggacagcagtacaacacctttacagaggccgctctacagcatgggcttcttgaagatgaccaaatttggcacaaaacgctcggcgaggcagccttgcatcgctggccggaccagatgagatggctcttcgtgagcatccttgtctttgggcagccgagcaatgccatagaactgtgggacaagtataaagaccaaatgtacaacccacagggcatcaccagtgcggctatacgccaagcacgcgagctgcaagccttagccgacattgattggcggttgcactactttaacttaagctgtgtgcactgtggcctgccagatccaccaaattcaaaagctaaaaataccaatttggcagttgaagaatttttctttggtgatgatggtctgaatatgccgcctggccagccaaatcaaaggccacaacaaaacaccccacctcccctcaataacgaccagcaaaaggtctttgatgctgttgtgagggcaatacagtcggacccgaaggaccagactgtgccgcgccgtttcttcattttcggcgatggaggtacaggaaaaacattcctgtttggtcaaattatcaaacgcttgcgaaagcccccatacacctataaagtgctggctacggcatccactgggtgtgcggctatcttgctgccatatgggaaaacagcccattccacgttccgtctcggcagagaagtctcgctagacaagcttccaagcattccgcttgaaagcttctttgctcgacggatacgtgaggcccagctcatcatcattgatgagatcaccatgcttcacaacacggtgatagaggtcatcgaccgagtgtgcaaagaaatggcaattccccagcacaaggacctcctcttcggaggaaaaacggtcatattcagcggtgactttaaacagtcactaccggttgtgcctcacgaaggcctaactgcacaaattacggcctgttttcaaacctctccactgttttgtcaattcacgactatgaaattgacaataaaccagaggttgggccaagggcagcaagcgtacttgcaaatgtgccgccaaatcggcctcggagagaccggagaacacttctggattcctccgcagttcctcgtaaagagcagggaagagttgatagactttgtctatcccgacttccaaagactccttggaaatgacaaggaactgctcaatcgtctgatcctcgcacctcacattgacacgtgcgatgagatcaacgaaattatgatggcgaacgtgcctggtcaagtgcgcgaatatttgtcctcggacaaaccgcttgacgagcggccactggacatcgatgaaatcgagttagaagtggcagcgttgaaccgacgcacagactctgggatgcctccccaccgtctgcgactaaaggtcggaagcgtcgttgtcctccttattaacaaaagcgataaggaaggactgatcaacggcactcgcatcgttcttgaagaacttggcgacgatcgtctggtcggtcgcgtcattaacagcaacgctgttggtggccaagttaagttcttcatcgaaagaacacgcaatgtctacgaggacaaaacgcctggcggcttaaaatatgagcgtttgcagtttcccatcaaacctgccttcgccatgaccattctcaaaggtcaaggtcaaacaatcagcacggtcggaattgaccttgaaagggacgtgttttctcatggtcaattgtacactgccttttcaagggcaacggactggaacaacgtccgagtgtacgctcccagaagggagaccgatgcacaagacagagtcaaagtgctgaatattgttgcaacgaaaatgctcaatttgcaataa

SEQ ID NO: 55304 - DNA, 1450 bp, Heterodera glycines
atgccttcaaaacaaaaaaatcaaaggaagaagaaacaagagcggtaccgagggcagatggagctatctgttagcccagatcgctcacccgtcccagacggaagtgcagatgagaatggggtggcatcacacccgggcaacaccacgcccaatattggtgctttgcaattaagcaccccggtctcttccattggaagtaaaagacggagtatacatccgaaaaccggagcggagccattcatggcatcgcaacacagtgcttcatctgctgatatacaaagcacatcggccactcaaaatgatgagtcatcgcctcgcaataaaaaagggaagatcgacaattttgatcgacccatgtctgctcttgaggcaattgctttgacgccggtttccacgcaaatgaaccgtggagggcgaccatccaaaaaaagaggcggccatgcaggctcaggcaggagcaaagctaatgattccatgagcgagagctcgtcaatggatctgagctctgaagctaccacatcggtggcccttttgccaaatgtgcctgaaaagataaatttcagcacagtggcaattaatttcgccacatcgcgaaatatggcctgcaaaatccggagatgggccgatgttggcctttacgagcgtgatggcgaaacatcacaaggcccacgatctggcccaagattcattgagacctgttggaatgatctgacacagtttctcaatgatgcctttgttgtcgagtatttggcatacttggcaagtatatcacaacgaaaagtggtcgttgttgatccagttgtgtggcaaatgggcatagaccgggtcatgcaatataaaaaaatgacatttgggtatgaccctaatgttccggcagaagtcatacttttgccagtacatttccctggacactggactctaattatccatgatgtgcaatttggcactcattttgccgattctttgcctaccccatatggcaggttggatccgcaactgacggataaaattagaaagattatttctgacattttgccgtcaacagttttaaccgggatttttaatgccgtaaatctgacggttcaacacgatggaaatagttgcgggtacttcgtgtgcctgtatgctgaatcatggctcatgaacaatcgcacgtttgttctgccagatttgtccatcaattatgaaaagcggcgcatattgtggcacattaacgagctttatggcacagacaatgtgccatatcatccgagggaaggggtaccaactccttgcccaattgtctatcgacatgcggatgaggtgcagtcgacatccaaggccgctgagccaatgaaaatcgatgagcatgatgacataatgattatcgaaccacagacgagtggacaagcagttaatactgttctcacccaggcccaagtggctggtgaaaaccaagttgacacgcttg

SEQ ID NO: 55305 - DNA, 1474 bp, Heterodera glycines
ccgcacttctgctggagaaatgcctgcccatttgctggacgaggcggtcgctcgacagatcagcgcgtcggcagtgtttccactgatcaacgcccatttgagtgagttggccaaattaaggcatcgatcactgatcggttgcctgggaataattttgtgatctttaaaatgccgtcgctctcttaggcaatgattcggtgttggacgtctcccaacacatgccctttttccaaattctgttggaattgtgcgccgcgttggcttccgtcccggcactgctcccaaagattgttttgccgcaagacgcacacggaaaatcaatcgcgaaacagctgatcccgcagtttcggaacaacctgaacaattaccccacactgatgagtggaatcagcgaagctgacttatcattcatggactttattcgcaaagtcaacgattattcggaggttggggaagacaaaaaaatgatttccaatttaaattttaacttttcaggtcatcattcgtttggcacggcaatttgaacgtcaaattccagcggaaaagcgcgtcaaaacgtcccattcccatcgctatttcacccgcattggcgccgaccgcgtgcgacgactgcgtaacgcgtcggcgactgtgccatcgtcgacgggtccgagttcggcggttggcagtgccattgcgtcaccgcaagccgacggcttcggctcgcagttgtcgtctccttcagcccaatcgctggtctttttcggcaacttcgacgtctccgcgactgtctctgtcgtagcgcgacagcgaagcgtcgcaactgcaacgcaaagacaacggacagccgcggcacggcgattgagcacgcaacaattggcggaattggacggacagtcgccgagcgagcagtacagggaggtgctcagagagttgcagatgagcacatacaggtgtgggcaagcctaaagggtgcattcatgcttattggatcgtgaaatggctttaggttgctcaacgatgccgggaagctggtccacgggttcagcttcaaacgcgaactccgctccgtgaaccccttctccagctcaaacaaagacaggaccaaacggatcgcaaagtgagttttccggcgagtggggcagagcatcggcgtgtgatcgctcactgactgatcgctgatttctgatcaccgctgggattgcctctgggttctactctgatcactcccccccccctctcccctcagggaactcgcttccatgcacaattcgctccctttgaatgcttccaatgcgattttcgtctgtatggacgagacacgatgtgacattctcaaggtgagcatggtgtgctgatcagttgacaattgaccaacccttttcttccctttggccaggttttggtcaccggtcccgacgacactccgtacgaaaacggactcttcgaattcgacgtgtttttcccgtccaattacccgcaacagccaccgaag

SEQ ID NO: 55306 - DNA, 395 bp, Heterodera glycines
atgcgttggcgtccggacaccgagtacatggtcggcttggcaaattaccagggcatgagtatggtcaagatgaacttctttctcgattgggtcgtcggcgacaaaaagtgagtttttttggtgcaaattttggatctttttttcccagcgcaaaccaaaaaataaactgaattttgaaaaatttccgcaaaaatcttactttttaaatgaaattttcaaaaaaaatttaccgttatttcagcttcatcggtcagggaccagcccccccccccatccctttttcatctccatcttttaatgtagcgtgctaaataagctgtttgggtcggggcctattcactgctttccttcaacaatatttccaaagtggagacaattcactcagcaacaataaa

SEQ ID NO: 55307 - DNA, 371 bp, Heterodera glycines
atggatttaattctcgccactgattggatgaataacgcttacccggaaatggaacaggacaaggctaacatgtcaccaaaggaagaccctagttggattagtctcattgatgaagaggaaaagcgggagcctataagtggccttgcaatttatataacatattcattaacaaagctgaaaatattttcgaaattatagatgttaaatgtcgtaacaataatttcaattaagaatccttaaccggtatgctcgtcctttcctttttaaccgtggttaaggtaaccgtggtttaatctttcttaagaaatcttaaccacaactcgagttgtggttaacgtaaatttatttagtaatttaaatagtaaaataaa

SEQ ID NO: 55308 - DNA, 312 bp, Heterodera glycines
atggaggaaacttttgatcatacggatgtacagtttcgtcatccattcacaatgattgtgtcaggaagtacgcgaagtggaaagtcggaatggataatgagattattacgtaacttgaacaaaattatttcagtaccaattgagcgtgtattgtattgttacggggagctgaatccgaatattttaaatttacaacgcaatgggagaattgacaatataacagtcactgttcacaatggagttcctactgaatactacattaaaggaaatgccaaaaaggaaaaattgttgttggtgttggacgatttattg

SEQ ID NO: 55309 - DNA, 457 bp, Heterodera glycines
atggtaaagcacgttttattggagtatgacactgtggtttggcttgacacttcagtggttttccataaaaatgatttcaaacgattttttgaaccgatgcaaaacggcaaaattggcacggtgcaaatcccaagctgtgagtgaaaagaatggaccttttaaaattaatgagtgaattataaactaattatcattttttagttgctctccacacaatgaatatgtcaactcatcctggtaaaacaaaaaacattttcaatggccttactttgtaattcaccgcatattcccaggaatgtacgaatatttgccaatgtacaccaattttgagccgaacagaacatacgaactgattggaacttataagcccatcatcaaaaccgaccccccacagttcgagacaaactttgtgattatgcacaaatccgagcaaacgcggcaagtgatgaaatggtaa

SEQ ID NO: 55310 - DNA, 450 bp, Heterodera glycines
tgcttatgatttggaaacggtgacaaaaaacaaagaaccgttaaaaaaatgtttaattttactgtaatttaaattatttttaaaataaaatattttaatattaaagaaaatatttaatttaaaaatttaagaataaaaaattgtttttttattgtaatccaactaaaattatttatattaaaaaataaatttaattcattaaatgaatggataaaaaaattttaatgtaaaattaagaatttattcaaaaataatttttaaattaaattaattcatttaataataaatcagctagttcaaacttcgtgaaatttttgtacttaaatccgttttctaataatcttttttcctttatttctgaagatgaatgaattggattcggtgtgcaatttcgaatggcgaattttcgatttcagtcaaatggtggaaggacgggttcgccaccttaaa

SEQ ID NO: 55311 - DNA, 53 bp, Heterodera glycines
atggctttgctttgtgccgccgagcccgactgtatggtgccaattggacagac

SEQ ID NO: 55312 - DNA, 658 bp, Heterodera glycines
atggctggtttggccgtttccctcgtgcgcaccttcgccccgtacgcttgtgggtcgggaattcccgagatcaaatgcattctgtccggatttgtcatccgcggatacctcggcaaatggacctttgtcatcaaatccgttggtcttatcctggcctctgcttccggtgcgtgttcattggtggaggatttatttattttttgcttctttgagacttaccagataaattcataaaacattgatcaaagcaattcaaattcagggctcagtcttggtaaggaggggcccatggtgcatttggcctgctgtatcggcaacattttctcctatcttttcccaaaatatgggctaaatgaggcgaaaaagcgcgaaattctgagcgcttccgctgccgccggtgtttctgttgcatttggcgcgccaatcggaggagtgatgttcaggtgatgatttcggtttaacaggcttatttattaaaaaaaccaaaacctactcattctctttgaccaatggttttttttagtctggaggaggcgagttattattttccgctcaaaacgatgtggcgctcgtttttctgcgctttggtcgccggtgttatccttcgttttgtcaacccgttcggaagtgatcaggtgaatgttttcttggaaagcaa

SEQ ID NO: 55313 - DNA, 603 bp, Heterodera glycines
ccctaatccaatttattttgactaaatttttccaaaaacataaaattatcattttttggacaaaagctgttaaaacgcacttaaattttcaaaaaattttccccggctgcagctcagagcaaaaaaaaaaaaaaaaattagcctaccaaatgaacaaactgccaagaacaccgccgaaaatgcccaacattgcgaacggaatcagttccatgaatgtccaacgcatggaatagtccacgtgaaacagcgaagtctataaaagaagaaaatacactattttttatttgctttccaagaaaacattcacctgatcacttccgaacgggttgacaaaacgaaggataacaccggcgaccaaagcgcagaaaaacgagcgccacatcgttttgagcggaaaataataactcgcctcctccagactaaaaaaaaccattggtcaaagagaatgagtaggttttggtttttttaataaataagcctgttaaaccgaaatcatcacctgaacatcactcctccgattggcgcgccaaatgcaacagaaacaccggcggcagcggaagcgctcagaatttcgcgctttttcgcctcatttagcccatattt

SEQ ID NO: 55314 - DNA, 537 bp, Heterodera glycines
atgtacggcatagtggtaagcggcaaacgcttgccccgccgcgacgcgtacggaactgtcggagtcggacagacaaatgcgaatggagccgatgaaggaggaggcgtggttctccacgatttccctgaaacgaacgcattaactgacaacgaacgaaatgggaaaatggaaattgtcaaattgcgaattcagtcattgtcagcggtggacatttccgatgatttcgatcagtgcgagtgcaacaccacgccggtcgttgacgccgccttgtctcagcctgtcttccagcaaaggcaaaacaatttccagaattcgctcgcccattttcttgacaagttcggacaaacatcggacggccatctaacaaaaaatgtgaatgaaaagcatttagaataccaaaattggacacacgcacttgctgacgatcgacgactgcacttgacagacagtgaagcatcagctcaaacattggcttcatcatgtcgcgaagagtgcgcggtgtattggcaacaattacctgtttaatggaaaagtgaa

SEQ ID NO: 55315 - DNA, 534 bp, Heterodera glycines
ccatcgtgtcgtcttctcccgtcgtttctgaggtcattttgccactaacccctgaaaaccaaatttacgaattaaatttccattatcaaaagacctgacacaaagaacagaaaatcgccgagcaatttgaccgatgcttgccgaatccgccagttctcgtggatcagcgcggattggagctgtgggatcagcaactttcgagcgtgcgtggaagaggcggtgatcaaacgtttgcccgcaattaacgccgactcgcggacgtattccgtttcatcagccaaagcctggcaaataacagaaagacagttaaatattgtgctgcaatgaatgaatcaccttcagaatggaaggaatgattttggaaaggaatgggatgaaactgaaaaagtattgaaaagttaatttaggagaagttgaaattggactgaccgatctccgaaagccatgggcaaataaatgtacaattggatgtacccatcgcgaatgtgtggctgagtcgtgggtgactcggtaatgcgaataacgccgggcaaa

SEQ ID NO: 55316 - DNA, 548 bp, Heterodera glycines
cacaatatttaactgtctttctgttatttgccaggctttggctgatgaaacggaatacgtccgcgagtcggcgttaattgcgggcaaacgtttgatcaccgcctcttccacgcacgctcgaaagttgctgatcccacagctccaatccgcgctgatccacgagaactggcggattcggcaagcatcggtcaaattgctcggcgattttctgttctttgtgtcaggtcttttgataatggaaatttaattcgtaaatttggttttcaggggttagtggcaaaatgacctcagaaacgacgggagaagacgacacgatgggctccgaggccgtgaacaaggccattgtgcggagcattggacaacgttcccgggacgaacttatggcggggatttacctcgcccggtacgatgttgttctggctgttcgccaagctgcttcccatgtttggaaggtcagagccaacattgttttcactttatcatttttattatataaaaacggcaaaattgtcagaaaaacctactcaatcattctctcattttgttga

SEQ ID NO: 55317 - DNA, 1583 bp, Heterodera glycines
atgtcgagggggttcttgtgcttccatgtttattggtcacctcagttaggcttggcttccctggccgattgcgtttgctcctctgccgaagtggtgcgactcgtccgtttgattgtcagcgaaggattggctgaccgttcggaaaagtgtcgcgacattatgcgcacagcggcaaccattgcgatagaaaaggcaattccgtcgtctttgccttctatttttttccaatttaagcatggttcgcattgtgtcgacgaactttttcctattctcgaaaacgaactgtcgcaaatgggcgtcgctgagaagaaaaaagggccgtcggaggaaatcgagcgggtgacgacgggacagttaacgattggcaacattcaaagcaccttttcagaatgacaatctccgacagggattggtcgttctcatcggcaaattggcgcagtttttgcaaggcgatgactcaaaagtgcgcaaaatcgtcgcacgactcatcgaaacgctgtccaccccttctcagccggtgctaataaattgttaattgttgaccaattaagccgttgtttaggtccaagaagcggttgccgcctgtcttcctgcgctaatgccgtctctgcgtgccgatgccaaagcgttgatggagaatttgtttctattgttgaccaacgccgaacagtacggcgaacgacgcggcgcggcctatggaattgcggcaattgtcaaagggctgggcgttgtcaccatcaaagaaatgaatgtcagtgaacgtctgaaggaacttttggcccaaaagcaaaatgccctccaccgcgaaggcgcgttgctttgcattgaaatgttttgcaggtaaaaccaaacattggaaaagccaaatttgacatttcgcttcagcacccttggcaaattgtttgagccctatttgatccatttgctcccaaatttgctgaatatgttcaatgatacgaacgaagccgtcagaagggccgccgacgacgccgcacgagcgatgatgtgacggacgcactctttgcaccttcttttttaccaattactcaaacatttaggcgttttctttccgcctacggtgttaaacttttgttgccgtcgcttctcaaagggttggacgatgactcgtggaggacaaagtgtgcctctgctgaactgttgggtaaatgcaccatttaattgcacttttatttatttatttttgtttttgttttaggggcaatgtcaaactgtgcccctcgccaattgtccacctctttgcccgccattgttccgaaactttgcgaaactttgaccgatacgcataacaaagtgcaaaaagcgagtgaacgcgcactcaaacaaattgccaaagtcatccaggtggaatcattttgatatttcaatttgcactcattcatttgcttccttcccccgtttctcttcagaatcccgaatgtctcgccatcagttcccacttaatccaagcactcgtcgaccctccgggcaaaacaacttcttgtctacagacaattgtgaacaacaaattcgtccattacgtcgattctccttcgttggctctgatggtccctttccagtcgatt

SEQ ID NO: 55318 - DNA, 599 bp, Heterodera glycines
atgtcttcacgaaaccaagcaaattctgtccctgcatctctttgggataaatgtgttcagaatttggccaaaattaatgtaaatgattatctgaatattagtgaacatgaaatcaaaatatttgaaacgccagacgggaaactttacaatgaggaagtgattgagaggtattttattctctgtttttatatatatataacccatcccttcacagaaatatggaattttatgatacgaaaaatgtccgacgagatccaagttaccgaacatttaaagaacagattgaagccctggaggcacttaacgaacgtgcgaaaaagaacagagaaaagggaattctcagcgaaaaacagaaaaaggctgttgaacaggaattgaaaatagaaagggtatgccgaaattatcgaaattttggggaaaattgttcaaaattaaatatgatcttttgatagttgatgacaatgtctcaattttaggagattagatcaaggcttaagaaattgcacgattcattcgaagagacaattaaatcgcttttcattgcgtgtaaaaaggagccgaaggtatcactaattgctgtcatttccgtcaatctttaa

SEQ ID NO: 55319 - DNA, 289 bp, Heterodera glycines
gttaattgtttgataaataattgcacaacgtcaatgcctccattatttcccgaagttgttctcatttaaatttaatagataattttgactgtacatttaatcatttagaaggtagagagcattcgtcacttgtccacaaaatcttgggaggcgacatttacgaaggattatctctccaatgaaggccaactccgttttctttcgcgcatgtgttacctcgcaatggcacattaccttttgtaccgtggagtgctccccaaaggagttttcaaacgccgaaagctcgaag

SEQ ID NO: 55320 - DNA, 262 bp, Heterodera glycines
tggctcaaatgatcttttattgaagcaatgttgaatttcagttcgtttccgtgtatttaaacaaagtttgaaccaaaaatgtgaaaatcgaaaatttgaattttcgactttttgttcgaattcgggtccgggattaggaagtggtctaaatgggcgccggattcgtgatcagcgacccgaaaaccccataaagtgtttttatgacttttgaaaacacaaaaaaaatttcgaaaaggggggggggcaaactgaactaattacc

SEQ ID NO: 55321 - DNA, 707 bp, Heterodera glycines
atggtctgctgtttcacatttctttggcatcattgggaccgcttcaaaaaacgacgcattcacaaaaagaaaatgtaaaataaaaaaaattgtcggaatatttcccctaatttttcagttttatctccgccgactgttggctttcagtgttcgaattgcttccgccacgtcaacttggccatggcattgctctgatcagcaatcgttttgattgttacgttgatgaacacttcaaaactcgtcgatggtcgtttggatatgtgcaaatttggcgctgcaaaaaggaaacgaatggcacaaaggaaatgcaaattttcaatggccgtggcgaagcaatggaaattccgcaaaaatcggtgccaaagaaagtcattggattccaacaccttttgataaggtgaaaacgaaaaaaaaataataattttttttctgatgactttttcagttacatcgaccgaaatgccatcgaatttctgcgccgtttctcttcggtttttgcaaattatggaattaatttgagtgttcaaacaaaaaatgatcgtctttttgaacgcttcttgctcaacgtttggccattgctcaaagacgaaattcgcgtgatacttttgtggccaatggatctcaaccgtttgcgacgtttcgggcactcggctattctcaccgattgtccatcactacgagtagtctttgacgcaatttgtctatag

SEQ ID NO: 55322 - DNA, 1060 bp, Heterodera glycines
ctcgaggctgggctcggttcttttcgtattgatgccaaattcggtcacgctcaatcatcattagtcaataaaatcccaccgatagtaccgatttttgcttgccagcagatgaacattgcgtgccgtacggtgtgtgcgaagctgcggtttgtttggtgggactgctccgagcgaacaatgcaggtcagtcagtcacagtcccgacaatacgagaagagagcaaagtgtgctgttttcaagagtcgggttcattgttagttttttgggtctctgtctcgattctgggctcaattttcagtctcgaatcggaatctcgatcaaaaattgctgtttccgacctcctaaagattaccgtaacacggcacgcgtatatacagtataaccccgtggtgttgtgacttttgggtttgggaaattagacattttttcaccatttcccccattttgttgcccattttcagtgatccgaacgtgcggcaacgaagcgcttggctgccaacgcaatttggaccggtgggctcacatctgctcgtgcgaagaacacttttgcaacactttcctcttccttcggttggacaaaaaaaaaatgccgtgcgtttttcgatgcccaaaaaaatcaaaaaacgcagggcgaacacaaacattgacattgggatgagaaagaacccacgagaatcactgaaaccaaatctaaacatcggcggccaaaaattggacagaataaactctcacagagtccccatcctttcggctttttgccctaattcgggcagagaatggacaaatttcaaaaaaccgtcaaatattcgcaaatgccaagaattgccacgtgggtttgccccgggggcattttgccactgtttccttggcattcccttttcgccgttgatgaactgaacagctccaacttcgcgtgtcattcccatttcccataacagatggcgacgaacggaccatcaagaactccaacatgctcacgcttctgctcgtcattgtgccgttgtccgtcggtgcggcggccgtcgtcgtcgtggcgattaattactattgccacctgtgc

SEQ ID NO: 55323 - DNA, 1520 bp, Heterodera glycines
atgcaggaattaatgcaggagttacaaattaatgagaaacaaaaggcagctgacgttctcattccaattttgagggacaaaattgaggcattagaagagaagttagacataactcacaacacggatggtgacactacctccggcattggacccctctcaaggagcgtgccaatgcgtaaaaatttgccaaaaactgagcttaagagatttgatggtagtccatctcagtggataccattttgggattactttcgtacaataattcatgaggactctcatgtcccaaaaattgataagttcagttatttagactcatgcattgaaggcaaagccagtgcaatcattcagggtattccaattagtgagagtgggtatgatgatgccatagatttacttttaaaaacctacggggaaaccaaacgtctaattcgaacgttgaaccgggaacttatgtcgcttccaattagtgagtcatttgaagacgacgagtccttgtacttgaagtctgaaaagatttttcgacaactgatttcaatgaatcagaatgtcgaagatggtatgtattacagtaacctggagggcaaaatgtctccagaggtgttagataagtactgtgttatcaaggatgccgaagataatgatgattgggatacgtcaaagtttcggaatgcattctcacgtgcattggaccaaataaagcataggcaggaattaaggaaaaatgtgattgagcccaaaagggacaaacatgaactgaccatgtctttcacggcattttccaagaatgataagtaccaagggaggaataaatttcctcaaaggaattcggatcaatcgccccctcgtgggcggaaatttgaaccaaggaaatttcgtgatcagaggcacgataatagtgactcatcagtcagccattcaccaatgagggataggaggaattctccttatcccaaaagggattggtcaagttcaccagagcgtgaaaaatggaagaaggatgagcagagaaaatgccaattgtgccaaggtgagcacagtgcgagtaaatgccataaatatatggatgccctctcacggcgcaacaaagtattaaaaatggaattatgttttatttgtctaaggactggtcattgggcaagtcaatgtacgttaaagggatataagtgcaacatttgcaatcgggcgggtcatcacatctcattgtgtagatccaaagacatacccaaggataggaggaatagtagttcagaaaattcaccagttcggtcgaagataaatacgactcaagacttctcagagtctgaagaagttgaaaaggaaataacatcggtcacttcgtgtgttacaagtaaaacaacgaaattgtctttgctgaaatgtaaatatgttaccatttataatccagaaaatccaaggcaaaggaaaaggattttggttttcatggacgatggaagtcaaaagacatacatttcgactaaattggctcaaattttgggtttgaagccaattggtaatcaaag

SEQ ID NO: 55324 - DNA, 2018 bp, Heterodera glycines; identical to SEQ ID NO: 24588
  unsure (1)..(2018): unsure at all n locations

SEQ ID NO: 55325 - DNA, 1128 bp, Heterodera glycines
tgcgcggaatgacgacaaccttcgctggtcaacaaatgccattgacgctggactttgttcgctgaaaccgagacggtgccgtgccaagaccgaagttccaacagaaagtgccatcgtccaacatctttggtcaacaaatgccattgtcgctgggttttgttcgctgaaaccgagacggtgccgtgccaagaccgaagtgccaacagaaagtgccatcgttcaacatctgccaccttcactcattcccatgccaacaaacacaaagaacaaaatggacaaatcgccaaaacagaacggaacaacggcagacgacgaaaatggacatcgaaatcggcgactgcttccaaacgaactgatttttgagttggttttgtgtgtgccgagtaccaaatggcccggacggcaactgctgctcacttcttcacttgtttaccgtattattgcggacagtaaaaagacacaaaattggcgaaagcctttgccaattatggtattgtaatggcacgaacgacggttgggggcgtttgcggtgtttgcctcgggcaaataaatgcttttccaaccaaaataaccattttgaaaagcaatgaaattttggaataagctaaaacactgaaaaataaactaattttcaattttttatgatattaagtaattaatttttctttcatttcgcgtttgtcatctctcatccttttcactttcactcacttacatttctcatttatgaaatacaaagattatgctaattaattctaatttaattacaggccctggacaacaccttcttccacaaaaatttgaccggatttaaggttacaaatgccattaattaagttttgggaaaagttttcaagttcaaaatgccggcagattttccctacaccgaattatgtgcacaaaactgcttttcgctaatgctataatattccatgatttcagatgtttccactgatcccgcgttggcactcatattcgggcttgttcttatccgagctttcagggcattacaacagatacatgcatttgagtaccgatgaggagacacatgtcgagtcgaagacatttgctgtggtgattaccatcgacccggcccatttgcctgaaggacgaactgtacaaatggcg

SEQ ID NO: 55326 - DNA, 1252 bp, Heterodera glycines
aagctgaagtggtgcctgcgcatcgatccgaaaggcctcgacgaagaatccaaggactacttgtccctgtatgtgctgctcgtccaatgcaacaagacggaggtgcgcgccaaattcaaattctccattctgaacgccaaacgggaggagaccaaagcgatgggtgagtgacgggcggagggaattgggacggcacagaaattgccatattttaaaaaaatttaatttccaactaaaaataagttaaattgggcatttattacgcgataaaataaatcagcgacggtcccattggccccctaagataccccacactcgaaattttaaggaaaaatagtattttatagtttttatgttgaatttgcgagtttccttgtcggtgtaccccctccaagacttcagtcacccaaattttcaaataaaaaaataaatcattaaatttttcaaaaaatttcagagtcgcagcgcgcctaccgatttgtgcagggcaaagactggggcttcaagaagttcatccgccgcgactttttgctggacgaacagaacggactgctgccggacgaccggctgtccatcttttgcgaagtgtccgtcgtcgcggacactgtaagtgccacattttttgggcggctcctactgaattctcggcatttccggattgaattcattttccgtccccaatgttccattcggtggccaattttcccccttctaggtgaatgtcaccggccagtccaacatgatgcaatttcgggtgccgccctgtcgcctctcggacgacatgggcattctgttcgagaagggcttcttcgccgactgtgtgctgtcctcgggcaacaaggaatttccggtaaatttttcttccctttctgctttggttcctggcccaatctttgttatttgacaatgagaattggtactctacccccgattcttaatttgtttttgcattctccctgagaatttttccttcgtcatggtttctaattcctcctccctccgaaaacgataaaaaacagaaaaaagcaatttactttttctttgttttccaaccttcttacaaatagttgttttttctataaaaacatcaggaaattaaaaagattaaaaaaatacagtaatctgaccaaagtgaacggctattaaaaacgaggtcgaatacgggcggacccgtacacaggtttagcgacccgtagtaaccgtatttttccgaccggtacgggttttactgactattcagatttaaaaatga

SEQ ID NO: 55327 - DNA, 207 bp, Heterodera glycines
atgagaataaattcccagataaataaacgaaaatcagtaagaatgtgaaaaaatattcaattattttttaattacattgaaataaattataaaattcagtttaagataatgttttttgtcattcttctcgtatgccaaacatcgcttggaattggtaaaatgatggcgggatttttataagaacacattttcaaaatatccaataaa

SEQ ID NO: 55328 - DNA, 360 bp, Heterodera glycines
atggcctttctgctgaagtttgttctgctcctctcaataatggcaattttctgcgactgtatggaccccggcaaaaatgggaaaaccaaaaaaaaaggtacagaaattagctggagaaaaagaataaattcaaaataaaataaaaagaaatttagaaaaataattttttttcttttgaaattttagacgttgtaaaacaaaaagttgacgaaacgaaagttgagcgtaaggaagaggaggggaaaggtgaaaaaattaatttaaaaaataaatattttaggcgccagtgaaatgaacaaaggcaaaagcatcgttatggctgactccaaaaaggaaggtgaaaatattgttaattaatta

SEQ ID NO: 55329 - DNA, 361 bp, Heterodera glycines
atgccagtccaaaagcctctcaaattggcagtccaaaaaacagtccaaagggcactcaaattggcagtccaagatccattagcagtcctaaatcaacacaaattggaagcccaaaaggcattcaaattggcagtccacgaaaggaaaagaccaaattatcttcagctgttggctcttctgatttcaatgttatcgacgaatgtaggaagtcataaagaagcaattagaagacacatatataatttatttaatttagcaaaagaagcgaaaaaaccaagccaattcaaaccgagtccgtccagaagccaaaataaacgcgaacagcagcgactcaatgttactattggagaagcgggaagag

SEQ ID NO: 55330 - DNA, 90 bp, Heterodera glycines
atgctacagtcaatacagccgcaatacgcgcccttgcgcatcatgacgcgatttgcgcaacatcagcagacgcgacgggacagtgatgga

SEQ ID NO: 55331 - DNA, 352 bp, Heterodera glycines
atggttcgattagtctttcgcccctatacccaagtcagacgatcgatttgcacgtcagaatcgcttcggacttccaccagagtttcctctggcttcatcctgctcaggaatagttcaccatctttcgggtctcagcgcatacgctctgtctccgccccatcgcatgcgatcgagacgggactatgttgcgccccaacaccgcagtgccagggatcacacatcagctccgtaagaagccttcactttcattgcgcctttgggttttgaacacccaatgacttgcgcatacgctaaactccttggtccgtgtttcaagacgggtcgaacagatgaccggcttttacaccgagaa

SEQ ID NO: 55332 - DNA, 69 bp, Heterodera glycines
atgaagccagaggaaactctggtggaagtccgaagcgattctgacgtgcaaatcgatcgtctgacttgg

SEQ ID NO: 55333 - DNA, 1354 bp, Heterodera glycines
caaaagcgggctgcagttcgcgcaggtggccgagttttcgctcatccaacagactttgacggacaatcgcgtgagcctttcttttggcgtgaattttgtggggaaaatcctcttgagttttggacgaattctatgaactttgagaaggaattaatttgtaattggagggctaatgggggaaaagcagcagaaaatgttaaggaaggaaatgagcgacggacggacagagaaaagggagaaaaggcggggggctgaaaaggacgactccccgcgccgggggcgacttccccaattcaactctctccccgcattgctcttctcttccccttcccctccttttgttcgtcgttcttttccttctcttggctaagagtgaaaggaagagagcgaagagaacagaaaaagtgcaggaggagagaagcagagaccgagaaatagcgaaagggaggagagaaagacacacaaagcaaaagaaaatgaaaagaggggaagacagaaggacagattgccattggaaatgccattttgagagtgccaatgggcagaatgaaagtctgtacaaaacgctgccctaatgagggggaagtcaatcgtaaagagatttgtttaatcaaagattaggataatatgctgattttaacattacatttaacttttcctcggaatgaattcgaatcgaattttcactaccgtagtccaatggcattccgtctcgaaacccgtggtttcgcttctgtgctccgccgattgttttgttgaattttcgcccgtcccttgggaagtgccgtcgatggtctaattaagcaaatgcttttgttggcagagtgcccacattgtcaccggctcccacttcagccaagtgttccgactcggtttcaaactgaggtccttccgcccttccgatttctgtgaattaattcccccatttttcagattgatttgcaaagctcgcggggaccctcggcccaaaatcaaatggtttaaagagggaatggaaatgcaaccgaagcgaaacgcccattactacgaaaagccgctgggaaaggatgaaatttgggtttgtccatacattcgccagattaggactgatttgcaagttttgtttagagcaaattggagatcgatccggccacaatgggagaccaggcaaggatggggagggaggggtaattagccaataatgaccaatttggctgggaatggatgcaccttcaccgagtgacatttcatttcggcacattaactgaccacaagggcgaaaaaacggaacaattgaattaagggcatttacgcatgtgtggccaacaaccaacacggagtgatggccaagaatttcaaagcggaataccggtag

SEQ ID NO: 55334 - DNA, 634 bp, Heterodera glycines
gagcgtgccctcttctttgagttggaagcggtccttcagtttgcccagcgttccgccgattgtttggccatttacggcgctggtgctagtgccgaagttcgtgcagcactgcaaaattgtgatgatgctgacatacaaaatgcttctttcgccatcgtccgtcaattcgtccgtcgcattcgcaaatattttgaaacggcgcaacgaattgaaaaggtccgttttttcctattgaaacggacaaaacaaactcaattgataggttcgttttctaatttaggtggtccctgagctgttgtgggagctctgttccggccctttgcctcccgttgagcagctcgactcggcccaggccctctgcaaacaactcgcccgactcatcgatttcgtctttcattttgacacaatgaaaatgaacacacccgcgatgcagaacgacttcagttttttcaggtgctctcgctcttccaattgctcttttttgactccttttccttaaggcgagtgatttcgcggagcgaagcggcggcgcgcgaagcggagaccgactgttccctcgagttggccaacaccatttcgctgttcctcgcctcgcccactccgatgctaaacgcactgacaaacgcaacagccg

SEQ ID NO: 55335 - DNA, 849 bp, Heterodera glycines
cgccttgaacaaaatcctttcccatccgacaatgccggtgagcatcgccgcgggcgaggaccgcaaaatccgtttcttcgacaacaacacgggtgagaagctgggaagactatttgtatagcaaaatcgcttaaaaaatagacaaaactaatggtcaaataagtcagtctttaccccacccctaatttacttttttttttaatcgttttgtgcgattaaaaccaattcttttggatctaaaaagcctttcttcatttactccggtccaatgacttttaatgttggtataaacagtcaatttgtccaatggcattttttcgccttcaggcaaactgatcagtgcgcccatggcacacgtggagggcgtgtccacgctggccatcgaccccaacggactgtacatgctcagcggttcccatgacggctcaatgcgactttggaacgcggagaagcgcgtctgtctgcaggtggtgagagggcggcgctgaaatatgtgcacacttttcttccgtcttttcccctgtcgttctcgcccctgcattatcttcttttctgtttttcttttcctttcctttcttcctgtctctttttctttcgtctttccccttcattatctttttctccgtctctgttcttttttactttttcttttctgtcaccatctctttcttatcactattttttctttgacactctttttcaacgtgtggccttaaattccaggaaattgctgcccatcgtaagaaatttggtgccggagtgatggccgtcgctttccatccctcacggcaactgatcggctcttccggggcggacagcttggcaaaagtgggtattgttataggatat

SEQ ID NO: 55336 - DNA, 91 bp, Heterodera glycines
atggtaagtagtaattcgtattagtcatcaaatttaggaggaaattagtgatcagatcgctgtggttgatcagaaaattagcgaaaagtga

SEQ ID NO: 55337 - DNA, 1414 bp, Heterodera glycines
cgcgttggacttgctggagacgacggaccagcaacagcagccgtgccatgatgaccgtggcagtgcaacgccgcgcgacaacgcgtcgccgcccccgtcgccgtccgcgttctcccacccacgaccgtcgcagctgcaatcctcgaattgggccagtggtggtgttgctggtactgctccaccaacaccggcgacaatcattggcccctgtccactgctggactctaagcgaaagtctgttagcaacagcgtgttgtccgtttggtacgtgttttttgcggtgcgatttttgggcgcggcccaattcagtctgactgagaatggccatttcagcgccgtacttttggccttttgattgtttttttctgatttttgttcgtcattttttctcttctcaattggtccgtgtcctgcttcatttgtggcctcagtgttacagtactaatgcatactgtgctgttcatcttctcacggatatctaatcatgtttttcgattcattcagtcccgataggtccacttcttaatcagccaagggtccttggcctggaccgggctagagtacagtctaaccagtttatagacgaattactgtcttactctgttcgggttacggtgtctttaatgtttatttgctttattagatcagttgtattttttgtttgcctgctgttgtttctctaagttcttagtcgttaatatttgtgctgctcgagagtctcggtcaccaattcctgctcgccctctctctgaaaattccggctctcgatcagccctacttagcaaagtgcagttgcacagtcataaaatcttattaattgattagaattttatgtctgtctgtctgtctgtctgtctatccctaacagcagtagtgtctctctctgtctgacttttctgtgatattctgtccaattgtcccaaaagcattatctttcaaaattcaaatttctttttttttgcagggatctgttagctgtcaaagtcactgttcgcttcaaattgccttcctgcgtcggactcggctcttccggtcagtgccgtttttgcccatccgacaaaattggggtgaaggcactttgaccaaaattcaattcccggcctcgaacttagtcttggtgcctgattttttctctcaatagattcgggcaaatattttagccaaaaatatccgtccaaatttgtgttccacccaaaatgccaatcccttccctcctcaggtgcttattgcgtttgcattgcggccgccctccttcagacggccggcctaatccccccgccttcggtgtccgccgaatcggacgaactcacttgggacgagtcagtgctggacatcatccgcaagtggtcttccgcagccgagtcgctgatccacggccgcgcctctggcctggacgcggccatttgcacttatg

SEQ ID NO: 55338 - DNA, 544 bp, Heterodera glycines
atgtacgttgaagctgttgtcggacttctgcttgttgcaagtgtagtagtagtaggaagagagcaacaacaaccctttaacgcaacagtgtcgcctccacaagttccatcagaacgagtaacttaattaagggataaaccaaggtgtaattagttaatttaatttactgccaatcgttgctccatatcccattgtttcacaccaaccatcccgacaagaatgggttctttgtacaaggttgggattttggatagtttttgtcgaggttggaactgtagaagttgaagtttttcttgatctagaagttgtgtccatagaagctgaagttgccctggttgatttcgatgttggaacagtagaagttttagtcgttgaacttgttgtcgaagttggggccgtagaagttgtacctgttgtcgacgttggagccgtagaagttgtacttattgtcgaagttggagccttagaagttgtacctgttgtcgacgttggagccgtagaagttgtacttattgtcgaagttggagccttagaagttgtaccg

SEQ ID NO: 55339 - DNA, 549 bp, Heterodera glycines
acgtcgacaaccggtacaacttctaaggctccaacttcgacaataagtacaacttctacggctccaacgtcgacaacaggtacaacttctaaggctccaacttcgacaataagtacaacttctacggctccaacgtcgacaacaggtacaacttctacggccccaacttcgacaacaagttcaacgactaaaacttctactgttccaacatcgaaatcaaccagggcaacttcagcttctatggacacaacttctagatcaagaaaaacttcaacttctacagttccaacctcgacaaaaactatccaaaatcccaaccttgtacaaagaacccattcttgtcgggatggttggtgtgaaacaatgggatatggagcaacgattggcagtaaattaaattaactaattacaccttggtttatcccttaattaagttactcgttctgatggaacttgtggaggcgacactgttgcgttaaagggttgttgttgctctcttcctactactactacacttgcaacaagcagaagtccgacaacagcttcaac

SEQ ID NO: 55340 - DNA, 551 bp, Heterodera glycines
atggagcaatggacttgtgaatctgctgcatccattggattgtgtaaagtgagtattaaaaaagataattcgatttaaaaaacaatttttaataccgagtttatatgaaatagttccgcaagaaatttaaattttcacaatttatatacgctttttggacctaaaaagttcccattataacctaaaagacaacttcaaggaaatttcaaaaatatatctcatcttttatataatatatctccatgcaatacttctcttattgaaagtcgctaaccaaagcaatggcattcaattgttgttggacatgttggaagaaagcagcagattttctaccactactttaatgaagaattcctaagggtgattttgtatataaatttttacattttttactactatatggtgcggaacaatttaatgagtttcataggttgttctgaagaaattatttgtctttgtctaattttccataaaaagtaaatttttaattttagctaaattacattagattatacatttaatatttattttacatttaattttatttttga

SEQ ID NO: 55341 - DNA, 1514 bp, Heterodera glycines
atgaaaaaggacgtcgtttcggcgttagttcgaccaatcattcgtcattctttcagcacggcaaaagtattttgcttcgcttgggtcatcgcgtttaatttcggtctttttttgttgatattttgcaattattcattcctttccataattgctcttttagctttgcttttgcgtcctttccatgcgtcgcttccgtcactttttgctttttggcacttttccgactttttcctccctctctttgcgcgggttttaatccttcgtttaactccgtttgttgtcactaattttctcatgaaggtgtttggtcaatttaactgtggagaaacgtttaaatttagcccattgaatttgtcatgccaactgttttttatgctgccacagaaggattgagttcgacaatgacactgacaaatgcactcgagtcaaacgatccgttgacaaaggttttactttcgaatgcaatgccattttttgtccggtaaattacaatttttcagttttttgcgctttatctgcttcaacgaatgtgttcagccaacacttcgacgcggaaacccttcttcgcattgagtcaacctggtggtgataatatgtcttttcatggttttgattgtttattaaggtggacatccacgaaattggcattctctccgtgatgtcgccattgcgcacgtacgcaatgtccgaaatattttccaaatagccactcatagtaaaattctggtgcattcgccgggggttggaagtgcgtcacatgagcaagtctttggccgatgcgtccgttttcgacactttggaggaaattgacgaagataatgctaataaatcattggtgaacagaaatggcagccttttgttgaactcctcgacgggctcaaccggcgtactgaacgaactttacgaggccaaacactccttttttgttcccccttcgctcaacccgcgctcagctggtccttttttaatgccgaaaagctgttccatccccaacgtttattttagatgcttttctttccgaacgcgtccattgccgtcgtcgtctgattgttgtgccgcttttttgtgatttcattgtcaacagatgcaaagaattgctttttgctcctgcaccgattgtctcttcctacgacaccctttgcactttatatgcgattaaaggtccgtctgtccttgaaagttttgaaaaaagttcattttaataaccgattggcatttagctctttccaaagtgatctctcactctcttcatgaggatgaattcggagttgtgcagaaggacatgagtaagtcgctttccgaactgacgcgcctttccatttccatcgacgcatttgtgagggccaacggagtgagtccttttgcaagggtgggaggcggacagaaaaatgccgcggatcgtgcatttaaaaaacattaaattctcaccgaattttcacaaattaagcatgcgtttcatttccccctcaaaattttttcgtaagaaaatttcaattaaaatttttttgaataaa

SEQ ID NO: 55342 - DNA, 793 bp, Heterodera glycines; identical to SEQ ID NO: 24604

SEQ ID NO: 55343 - DNA, 531 bp, Heterodera glycines
atgttcggcaagcgcgcaaaaagtcaaaaagttaaaagccacgtggacggacaaactgaaaatgttcattttcgcgacagtcgccattttatgtacggacaaaaaaaccaaataatttcattttttggcattaaaaagaccaaatgttcatttgtcagtgcttctgcttccgattcgaattgtggtcgctaccattgcgactcttttcgacgaccacagaacgttgggacgggcaatacacagatggaaagtgacacgcaatggggggacgaccgccggcggaaatgccatgagcacaaatggggacggagccagaaactgacgaacacggcacgggaaaggaggaaattaggaggaaggaagaggaggagacggaggaggaaggagaggagaaggaggaggaagaggagaaatgagaaggaggaggaagaggagaaaatgaggaggaggagaagaggaggaaggggaggagaggagaaggaagaagaggaagaaaatgaggaggagaaggaggaagaagaggagaaatga

SEQ ID NO: 55344 - DNA, 364 bp, Heterodera glycines
aaaagcgttggccaacgaagccgattgatgatgacaatgattacaggcacaaaaatgggagagaggaggacggtgccgaaaatggtggtggcagaggaggcggtactgacttggccagcgcaaaatgtcgctgcggcggcgcgacggtgtgcgacgcgttgaacgcaaagtgtgcaaaaatggtttttcaaattttggtgtcgaattggaccggtaaaacggggatggttaggcttttcaaaaaaccgtgaaaattgggaaattgggcgtgggttaaaaaaactgtttttttttttgtaacttcattttctcccaattaaaacagagagaggcgattggttttttcggcggtggcactcagcaa

SEQ ID NO: 55345 - DNA, 1655 bp, Heterodera glycines
atgatctcgcaggttgtttccgtcgtcccagcacttcgtcggcacaagttggtggagcaagcacttcgtcggcacaagttggtggagcaaaggaaggtggcaaaaccaaagacagtggagggaagaaggtggtcgcaccgaagaaaaagaagaacggatgagcaaagaaatcgcgcatcacgaaaaagaagtgaccgttgattttgatgttttcatgcgtcaatttcgtattgttgatgatggtgctctgttgtcgttgaccataaagtcttgttaagatatttcttcttgggtggcgattatgaccgcatttcatgatagtttagcgttttgattgaaatcagcagtttatgacttgagttataacgtaatgaaaattgaaactcaacttttagtacgttttctccttaattttattgcatagtttaatctttctgattgattccacacctccgacaatatgaaaaaaaattttttttttttgctgcacctccaaattttcgccgaaattttccctaaaaaaatgttgtccgcgaaatcttgtcctgttccggttttttcaatgaaaaacgaaccgttttttgcttaaatctggtgtaaaagtagtatttttttccattacgccttttttttattaattttgcattttaggcttgaacgtgatgggaaattggcggacgctcgtgccaagtttggccaactgttggcactgtgccccgaccaccagggcgcgctggacggcatcgcacggttggacaaaaatgatgacaacatcggcggcacggacattgaactcgtcgagctgagcgacgacgaacacacggaccatgatgacgacaatggcaataatgatggacataacagcggtccgctcaacaacagtgatcggcggaagcgaaggcagagcgaaaacggcaccaatcgacggcacagtgccgccggcgaaaacggcagaaagtcgcagaacggatgtcaaacagagggcggagcagggagagtgaaaagacgagagacaatgagcgaggaggaggcacagagaaacagacagaagttggccgaaatggaggcattcattgccaaactgaagggtgccggcggaggaggcggaagcgggacagcaaaagttacaggcgcaggcggcagcgagaagagatgagaagcggagcggacacagacacgcgcacacacaattctgatcatccccactctcacactgatcactgtgtattgatcgggaggggggggggcaatccgttcattcattcattcattgaggatcaattcagccatggaataatatcatgtgtaattaaaaaaaaaattagaaaattgttgttgttgttgttgttatttcaccacttctgtctctgtctcttctgccgatttgttgtcatccttttcattatcgcgattatatatttttgtttatcaccaatttgttataatattgtcgtccctgaaaaagattaatgagattgccagcaatatttatttatttatttcattcaaaatatgttgtgaaaaccaagagaaaatcgaattttccctattttttctttccctgattttccgtcctcgcgaaaatttcagcatcaaaaataatttaaaaaacaaaagaaaatagggtgatggatgacaaaaagtgaacaaataaa

SEQ ID NO: 55346 - DNA, 178 bp, Heterodera glycines
gtgataaacaaaaatatataatcgcgataatgaaaaggatgacaacaaatcggcagaagagacagagacagaagtggtgaaataacaacaacaacaacaacaattttctaattttttttttaattacacatgatattattccatggctgaattgatcctcaatgaatgaatgaatgaa

SEQ ID NO: 55347 - DNA, 938 bp, Heterodera glycines
ccatttgaccggaccaagcgcttttacaacatcagcgactacataagcagtaagtgtttggtggtctctttcctctctcctttctgtgcgccggtgcggttgggccccaaaatttcgtttcccccacccgtttgagccaccgtcgtgtccattgcgcccgccagcgaagagttggagttggaaattgacgagaacgaggtacgtgggtggacggggacggacatttgggcccaactttccgattcatgcaattcaaaacggtagctacaacgaaaaagcgttaacgtggccgattcagtaccattttcttgattgaggggcgaggaattcgaacaaatgacgtgttttaaatgaaaaatgggatttctctttcataaccctttaaattgccaacccccgtcacccctcggccattttcttctactgacaataccacggtgcttcttggtgcatttttttgacattcattgtgacgagacgattcatttcccctttttacaaattgaggcaatccttacacagcaaggcatcccggcgtattgcaggtttttgcatttcgattattaacactaaatgtgccattcctgtagtacatttaaaaatatgacaaccatttagccgttccaaactgttgtttttctgattttatgaatattcaattttatatatttttcatggaggagagattttcccaattttagtgacactttcaaaaatacttgtttttctacgtatttaatgactttttgaagccatttttggctatgatttttttataatataaaataactttcttccaaattcgaatcgaaaaattattaaaaaaataggcaaaaaattaaaatttcaacgcaattatttcacccctcgccgttcagggacttcgatcggaccacatttgaacacagcgagcacatccaaatcgtgcgcgacaaccc

SEQ ID NO: 55348 - DNA, 567 bp, Heterodera glycines
cgaatccatcggtgtgcggctgcgacccgactgagcatttcggcattgagcagttgggcaggcttagcttcctggagtgctgcgtcaaggaaatcctccgcctctaccccagcgtcccattcgtcgcgcgtcgtctcggctccgacacaatcattggcggaaacaaaatccccgcgaatacccaagtgttgctgaacatctacttgatccatcgggagcctgaacactggccgaacccggagctgttcgacccggacaggtggcatttggcaactctttttgcggttctttttatttgtcattttattaattttaagattttctcgtgagaatatgaagggtcggcacccgtacgccttcgttcccttttccgctggcagtcgaaattgcattggccaacgcttcgcccttctcgaggagaaaacgatgctcgtttggttacttcgcaacttccgtatcgaaagtctgctccgtcgcgaccaaatgggcttgaaacccgaattgatccttcgtccgtccgtcaaaatttctctcaaattaacaccccgactttaattgtttgaaagt

SEQ ID NO: 55349 - DNA, 815 bp, Heterodera glycines
ttggacgatttcgcagatgcggagaaaattggggagggcacttacggaatcgttttcaaagtgcggatgagggccaacggagagaccaaagcgttgaagcaaattcgactgaacaggtgggctggggcccatcgagttgctccgtctgtctttgttttattgttccgtaccaaaataaatcgttttttgtaccgtttgccaattgttttttcctcctgtgccatgtcaatgaattggcacagatttgtccattaagtgggaatgacggtgtgccgagcacttgcatccgcgagatcagcctgctcaaggagttgtcccatccgaacatcggtctctcctctccccctccctctgtttaaattttcatttccattccttcttcatttcccctcttcagttcgtcttgacgacgtaaaaatacacagtaatgaatggcattaattccttggcattttctccgtgtggcattttcagagggccgtcgtctctttctcgtcttcgaatacattgaccaagacttgaaaatgttgctcgagcgtctctcccctcgttctgtgcccattaattacgttaaggtctttcttctttttttcgattttccattttgcttgaccatttcttcgtcaaattatgccatttcccttccgttcagagtttcgtctggcaattgcttcaggcgctcacttactgccacacccatcgcgtcgtccacagagacctcaaaccccgtgaattgtccgcttcgataatctgttgcttacccccaacacctcttcagagaatctgctggtcaagaatgacgggaccattaaact

SEQ ID NO: 55350 - DNA, 941 bp, Heterodera glycines
atggaaattggagctgcgaatgttcggcaacccatcgaattgtttcccaaaagaacggaacggaggatttttcgcgaaaatgtgaccatgtttttaacaagaaagagaacgactggggctttccaactttcattgcttttacggtgagtgacagtcaaaagaagagttacggtcgaaatattgaaaaaactcagtttagtacagaaaactcattcgttttacacccaaaaatgtttagcggtcatatttttccgcaatgcttttgggtgaaataaaaacaacaaaatgagtttaaaaatgcaaatatcgcaaccattgccaaactcctttctcgtgaaataaatttaaacttaaggaattgatggatccggacgagggattttacgacaaaagtgaggaaaaagtgacgttggccattgatttaactgttgaagaagaaaaagggacaaaaaaagcggaaatttaccgatgaatcaacccacccaatcactattttctgttaattgatctttttgaaatttatacaataaattcggcagcaaattttttttcgtaattatttattaaggaaattttctcatgaatattaataaatatatttctttattcgttttcgagtagagttgagcgggaacgggacctgaacacggacaactgagtaccgaagttgaccgggaccgggaccagtcccgggtttttccagccaaaaattcgcggtttttcaacccgaaaaggtcccggtcccgggtttgcccaaaattcccggtcccgctcaactctattttcgagatattagattttgtgcttttccatcattccgccctcactaccataaaaatatatgatttacgataaattacaacaaacttttctagggtgatttgatgcgctaattaagaatgacgtcaaaaatttaagagttatctatgattttttcaaaa

SEQ ID NO: 55351 - DNA, 436 bp, Heterodera glycines
atgtcgtcgtcatcgtcctcgatcagtgtcagtgttcagcaccagcaaaacccaacacatcaacaacaaatgatggtgcacaacaatgccaacgatgatgccaattccgccaatgccaattttgccgctgttcttggcacgggaggaggagagggcgcgtgggcgcaactttgggtcagtttttggtatattttcttattgccagtcgtaaattgttgttgttgttttttccctcaattttggcatttctaatcagttgtcactatttttatatttgttttcacccggattcaaaattattttcctgaaattattaaaaaatgtaaattccttgaaaattttcttgttcctttagatttttttttacttaaatcttttggtttaggttatgtgtgacaacttttggtcaatttttggcacatttctcagccgttaa

SEQ ID NO: 55352 - DNA, 2211 bp, Heterodera glycines
atgtcaatttatagagcactaacagtttgcattaaaaatgccatctctgaattcaataaaaggttaattaagcaaaaagcgtaaaaaataaattacctatatttgatttaaataaattttacagtaatttttactgcactataattaataattaattgaccttaaaattttgaatctaaaaaatttaaaataaacaaataatgtaaaaacaaattaattttgaaaccgtttaaatttttcctcatatttgtttaaattaacaaatgcaaacacagacaaccaattagtcctggaattaagccctaaaaaatttgcaactctgcctattttaactaaaaacatcaattttatagatataattaacataaaaatctttgaataaatcgacattgaaaacgaaaattttaaatgttcttacattgatttttttaatttattcaatttctgagttagcaccactttttctgatctttttctttcgttaaattaattttgatcataatctccaaaaataaattttgtttgatcatttgatcacttttagattttctccgtcaaaaattcacagttctgaaaaagtgcatgaattgcaacgatcaatctttacaaaattgatcacttgcactgtgaacaaagccaacaaacaccatggcacaacaaatgatgactttttgtccaaattgcattttgacgttttggcacaaatctgtgaagcggatgatcaaatgaaagaaattgtgttgaaaaacagtaagccaaaaagcaaaaacttaaaataaaaaatatagaaattcagaaaagcatttgaaggattttatgaacgcaaattggtataaaaaattatctggtttgcttgagaaggtaagggtaagaattattttattacataattcattagttaatttgaccactttttggccagagctccgttcttcacattttttttttaaatctcattctgctgaagggcaaatcactgatttagttgaaaatagatttttccattttttatctcacattttattgcactaatctctcattgaaatgccgaaagaaaaattaaaataatagtgattttgttaacacatttagccaaacacctagcaaaataaatataaaaattttcaaaatttactataaaaaataaaaaatattttatttaggaggatgaatatttttctgtatccgaaagttttaacgaatctgacggttcagaaaatgaaatatttgatgacccatcagaaacaatcattgaggaaaatgaaaattcaaagaatttaatggaaaaacattcaattaaaaatatgaattttgaatttggtgaaaaaagtgcagaaaaatgtgaaaacaaaaatttcaaaaacaatttaacaacaacaaaaatggatgaaaaaaacagtgacgacgaatttttggcattaaattcagaaaatgaagaacaatggacaaagaaaaaagagcagcagaacaaaaaagcaaaaaatattaatgtaagaaaaaataaaaataataataattcggagaaagaaatgacggaacaaaaaaggaaaggaaaaaatggcaaaaataaattggaagaaaatgatgagaatttaaatttaaataaaaaaaattatggtaaaaagaaaatgatggaaaatttaactcctgaaaatgtacaaccgttaattgagcggaaaaatggaaaactttgcaagaaaatgtttagtgaaattggcgtcaacaaattagcaggcaataatttttcttaaattttttcgtttttcgttttttttaaattttttattttgtttctatttataagattttaattttaaataattttttattagaaagatagatgttaaatttaattttttttttaatttttagatttgctggatgaatcaattttcaaaaagatttttgaaaattttttggaaaaacattgggaaccccaaagcatggagaagcaatgcttggaatatttaggcacaattgcattatttgccagagcaattcaagcaaaaatgaattttattgaacaaatgtcgaaacattgggcaaataaatcggtgaatggaattgccaaaaaatgggaacattttatttttaatgaagaaattttattcgaattcgaacagtttgtacaaatcaaattgtattttctgcaaaatcagcttgatgaatacgcttttgagtaaatatattaataattcacaaattaattca

SEQ ID NO: 55353 - DNA, 654 bp, Heterodera glycines
atgtattcgtctttaatcatttatcaactatttaaatctaacgtgtaagtggtcaccccttcgttagatattttatttattaataaaaagaagaacacttaattgccctagtcaacaaaaggagaatgaattgattatttgtgccccccccctccactgctcgccctcttttatttttctgctgagtaattttgaaaatacggtactttgcgttatgccacactttcccgccccctcccctggcggtgtgacccacgcgtttgggcgccggcaggtttttccactatagcttttttctttggcatccaaatccaaaaatcttggtatcattcgaaagctcttaacatgctctattagccttaccaaatgcaaaaagattttcaatcctggaaaaaattttatgaagaaaaaacttcaaaaatttcgactttagctctaactttatataaaaaatattgattaaattttataattccaggatattgaagtagctttattcgtttaaacagattaaggaaaatttaaataatgataagtagagcttccatttttaggcacaaaaaatcgcgaaataggcacctaaaaaggcataaaaaaatcgcaaaataggcattaaataggcacaaaaaccctcaaataggctaaaataggcaa

SEQ ID NO: 55354 - DNA, 624 bp, Heterodera glycines
ctgctgaggccgccggcattggcgaagtgtttctgttccgtcgtgccacagcgctggccatcagctaccgtatgctgtacttggacgaggatgaggcccaactgtgcaagcagcagcagcagtgctcttccatcgatgggactgagacgggcggcgctggcgcggagacggccgcgctaatcattccgttggacagcagcagcgacagtgataaacagcagagctggggcgaaaaatttgtggcaattttgttcatctgcgagtattgcatcgaggtggtggcggcgacacattaggcgcattaataaattattgtggggttaaaaccggcaatttttttaaacgaataataaaatttatggactaaaattatttttgcgtaattttgcaattttctctcagctgtccgtttatgacttccatcaccaccatttggcccgtctgatctcatcaaagatgctcattctcactgatccaacagcccaaactgatctcatcaacacatttttgcgacgccatctcaccatcttccgtttcaaactgttcaaattgttaactgccggcatgccgaagcaaattgcagccattgtgccgacaatcaaaaaacacattggtgcccattga

SEQ ID NO: 55355 - DNA, 2831 bp, Heterodera glycines
atgccgctgttgcccatcgccgtgttgctgctctcctatttgttgctcccttctccgaatgatcgatcagaaagaatgattggacagcaggacaagtatgttgtgggcacagtcaatcgggtcaaatttaaaacccaggagaacagactgaatttgttgatccgttttggattaactgatcgggaccgcactcaatttaaaactgatcaagaccgggttcatgttttgagctaatcactgatttcggattcatgaaagctccgtttgaatattccccaacccttgactgttcttagcttcacattttagtgttttttaccgaaaataatgaggagagagaattagttttggtgaacttagaagtctcaattccattttctagtcaaaataaaaacatttgtcatcacaaaaggccccttctggaggaccctttggttcgattgcccaccgatgttgtgcccattcattatgaactccatcttaaggtacagaatattttcgccaattttctatcaatggcattatgtttgaggttaattgcttctcaaaatgttaggtgtatctgccctttcgcccttctctgttagattttggcaccaaaaatttgtcggtggacggcaatttgcgtctgttgcttttgtgtcgagcgccaaccgatgtgctgatgctacacgcaaaagcgctaagcttagagcacgtcaaaatgggcacttggccggacgaaatgcgtcaattgacggggccaagagtgtccgagtggagagaacttgccgggggaaacgatttggtggagttgaagttggacaaggcaattagcagcaaatgaataagaaatgatggcaattcggattatatccaattaattagtaatgattaaaaagaaaagctgtaacggaatcggaaaaatattgcaattacaatatttaaatgcctttttaagcaattttaataattatttctcatttaaggcacttttgcccggtcggaagtatttgctggaaatcgattacaaagcaaaaattggaaaagcacacgaaggcggactgttctggggcagttacaccagcgaagacggagagatacggtaacgggccgaaatttgaatttaaagggcaaaatcctaaaaatttggaaactcgcattacgattgatatgggtttgattgcttatcccgctgagattgatcacaaatgctgatcaagattgttggccgccacccaaatgcaaccgctggacgcgcgtcgccttttgccatgcttcgacgaacccagcttcaaggcggacttctccatttcggtccaacatcctgagggcactaccgtactgtcaaatgcgccactttcccattttcggagaatggaaaggtcgccccgggaattattttcgccctaaatttaaatttccaggggttggagcttgagtctgttcgaacgaactcctaaaatggccacttatcttttggcacttactgtcagcgactttaagcacaaagaaaccaactataaggatgttacggtatgccaaagtgagatttggcttgggcataatgccaaacactaaaaacaatcgactgaatggaaatgaaacggtttaaaagattcgagtttgggtgcaaccatcgaagcttgcgcacacggaacatgcgttggaagtttctgtccgatcattggaattccttgaggaatattttgacataccgtacccgttgaaaaagcttggtatggtattaaaatgcaatgcttttaatatttgttcttttttttccttttagacatttttggcgtcccatttttgcgtgtggcagcaatggaaaattggggactgattatggcacgccaacagaatttagtgtatacggacggagtgcaggcaaaaagagagagacaatttgtcaccgatgtattggcacatgaaatagcgcatatggtaaagagaaacaatcaaaaaaagaaaagaaaaaagggcacaaaatgaaaaagtgagagacgtatcaaataaggaaaagaaatacgaattaaaatttttagaaatgcttcattttggatattgaatgcttttcatgtaaaaaaggacatttaacttgtgggaaatgaaaaacaagtgcctaatttgaatatctttaaaattaatttcagcgttatataataatagagaccggatttttcagcatcaaaaaatgctaaattaagcacgaaataagcatgaaaatggcaaaataagcacaaaaatcgaaaaaaagcataaaaatttggtgctttttaggcaaaaattttatcagttaacaataattctccatttttcttttcccactgacaattctaatattttcttagcaaaaattgacattttgaaatcaaaaagtttgtcaaggaaaaaaattttgggggatgaattgagagaaaatttttcaattaagcacaaaaataagcactaaaatgctaaattcagcacaaaaattacatgctcatcattaagcacgaaaataccaatttaagcaaaaatcagcaagaaaaaattgaacttagaagcctcaaaccaagttagaaatgcgttttcatgcttattagcacgctccaagttagcaaaaatttcagcaaatgcaacaaaacccagtctctaataataaatgatattttttgtcagtggtttggcgatttggtgaccatggaatggtgggacgatttgtggctcaacgaaggctttgccacaattatgggcatgaaagcggccgattatgccgaaaattcaacgtcgagaacagttaaacggcgcttttaaaagagatgtccttttttgattccatgggaattcaaaaaaacccatagaataaa

SEQ ID NO: 55356 - DNA, 802 bp, Heterodera glycines
catttcaatctctgggactcaatccaccaacattccaatcaacgggactcaacccaccaacattccaatcattgggactcaatccaccagcattccaatcactggcactcaattctcctacatttcaatcactgggactcaacccaccaacatttcactgggactcaatccaccaacattccaatcactgggactcaatccaccaacattccaatcaacgggactcaacccaccaacattccaatcattgggactcaatccaccaacattccattcaacgggactcaacccaccagcattccaatcactgggactcaatccaccaacattccaatcactggcactcaattctcctacatttcaatcactgggactcaacccaccaacattccaatcactgggactcaaccctccagcattccaatcactgggactcaatccaccaacattccaatcaacaggactcaatccaccagtatttcaatcactgggactcaatccaccaacagtccaatcaacgggactcaatccaccagcatttcaatcactgggactcaattctactgcatttcaatcactgggactcaacccaccaacattccaatcaacgggactcaacccaccagcattcaatcactgggactcaaccctccagcatttcaatctctgggactcaaatctccggcattccaaacaatggactcaaatctccggcattctaaacactgggactcactcaacccaccaactttcaatgacattccaatctctgggactcaacccaccacatttcaatctctga

SEQ ID NO: 55357 - DNA, 123 bp, Heterodera glycines
gctcaaaatattaaatgtaagaaatttttatgatttttttaaataaaaatttgatagctttacaaacgaaatatgaaatccaaatctaagattggtgaatccgttcaattaaaatgctatttc

SEQ ID NO: 55358 - DNA, 582 bp, Heterodera glycines
atgcatttgcatatttttgacagccatgctaatgaggatcggatgtgtaacgaaaataatggacaaacaaagggtggtgaaagaaagaggcaaaccaaatgtgattttgatcagttacggagctttggagttgttcatggagaaattacaaggaatggcccatacagaacaatacaacagcaaacagtaacaaaaaggtaggccagccgacccttacctttttgaaaaagagggcacattaaaaacacaaaaaagtgccgcttaaaaataagaggttatttggatgatggtccaggccaatgttaaaaaaaacaacaagttcaaggaggttgttgaagaggcattggcgaaacaacaccgtgtaaaatgaaagaagcgcgcaattgaaaaagagtaatgatcaaagtattaaagcaaattgtgcccaaaatttttgttagtcggcaaatatttgaacgggaggagagattgccgaatggacaaacatttcacggttctgttcaacgaaaccacaaacagcagaagaagaaaggacaagatatcatcatcaaaaatggacaaaatcaaaacttataaagggaa

SEQ ID NO: 55359 - DNA, 1105 bp, Heterodera glycines
atgaggaatcgatcaaacaatgaacctagcccaccgaagcgccgaagaatgccaaacatcctcaaaagtggaagcaacaacaacaacaacaacaatggcaaaagacgcaattttcggcactatgtacgcgcgctgaacaccgacgtagcgttcaacaaaaaattcagactaatgaatgctaaaagtacattcatgatccagactctaccatcaaatcctgagtcgcttttgcgagtcatttttggacattgcatacaatcgtcattagatgaagctcagagacgtggaattgaaccgagtcgacttggtgcaacaattacttcacagttattggaccctgacatttggattccgatccgtcagataactccaaacacagtggacacaattttgaatcgcttcttagatgtggcacaatcaaagtcgcgggaaggttcactgtggggtgcacccttcagtgtaatagtaaccactctggacactgtcaatctaccgcagcgggatacaattactggtcgcggatccgaacaccgaacgctaaaaggagcgtatcacatcataaaagagaaaaatctgctgaggattcgtaataataataattcctattgtctattctacgcgttggagatcagcagaatctatcactgcatggtgatgccaaaacaaactttcagtaattatattaacaaaatgcattcacaacaacaagacgctgagcgcctaatgctcgatgcaggaattccactaaaccaagaaaggtatgacgccgaagtgtgggtaccacgtgtagtggaccattggaacgcagtatacccggagctaaaatttaaagtattcatcttcggcacaacgggtcagtacagacctaaatataaatatggaccagaagaattcctgacaccaatatcgctctattacaacaacgatcattttgatggcatccgttgtggagttggaacagcaatttttggtcgcgactactactgctttgcatgcgaattgccctttaaaaatgcggacactcacaaaagttcatgcattctgaattgtaaggaatgtggtcgaattggtgcggggcggccatgcagggatgatggatttaagt

SEQ ID NO: 55360 - DNA, 607 bp, Heterodera glycines
gagtgtccgcatttttaaagggcaattcgcatgcaaagcagtagtagtcgcgaccaaaaattgctgttccaactccacaacggatgccatcaaaatgatcgttgttgtaatagagcgatattggtgtcaggaattcttctggtccatatttatatttaggtctgtactgacccgttgtgccgaagatgaatactttaaattttagctccgggtatactgcgttccaatggtccactacacgtggtacccacacttcggcgtcatacctttcttggtttagtggaattcctgcatcgagcattaggcgctcagcgtcttgttgttgtgaatgcattttgttaatataattactgaaagtttgttttggcatcaccatgcagtgatagattctgctgatctccaacgcgtagaatagacaataggaattattattattacgaatcctcagcagatttttctcttttatgatgtgatacgctccttttagcgttcggtgttcggatccgcgaccagtaattgtatcccgctgcggtagattgacagtgtccagagtggttactattacactgaagggtgcaccccacagtgaaccttcccgcgactttga

SEQ ID NO: 55361 - DNA, 1046 bp, Heterodera glycines
atgattagaagaggtgcaaaagtgactaaaagaggtgcaacagtgattagaagaggtgcaacagtgattaggagaggtacaaaaattgaatgcaatttattataaattttaaaaaataaattagtcattccttttattaattaaaaagagaattttgaaatgtacaagaattgaatatttaaattaatatgaaattaatttttataaattcaattaaaaaaaatatgaaattctttattaaaagataattattattttttacataaattcttttattattaatttacaacaaatctttaaatataaattgatacaacagtgattagaagaggtacaacagtgattagtaaattcattaaattaaaacgaaaatattttttaacaaatttaattaaaaaaatacatgaaattctatcaattaaaaaaataattaatttaaacttataaaatttatttatcaaaaaaaattaaattaaatataattttttatttattaactcaacaaaatattttaaattaattaaaatcattgaaaataaaaccaaacatttaaatttattaaaagtaatgaaaattaacccaaaaaatacaaagaaaaataatttacaccggccggattcgaacctgccgcccccccccccaaaagatgactcagaatccccaatcacacagggattctgaggtctaaacgatgtcaaaagtaaaatctgatcacacgtattcgtgatcagcgtcataaaatagccctaataacatgtttctggaagatttttggtgaaaaaatttttccactcaaaaatcctggtcacccccctttggtcccgaatcccaaaatcacttttatttttgtaacatctctcaaaaaagtgataaaaatgccaaataaaatttatattatagagaaaaaaattgcggatttttgtagtattttacttttacagaatgacttttcagaagggagttctgaatttttttctgaaaaatctaaaatttccagaatttctggaataactttttttctttagaagatagaaattccaaataaa

SEQ ID NO: 55362 - DNA, 549 bp, Heterodera glycines
atgaagaagcattttggcttttcactgttctccgttggcattgctgctgggctaatgccaatgcttttcatgctgatgataatgccttcatccactgatggccatgaggtgttcgtgatgacaatggatgaacagcttctcgaagagcatggcgatcttttaaccattgagttgaaaaagggagcgagcgccatttatgtggcaactttgaagcgcaagatcgcggaagagattgacagttttcactctattcgtactatttatgcacatcaactgacaattagactagacatggtagccattatgacattgcgcttgatgacaacaaaacaatgaaagattatggcattggaagactcggaatcgtttatgcttcgacttttgaatttgaaattttcgttttgcatggtggcaaaccgtacaccatcaagatgaacaatggaaacacggtgcaaacactgaaacaaagaatcaaaagcagaattggcattccgcccgagcgccaaacactgagactcaacaatccatatgccaaagtgcttgaggaca

SEQ ID NO: 55363 - DNA, 472 bp, Heterodera glycines
atgagtgtgcctttgaaagtttctaacgatgatgaagacagcttggcagtacttgcagtagtgcaagtacgttttcgaagtgtttttaattaatgattaatgaataattaaattaaatttaaaatatatattaattaaacaatatattatcatgaatgatcaaatttatttaaaaaataataacatcaatgacaatgatcaattttatccaaaaaaacattaacatgaataatcaaatttatttaattattttatgcttcggcctgccaagcccttcttctgcaggatcggcggagaaagttgatgaatcaggggcctgatcattcgattctggtgttcgaaaaagcaaccaagtgcaacagttgctttttgaaagaagaccctttgccataatcccctttttgcttttttgtgtttattttgaatgtgagttcgagtaaatttattgttgctataattttgaaggaataaa

SEQ ID NO: 55364 - DNA, 1365 bp, Heterodera glycines
tctgaagaagatgtcgtggtcgcatttgcttcatccaatgacgtgtttgatgtcgacgaagcagcaacaaattatgttcatctgacaactttggaacaattgcctgttgaagccgaagaaattcgcgatcaaactgctgcagatgatcttctacagcaagtgttttcgtatgttcgaaatggttggccacaaaagtgccccaccaacgaattaatgccttatttcgttagacgtaattcactcgcttttgtgggcggatcctttttgacaggaaacagagtcataattccgttgacgaccctccatttcgcacacccgggagttgttcgaatgaaggcactggcccgaaaacacgtttattggccgggtttggatcatgaaatcgaagtcatggtaaaaagctgcttggactgccagctagcagcaaaacttccccaaaaagctccattgagaccttggccgataccggaagaagtgtttggccgaattcatattgattttgcaggcccttgtcatgatggcaacacatatctgatcctggtggacgctcttttgaagtggcccgaaataacgcaaatgagaacaacaaatgcggcggccacgatcgatatgttgaacaaaatctttcatcgctacggagcgccgaaagaactcgtgtcagacaatggaccgccattctcatcttacgaatttcgtcaattttgcaagtccaaggggactaaacacacattttctcccccttatcagcctcattgtaatggacaggctgaacgcatggtcgacacattcaaaagacaggctaagaaaaattccacatccaaaaaacaaaattggatttcgggattcctctttgcctataggacaacaccgaataatattttaaatgggttttccccagctgagctttttcttggtcgttctccaagaactccgttgtcgattttggcaccttcacaacaacaaaacaaaccggaacaaaatcgtcagtaccaagacggaatgaaaaagcagtacgacagccatcacggtacaaaagatcgacaatttgtgcctggtaactcggttcttgctttgaactatggtaaacacagtaagccaagttggttggaaggcaaaattttaagtgggaaaggtttgatttggaaggtaaacattccaacattgggaattacggtcactcgacacgtgaatcaattacggtcttttgttccctaccaagcaggaaaagttcaaaatgatcagatccatcagcctgaactgatccacgaacaaaatttgccagccgaacccgacgaactgagcccacaaacgccgaaaaccgtccgttgtcccccaactccacgtccagtccgtgaacggcgtccg

SEQ ID NO: 55365 - DNA, 681 bp, Heterodera glycines
atggcattggcatggccaaaatattggcattgcatggtcaaaacaatgccaaattggcatggccaatggcacattgacatggccaaaacaatgcaaattgatgactcatctttttattttctcaatcttagagaccttcttgcgtttgctactgaacctgttcaatgcacgttggacaaactgtacgaacagttcgaaccggatgatgccggcggacccttgttggagaagctggagatgaagcggggcattctccaggcacggggcccatttggaggccattaattgggctaattaagccaaaagcaaagcaaacggaacaaatataatttaatagcaaaaagtcaatgccattcataaaacgatatgtccatataattttggcactcaaacgaaaagtgatttaaatggatttaaatgcgtcgtcctttagctgatcgaaggcctctcttacctgcacaacaatgccaaaatgttgcacggcaatttgacaccccaagcgtgtgtttattgccgctaagcaattttggaaaattggaggccttgccttttccgtagcggctaaaaagggggttaggcaatgaattttaaaaatttagaattcattgaatttttcagaatgtttttccgtgctttccttggaccaagaaattcccgccttgccttcagcctgatctcgac

SEQ ID NO: 55366 - DNA, 908 bp, Heterodera glycines
atgcccatgtattcaaatgcgtctgccgcggcatacgcccaatggtactacaacgcggcggccgctgctgcatacggggccggaggatatctgtcataagacatattagtctaatttatgatttcgacccatcaacgattgatttttcttttcatcaagtgcttcattttcacccgcgtattgatgagaataaaaaagttatttgtgagaggaaaccagaataaattcgctccgttcctcgcccctaaatatggcgctaattcaccaaatgcaccccagggttttggctttttctaattttaatacatcaaatcttaaattattctggcatatagtacgcaacaacaaaacaaaaaaaaactaatttaggagagataaattggatgtccgaaaatttttgagtggttttttttcataagaatttaacaaaaaaaatttttacatttttagcacacgccgatgcctttggccttttgattaaacaaaacacgcagaaaacttggttcgacgggaaagttactaatatagcactttaaaattaacaacataaaattccactacattacatttgaatattaaggtgggtcactgtcggctattcggctagaccgcttttggacccatcaattttaagcccccaaaatgttttgtaaggccagttttggacctctctcttggcccaataagccggttttctggttaggacccgtcgggcttcagcttttggcccaaaaagccggtttgtttcggttcagtgaaacggtcgccgtgacccaccctaatgacactaattaaatttaattggagctttgattcattcggttgaagtggcttgctgttgctgctgtccatttttgccaatgtcattctcttcgggagatttgcacttaattgattaaaaaaataaa

SEQ ID NO: 55367 - DNA, 836 bp, Heterodera glycines
atgggcaaaattggaactggaaaatgtgagtttgctataaaaattgagtaaaattataaatgcaaaaatttctaaattattttagaaaggcacttgaacaaaaagttaaagcaccagggaattggtaggcgaacagaaggcattgaaggaaaaagtgaccaaaattgaacagaaaaacggtaacggtagagaattataatactgtaatataatggcttagaatttaattattggaatattaatatttatcattaaaactggcaccacttaaataatttgaccattggataaaaacaaatgggagggattattgtggattttctataaaataatgtttatgaactcaggttatgaaacctgttcccatggattcggaatcactgtgttcacaaattaccatccattttgacaaattttccgaattatttatcccaaattcgaacccgattcaagaatccagaattggtagaaaccataaaaaaagaaataaccataaaataatttgacaactttaaaagctataaccttttataacttgacaacaattttaaaaaattaattgaaaatttgttacaaatttcagtttcggacggtcatttgaaagcaattttggagagaattggtcaattggagaagcagcaacaacagcagacaaaaggcgaggagaaattaaaatgaaaaagtattcaatcgaattaaatgcttccattttaaatttaaaaattaatccgatttttaagctactggggggcaattgtcaaagattttggaaaaaattggtgaaatggaaaaacagaacgaaaacacggacaaaggcgagggaattttagcgaaga

SEQ ID NO: 55368 - DNA, 403 bp, Heterodera glycines
atggaaaatgatcagaagaacattttggaaagaatcttcagtgaattggagaagcagacaaagaaaaaggtgaatgaattggaagagaaaataaaaataaataaatttaacggtaaaaataatttttaatttatttaataaattattatataataattattaaaaaatatcgaattatttatttcaggggtttttaaaattccaagaaaattgttattttgtgtcaactttttggctctaaattttaatgtcttacaattagtaacatttttttggcaaaaaaaaatcgtttaatttcggcagaaggcattccaagaagagcttgagaaaaaggtcacggaacgaattgtggcagtgcagtcgaaggttgacaaaatggaaatggcacatcaacagcaaaagg

SEQ ID NO: 55369 - DNA, 1198 bp, Heterodera glycines
atgctcggtattttcgtctacggctctttggcggactatcgccgtttcgtcgccgaccatccgacatttgtgcgtgaccaactccgggtggaggacgagcaaacactggagacaaaaatgaaacagttgacactgattttgttggccgagaaggcgcaggtttttattttaagcaatagcgatagaactctttttttgtggtcgaaactttattaaaacgcagaaaattaaacattttaaagaaaatttttaaaaaacaaaaatgggatgaatccgtgccattaaatggaaggacaaactataaataaatattttttcttcaatccatcagcacatcccattgaccactttggtcaacgcgttagacatttcggaccgcgatcatttggaggaatttatcgtcgatgccatccacgcgaatgccatccaaggcaaaatcaacgagttggacgaccaactgatggtcagcttctaccaacaggtgaccaatcttttcatcaggtctaagcctccgactcgaacaacaaaattttctctaattatttccaatcgaagaaagtaaaataattaaatttcgatttcacaaagaaaactataattgttctcaattttggggagggtacaacggggaaatggagaaggcaaagtatcatgccccagggattcgctcctttttgtaaaaagttgattaaattgatgtattaatgaataaaattttcagcgagtgttccaacgtgcccagtgggaacagctgcatgtccgtcttggtgccctgcttgaaaatgcgcgttggttccgtgacaatatgcaatcggtggttgcagtggaagaatagcgaaagtcacataggacgaatggagcgttttgttattgttttcgtcattattattgtttttctattcatgttataatgtcgtatcgctgctatgtgttcatcccctgtctccatatcgttttaagtggcaaaaagttgttatatttaaattattattaagttttgttgggttttaattttatgatattttggcatttgcttccaaaagcggttttaaaaaatgtttgaacccgccgatatttatcggaccaacattatgtcatattttcgctggtcctacaggaaatattaaaatacaaatcgatagttgatggctactgaccattggttatattcatatgcaactatgtaacacaaaataaa

SEQ ID NO: 55370 - DNA, 797 bp, Heterodera glycines
gacttaccagcacttttgtcggcgccgttctttggtttttggaacagcgcaccgcctttcgtcttaccaccgttttctccgcttgcatcgacgagttgtgccgtcaacacaagtcgcccggggcggcctcgcgttaccgctttttgctctgggcgaccgtgccgtccgcgtcgttgcgacggcgcgcatcactgtccacgcggtggggctccttcacgagtatcggccacgtcgaccaaacggtcggatggaagcgaaggcgacggacgctgcacagagaaccgcgcgagttggacgtgtacgagttgcagcggcgcggtgggctgcgcaaggtgaagagcgcgtcctcgcggcgctggtccttcctcaaccgcacgatcagcccctgctcgggcgcctcgtcgcctggcctcccctccggctccatctctccctctccgtccgacatcgtcgaaaacggaatcacgcccgaggcggaggaaaacgcgctgaacgaggcgatagcggccaactcccacgacagcaccgctacaacaatggcgggcggctcctcctcatccgcttccggctactgctccaacatctccggcgcttcggcatgcactcgcttatcggcatcatttacagagccggaggacccttcggcaccatttgacccgccgccgccaacgccccacccgagggggcccaactcattggtcgtgatgccgagaaatcatccaccaacattcactttcgatcggaatgttttggaacaaaatgaattggacggcgatgacgaaagggcgaaaaaatga

SEQ ID NO: 55371 - DNA, 727 bp, Heterodera glycines
atgcgaaaatttgagctttcgactttttgctcgaacccgggttcggggttcgacataggtcgaaattaatgtcagattctgattctccgacccttaaaaccacttatacaatgttttctcgaaaaaaaaaattttttggggggtataaactggaaaagtacctaaatttctaatacattttccccgcattttcagttggctgtgcaacgacatttggatggacattttgccgctttttcgtcgtcctcaactcggccgaaaattggcacttctttcgccacgtttcaacgcgttggtcgacaaacatttcgacagcaaaaacgaactgacaattttgaaacaaatcagaattgacaagatgaaaacaatgccgaaactatgtgtagttaagaggggcattggaatttttaagcaatttccaataccagaccatccgatgcacaacaaactccgttttagcaagcttcagattaagtaaatcaaatcgctgacctacaaaatgtccaggccacgaaatgtcgacaagagtaaaaacccacgaaatgtccagaaaaaaaaacaaaattaaattttataaaaatctggaaaataagttcaccgactccgaaaaccctaaaatagacttacagacttatttttcggatttttataaaatttaatttcgttttttctggacatttcgtggcttggacacttactttgtgggggcgccaatcaaattcaaaga

SEQ ID NO: 55372 - DNA, 1107 bp, Heterodera glycines
atggcctgtgcctgtacctggatccaggaaaaatacagggctggatccaggtacatgttgatctctaatctacacccataaaacacagtcaaaatcgggaagtttcaaaaaaaaattctagggggttgtgaattttttgaaaatttgaaaaacccattggaaggtaaaagtttttcacttttttttgtaaaatttttgatcaaatttttaccttttttaatttttggcttcgcgccaaaacgtgggcgccaaaacgatcctggcgccaaaacgtcggcgccaaatcgtcggcgccaaaacgtcggcgccaaaacgacccagtcccgttcacaacatcgctattcactttggcattttccttgacatatttcaccatttcgtccggcggtgtgccactacgatgacggacggccacatagcaatcgaattcttggaaaaaattaagaatatgagaaatcattttaaattttgtgacaacgagaaattcgggaagagagtgtatgttcataattaatggggtgcggatttttaggagcgaaaaagcctaaaatagaggcccaatttaaaaaaaatgtcttttttttgtcttcaaaaaacacaccagcaggtccaaaagggtggtggaataatcatgtgtaaaaacgacataggatttgtttttgaattttaaaacatggatggatgataacaattcgactccttccccgtcgatcggcggcaaccctgggctactgtatgtttgcttacgataattaaattttaaaaaaatttcagaatttccatactgtcaaaactggtggtgatgccgcattgcagaaacacaagcagcaaaagcaaaacgtttcctacaaaggcagagcaagacgtgtggtgatgcgtaattattaattcattaattagttaattaatgggctaatttactaaaaaaaaaaaaattcaatttcgttttttaaaattgtaaagttgttgttctaaaaaagagtgatccccactcctatgttccaagtctggcacgtaaccctaaaatccgttaattgacaattaaattttttgcaggaaaaatatccgagagctttaaaaacaaaaaaaaagatttttcgttatata

SEQ ID NO: 55373 - DNA, 1261 bp, Heterodera glycines
atgacggaggaggaggaggaggagggggaggacagtgccaaggaggaggacgagaatgatgaggcggcaaaatgggacgaaaaaagtgccactcctgactcttttatgggctttatcattgcctcatcctcctcttccgaggaggaaaagaagtgagacggcacaatgatgacaaggaaagcgaagaagggatgagaaggatgaagaagaggaacatacggaagagaagaagaaaagaaatctcgtgatttgaatttgatcaaatgagcaaaaaaaaatgacaaataaaacaatttgtatttgatcagtgtatgtgaaaaagtgataaatatttatgcgcaaaaataattttatttaaatttattcattaaataaaaaaaattaaataacccaaaaaaatattcacatttttgcattaattattattttttaaattaaagtgattaaaaaaaatcggacctgaatttgaaggggaactcttaaaattttctgctttaaacgaaaatatatttgaattttcatatttttgcatcaattattttttgtttttaaatttaaattgatcagaatcgttttcaaaattttgcagtggaatatagaatttttggcctcaaggaaaacagtgtttgagttttccactaattgcattaatttttatttttgaaaaatcattaatgtgatcagaatcgcaccaaattttgcaggatacttcgaatttttggccttatggaaagtggaaagtattgtttcaatattccatttttgcattaattttttaattttatcaaccataactcatcttaaactgatctgaatggggtttacgggattaatcccgcgggatcacatcccacaaaaaaattgaattctatcccgcagctctggatctgcaagtttgaaatttccggtctctactttagcacccaattgtgaaagttgtgaaagtcaattagtgtgctgccaattcattcaaatttattttttcccagaattaaattaaaaaaatttaactaaatcgtatttaattatttttatttacaaatttcaacatgatcattttacatattttccattttcattttttattgaattgctgatgagttttttttttttttgcccatttccgaccacagaaatttgcttggaaagctattagaaaagctaaccatttgatttaaggcacaatcagcagagaaaagtggacaaatcatcacattttttaatactatgaaaaaaaacagaaaattccgagcaaaataaa

SEQ ID NO: 55374 - DNA, 1138 bp, Heterodera glycines
atgttcaaatacccaacaattgtgctcgtgttgatcaccttcatcatcctgcacattgctgtgcccagcgctgaatcattcatcaatctgtcggccgtcggagactttttcgctaatttgtgggactcgcgcggtaaggcaaaatgccaaaaaaacttataaaaaatttttaaaaatttcagcggacaactgtttttacgcggcccgctaccatggcaatgtgtccgaccaattccatgaaaaagtcaaatattgggagattgaggatgtgcaaaatgtgagcgaccgtcggatctccaaggattgttcgggctcattctatgggtgccagacccacgcgtgcattgatggtgcgaaattttctttaattaatgactttaattagggtaattaaggatgtaagacttttaaattaaattttttggcaattttagttaggataattaaggatttaagattttaaaattaattttttttttgcgattttcattaggataattaaggatttaatgtttcgtattttttgatgatggttttaattagggaaattaaggagcgtttttaaattccatatgaaataaatttattacagtattcctctacccgctaccatatgattttattagttaattttaattatccattttcaattattaatttaattacccaatttttttgttttaattttacagcaaaagggaaccccgtttttgtgttcaacttatgtgcttcttcggctgctgcttccggagagaacaacactggtcactgctctcaccctgaattggaagaactttgcgccatggaggggggcaaatcgaaatgtgccatttgcgagaatggcatgtgcaatgaggcgaacattgagctgcaaaatgtgatggggctggacatcaacggcaccattggcacggcggtggtggagaatggcacgaaaagtgccaaaacgggcgagaccggcggagacacgacggacgacggaaacagtgccacaacggacgcgaacggaaatggtggtgacgcaacaaccgataaaaatagtggtgccatgattcgggcgggaatttttagtggagagaaaaactcaattaggggtctacggcggggattttttaggggagaaaaaaccccaatttag

SEQ ID NO: 55375 - DNA, 1424 bp, Heterodera glycines
atgaaccgaattctgtcggatgacaaaaagatgtccaagaaggaaaaggacgaacgcattttgtggaaaaagaacgaagtgggcgactacgaggcgactctttttgccattttctacaacaatttggtctgttttccatctttagcaccattagaccgaaattagaagaattagtcaattaatactatacaatgcttatttcactttccattcctattggtgccccaatctcagctctttttcgtgctgctcgtctttctctcattcttcattctctactccatttcgcccatcttcaactgtcttgtctcgatgtatggcgctgcgggcattgttttgctattctcaacttcaaagaagtaaagtgatgactatcattccgataatgtataatttgttattcgggagtaaacaattaaagattgttgtaatttattttaaaaagaatagcatatacatcatttgaaaatgagttacattcgttcgtacaataaggaggattcagttggcctacattgcttgttgaatgcagccaatgtcttttcccgttttcatatctgaatcccttgtttttcttcatattattgtacaattcgatcaatgccttggtaatagtaccgatggtagcccttactcttcgagaacaacttccaaatttttctcgaatccgggttcggggttcaaaattgagcctaaataaggctagaatcgtactaagcgctcggattacatctgaaaataattttctcaataatttaaaaaaagattttcgggaccaataatctgtagcattgcagccttagttaccctagcgttttaaatccaaattttcgtgtaactttttgcaaaaatctagatatagagttccattgacattgtacaacaccggcaaatttattctataaaagtttcgattgtacaacatttgcgtcgtattcatttgtaattgtccatctccgaatgttaatcatgctttcacactgcaaaattttttgtctgattaagagaaccacaactttgattaggtccaattcatcctcctaaattttgtttattatgctttttgacttcacgcattttcaaataatagcctaaatttccaggggacaaaaattagaaaaaaacccgagaatgaaatacctaatactgaaatttacatttgatttttataggggttgaacaatagaaggcccgggcctttaaatagcgaatttacggatcttgtttttttaaatgattttttttctttttagtcattttctaaaatgatttttttgtcacaaaattaattaaattttctaagcagtgattttaatttgttgattttactggaatattatcgttaaaaataagaatttttgcgctaaaagtgtgtttttcgtgcgtttctctccaacaaagcagtagaaaaaatagttaaatca

SEQ ID NO: 55376 - DNA, 75 bp, Heterodera glycines
attctctgatcaacaatgctctcaaaaaaacttttccagactatcttgaacaaatctccaaaggttggttgtctg

SEQ ID NO: 55377 - DNA, 574 bp, Heterodera glycines
ggttcgatgaaactttttaaaatataagcctaaactttttggcctgtttaaaaaggaattaaaaatttttaaaatatttattcatctccctttttgatagtgaaagcatcagagagccttatttaacttttaattaacatttggtgcgtttcagagcacgttctaaaaaatatttatgaattaattttgcaaaataataaataattaatgaaaaagtcagaatttcgaaaaattttaaaaacaacaagcgttggcattttttcaggttaagttagtcctttacaatggagaaggcctgcaaaatttggagagattatatcgattttagtgcgctaggttcgatgaaactttttaaaatataagcctaaactttttggcctgtttaaaaaggaattaaaaatttttaaaatatttattcatctcccttttgatagaaaaagcatcagagagccttatttaacttttaattaacatttggtgcgtttcagagcactttctgaaaaaatacttatgaattaattttgcaaaaaataaataagtaatgaaaaagtcagaatttcgaaaaatttaaaaa

SEQ ID NO: 55378 - DNA, 2753 bp, Heterodera glycines
atgcagatggacagtctacgagattcatccaatgcttggatcgaacttctcggtcgtctgatcggagacgacaaagacaacggcgaaaaagaatacgttaaattcgacaagaatgaaaaaatcgccgaccgatacgacgcagcaacaaccaaacttcgggatttgcgagatctcgaagcaacgctcagtgccgcagccaaactgcacagaggcagagccgacagagaagcaaaggcggatcaattggccaatccgcagcaacaagcgcccatgctaccagcgatggcagcaccaatgacagtgccaacattcacagcaccgctctaccaattccagccaattcaactggataaatttttcggccaaaagcgaaaatggcccgaattctacgaatccttcaaatcggcaatcggcagtcaatcaatcagtaaagcgcagaagctgaacttactccgcaatctgctgggtggagaagcgcgagaactcatagcgggcttccggctggaagacgcaaactacgagacggtccttcagctgttaaaggacacgtacggagctccggaggaacacatcagaagtcttcacttcgaactggccaatctcaagccgtgccgaagcctccgtgagaccaaagactttctgcttcaacttgagcggcttacaagggagctgaacaatgccggagaggacatcgaaggtcctcaagtgttcctcatgctggagaagaagctgactccaccattcctacgaagcatcctcacaaagaaaggagaggatccggcaaactggacgacaaccaaattccgagatgtgctaaccgaagcagtccggaaagaagtccaaatccaagaagtgatgggagaatatggccatcactacgtccaaccaaaagcagaagtcgtctcagcagcacctgtacaagcaccgagaacaccaaaccaaaggtcacgaaggcctaaccaaccaatggcactgcgtgatatgacatttatcgcctcatcactggacgagggtcacaaacatcaagggtatgtaagccaacagcacacacaacaagcaaagaaacactgccaacaaatgcgaaaccaagtacaaagcctcaaaaagggtccgccatacccctgtattttctgcaacagcaatcattggcatgacgaatgccaaaacgtcgacacactcaaccaacggatcagcatcgtcagagaaaagaagctgtgcttcaagtgcatgaagccaaaccaccgcgcatcaaattgcgctcgaccatctaagtgctatcactgcaaacgtcggcatcccacggcactctgccgagatcagtacaaagccaagaatggcatcaacacgcctagcacctcttgcagtgaagagaagccaaatgccaacgatggcaagcgatcaacagtgatcgaacaacaacaaatgtgtaatgccatccaaagcaaggaaaccagagcgttgctaatgacgacaaaggcaacgatcttcaatccgtcacggccatccctcagcatgatgggaaccatcttcattgacccgggaagccaccgatcattcatctcgagcagtgcagctgaacaattggatctgaacgtcctcagcacggaagaatgctacttgtccagcttcggtgaacgagaaccgaagcgatacataagcgaccgcgtcgcaatcggcattttatgccccgaccaggacaggttcattttcaacctgaacgctttgaagttcctgctgaatgatttgccggtactacaactaaacgcattggataatgacgaacttcaacaaaagaagctttccctgccgaatgagtcacggcaaccggacattctcctcggaatggacgtttggcaccagctgaatgttcaaccaattgaacaactgccaagtggatttacgatttgccaatcgaaaatcggcaatatcatcagtggaacagggcgaatcgagctcaagcaaccgtccaacatctctttcgtgctaatggtcaacaacgatgaatcgccacaaagcagtaaagcggctcagaggcagaaaaacattcaacaaaaagaaaaggacgaactgagacggcatcaacgcaacaaactcttgtccagcattgcaacattgcgatcaagacggaagagagaatcggctcccatcagctcaaaatcaatcgtgattgatctttcatcagacagcgacgcatccggcattgagatcatacaaaatccagtcagggatagacaagccaaatcaccaaatgagcattcaacggcaccaattcctatggcagtgcaacggctaacaccaacaaggaagagttcatcagttgccaagcgaccagcattttcttccagcaaacaaccaaaaggaaaagtagcgaatcccgcacaaacaagccaaacaaatgaactcaacagaaaaatgaaagccttgtcgccaaccgcaagtggatcaggcgccaaccatcattgcgtcgctacattggccagaagctcggactcaacaacagtaattgataagggcagtcaacagaattgcccaaacatgagctcggcaacaatcagtaagacaccatgccaacagcactcgtccgagaagacgttaaactaagctaatcaccaacaatcgtccgcaatgacgttaaactagtctaagccatcaacaactgtccgaaacgctaatcacccggctgccacgagtccggaatgacgttaaactagcaaagcatcggccaacccacacaacaattgtccgcaatgaca

SEQ ID NO: 55379 - DNA, 1800 bp, Heterodera glycines
atgacgaatcacgaagcacaattgtggtcaacgaacgacgaattggaagtcaacttccctggaccaatcgccggacttttcaaaggcgaacaaatcagcacggcgacaaactgctttgctcaaccagcaacacttttcgtaaaacggcacaatctgcagatgttttcgccagtccaccaagttcagaactgtcaatacgccaccgaattctgccaactgcccgacaactcaactctgatttggaaatcaacctgcaatggcaacgaatgccaaacatgcgactacgagaaggcggaagtcatcaacggaaaattcactgcggcctacggagaatcaatggccacttggatctccgaagatcaccaaaaggcattaactttcgccaaaaatgcgccagaactcatcgcctgcgatggcacacgcatcgtcatgtccgaacagaacttcggaattgccaaggagcaatacgacgacattgtcaccaccacgacaagatggaaaagaggcatccgaccagaacagctcgcatcacagctctcggcatcccaagtggcaaatagaaggattcaccatgcgctggctaaaaagcctgatcgacgaagcaatcacgtggtggattcgagtcgcctgcgtttattcaaccttcctcatgctgcgcgacattgttctcccatgcactctggcgtatttactcaatcccatccgagtgactcttctcagcctcgttggagtacgcccgcagtcgacattccgacccaccgttagcaaaccactcgggatcgaagagggaatgccgctgcgtgaactgccacgaacccccaaaccaccagcgcgcagggcagagcaccgatccatgtcaccaatcaaattggacatgattgccagaacggctcggtaccaacaaccacgaacacagtgccatctcgacctcacagaagactcgccctttgggaggccgagacgaaaagaattctgacgggccccatcctttttcgcgccggaatgtcggaattttttattcctatcgccgatcaatgatcggcggaattaagagggaggaggcccttcaccaatcccccgcccgccgcgcgacatgttttcgccgttccatccctctgtccccctttccttcaaattgtcaattgtttttgtgtgttcctcccccgccccgcgcacaaattaatgaccaatttgtcaaaccgcaacttttcgccgccgtccccaattcggcgaatgagactccaaagaacgatgaacccccaatttcccgttttcctcccaatttgttcattcgttcatttttgtgccctctttttcaattcatgcccaattttcggcccattttcgttctgctcaatttcgccactttttgttcaattttgctcgtatttaatgcgacaaatccccaccaattcctacaatcagaagcaccagcaaaggcaagcaatgcctcttccgtccctctctcagtccccctcatttcattgtcctttcccccggcccaattgtccgttccatttctgtcattcacccggtcccttcattcaatgatcagtgattggcccttcactcctgtcccatttcgctgtgattttccccaattgtgataatttccagacccccggttttggtctttgttctgtggccccggtgcccttcaattctttcccatcccggtccccaattcatttgtgattaatcccccggagatggccttttttcctgtgatcaatttgtgataattttgttcaccatttcaaatattggtttaattacccaagtttgaggctttttcccgga

SEQ ID NO: 55380 - DNA, 393 bp, Heterodera glycines
atgttctccgtccgtttcttcgctttccttctgctgctggccgtcctttgcttttccctcgtcgagtgcggtctcatcggtatttcgaccgtttttacgcattaataatatccaaaattcgtccaaatccgtttaggcattggtgccactcccattgaagccgcttggtgcggcgtcgtcggccaagagtccacccattgcccgggaggtgcccttcacggcggatttcccgccgtcggcggaacatacggatttggccgatagaaagcggcgcatttggatacggtaaatcatttagtaaatcgtttaaatgcattgaaatataaatttaaggattcttttggactactgacaaatcgctgagagtgaaataaaataagttgaaataattga

SEQ ID NO: 55381 - DNA, 740 bp, Heterodera glycines
atggcaccaccgtcgaccaatgaacagtctcttcggcaactgatgcattcgctgcaattgcttctgcgcggaaaaggcgcgcgaaaggttacaattcagccttggctagcagtagcaggagaacaacccgaacagcacgaggaggacgaaaagaagcaaaacggggcaaagagagcggggaaaagcgacggacaaacgaaacggggggaggaagacgaattcgcaatgtgtgtcagtgaaaagtgcacgagggaggccaaggcgtgctgcagcaaagtggcggaaatgtgcgcgggggcgtaaaacgcggccaaatgccaaccatggcattgtcaaaaatgcacaaacggcacctttcggttaatggacccgaaatttaaataaaattttgtataaattttcgtcaaacgatgcaaaattaaacagacgccttatttgttaggggaaaatttgaattttaaaccaaaataaggaaaactaaaataatgacaggaacagaaaacaaatgggccgaaaaaattgaattgcggaccgatcacctcatacaaaatctctttttctttttcaaactttcacttgggaatttactgacaaattataatatttttaagtaattgaaaccacaaataaatgaacaattttgagtgaaaagcttgatattctatccaaatttattcaattatttcaacttattttatttcactctcagcgatttgtcagtagtccaaaagaatccttaa

SEQ ID NO: 55382 - DNA, 1058 bp, Heterodera glycines
  unsure (1)..(1058): unsure at all n locations
atgtgcacngaatccaccgggggctggaccaattggacgaactttcccgggtttatcaaggagagaatgaccattgaaaataagtagaaagctcaatggaacggcagttttacccagttttttttttagctacgctaagcaattggagcgatggaacgacgaatggaaccattattcggaaaagcatttgccggatgggtcgatgaagcgttccttcacgctgattttggacgagagtaaggaattgacaaaagtgcactcgtcggtcaaagagcgattcaacgacgaggtaggaaaaggcaaacatggaatgccaaatgaattcggaactcacgatttcacaggtgctgaagaccatcgaactgttcaaacgcgacaattaccatcggtcgacatttcgcggttttaaagaggcaaaggaaatggaagacgaatttgaaaaggcgcaaaaacaatggaagaaactgttcgatcgggtggaggtgacgaaacgcacttaccattcagcggcccggaccgaaaaatctatgtacattcaatacatgaacacgaagacggacaacgcacaaacggacggaacggaggcgaaggcacgggaacgctttgaaaaatgccacaaagaggtggaaaaaatggaggcaatgaataaagacggaatttgcaggtgacgcgggcgaggacggcgtacgagcaaattctgaaggaaataacggcgtacaatggcatttacatggaaaatgtgcacttgtgatgattttctccctttttctaacattgttttttcagatggccttcgtttttgagaaatgccaacaaatggaaatgaaacgacttcgcttcattttggaaatgctttcgggaatgcagaaaatcctcgtggatttggtcaacccgccaaagtcggtagaatcattggctttgctttgggtgtttctgtctcaaattacacttcagactcgtccaattgcactccaaacttcgtcaacactttctcagcacgaccgatgcgactattggcggagatttgaagcggtggtctctcctccatggcgtggact

SEQ ID NO: 55383 - DNA, 833 bp, Heterodera glycines
acctataataaaaaccgaagggccaagaatccaaagttgaacacgatagtgatttcggtcgcacgtatcaacaaaaatggttcttcaaaaataattcggatttccataatcatggacggcaaaacgatcaaattcattgccgacagtgatcagacatcaatattattgatgaaatcgcatacaaatgcatcggatccccgccgctaggaagaaagcgacgaagagggcatttttttcgatggacgccgctgccaattcatcggcaaaggattcgctaccttcaaattcaaaggaatcgaagtcaagcaaccattttatgttgccaaagcgggagcacttaatttgcttggggcagcaacaatggataagtttggattccttgaaggaatcaaaaatgcaatccgcggaaattccaatcaatcagatcacttccaaaaataatgagacaaaaattcgggaagcgatcaaagaattgccatcaaaatttgagcaagtcttctcagaaggccttggtctttgcaccaaaatgtaagcctctctgatgctcaagtcggacattaaaccggtgttccgacgagcccgtccagtgccgtattcagcgcttccaatcgttaacaacgaattggagagattggagaaaatcaatgtcatcaaaccagtggaacacaccgagtgggccgccccaattttggtggtgaaaaaggccaacggatcaacgaggttgtgtgccgatttctcaactggtctaaacgactgtctccagctgaacaagcatccattgccacttccgtccgacattttttcaactttaaatggctgaaaattcttttcaa

SEQ ID NO: 55384 - DNA, 543 bp, Heterodera glycines
atggtagacacgtttaagcgggcattttcaaaaataaaaggggaggggtgtcaggagacactctcgaaattattcctcttaacttttcgcaccactccatcggaaaatctgaatggaaagtgccccgcggaactatttcttggaagaaggcctagaatcgctcttgaccttctccgtccgccgatccgaccaacagaaaaagacctcaaaatggaggcacaatttaatcggagacatggcgcccgatttcgatcatataatgtcggagaccaagtctttgcccgtcataagaaaggcgaagattggagagcgggcaaaatcagtgaacgaaacggtgtaatttacgctgttaatttcactgacaattcaactggacgtttccatgcaaatcaattgcatgcgagagcgatcggggacgaggacatcccgcatccgttggatgcaattgccgcagatcaacgatgtgccgcagccgccagacgagcctgtccgacgctatcccgcacgccaacggaagcaagctgtgcgtttggatattgctga

SEQ ID NO: 55385 - DNA, 298 bp, Heterodera glycines
atgacaaatgaaatctttatttttcctggttttacagcaccaatagctctcacactttacaaaattgtttccagaagaattcaacatatgtgagcaatattttttcttacaattctcatttttgaaaaattatttttatttttgaatctttttattatttaattgcttattttttaattaaaatagagaattgtcttattatttccaatatatttatttagttttcaaactgcataatttttgtttaattctcaataaaaataattattataggtatatcaaactaagaagtctataa

SEQ ID NO: 55386 - DNA, 384 bp, Heterodera glycines
atgacattccaatcactgaaactcaacccaccagcatttcaatactgggactcaattctccggcattccaatctctgggactcaaatctccggcattccaaacactgggactcaacccaccaactttcaatgacattccaatctctgggactcaagccaccagcatttcaatactgggactcaacccaccagcatttcaatctcggtgactcaacagaatctccggcattccagacactgggactcaacccaccagcatttcaatctctgggactcaattctcaggctttccaatcactggaactcaaatctctggcattccaaacactgggactcaaatctccggcattccaaacactgggactcaaatctgcggcattctaa

SEQ ID NO: 55387 - DNA, 477 bp, Heterodera glycines
atgccggagaatagaaagtgcgctaattgtttccaattagcacactaattaagactgatgggcattaataatccctaattaaaaaatgataaaaatactaattaatttttgttccccaattaagagttgaagttgcgctccgtcaagtggacccaactgttgcaattccttattgggattcaacgctagaagcggcactgccaacaccggccgattcacatttgttcacaccggaggtaaaaaaagatttaaatttaattataaaaaataaatttttgtcatagtttatgggaagtacggacagtgctggcaatttggtcactggcatttttgccggctggagaacattggacgtaagggcaactcaaattagtttggatcattagttaattagatattcaagcaaatatttgatttttgtattaattaattattatttttacaattacgatttccagttctttgtaaagaattaaa

SEQ ID NO: 55388 - DNA, 737 bp, Heterodera glycines
atgagcatgaatgttgcgagacgtggtcattaaagggggaatgtcaacgaaatccggtgtatatgaacgcgtggtgccaggccagctgcaggcaggtggcatttgataaaaagaaaatttattattaaaattgcaaatttttattaaaaaaagtatttttacaaatatgtattataataaacagattcatgtttttgttttttaaataaccaaatgcaattaaattatctcttatttttcattaaatttttagcttattaagaaaagttacctaaaaaattaaaattttaattaatttttaaaaattttacctcattaaaatttgcatacattaagaaaaagttggacctggcctgaattccgtattggacttagatctgggttttctggtcaaaatccaagaaaatccaggtctaggaaaagtctgggttaccgaaaaatgacctggacatggtccgaaatcacgaaaatccaggtccaggccgatctcgatcatatattattcaacaaaattctatcttttttattcattaattataaaaaaaatttcaatgcatttaatttagataattaaaagaatattaatttatgttttaacatttttagtgccaagttgactacgacatgttcacgggtaacaaattcaaaaattgttctgatcatttcccgctgatcagaatgcaatgatcgccacgtgaactgtgcacaatgggcaatacgaggcgaatgcacacgaa

SEQ ID NO: 55389 - DNA, 1620 bp, Heterodera glycines
  unsure (1)..(1620): unsure at all n locations
ttataaacatttggaacaagtcgtgccgtgcccttcattatttaatggaagcaacagcaccaatggccacttcaacggatgagggcggaagtccgagggcaaatatggaggagggattgttgtcattgccccgggactcggtgactttgtcagtgccaagcagcagactgaaaatgccaagacggtccaaaggtaagtaagtacaacttaattggcccatgagcttgatgggcatggcatattcctgcctctcgaaatgaatagtaaaaattttaaattttcgataaattatcaaattttttgtaaatttttgggccaattttttctcagtaaaatttaataaaagttggttttccccagcttttcccatatttgctgtacctttgcactctatccctcaagaattaaatgaaatgaatgtgaaaagagcggaagagagaaaatgaaaattatagatgcagagcggaagtgggaaagagaacggggcgagagagagaagagagggagagagagagagagcgatagaaattgaaaatagagaaagcatagagacaaaagtggcagaaattggagatacaataggcataaagaattgtgaaaataaatagctaattcatagaataaggtagcgagagagagagagatagacgagagaaagaacaaggagagagaaacatagggagagagagattaatatatataaagagagaaataaagagagagtctgagtgcaaagagatgtgtgccaatttatttgctaattgctttgtttgccgccgccactttatgccaatggccatgtaatgaaaagccatctttattattacagaggacaggttgttgtcggcattaggaccattcatttatttgttcctgccaaagtcatcccatcccattaaatcccctaatttatttaaaaaaatgttttttgttcgccaattagaaagcttggcgttccatcgcgacccgttcaatcggccggaattggtgcacaccttgcgcgggcgtgagcttgtactgtttgtgttactgtacgcaatcggtgtgattgccattgtgttcatatttggtgagtgcttttttgtgtggcattttgccgaaattggcattccaaattttttgtttgtagcacttttatattttggtttttgagttgcaacaaaattttttgtcctattttttattttcaatatttcaaaaaattgccaaaaaaacgnaaaaatgttcccttgagaattaatctatttaaaaaattgaattataatttctattttaaaccaatttttcccgtctaaaagtttttagtgattttaatgaattttaagaaattatttttgtctctgtgaaaaaagggtaaaaatttaaatgaaaaatatcaatttttcatttttatgtcaattttaaaatttttaaaatttaatttcaatcaaaaacaaaaaaaatggcaaagtttttcgataacaattacaaaaaacagagtgtacaatgcccgtgttttggatcaatgatcaaagtcgcgcagagcagcgccgtcgtgccgcaattgtggtccgatcggcacagaaagtgatgctggacagagaaatgccatcgtcaattggcccactcagaaagacatga

SEQ ID NO: 55390 - DNA, 1812 bp, Heterodera glycines; identical to SEQ ID NO: 24653

SEQ ID NO: 55391 - DNA, 1581 bp, Heterodera glycines
caccattttcaaatgccattccaattaattatgttaatgttcgccttaattagcccctttcactttgtctcctcccgtttctttgatctcgatggaatttggcacttttcttctcaaaattggtctaaattttcgggaaatgcgaaaggttccgggggggggggagtggcggcataagtgccgtttttaaataatcatcgtttttaagtgcccggcgatatttacgccgatttattcaccaacggatttattgaagtagattgattcatttaaattaattttttattttaattttttctaattttggaggaccctttgtttgggaacggcgacggcttttgccgatgggtgccacggcaccgatggatttacgaaaagaaattcgaacttccggacgaagcgcacaaggcgagaagagagttttactggtcaaaggcaatgcgcagtaaattgctcatttcgtgcgcagaaatttcactttggatatttcgaaattgaccaatttatgtgaattaataattgccattttaaattccattttaatttaattaatttccccaatttttggctaattttttgcttctccatttgtccggcatcgattcgcccgcctctgttctgctgaacaatcggacaattgcccaattggacaaccaatttgtgtccaattccgttgacgtttggtccgatgttttgccccgtgaaaatattcttcgaattgaattcgaatcgcccgttgaggaggccaatttcagggcggaaaaatacgaagtgagagagaaaaagcacagattgaaaagaggatttcatttatgctcacattaaacaataattaaatcaaaattttataaattcattaaattttatttttaatttattttttattttaggcttttcatggccacaaattgccccccgtaaaatttgtttaaataactaaaaatgctttcgagtgttttgcagcagtgcaccccgcccatttacaacggggagtgccatgtgcaatttttgcgcaaaatgcaggccaattttggctgggattggggcccgaggtctgtccatttggcatccaattaaatggcactaattagttgctcgattgccttttgagttttcccaccgttggcatttggcgtccaattcgcttagaatttttcgatttgctttccattcgacgcttttccccggtgatcagtctgggcaacggttaaaaaattcccaaaaaattttattgtgattttacaattagtttagatgaatgttttgtgatttccgtccgcctttctttgatttgtgccgtcgaccatcaaatttccatcaaattgagcttaatcgaactcggaatggacaaagtccctaattatttgtccttcaattcattagctaattaacaccgctttaaggaatttattgtttcaacgggaaagggaccaaatttggagttggacagtttgaaaatggaaattccggcaaaatcggtccaattgtggcacccaatcggatacggaaatcagtcgatgtacactttggaagtcaagataacggaaatgggtaaaatttgggcataaagtagagataagt

SEQ ID NO: 55392 - DNA, 425 bp, Heterodera glycines
atggactcttcgtctccacacgccaatgccgtcacaaaaatttcagcggatgtcctcaaaatgaacgtgtgttccattaaaatctcccaaacaaaaaaaatttgggtttcttaacggaaaaacattttagtttatgaagaagacgatcactcgcattgagcgtcaaaaaaaacagaatgaaagggaacggacgaaggagcaaatttcggcagggaaattggaagtgttgccgcctcggcattatccgacagtcgaacacatcgacgacgacccgaacatgtgagcgattttcattccctccaatgtcttaaattctgaatttcagcacattgggcggagtgatgaccgaatggcgttactccgttctcatggacaacctccgctttggccgcttctcatttaaaggacaaaaccccgaagttgag

SEQ ID NO: 55393 - DNA, 481 bp, Heterodera glycines
atggccaattttttatacatttattcgtctctccgaattcttcctcagtccgtctcatccgcattttcaatgtaataattcgtaaatttttattaaaattccaatatttctttattttcagcgttcattgtcagcgtaatattagcattgataataaatgtcatcagcagaatcaggcaacaaaaggacgttaaaaacagctcacaattcggttatttttaggcattcgctaaagggaacaatttccaattgccaaagcagcaaaaagacgcgcgtgaaagggaagcgttggagcgccaattgcgcgccgcaccgcgcggacgcttttcgttgccaaatgtggacagagtgtacaattcggacgaagtgtacgaggaactttgtaaaccggccaaggacagggcaaaagcactctttttgttatcgattgtggtcataactgtttgttttataaccgatttggaacacagtcggaaataaa

SEQ ID NO: 55394 - DNA, 1990 bp, Heterodera glycines
atgcaatttcacgaacgaagacgcaatggaatagaggacgaagaggaggaggaggaagaagaacgggaagaggaaggagaaaagcgaaggttggcaaaactgaaaaatgggggaaaggggaccaattaattggcaataacaaacggacgatgttttgctccaggagtcgagaagaaggcgaactcagtgacgaggaaggggacggaagcatagtcaaattggtggaggaagtgagaaataaaggccgaaaaagaagggacggacgcaaaaggcaaacgcaaaagatgggaaaacgaacggacattaaaaggagaaggaggggcaattgagaggctaatgcaattgttattatgctgtttatggtattttattataaataaaagtgaattgttattcctttcggtgtcagcagcagaaaacgccaattgtttcttttttcatgcccaaataaaaaggaaaatgaaattctaaacggcgatgggacgataaaatttgcaatttcagtaaacagctaaatttatttccgactgtgttccaaatcggttataaaacaaacagttatgaccacaatcgataacaaaaagagtgcttttgccctgtccttggccggtttacaaagttcctcgtacacttcgtccgaattgtacactctgtccacatttggcaacgaaaagcgtccgcgcggtgcggcgcgcaattggcgctccaacgcttccctttcacgcgcgtctttttgctgctttggcaattggaaattgttccctttagcgaatgcctaaaaataaccgaattgtgagctgtttttaacgtccttttgttgcctgattctgctgatgacatttattatcaatgctaatattacgctgacaatgaacgctgaaaataaagaaatattggaattttaataaaaatttacgaattattacattgaaaatgcggatgagacggactgaggaagaattcggagagacgaataaatgtataaaaaattggccatccactgcaatgaaaaataaagcttatagaaacatgcgctaattaatttaaaaagtgctcccattagtagggccgggacttttagtgactaaaaatctcaaaatagttaactaaaatagtgagtaaaaatgccaaaatagtgagaaaatagtgccaaaaagtccaaaatagtgacgaatagtgacataattttcagccaaaaattgagcaaaaataatttttattcactatttgcagttgcaaatgagtaggactgggatttttaagggcaaaaaatccaaaataggtacctaaaaaataatttttagaattaaaaatttttgcaaagaaagtgaattttgtgaaaaatttttcatttcttaggagtgatttttgaaaatttttatgtcgattcttaggggtgtattttttgaaaaaaaattttaggtcgattcttaggggtgtattttttgaaaaaaaattttaggtcgattcttaggggtgtattttttggttttattgcgtttttgttaaggaattttccaaaaaataaaaatagtgacaaaacgccaaaatagtgatttctagtgactgataatgacatcagaatcgaaaaattttaacgcagaaatgcgttttttgagctcctttcttcaaaacaattaagcaaaaaaaaagttttttcactagaaatcccggccctagttattagtgccattttttgtttttattttttagaactggggtaaacccaactcatccaaacccaactcatccatacccaactcatccatacccaactcatccatatacccaactcatccatacccaactcatccatagcacgatacgagtcgtcgccgtggcatttaatgccacgactaagaccgtacaaccaaaaaatactacgactaagaccgtacaaccaaaaaatactacgactaagaccgtacaaccaaaaaatactacgactaagaccgtacaaccaaaaaatgccacgactgagaccgcataa

SEQ ID NO: 55395 - DNA, 845 bp, Heterodera glycines
atgcaggaactgactgacgtggaaattctgcacgaaagtgaggatggtgcgaagctgttggtggacgaactgatcaaaggccatgttgtggaaacactggtgcagcagccgctggtgaaactgaacgagcaaatccaagacgaagcggacgccgtttacaacgcgatgaatgtggtggaaaatgcgagtgattcgtttttggcatttaaacggggaaaacaattttcaaaaaggacatggactaatatttccccaatttgaaatttccccctctttttatttgccttttgtttcagttgctcgacttccatccccaggccaatgatttgtgcgtctcccagggcctcttcgattggctgatggtccgcgcgacaaagcgaaaagtgttcgacgccaacaaattgttcgccagccaattgttcgctatgctccttcagtcgtgcgagtcggcacggaaaaggctgacggagaaaagggatggcattgacatgacattgcgagtgggtaataccaacggaatgccatagtttaatttgtataggcacttgccgtgtacaaacgacacaacccgggcagtccggacgaacacgagcacatggaaaatttgttcgacgctctctgtgccgcgcttatgtacgtgccgaaccggcaggtgttcctcgacggggaaggacttcaactgatgattcttatgctaaagtgaggcggggagaacaatttgaattgaatttggcattgtttaagggagaagaaaatgtcgcgggagggcgccctgaaagtgttgagtcatgcgactgccatccccgacggtggccccaactgcgacaaattcgtcgaaatttacg

SEQ ID NO: 55396 - DNA, 1421 bp, Heterodera glycines
atgacaattcaatttgaccaaaattgccctccaatgttgaagagaatgtgctttaatggagttgaacaggttcgcgcacttctcgctcgaccaatttgcgcaaatggaaataaaaaaataattaattagtgaaattaattaattactgactcaaaaattaaaccaaatatttcattcgaagcgagcgagagaaattaaataaaaaaaacaatttgaccaatgattaatcgttcgcccgaatttagcgaattcttctaaccgaagttgattttgtgtattacaaatatttatttagacaaacgaataattgtttttctgtgttttaattaaatgaatttaactaaatgattttaattttttaaatgtaaagttcttcacaggctctattagcctactaaaaattacagaaaattttgaactataaaaaaagatagaaataaaaaactttgaaaattctgccttttttgcggttttaaactgacaacttttttgagagctgattaatcactgagaaatagcttataaatatcttctaaacatctagggctttcgaatgataccatgattgtgaagtttggccaacaaagaaaaaagttatagctttttgaacattgctgagacggagttggccagacggagttgacccctaccgtaaattagtggtgagcaacaattaccagtcattaagacacagttagttaaacggggaaaagaacacagtgaaaagagaaataggacaaaggaaaagaaagagacaaacggaaaaaacgcgtgcatttctttgtttctctttccctctttttaacccatacaaaaaatgtgcccagttttcttttcttttatataaatggtgccgtttttgtgtccgtcgcgggcccagtgaatcggcgttcggtgcgattcgtgcggagagcgaagtgcgaccgtttgcggagggatggaggcggcgaggcgacatcaaaaagacaaaaaaaattatggtggcggcagcctgtgcctggaggataattatcgttgataattgcggagggacgcgggcaagaaacgcgtcggtgagcggactggaggattttatccgtcccgatgatgcagacaataaagtgtcgtctcctttgcttcgatgaagcggctgggctcccacttttttgattttgttttgtacacacacgataccgtattccctctgagtattgtacacgttaccatattcactctgttaattccccggggctctatctatttgtcaacctcctccaaacagtgaaattttggacggggccactaatagatggtgacaaaagggagataataattatattaatatgtttattcgggtgggcatatgtaattaaaaaattttttcctggaaagaacttatttttaatttaattataaaattacaaaacacaatgccaaataaa

SEQ ID NO: 55397 - DNA, 70 bp, Heterodera glycines
aaattctttcttttcaatggtcaaactgaatatcgtttcctccacttcttcaccggcggtcgcaacgccg

SEQ ID NO: 55398 - DNA, 291 bp, Heterodera glycines
ttacggtaggggtcaactccgtctggccaactccgtctcagcaatgttcaaaaagctataacttttttctttgttggccaaacttcacaatcatggtatcattcgaaagccctagatgtttagaagatatttataagctatttctcagtgattaatcagctctcaaaaaagttgtcagtttaaaaccgcaaaaaaggcagaattttcaaagttttttatttctatctttttttatagttcaaaattttctgtaatttttagtaggctaatagagcctgtgaagaactttac

SEQ ID NO: 55399 - DNA, 485 bp, Heterodera glycines
atgccatcaatggaaccagcaaaatttggcatcggtatagttcaaaggaaaatgccaaagatggaggacaacacagacctgaacaaaatcatgacaacgaacaggcatggcggcattggtggtgatgccaatgccaatacgacagatggtggacgaataaagcagtggaagaggatggcgaaagcaaacgaaaacggtgcctaatttttacaacccattccggtggactatgaccatggcctaattagcaccataaagatatttttgtataaaatatttgaaaattgactcattttggttcaaaatacgaaaattttcaaaaattcgaaaaatcaaatctcaaaattttgggcaacaatgaaatattattggcaattaagctagcaattcaaatttgtcactgtgaaaaactggttatcctaaaaattagtgatgagttctgccgattttaatgatccaattacgtataatctactgccaataaa

SEQ ID NO: 55400 - DNA, 1743 bp, Heterodera glycines; identical to SEQ ID NO: 24662

SEQ ID NO: 55401 - DNA, 721 bp, Heterodera glycines
atgtttctcatttcgattgctttggcattttctattcaattcctttcttctgttgccgaccccgaaaatcaacttggctttaaatgcacaaatgtttcaaattcgcaaaattatggctgttctgtggagggaaatgttttgcgcttttttgtcatcggtgacatcggtggggaggagtatacggtagagggcaaacagcagcagtgtacggtggaaggacacggtaagttgaagagggagaacaaaataacattttaaaatgagagaaaataaaataggaatatacaataatcacttaaacgcatatgtgaccactgtgagttaaggaacggtggctgattgtgagaaaaatcctacggtagtaaagtattatcgtccaactgtggcacaaaaagcagtggcaaaggcgatggattcgcttgctacgagtaatggagtgacacctcgaaaagtaattaataattaattaattaatcctaacaacaaaaaactaaagttttgatataaaaattctttaatttctcctatcaatttttatttgtaaaaattaaacaaattgtttttataggattttacaaaagtgtttgcttctaaaaagtcgaaaaaagaattgtataaaattgcttctggagaaatggcaccccattttttgttgaacgttggcgacaatttttacgacgaaggcgtaacaaaagaggatgttgcagagcgttttgaacag

SEQ ID NO: 55402 - DNA, 801 bp, Heterodera glycines
atgttatttccacaattgatcagtgatcacaaattttggccaattaaggaattgatgaacccgaaaaatgacttttacgagaaaaatgttgacaaagtgacattggccattgatgtcacgttgaatgatgaaaaaacgcaggagaaattcatttctgatcccaacaaatccagcggaacactttcaatggaaattgaaaatttgtccgaatttgagcgagaagttattgggagtgaacggagaagtgaaacttggcacatcaaaggattttcgtggaaaatattggcaaaaatagaaaagaaaaatgagaacactgatgaaaagtggttgagtttctttattttgtgcaatgctccaaaagaaggtgctagctaattatcattaatatgtatttactaggttgtaccataaaaacttgtcgttttttgatcaaatttttttatttactaatgatgaaaagattataatgaataatgagggctacaatttcaggtttttgcctatttttttctgagctcctaatggcctgaaaagcacgaaaataagttgtttttttggtgttgttaaactacttttcgagtttattagtgccaatttactaggttttatttatagagcaaccaaaaatacaccccctaagaaacgacccgaaaattttcaaaaatacaccactaagaaatgaaaaatttttataaaattcatctcaaattattttaaatttattttcttgacaagttttgcttttttgaaattgtttatctcaagactgatatggcttaattttattacttttttaataaa

SEQ ID NO: 55403 - DNA, 691 bp, Heterodera glycines
atgaggcgcgaacttgagcaacaagagctggaattgtttatgttgtgttcccgtttagttcgacaattttgtgaggttggttttacagtgtattttatctatgatatatcaaataggagggggggggcgggggttgggaaaatgagtggttcggcggtgttataggcgccgcggttacttttttataatgtttaattcaatttgcaagattttgtccaaaatgactaggttttgggccaattttttaaaaaatatttagaactaaggacacttgggaactctgtcaaaatatgatgattttcagattgaccacaaaatcagcgccgaggacagaaaaaattttttcggaagatactgtgaggttacgacatggatggagcataatgcaggtgcaccagctgtggaagtgactcaacaaaaagaggcgttcgaacatctgtaccaatcaatcattgacggagcgtcgggcaacgactatgtcgcgacaacgggttgtgtggctgggacgtcatccgccaacgaagtggcggtcaccggatgtttgcctggaaattcgaagaaggatgaaaaaggcaatgtcgaaacaaagaaaaggaagagagaaagcgacgaaaatgaagaatgaatggtgtttatgcttttttaaaattggtaaaaagtgtttaattttttaatgtttaattcacttcaa

SEQ ID NO: 55404 - DNA, 856 bp, Heterodera glycines
caaaaagtccgattgtggtcgcaggtggtggattggttggtctgtcagtggcctacggcttggccaagcgtggtaagactcttgcatcaccaaagtacaaaaatgtacagattgaaatggatgtttattttcaaggtgcgaaggaagtctttctttttgaacgccattggtacttttgcatttttaaaataattgttttcttggcaaatgcagcatcggtgctcacaattcgacacgcatcagcacgggaatgatcagtgagtgattgttggattggtaacactggggaatattggctccacaaaacaaacgttttttgaaaatagtaacccggggttttcgaggcttattttcacgaatataatattatttgcaaaaagatatgatattcgtgattataagtcacgaaaatcgccgggttggtctttaacaaaaagaaaatgattttttttgtggggtccatattttccattataaccgttggatttggtttcatttattgggggagtgtcggtcgaatttaacttgtgagctttccaacattaaaccctttagacaatccatgcttttacacggatcgctctctccaatccgtcgtacgcaaatcgcacgaattatacgcagaattggacaaccgcgggacattaggtaatccgtcaacaatgatataagagtctcaaaacgatgagactttgaaaaacttgacgacccctttaattccgacttcttcccctgttgttagggttcactcgctgcggtcgcgtctatttggcgtccagcgacgacactgccatccaagcgcggcgtatgttcagccgactcagcgccgacccggccaattcggcagccgaactgg

SEQ ID NO: 55405 - DNA, 868 bp, Heterodera glycines; identical to SEQ ID NO: 4692

SEQ ID NO: 55406 - DNA, 927 bp, Heterodera glycines
atggccggcaaggccgctgaggagctattggtgggacatagctacggacatggtggagatctggtggccgctcggccagtggcaaaagaggtcggtacatttttaactcgtcagctgaagtttttaacgccaaaaatgctttatttgcgaccgaattactttggactttattgcagtttacacgaccataaaaagcatatttaaggattaattaattctggtatcattcggcagctcaaaaacttctttactattactcgcaaatttcagcgaaattaaacggtacttcggtcggtgatctatttaattttccccaattttttctgctcttcgccgttctttcccattcaattaaattggtaattaatccatcctcttttgtgtgcctcgggtggtggtggtccaatttcatgagaaaattgggtgtgagaaatttgcataaatgaaatgtgacgaacgatggatgagtgcgtttccattccgttctcgaggagagtctttaaacttttaaactcgagaacgtctcaaaaattgaaaaagtactttataaaatttaattatcgaaccatttgctcttccatatttgacatccaattttatttgacaaattaaatattagcggctgtaaaattcctacattcttggtatcaaaaaaagcttaaattctctggtaaacgctgacttaagaaagaaattgcaatgagaaatccgaaattagaattttcgagtatatttaagaaaattttttgtgctcatccattggacgcttaaattggaatagagcaaaaagtcacatccgtttatttttagcaatttccgcctttgggaattgtttatgaatgaatggcaaaaccaatggataaaagtttcttcaagcgaaagtcctcattttgatgagtgacagcgtttgatgaatatggaaataaa

SEQ ID NO: 55407 - DNA, 464 bp, Heterodera glycines
atgccatccctgacatacatctacgaaattttcgacccattggacgcttcttggcccgttcaagtctcgaaatgccaatcgctttgctcggccgtcggcgctcggcgtgtgcaaccaaatgaaaagcgcttggccggcagttgcgctttcccaattatttggcccgatcagattggggaacagttgaccggaatcaatggtgttgggattcagatcagtgagaatagttggcgaaatgagacggcgcaatttgtccaggcatttgccccaccgaaaggccaagtggcgaatgccaggctcaaagatgggccaaacttcacgtgccaccacctcccaaattgtgccttcatcaatcagagacaagaacaaattggtgcctttgtcgaagatttgcttgttgcgacggagaaaagcgatcacagagtggtcgatgtaactgaaaaatggactctttttatgtcgat

SEQ ID NO: 55408 - DNA, 1079 bp, Heterodera glycines
ggactgaacaaaacagtcccaccctcgaatatagccccatttttgaagggactgaacaaaacagtcccaccctcgaatatagccccatttttgaagggactgaacaaaacagtcccaccctcgaatatagccccatttttgaagggactgaacaaaacagtcccaccctcgaatatagccccatttttgaagggactgaacaaaacagtcccaccctcgaatatagccccatttttgaagggactgaacaaaacagtcccaccctcgaatatagtcccatttttgaagggactgaacaaaacagtcccaccctcgaatatagccccatttttgaagggactgaacaaaacagtcccaccctcgaatatagccccatttttgaagggactgaacaaaacagtcccaccctcgaatatagtcccatttttgaagggactgaacaaaacagtcccaccctcgaatatagccccatttttgaagggactgaacaaaacagtcccaccctcgaatatagtcccatttttgaagggactgaacaaaacagtcccaccctcgaatatagccccatttttgaagggactgaacaaaacagtcccaccctcgaatatagccccatttttgaagggactgaacaaaacagtcccaccctcgaatatagtcccatttttgaagggactgaacaaaacagtcccaccctcgaatatagccccatttttgaagggactgaacaaaacagtcccaccctcgaatatagccccatttttgaagcggttgaacaatagagcccctggggctttattcgaagaagtacggtatatgaaatgcaaaattatattttggatattattaaataaagaaaatggtggagattaaaggcattaaatgctcatttttcaattttagaggggaaattattaatagaatttagaaaaatgaccaaattgtaagaattatttgctttttctgcccgaaaaattatttaattgtattcaaacaaaaacacattcgaattgatttattgaattttctatgatgtgtaaatgaaaatttatatagaaatagcaaccatagataataaa

SEQ ID NO: 55409 - DNA, 165 bp, Heterodera glycines
ctatacccaaaacggtctgctgaacatgttggacaggaatcgacggataaagtgagaaaactttttagttttccattgcgttcatttgtcctcttcagaaaatgtccacaaaaattccaaaattacaaggagaaattttgtgtcatcatttgtctggaggaacgg

SEQ ID NO: 55410 - DNA, 819 bp, Heterodera glycines
aaattaaatccattttttcggggtgaccgtgccgggtgccgcggggtaagcagtgctggttcgtttcatcacggcaccgaaccttttggctagtcagcaatcgttgcttaacttgccagatcggacgggtgcgcatgattccactgttccaagcaccccaccaaaagcaaaacgatataaccaaaatataaggaaaaatttttttaaaaattttttctccatcttcctttttgatactaaagcatcagagtgctaaattaagttgtaaataaaatttggtgcgctttagagcactttctgaaaaaaaatatttatgaaacaaaaaaatcgattttttcaagtgtccgtttggggtactcaaacatttatggggagcaaaaatccaacgcagaattaaagtacaggctatagggaagctattcccgaaggattcggtctccccataaatctgggcgcatcggttcggggggactgccccgaaaacaaaaaaatcgattttttcaagtgtccgtttggggtactcaaacaattatggggagcaaaaatccaacgcagaattaaagtacaggctatagggaagctactccggaaggattcggtctccccataaatctgggcgcatcggttcggggggactgccccgaaaacaaaaaaatcgattttttcaagtgtccgtttggggtactcaaacaattatggggagcaaaaatccaacgcagaattaaagtacaggctatagggaagctattccggaaggattcggtctccccataaatctgggcgcatcggttcggggggactgccccgaaaacaaaaaaa

SEQ ID NO: 55411 - DNA, 504 bp, Heterodera glycines
atggaaacttcttatgtaattgtgaatggaaaagtgagtacatttaaaaaatattaaataaaaagaatgatgcaaatattttgcagactgtgactgaggacagtgcgaaaagtgaaaacagcttgccatggatcacgtccaacggatggtcaggcatcaattttgttgaaaataaatttgaggtgaacatcaaaaacataccgaatataataaaaatttaagagtgttaacaagactttgtctgcaaaaaaggtctttgtctcgaaagcctgggtgtaagaaaaaaattggcagtgttatatcaacgaaaagtcaattatggtaaaaaaaaattaaataatttctcaaaaaaaaatatacacataaaaaattttaaaataaaaaatataataaagttcaaaaatatatacttattttctgtagaaaactacaaacacgcaaaacgtggcatctagcattgaaacttatgctacggttctttcacgaaaaccggttagcaaataa

SEQ ID NO: 55412 - DNA, 226 bp, Heterodera glycines
aaatcagctcacaaagccaaaatacgagtcaaggaaaagccttgcaaaaatcaccacccgggctcacattcgttgacccgaaagaattgtaaagaattaaaacgttaaacataatttatataataattacaggaccatgtcgcaatacaagcgcgctgattttccacccgtagagcgtccaaaaggatactctcaattctcaacacaacccactgaaaaagtctaa

SEQ ID NO: 55413 - DNA, 607 bp, Heterodera glycines
atgaactcaaacttcggacgagccctttttattcaacattcgccagcagaagtgtcgaagcaaacacgtgagaattggaaaatgtagcatttctaaattcgtatttaaattcaatttttccttaattatttgttttaaatttttgaagacaattattccaaaaaaatctattgagtagagatgcaagggatcgaattttaggaaaaaccgggacaataaaccagggccatcaaaaaaagtatttattaattatttttcaaattaataaaatcattagtctttaatttaaaaaaataagaaaacaattggaacatcgtaatttggacgtttcgggattgaattttttcaaattccctaagattttctcggtgcataaaaagtgagaaatttagtttactgttaactttaatgtttttaaaatttgtaacttcagtgaaatctgctaaaaaaattcaaaaaggctttcttcttgcgcttgcgcactttgtttttgtttccaaaaaatctgatggatggagggcgacaattgccgaaaggcacctccggagataattttgaatttaacatatttcacaaaggtaatttttttggtcaaatttgaaataaa

SEQ ID NO: 55414 - DNA, 421 bp, Heterodera glycines
atgacgcgggtcagttattatgatgttttgttttttgcattgtctcacaattaccactttttttatttaaaaattactttttcagattgtatcaaatgtaaaagactccaaattgggcaaagatgcgattcagcagctaaaggtggcaacagaaactgccgaaagagttgctcaacaagttggcgaaatgcaggcgtataagcaagtgtcttatatggccaaggaaatcgaccgattggccgatgttcgaatgtataaaaggccaggtttgttaatatttaaatgtcaacggtacacttgaaagtagcccgtcgtggtgttcaatttggatcctttttttttaatttgaaataacaaaaatttttaggaagtgccgaactgaatttaatgggagaaaaaataaaacacaattgaaaataaa

SEQ ID NO: 55415 - DNA, 2390 bp, Heterodera glycines
atgaaggagtctgtcagcgctgctcttttgacccacaccgtcgatgagccttgctacatccagcccattgacgacggctcagttcgacaacgtgcatcgattgctgtggacaacgacgactctgacgacgacgaggacgatgatgatttgccgcttcgtctctgcttcttcgatgccgagacgtcccaggacacgccattgcagctgaacaaccgcaccgtccagaagcacgtgccgctgcttatcgtagccgaagtcatctgcgaacgttgtctgcaggctggcatcagcgtcaacgatggtcttggaagacgggctcctggctgcgtctgcatgacaggaatggtgaggggtcaactgtttcgccagtggtcttcgccaccctttgccaatgcaccgggagacaacagcgcttcgccagttggagcacccgccttcaatcagcgccgcttcttcttccattcgttcgacaacgacggcaacgacccagtggaccaatttttggattttttgctgcaccatggtccaaagaaggcacacaccgtgtgcatcgctcacaacggtggaaagtacgatttccatctcgtacttgaggcactacaccgccgaaatcgtccacccaagcatctgtgcaccacgggattgaagatctactcaatgcgtctgtccgggcgtcaccaacggcgagtcacattcaaagactcaatcaattacttcttttgtgccttggacgcgttggtgaagagcttcgatgtgcctgaccatctggccacattgaagccattcttcccttatctctacattcgacgacaacatctgtcgcagcgcctcatcaatcttccggctcaagagttttacgcaccggatacgatgaaggccgagaaacgggcccaatttctccgttggcacgccgaaaacaacggcaatggattccaactacgcgagcagctcatcatgtactgcgtcaacgacgtggccattttgagggagtcggtcatccgattccgccaactcattgccgacaacacgcaaggcctcgacccattcctccatgcgtcgacagcagctggccttgcgcttgccacttttcgccgctgtttcctgcccgccaatcgtctagtccactcacccgagggcggctacttgcgcgggcgacgtgcttcggcagaatcgcagcgctacatccgcttcttcgagctggagcacccggaggcgcaagtgcagtgcgccagctggtccgttggtgaagcgcacatcgaagacagtggctaccgagtggacgggctttggcgacgggatgcgcctctccgtcccctggccattgaatggctcgggtgctattatcacggtaattaattttttcgtttccaaaatatcttaaaattgaggctgtcgtgtgtgctttcccgaccggcagcaacaattggcggcggggcgaacagcggaagatttgtacgaacggacggagcggcgcctctttgagctggagcacgaccacggctgcgatttgcacgtggtgtgggcctgtcagtgggcggagcggctccgccacgatccgaacctgaagcgccgttacgatgctgtgttcgtcccttgcccgctggacccgcgcaacgacgcgttgaggggagggcgcactgaaccgttcaagctgcaccacgtgtgcagtgacgacgaggagataatgtgcatcgacattgtcagcctctacccatacgtcatggtaggtttttcttttaaacattcgcatattcatgatgaataccagaaagccaatcgcttccctgtgggcaacccacgggtcctgacgcgcgaggtgctgctgcgtccgccaacggtaccgctcccgtggaatgcaccggaaaacaacatcttccgggggctgctgctcgcccgggtgctcgctccacgcaacatccgggtgccgttgctcggctaccgcacaaaggacgggcgattcaccttccctttgtgcgcgtggtgtgccgaccgtcggcagcagcggccgtgccgacatgacgacgacaagcgctcgtgggtgaccgcctacacgcacgtcgagctcaacaaagcgctccagcttggctatgtggtcaccgatctgtttgaggtaaagtcactcattaaaaaattttgtgtacgaaaacacaaattaggtctgggactacgaagagtgggacggtacgctgttcagcagctacgtcaacaccttcgtcgggctcaaagtgcaggcgacgggctggccagaaggatgtgtgacggatgagcagcaaaaagcatttgtagacgattttgagcggacggaaggcatccgcctggactcgaccaaaatggagttcaaccccggcctgcgcctcatcgccaaaacattggccaactcgttgtggtaa

SEQ ID NO: 55416 - DNA, 662 bp, Heterodera glycines
atgggtggtccgtgtgtagcagagggcgaggctctggggcagatgaagcgcgaacacaccgaccgacggatcgtcgagttcgttgcgggtggccccaagaactacggcatccgccacactgcgcgggacggcaccgacgagcgcgccaacctcaaaatccgcagcttccgcctgtcctatactgcgcagcagctgctcacttttgaggcaatgaagaacctgacgctggccacgtacaacattgacggaccaatgtgagttttgcaattaagcattaattttgtaaataaattttaaaaaaatttagcgatgatgccttggacaatgacgacctttacgtgtacgggggcggcgaacatcgtgccatccgcgtcaacttcccgcaaattgaccgcaatgtgtacgccgacctctacacgcaggaagcccacaaagactacaggcccttctacgccaaggggcgcgttcggcctgggatgcagacgcgcccctttggctatctggaggatgatggacagccgaacgaaggacaacggacgcatcgaagaaagagaaatttagtagagcaagatcccacacagcccggccactctgggtggttctgatgttgtgatttttttgttagtttactattttgtttatttaaatttgtacaaatgaaa

SEQ ID NO: 55417 - DNA, 1174 bp, Heterodera glycines
atgacactgacgccccaattgtgtgagccacgggtgaagagtgcgtccaaatattgttgactcatacccaccaccaaatcatccagcaccagcaaggttttttcttttttggcacactcccgcacttgttccgcgcgtgggacgccgctgtgtacagtgactggcacattgccaactttgccggcgcgctgcagattcatcacatttgtgttcaactcaccatagctataaataacgcgttcaacaggggtagagatcattttgtccacatttcgcaacagacgcattatccactctgacttcccacttcctgtgctcccagacacaatcattgtgaatggatgacgaaattgcacatcctcccttttaaattgttggaaggcgtccattttactttttttatgtaattttctttttatttatagtttttttttttattttatagattttaatggatttaattcttgctaccgattggataaacaacgcttatcccgaaatggatttagaggacgccaacaaagagaacaaagagccaacgaaaaagcaagaggaggaggcggatgatcccagttggatcagcctgattgacgaggagatgaagcgcgagccgctcgctccaattggtgaggagacgccagcaacaagttacttttgttttaaacgtatatttaaattttaaattaggcactccaaaaaaatgtgcttgcgctgaacgccgtcgccccgtcccgctcgtggaccatctctgcaagcggttcaaatgcagtgcccacgagctgcatgtgcttttcaaaagcctagagaaacgccgggacattgtggagcatttgcgctccgtccaactgcgcactgcccacctgcgcccgtccgtgcgcaattttccagtgcgttgtaatgacctgtccatcctggacacccactccgccccagcttaccgaggctacctcggcataacggttgtttaaaatttgttttgtttgtcggtaccaagcaatttaaaggtcaggatgcactactacataaaacacggcatccgcttgcgccaccctaatttgccgtgcgttgttgaatttggaggcggagatcacaaaacttttttccctcttgaaattttgtccattgttttgtagatgtattcaatttccaattgtactgttgtttttaaaataaa

SEQ ID NO: 55418 - DNA, 3925 bp, Heterodera glycines
atggacgccttccaacaatttaaaagggaggatgtgcaatttcgtcatccattcacaatgattgtgtctgggagcacaggaagtgggaagtcagagtggataatgcgtctgttgcgaaatgtggacaaaatgatctctacccctgttgaacgcgttatttatagctatggtgagttgaacacaaatgtgatgaatctgcagcgcgccggcaaagttggcaatgtgccagtcactgtacacagcggcgtcccacgcgcggaacaagtgcgggagtgtgccaaaaaagaaaaaaccttgctggtgctggatgatttggtggtgggtatgagtcaacaatatttggacgcactcttcacccgtggctcacacaattggggcgtcagtgtcattttggtaactcagcacctgttcaacaaagagctgcgtgtggcgcgcactaattcacactatttagtattaatgcgtaatcctgcgggggcgttgcagatacgcaccatcgccacccacctcttcccgtcaaggactgcccattttattgaggcctaccgggacgcatgcgcaaaaaattttggataccttctcgtggacatgcacccagagagtccggaagagatccgccttagaacaaatatatatgaacaaaaacaaattgtttacctaccaaaatgaaagggtcacaaataataacaataaataaatactttttggagacattgtgtaatgccaaaaaggcgaatgcccttattcgagatgcatccgatgagcaacttttgtgccttgtcgaaatctgcctaaacattctaaagggccgagtccctttgcgtccccggcatttgaataagctgaaagctcatgcacaggtgcttcgtcgtctcgcccgcacacgctgctcgcgctctgccaaaaaggttttgctacaacacggagatggcctcccagctattgtggggctcattgcgtcaattgctctcccgcttattgctgatgtcatagaaaaatataaatagtttccaaaaaaattaaaaacaagaaaaaatgcagcatacaaagcgctatttgctcgtccccgaagagatttatcagagtttggcagcaccgccaccgtcagacggtacaccaattgggctggtccgtacccgaattaaacaaataaaaaatgatgacgccataaatgaggcggaaagggcagtcaaatatgagcaggaagttaagcgtctcaacaagctcacaaaggacgaagatgaacgtcccgtgggtgttaaattagaaaatttgagtgatgtggttgacgccatgccaaaaccagtcaacgttacaaggccaattgttgtttctacgcgacgccatctcaaggttggacgtgcgcgaaaagaaaatgttgaacaattagaagatactgatgatgatgatgattatcaaaacccacggtcgtcaagttcaaataaacgacaacccacacaaacggaaatcttaaaattaatttataaaaacgcccaatctctaggggtgtcggaggaagggcaagttttgagagccggtgggcgtccatttataaccagcagtgttgatgacattgttagtcacctgtttaacaaggacaagcgtggccaaaataaagagccaacggcattcaaagaatttgttgaaagggcaaggcagaatccgctcttgagtaggcatttatttcccgaaggccaatccggtaaaggaaattataaaaacaccccaattaagtttaagccatcattatggatttgaaaaagcttcgtttgctcgagtttttgtacaaggacctaagttcacctgtcgcattcacgagcgttgaaccgctgctgagagaggcgcggaaaagccaaccaaaaattaatcggactgatgtccaaaattatttaaccagccaacgtacatacacactgcatcgtcaggccaagcggcgctaccgccgattgccaacattggcacccggcttgcatactgaatggcaggccgatttggctatatttgaccgatttgctaaacaaaatcatggcttcaagtacttgttagtctgtattgatacccttagtcgacaggtgtttgccgagcccgtaaagaccaagacgagcgctaacatgatcattgcctttgatcgtatattcaaaagatcaaaatatatcccgtggaaggtgttaacagatcagggaaaggaattcactgcccgcgcagtacagcagttcttccgcacaaaagacgttgaacacttttgtatgctcacttctccccaatttcatgccggaatggcagaacgtgcgaatcgtagcatcaaagagcgcctttaccgctactttacggagcgtaacacgtacaagtggattgatgttgtgcaagacattgttcgtgcaattaaccactcgccaaattcgagcattggaatgcgcccagcagacgtgaactttaaaaacgcagaagcgttgagacaaaaattacataatgcagctgaaaatgttgtacgacgccagccaagataccgtgtgggagatcgcgtgcgcattgaaaagtacaagcacgtgttccaaaagggctacctcccacgcttcaccaatgaactattcacggtggtagaagtacacacagagcgttcgccagttgtttatcggttgcgtgatgaccataatgaaataattagtggttggttttacgcaaatgatttatgcaaatcactagaagacaagcagcaaaatatgtatgaaattgaaaagattttgaagaaaaagaaacagaacggggtggattatgcatttgtgaaatggaaagggtacagcgctcgctccaatagttggattcccgcaaattcaattagcgagaaaaatatataaaaagcattatttaataaaatttataaaaaaaaatgccttcaaattctttttatgttgttcttccgtcaaacaccaatattgaaggaaataggacaaattctttccgagtgcgtttaccgcgcaaattgcaattcaattcggaatgggaggtgggtcttgccgttattgtatacccccactcttggccttccataggcaccgtggagcaacaatttgttcagattgagtggcagacggggaatacggtacgtatcgaagttccaccatcaaatgtcacaaacccccatgagcttagcaaaaatttatataggctcctgggtgagggaagtgatccgttggcaaaaaaggtgcgatcaacacagaattctttcatgcttttgataaacaaggctcgacgatgggccagagaagaatacattaagcgaaagactaaagaaaaacggagcgtccgtgacgaagagctgctcctacaggccatgttgacagatactggaacattggttgatctcaacagcgtagcccaaggctttctgacacgcgaaaagagtgctgcaacgagtaatgtaccgttgagaatgccagctgatgataccaattcgtaccaagaaaaattggatgagtacttttcgaaattaagtgacaaaaatttgaacattcttgatgaattgggcatgacaaaattgaacgccgaaatcaaaaatttaacagaagaggaacgcgtgatccttgaagccacaaaggaaatgggaacggaagcatggattcaggcgtaccgtgagatacgtcttgtttgccaatttaactatgacgtccatagaaatcgttttgtcctgaacaccgacccacggtacgttaaaaaggtcaaagtctcgcctcaactcgcttacattctcggtttcaacaacacggagtttattcaatctgaaaacgaggcaagattcatgccggacatgagcggtggtgtgtcatcattccacgtttacacgccggatcttattgaaccaatgatgattggagatgtcacggccccagtgttgcgcatagtgaccatacgcggaaaccccgaccaa

SEQ ID NO: 55419 - DNA, 483 bp, Heterodera glycines
tccaatacaaataacaaagttacttcaacgaaagcacccgcaccaccaccgccgccatctgcaacaacatcagcaacacttaaagtaacacagtcgcaacatgcaatagcagcaataaatcccaaagtaacacagtcgcaacaagcagcagcaacttcagcaactgtaacagtaaaaaaagcaacagcaactgcaaaaccgacaccttcaccatcgccaccggttgcaccagcaacagcaacaactaaagctgctaaagcctccccagttgtgcataaagaatttaatgaaaatgcagcaggagtcgatgtccttgacattatgcttggaggatcaaaacagtctgttgtgagtggagaggagaagaagcagcagcagccaccaaaaactaatgtttccgttggtcgtccattgatgtctccaccggccacggagtcgaaagatgtccttgacattatacttggagaaccaaaacagtctgtt

SEQ ID NO: 55420 - DNA, 2900 bp, Heterodera glycines
atggcgaataaatttttaataattcccgaggttctataccgggggctcacttcagcttccagtactggggacatcactctcgatgctgtacgacaggaactcgaccgaacaaagatgaagaaggtgaatgcgaatgctaaaaatgttcagtataaccagcaactaagacgctacttacacatgaggaaggaacattcagacagaccaacaaaggtgtaactgtcaaaagggttaagtgtactatttaagcgggacgatggtgatgaagatatgggtgttgcagacgctccacaatacccgccgggcccccctccacccgatcagcaccctcgcccttcactacgcccaccctcaccgccggatggtgggcattctccgcctaataatagacctcctcgcccaccccggccaccaaaaacaaggaaaacgcggagacacatgcctgtacaccaatggaggctaagacagcgaaatttgcaggaacaacatctgcagcatccccaaccagagcagcaacagcaacaagcacaactaggacggaatcttcttgttgaagcagctgcagcaccgttatatgataatgatgatgatgattacatgcttgaagacgggtacacgctacctgctccttcacaatattatggcgaaccgatgctgccggactatgaggatgaaattgatgaaatggacactgcccgatttagttttgcgagcagaagaaaaatgacagaagaaaatggtgatggtgaaaaaaccaaaaaaaaaaataaaatatattactctccaccttcatctcccaaatgggaacaaaccagaaggcgacaacccctattaacatatgaacgtactggtcctccgcctccgcctcgccctacaccgaaacgagaatcaaagcaggaattgaaccagcagcagcagacaccgacattaagacagatcattcctcctgctcctcctccacaaggtaaaagagagccaaaatatgaacaagtacatgattcaccaccaccaccacctcctcctgctccggctcagatcaaaagggaacccaaatatgaacaagtgcatgagtttccgccgtatcctccgccgcctcagataatcaaaagggaaccaaaacaagagctatcgcaacaagcttcgacctcaagtaagttatctatcccggaaagagaaccaaaaaaagaaccacaacaacagcagcagcagcaacagcaactacaacaacaagaacaatcaacatcaaatcagccatttgagggagaagaggaggaagcagatgaagctcccactcttccacgaacaaaaagaaatggaattaaacaccaaggtaagaaaagtggcaaacgccgtgtgagacctgaaagacgcaaggggcgagcaagagtagagtattcaccaacaccaaagttctacaatgtcccatcaacatcggcacaaaaggatgacagtaaaaaatatggaaagctgttttctattccaccaaataaactaaccatgaaacagcgcgtagaacgaatattaataaaatgcaaccattacggtgaacgaatgggtgttagtggaaattctcttattaatgaagaaactggaaaaccatacccgcgtagcaatgtgtccatgatcataaagtatataatagacaaacgagcaggtaatgctaccaaaattccaccaagatcaaagcagttggaggagaagcttaaattggatccaattttgtactcatggacagctccattaaagaaaccgcagccacaaacaaaaccgaagccgccgacctacaagaagccattccgtccagaaaggtggagctgatcaataaaacacttgatcagttatacaatgacccttcttcacctgcagcatttgctggtgtcagtagattactagaagaggcaaagaaaagaataagtgatatacaccggtcagatgttgtgaattatttggaagggcaccgcacatatacactgctgcgccctagacgagttcatttcccgaggtcaaaaactgtggccgcaggttttatgactgatgttcaagttgatttggccgatttacaatcactttcacgtcacaacaaaggctatcgctatctgcttgtagctgttgatgtgctctccaagcgattatttgtggtgccgttgcgcagcaagcgtgcagatgagatgctgctagcattcaaacaactggttgagcaaatgccaatgacgcctcatcgtgtgttcacagataagggcacagagtttcgtaaccgaatgctcaaggagttctttgaagaacatgatattgcaaaacacgaacccgtccattctgctgtgaaggcatcggtagctgaaagagccataagaaacgtgaaacaacgtttgtacaggtactttgcacagaaagaaacactaaattggattgatgtggtgcaacgtattgttgatgggatcaacagagcgccgagccgtgtgcacggaatgcgccctattgacgtgaattttagcaatgctcagaaagtttggcacacaatatacggtgatatgtattcgccgatgagaaagctcgagaaaaggacgagattcaaagagaatgattacgtgcgcatgagtcgagagaaggggcagtttgagaaaggttatttaccaaattatggagatgaaattctcgaaattgacgatgtgctgcaccatgttaaccctgtgcgttataaacttcgtgatgaaaaaggagaacagttcaagggtagcttttatgaccaagagttggcacgtgttcgaaaggacgccgaaacgagctatcgaattgagaaggtggttcggaaacgaaaacgtgctgatgggtcaacagagatgctcgtcaaattcataggttacccggagagggagtggattcatgagtcacaaattgtataa

SEQ ID NO: 55421 - DNA, 600 bp, Heterodera glycines
atgcagtggatcgctgcagatatctgtacttgtccccaaaatctctactgtcttcgcacacttaactatctcaaaccacttttatgtatacataaaagtgtcctcaatttcacccaatttcttgctgaaggagtacagcagccaaagcaacaaacgtccgaattgcaatcagttctgcttctgttcgtcattggtgtgttggtcctacaggtcggatttttttgtagttttttaacaaataattttgttgtgtacagctgatgcaattgtgtctgctcatgaaccatcgtccgagaaccatgtcgagaagacggatccgtagccgagcaccttttcaaaatggtgcagagaatataggagctcatcgcctggcacggttccctcctctgcagcaacagtgcaggccgcagccactgatcattgatgttcgtcctcctgcacaaccgaatgctgaacagcagcagcagcagcaccatgaccgagtggtcagtttagttctcataaattttaagacttaacgtattaatttttaaggacagtgagcgctcgagcgtgtccgacaacgagagtttccactcaattgttgagaatgaatgctga

SEQ ID NO: 55422 - DNA, 120 bp, Heterodera glycines
ctcccggcgatcattgacgccgctaggagcaaagatcgtcttctcggcattcttcgttcttcgtccgttcttcgggcaaagatcgtacgttggaaagtgaaatatatgatcaaagcctga

SEQ ID NO: 55423 - DNA, 644 bp, Heterodera glycines
atgccgctttttggggggaagttccggcggggaatggtcaccagaaatgccccgtacaattcccacacttcctcacgactcattttggccaatgcgctgacactttcgacaattgcgtaagtctccgagtcggggtaatgctgatttacgatgttctccttgccactttcgaagcccgccttttgccttcatttgcaacactgtttacttttaattatctttatttttaaattgacaatgcttcgcgccaaaaatcgtcgccgaacattcggatcatcagaagacggatggattcgtggataaagccgaactgaacagaaagaagcgaaatatggaagaaggacaaacggacggaagggatcaattaccatttggaacagagaggagagaaatgaggaaataaattcaaaaattaattaattaattggacaaaattattgttttattcagtcagcccaaagcaaagcaattaattaagggatgggaaaaatatgagagattttgcaaattcccgccacttcttggctttctctgcttttatttcgtaaatatgacatactgttgaatggcaaaacattttgccataaaatattccacgaaaatttccgtgccaaaagggaaaatcgctgacaaatgaagccata

SEQ ID NO: 55424 - DNA, 519 bp, Heterodera glycines
cagttcggctttatccacgaatccatccgtcttctgatgatccgaatgttcggcgacgatttttggcgcgaagcattgtcaatttaaaaataaagataattaaaagtaaacagtgttgcaaatgaaggcaaaaggcgggcttcgaaagtggcaaggagaacatcgtaaatcagcattaccccgactcggagacttacgcaattgtcgaaagtgtcagcgcattggccaaaatgagtcgtgaggaagtgtgggaattgtacggggcatttctggtgaccattccccgccggaacttccccccaaaaagcggcattttgaggtggaatacacaatggaaattggctgggatcagctgctccgcacgatgagccccgatttgaaggtctttggcgattgcgttaattggtgtccaattaggagggcattcgttcccttaaggctttttggacaatttggactcgctccattacttcatcgaccacgtcgtgtacaaaggcaacctccgcgggccgttctttt

SEQ ID NO: 55425 - DNA, 516 bp, Heterodera glycines
aaaggcaatacggtaattgtccgatcatttatcagctaattatcccgcgtcaaagatgacacttcgccgttcgtcaaaaagattctgaaggcgcacgtccgcgtgcttttgtattacggtgacacggacatggcgtgcaactttttgcttggtcaacagttcactgcgcaacttggtcttaaagttcggcgcgtttgcaatgaaaaaagcaaattaattagccaatttagcgttccatcaacaaacagccgtggaaagtcgcgagacaaatcgccggcttcaaaacaatttatgcccgaggctttttgaccttcctcacgggtttggccaagtgattggccacccattcactcattttacaatttaagttcgaggcgcgggtcatatggtgggcgaattttgtaaatgaatctttgcttaattagcagtcaattaattaaaatgccttaggcgccccaatggcgagcacagcaaatggactacgcgttcagtcagttccttctcaaccacccaatt

SEQ ID NO: 55426 - DNA, 878 bp, Heterodera glycines
atgttggatgcttttacgacggattcagatgttgacaccatttgtgtgtcgccagaacatattcaagctgatcaattcttcggcacagtgccgtgccatcaaaaatttgccgaggaatgccgaaatgatgactcactgttttgttgactgtgctttgtaagaagttattgtcttaattataaattatgattccacagtttgggaaaacagggaccacaaaaaaacaacgattaggaaatgctgcaaatttaaattttcttacaaaatttaaaattttccactttttcagcacccggaagttcactcgctgcaacggatccaatccaattgggtcccactgatcagactaaaagcgttttggcgacaaagattgtcttactgtatcccgagacatttgaatatttttcggtgattcgtcaaaatgaatttgaatttggcgacgaagaattggcgcgaaatttgaaaattgaatttaacgaaatggtggaaaaggtcaaagacctacgggaaaggacacttccatcggaacagagaccaaaacacccgatgatttggctaaaagatgtgctgtttatgagcccagagcaaatcaaagtttgtcattaaccacttaattacccatttaattacccaattaaataattaattaaatttacaattaaatgaaattcaagataatcgttgcacaacaacgggcaaagacttggtgtggttcgtcggtttgctgctctaccgaatgttgtttaacaacaaacatcccatggacaattggggagccaaagcgccgttttggacatggaattcataacggattggcatggaacaggtggccaattaaaatgtcaaaacgttgtgatttattaatgaataatatttag

SEQ ID NO: 55427 - DNA, 567 bp, Heterodera glycines
atgattaaatttttctttgccatttcatttttattggtcatcggaactcatttgaacaatgggacaaccgatgtgaagaacattggtaaaatttatttaagaaaaacattcttatttcaacaataagaacataatcaaagcttttggattgacttaaattcgtctatgaaattccaatacataatttagaaaatcctgaatgaaataatgattttttggatctacttaaagtctctgaaatttaaaatttaatgaaatatggcccgaaaattacgatatttggttcgatttaaattaatctaaatatataatttaaagaaagccggcccgagaattacgatttttgggtctacttaaatttgtctcttaaatttaaaattataaataaaaatatggcccaaaaattatgactttgttaaatgccaaaaacaaatttatgaatcaatgtttttagtggaaacatttgtacaagatgatactgatctaaatgaattggtggatgatgccatcatttgggcccattacattggcatggtaacgcgagcagacaaaacgaaaactcggtaa

SEQ ID NO: 55428 - DNA, 181 bp, Heterodera glycines
atgagcatgtttttttccacaaaaggacaacaccaatttttgagcgcggtaatgctttataaaatagcttattttaatgttttaaaatttattttatattttttagacaaaaatcaatgtgcagaatgcgctcaatgccaacctgtttattctgtttgcgaatcgaaaagttggagatgag

SEQ ID NO: 55429 - DNA, 682 bp, Heterodera glycines
atcaatacaccaaattatgatggttggcttagttatctgatcttttaacaaattattaatagaaaattcaaatatataattatcatagttctttatatgtatgtttttatgttttattatatatttaaaaaaatttattggtaaaaaaaaattaaaaattcatagatatttttccatcaatacaccaaattatgattggcctagtttttagcacttatctgttattattaattttttaaaattatttataaaaaaattaaaaatttttataaaacattatttagtatgctaataactttaggataatgaatataatcagaaaaccgaaaaaaaaattttttttttgaatattcaaattttaaatttcagtccttcgatgaaaattccattccttgaaccaataattgaaaaatatgttgatgaatacaaaaaaagtcgtcaattattcgctgaatgcatgcaaaaaattttgcgaaaatcgaaaaatcctaatcaaacggtgaagatcatcgaatttaaaaagacaattgaaaaagaaatgaatgatttgttgaaacatacggatttgccaccagatcaattgattgatctgttgaacactcgtgaatggctattgtcgatgaaaaaagacattggtaagtgcaaaaatagcccaacatcgtccttgaatgccaaagggcgc

SEQ ID NO: 55430 - DNA, 895 bp, Heterodera glycines
cgatgcgtcgtggaggagggaaagggcacaatccaatcgccaccgaaaacattccgaggtgaaaattgtggacaaatgaaaataattcgcaataaatcactgaattttccaaacgaatgccaatgaaaaatgccaaatttgaccctcaaaagactgtctgtttcgcatttgttctgtgaatcgctacgcagcacaaaagcaatattgggcagagcagaaaaaggcacggatgggcgaaacggtggacgaggaaatgttggagaagctcaaagtggcggcggagaaggagcgggagcagaacgaattggagtacagcaaaatgctgggcagtgtggtccaagtaaatcgaaggggggggcacaagggaatggatactgatttgatcagcaggggatagagagagaaaccaatcggcagggaataaagggggacaattggcaggttgctgtcgtaaaccccttctcattagtcccctgttttcctaattgctgcttctactttttgtctaattgcccttcttcccatttcagtatggctcctccattcaggttattccattttgtatttggttcgctttttcaactaattctctcccccaattgatcagttattgcatgtgaaatccaacaaatttttgacgatgcaaaagaattcgccggcccgacaggagagaaatgcgatgcgcgtttatttggacagaataggcaatgagggctcgtggttttgtgtggacattgtgtacaaacacgtgtctcttggggacaatgtaagaaaacggagggaaatgtgaagggtaatggaagattaggggagcgggatgggctgatcagactaataattagggggagaggtgggggaagtgattaagcattggattggagaggggggatgcttc

SEQ ID NO: 55431 - DNA, 397 bp, Heterodera glycines
atgggatggttcacttatatttatgatggatggcgagcacataaaataataattcacggcaaaacggtgacccaaaaaagaaacaaatttgaattggattttgcttatccccccatattcccattgatttttatttcagcaaaatgatgacccacaaatgtggggagagattttctcaaaagaaatactattacaatgtgcaacagatagagaattttgtacataatcaaatgtcgagggttcaagatgaaaaattgaaaaatatttaaagaaatttagagaatactttaatttaaaaattttttgattaaaattaaattttaaaagaaaagattcataaaactttgaaaaatatttcataacattaaaatatcaaaagaaaaattatcaaaaaaga

SEQ ID NO: 55432 - DNA, 322 bp, Heterodera glycines
atgtctcatagtcagtccgagaaatcgctcgaccagcagttcgattgttgtgagtgcgtcgtcgatgatttgctgaagggccgtcttggcgattcgcaatttgcgcaaaggaatgtgagttggcattttcatccttacatttccgttcgtattgtttcagaacgtcttgagagattgtatccaatctctccaatccgtggccaaaacaatcgatggcctttcgttgttcagtgccaatgattccgtcgaagaacttccgacgaactctctccgttttttgctcgtcccagcttatttggccaccgcactgcaagaaatcggc

SEQ ID NO: 55433 - DNA, 1755 bp, Heterodera glycines
atggattatgggactgatatagaagagtgcaccgatgagtttaaaaggtaaggagaacaaaacatttacaatcctatgctatttactcaaatgctttaaggctttttgaggagaaatcactgaacacgtgggagtcgtacatcgctggcaattttaagaaaaatccgagcggaatggacattgtggaagtggattttgccgataaaaaggtacaatggtgcaatgagaaatgaaacatttttcgacccgctttttggcaggagaaccaaacccaaaagttggacattgatgcctccaagtcacgtttgtctcgtccggtgaaagaacttctttcgatgatattcgatgtcaacgcattcacgaatactttgcgggagttagatgtgtgacagtatcttttctattgggttttatttgctttttttcagattgaccttactaaaatgccacttggtcgcctcagccgttcccacgttctcaaggcgtacaaagttttgaccgaattgcaacaaattctggagaggaaagaggatggcaaagcgcagcccacttctcggggagtctttgtggacttcaccaaccgattttacacgctcattcctcacgccactgggctgaagtccccgccaattctcgataatttgaacgtcttgaaggagaagtgtggcatgttggacaatttgcttgagattgaaattgcctacaatttgctcaagtcagaggaaaaggaaccaaaggacaaagacgcatttgatttacactatgaaaagctcaactgcaaaatggaagtacgtactccgttaaaaaaatcacagaacaacaacattctcttaagattcttgagcaaaattcgcgagagttttcgctgataaagaaatacgtcgaagttggtcatgcgcccactcacggggtccaattggaaatcatcaatgttgttgttccttttctgtgataatttaaaacccattttatctttaggttcttaaaattgaacgcgaattggaaatgaaacgcttcaaaagggacattgggaatttgcatttgctttggcatgggagtgagttattaattacttccaaattcagaaaaataacatttttgccaatttaggccgtctctcaaattacgtgggcattctcagccaggggcttcgcattgcgccctccgaagcgccagtggtcagtccttgcattaatttttctcaccatttttttgtggctttagactggatatatgtttggaaaaggaatttacctggcggacatggtttgaatagaaattcgattgtgaataataacaaaaaggaaggcgtttaggtgtcaaaatcagccaattattgttatgtgattaatggcgagggactgctgcttttgtgtgaagtcgcattgggcgaaattcaggaagaaaaagatgccaaggaattgagaaaaccgaaaagagggaaacacagcgtgaaaggtaattaaatttcattaatattattctgatgtaagtctatgtcattgtttttaaggagttggtggaacagtgccaaatccatccgaattcgagcaattggacggagcaacagttccatgtggaaaagcaatcaaatcaggcgcggagggtcattctttgctatacaatgagtgagataattaggtagtttgataaatctaatcttcaactttttgtaggttcattgtctacgatgaatcgcaaattcgtctgaaatatttggtccgcgtgaaaatcaaaaacacaccgcttctttga

SEQ ID NO: 55434 - DNA, 1414 bp, Heterodera glycines
atgacaattgagcacgcgaaattcagggtcatcgaagtgttacaaatgcaaaaacagcattgcaaaaggggaccttcgtgtttcaagcaaagcatccttctaccacctcgaatgttttcattcacttggaatttttcaaaaaagtgcggaagagtgagtcatttctagctaaaatcatattatcgtttattaatcccagttttttatagcttaaatggatacaatgacttaaacgcggatgagcaaaagcggttggatgagttatttccaaaagcaacacaaacgcccgctgaggaagggtatacgctttttatgtcttccctaaaataacaatttgtattagaattaaacgaaagaatgaaatcagtgagacggagacaccgacgagcaaaaggatgaaaagtgatggagaaaataaggaacaaacagaggcactaaaggtggacggacacacattaataaattgttaattcttttagttaaatcaacccgacaagtctaaatttgcctttcagaaacaatccgaactgttatggaatactcgaattgcattacgagaaaatttggacagcagcgaaatggttcgttctaatacatttctattttttaagaataactcaaaaagggggcatgggaaacctaaagaatttcaaatatcataatgtttaaatttttatctcacaattaactttaattcaaaaataaaagtgttttaggaggaattactgcaagcgaacggaaatttcaaaccgaagaagggcggtgcggaagcgatgttggataagttggtcgactttgtggtgttcggtgtccctcagccatgtccacagtgcaacggaccattgaattacaggtgttgtcacatttatatttattttccatgtcaattaatttttagcacgaccacccattcttacaaatgctatggaactttgtcggaatataccagatgcctttacaccacaaggactcccgaaagaaggccttttttcattccaaaacaaatgaaatctggcaataagttcttgaaaacattgaagacagcggtgcgtttatcggcaatcatggaaaagggggcataggggcccctaagcaattgaacgcccataaaaagtttcggcctctgatgagaaaggcatagatttgataaaaacctgacggtagatattcgtgctcagtgtcacgagaccccctcccccccagataatgattttcctgaaataaaaactgcaaaatcaggggttcctttctccatgatttcttctagttcatcgtcacccgaattcatattcctgaaatgaacattttcagctgcttcctgccagactttaccctgctgcagcactgaccgaagaaatcattgtgaaaccgaaggcatttaaaagtttgaacgcggcagagcgagcaacaaacc

SEQ ID NO: 55435 - DNA, 57 bp, Heterodera glycines
atggagaatgaagatgaaacgccaaaagagccgccctatggagcagaatatcaaaaa

SEQ ID NO: 55436 - DNA, 764 bp, Heterodera glycines
atggtatttgttttgacatctgctgatacctggtcatagactggacaaaatatctgtgattttttaaatttttgggggggggggggggtagcaaaacaaggaagaccttattaccttaaggagcatgcatccgtaagaaatatgtgaaacaaaaatttataaaaaataatacaaaaagcagtcacttggaatttatgtaattactaattaaaagcacacacacattaaatatgtaacttcgtgtttgtttactcatctgttcacttttacacaatttgattatgtcctttgtgttttacataacatcataaaaccccctcaaataatcatcctttctctctctcttttttttatcaaaattcattctcgtctttgccattgttatgcggacattctttttcatttaactcttaacaatttacttttaattcgtcaaaatcaatgcattccgatatttcaatttgattttcttttttataggccattttgaagaatttatttgcgtatttggagaactatctaattgtggttgtgagtttggaaactctgtcctcccaaaatgcctctttgtcccaaatgtcagcggcctgtttattttggtccgttcatataaatgtctacaattaattaatttttgtttgtttttacagctgagcgcgtcacttccattggaaaagattggcaccgtccttgtctccgtacgttgcttctgtgttatttgtgctgttactacaacagaaaatcttctttttagagtgtcataa

SEQ ID NO: 55437 - DNA, 694 bp, Heterodera glycines
atgtgtgaaagtgtgcaaaaggataaaataaaacggaaaaggaatttaacgtcgacaggtcagaaggggatcgtttctttttgtatttcattttggcacgaaacacgaaattttattcacttgtaagtatggggggtgtgtgttctgatgagagaaaaattgttatttggagattgggagaaaatcaaaaattttattgaaaaaataattaagcattaacttttaatttatgtataaatatttggaaaattcaaaatttaattatttttaattttactacttaaaaatagtaaaatttgggttttctttgcttttaaaacccgggctaaaaattcaccattgttctttttaggtgaaaaaactgatcaattttggacaaatctgttaacaaattgtactcaaattttcaaaatttttcctcggcggcgactttcggcaccgccggtcctcctccacaaaagatttttaggaaaataatgcgtcaagaaagctgaaaaactcgttcgtagattatattttaattaaggaattttggagaacttacaaatttcaaagtaattaattgatttttaaaaagagtgaaaataattaatttgagtttttttttgattgattaaattttgagaatgcctcaaaaattttttaaatttttcagtaaaatttttttttcgtagttcatgtgtggttaaattca

SEQ ID NO: 55438 - DNA, 2327 bp, Heterodera glycines
atgccacaactcaattgcacagcttcggcaacgatcacttcctcagcacattcccgccatcacatcgatgtccccccagagccgaaggctaaacacgacaagcggaaaacatcaaacgggtaaatatatttaaataattttaaatttaaaaacaatttgacgctaaaggaaaaaaaggaattacccaacgggggaagggctctttcttatcacttaccaatttatcattgaatttcctccgttttttctccccccctttctttgaactttatttacaaaattggcttaatgagagcagaaatgtaataaaatgcatttttaaatggtttttaatttccattgtttttaagtgtgtgctatcaacagacgccgaccgacgaaacttttggcgcctcgcaattggaaaaattggcggaattacgcaaagaattgggtgatgagctgctccaagagaccacattgctaaatgacaatttgtcactaattcgttggctaacgggatggaacaacaaaattggtggctaattaatattaccaacgataagtcctactaattagtcaatgttatgatgccactttcaattacttttccaattaaaatggttcgcttttcgtttcgcagatgaaatcgtcccgcgtttccgtcgtgccgcttctgtgttccgctgtttgaacctcaaccaatttgtgattgaggacatcgacgatttgaacgacttctcgcggggtgtctcagccggctccgaatattaccccgggggcgtattgggctacgaccgcgagggaaacgtcgtgtcgctgcaatgcatgggactgtcccatccgaaacagttggccaaatgcgggcgcgtcagcgacgtgtatcggttgagcatttacgagaccacactgatttatcaggcaaagaattgacaaatgccaaaagaaagaatttggggggggggacgaaatggaaatggacgagaaaaacaaagaatgaaaatgatggcatggggtcaagtcgagaatttcagcttatcaaaatacaagagcggaaactcggtcgcaaactcggcctgaaagtgatcatcgacttggacggcttcaacaccgaccatttgagtacaatcgcattgaaagtgtacggaaatgtgctggtcacaatgcaggtaatgctcaccgaatttctttctcaaaacaggatttaaataaattaattgtgccctctttaaaggaattgtttcccgatttgttgcggcaaggtgaaaattcacaaaaaaactaattaattaagtaattattttatatttaagtgttcgtgatcaatgcacattatttggtgaaaacggcgtacaacagtaattaattaacaaattgaccaattagtcccctaattgccctcccccctcttctttttcagtcattaaacccgttctgtcggagcaaagtcgtgagaaggttgtcttcttgggcagtgatttccacggtgtgttggcacgcgacattgggcccgagaatttgttcatccgttggggagggacgcgaacgccgacgcgcgggcacaccgaaggagggacacttcggatgggaggagtgccaccggaaagtttaaggtggaaatggaaaagtgaagcgaagaaagagggggggggggagaaagagagaacgatgatcagagaaacaaaagagcgatcagtgaaaaaacgaaaaaaggggaagagaaaatgaaaacggaaattaaagaaaaaaagagaaggaagagagtggataagcctgtgacaagggaatcctgttcagatattgtgccaaaaacaatcccgatcacattgacgacgaagagctaatcaaattgaatgtgcccgccagacagagacgcgaagtggaggtggaagtgccggaaccgggcccacactccatccattggcttttccacacaaatggcgatttggccttcggcatccatcgaagtgacgaccaaatggaggtgggattggcaaaaacaacttttttcaaatggattatttattcattcaaaggtgtggccaactttccatttgctgacggattacgtgccggagtacggtaaagtgcgggtggagggcggagtacggtacaagctggtgttcgacaactccggtggcactttcttcagtcgagaagtgaaatacgggcttagagtgaagaaggttgaggagagtgaggaggaggagagagagcacggagcaaaagaagcagagaaaacgaacggagtgacagcacggggagaagagagacaaagcgtggccagagacaccgaggaagagaaagagaacacgatcagagatggagagggaaaagcgaaaaattaa

SEQ ID NO: 55439 - DNA, 715 bp, Heterodera glycines
atggaggcgattgaaattgtgcggaacgaacgaatgtcgcgcgaagccgaggacgaccacaaaaggcatccgctgctgatgggctattcggcaggtgccgaacatcgcttcattgcggacggtatgcaaaaaatccgacacaggtgcaatttagggattttcgggtaaatgggcgcattttacaacatttacagtcacttggagaagagtttgatgacgcttcccttcacttttgtgccggaccttttgaaggaaatgggcaaatgcgtgcgttccaattacaaatccgacctcgctgagcgtgtcattcttttccttaccaggttatctcggcgtccgccttggttttacttctgaaaagaattcctattgtttttttttcagaatccatcacaatcagatcatccattctcttgagctgctttcactgatcgacgacctcagaacagttttgccaaaacatatcgctgacactttggttggtgttgcgatgttttagagtgatcaaagggtcattaaactttgtgcttgcctttttcagaattgcgttggcctcaatatagctgcgttaaaatttcttcaaatgcgattggaaagccgacaaaatgcaaaaatgtttgtcgctccgcgagcagaaaataacgaaaaggcttcaaagaaaaagaagcagcgacggaaagtgaaagaaattgcctttgtttcatcagttatatga

SEQ ID NO: 55440 - DNA, 673 bp, Heterodera glycines
atggacgaaatgttgaaaagatatttaaaatttgccataaaatttatggcaaaacgccagcgaatttccgaacaaaaactgaagctgcagggaataggcaaattgcaagcattaaaagctctaataaaattttatgttcatgaaaaatgcgagaaagaacaggcaaatgatggtcagcaaccgagcaagtccaagtgggagcgattgttgccacttttgacgacggtggtggaggacgaagaggacggcacaaatgccaattttgcattggaatgtaagagaattaatttataaaaataaatgacaaaaaaagctaaaaattaaaatatgaaatttagttgacacaaaaaagaagaaaaagaaaaccggaggaggaagaagaaggaggagaaagaagcgcgaattagcagcctttgccctgattttgtgcgtcgcgttggcagtggcaattctgttgttggcgctaaattgcaaaagcgttggcctctgtttggcaaatcgttctggagcacaaacgcaacgccaatactcaaacgaaaacgaagcagcagttggtgtggaggcaaccgaagaagcgcgcgtcacaacactttttgaacttttacaaagcaacggttagcgcatttctcggatttttttttgtttgtttttagcgttaaaaattaataaccta

SEQ ID NO: 55441 - DNA, 387 bp, Heterodera glycines
atgccaaaacaaaacgaaatcgttttaaaatattcctttctggacttgacttggtttcttgatatcgaagctgttttctacgctatttctaaaacggttataccaaaccccagatttttgaatccggttttcagaaaaaatgccttgtggtgaaaacaatatttcacatttcactccataactttgtgagttcggcacggatcgagaccgggataagaccattggaaagagcagctcgagctctacaagaaggtatggaaagaaaaaatagttatttctgggactttttcagaaatcagaattaattctccaatgtggccaaattttaggcccccagccacagccccttgcttctcccagttttaagtcttggatttgtcaaataaa

SEQ ID NO: 55442 - DNA, 1020 bp, Heterodera glycines
atgcgaattttcatttgcttttccgcactttttctgtcaatctgcgcattttttggtgtgttcttttcattatttctgcttttgtagtaattaattaaacaaaattttagactttaagccaatctttgcgtatgatccgttggaattttttgattatctcatcgaatgcgatccaaaggccaaaatattgaccaaagtgcgaaatgatttttcagaaggggtcgaagtcagtcaaaacgatgcgaaagaattggcaaaatatttgagcagtgaaaagggaaataaaacatttggcgaagtgattttaagtgaggcgagtaaatacgacaagaaaagggagcaaatggacagcgaaagtgcacaaaatgccaaaacacccggaaaagcaactgaaaatgccaaaaaagaccaaaaggcacaagcaaagatgaagacggcacaaaaatcatcgcgtagaacaaacagattagaaacatccctgatgggatcaccgaaaagaattggaaatgccataaaggagcacgtgaaaaaatttttatcacaaggagacgacatttgggctttaatggtcaaagtgagtaaaatgtatgaacaatatgaagagatgtgcaaagaaatagcagaagaaacgattaagaatttaattaaacagcaaaaagttagggagaaatgctttagacaacacccactaattatgctaattgacctattcaaaccgcacttggaaattgcacatgatttgagcagcaaaattatgagaaaacgaacccaagtaataaataattaaaccatttaagagcaattagctaaaaattggtgagctgtttaattaagatgagaaagtcactgcaaattattgccaaaatattttcggaatattatgaagaagaatgggaaaagttgaagaatgaaattgccaacatcagattggaagaactgaaaatgctttcggaaaagatggacgaattcggaaagaaattttgggaagaaattcaaaaagccgaaaagagaaaggaatga

SEQ ID NO: 55443 - DNA, 3727 bp, Heterodera glycines; identical to SEQ ID NO: 4701

SEQ ID NO: 55444 - DNA, 1373 bp, Heterodera glycines
atgtccgtgaaaaataaaaatgaaattgagcaaacattgggcaatctcatcgaatttataaagaaaaatgaaacattttgtgaggtgaaatatttggaaatggcaacaaaagaattggaagccgtgaaaaagggaaaagacggggataaggggataaggatcaagcagattttgcaaaatcgcataatggacacaaaattaagcattttggccaaagaattgcccaccaaaagggaaatgtttgaaaatgccaaaattggagacatcgaattggccatatttatgcccgatttccatgccgaattaagccaggcggggcaaacaaattcatattgggcaaatgaatcggaccaaattatggtaaagcataataagcacaattaggaaataaatccacgtaatatattacagaaggactatctgcaaaaagcggaagaattgtttcggttagcaaatgaattgataaaaccgttgaagaaaatcgcaggcgaacaaatggaagaactgattaaacggttggaacccgaaattagcaaactcattagcctaattgacgacaaagaaaactcagaggaattgagtgaaaaattggagaaaagagtggacaaaatcaaagaaattggaagcaaagcgatggaaattgtgctgacaatggacacgccaaaaaaagagaaaatttgtaaaacggcggaagaaatggaaaaagcaatcaaagaattggagaaaaacacgggaaaaagcgacaaagtgaaggccaaaatgagaaaactgaagaaattgttggaaaacgacaaaaaacaatttgtggagcgaccgtacaaaatggaggtgagtactgtaagagcgcatattgtgaaaagagatttttgttgaaaatttttcagttgttaattaaaatgggaaggcattttaaaaaatgattcggaagttcaatttttaaataaatttcagcggaagaggaaaggcttttaattggaatcggagagataaaccaatcggtggaagaaagacgccttaattagcgttgatctctctctatctctctctgtgttaattaattacttcatttgttaattaattggttcctttcgatttttttttatccgacattttaatttttacaaatgacaaatcattcattcattcattcttttggtttttctgctccttttgtgttcaatttctttccaatttgtttttgttcattccatcgtcgcattattaccgtccgaactgtgcaacattcgcatcaccgccgggtcgccttcgaggccaagcaaccaaaaggtttcgagaacgccctttccctaaagcggggggggggggacaatttacggtagtgtactataaagagtaataacccaaacaataaa

SEQ ID NO: 55445 - DNA, 1041 bp, Heterodera glycines
ttaccgtattcttctcggtcggtttaattaaatactgtcattcattctttttaattattttattttaaggacgtcgtctcattcacaacaatcgcttcaaaatgctcacctttgcaggctaaaatttgaattcacataaacaaattaaaacggtttaaaggtggtcaatttgctgaacaatctgtacactctgttggactcaatcatcgccgaatttgacgtgtacaaagttgagacaattggtatactgtagggctcttttctgtatttgtattattcttgaatggtgtaaaaatcatctatttgcatgaattaattacaataattaaccatcccaaattggccaccattttccaggcgatggttatttgtgcgtgtcgggccttccccaccgcaatgggcatgaacacgcgcaacacatcgccaaaatgtcgttggcattcatgcgcaacttgggcagcttcaccattccccacttgcccactgaacggcttcgtctccgcattggcattcacaccggctccaccgtggcgggcgttgtcggtcagttcaatccattgaaattgaccttttctcgtttaaatgcttaatgataattggataggtctttccatgccccgttattgtctgttcggcgacacaattaacacagcggcacggctggaaagcagctcaaagcgtaattgggcattttgtttttaagcacctttttcatgctttaagcgatgcgaattcacatttccacgacgacgaatcactttttggtcaatgttctcggaggttttgtcacccaagcgcgtggagaaattttagtgaaggcaatgcttttcccttgccttttataattttcagggatccatctcccctcgaatatttattgtttgggttattactctttatagtacactaccgtaaattgtccccccccccccgctttagggaaagggcgttctcgaaaccttttggttgcttggcctcgaaggcgacccggcggtgatgcgaatgttgcacagttcggacggtaataatgcgacgatggaa

SEQ ID NO: 55446 - DNA, 132 bp, Heterodera glycines
atgcgcctcaacttcaaccaccaaagtgccaaattgccttccaaactcattaatgattgcccgcatggacgacagcaattcggcattactaaagacgggaaaaggtcaaatttggcatcgctttccgccggc

SEQ ID NO: 55447 - DNA, 871 bp, Heterodera glycines
atggtcgattctatcacctaccgtttgagcgaagtgtatttgttgtggcgtgatgcaaaacaggaactgattgacaccatattggagggtgttacggttgggttgaacaaaaatattatccgattcttttgtgaaattgaactggcatacaccgcattagggaacacttggcaaatcatcgaaaaaacaggtggggctcattaagaagaaattaattgacttggctaaatggcctttggccggctccatcctcctgcatttatttacgatttgtttttaattttaaaatttaataattagacgacccatggaaacaagaagctgcgccgggtcgtttcataaaagtgccaattttaaataatttttgagaaaactcataataacttttttccaacatactaattaaaaacaatttcttggtctaatataatagctcttggattgctgtattagcatgataaatttcaaaaaattttattcaattttctttgaatatacttgaacacaactgttttaaaactagagaaattttcttatatttctcctgctaatagagcagcaacctaagagctattttaagaaacaaaaattatttaatttagttgggtttacgaaaactatgacgagtttttcttgaaaatctgtaaaattggcacttttacgggacgcacatcgtggcacttttttgcgaaacgacctagcaccgaaacaagaattcatttatttattaaaaaaaataaaatttattttcgagaaaatttgagaaaggcaccgaagcaccgaaaaaagaacatttattcaaattaatgaattgaaattgggaaaatttataagtgaaacatgttaaataatatttcgtataaatatttta

SEQ ID NO: 55448 - DNA, 820 bp, Heterodera glycines
atgatcattgaaaatgagttcgtctacgccgggcacagctccgtctgtgtgctgatgaagctgatcattttgctgagcactgtttgtctggttggccttgtcgtcaaattccatgtccatgaaattcaggcaattaattttaatgattaaatcaatttatgtagaatttaaatttgtttcccctcagatttttatgaacgcgaacagtgccgaggattggcaaattgcgctgacctttcgcaaaagcatgcaaattgtggtggaaataatcgcttgtgccatctgtccgttgccaatgcaaattgatgtgttcgtttccacagtaaactccgacggacatacggtaaaatttttcaaattttaaattaaattaatttattttattttttcattttaatttatttttgcctacaattttttgtttaattaatttaggtgccaatgcgaatgccgttggacgttctcttctcaatttgtaaatttccatccaattcgtttttcattcaaatgattgttttccaattccattacagtaatgttcttccgactgtattggctgtgtcgggtgatgcttctccactgtaaaatttacctaattaatactaattgtctcattagtattgtaattgccttttctcagctcgtctgttcactgacgccgcttcgcgttccatcgccggtctcaaccgcgtgaagacggacgcaaaattcatcctaaaaacgctgatgaccatctgtccaggtattacatattgatagcaattttaaaaatacccaaaaatttgttttaggttttaatttaattaatcggattaataaa

SEQ ID NO: 55449 - DNA, 448 bp, Heterodera glycines
atgttgagcatggaaatggtcgcgacaaaggacgacgaagacggagaaggacaacaactacagcagatcgaggaggaggacaacgacaatgccgacattctgacccactacatcaagccggagcgcaatttgtggttgttgaagcgtcgtccgaccgttgggggaggaaaatggcaaaaacagtgggcccaatgggaggcggaggcaatcggatggaattggaccaatgcatggaatgtgatcgaagttgccaatgaagaggacgtggacgtgatcgaagatggcaatgaacacttggacatggacgaagtgacttatgagggagaggcgatggacgagatagatgagatggatggcacggacggatgaacgctttaaacagacattggacgacatttaaatgatgtgtaaaatgacaaaatttctacaatttattcatttttttaaa

SEQ ID NO: 55450 - DNA, 405 bp, Heterodera glycines
atggagaggaacaagagaaaatttgccaaaattgtttcctcactcaaaaaggacggaatcgaaatttcagagagtgccaccgatgtgagtgccgatgttcagtcccttggataatgaaatttccgtatcgtttcctttaatttcagactttgttcgtgagtaacagcagtcatttggtgggcgtccccttcgagagtctcgagttgcttttccgtcgttttgacctgcactgtgccttcaccgtttacccgaccaacaaatcctactcattggtccacttttccgaagtgaatttggcgatcgctgcgcgcaatgctctcaacggcaccaaacccaaagactttcccagtgaaaatgctgcacaaattcatttgttcttcgtcaggcaaagtggggtctgaaaaa

SEQ ID NO: 55451 - DNA, 482 bp, Heterodera glycines
cattgacatttcggcggagaaatggttgatgcactacgaggccgactcgttggccaaactcgagaacccaccgtcactggcggacggaatcaatcgcgaattggagagggtaaaacggggaagaattggggggccaaaaaaacggggaatagggatttagcttcgtagacattttcgaagaattttatcagttttcattggtaaacttccattaccctgtgtttaagacattctctatttgtgctgagaactgatacaatccggtgccattctgttacggttgagtcaaacatcagcggccaccgcacaaattctcttccaacgttattactacctcaaatcatttgtgcgctacaatttcgaggttttttttgttgttgttgcaatttcagacaaattcggtgtattttgcatttttttagcacatggtccaagcttgtctgctgttggcaagtaaaattgaagaagaacctcgaaaaccg

SEQ ID NO: 55452 - DNA, 412 bp, Heterodera glycines
taattaaatccattcctttgggggaccgtgccgggtgccgcggggtaagcagtgctggttcgtttcatcacggcaccgaaccttttggctagtcagcaatcgttgcttaacttgccagatcggacgggtgcgcatgattccactgttccaagcaccccaccaaaagcaaaacgatataaccaaaatataaggaaaaattttttaaaaaattttttctccatcttcctttttgatactaaagcatcagagtgctaaaattaagttgtaaataaaatttggtgcgctttagagcactttctgaaaaaaatatttatgaaacaaaaaaatcgattttttcaagtgtccgtttggggtactcaaacatttatggagagcaaaaatccaacgcagaattaaagtacaggctataggg

SEQ ID NO: 55453 - DNA, 461 bp, Heterodera glycines
atggcggaatccaaggttctttattatacaaatatttgtacagacggtaattgttagctttttctttttaaatatcctcttccgatatcaaacacactaaaactgatatttaaggacaatcagaatcgaatcctatgccatttggtggaggattttcatttacgactactgttcctccagcagctaacggtcctttccaatttggtgctgcacctccagtggccaacggaaatgtgttccagtttgctgagacgactgattgtaaggcaattattactttctgttagcattatgaaataatttagctgctgtttctacgaatgttcgacacggtgttacgggaaggaaattgctgcacgctcgaaggaagaagcgttgattgcattcaatgttagaaaaatcaccggttttgtttttgttcgttagaatatgttattttcatggaatattatgtccaggaa

SEQ ID NO: 55454 - DNA, 357 bp, Heterodera glycines
atgcgcaacggaagcgaagtcatcgacggcaatgaacgaatttggtggcaaaaggtgttgggccaaggaacggcggagaatgaccggcacggagagagtgccgaggcctaccaaaagcaacgggacggactaattgtaaggcaaaacggaaggaaaagagcacaaggatggacggcacggaaaatgggcaaaaaaggcaccaaaggacaaaaggaaaaggaaaaagcgaaaaggaaaaagcgaaaaggacaaaaggaaaaagcaaaaaggaaaagcctaaaaggacaaaagcaaaaggaaaaagcgaaaaggaaaagcctaaaaggacaaaaggaaaagcgaaaaggaaaagcctaa

SEQ ID NO: 55455 - DNA, 1462 bp, Heterodera glycines
cttccatctgtgccacatcagaatggggtctcatccgacggttttggccctggtcaaatggctattttagccaccgaacgtcttgacaacactttggctgagcgtgagtccgagcaatggccgttggaggggttggacccccaattggtgggccatcggccgtggagagtgttgcgccagcgcattttggacacattttcaagtgcaacggacagactttcattggagagcagttttttgaggggaaacgaaccgacggaaacgccaaattcggaggagaggcgaaagttacgaaagacaaccagcggagaagcggaaaagatgagacaaaggtgaaaatcatcggcaaaaaagcaaaattataatttaaaattcagaaaaaactttgccattgaaaaacacgtgcaaacggtcgcaaaattccacgaacttacgcaggacgaatggacgcgcaaattgaaggaattgaggcgcattttgctaattaaatgggaagaggaaaagcgattggaatgcataaaggtaattgagaaagaattccatttattcaatggggtttaaacaaattcctaacattttctcattatatcagctgacttctgaagtggcaatgctaatttccaccaatatttcgtctgcccaattttatccctcccaatttgtccatgtcaccgactttttggatctttttggccatttggtgtacaaaaggtgataatataatgatggaaaattattattttagcaaataaacttcatttcgttccgattttcttcagacttttgctccgagcggcggaggaacgccgcggggttggacttggcgcattgccttctcatttcgacactaacgacgttttggaggagacgcggatcaaagcgcgcaattggtttggcaaagtgaacgaaaccgtcgctttgctggcgccacgcatttatcgtaagcggaaaacagcggcaaaaaatgtgatttatttcccgaaaagttttgaccgctttgctgccgtgccaacgtttcatggaccctttggctgccattcaggaaaatgttttggaactgtgccaatccgtcaaacaggcaaatggcacatgtccaagcaatcaaaattaacaatttgaggtgcaacatccgctcatctcctcctatctccgctgttacatttgtcgcattgcgatgcgactgaatgccgccgatagggcgccccattggaaatgtctgaacgattggctccaaacctacgctcaacaaccggtaaacccggtgacccatcaaagactcaatgcgttttcttccgacctttttgcttggccccgccatggaatgggtcgtccaatgcgtcgcgttcaacgccgtcttctactcggatttgcacccgttgtgggagtattgccgtttgcccgaacggcgtgccgttgtgctgctgccaatgctcaacgcattgccccgcctttatttgggtga

SEQ ID NO: 55456 - DNA, 1329 bp, Heterodera glycines
tgaatttgctggggttgccctaattctcttaggtttttcatttcgggtcgattccttcgtcgccttctttttggacactttcgacggactttccctctcaaccactcttttcactcacattttgcaactcggcactgatttcttggccactttggtgcatattccgctcgaacaacaacatcaaagtgaggaggaggacgaagagaccgacgaaagtcggcgattgccattgaaacacttccgccgctttttgcacttcgtcctcagcttttggcacagtgtctcgccgtcgttcgccccctcccctccactctctcatcactctctcaatcttcccctttcgactcaatttgactttgtccgtctgcttgtccgttgtctccaatatttgtgcatcatttggccaactgtccatcgcactttccttccctctgccgccgatcagtcgccgctgattgaagacgaagagattgtgcagcaattgatggagcagcaacagaaccaactgcaacttgacgaagacaaggccgagcaaagccaattcaatgtcacacttttacggaacgtttgcactcaatgcgcggaaaaaattgcggacgctctgaagccctttttggtgaacgaaaacgcatcgggtgaatttaaaaaataggaaatgtgcggaaacttcttggaatttgtgaaattgcagatgagatgggtttggctggtgttgaactgcttgaactcctcgcccaattcggtccagccgatgtcgaggaaggaaacggagacgcttctgctgttgtccttccgggcgttctcctcacattggccaaaacaatttacaaacagtgcaaacggaagccggaattgagaaggcgaatccaacgaatggccaaacgataaaacgatgctaatcactgaactttcgcttattttcatctcatcggcgcttggattgtttcgatttttctcctcccaaaatttttgcggtgtttaatttcttaaattcctttcggatttacttcaaactttccatttgatatgggtttgcctttgtttcattgcgttttcttggccatacatatccttaattattgcgcttttcaaaatttgttaaattattcgcttgttttcctctgtgattttatgtattttcaaatttaaatgttaaataaaattatttcactttgaatgattttttgatggaagggttagccaaaaagagagtgaatgaactgataatgtttttctttttttcaatttgttcattccgaaggcttcaatcaaatggccattctcagtttcgatgccctccgggcgattgacagtttctcccatttttga

SEQ ID NO: 55457 - DNA, 620 bp, Heterodera glycines
atgactttcgttggcacagagaatgttcaaaatgctcgtcctcagcagcggtcagcttttcttcatttcggcgagcagtgcaaagccgtgcagaatcagcagctgctctccatggccatggcattcgacaaacactccgacacggaacagtccctcctccaactccctttccatgtcagaggcattctgcacagaccgcgacgaatggacaaactgaaggaatgggtcaaggtggaacttgcattttgggaggttatcattggccagttaatcgttaaaaatttgcatgccaatgtttaaatgtgaggggacggcacttttgaaaggcttcccattaattagcccattactctcccgtaatgacattgttaagttaagattgtttaggtgcttctctcgacagaaaatcacttccaactgtctctcgtgtcaacatcaagcctttccccgcacgaaatcgctttttccatcggctgggatttgtcccgcccccaaccgaccattagcgaggctttatcccatatcggattcaaagaatggccaaaggcattcacttctaccgcttcggacattgagcggaaagacaatgaaaacgaagagactgaagaggacgacggaca

SEQ ID NO: 55458 - DNA, 807 bp, Heterodera glycines
atggtgaaaataaagtcaaaagggaattggggagcatttgaaagaagccgacttttagaaactcaaaatgataagccacgaaattggcattttggtggtcgaaccgcacgcgcaacagcccgactcaaaactccaagtgcaaatcagcgggaaagaccaacagaaaaggacagttttgtcggatacggtagtgtgtaacatatacaagtacaatcaaccatttttctgacccttttagcctttgtcggacattccgaatggcatacaatttgatcggtcattacccaccaaaaaggaggctttaatcgtcgaatggaccacgtcaaatgctaactctgagggttctgtcggtgccaccggcgcaatttcagtgcattttgacggccaaaaagtacaaattttactcgacggtcagcagaatcgtcatcattcgtgtggtagtaactttgtttaattaattaattaattaattattattattattaatccaaccaattactttaaggactgtgcggagattggaatggaaatgccggggacgaatttcgaatgccaaacggaggacagacggaaaatgccaaagagtttcaccaagcctattcgctggtggacggagagggggaggaggacggagaatgcgaagacagcgcaattttggacaaattccattcagaaaagacggaggaaaacgaaacgaatgagccgaaacagcagaaggacagcgaggaaaagccgaaaatggagcaaatcggtgaggaaaagcaacgaaaaacaaagcgaaagaccgaaaaaagccgcattttatag

SEQ ID NO: 55459 - DNA, 1149 bp, Heterodera glycines
  unsure (1)..(1149): unsure at all n locations
atggcgcgtactacaatgagttttttatttaatcctcttaatgaagatcaacgggaagaaatgtgcgaaacttggctttacacctttagtaattttaaaatagaaaatcagttaaaaaataaattaaatatcttaggcacagaaaatataatttatgcaaatgaatttgaattttcatctcatgaatatggacctggagaaataaaagaaataattggtgatggaaacttgggtggcgtagcatctctctggctttaaccggaagtgaatggaatcacacagaaattcgngagagatgttattngagtttttggaagaagctatatatcagaacacgcacatttaaatgtaaatgaaaatgaatggtggtgtaagtattacgaattttataaatttatcaaaaacataacttttatttcagtactttttgatagtatagaaagcattcaagagcatatcgaaaaagcaattgcacccgctgctggtgctcatgaaatcgaagaatggatgagcaatttagatttagcagcagtcagcaaaatgtttcgaataaatgttattgtatgtgagctcgttaagaaagaagtttatcgttggcaaatgtattcaccagcagatttggaaacttcggttagactttgtaaaatatttgttttattatgaattttaagctttcgaacgtgagtcagaagaagtcttcaccatcaatatttctttattttcatggccaacattttgaactcatcaaacaaccacaaaagataaattaattttttctttcacatttaggtgtcagtattaatatcaggcaaaagccaactaactaaattaagccaactcgtactactccaaaacattaagatttagagtgaacacggatagtagcgcgtttgacttttcaaatcttattacacatgaaaagtacgagttggtataatccttaatattataaatgcttttcctttataaattccaaaaaaatattgttgtacatattgtggaacttcattattcgattcttgtttgatagcacccgtgatatggttttgcaattttaaacaaggttataaaggagaaaattgtttagcttaatatttaaatatagttgaccgttgttgctataaccatgatgtatgttacataaataaa

SEQ ID NO: 55460 - DNA, 55 bp, Heterodera glycines
gctatagggaagctattcccgaaggattcggtctccccataaatctggcgcatcg

SEQ ID NO: 55461 - DNA, 296 bp, Heterodera glycines
atgctgtgagtggatttagcaaatccaaaatccatttttctaaaattgttcgactttcagaccattgcccaccgccccgcaccgcccccggctactgagtgtgatcagtcgaccatcgagaattggagaagaacccccactgatgatccacgaggctgctgtcctttcgtctctcaccattttcccgatcattttggcatttccaaaacgctgatcggacaattctcaatgttatttttgtatttgtgcaaaatttcgttggattgttctgtcgcacaaaaaaatcaaagaataaa

SEQ ID NO: 55462 - DNA, 585 bp, Heterodera glycines
atgtcattggacacatgggttggtcgctatccggaaacatacggctatttcgatggtggcaaaatttatggacacaacaccggcttcttcgatggatttcccgagttttcaagcggtgacgtcgtcggatgtggtgtcgattgtgcgacccatgagatcatttacacaaagaacggagaacgattgagtgagtgtgggaaacgaagagaaagagaaaaagggggagagaaagtgaggtggtaaagagagtaggacgagatagagagagaaaagacgaagaaaagggagaaaagaaagagagaatgattttgtttaaatattaaaaaaaaaattaatgataatttttttttaaatttttaaacaattttctataaattttcaattaacaaaatatttttagttagcgaaaaagccatatttaacgtgttgtgtaaacaatagtagtgattcgatgttcgaaaccaaaaattcaacaaaaccgagactcgacccacccgagactcaagagatagagaccgaaaaaatacgagacccgagactttttaacaaattttttgttcacttcaaaatcgattaaaactttca

SEQ ID NO: 55463 - DNA, 1914 bp, Heterodera glycines
atgttgatttgtgtggggagacatttaaaaagtgccaatcgaagggacgaaataatggccaaattacacttggaaaaaatgatggccattttggaggaggaaaatgatgaaaccgatgggccattcaaaggcattctgatcaatcacagtgagtgatcggtttattatcgctgttttgggaccaaagtttcctttcttagtgaagtgaaaaaataatcgttttaatatatttttttctgattcttataaatattcggaaaaagtaaattcagaaaaaatgaaggggaaaagtaccataaaagcgaatgttttccccaaaattattggacaataaatgacaaattaaaaacatttagaagaatcattcggcacaattctcaacaaggacggtattcaaaagatcaatgaatggctaaaccttgaagtaaataaaatacaaaacaaatacattaaaacaaagtaattataaaagagctaggatttttaagcgcaatcacccaaagaatagaccacaaaactcgaaaaataggaaaaataaacaccagcgtaaactttacagttttaatatgtttcaaaataaatttaaaaatccggcccgtctttaattattttattattacaaatttagacaaaatatttttcgttgaatgaaaagttttcatcggctgcttcttcttccgatgacgaacaaagattcaaagatgcgaattatgatgaacaaattgatgaagataatgagagtaataatccaaatgatagtgataaattagagaggaacaaacaaaaagaaatggaaaattcgagggaaaatttaaaaaatgaaaattttgaaatgaattattttatgggtggacaaaatcaggaagaaaataaatgcaaaaaagaaaagtgcaaatggagcaaaaaagaaagtgaaaaaatggaaaaagaaaagagaaacgggaaaaaagagacggaaagggaggaaaatagtgaagaaaaagaagaaaaagaaaacaaagggatggaaaggaaagaaaatagcgaacaaataggagagaaacaaaatgaaaagaaaagatggcgagaaaaggaagaaataaaaaggaaaaaattgctggaaaaaaaggaaagagaaaaagaagaaagaagtaaaaaatggatggaaaaagaaaaagaggaaagagtgatcaaacggaagaaaaacttaagaaaatcagaaaaaggagaaaattatcgctttttgtcaaaagaaagtgttaaagcaatgaagcaaataaaaattgaaaattattcaggtgaatattaaataaattatgtaaaatataattgttaagatttattaaatgaaaaatatttggccaaattttacgacaaatttttattaaatgaattggaagaagagaattgtgtgatatatttgcatgttgcagcatttgttagagcgattcattcaaaatcaaaattcatcaaaattcgaacaaaaaatcacgaaacgaaaatttcgaaaagttttgaggaaaaatggcgcacttttgcaaaaaatgcaatgccaaccgaaggcgaacaaatggaaattgaattgcaaaagttattttcattggacatcgcacttaatgagataatatatgggtaattaatgtataataattaactaattaatgataattattaattgtattaagaccaattgaacaaaaacaaatggaaaaagcaattgaaatgcttgaggaaaagcgaaagggcaaaagcaaaaacaaattgggaacatataaaaggggggaaattgaaaacattttagagcaattgcacctccaaatttttgggattttatgtgctaaaaaattgacaaattttgtggaaaatgaaaaaataataatcggagaaagaattaaactaattatgagaaaagaaaatggagaaaaagaattttaa

SEQ ID NO: 55464 - DNA, 719 bp, Heterodera glycines
atggaacaaatggcattttacaattcaggcagtagtacgtcttcgcacagttccgactatgcagatggcttgggcccgctgggcggtggtgtgccggttggtgtccgaactcgactggccagccaagatacggccaacaaaatgatggttttcgatccggccaacgtgtactcggtgagaaaaagcttaaaacctttgaagttttaaaaaaaaattttttgtagagaccggcgcaggccgaagtcccacgctgtattttcagtgggatcccagtccgcattcccgcatttgttttttattttattgttccaaaagtcattgcacacagatatttactcataactttattcacaacagacatagagaaataaaacaaaaaaaaaatctaaaagagaacatattagcgaatgataaaaatcgaatgtttttaatgtgcccgcctttagctttgattcagagacgcaaacgcttggaaaaattttcggcattttgccgcagctttttttgggtattttttatattatatggctaagatcttatcggaagggtccactttttttctaagaattagtgcaaccccttatcttcaaaatagcattaaaagaataattttacatatcaaactcaaagaatatgatcattcgcgcaaaggtgccaaatctcaaatttcggttccagcagaactgttttcgggcataacttttcttagaactaataaa

SEQ ID NO: 55465 - DNA, 1297 bp, Heterodera glycines
atgggtaaattaagggactggaccagtggttcttatgtgcaaaatgttctgttcggcgtttccgagcagtgcccgggatcggccaaactgcttggcgctgagggcggtgcggcgtatataattgacgaggactcggcatcggactcatttggcggatgggacgcggcaaacggtggcggcgtcgcggttcagccaattggtgtgtgattattgttaagagcatccgaatccactgatgggatacgaaagtgccgtgcaaaaatggcaaatttaaatattttaattgcaaaattttcaaatttgtgtaaaaatgcatataaaaaattggtaataaaaatagaatgcgaaaaaaatacaaaatcttaaaatatttacaaaaataaatttgaaaaatttaaaaatattttattttaaaagatccaactatttttatatagaaagaattattttttatatatatatgtttttaattttgtttgaaaaataaaataaaattcaaatatttacaatagaaaatttgaaattttaaatattttttttaccaaattccaaaaatttttatggaaagaattaattttttctaacgttttaaaatatatttgcaatttttttaaatatataaaataaaaatttttataaagttgttgataacttcaaaaaaacaaatatttttttgttcaatttatgaaaaaaattaattttattgaaacaaatatttggcgtatttgaaacaatgaataaaaagtttggcttatttgttttttttttatttttaaggctattcaaatgcaattaatgatgacccaagcggcggtgctgctgatcatcccttgtacagcggaattgattccgtttattcaacagccggtggattgtcggtgttggcacttgtcgttttggttggcacgctattcggctttttggtaacaaatttaaaaaatatatttctttttttcttaaaaacgaataattaaaataatcatttttttttataggttggctggcgaatttcgagatggcgaatgctcagcgagctggcacgtcatacatcatcaggcatgtgtaaaataatattcaggggtcaagctaatagtcccaaaaaatacttcagatggagaaagcaccttttgtttttattttctgttacttaaaaaaatttcgacaaaaattataataactttttttttcagaagcaaactaaacttatattttttggtattttgatagacctatttttttttattagacagaaaaattttaaaaatttggcaaccgtattaaggcctgaaaaattaaa

SEQ ID NO: 55466 - DNA, 1613 bp, Heterodera glycines
atggcatttttacttccgatttgcctttcatatggcattcctcaatggtctgtcccggtgctttccagtgaatactctacaaaaatgataattgcccattgattaattaaagtaatcaagaaaattaattaatgaaaatgattactgtaagttgagaattaaaaataattaactaattataatgactgtcaattgataacttaaaagtaattaactaattaataataattacatttctggattccaaattggagtagctcaaattgaataatgcatctcttagaagtaaaaaacaattattatttaaatgttcattacaattatttcttctaccttgctccgatcagaatgaaatttttggttgcatcgatcaacaaaaattggtcttgacttttgcttgggctgtgaaagcgtggagtgctcccaactgaatattcaaaaaataaataattattattggaataatttaaataaattaattatttttaaattactattttagaaaattaagataattatttcaagcaaatttaatttattttttaattatttagaaaattaagaaaattattacttaacagaattattacaaactttattaatgcaaaagtttaatgatttaaaagtaatttttatttattattatataaattaatttaattaataaaaataaataaatctcattttttggagttaatataaacttttgatcaccttcattgacaatttgtcgaggtctcggatttaaattatcaacagcaaccaattgggcatggaaagatgagatcataaacagcaaaaacatttgttggaagaggtggttggcaaaaagcattggcattctatctctgattttgttatgagcttggctttgcgttgtcaatccttttaaaaggcaaacaattagctcactaattaattaattataccattcaaaaaaaagtttttaatttatttttatttttttggcaaaatcaaagtaatttttaaaaatttgatttaatgatttttatcattttctgtccccatattagtcactgctccataaaacaggtgaaattttacaatttttaaagaatttactgggttaaaatattaaaatttcagattttgtggcactttttggtgccgtaaaccctgataaacctctaactgacgaaaaagtaaaaatatattttttctgttatctctatttttcaccttcattgttaatgtcaatgttatggtggtgtcatgatcttatgagaaatccggattttctttgtacaaagatgagtgaggggcattatccattttcatataaatcaatagagaagggtcaaatttccaattttttgcatgtttttatattattttttttattaaaggagttgttcctaattggtaattaaaataaattacgattgaagaaaatgaactcgaaaaaactttgaaaaattttgggtatgaaattaaatcacgaggcatgaaaattatgctcaaatttttttaaattttggaatgaaattaatcccatgtaagaaaattaattcacaaaaaattttggtaaattggtatatgaaatccaaatcccaatgcaagaaattaatgcacaaattttttttaatttggca

SEQ ID NO: 55467 - DNA, 256 bp, Heterodera glycines
atggtatgttttaattaattaacttattttgggctttcccgcacccatttaagtggtgcaaccctttgatgttgccacccagggatatgttccagcacgtgccaggtgatttcgacaatgatagatctcgacagggattgatttcgacattgtggactcgacaaagagtgatttcgacagcaccgataaatttttaaaaaacacgagtgtattaaaaatgtgagccaaaaatgaagtcatacaatgatggaataaa

SEQ ID NO: 55468 - DNA, 219 bp, Heterodera glycines
gtgcttagcagtccatggcgtcgccactccatctttttgggcagtcacgcaattgcagcgagcgaagaatttgaaaaatgctgtgtaaatgggatgaatttggcggaatatttaagcaggattgacggagaatgaatgaattaatgagctgctgatgaaccatatgaaacaaatttttggggtttttaactttttttttcatttttaaatgcaaataaa

SEQ ID NO: 55469 - DNA, 110 bp, Heterodera glycines
gttggactcctttgatgtacgccgcctatttgggccatcgcgaactgtgccaactgttggttctgaggggggccgacgtggaggcagccaacgagcgcaatcaaacgggg

SEQ ID NO: 55470 - DNA, 1258 bp, Heterodera glycines
atggacatagtgcatgtggtcacttcgcagcaacggcagacgcaacattatgcgactccaccgatggtacaaagatacaacatgtggcattttgcgatatttactaatgctttttcatttcccgtaaagccgctctacacgccctatttgtacgccgccatggcaccgccccatccccaatacaatccatacgcgtattactacgcccccgttgccgctccttccgccgcttcgtcatcgtcctccgctgtgccgccgttcctccaccatccgccaccgccccatgtccatttgatgccggcaccgccaccgcctccggcaatgtttgcgccattgtcggcaaattccgcagccggcacttctgctgccaacaacacagcgtcgaccagcaattacaacaacgccacgggcacttccaattttgggtttgactgtccgcccgtcgactccaatccgtcccgttggtccgccgaaacgctgtgccggtggctgactgcggccggactcgccgactgtgcccagcgtttgctcaatgaggtgggaaggcggagggcacggaaacattattgggttgctgttttggcaaggacaatccaagctttggaccgaagaatttcacaaccttttcaggaagtggacggcgcctgccttttgctctttacgcccatcaactaccaaaatttgggactgaaattgggtccaatggtgagtacggttgtttttttgaactgaataccaaacattttttgtaaattaaggtaaaacttcagcaaatagcggaggtaaatgaatgaaaaaattttgattaattttcatttgtttttgtttacagtatctgcgacagttcacatttgccgacaaccgctaaaaagattaaaaattggagaaaaacagttttttggacgcttttttttgttaattcaaaattttctgaatttagcactttcattttatttatttaccgataaagaatttgccatcggaaggtcggtgaccattttttgcttatttgttagactgattttatgtgttattctaatatagaaaaatttggctccaataagatttatacgtcctacatatcaatcgaaaatgataacaaacaaagaacaactggtattgtggttcttaatttaaaagttcgaactccgtgaaagaattttaacaaaaagttgaaattttttataatatccattgaaatcaatcaaattttgccaagttgagaatttttatcgaattagcattgttttgcatcaaa

SEQ ID NO: 55471 - DNA, 828 bp, Heterodera glycines
atgaagggtgtcggtgcggaaagatgccgaaaatttaaaaatgcaatggacactcaaatgaaaaggtttagcgaaaatttgtgggccactgaaaaacccgagaaaattgaatatgcatgggcaggtgaacgttgtgaaaccacagttaatgattatttggagaaaggacaagggggaattttggacttttcattaataacttcgtttgggtacaaactcaacccatataatggttgggaagaaatgcaaagacaaacatttttatgggaaataccggaaccaagcgaaaattattgggctactcattttccagtgggcgattttttttcagaaattacggatgatgcaattgtggttgagagtgagcagagcgtttttttctttgaaaaagaaaccgcagaggagcgtgaagggattattggggtaccggaagaagcgtacaaaatgtcaaacgatgtttttatattaattcattctttgtcaaagaagcaaaaaagggaaataatggaaaaagtggaagtctcaaaaaagggaagaccgtttaaacaaaaagcacaattaaaacagaaaaatgtacaaaaacaacaaaatgagtctattttggtcaactcaaattccacctcatctcaaaatgtgctaaatgttacaacaataatggtaaatactatacccaaaccgactgtagctatattaactgtgccacctctgaagacccaacagaaaataataaaagcaactgccaatattataactactaccatggctccaaacattaaaattacagtagcaaaaaaagaaaaattaacaaaaaacataccggagaataaa

SEQ ID NO: 55472 - DNA, 552 bp, Heterodera glycines
atgggtagcacgcgggtctctaataacccgaagtttgggttcaattcccaacggtgcgcccataatttaaatgtcacatttcattacattacattacattacattacattacattacattacattacattacattacattacattacattacattacattacattacattacattacattacattacattacattacattacattacattacattacattacattacattacattacattacattacattacattacattacattacattacattacattacattacattacattacattacattacattacattacattacattacattacattacattacattacattacattacattacattacattacattacattacattacattacattacattacattacattacattacattacattacattacattacattacattacattacattacattacattacattacattacattacattacattacattacattacattacattacattacattacattacattacagactcagatatgtttataa

SEQ ID NO: 55473 - DNA, 307 bp, Heterodera glycines
atgttggcgaggaagttccgtggcattcaaggatcccaaagtaaatccaatctggcacacaacgcatctttcatcattttggagcatttgttggttcacttccaggttgggcaaaatactatcgcattgttgagcgagttagaccccctccaatctcaaaagtaggagtgggttcccttcttcttcgacgtagttgggtccgaattggttgggttctaattgcaacggactggtttcgtctcacggttggcggtgccccctaatattaaacacacacgtacacgtgtcgctcaaaatttattgaaaa

SEQ ID NO: 55474 - DNA, 1503 bp, Heterodera glycines
atgttcgacgccaagccaacggaaaagcttcaagatttggtgacgcaagccaagacaatcttcgaagcagcgggcatgaaactccgagaattctacggaagcaacatcgaagagctaaaaaagctgcaaccagacgacttgacaaaggacctcgaagataacaaagtgctcggcattcgatggaaaccaaaacacaatcggctcatcttcaaattaccaatcttcgaaggaaaaatcacaaaacggacaattctgtcgcaaattgccaaagtctacgacccgctcggactcatgtcacccgtactactgccagccaagctcattcttcaagaagtgcaaaacttgaacccaaaatgggacgacgaattgccagcaaacatcaacaaggactggttcaaattgatggcacagtggctcgacagaggcgaagcaatcacaatcgaatttccacggcacatccaagccatcgactcagtggaattccactgcttctgcgacgccagcaaatacggcatgggaattgccgtgtaccaaaaggccaaaacaataatcagaaaggatgaatgcaacctcatctacgcaaaaagccttgtcaaaccaatcaaagtggcagcgcacgacgacacaattccaaagttggaacttcaagcactgactctcggagtaaaagcagtcaaattcatccaagctcaaatcaaattcgccgatcatcaagtcatcatgtggacagacagtcaatgctcagtcgaacgacttcgagaaaacaagcgccaagatcgatttgtggcaaatcgattacaaaaaatccgagaagcgaattttcaagtcagacacgtcagaaccgactcaaacccggcggatatggcatccagaggcgcagatccccaatgccttcgaacatcactgctttggcgctttggcccgatttggctttcaaaagcagacaaatggccagaatccaacgtcatctaccgacccagagatgaattcaaagaagtggaaaagccaccaatcgttgatattccagagcaaccaattcaagcagtgcacagcttcatcgcatctgtcatggaagactcagtttctcttgccggcagcgacgacgaaagtcaacaaccacgtccaaagaagaagttcaaaattccgaaacgacgctcagcactgttacgacccatcggtcagcagcaaagtccattacaaggacaacacaaacgccgcaagcaactacaagactcaggcttacgcaagttatttcaagccatctcggaccaacaaggaagcagcaaggccaccacaaaggccatcgaggaaagccgagaagtgcagaaggcaccacgacatgaacagatcgagcatgaacaacgaatggtgaagaaaagtcaacaagaagcaaatcgacatcttcaacccgaaaagcggcagcaaaaagaaattcaagaagtgccacattcaacaacagaagagcaacaacgagaaaccaaacgccaatttatcaaagtttag

SEQ ID NO: 55475 - DNA, 669 bp, Heterodera glycines
caactttggaattgtgtcgtcgtgcgctgccactttgattggtttgacaaggctttttgcgtagatgaggttgcattcatcctttctgattattgttttggccttttggtacacggcaattcccatgccgtatttgctggcgtcgcagaagcagtggaattccactgagtcgatggcttggatgtgccgtggaaattcgattgtgattgcttcgcctctgtcgagccactgtgccatcaatttgaaccagtccttgttgatgtttgctggcaattcgtcgtcccattttgggttcaagttttgcacttcttgaagaatgagcttggctggcagtagtacgggtgacatgagtccgagcgggtcgtagactttggcaatttgcgacagaattgtccgttttgtgatttttccttcgaagattggtaatttgaagatgagccgattgtgttttggtttccatcgaatgccgagcactttgttatcttcgaggtcctttgtcaagtcgtctggttgcagcttttttagctcttcgatgttgcttccgtagaattctcggagtttcatgcccgctgcttcgaagattgtcttggcttgcgtcaccaaatcttgaagcttttccgttggcttggcgtcgaacatgatgttgtcgacgtacagattctcttcgat

SEQ ID NO: 55476 - DNA, 3151 bp, Heterodera glycines
atggccgcaccaattcaacagaaactcggcgctgcactcaaagttctctcccgcagccgaactgcggcggagctgaacatccaagccgaccaagcggcatcaaatctcgaaaatgccctcaacttcgaaattcaattggagaaagttcaaaaagatgccaaaacgatggacatcttcctcgacgatgtgcgcgaagcactcactgcatgggcagatttactgcgcaaactgcctgcactggaacgcgatccggcagaagcagatttcaacaaattcgagaaaaaagagcgaatcaacgacaaagtcgacgaagcagcactgaaactgcgcgacttgcgcgacttaatcggcacactcacgtttcaagcccgactcttccgcagcaaggcggacaaagaagaacgggacgctcaagcagcctatgcacaagcaacacaacataccgcacagcaacaaacaacaaagacgccgtccttcactcctccgttctaccaattccaacccattcagctggacaagttcttcggcaacaaacgcaaatggccggagttctacgaatcgttcaaatcagcaatcggcacacacgcactcagcaaagcgaagaaattcaatctactgcgcaacctgctcggaggagaggcccgtgaactcgtggccggctttcgactcgaggacaacaattacgacacggccctccaattgctgaaggacacatatggcgcaccggacgaacacatcagggcacttcacttcgaattggcaaacctcaagccctgcaaaaacctgcgcgacaccaaagaattcctcctgcaactcgatcgactcacacgcgaactcaacaatacaggagaagacattgaaggtccgccaaccttcctcatgcttgaaaagaagctcactcccggatttctgcgcacaatcctcaccaaaaagggagaagacccggcacgctggaacacgacaaagttccgagacgtactcaacgaagctgttcgaaaagaaacccaaattcaagaagtcatgggcgagtacggacactcgcagcagcatccgcaacaacggccacaacctcaaaggcccaatttctcggcatcgaaattccgagaccgtgcaccaatcccacagcaacgggaacgcacattcatcacctcagcggtggatgacaatcacaaaaggctgatcaacagacagcctcaatataagacacagcaacaaaggcctcgcgcaccacaaccgcaacaaagaaacttgcgcactttcaacaatcaaaggcaatttccaactcaacgtgcaaatgcgaccaacaatcaacgacaatttccaactcaacgtgccaatgcgatcaacaatcaaaggcaatttccaactcaacgtgcaaatgcgaccaacaatcaacgacaatttccaactcaacgtgccaatgcgatcaacaatcaaaggcaatttccaactcaacatgccaatgcgacatttaatcaacgcaagcctccaagtccatgcatcttctgtgacaacgatcactggaataaagaatgccggaaatacagtacaattcaacagcgaagagaagtactacgcacaaaggcattatgcttcaaatgcctcaaaagcaatcatcaagcaagcaactgcccgcaaccgaagaaatgcttcaaatgcaaacaacctcatccaacggcattatgttatgcagacgaaaaaccaccgaaccaaatcacatcagcaatgttggggcaaacacaacaaaatgtgtcaatcacaactcaagacggaagcaacgaacaaacggcatcgacatcgcaaatgtgcaatgccgtaaacggaagcgacacccgcgcactcctcatgaccgcaacttcaacggtcttcaatccagcacaaccgcatctcagcatgactgcggcaattttcatcgatccaggcagccacagatcattcatttcgtcaaaggcagcacagctactggatcttccggtggtccacaccgaagaatgccacttgaccagtttcggagaacgcgaaccaaaaagatacatcagcgacctggtcaagctcggatttctctgcacgagcggggaaaaactcatcttcaacctcaacgtcatgaaatttttggtcaacgacatgccaatgattcaactgtcagagctggacaagacagttttgaggcaacaaaagctcaatcctccgcatgaacaacgacaacctgacatcatgctcggaattgatgtctggcacgaactgcaggttcaaccaatcgaaaagttgccaagcggtttcacactgtgccgatccaaaatcggcaaaatcctcagtggatcaagacgcatcgaaatgcatcaaacgccaaacgtgacatttgtcatgtcagtccacggcactgagcaagaagaagccaatcaatcagtcacgttcgaatcaaccaaagaagagacggaagttttcacaatcgaagatgatttcaaaaaggacgaacaactcaacaacttcttcggattaaatctgattggcatggatgacacatcaacaccaatcgatcaggatcatgtgatgatccacttcaaaaagaacctcacgttcgtcaacaaccgataccaagtcgctttgccctggaacgaccgagttgatgctcttccaagcaacatccatcaagccaaagccaggctcgtctcattgatcaaaagactgcgcagcctcaacctgattgacaaatatcaggcaattttggatgaacaagttcaaaactcagtcatcgaatacatcggtccacccgagtctccatcaagtgcatggcctgtgcattttctgccacacagagcagtcatcagagcggataaagcaacaaccaaaatccgaatcgtcatggatgcgtcagcaaagccaaagaattgtccatcagcaccatccttgaacgactgcttgtacacaggaccacaactgctgaagaatctcaccggcatcctcctgcgcttcagacgcatggaacatgtgatcctcgccgacatcgaaaaggcatttctgcaacttagcattcgacacacggacagagatgcctgcagattcatttggcttaacaatcccgagacagcagagctcaatccaatcagccactccgaattgcgcctctaccgattctgccgtgtcagtttcg

SEQ ID NO: 55477 - DNA, 681 bp, Heterodera glycines
cttttcgaacagcttcgttgagtacgtctcggaactttgtcgtgttccagcgtgccgggtcttctccctttttggtgaggattgtgcgcagaaatccgggagtgagcttcttttcaagcatgaggaaggttggcggaccttcaatgtcttctcctgtattgttgagttcgcgtgtgagtcgatcgagttgcaggaggaattctttggtgtcgcgcaggtttttgcagggcttgaggtttgccaattcgaagtgaagtgccctgatgtgttcgtccggtgcgccatatgtgtccttcagcaattggagggccgtgtcgtaattgttgtcctcgagtcgaaagccggccacgagttcacgggcctctcctccgagcaggttgcgcagtagattgaatttcttcgctttgctgagtgcgtgtgtgccgattgctgatttgaacgattcgtagaactccggccatttgcgtttgttgccgaagaacttgtccagctgaatgggttggaattggtagaacggaggagtgaaggacggcgtctttgttgtttgttgctgtgcggtatgttgtgttgcttgtgcataggctgcttgagcgtcccgttcttctttgtccgccttgctgcggaagagtcgggcttgaaacgtgagtgtgccgattaagtcgcgcaagtcgcgcagtttca

SEQ ID NO: 55478 - DNA, 1026 bp, Heterodera glycines
atggcactctcacagctctacttgaaggaatgtcaacgcaatgtgcgagtcagcaatccaacgcttcaggcacggaaactcctaaagcgcgagaatctgcaagctcgatggatcagcgaaacaacaatcgaagtgtttccctgtgttccaatctccctctccaacatcagctaccgaacaacaaaggactgctacaagttcattccggtcacaatacatttgccaaacgcaacaagagacgcattcctcgacccggagatgcgcattctctcactcatctcaaaaatcgcaagttgctcaccatttcgctaccatcaccttcaagtgcaacaaaaccccaacttgtgggtgcgaatcgactcaagaaatggaaacgtccaacgactggcacaaacagtcatccatgagctttacgacacgatcctcaacaaaacggacaacgatttggatctccacccactgatcttccatcagtggcagctcgacaacgacaccgacttcgccagccttccgcacatcgacgaattcgaagattcggaagaattcaaaaacaagctggaagagcaaacgacgcaacgagcggaagcactcggcgccttacccggcggaatcgaaggatggaccatcaaatggctccaagaacggctacaggaagccatccaatggtggataagtctcgcctcggcatactccacattcttgctttgccgagatgtcatcctaccatgcttaatcgcatacttcctaaacccaatccgcatcacactcatgaccctgattggatttcggccaaaaaatcagccaacgcctcaaatccaaccacaatacgaggacatgccattgcgggagatgccaagcactccgatccggcggaaacgacgacaattgccagagcaatcgactccaccaatccgactggacacgacgacaggaacggcatcattccgaacacgagcgagagcgcatagcgcgacagaagacacgctcttcggacgcttacgaccgatgaaactggcggacgactga

SEQ ID NO: 55479 - DNA, 54 bp, Heterodera glycines
agcccgtgaacagctgcatcggatgcaagtgccgccgttgctgtacgcctaaca

SEQ ID NO: 55480 - DNA, 105 bp, Heterodera glycines
atgccaatgtcaaaggcaaaattgtgcaattcggtgctaaacacgtcgcgcaacgagtgtttgagcacattcttcgcgcctggaaatacggtgtcgcggattaac

SEQ ID NO: 55481 - DNA, 690 bp, Heterodera glycines
atgcccgcaatgtcagctgctgctagtgaagctgatttgcgcaatgatttgatgcgattaatcattggtgaagagcacttgttgaaaattaaagcacaatatttggacgagcggacagcgcttaacctgcgaagaccagtgaactacatagaggtggagcagtactttcaggtttttcatgggacccccggacagaagaagaaatgaaaatgttagcacattttgttgaaaaaattgaccaccaaaaatggtcattttttgtaattaattggttaaaaccaacaatggcaatttataaaaaataggtagtggcaataggaagagctaaaaattagtgctgctaactgaaattgtcaaaaaacataatttgactgaaaaaagtctaattgtcgtcaaaaacaacaatttttaaatattccaaaggcaaattttttaaaattttaattttttaaaaagttttatccaaaatatttttaattattagtgttcgacattttgaaaaaagacctgggcatggatgtactgccaggaaaattttcctaatttttatgcgatttgttaaatgatttagacaaaaaagacaaattattgaagattttttccataaaaccaaaaacctcagaaaacttagaaatcagtaaaaagactttctaaaaattgagccttatcggcctcccaaaaaacaataaa

SEQ ID NO: 55482 - DNA, 61 bp, Heterodera glycines
cagcagcacgtcgcttgagtccagttacaaggcgctgacattccacatgcgcagcgttcat

SEQ ID NO: 55483 - DNA, 2476 bp, Heterodera glycines
atcatactccaacttctcattgtttcgttttgttttaattacttgctgttggttcattttagtaattataaaaacctaatttggtcaaaacattaataaacattagtaatatgtataatttaaatgcatttgggtttctttaatttattaattattaataattttgtttaatttcgattaaaatgagtttacgaaatctgcaacaaaaattcacctaaaaaatttttacaatctacaaacgcaataaaagttttgtacgtccgaaccccgccacacccatgatcaatgtaatttacttaaaaattttcatttacttttaaatcatttttaatttcaataaattttagcgtcttagtgtgcaggtgcagcaactgcaacaaatgtttgcacagctggagagcgagaagcgatattggaaagaatggtgctaatgaaggtgtagccgatggacgactccacggccgaactgcccagaatccaaggaggaagaggaggccagcattggccctttgacttcgatgtcgctttttaattggagagaatgtgccttgatcaaattcagttgatgcaacagtcaaaggcacaaattgaaaatgaagaggaagaggaggaacagataaaggaacgtaggccacgttcggataatgtcaaacgtgaaaggagaaaaaggaaattgagcaaatggaagcgaagtccgaagccagacgaaaagacgcggaagggaatgccaaagagaaggccaaagccgaaaaggaagaatggaaacgtgccctcctacgtccgccagttaaatattatgaccactttatgtacatatttttgacaaacctagtgatgacaaaaaattttatttaagctaatttgttatcctaccgtaatatattttttatttaatctgaaaaattcttaaataaacgttgcttatttatttatcccagggcttcgatatctgaggaattttcctcattttgtggtcttttagagggtcaaagagtttgcggatttttgtggtcttttgagaagtttaagtatttttgtggtcttttaataaaaagtgacaaaaacgcatgattttttgaaaaattaggtatatttggcaaaatgtttgaactttttcttcaaatcttaaacattttttcgaaaaatcctcattttgcaataaattttaattaatttccttttataattttatacaaaaaaacaaacagggcttcggtagagggggtcaaaatcattttttttgaaaaaatctgttgacaaatcgcactcaaaatctcaaattttttccggcagcgcctatcggcactgccggaccccctccccccaatgttcccaaaaagtttttttgaaaaaccgcggcacgaataaagcaatttaaaatcaaaaaattatgagattgtcaatttttttaaagaatagaaattgaatttaaaaatttttggaggttagttatagatagatttttaccaaaaattaccaattttgcgatttttgaccaattaaaaaaaaataagaattattggggtccggcgccgctgattggtgccgtgattgtttgaaacgaaaaatatgaaagttaactgattttgttcgcaattttatggacgttttaaaaaatgaggattttttgaggtattttagtggcaaatgaggattttttatgactgaaatgaggattttcaaaattttgaaatcgaagcctgatatatgcccctctccgctcttctgctgcctttttttggtccctcccttccctttccgttcaaccgaggagttaaatcgattcgccaattttccttcccacccccccccccctccgcgtttctgcgcaatgagttcacaaacagattaatgatgaatgaatcatttattcaaggtactcaaatttaatggttgctataaaaccttttttgttctcctaaaaaacaataaaatttcggaataccaatttggttttgttagaaataggtctacgacaagtcaactaataacagttgtggaagattggtacgaggcaattataaatggaaaaaatgttgactgtatttatattgattttcaaaaagcatttgactcagtgccccataatttacttttatacaaattggaaaaaattggtataaagggcaaacttttaatgtggataaagggctttttgagtaataggacttttcgagttaaaattggggattctttatcctcaagtaaaaaagttacctctggcgtcccccagggctctgtcctgggccctttattatttttgatttatattaacgatcttcctgatgccttgccatcaggagtgaaaataaaattatatgctgactgatgttaaattatatatttgttataaagcaagagccgacacggaaattatgcataaagcattgcataatttattcgaatgggcaaataaatggcaaataaaagtttcaattcaaaaatctttcgtattatatttgggttcaaataaccc

SEQ ID NO: 55484 - DNA, 288 bp, Heterodera glycines
atgaaccaacagcaagtaattaaaacaaaacgaaacaatgagaagttggagtatgatggtgcactatacgtgctccataaattcagtgacgaccgactaaagaagttttggcgctgtgagtttcacggaccatcagacaaatgcaagggtatgttaatatatcactttgaattttgagaatcttaaaattcaggacggttgcacactgatttaaacaacgttgtgcagaaggtggtcggcgtccattcgtgcgacatgaacgctgcgcatgtggaatgtcagcgcctt

SEQ ID NO: 55485 - DNA, 67 bp, Heterodera glycines
atgcgcaagctgcaatttgttgggcccgagctgctgctgattcgaatggagcagccgaagggcgaca

SEQ ID NO: 55486 - DNA, 942 bp, Heterodera glycines
atggaagacaagacattgcttatgtgggacaccaacactactcgtgcatgtgaattttcgaaaattggcacatggaaaggactacaacttgacaatatttggatttcggatgaggtcagttttcgtttgacatttttgaacaacacaaagaaagtcaactcatgtggtctgaatttgataaaatcggaggaaggatttgctgtacaagacttgccttccgacgatagcaacaaatcctcaaagagaagcagaaagacgagatcacttgaaagttgggtcaccgaatcggaaatgaactccaaattgggctatttggatgaacaagtaagagaaatgctgactctttccttttctcagacaattaaatcgatttgtgattatatgttggagacgagaagatgggcagcgacggcacttctctcagatccaacaacttttgccagaaaattattccaatctggtaaactggtggcaaaagtggccgggcccgaattgattaaagtgtggccatgcatcgaattgcaagcacatgactacaaatttgccaaaattgggaactcagcggactccgaattcgaatgctttgacaaaattccaattaaattccgagtgaaggacaacaaaagaatggcatttattgacccaaggacaatgattttgagctccgacgcgagactggcaccatgctcagaataccgcaaacagctcatttttgtgcgtggttctctttatgaagttgatcaaatcgatgctcaggtcaaacaggtgaatgccaatcgcattgacggtttcagccttaatctgtcattggcaccgacttatgctcgccattcctttcttcaccttgccctagtgaatgtgtctgactttattggccagttttacgacgccaatttcgcaagagaaagtgaactcacattccaacttaaaagtgaggacacg

SEQ ID NO: 55487 - DNA, 371 bp, Heterodera glycines
agcatttctcttacttgttcatccaaatagcccaatttggagttcatttccgattcggtgacccaactttcaagtgatctcgtctttctgcttctctttgaggatttgttgctatcgtcggaaggcaagtcttgtacagcaaatccttcctccgattttatcaaattcagaccacatgagttgactttctttgtgttgttcaaaaatgtcaaacgaaaactgacctcatccgaaatccaaatattgtcaagttgtagtcctttccatgtgccaattttcgaaaattcacatgcacgagtagtgttggtgtcccacataagcaatgtcttgtcttccatctcacattggcctgccttgaattggcaattgtt

SEQ ID NO: 55488 - DNA, 786 bp, Heterodera glycines
caccgagttggctgaactgaaaacgaagagtgacaagctcacttccgaattgtcggctgtcaaaacgtttgcacgcaaattccgcgatgagcgcaacaaattggagttggagaagaaggagttggaggtggacaattttttagaaattaaaagttttttttctttttaaattccatttttaggccgatttgaagagcaaaaacgaggaattggtgcgtctccgtgaacagtccgccgcttcagcgctggaaaccaccgccgccgctttgtctgcagacacttcagctgctggggagccgcgttctcctgtcccgccaactttgtccggcactgtacctggggcaattgctgctggcgcactttctgcaatccgtgcagcggttggtgccggagagggcggcggtgccggggcggacaacagtttgcgtcgccgaatggaccaattgatgaaggagaagcaggtggggaacaacacaaacacaaactgaacttgattaagtggtcgaacgtgctaccataggaataatttggacttatactgatattacaaattggttttgatcaaataacctggaaaattgagttcattaactctgatcaacgtgatcactgatcaaaaaacatgcaaattgatcattgataatccaatccttccctttgtgcattttaatcctccattttctttcacaggaactgttggacaaggtgaagaagttggaggaacacaacaaagtgttgcagcgtgagctggatgaatccaacgagaaggtcacacggatggacatg

SEQ ID NO: 55489 - DNA, 819 bp, Heterodera glycines
aaacaaaaaaatcgattttttcaagtgtccgtttggggtactcaaacaattatggggagcaaaaatccaacgcagaattaaagtacaggctatagggaagctattcccgaaggattcggtctccccataaatctgggcgcatcggttcggggggactgccccgaaaacaaaaataaatcgattttttcaagtgtccgtttggggtactcaaacaattatggggagcaaaaatccaacgcagaattaaagtacaggctatagggaagctattccggaaggattcggtctccccataaatctgggcgcatcggttcggggggactgccccgaaaacaaaaaaatcgattttttcaagtgtccgtttggggtactcaaacaattatggggagcaaaactccaacgcagaattaaagtacagactatagggaagctattcccgaaggattcggtctccccataaatctgggcgcatcggttcagggggactgccccgaaaacccaaaaaaaaattttttggataaaaattatttaaatgaactgactagataatatttaaaataggttatttctcttcctttcagtatccctgcaaagtttggtgcgcttctgataagtttctgaaaaaaaagttaagcctaaactttttggcctgtttaaaaaggaattaaaaatttttaaaaattttattcatctccctttttgatagaaaaagcatcagagtgcctaaactaacatgtaaataaaatctggtgcgtttcagaaccctttctgaaaaatatttaagaattaattttgcaaaaaataataaaacgaaagact

SEQ ID NO: 55490 - DNA, 810 bp, Heterodera glycines
atggaggaatttgtcggaatttatcagttccattgccatccaaacttttccggcgtttccgggctttatccgcttcaattttcaagccgtgggcgcatttctgaccggaagaaagggcgacttatgttggacattgaaaaattttctgaatttgcgcaattatctgctgggagttgcaagcgattcctcgaggactatgtgtacattgggggactcccgtggataataatggcaaaaataaatacgcaaattgaaagcactgaaaaatggatggactttttcctatggtgcattggtccaaaacaaggtcggattgaaatgtgaaattatgaacagggaacggatttatatgtttttacatatttttttgcgcatatgctatcgcatgaaaagctcaaaaatagcatttttacctgttttcctttcaaacagagcgtgttttagcattgtgctagcgaaattgataaaaaacgagacttttttgagaaattaacttattttttgaccagtttttcttcatgttttggcacatattttggcctttttggggtttttaggacatattttgagggtttttttggcacatatatatatgtacatatttggcgttttttagcacatataaatcgttccctgattatgaaatatttaattaaattaaaattttaaattatgaattatttattcacactatgacaataattagggtttcaaaaaattttcattttattataaactttttatttattgataaatagggcttccttttttaggcacaaaaaatcgcgaaataggcattaaaataggcaa

SEQ ID NO: 55491 - DNA, 2692 bp, Heterodera glycines
atgaccatcgccagcgcctgcgtcaagaactttgcactcaaccatctgaaacccaactcgctcgccatcgtcccggaaaaaggctatacaccacaacagaatcaaagtgcactggccatcaaatatctcgattggtactcacacattaacaacgtcaacattcaaacagcacactcccgctatggtgaatatgtctttaaacgtgagggtcaggtgtatcaagtggatggttatataaaaggggaaaatgggaagagggataaaataatcgaggtaaatggttgtctgtggcacgggtgcgaggaatgttttgaggacttggacgacgaaacgaaaatgccgaacggaaagacgctaggacaattaagagagagggaggtaaggaagcacgagattcttagccggtacgtagacttggatgtgatctgggaacacgaaatcaatgagcagctgaagaaggacaagcaaatgagggagtttttcgacaactggaaggaccactcaccaataaaaatcagagacgcatttcatggaggacggactgggccaatgaagctactccacacagctaagccgggacaaaaaatcagctacaaggacttcaccagcctctacccatggaccaatttctctacagactatcccctcggtcacccaaaaattatcagctttagattaaatgagcaaactgtcaactggcgagctccatccgacaatccatacaagggacttttaaaagttttacttttacccccaaacaggaatatcaatgtgaccgtaatgcccataaaatttgatgagcgactcctctttccactctgcgaaaaatgtgccaaacacatcaccaatgaacacccgaatggcctcaaagacaacgactattcgtgtccccacttcaatcctaatgaccgtgcctttgtctctacctgcactcaccttgaattgaatgctgccttggaggtcggctacaccgtcagaaaactcttccatgtcctgcaatacgaccaatggagcgacaacatcttcaaatcttacgttagcgaaatgatggccctgaagatccacgcaaccggcttcccttcatggtgcagcagcgaagaggagaagaaggaatacattgaggagaaccgtcatcgatttggaattttgttagacaacgaaaagatgaaggctgaaccagggaagcggtacatcgccaagctctgcctcaactcactttggggccgcttctccatgaggaacctcctctccaaagcaataatcaacaacgacgaaagcctgattcgccaatataccgacgacaagaaaattgaattagtggacttggaaatgatcgacgacgacaacgacgtattcatgctcacctacaagccgaaagaggagtttgtcgacgaaaataaatactccaatgttgtcatctccctcttcacgacatctgcagctcgcctctacctctacgatgccctcaaaaaagtagccgacacccccgactgtgaaattctctacttcgacaccgacagcgtaatctacgtgcaccccgaggacaacgacccactaccaacaggaaagggacaccttggagaactcactgacgaaaagccggaccacaacattttggaattcatcagtgctggctgcaagaattatgggatgaagctgcaacgcaaggacaccggtgaaatagaacatgatttgaaaataagagggttcacccttgatgcacaaactgttcaaaaaattcattacgatactgttaaggaccaaatcttacgctatggctccgaagacccccctgaccctatcattgtaacttacccccattttattcgccctaatctaatccaaggcaaagtgtatacccattccctcacaaaacattatcaacccatattcacaaaaggtattattaatgattcattccaagtcctcgaatttggttatcgcaaatgataagtatgcattctcaattaaattttctgtatattagttttcttatggttcccttcttttctttctctctgtttatatcactcatgtgggacggaatgacccctggttgatcctctccaacactccaggccatccatctgagatgaaggtggacgagctgttcattattgtaatgcgcagcctggtgcgtgagtgtttggattggggaccgaagggtgaagccgttccctgggtgtgtttactcacttttaagggaactctaagaattctgatatgccttcaaatctatcaaaagagttgcatactttctttttataatttcctttattctctattttacacttgtatttttcatttgaatgtttattcagaaataaaattgaaaaatgtgtcattactaatattaaaaggtataaattaaaaaggtatttaacgagaaaaatagtcagggttttgtaacacaatttgtaaattattaaggaatagaagatacaattttaaaaaatacacgaacttgtcgtttttaggtagaaaagtgcataattaaacacattaacatgtatgcagaattaagcaatggaagataaatttgaaaattattaagcaattgggaatgtcgtttttaggtagaaatatgcaaaattaagagaaataagttacaatttgtaaattattaaggaatagaagatacaattttgattatgtgcacgaacttgtcgtttttaggtagaaaaatgcataa

SEQ ID NO: 55492 - DNA, 753 bp, Heterodera glycines
atgtgcaaactgatgttcgaaatggaagtccgtgcccacatggattcggtggcggtccgtgcctcccccacggctgtcagttttctgaccgaattcaatgccaaactcgcggaacaacagcagggaaaggtcggtccgtacaattcatacatattcaattttgcataaatcaagcagaaccaaccaaacgaggaaaacgaccgtacggcattgcgcgaataccccaactattgggatcagaaacggattgaccggtccgtctattggtggttcagaccgatgaagagcaccagcggaacggacgcgataaacatgacgaaattgtcgaacaatttgcgcaaagcggcggaattgaagcggaaattttcggaaatggtttgtctgtccatttggtcgcccattgaggaaagctttcggttttctgccactttttaggccgaattttcaatccgtcactgtctgatcactgtggaagccggggttcgtgatgttacgcggccaatgattttgattgaaagttctgtcaccggtactgctcggaattggtccagcacattgactgcggtacgaactcacgcaaaatcatttctgataattccgttgaattttcagaaatgtgagactcatctgattgtctcctatttcaatgaattattcaacgtttgggagccggtcattgaacccgttttgcacaaggacaaaggctggcaaaactggaaattggcattgaaagtgctttctttcttccattag

SEQ ID NO: 55493 - DNA, 761 bp, Heterodera glycines
aaaaagtttagcaatgattcatcgcattttttaagcctagaaaaaacaccttcaaaacttttaacatttttttcgccggacgccaattcttgaccattgccgttaattttttagccttggtcgtcctttacatgctttaccttctgttcggtcgttgggctcagctggcgtgtaacatcaccggctttctctacccagcgtaatttaattttttcaattcggtattatataattaaaactgaaacacgcaaacaatttagttacatctcaataaaagcgattgaaagtcaccagaaggaggacgacacccaatggcttacctactgggtaacttcttttttcgtctcaattgcctcgagaattgatgcattccttcagattttggtgtttttttattcaaatcattatttaggtggtttttgcgctgcttaatgttgtggaattcttctccaacaccattctgtactacttccctttctattggttgatgaaggttctattaaatttttaattgtttttaccctaatataatttttttttcatcctcattactcttgcagtgtgctctgctgttgtggctgtacttgcccagcactttgggtgctcagctgttgtacacgcgcatcattcgtccgttccatcttcaacagcacaagaacattgacagcatgtacaacaaattggctgggggtgagccttttagcaaatgaaactacctaaatctccaaatttccttaatggttaatggtaccatgtgtcag

SEQ ID NO: 55494 - DNA, 723 bp, Heterodera glycines
atgactgtccaatttttttcacaggaacaacagtacaagaggcagctgaaagccaagaatgagacggccaaatttttgcaagattcgctggaagaaattgcgctggctcgccaggagcaagggcatgcccacggggcgcaagcaatcgaatttgctcaattccttaaaaaggttttttttgcacaaagtgccaaaaattttaaaaaataagcaatcctttgaatatttttttttacaaattttaaaaattgccaagtttttcaaaaaaaaatttttttttattcgtactattttccccctatttattgtcaggttcgtacgggtgagggcggctatgtgaacaaccaggagctgttcaagttcagcaagttgttcgaggacgaactgacgctggacaatctgagcatggtccatctgcgagcgttgtgccgtctgttgggcattgctcagtttggaacgccggaaattttgcgatttcgtctgcgcatgaaactgcgcgagttgaaggcggatgaccaagtaattgtgtctgtctattaccaattttatctaatttatttttttttaatttttcgttttttgaccccctaaaaatctgcaactttttagctcattgaacgggagggcggtgttgaagtgctttctgcccaagagttgcaggcggcgtgccgcgcacgcggaatgcgagcgcttgggctcagcgaagaacgacttcggcaacag

SEQ ID NO: 55495 - DNA, 369 bp, Heterodera glycines
atggtaatggagagggaaatttgggcgcttcttcacaatttggtactcgccgaagacccgtccaatgcggcaacttatctgattgacgagtggagccagaaattcgggaaaatgcacaagctgttggccaactgcggctcatatgacaacactgacccatatgatgaagcgatgcgagggctgctgatggtggtcatggacaaggagaaaattccaatcaaaaagctggatgaatgccgtgccatcgtgccaacacttatggccaatgccgcgcatagacatgttggacaatttgctaacggatctgagagagccgataagtccttatttcggcaagacttttttggcagaagagtgcaaatgaagtag

SEQ ID NO: 55496 - DNA, 6352 bp, Heterodera glycines
atggggaattttcgactgggcattttgacccaaacagagcatacgacccaaattcacttgcagaaccgtgccacaattcctccaccctccgccaaatgcgccggtaatcttgagtctcgttttcggttgcttttttaaattcccgaatgcttttttcaggccgttcgtgtccaaccagttcaacaactgataccactgatagacgtgccgctatttgtcaacccaccaccaaatgtgccggtaattttggctcgctttttttactttttttttcaagatcccgaatgcattttttcaggtaattcgtgtccaaccgatgcctcaaccgttgccgctgagagacatgccgcaaattcaccatccaccgcgaaatgtgacttcaatttggatcaaattgtggttgctttttctcagtctctgggtgtttcttcagggaattcatgttcgacaaattcaacgggaatacgccgtaccgcaatttgcccatccgccgccaaacttgccgtatcatccaccagaaaacgttccggtagttgggtcttgtttttcgtgcgttttctcatattttcggatgcttattcaggcaatccaaccacggcaacgaccgcgccagctgagagacgtgccactattcgaccacccactgccaaacggacaggtaatttcagaccctgtcttctacctaacaccgaaacatcttttctaagcaaatacatcccaaccccccgagagtgctggaagtgatccgacggctgggcgagtggagaggaagaccaagggacccaagatgtccgcctcaatgaatgaatggaatttggattttgataaaatttgttgttttaattttttgaattgataagggttaaatcccgttacctaaattgtttgaaaattattaaaattttaagaatttagatgctaaacctaacctttgacaaagattatgaaaaaatgaaaagaaatgacgaaatttttggaatgttccttctttttattatctatggattttttttcatgtgcattattttggtgctagtaagatattgccgaatgaattaattggttttttctcttcattttaaaacatttcacgtccccatgccctgcccacttcccgcggaattgatcaaggaaataattgacgctcttccccctccaaaaacacatcggcttttgcgcttaaattttgttttggcatactttgttaaatgtcggtttcattccatgatgagaagattgtttcgcccagatcatatttcaataccaatggcccgaagaaccggaatttatttctttttcgatgttcgtactccccctatttattttccactctaccaataataacatttaaataaaattataattttttatttcttatttgattaatttcgatcaatattttttgataattaaacaaattgtatttttcaaaaaagacctttctcgcagtagcaactcatcggcttttttttactcccttcataaaatgtctcgcttttgcccgctcgcccaaatcaatgaatcgggtcggcttaacacaccaaaggggaaatttagtgagttccaaacctatcaaattaaaaaagaattttgatattcgttttaggtcttttttacgctttggaaattgctcgaagctaccagctcatagggaaaagtataacggaaaacaaattccgttatctgatgaagacggagaagaaacaaagggaaatggccattgaattgatggaaaaggcagggataagcacggatgacaaagcttttggtacccaacaccttgaggctgtacaaaaatactgggacagggaattcccggatatgtttcgcattgtggcttttgaaatggtaacaaaattcgcttgaaaaatataaagttacatatttttagaagaccgggcttaggccaattttcaagggagagggtgttcgtaagcacgaagtttgcgtgataagagaaggcaatcactgggaagggatcaaatcggtgtcctggttttttggtgttcgcaacttttgcgtgggttgtgaagtgacgtacgatcgacctgaaagacacagaatggagtgtaaggaaagatgcaagaagtgctgtagaatggggttcgggtttccatgtgcaaatgtgtgcgaggaaatgcactgcggtgaatgtaatcttaagttctacaacccggaatgttttgaagcgcataagaaggcggcttgtaatgagtacaaaaagtgtgaaaaatgcggagaagtctaccaaacacgttcgaaacacgtgtgcggggaaaaattttgcaaactgtgcaaagtttgccacccagggcggcaatgtttcatcaaaaaaattcaagtgcgaccgcagaaagcctacagaattgtggcctacgatctggagacgactgtagatgggggagaacaccggcctaatcttgttagtgctgcacgtacttgtaacatttgtgcgggagaagagcgggaatgtgagatttgtgaaggccccagtaaaatcacatggtcagtagcggatggttttgacccaatgagcgagtttgtcgtttggataatgggttttcaacgatttgaaacgattgcttacgcgcattatgctgggagattcgattcccactttgtcttgtccgagctaacaaagaaggaaatcgcgacggaactgatgatggcagatttgaaaatttatcaaataaaggcgggaagagtgtactttcgggacttttggatgctcagtcagaataaattggcggaccttccaaaaaccttgggcttaaaaactgcagctaaattgtattttccacacaaatacaataagaatgagaattttgggaagagattatccaacctgccacctttggaagactattgccccgacagcatgaaagaggaggaagcggcaaaattggaatcgtggcacaatgagaattttcaaaaggaatttgaactaggtagggaaaatagcattttttctttgaaaataaaatttaaggggaacaactcaagacgtattgcgaaaatgatgttgaaattttgatggaatcaattttgaagttccggcggttatttttggggataacaggagatttggatgtaataaaggacagcgtcaccattgccggggtcgttatgaagatcttcagggcaaaatttttgaaggacaggcatattccaatcatgccagagggagggtatgagagagcagagaaccagagcaaaatcgcagtgaaatattttgagtggttagcccaaaaaaagggagtaaaagtgcggcatgcgtgtaacggaggagaagtggaatttggtgggctgaaggtggactgtgtgattggggcagagaaaaaaataattgagtttcaggtaaaagaaaaaatattttctttttaaacaatacttaaggggtgtgcatttcacgggtgtccgagatgttttttaccttggaccatagcaccaaacggacggacaatggaagagaatcaaagtagaaccgaaattcgcatggaaattttgagggaaaagtgcaaaaatttttcaatcggagaagtttgggtagaataaaacatttagaaatatttattaattgttagttttaggagtgtgacgtcagagaggaattgaagaaaaataaggagatgaaaaagttctttgaaagtgtgccggacaagggaccgatcaatccgagggatgcttatgccgggggaagaacgatgccattttgtttgtacgcaaaggctaccgaagaaattgagatatcaatgttcgacatcattagtttgtacccctttgttaattatggtaaaaatctgcttaatttttgttagtttcctttcgcttaagacaccccataccccgttggagtcccgaaaattgtagtgagcaggaattttaatgtgaattggacagcacctgacgacgtaccctatgatggacttttgaaagtaaaagtgatcccgccgaaaaatcttttgtatcctctcctccccgtgcacatcgatgaaatgctcctcttccctaattgttggtcttgtgcgagaagggccaagaatgaatttatgatgacaaaagatgtgaaaaaatgtaaccatcgtcccacgcagagagcatttttggggacattcacatcaattgagttgcggaaggctttagagctaggatatagaattgtgggattctatcgagcgtatcattttgaacagtttgacagtcaactgttcaaaggatatgtgcggatgtttttgaagataaaggtggaagcgtcggggtggccggcggaggtgaaaagtgaagatgaaaaaagagcattcatcgaaatgtacaaggcaaagtatgacatcagtttggattatgataagattgggtttaatcccggactaagaatgatcgcaaaattggtgagaaattataaaaaatcttgaaaaattgttcaatttaagggtttaaacagtttatggggcaaattttcgatgcgcaatactctttcaaatacggaaattgtgggcagcatggaacgttggatggaattgggaagagataatacaattgatttgggcgcccggtaaaaataagcgaagagatagcacggtggtgtaccggaaaaaggaggcgttcataaaggagcataaagtgtcaaatattgtttttcattgtggaccacgagtgctgcgataataaaactgtatgagaaccttgaacaggtctataggaaggaggggtgtaaaccgctgtattgtgacacaggtgtttcattagaaaaaataacgcataaaagttagattctctggcgcttgatcatccgaagggtcggtgtacattgaaggaggggaaatttttggggtaaaacataatttttgaaacacatttaaattgtagttttaagggagatgacgcgagaatatgcggacaacgaaattttggagtatgtgtacgcgcgtccaaaacagcatgccttaaaactcagaagaaagaaggatggggtgatttggcacaaaacaaagatcagagggatgacattagacagacgaaacgcttttaaatacgaattgttcaaagagatggtgctggactgcaagaaaggggtcaaaaaagtttttcactaccctgagaaaatcggttcaacaaacgacttccgggttctctcaaaagatgtgcgaaaagaatatacgccggtgcagaaaaaaggaattattgacgatcactttaatgttttgccctttggatattattaataatttttgttttgataattttgtctcatgtttataacatttaatattttaaattaatcaaatttgtttcattttttagaatgtcaaagaaaaatttccaagaaacttcaaaagaaatccgccgctcgaaaaatacaaaaaattatttcaaaaacagtcctaatttggaaaaatgtttcgaagaagtggagagtcacataaaggaaaataaaaaatttgggataaaagagcacgtgacaactttctattttaaatgccccgaaaatgaagatcccgaaaaaatgtttaaaaaaatcctgaaaaaattaatgggggatgcaatgagccgagaagctgagccgggctggaaaattgagaaaatttcagtggacctttattgcagtgctctgtcagacccagtgatcatccctgcccgccccttccaacaatcgaatccagacattgttttcaaggagttcatgcacaggcagcaatcatttggggaagtgaatttgttagaccagagaatttcaataattattgccacttattctttccctgttaaataaaatttttttcatttttccatttcattattttttgttcattccattattatttattcgagtttttttctttattaatttttcagttaaaatgtactcgtttcaaaaatattttgaggaggctctcgaaaaagaagattttttctggcagaaaaacagagcagaagtggaggcattgttaattgaggcttcaaattataaaattataatacacagggacaacgaaagccgctattctgattatattgccacctatcgccgcaccccactcttctgtttctgcatgattgagagaaatttaagatttttttacgacacaggaaccgggacgcccataggaagggttacaaccgtgctacatgttaccgttgaggcgagctatacaggagagggattcatttcgcctatgttttccttttggttttattgggagggcaggagtcaaacaacaaacgaatctttcacgagccgtctttatttgtacactgtttcgatgctaagagcaatgggcaaagcctggggcagagaactacttttgaaccctgttgaagttttaattgatatgttctaccaacgaatagatag

SEQ ID NO: 55497 - DNA, 766 bp, Heterodera glycines
atggctccactgacgatggaccaaatgcaactgctggccaagctttggtcaaatggcttcacactccgagcaaaaatggccaaccgaagcgattgtatcgcaataattattttggtccacagaatctcgaatgggtcaacaacttcaaagaggtgtgtctagccatattttctataaattgtttttgtttttccaaatttgtttagccatttatcagtgccaccacttctgtcagttacaatattcaactttattttcatgtgaacacaattccaactgaaccatttgaattggtgaacaaacggacgaatgaaaagctgacactgaaacaggagatcgacgaattcgacgtaaatgtgtataattggctgttgcaacggtgcccaattggggagacggcgagggtgccagcaattaaatggggagacagcttaaatccgagtgccaatttgaacagtatcagatttgatctgtggagtttcgataaatccattgagtgagcagcagcaatagcatttgaattttatcgaaaaataaaatatttaattaattttaggccattgtcgccaccaacggaagaagaaaaagaagaagaagaagcggataaaagcaacggaaatgtcgtctgctgattaagtgtacggaaatgaatgattgaataattctatttgagaaatgaattttcgattgaaacgattatctagagaatttggaaatccattaagtagttaagggttcactcatccccccgcttagaaaaaaataa

SEQ ID NO: 55498 - DNA, 1194 bp, Heterodera glycines; identical to SEQ ID NO: 24760

SEQ ID NO: 55499 - DNA, 65 bp, Heterodera glycines; identical to SEQ ID NO: 54797

SEQ ID NO: 55500 - DNA, 339 bp, Heterodera glycines
ctcaaacaattatgggggagcaaaaatccaacgcagaattaatgtacaggctatagggaagctattccggaaagattaggtctccccataaaatctgggcgcatcggttcggggggacatgccccgaaaacaaaaaaatcgattttttcaagtgtccgtttggggtactcaaacaattatggggagcaaaaatccaacgcagaattaaagtacaggctatagggaagctattccggaaggattcggtctccccataaatctgggcgcatcggctcggggggactgccccgaaaacaaaaaaatcgattttttcaagtgtccgtttggggtactcaaaca

SEQ ID NO: 55501 - DNA, 744 bp, Heterodera glycines
atgcagcccggtgcgaagaagcgcacaaaaaggaagaatgccgaaaacacccacggcgaggctatggaatgcgaagaagaagaagaggatgccgtagatgaggacgccgagaacaactggatgctggggtacgaagaagccggggagaagccggagtcggtgacaacatacgcgtacgcccacgccggtaattttggaattatttaaaaaaaacttggaagaaataaaatttaaaggttcccgctacgatcatgtgctgatttatggtgaaatgctgcgcatgggtgtccgccctgaactcatccgccagggaaaccatctcctggaaatgaagacccgcaaaacaggagtctacacaaccaccgttttccgggacaggtaaatattttgaatattaaatatttttaaaatttttgatcactttagttacaagttgatcccaataaaacttgccaattttgtcaagacgtttggcctagaaattgagggcgtggaaaacaagaaatattttccacacaaattcaataaggtaagaggaatttataaaaaaaaaataaaaataaaaattaatacaatcttaggcggaaaattatggcactgtgctggacaccctgccaccaattgagaactattacccaggtggactcttcccggcagagcgtgcaaagtttgagcagtggtacgacgagaaccgggaaactggttttgagctcagtgaagtcatcgcggactactgcaagacag

SEQ ID NO: 55502 - DNA, 453 bp, Heterodera glycines
atggccgaagcagcaattcgccaactgtccgacgtgttccagcagttcttgactgctcagcaagcaaatgcggcagcaccagcacaaccgattccaatgccaaatttggcaaatttcgactgttttggtcttggtgaccatggcgaaagcgacatcgagggttggctggaacgcttcgcccttgcgcttgactgctcaacaccgaaccttcaggacgatttgaaggttaagctcttgctgacaaagctgagtgagacggcctacgccgagtatagcaaacactgtttgccgaaaaagccaacagagtttgactttgctaagacttcggaaatgctgttaagcttattcgcgaagcaaaatcagtgtggatcggcagatatgagtgcttacgggctgaaaagcaagacgaggaggaatttcgcggcttcatcaaccgccacaaaaggctgttaa

SEQ ID NO: 55503 - DNA, 2943 bp, Heterodera glycines
atggaagtcacgatttgggtgaatgacattccgatcaaatttgtgcttgactgggtgccgatttgactgtgctggacgaagtcgcacacaaggctattggaaagcctcggctgacccactgcaatgagcaagccgtgtaccacgacggtacaagctgtaagcttttgggaaaaggcacagcacgtttttcatttggaggaaaaacaattaatgggcaatattatgtgacgaagaaaggatcactcaatcttttgggaattgatatgttggatgcctttggcctattggacgctttcagaagggaagttgaaaaggcatgaatggcaatttggtgaagaaggaagcgaaaaagtcgccgattcttcaacaggagaccactttggctgcgcttcaaacaaaatttccgcttgtttttgcggagggacttggacactgcacgaaagcaaaggctcatttggaattgaggcctgaggctgtgcccgtctattgtcgtccccggccagtgccttacaacacacgtttggttgtagaggaagaactggaccgattgttggagcagaaggtgatcaaatctgttgatcacactcattgggccgccccaattgttgtggtgaagaaggccaatgggtcagcgcgtatttgtgccgatttttctaccggtttgaacaatgcgttgctgcttcatcagcatccacttccattgcccgatgatatttttgcgaagctgaacggtggaggattttctctcaaatcgacttaaaggatgcttatttgcaagtcgaattggatgagaaatccaaggaagtgtgcacgattgccacccaccgaggaaattaccagtttcagcgactgccgtttggagttaagtccgcgccaggcatatttcagtcaattatggactcaatgctggcagactgtccatttgctacggcatatttggatgatgtgatcgtcgtaagccgatcatccgaagatcatcagaagcaccttgaagaggtcttcaaacgttttgaaaagtttgggttccgtgtcaagccagagaagtgcttcttctgtcaggaccagatcaaatatcttggatttattattgatcaggacgggagacgaccggaccaaacaaaaattcaggcgatttctgaaatgcctgttccgacaaacgtgtccgaggttcgatcatttttgggaatgatcaaccattaccaacaattcgtgaagaacatgaggttcatccgacagccgttggacgaattgttgaaacaggacaaagtgtggcaatggtcggaagattgtcaaaatgcctttgagaaggtaatcaaaattttgaaatctgatcaattgctgacacactacgatccggcacaagagatcattgtatcggctgatgcttctgagcatggaataggagccgtgatctctcatcgcttttcggatggaagtctaaaagccatagcacatgcatcatcgtccctgtcagcagcagaaaagaattattctcaaattgagaaggaaggcttagcgattgtctttgccgttcaaaaattccacaagtatctcttcgggagacacttcgttctgcagacggaccacaagccgttgttgtccatttttggcaacaaaaagggaattaaggcttgcacagcgaatcgattgcagagatgggcaatcactttgctcggctatgacttcgaaatcgaataccaaaatactgctgattttggtcaagcggatgttttgtctcgcctaattgcgaagacaccagtgccggacaacgaagtgatcattgcaaacattcgtgagagcaatgaaacgggagtgttgaattttgttacgaaaactcttcctctcgatcaccgtgatttggctaatgccgcgaaaagtgatcaggtgatcaaaaatgtgaagaaatttgtctgctcacattggccaacaaagaacaaaatggccgcagacattgttccgttccatcgacgacgacacgctttgaccatcgaggatgaatgtctgctttatgcggacagagttgtgattccggcatcgcttcaaaaagatgtcctacaactcctgcacagaggccatccagggatgaaacgaatgaaagctctcgccaggcagtacgtttactggcctgggatggacgaacaaattgagaattttgtcaaaatgtgcaacgaatgcacaatggaagcaaagatgccggtgaagagtgagcttcactcgtggccgaaagctgacggaccgtggaaacgcgttcatttggactacgccggaccgtttatgggaaaaatgtttctcataattgttgacgcgtactagaagtggcccgaggtcttcgaaatgcgttcatcgaattccgcggctacaatcgacaaattgcgatcactctgtgccagttatggccttcccgaaattttagtcacggacaacggcacacaattcgcttcaaaagaatttaaggaatttgtgaccgaaaatggcatcaaccatctgttctccgctccgtacaatcccatgtcgaacggacaagccgagcgttttgtcgatacgttcaagaggacatgtaggaagatcaagggagaaggagcatcggaaatgttgaccacatttttggcaacataccggaccacgccttgtgaggctttgccggagtgcaaatgtccggccgaaatgtttctaagaaggaaaccgcgcacgactttggacttgttgaggccaaagccaaaggcacagataattcgagacgagaccatggagaagcaattcaataggcgccatggagccaaaccgagatcttttgccgtgggcgataaggttctcgctcggcatcgtctttctcagccttggcgccccggaaaaatcaccaaatgtaaaggtgtcatttacgacgtcgaattttttgacggaaaattcggacggttccatgccaatcagttgcttgtgagaagc

SEQ ID NO: 55504 - DNA, 746 bp, Heterodera glycines
atgccaattcacaaatttaattttttaatatgtcacggaaacattagcagcaaatttaattgcgacaatttgccatttataacaattgagagcgtgagaaataattaatttttttaaagtaactgaattatgaaaaaagttgtttagatattaaagataaatttcaaaaaaaatttaattactaatgctatatatttcaaaataattcataggattgctaaattaagacacagaaaatattgagaaataaaaataatgaagaaaaaaacaataaaagcatatatatttttacaatgaaaaggatcagaaaattttaaaagtaagaacttcctttgtcagaatttatttctcaactcatcatgaatgttgtattcattcccatgtaaaagtacaacatcaaaaatgtggagcaatttcaaagtccaaaagcccagtgcattctgtcgggaagaggaaattaatccaaatttggcgcgggaaaagttctattttgttgtcgacttatcggggcggaggatggcacgaaaaatcggatgatggcaccaattgcctcgaggccattctgccgattttttgttcaaagctttagagtattttacaaaaaaaataaaaaacatttggactaaaaataaccaatttgttggcaaaaattgaaaaaattcagagatccaactgaattttcctgcattgtccatagtcgtagctgagaatgaattattaaattgttcattaaaaaattagtaaaa

SEQ ID NO: 55505 - DNA, 871 bp, Heterodera glycines
aacgattgtacatttgctcagtattcgtgaatggcttgtttcgccggttagcctaattatagatggcttctttagcattgtcgaccggtaggtttcgagttagtggtgtaataaatcaatattttcagtgaaatgcaagaagcgtggaaacttctcaacatacgtgtcccttcactaaaagatatatgcaccaaaagcatttctgagaatgagaaagctttggaagaatttcgaacgttcccatatgtttttaaaaaattatttacacgtttttaataaaaaaattgattatgttttaaacttctaataaaatgtttgatcgttttttttattttaattttaatttactggctatatgtatggaaaggtttttagaatgggtccgttcactaaatatttccgagaggagctagaaaaggtatttttgttttgcgtcaccaatcatataacgacttttaggagtccttttattggaataaaaatcgtaaagacctcaaaaaacgaatggcaaatgctagtccgtatagtgttgccgttcataaggataacaaccaccctttttcgagcattcctaaaagcagacgatttcgaaaaaatcttttctcttttctgatccgtgatggtgattatcgtctttcgtgggatttttttaaacatatctcaagacgaattcactgcccggttaccaagttttaccgctacattaacggactggtacaaattgtatctacggataagaaaaaaccgcgtattttcatctatttctatcaggaaggggaaggaaaatatcgagccccttcttcttatcaagggtggcttatgaggacggaaatagactttgacgagattattacgacttatttggtcaaag

SEQ ID NO: 55506 - DNA, 592 bp, Heterodera glycines
atggcaaaaatgccgacggtggtcagtaaaatcacaaaatattacctcaaattttgtatttttaaggcgactattgagccgaaaaatacgaaaagggacggaagagcggcagaaaatgagaagacttggatttgtgagaagtgagtgccgaaaggggggcgggagagtgatgaccgaataatgccgactctctcccccccccccccatggaaggtgtcgcaagcgcaactcaatcctccgttatgagtgccaaagctgcgaaaagggacacccaacggaagcccagcgcgaggcaatcggtcgagcattgacgggagtttggctgtgtttcaagtgagtggtccaagacaaacgaatggggcggggttaagggatggaataactccgagaaaaaatattggtgtgaaaaagggtcctcaccaggcagcggtacccctccaagccaaaatcctaggattttctctgctgctggagattttagaaatctattaaaaatgaaatcatctgccgatttacagttgtaaaaagatcaatggtcgacttaacaaagtgtgcttcgaatgtgccacaaaaaggcctttgaaaatggcag

SEQ ID NO: 55507 - DNA, 73 bp, Heterodera glycines
tccaagtggggaattgaacccaggcgaaaaattatgaaaggtagaaagtttaaccactacaccacatgtgcat

SEQ ID NO: 55508 - DNA, 1290 bp, Heterodera glycines
atgtcagaccgccgaaaagaagccgaggaaaaaatggaaaaagcaatgtaaattaaaattaaaatgccattttaaatttcaattttcaattttgtttctttttcttcagcttcatctccgctgattgttggctttgtgtcttcgatttgttgccgcctcgtcaacttggccttggaattgcgatgatcagccaccgatttgactattacgtggacgaacatttcaagacgcgaaaatgggcactgaaaattattgaaattcgaagcaaaattggagaaaatggcaccaaagaaatggcaattgtcaattctaattgtgaatcattgccaattccgcaaattcaattgccaaagaaaatcatcggattcaaaagcatcagcatctagtaatttcgattatgaaaaatttagacaacacttcccatcattttcagtttcatcgaccaaaatgtcatcgcttttctccaccgttttcgtcaacttttcgccgcctgtcaaattaatttggacatttatgcgcacaatgatcgcatttcggagttcattttgcacaacatttggccaatgatcgtgaaacatatttgtgccatccaattgtccgacgaagttttctaccgtttgcgcaaattcgtgccgtcaattctcgacgactgtccatcgcttcgcgttatcagtgcctattatactggtttcttcgccgaatttccatgcaatgacagtgtcgcggcatcggatggacaagcggtggtcaaatggcttttcactccacttcaaagcaatgtgccaaaggtgttcaaatgctggttgtacatggatgcttggacttggccgtcaaatattgaaccattcaaaacggtgctttcttttattatttcgttaatcaattttcccatattttaggctttttccaatgcttcttcccccgtcaattttattgtcgtcatgtgttttattcctacgtcttttcctgacttcgttgtgccctttgatctgatcaatgaattgactcgggaacaattggcattgaaaagaactgatgactacagcaatcgttttctgttggtccgttgtccaattgcgcgtgatgaaagcaaatggacaaaatgggaaaaggaagcgattgactggcaattttatgagcaatggaacataattgacattcggattaatgatgagggcgaaatcggagatgggtaagcgaatgcttttttcaaaaattcatatttattgcgtttctatttttaggcttctcaacgcaaatcccggcccaagtgatcatcagcagaagtga

SEQ ID NO: 55509 - DNA, 1189 bp, Heterodera glycines
atgtcactgtggatgacgctgcctggcaagatgtgttcagtaatgagtggaagtaacgtggcagcgtcgcgtcgcataaccggtagtgatgctcgagagtctcggtctcgagtctcgactcgagaaaagtctcgggtttttttggtctcggggttttgggtctcggtctcgagtctcggggtcgagtctcggtctcggggtcgagtctcggtctcgagtctcgggaaatttttggtctcgagcatcactaataaccggcaccataaaacaacgctgcggatttcctcgttcaattccaccgaatatccaaacgtcattaacgacgagccttccacgctcgtattttcttcgaaccgcaagtgtttcatcgatttcgacgaggattcctacgagatgacaaactacaacctgtgtacgatggcgacaaaaaaccttggccgcctatgcgggcagggtggcgaatgaaaaattcgatacaaaccagggatgtgccgagccagacaaaatccgattccgattatggccaaaaatccgatacggttttaaaaccgattacgataatggcccaaaatccgattaattgcgattccgattacgattccgatttttttaaaataattttttcccaaaaattttattcataatcaaaatcataaattttaagattgtgatgcaaaaataaaagtttgtccacattctcaggcaataaacgttttctcagatctgtcacaatcaacccagcggtggagaaaagccgttcgctttcagtcgatgtagctggggctgagaaatatttttttgatagcttagattcggaaacgaaatgtcttctgcacacagaagcccaacaactgttttgttttgcaaaaaacgatcaagcatttggaaggtggatgaccaacgcagctgataggaaaattgcaacttagtaataattcattcatggttcttttctgctttaatgtcccaacaaatttttttcttcaaaatttcgacttttggttcgaattcgggtccgggattcaaaaataggtgaattggctgccatgttcttaaactgataccattaacaacccttcaaagactgacatttttgctaaataacaaaaaactggattatatcggggagaattaatccggcactgctttgtgagaaaaatttaatttcagtcattatgttaaaataaga

SEQ ID NO: 55510 - DNA, 1303 bp, Heterodera glycines
atgaaccaattgcacaattttaccgccaaaaagctttatgaaaaattggcattggctgatgatcagtttgatgagtggcttgtggaattaggcctattacatggtagacgtacatgtcctcaatgtggaaatgaaatgggacgctgccaacctcgcccaaatcagcattatggaaaatggaggtgcaaaaacgcacagtgcaatcgtccggaaatgggctaccttgttggcacttttttcgccggctctcaccttgctattaagcaggtgttttctttgtcttatttctgggcgcaggaattgggtactcaggatcaaatgatgcgcgaaatcgatatcggaggttttgtaaattgtttagtggaagttactcaaattactatgatagggcctcaaacagtcgtagattggcgtaattttttcgcgacatttgtaccagggatgtgccgaatcggaatcgtaattaactttaatcggattttgggccataatcggaatcggataatcgtaatcggattttgccttgaaatccgattattacacccctaagaattgacctttgaaggaatttttttagcgagaataccaatgaattttgaaaaaaatgttttctgaaacgaatgttttaatcttattttaacataatgactgaaattaaatttttctcacaaagcagtgccggattaattctccccgatataatcaagttttttgttatttagcaaaaatgtcagtctttgaagggttgttaatggtgtcagtttaagaacatggcagccaattcacctatttttgaatcccggacccgaattcgaaccaaaagtcgaaattttgaagaaaaaaatttgttgggacattaaagcagaaaagaaccatgaatgaatacaaaaaaaaaaagaaggggagggggcgaaaggtgccccgggaaatttccaaatgaaatttggtgtgtggaaaaatcacccctagtttctattgtgaaattttaaccatttttgccaaatgagcatgagtgccgagatatgacgtgccaaagtttttacgcttttttaattagaaaagatataattctttttggccaagaaagaagccattggtgtagaggtaggtagtaggttagtcaaatcttttttatctcacaggttcgaatcccatgcatgtatatattattttataatttttatttttgattttcatgcaaagttaactatctaaaaatttttagtaaaaacatatttttattttaaatttttttccattagaaatcaaaaaattactacattaaacataaaggtgcaataaa

SEQ ID NO: 55511 - DNA, 870 bp, Heterodera glycines
atgcaagttaatccccaaaatattatttctttacttcaaaaacatttttcgaataattttaatgattcaactatttcgcctgtcgagattgaaatggctaataattttatttcaatcattgaacgatgccttaaaaatgaagaagaaattgaaatcgttgaagatctcgcatttgatgaaaatgcagataaaaagtttaaatttagtatgtggaaagaatttacaaggaaagtcactcaatttgttattgtttgtgaaattgatttaaatttgcacactcgggacaatatcattaaattgcaatcactgatacacaaccagctccaagcaagccggtttaatgcttggataaatttcgcgtggcgaaaagctggattttatgggaatgactccttcccaatttttacgcacccagttaaatattgttttgatgcaaaaaagcagccacatcaatgccaaaagaatgaatgtgccaatgttgttttaatccggtgcgctcattgcgaaattttcctatgttttgaacatttttttgtcaattacctgtactgattagatgattttgatttagagaaaattaaaataaaatttattaaaaacaataaaaaaatgtttgcgtaggggggactcgaactttccattacaaaaattaaatcgtgacacacaaccaccctgccaaccggtcgcttgttgcttctccttttaaatttaatataatataattattaaatatttaaagcctcatatctcggcacagaagcttattccgcagctagaaaaaaaatttggcaatacaacccaggggtggtctacccacctacaaagtttcatttggaagttccaccatcacccgaacactctcctttgtga

SEQ ID NO: 55512 - DNA, 6884 bp, Heterodera glycines
attctttggtccgatctgacttcaatggtccttaaaatgaagtccattcccagtatttctgagcaccttggcgacctccgcttccgcgatcagccaccgaaagcggctattggaagcgcattaaaaaatctttattttctgggagcaatcgatggtaatattttttttttttttggcgaaaatttattttaattttttataaaattaaaaatttcagtccggtcatttccacaaaaaattttcaaaagggcaccgaatggcacaaatttgtgaaaaggcataaaagagtagtgatgcttgtagtctcggtcccggattttcggtctcgattttagtcttcgagactcgtgaagtgggttgtgctctgtttttttcctggattctccatgctttgaatagtaggaaaaacactttcttttttgtgtttgcgaacaaaagttgggacttttttttacatattttcgggtttttttcatattacatacgtacatatttgcatgcatattccacactttttcgtacatattttcatatatttttttacatattttgaggatttttgagaatttatagaaattttttgtgaaaattaaaaaaaatttttgaaaatgtatccctaaaaaatcgatttttttcaaaaaatgatatcaaaaattaatttaaaatactaaaaaatgattttaagcctatttttatggcattttgtgcatatttcaccctttacgaggaattttctccaaaaaaattaccattaaaaatttttatttacatattttagtacatatcttgggttttttgcacatatattttagcattttttataaatttttatttacatatttcacgatttttcttacataaaatagacagccctagtaagtcagaaaaaaggcaaaaaatgcctcaaagcgggtccctaattataccgtaatttaattttttaaaacttaatatatggacataaaacaaaactattttaaattataagcaatcaaaataatttaaaatggataaattaaaaacggaattcttcgttttttatcctaattaccaggatggcattccgaagccccaaaaattttcggctataacaccagatatatttatttttagaaataatagcgaaattacaaattatgaattagatttatcagaattccgaggcccaaaaatttttcgtaagtcgaaaatcggaattccaaacccaaaaatgtcggaaatcagaattccatgccatccctgctaaataccaccaaaatattcaaatttgaccaaaaattgccagttttggtgaaattctgttaaaaaaagaataaattttaaaacgaaaaaatttagttatacggggaattgaacttactctttgtatatggacacaaacttctaaaataaaattaattcaattttttgattgttcttaaaaaagaaaaaatatatattaatagtgcccatttcctcatttatagaacgcgtatcacttactcaaattggcaatcacatggcaaatctccctgtggatccgcaaatggcaagggccctgatagcttcgaaagattacgattgcattgaagagatgctatccattgcggccatcatgtcgacccaacaaccgtgcattattcgccctaaaaaaatagatcgcagccgattcatgaaagcgatggagcagttcgccaactaccatggcgatcacatcacaatgatgaacgtctacaacaagtttatgagttgtaagaagggtggggatatagaagggtagttgcgaattaaaaaataaaatagaaatacgaaaataggaaactaaaaatataaaattcctatatctactctttctttcctttctcctcctttttctcttcctctatctcttactctttctgtttttgggaatgaaattagcaaattaatattaatcaaattttaacaattttttgcggcgcatttaacgaaaaacttttgggaaatgggcgaggggataggatccggaaaaatttggtaatttctttcggatttgttaacagattttcatcaaaaagaccaatttttgcaattaagtgccaatcgatgattttttgcgcttcgaaacgctttttttgctgcgcgtttttcaaaaattttgggggatgggcagggggtcgccgggaaagattttataatttttaatgcgatttgtttgtcaaaaaatgaccaaattttgcgcaaaccttagacattctgccataaagtttcaaaatatgaatttatttagtgaaataagaacaatttttggtcactacatacctccaaatcaggacaaatctgacaaagggatttaaaagcgtaaaatcaagcaaccggttgtcaagtgattagtgtgcctaccttaggtggtgtgttgtcatgggttcgagtcccattagtgttgtctattttcaatcaattaattaatcaaaataattcaattcttttttaaaaattaattaagtttattaaataaaataataattattgtaaattaataaataataataatttatttttaataaaatttaaaaaaaaattgcgatctctttctatctttctttcatttctactctctctttctctctcacttttccattttctctctttctttatctctctaaccctctcttctctcttactttctcttattttctattttttctccctcgctttactctctctccctcttctctttctttccctctctttttctctctctctcgctctttctgtcgctccctcgaattttctctgtctctcctctctctttctccctcatctctctctccctctctttttttctttaactctcttttttctttgctctcttctccttctttcctctcctcttttatcttctctccctctctttcctttactctcttcgttcatttctatcttctctcctcgcctcactatctctcatccctctctcgcttcctctctttgtctctcctcgctttatctctatcctttcctctctccttaacttattctatttctttcttctttcctctctctcctcattttctctatcctttcctttcttctccttctcacctcactttctttctttgtttctcgcttctattcttttctctcctcattttgtctcatttccctcttttctggtcatttttttgtcaagttttgttaacaaatcaactaaaattacaaattttcccggcggcgcctatcggcggaccccttgttccccaatgttccccaaaagtcttggaaaaagcgccgcgaaaaaaccggtttgagagcaaaaaaaggtacatcgatttacatggccggaccccttcgcaatttgtaaaattggccgctgacccctcgctttgcaaaaaattttaattttaggtataaatctgaattttactgttcttcatcctgaatttgaaaaaaaaacttaatcaccctcaagatacatatacttctgaacaattctaatgctaaaaaacaggaactcgcacgaaaacggaataaaaattttgtatttgaaaatgttgtctaagaatttttaacgttggaaaattaccggtttttaccggtatcggtaccggttttgcagtaccggtcattaccgataccggtttttttacaattaccgattaccgcttaactctattataaactcaataaatcatttttttataaattatttagatttgcattattattattgttttttttatttcatatttattttattcgaatttgttttttttaattttattaaaaataaattattatttattaatttacaataattattattttatttaataaacttaattaatttttaaaaaagaattgaattattttgattaattaattgattgaaaatagacaacactaatgggactcgaacccatgacaacacaccacctaaggtaggcacactaatcacttgacaaccggttgcttgattttacgcttttaaatccctttgtcagatttgtcctgatttggaggtatgtagtgaccaaaaattgttcttatttcactaaataaattcatattttgaaactttatggcagaatgtctaaggtttgcgcaaaatttggtcattttttgacaaacaaatcgcattaaaaattataaaatctttcccggcgaccccctgcccatcccccaaaatttttgaaaaacgcgcagcaaaaaaagcgtttcgaagcgcaaaaaatcatcgattggcacttaattgcaaaaattggtctttttgatgaaaatctgttaacaaatccgaaagaaattaccaaatttttccggatcctatcccctcgcccatttcccaaaagtttttcgttaaatgcgccgcaaaaaattgttaaaatttgattttttttatcccgaatgcattaaaattcaatttgctaatttcattcccaaaattgctaaagatgatcggaggcgaaaaatcttcgaataaatttaaaaataattgaaatatttttattttcgacaccaaaatctgattttttgagcccgatgttctgattttgaaaaattttcgataaagcccttaaatatgttaaagtttcagtgaatacgagcgaagaagaacgcaaaaagtggtgcaatcaaaattttgtacgcttcgatgcattgaatgaagctactttaatacgaaagcagctgtcagacaaaatcaaggagccgacgagaagaaatatggtagtagccatttaaaaaaaatgaaaaaagtacaacaaagtaaagagaaaaaaaacaaaacacaaaatcaaacaaacgcctaaaatgctaatgttagggtgtccatgtatttgcatttttttcatagactgcaaatggaatgaaacgaacgaaaaacgagttttagctagagttgagcgggacagggaattttgacaaaaaccgggaccgggacgagaaaagccgggattgggaccaagtttttcgaccgggacccaaaaaaacgggaacagaaccaaccgtttatttcggggggagcggtgaatcttggaattttctgagtccaaaaattctggattttttaaataaattaacaatctcttaatttttttgcttttaaatctctcttttgtggcgctgttttttcaaaaaactttttaggaacattggggggggggggggaggggggtccggcggtgccgataggcgctgccggtaaaaattttgaaattttgcgtgagatttgttaacagaatttaccaaaaaagtgataaaatatttggttatttgtgggttttaggctgtttaaaaataaaagaatattttttattaattaaaattttaattacagtaaaataatggtaaagaaaatatgaaaaatattatatcccgtgaggaattatgattaaatgaaataaataattaatttttttctcaaaaatttttccttctccaccaatttccttctcttttctcaccagaccgccattcttactagtgcttatttagtcccgccgggaccgggactggcaaaaccgggaccgggatttctttttttcaaaaaccgggaccgggacctggccaaaattttgcaaattgactaggtatttttataaattattcattgcaaaaaagccagattataaatgttaacaaatagtttcaactaagggccgatttatagctgaaaaattgttttagatgcagttcgcgaacccaaattctccagaatacttcaagaacatcaagcaatcactgctgcacgggtatttcatgcaggtaattgaaaaatttaaaattgaaatttaaataaaaatgataccaaataagtttttaaaatttacaaactatttcaataatttatcaaatgctatacattaattgtaaattggatttgaattttaatttaaatcgtaaaaaaattaaaaatacaagttcttttgtaaactttgttatttcaagccagtaaataataatatgatgattaatttatttaattatctattttaaattaaatttttttgtgggaaaatgggaattattttaaaaaattaatgaaaattgtggacaaattactattttttcggcgatgccgatagtctctgcggggaaaaattttgggaagaaagaagtttatttacagatcttcattaaaaacgtttttgaccattttaaaagaagaaataggaattttggggtccggagctgccgataggcgcagcggaggaaaaaattcgagattttgactattttttaatagattttcaccgagaaatttaaatatttttctatctgatttccagaggcattcttgcaaataagaactccttcaattttccaagacgtagagcccaaatccaaggacgtccttggcacccaaggacgaatccctatggttttacgccgtttttgtttaatggttttcggaaaaaattttttaaaatagaataaaaacgaaaatatgccccctaagaattgaaaaatgatctctaaagtcgatccccaaattaatttttatttcgcaataaattgatttaaaattttccttattcgattctttataattgaaatataatcaagaaagttttttttcctaataatttttctggattttttaccttaaaatctttcagaaaacttttgtttgactatttttaatgcataatcgagggtttttatacctcttttttgtttgtttttgttttttgctttttgttgtaatccacgtatttatcaaattatttatattgaaaaataaagatcgcccagcgtgatggtgagcgcggaaggcttttcaagccaattgtcgaccgtgacatgtcgatcactttcgacaaattcacctttgtccatccggaatccactttggtcatctaccatcagctggtcgaaaccaaaaatgcggtcacaatgagaactgtgacatggatcgacaaaaaatg

SEQ ID NO: 55513 - DNA, 630 bp, Heterodera glycines
atggtggatcgaagtcttttacaaaagggcaaaaaatgctttccgcaaaaagtgcaatttgaacataaaagacctggcctcatcagtactagggttggttttccgatttccgaaatttttgataaaacgtcggaaattctaaaaaaatttgaaagtttttttttaaaattagcaatttttgtacattatatattacaataaaattttcaggaattttcccagcggcgcctatcggaaccgacggatgaaccgtaaaagtcattaattttcaaggaaaaaatactaaaaccgcaaaatttggtcatctttatgatgaagaattttatcaaacaaaaaattttttgaaatcatctattacttggttaagaattttaaaatttagcttgttaaaatattttaaaattttttaatttattttatgtttttcaaaaatttccgatttccgccttctgatccgacgtttttggggtcagaattccgatttcgaaaaaatattggggcttggaattccaatttcctaaaaaattttgagcctcggaatgccatccaatacgatgtctttttgttgttaaaataattttaattatttaaaatctgttttaggcattattatagacaaaccactacaaa

SEQ ID NO: 55514 - DNA, 1940 bp, Heterodera glycines
tacctttctgcgccggttgaggacgcattggaagctgctgcaacggcaataatccaaattcatgttgagaaacaatacggagacatccttgttttcgttgaaggggaggaagtaagtatgaataataaatggaaaatatttttgctcgagacgaaatttttggtctccagctgacccgagaatcgagactgagtcccaaaaagactttttgtactgattttaattaaaaaatgataaaatatgtgtcaattgaaatatatatatatatatatatatatatatatatatatatggattaaattttgtcgataggaaaccaatgaatatacaaaaagaaaattaaaatattagaataataatttacgaactcatagatatttagaaattgctagtactataaaaattcttgacatttttatcaaataatttttttcatttttgaaacaaaaattaaaaattaaacggttcttttaaagttaactttttaatgaatataaattagaatataaaaaaaattctctatttcgttatattgttaatttaaaatgttttcaagtaccattttttctcaagaaaaatgacattttggcattgattcttaaagtttttgaatgatttccgtttatgtttgtttttatgattaagaattcttgaaaagaaaatctctttttttctctaaaaataaagtcaacagcagtgctttatttatttcatactcaaaatgagtcgccaagaagacgaaaaaattaaaggaacaaaacaaatgtaatttttttaattgaaaacgatccgtgcaaaattttaataaaagttagaaattaatatatgtatgtattctacaggaaattgagaaagtgtgcgacaaggtgaaggaacgattacgcgaattgaagagatctgatttggtaatttcaaaaaaaaacttttgaatagagggcacagaattccaatttttctataaaataggagacatttgtgtacatttgcttattatatttgttagcaaattatggtaaacataaaaaaatttatgctatttgttaacagattttgcaccaaattgcaattttatgattattaggttaaaaatactgatttttgttatttttaatccaaattaaaataaggataataatgaaatggaaaataaagacaattcttggaaataaggacaagaaagatctctctacaataaaaaggaaaaaattttatagcaatttttattaggtgtgccggccgttgtatggggcattgacaactgaccagcaagcaaaagcgttcgaaagatatccgagtaataaaaattaaattaaattaaattgtaacaattaatattaatttaaattaaaaaaattaatttaaaaattttgaattctttaatttggtttgttttttgttttttgatttcttttttcttttattttttattttagcaaaaatattattgaatatttaaatggttttattaaaaatggaaggaaagttgttaaaatttagcacacatatacacatatatgtttaatattccctaaaattgaaaaactttggtacgtgaaattaagaattttttaatcgggtttaataatgtccttatttttcaacataattcaattttggttgccaatttcgatggcatctctggtaatttttttcttgccaaatcgggtcaaaaataaattgttacaaccaaatttaataaatcaaatttataaaacttttccttcggcacttctcattattgcctgatcccaaattcattaaataaaaaaatatttatatttaaaattccgtattctaaatcaaatttttaaatagaccagagaaaatgtgtgatcgccacgaacatcgccgaatcatcgatcactatcgacggcatcgtctatgttgttgatagtggcttggcgaagcacctcaaatatgataccaaaaagggcatcaca

SEQ ID NO: 55515 - DNA, 228 bp, Heterodera glycines
cggtaggggtcaactccgtctggccaactccgtctcagcaatgttcaaaaagctataacttttttctttgttggccaaacttcacaatcatggtatcatttgaaagccctatatgtttaaaagatatttataagctatttctcagggattagtcaagtctcaaaaaagttgtcagatgaaaaccgcaaaaaaggcagaattttcaaagatttttatttctatcttttt

SEQ ID NO: 55516 - DNA, 385 bp, Heterodera glycines
cggagtaggacaaaacgtcgtcagccgaaacgtcgtcgaacgaatttttcgaccataacttttttctttctcaaccaaattaaacatttttggtattattcgaaagcattcgaaaaatgctattagcctgcaaattttcaaaaatttttatttatgcacaataaaatcagagcaaaaaaagttcgaattactgggcttttgagttccttctggccataacttttttgaaacttaacgaaaatttttgagattttgcaaattaataataaacacatagagctatcgaacaacaccaacaattcttaatttgattgacagtgaacaaagttatggttcaaaaagtcttccgacgacgtttcggccgccgacgttttggggtgcaccg

SEQ ID NO: 55517 - DNA, 236 bp, Heterodera glycines
atggctgatccaatcgactcgaaatattttgggtttgtgccagccactgaagagcagcagggtaatggggaaaatcacaataaaaagtaaatgcaattaaaataaatgattgaattcaagaacatacattaaaaaggggtaatatgccaaagggtacaaaatgagttttatgcaaaaaattctaaaagaaaggcagtttattgctattttcaaaatttacgggttaaagatctgta

SEQ ID NO: 55518 - DNA, 1642 bp, Heterodera glycines
atgggaatttgccaaacaggcaattctgctgatgtgttctgtttgggccaatttgtgcccagtgccgccgtgctgtcatcatcatcaatcggtgctgctgctggtgatcgtcagcagaaaggacggcagcagcagcagaacacggcgatggtgggccaatttataaaagaaacaaaaaatggttgccaagaaaattgaaatatttaaaaaaatgaaaaatatatttttgcataagaaatatttcttaaaataaaaaaaaataaaaaattttaatcattgaaattattatgtttaaaatgaatattttatttttagagcccggaattttgaaggtttcaggctcgtccgtgggcttagacaattgaccaggctcgggctgccctgtcaaaaaagccaatttaaacgggcgtcccgggtccggtcccaattttagccgggcccccgccggacttgggattttttcaagttaacatgcggggaccaaagaccaacaaaaaaaacttcattaatccgaattttcttttaatagtaatttttcaaattttttctgataggtggaaggttcgacaccgcaaagtttttcaatttttgcaggccaatgttgtcaagacggaacagcagcagcagcataatgaagaggatgggcaagtcgaatatggtaagagaaaaaaagtacattcatttattgtcatttcaaatatacgaattatgttggttttttaaatttttaattttgaaaaaacttaaatgcgcttaaatctaaagtttttgaatttttcataaaatttctccgactctattcatcttgtaaaatttaggaaaaaatattagattctaaaataaaataaattaatttgattttttttgattataagcaaaaattataatggtttttttggaagaaaaagtgttcaatatgacgggtttaaaaccttccaaaatactgaatgaaaacctacaataaaaatttaaataaattaaaaaaatatatattttttagaccaattgactccaacaattccatcactttttggagaagatactaaccgattggatgtgcgacaacagcagcaaatgtgccatgttgatcagctgatgaaaacatgcgaatccattggtgggcacagatttatgcacaactaattaatgatgctaaaaagacaacaaacaattattctgtttttaactccgatgtaataggattttcgagatttctgtcccagggatgtacttttttttgaatttagtttaaattcaaaaagaggaatttatgatttttagaatttcttcaaatcattgaagacaggcacaaaaatgccgaaaggcaataatttaatgctttgcccggttcagttggccaattaactcagtttcaaaatgatcagaatgctattttgggacgaatttcccaattggagacgcagcaacagcaaatgcgtgaagcatttatttttatattcgaaaattttaaatgaatctttctgagaaattttaaatgttccttaaaaattcctcgattatttaatgattgtcttttttaaatttgacagttggcacagcaaacaacgaaagagcccaccaaagtaggcaatgccaaacaacagaaaaaagcgcaggtattaaattttgaaaatttatttga

SEQ ID NO: 55519 - DNA, 1645 bp, Heterodera glycines
atgaaacattttaactgctgggattacgaggcccgttcttttgattatccctactacggtagttatgacctcgaacttattgacgctaaaaatctgacgatctgttataccagaagaaaatataacaatggtatatcgaatgattatatcattaaactgattaattaaaaatattttttcctataaaagattggcgaactgtctttgcggaacattccattcaaagctccgctaattccaatggccttttctacttcgaaattgctttcgaaaaattacaatcgtagggaaaatttatatgtaaaaacaatttagttattgaatcaatttattttatattgtttattaacagggctgggatttatatttttataagtatatgcttttttgcaaaatttacgagtgaatcacgaaaacatattccatagttcaagttgccaaatttttttgtgttaagaacaatgaattaaaacataaaaaaagaaggattctctcaaagcagaattttttcatttttttataaagttatgaaatccaagaaaattaacttttttacaaaataattatttgacgaagcttttcggaaatttattataaaattttttgtatgaataataaatggcagaaaggttgatgctcaattgaaacccttgattaaaattttcatatcatttgtcttaagtggtgccgtcgtcggatttgccgtcaaactaaagccatttttatcggttgtgaaccgctggggcacattggcgtgccaaagcaatggcactttttttgtgaatggtttccagcaacaacatataaatgcgacacattcattttcccgtggcgatataatcggtctcggcgtttatttagaaactcgtgaagtttttctcacaaaaaatggacaccgtttgggtatatttaaatttaaataaataataataaaattgaaaaatgtacaactgtttttgaaatgattaatcaaaattactatacatttaaaaagagatgaagcgttcggaccattgattgaatttttgaattatttctgattttctcaattttttgaccaattgatcaaatcacttttcggctctctaataaaaaactaaataaataaaacataattgtttaatttacagttaccgccaatatgttcatttcatttccaactgatcaccggcagcagttgttcccattcgtttctttgctttcgcctggtgatcaaattgatgcaaattttggaccaaactttctctttgcgaacacataaataaggaagagacgaagaacgattggacaaatttattatactttttttatgattttcaaatattatttcatttttctgctttttttgtttcatggatacaaaggaattccgcccttcgatacaaaaattacaaatttatattcgcgataaaatgacgccgaattcctcattgtttgatcagttgggcgctcacatttgggcgctcaggtttgggcgcatgcatgtttttccactataaattttttctttgtgaccaaatccatcaatcttggtattacccgaatgcttaacctgttgaaaaagttatttctaagctattgattcgcagtatgaaaacccgaaattgtagaaagaaatgctggtgcccaaacgtgagtgagaaaa

SEQ ID NO: 55520 - DNA, 1509 bp, Heterodera glycines
atggcacttggcgctggtcaacgcccgcttcgccgccctggtgaacatgcagctgcagcagaggcggtggtgtttggaggagtttcacatcagtgagcggaagccgaaacggactggcgccgaagtgttgagcttggcaaacaacggctcctacttctcgttgccattggccacctcaccgttgccggacagtgtcatcggattcaacggcacattcaacatttggtcgccattcaatttttgaatttccaattgcattttgttcttccccattttgcaggtatttggacgcagaagtgatcaatttcctgcaacgatttcggcgcctcttcaacacgtacatctcgctgaagttcaccattccgataacagaatttcgcgcttggcaagccgtggcacgtcacatttggcccttgctgaagaacgggctcggcacgttggtcaacgtgaagcggaagcaactggccttgatgcgcaaacacatttcgccgaccttcctcttcgactgcccaaaccttgtcgaaatcgtcagcccagttttgcctgaacgtcctaccgttgacaattctgctgctcctgaaacatcgagccgtgacttgtacatgtggctgcacacgacgcgcgtcgaccgtcgtccgttggtgtacaaattgctcaaatggaacaaccgatgggaccaattcgtcaacgaattgatgatggtgggtgtgtgggatgatcgatcgattgatcgacggacggacggatttcgttttttctctgtgcccttttaatcattgttctgctgatcacattcatttccgcttttcagtctttcaatacggcgtcagtcccggtcaactacatggtgttcacttcgttcgaattcatctacaccagaagggaacaaatggtgaacatgctgacggaggagaggctgacgatgttgaccaatgtgcacccgaaacgaggtggtggcgtggtgtccttcgtgaagattgtgcgctgtccagcggagttcagtgaagctgacgtggtgtcctggtttcgtatgacgcgcttgaacaacgaacctcatccgaatttggtgaccattggctttgcagatgacgaaattgggtatggacgagttgtcaaccaatttttatattcgggggtactcttacaatttctgtccctttgttttcagaccgttgccttcggattgtgctgcgtccatgtcgagaaacagaccgggctgagaacagaagcaatgcgcaaacagtggatcaacagcagatgagccctaaacacaatcaatggccactcggatggaattatctgatcattatcttttcataaaatgtaaatttcccatcaaatgactgatttttgtcacagatttcgtgtgcatattttgtattataaatgaagtaaagcgttgcttaatgcgatatttgtgcatcaatcaattaggcttttttaaaaatgaaaagctagaagtcccgatttaatgataccaacaaaatgctgatttggttgacaaataaa

SEQ ID NO: 55521 - DNA, 748 bp, Heterodera glycines
atgtccagcctttccataaaatttgtcaactttttcctttttccattgaccattctgttggcacagtgttcgaattcgcctgacggtaaaaatttaagccctctcgagagggaacgggttggaattgtctttttttctaaacgaaattttaatttcaagtcttcaaaaaacagtcaaattttattccatgtgagatttctgaataaacattttacccctaaccagctataagctgctggaaggctttggtgccaagcttgaggctaaaattcataagcttccttcatctgctgatgttccaatgaatgcttctttgctggagctgcttgatcaattcgaaaccatcgaatttgatgggacagtgaaaggaaaagttcgctgtggttttgggctgaaccaatgcatgaagatggaatgcactctggatgcatacagtatcaacaacatggagtttaatgaaggttttgtggttggagactttttgacgcttacacaaaatccgcaaggttgtcgtttcacactggctttatttggtgccaagtcccatcacatatattaattatacagttaactcatgtttttaaaatagaaaatatatttacggaaactttaccagttgtcattaccatactaaaaaatgcaccaaagcaaattttgtgcaactaataattagttagttatcagtcaagccttttcaattagtttaattgctgctggcccataattaatttaacactaaaattctcta

SEQ ID NO: 55522 - DNA, 253 bp, Heterodera glycines
atttaaaatgtaaaaaactgatttaaaatcaattatatttttaaaattttatggatgtaatttcgacggtcctaaaatttaagtctggagtcggaattgctctcggaaagtgcaaataaagggaaaacattgaaagtagttttaatttttaatttaaaatgttgtcttttaccatgcaaaatgccaacagccaaaatcagggcaaaggtgccaaagtgattgccaaccgtccacccaaccatcgcaccgttgc

SEQ ID NO: 55523 - DNA, 1291 bp, Heterodera glycines
atgcatggtggcaagcggcccagtggtcaagtggttagtgtgcctgccttttatagtgggttcgggtcctactgcttcagagtaatttaaaaaaatattatatataattctactttttgttttgtttttttatttaattaactttatggaaataaaatattagttattttaaattaatgaaataagatttatttaaaaccaaatttaaaaatgaatttaatattaatcaataaaataggtaaataataatttaaaaaataatataataaataaatctaaataatatttaagataaataagtatttacgagtacaagacaagcaatccggtgaacaagtggttagtatgcctttctttgttggtgtagtgtatagggttcgattcccattaattctgattatcaaactttttaattttttttttgataattacgtttaggaaataaaaataaaaaatttacataaagagtgaaataatatgttttaaaaaaagtttctgatccaatctaacagaataaattttgattcatggcttacggaaaattaaaaatagataaaaatttaaataaaacaaacaaaatttaaaactaaaaaatatgaaagagggacagaagaggaacagaaagaggaagaggaatagaaaggggaagaggaagtggaagagaaacaaaaagaggaacagaaaaagaaatagaagaggaacagaaagtggaaaaggatcagaaagagaaagcggaagaggaacagaaaggggaacagaaattggaagaggaagagaaagtggaagaggaacagaaaggggaacaggaagagggacagaagaggaacagaaagaggaagagaaagtggaagaggaacagaaagtggaagagaaagtggaagaggaacagaaagaggaagaggaacagaaaaagaaatagaacaggaacagaaagtggaagaggatcagaaagagaaagcggaagaggaacagaaaggggaacagaaattggaagaggaagagaaagtggaagaggaacagaaaggggaacaggaagagggacagaagaggaacagaaagaggaaagtggaagaggaacagaaagtggaagagaaagtggaagaggaacagaaagaggaagaggaacagaaaaagaaatagaacaggaacagaaagtggaagaggatcagaaagagaaagcggaagaggaacagaaaggggaacagaaattggaagaggaagagaaagtggaagaggaacagaaaggggaacaggaagagggacagaagaggaacagaaagaggaagagaaa

SEQ ID NO: 55524 - DNA, 589 bp, Heterodera glycines
atgatatacccgggtataacgaactcctccaactctttaaacaagaatccctcttaaaacgcagaataaaaatagatttaaaactcttccatgatataattttgggaaagatccatattcagcataatgattctttttcaaaaatatattcaggactgaaaaacgattatattataaaaaccgcttattgttcaaccaatgttcggtttcattcgttttttattcgtacctctcgcctctataggagtttgcctaaagaggcgaggttacttaattctactgagtttgctaaacttcttgacacctatgatattgatgttttacttttgaaaccgccccatctcattcagtgaccaattttattttatttattttgttttaatgtcggtgtcacgcttttgcgtataaattgaattgaattgaattgaatcagtttttcggtcgttttttcgataaaagaacagaaaagtcggaattgaaaaagaccaataatttttcatggattttatttatgtattgtattattaagttaataagaaaggaccgggagcacagcaattctcaacaatgactgagaatttttaataaa

SEQ ID NO: 55525 - DNA, 1436 bp, Heterodera glycines
atggacaaagtgactccgaattttaaagaggagaaacgaacaaatgccatcgttgttcccccaaaggatgcaattggtacaaattaataattaaacaaaaaatgattgaaataattattaaataataattgaaattataaatttcagtgaaacgaaataataaaactgctgttattgcccatttgcacgtcttttaccaaaaatgggctctttttgtggtgaaacatcgcactttaataatggcaatttgctcaattctttcgactttgggcgcagtgaaaatattcaaaacgccgtaaatgaaaattaattaaataataaaaagttaaaaatgagtgctcatttgtcagctttgtgaatgatctcaacggatggaccccttacggcgcgcgttctttggccgaatcggacgcatggaacgaatttttcaacgacaccggcacaggcagcaatttcgccattttcgtgctgatcaaaccgaaagtgatcggcacaaatatgctgcagagcaaaatgctggaggaagtgatcagagtgaggagaaaagcagccaaataaatcaataggaaaataaaaaataaaagggggaggaaagataattagggcgagcgggggtaattaatgggcaaattaatatccaaaatggcacaaggcacaaaacattggtttgtcttcaggtcgatgacctgataaattggaacatcactctccaaaaccatgccacgaataagtcggaagcatttgccgagttttgctacaacttttgcgacattaacgaacccttgcgacttttttgggcaagtaaaaagtcaaaaattaattgatttgcatcaattagatcttaaaattactttttaaaaatttcagaaaggattcgtcacccaaacggaagaaggaggaaaagcagcggagataagtctgaactatccgaacatcaatgtgtgggggcgaaaagctaatattcaggcaaacaaaggccatcggcgggtttaaattttaaatcaccttttaatttcagccccatttccacggcgttaactttgccaaaaacaatttgaccacaaaaatcaccaacatcgcttctgtggagatggtcgcccttcaataccgagccgaacggacactgttggggctgagcagcgacgagatgaagcagtatctgatcagagtgtccaagttcttcgagaagttcgttcaatcaattactataattgttttgatcatttttaactttcagcgaatttcgcagtgatttgatccatgtgatgagcataagccaaagttatgtcgaggcggagttcgtccgtgccagcttgtccatgctgccgtaccttggcttcggattcgccgtcatggctttctgtacggccattagcattcctttgtccgccgcgtattttcaacaggcgaccgtccacaaggcattcactcattag

SEQ ID NO: 55526 - DNA, 1074 bp, Heterodera glycines
ctacaattcatattggcaaaacgcgtcgaccccgcaaccggcgcatcattactacactggcgggaccggatcacttgtttactcaacaatcagtggtgacgcacattccatttgcaggtaggtgatcgctgatcatttggatcagcaaataaattatattttttgtgttcattatataattatttttaactgatttattagagctcgacctgattagcctctgctggttccagaggcctgggtttttcattaacctaggtccaggcacttttcgggccttctaggttttttggggtctaggttttcctgctatgctttttccagaaaaattagaccaatgtaaagtataactcataacttggcatgaattttattgagccttggtttttctcagaaatccaggctcaagtcctgcgttaaacaatacccaggccccggcatttaattcaattgccgaatacttagttaattagggttacacaaggttacggaatcgttaatcctctgggctgatcaccggattacagcagtaacgcggacgtgtccgcccgtctctccacccgtacccatcagttatcctcctcactgatccttgtgccaactccgccggccactcattatcagcatcatcatcattatccgaatcatcatcatcagcaacagatcaccgttgatccatcctacaataacaacattgtgtcaatgtcttcaccgtccggcacgggtgccattggtggtggtggcggtggtcacattggcatctatcatcaagcaaattccagtaaaaaagagcaattttcaatttgtgacagatagatgatgtccacttaggacttctaaatttactaaatttgcgttttcaaaattctagagttttaaaatcaaattttgaaatattttttagtgccaaagaatatgaaaaagtttctagatttcttccaaaaacaaaaaagaaatagtttaactttttaaatttattttttgtaataattcaaaacttttatcttgaaaaaaatcattttctttaaattttattgcgccttaattttaatactcttgataataataataata

SEQ ID NO: 55527 - DNA, 56 bp, Heterodera glycines
atggaagaaatgccagttgtgccgataaacgcctcatggaaaattttgaagacata

SEQ ID NO: 55528 - DNA, 86 bp, Heterodera glycines
atttcgtcctcctcccccttttttcttccctttgtctctttgccgatcgtttgtcgtcctttgaagacgaatgagtaagcgttgat

SEQ ID NO: 55529 - DNA, 291 bp, Heterodera glycines
atgagtatcaacctccacgacaaaaagtcgctcatggacaacattttgccggtggttgagataaatcaaaccaccaatggcattacggttagcagtgaacgaattgcgataccacgaacgattcagttcgacattcttggcaaatgtcgagaatgtaagtcaaccgaatgtgagacggaatggtgcgtttccaaggaaggcgttaccatttggtgcacacgcttcaaaataagcccccgttttgtgccatttgatgtgatctacgatttgtctggttacacatttttcaag

SEQ ID NO: 55530 - DNA, 612 bp, Heterodera glycines
atgaggaccatcatattgaagaaatgctgttggcttacaattggttgtgatttcatctctgaagtgttgaacctgtcggtcggccactcaactttttgctcactttcgagaaattcactacttcaactttggcggccccttttgtaagtgggttgggaagagttgtggtaaatttgccaaatagccaaatatctgataaaacatttgtgttcgttaatttgagtttagtgtgacacaattatgtgtgtcatgtttttgataaacattagtgtttgttatttgagtttagtgtgacacaattatgtgtgtcatgtttttgataaacattagtgttcgttatttgagtttagtgtgacacaattatgtgtgtcatgtctttgataaaacattagtgttcgttatttgagtttagtgtgacacaattatgtgtgtcatgtttttgataaaacattagtgtttgttctgtgacttaagtatgagacactaaagtctggcatgacattgataaaacattagtgtttgttttgtgacttaatgtgcttctcaaatttcagaaacccaaacaagcgtgaagcaatgaaacatgcacggtctcatcattggactttttaa

SEQ ID NO: 55531 - DNA, 259 bp, Heterodera glycines
aacaaacactaatgttttatcaaaaacatgacacacataattgtgtcacactaaactcaaataacgaacactaatgttttatcaaagacatgacacacataattgtgtcacactaaactcaaataacgaacactaatgtttatcaaaaacatgacacacataattgtgtcacactaaactcaaataacaaacactaatgtttatcaaaaacatgacacacataattgtgtcacactaaactcaaattaacgaacacaaa

SEQ ID NO: 55532 - DNA, 55 bp, Heterodera glycines
aaatttatttatttttatgttggattcgaacccgagctccaaaaatgcgaattta

SEQ ID NO: 55533 - DNA, 82 bp, Heterodera glycines
cagagaagaacattcacattttcatatttaatttcatctttaaatctgccattaataaagcatctcaaataatccgccactg

SEQ ID NO: 55534 - DNA, 1958 bp, Heterodera glycines
atggcgggaattttgtccattttctcgagttttctcgaagcaaatggacttggcggacccgacttttggggacgatcgattctcgtgatgcaggtggacttaaaaatttcgtgccaaccaaaactgttttatattatctttaaaaatcttattctgaaattaaatttttgacaaaagaatcatcactagggcggggacaaatattttattataaatcccaaaatatttaaataaatattttcaaaaaaatgctgaaatgttgaccaaaatattgagcaaatatttaagaaaaatgaaaaactttgtggaaaaaaataattaactgctcataacactacaaaaatttattcattgattacagctgcaaataatatatttttcgagtttgaatgcattttctaaaataagtaaaattataaaaatcaaaaattttggtcaataaagaaaaaaacaaaaatttggttaagaaaaaaaaaaaacaggattttcttggaaaaatttttgaaaatttttgttatcgcgttaaaaaatcttttagcatttttgttaaataatttcttagttttacattaaaagtttgaaaaatatcaaaatatttataaaaatattgacaaaatccctaatattaaaataaatttttattttataaaaattcaaaatatttttttatgactaaaactgacgttcaaatgcaaaaatttaagcgcagaaatgcgttttttatctcctattcattgcaataagcaaaaaaaaaaaaaaaaattcaaataaatgtttgccccagccctaatgatcatctctgattttaaaacatattttaaagaacaattaattaaagtttgaaaaattattttcggagtttctcatcgaccaactgagtccccccccccaggcgttccatctgctgatcaactcttatctcgagctgcgctttttcctcccgcttctcctctccgtcttcgcttcgccccccggcgctttgcttttgtcgcgccttctcaccatttgccagtccctttactttgtactgctccaatttgtcgcctttgttctgctgctctgccgtttggtgctcaattcgatgattctcccattggtccggatttttttcctttttttaatgaaatgatttgaagatcactgtccatttggtgctgatcgcctcaattctgctccaacttgtccaaatgcttttcgtcggccaagcgggcaccgaattcttcatttggtgttggtatttgagtgcgtgtgtcacttttacgctgtaccaggcaatgtcagtgttcagtgttatttgtctgttcacatcggagccaatgttttggacgacattcaacttgtttttggccaattcatttttgaatcgactcgttttttaattgttccaactctttttcttgattgaaacggtgctgattgtgagccgttataaaaaaaagccaacaaaaagggcgttataaaaaaaaccatcaaatgaaaaatttcaacaaaaaactacccataactttgctcaaacccaatgaaaattttaaatctttaaacaattctattttagcctccaaaatttcaaaaaatttggttatgtttcaaaaaagctatggccaaaagtacatcaggaaccaggttttctgacatttttggcaataacttttttgaaattttgcaggctagtagagaattgttaaggctatcgaatgatattaagaattaaatttagttaagtttgagcaaaagttataatttaaaaatttctgctctatttaaactcaggaatgctttttaagctagttttcacagtttttcactatttttggtcaattttcaaaatttaaataacgaacaataataattagagctagaaatttaggtaagaaaaatcgcgaaataggtattaaaaaaagctcaaaatagttattaaatagatacaaaaatcccgaaatagctagaaaaataggtaa

SEQ ID NO: 55535 - DNA, 54 bp, Heterodera glycines
aaacacttagggctatcgaaatattaagattttgaaatctggttcattttgtgc

SEQ ID NO: 55536 - DNA, 542 bp, Heterodera glycines
atggcacaaattcatttcaaaattttccttatcttttctctcattactttttcacaatgccgaatcaattcagaaccgagtgaaaaaggtgagaaaaagaaattaaaaagtttaatttgcttggtcattatgagggcactttattggacaataaaataagcgcaaaatattcatatcagtagaaatctctgatattggaataacaacattttttgctcttatttctgaatttcgcacaattgtcttaattttcattaatttcattaaaattcccttcttcaaaattttcgagaatatttttaaacaaaattaattaacgataatccattaaatttacctaactgatgacatgaaatcatttccaataatttgctcattagtaaattgatgagttttcaagatgtaactctgttttagaaggcccttcttcaattggtggaattcaaaatgcaacaagcgatcatcggtctgctgctgctgcttctgatcaccatgcttcttcatgcgatggttttggttggacactgaacaagggaaaataa

SEQ ID NO: 55537 - DNA, 83 bp, Heterodera glycines
atgcacagatcccatcaaagccacggcattattatgggaatccgggaaaatgatatgtctggggacgcaaagtctgatagact

SEQ ID NO: 55538 - DNA, 800 bp, Heterodera glycines
atggacacagacactggatggatcaacgatttcaagcaggtccgcaagaccaattttttttttcatttaaaactttattgtaatttattatttttaaaccaaaacatttcgtatttctgattttattataacaaataaaaaactttcaaattttttcattcttttttttgagcaaactaaaaagccgcaaaattaaccaaagtcatcattttttggataaaatctgttaactaatcgcattaaaattccctggcagcgcctaccggcaccaccggacgcccatttaccttagtttttgaaattttagctcaagaattgcaaaaatttcaggaaaaacatcttattatattttaccagaaaatttcaagtaaaaacttttgaaaatttttaaacaattttttaaaaatttaatgtgaattattaagttttttaaaggattttccaagaaatcactgaaaatttcttaattttttagtaaattttcttacaaaaaaaatttatatttgcattttcccattgtttagacatttgttcgtgccaccacttctgcccgttacacaattcaatttgaagtgcccacatctgtgccaattgggccatttgaattggtgaatgaacggacccaagaaaaactgacactgtgtaaaacaagcgaagatttatgggctatccaatgggtgatgaagcgatgtccaattggggagacggcgatgattcagtgggaggccccccaaaattcggcaaccaatttgaacaatgtcaacatttatttgtgttgtgtcagttgcactaagtggtga

SEQ ID NO: 55539 - DNA, 435 bp, Heterodera glycines
atgcaattttcaagtgtagaacatttacggctcaccctgaacagcctcatacgtgaggtgtatcagcagcagcaattttcttctggccatgatagagctagccggacgaaacggcaggtcacagacctattttttcatgaaaatccagtggattattgggaaaagattggcgaattacgcaccaaacaagagcagtttgaaaaggaggtaaaacaggaggagagtgaactttcggcagacactacggatgtggagaggaaaaaactgctacaaagcgagcttccactaaaacggattcgtatgcagaggaaaaagtatgagctggaagagttggaacgtgctgctgaacgtcgtgatcaggaaagtccggagaatgagcaaagaaagattagcgatttttccaacatcatcccgaagattataacaaaaaattga

SEQ ID NO: 55540 - DNA, 889 bp, Heterodera glycines
atgagcaagtacattggtgaaaaagatataaataaaattcgtcagcttaacaccgaggttggcaaaatacgcacaaaaataaaacacatgcagcacaatttgaccatctttgaaaatgctgcgcttcagcgtgaccaccaaaaatctttgtcggaatatgaggagctcagccaccagcagaatagtgcatttgttgaggaattttttcaaaaacatcccacaaattattggcaaattattcacaacaattataggggtcttacagaacattttcagaagatagaacaactgcaagcaaaggcagtagggttaaaggataatgcgtctttcgaaaagcaaatagagcgagcaaaacagctgattgagtacagacgaaagagattcgctgcgctggaatttgaggcaaaaaagcgtgatgagcaacaacagtttgttgcagcagcagcaaatacaattactgcaccaactgcgtcggcattgatcggaagggaggcgttaaaaaaacgtacaggcatctctgccagtacggatggtgaagtaggtgataaagcagatgtcggtccacaaacagctaccacaacaacacatggggaggtattaaaagagaaaatactggagcagcaaaaacacacggacaaggatgataaagcagatgtcggtccacaaacagctaccacaacaacacatggggaggtattaaaagagaaaatactggagcagcaaaaacacacggacaacgatgataaagcagatgccggtccacaagcagctaccacaacgcatggggaggcagtacgtgagaaaatattggagcaacaaaagagcacggacgatgatgataaagcagctgtcggtcagcaaacaatcccaacagcaacaaaaacacatg

SEQ ID NO: 55541 - DNA, 1650 bp, Heterodera glycines
tgcggcaaatgaatgcaggcagaagcatcaatctaatggaccatgtgttcggcatgttggagcagtacgccaacaaattggaggagaatgtgcatgaacggacgcgcgagttggaggaagaaaagcgcaaatcggaaatactcctctaccgcatgatgccacggtaattaaagcaaaagtgattaaaaaaattgcctttttttctctcacgcggccctctccctctctattacacccccctcttttattgcccttactgtaaagccgattcaaaaaccaaaacgcaattaagccaagttgcggaccgacttaagcttggccagtcggttgagcccgagcacttcgagtgcgttacggtgttcttttcggacattgtcaaattcgcggaactgtccaaccaaatgcgaccgctgcaggtggtcaatcttatgaacgaactgtacaccatttttgacgcgatcatcgacgaacacgacatgtacaaagtggaatcaattggcgaggaatttttttaattaaaagcagacaaatgacatttttgaattttggggctaggctggtagttgaaaattttaaaattgttcccaaaacatatagaaggaaataatgcatgtggataaatggtggatatatgcttcagctaatttacgattaaaaaattgtcataattttaataaagaatcgattcacttttattatttgagtttttaaatgtcttttaggatttaaaaatatattttttttaacattttttttattattcactaattatgtatttaattttactaaatgcctttaggcgatggctatttgtgcgtgtccggccttcccaatcgaaatggcaatttacatgccaaacagtgtgctgacatgtaagaaatggcataaataaattcaaaaattttatttttattttttaaattagggcattgaaatttttgaaagcgttggaaaccttccgaatttcggaccattcctttgagcgcattcgtctccgcatcggactgcacagtggcccatgtgtcgcgggcgttgtcggtaaaaatttctttaaacacattttgtgtaattaaattaaaatgggtaattttagaatttgattcattttcctatcaaaaattttattggttgtaatttagggttggccatgccccgctactgtctgtttggcgacacggtaaacaccgcctcgcgcatggaaagctcttcaagccgttcgtttaaaaaccattaatgaatcttttttacatattcagctaactaaattcacatctccaaagaaacgtatatgctgctgcacaataattttgatggttacgcagtggaaagtcgaggcgaagtgataattaaggtaaggggaggggcgataaatgcatcattaatcagcacgaataattgactaaatgccgtgatctaataagctaaggcaccaccacaggattattaacaaaatatacgaatgatatgagaatgctggggaaaaaaagcaccacttattaaccacaaatcaaattaaaatgaaacaattagaaagcccgaaaaaagacaattaaaaattaattagtgtgtacaatcttactctttttatagggcaaaggcgtaatggagactttttggctgttgagcaatgccgagataagaagcaacaac

SEQ ID NO: 55542 - DNA, 305 bp, Heterodera glycines
atgtcaaacaatgcgagcgatgaacaaaaggagcagaaaaagggcgatgatattgaccaaaatgatggtcatttgacagctgatgatcggagcggactaaaaaaaatcaaagaaattaatcgaaaaagagagaaagaaaaggacttgaagaacattggagacggaagtggagaaaaggataagcaaaaggaggaaaaggcagcagtcgacggaagccaaaaaacagcgcaacggatagggcaatctgagcaaaaatggggcgaaatcggaggagagcgaaaaagacagaaacaaactgctgatca

SEQ ID NO: 55543 - DNA, 486 bp, Heterodera glycines
atgcaggtatttcttttttatatctcatatttattcttcttattgagtccaatatttcggatatcaacggttttttaacatgcttcaaaaatatacgaaaatgttttatatatgcttgaaaatttccttaagaccaatagactaggatttagaaaagaattgtttagacaatcatcgagaaattgtcggagtcaaggaaacagtgtcaataattattttagtccggataataaattataaatattttagtataattttcatgcaggtatttcttttttatatctcatatttattcttcttattagtccaatatttcggatatcagcggttttttaacgcacttcaaaaagatgcgaaaagtttcgctgatattaaagcattcaattaatcgcattttcatagtcataaaaaacaattttttatataaagcgtcttgggttttttggagttctcaatatggacattattaaaagtagggcatgtgca

SEQ ID NO: 55544 - DNA, 705 bp, Heterodera glycines
atgattgatgagtatatgacaaaaacaattgttacaaatgtgaaaagcccattccgattaagaagtaagtttataaaattcctcctcgaccaagctacggttgagcatgttcgacgtttgatctccgaacgcggcattcacagtgagagacaaagaattgcacgggtggttgtgctggaacaactccgactcgaactcgaagaccggaacgttagaagccgttgagaactgaggagtgttcggcagattcgaagggaccgaacgcagttccttcatgttatgggcaaacaagcagtcggaaccgaatctaaaagaaaacaaaaaatggctctgaccggcattttcttcaattttaatatttaaacaaacttgcaaaagcccagcgtttgaatattatggcacatttgcgttttgtacagcgacatcttactctgacgcgcattattacagtgcgaacgctgcttgtaagccgcaagcatctgaaggcattcgcggaaaccattcgtcgcactaaattaggcatgagttactgtatatgtataatattttagttatataccgctccattttcatgcgagtattataagcaagcaaaaaggcattgttaagtgatgtacgcgaatcttcttgcattattttagggtgtttgttaggatgtagttaatgaaaaatcggtatgcctttacaaagaattatctaaataaa

SEQ ID NO: 55545 - DNA, 222 bp, Heterodera glycines
atgccaatctataggttttcgtggtcgctgatcgcgaatccggtattcatttcgtccaattccaaatcccggacccgaattcgaacaaaaagtcgaaaattaaaatttttggttttcatattattggtcagcattgtttaaatacacggaaacgaactgaaagtcatcagtgcttcaattaaaaatcatttaaactatttttagactaaaaatgaaaaataa

SEQ ID NO: 55546 - DNA, 295 bp, Heterodera glycines
atgcatttcgtgctgattgaggggcaaaaggcaagtcaccccagccaaatgctttgtgatgtaaagcccgggtcgataacaaaattattggttcttccattttcagttggaatttgacatcattgatggtgagaaggggagggaggcggccgttgtgtccgggcctggtgggattcgcgtcggtacagccatccgatacaatccacaacagcaactggccgctggcaaggacttcaaacgtatcaatgcttctgctggtggcagcagactcccgccgcgtcctcctgtggcgaag

SEQ ID NO: 55547 - DNA, 61 bp, Heterodera glycines
tgtcgcctctcaccggcaaatgcttgactcctatttgtgcgagtttctttggcgcgaggct

SEQ ID NO: 55548 - DNA, 546 bp, Heterodera glycines
atgcgaatgcaatctccaattattaatcgtggcagaagaaaaacgaaattggcttttaaatcacttgtgccatcatccttcgttacttatcgcacatttatatcgttttgcatttttaggtcattcccaaaaaaatattaatttaatagcctatttttatttatttttcttgttacttagcacgattgtccctttcggcgatcggcgttttcttatctttttgtgtattactacaggatttccactgtcggactgtccactgtcaaattgtccagtcagggattatcgaccaaagcttatgcaattgtctgtatgaaagtggtgattgttttttaacaaagtctgtatttactcgtgtttttaagagttaattatgtttaggatttgtaatttcgacattttatggcacttttataaaatttctaagtgggcaattttacaaaaggaccgaactcgcttttttcaaaaaaaaattgaaatttttgaatctttttatacaatattgcttttaatacaatcatataaataacaattttttatcttaca

SEQ ID NO: 55549 - DNA, 1184 bp, Heterodera glycines
atgcgtcaaagaatggtttgtgtttagttatcttgctctaaggcatcaaaactataataaaaaaaatatttttttaattttaaaggtttgaaaaaaagaaggaaattcgttgtccattctgtaacgttgagtcaaaaccatttttggtaaaatatgaaaattgttttttgatataaaaactaaaacccgattaaaaattaataaaagattatctccaaaaaatcttatttattaattattttatttatcacatttaattgattaaattgcattaaaaattaattagctgaacaaaaaggtaaaattcgagaaaatttgataatatttattttggaaaaaaataataaaaataattttatatattattttttgccacatttaatttaataaattataattatgataattaaaaaaaacaaaattaaggattttcattttcaaccaattttctccgagtcagaaaaaatgtacgcgcatttttacatggacccattgaaggaattgtacagaattaaaaatgccaaaattggtgggtcagctcagcgcgggctactagcccaacaaatcatcaaccaaatcagtaccaaagtgaaggaaatggaccaacgtttaaagattttattgccaatatttggttttgaaaatttggaaatgccattgttcagcattgaacaagagggaaaatttgctgaggaccctttctttaatatatccagacatacatcaaacttttggacgatgaccgaggctttagtactgatattgaaacggaggcgttggcgctgatcgaaacggcaccgaaagtgccattgttggaagccaacaatgccattgaacaaatgcaaattgttgtggaggaagaggaggaaaagccgccgcaccagccccaccaccaacagaagaaacagcatgaacaccaccaccacaagaaggaacaccacgaacataatttggttaagatgttgtttaaaaacatgttttacaaagaacattgaccaaagatcaaagagtaacgattatcttgatttattgattggttggtttggttgtaccgttattttatgctatttttagttatgttttcgtgggagaagaagagaaagtatttagcaaatttatttaggtatgtatgtggaaagaaagaattgcgaaatttaattggataaaattgaggcacaaataaa

SEQ ID NO: 55550 - DNA, 1865 bp, Heterodera glycines
atgccattcagcatcaagcccagtggtctgttttggcaccgacgcgtgttagtcgagacgacaaatgagggcaccggtggtaattatcacgcccttctgtacgcaattgtgcgagaaaataggagggcaccacaacaaaacggtggcggtggcggtaatggtcaaagcggtggtaatggtggagaccagcagaacaacgctaatgctaatgaccgtaatgatttggctgccgctgagaagcgcgaattgttgggctattccccgctgatcaaagataaagaagatatggcagaagcggtgccgaatgttggtgatgatggcactggaacaacatccgggcagcagaaaaaggcaccatttaaaccatatttataatagctgagttcattggattaaatccataatttttattaatcacttctgagctgatcgatcaaactcgggaaagggattttaagttggagtaaaattagaaaaaaaattttaaatgaattaagcattgtaaccaaacgccaaattcatagttggcttgtcgaaactaattcgggaaccttgaggattttcattaaaaaccaaataaaattaattttattttatgtgttcaatgaatacgaactaaatattcctgtgaatttgacgcatttatatcgccacaaaattgaacggcttgaactgtccatttttcattatgatggcgaggtaagatcaatgtttatttcagtaaattaacaccagggctggagggatttgcgattttaccaggtgctatgtcagacaaaaagtgcaaaatttgcgaaattttggactaaatcaactcataacttttctcagacgcaaccaaattgcacaatcttggtatcattcgatggcccttgaattgcattattagtttgctaaatttaaaaaaatcttattaagtttttcaaaacttcaagcaaaaaagtggaaaaattgtcataactttaaaagaacataataagatttttttttaatttagcaaactaataacccaattcaagggctatcgtatgataccaaggttgtgcaatttgattgcgtctgagaaaagttatgaattgatttaatcaaaaatttagcaaattttgcactttttgtccatcgcctatgattgtaaatctaattaaaattttgaatgtttcgcatacatttgcggtgtacttaagaaatttttcaaaaaatttgactcaaaaacaggaaaatttggttatttttgattaaattgttgttttacaaatcgaactattttttgaaattttttacttgaaaagtaaaggcggtacctaataaacaccgctaatgcgtcttgttttttttctacaaattattatctttataatttgctcctttgttcccataattgcttaattgccccaattaagtaatttttaggaaaacatcctaaattgaaaaaaattctgttttctctggaattttcacaacataaaaacagagcagcagtccgtctccacacaccctccggcccagaaaatgcttttgcctcattaattttaattatatttttttctcattttaagtgcaaattcactgtcaaaaaagttgttaaaacggcagtttatgcgaataaagaaaaggacaaggacaaagacaagaacgatgataaagatgaggataaagataaggacaaggatgaggatgattgtccaatttgcttcaatgaaatgaaagttaatgaggaacaaattcaagttcatgaacacgaggtaaaatcaaagacacgcgcgggcatttacgctggaggggacattaatttgccagcagggctatcaaacgaaagataccagggatggcacggaattccgatttccaacgtttttggggtatga

SEQ ID NO: 55551 - DNA, 1339 bp, Heterodera glycines
  unsure (1)..(1339): unsure at all n locations
atggaattggctgaaggtatactcattaacgatatccaagtgcaacgtttggcgcttgaagttttgacgaactgtttgtgcggtccaaccaaccaggntgatgctgattgtgaattttgtcttatgtatgtttctttttgtttaggccaatggctgtttgggtcttcattatcgttttacatccaatttcgaacgtgatcttcttcccagcgaactctcaatgaaatttccatcatccaatttgcccacttgcgatggtgcgcatcttccagcttcttcgcttccgaacttacaacaaaatttgcgattatttgtcacccctatacagttgcttaaaattatttggaaatgttcacagcaaaataatgcaattatggtaagatgtgagaattttgatttttataatattttttaggttctcactaccttgttgcataagcaacaacccgcaactgaagcagactcgatccgggaattggcctgccgcgcgctgaacggaatcgctcggtttgagccgatccgccaaattttgagcaaattgccaataattgcaaataatgaactgataagtgagtttctcattttgtatgattattcactttaatttctagcattaatccaatctcctattctgcttgagaaacgtattgaacatagtcgtttttgtgagcaagcgcgtcagttaattgagtgtgtcagtcagaccaaattacaggactttgccattggaatgactcaggttttttttgttaacattgcatagaagacacttatttattaaggagcatctttggcgggctgccgttgtcgcgaagacacacatcaaattcaatgaaaaggaactgttgcaactgatttaccagcatttgagtgacattggctttaaacggactgccaaacagctgcaaatggagggggaacttccgaatgttcccgcaagtcgaattccttcaacgcccgcttctctgcccggatttgtgaattgcatttgcttgtcaaatgtttcagaaattcatttgattaagcctcgtcaaaatgaagctgcgttcgccaatgttcttgcgcgacggatttcaaaggcagacgccccaatttcacacccccagccgtttactcctcggccacagtccgtttcctcctcaaagcaaatcacttctggcagcagacttcctctgaaactgctctcatcggctcataacactttgtcaacgggctcctctaatttctctgttgcgtccaatttgtctcagcaaacaccaatcgccaatgtgaacaatgcattttcgttgaaaatgcgacctcccaaatcactcagtgaaattgttattaattactttag

SEQ ID NO: 55552 - DNA, 49 bp, Heterodera glycines; identical to SEQ ID NO: 51181

SEQ ID NO: 55553 - DNA, 270 bp, Heterodera glycines
atggattcggttagagatgatgaaaaagctggggctgctgaagatggcggatccgataatgccgagtgcaggtgttgtaagtaatgatggcgttgcaattgtcgttggtccaaagtaactaccatcgggcattgtgtttctttgtcatgccaaaccactctgttatgtagttgttatttgttaataaatttaggcttaatctatgtgtacgctcatgcttttctattggcttttcacttgtgtcatcactgcctaatccattacaattag

SEQ ID NO: 55554 - DNA, 1303 bp, Heterodera glycines
tttttctcatcccatgggatatgatttacatttttgacccagtactcgttcacgctcggcatgcaccaggtcatcgaaggcatggacaggtggtgccaattgaaaattgatgacttttccctgggaggctaataaaatgcatattttgggataattaatcgttaacattgatccgaaggtgccattgttttgacccggaaatgccattgttttgatcaaactagacattataaattaatacgaatttcaatattttggaaaaatattttgaaataaaaatttaaatattacatttattttaaatttcgtatttacagagcaatgaccggcatgtgcattggagaaaaacgccgtgtgaccattcctggaaagttgggcttcggcgacggtgggcgaaagaggtaaaacaaattttaaaaaattaattaaaaattaaatttgaaaatatttttttttttcaaaaagggatggcatcaagtcggaccaggtgctgcattacattgtacaacttgtcgacctgtttcgtccgacgcccggcccacgatggcgcgaggaggacggcctcgaaattgaggtggttgggttggcacatttgaaggagcctcggaatggcaaaaacttttgagatttcaaatctttattttatcagtgttggaaaaattggaaatcaaccattgggtcgaaattttctcaacaatgaaaaggaaaagtcaaataacttagaggtcagctctaaaaactaagtaacatccaatacggattttaattaggattggtggaaaattccataaatttagtcctaaaaaacaatagtttttctaacaataagacaagaagtttgggtccaaaaaattttcggaatgactttcaaagaaaaacaaacccctatgtttttgtgtttattttccaaaaaaacaaacaaacaaataaccaaatttctaaaggccctaaacaaattgtgataaagccacacattcaatagtctctgttaaattaaataaagctgctggcgaaatcaaatgtccgtaaagttataattaccgagcgaaaattcaaaaaccgtaaccacatacataattacagtagctctccctagtttgctttaattatgcgcttgacagccgcgtagacgtaatcaatcaattcattaataaaataatataatttcatccgtcgacaggtgacccacaaaattgaggaaagcgcttgccgtcgttcggcacccggcgacaccattcaccagcactacacactgaacttggcggacggcacattcatcgactcgtccttctcacgcagcaaa

SEQ ID NO: 55555 - DNA, 1408 bp, Heterodera glycines
atgacatttgggtacgaccctaatgttccggcagaagttatacttttgccagtacatttccctggacattggactctcattatccatgatgtgcaatttggcactcattttgccgattctttgcctaccacatatggcaggttggatccgcaactgacggataaaattaaaaatatcatttcggatattttgccgtcagcagtgttgacagggattgttgatgtcgaaaatctgacggtccaacacgatggtaatagttgtgggtacttcgtgtgcctgtatgctgagtcatggcttatgaacaatcgcacatttgttctgcctgatttatccatcaattatgaaaaaaagcgcattttatggcacattaacgagctgtatggctctgataatgtgccatatcatccaagggaaggggtgccaactccttgcccaattgtctatcggcatacggatgaagcgcagtcgacatccaaggccgctgagctaatggaagttgatgaatatgatgatataatgatcatcgaaccacatacaagtggacaggcagttgatgccattctcacccaggcccaagtggccggtgaaaaccaagctgacacgcttggtttggtgtcggagtcttgcatcccgcaagagccaattgcgcaggctgatgatgtaattttcatcagacctaagacgccaccaaggcgatcaatgcgcgttcaaaaaaggctttcagcttctgttagccgttcgccttcaccggcgccgaaacgccccccgccagcaaattcgctgggagtggcaacgccgatcacacggcgttgctctgcatttcacaaggggtggcaatgcgctgcagcagcagccaaacatttcccggaatattgtgactccgggaaactcggtgacaaaaaatgcgccgattgcggtgcacatctcttctcacatgaagacagtagcatttgctgccggaagggaagagttgtgctgccaatgcttaacccgcatcctgatgagctcaaacagctgattgtggggaataagcaatcccgtgaagggaaagaatttgtgcgacacatgtcgcgttataacaacctgttccaatttgcgagcgtttccgctggcaacaaaccaagccctgctggcggtccgatggccgttattcttaacggagaattccatcgccgcataagcagcatgcaggctggtacaactcagattcctggctttggccagttgtacattctggacccagtcgaggctatggaacagcgtcgaaacaaccccaggtttactggggagaaaatcacaaacgaagatgagtttgtgcagggtcaccagctaaatgagcagactcttgagatcttagaacaaatgatccaagtgcatcatcctgctgcgcaggcatataagcaggcgc

SEQ ID NO: 55556 - DNA, 849 bp, Heterodera glycines
ggcgccgctgttgtcaaagtcagtaagcgtcaagcagttgatgagggccttaggaaatacagaaaacgcgtaaaagaacagcaagcaaaagagaaaaagcagaaggagaagaagccaccgccaaattccaccgtatgccgttaccgtactttctcattttaataataaaaaaaaatttaactttaatgaagaatgatgctgccggtggtaattcaacgggaaacaaccaccatgggtcccgtccagctccagcaggtggcccagacgacccatctccagacgaaccgggtaggacggacttgcatttggttaaggaacagattggccgcaattttgctgtcaaaaaacattcgacatgcatgactgaagttattgcgttcagctattttatggccaatttcctttattgaaaaagccaaatttcatggctatacctacaactgactacatttacaaaggcagttcatagaatggagggatttcttaaaattctaaattaagcaatgttatatcaggcctatctagataatatcttttggactaattgccagcatacgacattaaaaattttcaatgtggacataaggattaaaaataggtacaaaaaattgtaaaattccaagcttcggctcaaaaatatgtgtatttttctgctttcttatgattctgtccaggaaaagaggccaaagctcggaggattataaaaaagtcgtgtgctgggtgccgccgtcgttttttattgacttaattggttccgaattcagtatcaaatgcttctgatggtgctgctccagctggagatgatgtttcgatccctcgtgaagagataaatgaaatgaaacatgcggg

SEQ ID NO: 55557 - DNA, 451 bp, Heterodera glycines
atgcagtttttacccaacagcggcaaaggtgaatagcaaaaaaagtcttcaatttaagtgcaaaaaaaaggtcttcggttcggtccccccccccccgaaaatgagagagtgacatcacaaaatggtacggctaaaggaaaatcaaaaaatgaattaattagcaaaatgtatgccccaaaacttttgacgcgctcagtaaattcaaattttcttaatttttaagtcaaatttcttgtggaaaaagctggcgccgacttggaaattcgcgacgcctcggggaggacggcgttaatgggcgccgcctttgaaggacaagcggacattgtgcaatatttggtgtcgaaaaaagcacgcaccgattggaaggatgaaaatggtagtggtcgaataattcgttgatcgcaagaggagaggggcagaaaattttaaaattttggccaattctaataaa

SEQ ID NO: 55558 - DNA, 322 bp, Heterodera glycines
tttttgggccccggggtcgtttgggccccaacccaaaaatacaaaaatgtgctgtttttaaaaattaagattctaaaaactaagcctgagggatccctcgccacttggcataagttaggtttaattaacattcgctcattttttacaattttacttattccaaatcctattattttttaatagttaaccaatttgatttacattctgatttggacatttttcagaaatggctaacccaattgcaaccaaaaaacaaaaagtaaaattgtcttacgaaagccacctttacaccttcgctaaaatgagatctgatgggatgaca

SEQ ID NO: 55559 - DNA, 166 bp, Heterodera glycines
actagagtagagcgggaccgggaattttgggcaaaaccgggaccgggacttgccgggacctgagaagccgggaccgggacctcggtttttgtccgggaccgggaaccgggaccaaccgggaaattttaaaaattcaaaaaaattttaaaaatttaaaaaaaaattc

SEQ ID NO: 55560 - DNA, 2041 bp, Heterodera glycines
atggcaaaaccaaacgattgtggtcccgcggcattccatttcggcaagcaaagccgcctgcaactccacgtgttttgcgacgcgtcggaacacacattcgccgccgccgtctacattcgaagcgagactgccgatggctctgaagcgaacctaatcttcgccaaaaaccgcctccggccacgaaccgcgaaccagcgcttcaccatccctcgactcgaactcctcgccattctcgtcggaattcgcgccatgcgcttcgccgagaaagagctcctacgtccgatcgacgagcggcacttatggtccgactcccaaattgccctctcatgggtgaagtccgacgaacccaaagcccagttcgaacaacgaaggctcgtcgagatccgacaagggccgcccaccattttccatttcgtcagaaccgaccaaaatcccgccgacgtagccacgagaggctgcacacctgcggagctccgaactcgccacatttggtggaaaaggcctgagtggctcacgagtccggaaacggaatggcccgacgagttaacgttcgcaacgccagccgactccccttccgccgatcccccgtttgaagaatcggagaccaagaccctcatggccaaacaaagtccgctgccccctcccctcattgatccggctcgtttcagcactatgctgacccttctcggaacgaccattctcgtcctccaattcatcgggcgtcgtcgaccaaaatggctcagaagcggcacctcgtcaatcccacggagtggccctccgacgggcgattcgttcagagcagccaggactttcctcatccgacaagaccaacgaagctcgcccgacggctacgacaaacaccccactgttttcaatgaggatggccttttgtgcctcaaaacccggctcctgcacgcgaatggtccgcccactctcgcctctcccgtccttctcgaccgccattcatctctgactcggctaattgtccaagaaatccacgccgacctcagacacgccggcgttgactggactctgactgagttccttagccgttattggatgcctcaagcacgacgaaccattcgtggtatcctccgaggctgcccgtcctgccggcgaatcacggcacccccttttgcgaggccaacaatgcccccctttgccctctatgcgcgtcaaaccggctaatccctttgaattcgtcggtctcgactttgctgggcccacctcctctcgactaagcgacggatcgctcaccaagacctacttggtcatcgtcacctgttttgtcacccgggcagtatatctagaggcaaccaccgatctgtcagccccgagcttcatcaatgtcttacgacgattcatcagtcgtcgcggccgaccaaagcgaattctgagtgacaacgccccgacattcgttcaaacgagcaaggctctcgacattctgaccggccctccgtccgaaaccgacgccgtcacctttgccgcgcgccgaggcattcagtgggacttcattcccgcctatagtccatggatgggggcttgctacgagcgactaatcggcctcgtcaaatcctgcatcaaaaggacgatcggtcgacgaattctcgactacgacgatttgagcgcattccttgccgaaattgaggccagcgtcaacagccgcccgatcacatgggtgtcagatcaaccggactcatcgaagcccctcactccgaaagaccttatccagcccggcctccccaacgacttggaaatcgtcgactctgatctcgactacgacgattgcctctccggtcccgcgcgtctcgcagcactttggaaagcttaccgggaggccgccgaccatttctggctcaaatggagtcatgagtacctcctcgccatcagagagcgcgccggatggactcataaaggtccccgccttcgaactcccaccgccccccacatcggccaagtggtcatcgtcgaagaggacctccgcccccggaatttatggccgatgggcatcgtcgttgcactaaacggctcactccctaac

SEQ ID NO: 55561 - DNA, 515 bp, Heterodera glycines
gtcagagtccagtcaacgccggcgtgtctgaggtcggcgtggatttcttggacaattagccgagtcagagatgaatggcggtcgagaaggacgggagaggcgagagtgggcggaccattcgcgtgcaggagccgggttttgaggcacaaaaggccatcctcattgaaaacagtggggtgtttgtcgtagccgtcgggcgagcttcgttggtcttgtcggatgaggaaagtcctggctgctctgaacgaatcgcccgtcggagggccactccgtgggattgacgaggtgccgcttctgagccattttggtcgacgacgcccgatgaattggaggacgagaatggtcgttccgagaagggtcagcatagtgctgaaacgagccggatcaatgaggggagggggcagcggactttgtttggccatgagggtcttggtctccgattcttcaaacgggggatcggcggaaggggagtcggctggcgttgcgaacgttaactcgtcgggccattccgtttc

SEQ ID NO: 55562 - DNA, 894 bp, Heterodera glycines
acaatatcactgcccgttgggacggattgccaatgccaaaacagcccacacttttggaaggggacgatgttggcacactgttgaccagccaactgaatgaggaggacgaggccaagacgggcttgaattgcccacaaaaagtgctcaaggtgttcgttcagcaatggcatttgtaatgccaaaattataaaaaatttaatacaatttattaaaaataaattaatttttaaataaaatactttttttattttttacatatataattttgggttttcagcttatcaaaattatggtaccacatgttgtgcttgttgctgtactaattggttatttgtgtttaggtatatgaatttttatatttttaaattaaaaatatttcaatatttttataaaaaacaaaataaaaactaaaaataaatatgaattttttacgattatcattataattaccttttttcaatttaatttattttataaatttataattatctttattattattgttgtaatttttataagcataaataaaataatatttttctttcaggagctggaattttacaagcattggagacccgaactgagcttgtaattaatttgttatattatcaaaaaaccattttgtatatttttgttttaaatgctttttttcacagatggcacgctctcgaaaactgataaggcttgatcagctcattgagaacttcactgagtccagctggcatatgttggttgaccgatttggcgccgatgcccaaatgcatcgggaacaatgggccgacatatttaggcaaaaataattaaatcaaattaaaatgatgattaatcccccataaaatttatttaaaaattcagagattatatgatcagcgttgcggcagaagttgatgacag

SEQ ID NO: 55563 - DNA, 109 bp, Heterodera glycines
atggaagaatcgcccgaattgttaaacaaatcagtcggaggattagctgaatttgacttctctttgtgcgaacgtaatcatgcactgaagcgacaaatggacggcgaag

SEQ ID NO: 55564 - DNA, 829 bp, Heterodera glycines
atgacactttacgcgtcccatgacattttacgcgtcccatcacattttacgcgtcccaacaacactttacgcgtcccatcacactttacgcgtcccatcacactttacgcgtcccatcatattttacgcgtcaaaaaatgtttttcgaaccgtcaatcggaaactttataccttccgaatagtctaattgttcttgcttgtatactttgatcatcgaaatgtgcaaaagcaactctaagcacacttaatgatgtcaacagaaattcaactaatataagaaaaaaatttacaaaagcctaagcttaggcctagtctaacaataagccattgttcgagttgcctgtgtataagttgtcatgataaccttaggcttaacaacgaaatttatagttaaaaactttactgaatacctgacaaaaaaaatagtttttctcttagttattaggacaactataataccatgagaccagggatggcacggaattccgaaaatttttggggcctcggaatgccatccctgccatggacacaaaatgtcatgggacgcgtaaagtgttgttgggactcgtaaaatgtgatgggacgcgtaaagtgttgttgggactcgtaaaatgtgatgggacgcgtaaaatgttatgggacgcgtaaaatgtcatgggacgcgtaaaatgccatgggacgcgtaaaaccgattagaaccattgcttttaccaaatacgaaacgaaactgaaaaaatgtcattttttgcgttgattttttccaaaaaaatttcacggggattccaatgttgtgcaattgtatagaattgtggtcccgacgaaaaataaa

SEQ ID NO: 55565 - DNA, 345 bp, Heterodera glycines
attatgagccacccaatttggcaaatcggtctttttaaacgcattaaagaagattcagtcgattgcttggagtgtaagcaaaaaaacgttatttatttttcatcttcatcattttttggtttaaaaatatattgaatacttttttatactttgaaagacttttattaatacagaatttttttaaatttcctaaaatccgcaatcctgcgcaggatcctgcagattttaaatgcaggatttgcaggattaatcctgccggatcctgtcctgtaaaaaattttgaattccaatcctgcaacaggatccgcaaatttgaaatttccggtctctatattcactatgggt

SEQ ID NO: 55566 - DNA, 228 bp, Heterodera glycines
ctttttaaaatgactggcttgtccgaaaatgtggccttttcccgcttcgtctctgagtttggtggccgctgcaaagaactcaaaatcgctaatgaattcgccagggatccgagccgtgccaacaaatacacgcgaacgctcaaagacggaaagggcagctggcaattgtgcgtggacttctccaaaaacctcatcgacgacgacatttttcaccaactcatctcagtg

SEQ ID NO: 55567 - DNA, 438 bp, Heterodera glycines
atgattcacgtgttaattcacggtcatgatttacgtgttaatttacggtcatgtaagtttaacttacagtcattattcacgtgtcaatttaggggttaattcacgtgaaaattcacagtcatgatttacgtgttaattcccgggcatgatttacgtgttaatacacggtcatgattcacgtgttaattcacggtcatgtgcgtttaacttacagtcattattcagtgtcaatttaggggttaattcacgtgacaattcacagtcatgatttacgtgttaattcaaaatcatgatttatgtgttaatttacggtaatgattcacatgttaattcccgggcatgtacgtttaatttacagtcattattcacgtgtcaatttacggcttaaagcacgtgtcaattcacggtcatgatttacttgtaaattcacgatcatga

SEQ ID NO: 55568 - DNA, 1024 bp, Heterodera glycines
atgcagtacaatgcttttaagccccgccgtgaggcgggacagttccaaaattttgtaccacattttactgtggaaagtccaagtaccttattggacaactacgtgtcaatgagcacagtcgcctttggccagttgtggaacggaaaaatgggaatatcagatggggtgcgctcttttctaaaaattcctcttttcgtctaaccatccctcccttttgtgcactatttcgtttcaaaattgaatcattttttttggctttttgaaataaattgtgaaaaatatacgaaaattattttcggttttaattatgctgtacaatgcttttaagccccgccgtgcggcggctccccttttgtgcactattttagtttttaaaattggttccggactttttggctttttgaaataaattgtgaaaaatatacgaaaattattttagcttttaattatgcagtacaatgcttttaagccccgccgtgaggcgggacagttccaaaattttgtaccacattttactgtggaaagtccaagtaccttattggacaactacgtgtcaatgagcacagtcgcctttggccagttgtggaacggaaaaatgggaatatcagatggggtgcgctcttttctaaaaattcctcttttcgtctaaccatccctcccttttgtgcactatttcgtttcaaaattgaatcattttttttggctttttgaaataaattgtgaaaaatatacgaaaattattttagcttttaattatgcagtacaatgcttttaagccccgccgtgaggcgggacagttccaaaattttgtaccacattttactgtggaaagtccaagtaccttattggacaactacgtgtcaatgagcacagtcgcctttggccagttgtggaacggaaaaatgggaatatcagatggggtgcgctcttttctaaaaattcctcttttcgtctaaccatccctcccttttgtgcactatttcgtttcaaaattgaatcattttttttggctttttgaaataaa

SEQ ID NO: 55569 - DNA, 391 bp, Heterodera glycines
gcttaaaagcattgtacagcataattaaaaccgaaaataattttcgtatatttttcacaatttatttcaaaaagccaaaaaaaatgattcaattttgaaacgaaatagtgcacaaaagggagggatggttagacgaaaagaggaatttttagaaaagagcgcaccccatctgatattcccatttttccgttccacaactggccaaaggcgactgtgctcattgacacgtagttgtccaataaggtacttggactttccacagtaaaatgtggtacaaaattttggaactgtcccgcctcacggcggggcttaaaagcattgtactgcataattaaaagctaaaataattttcgtatatttttcacaatttatttcaaaaagccaaaaaaaa

SEQ ID NO: 55570 - DNA, 965 bp, Heterodera glycines
atgaaatttgagaataacgctacggcagtttttccaaattcgggcaccgcaagtgaagcgaaaaatgagcgtgcgtcggaattttcccaaaaaggaaaattttctgaaaccaaaaggagccattggacagattctgatcaaaagtcgatgactaaggaaaagtggaagaaagttgaaagggcaccaaggaacatcgcgcccaaagtggacttccgaattaaaagaaattgtgatgagaaaaatcacaactttggcccaaaagaacaagtgggaaagaattttgaagtaaaaaaaggcagtggtgaaaattcgggaaaaagtggaaggattttttcgtgcaaaaattctgaagttcaattagggacaattgaaattttggaaggtcggaaggagtttgagagaaaaagattgaagttgggcagaaactctcaacgagaaaagattggacgaaatgtctcacttgatggaaatggcccacgaacgaattatggcacaaatttgaattcgtttcgacaaaactgtgttttctggccaaggagagcgaatgcagaccagatgagccgtgaaactttgccatttgatcggggttgggtcgagttgaccgcctcgtgtccggattcaacttcgacttatgctgatcgacaaccaatgatgtgcggacttcggtgcaatggcagtgagctgatcccaaacggacctcacctttcgacagccggatgcgggatgtgcagctgatcggcagggacgcctctcgtcagcggccggggatgtgttattatttaaattagtgcgtaattgcttggcgttttgaccatttattgatgtttgttttattcattctcattttcatgcaattattctccccccttaaagtttttgtcatgttttgctgttctccgtcattttggatttgattgattgttttgttccccctcgtcttctgaatttgtttgtgtttgatttta

SEQ ID NO: 55571 - DNA, 3340 bp, Heterodera glycines
atggcgaatttgagaacgccaccgctaacgcggcaacgcgcccttaactttggaattgcattggacaataccggaaaccaaatttcggcacaatttaacccgaatttaggacaaaaccgttcttttagccctgaattgggtcatgtagaaatggttggtaatgatggcgtttcagaatacggcgaagactttgacgacgagcagaatttgagaagcagacttttggcaatgacaatgaacatcagcaatccagcggtgaatgtaccggacgagaatgcacaaaaccagcgaatggccatgaatgcaccgcttgtgaattcgggtattttacgtgtcaacaacagaaatgtgggagtaaatggcttgggagaaacaagagaaagatttttgtcaaacaatttcgaattgggtgtaagcaatttgaacaatgcgggattagttcctacatatccccctgaccatgaatcaacgccagtgagtgccttgcgtggcgaaattcgagcttttggtaatttggttgaaaatcgccgacatgaaaatgaacttttggcggcgcgaaatgacgcacaatacactcagccgcgagtggacggagttcatccagtttttgtacgtcaaatggctgtccactcccaactgacagctttgcgcctttcggctaaccaccaagctcatgttgcaacgagttcaatcgaaccccttgctcgaaacgcgcaagtagacaacattggttgcaataacaatccgcagcgacaaatggaaaatttgcaacaaaatttacaccggcaaatggttcgtaatggtgaaaattttgaacccggaaatcacaactacggttgtgaggagcgaaacccaaacgcagaacagaatataaacccgcgcccaaatagccaacattttcatgttgcaaatcaaaatcatccgtatgttaacgacataccggacacccaaaggaatgaaatgcatgatatgattttagcgcaggcaataaaaagcctgaacaatttttcatactcaatggcattgaattcgttgcctgagctgaaagggagctccggagcagatggcgtccgatcattttttcgacattttgatgtcgcaaccgatgaatggcctgaagcgaagcgcttaagcgcactccgatcgaaatgtttggggcgtgccgaacgcgccttcaatgttgcggttgcaaacaacccgttcagctatgacagcgtaaagagggcgatgataaatctgcttgaagagacagatgccagacaaatgtcggcatttgaagagcttatgtccggtgtctatcgccgaaacaatgagagaattaacgatttggcagatcgagtttcttcgctagttagaaaagcctaccctgggcttctcgagcatctttatgatgattattcaatccgacacttcataagggcgctccaaaatcctgagttagcattgactcttgagttagcccgtcgtccttcaatgatttttgatgaatttgttgcattagcggcgagagccgaagcaacccaaaaggcatcaaagctcgcaatgcaaaggcccaactattttgctagatttaacagcaatttccaaacgcctcaatacaaccaacggccaatgcagcattttcgtcaagaaaattttccgcaaccctacaaccagcaacaaaaccggcctaattgttataattgtggaaaattcggacattttgccaggcaatgtactgaaccacaacgaaaccaaggcacgccgaataacaacagctcggcatcaaatttcgttggtcaaaattttcttgttgaacaacagaaaaaacctccacaacagaatcaaaatctttttgttggtggcatttcgatgagtcctgctgatgtggaaaaactgtttggaaaggatgggaccgaaaacgagacgaaaaatttgaataaggtttcgatcgggagaataatggccttaaaggtatcggtttgtggtttgacggcaaaagctatgttggacggaggtgcccaaatttcgatgttttcttccaaattctttgcaaaattattagctgagaaaagaatcggtaccgaacagcttcgcccatctcgtcacaacactcgcgtgatcgacataaatggaaatgcagttgagtgtattggaattgtgtctctcccaattgtcaggaaaggcaaatgtgtgtggattcgtttccacgtctcacacgcatcttttggctatgaatttgtttttgagacaaatgcattagctcgactaagttttaaacttttcgacgaggcaaatgacgaattggtcagtttttcggaagttaataatgtggaacgcaattctgtgcacgtcatttatcatacgaccataccatctcgtaacaaaaatttggttcactcggcccagcaaatgaaatttaagagtaacgctacggcaatttttacaaattcgggcaccaaaagtgaagtggaaaacaaacggacgtcggaattttgtgccaccaaaagcggccatcggccaagttttcgtcaaaagtggaagaaggttgaatggacaccaaagaacatcccgcccaaagtggaaaaccgaattatcagaaattgtgatgagaaagggcacaaaaagttcagcccaaaggaacaactgggaaagaattttgaagtgagaaagggtggtggtgaaaattcggaaaaatgtggacgaatttttcttggcaaaaaatcggaagttcaattagggacaattgaaattttggaaggcggggaggagtgaaagagaaaaaggatgaatttggacagaaagaatcagcaagaaaaagtcagactaaatgtctccagtggcggatctcaatcgaattttggggaaaatggcaaaaatttgaattcgtttcgacgaaaatgtgttttctggccaatgagagcggaagcggaccagatgagccgagaaactttgccatttgatcggggttgggtcaagctgaccgcctcgtgtccgggttcgacttcgccttctgctgatggacaacacatgatgcgcggacttcaacgcaatggcagtgagctgatcccaaacggacctcacctttcgacagccggatgcgggatgtgcagctgatcggcagggacgccactcgtcagcggccggggatgtgatattatttaaattagtgcgtaattgtttggcattttgaccttttattgatgtttgttttattcattctcattttcatgcaattattctccccccttaaaagttttgtcatgttttgctgtgctccgtcaattttggatttgattgattgtctgttttcccacctcgtcctccgacttggtttgatttgttgtgtgtttggatttta

SEQ ID NO: 55572 - DNA, 662 bp, Heterodera glycines
aaacaaaaaaatcgattttttcaagtgtccgtttggggtactcaaacaattatggggagcaaaaatccaacgcagaattaaagtacaggctatagggaagctattccggaaggattcggtctccccataaatctgggcgcatcggctcggggggactgccccgaaaacaaaaaaatcgattttttcaagtgtccgtttggggtactcaaacaattatggggagcaaaaatccaacgcagaattaaagtacaggctatagggaagctattcccgaaggattcggtctccccataaatctgggcgcatcggttcggggggactgccccgaaaacaaaaaaatcgattttttcaagtgtccgtttggggtactcaaacaattatggggagcaaaaatccaacgcagaattaaagtacaggctatagggaagctattcccgaaggattcggtctccccataaatctgggcgcatcggttcggggggactgccccgaaaacaaaaataaatcgattttttcaagtgtccgtttggggtactcaaacatttatggggagcaaaaatccaacgcagaattaaagtacagactatagggaagctattcccgaaggattcggtctccccataaatctgggcgcatcggttcagggggactgccccgaaaac

SEQ ID NO: 55573 - DNA, 911 bp, Heterodera glycines
ggcaggacaagaaaagaatgaagttgatgcctcatgaaactcggaattggttatgttttgtcgaaaatatccttacataatactcataaaaaaatacaaataattcaacccacctattctatgaccacattctgaaaaaaatcccagaaatacgaggaaagatatgcttggtcacaataaaataaaaaatggctagtatgtaaaaatttgcggtcacaaataaaaaaaaatggctaatatgtaaaattggcgtccagaaatttttagactaatccgacgcaaagcacgaatgaattaaagaggcgaaagaattcacagtatcgtttctaatagggaaatattgacaggatattcggctaaaaacgggtttgatcatttttagcgcatttttaggtatacatttgagacaattgggcaggacaagaaaagaatgaagttgatgcctcatgaaactcggaattggttatgttttgtcgaaaatatccttacataatactcataaaaaaatacaaataattcaacccacctattctatgaccacattctgaaaaaaatcccagaaatacgaggaaagatatgcttggtcacaataaaataaaaaatggctagtatgtaaaaatttgcggtcacaaataaaaaaaaatggctaatatgtaaaattggcgtccagaaatttttagactaatccgacgcaaagcacgaatgaattaaagaggcgaaagaattcacagtatcgtttctaatagggaaatattgacaggatattcggctaaaaacgggtttgatcatttttagcgcatttttaggtatacatttgagacaattgggcaggacaagaaaagaatgaagttgatgcctcatgaaactcggaattggttatgttttgtcgaaaatatccttacataatactc

SEQ ID NO: 55574 - DNA, 445 bp, Heterodera glycines
atgcccatcaactttgttctgaacgactttttgtctgtacgttgtttcgtccattttttgcctattttctcctaaattcagcgcttactgaatactcaacaggacaaaatgccattatttctgaatttgcgaacaaaaaagaactcattcaagtggaaatctaatggttgagttgtcatttcaattctttttaggccattttgtgcagctgttttataccaattttttgtggttatacggtgcccgaatttcgcggcgtcagatacatcgacggcggcttctccgacaatcaaccggtgtacgaccagaacaccatcactatttccccattctcgggaggtcagaacgggtcgcttttcctgagcagttcgtttacccttttcccggaatttttttttttaaatttttctttttttttacaaatagggagtttttccagaataaa

SEQ ID NO: 55575 - DNA, 823 bp, Heterodera glycines
aaacaaaaaaatcgattttttcaagtgtccgtttggggtactcaaacaattatggggagcaaaaatccaacgcagaattaaagtacaggctatagggaagctattcccgaaggattcggtctccccataaatctgggcgcatcggttcggggggactgccccgaaaacaaaaaaatcgattttttcaagtgtccgtttggggtactcaaacaattatggggagcaaaaatccaacgcagaattaaagtacaggctatagggaagctattcccgaaggattcggtctccccataaatctgggcgcatcggttcggggggactgccccgaaaacaaaaataaatcgattttttcaagtgtccgtttggggtactcaaacaattatggggagcaaaaatccaacgcagaattaaagtacaggctatagtgaagctattccggaaggattcggtctccccataaatctgggcgcatcggttcagggggactgccccgaaaacccaaaaaaaaattttttggataaaaattatttaaatgaactgactagataatatttaaaataggttatttctcttcctttcagtatccctgcaaagtttggtgcgcttctgatcagtttctgaaaaaaaagttaagcctaaactttttggcctgtttaaaaaggaattaaaaatttttaaaaattttattcatctccctttttgatagaaaaagcatcagagtgcctaaactaacatgtaaataaaatctggtgcgtttcagaaccctttctgaaaaaatatttaagaattaattttgcaaaaaaaaaaataaaaacgaaagact

SEQ ID NO: 55576 - DNA, 93 bp, Heterodera glycines
atgggagcaaacatccaacgcagaattaaagtacaggctatagggaagctaattcccgaaggattcggtctccccataaatctgggcgcatcg

SEQ ID NO: 55577 - DNA, 369 bp, Heterodera glycines
atggccagatttttaattcaaaatccccaacatcaacaggtgtgtggtgcgcaacagttggtcagtttggtggtcggtggcactgtgtgcgagtcgcatcgccttcgtgttgggcgctgctcccgtgttgtagtcgatttcagcgacaacagcagtggcggctcattttgtgccgccaacgcgggcggccgtgccaaaatgaagaaaatgtttgtcaccggcggcgacggcacggagcagcagcaggacgacaccatcaccgatgaacaacagcagcaggaagacgaggatgacgacgatgatgatgaagacgaattccgcatactatctgcacaccgtaagcaaagaaaggaaaaactactcatttag

SEQ ID NO: 55578 - DNA, 491 bp, Heterodera glycines
atgaagaaaggggttcaaaatagcatttatgcgttaaaattttttgatttggtgaaggtttttagtccatacatataaatccatattttcgggaataaatccatatttcgccatttttgccattttagtccaaatttcggccatttttggcaaattttcacaagaaaaatgcaaaaaaagcgaaaaacattggtgccttttttaggattttcggaaaaattcttaacaaaaatgcattaaaaacgaaaaatacacccctaagaatcgacccgaaaattttcagaaaatactagagcccggagcaggaccggatcctgtgcaggattttgcaggatcccagtccgcaatcctgcattttttggaaaatgcagaatttgcaggattaatccggccggatccggtcctgcaaaaatttttgaattccaatcctgcaacgatccgcaaatttgaaatttccgggctctaaaaaatacacccctaatttgtaagta

SEQ ID NO: 55579 - DNA, 2307 bp, Heterodera glycines
aaacgggtggaacagatcgaaatcatcgagagaacggtggaggaaagtcggaggtaatcttaggaaagtgcccaagatgatcatgcctttggcttcgtttttcgattatttattttaattttggcatttttctccctttttttgtccttttcccttttaatttttgcctttcccttttcaggcccctcacttcccaaggtcttttcgtctgtttaattcgtaattcgaatttcttacttctcttcagagttagtcaatttccagccccaaagttcggtgcgtacttccagcgaacggattcttttcccggacccggaaaagaggtttcagctgaccagcgaaagggacgccgggagggactcgtcgctgctgtacagcccctcaggcaatcgttttggaatttaaaattgcaattttcttttatttaaggccaaaactcattcattgtgcgtgaggcgccgttgcaacagtcgacgcctgaacggaatcaacagacgcacaaaaatggactcacaatcagtcggcacgggtacgacgctgacgaagtgttgactttaggtaggttaaatttaaatttaaatttacaatttaaaattcagaaacgagcgaaagagtgacggaaacgcatggacaaaagggacatccgacgaaggacagaagcgtgggggagacgagcggtgccatcgtacggcgaacgccgccccggcgggaggataccgcgacgaagtccattcttaagacagtgccgccgatggcatcccccgaggggaccgtaggggaaaattcgtggaggaaaagccccgcgtcggtggaagggtaagccgaggggagggagagaaaaggaacggattacaacaacagatcagtgcagcggaaggacagctatcggagaatgcaggtaaagcaggaggaagagagtgatgttcagcagccaacatcattttacggagtgagtgaacggacgaaaaaagggggaagggaaggagacggacggacggaggaggcgaattggcattttaatgggggacaaagttggcatttcatataaaaggggatggagttggctaaagaattagattttattttttgactattttttctaatgacttttcctccgatttcttcccaaaaaccatgatttccatttgtctcttttcagcagtctcccaatgcgacgattctgtcaaagagttcaaaacaactttggcctgaaatgtttagcgcggagaatcgcggaaagaattcattagcacggataaaagggtcaattgccgaaatgagccgacaaatgaggtggagagtcagttgagttagcaaaaaaactaatccgttttcccccgcagcgacggcgaatggaccccccgcctcgtctctctgctgtgcctcgtcctgcttctgctgctgctcgtcctgctcctcctttggctgcttgtctcttcgcttctcctccatcgctccaccttcgccttttggctttaccctccgccgtgcgaagagtgccaacgacggaacggcggtggaacttcggacactcagcagccgagtcggcttttcgtccatttgaacagcccggcacaggcgcacttcgaactgatcggaaaccccccgttcaagtcgaactcattcactgccgttgatttcgacaccgtttggcaaacaattgcaatgatcaaacaaagcgttgttccgtttttgtaagggatttgtggccatcgcggaccacgcgttgacagatgagcaaggaacacacaccacgtgctttgtgatggagttggacagaagcgcgatgccggacatggatgtgttgcaagacgcactgagcaacacttacagcgaggtgagaaggagggagggggaattagaaatatttggtttggcggagatttggccgattggtgaacgatttgccaatgtttggggaggggaattagcaatatttgggggtggaattggccactttgtgaagatttgccagtgtttggggaggggaattagcaatatttgggggtggaattggccactttgtgaagatttgccagtgtttggttggccaatcccattaatccttgtgccacccttgctcattctctctttcccccgttctctttgccaggtccattctcagttcggctggcaagaatattggtgcgtttcgcaacttcggtgtgcttagctttttccattgaaggcaatacgtagcggaagaggtcgactcatcatttgttcttcagaaatttcgcgatcgaatcgacgactgtcaaaaggcgaccaaatggtaccgcctcaaacacaccgtttacacccgcg

SEQ ID NO: 55580 - DNA, 414 bp, Heterodera glycines
atgggcaaaatacgaagtgcaaacggacccatcgggcggacattggcactacccaaagcatacggcacaaaagacgcaaagggacgcggagggaaattgggtgaattggcaaaagggcgggggaggaggacaaaggcagcggcggaagaggaggagaagcggaggaggggacggattgagaaaacgattggaaattcaatgagaatggttgtgaaagggagagagagagagagcgagggagagacagacagagagagcgagggagagacagacagagagagcgagggagagacagacagagagagcgagggagagacagacagagagagcgagggagagacacaccgatcacttgccaccaaccgatactttcattatgcaaaaagtaaattatataaaatgccaatgccataa

SEQ ID NO: 55581 - DNA, 482 bp, Heterodera glycines
atgccaacaacgagcactgccacactgcttgacacatcggcaacaacgagcagtaacacggcgatggaaagcgactcggacgaagaacaattcccaccgccaccgccgattgatgggacaattggcacggcgaatgaggtgggaagggaattgagcatgagcgacggacttgccaattaccgtcttttgtcctccctaatgggattaccgtacttgtcacccttcattaattccctcttctctttactaatcacttttgtcatcagagtcacccattccgcgcaatgcttccgcctccttccctcccttccatcgttttcccacggaatttggcgccgccgcccccgccaaagcgatcggaagagacgcggcttcaaatggcggaacaaaacccttttgagatgagagaggcacaaagcgaactgatggcggaattgcaacagagacaaaggatgaggacgaaagaatcggcggaaaagtga

SEQ ID NO: 55582 - DNA, 366 bp, Heterodera glycines
ctgaccgacattttagcaagtgcaaaaagtgcgataaaattgtggtcccaagcagccaatgaagccgaattgcagttgattattgagcgtaagttaacggaagaaacattttccgcttacacttgattggctaagattttggtgctatggcgttacccaaaaaccatcacaaaaaattttttgatatgactttgctcaaagcaaccgaatttttaattgttgatttctttcgatagccccaagtgttttttaaatcctgaaaaatttcattatgtttcaaagagatcaaattcaaaaaaaaatatctggtttttgaatttctcaggtcatactttatttaaactatgatttttttgaataagtata

SEQ ID NO: 55583 - DNA, 912 bp, Heterodera glycines
atggtcgctggggttcagcagcaaaaaattgcagccaaaaccagcaacaacacaaggccaaaaacagcagcagtcatgctaattatgaggatcaaagctcacttaagtgagtataaatgagaggaacagcagaggaggaggatggaagttacatgagataaaaaaggaaaaataaaataagtcagataataatattctgattaaactaattacacataaaccatgcaaagaaaatgatttttaatttaaaatcgaatttattaattggcaaataaaatagaattatttaaatgggttttagtggaacacgtccgtcatattgtgctgatgagtctccgttcgttgcaaattgcttcgcccgactcttttctcgatggcacaattcaacaaattcgaaatggccacccgctggaaatggcattgggtcccccaaaaatggcattggcacaaaaattgagccaaatcgaatgccatggaagtggcaaaagggatcaaaatcgcatttgtttaacgatggagcgaccaaaaactacaaaatattcgccgaaatcattgaccaaaccatcggcaaattgtgtcgcggtgttcggccaaacggcgttgacgttggcatttattttaaaaacaaatattatataattttaataccactttggttgggacaacttcttataaaaattcagaagaaatatgtatataaaaatattattttataaaatcttaaaaaaattggttgtgactgtggatgtagtccccccccccaagtggactacatcccagtcaaaatatttttactttttaaaaagatttataaaataatatttttatatacatattttttctgaatttttataagaagttgtcccaaccaaagtgttattaaaattatataatatttgtttttaaaataaa

SEQ ID NO: 55584 - DNA, 650 bp, Heterodera glycines
tcgattttttcaagtgtccgtttgggggtactcaaacaattatggggagcaaaaatccaacgcagaattaaagtacaggctatagggaagctattccggaaggattcggtctccccataaatctgggcgcatcggttcggggggactgccccgaaaacaaaaaaatcgattttttcaagtgtccgtttggggtactcaaacaattatggggagcaaaaatccaacgcagaattaaagtacaggctatagggaagctattccggaaggattcggtctccccataaatctgggcgcatcggttcggggggactgccccgaaaacaaaaaaatcgattttttcaagtgtccgtttggggtactcaaacaattatggggagcaaaaatccaacgcagaattaaagtacaggctatagggaagctattccggaaggattcggtctccccataaatctgggcgcatcggttcggggggactgccccgaaaacaaaaaaatcgattttttcaagtgtccgtttggggtactcaaacaattatggggagcaaaaatccaacgcagaattaaagtacaggctatagggaagctattcccgaaggattcggtctccccataaatctgggcgcatcggttcggggggactgccccgaaaac

SEQ ID NO: 55585 - DNA, 527 bp, Heterodera glycines
cagaagtaatcggtctcccattcattgatcattcgttcttcgtttcgtcaatggcattctcttccgtcttttgccgttctccgtcccttttgtcccttttgcccattttgcttctgatcattgcccagtttgttaatggcatggactttgatgaattcgaattgccttccgatcgattggacgcattccaaaaacggagggcgcgcgaacttttcggaaagcgaagcgcaccacctccggcagcaggtgggaaaacgcggcacaaaaaagaattggcagaattatgccatcggcattctttgccatttgcagtcgcaaattacgaacgacactcccgaagaacacgagaattgttcgggaagagagcagctgctgttgaaccgttcacggaagcggaggaaggtgaaaacagtggggaaagccaaaaagccattcactggcaaaggcaaagggtggcgaaatttgcatactattcttcctcccccatgcttttcctcatgcttttcctccttggtcagttccactga

SEQ ID NO: 55586 - DNA, 168 bp, Heterodera glycines
agaaataaaatggaaaagataaattttaaagcatgatgcaatttcattaaaaatgggataaccttaatttaattggaaatgttccccctcttcgtcgttctattcaaaaaatatttgtttgtttacattcaattcttattcatttctcacacaaaaatgtattaatca

SEQ ID NO: 55587 - DNA, 104 bp, Heterodera glycines
gtcggaataaaacatcattcccctgcttgtctactgtttgtcccaatttctattttgccaaaatttttgccgggccgaatttgcctctgtttggtcccgacaag

SEQ ID NO: 55588 - DNA, 761 bp, Heterodera glycines
atggaggcggtgcacaacgaaactccatctggaatgccgactcacaaactgaccatcaaagtgaacaaaattttatttgattattgtttaaccaataaatccaggtgggtagtgttgaaagcggccccggcgctttcacagtgccccttggggccttggttaaataataataatgaaacaaacaaaatttagagtgaatctccgaaagcgaatcaaattcagcaagtcattgcgcgaatgaggaaacataataaaagcaaaaattaaaagcaaaaaataaatacaatttcattatataagaaataaatagttattttttaaaaaatttaatgggattaaaaaaccatattaatattatatagaatcatagaattaaattatttaatgaatctatacatattacttcttaattatattaatttaaggttaaaactcactcaattcattaaattttaggacgagattcaccatgagaataaatcacaaaaagaattcattttctcaattaatgaatataaatcaacaaataattttaaacatttgaaaaataactcaaattagggactaaataattaggtaacaaatattttaaaattaatttaatggtcgacaaatgctgaaattaaaaaattaaacgtatacaaattatttatattatactatcagaaatacaataatttaactaaattgctcatatatttttatttctcatataaagctattaatattcaacaattaaacaaatttattaaactaaaaaa

SEQ ID NO: 55589 - DNA, 1890 bp, Heterodera glycines
atgtcttcagaaattctgtacgtttattatttccttttttttctaacgtttcgcatttaaatttcaaaaccaattttgaaagattagctttttttggatgctataacttcacatttgtatttactagctaactttgatcctttaattacttttcccttctcttcaattattaattcattcatttcccaaattcatttttcagttggtgtgccgtgtttcttcttctgttggtcggctgtgccaccattcttttttggttctttttggacaatgccaaaaaacgacgacgccctcacaaaaaagaaatgtaaaataaataatcataatttgaaaatttcgaaaaaattctccccaatttttcagctttatctgcggagattgttggcttttggtgttcgattttcttgcgccttctcaactcggcctcgaaattgcactgatcaaccgccgctttaactgcatcgtcgacgaacacttcaagacacgcaaatggaaattgggcgaaatgcgaattttccacaaaattggagagaatggcacccagcaaatgcaaattgtcaattccgatggaaatccattgccaatcccgcaaaatccgttgcccaacaaagtcatcggattcaaacgcattacgatcctgtaaaaaatagattaaattggaatttttcgtctaaattttctgtttttcagttacatcgatcaaaatgtcatcgcttttctccgcctttttcaccgttttttcgccttttcttcaatattcttgttcatcactgaaaatgttcgcattttggattttgttttgctcaatgttttgccaatgctccgcgactccattcgtcttatgcttttgaataccatcgcttttcgccgtttgcgccaattggccccgtcactgctcaacgattgtccatcacttcacactgtgttgtttgaagactccattttccccgaatttccgcccgatgacagtgccaatgcgtcggatggccaagcggtgaccaaatggttgttcacgcctcgttcggatggtgtgccgaagttgcttcaatgctctgttaattcaacggatgagcaatggtcgtcaacgatggaacattttaaagcggtgattatccctatttcattggtttttctatgattttttgtcccatttttaggcattttccaatgcttcttctccggttacttttcgcattcattttctgatgtcttctccgcttgacttcattgtgccatttgatcggatcaacgaagtgactgaggagaaattgacacttaaacaatcatcagcaaatgattttctgctcatccgttctccaattggatgggataaccgaaattggaaaaatctgagggatgaaattattgctcgaacgaatccaattgacattcgggtcaaagatggcggatacgacgacgggtgaaaaaattaaaaatgcttaataattctcttttttgtttttgagtccaattgcttagactttgtgttttcaaatgcataatagagccgaattatggtacaaaaaatagttcgttgagttgactcataaaatgccattgaattataatttgcaatggaatgatcatcgttttttcagtcttctcgacgacgcttctcccgggccgagtgatcagcagaagaaatgaatgaattaatcaattaattgatgcgatttatgagcgaaatgatgttggtggcaatttgtcatttaaatattgcctaattgtttgtttgtctgtttgtatttgacctttgcttgctcgcaaatgcgtccatttccattgtattttatgtgtattaattaattcattcattcattgtgagtaatcgtagataaaattgctaatgatttaaccggatttcattacatagcagcacaattcaataaa

SEQ ID NO: 55590 - DNA, 311 bp, Heterodera glycines
atgggtaagtgtaaaagattaatttaattcattcaccaattcaaattgtgtttaattttaggccattgtcgccaccaacggacgaaaaagaaaaagaagcgggtcaaagcaacgatgaaatgttctcgacgactcccggaccaagtggatcagcggaatgagtgattttttgaaaatgtcgtctaattgcgtggaaatgaatgaattaattaaatttgagaaatgatcgatctcacggattgaaatttgatttgattctctcatttattctctcagaaatgcttttgttgattttctttcattcgaataaa

SEQ ID NO: 55591 - DNA, 369 bp, Heterodera glycines
tggatgaacagtttggcgagctgcgggcagagatcggcaaaatcaaagaacaacagtcgacaatgatgagcacaattatgcaggtgagtgttataaaaagaaatatttaatttttttacaaaaaaataaaataaaaaacaatttaaaatattgtatacacaaataaattttcaaaattattttaagttgcaaatgcttctgctgcagaagaaaaacgaaaatcggcaggaatttactgagtcagctgatcactcactgatcagtgccatcggagtacaataattttgaaatcaaaacaaataattatgatcatgttaatttactttttttttaatttttttttgtgcttttttatccatttaaaataaa

SEQ ID NO: 55592 - DNA, 571 bp, Heterodera glycines
atgcctgtagactctgttgctgatcggatgcgtaacataaaaagcgctgatctgattgtgtggatgcaatggtttcaatcggcgcataagggaaaagcggggcattcgatcaaacgagaatttatttggctatatgcacgtgttttttacgaccggtatggaaatggatttgacaaatattttgaagccgaattctccagaattgaagtgctgatggaaagtaagcaattacagtcccattaattaattaattgggtaattaataaatgatttaactacagaaatcacccaaatgcacactgatgctactgctgctttcgctttgcagaaaggcatttgctgtgaattgccagaaaaatggcgtaccataatcaaccaaggtacgatgaatgagagcattttggaagtgatcgaatcggatgagggaaaggaaagaaaaatggggacaaatgaatttgtacaacagttgcattttgatgtgatcagagagttttgccaaaacattgatcaaaccgaagaactggttcagagaaaaattggaaatataataaaaagtaaattaaaattataa

SEQ ID NO: 55593 - DNA, 196 bp, Heterodera glycines
tttttcatcaaatggaatgccaatatgttggaaattttttttgatctgtcctttgttcattattccttcaaatttcgtcgataatctttgctctgttttaacacttaaaaatttaaaaaaattttccgttacttgccaaaaactttataattttaatttactttttattatatttccaatttttctctgaaccagt

SEQ ID NO: 55594 - DNA, 982 bp, Heterodera glycines
taattaaatccattccttcgggtcatgtgccgggtgccgcggggtaagcagtgctggttcgtctttcacggcaccgaaccttttggctagtcagcaatcgttgcttaacttgccagatcggacgggtgcgcatgattccactgttccaagcaccccaccaaaagcaaaacgatataaccaaaatataaggaaaaattttttaaaaatttttttctccatcttcctttttgatactaaagcatcagagtgctaaaattaagttgtaaataaaatttggtgcgctttagagcactttctgaaaaaaatatttatgaaacaaaaaaatcgattttttcaagtgccctgtttggggtactcaaacatttatgggggagcaaaaatcccttgcagaattaaagtacaggctatagggaagctattcccgaaggattcggtctccccataaatctgggcgcatcggttcggggggactgccccgaaaacaaaaaaatcgattttttcaagtgtccgtttggggtactcaaacaattatggggagcaaaaatccaacgcagaattaaagtacaggctatagggaagctattccggaaggattcggtctccccataaatctgggcgcatcggttcggggggactgccccgaaaacaaaaaaatcgattttttcaagtgtccgtttggggtactcaaacaattatggggagcaaaaatccaacgcagaattaaagtacaggctatagggaagctattccggaaggattcggtctccccataaatctgggcgcatcggttcggggggactgccccgaaaacaaaaaaatcgattttttcaagtgtccgtttggggtactcaaacaattatggggagcaaaaatccaacgcagaattaaagtacaggctatagggaagctattcccgaaggattcggtctccccataaatctgggcgcatcggttcggggggactgccccgaaaacaaaaaaa

SEQ ID NO: 55595 - DNA, 2162 bp, Heterodera glycines
atgttcggcttcaactacttgcccatcttcccgcaaatcacgtaagtttttcaacgtgtgccactttgggagggacatttttttggctgttcaaaatatttttcaaaaattacaattaattgttgaaaatttaaaaaaacaatatcgatcgactgactgatcactcattgatcaatacactttgttttctcaacgattaggaagggtaagctgaacatggacggtggcgatttgctggtggttggcattgacacgagtcgcccaccaaaagcgacggcgtacgaccggtacaaactgtgcagcaaggggctggccgagctcacctccgaggaaccgatgaccggtgggtgaacgaaacagtcaatgggcgcggcaatggcacagcgatcattggcattccgccgatcgggaatcgctcccggggattatctctaatccattgttaaatgcccaaaattcggctggttttaagtgattttttgtttcaatttcacagttggcatttgcgcaaattatctgaagaacccctacaagttctgtggcgattattacttccaaccgtgcacgtccgtttgcttttccttccaattaataataatgcatggaattgttttttaataatagaaataattattatttcccgttttatttcttcccatttaagtcaagatcagttgcaaaaacagatgctcgaatacaaattcggctggattttggacaaagtgcaaaagaaccgagggaagatgccgtcggtggtaagtcaacgaattggaccagggatggcattccgaggccccaaaaattttcggaaatggaaattccgaccccaaaatgtcgaaatccgaatttcgtgccaatccctgctgaattggaccttccaaattgaaatcactgatcatcacgaacaaaatgttatttctcaaaggttttcatcatccgcgacggcatcagcgagggaatggtgccgaaggtcggtttgaatttgcaccgcaattccaccggttggcattggcactctgtcctccgtctttcagaacgcgcacagcgagttccaagcgtacgtcgacgcgtgcaaaaaggcggttccgaactggtcaccgaagtttgtctactgcattgtggacaagaaacacaacaagcgcttctttgtcaaaagcgggcagcaagtggagaacacggagccgggtggggttaattagttgtgccatgcctttccctcattcatccgttggccaacaattaacggacaaattgagaacggcacaaatgtttacgagtcaatggcttatcacctaaaacagtgcaggaatgccgaaatcagtttcaaatacggaacgggcaaaagccagtcataagtgccgtcgtattcaaaaaagtttcatttccccccaaaatttggataagccactttttctccgaccgatgcctaatatcaaaaatagcacgaatgctgaattaaaattaaagttattaattttgaggaagcgtcgtcgattcgaaattcacgcgcattgacattcacgagttctggctgcagtctcacgttccgttgaaggtgattttgatggccttgaaatgacggaccgttcgttacgaatttattcgcttaattatgctttattacagggaaccaccaaaatccctcaatatgtcttcccggtgaaccaagtcatggccaataacaacgagttgcaaaggtggattaatatattgagaaaaatttacgatttctatgtaattggaaccaaaaaaagggacaaaaacggtgccgaggggtgggggattccgatatcagcaacttgaacacaaaatcgtctccaatttctttaatttgttgctggtgtcatgctttttaattgattttccagttttctcctttcgctctgctgcaattggcaaattgtgacattggccccgggtttgccaacccccgtccgccaggctgccgaattggccaagcgcgggcgtgccaatttcaacgagctgaagcggtgagtctccctagccaatctaatcaattaacggtgataattaatccctccagcagtacgccaaaattcatcccgcgcgttgaggacaccgaccagattaattatactgtgctgaacaaccgcctctgttataacgggcatattttggcggacacgcgtttcaacgcttaa

SEQ ID NO: 55596 - DNA, 1910 bp, Heterodera glycines
cgctaaattacaaaatttttttccgtcggcgcctatcgcgactgctgtaccccatcccctgcccattcctcaattttttcggaaaaatacgccgcaaaaaaatccttaaaaatctgattttttgatcccgattgaactgaaaataatttacaaattgcatatgttttccacaaaattgctaaaatccattttcggaaatgtataaatttctcatttctaagccggaattgctcagaaaaatagttggcggcgagaaatatgttgctaatgcttgattttgttgaaaaatgctatttaaagttttggaagcgtgttttaaaaaatgtccttatttttgatctaaaatcttattattgcccagcgatgttcttatttcgggaaattttcaagggtaaccctggcttaaagggtggagggttttaaaaagcagaatatgaaaaatgctatttgggcacttttgccgtttacgaaaaaattccaaaaggggggacccttttatagggatttggaatttcacaacttttgacaaaaacaattgcaaaacaaaagtccctccctttggattttttcgggaggggggggggggggataaacagcaaaagtgccattaattattatgagttccgcttaatctatgtttttcagcttggtgttaaacttgagcaattgtacaagtcttggtcttctcgagacaaacattttgccagattcttgacggaaagacgagaaatgttgcagggcattcgcattttgcggcaagaacccgtcgagacgcttttcgcattcatttgctcagcaaacaacaatgttccgagaatatcaagtcagtgaaataaaataaagagtcaatttgtggtgactctgtttattcatagggtttttaatttcgctgatactgaacacgaaaagtacattcattttgaccaaatttaaaaaaaaaaaccaaataattaatgaaaaaaggtaatagtcaaaattgaattttcgactttttgttctaattcggtaaaaaaaatttcgaagaagatgtaaaacaaactgcaattaagttcgcgatttaaattttaattcattaccatcggataaaaaaaagtgtagctaaaaaaattgagtcgccaacaaaatttggctactttatatttaccaaaaatattaattctagaaagaggccgagaacctcgagcagttctattagttgtaattcagaaatggtcgaaaaactttgtcaattttatggcgattctgtcgaggtgaacgctcaacgtttttacgactttccgtcagttactcaaatggccgcacatttaaattgtatggaacaaactctcagagatgccggtcagcatttaatttattaataaccgcagctattaaatactcaaaatttcacaggttttggttaccgggcgaaaagcattgtgaaaacggtggaaatgttagctgatggtaaattgggaaattctgcctacctttggctccattctctgcgaaatttgccataccatgaggccaaattggcacttatgaaattgccgggggttggccctaaggttttcattcaaattcgactatttttaacgcattaaaacttcccaggttgccgattgcatttgcttaatggccttggacaaacatcaggtggtcccggttgatcgtcacgtgttcaatttggccactgagatttacacaccgacatttttgaagggttgtaaaacattatccactgcgatctacggccaaattggttggttttggatggaagtgtaaggatggcgaggggccggtcccttcctttcgccctcccgttccaaccgaatcgttgatttcctttttttaatttaaaggtgcctttttcgttgatcttcacggcgattatgccgggtgggctcactccgttttgtttagcacgc

SEQ ID NO: 55597 - DNA, 900 bp, Heterodera glycines
atgccgttcaattgcgaatttgccggcggagtttgtgccgagatcggtcaagtgctcgccgtttggctcttccaatggatgttcatcgatttcgcctttgtcggcaccgctctgttccttctcctccttttgcatcgttcgctttggcctttggctctgttgtacttctgttggtactgttacgacttcaacacaccgaaaaaaggctcacggcatttccgttggcttcgaaatttgcacttgtggaaaagtgtggccgaatattttactgtggaaacggtcaaaacggcggaaattcccccggacaggaattacattttctcgtcagttcatacaaattcaaattcatccgatattaattagaaaccaattcgaaaatcttttccagtgctcacccccacggcgttttaagcatttcctcggcgttggcctttggcaccaatggcaccgacttccaaagactgtttcccggcatcgaatggcgcgtggccaccctccccatgaattttttattcccttttcgacgtgattttctgatcgcattgggttgtcagaatattacgtcctatgcttatctttatatttcaggagttatctcaagctccgccgcttcgattggccattcattgagtttggcgccgggagggaacgccgttggcattgtgccgggaggggtcgcggaaatttgcttttcccagatggacgaaggactgcacaagctcaaattggcaaatcgcaaagtgaatgactagtgagcctttcattctgtacagttttacttttcagggatttgtgaagttggccatcaaaaatggcgccgatttggtgcccgtttatcattttggagagcaacaactgatgcgacttgccattctgcccgcccttttggacaacattcaa

SEQ ID NO: 55598 - DNA, 899 bp, Heterodera glycines
tcttctcctggtttttcccacgaaaaggaccgtcgcgaagacccgcagactttgcgaatgttcagcacaattcaggtgagtcattttctactgctttgtccatgccttctttgactgtcctcccttcttctttttttggtgttcaccgcctgtttcgccggcttcgcccacggagcaaatgacgtcagcaattccatttcgccgttggtggcactcctttccgtgtggcacaatggcagcgtggaacagagcgaacagacgcccatttggctgcttcttttcggcgtttccgccatttgcgcgggcctttggcttctcgggcacagaggtgaagccaaagaacgaacgaatgaatcaatgaatattcggccggttcaattaaacaatattcccttttaagtgatcgaaacggttggccaaaagctgtcccatgtgaattcgtgcaggtaatccctcccctctctccccccatttggtcataaattcgcaaattcccctttcagtggcttcacaatcgaattcggcgctgctgtcaccgctctgttggcctccaaacttgggcttcccatctcaacaacgcactgtttggtgggcagtgtcgtcgccgtgggctccattaaatcgggcgaaggcatcaattggcgcatttttgcctccatcgccacttcctgggtagttatttgtgatggggcgggaattcttgaaaccttacttaagaaagaaataccaatggactaaatttgtttggttttaaatatctaattaattaattagtttgaattttaatccccttaattgcttcgtttccttttcattttgtccattttcagctggtcactctccccgtgtctgctgctgtttccgccgctttgatgttcattatgaagacttttcttctg

SEQ ID NO: 55599 - DNA, 681 bp, Heterodera glycines
  unsure (1)..(681): unsure at all n locations
tccccctctccctcatcgttcgtcccaactttttccgctccttttgatggtgccgccctctcccttttccaaaatgccttcctttgggctttgatcgtcggctttctgctcgcttttgtgctcggattcggaatgggtgcaaatgacgtggtgagtcatcatcagtcattgggggagggcctcaaaaaaggggaaaacggcaaaaatttaaggcaaatgcattcggcacttcggtgggctcaaatgttttgacattgcgaaacgctttcattttggccacgattatggaaacgcttggcgctgttcttgttggtgggcgagaaacaaatcattctgaaattaattaaatacatttgcaggatataacgtgacagatgcgatgcgcaaagaagtggtcaacattgacttgtacatggaccaccccaaccaatttttgctagggcaattggccattctcgggggtaatcacaaagtgccaaaggaaagcaaaggaaaaacgcagccattcattgctaattttgggctaatgagtgccttttctttgctctactaattaatttcataaagagtgattctgtagtaatttacgccttccaacgccaattttttcaggcggnaagtgtttggctgctgacagccactttgctccgtctgcccgtctccaccactcacagcattgtc

SEQ ID NO: 55600 - DNA, 979 bp, Heterodera glycines
atgggccaatggcgtcagctggaatttgacttccgcaccggacagccggacattgagcaaattgtggccggatgggacccggcggacaatgggcttcaaatgaaaatctcgctcagagcaggtggccaattataacaaatttcgtccatttgtcccttttttcgacattttgtcatgccaaatggggccagctaactcgaattgcttagtcatagttctatctagtcgagaaatttcttgggttttgggattctcggctttctgcaattagcccattttgatactttgtcgtgcgatgtcgaccatttgtccaatttattaaaaaaaaatttggttaaaaggttcataaaaacaaggatatttttcaccttgtacagaattaaaaagtattttctcgatagtctttcattttttgttaccccaatttaaaccgtaacccaatgtgttaggctaccgtatcgagttgacactgtcacatcaggcgaacattgagcaagcagaaaaaagtgccgaaacggatgacaacatggacacatccaatgataataataaagtatttgtccatcaacaaaagcggggcatacgacgagaaatgagtgtttccattgcatcccaacggcctttaaacgatttgttttggcacagggtaattaattaataaattaaaattagagtattcaacaactaatcaatgctaattgcttttaggtgttggtcgaagtatttcgtggtgaaattcgtttttctgtcgaccgtttgaatgcatttcaaccactttcatttccattcgcaacatccacgaaatttagcattggaggcgatgaaaagtaaaaccataaaaatcatttttaaaaatttattataaattttattttcagaggcaatggctttgtcggatgcattggcaacttccaaattgatcaaatgctgcatgattggacccagcaattagcacagaaggacagggatgaagatggta

SEQ ID NO: 55601 - DNA, 981 bp, Heterodera glycines
atcatggttccgatccaaatcaatggacacaaaatcgaattggcagccgactcatgctcacatctcacaatcattcaaaggccgatgtggttaagtctcggagggccaaaattgattaaaagtggtaaaattgtgggatctttttcaggccataagctttgtttgctaggccaattcaaatgttcggttgagtttaaaggtgttcagattgctccttttgaacaggcaactgaacaaccaatcgcaacgacgttgagttccgaacattttcaaccgaaaactttggcaattgcaattcccgatgaacctcaagggctggcggaacagcttaaaaatgcttttccccaagttttcgcccccggaattggcagatgttcaaagatgaaagccattctgcatctgaagcctgatgcatctcccattttctgtcgagcacgtccagtgccacatgatgttcaagacgcagtggacaaggaattggatcggttgctcgaaatggatgccatcagaccagtcgatttctcacgttgggctgcacccgtgctcgacgttcgtaataaaaatggagcagtaagaatctgcattgatttttcgacgggtctttatgatgctctagagctaaaggcaccccctgccccgcacagatgacatttttcatgcattgcgcggctcgaaaattttctctcagctggacttccgtgatgcatatttgcagttggaattggacgacaaatcaaaaactcttgtgggaataaacactcacaggggtcttttccaatttcagcgtcttccgtttcgagttaaatcagctccatcgatttttcaaaagaccatggaccagttgacagccggaattaatggtgtgttcacatatctcgacgatgtcatcatcgcttcaaggaacgaaaatgagtaactcggttcttgctttgaactatggtaaacgcagtaagccaagttggttggaaggcaaaattttaa

SEQ ID NO: 55602 - DNA, 1276 bp, Heterodera glycines
atgggacttaagcatcgaatggatgcaaaaattgatgccagtggaaacgttaaaagattttcgtgggatgaaagcagagagcttgttctgtcgacaattttggaccctcgtttcaaactttcttttttgaatgcagaaaagcatgatcgatataaaatttggcttacaaatgaagcagagaatgtccaaaacggctcaagtgaattccatgatcttttctcccgatgtgaacaaaatattgccacagaatgcggattagacattactgcgcaaccgttacctagtccagaaacattgaacaaccgccaaaaagcggaagtcataattattaaattttcaaaatttatttgtttttaattaaaggttgaagtcaatgattatttgcatgacaaaaaaattccaatcgactctgacccatacgggtactggacgggggacaatgctgtaaaatggccccttcttacatgtcttgcgcatcgttttctttccgcgccggcgacatctgcagaaagtgagcgcctatttagcgctgcaggattaataattaatgatctgagaaaaagattgactccggaaaatgcagagattttgttgtttttgcatcacaacctcaaaatttatgattttgactattcgtaaaattttttgaaaaaaatttcgcttttcgcatttcgcttttcgcattttcgcatattttggcttttcgcatttcgcttttttttcatttcgcatattttggcttttcgtatttcgcttttttttcatttcgcatttttcagtttcgcaaatttcgcttttcgcatttcgctttttatttttcaatttggcccatccctggtatagaggcattaatatcatttttttatcatagaaaattgttacttggcaccgctccatgcatcagatgtgaatagaagccattttcatacttctaattaccttttggttttttactcaactaaaatcgctttatgtttattatagaacaagataagaatttttaaatttagaattgttataaaatatataaatttaatctttaacgcaataccatagaatgcgattaagataattttacttaaaattaaagtaacattcttctaaaactgtagagacatttgggtcgattatatttttaattttgaggttgcatcaacagagtcattaaaaccttccaatattaacagaacaggtgggatatcttattatcttctaaaatattattttcagccaaaaaatgcatatatctatgagtatataattatgtttctgacca

SEQ ID NO: 55603 - DNA, 1027 bp, Heterodera glycines
  unsure (1)..(1027): unsure at all n locations
atgtgggaatggtcggtgattttcaccgactgcgctgtaaatgctgttttggatttatcattccttcacctttgcaatttaaggtacaacaacatcggcagcgaacggcagatgatccaaagaaggggtaaaatgggcgagggattggccagggcatgggaccgatttgaaggagcatgagagcgtttacaatcatagtgggactgatcacgaggcattaaatgattgtgaggggctgataaagcacatggaagcaatgagaagcactgatcatatggattggattgaatgaaaaatattttgctgattgtggtagctatgttagcatcgcgcgagcattatcatcgacattttgcccaacacattatttataggccgtgcccggcacaagcacagtctgtccattctgttggcactggacaccggcattgagcagcgggagttcagcaacatgcgcaaggaggccatggcaagtgaaagagcggattatcagtaaggctgggaccgaaggccttaaaatttagcgaaagtccagtccaaaaaccatgaatccggccccacatctggcttggatgttgatttttaaagtatattttatccaaatccaacagatgatgcgctgcattgaggacatgcaagagcaggatgagcagacactgcgcagatcggtgggtggcatntggcaattcgaganaatttccaaataaaaaaaatattcatttactataataggtgtcaattttttttacagatcgaggaaaaggccattgaattggccgaacttcgcaacgacgagaaaatgaaggaggagaacaaacgggcccagctgatgggcagacggtgtgtttgttttatgtcattgtgccatttttaatttatgattattttcagtttcgatttgagatgcgcctgtggcacagtgatttgctgcagtgaccgcgtccgatcggtgatgggcactctgtttgtgtgctgcgatccgaaagtgtggaagcgatcgaaacacacgctgacacgggccccaacg

SEQ ID NO: 55604 - DNA, 78 bp, Heterodera glycines
acttggacatttcgtgggtcagcggttgaagcaaagaaggaagcaaatgggaaagagaaaaattgggcttacaattag

SEQ ID NO: 55605 - DNA, 1562 bp, Heterodera glycines
atgttttttctaaaactatttctgttgtctttcttggtaattgggggtcagtgttgttgttgcttgtcgaaagaagaaaagcagcagatggatgcctcccgaagggttgttgaagaagtaattaaagatataattaggttaactaatgaggccaaagacttttcattttctgctcataataccatggttgaagctcaaattattaaggataggaattcgggaaaatctgaaatcatattttggcatgaaaaactattaaacggagttagaaaaatacattcacaatttgataaaataaaaaatgaggaaaagaatataaaaatattaaaaaaggcatggaaaaatgtctagacagaaaggacccagtgatgtgccaagaattagccgaagatgccaaacaatcaatagaaatagctaaaaaatataggcatgaaattggacagacttatcgtaactcttattcacagccagatttaggaattggagatatggccaataaaataaaagaaataatgcgagaaaatcaaataaaatttgaaaagccaagaccctcagcagaatttagagacgaattcattgcatataaaatataataaaaatatataaaagaaaaacagaaaaataaaaaatagaaaagctaattccattttgttggaagctgctaaaagagagacagagagagcatggcgagatgtcgttgtgttatcggatgatgtaagcgattttgccaagtcttctcgagaaactcttaatcgtgcaataaaatcaagagaaaaagctccttacgctaatggtgttcgggaattgtatcttaaaatgtccgattcaatttgggaaattttcaaattcctggaacaaatcaatttggagtcagaaaaagctgaatctgcgtggcgtgagttcgaaagatgcaaaacttttgaccaggcaacaaagcttgaggaacaatctcaaaattctttaacagaagcccgaagattacattttgagtcccgaagggtgcaaagccaaatgttaaattatgaaaataggctccaaacaattgtttgggagcatatgggtatataagaacataaaaactaaaagggcaacactcaaaatggaagggtgttctttaattgagtcatttcgtcatgaagacttaaaatttggctttacaaaatataaaactaaattttattttaaaaatcctttcataattaatgctgaagaaaattttaaagatatcctcacatcgttaattaaagaaaaatataaaaatgagcaaggcaaattcagaagcattttgaagctttcttttggttttgaatcattttattgccctcttcgataccctagcgaaaacacggccgaggctttgttccaacacgtattattaaaagaagaacaatattcacttttttatcctttggatggtgttataacactagaagtaattataatcccagatgtctacagtaattcaagaaattgattttattaagaataatttaacaaaaaattggaaaatagccgggaatatacttaaacgatcaaataatcttgaaatctttgcaaataaa

SEQ ID NO: 55606 - DNA, 684 bp, Heterodera glycines
atgtactcgttcaaaaaatattttgaaactgctcttgagaaggaagactttttctggcctaagaacagagctgaggttgaagcgatgttgattgaatcatcccaatataaagtggccatacaccgggattatgaaagcccgttttccggctacatagaaatgcacgaacacacgtctgcgttttgttttaccatggttgagcgagatatgcgaattttttatgactcaggggcgggtactcctatgggtagatacacgttggtactacacggcatcgtacaggggaactatttgggaaatgattcgggattgggactccctattttttttcttctggttttactgggagggaaggagccagacaaaccgcaacggtttttttaggagtcgtctttttctggcaaaggtccaaatgctaaaggtcatggcattagcttggggaaaagaactgttgacttccccaattgaagtactactaaatgttttctttaatcgtatggacaggtctttaacgattaaaaatctatatgtcattattattacagagaattgcttggctcttggtcgttgctctatcgggtccctccaagtctctttgatatttctcgtcgaattgttgcagaaaaaatgatggaagaatttttaaaactgccatcacactttcgaattgctttttataataaa

SEQ ID NO: 55607 - DNA, 1160 bp, Heterodera glycines
gaatgcgatgtgaaagcggaattgaaacggaacagagcgatgaagaggttctttgacgctgtgccggataagggtccaataaatccgagggatgcttacgcgggaggacggacaatgcctttttgtttgtatgcaaaagcaaccgaagaagttgagatttcgatgttcgatatcataagcttgtatccgtttgtgaattatggtaaaaaatctgcttgcatttttgaaattttccttcgcttaagacaccccttatccggttggggtccctaaaattgtggtgagcagggaattcgatgtgaattggacggtgcccgacgatgtgccctatgatggtctgctaaaggtgaaggtcatccccccaaaggaactgctttatcctctcctccctatgcatattgataatatgcttctcttccccaattgttatacatgtgcgaaaaaaacgaagaaagagtttgtgttggctaaggatgtcaaaaaatgtaaccatcggccagagcggagagctttgattggtacattcacctcgatagaactgcggaaatccttggcgttgggatatagagtaataggcttctatcgggcctatcactttgagcaatttgacagtcagctgttcaaaggatatgtgcgcatgttcttgaaaataaaggtggaggcgtcgggctggccctcggaggtgagaaatgaggaggaaaaaagagcattcatcgaaatgtacaaggccaagtacaacatttggttggaatatgataaaatggtgtttaaccctgggctacgtatgatcgctaaattggtgagaaaaacaaataaaattcaaaaaacaaataaatattaagggattgaacagtttatgggggaaattttcaatgaggaacacactttctgtgactgagattgttaataatttggaaagatggacggagctcatcaaagatgacacgattgagtttaaaagaccgattgagataaatgagggtgtgatgagagcaatataccagaagaagcaagagtttataaaggagcataaagtttcgaacataattttgtcattgtggaccacgagtgctgccagggtaaagctgtacgagtatatggagcaggtctacagggaggaggggtctaagctattgtattgtgacacaggtggacattag

SEQ ID NO: 55608 - DNA, 386 bp, Heterodera glycines
atgctttttgatctgatcagcagcggtcgatcacttccactgggcccaaccaacgaaagggttttcttctccaacgcattacggtaagtgttttacttgggttcagcatactgtaacagaatcactacagcataaatcaaaaaatatatttttgttttagtaaccacaaaaacattttacttcaacttcgcaccgtcccagcgccaatgttagggttgaaaaagcgtcggccaaaatttggacgaattgttggcaaaaaatacagaaattgtagtttattttcaatataattttcactcattttttatattttgtttaggcttcttctcgcctgttcagtgcatgttgtccttcagagaaggctccatttttatggacaattacaa

SEQ ID NO: 55609 - DNA, 348 bp, Heterodera glycines
atgacggcctacaatgagtacagcaaacatcgtctgccgaaaaagccaacagacttcgactttgccaagacgccggagatgcctgaaaagcttgtttgcatagcctcagtcagtgtggatcaaccggtatttgtgcttgcggatgtgactgagttgtagaccatgctagactcagtcacaactagagatcggaaatttcaaatttgctgatcctgttgcaggatttgaattcaaaattttttacaggacaggatccggcaggattaatcctgcaaatcctgcatttaaaatctgcaggatcctgcgcaggattacggattttaggaaatttcaaaaaattctgtatta

SEQ ID NO: 55610 - DNA, 250 bp, Heterodera glycines
atgattgaagacataaccggacggagccatgttaaggaaatttgcttttacagtaagaaattttggaataattaaatttaaataagtaatttagctaaagatggtggggatagaaaaattggacgatcacgaaaagcaatggctatagtgcttatgtatggtttgatgaatggaaaaagtcttgagttatttttatgttcataagttgtatttgtagaagctgttgttgggccttcagcaagccaataaa

SEQ ID NO: 55611 - DNA, 700 bp, Heterodera glycines
ggtcgacgatgttcaagcccgttgtgatgagctcaatttgcaatttgtgcaccgttttggggtgatgccggaccagcatttggtgaagtaagtttggcggattttttaaaatttattattcaatttagaaaagatatttttatttgatcatttatttttaaaattaaggttttgcccgaagaagttcgacatgctgtatgtttaaacaacaaccataaatttgatttttttctcaagcaaattattagaaattgaacaattaataaagtgctcaaaattttttccagtttttttggttgcaaaattttagttttttttaactttttaaggaattaagttgggagcagtgctcttccccccccccccctctctcgccaaaaaaaaaatttcaaaaaatcttattttctaattttttattaaataaatttaaagactggtgggggggggggggggggtgagaatgtcatgcaccgaatttcgtcccaatttttaaacacagccttggaatcgatttgctggttggccttggattgagcatggactatggcaaattggcaatcacccacaagggcaaaatggccaaatggttgaccgaggaggaaattcaaatcgaaatggaggacagctactgaagaaacgaaagaatgaatgaacaaaaagtgatcggaattttgtgatcagagaaacagaaatcaaacaa

SEQ ID NO: 55612 - DNA, 196 bp, Heterodera glycines
tacccagttgcggatgcgtcaatgaaagaattagacgtgttgatgcagccattgttgtcggacacgcaaaaggcagtggaagggatttgaaagcgaatgccacggatctcaaacaacaattctctcatcacttttgtgtgtcattatttacgaaaaagtcagacctcctaaatcctgaagattttaaagtattaaa

SEQ ID NO: 55613 - DNA, 620 bp, Heterodera glycines
atggcacaaaaagccgttcattcaattcaggagactcagtctgtcttgaattatggaggagtggtaagacatcatggttggaaggtaaaattgtgagtggtagtggtttgatttggaaaatcgaaattccaatccttggaattaccgtaacgcgtcacgtcaatcaaatgcgttcattttccccttacatttcaagtaagattgtgtccgatcagattcaagccgctccgcaacaacacattcctccaatggcgccaattcaaattgatcagacacctgtccgtgatcaaactcctgtccgtgaccgcacacccgaaccagtcaaatctcctcgtccgcagcgacagcgcaagaagccaattcgctattcgcccggctaattgccacggacggtctttccaaaagagggagatgttggatgtgttgatatttaatattattaagtttcgacacgaatacttttattgattagttatttgttgatgggtcctctcccatcgactcattctttgcatttgtgttattttgcaattcggtgtttatttttcggactttctaatttgactccgtcgttattttattattattttgtgattctaattttattgtttattcattta

SEQ ID NO: 55614 - DNA, 647 bp, Heterodera glycines
atggaagtaagcggacgaattgaagtggagcctcaagagacttggctgaatttgcggctaaaatcagtgcgtaaatgatttattttagaaagcgaattaattaattaacttaaaatagctgaccccaataatcgaaattattagtctaaattagggttaatccccgacccaatgcgggaaatttcgaatctcattcattgcactccaaagactttcttttttgttttagaaaatttcgttatttttttcgacttttttttttggaaatttcctccttgatgagggtggttgctccccgacatttttttaaattactccagccatccctgaattttatccttctaaaagatatcttttcaaatattgctttatctcaggtgagcacggaggatttgaagaaggagttgggtcgagtgaaggatgatcaacgtgagaaaaaacaattcaaattattcggcaaaattaaaaaagccaaaaaatttccaggccaaaatgcttaccaggacacgctggccgcattggtgtacgacgtgaatgcaacagcggaagtgcttcgccgcggttcattgaagcgcaaaaagcccaaaagtcacgaggtgcggtttttgtcagcgcgatattcgtgcacagatagacatgtacagtaa

SEQ ID NO: 55615 - DNA, 575 bp, Heterodera glycines
ccataagtaaaaaatccaaatttttaacaatttgtgttggacatggttatgggtttatccgtgccaccacttcttccgccagctatcaaattcaatttactgttcatgcgccaacggaaattgtgccatttgaatatgtgaacgaacggaccaacgaaaagctgacattggagaaagcagaaaacaatgatgaaagtatggatgaagaagatgatgatgaatgggatgagcgatggataatgaagcgatgtcaaattggggagactacggccgcgttaaaccaaaattcgggcaatttgaacaatgtcagctttacgttttatggaaattgcattgggtgagttgcaacagcttttgctttaataatcaaattaaaaatttcgcttaatttaggccattgtcgccaccggcagaagacgaagaagcgggacaaagcgccggaaaagagtcgacgtattgtgacatggatggattaatttggaaatgatcgatcattatgtattatgtgatgaaatgaattttatgaaggaaattcgcaaatatctacattcatatatatgtatgtgtacatgtaa

SEQ ID NO: 55616 - DNA, 1295 bp, Heterodera glycines
attcatcgaccactccgttttcgcgtttatccgtgccaataaacaaatttgggacaaaggcaccaatttgaatttgtatgtgccttattcccataatgccaagagtgtgcagcaaatttggaatgattttgttcgtgaaatttggcccatttttgcgccaaagattcaccatttgaactttgccgatagccatcatttggacaatttgcgtcgccgcacttcgccgacaattctcaccgatctcaatcagctgaattcaatcaattccaatcgtttgttgcccgatgcaattgccgatgatgggccaaatgcaactgctggccaagcgctgtccaaatggttgaacactccgacaaaaaatggaaagccaaagcaattgagttgtgattatacgtcaaaaaccaaaagaatgatcaccaatttcaaagaggtgtggccacattttcaataaaatattcggattaattgccatttatttgcttttcgtttcccattttataggcatttctccgtgccaactcttcttcggccagctacgaaattcgaattaaatattttaaatcaaagcaaattggcccatttgaattggtgaatgaacggaccaacgaaaagctgacattggccaaagaaaccgaatataaatggtacaaaaaatggataatgaaacgatgccaaattgggcaaacggcaacggttagatgggacgacaaaaagacgaacaaattgaacaatgtcagacttcatcttcattatcaatttgggtgagtggcaacaacattttcttttgtttaaagtaattcaaattgaccttaattaggccattgtctccaccagcagaagcgggccaaattaacgcaaaaaatcgtctgaaaatgaatcctgggcccagcggacagcaacagaagaaaaagtgaaagaattattaggaatgattgatcgatagttatgaactgatcggataattgccccttatatttatttgttgcttctttcgcttgaatacacatttagttaattaattgtttgcatttttggacttttacgcagatttttaaacctgaaaatcaccactgattattctaagctcaaataattaaaaaagttaagttcagggtcataatgtttacaccccaattattgtctgtttttaatagaattctaagctcatgaaatttttacctcctttttcaatttgtccctttttttgcctttttccttttaggtgtctttttgtcagtttttctgcattgaaatccgttccctaatcatttcttctgacattacccggtaataaa

SEQ ID NO: 55617 - DNA, 314 bp, Heterodera glycines
atgctaacattgacgaaagaaaacagtgatgaaaatgtggatgaagaaaacgataatggatgggaagagcgctggataatgaagcgatgtcaaattgggaagacaattcaatgggatgacaaaaagacgaataatttgagtaaaatcggttttacgctttatgaatttgggtgagtgccaacaccattttctttttttcaattaattcaaattgcacttcatttagtccattgtctccaccaaaagcgggccaaatgaacgcaaaaaatcgtctgaaaatgaatgccgggcccagcggagagcagaagaaatga

SEQ ID NO: 55618 - DNA, 1770 bp, Heterodera glycines
atgttaaatcatgaagtgagtttatgaatttccaaaaattagcttaaatttcacgcgcttaaaaaatgaaaatttataaatgttttttatgacgcgatgattttttggcgacatgttcaataaatttcaaaaattttaataaataaatctgtcgaaaaataatccacccgtctccatttatcccttcttatcttctaatcccccttttctgaggaggttgaaaaattaattcgagaaaatagtaagtcgtattatagcattttgatgctgcttagtcactattttctaataattttgaccaaaaaaccaccttttgtaattttatttatatttttggtacaatattttgttttttgtacaaatttcttacatacagttaatcgttggattaattttgacatttggaaaacgacaaagtcaccgcgtgaccatgaaaatgaacagacggtaaggaaattttaaactttcaaattctaatattaattaattatcccgcatttcagttggatttgtagcgacatttggatggacactctcccgttctttgaccatgcccaactcggcctcaaattggcacttctttcgccacggttcaacgcgttggtcgacaaacattttgatggcaaatcagaattgacacttttgggaccaatcgcaatttgcaaggacattgtaacagaagtgccaaaattatgtgtgtttattggtgccaattctgttgaatttccattgcccgaccgtccgttgcccaacaaaattcgctttaacgacattcggatcgtgtaattcaaaactttgttaaaatcattttgattgttgtacaagtattattttcagttacattaaccattccgtcctcacatttctccgtgccaaccagcaaatttgggacaaagccatcagtttggatttgtatgtgacttccgcccataatgccaagaaagtacagcaaatttcgaatgattttgcccgtgaaatttggcccatttttgcgccaaacattcgccatttgaacgtttacgatgttcaacattaccacaaattgcgtcgtcacatttcaccaacaattctcattgatcttgatcagttgaattcaatcaattccaatcatttgttgcccggtgcaattgccgatgatggaccaaatgcaactgctggccaagcgctgtccaaatggttgcacactccgacaaaaaatagccaacccaagcgattgagttgctgtgaatatgcgcatacctcagaaaccaaaggatgggtcaacagtttcaaagaggtgtgacccaatttcgtaaatttggaaaaattgcatttaatttcggtttccatttgttcaggcatttctctgtgccaccgtttcttctgccagctatttaattcgccttgcgctttatgaatcaacggaaattgagccatttgaattgataaacgaacggaccaacgaaatgctgacattggagaaagaagaaaacaatgatgaaaatgtggatgaagaatacggttataaatggcacgagcgatggctaatgaagcgatgtcaaattgggaagacaattcaatgggaggacaaaaagacggacaatttgaacaatgtcatcattgcgttttatggatttgggtgagtggcaactgcttttggcatttttaaactgttcaaaagatttaaattgcgcttcatttaggccattgttgcaaccacagccaggccaaattaacgcaaaagatcttcttgaaatgaatcccgggcccagcggacagccgaagaaatga

SEQ ID NO: 55619 - DNA, 117 bp, Heterodera glycines
tcttcgcatgctcccttttgcgaaatttttgcttttaaatggttatttcttttggtactgaagtgtccattttcgctgggactcagttgtcccagtgcttagatggcattggttcga

SEQ ID NO: 55620 - DNA, 230 bp, Heterodera glycines
atgggagagaaacgagaggaaaagggagaggaaaaagagcagcaaaagagagaggaaacagggaaaatgggagagaaacgagaggaaatgagagagagaggaggaaaagaacagcaaaaggaaccgcagaggaaaaagaagcaagagacgacaacaacaaaagcagagaagaacacccgcgggcaaaacggagggccaacggaaggccaaaaagggccaaattcaaaaat

SEQ ID NO: 55621 - DNA, 712 bp, Heterodera glycines
atgttggacgaactgtcgcaacagtgccgaacggagcgacaaatgccgaaaaaggacaaactgccggagaaggaagtgagcaaagagcaaacgacaacaattgtattcaatttccagcaaacaaagtctcccgctcggaatgaatcgcccgacttggacgagttggaagccgtgcaaatggcactggaaaaccgcgtccctcccgtggcattccgtcttcagcaaatccaaaaccgactgaatgcaatctcttcccaactctcaacgtcggcaagagaccgttaccagcagcgcattcaattatttgtgaacgactttaatgagtgcgcgaaaatggtgaaagcgaagaaacgagcgatggaagaacgattagcggatcagacgaggataagcggacagatggaggagttggaattctggtgcgacgaaacggaggcactcgtcgtaagaacggcacaaaccgaaccaaacgcccaattcactgtgccatttgtaggaatttgatgagccattgggcgctttgaacatggcgaaattggagaaacataccgaaaaagttcgggaacggcacgaatccgtcgatgccaaaatgaattctttccgaaatttggacaaaatgaaggacaaattcgtcgcactggacaatgttgagcaacaggcaaagcatgaagttcgcagaagtgtggccctattggggaaaaggatgagcgat

SEQ ID NO: 55622 - DNA, 471 bp, Heterodera glycines
atgaccaaacagcacgaggacaacactttgggactgcggtgtcgcctgaagatgaacgatgcccagttgcagacgctgggcaaaaccattcagggcaaggtatcaaccaaagtgatggccaaaaatgccaatatttgcaaaactctgggacctcgggagagggatgcaatttttaacgctaagtctgacacaaacccttttaaatatttcaattaatttaggacgatgaaatcaaagagttaaaagcgatgtgcgaggaattgatgcagaaaaaagggataatggacgatgatgaagacgaggaagaggaggacgacgacggggaaatggacggcgaatagaacaaattttaatgaatgaccgacaaaatacccccatgattgtatgccctacatttttctacattaccctgtacaattcacttattatgggattgattttattatggctgcctattgatgataagcctaa

SEQ ID NO: 55623 - DNA, 844 bp, Heterodera glycines
ctacattgaccattctgtgctcacatttatccgttcaaacaagccaatttgggacagaatgggcaccaaatttgagttttttgcgaaaagcattcgccagttgggctttaccagtggcgatgcctttgacaatttgcgtcgtctgatctcgccgacaattctcactggtcttgaccaattgaattcaattgattccaatgaactgttccccgatggaattgctgacgatggaccaaatgcaactgctggccaagctttggtcaaatggcttcacactccgagcaaaaatggccaaccgaagcgattgtatcgcaataattattttggtccacagaatctcgaatgggtcaacaacttcaaagaggtgtgtctagccatattttctataaattgtttttgtttttccaaatttgtttagacatttatcagtgccaccacttctgtcagttacaatattcaactttattttcatgtgaacacaattccaactgaaccatttgaattggtgaacaaacggacgaatgaaaagctgacactgaaacaggagatcgacgaattcgacgtaaatgtgtataattggctgttgcaacggtgcccaattggggagacggcgagggtgccagcaattaaatggggagacagcttaaatccgagtgccaatttgaacagtatcagatttgatctgtggagtttcgataaatccattgagtgagcagcagcaatagcatttgaattttatcgaaaaataaaatatttaattaattttaggccattgtcgccaccaacggaagaagaaaaagaagaagaagaagcggataaaagcaacggaaatgtcgtctgctga

SEQ ID NO: 55624 - DNA, 1368 bp, Heterodera glycines
ctactgtgtcacagtgaattgtcatgacgaacgtgctactgtagcgaagactttagaatacaacattacaaaagactcaaaagatgggttgtggacgaccttttcagaaggaggaaaatcatttgaaagggttctatttgactttaatgaagaaaagtgcaaggactattcaatttttatcaaaacaaaaaaactggaaattgagaacaaaaaactgctggaaaacgaacattattcacttcttggcatcttagcaaaggtaaattaaaattctaaaattagatgtaataaaaaaatgtatttgaaaataaatgaataagtaattgtaaaaaggtaagcattttataatatttattcattttttatttaaaaatatttgacataaggaatataatattgggaaaaagaattttataaaaattcatttttagaggggcggcatattttaaaaaagctaattagtgagagattttcttgatcattttcaggattatgttcacgtgaataaaaaagccgagtcaaacgggaggacagaattcaacataacttgcaaatatttttttgtcaattttacgccggtgctcacgcgaaaggaggaattttatgagattaaagtgtactgtaatgataaacagcaacaaaatttggtttatcatagtgatatccaatgtggcaaagacggatgccaacgaattattttggcggatgaacaaaaatgccaaacaaatgtctatgacgttcaagtgtggcgctggagcgagcgatggacgaggtaatcgggtcagagttcgggttcaaaatgacggtttttcagggactctattttagatgggcaggacagacaggaatttaggagggtgaaggggctgcatttaggaaaaaagacacctaggtatataaaaagaaaaattttaaacaaaaatgagtaaaatacaaaaaatatatatatatttaattttaaattttagagagaaacttgtcttactgagccaagaagcacatatttttcagacattcatataaatgacggtggaatgctagaaattcaggaaaatagtgacggttttcaaacattggtgaagaaaaactaagacagaagtagatattatatacattctttctatttgtcatggtgtagtattattatctttttcacaattgttgctattttttttttgaaaaaatttccatttttggttttaaggagatttaattgaatttaaaattatacaaagttaaaataatattgtgatggaaaaggtcgaaatttggttaattatttctatcaatatttattttaaaaaaaattttaattttgaatttgaatttttgtggctaattttcggatacttagtgctctaaaatgaa

SEQ ID NO: 55625 - DNA, 1670 bp, Heterodera glycines
ggtctccgaccgataacggaagagtttcgcaaagaatgccaaatcgcatgggaccatttcggctcggaaggccggcgcgtgttcgcatttgcgaagaaactcttccaagcccctcagaacaccaaattcacggcacaatcggacaattatccccaggacggactcacttttttgggaatggccgccattacggacccaccgaggcaaatcaccactaaccaaacaccaaaagaccaattaacttttactaattaacggtgggaattattaacagaaatgaaacagcagcggccattcagcagtgtaaagacgcgggtaaaaagagaagaaaaaagcaatggaatgataagctaagcgaaaattcaggcattaaagtgttcatgatcacgggtaaccattcgatgagagaaatggcattttaaaatcgaaaaaccaaaaaggcgatcacccgacggcggccagtgctgtggcttcccaaattggacttttcggtctacaaaatgatatggtaatggatattaaaaagcaattaaaaacgattagtccgccaattattccatttccaatcgaaggtaaagtcgcgcggaaatcaacaggtgaagctgagtctcgacctcagcacaaaagtcgattgggccattgtgcttggcgagtcgttggcacaaatgagccccgctgagtgggaccgactgttggcacatcgatacatcgtattcgccaggttctgctggaaattggcgaatgtccgcccaataaaaattttttttaagaacgacgccggaacagaaattacttattgtggaggaatgccaaaaaagaggtgaagcaaaaaaagtagaagaaggctgatgagtgaaacccaaatgatcgcaaaaatttattaattaactaattaggggagaccgtagcagtgactggcggcggagtgaacgacgccccggcgttggccaaggcaaacatcggaattgcgatgggcgttaatgggagtgacatcgcccgaagggctgcggatatgtgagaggagaggggggggggagtggcacggcaccacccaattaacgcataaataaacattttaaactttctaaaatttatgatttgcaattattgtctcatttgactaaatcacttcctcttgagtgtgctgactgatgacaatttcgcctccattgtgaagggcattgaagagggtcgtcttttgttcgacaatttgcgtattttgccccccgcggcgtttgtcccaccaactcattcgccatttagggctgtccattgcgtacactttggcccatctttggcccgaagtgtgtcccatcattctcaactttaccctcggaatgcccttgggattggagccactgcaggtgaatcatcagccgatgaaaagaactgacggagcaaaagcatcaatctaaacagattctcagcatcgatttggccagcgaattgccccccgccgtctctttggcctacgaaagccccgaaaggtcggcaaaagcgaccaaatgcaacgcaatgcctttgaggccctttcagagacataatgaaaattccgccgcggaatcgaaatgccgaattggtgtccagccgactgctgctctattcctatttgttctccggcacttttatcactttgggatgcattggcgcttatttgagtgtttattggt

SEQ ID NO: 55626 - DNA, 572 bp, Heterodera glycines
atgcttaaaaatgcacaagcagaaagtaatatgaaactaccaatctcaagcaacaaattcaacaagtacgaactctacaaatttcgacatgcgactatggccatcgttgaaaatatcggagtaacaaatacattcatttccaaatttacatttttcttgttttgtcttttagttttctacttctaacagctccgcagtcagttccttgtcttttctgcttagaacttattttgagcaattgtgtcgcgactcgcttaactcggccattaattgtgattttcattttctccccttcatttatttattttacaaattcagctggtcgtgcagaagttggcttggaagatgtttcttatgttttcggagccaatggaattaatagtaaattcgatgtccctccgatttcccatttattgtttgctttttgtttcagtaactgaacttcatgattatatccagcaagttcaaccatatgcggctgatgaggtttttttcacccattattatttatttttttaattattcgttttcttatttaagcatcctttgtttcccgtcactgaaccattaaa

SEQ ID NO: 55627 - DNA, 206 bp, Heterodera glycines
ctttttgcttttctctcccgctcactgactttcccaaaacaaacaacaaacggtcgaaacaacaacaaataaaagtaaaagtaggggaaaccatacggacagaaaatctatgcacagccgagcatcttttttacggtgtattgtaaaaacagcgaaattattcatttttcgccttatttacatttagtaatgccataatttttttg

SEQ ID NO: 55628 - DNA, 742 bp, Heterodera glycines
atggttagtttactttgaattcattccagggaaaatacaaaaaattcttcatttttaattagaattggttaaatttttatagtactttggatttcacaaatttcccccgttatttacttcgcaatttgcaagcctgttgttggaaagtgactcgacccaagccctgtataataaaatacgcttattgataaaaaaatcaatatttccatctttctataattgttccattttttaaatgggattaaaagtttttgataaatatttaaaaaataattaaactgaccactgcttttattgaaaaatatcattggaaaagacagatttttgattttgcagtttttgtgaaccgacaaattataaggtttaaaaattattcaaattaaaaaaaaaattcattcagatctcttcgaaaaaaacattgaacattgttttatctttggcacacttaatgccattaattagcgaattctgcctccgccgctatgcagcacttgtcgttttcatcgttttctttttcgaacctatgtatgaactcgctatgccacttgacatctcatctgctgtattaattaatcacatttaccatttttaattattgccatcgtttggaaactattcattttaatcagcagcggctctcacttaatttgttaaccgtttcacttaaagattctttaaatcgcatttcaatcaaatttttgaagaagttatattcaatttttgcttctttttctttgtttta

SEQ ID NO: 55629 - DNA, 1180 bp, Heterodera glycines
atgaaggcccgcaaaacaggagtctacacaaccaccgttttccgggacaggtaaatattttgaatattaaatatttttaaaatttttgatcactttagttacaagttgatcccaataaaacttgccaattttgtcaagacgtttggtctagaaattgagggcgtggaaaacaagaaatattttccacacaaattcaataaggtaagaggaatttataaaaaaaaaaataaataaaaattaatacaatcttaggcggaaaattatggcactgtgctggacaccctgccaccaattgagaactattacccaggtggcctcttcccggcagagcgcgcaaagtttgagcagtggtacgacgagaaccgggaaactggttttgagctctgtgaagtcatcgcggactactgcaagacaggtacaatttttgaaaaaaaaacatgcaaaaataacaaaaaaaattgaagatgtccaaatcctggcccatggtatggtaaagatgcggcagctgttcttgtccgagactcggcatgacatcacggattcggtcaccatcccgtccggctgtatgaagtattgggtgcagttggctcaccacgacaaagaacgggttgccatcatcccacacttgggatacgagaagcgaggcaaacagagctccatcgcccggaaatatttgaaagtgtatccaaattattttaattttacattttgtcgactctcagtggcgtgccgaagaagaattgcgggagaatggccgagtcctgcgccatgtcgaaagccctggaggggagttcaaattcggcaactacagcttagatgggatgatggagcgtccagatgaggacaaaaacttggccattgaggtcaatgggtaaggaaaaattccaaaaatgtgccaatttacccattgaaaaggtgctattggcatggatgcccgagctgcttccccgacgatgcggcaattgtgggcggaggagaaacggccggagccctcagggcccgggacgcaaaacgaacccgggacattgcgcgggaattcgaagtggaagtgatttgggagtgccacttgaacgcaatgctggaggacaacccagccatgaaggcgtacttcgacaactgcccggattctggcccaattgacttccatgatgcattctttggcggtaccttttccatttaa

SEQ ID NO: 55630 - DNA, 351 bp, Heterodera glycines
atgcccgatgaacgtgttctacacctcgagtgctttgagagcggtgattatgatgtaaataattgttgaaaattccattttttccctcaattttaatccatttcagatgatggaattgtacggaccggaccgcgctaaagagatgctgatcgacttgcgcgactatgcagaggcgcacggaatgccatgtaaacatgtgaagatgctgttgtacaaactggacaaaggactgatcaaatggaagggaaccaagccatgaaatggatgatgagtgatcagatattttggtgacaggacgaaggggggatgattgaactcattggtgatggatgtgatttaaaaaaaaataaa

SEQ ID NO: 55631 - DNA, 819 bp, Heterodera glycines
atgtcaaagaaaggtcataaacaatttctagaatacgttgtgagcattttttcgagtcataacttctctgaacattgtcagagatgttggcaatatagcagcttaatagaggtcagttaggaatatggatcgatactaaatatgttggatattgttggcaaagaaaaaagttatagccaagaactggcgcttgtactaaaacgagccgtactaaaccgagccccccgacccgtttaaagttatgaggtgctgaaaattttgcatttatttctctctccttttggacagcagctactctttctcttcgagtggtgagtttgagtgcggggcgggggaatggcacaatttcaatttgtgtccattaattaaactgaatttttagattccgaggagagcgaagaacagggcccgtagaataagaaggtggttaaatgaccgggtcaaacgaccatggttaaatgacctggtcaaatgaccatgaagttggtggtaaacccgtagaataagaaaatgaccacgaagtgccgtttttaccaccaacctccgtcaaacgaccatgaactatgatcttattctaccgggttatttgaccacgtgcacttttgggacaatttgtttacacattttttatggaaaaataacttttgttttttaggtctatcgcataacacatcattcctattgatcaatttttatgtttacccaaaatgttacatgtatttttgcaccgccaatatattatttatttgtgagttaaagacgaatgatcaactcataaaataataatattttataattaaatctaagatcacaaataaa

SEQ ID NO: 55632 - DNA, 739 bp, Heterodera glycines
  unsure (1)..(739): unsure at all n locations
acaccaaaatggacacccntttcgggcgcactcccgttttaccgattaagtaaggaatcgatgaaagtagtggtatttcactggcgccttgcggctcccacttatgctacacctctcatgattcttcacaaagtcagactagagtcaagctcaacagggtcttctttccccgctaaatttgccaagcccgttcccttggctgtggtttcgctagatagtagatagggacagtgggaatctcgttgatccattcgtgcgcgtcggtagttagccgacgaggcatttggctaccttaagagagtcatagttactcccgccgtttacccgcgcttaatcaagtttccttggcttaacattcagagcactgggcagaaatcagacacggtcaacgtccacaaggaccatccgtctcctctgttttaattagacagtcggattccccgagttcgtgccagttctaaactggtcgttcagcgccaaccgaagtgcataccctgacgagcatacacgcagctgaagcgctccacaagcagctctcaccactagtccacgcaccatccccgaaagaacagcacgcagccacgggcaaaagccgcctgtttcacgcaacagcccggctgacccgacctttagagccaattcttttcccgaagttacgaatctaatttgccgacttcccttacctacattattctatcgactagaggctgttcaccttggagacctgctgcggatatcg

SEQ ID NO: 55633 - DNA, 1455 bp, Heterodera glycines
atgtacagcgaatacaccaacaattacaaggcggccattcaaatgtttgaggaaagcatgcgaagaaagcgcaattttgaaggtgaacaaatggaagcggggacaaatgatcaaaggacaaaacggggaacggacaaatgatcaaaaaaggggatggacaaattgtcgaaaaaatggagaaaaatctgatcagatcacattcatattttagaattggtaaagcgagctgaacagtgggaggaatgtgagcacttgtccatggtgtcccatctgatctgcccggtgcagcgagtgatgcgctaccaattgttgctgagggtcagtgatcggagggatatttatttcagaaaagattgattgattaatcagtgacactgatcagtgatggaagcgtgatcacggtgatcagagaaagagaagagagagagagagagaaaaggagagaggggagagagagagagagaaagaaggagagagagggcgagggatttcataaaagagatgaaattgtgatcaactgagttgatcattttcattatcgaatgaattttgattattaaatcaatgatttgttcatgaatagagatatggataagtgagtgatcagttttcaatgctaaggtgatatgataatatataaataatttcaaaaatcaattaatgactgtgaagcaaaaagtgatcagtcaatgatcaagaggtataaactgatcaatgatcgaaaaaattaattagtaataggtacattatttgattactgtacatcattttactcatacgatacccaaggcttgatcaatcactgttatgtgatttgtttcaggaataccaacggcatctgagctcaacagaccccgattgggaggacacagaggtagccaatataaaaattaaaattaaaaaaagaaagcgaatatttaaaaaaacaaaaattgaaaaaaaggtatccaataatttaaaattcaaaatttttcaaaggctgccctttcgcttgtgttagaagcggcttcacatgccaacgaaatgatgcgcaagcttgacaggcaaaaacaaagttaaaattgtaaaatttcagatttgatttgggcaggtatcgaagtgtgttggaggtgcaggaactgttgggcaattgcatttcattggtaaattattacatatttttaattgatcaatttgggttaattaattttcaaaaaatttatttaaatattttattcaattgaccaatttttctttatttatttcaaaaagattaatttattgactattcttaactttttttttgaatatttttataaataatttttacttacctaattaatttaatatatttttttaatatttttaattattttaactttttttcaattatttataattaaacattttttcttcttttttaggttacgcctacacgtgaacttctgacaaaagctcgtctttggaagtgtactg

SEQ ID NO: 55634 - DNA, 1845 bp, Heterodera glycines
actcatgcaaaggccatgaggacaagtgtcaaaactggggctatttgaacccaaatgattgcacaaaatgccattgtccggacggatacggtggtcaaaactgtaaagaactcgaagagagtgagcattaattccatcaattaaaacaaattatataaattaattgaagatttgaattgtgaggatttgagtggaattgcaagagaattggtggccaataagtcagcagtgttttcgaagacgaaggccaaatgtggggggaattggccgtgccgatgccattggcgaattaaggcaataaaataatgtttagaaaattataaaattattttgagtgttattaatgcaaattttaattgctttcagcctgaagcggggaaaaaggcgcgaattcagttcaaaagtttgaacaatttgtttgaatgcacatacaactgctcatcggcgtatgtcgaggtcaaataccgagccgacgaaagggcccaaggcaaaaataaataaacaattaactaattagttacaattattaatgattatcaaaatattgctcattaaggtgccaagctttgttgtgccgcatcactcactgatctgaacgcaaatgaatataaaaattggattgcggcggaaaagccggacatggacattgtcatatccgcgtgcctttcaccaaaatggaccgtaccatctaccgtattcgagctgacgtatgaatcaggcaaggaaaattgtgaaataaatttttatatattttcaatatttctataattaatttattttaaattgaaaattgtctttatttcaatggctttcgtaaatcagaaccattacacaattaaaactgttcaaaaatgttaaggcaaagtcaaactcataaattcgaacaaatgcgtaaataccgataatttgtttgccgagaaaaggaaccccggcaccggcggtttgaaatgttatgacgagatcaagcaccaatcttatgactgctcctgtcacggtgatagaaatgcctcgctgaagaaaaatgggcgcacgacgcctttctttgtccaataataaaggtaattaattaatttattattattaattaatgccaaaagacaccgccacagacaaatttcatataatataggcaatttaatttttaagtagagtgaagcgggactgggacctggtagcggacaactgagtaccaaggttccgggtttgacatggacctggggactagtcccggttttcccagccaaaaattaacggtttttcaactcgaaaaggtcccggtccggttttacccaaattcccggttccgcttaactctatttttttgtatcaaaaaaccggaaataataaaaaatagggacgataaactggaataaggataaatatgacaaatgataaaaactctattttattaattaatttgaaaattcaggtcaattcaatttcaaatcaaaggaagccgacacgagtgtttactaacccaaaagattttcgatacaattggactcggattgaggttgattgttatgtgagttggggttttctaatttcaaaatttgtttaattgattaattttacagaaggccgatgcgggcaccgtaagcttttggggctacagtaagccggagacaaaggaaatcattcgggtggacgaagtccactgtttgacttatgaaactgctggagtgccaaaacggttcaaaagtttgcaagtcgaagaacagccgccgatgaaaaaactgaatccaagtccattcttggccatgcttcatcacttatccatgtgttcgtgccatttgttggccatccatgagagaagggggaaatcagtgatcagtggatctgtct

SEQ ID NO: 55635 - DNA, 401 bp, Heterodera glycines
atgctgctgcttcccgacccccctctcccgttgctgctcctccaaaccctgctgctgctgcttctccgtgcttgccccgagctggaccatctgctgctgctttaaaacatggggagggggtgacattttaaattacaatttgtaggaagtgatatttctcaccgaaaacataatactctaccaaggggtagagtatgcctacacaagtcccgccctccccatcccaatttgccggtgtctggtggccgcgtcttcatctgtaggcgtgttggatgtgccaatacaagaattggacgctgttgtgcatggttgaatatgaaatggggaacagatgaaattattaaagaccccggggttcataagaaaaaataaaaacattttttgtaatttttttaaataaa

SEQ ID NO: 55636 - DNA, 860 bp, Heterodera glycines
atgggcattttggagacgaagccgccgaaacaggagggaatggcactgttgggagctaacaggtgagaatggtcgacggcaattggccacggttaattgttgaagtgtgataattggtgaaaagttaggacaaccgcacggggttttgttggcaaattaaaatcaaaaacagccaacatttaataatataaaatgacaaaattaggcacaaacatttgaaactcttaatgaattgtctctcagctcaaatcgtaattagccttgtgaattggttaattaagtgcctatggacagctaatgagcggaaattatccgacagcaactgcggcaatgtattattatgggtggccatcaatgaacgaatggggtcagttggacaaggaaatatctgccgaccagaggggagacaaaatgccaaaaaccctccaaaaataggatcagcagcagcaacggcgtcggcaaattcaacaatgatcagtaacgaaggcgaagcaggcggagaaagtgccgaagcagcagcaacatctgaactgattggcacaacgccggcaaaagcgagtgccaaaaggagtagcaacggatcaacgccgaaaggcaaatgccaaagcaaaagcggtggcggaaaaagcaaagggaacggcagcaacgagcagcagcactcggatgacacgaaggtggagaacgaaagggcgacggcatcgacaacgagcagtacaaaaaacaacaacaacttcacatcgtctcttggcacagtcggtggaacggcaccggcagcgatggcaccattccttgcggcaatgaacccggcgggatacggtaggggcacaattgggagaggattcatcggatggggggcataa

SEQ ID NO: 55637 - DNA, 717 bp, Heterodera glycines
aaaacgggcgcgaagcgcccgtcctgaggccgcgaagcggccgaatgttccccacaaaattaaaaaacggccgcgaagcgcccgtcctgaggccgcgaagcggccgaatgtcccacaaaaaattaaaaacgggcgcgaagcgcccgtcctgaggccttgaagcggtcgaatgtcccttaaaaaattaaaaaacgggcgcgaagccacgtcctgaggccgcgaagcggccgaatgtcccccaaaaaatttaaaaacgggcgcgaagcgcccgtcctgaggccgcgaagcggccgaatgtcccacacaaaattaaaaaacgggcgcgaagcgcccgtcctgaggccgcgaagcggccgaatgtcccccaaaaaatttaaaaacgggcgcgaaccgcccgtcctgatgccgcgaagcggccgaatgttctcaacaaaattacaaacgggcgcgaagcgcccgtcctgaggccgcgaagccgccgaatgtttcccacacgataaaaaacgggcgcgaagcgcccgtcctgaggccgcgaagcggccgaatgtttcccacacgattaaaaaacgggcgcgaagcgcccgtcctgagaccgcgaagcggccgaatgttccccacaaaattaaaaaacgggcgcgaagcgcccgtcctgaggctgcgatgaattgctaaattacatcactttctagcgacgcggcgaagccgcgtcccatagcg

SEQ ID NO: 55638 - DNA, 748 bp, Heterodera glycines
gacaaagtgacgaaagtgatcattttgctgggaagatacaatttaaaggacatataaaagaaacccaggacaaagtgacgaaagtgatcattttgctgggaagatacaattcaaaggacataataaaagaaaaccaggacaaagtgacgaaagtgatcattttgctgggaagatacaatttaaaggacataataaaagaagaccaggacaaagtgacgaaagtgatcattttgctgggaagatacaattcaaaagatataataaaagaagaccaggacaaagtgacgaaagtgatcattttgctgggaagatacaattcaaaagatataataaaagaagaccaggacaaagtgacgaaagtgatcattttgctgggaagatacaattcaaaagatataataaaagaagaccaggacaaagtgacgaaagtgatcattttgctgggaagatacaattcaaaagatataataaaagaaatccaggacaaagtgacgaaagtgatcattttgctgggaagatacaatttaaaggacataataaaagaaacccaggacaaagtgacgaaagtgatcattttgctgggaagatacaattcaaaggacataataaaagaaaaccaggacaaactcccgacagtctctcccgcaaattttgacatttttcaatttccaacgcataataaaagaaccccttcggttgcccttgactatgttccaattaaaaattcgtccatgggcttaggaattgg

SEQ ID NO: 55639 - DNA, 751 bp, Heterodera glycines
atgatcactcccacaacgacgacaatggttttggagggtgctgaagtgccgaattcccaaaaagcaaagggtaagcgaatgaatagagagaaaagcgaattgtaaggcattcgagagcatttcaaagcaggatttgcatgaaaaacccagcaactttttaagtcttcaaatgcgattaattagacataaatattcatcttgggttaatttttgaaattccgtgatccatcaaaaccacacagaccccccaaaagcctaaaaatgccaggtttttctgcaaaataggaatcctgtttcaaagtatggtatggattggctgttattggttttatgaaggtgtttgaattctttttcaaatttaagctatcagatctttttgacagagttcgccaaagttttgtacaattacgaggcggcaaactcggacgaactttctctctccgaagggaccgtcgtcactgtggtcagccggcactgtgaggaggaggattggttcattgccgagcatgacggacggcggggccttttccccgacaatttcgtccgatttctcgaccaaggacaaatgcaggtcgaatgcggtggccgaatgtatttcatgtttttcaaatttaggcttccacaaatgctcaaccgccgtctctgccggcgaaaccctccaaatttagcgcaattgccaacccttcggccaatgcgctgcaaaatgccgttgttcctccgatcagttcgagaaattctgtcaatgctttga

SEQ ID NO: 55640 - DNA, 1047 bp, Heterodera glycines
atgaatgtcagtgacgaagaaatccatttctctcggactgttcgtcatcttaatcagcggctgttcttcggtttgttatcgcaattttcgggaaacattgccattgtttgggacggtaaagcgatgaccacacaatttgacatggtaagcaaaataggcgaagttgaacatcatcttccagcattttactatataatttacagatagttactccgaaattgctacaagagcacaatgtgaccaaaaattacaaattggaactcgtggcacaacccgacacacaacacgtgattcttttttatttttgttacggaatccaagttcttaggttgtctatttgatttatgcgacccgtcaatctgtgttattgcttatgcgaaattggcttcaccaattgcccgacgatgtgagttttaactgttgaggaattatttaatttttacaagttgtatataacatacagcgaatgatttttttaggacttacgcctccatcacgttgtgttcatccccgacgcttcattaactctcagacaacagttgcgtgaagatcaacgcgtttgggatcgtctccaatcggtcgactctttgcctttgcattggttcccgacggaacagcacaaactgctcacgatggagttgcctcagctggtggcgcagctggtgctgaacggagactggaacttcctgttcagatgtgccactgcgatcagacaattggagcaactgatcacaggcagtgacggggcgctcacaatgcgctgtaagggcgaatggtccgcacgcattgtggacatgtgccgcaaaatcagagacgatgttggtgggaccagaccaagcgggaggagtgctttcatccctttgaagcatttcgattgtttaagcccaatgagaagaaactgccgctggagaccgacttttttcccagcatccacgggttgcgggcggtgaacgaaattgtggtcgtggaccgatgggtggacccgttgagtccgatgtttcaacaattgactttcggaggagcatgcgacgagttgttggccattga

SEQ ID NO: 55641 - DNA, 762 bp, Heterodera glycines
atgcttctgaccaatccaaatgagttcagcaatgagaagcaacgatatttgtttgaactgagcatttattcgaacgaaatttggcaccgctttttggcacagagacattttgccaatattgccatccaattttggcattcaaaaacgaattttcttgttgagaaatggacagaaattgaaaataagcaaataataaatgaaaaagacgaacaattgaagatggaactgcacgaaatgttgagcaatttttccacagattataagcgaaattttgaaaattttggttggaaaatttttggcgaaatattatacagaaattggttggccaggactctgttgtccaatgctcgactgtcagaggaatggaataaattgaacaaagattctcagaccaaagcaattacggtaattttcgctgcagtaaatgaaaaccggaaaagcaaagatggaaaacgcaaaaatatgcttaaatacatggaaaaatggagaaaaacgctggagcaactgaagcttggtaaaaatttaaatttaaattcgaaaaaagcaagaaatttaaataaaacagttctttaattgttttaaattgattttagataaaagcatttttgatgattttgttgaaaagaaatatttgattggacaaatgccagcgtattggcgagcacacattgaatatattcaagaaattaattgtgatattatgtccaatttccctgaagccgtaaaatatatttttatttaaatttaatcattcgaattaaa

SEQ ID NO: 55642 - DNA, 1368 bp, Heterodera glycines
atgactttagccaaagttaggcggcgctggccgattggtttttgggcccattatatttttgctcgttggtcacaaagaccaaaggtatggcacagttttttttggccattttactgaatttatatacatagatagatagatatatgtgtgagttttgattattttagttgttcatttattttattatttactttttcgtaatattaaacattatattttgattttaattcctaaattaaaaaattaaatcacatttatacttattttgatttaaatgtttttttttatttcaaatcattggtgagtgctcatttgcgcctccacatttgcgcctccacatttgcgcctactacatttgcgcctccacagttgcgcctccatatttatataaaataatttaaatactcaaaaatatttgctataatacatttagttggacaaaccacaatacatttatttttttatattttctttgtttttgtattattttcttgttttttttattttcttgttttttattatttcttgtttttttaaaaagatgctcaatcgagccaatgatcaattccttttgtggtaagtcgaaatgacagtgcgtgtaaatgtgtaatccatctttgatcatcacgctgatcaggaccaaactgatcaaattgttcaatcagatttttgatggctcgatcattttccaaatattttttggtgcggggtatttcagctgctggacgtgtctggtcaatttcatgtggtctcattttatttctttggtattcctcttcatctttgatttttaatatgaaacttaaatttgaattttaaaaattgtcaagtaattattaatttacgttgataaggggggtttaggtgctgaaaagcgtttgttgaagcttgaatgaaagccttccattccattattggttcttccaagatctgcagttaccgaatcatgcatgttccaagtttcaggaataaaataagctggtcttcggtttccgtcgtcatcaaggcgaaaaagataggttcttaaaaatttcaaagcattatggtcgaaaaaccaatgaaatttgcattaatagtaagtttattttaaaataaaaaagatcatatttaatcaaaaagcaaaaacgatggcgacacgaaaagtgaaaaattcgaaggcggatcttggccttctgatgctttatgccgtcaaaggagacggaaaacaagagttatttggatgtgcataatgattttttgataaaatcactcccgttagcccttgggcaaggcaatttttacacatttacacgctctgtcattttgacataccacaaaaggaattgatcattggctcgattgagcatctttttaaaaaaacaagaaata

SEQ ID NO: 55643 - DNA, 378 bp, Heterodera glycines
agattcctcgaaagatcaaaatcagcagcagcagaatgaaaacgatgagttcaagcagtacatggatagtgtgtttgctgcaatccgacgtttgctgatgggccccggacggcggatgacctgccaaaatttggcaatgaggcaattggcatcgtccattttggggccaatggcatcggcggaagacatttatgagccaacagaattggccaagttggcgctgaattgatgagtcaaattaactgtggccctattatttaaaagatatgccatccaagtgttggattcgttgtccgaaggtgttttgatgagtcagaggctgcattttgtcggcgaactcattgagacaaaggtggcaattttctgttaatttgagca

SEQ ID NO: 55644 - DNA, 1059 bp, Heterodera glycines
ggtgactttgcttggcgacccgacacatcagcggacgctgcacgctctgctgctcggactgttagacaaattttcggcagaaaattttgacgcctattttcgcgcgctctccaatcagttggaacggtaattatgtgtaattatccgacacctttgaacaacaccctgtggccggcgagcttttcgggaacggcttttttggctcagctgatgtgccaatttccgattgaaaaggaggcccaagtcttctcttagtttcgattgtaattttgatctcgagaatcacctcctttctacaattaaattcgaccttttccccgcacttcgttggcattttttgtggttgaagtaagtatctctgttcaggcttgacactctgtccgaaatgcttcacatgttccgcgatttgctcctccgttgtcccgttcccgcggaatggtgccgtccgtcgccactttttccgttaattaatatgtgccaccattttcgcaggcaatcgttgcgccgtattcagctgcgactgttcgccaagcatttgcgaatgtccgccgcgttgtgccgacgcgactttggcacgccggcgcactttgacgcggccatttggtgcgaatgcattctcagttgtgtggcgttggcaaaatgttgcgccacgacgacgactcaaaaatcaacaatgatggcacacaatgccgaggcggaggacaatggcacaacgcacagcgattatgaagagggagaggaagaaaaaggtgagaaatgccaaaaaaaaagatggggccaacagcagaacgggtcccaacccaaaatgggataagacgggaattttgaagcctttagtcctgatttctgccaatttttttgcagactccgaattctgttacgtttaaagcccggaattttgattttccaacaatttttttttgaaaatttcatagatttttaaaatcgaattttggcaaaaaaacgaaattttctttttaagtcttatgtgatcaacaaattgacaattctgaaggtgaacaaaagctgggaaagtatgcgaccgaaattctaaggtaa

SEQ ID NO: 55645 - DNA, 1083 bp, Heterodera glycines
atgggccgaccatttttaccattggcattttctttggttttgctgctgctggcggtggtgatcagcaccaattgcgcaaatgcttctccgatcgttggagaggaacagcccatggcaccggaacaaaaagcgacaaaaggcaccaacgacggacaaatgggcgacgacaatcggaccaatcggcgcaataacagtaaatctttggatagagaattagattcacttacactgctgtgaggactagaatttttgacaaatttggagatgactttcactcgcgcagaattagctttaagaggcgtctgtttatcttgcgaatggcacttttgtttttagcactttcgcgccgccataaaatgccaaaatcatgcgattttggcattagcttaattggcacttttagtggctgctgctcagcatcaacagcagaaccgcaacgccacatccttggtggcacttggctggttgggcttgcgtagcggcgcgagcagcgtcaacgcggtcaacgtggcgtcatgttacgacagccgactgtccagcttcataaacgacggcctccgctattattcggcacttatttttcggcacaattttaaaaaaatattcccaaatttagcataacatgggccaactgtctaaatacatcattgaccaggttcagtacagcacaacacagaaatgcaaattcaagccccccttttcctcgtttagattaagcgtgtccgctactcgggctattggtttgtgcatgcggtaggtaccgtataccaatacaaaacacacggatgaccattttgaaaaatgaaatgtgggaactacggtacaattcaaattatttcgcaggcaatgatcggcggacaaacacagggactccaatggcagtcgcaatcgaacggggacatttttgcgcagacgagtcggcacggatgtgtgttttttggaaaaaatgaaaattaaaaaattaaactaaaaatttaaaattttaggctattaccacgacacacagacatacatcataatcatccgatactgagaaagaaaagaaaggaaagtaatgttatgcgaatcaaagaaacgaagtga

SEQ ID NO: 55646 - DNA, 723 bp, Heterodera glycines
atggcggaactgttcacccaaggtacagtaattgggaacagtaattttgatttgcataaaaatgatttttacttaaattccaaattattaaaaaccatacaaaatgcttcaggcgagcactgggaattggccattgaaacaaatcgggaattggccaacatttacgagacggccacctttgactttgccaaattagccgatttgttggcacggaatgcggcgctttatgataaagtgacgaaaacactgcgcatggaaagccactactttatgatcgcattttatggcaaaagtgagggatcaatcgatggcacaccaaaatgccaaaaaaagagaaaaataataccatccctactttcctcttattttaaggctgtccctcccatttggtcaccctcaaatttgtggcccggggccgtcccctggagcaatggggctgtttcaagcagcgatttgtggccaatttctccgacttcaaatttgtggacacattggacaactgcgaggagacttaccgagaaatgaacggaaaattccttcaggcaacagaaaaattttaattttttgttttttaaaattttattttcttcctcagattgtgccggtcacgccgataccgctgaaggaggtgtatgccaaactgttgcagaacagtccatgccgtttggccagttggtactacaaacatcacaggtggttgagaatcagcgcatttttgggcaa

SEQ ID NO: 55647 - DNA, 1182 bp, Heterodera glycines
atgggcccagtggtgagtgagttggacttggacccgttgaatccggtggaagtggccattgaaaaaatgcgcgagggtatttttaattaaaacaatttaatttatttaatttaaatttcttacagccaatgacaaattgacagagactgcggcaatggtcggcgaaggttttgcccagtcattggtcaatttggccggaatgattcgcggcattgttcaggccgatgttggcggtggcatccgtaattaccaggtgaattaatggtcggacttcattcaattcctgctaatgtgattatttacctacatgcaaaacaggaatggggtcgagtccttcaatcagtcgcgaagtggcaaaatgtggaagcaaaaaagggggcggggtgagggcacgagaggaattttcgaaattttttttacaatttaaaaaaatttatctaaatgtctccttactgatgccgaaaggtatcggaaagcctaatttcctcacattttttaattgaaaaacccctgggaatttaataaaataaacaaaatcaattatagctacagtaattggtgtttttttctttaccccccccccccatttaagccatttttctcggaggaatcgtacgccgtctgtacggaggaggaacggaatgccattgggacgctgaagcggctgattttggagcaaacatcgcttttggaatacgctttgtacatccattctcaggtgctaatttggtacatacagttttatgatataacccccccccccccccctaaatttcagagtgaacgtgcccaagcgaatgccctcttccacaattcgttggccggctctttcatggagcatcgccagcgggtggagcattggctgggcccggtcaagtcggtgctgcctgaaaagacgtccatttacatgttggaagcgaccgcagcagcagcggtggagacgatgacgtcactctctcacgccgtaacggatggaagcggagggttggaaacattttgaaaatatttttaaatttaaaaatgtttaaaattcagtcgcaaccaatcggcgcaacaattgtccgctgtttcgtccactccaccgccacaacagaaactgacgcggatgacgtcactgcatgaaaatgggatgacaacaacaaacaacaacatgatgatggtctacccaacagcagcagcaag

SEQ ID NO: 55648 - DNA, 190 bp, Heterodera glycines
ggagactaagaaaaagctgaataatccgagggagacgaagaaaaagcggaagaagccgagggagactaataaaaagcggaagaatccgagggagacgaacaaaaagcggaagaaaccgagggagaccaacaaaaagcggaagaagtccgagggagaccaacaaaaagcggaagaatcccagggagactaa

SEQ ID NO: 55649 - DNA, 843 bp, Heterodera glycines
atgcccatggaattcaaaggcggttgggaacaatatgctgaagattattgtttcatccaaaacacttattatgtggcgccagaagaagaaattcctgccgaaattaatgaacgtgatgagcgccaatttggttactaccaggtacaattagttaattaattgagtaattaaaaatgagtcatggatgaattaattaaaattatttagctaattaataaaaataaaaattaaataataaatgaattaatttaaataaatacttaattaattaattaaatagttcattaattgaataattaaactaattattttttattaagagggcttttaaaatatacgacaaaaattttatttaggctaatcaccattatttttttttgtaatttctttcgtaaaaaaaagaatttttttaatgaaaaccaaaatttgtaaaaaaaataatttttgaatttattttccctttttaaatgtattaaagtttagtgggtgccaattgttttggcactgcaggcagtgatgttttatctgccgaattggatttggaaaacgcttcaccagcagagcggtaataaataaaattatgtatttatttattctgtatttcctctaattacggtatatatttttttaaattaaatttaatttttttaaggcgtcgacttggagacggcaatttcggacgcgcgagcactgcgcagcatgcactctgacaagcggtcgcaagagatgggcaaactggtgcagtacctgaacgagacgctcgagttgcacgaggtgcgccgtacgccccgttactgtatgtttactgtaggatgttaaaacaccataatttactcaaataaa

SEQ ID NO: 55650 - DNA, 622 bp, Heterodera glycines
atgcgcagtgttcggacaagcatacgccgaaaaacgtcagcaggacgacaacggcaccggctgaggccacgcattgacacggaaacggcactgttggatggacggaacagtgcaagtggggcaatgagccgaataagcaactaccaaagtgttgtgctacaacaggtacagagtaattggctaattagtgctgtaataaatacaataattaattttaaacgcctgtatttggctaattagtgctgtaatcaatacagtatctacaaaaaggcatcttttcaaatactataatattaaataaatttttataggatttcaacgaacacggagcaaagccgagatcaagaataaacacggcgtatgacatcatcctgatcacttgtgatcacaaaaatgaaaagagtgcccatgcaaaacggcacatttcattgccggacattgtgattgatgctgcaactccaaagatggatgaaaagagcacagcagaaggtgatgagagacagaaatttattaaaaattctaaataaaacaaaaaaaaaatttaagtacatttcaaaattggagaattcattttcaagttcaagtacctaccttaaaattgtacataaaatttggaaataaa

SEQ ID NO: 55651 - DNA, 1074 bp, Heterodera glycines
atgactcatggacaatggataaaatatttgtacaaatttagtctaattatttttacatttcatcaggttcgaaaccaggagatttaaaagatcaaagtaaaataataaatataaaatgtttagtaaactaaaaaagtagttttgaaatttcattttaatttttaaaaattaaaaaaatatttttatttatcataaagtgaataaatataaaaatcattagtaatagtaataaaaactagaaaataaataactttactaaaaatattgactacggcttgtattcaacttattatcgatccccacttattagccacttttgaataccgttaaaaatggcattataagagagaaagcaataaattactttaatttataattaaaatttaattttttgttgttagtaaattttcggtgaaaataatttgagattttataaaattgaacaaaaaatcacaaaattcggccaataatgaaagaacaattattcatatcaaaggagaataatttgttaaaaattgaaaatacttatttaattcaaatgcccgattatgagaatttaaaatagaaaataataaaatgattaaaatatctatttgaaaatgattgtatatattcacaaagattatacggcgaaagaatagttccatttgaaattaaaaataaaatttttcctaaaaatgaatggaatttggccttgtcagtacattttccaatttcaataaacatttcaaactcgttcgttgagcaaataaaagtgtgtcaaaattattgtaaccaacaactataaaacataaaaaaaataaagatttatttggaaaaaatattaatttaaataaattgtataatgcatttgaaataatatattagtaaaatattattaatacaaaaaataaaaattttattaaaaaaattacctaaaaattgcaaaatatatacaattccagcataatagaatcataaataaggaacattaattttacaaatgaaattctaaaaaaatgaattacttaattatatatgctctgatcagttatctaaattagtcaattatagaaacaaataagtataatttta

SEQ ID NO: 55652 - DNA, 464 bp, Heterodera glycines
atgagaggaagagaaaaaggaagaaagagaagaggaagagaaaaaggaagaaagagaagaggaagagaaataggaagaaagagaagaggaagagaaaaaggaagaaagagaagaggaagagaaaaaggaagaaagagaagaggaagagaaataggaagaaggaggagaggaagagaaaaaggaagaaagagaagaggaagagaaaaaggaagaaagagaagaggaagagaaaaaggaagaaagagaagaggaagagaaaaaggaagaaagagaagaggaagagaaataggaagaaggatgagaggaagagaaaaaggaagaaggaggagaggaagagaaaaaggaagaaagagaagaggaagagaaaaaggaaagtggttgattaattagtgacaaagggtgaggattattttttcaaaaagacaattttaataattttgcataagaaacataatgcttattaa

SEQ ID NO: 55653 - DNA, 1124 bp, Heterodera glycines
taattaaatccattccttcgggggaccgtgccgggtgccgcggggtaagcagtgctggttcgtttcatcacggcaccgaaccttttggctagtcagcaatcgttgcttaacttgccagatcggacgggtgcgcatgattccactgttccaagcaccccaccaaaagcaaaacgatataaccaaaatataaggaaaaattttttctccatcttcctttttgatactaaagcatcagaatgctaaaattaagttgtaaataaaattttggtgcactttagagcactttctgaaaaaaatatttatgaaacaaaaaaatcgattttttcaagtgtccgtttggggtactcaaacatttatggggagcaaaaatccaacgcagaattaaagtacaggctatagggaagctattcccgagggattcggtctccccataaatctgggcgcatcggttcggggggactgccccgaaaacaaaaaaatcgattttttcaagtgtccgtttggggtactcaaacaattatggggagcaaaaatccaacgcagaattaaagtacaggctatagggaagctattcccgaaggattcggtctccccataaatctgggcgcatcggttcggggggactgccccgaaaacaaaaataaatcgattttttcaagtgtccgtttggggtactcaaacaattatggggagcaaaaatccaacgcagaattaaagtacaggctatagtgaagctattccggaaggattcggtctccccataaatctgggcgcatcggttcagggggactgccccgaaaacccaaaaaaaaattttttggataaaaattatttaaatgaactgactagataatatttaaaataggttatttctcttcctttcagtatccctgcaaagtttggtgcgcttctgatcagtttctgaaaaaaaagttaagcctaaactttttggcctgtttaaaaaggaattaaaaatttttaaaaattttattcatctccctttttgatagaaaaagcatcagagtgcctaaactaacatgtaaataaaatttggtgcgtttcagaaccctttctgaaaaaatatttaagaattaattttgcaaaaaataaataaaaacgaaaga

SEQ ID NO: 55654 - DNA, 1041 bp, Heterodera glycines
atgcgcaacagctgccaaccaatgtcgaagtgagtcgaacaccgtccgattctcataattccctaaagtcgaactccttggataactaaatgcattttaaagagttggttgaccttgtgaaatgaaattcttttcaaatttcgtgcaaatcatccgacgacagtgcctcctctccaaccaccgctttcattgcctgcacgtctgcccctttgtgtcagatttccaaaaaaatgaatttttttttatttaccaaaagcgctgctaaaaaattgttttttggaatttaaaaaaaaaaattttcgtccgggtccggttgcgccgactcttcatgaacgccttctcggccctaccaatggcaaacgtatttctgtgacttactctcttttccatttttcgttatttcagcatttatcgtctgaacttacgcacttgtcggggcttcagtttttggcattggaatgttgtgctactacggacttaccacgactgtcgacagcgctgctgttcgttctaagtacgtttttcttggcttatgcgaggatttgttctttaattcacttaaatttcgccgacacattcaaatcgctcctaacaatcctttttatcctgttttttagtttatggcctgattatgttcgtcagagacttcagtcgacctacgcttatttggctggtagccttgccttgactgcggctgttggagtggctgctgcccgtagtcctggaattttggctcttaccagcgctccatcacttctggttagtcatcggagacgaccctgggatttggcgcggcggtaccgttcccagacgacacttttttgcctttccgccagccaaaaaaattttccgttcaaacaaattttacgataaacgggtgttgtcattgccagaaggcgccgctggattaaaatgaaatttgcttatattctaattgctttttaggtttggtttggttctctcgctgctattattggttctggcttggttggctcattgtggcatttttggtgcggttttggctcccctttgttttgttag

SEQ ID NO: 55655 - DNA, 630 bp, Heterodera glycines
atgaacagatcagaaagctttcgcctgctttcaagtgttgacagttgcaggtattctaatctttgttggtatggaatgggtggaaggttacacttaaaaaatactcttttggtgaaatatttctgacacttttcaattttttaaatattttttagaagcgatggattccaaacctcaggagcatattccaataacggtctaacataagttttgtacaaaataatccaaatcctagaagacttggacttaataatccgaaattaagaacgcatacgtaaatatgcattctttattatttgtgcgacatgattggaaaattgcaatttattatcaatatttatgcctaaatccctaattgtatccacaacatttattatatttccatcaattttatatatttctttggggtttttattccccaagtaaagtacaaaagtttttttaattgagattatgatctgccatttatttgcccattccgataaattatgcaatgctttatgcataatttctgtttcggttctttctttataacaaatatacaatttaacatcatcagcatataatttaattcttactcctgatggcaaagcatcaggaagatcgttaatataaatcaaaaataataaa

SEQ ID NO: 55656 - DNA, 1719 bp, Heterodera glycines
atggcagcaacggacggaatggtcgaagatggcaaagtgggaaatgacctcgaatcagcaaagttcacaaaggtgagaaaagtcgtgttcgttgtcctaagattgtgaatgataccttaaaggacaaagaagtcgttgacattgtgcagccaacggccaaattgataggattgacgaaggagcagctcgagcagtaccgaaatgaccccttttggaaggcgattcggtaaaatgggctattaaattcgaaggatttgccggaatttgaagctttttcattttacgcgtcttatctttctttgctcagttactcacttttcgtcgccttttggctgatttggctggccatgttcgtgggcgctgttctgattgttgttttgagcccaaaatgtcagcaagtgaattggaccgaaaaaatggtcgcttacaaagtgagacaaacactttatactctctcaaataaaacatcaaacaaatttagattttcaccctcgcatacaaagactctgagtccaaaaatgggttcggagactttgaggttattgagaaaaagttggaccaaatgaagggaattggagtcaatgcaatttggccaactcccgtgctcaaatactataaaaatgcgcttggcccagaggcaatcgaaaagttggaagtgtcggaccaactcggcggggctgaggggttcaaaaaactgatcaagcgggcccatgacaatcaaataaaagtgatcgtcgatttgccattgacagtcaatgccaaaggaaattgggccaacaaaacttctgatacaaaaagtgggaggggccggtatcccatgctgactaaacactctttcaagatggtattgccctgatcgaccttgacagtgcagcaaaccgagaaggacttaaagaagcggcagtgcgctttttggactttggcgtcgatggactggcaatcaccgattacggcctttttgccaattccgtccacttgggttctcttgtcgatcttattcgaactataccaaaggcggaaaaaatgtacagtgattaaacatacaaaaattacttaatcattgttttagtcccatttatgcacgtggctctttgaaagggccaactgaattttatgagattttgtctttggttggcgatgtgccgtccgatggagtgaacggattgaagaaaatgctggagggaagcattaaaaacattgaggagaatgggggtaataagtcgcgaatttggcaattggggagcatggatccgagtggacaaagattggaccaactcctcggcaaagagtcaaaaaggtaaccgaaaatggaattggcattaaaacagttttcttcgtatagtaaatgacttctccgattgtcttttgttttcttagcaatgagcagaaacaacgcatttcttccctcttcacttccgtccatcttttcatgccaaaaccccgtcgtcgttctctacggcgaagagcttggcctgttaagtggaaaaccgacagccaacaaattggccaaccgaattgtctatccgtggagtaacgaaacattcggcaatcagtcgcaaggatttttcgttttcccccaacgtacaaaaaacggagacttcgaggtaatttatacggataattattgggaattattattatgtttcattagagccagaaaaatgacaaacattcgccgctggcgttgttcaaagaaatcgcaaagctacgcgaggtaca

SEQ ID NO: 55657 - DNA, 843 bp, Heterodera glycines
atgcgaagaccgacggaagaagtgcaaatggagacgaaaacggaggaacaaatgagaaaggaagcggaggaattgtgggaacagcagaggagggaggagctgaatgaagcactgaacaagaagtacacggagtacgtgaagatgatgcaaaagtgaagcgcagggccaacacgacgacgaagtccattacctttttgatgtcagattttttgaattttattttgtataaactcaaaaggattccgtactcaaaatgatggcattttatttttggctttcatatcaaaaaagtgtgtgaaaattgtcctcataattttgtctaaatgatttccccttcacctaagcttcagaaagattgtttcaatttgacaatgacatcacaaaacgaaggagccgtcccggctgaagaggttggactgcataaaattaatttgaaaactttgttttctgggtgggttcaaacaaataaccgaaaccaacgtccgccgtttggcaatttacagatcaaaaagctggtcaaggagaaggacgaagccacggatggcttttacttccaacaaacgatgtaccgtatcagagacccacgcgtgtccattcccttctactgtaacgtgctcggaatgcggtcggtcacttttattaccatacaaatccattgtctgattattattatttttttctttgaattttaggctgctcaagcaattggacttccctgagggaaaattctcgctctttttcatgggctacaaagatttggacgaaatcccttcggacgatgcggcccaaaagaaattcgccctctcaacccattcgaccatcgaactcactcagtcttactag

SEQ ID NO: 55658 - DNA, 1373 bp, Heterodera glycines
ttgcaaatgttcggcaacccttcgaattgttccgcaaaagagcggaacggaggatttgactggacaaattgaccaccattcttttaacaacaaatcgaacagctggggattcccatatttcatcacttttgcggtgagtggcaatttaaaaaaaatgtccatcgctaagaatgagtcatccaatccatattttcctttattataattttaattaaaaataaaaaaccaaaatatatgtaataaaggaaagcgataattggtgagacccattcctaacgatgccaaaaaacttgttctattttaccaaacaccaaatgaaattgtcaaaattaagaaattaatggactcgagcaaaggattttacgaccaaaatgaggacaaagtgactttggccattgattttactgtggagaaagaaaaagggacaaaacgaaaattggccaatgaataaacaaacccacacaatccacagtatcatccgtttttgtcaattatttgattaacgtttgcaaattttaccttacaaataaagtccgtgtaaaaattccgtaaacgagaaataaaaaaagcgattgggaatctcgagctgtaatttaaaaaaaatttttctaaataaaatttcaagcaagtagtggggcgagacggagggcggaggaatactggccgccgtagtcgagtgtgcggcggttttttagcgcaataaccaaaatgacctatttgcaccagtttccctacggcgccaattaaaacaattataaattacgtttggtactgaattggcactataagatttgaatcggttcaaaaaccgatttatacttgtcggtttttagatggcgcggttcgacttcattccctgatttttagattaagctcgtcaagagctttcaaatggtaccaaatttgtcaggattcgatcgtttgaaaaaaagttatagtgcgaaatctctcaatttttcgagctttgaaccggttcaaaaaccggtttttttgaatttccacaactcgcgacatatttttccatgcttagctccttgagacgaatcgatcggtatatcatttgactctttttttcacggggcgttcactacagttcacccttgcatctctctatttgaataggcagcaagcgccaattgtacatatatctctttcattcctctttagatataatcattttattatgtctgcaaatttggaagcgagtaaggataaattggatcaggtacatattgcccaattactctttcgcttaaacaaatttccttcttgttttgaataataatcattttaattttcagaaaaactgaaagaaggacgtggaaaaaacaacgacgacctgcagcaggagtcggatgacggggacggggacg

SEQ ID NO: 55659 - DNA, 411 bp, Heterodera glycines
atggcaccacgacgcaaaagaaaggcggctcaattggtcgggcaggacgaagcggtggtgaacggaccgagcgcacaggtgaattgtgttcaccatcaaattttcacatttaaatttcatatgctttttattttcacagttgccaacgaatgacggacaacaattggcgtcagcagcaccagtgacaaacaatggcaccgtccaacaagcggagaacgacggaactgatgcggtggcggcagcagcagcaattgatggcaccggcggacaagtacaatttttgtattttcgttagctaagggcgggcgcttttggtttaaaaattcaccggatggtatatgaatattttatgacatctaaattgaaaaaaaacttgttaatttggaaaaaatttgggccaagtgttgttta

SEQ ID NO: 55660 - DNA, 138 bp, Heterodera glycines; identical to SEQ ID NO: 50950

SEQ ID NO: 55661 - DNA, 492 bp, Heterodera glycines
aaacaaaaaaatcgattttttcaagtgtccgtttggggtactcaaacatttatggggagcaaaaatccaacgcagaattaaagtacaggctatagggaagctattcccgaaggattcggtctccccataaatctgggcgcatcggttcagggggactgccccgaaaacccaaaaaaaaattttttggataaaaattatttaaatgaactgactagataatatttaaaataggttatttctcttcctttcagtatccctgcaaagtttggtgcgcttctgatcagtttctgaaaaaaaagttaagcctaaactttttggcctgtttaaaaaggaattaaaaatttttaaaaattttattcatctccctttttgatagaaaaagcatcagagtgcctaaactaacatgtaaataaaatttggtgcgtttcagaaccctttctgaaaaaatatttaagaattaattttgcaaaaaataaataaaaacgaaagact

SEQ ID NO: 55662 - DNA, 1455 bp, Heterodera glycines
atcacatattttattattgaagaaaaaatggatggatctggtaagaaatatttcattaataattttatttattatattttaaaataaaaataacaatgtttagacacttaatagagaccgtcacgattggtattttaaacgatctttctttcttttttgatcgctttttcggagctttgcttttatccaacaaaaagattgaattacttgtctgatctttaaaatgtttggtgctttgctttttgagaataaatgaatttttcgcctttttgggttttgagagaatatttttaccatatttggaaattttataataaaaatacaataaaacatcataagaataaaaaaaaatcgagaagtttgtttcgtggaggatttcttggaaaatttttcaaacttttttgtatttggaattgggcactattaatataattttaattataattaattaattattttattttaagaatacaaaatggatctttttatattattttttttatttttagatttcattcgctccgttttcaccgtttccgcttcagtttcatttgtgcttggcattctgttcaacacatttatggcatggatgatcatcaaaaagaccccggcaccaatgcttatctactcaaaaatactgatggcaccgtgtataattgtaaatgtttagctttatcactcatttacatttatattaaaaaaacaatttttaatttaaattatcaaatttaatttaatacattttcaggacattttcttgtccctttgcgcatttattgtccaaccaattccagtaaaatttgtaaaataaaattacaattttattaaaaactaggtatttgattcgctaaacttattataatatccatcccaaggttgtctcgcatggttattttgctgtcgtgcagaatggctttttccgcaacgcttccggcttttacaattatacggtaatttataattaattaaaaaaaacagtataaaaaacaattattaaacttttaaggcaaatgtgctgtggttccaaatgcttattctgtttgtgtgttgtacaacaattcaattcgtgtttcgctactatttgctgatttggtcctaataattttaaattaataaaatatttaaaaatgattaagtaatttttattggggatcatttttcggtaaccattaggctgtatgccatttgggattgacaaatgtgatccatgaccagtgatttctttttccgattccatttccgggtacaaagcacgttgaaattattttttccaatattattttggtattaatttttcattttatataaataaatttcaaatatttttttaaatttaattccttcattattcttcagcgatggccaagtgccggcccggctcaaatacttgaccagtttgatcatcgtctttctgctgattgcccatgtgctgctccattatctgtccgactttcc

SEQ ID NO: 55663 - DNA, 510 bp, Heterodera glycines
atgaatttatatatatttttgtccgctttaattgcatttttattaattaggtaaaattgaaattagagcagaaaataaaaaattgaaagaaaaaacatttgggcgaaatatttagagaaaaatgggaaaaaaagaaaatgaaaatgatcagaaaaactgagaaattattgagaaattccataaaattaaagagaaaataaagcaaaacgaaagaaaatatacagcaaaagaatggagaaaaattgatgggaaaattgcgaacaaattcgagacaaatcgcaaatatatttatgaatagatcaaagcattaggactttataaatttaacaaatcaaaaacggatgaacaaaaaagttgaaattgttcaacaatttatagcaatgacaaatgaatataaatattcaagaaaagaatggaagaaaatttatgccgaaattaataagaaaaatggagttggtcaaagatcaattgataaatggaagaaacaatttggatgagtggaaaaataaa

SEQ ID NO: 55664 - DNA, 90 bp, Heterodera glycines
ggtcttggtctccgatttttcaaacgggggatcggcggaaggggagtaggctggcgttgcgaacgttaactcgtcgggccattccgtttc

SEQ ID NO: 55665 - DNA, 2414 bp, Heterodera glycines
atgcagcaattcagcaacaccgtccgccaactaccgtctggccggtactctgttcgcctcacttggcgggaacctcgtcctccactcccctcgaactgggccatcgcttatcgccgacttctttcaacaaccaagcggctgcaatgcgcccctgagctcctcgaccgttattccgccgaattgacacggcagatggacgccgatatcatcgagctgaccgggcgagacgacgacgagcatttcctaccgcaccatgccgtcatcaatcccaagaaattgcgcatcgtcatcgatgccagcgcccacgccaaaggcactccaagtctcaacgattgcctccaccgcggacctgttcttcttcccgacctctgcgggatccttctccgctttcgatcggcatcaatgcctgttttggccgacgtccagggcgccttccatgccattgaagtcgagccggaggaccgacgcttttgcaaaatgctgtggttgaaaaaccctgcccgacccgtctcaggcgacaatctgttggtctatcgctacaagcggctcgttttcggcgcgacatgctcccccttcatcctcgccgccgttcttctccaccacttcgaaaggcacgaccacccattcgccaaggaattggccgcgaatatgtacgtcgacaacctcctcatcgagtgcgagacggaagaggaggccatcgacaagtcgtccatcgccaaacaaatcctcaaagacgccgacatgaacctccgggagttcctcagccactccccaaacgtcatgggacgaatccccgaggacgaccgactcgacaaaacgccggccaaagttctgggactgacctgggacacccccagcgattgcatcaccttcagtctcccaaaagacacagacaccactgctacacggcgttcagtcctgagcatcattgccagcacgttcgacccgcttggactcgtcgggccatgtcttctgcccgccaaacggctcttccaacggctatggggagaatgaaccgcctgggacgcccccctccccgatgccgagcggcaacttggagccaaaccctttccctttggcaacaccaaacacttgtcattccccggcactccattctcggcaagcacagtcgcctacaactccacgtcttttgcgacgcgtcggaacacacgtttgccgccgccgtctacatccgaagcgagactgccgatagctcccaagcgaacttgattttcgccaaaaatcgcctccggtcacgaactgcgaaccagcgcttcaccatccctcgactcgaactcctcgccgttcttgtcggaatccgcgccatgcgtttcgccgagaaagagttccggcgcccgatcgacgggcgacacttatggtctgactcccaaattgcgctctcatgggtgaagtccgacgaacccaaggcccaatttgaacagcgaagactcgtcgagatccgacaagggccgcccaccacttttcatttcatcagaaccgaccgaaatcccgccgacgtagccacgagaggctgcacaccggcggagctccgaactcgccacatttggtggaaagggcctgagtggctcacgagtccggaaacggaatggcccgacgagttaacgttcgcaacgccagcctactccccttccgccgatcccccgtttgaaaaatcggagaccaagaccccagtatatctagaggcaaccaccgatctgtcagccccgagcttcatcaatgtcttacgacgattcatcagtcgtcgcggccgaccaaagcgaattctgagtgacaacgccccgacattcgttcaaacgagcaaggctctcgacattctgaccggccctccgtccgaaaccgacgccgtcacctttgccgcgcgccgaggcattcagtgggacttcattcccgcctatagtccatggatgggggcttgctacgagcgactaatcggcctcgtcaaatcctgcatcaaaaggacgatcggtcgacgaattctcgactacgacgatttgagcgcattccttgccgaaattgaggccagcgtcaacagccgcccgatcacatgggtgtcagatcaaccggactcatcgaagcccctcactccgaaagaccttatccagcccggccttcccaacaacttggaaatcgtcgactctgatctcgactacgacgattgcctctccggtcccgcgcgtctcgcagcactttggaaagcttacgggaggccgccgaccatttctggctcaaatggagtcatgagtacctcctcgccatcagagagcgcgccggatggactcataaaggtccccgccttcgaactcccaccgccccccacatcggccaagtggtcatcgtcgaagaggacctccgcccccggaatttatggccgatgggcatcgtcgttgcactaa

SEQ ID NO: 55666 - DNA, 393 bp, Heterodera glycines
atggccataaaatatggaccaaaaatcgcaaaatatggacataaaatggcaaaaatcgcgaaatatggacataaatggcaaaaatgtcaaaatatggacataaatttttcaaaattgagtgcaaaatttcttcaaatttattggttgaaattgcatatgagatacatttccaaattttttgactcggtaaggcgctttgacaaagacggctttcgttttgcaattagtcggtcaacattcggaaattggtctcgaattttttcggcaattacgtgcaatcattttaaaagaaaaaaaaacataaaagccaaaatttattaatttttttagcgcaaaatcaacaacaaaagcgaaattttcgcttttttgcttatttttgacataatttattaa

SEQ ID NO: 55667 - DNA, 155 bp, Heterodera glycines; identical to SEQ ID NO: 51421

SEQ ID NO: 55668 - DNA, 839 bp, Heterodera glycines
tcactgggactcaattctcctgcatttcaatcactgagactcaatcctccagcattccagtcactgggactcaattctcatgcatttcaatcactgagactcaatcctccagcattccagtcactgggactcaattctcatgcatttcaatcactgagactcaatcctccagcattccaatcactgggactcaattctcctgcatttcaatcactgagactcaatcctccagcattccaatcactgggactcaattctcctgcatttcaatcactgggactcaatccaccagcattccagtcactgggactcaattctcatgcatttcaatcactgggactcaatcctccagcattccagtcactgggactcaattctcatgcatttcaatcactgggactcaatccaccagcattccagtcactgggactcaattctcatgcatttcaatcactgggactcaatcctccagcattccagtcactgggactcaattctcctgcatttcaatcactgagactcaatcctccagcattccagtcactgggactcaattctcctgcatttcaatcactgagactcaatcctccagcattccagtcactgggactcaattctcatgcatttcaatcactgagactcaatcctccagcattccagtcactgggactcaattctcctgcatttcaatcactgagactcaatcctccagcattccagtcactgggactcaattctcatgcatttcaatcactgagactcaatcctccagcattccagtcactggaactcaattctcatgcatttcaatcactgagactcaatcctccagcattcca

SEQ ID NO: 55669 - DNA, 461 bp, Heterodera glycines
atggccagcggatttgggatgtttttgttcgtgaaatttggccaattttttctgaaaacattcgctgtttgggctttaccggtcgtgatcatttggacaatttgcgtcgtcgcacttcgccgacaattctcactgatctcaaccaattggtttcaatccattcatttggtctgtcgcccgctgcgtttggtgatggttttgatgtgccaaattcaacaatttctgctggccaagcattgtccaaatggttgcactctccgagaaaagatggccaacccaagcgatttcgttgtggcagaaatttgaacgcacaagcggacttcgattgggtcaacagtttcaaggaggtgtggtgcggagggaggggggagcagggcaaaatgtcgccgcaaatttttcttttaattttaaaaaattattaaaaatttagttatctagcctaaatcaaaaaaaaatcataa

SEQ ID NO: 55670 - DNA, 2528 bp, Heterodera glycines
cttcagaagacattaacaaactcaagggatggggtagaccctaattattcgagaacagaggacggaatagcattcaaaatcggagaattacctcacccatatgttaaaaattgttaagcctatttacattgacgtttcacagggatcacagaaattatttttaactattttttgagatgatcaaaaaatggcatacgaaaaatattcatatgcctacctagatagaatatgaccataaaaatatttattttaaataacttcagtactgtaactttattatatgtatttaaatattaactcaaaatatcaaaaattatttttaaaatttaaagttggtgtcggattttccagtgccggattttccgctagtgtcggattttcaagcggtgtcggattttccgcttgtgtcggattttccagtgtcggattttccggtgtcggattttccagtgtcggattttcctagagccataagggacagtcgaagtagagaactgaaacaccgtcaaaatttctatgcgatcgagttttagcttggataaggatttatttaaacagagaacacaataatttatttatttaatggtagtatgtatagaaaaaaatatatattttttaaaaataataaatgaattgatcaaacaacagttgtgtcagagaacgcaataaaactgagatgagttggttgattatgagcggcgggaggggtgggcgatcgtcgggagccaaaattgggatgatggcgaaattgtggaacattttggggagaaatgggctcagaaagaagggccgaatttgactaaaaaaacggaacgaaaaaatttttaaattttagaaaatatttggggtgaggcgcaaaactcaccaaaatgccattgcccgagtcaattagcgcacttagcgatttctcttcggcgggagacaaattgccacagcagcgaaaggcacaaacacagcctaatcagcagagaaagaggggaaaggagagataaaggggaaaagaaggcagagaaaaaaagggatgaccagtgatcagagaagtgagcagacaggcgacacccaccgcaatcaccagcgacagagtgcctttcgggggagggagtgattgaattgatcagaaggcagtcttgacaccccccccctccccctctggccaattaattaccggtgtccactctcgactcggggtcgcctcgcaattcctcgaacatttcacctaaagaagggacgacaaaatcggacgacacccaactcgtactgccccaactcgtactgttttttgacaaataaatggtcataacttttgtcaaagtcgaccaaattaaatattcttggtaccattcgatagcccttaatgttctctatctaaccaccaagtttcaaaaaatttgataaagtttgaaaaaagttatggacgaaaattttttttttacaatttttggccataacttttttgaaaagcaataaaattttcttgtattttgcagatagatggagaacattaagggctattgaatggtaccaagaatgtttaatttggtcgactttgacaaaagttatgaccatttttttgtcgaaaaacagtacgagttgggtttttaccgaatctcacaccaaacgattctcactgagctcgcgaacatttgttgcattgctttttacttatatatgaaaattcattaagtgttataagttgtttgatggggttaaaaatgtggaagagaaagtgaggaaatattgcccttttccccttttctatgttttctctgctgcaccactgtttcgcttctctctgatttctttgaattagaatttgcgggctccctgcgcgatggaacttcaaattcttcattaccggtaatcccaaaaaatcccgcaatttccaagagagggatagctgattagggtcaagcaaaatcccacgcgggattcccgcgccgtgctctattcaaaaggcaccgaaatccggcattgatcagcgtaattagtcagctggactaaatcagactaaaatattttattttaaagatgttttaagttttcggagaaggcgtcgtccattttcttcggccatttcatcatcgattgttccggcttcaccttcgtcgactgtatgggcgtaaatgcactcaaagaaatacttattttgttcaattacaattacactaatggaccctaattattctaatgagtgtaattattagaaaagtcattaatagccgaaaaaataacaacagattttcaccgaaatgcgcgagcaaagagttcttgtgtattttgcagcggcaaaaggtgggcgttatttaaaacaaattgtcgaaacaaaatgccaaaataatttagcgcccgtgcgcgatctgttcgaaaagtgcggctttttccgctacgtgcaaaagcacaacttttacccgacaattcgcgacgcggtggcaatcgcgcggaagcggcgaaatgcgtaagcggaaaaaataaataaataattaaaatgtgaaataatggtaaaggagggagagggaagcttaaaaata

SEQ ID NO: 55671 - DNA, 599 bp, Heterodera glycines
atggcattttggtgagttttgcgcctcaccccaaatattttctaaaatttaaaaattttttcgttccgtttttttagtcaaattcggcccttctttctgagcccatttctccccaaaatgttccacaatttcgccatcatcccaattttggctcccgacgatcgcccacccctcccgccgctcataatcaaccaactcatctcagttttattgcgttctctgacacaactgttgtttgatcaattcatttattatttttaaaaaatatatatttttttctatacatactaccattaaataaataaattattgtgttctctgtttaaataaatccttatccaagctaaaactcgatcgcatagaaattttgacggtgtttcagttctctacttcgactgtcccttatggctctaggaaaatccgacactggaaaatccgacaccggaaaatccgacactggaaaatccgacacaagcggaaaatccgacaccgcttgaaaatccgacactagcggaaaatccggcactggaaaatccgacaccaactttaaattttaaaaataatttttgatattttgagttaatatttaaatacatata

SEQ ID NO: 55672 - DNA, 954 bp, Heterodera glycines
atgacgatgtcggtcttaatgaatggaactgagtcggttcctttgtctttggctgtggatttgcgccaggagaaggcgtttgatatcggcgtaggagtttcgaaaagccctgaccactcagaggaatttcttccggtggaggccgatgtgccaaatgtcgagaacaacgacttttcaagcaaaacaattttgtgtgagcaacataccggcggtgtaggcacaggttgcaaaaaggataacatgtttacaaagtggtctcataataaagaagtaaaaaaggggttatgcaattcttagacgcattggttttttgaacctctaacccggattcgaacatttttcgaaaattaaaattcgcgtttcttgcaaaaattgttaaggcattgttcgaattttacaataaaacacaagggattcagatatgaaaacggaaaaacacattggctgcattcaacaagcaatgttagtaaaaaaaaatgagaattttaaattttcaaaagagttcgaatctcagttcagggtacgaaattaaccgaaagaaggccagattcgcgctaagcgcatcggattaatttttgggaccgataatctttaccattgccttaaatagatgctgtcactgctgacaatgaacactttcactttggccaaaaccgtgaggaaacgattactttgaatgatgtgcatgagcaacagaaacagagcgatgaagtaattgacagtggttatcgtgatgaggaggcaaaacggcagtttggaatcacttcccggatcgaaatcccggtttcgcttcaaaaattcaacaaattaattgataaggtgcgagtttttaggaaagcaatgacgacgaattggacaatgaccagccccaaaaatcaacagcaaatgccaaaaagaaacgtggaacaaagcgaaggcacatgcccagtgttgctgcgacaaagtgcctcagca

SEQ ID NO: 55673 - DNA, 84 bp, Heterodera glycines
acaaagacggtcacagttcgctggaagtgctgtacaaatgttcggcgtgtggcaaaaatgtgcacagaacttatgagtgcatta

SEQ ID NO: 55674 - DNA, 1241 bp, Heterodera glycines
atggaacagcaaaatgatgactgtatagaacggaaaagctctatggtcttacaagaatattctgtgatcgaaagtgaggaatccatgctggacccacacgtaaagccaaaagcggtaagggaatcattaaaggcaaatttgtgggaatttggattttaggttcaccaatgtcccgtatgtaacaaaatcttcgtttccttcaaaggtaagtttatctttgcttttatggagctatcaattctttgaactcaggccttcaacaacacgccatcattcacacggatcagaaaccatttgaatgcgacatttgtcgaaaatcgttcagattcaaatccaatttatttgagcatcggtccgtgcatacgggcaccaccccgcaccgatggtctgtttgatatttctaaatcatgaaaaaatgtaatttttttgtactctcccattttcagtccgctctgtggcaaaacgtgtcgtctgaagggcaatttgaagaaacacttacgcacccattgcacaactaaagaggagttggaagtcgcttggcagcctttcgcttcgaacagacgcgccccagcggaaatcccacaagatgccataataatccgagcaaatgccgacccttccacgctcttcacgccatttgaacagcctaagaaacagcgcaagttggggctgggcacggacgtggcgtattgggtggacagaatcaaacgatgtgagctgttgccacctgtgccgatcagcagtaaggtgggcgagttttgaatttcaatgctcacaatcagcttttccatgcgacggagagcagagattttttgttacaattccgttgatatgatttaaatgcttgtttttcattgccatattttgattttaatcagatgtcaagattggctaatctcgtcaaaatggtcgaggaggggagtctggacatggacgggttgtatcaccatgctgggtctgttgatcaattcacaatttctttatttgttttttgcagtgctattccattcgagcgatacgaatgtccgttttgcaaatcagttttcttttcccccattgaatgtgcagaacatatggtgggttatctacgcgacgaatgggcgggggagggttaatgcggaaaactagccaaaattttcggaaaatttcctttccccactttgccgggttaatattttggatagtaaattattttcaaaaaaccttaatatttttactagtacactttaagaagttagaaa

SEQ ID NO: 55675 - DNA, 956 bp, Heterodera glycines
  unsure (1)..(956): unsure at all n locations
atgttttaccaagagcagcaaattatgaaagtttttgcgaagcttgagagcttcagttgccttatgtttttcaaaaaaggagatagtgtagaaaccaacaattttanagtaaataatcaactaattaattagcataagtcatttanattattaaaaataatttgttataataattngttttgtttgttcaattcttttaatagattgactttaattcaaagaacaaatatgctaatattaatgatgccgacgcaaaacaaatcattgatgacaatctaaacttagattttggcgctcaacaaagtcgcatttttagaaatatctttcaaagttagtgaaaaaaattgtattaaaaataaaataattttcaaatttttaaattaaaattatgtataattattttaagaattagaaggcccaagcgacggagcaagctcatcaccagcatcagacgagaacaaaaataagcaaaaaggcaagataatcagttcattattatcgttgggcggcaagaacaaagagaaaaagaatagacagccgaatgttattgattttatataaaaaggacagtaagggatgagagaagatacagtaagaatcagggtaactattggtgtggagatattgccgagtatggaccacttcagtcccaaaaatgattaaaacacaaattttggcgtttgtactatttttccttatttcaacatttttttggaaaatttattaactgaaatgaataagaaaaaccaaaaatacacccgccccctaagaatcgaccaaaaaaatacacttctaaaaactggaaaattttctcaaaagtcctttttttcttgacaaaatttttgatttaaaaaatgttaatatttgctaagaaaatattagaaatagttcattaaaaaaatcaggaggaccgaacttaacattttggattcttttacatgtgtattcatacaaca

SEQ ID NO: 55676 - DNA, 1832 bp, Heterodera glycines
atggcggcttggcactttgagaaattgttacgtgatttttctttccaaatttcttcgccggaaaatgacaaaaaaatttctgttaataatcgaagcttaccacaacagaatgacactttccttcaaattgagcaatgcgttagggaaatgctgttggaaaaagaaagcagaagaggtgagctcggctcgactttttccatttgtgattttctgcccgaaattacgaaaaaattctttcaaattcgattatttttctgagaatgccctctcaattgggcctatttcccaaaaaagtctccaaattgtcagttggtttctttccattccaatttgttcttcgcttagatttgtttcattgttcccttcgtccggcacttggtcatttcgtcgctcttttgcttcattcttttggcaatgattccgacgttaatttacggtgagaaagtttcgtccgcaatttagtttgttggtttttggattttcaggttgagaagtggcgaatttctgtgtttgcttactcagttggattttgccgatgaatccgctgattttgttgcttttgttcttcccgggattttttcgggctgtcgtcaggtggcaatttcgaagagtttaaaagcaaaagttttacagattctcttaaatgttctgcccaatttgcattcaattgacctcgtaaggtgcgcttgtgaagtgagtggggaggggaggaaaagccatttcaaatggcaattaattaatgctaattgaaatgaccaattttcatatgattttacctttttgccttcattatcagctggtcaccaactccatttgcatttccttctcaaaaatcaatgtcaccgattgtttgagtgtttccgttggaaagtgcgtaaaatcgccgtcctctgaaaatgtcctcagctttcgtcgcgactccaattggctccaaacggcggcccagcgaattctcccccaggcaaaaatggcattgctttttcattttgttttctttttcagatttgttcacttttgtcacatctttccgcacattccgttgactccgttcgctatgagtcagccaatattttatcaaaaattcaacgacaaattccgtcgggtgtttgttgtttccatttgttacctctttgctatttatacactttttccagattactttggctcttcctttgtcaaaatgacaattgatgtctcccttttgctttacagtgacacaatgccaaagtttgcccttcgcgtaatttcccagcaaatgctctcttaaggacacgccatttggcacatcggataattgacgacatacggctccaacaaaaggaattattcgagtcgcattccctcgacaaactcaaaaaggcaatgaaatcgctcgaaagtgacgtcaaaaatgcatccgacggcggagtttacctccaaaatgttagtttttactacttttgcttataatttctcttttttttgaacagttcgtaaattgtgctcaactcgttggtccccatttgttgggtcgtctgtttaatttgccagaatttgttgacaaatttctttctccattaattcggctgatttctgttgatcacaacaaagaaatgatttgtgattctcttcatcacaaaacaaatggtttttaatttcaatctcctaatatttccatctttttagggctccaaaatttaccacccctaaaatatgggataaacgcaaaacatttgacacaattggccactctcatcgtcgaaactcacaattcagaggtaatcggagcattttgaagaattaaaaaaagagtatctttaaattattaattaatttccatgggttgccctcca

SEQ ID NO: 55677 - DNA, 1179 bp, Heterodera glycines
atgctactcccttttcaagtttgtcctcgatttccgctcattttcgctgaattggtctcgcggtgtttttctctccaaattattctcccccaaattcgaagtgttgtcgccgaacttttgctttggctcgaccggagtgatcagaagcgaattatcattttggccaaagcacttcgcgcttatttaagcgcacttaacgaatggtttcctaatttgaagccattggttacgaatttgagcaaaacgaacgagaaatatgccaatttggaggagacggaaggggagaaagatggccatggagaggaagagggggcggagaaagtggacggacacaaaaagcaatgggaaggagacccaaattacccactggtgaaggacgtcgtgtccatcctgaacaggtggggtgcacaacgttaaaaataaattgtcaaacttagagaatttttggaaaaaatcagaattttccaataaatcaccgaaatttttgaaattttttaaaaaaattttttcgcaattttcttgaaaaaatcttctaagattttttttggaagttccttttacgtattgttaacaaaatgaaattccgtaagtcagaattccaatttaatgtgataatttcgtttttctttacgactaaattattttgtgtccccttttggtaataattttctatttttttcattgaacgtaattgaatttacaggacaaagcatttcattgcgtccgccaatctgccccttttgctaattgttcttgacgttctgcgcctctctttgctttttgtcagagattatgaagacgaactattgccaatgattcatcaaaattggatgggacttattcggctctttaaaattggcactgccggtcatctgttggattcacaaaaacttattatgatcaaggcgattgaggtcaattgaaaccttatagatagttcttgagattaattcccatttttaggttgtttcgtgcatttgcaaattgtcaaaagattttgtgtatcggaaaattgttcacgaatttgtcccttgcattgttgttttattgagggctcttctaaaggaatcacaaaatttgggcaaattgtacgcacagactgccacattcaaacttcaatgtgcaatattagatgggtacggtattttaattgaatcatttaaaaggatgcctcgcaaa

SEQ ID NO: 55678 - DNA, 1079 bp, Heterodera glycines
atgaacttccgtggtgcaacggaagcatatgccattgttcattcaatgccatttgcccgtctttcgcatcatgttgtcaaattggcaattcatttgccaaaccaacagcccattgtatatagggcattccagctggtgagcaaagctcaacaaatccagcaaggcgaactgccagaaacgcagtgttcagcctattggaaacaatggcaaaatgagtggaagaatgatccaaagtttaaggacattcttttcgaaaaagtcccagagcggttccgatgggcaaaggacaaatgggtcctgtacaaaaggcagcaaattaaaaggccacctatcggccgaattgttcctgtacccccatcggacccggaaaggttcgcgctctattcacttatgcgtcactttcctggagacccagaccatcttaagatggttaatgggttgctttgtacctcattcactgaggctgcaataatgcatggtcttcttgaagacgacaaaatttgggacaaaactctggcggaggcagctctgtcgcgctggccagatcagatgagatggctttttgtgagcatcctggtctatggccagccgagtaatgccatagaattgtggaacaagtacaatgaccaaatgtacaatccgcaaggcattattactctggcacagcataaagtagcagagcttgaagccctagccgacattgattggcggctgcacagctgctttaacttaagctgtgtgcattttagcctgccagacccgccaacttcaattgccaaaaatactgacgcggcaattgaagagtttttctttggcgatgatgatttgaatttgcctccagggcaaccaaatcctcgtccacagccaaatacccctccgccacttaacagcgaccaacagaaggtctttgatgctgttttgttggcaatacagtcgaaccctagggattcgactgtcccccgccgtttcttcatatacggcgatggaggcacaggaaagacattcctgtttggccaaattattaggcgcttgcgaaaggccccatacacctacaaagtgcttgctacggcatccactgg

SEQ ID NO: 55679 - DNA, 519 bp, Heterodera glycines
atgcgtcttcttccgttttgcttcttcctcctcctccccctccttttgtgcttcttccttttcacttttggctcttcttctccgatcgtcgattccgaaatgtttctgcccccgcgcttttacagaacaatttggcccattaatgcgaaaagaagccgtgagtaattaggcgaagcatcattaaactaaacctctttatgctttagcaagcatcggactgtccctggccgaatatatggccgcaggaaaccaaggccaggagcaatttcatttcatccccggaagcggaaggaggaagtgaatgccaaaaacggacggaagatgaagcggaagagcggaaatgaagaagaagaaaagcgaatggatgaaaagaaacgccggggtggaatttgtgaaggatgaacaagaaataactgctgttgatcgattgacccttcagtgatctgatctcattgaatatttcatgcatttttcacataactttatcctttccaaccgatggtgagcaaaagtgagcga

SEQ ID NO: 55680 - DNA, 1005 bp, Heterodera glycines
  unsure (1)..(1005): unsure at all n locations
atgcgccgtaaaaaagtaccgcaaaaagaaaaatgtaaaagattccttaattaaaaaaatctaaattttggggtcaaaacagaatccaaagccgttgtggcgaattaaaaaaatggcgactttgtttgtgtcggtgtcattggcgttgccgccgcttttcaccgcggcgcgccaccgggcgatgccaatgacgcgagggaggaggcgtacgacgatgacggcaccaccgctgcggcagccggcaagaaaatcaaatggtggccgatcagtgccaaagagcctctgcggtggccaagggccctcgcacagaaacacgcgtcaagccgacacaaaatgccaatttaaaaattcagtaaaatagattcgatttaaattttcatgacacggctgctaaacatttttgccagataaaatagaaaaataagttaaaactcggtgctatttgatcccaaaaagagcaaaaatgctcggttttgagcgattgtgccatgtgctcatgggttttcggcggtctaatcacgaatttgatattcaaaacgagttgggtttttaccatttcatgcttaatttaagggaaggaaggggcacttctaattcaaccaatacgatttatgacaataaaatatttataaacccaattgaaatccttggcttttttttaaatgaaccgtaaactgttgctctcgaaaatttcaatccaacccgactgttgaaaagctcgttcactacaatttaagactatttactaaaaaactttttaagtgagacatcaaaacgtttgatcattttaaatccatttcagggtccgagctcctccgaaatgattcgttgggcttcactttccgaaagaaatgggatgctgtatccgtcctcgcctccattcgcaatcgcatgttggcaatgtcaatgtcagcgttcaaaaagatcatgatgtttagcccaaaccttaattnatctatcagtgatgaggaaacaatggaaaagataaagagctacagagcatga

SEQ ID NO: 55681 - DNA, 493 bp, Heterodera glycines
atggcggaggacgacgacgaagacgtgcaggaagaagctggcaaagacgtacagaccggtgagtgattaactatggggttggtatacatccccttaaccatttctatggggatgtatccatccccttaagcatttctatggggatggtatccatccccttaaccatttccatggagatggtatacaacttttcataataaatctttatacttttagggttcaagcaaaaggctaagaaggttaagaaaactttggccaaagtgttggcgcagcgtgccaagaagcctggggagttgccggccgccatcattggcgatgatgtgcttgtttaggaatgccaagagaagtgtaggcgctactaccatcagacgtgtagtaagaagtgtgtgtgccagaagacagaagaagaagaggaactgaaacgactgcagtaagaacgccggccctccgactaatgtattttcgggttcatttttttattatttataataaa

SEQ ID NO: 55682 - DNA, 931 bp, Heterodera glycines
atgataccgaatccattgtgtaccgattggatgagaggtgaacaacttttaactggttatgtggaacgaggagaccttgtagaaattcgccgtggatcttacatggtttttgcagtttttattttttatctgaccatttttttcttagcattgggctgtctttatcggacatatcagtggacaaccgcttgtaattcatatttcgacagagtcatccgatatgggaattagcacaaagaaggaatttgtccggaagatggccaagggttgtgctgctattgtaatgcttctcacatccatctgttcaactttacaaagactcgtcctttctctccgtttttcatttctcaatttgttcaaggtccgcagcgacccttttctgaatgttatttcgactgacttctgtcgtgtcaataattgtttggatgcaaatcgacgaccttttccaccctcaattattgtcgaacgggcattgactaaggcgagttatgcctatttaattatgtttaatttactacagatcctttttagcttggaactggtgggtataatctcatcaaaaacaactgtgaacactttgctaaatggtgtcgttatgctcttcgagaaagcgagcaggtgaagagttttttgtcattaaaccaatttctttttttgactggctgtagagcattctgggccatgcggggatgatctgtgtgacggcgatggctgtaagcacttcaattcctgcgggcatcgctgccggtgcggtcagttttatcgcgttgaaggcgggtcaagcattgagacggaagcgaattgggtggtcaatcatttgaatgttgaccactgttaaatgcgcacgaaattttgtaaaattcattccaaaccattccttgcattgtcagtttatttcttatttgtatctatatatatggtcgttttggaa

SEQ ID NO: 55683 - DNA, 220 bp, Heterodera glycines
ttttagcttttctaaaaattaactgctgccaaagtcttcatcatgtcttcaaagcctctctacggaaaggatgttgtgagtttttctgtctaagcagtttaaatcttaaaaaattgcttatcacaataacttgataaatatgtacacgaataatggcgacgtcaattttaacttaaaaatttagcttacggaaggttcggagatctcgcgtgaattggag

SEQ ID NO: 55684 - DNA, 792 bp, Heterodera glycines
atgagaaggaaatccgccggattgtcccttttattgctcaagcacagcaggcggtcccatgagcagctccaaattcccaatgcatcggcccaggcactgctcagagttccgcccgtttatactcaacagaagggcagtgccgtgccgtccttcgcttcatcttccgtaccgtatgcccaacaacaacaacaacgacagtacccccaaaacagcgttcagtcttcgccccactcgcactcattgtcagcagcctatgcacatccacaaccccttttcgtgccctcctcctcctcgccaccgttccaacctctccaaattcgaccccagcaaagtcccgccgcaattcccagcgttcggcactcctccgtcccccgaggggatgacgttgaccgggcgaatgcctcgccaaaaaacaaaattccaccggcagtgtgcgcagttttctccgttttggaagtgctttttggcgtcgtctcactgttcgtgggttcgttcgtgcccaaatgctttgagtctctccaaattcgcccgacccattcgcaggtgcgctcaatgcgaatccgtacaattgcctcatccaacccaacgtgcccatttatttgatcctttccggcatccttttgatcatcaatggagcggcacgccttttcctaagcctttctgcttctccgactgactcgacaaagagaagggacacccgtcaaatgcgtcattcgcacggccgtcgtcccgcgctgacttatgccgttgagggcatcggactgttcgccatcctcgtcgtcctcatcttgg

SEQ ID NO: 55685 - DNA, 1213 bp, Heterodera glycines
atgtgcagtgaactcgacaccgatgccgacagcggtgatcagagtgacggacgaaatcgggttcagcttgacgcccgcaaggcccatgaagccggccaactccacggtcatgctggccacaacgcaggtgacctgtgttgtttggggataaatggtaagtgatcagaaaaaggaaaaagcaaagcaaagaaacaaatgattaggaagtgctctgaatgagcgggaacgatcagaaaaaggaaattgtatgatttgatgtcagtgatgtgatcggatggtggaatggggaaagtgattagagacgagagaaataatcagaaataagttaaaaagttggcatgaaatgatgtgatcagaagaagtgatcggaaaagcggaaaagtaattagcgaacaattaccgaccatgtcaaaaataaacaaaatatgatttatttatcagaaacacatttagaaatgtttggagaatttgaatgaccaaaaaatttaacaaattgtatacaggagaatggggttggggcctcggcaagacaaaaaaaaaaatttttttttaaccaaccaaagcggcggcccacgggttgaaaatgatggtggagataacgcagaagacggacacggaaatgatctaaatcttttttttgtataatttgttagataaattcatcaattttatatattttaatgaggaatttttaagtgttcagcgaattaactttttttaaatttgtgatgaaaatgtaattttttttaatttctaaaaattttttttttaaattaagaaataatcaagcaaagctatgaaaaaatcctttaacttttagttgaatattttatttttcgtataataattgttcaccaaaaagaaagaaaaacttacgccaatagccaacaccaagtagtagtccaagtgcaaatactgctcccaaaaggtgaaagcgacgccttgaaaaaataaatttgtattttccccgaaaactttcctaaatttccaaaaaaaaaacaccttccgggtagttgggcaggcccgcacggctgtaattttcgctgattgccctgatctcgcggatcatgcgcatgatggtcggcgtgtcgcgcaacccgtcacagtaaaacggaattcggctgaacaacggcttcggcgcgggcggaatgaaatagcgctgagaaaatgggagagatacattgaaaaatgtatgcatataatttgaaataaa

SEQ ID NO: 55686 - DNA, 1018 bp, Heterodera glycines
atgggccaaatgcaactgttggccaagcattggccaaatggttgcaaattccgagaagcgatggaaagccgaagcaattgggttgccgtgcttctacgtcagaaatcgagtggtatgcgtagtttggtaacactggagaattggtgacccggaggaaaataaaataaaaatttttcattcgatttttctagtgtgaaaaaatacccgattaggggggacctgctgagctcagatcaattaattgaatttatttattttttgtgttcaggtgacatgaaaacttatttctggggttttgggtcgcttatcacgacattcattttggccaaaccaattcggaactgcgaaattgagaataatagtatttaattccacatatgtatacatattgttaataaaaaaggttgattttcatttgacactcacaataaatggtcacactaaaaagactcgttggcccgtccgctcattcggtgaatggcaatgtgattagtaaaaatctaatttcttgaacctttaaaattaataagcaggaatttcggactgaaatgttctaaaattttctgaattcgtatatattttttgctgatgagtgtctaggatttgaattttcggttgctaaatatgaccatcatcagaaactcttttaaagcgatcatggcaaacagcgtacgaagttgcaaaaagcatctttcgccaagcaaatggaggaccttttttcgagaccacgaaaatcgaggtgttagccccaccagtgggcccagaagacgatggaaagatgtacggcgaatctgggtcggcagcgattttaatcgcgctgtatgctttggccagtgggctttttgtgaagaaaaacatagccgtatcagcggtgatcaaaaaaaacaaacaaattggcaaggttggtggccttcgctataaagtgatggcggcggcgaaagcccgaaaaaccactggtgtcctgtctacagaaaataagacagagttcatgaagttcgaaaagaaagtgaagaaacat

SEQ ID NO: 55687 - DNA, 1167 bp, Heterodera glycines
atgccgagcaatgtgatgatccgtaagtgttcgataatgattaattaatggtgtcaaatttaaactaattaattcataaatttattttggattctgtcttgctaacaatctgaaaatggttgttaaaattcgtaaaatatctttaaatatttttaaaaatgtaaatattacaaaaaaaaaattgacgctatttgcaaagtgacagttaaccaatgaatcgaacccataaattttgaaaaatcaaatttccaatttttaagtttttattcgaatacacctaaaaaaagtataaaaattctcttgcgatggcatttgccattgcccccaggcaaaacgggcgaaattcatttatttaaaaaagtataaaaattctcttgcgatggcatttgccattgcccccaggcaaaacgggcgaaattcatttatttattttcctaaaatgggacaatgttggccaaactcaacaatggcacagaaaaaatttctccatattttcaagaaaaaaaatcaaataaaaaatagcaaagtacaaaattttaaattttctcattttaaagaatatgacaacaaatttgtgccaattgagcaaaaatatttgtcgtgccagaatgtgcccaacggcggcattgggtacaattgtgaatttagtttggacaatttggaggtggacgaagaaagctcgaagctttcaatttgggccaatgtgcgtaatgataacagcagctcacttcaaaaattaaccgaattggtagcgaaattgcatttaattaattaaaattaggctgaaattaattcttttaaattttagtttaattatttcacaatttttgtactccccgcccttcgtggagcaaaaaagacggggaattttgtcggggatggctggagaaaattaaaaaatatcgaggagcaattccttttgggcaggaaattcttagacaaaatttgtcgtggatggccagagaaatttcaaaaatgataaaaacgctcattagccatttggtatttttaaagtcaatttgaatttttacacaatttttggcaatttttaggcatatttttagtgcgtaaattcacattaattaaatttcttaaaaataattttaatttcgtctcatataaattttatttccattttctgtataaacatatagtatatataataaa

SEQ ID NO: 55688 - DNA, 1524 bp, Heterodera glycines
atctgtttgtgactgcaaattcatcatgtgctccaaagagcgagtgagtggaaattatgtaatataatttaaaaaaagggttaaactattttaaaacaatcgaatcctgacaaatttggtatcgttctaaagctcttgagagctaggtctaaaaatcagggaatgaagtcgagccgatgcaaacccggactcgaacaaaaaactcaaatttaattttcgccaatatgaattatatgtcttgccttcagaatactattttctgtttatttcatgcagactaggcctaagcaagcctaagctgaatccaaggcctaagctgaagcctaaacctcagttgtcccagtgcactgatggcgtcggctgggttcatttcctgatttttagactaagctcgacaagagctttcggatgtaccaaaattgtcaggattctatcgttaaaaaaagttagagtgccaaatctcccaatttttcgagtgttggtcggttcaaaaaccggttttcacgggctgttcattacagtacacccaaaatttttaggagcgtattcagaaaaaagtaaaaaacactttttttaaattttaggaatgcactcgtaaacgggcaaacagtgatggatgttatttatttgaggtgatattcaaattaataattaatttgtaaaattaaaattctctaaaattttgtttatgcagtttttcgttaaaattataattcacggttttttttattctgaaatttatttttgatatataattagttagaatttttttcgggttttaaagcagtttttcgttaaaattaataattaaagttttatattctgaaattatttttaatatcgtatttgttagaatttaacgaatttaatatatttttttaatttcatcctcaatttttttgaatttatccaaatgggaattttaaaattttagtatgagaccggaattgccttcctgccctctcaaatccgaccgtcaacacatctgcgacgccgagagcaccagcagccacatgttcaattggaagattttaaaaaaaaggtaatctgaccaggggaaaaatcttttttttggtttcaaaatttgtgtcgcggtatttggtgatttgtaacttggggccccgacatttgggtaaccgacacttaggattcctttttttgagaccacataaactccgggattctgttaaaatcctttggccactatttcaaccctaaatgtcacattaaatactttattttaattttaatttgcgcgattaaattaatatgtgatatagtaattttaaaaaagagatacagtatgacaatgaattttgatattttttttactgtatttattactgacaactttaccgggtcgcaaatatttttatttatttcatttaaaaaatgttcaaagaactgtgagcagaacaatcctgaaaatataatttaaacaattttacaatttttaggaacaatttccttgcccgaaatgtgaccgagtcttgccctccaaacaaggactgtcaaatcacctga

SEQ ID NO: 55689 - DNA, 124 bp, Heterodera glycines
aaattgtacaaaacttactggttttaaaaaaaaattaaaaaatttacgacttttcatcaaaaatttcggaagtcggaattccgaccccaaaaatgtcggaaatcggaagtctttccgtgccata

SEQ ID NO: 55690 - DNA, 1563 bp, Heterodera glycines
atggaacgaaatagcaaaaacaactttctaaaacgattggacaagaaactgctcccaggctacatcatcgagatcaacggcaaactgacaaaatcccttgatgaaaatctgccgattacgatcagtttactaagtcagactgatgatcccaaatttgccgagattgagcatataatcaaatgcaaagaagaaacgggagtgaaatgtccaggtgaaaatatgaatgatgagatggtttgtttaagcaaattttacggtgccaaaaaacacaaactttggtttcgaaaattttgataatttttttaattagctttcatatatatagtggagaaccagattaaattctttgtataatttgacaaggaaatttaaattttcataaaccaaagacaaagaaaatcattaggggttcatttttaggctttgtggccacggaaagactgctttttgtaactatgtgtcgaacttcgaaccattttactaaaaataataagacattctgaaaacagtgaacacatttacagaaatcaattaaaaattcttccgttcgttttttgtcaaccacaatcataaaaaagttacagcaaaaaatattttaattttatatattctttttagctttttgtccattgcaacttgtctttttttggaattcttcgtcagcagctgtacaattaaatgtgtttgcgctaaacggcattgaaaacatcaacatttcaacgaacaaagatcttcctcaattccctcatactgctggaaaagagatcaaattgaggatccacattgcgcatactagtaagattaaaggtttactttaattattaagatttttgatttttaaaatatttattttagggaggttagggatccagaattgaccaaaaagtgatcagattcgtgagcagtgaccccgaaacccccggggaagcgttttctcgctttttatgacaaacattttccatataaaaaggtcctccctccttttggtttttttaaagttttctccaattggaccttcacagatagcacaaacacaaatattatgtattaaaatttttctgcctaacaaattttttttaattttgaattttcaaaatgtgattattatttttttttaataattttgtttcaaatgcttatttttaagaatacttattaactgagcatggactatcagaagaaattccctttggagatgaagaaaagagagcattgcccccttggcttgttgaattcatccacgtaatttataaaattattggtacttttctgttttgaaggcgcaccccatttctgatcaataatatgacatacatttcgaccaatttcgaaccccggacccgaacaaaatccaaaattctttatcaccaaaatccacctttattgtccaaaaccgattcaaatgcattgaatggaaatagcaaataggatttacgggcattccatgcatttgaatcggttttgaacaataatggtgtatgttggtgaaaatgaattttcgacttttgtcagaattcgggtccgaggtcgaaatggatatcatatccgtgatcagtggaccga

SEQ ID NO: 55691 - DNA, 1515 bp, Heterodera glycines
ctctggtttaggattcttcttcagtacaacatttgtgatgtcgaaccaacaaaatggtgatgtcgctgttccggcagcagttgctccgaatgaacaacctaatcaagtccgttttacactttattttcccggagtatctttttctccctcttagaacaaccaatttcaactttggccctttctcaagtccattttgacccgtcttgtcatgttctggctgatctcgtcacttattcgaaactttttcggccctaaacaggaacgtgacgccgaccaaaatacatcattgaccggcggtggaaaaacgtacccgccctcttttaatatgttcatggcaaatgagcattttgacttatttgtttacctttctgcaaaggtagtgcaaatttctgttttttatgttgtacagtataatatctttttgcaattttagtccgaacgcttccatgatttcgacaatgttgaatctcttttttggcatgaacatgatctcgtttacggggattggacctccggtgccattggtgacggctctcgacaaaaggcggtgacgatgatgccaactccggaagtgctccagcggaacggctcactgtatttgcacgttttcctggtcaaacagggacagtctcatcatccgcgtgccaaaaattatggcgggagggaagtgagtgaaagaaaaagaaattataatttacccaattaaaatcaaagattgtgtactccagccatcaactgaacaaattcaaaaagaagtactaccaaaaaacagccaatttgctgacaggcaaaactggacaaagtgaattggaccgtcaaaaggcggaggagggagtgaagttcgacattttgaactattggcatccgaacattaccgtcagtttggttactgatttttcagcctggacaaggggttcgcttttcacaccgatttgatcttaagattgttttcggtttttaggtcagttgccggcacctttcgatgaggccgtcaaattcgacccagccagcaatcgctattacccaatcgttttcttcaatagttactggaacttggccaccgaataccaacctgttaacgacaccgttcccgcgctcaatttgaccgtcactttcgcgcccctttcgctgttcaaatggcaactttacgcgtctcaacaagttttgtataataccagttaattgtaagtattgttgctttttgagatgcgtggaaaatgggcccaaatgttcggcggggaaatcttcgaggagagcgacgccgaccaagacgcaatcaaacaggcactgatcgagacgagtcccgtgctgttgggcataacagtcgtcgtgtccattctccacaccgttctcgagtgaatttcacattttttttttcttgttcctttagctgcttatattctttctattttcaggttgttggccttcaaaaatgacatccaattttggcgcacccgcaaaagtttggaaggcctttctgtccgttcggtgctcttcaacatttttcaatcactg

SEQ ID NO: 55692 - DNA, 232 bp, Heterodera glycines
atgtggataaatcctcataatgagtgtgtattagtaatattcagaatttatttttaaattaaattttattaaatttttgtcagattttcatgtgctgctgcccctgcaataactgctgagattggaacaaaacggagcttaaccaagaaatgaaagatggaaaaagaattgatcgtcgcattaatttggactaataattaattaatttatttatttatgaaacataaataaa

SEQ ID NO: 55693 - DNA, 2183 bp, Heterodera glycines
atgtgcgggagcggtgccaaaaaagtgtggacacagcaaagactgacacggtggaaaggtggcattgtaaataacgaactcataacaaagttaaaagcctactggtccgttagtgggcaacccttgaaaatttagccccgaggctttaatttttcaacccccccccccccccctcaatagggggctgctatatatcaggggggagcttgtcattcacagcaagtaggggggaggcttttgttttccaccccctcccctcaataggggacttatatttgaaaggagggagacttctataattattttcgtaaaaataattttcgctaatggccaacccccaactcatttgcttcacccatcccaataaaatgagaatgaatgaacagattggtagctaaagccaaacaaacgatggtggtggtggtggaatttgtgaagctaacaaatggttacgtggcacaaaaaaaagcaaaaaaaaaaacagatagcaaaagcaaattggttttgatgatttggccaagtccacgacggaccatcaccaacaaatgaaccaatcgccaaaaggaaaatggaaaatctgtgctggtaatcagccgatccaatccatccaccgattgtcatcattttgagttgagcccaacaaattatgcacatatgtaatgaagttggtaatataatcaaaatgaaaagccaaataaataaataaataaaaatatacgaaaatattgggatggacttaaatggacagccttaaaaatcctcaaaaaaccctcattcggcagagataaataaactctcttcagatggatggatggatatgtgtgtaaatttgtattcggaccccccggcttaataattaaagccgccgtgggctctattagaggctaataacgataattatattgaaaataggtatgcacattaatttgtgttcaaaatgaatttcttcgaattcaattatatttttcttgaatcattttttcaaatttccataaacagaagaatatttgtcgttaatcaattaaattaatttctcaaacccatttatggggaataaaatttataaagtttccattcgagcatttaaattaataatcaaaaaggtcgttaattaattaattaattattgattaatagattgatgattatgaaatttattaaaattaataaattgtattttttgtcattttcaaagcatatactttttatatttacaaaaaagcaataaaaaataagaattattccaaatttttacaagatcaaggaaaatttcattgtcattaccagccttaagaataatttttaattaattgttctcaaattataaaataatttggtactttcctgttttgaaggcaaaccttggactcgtatttatgtgagtttctttggctcgaggattgtaagcaaccaacgtctatgaatttgacgaaattttggcaaaaattgttgcttttcatatgcctccaaaataagtcaatgttatctatccaattttttctaataatttcgacaaattttttgagcaaattcgtcttgaaactattggttcatttgaaaaagtacataaaatttccagtaatactcaaaactggaaattttaaaatttcagcactcgaaacacaaaaaagccgaatcttttaaaaaaaatttcttaatacttaaaaacccgaccaaaaaaaaaaattaaatttaaaaacaattacttttacagttaattgagaagctctaatttttttgttgatgagaagaatttgagaggaccaaactcaaaaaaaaggacaaattttcttttattttcaaaattaaaatcaatttaaaatctgcaaattcatggtcaacagaagaaaaatgttaatgagcagtgagtataacctgttgtagttgaacgagttcaatttagtcatcaaatttaggcaataattaattgaattttataaattttccataattagcataaacaattatgaacaaaatttagttttatttaattattaatatgaattaattaatttttttgtaaatggttttgagaaattaatttaataattaatcacaatttttgaggtgataattgacaaatattcttctgttagaaatttggaatatccaattaaaatcacaatcctaattttaagtgcatttgtttaaatagcaaaaaatatataaagtaaaatcactaa

SEQ ID NO: 55694 - DNA, 663 bp, Heterodera glycines
ccctagtaataaagaaactacaaagcaaaaaaggggcccaaaaacgttggaataaatgggaggagagaaaagcgcagacggccaaggcgagacaagcctatttggccaagagaagtgagtttttccatttttgttcataaattcccaaattttccaatttttagccgctccccagcccgacaccgatgccgaaatgccacaaccatctgaagaagggccgtcgacagaggcaccggcgcgggacaacgacggacgaccaacatcaactccatcaccgatgacaccgcaggaaatggacgtgccgtcggtggagatggtggacaccgaggcagcaactccgaacaattgacgccgctcgttacccagtccggccaaagcttcatcttctcgctgctcacgtcgttccatttgcacgcactcatctctggtggggactgatcagtgaacagggaatggagcatatgcacagaatgtgcaacaatttggtttaatgaataatttttcccattaaaattataaatccaggtcggtcgttatgctcatctcggcactccagagaaggttgttgagaagttggtgaaacacgtgacactgctgaatgcccttcactatcgaggtgtcgaaaacagtcaagaaaatggaaacaaatacccaaacttttga

SEQ ID NO: 55695 - DNA, 738 bp, Heterodera glycines
atgggcgatttggagacaacgctttcgacaacaccaactgcgccaatggacaccggagagacgaccccgccaccgctggccattgacgagcgatcagagcgcatcgaacaactggagaagcagctcaaggaccgggacgacaccatcaaatttctgcgcgagcaggtgcgcaatcgagaagcgctgatcagtgatctgcgtcgatcagtgatctgcgtcggcagctggacgagcacattgtaccaccgatggcaccaccaacgagcagcaaaagtgagtgaaaatctcacattttaattttaaaaaaccttcatttttcatttaaatttcaaaaaacccatttcattcaattttagcgcctccaaacagaggaagaccgaagaaaagggtggatgaactccagcgcagcgccaggcgcgacatcgtcgacgcaattgtgggcgtcatctatcgtgatcgctcgcgttccgcgagcgcgacttgacggggaacagcatccgcaaaatcctcgtccatgccgatcaaatggaggcccttttcgaaacggaatgggccaaaacaatttgcaaaacaatggcacatttggggaaaatccaaattttcaccaaagtaattggttttcatttttgtggaaataatttttttaaatttaaggcccagccattgtctccaggtgatttggatggactggagacggcagtttaccagttcaaggcatttctcgacgaacaaccaatg

SEQ ID NO: 55696 - DNA, 432 bp, Heterodera glycines
atggagcggcataataaaaaacaacaagcaaacattggacaattgattaaagaaaattgtgattggctctgtgccttggccaggactaaatccgcaaaaaaatgcaataaaatgataaagaaagcgaacacagaacaattgctttcacttgtggaaatttgtctaaacctagtcgcttcgcgtttccgactgaccacccgccagaaaaagagattgctaccccatgtggataccgtacgccaaatgagcagagcgagaagtgagcggggcgcccgacgtgtgcttgtccagaaaggcgcaggatttggaggactgtttgctgccgtattaacccccgttctaattgaattggcaaagtctgttatgaccaaaaatgcataaataccccacactgctttgtttttatgtgcattcatcatcatcattcattca

SEQ ID NO: 55697 - DNA, 627 bp, Heterodera glycines
atgtcggacacgagtgacattaatttggatgctgtacgacacgatttgaaccgagacaggggcgaacgaacaaatccctctgctaaaaatgtcaactacaaccaacagcttaggcggtatttgaaaatgaggagggatctaacaaacatgccgacaaaagttgagatgtcaaaaggaataagtgtactgttaaggagaggtggcgaagatgaagatggagaggttgtggatactccacctcgaccacccgctccaccaccaccaccacctccaccgtcaggtaaacgccctccgcgtggaccaaatcctcccgctcctccaccacctccaccgcctgggagacgtcctccacgtccacccagccctccttctccaccaggaagtccaccgcctcgtccacaacgtccccctagaccatgtagagctgctgcaccttctcggagaggtggtctcatagagcaatggcggaaaagacaatatgatatacaacaacggcggcccgtggtgcgggatcttttggcggaagcagctgctgctccattgcccgaaagtgacgatgaatatgactatatgctggagagtggattcgcgctgccagcaccatcacagtactatggagatttgcct

SEQ ID NO: 55698 - DNA, 790 bp, Heterodera glycines
atgcttgctggtaggaaactaagttgaagtgttttctaattttcaaaaaaaattccaggcctctacctatacttggaagggctgcagaaattggcaacttttcagtaccaactttgcccagttcagtccccgttgaataactcattaggctttgacctgagcgcagggtggccagcggacttattgtagagctcggtgagctcgatttttccaaatttaaaaatttcgaaaattttcaaaatttttcgagctaggcctaaaaaacggttttcgggtttttgaattttaggattttttaacgaattttcccagaaaaacgaagaccacttccaaaacatagttttcgagctctatcgactggtatttttttcggaaaaatttcgattttttcccggaaatagaaaaaatttttggcctcagcgggacatttgagtcccgggcccataactcgtcaggggttggttttagccaaaaattgtcttagaacatttttgtagagaattttaaatgctatcgaatggtgtgcttcatgactggaaaatttcaaaaattttcgagctaggccccctagaaattttcgaaaatttttttggggtcctaaatttgggtgtaaaatttttttcttgggtattttggggtgctgagcacgaatatgatgtttgttttaagttacagtatttttggaattttttaaaaattctttattttttggtaattttttagcccttggaaatttgggttaatatttgaaaatttataactcggtgatggtttcatcgatttaactata

SEQ ID NO: 55699 - DNA, 742 bp, Heterodera glycines
  unsure (1)..(742): unsure at all n locations
atgagtttaatgagcaatctgatcagaatatttcgtctaatgatcaaagcaattcagcatatatggtaatgaatggtaaaactaacagaaaaataatttttaaataaaattcgaacgtacgattttaattatttataaaattttaaatatttatttaggagaaaaaaaacaagaaacgaaatagaaattgatcatttgaataaatttaatttgatgaagaaagaattacgaaaagaaaatgtttataaaaatttgacaactactcaattagaatccgaatttacaaagaaattcaatttgaaaacgaattggaaaattgatgaaaaatagaaaaaaaaatggtgttgcattgaaaacaatttatcgatggaagagaaaaaacgatttaatcactcgtaatattttttaatttgccaatttgagacgatggacgaggaaatttggcatcacataaattcgttagcttgtgtcaaacccaattttatccggtgacactttgctaatgcctaattaacagttctctatgggtgaattttcctattttcctattttccttgtttctttttttttctttttaatttctctcactttggcatcatactatctttccatttcactgatagaaaacaacatttttatttcgctctataatcattagggcttcgatttttaggcactanaattgccaaaataggcaaaaataggatctctcaaaattntttaggctttttaggcgctanaa

SEQ ID NO: 55700 - DNA, 450 bp, Heterodera glycines
atggaatctgtggctcatgattacactttttgtcggggccgcttccaaagtgtcaattatgacacatatggtcaagacgaaattccaattcctttggccactctcatcgatgactatgtaaagcgggaaaccatccaagactggaagtgtccgaagtgtggtcgttcacccggtcgaaaggaactgaaattccattcgttgcccgatgtgctcattttccacctgaaacgttttgaattggtatgatgttctggctaattgtaaacaatactctcagaactctagaaatcagaaacaaataaaattacaattgattttcagctcaatgatggaattgcgagcaaaattgaaagccgtgtccaagttccgctggagggtctcgacatgggtccgtatgtgttcaaccccgatgttcgagcaaatacactgccgaaagtaccttccaattga

SEQ ID NO: 55701 - DNA, 624 bp, Heterodera glycines
atgccaaaattctggtttccaagtacaatcttggaaataaatacagttaaaatttccaagcataaaagccaagtgcgtacttagcatccaagtacgaatgggagccctgctgatatacatacatatgtaaatttagattatggtctatagctacatatacggcacagctatatctacagcctttgctttctacaaaattgatgaagtggccagtttctgtgcagttccttttgccgtgtggactggattatactgtctgctcctgaattatttccacgacaaacagaagcaggacaaagaggaataatgaatttgcagaaggaaaatgatgaatgacaaaaattaatttgtattattagaacaagtacctatctgttttatcataaaacatttgtaatcgatcgacccattcatggaggataaagatgaaaaaaattgaaatagtcgtttagcgccgacctttcggcgccaggctcatttcggcaccaagccgggaattatacatagcgcttcttttcctatcactatcatttacaaatatttgtatttatatttattttattattccaaattcagccattccgaatacggcggcagctcgtccctccccccccccccattaaa

SEQ ID NO: 55702 - DNA, 1190 bp, Heterodera glycines
atgatgagaaaaggcacaacagtgatgagaagaggtacaaaagtgattaaaagaggtacaatactgattaaaagaggaagaacagtgatcagaagaggtacaacagagattagaagaggtacaaatttgataagaggtacaaaagtgataaaagaggtacaacagtgattagaagaggtacaactgtgattaaaagaggtacaactgtgatcagaagaggtacaaaattgttaaaagaggtacaaaagtgattagaagaggtacaactgagattgattagaagaggtacaaaaattgaatgcaatttattataaattttaaaaaataaattaattattccttttattaattaaaaagagaattttaaatgtacaataattgaatatttaaattaatataaaattaatttttataaattcaattaaaaaaatatgaaattctttattaaaagataattgttattttttacataaattcttttattattaatttacaacaaatctttaaatataaattgatacaacagtgattagtaaattcattaaatctaaaagaaaatatttttaacaaatttaattaaaaaaatacatgaaattctatcaattaaaaaaataattaatttaaacttataaaatttatttatcaaaaaaaaattaaattaaatataattttttatttattaactcaacaaaatattttaaattaattaaattcattgaaaataacgtaaaaatgcacaaaaaaataatgttacaccgtccggattcgaacctgcccccccccctcaaaatgatgcctcagaatccccaatcacacagggattctgaggtcttgacgatgtcaaaagtaaaatctgatcacgtattcgtgatcagcggcccaaataacccctaaagacatatttttggaagatttttgtgagaaaaatttttccactcaaaaaccatgtgctcccccctttggacccgaatcacaaaatcacttttatttttatatctttttttaaaaatgtgataaaaatttaaaataaaatttatattatagagaaaaaaattgtggatttttgtagtattttacttttctcaaatttcttttcagaaggcagttacgaatttttttctgaaaaatctaaaatttccagaatttctggaataacttttttcatattgatgttagaaaacctaaataaa

SEQ ID NO: 55703 - DNA, 1223 bp, Heterodera glycines
atgctttttttcaatttaccgccaaaaacccttttattagcattggtcatgcttttatcaagcaaaaggagtcaaagcatatcaaatttgcaaaaaatgcactctaaaactggtaaaaattaaataattttttttaaattttgcattaattaattgcctattcacattgatagattacttcaaattggccactgaattggtggactcgtcatcatcattcaatgaaattataaaagcaggaaaaattgatggttccaattttgaaattggatggtgggaaaagcgtgcctttggcattttatgtgttgccaaatttggatttaaaatggatgaaaatttggaaaactacacaaaaacattgtaaacagttggaaaatgatgaaaatatgctgaaaatacatatttctcaatgataaagaatcattgggaaatttgaaagcatttgtatcaaatgaaaagccgatcattgatacaaaaattattcttgaaaaaatcaaaaaattatcaattcttaactacaaaaatgaagaaaacattgaaacaatgctgaaatattttatttggggaacatagaaaatttcgcaattcattaaaagtatttaagtttaataataatttaaatttaatattattaatttattttgattaaaatttaagcaaaaagcctttcatttgtcaacaaagcagctgaaattttttaagcaaagcaattccgtttttctaatttttttttgagcttcggaatttaaatttctgaaaatttcaaggccccgtgaacttgaaagtccaatgaaaatccatctcatcaactaattaatccaattagttaatttccaattttctgcaaaaagcctaagcagcggagagaatagtcaaagaagaagaagaagaacaaagcgtatggacaatgctaatgataataatgataatatggatatggtgatgaacggatcagaaaacaagcggaacgaatagaaaagagaggagaagccaattcaaaaatgcacgaaatttgtgtgaatttaatcaaatcgctgatcgctttttattttggttttcgccgcctgatttatcttttttggacaatttaaattatttgggcattttcatattcatgatgatcagtttaagcagtgtaaaaaatttttttaatttgttgcaccattccttttctgtcccttttgtcttgttatatatgcttttgtatgctaaatctaaataaa

SEQ ID NO: 55704 - DNA, 1683 bp, Heterodera glycines
gtgttctgtgccatcaacgagctgggccaaaccaagcgtgtggatgaagcgctgtgtggccaaagcctggaggaaaagccggtggcacgggaggagtgcgtcaacgaggagaaatgcaccggcacatttttcaccggcccgtggagcaactgtacggccaaatgcgacggtggcacacagacgcgtacagtagtctgcctgaactacgataaaaagccggtgccggaatggtgcgatgagaaggaaaagccggcggagcagcaggagtgcggcatggacaaatgccaaagtggggaaatggatttgaatatagtaataatttaatcattttaggcttatggagataatcctatcaccctgagttaatatgatttgtatgggttaattagctgatagcccagagttaattacgacagcgttcatttggacccacgcactaatcaatcgtccagagttaattacatcgtatggggttaattaattatttagattgtggtcaccaaacaataataatttatccaatcaccttgagttaattatattttatggttaatccatgtgtcatagaataataaatccaatttttcagagttaattatattaggcaggattaattaggctcatggtataatcaatcacccagggttaattagatagtacggagttcattaagcatttgggattcgtccgtcgtcctatcactttggaccaaaaagaaaagaaacgttcttgtttgacattgccttgccacacttcacagattgtaccgacagtgagttcggctgctgtccggacggcgagtcgttcgcctccggcccttacctcgagggctgctccaactgttcgtccgtggccgagtttggctgctgcgcggacaatgtgacggcgcgggaggacgctcagggcacaaattgtcctgaggcagcggccggcaaaaagggggtgacattcgacgaagcggagggcagcggggaggagccgaggtaagagccatggaaattttttaaatttttaattttaaagtttttttgatttcattggcttgacgaaacctcggcttcggcttgggaaactcccgagtttttttgagcttcaaacttcgagctttggataaattactcgaagtttcgggaaaaattaacttcctaatgatgggctcaataactaagagaatgacactttttttctctaatttttcaaaaaattttgctgaaaatctggtaaccaatcacaatcatatttcaaagaaatttaagtctaatcctgatcagaaagaattttaatcagttttgcattggtaaaaggcaaaaagcaattttttgggtccgatcatcgggctgatcacttcaatctaatcaatttgcattggtataaacgcatatatgatcaaagggaatcatttttgggtttccgatcagtcgggctgatcacttcaaatttgtgttacagtgacgctgaagaagcggcgccgccttccaaagaaatgtgcgcaattgaaactgtgggcaccaaggagaagctgcaaatcccatgcgcggaagcagccgccgtcacagaaacaatgaatgaaacggtgcaactgatcaaattggcgagcgccgatgaaacggcgccggaggccaaagaaacaaacgcaacggcggaagaagcggcgccggtggaaaagccttgctccaagacgga

SEQ ID NO: 55705 - DNA, 108 bp, Heterodera glycines
ccgtctagagcttaacaaatttaaaaaacgggcgcgaagcgcccgtcagagcaaaacaacatttgaaaaacgggcgcgaagcgcccgtactatgccgcgaagcgggcg

SEQ ID NO: 55706 - DNA, 382 bp, Heterodera glycines
atgcctacaaatgtgttttataaattaatgaaagtaagttttaagggctttttggggtcgctgatcagtgatcacaatccgggctcagatcagcgcgaccgttcactacatgaggtttacatggacaatgaattgacaggcttcctgtaccaagggtaccctcattgtcaaggtgcccatgaggatacctaccattcatacaaattttcgtattttacatatatattcttactaaagtttaaataatcatttattgctgtttagataactttaagctcactttcatgtattaacaaaatacaattaaattttcaaaattttccccggcggcgccgccagaccccttaactcgacaattgttgtaaaaaataatgcagcaaaa

SEQ ID NO: 55707 - DNA, 1351 bp, Heterodera glycines
ccatgtttaggagattggctccgacgcgggccattcgacggtgtcaatggccgaccgactcgacacggccatttcccaccaccacaacgccgcctctttgacccgtttcggtgggttcaaatgccaaaaatcacttgcggaagggaatgaatggcattcccttttaagacacggaccatcgggactttgaccagcggttggcacaagtgatccacggggcgaacggcactttcgcgaagggtttttggctccatcaaaaagtgccgcttattcaaaacttaaatgtttcatttctctttgtcaaaattaagtcgctcaatcgctggacgctgaacttcaaccaaaaggacatcgaaaatgaataccgtgcacattttgcggcaggcgattcgtcggaacggcactcagcgattcgaagcacggccaatgggttgaagaagcacaagcaagtgggtgccgttgattaacacttatttcaacggcaattcctggccacctctttcagctcagtgctcagttggaacggaaccgtggcggttccatccgtcccgttctgttggcctccgccgccgccgagtcgaagcagcagcaacggtcgcgacggccacgctatcgctattctggcgtgttcatcgacattttcggtgtcattggcaaattattgggcccttcctcaattcccactcattttgccaagtgtctgctctgctctttatcatttgctcccttctgttcctcgtccaaccgaacatcgccgtctctctgccttttgtcctttacattgctacggcttcggttttcctcaccggtaaaattcgattagggatggcaccgtttggtcgtcgcttattggcaatgtttccgcttcgctctgtttagctgtcgtcgttctcatcggacttcctctgctcagtcgccgtccgcttttgccttgtcttcaccagtgggcccctcggcacattgtcggtgcctttcttatcgctttgcccgttggcattgcgctgttcaacgtgccgttgtgcacctccaccaatccggccagttcattgtgcatttcaaatcggcaatttgcgcttcgtctgctctactcgttcaccatgcttttggcactgttcgcccattgcaatttcaggtgcattttttgcgaccgtgccattatgctttggggtcatttcccaagttattttcagccaacttggcgcttggccaaagacttgccaagctatcggcgtgggactgatctttttgctcagcacttggtctgtccgctgctgtgtcggttgatagtatgggttttatctccaggttttgccaacaacaactcgaccacattcgccatttgaacgacgtt

SEQ ID NO: 55708 - DNA, 489 bp, Heterodera glycines
taatgcttaattaaatatttattatcctttttaaaaatcaaatttgaaataaaatcaatttaaaagttattttataaattgttttattaaaaataagttaaatgaattattaccaaaaaaaaaaaaaattaaaaggaaaaaaatataaaatccctctaattaaatccgggaagggtttaaaataatttattttatttaaacgggcgcgaagcgcccgtctgagctcaacaaaatttaaaaacgagctcgaagcgcccgtccgagctcaacaaagcttaaaacggaaagcacgcctgtcaacaaaatttaaaaacaggcgccaagcgcccgtccaagcccaacaaagaaattttttaagaaaaataacccgtttccaaaagtttttttaagtcagaatattaaaaaagacaatcgctgcaataaattttctttataaagatttagtcccaaaaatccgcggatcacagtcgcgcattgcggattcaaatt

SEQ ID NO: 55709 - DNA, 380 bp, Heterodera glycines
atgggaaatgacccaattgatcaaatgaacggtttgaatgatcaaaacattctcaaaagtgttcagagttaaaaaagaatcaaactgatcaacaaaaaagagaaactgttaaaaaatttgatgcaattaaagaaaagttgagagaaaaaggagaatacaaagggaaagatcaaagcaaaattgagagaaaaattgcaaaattattaggaacaaatcggcaattaatacaaaaatggaaaaatgaattaaatttaaagaaaaccaacagaatgaaaaagagtttttatgatgagaaaaagctcaaactcattgaaagaattgatgaatttaaatggccaaggaaaacagaaagaatttgccaaggaattgcgcattcataa

SEQ ID NO: 55710 - DNA, 1281 bp, Heterodera glycines
atgtcggacaatccgaaagaagcagagaaagaaatggaaaaagcgatgtaatattctaaatttgattttctatgctaataattttgcttttccgttttcagcttcatctctgccgactgttggctttcggtgttcgatttgctgccgccctttcagcttggccttggcattgcgctgatcagccaccgttttgactatttcatcaacgaacatttcaaaacgcgcaaatggaaattgggcgaaatgaaaattcaacgcaaaactggagagaaaggcgcaaagggaatggaaattgtcaattctgatcaaaaagcattgccaatcccgcaaaatccgttgccgaacaaagtcatcggattcaaaagcatttcgatcgagtaaaaattgaatttggaaatgatttgtgcccataacagtttgattttcagcttcatcgaccaaaatgtgctcattttccttcgccattttcaccgctttttcgcttcatgtacaacaacattgaatattttcacggtgaatgttcgcatttcgaagttgattgtgctcaacatttggccaatgctcaaggacaccattcgtgggatggctttggacaccgtcaatcttcgtccaatccgccaattggctccgtcaatgctcaacgattgtccatcccttcgcgttatcactttctatggccccatttccatcgaatttccacctgatgaaagtgccaatgcatcgaatggccaagcggtgaccaaatggctgtttttgcctcgtcctgacaagttgccgaaggagctgacaatctgcattgaggattcagcggtggagcagcaatggttggcaaccgttcaacaaatcaaagcggtgatttgtccgatttaattcgtctttttctattttttgtctttttaaggctttttcctccgcttcttctcctgtcaatttcgtcattactgtttactttccgccgtcctcttcactttctgccgttatgccatttaaactgaccaacgaattcaccggggagcaattggcactgtccaaagaagatggagaagaagattttagtggcttttccatcattcgttgcccaattgtgccagatgataagagacagcagcagatgattaaggaattggacaaacgatggaatcgaattgacattttcattattagagacgacggagtcggcgatgggtgattaacaattttaaaatccaaattcttatttttattttcagtcttctcgacggttcgcccgggccgagtggtgatcagaaacagcagaaatga

SEQ ID NO: 55711 - DNA, 1652 bp, Heterodera glycines
atgatggcatcggcagttggccctatttcacggctgccgcccgccgcggtggctgcgtgcgcttctgccgccgccgacaatggcagtggtggactgctggcagccgttgcggccacagcagcggcagccgcagcggcggcaatgtttgcgccgccaacggatgccattgccggcaacaatgccacgacgcctgcaacaacaatggtgccgccgaggagcagcgcggcgactgtggcaactcccgcggccgcttcactgcttgtcgccgcgatgaatgcggcggcgttcgctcgccaacaacaccaccaccaccagcagcggcaatgggcggaggcagcggcggcggcaacaatcgccaaaccaattacagtgagcaaaaaggcgatcgacatcagcggcaacataatgtaattttatatttggcgcacgactgggccgtggtggaagcagttcgtttccctcccacccccgcaaaaaataacattttttttagttttctaacatttattaatcgaaggaaaagttcaaaaaatccaagtttttctgatccagggggtcggacggtaacggcgaaagggtgggcggtcgggagcccggaacgtagagcagccgagaacaattcattttgggctaattatgaacttggtcatatgaaaaagcatttaacgtatttaacgaccgacactgttgagcccttcaatactactgtatttgatactgtatttcgcgaactccgaatctgtgtcttgaccgtaatttgaatttcctttaaagttccactggcatttcactaattggccaacagctgtccggtccgaattacgcaaccagcgaaagttcgtcgtcctcttcggcgtcgtctattgatgaaagcggtgaagagccaccaaaaaagcgaccaaaaagcgacaaaaaacaaaaaaccattacgactgacgcagctgatgatgaaaaagcgctcccatcaaaaacagaaagtaatttctgctttcacaattgctgaaggaatttactaagaaattagcaaatgaaaatattttatttttattttttcgtattgatgaatagtgccaaaatcttatacggaaatggaaatttgcgcgaaaaattatagtgactccaatcccgcgggatttgcaaatggtcatgagagatcccgccattggatctcgatgaaaaattgcaaaaaaataaaaataaaatttccccgaaatttgacggccggaattttgcctctgaccttttctctgtcatatatttttctcatttcaatttttttttaaataagcccaacttttaaggctcaagttttgatggtggcaccagtggcagtgaagctggcggcggcactttacaaagtcaagcggcggcaaccgccacaaaattatcgccaccgccgtcgccacgcgacagcggcggcgacagtgggacgacgactacgacagtcgacgggggcggcggcggcggtctgtggcgaccctttcatgcctgctaatgaaggtcgtccgtcggtcgccaacaaattagtgtctgtcgtcgtcgccggcggccggtcgcgcccctgggggcacaaacagcagcaacaacaaacaacaagttgccgccgcccgtcgtcggtgcgcttgtcgtcatccaatcgccggcggcgataa

SEQ ID NO: 55712 - DNA, 399 bp, Heterodera glycines
atggacagtgcgcggaacgcggacggagttgcgcagtgccgtaatggtgggctggcggcgatgaagccctgctggggcggtggtgccgacgataccgccggagttacggtagttgccggaggcgtcatgccagcgtcggcgagttttgcgtcaagcaagctgttgttgccaaatgcacaggtcggctgtcgaaaggctgctatttgggatgcttttgtccgtgaactttggcccatttttgaaacaagcatacaccaacatttgaactttgccggtcataagcatttcgacattttgcgtcgtctgatttcaccgacaattctcactgatctcaacaaattgaattcaatcaattcggatgatttgttccccgatggaattgctgctgatgatgaatga

SEQ ID NO: 55713 - DNA, 478 bp, Heterodera glycines
atggatatcgccacctccaaaattgcagcgatcaatccgactcgtcttggccttgtactcaactactccgtgttcctcgcggatctcctgaaatctgtgaacgaggcgcgcaacttggcaaaaaaggtgggaccaattcgaatgcttttattttcatcattgtacatataatcttgcttaattctccgccaattttcaggctattgacttggctgaggcggagattgcaagtatgacggtgccattggatgatgacgcatcgatcaacctacaaacgctgagggaaaacatggaattgtggacaccggcgcgcccccgctaagacgaccggagaaggaagtcagaccgatcggatggacgatattatgcatacaacaacgatattcaacagattgtgtaaataatgtatttattgtgtatatatatatgccattgcatagtattgtatatatttgtgtgtgctccttgtgctaataaa

SEQ ID NO: 55714 - DNA, 1353 bp, Heterodera glycines
atgacggacgagcccgaaacaaaggaccaactaatctacctgatcatcgtgtgcgagaaggcgcgacgcttcgacgacatggtggaggcgatgaaaaaggtgtggccatccatcccatccgatcggttgtggttgcaggatttcacaaatgttgatgatcaattaaatgctttatcccctctcccccatttcagttgatcaaattggaccccaatcttggcctggaggaccgtgtttcgctggcactggcctacagaggtgcgatgtcttcacgccgttcgtcatggcgcacgttggtgtccatcgagaagcggaccggcccggaaatgaacgagcgacaacatcaggtggtgccaccgtcgatatttggaggccccggcggcacattttccgttaaaaatgtcactgaccccttttttccccaaacacaggtgatggagagctatcgtaagcatgtgcagaacgaattggtgaccatttgccaagaacttttggtgggttttccgtttaaaaaaattttttttgtacatcccgaatttctcttccgttcaacagacgtgcatcaacgaaatgctgctcccgaaagcgaccgacccggagccgaaggtgttctacctgaaaatgaaagccgactactaccgttacatggccgaggtggcgacggatggggaccgatcgggtgagacagaatttgtccgatcccaatttttaacagcatttttgatccgccattttttcagaattttatgagtccaattatctttgaagcacccccagttttttggaccataactttctatgtttcagcaaatcatgcattttcagcgtttttcgaatggataccaaaatctgttgtatttagagcatgaaaaaaaagttatgacccaataaagtgagcatgttcaaagttgattctcataaaatgcaaaaaattaaatattttcgatcgtatcataatttttttttgttccgcaggtgtcgtcgaactcgcaaagggcgcttaccaagaagccatggatatcgccacctccaaaattgcagcgatcaatccgactcgtcttggccttgcactcaacttctccgtgttcaacttcgaaatcttaaaatcggtggacgaggcgcgcaaagtggcccaaaaggtgggaccagttcgatgcttttcaccatgcttttccttttattgtgaaatgtggccaaatctcaccccgttttcaggcgattgacttggccgaggcgcagattgccacactgacggtgccattggctgatgacgcttcgatcaacttgcgcatgatgagggaaaacatggaattgtggacaccggagggcggcagccacaccaagacgacctga

SEQ ID NO: 55715 - DNA, 883 bp, Heterodera glycines
atgagcattgaattcaaacattttttcttttctgcattgtttttgcatttaatatgcgtaagccatcaaattaccgccgaaaaagaatgccaagaatatgaaaatgaatttatgggatcatttaatgggttttcgaatgcttctgaatttgtttctttcaacaaattcacaaaggaatgtttttctttgtggttttgcgaaaaaacaaaatttgtatatcctaaaaatggtaaagatattgatgcaacaatttcggaaataatgacaaaaatccataagaaatattgtgaagaaattggaaaagggcaaaatatagagaatacattaaataaaatggaaaatgaaacggaaaatttaatcaaaaatttgaaaaaagacccgaaattgcaagaaaaggttcaaaatatggttgaaatggagctgagcaagaaccgaaaactgaatgaaaaaattcaaaacgcaatggaacgcagaaaagttaattccttctacgatttgcttaacggtaaaatttaaatttttattaatttaattactctttttagccgcttttcaaacattttttggaaactgcaaaaactgttccatcatgccacaaaaagaactgtcaggaagaaggaaacgacggatggcaaaacatgaaatgggaaatacatcaaatacagcgaatgagcaaaataatttctctattgctggacaaaatttggtgactcaaccaaccgttgtgcacaattcaaatgagacaggtctcgagctcgtcactcattcatctgatgacaatgaccatcaaaatggtggtacaaaccgaggtttttttgaatgccgaactcccaccacaaaatcggaatttgtctccgactcgtcaaattttgccggaagatag

SEQ ID NO: 55716 - DNA, 2202 bp, Heterodera glycines
atggtggatgcgaaagtgagaaagaacaaaaacaaatttgttctttggaatttctcctcactctggaaaaacttcccgaactaaatggaaatgaaggacgagagcaaatacggacatttttcaaaaaattttcgttagctaccgaagaatggccagaaaaacgccgaatttcagcactcgagtgtaagtggaaaggcggaacgtgctttcagcgccgctgcagtgaatcggccggcgaaatttgatgcaatacgaagcgaaatggagtcacttttggacgaatgggattgtaccgcaattcaagcattcaacgaattgtgggatggaccaaaacggcgaccaggcgaaaatctggaagaatttgcagaacgagtttaccaacttgtgctttgtgcatatccaggtttgccattggatttgtacaacgattatgcggcaaaacacttcattcgtgctttggaaaatgccaaaatttcgattgcattggaaatggctcgtcgtccgggtttgagctacgacagcttggtcgcgttggctgtgcgtgcggaaatagcgcaaaaagccgcaaagtcaattgcagagaatgaaaacgcacacatagcacgcagctttaaaccaaataaggtggaaaagacgaccaccgattgggaaaaattttacgtccgaccgacaaataaaagcgtctgttataactgccgtaaaattggccacatcgcgcgaaattgtaaggtcaaattcacttggaaaaaatgcggctttgaacaaaataacagcaatatgaattttcaaaaagagaaccaaagaattaggaccgacaatttaccgagagcaaaaattttcccaaaagtctccgcccctaaacgagcaaaggatggccgaaacgaacgcaatttgtcgcagaaaccgatagagtcagccgatgcttcaacaatttttgctggtctttttgcttcatttttggttgttgccaacgcgttttcgaatgtaaaggctaaaactcatagccgccgaatcagctctacggctagtagcagctcgaaattgccggcattatggaatccgttgaatgttgcatttgaaaaattgaggaaaagggaaaattccaaagaaaacggaatcaacagcaaagtgaaaacaccgaaagggaatggccaattgaggacaattgttttttcgaaggctggggaggaattggccgactcaacaggtccaacgacgaagttgttgaaagccgacacagaacgaaaattgtcagccgttgatggcacaattacgaataaatctgcgtcaagttacgctatcaggcctgttcaaaattgtagttttcgttttttccgcacattttacaggtcaaattatgatgttggtctgtgccactgctgattgtccatccttactgccccttttggaagccgaatgccctgccgatggatttgaagcgctgaggacatcgctttgtagagggcgaggatgtcatatcattgttgatttgaattattttggcgttttgttttagtttttgtgaccctttattttattttgttttggttggagtatgtgtgatatatgtgctcttcctaaatttgtaattgattggctgtgtgctgttttattaattggaagtaaaagaaagcagtgaaaagagacggcgatttggttttggatttgggatacaattcccctttcccattggactattctttttcctacgacgtccctatctccaatcacaattaaaaaatttgtcgtctgaaatttggcgtttgttgtttggcgttcgtaattgtgattgaaaccaacgacaaacgccaaatacttgggttgcgctcaacagcgcaccttaaatttgtcgtttgagaagtgtcccaaaaatccaccaaattattttgatccaaaattttttatttaatattaaaaacatttttctatgggtaaatgagttcgctgatcatgaatccaatctcagattttcatttctatatacttttatctatgattttcatccatttattcgggtctttcgaattcaggtttagggttagaattagagcaaattaaatattagattcggaatctacgtacctaaaaaacccctaggttgacccttctccgtcattcgtgcattctttatattattttccttcgtttgttatttaaatattcctccctaaatttgtgtcttccttttctgctccaaataaa

SEQ ID NO: 55717 - DNA, 477 bp, Heterodera glycines
atgtgcaaaatgggcttaaagaagactttgatcaaaggtaatgtcggttgaaacagcgattgattttttgttaaaatttattattacatttgtccaagaatttcaacttttgggatattttgagccattttgaaattcttatttagggaaattttttttttgttgaaatccaaattaaattctgcttcattcctatttaggcttttcatccaagttgtccaattacgttttttccgtcgccatttcctcgaacatattttgagcaagcgtacaacgctcaaacagtaaatcattatttattataattttaatgtatatattttataaatcaaaattacacgataatcttgtccaatttttaaatagtgcttaagattaattttaatacaaaaaatattttgcttttttatatttcattttatatttttgttgaacttttagacctttacatagatgttgggatcgaggaatgacaaa

SEQ ID NO: 55718 - DNA, 888 bp, Heterodera glycines
  unsure (1)..(888): unsure at all n locations
tttaaagcaggagtcatcggattcaatggaaaatgggcagcagaccagacntcattatacggagatattgacgaaagctcagagcacaggaacaataaaatatggacaagggcgatcaaaacgccaatntggcaaattgtaaaatatgcggacgacaatgtccagtacattttctacggtgtcaaaagctgtgaaagtgagcagatttgtttcaaaaatgagaaaatgcaataaaatttttaattaatttttttattattatattaatttaccagattaaatattaattaaattggaattgtcggatattgtaaaatattctttttgaaattgcaggttgtaagcaattctttcgtcgtgtcgtcacaaaacaaattttgttcacttgtccaagacgaaatggagttggaagttgggacaattaatttttgccaaaatcaattaaaatatttattttcataggtatggtaaaatgccgcggctgtcgcttggacaaatgccttgtggcaggcatggacccgactcttatcaatgtgccaccctcggacaagttcaagcagttcttgaccgaattagagaagcgcaaattgagcgcaatgctgactcattcggaaaagaattaaaaaacaaaattatttgaacaattgttttaagtttttgttttgaaaaactaagtttaacttaaaaacaaaaaaataatttttctatattttttgatagataattttttacccattctttattcagttatttatatttatttggctttatcaattatttattcttatttactagtattttattgcttaaacgacacttattgatcgcattttttggcaatgcttctccataatgcaaattatcgcagaatgatcaaaatgaattaaa

SEQ ID NO: 55719 - DNA, 146 bp, Heterodera glycines
atgcgccgcttgcggtgcagcacaaatgccccagcatctggcccgatgtgcgtgcttaattgctcgcacattgccaaagccgtagcactcgtgtgccatggtggaacgtcggggcgcaaaatcacttgtatacgacttgactactg

SEQ ID NO: 55720 - DNA, 504 bp, Heterodera glycines
atgcaagatttgagtctcgccatgagcttgaagcaatggagaacaatgtcagcgatgggctatgggactgaatggtcgttgccctgagaaccatggtggcactcctgccgaattggaacggcttcgggtgcagccttaaagaataattgtattattatcataaaaattttaaaattttcttaaatataaaaatatgtattttttgaattaaaattaaaatttttatagtatatttaaattaatttaaaaatataattaataattaaattatattttaatttcttgaatacagagtgaaagatccgaatctcgccatgagtttcaagcaatggagaccgatgtgagagatggattatgggacagaatggtggttgcccagagaagcatggttgcacttccgccaaatttagaaaagcttcgggtgtagtcttaaagaataattgtattattatcataaaaattttcttaaatataaaaatatttattttttgaatttaaaataaa

SEQ ID NO: 55721 - DNA, 258 bp, Heterodera glycines
atggcatacagaatgccaaggtaagagtcataaatttgtgccaacattttcttattttgctcaattcactgcttttcccgctaaaaaatgctcaaaattggcaggcccttgcacaaatgcgacaaatgcgtcatcatcaacctaattaaataaagataattattacttataaatttttaatttttttttaacaattaccgttgaaaagttggcatttgaaaagatgaacaaaaaggaatatataattaaaggaataaa

SEQ ID NO: 55722 - DNA, 1546 bp, Heterodera glycines
atgaagtttgatggatcatttaccaaggatgtgtgtgtacagtatcgcaaatatttggacatactgtacgaatatttataccatgttcatgccggacattccgtaacgaggccaacattcattgaaaatgctgcattaagcagatataatagagatctgattgagtttctgatatcattgtcaaccatttccaaattttatctttttgattcggaatttgctttatcttctgtgacggatcgtgaggaaatcaaaattttttgcaaatttgaattggaaaatgagaattgcttagaatatcatcatggcctcgcatacaatgaaaaagaatttaataagaaaaaaaggcaaaaaattgactcggaaattcgagcaaaatttgaattattgatggaaaaacatttcaataaattatgggaaaatgccaaattgaaaaacggaaacaaaaacagtgatagaatgtccatatcattggcaaaaacaatgccatcggattatgctgtacatatttatgacacctttttgggcatgccaatatatgactttgatacattagtaagtgaggaatgtgccaaaaatatgggattaattttttatattgaaaatcagatggaagacgaagcattgattaattttgtaaaaactggaggttcaaaaatgactaatattgaaattgctgaagatattgaggatttttatgaagcagttgaaatgcatcttggccttctgttattgatgagaaacaattggcactgtgccaatgccaaagtcgcaaatgcagaaaatgaatgccaaaaactccgatatttcgtggaaattttctaccaatatttgttcagagaatggtgtggaattgcagctgtgaagccaatgttacaaacgaataacgattttgaaatcaagtaaaaactggtttagagtaatttaaaaaattaaagttttttaacaattaaaaaaatccaaaaaagctcagtttactgaaaaatgcttggactggggggctggattaataagacaattgatttccacatttatggcaaaattacgaatttttagcttggattaaaacattgaaattttattgaaatccttccgagcgattaatttaatcatcaagacgaccttcgttttattattattactttaatttcaggccggttatcctaagtgtggaagatattctgagctcctttaatcaaatttcaatgtatttttttggcgcaaattcgagtgctgacaaaaataaatttgcacatttgttgggagagttagctacttataaattattaaatgagcacgaattggattataatggaactccaggtaattgatgggtaggagataattaaaacataattaattcattaaaaaatatgtgacatttcaaaatcaatttgttacaaacatttcaaatagtgagtgcttcggcttcatcatcgactgctggaaatgcttctaatttctcaaggtaatttgttggcgcgtaattttaaaaaattcagggacctgtttcgaattgcacccggacttcatttcaagagaataa

SEQ ID NO: 55723 - DNA, 660 bp, Heterodera glycines
atgttctgtgaaagtttggtccgttgtgccaggtcgcgcggtgttcaaatggagttgccaaagcgggggattgaccattttgatgatacatcactgtgagttaagggttaattcacggtcactgtttagggggcaaattccgttaatgattcacacggtaaattaacggttcacgggctcaattccgatcgactcacgtggcatttcaccgtcatttttcgcgcgatcatttcacgctcaatattcatgggggcaattcacgtcacatttcacaggatcattattgacgctcatattttttgggtgtcaatttttctgtcacggatttgctcagttgtttaaaaatgggcttttttaattgaatatgtttttaataattttttaaactcaaattaatatcatcttttttccagtgaatttgtccgtgagcaattcaaattgttttcaaaacatcttgtccgttttgtgattttctttgcgcccgcgaaggatgcgtcccatgccggtgatgtacaccatacgttcaaattgcaaggaattaaacagggcaagtccaactttttcctccttattgtagtgatgttcaagactcaaaatttccgaaaatttaactcaaagaatataggaagaaatttttcaattttacggaatataaattaa

SEQ ID NO: 55724 - DNA, 1463 bp, Heterodera glycines
ggtcagcagttgttggagtccaccttgcgcaatgtgttggaccagcagtcgcttcgatggattttcgttggcggaaagggcggcgtcggaaagaccacgtgcaggtcagttgatgtggatattacaaagaacgcttattgtgcgaaaatgatgccttgaattccgtcaaaatctcccaacttttaattaccatttcgaagtgccaaatttttagttgctctttggccgttcagttggccaaatatcgtcgcaatgtgctgatcatttccaccgatccggcccataacatttcggacgcgttcaaccaaaaattcacacggagtcccaccaaagtgaacggcttcgacaatttgttcgcgatggaagtcgacgggtccaatttcggggaccatggtgtgcccaatttgggtgacgaggacgacaagtgtactcacttaccaatctgtattcatttaattcattgtttccgtttttcagctgatatcttttccatcggaaagaactttttggccgattttgctgccggacttcccggcgttgacgaggccaccagtttttctcaaatgattaagtaatgtcataccaatttgctattttttcactaattgggttccaattgaccattcaaaatgtccattttatcgcgccctttcagactgatccgttccatggacttcgaagttgttttgttcgacaccgcacccaccggtcacactctccggttgctccaatttccgacagttatcgagaagggtctgtccaaatttctgaaggcgaagacgcaatttatgccgatagtctctcaggtggttttatgattattattattgtaatttggtgtacgaaaaacagaaaggtaattgctctaggccaataatctgtgattgtatttcatttcattttcttttaaagatggcaccaatgttgggtttgcccgactcgactttggactccacgacggacaaattggaggaaacgcttcaggtggtacggcagatcaaagacgaatttaggaacccggtataattttgaattgtgtgtaaatacgataagaggttctttaggatctcaccacatttgtctgtgtttgtattgccgagtttttgtcgatgtacgaaacggagaggctggtgcaggagttggcaaaacaggcacttgaacatttattaaatattttttggaatcaaagacgaaatgtcaaaatgaaaaatccctaggaaatcgatgtgcacaatatcatcgttaatcagctgctgttccccgacaaaaattcggacggttctgtcagctgcaaaaagtgcctttgtcgtttcaaagtgcagcagcgttatttggcacaaatcaccgaactctacgaggactttcacatcacaaagcttcccatgctggacgaggaagtgcgaggccccgaaaagatcaaacagttcagcgaaaggctaatcaccccttattcttctgctgtt

SEQ ID NO: 55725 - DNA, 1148 bp, Heterodera glycines
cttcctctgctcgttgacatcgttaagcatcgtcatgagctgaacagcaaatccacggccatccacgcgcttctgatttctcccggacaaacgcgcattttcgacaaattcgaggaggtgccaaattacgctttgggtcggtgagttaattcaatgcctccgaattttagaatttcacacttttcagaatgttccgccaccgaaaatgtcgtcgttcttttcccgtcaaagaattcgcagtccatcgcccaatttgtgcgtgaaaatggcccccttcaccgtatcgtcgtgctcgactcgacatggaacaccgtgggacaactaagaaacatggccaacatcgccaaactaccgatggttcaccttcgacagtacacaacggactactggcgaccgcaagtgggcgaatgggggggggataaataaataaatgaaaaatggacggaataacgacggaagggctcaaaagggagatgggggggggggcagagtctgcgtttagtggccaagttttaaggtccgcttttcaaaaaaatggatatgagagggccgcaggcgccgtcggggataaatttcgtttatgaatttcttgaatgtaagaaaatagccaaaacagtatttcttgaaaacgagtccccaggggttttatttttcaagcccctcaaaagggggctctaattcaagggggatatttatatgttgcgtatgttttggttcttttatgattacggtacccataatcttaatttatttttcccatcattttcccctgctaaaaaggaatttttttgggaatgttatgaataacataatgcattgcattacattaaattcaaaaattattcttggcgtcgcatcactttaattattgatcatctttatcacttcagaatggtctttcagccgaccatttggccacaatcgaagcaatttactacgcatgtgtggaaagtcaggaagctgaaagggaatggaggagaacggaggaaaggaggaggatgggagagggggaagaaaaggaagtgagagaaaatggaggaagcgaagagaaggcggaggaggagcagcaccgcctggacaagctcctcttttggttttacttcttccgcaaaatggtgcccgcgaggatatttcggatgaaaaaataa

SEQ ID NO: 55726 - DNA, 1250 bp, Heterodera glycines
atggaaaagaacggaacggaggaggaacagacggcggacgacctaacgccgaagacaatggccatttttgaactgttggattacattgtgaacagagtgagtcatttggaagcaaagggaccgacgcccccccccccccccccccccgaaaccgttttctgttcagccccctcccgtgctgccgcgtggacttttctctgaccaatttgtggactttgtgaatcggtgtctgcgaaagaatgtggcggagagggcaacgctggcgctgttggcaaccgacgccttctacaaacggcacgaaagaatggaagaaaccgccgaattcgccgcatgggttcggtcggtgatcgaacagtgagttgggtgctggtggaaaatggcagtacaaagggtgacaaaagtggggctgtttttcgtccattgcagttaaacttttgacaccttacaatggaattttcgtttttttttcactcccctcccctcgaatgaacgttcagcttggccttacaatttataaattgcagtcggaatagcaatgccctgctgatgggatgatttgcggcgcccttaactttcgctcgcttttgccacaacaattcgcgagtgccgttgcccttctctctgtacgcttttccgatcactcgcaattcgattgatcatttgcctattctttggcattctttttttttgtatgcaatagacaggcacaatggctaattaattccgttttcactttggccttatgttctcccttcacggcgcccactttctctcttttcctctgtcacttgtccttttcctccctacttttccttgtcgttctgtcgcctttgctttcttccattattagcaccataataatctgaacaaagcaatgaatgcatcgtaatcaccggggggggggggggaaagggttggcttttgcttggattgcattatgccaatttctcattttctctgtccctatttattttttgcccgttcttctgccctctccttttctctagtcactctcccctatttctatgtccttttcgttcaccttccgttgtcccatccttctcttcttcttcctcctcctcttctctctccgcttcctcttcttcctcttcatcacttcttctttcctcctctcttttgtccgcttctcccccaaaaatccgatgattttctccatccagcaatcgtccacttttattgtaatggtaaagaacagtcaaaagcacaaagatagcgaagaacggaataaa

SEQ ID NO: 55727 - DNA, 634 bp, Heterodera glycines
atgtccagcaaaagacgcaatccgctcaatttgagccttccgccgactgtcaatgaggagggcgcggtcggcgccgatggcgcatgggtcggaggacagccgccgacggaaggagtcggaacggaaggaacggccgacgcgtcgttggactcgaaactgcgctcgctcaatttgtcaggctcgcaacagcagcgaatgtacgagtggataacgttgaagaaacaggcaagtgacacggcctattggaaatgggtgaatgtcggcgaacgcaaagggacgaattggcgtaaggacaacgcggttaattagccgattaatgggctttatgtaggtagcctaagcatccgcataattcaagaccaaagcaaactggaggaatttcatatccatagtgctttttgaaaactcatttcccaattgaagatcggcgaactcagtgacgatgtgttggaacggatctgcgaccttggccacggcaacggcggcgttgtgcacaaaatgcggcacacaaaaagtggcggtggcgtggttttggcccgcaaattggtccatttggaggtgaagccgtcagtgcgtaaccaaattctgaaggagttggaagtgctgcacaaatgcaacagtccgtacattgtcg

SEQ ID NO: 55728 - DNA, 218 bp, Heterodera glycines
gctacggcgactttttggcgcgactttccttttcgcgcggtcacggcggggggaaggccaattcgggtgccaactcggccacactgacggaagcgaaaacggacggcaaacagtgccctcttttgtgcagtcaaatcggttgcccattggccgctttcctccaatttttgacgttgacaaatcccagcaatcgctccgttctttttgccgttttgcaa

SEQ ID NO: 55729 - DNA, 887 bp, Heterodera glycines
atgtccgaattgagtggggatgtgctaagaaaatggaatgttctgcaatcagtgccggtgtacaaaaggataccaaaatggcggggattaattgccagtgtaaatttggcgtgatgaatgacgatttcggaaacagaaaattgcatgttacaccaaaaggacggaccaccaccactgttagcacgacggagaagagaaccaaacgcactcgcaccacgaccgaatcaacttcaacaacgaaagtgccaaaatcaaaatgaccaatagggaaaattcaaatttaaaaaaaaaattttgttggcaaaaaaatgatataaaattgggatttgttaataacatgaaaaacaaagttttagttccaacaagcccattaattggactcataaaatgcaatagaacagaagtatttctttttttcaaataattttattaaaattttcagccttctccttcacttgctaatgtcaaaattggaaataaaatgcagtgcatggccaagaacatttgcgatatgtttgttgctttaatatttgcttttaaacaaattgccccaaaatttgtttttgtttttttccagtaatgaaatgtggaagggggcaaagcttacgaaacgctttgaaattcgcaaaaagtgcgaggaaatggtcaaaaattgggaacagatgacgaaagaaattagcactgaatacgaaaatgcggacaacaaaaacagtgcgctcaacaaaaatggccaagtgttcttggcggatttcattagcgcgcgcattcattaagcccgagaaatgaatgccttttcgtcaaacttaagcgatgttttactaattttgggatttaaaaaaatatatatattatttaaaacatattcattttgtaaaatattttcctaa

SEQ ID NO: 55730 - DNA, 384 bp, Heterodera glycines
atgcttgggaaacgccaatttgtcctcattaatcatgtcattattattcattttacactcatcaaaatgctcgatacaatattgactaagccgtacatcaaagttcctgtttcgcctcagaatccgagtgtgcaagaagatatattgagtggggttggccttggtatgtcatttggcgcattcggcggcggatcctttggccttgtcctcctgggaattgctggaggccattatggagctttgatgaatgagcaatatacgaattgtcaaacactagttcgggcctgcatttgcaataaagccacctgtgttttaaacgcagatgaacgatgtttgctttcgtttttgttttatttttttaatgaaaaaatctatttaaaataa

SEQ ID NO: 55731 - DNA, 1385 bp, Heterodera glycines
atgttgagcttcatttacacggacgatataagcggattaaacggcggcaatgcaatggcagtgctttacgccggtggatttgttttttggaataaaatttaataattgttgatttcctaattagccaaaaaatacaatatcactgatttggccgacgcatctttgcaaattcccttctccgaattgccaaatgttttctacgcttttgcccaggcccgcctttttgaattggaggtgggaaagaaatatcaattcttatttcgaatttacgaaagaatgcaattaattttttggatgagtctcatctattaaattattatttttaaataaaataacctataattgatcatttatttattatttgttaattgaaggaatattgcaacgattgtttggattacatcaacaaaaatgcggacgctttgctcaaatcggaggaatttttgcaaattgatcaaaaattattatgcgaaattttgcagcgtgaccaattgcgaatgaatgaagagatttctgtatgggaagcagtaatttttttaaaatttataaaaattactattttattattaaaatattcctatttaattctaatttattttttggcaatccgttgggccgacgaaaagtgccgtgaaaatggcattgattgttcagcagagaatcgccgtcaaatgcttggctcggcacttttcaaaattcgctttccgcttttctcacaaaatgaattttcggaaaaaattggtaaaaatcgggaattaatatataaaaaaatgtaaatactatttttctgcaaaaaaaaactaataagcatcgctagattttaaaaaaatcttaacctgacattttgaaagacttttgacacttttttaaaaaattatctttttaaaaactaaacatttttaaggatcactaacaattacaattatgtcatttatttttttacaggaccgtacggtattttaacagcagaagaattggccggcatcaaacagtaccatagccaatcaaaaatgtgcggaacgcctggcttcttactgaactacccactgctatttccgagtcaccagcgaaatttgtcatttgaaaaaattgtgatggacattgaaaaagtgtcggaatttgctgcagaatcagtgggaagttgccgatacagcgaaactgaccaaatgagaggacttccgcgagaataaagtggcaaaaatagaacaaaaaactgatctaaaatgcatgtgattgtacataaaatgcgcagcaccaccaaaggtaaagtagatcatatactaattattgcagacaattcgtaattgcgcggaattaatgaagacaaagattgtaattgcgaatggtcggaggcaacctttcgaagtgtttcgaaattattcaac

SEQ ID NO: 55732 - DNA, 816 bp, Heterodera glycines
atggaaatgatcagcgaagtaaattatgttggccaatggactgtcagccaatggaatggcaccgaatttgcagcgccgataatgacaaaaaattgtggtaccgttgttgtgaaactgaccttgcgacgaatttcgattggtctccaaattgtcaattagcttttccaccaacgcattgaaacgtggcgaaagcaatgccaatttgaggccgagttgttcacgtttttggtctaaaaatggtttaaattattgttttaattaagcctgatggatgactttcagttcgtatttaaacattaacaaatatgtaaaaaccgaaaaatttgaatttccattgaaaaaaagttgagttaatcaataacgcacaccatctcaaacatgagaatgcgaacatacagatggtgtataaaaaaacaaattgtggtcaaaaaatttatcgaaggataaaaaattatttaaatattagaaggggttcaaaagtgataaaatggtacaaaagtgattagaaaggtacatatacaacagaggtacaacatttgttagaagaggtacaactgtgatgagaagagatacaatagtgattggaagaggtacaaaagtgattgggagaggtacaaaagtgattagaagaggtacaacagtgattagaagaggtacaactgtgatgagaagagatacaatagtgattagaagaggtacaactgtgattaaaagagaagaaactttgaaatacaatgattgaatatttattaaattgaaaagaattttttgaaattctaattgaaaaagcaaatgaattatttaatttaaaaagaa

SEQ ID NO: 55733 - DNA, 655 bp, Heterodera glycines
atgatgcatggatcattttcagtacacatgtgtcaacgattggaaggaggtcatttttaattgcaaatttcgcactttaaaaaaaatcatttgtcaattttttgattatttaacaattttttttgtctaatttattattgttatttgtgcggcacggacacgtttcttaaaagacgatcaccccccccccccccctcactacaaaaaattaagaaaaatttcttatggtttgaaaaatatttaaagaaattccgataactaagtttaattttttcaagtttatgaaaaactttttcgaaaaaaattttaaatgagtatttagaattttttaaagaaaaaatttttttaataaaattcaacaatttaacatttctttgtttgatttctattatttctttttcatttaatttttttataaatttaaagttttcgtatccgttgcgcaattgaaactcaaaatttttgctaggccgaatatgattaacccgcaaatcccgcatttgcgcagggattgcgggatcttgaatattgattaaatttttaatttaaacaaaaaaaattcagcactttttttatccagttttgaataatcctttcttttaataaatttcctattcaaaaggttgaggcgatgtttccgaccacaaccacaact

SEQ ID NO: 55734 - DNA, 128 bp, Heterodera glycines
acgatgatcactcacgaaagagcagtcaaatatttgaagaaggagtccgtgttggatttgctggtgaccagggccacacccaaacacagcacggaaatgcaaatgtgaacagattgtccgactgctga

SEQ ID NO: 55735 - DNA, 716 bp, Heterodera glycines
atggcctcttcccgtccgggacagttcacgcacaaaaattatccacttagatacgtgagttttcgagggaggggtggaaatgtaattaatgctaatttggtcgtcttttttttctccagaaaagtgcctgcttttctgaggacgattatgccaagaggttcgacgacgctgcatgaacggtcgtggaacgcctttccgtactgcaaaacggtggtgaccaacccggactatatgaaggacaactttctgattcggattgaaacaatgcacttgagcgaccgcggcaccacaaaaaatgtatggatggaatgatcatcatcattactaattaattgttaattatgccacaattttccgtttcgtttttcaggcactcggtctgaccaaggatgtgctgaaggaacgcaaggtggtgcgcatcgacatcgccaacgacaacgagtttctgcgtgcagccgacatccttgacaacaccagaccgtcgacattccgctccatgaaaacaggccgtgggtggccgaatgagcctaccctttgatgggttaggcgaatgagcggcggcgatggccgaatgagccttccctttgttgggttaggctagatgagtcggctgctgatggccgagtgtcttgccactggttgggcaagacgaagagtcggctgctgatggccgaatgagccttcctcccttttatttctccctcaattaaaataaa

SEQ ID NO: 55736 - DNA, 476 bp, Heterodera glycines
ccacggcctgttttcatggagcggaatgtcgacggtctggtgttgtcaaggatgtcggctgcacgcagaaactcgttgtcgttggcgatgtcgatgcgcaccaccttgcgttccttcagcacatccttggtcagaccgagtgcctgaaaaacgaaacggaaaattgtggcataattaacaattaattagtaatgatgatgatcattccatccatacattttttgtggtgccgcggtcgctcaagtgcattgtttcaatccgaatcagaaagttgtccttcatatagtccgggttggtcaccaccgttttgcagtacggaaaggcgttccacgaccgttcatgcagcgtcgtcgaacctcttggcataatcgtcctcagaaaagcaggcacttttctggagaaaaaaaagacgaccaaattagcattaattacatttccacccctccctcgaaaactcacgtatctaagtggataat

SEQ ID NO: 55737 - DNA, 412 bp, Heterodera glycines
atgcgcaaagtgtcgtcgagagaagaaattgttcagcagagagtgaaagtcgccaatgcgaagaatgagtggatcacgcaaatttcatccctttttatagagaatttttacacggaattgacgggtaggaaaatgtttgtataaaagggacgatttaagcgcagaaacaatcattcttcatttgtcctttactgacataataagcgtctgtctccttcttcactttgttccccttttgactgcacttcagcaacaatgctcatcagagaatagtgagttgcttttttcatcatcattcttctgacaccttaattaattacgctttccttttttcagtcgcatcgtcatgccgttgaccattgaggagtatcaaattggccaattgttttctgtggccgaggcatcgcgacag

SEQ ID NO: 55738 - DNA, 870 bp, Heterodera glycines
ctataaaaagggatgaaatttgcgtgatccactcattcttcgcattggcgactttcactctctgctgaacaatttcttctctcgacgacactttgcgcattcaatccgagcacacttcttcacccattggctggtcccatgtctctgcaatacgtcggcatcgctgcggtaatcctcggaagtaagtgccaaaacaattgttattaatccatgttgatttgctgctaatttatcgccatttttcagctgccatcgctctgttccaaactgtgtcgctcagcaccagacgacaaatcgccgcacaaaatggccgaagcagcagcagcggcagcaaacgccaaagcaagtcgccgtcgtccgcaaaaaccttggcacacaaaatcgctgcgacggtcatcgctgagaagagcctgagctccatcccggacaacgaaatcttgcagctgatggacatcggctttcaactgctcgacgaggtgggctcagcctggatccgggatgaccagccagtgcctctgttaattcgtgccaccactgttttcaggagccggcgcgtgttgatgtgcatgccccttgctacgttttcggtgacatccatggcaatttgtcgtaccttctcaagtgggttttggactcgtcgactcggctttttaacatttcagcggcacttgcaaatccgttgttgttcaggtacttctccgacacccacatcgaaccgcagctgctcaagctccaaccgccgctgttccatttgctgttcctcggcgactacgtggaccgcggcgagttcagtctggaagtcattgcgctgctcgtctcgctgaagatcctcttctgggacaagatcactctgctgcgtgggaaccatga

SEQ ID NO: 55739 - DNA, 444 bp, Heterodera glycines
atgacggttgttcaaattgtgcaggagcaccaaaatcgccccctgtgtttcgccaccttgtccttttgtgagcaactgccggcactgtttggggagacgacgcatttgatcatcgatgaggctggacaggcgccatacgtccaaagcctcaacttggtaagccaactccccttggaaataataaattgctcactgttatcgtgcatagcgcagtcgttcacgctccttcgcttacttaaatacatgaaagttcgagtccgctcgaacgcacggcattttttattttattttccaaatcttttcatttttatttttcccaataatacctataataatatttaaaaattattgaaattcataaattaaaaagaaaacatatttttagtggatttagaggatgctgaaattgaccactaccctcgagcgatgtattaataatgacga

SEQ ID NO: 55740 - DNA, 437 bp, Heterodera glycines
aaaatggtcaagtaaaaatcgtaattacgctcaaaaagcttctcaaacaattttagcgcttccaattccttctacaatcgcctttatacatcccattatgagcgctaaaattatcagagtgccgaaaatcgcatgtgatctaagcctagaaaaaaatggtcaagtaaaaatcgtaattacgctcaaaaagcttctcaaacaattttagcgcttccaattccttctacaatcgcctttatacatcccattatgagcgctaaaattatcagagtgccgaaaatcgcatgtgatctaagcctagaaaaaaatggtctaagtaaaaatcgtaattacgctcaaaaagcttctcaaacaattttagcgcttccaattccttctacaatcgcctttatacatcccattatgaacgctaaaattatcagagtgccgaaaatcgc

SEQ ID NO: 55741 - DNA, 869 bp, Heterodera glycines
atgtgtacattttgctttatttttgttttgtcatcatttgctacgtgcgcaactgacgaaagcaattcaaatttggcacaacgacaaaatgatcagcagtttgccattgctgaagctgatccatccgcgacaactgtttcttctccgcattgcccaagctgttcggataagtcatctgcttctacgatggcacaaaacggtgcttatccaaccacggaagacagaacgaaagagttttggacaactgatggtacggtagggtgaatagaattcgcgtttaattgagttgatccacgattctcgaccttttctggcctgcttccaaacacagtacccgacctgtcccacctgacgatcccgacctcgacattttttccctatcgggcgcttcggtattacctagggacgaatttcgtgcccccagaaaatctcggaattcgaaattccaagcgcaaaagtgacggaattcggaagcctgaagtaaatcttttcgacttcatggttgtataaaaattgcgtaatttgctttaaaaattacaaatttttccataatcccttaatgagaaaagttaacaggctttcagcgttcaaaaagacttttttttttgcttttgtgggtttttggcagagccagctatttgttttaaaatagacaaaatactcaaaaagattttgaccccataagaattttcttaaaaagccgagcgacgaatttttggtatttgtaggttttgtcacccctttgaaatttttttcataattttttctaggacgatttatgtgctgatcacgtgtcctatctcgaaccccagacccgaactcgaacaaaaagtctcaaaagattcgtacataatataagtaatttctga

SEQ ID NO: 55742 - DNA, 1232 bp, Heterodera glycines
atgggaaaattgaaaaatgagagaagtcttaacttcatggtcaagaaaagtgagttgagaagctaattgagatgtggtgacaagactgtcagcacttctctttgaacgaggttgatccgtgggaagaaattgaacggcaaaattttgatatgagagagagagagtttgattacagtcctcgatcaaagttttggtttggggaaaggaaagagcaagatcattttcttctgcaacccaaatgtttgacagaaaagttcctaaaaattttccgaggttaatgaattgacagagtttcttaggagagggaagccacataaggatggatttgtcgtcgaggcggcaattctctgctgtatatttacaatttgggtgtcctagagatgttcggatatgatcttcggaatgatgcacaaaaatctcagtttgaaaagcgaaacaatttgtggaattgtgtgctttccaggaccagccaaggaagggataccgtttttcatagctgattggattattggagaaaaggagctccccactttggattagaatcccttcggaacatgacttttcctgaaccatttgcttacattcatctaataatactgggagattttcggacgggagttgcttaatgattacatcattccatggattggtgtactcaatcagggatttctttaccttcctgcacacccatgccttggatttttgttcgaatgggttcggtcggaaaaggcgaataggttgtttgataggggtgtcagaaggagtatgctttaattttggacatggtagccaaatgggtagagaccaaattgtgccctcaacgtgtgtctgacaaaccatagggaggatttttaaggatgattgactgtgagaggatgagaccaaagaagcacttagagaaagagtaatgatacaaaggataaaattgaaacgagttagaaagggagctattgaaaaatttgagctgcgcgggtgtgattcccaatttgtgacaataggagtggggggaacaggctttggttcggattttaaagcatccgtgagatttggttgcttatcagcagagccagagcacacgagctgttctttgatttgagatggtgaggcagtaacgggttgttggatttggtcagataatgtaagagtgttaaatgaagggtggggaccattatcagacattgaaagattttggattgagtctggggggaagggaatcatagggtgttaaggga

SEQ ID NO: 55743 - DNA, 1054 bp, Heterodera glycines
atgcgggatcagctcgccattgtgcccgagtgcggctacgacactacaaacacgcaaagccttatagcgctcaaattcttggattggtacgccaaaaagaacggggtgagcatccagacggcacactcgcccgacggagagaaaaaaattggacaatacactgtggacggatacattgcgtcgaccgacaccgtgattgaggtcaacggctgccactggcacgcgcacgaccacccgcgtcaccgctttcagccccaaacagtgatggcgaacgggaaaacggcgcagcggatacgggaggacgatgcgagacggatggtcttcatcacatctcaggtgcaacaagtgctcgtattttgggagtgcgaaatcaacgcggagaagcgcaacaacgacgaaatgaagcgcgcctttgctcagtacaaggacagcggcccaattcgtttgaaggactgctaccatggaggacgtgtgggtccacaacgactacactacgaggtgccggaggggtggcggatgaaatattacgacgttcgttcgctctacccccacacgaatgctgtgacagcatatcctgtgggccacccaacacgagtgaacatcattggtgaggcagagcaggcggttgactggcgacgcgccgaccaggtgccgatccgaggcattctcaaagtgttcgttgtgccgccccatcacgttgatgtgcctgttctgcccgtgaaatttgatcagcggcttcttttcccgctgtgccgtacgtgcgctctgcaacatccgcatggatccgtcaatgaagactacgagtgcacgcatcgcgaggatgatgagcgggggtgggtgtccactgtgacgtcaatcgagttggaggaggcgcttcgcaacgggtaccggtgtacggcctattatcgctccgtcgagtgggacgatacgcagtggagcgaccgcgtttttcgaggctacgttgccgaattcatggccatgaaaacgcatgccagcggcttcccggacgaaattggcacaacaaaggaagatcagcagcaattcatagaggaat

SEQ ID NO: 55744 - DNA, 231 bp, Heterodera glycines
atgccattgaatcagcaaatgaaaaattacaacagtaatcatttgacgaaatatttggagaaaaatgggaagaaaaagaagaaaaacaaaatgaagagaaaatcaagcaaaaaggaagaaaatattcatgaaaagaatggcaacaaaattatgccgaaatttgcaaaaaaattggggacaaatcgaacgaaaatttataaatggattaaagaatttggtctttaaaaacaa

SEQ ID NO: 55745 - DNA, 1636 bp, Heterodera glycines
atgcgccaaaacgggggctatttgaatccgaatgattgcacaaaatgccattgtccggacggatacggtggccaatactgtgacgcactggaagagagtgagtaaaaaaataaatcaaaattaaaaaaatcaacatttgaatgttacgaaaaatgactttgatcaaagcatattcgatcaaatgggaaataaagtgtccagataaatgttctcccaatttattagatcagaactgcaaaattttggctgatgagtcgagggaattgaaatctgatcagaccgctaaagtgttgaaaccggtgatcggatgcacttctgccggcaaagaatgccgttgccattggcgaattacggcaatttttattttgttataaaaagataattatagtgttaataattaacaatataaaatgagtgaaaaagattttagcccatgtctggcaaaaaagtgcaaattcaattcaaaagcttgaacaattcgctcatctgctcacacccatgcacaccaccgtacgtcgagatcaaataccgtaccgacaaaagggcacaaggcaaaaaaattaatgaactaattaattattacttagcaaaatgatggctcattaaggtgccaaactttgctgtccccgtgcacttactgatctgaacggtaatgaatacaaaaattggattgaggcggaaaagccggacatggacattgtcatttccgcgcacctttcaccaaattggaccgtaccatctaccgtattcgaactgacatttgaatcaggcaaggaaaaattgtaaaataaattttatttgttttttaaattaaaaaaaattttaaatttgtattttaaaatgctttacatatctaatggaaaattgttctaaaaatctgttaaggcaacgtcaaactcataaattcgagcaaatgcgtgaaaatcgaaaatttgtatgccgagaaaaggaaccccggcaccggcactttgcgttgttataacccgacaaagaatcaatattataactgctcctgtaacggtgataagaaatgcctcgctgaagaaaaatgggcacacgaccgctttctttgtccaataatacaggtaattaattaattaattaatttgttattaatgccaaaagacactgccacagaaacatttcatataatattggcaatttaattttttggctgtaaaaattaccatttttgtatcaaaaagcggaaataaggacaaatgagaacataaatgaaaaaaatgccatctatttaataatttgtaaattcaaggtcaatggaattcaaatccaaatagattatcggtacaattggactcgtcttgatgttgattgttatgtgagttgggttttcctaatttctcaaaccctttttaattgactaattttacagaaggccgaaggaggtaccgtaagcttttggggctacagtaagcccgagaccaaagaaatcattcgtgtggacgaaatccactgtttgacttttgaagctgctggagtaacaccaccgtcacagaaacggttcaagagtttgcaagtcgaggaacatctgtcgatgaaattgaatccaagtacattattgggcaatgcttcatcacttatccatgtgttcgtgccatttgttggccatccatga

SEQ ID NO: 55746 - DNA, 520 bp, Heterodera glycines
atgcaaacaaccaacgatgaaagaaaagcgaaaactcaacaatggaagtcgacgaattcatgcagtttaaggtacgcaagaattacgtttttttagaaagggcagccttttttataaatttggagatgagtggtttaaccatgagttaccggttaaaaaatttttaggagaaatccaaaggcacttgcattgtttaggtgcttcagtggtggcccgatgaaaaaccataggagatgattagacagggatgggccaccgatgataacatttttatactggaaaattcaggattttcaaccaatttcttgacaaaaagtgcaggcaaaaaagaggccccgaatgatttttgtcggacctctagtggagtaaccaaaccaaacaaaaaaaatttgtccagtgtaataatatggtttaaattttcactgtcgtgggaaaaccatgggagggaagtacgtgcctcaccccttctatacggacctgatactgtttaattttactcgagcgtcgatcattcaataaa

SEQ ID NO: 55747 - DNA, 2583 bp, Heterodera glycines
atggcgagtaaggaggagttgaaaacaatattggaggcgcaacaaaaacaatttttggagttaatgaaaactctcatgtccaaaaatgaggctccagcccattctgacttattttcaaaattgaattcacaaattccggattttcggtatgatccggaaaatgactcaacattttcattatggtatgaacgatacggtcagtttgttgaaaaggatggtcaagccctttccgacgacatgaaggtccggttagttttaggtaaactttcggccactgatttcattcgttatgagcaacaagtgctccccaaaaaaactgccgaattaagttttcaggaaacaatcaccaatcttaaggctttattttcagacacaaagtcagtgtttgttcgacgatttgagtgtttccagctcacgtgttctcctggacaggacgttctcgactttggggcaaccgtgaatgccaaatgcgagcgtgccgacatgaatttgtccaaggaggaaatcaaatgtctcatatttgtcacaggtttgggtgaaatgcaccgggacctccgtcaagaatgtcttcgacaaatggagaaggcacggaaagtgacaccgccacgcgacatcaaattggaggcattgttggaagaatgccgttcaattcaatcattgcaacactcagctgcggcgctcgcaaatcctggtcaagttcacgcaattcctagtaagccaaagattttgagtgatggtagagccaaaaattggcaatcaaattccaagaattggccgtcaaaaccaattcaatttcaaaaattttcgggcaacaattcttatggaagaaataatggttttcaaaataaacttgttaaaccacaggataaaaatgttgagcagcagaaatgtaagcgctgcgggcgtgctcatttgcttaaggaatgccgttatccagtggatgttcagtgctttggttgtggacagagaggacacatcaagacgaattgcccatcatccgcaaagtcaaattcaatcggagttgcctcaattttcagtgtcgctaactcgaaacgaggatggatttggactgaacttgtggtcaatggccatcctatcaatttggcagctgattcgtgttcggatttgacaatcattcagcgtcctgtttggataagtttgggtgaaccaaaacttgaaggtgctggacggttggtcggctcattttcagggcataagctaaaacttttgggtggtttcaagtgtaaggttgtattcagaggtgtcgaattaaatctgttttgttcagttgccgacacagacgctccaagcataatgggcctcgactggattgaaccttttgaaagacacactcaaatgcccatcgcgacaacattaaaggtcgtatctgccggcaattctgggcccgtctcatgcacaatccaatcgtcggatccaacgcagctggccaaggaagtcagggcaaaatttccaaaagtttttcagccaggacttggacggtgcaccaaaatgcgagcaaaattacatctcaaagaaaatgcaaagtcggtgttctgccgcgcccgtccggtacctcatggagttcaagaagcagttgatcgcgaaattgaccgccttctggaaatcgatgcaattcgcccgattgatttttcgaagtgggcagcgccggtgcttgcggttcggaagaaaaatggagctgttcggatttgtatcgatttcacgaccggtttgaatgaagccttggaacttaaccggcacccgcttccaagaaccgacgacattttccattcccttaggggttcaaaaatattttcccaattggatctcagggacgcttatttgcaattggaactcgatgatgaatccaaaactttggtcggaattaacactcatcgtggattattccaatatcaacgacttccatttggtgtcaagtcagcgccatccatttttcaaaaagtcatggatcaactcacgtccggtattagtggtgtttttgtgtatttggacgatttgatcatcgcttcgccgaacatggctgaacatttattggttttagaaaaattgttttcccgaattcaagattatggcttccgaattcaactcgacaagtgccattttgttcaacgcgaactcaaatttcttggccatattgtttccgcggacggcatacgacctgacccgagtaggtcagcggcaattcgtgaaatgccgcctccgcatgaccttggcacattacgctcatttttgggagcaattaattactatggtcgttttattaaggaaatgagagccatccgtgctcctttggatttgttgttaaagaaggaaaccccttgggattggggtccaacacaacaaaacgcttttgaacaggcaaaacgtcttttgcagtcggaacttcttctgacccactatgatccggagaaaccgatcattgttgctgcggatgccagtcaacatggaattggtgcgacgatcagtcacaaatttccggatggatcagaaaaagttgttgaacatgcgtgtcgttcgttaacttcagcggagaggaattattcgcaaattgaacgcgaagcgtag

SEQ ID NO: 55748 - DNA, 138 bp, Heterodera glycines
tcagaatgccatctcttcggatttgccccttcaatttccccaccaattcccttctaatttccgtccttttgcttcttttctgtctccaattctttcctctcaatgcccttcatcagtgagttcgcttttcttttctct

SEQ ID NO: 55749 - DNA, 424 bp, Heterodera glycines
gtgacgaatttggcggaatggaagaaaattgtgtaatggagggaccgggattgggatttaactgtggaggaattgaaggtgacgaatttggcggaatggaagaaaattgtgtaatggagggaccgggattgggatttaactgtggaggaattgaaggtgacgaatttggcggaatggaggccaattgtgtaagggaggaagtgggaatggcatttgaatgggaaggaattgaagatgaagaatttggcggaagggatgccaattgtgtaagggaggaagtgggaatggcatttgaatgggaaggaattgaagatgaagaatttggcggaagggatgccaattgtgtaaggaagggagtgggaatgaaatttaaaggaggaggaattgaagatgaagaatttggcagaagagaagaagaaggcag

SEQ ID NO: 55750 - DNA, 294 bp, Heterodera glycines
atgacattccaatcgctgggactcaacccaccagcatttcaatctctaggactcaattctcctgcatttcaatcactgggactcaattctcctgcatttcaatcactggcactcaacccaccaacattccaatcactgggactcaaatctccggcattacaaacactgggactcaacccaccaactttcaatgacattccaatcgctgggactcaacccaccagcatttcaatctctgggactcaattctcctgcatttcaatcactgggactcaacccaccaactttcaatga

SEQ ID NO: 55751 - DNA, 1960 bp, Heterodera glycines
atgtgcccggtgttgcaccgccaggcccacccggacgtgccggcgaggtcggaccccctggcccacctggaccgcccggagagaaaggtccgtgagaatcctcttggatatatcaaagcgttcatgcacctgtcttcaactacaggcaaacttggcgagtcgggcccacaaggtccacagggagaccagggcaacccgggaccgtatggaaagccgggcgcgctgggcgctcagggcccgcccggacagcccggagcggtcggatcgtgcggtaagtgtgccgtccgtccgtacggatcccgttatgtcgaaattactatatttttttctttttgtaagaccattgcccaaaaccgcgaacaccccccggctactgaagcgttgtgccttttccctgacgacagcagcagaagacgagatcagatcaccgttactactaattgtcacattattattgctatacagtagtgtacagtaaccccttccattgtgaaaaattggatagatggaaaacaaaatataaaaaaacacatttggccaacagaacattgtgccaatcaatcatcacagaaataaattgtttataaataagactcgaaattatatgcaccgaaaattgcaaaaaaaaaaaaaaaaaagtgaaaaatttgcttataaaccttgccaaatgaaggtggaaatttctcaatttcacatattccattaaatgtaaggtaaaaatcttgaaaatagataaatatgtatggtatgcaaaaacaatacaaaacaaagctaaaatttattaattctgaagaaaattgagtaaaatcggatttccattttgggcttacataatttttggaataatttccatttttttaacaatttatattttttaaaattttatcgataaaataccgaaaaaattaactttttgtgaaaaattttcgctccttaaaaaccaaaagggccgctttaatagagtgaaccgtttaatagaggattttgcatatatttcgagccctgtttataaaaacttctcaatcagtgtccgtttctgacaatgtcctttttgtccgtcactggatgcagatgttccaccgggattggcacaccttgggactcgtccactgcttgggcaatgtactgcttgaattcttgattggggaaacatgggttatcagacgcgcaattacatgggcaatataataattgccatgaaagttgattttgttgtctccgttgaggtcagcatttttcagcacactgatcagaaagcgcaagtgcgatttgtacgcgggatcaacatggttgtgctgaagcaattggttaaagaacaaattccatcaaactgcatcactttcttcgcattcaacagcatgcaaatcagatcctcgcgcccaatgtgcccattcatgtccttgtcctaattttgggaataatcatagttggtatggtatcggattactgtattctaaattaacgcgctcactcgccccctcccctaaccaaagcatagcctcccttttgagcgaggggtgtgaagaatttggcaacgttcgagtcagtaatttgaaaaactgcggacccggatttccgagtcggattcggacagggtcccggacaaaaaatcctgctttaacaggactctggctccttttgaattttcaaaaaaaaaatacagacctgaactagggccctggaaaaatactgtacaggatcctggtaaaagcaataagcttgaaaaagcgtcagaatttttccatattttgaatttctcgaaacagtcgaactcactaccaagagtgtgttacacaaatcaaccaaaccatatgtatgtatgcattattgtatacctgttctacgaacatctcgcgcagtttatgttctgtgaaatggacaaaaaatgctgcgtgaaaattaagaccaaaaaaccgaccccaattggccatatttgaaggcaaaatagacaagtaaatta

SEQ ID NO: 55752 - DNA, 388 bp, Heterodera glycines
atgaattttcgagcggttttttgtttttcggtgagtattttttgcgtaaattattgtaattcaatatatcttcttggaggaggaggtgccgaaggcgccaccagagaaattgacgattttaagaagattttcagaggtttttggtccaaaaaattttgaaaaatagaaaataaacgggaaataaaaaaagagtcataggcaaaatgtcaaaatattaaaaattttcataatctaaacattttacatgcaggaaaatgccaatatcttttattacctcatcattattttcggcatttgagctgctgctcggatgactcaaacattcattgataaaagccaaaagtgtcggctcaaaccttgaaaatttccaattaattgagcgaattca

SEQ ID NO: 55753 - DNA, 1234 bp, Heterodera glycines
atgtctcacaatcaaccaaagaaagcaaaatatgagcaagcccaagagaaggaggataaagcaccacttacggacgacgcagagaaaaaggaggctaaagcggataaagcatcacttacggacgacgcagaggaaaaaaaacagaaaatgacggaaaaggaaattactgtactgagtgagtttttatgagtgatggtctaatttttccctatagtttaatcagatgatcaaccaaaatttaggattttctgacaaattgaaccgtttttgtatgaaaagaaagaaatgatagaattttttggtccttttgtgatttaagagcattaattccaggactccatatgtatttttttaaaaaggtacgcacgaagctctacactgttattatgcgcaccaatcaactgttgcaacaccaacagaaatgtttatgtcgcaagatggcaccggttttgtaagtttttagcttttgtaccatttataaatcatgggaaatagaattttgcgcctttctttaatggaatttgtcattttaaaagaaggttccattaccatttgatgcgggatgaagaagaaaacatcttcgacattgaggtggcactagccgccatcattggagaagaaaaaatttttggacaccattttgatgggtcagaaagcgatatcgaacaagcgacgagagtaagcaattaattaaaaatcagtttttgtgctgcttagtttatgttgattttttcatgtcttttttattttaatttttggttgttgacctgggacgagaaacgaaactgaacattgaattttttaagaaaatttgaatgtacatgatttttttaaatttgatttgaaaattggtcgcttggattttatgcattcataaagttttcccttttgcttcagaatctgaaagcaatgatcgaagaagagggatcgaacaattttggatgtatgcgggacttcagcgtaaatttttctcattaaaacaacaccaaaaaacggaaaaaaaactattttggtgttttggcacataaaacatatcacacatatttagggtttggcacatattttggcagttttgagaaaaatctgtaagaaaatacaaaaaaaaaattcaatttgcattttaaaattcactgctgaaatttatcatatttcgggatttttagcacataaaaatgcggtctttactaatcgtactcacttttaaaggttctcacgcccagaccagaaaatcaaa

SEQ ID NO: 55754 - DNA, 416 bp, Heterodera glycines
caggtttgatgatagttttggtaagccaaaaaaaatcctcacctttattaatctataaaaaatttaaaaatgagaattcatgctagattttctggaaataagcttaatatggcatagttaagctgtaaaaaaatttggggcgatttgaatgagaatagaaagagccaggttcgatgaagttttggtaagccaaaaaaaatccaaacatttaaaaatctataaaaaatttaaaaatgagaattcatgcgagattttctggaaataagcttaatatggcatagttaagctgtaaaaaaatttggggcgatttgaatgagaatagaaagagccaggttcgatgaagttttggtaagccaaaaaaatatccaaatatttaaaaatctataaaaatttaaaaatgagaattcatgcgagat

SEQ ID NO: 55755 - DNA, 418 bp, Heterodera glycines
gtttgagtaccccaaacggacttttgaaaaattcgatttttttgttttcggggcagtccccccgaaccgatgcgcccagatttatggggagaccgaatccttcgggaatagcttccctatagcctgtactttaattctgcgttggatttttgctccccataattgtttgagtaccccaaacggacacttgaaaaaatcgatttttttgttttcggggcagtccccccgaaccgatgcgcccagatttatggggagaccaaatccttcgggaatagcttccctatagcctgtactttaattctgcgttggatttttgctccccataattgtttgagtaccccaaacggacacttgaaaaaatcgatttttttgttttcggggcagtccccccgaaccgatgcgcccagatttatgggga

SEQ ID NO: 55756 - DNA, 180 bp, Heterodera glycines
aaaatctataaaaaatttaaaaatgagaattcatgcgagattttctggaaataagcttaatatggcatagttaagctgtaaaaaaatttggggcgatttgaatgagaatagaaagagccaggttcgatgaagttttggtaagccaaaaaaaaatccaaacatttaaaaatctataaaaaa

SEQ ID NO: 55757 - DNA, 466 bp, Heterodera glycines
aaaattttattcatcttcctttttgatactaaagcatccgagtgctaaaattaacttgtaaataaaatttggtgcgctttagagcactttctaaaaaaatatttatgaaataaaaaaatcgattttttcaagtgtccgtttggggtactcaaacaattatggggagcaaaaatccaacgcagaattaaagtacaggctatagggaagctattcccgaaggattcggtctccccataaatctgggcgcatcggttcggggggactgccccgaaaacaaaaaaatcgattttttcaagtgtccgtttggggtactcaaacaattatggggagcaaaaatccaacgcagaattaaagtacaggctatagggaagctattcccgaaggattcggtctccccataaatctgggcgcatcggttcggggggactgccccgaaaacaaaaaaatcgattttttcaagtgtccg

SEQ ID NO: 55758 - DNA, 523 bp, Heterodera glycines
atgggtcgacacaggcgttatccgatgaaaaaaacagcaaagaatacaaaccaagcccaaaaaatagaacgattgtcctttgacactgatcagacgcctcttcaaacaccaaaggacagcaggaaaaacaagttttctattctcgaacatagagaccttgaaaagtcaccttataggaatatgaacaaaaagccatccaattcgatgttggaggaacagccaacaacatggaaagagcaaatgttgaagaaactgacagacgaagttgcacaacaaaaaaataaaatacagaaaaggaacaaaaagccaaagaatcgacttttgggtaagagacaaaaataaaaaatttgcggaatttttgattgttaattcagaagaaacgcagaaattgggttatcatcacatgccctgggaaagtgcaaaaacactgatttaccgaattcagcaagaccaaaacaaggctataaatgaagaacttttaaaggtcggaaattggattttttgcttttatccttctttttaa

SEQ ID NO: 55759 - DNA, 346 bp, Heterodera glycines
atggactcagcggaccgtcgctcacctacccccgacatggagctttgcgaattgtcatcctggtacgacattttgcaggatgacgatgacaacgtaaaaaatgttttttcatttttcattttcaaaaattattattccagattttaaattggttcacaccggtgacggctcgcgacgtttgccaggaggtgttagcatttgcacaagagcgccgcatgccgtttgaaaagattgttaaatggaagcaaattttggacaaaatttgtgctcagatcgcccaaaataagtgatcgttttgtgatcgaattcatttttaaattgatgcgctttttttggcactgttaaa

SEQ ID NO: 55760 - DNA, 271 bp, Heterodera glycines
atgacgagggcaaatgacttattaattatttgtttaataatttttgtagttcccactggcgtgttggacgctgacgacgcgttgagcgtgttcgtttcgtattcgaattcgggctatacaaatgcaaaattctcaattcatccgagagttatgcaaaacactggcggttcaagaggccggctcacgttggacatcgaaaattttgaagattttttgatggaagatgaaggaaaacgagaaagtgtgataagagtcatcagaggacttcctt

SEQ ID NO: 55761 - DNA, 556 bp, Heterodera glycines
atgagcgaacttgtcgccgaatgtctgcaatttgacttctccgaaattcccaacatttttgctgtgtattccgaatgtctcaagctgaaaggacctaatgtgcgttgctatatataagcaaatatttataaaactcattttacattaagaaaggattaattgtattttgaattaactcgctaattaggggaaaggagcgtttcggcgccagcccaaatttttgtgctataattttttttagtttcaacgaaatcaaaccttctaaacatgctatgagttagaatgatgccaaaagattgttgattcattgaaattaaaaataataatagcccaaaaacttgggatggccccgaaacgacccagctaataattgtttttatttagttcgaacattttgcgcagaactgtctccgttgacgtttggaaggcggtaatcatatgacaattgaaactaattgcatctttattttattgttaggcaattcgttgggcgcaaaatcagtgccaagaaaaagaggatgaacaaaatgcttcgcattggatctccgcagaatga

SEQ ID NO: 55762 - DNA, 771 bp, Heterodera glycines
atggcattgaacacgtcaaatttaatgtttttgattgccacgggttttgttggaggtttgtctaaaaagctattcgtctttataagattcacatttttggcacgacctttgttcgcatcatctgaaattagacgatcgaacgcaccagaaatgccccacaaaatttgcctgtgggctcggacatgcttaaaggtaaaaatgttatgcttcgaaattctgaattctatctgaagtttatgccttggtttcgccaccctcgtcaaatacaaacaccaaatcagcaacggacccagtcaataataaatttttaaaacgagttgacacggaagacatttcaaaattaattgtattttaaaatatgtttgctcctattagaaaattgcaaaagaaattagaaggaacaggcaattgcaaaataatgaataaatagagagaaataacaaatagaacagagaatgaatgactgaccccaatgaaagggtcaaaaattgaaaaagggcagagtgaaaaataaagtggggaggggcggggggattgaacggacgtgggaaaggcaatttgcaatcgatgagaagtttattaatcattcgtattttttaatctatgcatgcatatgctttatgtgcctgcgtcattttttttattcaaggagtatgtgcatcaacggaacgaaaagggtcttttcacatgaatttaccgtattggtaggatggcattctaatgcccaaagattgggcagagcttacctaaatattgccactttattttaaa

SEQ ID NO: 55763 - DNA, 333 bp, Heterodera glycines
atgcgactcgatttggccccaaatgcccacggcaacgattggccttacgctgagcttaagtccgccgtctcctcggccaattttctcgagaggccacggccaacaaagcgtgccattagcgatgccattatcagtgccattccgacgacttctttcctcagcagtccctctgcctttgatgctggcttattgttatcgcctctgccggtcactaatcgaattggccatttgctgagggaattttcggacagacaaaaggccatttgtgcccaacactttggcattggcactgtgcttggcaataaggttggatcgattgtcattgacaattga

SEQ ID NO: 55764 - DNA, 116 bp, Heterodera glycines
atgattttatctatgatttttcatcaagtacttggttttttccaaaattttaaaaaattaaacgagcgtaaaaactcatggaccgatggtggagagaattgcatattattatccag

SEQ ID NO: 55765 - DNA, 1040 bp, Heterodera glycines
atgtcaagcagtcttgacgtcttcaaactgacggacgatgacgcaatgaaatttttgttgtgcgaatcgcacatcggcaccaaaaaagatggactaccaaatggagcattatgtgtggaagcgtcgatcagacggtttattttttcacttgcacaataaatttttttaaaatgtaatgcaaagcaaaacttgccgtttttttcatattcaaaaccagtaaatttttcattttcgacccatgataaaaagttggaattttttttcgaaaggtacatttttctgggtaaaagcttcgaattcatttaacaactatttattctgatcaaaataatgcttcaactattaattgcataaaaaatatgcaatttacgccaaaattagatcgattttaacgcgtatttgaaaaaaaaatatttaaattttttgttccaattcgggtccggggttcggaattgagcaaacccgagtccagattcgtaatcagaaccctcgaaaaccaccggaaactgattttaagcctaaaataaaaaaaagttaaattagggacccccattctttacaattgccatgccgagcacaaaatcttataaatttttagaaaaataaaccacccaccgcgttaaggcattcacatcatcaacattcgcaaaacgtgggagaaactgttgttcgccgcccgtgccatcgcggccattgaaaatccgtccgatgtgtggttgtctctgcccagccgtacgcccaacgcgctgtgctcaaggttttccttattccatggttccggggtcgtgctgattgtgatttttttttttatttcggtccccttaatatgcagcggttaacccgttacaaatgcattacatggaaaagtttagtttggttttccaaggtaaatgaaaacacagagttgaagcgggtccctcttttttgtttaactgaatcgatggcaataacctttctataataagttttcttcatgtttcagttcgccgctcacatcggtgccacgccaatcgttggccgtttcacgcccggctctttga

SEQ ID NO: 55766 - DNA, 149 bp, Heterodera glycines
ggtaaatattgatcataggccccaaactcaaaaatgcttaaaaacagtcagaatcgatgtaaaaaggtttgaaatgtgttggaaaaatagaattaggggcgcgcttgccctttttcaggatgaaaagtgccgaaaatggagtgccaaac

SEQ ID NO: 55767 - DNA, 229 bp, Heterodera glycines
atgcaaaaatgtaaaaagaaactagtaaaaataaaaaatggaaaatgtaaaaatattttaaaaaggtaaattttttcgtacatttcaaaaagtttgaccattttctctcctgcgaattttaggcaaaaagaaaatcttgttgacgataaaccagggctcggatctgtcctgatttgtcagatttgtttctgatttggaggtagcgaccaaagttgtcctgatttcttaa

SEQ ID NO: 55768 - DNA, 2482 bp, Heterodera glycines
atgcgcgccattctcttccttgcaatggtttgcttggtgatggctgttattcttgagacaggtggccaaaattaattaaaaaattaaaaatattttattattttagccaactcaaaggcagtgaaaaataagaaaggtataaataaattgataataaataataattggaatatgcttttaaaggaacaattacaacgccagcaaaaggaaaagcggcgccgaaaggagcagcgaaaggaggtaaagcagaaaagagagagggactaattaatacaaattaattgattaactaattaattaattaaggaattaaaaaagacgcaaaatcaaagggaaaaggaaaaaaggacgccaaaggcaaaaagggtaagaattttaagtttatttttaatgttattaattttcacaaaatctataaaaaaaaaattccgttgtgttggcaattcaccgaaattaataaataaggattttgatattttttaaagttttaaacaattgttaccattccgaatcagtcatcaagctaaatgtagttgtcttatttttaattaaaatcaactaataggctttgaaaaatgctataaatattttagaccaaccaacttattttgtgattaataggagggcttcctttttaggctcaaaaaatagcaaaatagacgttaataggcactaaaataggcaaataaattttttattaacgctttttaggtagcaaatggtaaatatttctaattgtatgtggaattaataaatattttaaagttttttcgaataagcacaaactttaaaccataattttttataaagaaaaataattaaattgtagaggatcaatttttctaaaaaaaatttgggtcgtttcttagaggtgtatttaagagttttccgaaaatcctgaaaataggcgccaaaaatggataaataggcacaaaattaggcattataaaagacatcgttgactccccaaaaccagtttttcgtgcttatctgagcgtatcaagcgcgcagaaattcttattcagttccaattaatttttctacaaaatgtaaaaaaagaaatgaattaaaattgtttgtattgtacgatggattaacaaaaattaagtgctacgcatgcggcaggattcgaacctgcgaaggaaatatccctttgcgatgtaaacgcaacgccttaaccactcggccacacatgcggtaatgtcattcaatactccaatgcgttaaaaacattcaatcaggcaacgctccgggtttagcgctaaacccgagttgacttgtgttgatccggattaacctttttatatcgcggtgtgtctctaggttaaatgtttcttaacccgtgtttaataaataatctcgggttaacagcgtcagtgtcctcgtctttggattcttaaccgggttatccgttaactcgggttttgttaactcggatttaccaacttttaacccgggtttatctccgtgaacccgggtttaaaataaatttgtgtgctcgtttaaccttgtttattttcttaaggatttttaaccctgagtttaggcattgttaacacattttaaacaaataaataatttaaatataaagaactcggtttaacggcttaacttgatttatttagataaggataatcgaactgactaaaatcacatttttgcaggttttaatgcttttgtgatctcataattatttttatatatcgataaattgtcaaattaacgaattgaacatagacaaatcaatgaaaaaaaaggttggcattggcataatttccgggcaaaaaattttggaaaaacatttccaatttcaatgaaaataaaagattttggaggaatataaaagctaaaagaaagccaagcgaaaaacatattcgaatattttaatttaattaatttgcttttattatccttcaaaatgcgcgccgttctcttccttgcaatggtttgcttggtgatggctgttattcttgagacaggtggccaaaattaattaaaaaattaaaaatattttattattttagccaattcaaaggcagtgaaaaataagaaaggtataaataaattgataataaatattaattggaatatgcttttaaaggagcagttgcaacgccagcaaaaggaaaagcggcgccgaaaggagcagcgaaaggaggtaaagcagaaaagagagagggactaattaatacaaattaattggttaactaattaattaattaaggaattaaaaaagacgcaaaatcaaagggaaaaggaaaaaaggacgccaaaggcaaaaagggtaaggattttaatataaagcgaaatttaaacagttaatttttgaattttagacaaaaaagctaagccagccaaagggaaaggagtgcctaaaaatggtaattattattaattttaaatgctaattaaaattgaatgaatttagacaataaatccccagcggcaaaagccaatgacaaaaagagcccaagtaaataat

SEQ ID NO: 55769 - DNA, 521 bp, Heterodera glycines
atgtcaatcatcgacagcttcgttgtgccatatcctatcagcagtggaatattagtgaatcagttcctattggtatgtatggcaaataatttgaaaattgtgtgccgtggcatgtttttggactaaaattaaattttacaaatttttaggcactttgattggtcgtgtcaacattttggacaatgtcaccgatagtgcaacacataaattttcgtttgtcaatgcaaatgcaacgccaaattttcgagtcgacgaatttgacggcaatatttacattcagaaaacattggatcgaaatttggtgcatgcaaaatttgatttaaatttgaatttttgtttcttgcttttaaagcattcccttgtcttgttgatggaggtcagtaaaatggaggattatggtgggactacagtaacccgatgtgccattcgcgtcaatgtccaaatcgacgacactgaccaatggtcgtccaatgcaacgaaaagaaatgccattcactttcttaggtgtggtccaaaataaa

SEQ ID NO: 55770 - DNA, 647 bp, Heterodera glycines
atggaaaaagttgacgtagacacacaaacggatgatggaacagaaggaatggaaattacagacgatgaaaaaataatattaagtgggttgcatttcattcatttcaattttaaaaattatcaaaaacttttttatacccgccttttatcaatttttccatttttagccgtaaaggaagcgtcacgcgctgttgttgcgcatgagtccgtgtggagcgaccccgttgaaatggcttacgcacgtaatgggaaaggagaagtgagttttaaaaaaagtttttttttgctgaaattgtgtacaaatttcaaaaaatttttattaaaaaaccttgatcactgaaaaaagccctagttaatttgtgttatagacaagaagacgaaaacactgcgaaaaattgggtggaaagcaccagcaattggaagatgttgagttttgtttggctgccaaattgggagttgaaatcgttctcaagaggaccatcgctagcgatgaagacatcaccgaagcgacaaatgtacgtaaaaaataaaaacaaaaaagtgattgttctgtttcagacagttggtacatggtcaaaagatcaggcgcatatcgcaaggaaacaggaattcgtagtagggacggtaatgatggttttttgggtataa

SEQ ID NO: 55771 - DNA, 656 bp, Heterodera glycines
atgtttatgaattgtttaaaatgttggtttcattgtttgattacaaaaatcaaatgtatgtcaaaatgatccaatagactagaatagagcgggaccgggaattcccggtcctccgaggtcccgaattttaaaaatttatttcccggtcccggtagggcaaccgagaaaaacaagcactggtatgaagggggtctgagtgaaaatttaatgctgaaaattggagttaaaggcaaaatttaaaaaaaaattgatatagtctaaaagtaacactaaaaattgtgcaaatggcttagtggctaatcttcttgattttctacttctttccccaggttcaatccctctacagaaattgaattatatttaattttcttttcgtatactcatatgtagggcccggattcttagttttttaactattttttctgcggctttattttgattagaaatgcacgaaaaacacatttttagttcggaaattattcgttttaacgccactattcatcactaggaatcactattttggagcttcgccactaaaaaaaactattttggaagttggccactaaaataattttttgccactattttggcgtttcgtcattatttttgccactattttggcattttttggaaaatttcccaaaaaatgcaataaa

SEQ ID NO: 55772 - DNA, 364 bp, Heterodera glycines
atggcatccgttcgtcacagaaatcccatggctgtactggttgttgttctttcatcgtcgctgttttcccccgcttttgcgcttgctccacttcggcagtgcgccgcgtcgttggaatgtgccacgggcggtcgcctcgcgacgctgcacaatggcggtgaaccggcgcttgttgcgtgccaacagttccgtgtccgccatcagctcctccaccattgtgcgcttccgttgccgtcttggaacccgcgcggcgtagaagtcgaccttggattcgtcgatgtggccaatttgggggagaaaacaataatttatggaaaaaatagattttttttctctattgcacagtttaatcgatcataaaaaa

SEQ ID NO: 55773 - DNA, 241 bp, Heterodera glycines
atgaattatgatgaattgagtattttgaaggaagaaactgttgttaagacaaacggtgaatcattcactgatgggcaacaaatgaaggtgaacaaaacatagaaatttggaaatatttataatttattaaaattataattataatataatttttaatgcaatattttatttttaggaacttagagaaaaatttgaaaaaatggaattgatattgaaaaataccaaattggagctcaaaaat

SEQ ID NO: 55774 - DNA, 1968 bp, Heterodera glycines
atggctccctggcatagcaaaatgcgtaaacattgtgaatggaaaaatgtgaatggtccaaagtttgaattaacaaaacaaagagaaaaatggggaaaaatcggaaaagaatcggagaaggccggaggggaagtgtcggccaaaatgaagacaaaggtgaattcaaaaataaatggcaaagcggcggggcaaaagggtaagagcagacgcagatgtgaaaaaagggagaaaaagggtcaaaattgaaatacgacaaattgaataaaattacgatagcaaaatattgagaaaattgggataaaaaaggtgaaaaatagagaaaattgggaagaaaaggcaaattccgatcattttcttgacgcctctcgctctgtccctcaattgcgacgggaagtgctcccgttcgaccacttgtttctcttctaaacgcagcagataaaagtgaacagcagggcgcgaaagcattgactaaacacaccgggggtcctctgccccccggcgcctctctctcccccccccccccctgcccccgctcaatgttgataaaaaagtcgaataggggcagcgaaaattcgtccaaatcaacccccccccaccgccaccaccatcaccagcagcagcaaaaacatataggggcagccaaatgttgtgcagcaaaaggtgcagcaaaaaaagtcaagtaggggcagtaaagtgtgcgcgctatatctactaatatccaaacttaatcaaatcccattatcaaatccaatttgacagttataaaaaatctgaagagaagaaaatttcaatttcaacagattcaacaaatagtgaagatttttcgtctgatgattgtgataatgagaaaaggggaaacggtagaaaataaaatttgggaaacagtagaaaattaatataattaaaaataaataaaatgaaataaaaatgcttttctttttagaaatgaattatgatgaattgagtattttgaaggaagaaactgttgttaagacaaacggtgaatcattcactgattgaggatttttgtacatattttagcattttttatacatattttatttacataattcgcaaatattcttacataaaattagcagccctattaataatgcagaaatgcaaaaatgaatggataaatgagtcaattataatattttcgttttgctcttctccaattgttgagtcatcattttgccctaaattattgttgattgacctcgataaatacattaacataagcaacagcagtcagcaaatgttcatttattactacaatttttaaaatatcatatttctttattattattattatttattttttaattaaaaattcactttatttgtccaaaaaatggctctattgcactttatgagtccaatcgactttttatgaaaccaaaggtatttaatgaatccaatcaattaacaatacctggtttttataaaataattttgttcatgtttgaacaaaccctatctttttgatgtcattcgaaagtagaaagcctaaagaagtttaaatatataaaattttagcgtttaggccatgtcaaaaaaagatttgattaattaaaaaattgttgatattttcgtttgtaattaactgttagaattatcttgttttctcgtattattacattattcggactttgtgctttcgaatgatacctaaaatatagggtttgttcgaacataaacaaaacaaaattattctaaaaaaccacaggtgttgtttgttaattgattggactcataaagtgcaatagataccaaaaaaatttcaaaaggcttgttacatacaaacagtactcaaacttctctccatttctcatcatcaaacccaatttgacaattataaaaaaattgaacagaaggaaatgtcaatttcaaacgattcaacaaatagtgacgatttttcgtctgatgattgtgataacgagaaaaggggaaacggtagaaaataaa

SEQ ID NO: 55775 - DNA, 93 bp, Heterodera glycines
gcaaaagattgcgttgttttcgccaccgaaaacaaacactccgtcctcacacagcccgtcaacaaaatctccaagttgtccgaccatattgca

SEQ ID NO: 55776 - DNA, 379 bp, Heterodera glycines
atggtcggacaacttggagattttgttgacgggctgtgtgaggacggagtgtttgttttcggtggcgaaaacaacgcaatcttttgctgcaaaaatgaaagaatttgttgggttaaaaaaaggctgttttcaggagtatcgaagtcattgaacaggaaatggcatcatttttcggaaaaactcttgaaactgaactcaatttggaaccaaaagttgtgttgaaaagtcaacccgcgacttaaaaggaggtaaaattgaaaaaaatcatcatttgttttccggatgtcagataaacaattgtatatcccaccaattgcggtttatgtttatttttgaaaaaagggatttgaaacttcaaaattggccaattttaaataaa

SEQ ID NO: 55777 - DNA, 126 bp, Heterodera glycines
atgagagagtgctggatctcagtcccagtcatacaaaacatttttgatgaaggaggtagagaaaacaatttcaataaagagcgcaatgggaagggagttcatgtctcttcttcgctgattcttttg

SEQ ID NO: 55778 - DNA, 869 bp, Heterodera glycines
atgtggataacggttagaaccccaaattcttttgggaataagagaattttggagatttgtcctgggaaattcacccaggccttttccgaatcgacactgtatggaaggtatgacgttggttgaccgtggaggccggaggcagagaccatttgtctaataatttttcactcgcctgttcccgtctgatggaatgcccctaaaattaagggtcaacaccgaattcgagaataatatcaagcgacaattttggaacaattgaccgggaattataaagccggcggtttgttcaggggcaagggagcattttatacaacatcatgaggttcgaacccccaaaaattgcgagttgtctatgataactccgcgcaggaaaaatggaaggcttcactgaacgatttactcctccctgacccaaatttggtccggaattagcgggaatttagctacgtttccagtcctctacctttcctgtacattgcagacattaagaaggctttcttggccgtcggtcttcgggcggaagaccgggaagtggccaaatttatttagatagagacccttcccaatccttaatccctgaaaatttagtgattttcgcttcaaacgaattgcattcggcttcaattcttcgccatttctgcttgcttctgttctccgtcagcattggttttcgattttgtacaccccttggggatggcaaaaacctttacggtgataatctattaatttgcagtgaatccgccgaagaagtcgctgctgcaactcaaattgcccgctaaacaatcgccgatgctctttgagttttcgaggtcactgattacgagtccggcattcatttcatccgaaccccggaccagaatttgaataaa

SEQ ID NO: 55779 - DNA, 352 bp, Heterodera glycines; identical to SEQ ID NO: 55331

SEQ ID NO: 55780 - DNA, 836 bp, Heterodera glycines
atgaattgggtgctgctccgtgccggcttcccgcccgtctccatccccgtggagcagcgccaccgctactaccacgtgctgcgcgaggccaacgacggcgacctgcgcccgttcatccgcttcattgccgagctcaccgaccgcacgttggaggtgggtgggtcatgagacatgaatgactttttaaatcgcccaaaaaatttttcaaaatttttttcataaaaaaaatcggggcggttgggatttgaaaattagggtttcataaaaaaaaggtcctccattttttcaaaaagtagctaataaaaaacaatgcttggtccaatgtctgctgatataccaatcgaaaaaagccctctgacatatgggaatttttgtttttttggaaattttgatttgaaaattttatgggaatttagcgcagcccggcaccgcctgggaaaaattttgaatttttaatgaatttgttgaaaaaaaatttgtgtaaaactattgtacccgctgttgtgttgcggctatgtcaatgaaatttgttgacattttagcccaaaaaggacaccagaaatatttttcagaaattttaatttctgttttttacacgaaaattttgttcatttttctaaattccttccatttttcacatttcggtaatttcaaaatgaccctccattttttacagtcgctgatcgccggctcagtgtcctcggtgtgcgaaattggtgacgactgttcagcatcatcatcatcgtcatcatcatcatccgccggtggtggcgacgcaattgatgccaccactaatgggccgaaggagggcgaggaagaagcattggatgccaatc

SEQ ID NO: 55781 - DNA, 609 bp, Heterodera glycines
aaggcagaactatctgaacattacaaattcaatttaactcgattaacggacattgacgtcattgcgaagaaagactacccatttagtgtttcttttaataggttaaacacatcaaattttaagaaagcaagtgtgccaagttgggccgtcaattttattcgggtaaatgccaaaaaaaaatcgcataaaaaataaaccaaatttttttacagttaaagggtgagcacatcaaattgctagaccggccatctgtactgaacgaagaaaagaaggtaattttggaaattttttggcaccaaaaattccgattgaataaattgaaatttttaattttaaaagattttttgggtcaatttttaaatttttttagcaaattttatgggggtatgctaaacaattgagcatgactatagttgttgttgttgtttttgtcgtatattcatcatttatcatcactcctttcataaagaaaaataataatttaaaccttaccgcatcattggatacggtgcttaactacggtgacgaagttttcctgtgataaaaatgcccaagggtcgttccgataaatttctacttaaaaaatgattttctattttattttcaaaa

SEQ ID NO: 55782 - DNA, 1101 bp, Heterodera glycines
atgccgaaatgtgcagtttcggcgcaaaaaagtgccgaaatcacagaagcggaatgtaccggaattcacaattttaaaataatttttcaatttttgtattatccaaaaacaattatttttgacagatttggtaacaaaaattggcatttttcaattttaagcattttttttgaataaatataataaactcagaattttgccggaatttttcacttaaaaaaatgccgaaatgcgcaattccggctctaaaacgcattttagacccatgatcaattgtggggcaattcgtatttatttaacaatatttttgatttattcaatttaattttacaaaaaatgttttctaaaacaattttttaaataaaactcgataaaaaaggcatagaaatttaataataatttaaaaaacaaaataattaatttatttttttaatttaaattctcattttcagttggtgacactttgttattgttggaatttgatctttcgaagccaaatattagttgcaaaaattatctgcacgaggtgggaaaataaaaaaaattttaatttaatttatttttgggattacagtattaaaggaatttgaatgcgaaaactttggacatacagtatcacaaataaaccaccattaaagcaaaacaaacaaaattaaatgcaaatatcatcggggcttattaatttgataaagtaaaaaggtacaaaactgtctgcttattaactgaatactgtaaccaaaccataccaaaaaagtggaaaaaaatcatgaatacagtaaccagatcgtatcaaatgacggcttattgataaatgaatagagagaaacaaaaccgtatcagaaatatagagctacaattaaatgccgaatactgtatcaccacgtattacagaaccacgacttttcaattggtcctgaaagcacgcacaagctgaacaaatatggccaacatttccatttgctgatcaatgcgacggccaaacattttgcgatcagaattgatcaagtcggctttcaactggattgcaaatatggaatttcgaaaaaattctcatatgataaatactacatatacccaccatgggcagtggataaaattcaa

SEQ ID NO: 55783 - DNA, 382 bp, Heterodera glycines
atggagtttctgaatgaaattcatgggatatcttggcctctgtttgaactaaatggacttggacgcctagatatagtgctttttccttcggtaagggacaatggtatttcgaataaaaaatacaaatttatttaaaacttacaagaatttttaccggtaatttttgcaaatatttataaaaataatatacataccaaatagacgagtcaaggctaagaaaaatagaattagtccgaataaaattttagtcatttagaggttgggatggaagtgaatgttaaaaatacgttacaattgtattatgtaagtccattattgaaaggtgtttcatacaattacacgtgaaataatgaaatagatttatttaaaatataaaaataaa

SEQ ID NO: 55784 - DNA, 678 bp, Heterodera glycines
atgactctcctcaaacacaaattttcccaatcaccgcaattgaaggaattgtccgttgccagtccgcaggagcgcaattggcgtggcattgcaacagcgcttctcgtcatcgtcgcaatgtgttccatcattgcacttgccgtgcttgtgcttacgccccgtgcgtttgcattttgcttttccttacttttggcactcgtaaattgactctcattcatcagacgcatttcaaattcggcatttgaatgtcaacgaaaagccaaaaatacactttcacgatttttgcgactttattcgaatttgtaataatttttaatttttattctaaattgcccttggctttgtcatattcgtctgaatgtatgtcaaatttgtgattgtggtccaaaaatatactcacaaattggggactactgattttcatggcatagtttttaaaaatgcaattctctcaaataatttgcagctcttttggacgctgaccaaccgcagaagcgcgtcactttggccgatgtgctcactcatcgctttctgaactcggtggagtcgttggaatggttggacagtcggcgactgctcgtcaaagaggcggagagtgtccgcgtgttggaactgaacgaaggggcggagaacggaggcccaattgggtggacatggaaaacgttgcctggcgatttg

SEQ ID NO: 55785 - DNA, 1216 bp, Heterodera glycines
atggtagcagggcgagaggaggcggaggaacgacgagttgtggttttggaagaggggccaatgcagttggtcggttatttaagtgtggttatttggattattttcaatttcatcccacagaactcggtccaggagaccgtcgcggttttggacatggtgccaatacagttggtctgtcattcccgtaaatttgagagtaattgtggtcatttttattctaatagaactcaattcttcgaatgatccgccgagcattggcactattttgcgtggtggtggacggggccgtggtcgtggcatgaactccgaaggttcccccccccccccccgtcgttcttttgcattatttattttattcccaaatttttaggtcaaaatggtggtttgggcaatgcccggccaaatgccgaaaacaacggacgcggaagagagagttacggagaccgtaggggcggtggtcgcggaagcgaaggagacggcggagaacgtttcgggcgcggcagaggcgtaagaggacgacccgaatttggcgaaagaccgccgaatcacagtcagcgaggaccattcgcaaatggcggagacgaacgctttccacgggatggtaacgaatggagctaaagcatttatgacgaactaaaaaaccaaatttagagcaagggctgagccgaccaagacacacttacaaaaaaaggtccatcgagtgcctttacgaagaggactttctcgtcagcgaacgctacgtggacatccgtgacgaagacgaagacttggctgtttttggacacaatgaaaaattcacatcgtatgagtaagcgattcatccgattaatggaagttgaatttcgtctgttttaaggacttggaaggacttcaatctggagccaaagctagtcgacaacatcaatcggtgtaagtacgtgttgccccggaagatccaatcgtacacttttccgctgataagagacggtgcgacacatttagccggcgtttttacgttgttttgaagaactttgtttaggctacgacgtgaaggcacacgcggagacgagcagcgggaaaagtgcggcatttttgctgccaatcatcgacagaattatgaagctgaagaaggaatgcgctttcaagtcgaaacggggctgtccgtacgccctcattttgtcgtcggcccgtgagctggtcatccaagtgtacgaacaagcgaggaaattgtgcgatg

SEQ ID NO: 55786 - DNA, 2266 bp, Heterodera glycines
atggatccacctccctcacacccaaaaaatcagcaaacccagtccgccaacgctttctccgcaaatgctgcaccggctccactgctgacgtatgggagaggcatttttgggtttatttttgtgcgtaaaattggatttgcatccaatttcagcacatcgtccgcctctggtgtccaaccgctgcttttgccgtcctcttcaaccggcgccggtgttccttatcaccagtgcgtccgccacggctttgacagttatccttcgtctgcgaacgaaacggtggcaatgtacgggcagccaggggccggtgcagcggtgtattcgtcgtttcagcaacaggtcggagcccacaaaattccgctgtcgaaactccgccggacgaaactgaatcaaagtattcaaaaatttttcaaaaaaattcgttggtggaaaactgaatttttttcaaaagttttctaaggttttttcttggaaataagtgaaaattttttgtctcggtggagtttcgtcggcggagtgcgttttgggggtaccggcaacaggtgtatggagaatggtagaacgatgttgaccccttaccgaaaaatttatctgtttttttgtccacaatgtgttaggcatattgtctaccacatttttttccctaatgtgtcaattttcatcggttggttttcagcacgccgaagttgtcgatcagcagtgctaccaacaacagtccgctgattctgtgggttacggtccgttggtgccggccgccttcgtgtcagtccctcttgaacaacagcagcaggcatcacaaaagggtgccgtcacttcgtcggcggcaaaaccgctgccccaacaacactttgtgcccccgccgccctccttttacacggccggcaaccgttcgtccaacgccgccgccgccgcactgcttggcgttgtgccaccgcctccgatgcttccgccgtcggtcggcggctcggcggtggttggcccaccgccgcccaccgcttacgcgacacagcagcaacagtcgatcaatgccgtcacttcgtcatcggcaaaactgctgccccagcagcccccgcagcctttttacgcggccggcaactattcgtccaaagccgccgccgcttcaatgtttggcgttatgccacgacctccgatgctttgcccgtggggcggcggctcagcggtgattggcccaccgttgcccgctgcttacgcggcacaacagcaacagccgatcgaccccatgccgtcattatcgtcgacattggattatggccaacagcagcactcatcattccaacaccagcaggtaaaaaacttgtgtttgagagaggaggtggtggatgggtagccccaatcaaagaatattaatattttagatggtgggtcccacttcatcaacggcagatttgcaccaaaagctgttcgttccgactgccgaagatctttctgacagcatgatatacccatttgatgtgacgcatttgttctgcagagaaaaaacttcggagattttggacccccaggttagcaaatacctaatcattaagagaggagggggtggatgggtagcaccactcaaggaatattaatatttagatggcgggccccacttcatcaacggcagatttgaacccaacgttgttcgttccgactgccaaagttttggaccccgaattggttagcaaataatcattaatttgaattagggaagttacttagacacaggagggcattagttttgcatattcaaaaatgaagcctcttaatttttgtgagtgaaattatggatgacttataaaactgtatcaaaattaaatggttgtggtactcatttgggtggtgcagaagatgacccatattgatttgttcaacaaaagtaatggtcattttcgatttgcatctctttatatcatggaaatgttttctctaaatttgcttttttccttcccaatctccgctcttttcggttttagaatgtattaccctaaaatgattaggcttccgtctgaacttatttccgaattggcgagtgctcttccccttgacccccgctgggccgtcatccgtgtgtcctcggcctttgattttttcgtttatacaaaacagataatttataggaaaataaatagccaggaatttaaatttgtcttacattattttaattgttcccacttttagttggatgaagggcttaaaaaagcaaagcaacaagtttcgtcagttgccaatgctcagtccagtgacgaacaacgacgaaaactgctcacag

SEQ ID NO: 55787 - DNA, 742 bp, Heterodera glycines
ccgtactgaaatgaccccatccctctgaaagtctctcactgatatttttgtcacttcgtcctagcacctgtccattcacttttcccttcccaaggcattcatgtccaatcacttgtccaaatggcgtgcgattcgcggcttttggacgccgattcgcggcagagggcgatgcaaacaatcgccacaaatgtcgaagaagcattgcacgtcaaacaccaggcaaaatgctattagatgttagggttgctgagcatgattatgtcattttggactgttatgattttgtcttttttaaattttcccaacaaaaatgtcccccttttgcttccgactttgccctctttcagttgggcggcaatcgcttcagaatgctgaacatgatcatctgcacgaggagcagcggtgcggccgtcacattcctttacatttccgtcaaaatgctttataccgtaatgcggcatttattaattgctcgcccgttaattataaaaagggaattaggcaattaattaattgcttccttaattaggtgaacattgttggccaaatctttctgctgaacacttttctgggcaacagaagtcgttggtacgggctgcaggtgctgaacgatctgatgaatgggcacgagtgggaggagagcggacacttccctcgggtcactctgtgcgatttcgaagtcaaagtgttgggcaatgttcacagacacacggtgcaatgtgtgctgatgataaacatgtca

SEQ ID NO: 55788 - DNA, 657 bp, Heterodera glycines
ccgaaaacaaaaaaatcgattttttcaagtgtccgtttggggtactcaaacaattatgggggagcaaaaatccaaagcagaattaaagtacaggctatagggaagctattccggaaggattcggtctccccataaatctgggcgcatcggttcggggggactgccccgaaaacaaaaaaatcgattttttcaagtgtccgtttggggtactcaaacaattatggggagcaaaaatccaacgcagaattaaagtacaggctatagggaagctattccggaaggattcggtctccccataaatctgggcgcatcggttcagggggactgccccgaaaacccaaaaaaaattttttggataaaaattatttaaatgaactgactagataatatttaaaataggttatttctcttcctttcagtatccctgcaaagtttggtgcgcttctgatcagtttctgaaaaaaaagttaagcctaaactttttggcctgtttaaaaaggaattaaaaatttttaaaaattttattcatctccctttttgatagaaaaagcatcagagtgcctaaactaacatgtaaataaaatttggtgcgtttcagaaccctttctgaaaaaatatttatgaattaattttgcaaataaataaaaacgaaagact

SEQ ID NO: 55789 - DNA, 135 bp, Heterodera glycines
gtcagtggcccttacggagagaagttccaaatcagcgtgaataagggacaacttttgttggctgccgcgcactcttttggtgacactttgtctctgctcggcgagggcgacattatccgttttgtggcctttttc

SEQ ID NO: 55790 - DNA, 927 bp, Heterodera glycines
atgattgtggtgacaattcggacgaaattgatgaggagtgcggtggaacatcacgaccatgttccgagtccgagtttcgctgcaacgacgggcgctgtattccgcactccaaggtgggaagaattttaatcaaatttaaattccatttttaaattaatattttaaaaatagtaaattcccatttcaatgatttcgtatcataaataaatctgtttataatattttaaatgtctttgaataaacaaaaaatcgtcataaattatttaagtttaaattatgccggtacaaaatttttatttaaatttaaaatatcagttaatattttgaaaaaattaacaattgcgagttaaaattcttaaaataatgaaaaattgaaactttattattcaatcaaggaaaaaatatttaaaaaaaaataaattaaaaaatccaaattgtatttttttttaattattattttaattaggtctgcgatgggaccatccaatgctctgacggacttgacgaatcggagtgcaccacgcgcaaatgtgtggacgggtaagtaaaaaaaaaaatatatttttaatttaattttcatttaaatattttatatttttcctatttaaatattaaagcatgcgccaatgtgaggacggcacatgcattccggaccacaaatggtgcgatcgtcgccgcgactgtgccaatgcgtcggacgagcgcaactgctccaaccatccgaaccgtcgccagtgctcccagtacgaatttgagtgcaccaacagtgtgtgcattccgcgcaagttcatgtgggttttaattataatttatttgcttgtttaaaaggattttttattattattattatttattttaatttaattttattttatcgagcaaaccaaaggcacattagtgctcttatatggtgccaaaaacaaacaa

SEQ ID NO: 55791 - DNA, 1102 bp, Heterodera glycines
atgcagcagcatccgatgcatcatcacccccattatcagcaaccgcaatttgcctatccgcctccgccgctgtctgcgcccaacgcaggcaccggagcacatatgcagcagcagccgactccgccaccacaggcggcacaacttcacgccatggcggcgtccgctacgcccaccggactgttcatttacgctaccaatttcggcacctttcagcaggcggcggcggcgatggggccggtgggcgaaccgccgcatcagcaggtttattttcgttcacttccttaaactgcacttaggttgcatttcagtcggattttgcaaggcaaaaactgccataaaaatccggaaatatttttatatggcaatttcatattaaacctatttacctactcaacatttacactttcacagcccaatgaactgatcggcccaatgcccggacagcatcagcaacatccgatgcatcatcatcctcactatcagcaaccgtcgttcgcttatccgccgccaccgctctcggcgcccactgtcagcaccggaggagcgcacatgcagcagcaacagacaccgccgccgcagacggcaccgccgacgcaccaccaacacgtcatgcccaccgcactgttcggctacaatcccaacatcggaccattccatccgccaccggcgatgggaccaacagtcgagcagccgcatcagcaggttttctttttttcattctcccgaattcaaaataaatgttttgaagaaaaaaacaaaaaaaatttgaaaacagccgaatgaactgattggccaaatgcctgtgcgacatcagcaacagcagcatccgatgcatcaccacccccactatcagcagccgcactttgcctacccaacgccgtcgttgtccgcgcccaccaccagcagcggagtgcacatgcagcggcagcagacaccgcctccgcagacggcaccgccggcgcaccatcacaatgccatggccgcggcgcttttcggttgtccgcccaacatcggaccattccatccgccaccggcgatgggaccaacagtcgagcagccgcatcagcaacaggttttgtcatttatgttggttcgtaataaa

SEQ ID NO: 55792 - DNA, 397 bp, Heterodera glycines
atggcactttcctcactgatcgaattgggtaaaaatcggcaacaaactcagcgagacgaggctgaaaatggcattgacaatgagtaggcaaagattggcttacaattagcgtttaattgtcatttatcttttcttaattaattgcagcgattgccgtttcgatgggtccgtcgccgtttcgtcgccttcggtcatttcgtcgacttttgcggcaacaccagcgaactgttctgccgaaacattccaatcgcacgccaacggcacacacaatgtgacgacaatcaaaacggaggacaacgaatcgggcgacgaattgccaccgcaaggcaatgcgaaaaaacaaacgaacgaaggcattttaaatgccaagcaaaaaattcgaatacctttattttaa

SEQ ID NO: 55793 - DNA, 810 bp, Heterodera glycines
atgggtcatgttgtttttataaataaatttgaaaaatagtaagggaaaatttgatggttaattaaaattaaataaaagaaatttacatatataaaaattatttgaataaaatgctgcgcttaggaatatattaaagtgacctcattcaaatgacattattatattgttttattgaattctttttgtataatataagaatttttatttttgtatataataaaaagggcaatattagccaaatttttattaaagtgatcaataacatagacatatattttatttttgccgctttttacgtaacatatacatatattttatttttgcagctttttacgaaaaaattttaagctcaaacttggtagcggattacaatggctactcgatttttgaggatttgcaacttggggacccgacatttaaggacccgacttttgaaacaaattcaatgacaatcaatcaaggggatttatgggtaaaaaataatttaaaaagttatttaatatttatttagccaaatttgataaacaaaatcacacaaattggcgaattgtaccgcagtgccaaattgtttgagaatccttccgctgtaacacaacaattatttgcaaagctaaatttgccaaatggaaattggaatcctggcagcaaggattggtggacacgctattcgggagtgatcttgaacattctcgacatatggggcacacatggaatgcctgaaattgcctgcctattaggcgtaagtgtgacaatttaattaacaaaatgaggcacgcaatcattcagttaattataaaaaatttgaataaa

SEQ ID NO: 55794 - DNA, 361 bp, Heterodera glycines
atgtgcaaatttgcctcgtttttagttattttttttgctgtttttctgctttttgcaaaaggtgacgcaatgaaattaaaatccaccaaagattggataaagaaaaaattctcttcaacttcttcaccattttcatcacaatcagtatcatcttcatcctttcataatccattaatagaatcatcattttcctttaatcctccagaagaaaaaggtaaacaattcataaatttaaaatggagaaaaaacttgatacatttattaaaaacaacaataattaatattctaagcaatcactgcagcgcactttttccaaaaacttttgggaacagggacagacatcatctgcgactcccgataa

SEQ ID NO: 55795 - DNA, 1455 bp, Heterodera glycines
atggtcatcgcactcctcctgtcatccgcactccgcttgttgtccatgcttcgcgtgcttacactgccgttccgtttgttgagcgcgaatctgccgtctgaatgtgagttttttttgccctaaaaccgagtcataaaccctttcttcaaactctttttctcattttcccattttgaaatttcttgatttactttccatttattttgcctctgatcacataatttttctcagatcaaatcagtcacatcacttaccgtatttcctcgattataagccccggggcttctattgttcaacccccctccaaagggggcttatattcgagggggggggcttccaatcgagggggggcttttattgttcaacccctttccctatataaattcttaaaattttttgctttctgcataatggtacaatttaaatcttaatctaaatttttgaattgaaaagatttttcattttttggcccttggaaatttaggcgaatgtttgaaaattcataattcacttctaaatgaatcaataaagtgcaaaaaagcattaaaaatagagaaaaatctggagcattttatacttttttagaatattctatcttcaaaatgaagaagttattacataaattttggaaaaattcgttttttgagaaaaaaattaatagcgctgttctgaaaaggttttttgaaaaacacgaaattcttcctctataagcttctgtttattctatatttttataagacttttgaaaaaaagtacaaaaataaactgattttggaattcgggatcatagattgaagcaaatggtttttttgggccatgggttcagatccacttgcctgtaaaaatgttttttagggtttttgggaccactaatcaagaacttggcatccattttgcccaattccaaagccttgatccgaactcgaaaccccaaaaataattttataaatgttgcaggcatgtggatttgaacccatggccaaaaaccccatttttaacaaaacaaaaaatatattgggtataatatttctatatttgcttgaaaattttttagtgattttcatcaaaatcttttccagtgcaatttattaacagaaattttttctaagctattgcttcgctattagacaatttccaaaaaagttatacatgaaaattgcgaaaagtcgaaaattttgaagttttttcgtaataaaattattccaggcttgaaaatcttttcgcttttggtaaggctaatagagcatgttaagagctttcgagtgataccaacaatgttgtatttggatgtcaaagaaaaaagctatcgtggaaaaagagctggcgccgaaacgcaagcgccgaaacgcgtgggtcccgtttgtacatttagtctttctaaaatattttatgaattttaaaaaaatactattttttcagaaaatttttgtgttttaaaagtatttaaaataacaa

SEQ ID NO: 55796 - DNA, 1872 bp, Heterodera glycines
atttcattattgcactaaaattaatgctttttcattatggcatgacaaatttataagaaaaacattatcacagtatttctttctttccttgagcgctggcattcaatcgaaaactttttcacatattattaattagaaaattttatactctttccttgattatttttagaatccgaaaattttgaaaaaatcagcatatttgggaatactgatttatattcataccaaataaatgaaaacctgcaaatacacaatacgctcctctataattcagaatgacattctgatcaacgaagtcatcaaacgctttaccccgaaccccgtgctggtcataatccaagcttctcaaggccgacaggatttggcactgccgacggatgcttatgtggaagtccaggaagtgcacaatgtgtgttttgattgaatggtaacaacaagctgacaagtcaattttaggatggttctcccccggtgaaaacctttgaacacgttcccagtgaaatcggagcagaagaagcggaagaggtcggagtggagcacttgctcaggcatgttcatattgcatatttgtgctttggtagtaattttaatgaccaaacgcaattttcagagacatcaaaaatcaaacagccggcaccctctcgcaacgaattgctaaatcagttgacggaattcgtggtctcgagaaccatttggctggttttacgagctatttgcatcgtgttgcgagtcgagaattgcccatcaaccacgctatcatatttctaatacaagtcgctgggaaattttgaaattgttcttttaaagccctacgttgtttttatattcctctgcttctcaaacacccatttcgttcttatgaatccctttcgcaggaaatgctcaatttgttgccggaggtcctctcaccggactttgtcgacgcgcacaatgtgcagacgaacgaccatttgatgtgcgtttacatcggttcgatggtgcggacgataatcgcattgcacaatctgatcgacaataaggtgaaggaagggggatgaagccgtggaagagaaacagaaaagcatatacatttactatagtcaacccccccccccccccaaaaacggaaaaattttccaaaaaatttcgctacgcccgaagggaggggtacccacccgcaaccccaaatcctgggaccgtccctggttcctcgagacgtatcgatttgtatataattgtagaacttaacctggacctggatccaggcctggtttttttttctggattcggcaaactggatttttgtccaggtcaaatacgaaaatccaggtcctggcaaaacacgaaggaaactggaattactggacagcattttagaatttattctttcaagtgaccgatgtttttttcaagttttcaaaaaatgattaattgatttaaaaaccgattattattgaaaatagatatttttagatgtttccaagtaattaattgattttttcaaaaaatttgttggctttttaaaagaaatttcaaaaaatccaggcctaggtccaggtctcgaggagcctggattttcctggatgtttgtccagaaaatctaggcccagctccaacatagagtccaggtcctggcttttttcaaaatcgagttcatataatttgtgccattttttctggggggctgactatagttcagccataaacgagaaagtttgtttaatggacagattaagagatatttttgctctcacaattaaacagttaacgctgcaaaaagtggcagaaaaaagtgcgaaggaaaagacggtcaaagagacggaaaagaatgaagcaaatgacaaagagattgtcaaaaacaccaaataattgtatgaccattttgctggaaaa

SEQ ID NO: 55797 - DNA, 510 bp, Heterodera glycines
atggttgatgaattaacatctagtacaaagattgacagaaacaaaaactcttatggaattgaggatttaatcgtaattcaaaattattttgatactaaattcccgaatagattcttaattgtggctttttctaggtaaaataaataatttattttaatgaattttttaggaacatgggttaaaaccaatttttaaaggacaaggccatagagaacatttgatatgcgtctttaacgaaaacggacattgggatggtaaaaaaaattatttttaaaagaatcaaaaattttaggtttaaaaagcatcaaacaattttttaatgttaaatataagtattgtgtttattgtgaacaaactttccaaagcacaactaaacattcaattaaatgtatcataaaatgcagccgatgtggatcgtggggtaaaatattcaaattaaattcatctattttgaaaatttaggaaatgattttccgtgtaaaaatagtctaattaaaccagaagaatgta

SEQ ID NO: 55798 - DNA, 654 bp, Heterodera glycines
aactttattttatatttgtatcaactgatgcattttctacaaaaattcgggattacgactgggatcccacaaaagaccgggattgcaactgggatcccgaaaaatccagggattacgacggggatccttaaatccccgaaattacgactgggatcccacaaaagaccgggattgcaactgggatcccgcaaaatccagggattacgacggggatccttaaatccccgaaattacgactgggatcccacaaaagaccgggattgcaactgggatcccgcaaaatccagggattacgacggggatccttaaatccccgaaattacgactgggatcccgcgaaaaccactcgtgggatttcccgtcccgctccaggctttatgtgagactataatgaaaatgaaataatttagttactgatgagcaagcaaaaggattggtacaaccgggaggaggacatgatgactttgcgtgtcgatatgctcattggcgaaccatatgatgacattacatttaaattttaaaaaaactaaatacaatttgttgggttcgaggcgtgcccagacatttgcgcctcggacatttgcgcctatgtctaaaatggggttcaagtctgacttttttcaacccctaatagcctaattagcattaaataaa

SEQ ID NO: 55799 - DNA, 1477 bp, Heterodera glycines
  unsure (1)..(1477): unsure at all n locations
cttatatttttaaaaataatgatatttgatttttatttcttcgtccggaaaatgagaattcggaccaacaaaatataaaatgtgtgggtaagtgcatgtttttgtaagatagtaaagggaaaactggtgcttaggttcaagtccgcagcacgacacaaatatttttatttgcttatttttgaagcaattgaacaattcttgatgtcattcgaagacgcttaatgaggagaaactttttcaaaacaaaagttaggaacttgaagcaccaaaaaaaaattatgagtcttttagaaagggtttctaccagggatggcacggaattccgatttccgacttccgatttccgacatttttgtggtcggaattccgatttccgacttccgatttccgacatttttgtggtcggaattccgatttccgacttccgaaaaaattttggacgtcggaattccgatttccgaaatttttgataaaaagtcggaaattttcggaaatttctttttttttaaatttatttttcaaattacataaaacgttttgccaattcaaaagatttatttttcggtgtcaaattattaatttttatatgcattttctattttttttgttttcaaatgaaataaactagagtgaagcgagaccgcccacaatacatgttagtctcctcaagaaattgctggtgccttcgccggtgttgcttgtgatgcagcgtacgactactagctaattggaccgtaacctgccatcgaaagctgaaattatatctctcttagctgtacgttcccgtatggcataagatcatgccctacgcaggaattttctcggtgcagaccgttgccttgctatgtatatgcgtccaagagatactatcaccatggtaggtggttactgttccgatattcgtgagagctgataaaacatgtggttgctatgtccacgctcactagatattcggtgaggtacgctgaatgagaaaccgtgtccagtgtctgagcattgctcctttagagctcatgaccatatttctagaacttgcttggaagatttctacggtgttaactccacctcgtatcattgtacaggatgctggctactaggtgacatgtcatgtatctcgttgaaagctgtccagttactggctccgacgagtgaaaagagtactactccacgtacaccaatgagcgaaaacctggccagctatccgccgcttacatgacatgccannccgtcactcaaatactctgacgatagaacaggctgacgataagcaatccaatctcatgcacaattctattgtataaatctcgctctaaaggccgaaaaaagcacgctcgacacagactcattgtcaccacccgtcacctaaaatctactcagcgtcggggaagggagccatggggttctagcaactaacttacctgttgaaattcggacaccccaacaacttgttatatctattccaaaggaatgcaaattg

SEQ ID NO: 55800 - DNA, 211 bp, Heterodera glycines
atgttaacaatctttgcaaggcaaggaccaacaattttaacagaaaagtcagttttcaaggacaatcccttgccatttatagacagttaagaaattcccgttcgagaataccatccgctttttcttcctcgttcccagttctcgtgaattttctcaaaaaatgggaagaagtgcactagtaaaaatggatgtctgagatttgatcattaaa

SEQ ID NO: 55801 - DNA, 1015 bp, Heterodera glycines
atggccataaaattggcctccttttgcccaatttttctttttctgcttctgctccccattttgtccactttttcactttctccaaagcttaattcttccgttgccgatgccgttgtttcctgtggcgtccctccgctgaacaaaaatttcactcgatttgattatttggtatagaaaaaaaatgttaattaaatttaatttaatccttttcattgcttgcttaattagtagggttgtaaattatatggattaacatattttttctgcgcatatgctatgaagaaaggggcttaaaaatagcatttctgcgttaaaattttttgatttggtgaaggttttagtccatataaatccatattttgggggttttcgggaataaatccatatttcgccatttttgggtttttagtccatattttggccattttttggaaattttcacaagaaaaatgaaaaaaaaaacgaaaaatacacccctaaagatcaactttttggaaatttttaaaaattacaccccacaaaacacgaaaaatttgagttttcgtcgtcattttggcattttcaataaatattttcgtcatttttttgcgaacatttcttttttttaatgagaattttttcgaaatttggcaaacttggaggtgtttttgatacaacgaacaacaataaaaaatatgcatttttaagttttaaaccccattttttggttgtttattgtactttttaggtttatttaagcaaatattaaatatgcacaccttttttgggatttttgggggtttacaacatatattttggcattttttatccatattttggtccatatttggccatttttgtcctttttagtccatatttcgggcttttttagtccatatttaatgtccatatttcgcgttttttagtccatataatttacaaccctattaattagtaaaaaaaaaggaaagcaaatttcggtgccatccatcgcccgatttggttaacatttgccattaaattgccaaaaaataaa

SEQ ID NO: 55802 - DNA, 106 bp, Heterodera glycines
atggacaagcaaatgagtttaataattgtaagaatactgaatcgcaatatttgaggccgaattattcaattttttcaggatggagagaaaaaggacacttttgggg

SEQ ID NO: 55803 - DNA, 896 bp, Heterodera glycines
ggtcgtactccgttacatgaagtggccaaattgggggacgaaaaaatgctgaaaattatgtggaaaatgaacgccgatgcgaacattcgggacaaagtcggcaaaaaatagaaaataataaaaatgttaaaatatacaatatatttcgaataaattgtaaaaattatattttttatttaattcttcatctaaatttaattaattataaaattttaaataatttaaaaatattaaatgcaaaactaactagaaaaataataattaaatagaaaacagtcacattaaaaatagaataataaatttgatttgtaaatatattttctttttgtttaatttaagaaactgaactgtatttattttcttaaataatgtaattaaaaatgtttaaatattcgaataatcgaaaaaattttaaatttaaaagttaattgaattttaacttaaaaaattgaaacgttaattaaggaagataaaacgcctttgcatgtggcagcggaaagaggtcacacccaagtggtggagactttgatcgacaaatttgggcaaaatttatttaaattttatattaaataaatttaaattattacattttgcattttttattaaagttcctcaattcgcgcccggacaaaggacggcagcactttgttgcaccttgtttcagcggaaggtgcttcacatttttcaattttttgttaatttattttcaaaatgtattcttcaggtcatgctgacacggcactcgcttttctgagtaagtgcaaaatgccataaatttcaaaaaaaatgaaaattccaatattcaagagcgtggcgttccgttgtatatgccgaacaaaagtggcgcggtcagcctgcacaaggcggctgctgccggatacaacgaagtggtcaag

SEQ ID NO: 55804 - DNA, 3958 bp, Heterodera glycines
atactaattaaccgtggcaccaaagtggacatcccaacccgggacaattacacggcactgaccgtcgccgtccgatcgggccaagcttcggttgtcgagacactgctcggctttggcgccgatgtgcacataacaaatggccaaattggcgaggtcttcaggccaaaaattaataaattaaaatcgaataaataaattaaaaacaaaaaaaataaattataataaattttaaataataaatttaaattttatatgagggaaacactcaaaaattaaattcattcaaaaatttaatgggcatttgaaaaattcaattttaaaaattattatattttttaaattcttaattttaattttattctactctactttaattccaatttaatggacgaaataaagaaagaaaatatgaatttttgtttaaatgttgatcttttcactcttatgaattttctttccaaaattttattaattttattaaaatttgcgggtcaattgctaaggactccgtggcgcaatggtagcgcgtctgactccagatcagaaggttgcgtgttcaagtcacgtcggggtcaattaattttttccattttttaaattgccatttttaattgctaaataattttaatttaattttatgtggttttagtattgcttaattaattttgacaaaattaaatagaattaaaatataaattccaaaaaatattttaaaaaacacttttgcacacagactgcactgcatgtcgctgcaggtttgccctgcggggacattgaatgcgctcagatgctgttggtccgtgtaaattccaaaaatgatgttctgcttgcgtttttcagaaaagtggcgcgcagcccaacgtacagcgtgtgcaggacgggcgcacgccgttgcatattgcggtaaataaattatgtttttttttttaattttaaaattttgattttaaaggctgcggttggtcattgcgcaatgtgaggaaggaattttttaattttaatttaattatctccaaaatttttataaataaatttttaacgagaaaaaaattaattaggaaatttattgtgtaataattttaatcatttttaattctttaatatttttaaataattttcccattttattatttatttatattgtttaattactatcatttttttaaattcttaggtgccgtttgttattggctgagggggccgacgctcaactgaaatcgaaggtgaatttgacaattataatacaaatgattataaaaattcgaatatattttaattttattaacgagaaaaaagtcatattattattaatttaattaataaaataaaaatatatttaaacatttaattaatgcctttctctctactcattttttaatcaattaacttggtaattaaataaatttcatcaaaaacaactaataatcattaaaaaagttaattagttttttatatttggaattaaaattaattaatgaaaataaattgcggaataaaatgccgtaattaatttaaaccgttaattacgaaattattttctcgcaaagaatggcgaaacggcgctgcatttggcggccaaacattgtcatttcccagtggttcaactgctattggaccatttgagcagcagcaaagacgcggacagcagcagagtgcgcagctttgtcaatgccataacagaggtaaaaaggaaatttaaaatataaaatttaaattatttaaatttaaaataaggatggccaaacctgtcttcactatgccagccaaattgggccagagcaagtccatttcaaggacgaggatgccaaaattgtgtcactgctcatcgacaacgggggagactccgagctgcaggcactcagtgtaagcaattttaattttttagaaatttttttgacaaatttaaattttgaattttacaattttaatttttggaaattttcttgactctgtttaaatttcagaatcttgaaactgcgatgcacatgtgcgcacggacgggcaacgaaagcatccttttggcaatggtaggagaggattgaaaatgagggaaaatggggggacgaaaaacaaaaaaaaagtgcatttattgaaattttgaggaaaagcctcgacctggattcaatgttgggcctggatttctttgacaaaagtcaggaaaacccaggtccaggaaaaattcaggcatgccatggcatggacttgaatttttgttttaaaaagataacatatatttattcttttctggaccaaaatccaggggccagaagaaggccgagttctattttataccataaatttaaaaaagaaaaattacaattattatacgaaattttatatgaaaattgaataactttttaaggaaatgaccacttccgcatattattattattattattattatttggtttaataatgcgtctttgattattaggtcaacaaaattgggcctggcgctgttcagattgtacagaataagaagtcgaaggtgtttttaatttttaaattatttttatttttgcttggcgttctgttcagaatggctggtccccgctgttggaggcgtgcgcgcgtggccatgtgggcgtttcacgcattttgcttcaacaccacgcacgcattgacgtgttcgacgatgcgggaaggacggtaaaaaatttattgaaatttttaaaattttcaattatttaaaggcccttcacttagcgtcagcaaacggacacatcgaattaaccaaacttttgctaaaatacaaagcatttgtgaacaggtctggccatatgtgaagcacactaaatttaattttaacaattacatttcaaaataaccattgttattgcaaattattaagtttttaactttacaaatatattttttataattaaatattaagtttttaagtataattaattaatttaaataatttatttaaaaataaaattaatttatcgctttttcatttgcttaattagaaactttttttttcaaatagtaaataatttctctttgataattttagtaaataaaaattaaattgaatcaataaaataatcaattattatataacaaatctttaatatgatcaaatttgaataagtaaaaccgaaaaaaaaatcaaaataagtaattttttataaataatttttagtattttttaaattaaaataattaagcaaagccaagccaagaaaaccaccctccccccccaattaataaaaagcatccattttaaaattcttaattttttaagcaaagccaagaatggtgaagcgccgctccatttggcagcccaatacgggcaccctcgggtagtcagtatgctcgtccaagagcacggggccagtctcgaagtgaataaatttcaaattaaattgaaaaataatttcgaaatgccaaccaaggccatcactttggacaaccaaacggcactgcacttttcggccaaatatggccaattggtggtgtcgcagacgctgctggcgctgggcgcaaatccaaacgcgcgggacgacaaaggccaaacgccgcttcatttggcggcagaggtgtgatgacgagagaaataattttgtaaatgatgagtagggatttgacaaatattttttaaaaaccccgatatattgagaaaataaagaaaaatgaaaaaatttgggtgtaaaaataattaattgctctatactaccaaaacatttcttcattaattacattgaatataattaaatttttcaaaataattaaaattacaaaaatcaaaaattttggcaagtaaaaaacaaatattcaaaaaaatatttgtcccgtccataatgatgagtgtttaaccaatcagcgttgactccgccccttgcgcaattaatgctgaccaatcagcattgacccccccacgctcctttcttttgtctatacgagggtagcgcaatgcctctgcagagacgctgcagtgaaggcactctctcgc

SEQ ID NO: 55805 - DNA, 961 bp, Heterodera glycines; identical to SEQ ID NO: 4814

SEQ ID NO: 55806 - DNA, 674 bp, Heterodera glycines
aaggagctggccgatcggcacgttctgatcagttcgcagaatgagaaaatttctcagctggataatgccattgccaagcagcaacaactgcggcatctgtttttgtacgagaacggtggtcaaaatgagagagttgttggagaagcagagaagacgagagagtgcatggctggcgaagacagtggaggagcagagaagcagacgcaacaacaacagcacaatgaattggatcggacacggcacgagatggacagactgttggagagagtgcgcgagttggagagggaaaagcgacagagacaacaacggcaacaacacgtgggcggaatgacaacagcagaaaccgtagacactggagatgttggaaaaatgccgtcggaggacaccgcatcaaatggcattgacgagcaaacggatgctttaaagcatcggtatgacgagaggcgtcacctgggaaaattctttgaaattttggccaattccaaaggaggcaactgctctcgacccattaaattgaaatctgtccaaataaaattaaaatattttaaatgttttaattatgcttaagcattcacgagttggaggaagcacttcgggagtccgtcggcatcacatcggagcgggaaaaggcgttggcggagcagaaaaaagtcaaccaaaaattgtctgatcag

SEQ ID NO: 55807 - DNA, 542 bp, Heterodera glycines
atgctttcttctgactctaaaagttcaccatcaacccggttatttaacgaaacatttcgattttgtgtgttagcggtgttattcggcctgcttaaattccctacaactccgttttgctgttgctgtaatgccgccgcatctcgagctcgttgtctggtgaatggtggagagcggttaatcatctttttaaaacaacacgagttttattggagaatcttgaagagcacaacacgagtgctttattggagaatcttgaagagcacaacacgagtgctttattggagaatcttgaagagcacaacacgagtgctttattggagaatcttgaagagcacaacacgagtgctttataattcggtgggatgcatgaagagtccaacacgaggacagaaaaatgataatgtcgatatatgataatgtcgataaaatccaaaatccaacacgaggattatcgcaacttatatggccgatgtaaaagttttccgtttagtcgtcactaagcaagccaaccttttgttgcaggagcgccaagttgaaaaaga

SEQ ID NO: 55808 - DNA, 74 bp, Heterodera glycines
acaacttggcttaacgcgtccgatttaccaaaggacggcggagaatggacactttggcaacgacgaattcccat

SEQ ID NO: 55809 - DNA, 883 bp, Heterodera glycines
atgggacgaagcaaattgcttcgaaaagcaattcatttgggagcacaatttttggcttcatttttaatgggaaaatgcaaaattattattatttggtcagcatttttagtaattaggaaactgatgattcattatgttgataaggtaattaggctgggaaattttaattagggctttgcgcgatggacgtgccattcttatctatctatgcctatgccatctcttcggcctctctgcccagccccttcaaaaatgtgacaaaattccccaggaaaacgaataaacatttttttggtcaacaaaaacaaacaaaattattggcattttttagaaaaaataattatttaattaataggcaattaggggagaatttatttagcaaaatgtgagaaaataaatgtgtgacaatgagtttgtttaaagcgtataattaagataaagaaagcgcatagataagaagactttgattaagaatatgatggaagaaatattttggagaaatataataaaaaaaattactataaatgtgtaaatccgtgcaacatcagacgaagttgtttagcattgacaattataaaattaatgatttgtggtgacaacgaattaaattagtgcttttttgttcatctcaaaattgcataatttttaattaaatcatttcgaattttgaacaattaatttggttgatttaataaataaattaacttatttaaattaatcataatttttgcgatatttttgcgataaaatcggcggccaacaaaatatttgaatttcatagaaacaaaattcattcaagtgattttttaggacgagaatggataaattggcacataaaatgccaaaataggcaaattaaaaaaatgttcaacaagatatctta

SEQ ID NO: 55810 - DNA, 1114 bp, Heterodera glycines
atgaaattcatgaaaattatgcaaggtaattaattgaaactaattaaaggcatttattaattaacttgctttaattaatctaattaagtttttcattgtgttacaaaagtgaattattatttggcaacaaaagtttccatggaaattggcgaaaagatttaaatttgacaaaacattcactgaaaagacaaatgcagaagaatgtgccaggaaaattcaattttcactttccaacggaaaagaaataattgaaaatggcaatttattatcggcgtaagtgaaattatttaacaatctaaattatatataaaaactaatattagtttacaaaaaaatcaccaaaaaattcaataacttttgtaatttttcgaataataaaataaattaaatttcaaaattttatgaacgatttttcattgaaaaaacaacagaaaaaaataattaaagattaaaaaatgtttaaacaaaaatatttttaaaatatttttcttattttcaacaaaggaaaaatttttaaaaatttttaaaaaaaccgaaaaattacaaatggtttaaaatgatattcattcattttttatttctcgacatatttatgacaaaaattcttttattctttaggaattcatcagctgaagatatttttcgcgcattgccaattttggaattaaaatttacaaattcgaacaaaacattcataattaacacaggtattttatttattgccctcattaaatgccaaaaataatttcacattaaatttagtgtcgccaaaacaaatgaaattgcgctcagaatttttcgccgaatcaaagcttgcccatttttggaagaatttgccggcctttggcttttgccagcagacatttggccaaagtttggccaaatgccaacaaaatttgtgtttatggtggcgaatggatgccaattaattcgtgtcgatggcccacctcaaaaatgcgcaacttttgatcatttggcatttgaaaagccacgtgccattcgccaacaaatcattaagccactcgtaggaattaattgaattgtttgtttattttttaacgaaaaattatcctaaattatggtctcttttaaatctataaacattaaaaataaa

SEQ ID NO: 55811 - DNA, 2735 bp, Heterodera glycines
aaaattttacctccacggcactgctcacctggggctgtagtgatgaagcggataaaaatgtctgcgaagaattcttcatgaacgcgtccaacaccgcgctgcgctcgacgaagcagcgctgcgagtgccaatttggggaccagggaaaagacatggccaatgagcacgtgaaactgcccgaggcggagaagcccggcccaattccgaccattccgccatcggcactgaacaaaagtgggcgcaaatgccaaaaaatgttgcataaaaattacagggaattgtggcacaaaaataatgagaaaaataatgtcaacggaaaatggatggggggatggcacgtgaattgtgccatggaaaatgagggaaacagtgtcaagaattgcataaatgtcacgaatattctgccataaatgagcaaaatgtatttgagcaatgccaaaaaaaatttgttatgaaaattacagggaattatggcacaaatagtcagggaaagaatgccaacggaagatggatggggggacgtgggtgccatgaaaattgaggaaataaaatggcacgagtattatgccataaaagatttgaccaaaataagcttttctgacataaaagaatcacaaatttcataaagccaagcttgagaaatatgagaatattttaaaatttgttcatttgaaaggcatactctgcaaaattggcacttatcatgggaatggatacggtgggactgcggcgcgggaatgtcaaggcggcgagcactgttacgcggtcagctgcgtatccggtaaatatgtgataagtgataaaacactaattgttatccatttttaatcaatttatttttgaatattttttatattcttaataataattaacatttgtataatcgagcaatttttctatcgatcaatcaatcaatatatttagttggctattcaaaaattttactaattaacacggtaattgaggcaattattactgatattgaccgattgattgattgatcggttgatcatttattgattaattttatccattctctccgctttcacaggctctgacaaaatcagcttttttggctgtcacgataacacggaatgtgagccgctccgcaaattcattgcttatggccaggattgccagtgccgatttggccccaagggcgagaatatgtccaatgttaattatgacctgccaaactatgttccaaaaattggcataggttagaaggggaaatagaatttaatagaccagaattattgggggaaaatggccaaaatttcgccgcccaaatcttttttttttaaatttgcaaacagaaattttacaagaaaaaaatcaaatttttttctataagactacaagaaaaaatattgttagtttttagcgatttttgtaaaattttatgataagttactaatttcgtgaaaatttttcaaatttttttcttataaaatttctaaaaaaaaattttcttgaaaaaatttctaagtttgaaatttttaggcggcgagatttcgagaggcaattttttttgggtgcacccaaattattaattaattatgaaatttatcataaaaatctcaaaattggacaaacagtaaatttcatagtacagaatttaaaattagagagcaaaaaattaaatcaatggcaattctttgattaatcaaaaataaggtcagataatctgtgatctcgagattataacttcttttttgtgcaaaaaatgccctttctcgggacacggatattgaaaagaataaatcattaaaaaataaattaaaattttaaatttggacagacattgtcttcagtgaacttccgatcccgaccgggtacagtacccgtgcaaatgcctaccttttggttgccttctcttcaattccaattggtgcctaatgaacatttgattaattaataatggaaaatatcaaaaatgctattatttctcaataaacaatcgataacttttattttatttataaattaattattatttatttatttgttttaaggttttttgaccaaattccttctccgcgcaatggtgcgtgttcatgaatgaacggcagaagcttaggaaggaagaagaaaggagaagaaatgataaagcggccaagaatttataattaattttggattaaattaattttcattttttaatttgataatttaaatttttaattatttttatttaatttaatatttttaatatttgaatcacccattttcctaatgattattttagcctatcaaaacattgcacagaaaatgaaatctgtcctcccattgtcactcttcttcttcttctactgcctcgcctttccatgcatttgttacggtaatttagaaaatttaaaaataattaaaaataaattttcaaattaatttcgcagggatccattgcaagactggaatgtacgacacgtcgggaaatgctgctattgtcatctctgaatgcgcagcggatcaccacttctgttctgcaattggttgcgcaatcggtgggccactaattacctaattaaccaaaatttgattatttaattgtcacgctttaggcactgaacagatcactgttttgtggtcttgtgagaagcaaaatgataccaaagtgctcgtcaagagagtatctttcgagaaccacacttgcatggctcagattggccagaaggatgccaacatgtccaatgaagagttcggttttcccgaattggtccaattggtcttgaagg

SEQ ID NO: 55812 - DNA, 115 bp, Heterodera glycines
gcggaacgggccaactccgtctgagccaactttgagtcaatataactcttgaagttattgaccgaatcaaacaatcttgatatcattcgaaagctcttcacaggctctattagcc

SEQ ID NO: 55813 - DNA, 829 bp, Heterodera glycines
atgtctcgacaattgcccctaatcatgttcgtaattgccctccaaattgggtttgccgagggcggctttttctcagccgtcaccgacttcttcgacaatgtaagttcggcacttttttaaatgttttcattcggaaatattcattaattttgtaaaagaatttttgggttcaatttttggacaaatttaggtcgcttcatcatgcatctgacatatttttcctataattcgaaccctgccccaaggccgaaactcaatcaaattcaaatttcacttttacattaaagtgtggcacataaaataaacagggacacactgattcgtgatcagcagcgagactcgcttgattaatttttgtttattttttgcggaaaacacaaattttgcgtgaaatacaacaattaaaaaatgccgtaaatgtttgatgtttcctaaatttgagaccggcattttgaaaaaggcatgggcctggacctggattccgtgttcgatctgggcctgagcttccttgataaaaacccatgtccagaggccgatctctaatttaaatcattcaagcgatcgcttcttccgctttgcgttaaaaacggggacataacggcaccacccccctcactttcaggttggccagtcacttgaaaaggcctggaacgatatcaaagaacccatgctggatgccggggctctttatctggcaccactcagctccttactgccggtgacaagttttggtgcattagttgcacttgtgatcgagaaaggggtggataacccacacggaacgggcacagaattcgcatgcggcccgaacaccaacgccattttcaaa

SEQ ID NO: 55814 - DNA, 1060 bp, Heterodera glycines
atgacattccaatcgctgggactcaacccaccagcatttcaatctctgggactcaaatctccggcattccaaacactgggactcaacccaccaactttcaatgacattccaatcgctgggactcaacccaccagcatttcaatctctgggactcaattctcaggctttccaatcactgggactcaattcttatgctttccaatcactgggactcaaatctccggcactccaatctctgggactcaattctcaggctttccaatcactgggactcaattcttatgctttccaatcactgggactcaaatctccggcactccaatctctgggactcaattctcaggctttccaatcactgggactcaattctccggcattccaatcactgggactcaattcttatgctttccaatcactgggactcaattcttatgctttccaatcactgggactcaaatctccggcactctaatctctgggactcaattctcaggctttccaatcactgggactcaattcttcttatgcataccaatcactgggactcaattcttatgctttccaatcactgggactcaaatctccggcactccaatctctgggactcaattctcaggctttccaatcactgggactcaattcttatgctttccaatcactgggactcaattctcaggctttccaatcactgggactcaattcttatgctttccaatcactgggactcaaatctccggcactccaatctctgggactcaattctcaggctttccaatcactgggactcaaatctccggcactccaatctctgggactcaattctcaggctttccaatcactgggactcaaatctccggcactccaatctctgggatcaattctcaggctttccaatcactgggactcaaatctgcggcattctaaacattgggactcaacccaccaactttcaattcatatggtcagacatttcttcttaatatttaatgacaaaacaattttaaaacttacttggcaaacgttaatacaaaaataagtgtaaacaaatagtcatttatta

SEQ ID NO: 55815 - DNA, 2338 bp, Heterodera glycines
  unsure (1)..(2338): unsure at all n locations
atgtatggattgaaggttagggtcgagatttgtgctggtggaagcgtccggtgtcgtgaatgactccgaaaatggccaaaatgccggggttgatggttgggtagtgatgctcaagactgaatttcctgagactcgagaccgagactgaggccgacaccaaaaaatccgaaaccccaagacttttttcaaaaattttcttatacgcataaaatttaaaacttcttttttgagtcttttcttaagcaattttttaattcgataaaacttttaattcaaaatacttaaggggtttttgagtcagttaaaaaatagatagaattttggagatctggcactgatgattagggctgtgatttttaggcaaatgcttaaaatttttgcgcacttaatacgaacagataagcacgaaaaaagcattttccgcttggtttgggatgtctacgatgccttttataatgcctaactttgcctatttttgtgcctatttcgccatttttggcgccttttcagcattttcgggaaaatccttaataaaaatgcaatcaaaatgaaaaatacacccctaagaatcgacatggaaaattttcagaaaatacaccactaagaattgaaaaagattttcattaatccccagaatttagttaaaatttttggtttaaaaattgttcttatccgaaaactttaaaacaaatgaaatataagcaaatgttttgcttaagtttttacgtgttttgctacctaaaaagcgttaaaaaaaatttttttgcctatttttgtgcctacttaatgcctattttgcgatttttatgcctttttaggtgcctattttgcgatttttgtgcctaaaaatcccagccctactgatgatagtgaaaattttgaaaatttcagcgttcttagtcaacagatttaatcaaaaaatgacaacattttgcgatttagaccaatttttaagaaaaattcagggagaggcgccgatgagtgaaaatgtgtgtaattttttggccttatttattaaaagatttacattacaccataaatcaacgcaaaaataatgaataaaaccaacatcacagcccaccggaccaggaatgttggaaaaaggaaaagaaacaaaaaataaccaaaaattattaattttaaatataccaaaagccaatcattagggggtgtaaaaaatgtctcgttctcggaagtctcgatgaccgagactgaacacccgagactgtgaccaaaatatccgagacctttctcgagtcgatactcgagaacgagactctcgaactttgaagcgtatggtgccgggaagaatcccaaaaaatggctaaagatgccgggcttgttttttaatattatttttttcccaattattttatttgtaaatgttaattgattgaatattaataataataataatataattattaatttttccaaattactacctgccccgcgtcgaatgcttttttcccgagttctctcaccaaaacacaaaatgaccgtgccgtggggccgcattggaaaaaacttgtgctttcctacagtttttttaatcattttttaatttttgaacaattaaaaaatatgaacatacaatgaggcacttgcagaagacttcgtcgcagttttgctgcgattcaccgcagataccgtagcagctaaatggaacagaaaaactaattaaaaaatcagaaaaatcaatttataaataataattacaactcattagttaattacaccaataattgccgtatacttcatgcgttgtatacatagacaattattattattataataattatgtcatcaattaattgacaaactcacgcatcgtgcgttacacagcattggtgcagaacatctaattaatttaaattaaaatttggttaaaaaattgatgaatacgacggacaaaaaacttaaaaatctttcgaatatttaagtgatttttttttgaatttatgctttattctacagacatcttcataggtcatggacaaatactaaatttagaaaaattgttgctttttgacttcaatgaatttgaaacgaactaatataataatgttttggtatatatttttgttgcatttttatggtcattttatcatataaatcaatttttgaaataataatcattaacaaaataacatgtgagtgcataggccattttaggtggtcatcatagaatttttttcgcaaaatttcccaattttcagtgtatccgtcactatgaaggagtgatatgtgagcaagtttctgcaaaaggcttttttcggttagcatcaaaagttagcttagcaggaatttttcataatttttggtcataannaataaa

SEQ ID NO: 55816 - DNA, 1252 bp, Heterodera glycines
atgtcccccaacaaattcgcgcttcttcttttgttgatttgcttcaacatttctgcggccaatggatttaaaagcccattctccgagctcaaaaaattctttgagactgtgagaaagaaaatttgtgagagcttagccaagaaaatgaattagcaaatgtcaaatccaagaaaatcgggcatttaattagaaaaattcacagaattatccaaattttaattgggcacgaaaacaacgaaattagtatagaattttcgaaaatcttgctatagtcaattttttcaaatcattagtgccaaataatttgaccgaaaaagctcaatgatcagagcaaagaaaatttcgggttttcattaaacaaaaagggttctctaaggtcccattttcctcacacttttccccctaatttatgcttggctaagctttcactgatcagaaaggatttcctgatcaaagtctcattctctgtaggcggtctctttggtggccgagaaggccaaagaagcggttgaatttgtgaaatgcactatttgggtaagaaatccacgaccataacaaatcagagatatcgtattaactcattaaaattacacagcattttaacaaaatctcgagaatttctcgagtcaagaatcggtcgagtcgatgataaatattttgaaaaatttttttttttaatttttcattttcatttacaattttattttattttatttaaggaggaagcgtgccagaaattgtgcgaaggttcgtgccttgacccgcaaaaggcgtaagttttgagttgtaatgccaacataaattcaaattttaatgactgaaaagatcataaatggaactttaattatttattcaaatgaattcatttagctgttactcgaaatgcggcaacacgaagcaacaatgtgatgatgagtgcaccaaatgcgcagtaatttttgaaatttaatacattagaacaattttatcaaatcccgggtccactcatcagactataattgtgctaaagaaatttccaaaaaataacatcgtattgtaaaaattactatttttaaaatattgttattttattgcttgaaaaatcaaaaatgttaataataatatgctaattaaggtaattaaggacttttattatttaaatatctattaaaatgaaaatattttatagaatggtccgctatccaaatgtaagggcaaatccgccgatttgtgcttcccgagtgggcatgagaaggcattcaaagatgcacag

SEQ ID NO: 55817 - DNA, 1177 bp, Heterodera glycines
atgggctggcgcgtgtgtgggccagtagttgtcttttcaatgcatgcaaatcaaatgcacgccgaatacgaggtgcaattctctaagaagttttccattgtgatgattttttcctgctgttttgtaattctttaaaactttattttttcaatgtagaaaagatgcgagcagcagaagaagaccttcaaacaaattccagccgatgaattattggttggtttcaattagattcaattagagttgtacggcacatgggtctcggtctggattgtgcccggaaccccggctttttcgggtcgatattctgggcccgctctttccaaaaaattcttaaaaagattaatcattttgtgcaaattttcttagcatttcaataaaatattttttaagcctgccaagaaaccacataaattggcaattttggtgcaaaattgaacatattttttaatgttaaaatgatgcttaaaaattaatattttttattaatcacggaaatacccgatcccggcttttctggtttcggtttcgatcccagtcccgggttttccccggaattccgatccaatgttagggatggtcttggatagcagagtttaatttttcaaaaattttcattaactgtatcgaaatttttaaatattttctttttaaaagcaattgtaatattgcaataatgaaaaaccttttctttcattcaaaccatttacttttcacctttaggagaagcccgaaaatggtcagatggagaagaacgcgggaatgaactcctctgatggtgaaattagatttttaaataatcaatcctttaaaattttatattagtcactttaaaaattagaaattagctttgcatataaaattacgaaacatggccgtaaaaaatagccaaaatccatggatatccaaaaacttggacttaaattttgtataatgccaaaatatggtaataaatcttgaaaaatttaagtctataagcttctaaccaagctaagaactttttatcataccttcgacagtttaaaaaaaagtgggaggattacaaataattttcggttttatattaattagccatttaaaataaataataaacatttatgtgtaaattatatttcagtgccgccaaataccaccactaattcttgatgccattccgttcccctcaagcggaggagaatga

SEQ ID NO: 55818 - DNA, 2712 bp, Heterodera glycines
atgttgccgcagaatgtgtcgccgtcggcgccgttcggcaacgcgacggggacgacagctgctgcggtgccatcggcagaggcattggacagaaacaacaacaacagcagcagcacaaacatcaacaacaacggcaccatcagtgcaatgagccaacagcagcaaaagcagcaacaggcgcccgccgttggtacggtgccaacgtcggcgagacggacaacaattgcagcaacgacatcaacaacaattgtaaataggaagggtggggaattcaaatgattaggcattttataaaagatacaaataatttatccgattaaaacattttaaggatcaccagcagcaccggcaaagtgagtgagtgagagaatgtcatgtgttgttgttatggtgttggtgttcgttcgtcttttgatcgttgcttagcttttgtcctatttcgcttttaccataacaattctattagcggtttttaggtacagaaaaatcggaaaaaactaagaattttttagtccatccatttttcttttcccacaaaaatctctaagtcgtcaaccccacaatgcttaattaaccgctaattaaccgcagcacaatcaaatagcaattttttttgtctttgtcctctgctgacattttcatcgctttgcacacacttagaaagcactcacaacaaagattttgctgaccattcgaccgaatttgcacaccgcactctgcaggcgaacattgtgctgcgcgagttggactatggccgtagccaactgttatggaagtgcagcattgacgaaatccaaggcatggagacagaaattgggcaacagaaacaacaacaacgacgacaggcggaggacaagcagaaacagcagcaattggtgatgaacaacagttgcgcaacggaacacgacgacgacgaacatggcgatggaaaacaacaacagcaacgacttggacatggtgtaatggacgagcaacaacagctttatttgcatcacaaactcgagcagttggagcacgacgtgcccacatgccgtgccaccattctgactgtgcctccgtcgacaatggcggcggcggccgctgaagcggtaccccaggcgatgacactgatgaccgcaacgcatgtcatcgtgcgatccgctcgcttcaccaccaaatggcgacgcaacacattgttggcacgggaaaggatggcacgcgagacgtcctcctcgtcactgatgtcgtccattgacggaagacagttgatgcaagagaagcaggaggaggtgaacagtactgacgacacgccgaaaggaaaagcggcgaaagatgaagctgaagcggcggcacaagttaaggacgcactgcaccgaatgaaggaagggtcgaccgagtcgcggacggcgagcagggaaagcgaccattgcgacaacgctaacggtaggtgcagtcgcaaatgctcctccgtgttgggttctgcccgtgccgtgcccaggcgccgtcgtccctcctcccttgacgcatccattgactcatcaacaacatgcggcgccgcttcagagacggcacataattccgaagccgttccattgttcggcggaactgcagcacctttttctgagaggccttcagcttcttctgcagctggtgctgacctggttgaactggtctgctcaacggattgcggcggggcatcggcagttaatcgtcatgacagcatcatccgcttcattgacgcgcacagtccaccgatcagcccgttgtcgcctactgctgtcgccggtggtgacgaacgaacagcgcgacgccgctcatcaatttttcgggatatgataatgctcggcacgggcggagggagtgaccggagaaagtctgtggccaagtgtgagcagcagcaacaacagggccctttggcggcacaaccattggaagctgtgccaaaaaagacgacaccactgctcgccgatcaaccgaccacttctgcttcctcctctgtcacttcaatgtcttcatattttaagtcatttttccgacggacaagcaaaacgccgctacaggaacaaacgcaggcacagaatgccgcgcaggaaaataatgccaaaacaaacaacaacggcacaacgacggagcggcgatcatcgtcgtcatgccgcatgtcaattgtaccgtcaaacactgaacagtcgaatgttgtacaattagaacaacatgatcaggacaaattggaacagatcccaaccaatacatcctcaaaagcttccgcatcgatcggacgaaggggttggttggttttggcactgtttgcttacttttattgctttttatgtccgttgtccttagcacaaattaacaaaaaacaaaattaaagaagctttgcttgttttggatttttgtgtttgctaactatatcattctctaacttatattggaattccacagtttttaatgcatttttacagaatccgcaatgacgagaaataatgaccatcagcaggaagagagaaggcgagtgaaagccaagctaaatataaattcatcattttcataatcatcccaacattctctcatgatttaaaaaaaccatttttggtttatagaattggctccctcattttcccctccgatgagtgccatgccaatggccaaccgtcggtggaccgtgcgcgaacaaagagttgcgtttcggcggacgaaacagcgtcaaccaccagcaaatcggaggcggccaca

SEQ ID NO: 55819 - DNA, 313 bp, Heterodera glycines
atggtgccgttgttgttgatgtttgtgctgctgctgttgttgttgtttctgtccaatgcctctgccgatggcaccgcagcagctgtcgtccccgtcgcgttgccgaacggcgccgacggcgacacattctgcggcaacattcgcccagtgggcgtgacaaaggcaatttcaacctgcgcaatgcggaaacccagtttaaaagaaaatataggtccatttggtctaactaatagtcaccaattaatttatgcattataaatgtcctgatcacttttcgtttacacaccgactcaaaaaaacgagagatgaacca

SEQ ID NO: 55820 - DNA, 1418 bp, Heterodera glycines
acgccaaaggcagccactgcagcggtacttaagctccaaaacgcgatgtatgaggagaagaagctgatgtaagtgtaaggcattttattggggagggaaatggcagaacaaataaagtaaaaaaagaaggaataaacaaaggttgatcactcattctgatcattcattccgatcacttcaaaaattgtccaattgaacttcagagttttgtgtctgccaaacgttcagcagcacatgatccctgccgacgtggagcctttgctggtgctggtcaacgtcaaaagtggcgggtgccaaggcaccgaacttttgtcagcctttcgtcgcttgctcaaccctttccaagtgttcgacgttctcaaaggcggtcctctggtcggactttacgtgttccgcaacatctccaagtatcgcattttggctgctgggggcgacggcaccgttgggtgggtgctgcaatgtcttgacatagcaaaacaggtacagcttggccaattgaccaactcctttgctgtttcaacctttgtcatgcttcaggatgccgcttgtttctcacctccgtgcgccgttttgccgctcggcaccggcaacgatttggcacgggtgcttaggtggggaggcggctacacgggggaagagagtgcggcggacatcctaaaggaagtgatcgaggcggaagaggtccgcctggaccggtgggccatcgtttttcacgaagaggaacggtcacagccttcggccgcggggatggacgagggacagaacgaagcgcaagtgatgagcaacccggaggaccagaccagcatgataatcatgtgagtgctggtccagccaagagggtcaatagcagttcgtacaataaaaatttttacaaaataaagcctaagcccaagcaagcctaagcttaagccgaaggcttatgcttattctaagcctttataaaaactgcctattgtacgaaactccattgtacgaaatgtatacattgtacgaactgccatgacctcagcgaggatggccaacggcactttaggaacaattatttcggcattggcattgatgctgacgtttgtcttcgcttccacaacaaaagagacgccaacccggagaagttcagctcacgccttttcaacaaagtgacgaaatctttcgaagacggacgaatgacaattttgtgccttttccaatgtcagactcaatatgtgaagatcggacttcagaaggctttcgaacgaaactgtaaggatttatggaaacgaattgaattggaagtggacggaaggccggtggaattggcccaatgcgagggaatcattgtgctgaaccttttgagttgggggagtggggcgaacccttgggggacggccagggaagagggcggctttcagaagcccactcattacgacggacttttggag

SEQ ID NO: 55821 - DNA, 1064 bp, Heterodera glycines
atgagaattgaggagcggtgtggggtaagattgtgtttacacaggatatgcatgtaggcgtataatattactacatatgtacaaataatgctcacgggtttagcactttcgcttcctaaaaacacattttttaagtgcaaattccgcatttgcataaaatgggacattttttgcgaaggaaattctttttttagacggaatcataattgatgaaaatgattacttatgtatatattcgacttactttagcaaaccacacaactttcatcaaccatttttgatttttgcagaggagtcagattttttatttttggaaatttgtcgagtaatatctatcaatcatcaccatcacctattcttgcctttttatttgcccaaatattgcataattagtggagcaattgtaaaattattttattaccaaactccaacaacactcagcaaaagtcattcaaatccgatgggacaacgtccgtcaatgcagcagagcgaagtcgcggtaagcaccggaaacgagacaaatgctaaattttttgtaatccgggatttagcgagtctataacggcaaaattaattaggtatctgtcaaaaataggattaaaaaatattttatgatttaaaatttttttttggcaatttcctttttctattggtacctcaaagtttaaatttgcttagaacataaaatggaggaaaccgtttttggcggttgttgtaaaattgccattcttttattttatagcggcgtcctcgtgccggttctgaacttggcagcagcgcacaaaccacgggcagcagcagtgcaacggcacacattcacaaccatcggagagcgaatggaacgcgcagcagacagccgcagaatgacacggtttaatttcacatttcttggtacatttgtgtacaaaattatagcgtttggctagaaaatttcaaatcgggttaagtacatatttgggcgctatttacaaagctttacattttgaaattttttttacttttttggtcaattttttttttttgtttattttgatgtagaacttaatattcattattatatgtaa

SEQ ID NO: 55822 - DNA, 215 bp, Heterodera glycines
atgcacatccgtaacttcaatgttcaatccctggccaattgctttgattgcttggctttcctgctcaaattgacttttcaaattgtgccattctgtgccggtgcccgcatggccagcagcagcagcggccaagtcgaacatggcacgggcgaagcccaaattgtacggacactcgtcctcataagtgatcttcattttcataaaggcttaataag

SEQ ID NO: 55823 - DNA, 842 bp, Heterodera glycines
atgtgccgagtccgagccatgtgattaccaaccctggccaacaaagttcggttggccatggaaaggaagacgaaccgttgtcatccgatttcgacctttgagggcatagaaaaaaggaattaattagaaggaaaattcatagtacagaaaacattttgttgattatttatgaagaatatttatttgttttgaataattataatattaaaaattgtctagcataaatattcacaatatttttaattttcaataaaaaatatgacgagaaaaatctatttaagcaattttacccgtttttaatttaaaaccttttaatatttaaaatccgattttttcataaaattcgctaataataatagaattctccttttttataattcatttaaaaggatcaaaaaaattctttacattttcctataaatataagtatttcttttaccacgtatcatttaattcttatcaagataaattcgttaattttttattaaaatattttagacaattttttaaaaaaatgtttgccaaatttatgttatttttattctgctatataattggcaaaaaattttcattatgcgaacaaattttgtcgccagcaatacaagattattcggaatgcggagtttcgaattttgacccattcaacgaacgaagcgcggaggacacggaaattagtcatgcaattaagcggggaatcaattatcattagatattgaaataatgaatgcatattttaatttaatatttaattgtttgttaattaggtcgtaataggacacccgttgatgatgaccgggcattgccatggatggccacattgcaaatcctcaatggtcttttta

SEQ ID NO: 55824 - DNA, 526 bp, Heterodera glycines
atgtccaggtgtggcctcatcagctgcagttcctcctctctgctggcctccgtttggtgtacggccaaaaggatggcggtgaagccacaatttgctttgatgccgaccagcgaaattggggcagcagaagtgccattggcggaggcgaaggtgcggcacagccgtgccaagatgggctgaagcggtcgcacgagattctgaagaaatggtggaagaattggcaacgcattgaaaggatggaaattgtgagtaataataagtgatacctaaaatttctgtagctggctcatttatttaattttgggaaattagcgttaatggatgagggaaaacgcatttataggaaaaagtatatatgttgttctatcagtgttaagtgttccgtaatgtaaaagcgtatttaaagccgagaatacggtattgaaaatgatcggtaattaaccaaagtaattaaattaaatgttgttgagttttttcagaagagtcaattataattcactcattacggtgtttatacagtaataaa

SEQ ID NO: 55825 - DNA, 605 bp, Heterodera glycines
atgcaaaatgaagcagtgttattaaatggctctgataaaggaggagcctcatttgaatttgatgacggatcagcgtcatcggacacaactgatgccattgatgatgaatttgttgtccccaattcgaccgatgaaagtgatgaaacttgtgacaccttttccgaatttaacgaagcgcacacttcgtcaagaaaacaaaagaaaggaaaagccaaaagaagggaaaaacggtcaaaggcgttaaggacgacggggaagaggcttattatatgcaacggattaggtaatgaataataccaaagaagcacttggccaatcccaatttcagagagcatcgttcactccaagaattggccaaattgaagggcgaaccttttgatgacccaaatgacttccaaacactgtgcaatgactgcccatttcaaattccatttggaacagactttacaggttataaaagaatgatcgattgtactagtttaaatttggagtcatttgtttgatttttttgttgtttaaaacaaacgatttttataggtaccaaaaaacaagcgttcgatggctctacgaattgcattttcaatacgtcggagggtaatggatga

SEQ ID NO: 55826 - DNA, 654 bp, Heterodera glycines
  unsure (1)..(654): unsure at all n locations
aaatcgattttttcaagtgtccgttntggggtactcaaacaattatgggggagcaaaaatccaacgcagaattaaagtacaggctatagggaagctattcccgaaggattcggtctccccataaatctgggcgcatcggttcggggggactgccccgaaaacaaaaaaatcgattttttcaagtgtccgtttggggtactcaaacaattatggggagcaaaaatccaacgcagaattaaagtacaggctatagggaagctattcccgaaggattcggtctccccataaatctgggcgcatcggttcggggggactgccccgaaaacaaaaaaatcgattttttcaagtgtccgtttggggtactcaaacaattatggggagcaaaaatccaacgcagaattaaagtacaggctatagggaagctattccggaaggattcggtctccccataaatctgggcgcatcggttcggggggactgccccgaaaacaaaaaaatcgattttttcaagtgtccgtttggggtactcaaacaattatggggagcaaaaatccaacgcagaattaaagtacaggctatagggaagctattccggaaggattcggtctccccataaatctgggcgcatcggctcggggggactgcccccaaaac

SEQ ID NO: 55827 - DNA, 324 bp, Heterodera glycines
tttaacgaaatttatcgaacgagatatgttttgacgtataataaaaatgcaaaggcaaaataaaaaatcgtcataaaaacatatcacagtgtaaaggaggataatgcggaaagcatctgggtaatgattaagatctggaaaaaataaacggaaaataaatgttaattgtaaaacttacaatgaggacccagactcgaaattactcaaaactataaatttagcagtaaaaaatgaaatatatggaagaatttcctttattgcgctttttgagtctgggcctcacattaatatttaccaagtaatgaaaaatgccttaagataact

SEQ ID NO: 55828 - DNA, 1511 bp, Heterodera glycines
atgcccgcaacaaattccccacattcatcaaatctggcggaaaaagcaacggactctctgctcaacgggctgcagaacactccggctgtgacttacgaggatttaactgtcgcgactgacggattcagtcccaacaaaatcgtcggcaggggcggctacggcgtggtctatcgcggagtgtggaaacacacgccggtgaagacacattctttcgcactgttggacacgtttttttcaggtggccatcaaacgaattcaggggaaatgcggaagtgacgaaagggtatgttgagcagaaatgcagcagttagggttttagagaaaaatagcgaatcttccaaaataaaaaaagctgtggaaaacccaattaaactgttacattggaaatcccatttattgcagcagcaaagggagcgaattcgtcagagtttacaagaattgaagactttggcaaagtttcgacatgacaacgttctctcactgtatggttattcgctggacgggcccgagccttgccttgtgtaccaattcatgtccaatggtacgcttgaggaccgtttgctatgccgggtaacttacaacggaaaccatttgtaatttttgcgtttaaaaaatcgaattgactgctgctcattgtcagcatttcaatctttcctttttcgaatgggacggagccactcggttgggccaaaaagctgtccatttgcgggggcgtttgtcgcggcctgcactttctgcacaccatcaaccaaatgccaatcattcacggcgacgttaaatccgctaacattctgctggacaagcattttgagccaaaacttggcgattttgggctcagcagatatggacaggtgatctaaaaggacagttggtccacgaaaatggccaaatcccaacgatggaaagtctcattgtcaggttgaactcgacacgggcgacaagcggccgatgatcgcttctcatgtgaagggaactctcgcttatttggctcccgaattcttgaccaggttcctcgtgtttggtaatattatttagctgtttaattcagtcgtattttgaccaccaaactcgacgtgtttagctttggtgttgtccttcttgaagtgtccaccggtgaagcaaatttctacaaaagttatgatttttcattttatttttaggacaacgcgctttttctgccagtcgcaacccacaaggaattgtcgaatttgtccttaaaatgtgcaccgaagcaaaacataaagatgatactaacttcaaaaacaaatgttattttgaattagcggacaaacgaacgcccaaaacggacgacggtttgttttgtttgattggtctttctatttgaacacaaaaatagaacaattcccgtctacttaaattcagaaagaagtctgcttattttcaacaaattactttctgttggtatttcgtgcaccgaaaaggatcggtttgcaaggccaattttctcggagatttttgcccgattgaatgacgaagaattggaggattaa

SEQ ID NO: 55829 - DNA, 351 bp, Heterodera glycines
atgttagagatagctattttagattctaaaaaggtaagcaatgatagtctgcgtttttttgatagcaagtgaatttgacagtaattgattccatcaaatatccgtccgaggcaaaaaagacgggaacgggattcccgggttttcgagcgggaatcccattcctacccggtctctaacctatgcgtcgtcgcacacccacgccgatgtgttgtgcatataaacactaacacttctatttttttttaaattccgaaatgaaatttaaataatttttttatagttaactaaaatagtgagtaaaaatccaaaaatagtgaagaaatagtgacaaaaagtccgaaatagtgacga

SEQ ID NO: 55830 - DNA, 518 bp, Heterodera glycines
cagtttagtcgtcgtctttggattggtgggacgccgctactgccgcccacggttggcggagtggggcgagagcagtagacaatcagggcttagccaccatcagcagcagaggggagtagcgaacgacctgcgcgcgcaagaagtttatgcgcagtagaatgacaatcgaaacacatcgaaaacgaaaacggatcaggacagcggaaattccgctgctttttggtggccaaggaatgagacgccgtcggcaatagcagaaccaagcaaaggtgaggcgatccatcgtttatcatctcagcaacaaaagcaagcgcatatggacgttggcggcaacgcttatttgttagtcgattttggtcaaataatggctattttactttgaacaattgaaacaaaagcaaacggaagatcccataaatccctcacagaaaggtctgcaattgaaacaaaaagcgtgcagaaactgcacagagtgtgccacgacaaaaagcagcgaaagagtggacagactttccaag

SEQ ID NO: 55831 - DNA, 787 bp, Heterodera glycines
atgcccgcaacaacaacttgcatcccaaatgacaatgctgacacggtcgaagaacggcaaattgacgaaagagagacccaatttgacctagagactgatatggacagtgagcaggggcgtcattcgaaagtgacgtatgaagttctttattttatgtgtaattttatctgtttttgttaagccaatgattgctccaattgacagtgttttggaacccgtttttggcgtccctccgaagaaacgagaacttggcgtgcggaagcccggacctttggaaaatatttccgagagacaattttaccgctaccgttttgcaatgcgagaaaacagcaggggcgcctttcattggctttggtttgcccgtcgtttggctgaatattttgtcaacgctgttcttaatcgaattgagcgcaatgagatggagcatatcaaggcaatccagcaacggaagaactaccgccaaactcttgctcgagattacatcaaagccattgagcaaggactccagcagcaggggcgcaatgccaaattaggcaatacgtgtaggatccactgtattttgtaaatacttaggaattttaaaaagacacccaataagtaaaagtggtgtttataaattcggttttattcttaaagattaatgaagcaatatctgatgataatgtttcatcatccttacgaattaatgaagtattatcttgccattaaataagagcacatattaaatcattgatttaataataatacaccctatcattttcaataattataatgcttgatgacatta

SEQ ID NO: 55832 - DNA, 660 bp, Heterodera glycines
aaacaaaaaaatcgattttttcaagtgtccgtttggggtactcaaacaattatggggagcaaaaatccaacgcagaattaaagtacaggctatagggaagctattcccgaaggattcggtctccccataaatctgggcgcatcggttcggggggactgccccgaaaacaaaaaaatcgattttttcaagtgtccgtttggggtactcaaacaattatggggagcaaaaatccaacgcagaattaaagtacagactatagggaagctattcccgaaggattcggtctccccataaatctgggcgcatcggttcggggggactgccccgaaaacaaaaaaatcgattttttcaagtgtccgtttggggtactcaaacaattatggggagcaaaaatccaacgcagaattaaagtacaggctatagggaagctattccggaaggattcggtctccccataaatctgggcgcatcggttcggggggactgccccgaaaacaaaaaaatcgattttttcaagtgtccgtttggggtactcaaacaattatggggagcaaaaatccaacgcagaattaaagtacagactatagggaagctattcccgaaggattcggtctccccataaatctgggcgcatcggttcagggggactgccccgaaaac

SEQ ID NO: 55833 - DNA, 499 bp, Heterodera glycines
atgccatctttgaattccagcgaaatctctccgaaaaatgtgaaaaagtgctatgaagaggaaaaagttataagtagaaagaaaacggaagaaatttttgctcagtaatgaagcaaaatttcatgcagaaagaaaagcggaaggattttcaaaagatgtcagggctaaggtgctccaaaatattgaccaattaagcttacaattaattaaattttttcaagactttccaaatttaacaccaggcaaaacaactcaaagaagaaaggagtcaaaaagaagaagcacaagaagaagccatcaaacagcaacaactcaaagaagcaatgaaaaagcgattgaggacaaacaattttacagaaatcgagctcttcaatatcttggagaagttgaagaaacggaggcaaaaaaatcggtcttgaataaggcactttgtgattggaagcggaaacgccaaacgcaagaaggtaaactatggcagtgggattggcacaatggttag

SEQ ID NO: 55834 - DNA, 940 bp, Heterodera glycines
atgtgcgcactttcaagggttaggcatttaagtcatgagcttaccacaaagttgaaatgattttgtaaatgtcaaaatgtaaaactttgcaaaaaaataaaacaacgatctgcttaaaattcaaaatttttcaatcacttataaattttttgaaaatatccatttttaaagcatgaaaaatcaaatcatggcagtgccgagggaattttcaacttgtaaaaaggtgcgattttatgaaatttatatgagattttgcagactgattgtcattgtattaacgtatttttcaagtcattctgactactaaaaacaatttaaaaaatcaatttttcataatatgatttaaattcccaaccctgccggtcgcgacattggtttttgttgcaactcgggttaggaactcggaattggttttctaatggatgattagtgcacccgaaacacaccggaattgcaaaccaaaaggacgaccccacctaatttatttttttcatgattttcaaaaaaaaatttgaaatgaataggaaacaaattttgtaaagggcatacattattacggagacccattatttctaagaagggaaaacttttcaaaaaatcaattaatgtgggtgaatttattaataaaaaattagagaccgggcaagagggtcggtcgaacggtttcggttaaaaaccgaaaccgaaaaaaaccgaaaaactcaaaaaattctcggtcgaacggtttcggttaaaaaaccgaaaaaaaccgaaccgaaaaaaaccgaagaaaaattttcggtataccgtttcggtttcggtttttttttgaatttttatattttttccaaaaaaagcaataaaacatttttattaacagaaaaagctaaagatcacctctgaactaaattgtaaagctattgaagctctattgaatggtgtactaaagtttggaaaatga

SEQ ID NO: 55835 - DNA, 277 bp, Heterodera glycines
atgagagcatgttcaccaatattaaaggacgatgtaatttaacaaatatattcgaactagcggaaatttattggcacccgaaccaagaaggtatattcagtggatgagcttgtgaataagctacaaggacaaatcaaattttgagagtttaaggccaccaattcaatgggcaagtccgaaattggctcagttcgtggctatggatggtgctgattctgcggcgcattttccctgggaggaattggcatggcaattaggccctagaaacagtttaatg

SEQ ID NO: 55836 - DNA, 248 bp, Heterodera glycines
tcctccgctgtcgcatgagtctgatgagtttgttcatgaacatcggcgcagttcaagttagccgtttcttttttaaagcttgttaccattaaactgtttctagggcctaattgccatgccaattcctcccagggaaaatgcgccgcagaatcagcaccatccatagccacgaactgagccaatttcggacttgcccattgaattggtggccttaaactctcaaaatttgatttgtccttgtagcttat

SEQ ID NO: 55837 - DNA, 589 bp, Heterodera glycines
atggcatggctctctttgctttgggctctttttgccggcactttgtcttttgtctttgtgccattattcagcacgttttctttggtggtatgtttttttcattgtttatacttttttattattttcatattccaaattttttagtccgtttttctcgctttggtcaccaatttgccaataattgtgttcgatttgcttgggaaacggtcccatcgcatttatttgccattccttctgattaatgtgggacttcgaattaattaaaaataacaattaatttcacttccttcagggcatttgtattcttttcggtctttcgcacattgtttatctcattttgcactcagttttcatgtttaaagtgcctcacttctttgagagtaaaatatttacttttaaaattaatcaaatttaaaagtaaaatgcaaatggttcttttttattcggcattcatttaagtgcaccaaaaaaatgaaattagagttaaagctgaggctattcaaaaattgactaatgccaatttttggagcggagggaggggaaggaaatgcaaggtttgacgaagtacgagaaagtgcaagtgatcaaa

SEQ ID NO: 55838 - DNA, 1841 bp, Heterodera glycines
ctttagtaaaaataagcaaaaatgataataaatactagtatcaagattgggaattaatagaaagtaaaaaaagcttgaaatcggcccttaggcctaaaatttcgtttttgaggcctcataactttttgattccctcctatgggggcgtaatattaaaaatttccaatagaaggcgaccctgctctatcgaatggtatatcacacatacctatgcactttccgacttacagttcgggtggttcccttgttagcgaaatccatgcaaagcctatcggcaccgccggaccgcccgccacccccttccccaaaagttttttggaaaaaacgcgccgcaaaaaaaaggtgcctgaatacaaaaaaagatcgccagaaaaatttggtatgaatagcaacaaaaaaaaaatgtcgtcgtctgagaaaattttggaccttcgtatgaaaaatcggtcccgagacaccgcctggctcaatcgtacggcccttggcctgagacaccccttgcacatgtatggttggctaaatattttaaaattgttttgtcattcatttgctcatcaaatcgcgtgctttttaggcacttcccggctacgacgcgtacgaacagcgttttactgcgacacgccgcagacttttctgattgtgcgaaatgagaaaataattataaatttcaagataatttttatttttgtaccaaaatgtttttaaagacatttggtggctgccgtcaaaatttttgattacagattctttcttttcaatataatcttttaaatctgtcgttattttacttttttttcatatcattttttatctttttttaaaccttaatcgataaaaaacttcctgaacccaatcctgccctgacaacaaaagggtccgatttttcatttttcagatatttaatccatttattggtcctttattttcgttcttgttgtctgctgattatgggcaatgaacactcaaatcgctcaaagggtcatccgtcatcttcgtcttcctcaaaaaaggatagtccggcgactcgccttcaaaaagcgctgccgtccgcgctaaaattcggctcaaatgatctctcgtcgagtgccttacgacgccttttggaacagtcgaagaaaagtcgaagtttgcaactgaaaggggccggcatcaaaagagtgccgtcgggaattgtcgaggaggtaattaattcattttttacttaaaatggtcgataatttggggttcatgaaaaataaggtccaaattttcaaatttcaggtccattctttgctcagaattttggagctgtcgtcgaacaaattgcgcgaattgccttcgactatcggcactttcaccatgctcaaacagttgtacatcgccaacaaccgtctgaccaatttgcccgacgaaattggctgtttgaagacattggaattgctcgatgtttctggtttgccttttttttttttgtttccaattgagtaaatttctaacaataagaattacaaaactaatttttttattttttcccgacttaattttcctaaaattgaaggcaatcagctcactgaactgcccgacccattggccgcgtgcaattcgctgacccaaatgaacgcgtccaacaacaaattcagcacatttccctccgtcgtgacgcgactggtgcggttggaggtcatcgacttgtcggagaaatcgatccctgaacttccggacgaagggaattgcataattaaattaacccaaacttttcccatcaaaaatcccaattaaaaaaatgcggttaatgaccttggaaaatttctaatacttcccttcccttccttccccaaaaaaaaggaaatttttctttaagg

SEQ ID NO: 55839 - DNA, 3664 bp, Heterodera glycines
atgttccctgatgacgatgggtacgaatcggaagatgatgaaattctcctgccacctccgccgatccccccgcaacttggccaccctccaccaaatgtgccggtaatttcggtctcgcttttcgttgcttttctcaaatttccgagtggttttttcaggcagttcgtgttcagccaatgcatgttgggcagcagcggctgccgctgagagacttgccacaattcgaggaccatccgcaaaatgtgccggtaattttgggttgattttcgctgcgttttctcaaatttctgcgtgcttttttcaggctgttcgggtccaaccgatgcaacaaccattgccgctgagagacctgccgcaaattttccaccctccaccaaatgtgccggtaattttgggtctttctttcgattgctttttctcaattcccgagtgcatttttcaggcaattcgtgttcaaccaatgcagcaacccgtaccaatgagagccgtgccacaattcctccaccctccgccaaatgcgccggtaatcttgagtctcgttttcggttgctttttcaaaatcccgagtgcattgtttttcaggaaattggtgtgggaccaattcatgatgggcaacaaccactaccactaagagcgttgccacaattcgcccaacctccaccaaatgtgccggtaattttggctcgcttttgttactttttttcaagatcccgaatgtttttttcaggccgttcgtgtccaaccagttcaacaaccgataccactgagagacgttccgctatttgtcaacccgccaccaaatgtgccggtaattttggctcgcttttgttacttttttttcaagatcccgaatgcatttttttaggtaattcgtgtccaaccaatgcctcaaccgctgccgctgagagacatgccgcaaattcaccatccaccgcgaaatgtgacttcaatttggatcaaattgtggttgctttttctcagtctctgggtgtttcttcagggaattcatgttcgacaaattcaacgggaatacgcagtaccgcaatttgcccatccgccgccaaacttgccgtatcatccaccagaaaacgttccggtagttgggtcttgtttttcgtgcgtttctcatattttcggatgcgtattcaggcaatccaaccacggcaacgaccgcgccagctgagagacgtgccactattcgaccacccactgccaaacggacaggtaatttcagaccctgtcttttacctaacaccgaaacatcttttcttaagcaaatgtatgccaaccccccgagagtgctggaagtgatccgacggctggacgagtggagaggaagaccaagggacccaagacgtccgcctcaatgaatgaatagaatttggattttgataaaatttgttgttttaatttttgaattgataagggttaaatcccgttacctaaattgtttgaaaattattaaaattttaagaaattagatgctaaacctaacctttgacaaagattatgaaaaaatgaaaagaaatgacgaaatttttggaatgttccttctttttattatctatagattttttttcatgtgcattattttggtgctagtaagatattgtcgaatgaattaattggttttttctcttcattttaaaacatttcacgtccccatgccctgtccacttcccgcggaattgatcaaggaaataattgacgctctcccccctccaaaaacacatcggcttttgtgcgtaaattttgttttggcatactttgttaaatgtcggttttattccatgatgagaagattgtttcgcccagagcatatatcaataccaatggcccgaagaactggaatgtatttctttttcgatgtccatactccccctatttattttccactttaccaataataccatttaaataaatttataaatttttattttttaatttgataatttttaatcgatatttctgataattaaacaaaattgtatttttcccaaaagaattttctcgcagtagcaactcatcggcttttttactcccttcataaaatgtctcgcttttgccccctcgcccaaatcaaggaatcgggtcggcttaacaccccaaaggggaaattgagtgagttccaaatcctgtaaatcccacacaaatttgaaatctattacttgagtttaggccttttttatgccctcgaattcgctcgcaactaccaactgatcgagcatggaatttctaggaaggctttccgttatttaatggaaactgagaaaaaacaaagagcattagtctttgatcttatggaaaaggcagggataagcacagatgacaaaacttttggtacccaacaccttgaggcggtacaaaaatactgggacagggaatttccgggcatgttccgagccgttgttttcgataaggttaataaataaaaacacaaaaaaatcttttctattttttttagaaatttggacttaagccaattttcaagggccaaggcgttcgtaagaatgaagtgtgtgtgataagagagggagaccattgggatgggatcaaatccgcttcctggttttttggtgttcgctacttttgtgtgggttgcgaggttacgtacgatcgccctgaaagacaccggatggaatgcaaagagcgctgcaaaaaatgttgccggatgggattcgggttcccatgtgcggatgtgtgtgttaagattcactgcgaggaatgcaaccgcaacttctataacaacgaatgttttgaagcgcacaagaaggtggcttgtaatgagtacaagaaatgtgaaaaatgcgcagaagtctaccaaacacgttcgaaacacgtttgcggggaaaagttttgcaaactttgcaaagtttgccacccagggaggcaatgtttcatcaaaaaaattcaagtgcgaccgcagaaagcctacagaattgtggcctacgatctggagacgacagtagatgggggagaacaccggcctaatcttgtttgtgctgcacgtacttgtaacatttgtgcgggagaagagcgggaatgtgagatttgtgaaggccccagtaaaatcacatggtctgtagcggatggttttgacccaatgagcgagtttgtcgtttggataatgagttttcaacgatttgaaacgattgctttcgcgcattatgctgggagattcgattcccactttgtcttgtctgaactaacgaagaaggaaatcgcgacggaactgatgatggcagatttgaaaatttatcagataaaggcgggacgagtgatttttcgtgacttttggatgctcagtcagaataaattggcggaccttccaaaaacgttgggattaaacattacggaaaaattgtattttccccacaaatacaataagaatgagaactttgggaggagattgcccaacctgccacctttggaagactattgcccggacaatatgaaagaggaagaagccgtaaaattggaaaaatggtataacgagaattatcaaacggaatttgaactaggtagacagaaaaaatatgggtttttaaattatattggatttaggggaacagctgaagatatattgcgaaaacgacgtggaaattctgttgcaatcagttttgaagtttcgacaattgtttttggaaataacaggggattttga

SEQ ID NO: 55840 - DNA, 566 bp, Heterodera glycines
atcaatcttgctcgaaatttcgagaggctctgcgcactaaggaagttaccgtgtggcgaattgttcatccagttcgggttcatccagttcgggttcgaagatgaactggaagacgccaaatatttcgccgactttttggcgtatctatcttttggacgatctggccccaccgctacgacgagagtcgtgacttattccatggtaagaaaacaaacaaatataagaaatattattaatatttagccaattaaaattggagagctgttcggcgcaattctgatttatgtcttgggaagcgcaaacccgctgaccatgaagaagcggactgcaggcggttatttgatgcggcagcattttccgcggcttctccaattcccggtaacagaaatggcgtcacatggccttggtcaactggtccgcgccgatgggatggaactttaccgattgatgaatccgcatcacaaaggagatgttggttatttgatgattattgaaacaactcaacaccctggttcctactattttaatttttcaatcgaataagttttttttcgtaattgaataaa

SEQ ID NO: 55841 - DNA, 63 bp, Heterodera glycines
ggtcgcgtggacgatgtcaatggagaagtcattgatccggccaccgggcttggaaagtccatt

SEQ ID NO: 55842 - DNA, 852 bp, Heterodera glycines
atgcttttttcgttttttctattccaattttattctgttgtctgctcaatagcgtcaaagagaagtcctgaaccatggggggatacactgaaatcgattgacgacaatgccagagatttcaaatggcctgaccgacacgaaaagggtacatgggcagcagtcgccgcaaccggggaaggctccagggctaaagctgaaaccggtgtcaatcgagaggaaggcagtggtatggaggaggaggaggacagccatattgtaagagcggaagcgttgagtgaacgtgaaggcggtgttgcagttgctgcagccaacaaagggcaaacccaaaagacgagtgatgatgataatgattatcatgatggcgcgcaccagcaagtcgtcgtaatggcacgtggaggtgaagacgcccgtgcaaaagctgaagcaagcggaggtccaagaagtgtcgttgaaacacgaattagtgataaccaacgagggggagaaagattagctttgggttcggccattattcatagacaaggaagaagaagaggaggaggaggaggaggtcgaaacagaaaaccgtcagagaggcaaagaagaacaagggcgaggacgaagaccctattgccaacgataaatttcacccccgcccccccgcaatatatggagctaaacaatcgtcaaaaaggaaattgaacaagtcacactcaacaacaatgtgcacacaatgagccctgtcagttacccatatttgttgagaaaaaaagttgaaagaaattgttttgaacctgctgatttaaccttggctttcagttttgccaatttccttctccacttatcaatttttgactcaaaatgaaaaactta

SEQ ID NO: 55843 - DNA, 918 bp, Heterodera glycines
atgcgaatgtgagaactgttgctgctgcaaaaagtgccggaaattcgttgcaatgtgcgggtgccccactgaagcaaagactgccaaacattgaaaagggtggtcatttttaggggtttagtgcagcaaataatttgaatttgccaattttggcaatgcgtcgtgcattaactctttaaaattcatatgagacagaaaaaaagcaaggaacatattctatggatttccagggaatgagaaaaaaattgaaatggaaattgcccaatcctaaaaatgcggagaacataagaaattcctaagtttttgcagcaaatattcggagtttgtcttagtctcgaagatagatttctcaagacatttggtccacgagcacatgtatacttcatcaaagatgcaagctgatactcgaaaaatcggtatcaggacttgaattagataaaaaaaattttggggttcggcatttcgccgccccaaaaatgatgggattggatccttgggatcggctcgaatcttagttccaccattacggaaatcctttttcagaagtaaacaaatggatcatttattatttgaatttgccttccgccggagcgctgcgccgaatgattttttcgcaaatttttcgcttgctttaaatagggggggggggggagacagcagctgtttgttgccactgctgctgctgctgataaagcaatcagtcatcattcaatgtgaattcattcatctcgtcaatttccattattattaatcatcggtcggtgtcagttgaaaatgacaaaaaatggcaaaaatattataatggggcggcggcgggcgaattgttttgttttgttaaaaagcatcaaaatacgcgctcaaagggcacagaatagcgcacaaaaccaattttaaacaattttttcagtcacaacgcca

SEQ ID NO: 55844 - DNA, 372 bp, Heterodera glycines
atgtcccatcgtcgttcacatgctgataatgtggaaacaatggtaagtacctaaaatgtatggtggcatttttgtgttaaaaaatctgccgaataaaaataattttttcctattttttggtcaaaaaattctttttcaaccattttgaaacttttaattgtcatttaggctctaaagtactttataaattgaagattgccaattttccaggcccaactcatcgccggccttttgcctccgttggcgttggaagcgcggatcagtggagggaatgcgctcggcaaccaattggtcacgcagttgggactgtccgtccaagcggcacagaatgtggacatggccattttgggtagggccaaattaaaaatttga

SEQ ID NO: 55845 - DNA, 691 bp, Heterodera glycines
atgtccaacacaaaggcagccggccaaagcgccgccggcgcatcggaaattgcggaccaagttgagcaaaaacacaatgctatgaaggtgagaaacaattttaaatgatattgaaaattatttaattgtctataaatcaggtgacggtccccaagattttcgacttgggttttaaggggcgggggggggggggtgggtattacaatgaaatagatcggtctgctgtttagttttatcgcatttggcatggttttttggaatcccaaaaattagttatcaaactctttcccaaattaaattttttttttctttatttttaatttatgaaactcctaatgcctattataattaattttttaatttcagtccacctatgacaaagtgttagctttattggaagagaaagaaggcggaaatgaggagcggaaacagcgggcggaagagttgcgcaagcgcacaaccgaattgttggcaaagattaagcggagtcgggaagagaaaatttgtgagctattttttattaatttattttttgttttttaattttttagccctgattgaacgtgctgattcattagacgtggaactgaacaattttcacacctcaattgaggaactcagtgatcagattgatcaggtgaccagcgaaattgatcgacgcgttgagttccatgccacatgcgatgcctaa

SEQ ID NO: 55846 - DNA, 216 bp, Heterodera glycines
atttgaaagagaatagaaagaaccaggttcgatgaagttttggtaagccaaaaaaaatgcaaacatttaaaaatctataaaaaatttaaaaatgagaattcatgcgagattttctggaaataagcttaatagggcctagttaagctgtaaaaaaaaatttggggcgatttgaaagagaatagaaagaaccaggttcgatgaagttttggtaagcca

SEQ ID NO: 55847 - DNA, 427 bp, Heterodera glycines
atgtgggacgagcagcagccgatgacgagccaaggaacacgacgacgaatttcgcactttgctaacagtttatggacaacgccagcgattggagggaacgcggtgaatggaaaccgacggacggacgaaactgtgagaaattgaggagaaatttacaaggcctcgtacctatactatgatttaaacccctctcaattacaatcaattttatcgtattcagtctgtagattttatgtttagtctcacaaccaattccgaaccgcccgaatggacgatgattcggtgcaaaccctcgacgacagtgacgtgtaagtgggcaacggaccaccagtttcatacgaaatgcatttagacaaatggtagaagaatctgacagaaaagcggcgccaccaccaaaagcagagaggggtccgcttcttctgacggc

SEQ ID NO: 55848 - DNA, 554 bp, Heterodera glycines
atgtttctaggggtttataggtacgttgagcacgaatctgacatccatttcgaccaatcccgaaccccggacccgaattcgaacaaaaagtcgaaaattcatttttcatcaaaattcacattcatgcaactaaagcaatacaaatgcacgaaaagacgcataaagatatattttgcattctcttttatgtttccagcttattaattaatatggctgcgttggaagcgtttcggaatttctcgtgtcgaatcaatgtggaagaaattgaaaagaaattttaaacagcagtttggcaacaaaactgagacatacgactagggatgcgatttttagttaaatacctaaaatttttgcgcacttgtaacgttgagataagcataaaaaacgagtttttagcttggtttggagcttctacacccacttttataatacctatttttacctatttcgggatttttctactattacctaggtacctatttttatacctatttcggcattttggttacctattttaaggattttcaaaaaattcttaacaaaaatgcaataaa

SEQ ID NO: 55849 - DNA, 290 bp, Heterodera glycines
acttggtggaggacatctctgatcagtacgacgattctgagcaaccaacaatcatccaccacgaaccggcaacaccaacaacaatgtttgacaactatggtccgattgagaagattgttgtggtcggcaccggcctcatgggcagtggcattgcgcaaattgcggttgagtcgggcgtcaaagtgtgcctggtgggccgtagtcaagaaaagtgtgatcagacccggctgaagatcaacacgggagtgcaaaagtcgatcaagaagcgcatggcaaatgaaactgccgag

SEQ ID NO: 55850 - DNA, 363 bp, Heterodera glycines
atgctggccaaacgaaagcaacacgtcggcgaaagcttggacgaatttgctcaagagattaggactttggtagcgaaggcgtacccggatacgtcgcttgaaatgaacttcgaggcattggcattgggcgacatggaagacgatgtgaagagggaacacgaagaacgcctacacaaatttagagctggaattgcaaaggactttttccgcgcaaacatgacggcatcaatcaaagaaaaaattctcttcatggatgaacctccgacatttgaggatgcgatcacacaagcaaaaagagttcaacaaatgcagggagcgttggcagaagacctctgcaaacaaacgcaaggaacaaaagctgaa

SEQ ID NO: 55851 - DNA, 483 bp, Heterodera glycines
aaagtgaaagagaaagtggaagaggaagagaaagtggaagagaaacagaaagtggaagagaaacagaaagtggaagaggaacagaaagtggaagaggaacagaaagtggaagagaaagtggaagaggaacagaaagtggaagagaaagtggaagagaaacagaaagtggaagagaaagtggaagaagaacagaaagtggaagaggaaggaaagaggaagagaacgagaaataggaagagaacgagaaagaggaagaaaagaggaaggaaaaggggaacagcaaatggaagaggaacagaaagcggaagagaagaagagcaacagaaagtggaagaggagcagaaagtggaagaggaacagaaagtggaagagaaagtggaagaggaacagaaagtgaaagagaaagtggaagaggaagagaaagtggaagagaaacagaaagtggaagagaaacagaacgtggaagagaaacagaaagtgtaa

SEQ ID NO: 55852 - DNA, 1278 bp, Heterodera glycines
tgatccgaatgtggtgaacgaccagcaacaacagcagaaacacattttaccgcttcctccacaacagaacgaacaaaacgaagtcaaatcgacgactggtctgacacctgctgaagctgttcggcgttcgcagatctctgcattggtggaaccgaaacaaccacaacaacagcaacaagaaatcaacaacggcgccggcgacgaacatggcggagtgcttcgcaggcaaaaaaaaaaaaaattcagtaccaatttgtgactcaccattttccccttttcaggtcaatttcggtgctcagtgataattggtacgattgggttgaaggcaatcagacggacaaagctgggtaaactccatgttttaagcaattttgatcgattctttccccacgcacagtttaagcaatcaacaacaaaatgtcatcgtccatcagtcagtcaacagcaccatcaacgcggatgagcatggcatatctgatgaagccagcccggtcgcctcactatccacaatcgaccttggccgtgtgtacaccactgttggcactgtgatggaatcgctgctggttaactttgcgcacctgtggcaatatcgggtgagcaaccagagcggcaaatataccaattaacacggggacggacgatgaattaatttgtctcccccgcttccgtttttcagcttttccgttttgccttcgtccttctgtccatctacttctgtctgggcttcttggaacagtgtgctgtcgcgatgaccgccgcatgcgtccgctgggcttggccaccggtgcacttcatgctcggttcgtcacggggaacgctgttctatttgactgactggttcgacttcttgtcaagttgggtgtgcgacatggccaattctatgcataacacttcattttttctttaaacctgactgtacaccccccccccccctcatttactcaacgctttcatcctcctttttgatctcgattttgaaccttcaaaatttattcctaattcaatttccaaattcagttttcatttttatggatctaaatcattcaaggaagattacgatgatgatttctttgaatcaacatgtattgaagtgattgcgccgccagagcacgaaatcatttatggaccatctgcttttgttgctatttttgtagccatttatgccttggcgacgggacgtaaagttcaaaaggcaacagcattaacgggggaactgctgcgcaacaaatcggttgtaaaaattggtggactgcgtcagaaagtgaaggcggcagcgaa

SEQ ID NO: 55853 - DNA, 1117 bp, Heterodera glycines
atgttctattcagctgacattttcaagaatgccggacttcaagggcaatgtaaatttaatacgggaaaaattacttattaaaattattacggaatatttagggccaactgtggccactatcgcaatgggaaccgtgaatgtgctaatgacttttgtgtctgtcgttttggttcggttttttgaaactaattcttttcaaggacacgatgcttatggcttcagaggcgcccttaaaatttgtctttattcaaggaaaaccacccaatcttcaagatctgaattgtagactttgggtatttcagtgaaaaatataccctttgcgtccttgagaaaggctctgtttttccgtgtccgatggcccattaacgccttaattagaccggcactaatgatgcccttgaattctgtgtccttgaaaaggggcttcatttttccaagcctgctagccttaattaagaattaattacccccaactgaatttcaggtggaacgccttggacgtcggactttgcatattactggcctcgtgggcgtgcttttgtcgagcgcttttatcgcaatttcactgcttaattcagtgggtttttttgtttcaaaaaataaaacaaatttcgctaattgcttttcagtcagttcaatgggtttcatatctttcgattttatttgttctgctgtttgtcatttcgtttgcaactgggccaggtaattaattaattatcagtcaaatatgagaccggatttgcggcaataaaaaactaaacgcacttaattattaaaaaattagagaccgggtctcatgagaatttattaaatttttgtgaggtaatttggaaataaatttacaggcttttttaccatttaagttaaaatgctttgaaaaactaaaataataaaaaaaataaaatgaaattcaaaaaaaacaacaacaatttcgtaattacatataataattagaaatattttaggctcgattccatggctttttgttaatgaaatctttccatcgaatgctcgtggcaatgccaattcaattgcggtcctttccaattggggctcaaatgccattgttggctactcctttccaatgcttaatgtatgtttatgtacagtagactaa

SEQ ID NO: 55854 - DNA, 530 bp, Heterodera glycines
atgttttttgaagcaacgataactttcgctttcgtttctatatgggaccgacccccattcttcattgttcgtgattgcgtaccacaatttcgtctcccttttacagaaagaactctggaagaaattgaaagagttgagaaaggacaccaaattggccatggaacaacaaaagttggcaaacgaattgcgcatttccaagttggaagccgaattggaacgacaaaaattcgaattcaaggaacaactcatgaagatggaaatcgaacgcgtaagttttattttaatttatttaaataattatgagaaaattgaatctaacaattgttttaacatttaaaatgatgtgaattaagttgaaggaacgactcatgaagaccggtggtacggtagcctatccccccttttccaactattacactttgttttttaggtgaaaaaaatgatgatgagtgagtgattgaatgaaaatttgtgggagtattttttttaattaattaattttttcgtcgttttttccttttattaataaa

SEQ ID NO: 55855 - DNA, 260 bp, Heterodera glycines
atggctagaagggctgccaaaaatatgtgcaaaaaatggtcaaaatatgtgcataaacataaatatataaaaaaaaatagcgatatatgtatataaaacccaaaatatgcaccaattatgtaaatacaatttttaaaactggttaatttttagaaaaatttcttcgtaaagggtgaaataggatttaaatggcttattgttagaatcatttttattataaatattatttgggcattttttagtggtacattttaaataaa

SEQ ID NO: 55856 - DNA, 382 bp, Heterodera glycines
cgacgaaatttgttctattcccgtcataacccctctccaactttgctcataaactgccccaaccacctgctcctcctccctgttgctgtactgctccagcctgttgttgttgttgttgttgctgtttctgctgccagtgcacaatttcagtcagttgcaactccatcttctgcatggtcatgtggatgttcgtctgcgcctcgtagatcagccgcaactcgcgctgctgtgcgtcctcatagtatttggcctggtcgtcctcctcgtccgatttcgccttctccggatgctgctccttgaacctggacgggcaaaatgggaaatggtaaaatgattttgaattcgaaaaaccttcatagagaaatatgccaaatagaataaa

SEQ ID NO: 55857 - DNA, 844 bp, Heterodera glycines
atgctttggcttaatctcatcatggacactttggcttcgttggcacttgccactgaaatgccaaccgaggaactgttggaacgcaaaccatacggccgcaaaaagtcgcttatctctcgcacaatgatccgcaacattttttgccatgccgtctatcaattcaccattttgatggttttgctcttcaaaggtcggttatcgcgtttttaaacacgagtgattaccttgaatcccttgtttctcattctaacacctgcaaattaggccctgaattgctgaatgtcgccagtggcatcggtgcctccatttactctcctccatctgagcatttcaccatcattttcaattcattcgttttaatggtgcgttaacgtaagcagctcgtttcctccccccgcccaccgattttatcattatttttttgataactttctaattttgaaaatttgaaaaaaataatgataaaatcggtgggcgaacggtggagaaacggcgagaggggggaacgaaatgcacccgagtttatctattaaaatgttttaatttttgcccgtcagacccttttcaacgaaataaactcgcgcaaagtccacggagaacgaaatgtgttcaaagtgagtgtaataatatggcttttgcatttcgtctgatgattggccattcattttgttcagcatctttcttctaatcacatgttctgcatcatttggctgtccacttttcttgcccaatttctcatcgttcattttggccataaatggtcagttgttactttttttaattagttcgattaattgttttaatgaccaatcaaatatttccaggttttcaaccgctcgtctga

SEQ ID NO: 55858 - DNA, 204 bp, Heterodera glycines
aaatcgattttttcaagtgtccgtgtggggtactcaaacaattatggggagcaaaaatccaacgcagaattaaagtacaggctatagggaagctattccggaaggattcggtctccccataaatctgggcgcatcggttcggggggactgccccgaaaacaaaaaaatcgattttttcaagtgtccgtttggggtactcaaaca

SEQ ID NO: 55859 - DNA, 1020 bp, Heterodera glycines
atgtcgctgctgcccatcagtcgctgctcctcccttttccatgccgcccgttctttggcgtgccgtcgtcctcctcccctggcgtcgtgtcattgtttgctctcagtgccatccacggcaccgttttcgtcccatttgtcgtcgtcgtcgccagtcgtcctccacagcctcacaactccgggtttgtcaaaaataaacatttgcccgcattcatttattttcatggctttgcatttttttagagtgtcaaccttctaaaaacccaaaaaaaaaatttatattctgtttttttttattaacttttaattttccctcaaaaagtggagcgagcaaagcctcaaaattgcagtgctaaagcgttaaaaattggggtgcgctttactaattcatttaacaattcggatgcctttttagaataaaatttagaaaaatagttagtgaggcgtcatcggagcgatttaccatttttattccaattaaagcgatttttcatgccccctctctttaagtgacctccactcactggtgccatcgtcctgcatttgcctctcaatcgacgccatccgcaccggtgccaaattcgacaaacaatactccggctgctgctggcggtggtggcattgggttgtatcagcgctacgagcaatggttgcagaactatccggccctgtacaaattgcatcgactcactgttgacggttcgaattcaaaaaataccactgaataatgaatgaatgagtcgacgattatttcgcttttttcgccctaattcagaaaaatttaaaaacagaaattttttaaagaaaaatcatagaatttttataagaaaaaaacgatttaaaaattcttttatttttaatttttctgatttatttaaattcaaatatttcttttgtgtaggctccaaatggtgttactccgatctcaaaacgttcttttggttggcctacggactgcgcaaagggcgcatcacactgaacgatctcaacgcgcgcgaactgttcatctacatccaggctg

SEQ ID NO: 55860 - DNA, 376 bp, Heterodera glycines
atggacgacctgcggcgcaacgagcgcaaactgttcccccgcattgtggacgcgttgcggcagcacaacccatcgtcagcggtgagtgatgacacaaccctggcaggagacagaaagagcggttgctaatttgtgtgcattatgttggctccgccgaaacgtcgccgcaaaaaaatataaaaatttttcaaaaaaaattctgaaaattaattgttttaaattttttggaaacctaagtaactatacaaaatttgcttattttccagaaaattcaatttttttcgtattagactatgtaactaaaaattatttatatgtcaattgacgaaaatcgaaattaattttaaatttttcaaaattttttctaactaaaaaa

SEQ ID NO: 55861 - DNA, 356 bp, Heterodera glycines
atgaaagcaaatggacaaaatgggaagaagaagcgattcgctgtgaaattgatgagctatggaacaaaatttacattcaaattcatgatgagagttttgttacggggactggtaagtgaaattttttttcaaaaattaaattttattgcgtttcgttttttaggcttctcaacgcattggacggcccaaattagtgcgcagatgaatgtatgaattgttcagaatttgaccgatcgatttaattgaattattatggaattattgacgtgctcataataattgttcttttttaatggggatgatcaatttggatttgtgttatgtcattatggtattttgtggttttctgaaataaa

SEQ ID NO: 55862 - DNA, 939 bp, Heterodera glycines
tggcttttcgccgtctttcgtctcctccaattgcctttctgctcgccttttaactgtcccccaccacaaaagtggggcccgggcccccctcagaattgtccgtcgcccaccgacccaaacaaccgaccgccgttagttttgctttgccctttgctttggctctgatcgttcgtttttgccaaggtccgctctcgagcgttggttcacaaaagcgatgttcgaagtgagtggcacaaataaacgccgaaatttaatcgccccgaaggatttgtttccgtttgccaacctcggctggggccccgaccgatgctttccctattcatacgaaagttttgcaatcgctgcgcgttatttcccccgttttgggaccgaaagtcccaaagagaacggactgagtcggacggagaacgaacggagggatttggcggcattctttgcccacgccattcaggagacgggacagaatgacatttcgctttaccaaaggtcacccatccgacattcttttctcggcaaaagtttcccccttctccttcacattttgaaaatgctttaaatgggaattggtcattttgcttttggcactcattttcagtattcccaaccaatccgcggctgatgcctgcttctaccgtggcggactgttcaattggtttgagggtgggcccgtgtcagcatttttggactccaatttgccgggctttcgtcccaccgatggagcgaaatgtttgagcaacggaaggttcgatgggatttgaaaatgggcgtttcgatgattgattgaataatagcttgcttgataatttgctcgtttgggtgattggttgttcaggtactgctcgccctcccttttctttccttgtgccaatggcacttccgacgatgggcgtttcttcaaaagctgctactttggcagagggacaattcaaatttcgtaca

SEQ ID NO: 55863 - DNA, 1349 bp, Heterodera glycines
  unsure (1)..(1349): unsure at all n locations
gaattttgaggagtgcgaatggcaattccgttatcatcgatggaactgctcancaccacaagagctgaaggacacatttgttccaatacataagaaaggtgaatttgttaaaatttaataattaaaataaaatgtccgcgttcataatttcaataaatttaattttaatttcaaaattttataaaattaatgaacttattatgcccacttaaaggaactcgtgaagcggctttcacatatgcaattctttctgccggtgtcacacatgaaattggacgccgttgtcgtcttggctttctgcgaagttgtggctgttcagaaagtgataatgcgccaaatcgcgtgggcttttaacaaaaattgcacctaatcaaaatcatctgcatttgatagttattattctggttttaaatttatattttggcagatttaatcgaaaaactggcaaatatctaataaactcttgtgggacagaaaatttgggtactcttgaaattgggtgtgtccaaaagtgtttgactataaacgcaatcgaaaaatttcaaagaatttgcaaaaaaaaaaaatttttttttgaattttaattttatccaattattttaattaatttaatatatttctctgtgagtgtaattttaatgagcaaataatgaattttatcattgggaaaatgtgatttggcactcatgatgatgatgaagatggatattctatgtttttccacattcagcaacaaagccgtggtgttaatgaggattggacttggagtggttgtggcgataacatcgattatggctaccgattctcgcggtgagcagctgattgtgagacaattactgagtcgggattttcgcccaaactcagaaagctttcaatgaaattctcgaaaatatcttccttattatcattaggacttgtcaaatattagcaaaaaccggggattttagagaaaagtataactgaaaattctgcttttgaaaatcccaaaaatcccgggttggcgctcacaatcagcaattgtcaaaactgggattttttgccgtgctgtttgttgcccgccgccgttttccttcaaaataatttgtacggctgggagtggaaaaaatttcgccctgtttttgatatttttattttttcctgaattttttgagttttttttcgaaattcctactcaataccgaaatctcgattccgggctcaagagacaatacaatgacaaattaaatttaatgaagagcaatttaagcgatttcattgatgtacgtgaaaaggaggagagcaataagcgatccgcggaatggcatggacgatcgttgatgaaccgatggaacaacgaagttggcaggaag

SEQ ID NO: 55864 - DNA, 379 bp, Heterodera glycines
atggatgcaaattcatcgacagacgttgatttgcgtaaacaacattctaatggtaacggaaatgtacgtcaacaagctgaaaataatggaactgaacagcagcagaataacggcagaaatttcttacaagcgcctacatcatttcatgacgttgttttgggttattgaaccttttcaattcattttatgtttccattcctttccaggtgttcttacacaactctcccgcaaatacctcttcatcgatgcgcaaaagaaggcattgttttatttggctatggtcatcgttttatctttgctttcgcatgccatcaatttgcctagcggttatttgacgcaggttttggattttatatttaaaatatttgtaagactgtag

SEQ ID NO: 55865 - DNA, 434 bp, Heterodera glycines
atgtcactttccccaacattggacagcaacaataaaaatgaggcaaaaaccgaggaagaagaagcagcagcaaaagttgaagtcgtcatccatcaaaggcatgcatttcagggtaaattagagttaagatggtagcccctattttttggcggaaattttcaaaatttaaaaagtcgttctaaaaagtttccaggggttttcggggtgtcgttgatcaagattctggcatccatttcgtccaatttcgaatcccgaacccgatttcggacaaaaagcgaaacttcatattttttttcgaatgaaaagggtttaatgatcttttattgcaatattcgtggttttcaaaatgtttccatgtgttttaaatcatttttaggcgaaaaaacgaaatttgaagtttcgactttttatttatttatttattcgtgaataaa

SEQ ID NO: 55866 - DNA, 799 bp, Heterodera glycines
  unsure (1)..(799): unsure at all n locations
gtccaggcctggatccagatctcaagaagcctggatttttcctggacctggattttcctggattttgtccaggaaatcaaggtccaggtccaacatggaatccaggtccaggtccaggcttttttcaaaatgtcgatctctattatttttaaaattgtttaaatattaaggttcaatgaattggactataagccttggtaccacgctgaacgatggtcggaaggcaaaccgtacattttgataagaaaaagcaaaaaattttccggttattttcttcataaatatgaatattaaatagtgttgctgagttatttcgtaattataaaaaagtttcaaaaattatttaagttacttcaaaatgattatggatttattttctatcattgaattgttaaatttggttccaattatgacaattttaatttttatgaaacgatataactcatttaataagcaatgaacaatagtttaataatccatttttatcgttcttttattttaggatattcggacaataatattgaaaatgtgaacaggcgttcgctgatttatttgtcggaaaagtcatttagcacggagcataatgtcaacacatcacgcggattaatcatggaacanttagtcaaatttatgggtaaaaattatctaaataagaataaaaaaattnnaattattaatttntaggctttcgtgaagagtttctccgtgccgacgcgtcgagttatattcagccaattacagccaataaacgaccaccgggtccttcttcgccaccagttttttccaatgaacaattaat

SEQ ID NO: 55867 - DNA, 904 bp, Heterodera glycines
atggcgaaaatggagggagaagaaagtgaggaggacatgaggaggaagttgcgaatggggaggacttgccaatctgacaaatttttttatcacttaattcgatgatcagggacattcatttttttctgcccaaattctcattttctttgcattaattatgctttaattttaaatgctttcaatcatttaaattgttaaattctatttctcatttcctctcctattatctccgacacatatctcttgcaaattgacggcggtctcatccgccatatttaagccattcattctttcccatcacttctcacatcattcacttaaaaaattgtttttaatcgacaattccgcttttttgcaattctcatcaatttttaaattaaatttcttcattggaattttattgaaatttgtgttttgcaaccagcaaaccggaggttttctgagcaagtttaccgccacacaaaactaaactgcctaatttcaaattgtggcagaaaaccggttccagcctaaattatttttaattaattttgtgtcatcaaaatttcataattgttttccccttttttacaggtgaaaagtatctgacattggacaattggaaattggacgagctgaacaaattggacattggacgcactgaacatttggacatttgacattgtgtgcaccgtctcggagcgtgtctcatcgcgcaggccagtctcaattctcaagacgcgccccggacagttacacatattccttaatttttccacaatttcatattcaaaaggtttagaaaaaataattaatttgttaattttacatctattactctcctgttatatatatatttaaaagtttttatatttatgaaaaattgaatatttgttttttattgcttttggtattttaatttaaa

SEQ ID NO: 55868 - DNA, 1087 bp, Heterodera glycines; identical to SEQ ID NO: 4827

SEQ ID NO: 55869 - DNA, 702 bp, Heterodera glycines
atgtacacgtaccaaacttcggaaattgaacgaaagctgaagcactgcggtgttcgtgcactcacagttgatgcctatcaggcacaggagtgcgatgtcatcataatagtgacaacaagatcaaaatactccgaggtgggatccggaaagacggacaacatgcacttctttgaagacgatcaacgggctactgttgctctttcaagagctcgccacgctgtcttcatcattggagacttggtctcaataagtgcaggacaagtgtggaaacgtttcatcgaaatggcgataacaagaacaagcgtagttcgagccgaatacgttttggcacttttaggacgaacactcatgaggtctccgacatgcctatttgattcggccaaaagagaatctgtggaggatgaaagctttcttgaaagctgggcgctgaagcatggtttgcgcctggaccgaacgaatgcctttgcacaacaatcgcagcagccgagagctccctcattccaattccaaaatcgccaatttcctgcactacagacgacagggtcttcagaccgtgccggtccatctggcaacggtggtgaacaaagaggtgcgcctactttggcgccacagtatggaagaggtcaaggaagacgtggcccggacaatcagtggatgcactacggtggaaacccgaaacgacagaagggtggcagacgctga

SEQ ID NO: 55870 - DNA, 340 bp, Heterodera glycines
atggcatatgcaacagaggtgaataggaagaaatggcacgataacattggaaatgagatggataggattggcttgggatgggatgaacagatggataagtttacgacgggattgggtcgggagaaagtagggcaatgtacattatgcacaaaatatgaaattttgaatgctgcggatacagcaattttcaaaaaatttgctagcaaaaaaattcaattgcctccatagttttctttaccaaatttggtttttcatctttgagtgttttttgccgagtagttatcatttcaacaatttttcgatcactcatttttgtttttcttttttatttgccaataaa

SEQ ID NO: 55871 - DNA, 268 bp, Heterodera glycines
atgctgaagcccccgtcccaagtgggcactgacaagcggcacaacgaacgtgtcgaacggcttccgttgcgcgccttcaaaaagatcggtcgcgttggcactttgcctgccctcgcgcacacttccgccgcttcggcggccattcagtcggtgatgagcagcggagaggaagcgacgacgccggcactgaccagcggagggggcgctagcagtacacggacggcgggcggaggcagcgcattccaacgatggggaggcaatcggagag

SEQ ID NO: 55872 - DNA, 999 bp, Heterodera glycines
atgggctccctcaaggtggaccgacttggtgttctgatcgacttgaatggtgatttgttgtccgcctggagcaacatgaagcgcaaagggactgacgccatttcttcactgttattggcccgagtgagggcccgtttttcatcattgcctgaccaacagcagccgctttggatggtggccgaaatgctcgaaattgccaaaatgcgagtcgacacggaaagcaaacgacaaacgctggaagagccaaaagtaacggaaggaaattgcgagacgaaaaacagcccacgcaaaaaggaggacggacggatcagcagcgagttccaattgcacgaacatttcagcaaaatcactgtgcaggtggcggcgatttgcttaaaaattacgacttttttttatttgtgccagtattaattaaatttgatttaatttaaaatgactaacggttaaatttttaaaaatgacaatgaaatcggacattctatagtatgttctaaattataagaaccgtctttttattctgcttttataacttaccgtgaaccgattaagctaaaatttattgtactataagtagtaattccgcattattaagttaaagaattccttccacattttttttctgaataaaattattttctattaggacggtgcttttggtgcgccaattagctccacgagacaccaaaaacttttgcaaaaatgcaacaacatcgcctcacactcacaagcgcccacacccacaccaaatggcatgacctccttttcttcaaaagaagtgccgtcgccagcggtggtgccaatagcaaatgcaatggtaaaactcggaaaagccattgaaacggtggagagcagcaaaggcattcaaccgacgcagcagcaaaagcaatcgttcgaagggattgtgatgtttacacacacaaaaggggatgagatgtattggttgttctacgacgaacagacgaggcgcttcacgcgaatggcatctgcaaaaggcagcaa

SEQ ID NO: 55873 - DNA, 528 bp, Heterodera glycines
gctgtcgtccgtccttcacgtccttcgggcccgaccaaaccactcaaatcaaccgcagtgagcacagcgtggcgctttttccaataatttttgcatttgtttgattgcccccatcataagatctctccggtgggccttccgcatccgaaaaagggcgttagcgcgggaatagtgagttttgttttgcgcttttcctttttaaattcctattattaatacgtttcaggatgttccaacttctctgtattcagcggacccaattgattgtgcaaaaacaaccaaagggagaaaagtgcgttgtttcttgtttttcgtcttgtcttcatatttgcttccgcttccttaattaaggctgtttcgcgtcctccgccgccgtcatcgggcaaaaaagcggatgcaaaaaccaaagtgagattcactgacgaagattctttttgccgttgttgttttcgaatccacgaactttttttctttaaggctgtctctcgtcctccaccaccaccggccaagaaaacagataaaggcaaa

SEQ ID NO: 55874 - DNA, 271 bp, Heterodera glycines
atgcgcacccgtccgatctggcaagttaagcaacgattgctgactagccaaaaggttcggtgccgtgatgaaacgaaccagcactgcttaccccgcggcacccggcacggtcccccgaaggaatggatttaattaaattctctccttcgggttgttttttgcataattaattcataaatatttttttcagaaagggttctgaaacgcaccaaattttatttacatgttagtttaggcactctgatgctttttctatcaaaaagggagatga

SEQ ID NO: 55875 - DNA, 735 bp, Heterodera glycines
atgagtttcccagcagagcagaactgtactctcccgactgagacgcagccaatcatgaacaaatcaattctctacatacccatacgaattccgcgttcatttccagtattcaaatgctggaatgttacgacagtggcatgtaccgaatcattcttacgcgtggttactcttgatcatccgccgaagaaattcgaatcggaaacatcactggacgattgtcaaaattctttaaattatcgtccaatgaacagaataagcgagaagcgctgggaaagttttaaatcaattaggaaggagtacggctggtacggagtgaactgttataacaatgtccaaacagttatcgaagaagggaacggaggaattttagacggggaaatgctcgtcacatcatggggggattccctaaaaatcgaacaattcacgatcggaaaggatgattgggttcgcctgccaggagcagttgaacttttgatgtggcgcattccctcgggagaatattgggacacgcatttctctatgggaccagtaacaactgagacatggcccggacaggccatagtagtccacgaacttcagtacacatttccgataagtaaagatcaagacagaaaaaaccaagtgattggagtaccaagagaagcaataaaatcgcaaaataatgtcttaaatcactacgttggagaggtcgaaagaggacaaatctcaagtgaaacaacgcaattccaccaataa

SEQ ID NO: 55876 - DNA, 1376 bp, Heterodera glycines
tgggcccgccaaattcgccataaaaatgtttcatccatgcgcgaattttttgatcgttactttggttcagcgagggcggtaacttccgtggaaaactccctttccctaaagactatccgctgaggccgccgacgatgcgatttgcgtcgaggatagtgcacccgaacagtgagcggactaccgaatgaatggattgacggcattggtgacattaaaacttgtcctcaacatttagttgaccgagacgggaatgtgtgcatttcgattcttcatggtattttcatctttttgtggggcggtggcggtggacaaatgttccattaaatgccgcagtttggttgagagtgccaaatataatcgatcaaatagcgtatttgaaaaggcaatcaacataaacattgacttgtaacttctttattgccattttcaagaaaaatacactaatttttcaaatcattcctttaccattgtttttgggttatgagtttggactttcgattctttcgtgatcatatttccaaccatttcccatgcctctactaatccctccaattgtcccattttttttacaattctggcccggttcggttgtcaagcattttctctttagagcctggcgatgaccgatttggctacgaaaaggcgtccgagcgttggctgcccgtccacacgggtcaatcgatacgaaaacattgcgaattgccaaaaatcgtttcttttcagttgagaccattctgatttcggtcatttcgatgctttccgacccgaactttgacagtccggcaaatgttgacgcagcggtaagcgaaggcggggagagacgatagatattttcaaattatgcaggaaaatagagaacatttagggcaatagaatgatttcaaatccattcaattcgggcacacttgaaaggagttatacccaaaaacggggccgacgcccaattgtcctttttcgaccccccaacctccgaatttttttaaaattcttattttactatgtttttttggcaaaattccctgagagttttttttttaatttcgactagaggaaacgatgcggggacggcagggggggaactgtttctctttttagggacggaacaaaaagcgcgagtctcttaatgaaaatatcgaattacagatttttagcgcattttaggattgatgcgataaataattttaaactgatattgacgtacgctaaaaacaaatacttcagaaaacgcaccgcgagaatccgacggagtacaggcgtcaggtgtttattcatttcatttttcctaaatactcgtacaaaatgtttcatgaaaattgttcctttttgttgttcaggtcgcgcggtgtgtgcgggaaacggaagagcaataggcaaat

SEQ ID NO: 55877 - DNA, 420 bp, Heterodera glycines
atggtctttaaatctttaaaatttagaagtcgtcggcattttacaagtgatgtcctgaggaatttgtatgtgaatgtgaaagctcgcgtaaaagaggacattcggaaaacagacttcatttctcttacaatcgatggctggagttctcacgaaggaaaacattcgttattaagtgtcacagttcattacattggcagtaatatggaaccgacttttcgcgtgatggaagcagttccaattaaggttcggttaaggggtttttacttaacaattttgcagacatttagggcagtcatactggcgaaaaaatgtgtggtttgctgagccaagttcttaatgattatggtgtgaacgctgaaaaagtgcaccttattgttcgtgacaacgaaagtgcaatgcaaaaagcgactcgtattgctg

SEQ ID NO: 55878 - DNA, 414 bp, Heterodera glycines
atgccaccacaaagcaaatatattaaatattttaaaatttctcatggaacagcgaaatgtttgagctgtagttattcttacggctcaaagtctacaacttttccgaagacgtgtctacgagaacatttgcagcgacatcatccggacaaatatgaagaattgttgaaggaagaggaaaaagcaaaagtgaaaccaaatggccaacaatcaattcaaagtcttttgttggcaagtacaagtactgctcgcttgtgcttgagcccaacacctgccaaaatgccaagaaatgagtcgccgttctcttcttcacagccaaaaatcgtcaaaagcttttgtaattatttggatatttcaaaatttcaaagtcgattaagcacaatggagttcggatggagaaatgacaaaaagggttga

SEQ ID NO: 55879 - DNA, 500 bp, Heterodera glycines
atgatttatttaaaaataaattttttatttacttttttatttgtcaatctttgttttgtcattgccatggataacgacgaactcacaaaattagtgaaatcttcgaacaaagcgacaaagaataaacaaaaagtggtaaaaaaaattaacaaaaatttttgaaaatttaattttttaaattaaattttattaattagacaacagctagtcaatcaaatgacagtgattcttccaaaagatcaacgcagaacattgatcaactgacgacggctatttgtcttgaattttttttattaaaatattaattataaaaacaaaccgaaaaatgataaatttaattaaaaaataaataaatttaggaaaaagagaataattaaaataaaattattctcttaaagtaatttccagaaccatgtgatcctttaagagtaccatgaaaaaaaaatttttttttttaagattgttaaaataataattttataaaaatataatttaataaa

SEQ ID NO: 55880 - DNA, 1556 bp, Heterodera glycines
atgaaaggatttatcagccatcatcctggtgtgccaccacgtgaacttttggcgatcaactgctcggatgaaaagggggaaaatgtgtgctacggggccaaatgcgttgaaggttaaaaattgttttaataaaaattgatattaaatataaaatttaatatgaaaatattttaataatgaattatttgatttaattgtttgaatatttagtaaaaatttatattagtattaaattcgatgctgaaaataatttaaaaattgatgtcgatattaaatgatatggagaaattttattatttattatatagtgatattttaattaaaaaatatattcattattattttaaagacaagaatggacaggagaacaatgccaccatttacgtatacgattgtgaggctgatcgtaatccgtgccatctgcccaacggaattgaaccgtaaattatcgtcaaaaatttttgaatttgaatttaaaaattttaatgaaatttaaaaggtgggaaatttttaactccattcaataaaaaaaattttttaatttttttttcaaatattcatttttaacgaataaataaaaaataatttacatacgcattaatatttttatacttttaaaatcccattaattattttaggtggattagcagcgaaacggggctgaaatggcactgtcagtgcatgatttgcaagggcacggacaaatgcaatgaaaatttcttcccaaatgaaacaatcaaagatttgctgccgccatgccatggacaggaaaacagaaccaaccgaacgaatttttcttcatggctgagtgatgaaccggcaaaagatgagaatggcattgtgagttggcaactgttgcgcaaatgaaaagggtattattggcactatgtattgataggtgggacaaaacggcacaaccaatgacggtacaaccgatgaaggcacaaccgatgacggcacaaatgtgacggatgggacagaaactagcacaacttctacaccggaaagcatcaccattccgactgttgagcaaaaacctagccaccctcttagcacggtaggcaataaaaatttggcgttttttttcgtcagtaattcaaaaacccaccatttaagactgaacaaagcaacaacacgtcccagaagtctgagcaaaaacggaaaagtaaatttgtttgaacaaaaacacggaatatttgggaatgtccaagaacgcgctgcggatgagccgaacggaactggcactgatcagggaaaggagcaacagcatggcgctgaacatggacatgaatcattggaaagcagcattgatcagggagctgcgcagaaggaaaacggaatcgatcaggcaaaagaatccttaattaaaaataaatgatcagagtgtacagcaggcaactggagctaagccggatgccattgaccagggcaatgatcaaggctctgaacagaagctgagaggcgctgaacatggacctgaaaagatgcaaaacaacgttgatcagggagctgtgcccaagcaaaacggcactgatcaggcaaaagaatcataataa

SEQ ID NO: 55881 - DNA, 899 bp, Heterodera glycines
atgcgttattcaacatctttttttgcttttatttttattatttttatccaacatattcaatgttagtggagaaagttaaaaaattaaatgcttattttaaaattattttaaatgttcttactaatggtaattaagaaaaccaattaaaaaaattatctcatttgtgtgctaactttgttattaaggttttcctccgacaaatgaccgaagtccctcagcttctccttggcgcttaataaaatttctttcgcgagcattcagtcacgaaaaacatggaagtaagtgttaaaaaataattcattttaagccaataaataacctggatttagtcaattacatattttttaggatttaaaatatttaagttgacttaaaaaatatatttagatatttatttaggttcatcatcaacaccgacttcaaatgctgcaaatccagctcgggcttctagtgctccagttcaagccccaactccaagtcctgcagttgcagctcaagcttcaactgctgcagttccagcttcaagtgctgctgttccagcttcaactgctgcagttccagcttcaagtgctgctgttccagcttcaactgctgcagttccagcttcaagtgctgctgttccagcttctacttcaagtggtacaacagttcagcaaaattctgcgtcaatcaaaggaaaagaaattgatgaagcacagagttcgccggaatgctcaatttgtcttgagaaacttaatgaaggcaatcagtctgaagcattgccttgtgccgtgagtatctttttaatagacaatttagtatcttgaataattttttttaaattttagcacgtgtttcatcagcactgtttgtctaaatggtatttagcgtttagctttatgagtttgtcaatggcatga

SEQ ID NO: 55882 - DNA, 353 bp, Heterodera glycines
atggcccaaaaaaaaattttggtactcgttgaagcttgtcagtttgagaatgaatatttaattgaatatttgaccaaaaatcaaattttcataattgttgatgcatcatttccaaaacaacagtccagcgatgatgaacaaaatgttagcaatgaaaagcagcatgatgaaggtgaaaaagtagcaaaaggtaaagccgtaaatttttaatatttattaattaaattttatttgattacagtaatcgctaaaagatagccgccgagggctttatttttcatcccctgaaacggggggattttatttcagggggagctctaatttatcaagggggggggggggatcctaataaa

SEQ ID NO: 55883 - DNA, 80 bp, Heterodera glycines; identical to SEQ ID NO: 51817

SEQ ID NO: 55884 - DNA, 993 bp, Heterodera glycines
atgacacccatgcctgtcactttctgcttcataaatcagcaaaatatgaatgtgtgcaccactggcttcccaatgggttgttatgtgacaaaggaggggaagcccaaagatgcctgcgttttggatgtaactatttcttcgagtattcttttggttctattgactacatatttttagggacgttaccgacagcaggacagtttttacctgttcaaccacgtagatattaagattgagtacaggttgtgtctaatacaattatactttaaataaaatttcctcgaacagagacatgtctgatgatccaaatttcctcgatgagaaaattggtggccgtataattcggatcaaagtgcagccaagaaggtggaaatttttaaattgcgagggattatcggctctattgcagtttacacgatcataaaataatttgacaactttaagctaacatttagatgttttttctaggaaaaatattaaatttatttttcaataaaaacctctaacaataagaatgatatgaagctagaaaattaacggttttttatccgaggggcacagatgcgagggagggggagaattactcccgaattttggctagattaagtacctgatttttggatatatttcattcttaatttttattttagcatcaaacatgaaagcaaaggtggaatgaattgcggaatggaagccgctccccagcccattggagcgggagaaaaggagttcaaagtgatttactcgtattcaattgtttgggaaccaactgatgtgaaatggtcttcccgttgggactatattctcgactcaatgcctcatacaaacattcaatggttttccattatgaactcactcgtcatcgtcattttcctttccgggatggtgattttttcattttttttttctctatcatttccattaaaggttggaatgattctcctcagaactctccatcgtgatattgctcgctacaaccgtcttgacgaagag

SEQ ID NO: 55885 - DNA, 797 bp, Heterodera glycines
atgactcatattcacaaaaaggaaaggtgagtttctaattcactttttaatgtgattttttaattcactttttaattatgaattttaaattttttatttcatttatcgtgtaaagcaaaagtgtactgtaatgtacaataagtaaagcaaaggtgtactgtgattgacgtaaaatgcgatgaaaattgtattaaaaatgaaagtgtaaataaaattataaaataatccattttcattttgttcttctaatttgcaattttctcttatcaattctctttttttattctttgagctctatctatcgccttactaatttgtgcttttgctttaattatttatttatagaattttaaatagtaatttaataaaaaaaaagtcaaaagtttttacccctgggcctttattagaatatgctcaagcatgtgaaaatctcacaaaaaaattaattaatatgaatgatgtgtttggctccacattactttagttgatgtatcgcctcgattcaattctttttggcataaattacacagattttgtctaaagaatgaccaaatttaaggattataaattatgccagaatagtcaatttttatgggtgtttttgtcaattaatccagggtttctatctcaaaattttcaaaataacaaaggccaaaaaataagactatggttaaaaataagaacattttgcaaaattgcttcaaatatttttacattttattcaaccaaaaatgtattctattattatatatatcataaatttcagagcattcgggatcactaaatcagatttttaa

SEQ ID NO: 55886 - DNA, 351 bp, Heterodera glycines
atgtcagttccatcaaatcccctgccggatcagtccgcctccattggcaatctgagcattgggccgggtgcaaaatacgcagaaattgtcgatggcagcggcggttccgcactgaatctgttgctgttgatcacactggccaagtcgatcagttccgcgggcaaagtgtcaaaactgagtgacaccgtactccgcatggactacgagcaccgtaaccgacccgtgcagctgacggtcaattgggacgcggtgacgcacgacaaattggacttttaccacttccattggacaaagccggaggacgaagtgttggatcatttggaggtcgaagcattcattttcattttgtaa

SEQ ID NO: 55887 - DNA, 640 bp, Heterodera glycines
atgtcttttaaacgcgtgaactccttccaacccgccgtcccattggccaaaaaatgggatttccgatcaatcgggtaagtgatttttaataaattaaataaaaaaaaataatttcttaaacaattataaatacaattataagataataccctttaagaattatttcaaaaaaattttttttgttcagaaataattttgctgaagaaatggaaaattataaattgatggattaccaatcgacaacttgcgaaaaatttggatttacgaaaaatattacggaatttcgtgtcaacccggatgtggagcgccccgatgaagcgatgaaggacgcaatcgacaacatgataaaggtggctttaaaaactacggaagaaaaaatgaagcgaaaagtgcggatgtttggagtggcaattacgggtgctgggcttgcttcccctgtttgggtgccgtatcgggcgtacccccagaataatgcggatgttatcatgcaggagattaataagctggggcagagcggggacggggatgaaaatgcttttccgattactatgaaaattacatgcgttacaatgcccagtggagaggggccgaggaatgtccacaaatttgactttggattcaaggaacaccagcggatagg

SEQ ID NO: 55888 - DNA, 825 bp, Heterodera glycines
cacatttatggcccaatttttcagctccgttctgtgcgtcacgccttttttggtgttggccatcggtgttgacgatgcctatctgatgatggcatgtttttcgtttttggcacaaatcgctttaaaattcgttgattaatcgattgatcgatcactttttgaagcatgcttggcaacggatcactgatcagatgcgacgaaagcgcaaactgatgctatcggcaacatcagcagatgcagcaagcggcggatcaacagccgggggagaggagcaaacattgctcagccaacgattggcattggtaatgattaatcaaaagtgcggcagggtattcgagatcgaaattctcgagactcatggaccgacatttgatcccaggacagcgacaagagattgagcgcctaaaataataagaaactctcgagagtcgaaaccaatatttggtcacaggatggttccaaaactggggattgagtcccgaaaaaatcagaaattctcggaaccggtatttggtcttatgacccgactcgagactcttggatagaaagtctatcctatcatttgagagagcggattcaattttaaataaatttatatttaaatttatttcgtttttaatttaatttaacaaaaataaaaaaaataaatttaattattgtgcccaaggtgctggtcgagactgggccggccgtgctgatctcggcactgacaaacatttgcgcggatgcggtcggctcgttcaccggatcacccgaaatcacgctgctctgtgttggcaacatggccgccattgctgtggacttcatctaccagatcacttttta

SEQ ID NO: 55889 - DNA, 783 bp, Heterodera glycines
atgcacgcgttttgcgctcgagctatttatcatcgggcttgtcaatccaaagcgaaacaacaaagatgctgttttgaacgaataaagggcataggttattttgaagaagtgtcaaagaacatgcagcaataagcctgcaaaatctaataagtggaaaatacatgagtatagaatttattttcagaaagtgtcaacagacttttggaaaaatatatttgcaatttatcaacaattttgagaagtgagttagaaatgataaacttcacgattcaaaccaattttcgttgctctaattaaccgcgataaaaacattcgaatcaattaaatagcttctgagataataaggtttatcataaaatttcatttaaaaataaaccctcaattattggtatgaacgatactttccaaacatgcacgcgttttgcgctcgagctatttatcatcgggcttgtcaatccaaagcgaaacaacaaagatgctgttttgaacgaataaagggcataggttattttgaagaagtgtcaaagaacatgcagcaataagcctgcaaaatctaataagtggaaaatacatgagtatagaatttattttcagaaagtgtccacagacttttggaaaaatatatttgcaatttatccacaattttgagaagtgaggttagaaatgataaacttcacgattccaaccaatttttcgtgctctaattaaccgcgataaaaacattcgaatcaattaaatagcttctgagataataagggttattcataaaatttcattttaaaa

SEQ ID NO: 55890 - DNA, 697 bp, Heterodera glycines
agcaacgaatacataaatacatcagttcgatgtctacaaatgatgttacgaaaggaaaagtatcgacgaaaattcgttgagtatgacggcgttaaaagcattcttttggcattgaatggtcgtgccaattttcaacttcaataccaactcattttttgcctttggtcggttgggttttttcgcacttttaactcaaaaataatcctggaaaaagtttgttaatttaatttccccatttccttccgaaatttgttggagaaaattgacaacagagagatggtgcgcgaatcggcactgcaaatggtccaatgcaaaacgctgaaaacccttgaattgatggacgccaaaaagtttgacgacccggacttggtgagagactgcataacttttggcaattttggatgggaaattaaatcaaattcaggtggacgacattgaatgataaagtggattattactttttataaagcttataaataacaaacaaattctcagaatactcatcaaaattctcgagaccagcagcgacccattgccgctcagtgttgctgctcatgacattggcgaatacgtccggcattaccatcgcggaaaaacgtttatcctaccgcaaaatttcagaataacaaaacaatttcattttatttataattgtcgaacaatacccaagcaaacaaacaatgatgaagatgttgag

SEQ ID NO: 55891 - DNA, 820 bp, Heterodera glycines
atggaattaggcttacaaagccttgaaaaaagtatatatgaaaaaagaaaaacatttgaaagtgatccgaacttatttgaggatttgaagaaaattgttgagccaattttggaactgcacaaaggcaatttttataattttttaaattcaattagtaaattttttttaatttactggtaataaatacctatttcatgtttttagtcgcaatccatggcgacataaaaccggataactttatgtatgtcaaaaaagtgggcgaaaacgaaactctgaaactgatcgattatgacggtgccactttcataccagttgggctatttgaaaacccgagaagactggcaaataaagttgtgccacgtgagttttatgtggccaccccaacttatgcagcaatcgaatattatgaggagaatatgatggtaaaaatgaattataaacaattaaaatgccttttcaaataaacattgattaaaccattaaagctcacaactaaaatggacatgtgggcacttggaataataatttacgaactcatattagtacaagcgaccttcaatgagcgaattagcatggtaggttttaaaatgctaattagtaaacaattaaaattaaaattaatgggatcaagggaaaaatcacgcaaatactgctgggaattggcaacatttacttgggcatgcaaagaaacagcagaggaataaaactaacggaagaaagtttatttgaaaatgactcgtgggcgaaaaataattgcgcaagtttattgaccattttgaatgtgtggcaaaagtacccgaaaactgcccttataataacg

SEQ ID NO: 55892 - DNA, 88 bp, Heterodera glycines
atgctgatcaaaaaaggtagcaacaccaagttgatcagatcactccttcatggtgatctgatcagcccattttggctgggaacgaggg

SEQ ID NO: 55893 - DNA, 613 bp, Heterodera glycines
agaaatataaaacatatatacacaatatagtcatattgagattttataatcaatttaaattaaatttggtagaaaattttgagtgttcctaaacatatgaccatgactgtatcatctttttcaattctaaggtcgtttttgtcgcattttgtgctgattggtgtccttttagtagaaaattgaagccagtttttgaaggtgggatttgttgatttgataaatcaaattaattttaaaatttttagaagcagcaatcaaatggcacgataataacccaaacacgtaatgtctcgcttatcatttggattcgttttttagtatgataatttatattttagcagtgtcgtttgggctttcgttgattcagtgaaacaagcggatgttgcggataaatattttgtgaataaatacccaacaatgaaggcatgttaagcattaccagaattggtgcattagtccaatgtttaggtttttattaacggtgagttgatcaaaaatgaatacaggtattcaacatgaaattaatgattcaaaaaatacttaaattcgttaggagtacgagatcagtggaggcgttgacagattttgtcaagaaacagctcgaggtcagcat

SEQ ID NO: 55894 - DNA, 2251 bp, Heterodera glycines
atggatatgcattctggagaattgcacaaaaaattccatgaaactttggacgagaaaattgcagagctgcagaaaaaagcgttggagcagctcgatgcggaatttggagaagcaccggccggtagcaacagtggcgaagggcgggcgcctgcggcgatgccgaaagtggacacaacgccagtgccatccattttcaaggaactcaaaccatcggttggttgttcattaatccaatcattgtgattggaaaagaccaatttccttttgtttcaaggagaagcgttatactattctgcaaaagacggaattgtgacacttttggcactgtgataatggactaatcaattggacactaattgctcgctttcctccttttttcgcagcttgggtattcaactcgatttaattcgttcaaattttctagtttttattttttacttttttattgttaaaaagttcggttccggttcattgtcagtggcacttattatttatatttattgttcaatgtgattgtgaggcataatgttgttaaattaaaatgtgaaatgatgaagcaaaaaaaattatttatttgttttattttttcattattttttaacttgtggtcaaagttttagaaagtatgccctctcggcatgctcctaaagcgaaacaagttggccttgctgacaatgaggatcatcagccactgaatcggcagcaatcactgtcgccgaaggatgaacaattacaacaaactcaacagttaatggaccgaatttcggacaaggtaatgttaaggtgcgcaattcacaaattcaggttgtatttaatatgttttaagctcgagcgtgtccagccaaagcatcaaaaggtcgccgagtccattcgtgcaattcgttctcagggcgttcgtctgatgggccctggttccaaaatgagtcaaaacgtcaaggcaaaaatggtcgcattgtatcaaacagctcaaaaacagtgcgagtcggaacattcgtatttggaacaagttttggctgatatccaagtaagttgctcatggtatttttaataaattaacatggcgtgacatttgactaggttttcaaaaaatcaggggattgaatatatttgttatatagattctcttttattttccctggatatatgaaattttttaaatctcaaattttataagtaaaaaaaaatcaaaccctatctaaagccgtaatttaaaaaataaagaagtaagcagcaaatgggggaatttgttgaaaatgctttaatcaaatggctaacatttaaaaaatgcttttaaatttctttttggcagcgtgtgcggcagcttcatttgagacagcgaatggccgacaaactttcgcgtggttctctaatggttcttctggcccaacatgctgccggactccccctttacatcggatccatcgacggtcatccaccgccactcgtaatttattttcttattcatttactttcctgtttatcttctttgactcatttttaattgaaaaccaaagtttttggacctaattgtaacattggttttcccttttggcttttcaggttggcgccattccacaaaatccaggcgattgcatttcggaaggtgagtttgtcgctgcttttgttgaagaaatctggattctggctgaagttagggtacaatttcagttttcgcctttatctaaagcatatttaatttggtctcagaagcaaatctccgccagcaaatacgaggtgaaggacgtggatgatgatgacgatgatggtgagaagctgcaagttgtgcctccaactcgtctgattccgctgccccattttcgtgccgatccgaggcgccatgcccacgctcttttccccgtcggtgccattgtccttgccctttacccccagacgacctgtttctacaaaggcattgtggagagttctccgacgggtccaaacgatgattatatgtgagtccacaaattgtcattttgagaaatatcattttaacactttgttttaggattgcatttgaagataacacttttccgtccgggtattcgccaactttgccagttccgcaactttatgtgttaacgcattgtgaagtgacgccgcagcaccgaaagcgcaaaaaatccccattatccgatttgactgatgaagcatcgtcagactgatgacacccatattttgattcgttctcaacttcccacttttatcttccattgccaaattgtcccttttacaatatggaactataatttaa

SEQ ID NO: 55895 - DNA, 1759 bp, Heterodera glycines
ttcaaccggacaaggagattcatgatttggtatcaagcattttcggaccatggaattacgccaccagaaaatcgaagcgtcaactctattggatgccaaaactcaaacacacaaacaagtgggatggaaattaaaacattttattttatcttttctttggttttaaaggtatttggaccgaagggtcgtggaacacaaaaagttggagggcgtggaattggcacagatagcgctgaaaatgatgtgccgagattcgggaacacaaatatcaagtttcaaagtgagtcgtacaaatgtcagattaatactgactagtaatttactccaggcatatttcgctgaaaaagggcccgaacatcacaattggattgtgagcgggcaaagtccgctgcagaagaggataattgccaatttgccggaccaaagcacttgccacgtggatgggccgagccgagtttgggtccaggatcacatggcaagttgtggtgatatatagggctgggacttttaatgacgaaaaatctcgaaataattaactaaaatagtgaataaaaatgccaaaatagtggcaaaaagtccaaaatagtgacgaatagtgacataattttcagccaaaaattgagcaaaaataatttttattcactgattgcattccaaatgagtagggctgggatttttaagggcaaaaaaacaaaataggtacataaaaaaataatttttaaaattaaaattcttgccacgaaaatacctctttgagaaaatttttttcatttcttaggagtgctttttgaatttttttgtcgattcttaggtgtgtattttttggttttattgcatttttgttaaggaatttcccaaaaaatgtcgaaatagtgacaaaactccaaaatagtgatttttaactattttagtgacgaagtagccaaaatagtggtttctagtgacagatagtgacatcagaatcgaaaaatttaaatctaggtcagttttgtttttttcttatcgggtcgtcgagtccatttacataatttttttatctttttattatctgttgaaaacaccttacactttttaaaaaattattccggttgaaaatattatgagaatttaaatttttatcaaccctgaaactggttccggtcacggcaatttggaaattgggtttgaccagcaggccggacccggaaaccagctgcttttgaatatgtcaacccggcccggatgatttgaaaatctcggtttctgttttagcaactgttagtatgttggtcgcattaaacagcctcactctgcatttttgaattaagtctcatttttcattttctctcttattttatacatttttttcaatattttttccatcaataattttttctcattgtcagttgaattacgtcgttttgagcagtgctgcatcggttgagcgggacgaggaaataaccgaattggtcaaagcgaattattattatttattcgcggaattcggacgtttaacttttattttcttttttagtgtgtttcttctcacaaaatcttcaccgaggatgagcttcacaaaaggctgtgggaaggccattccgattaccgcacgaatttgcaccaacagtccgaccaaaccattctcgcgatggccatttttggggtgaattccaacgacttcgcttcttcttggctgaatcacttgcaagaggacaacccgcggctcggccaactcagtgttttgatcagactgaaggaattgagacggagtttggaaaaa

SEQ ID NO: 55896 - DNA, 405 bp, Heterodera glycines
atgtttattcgtgcacaaagtctgtcagaaagtgtttttcctttggttcgttccttcgcttcctcgtcaagcagtgctgatggttttaggaatacttataatccaagacagccgataatatggaaagaaaacttccgcaaaatgccaagaaatgagaagaccaaagaagcctttttgaagcaaatcggtcggttctttcactgaatcatgtctttataattttacaaaggaattttagaaatatttcaaaaatcgcgcggaaagagaggcgttggacacgtcgagtttattgaggcagcactgaaaaacatcaaagaatataatcttcacaaggaccttgacatttacaaggcgttgctcaatattttcccaaaaggcgatttgctaccgacgaatataattcag

SEQ ID NO: 55897 - DNA, 312 bp, Heterodera glycines
atgtacaagcaaagaaaggcaataaaaattgcaaacctaaatgctatgtacaaattttcttccaaatttatattatataaatttaatttaagttatattatatatctatatataggtattttatatggttaacaacgagaaaatctgtcacgagtttcgtgacaaatgcagggttgactcagtcgtacggtgttcggggagatgtgacatcgaattgggagaggtgaccaagcacaatgtcatggtgatttttcattttcaaatatgaatttttttttttgttaaacagtcttaatctatcaaatttagcaa

SEQ ID NO: 55898 - DNA, 832 bp, Heterodera glycines
aaaaaaaaaaattgatttttttcaagttttccgtttgggggttcctcaaccaattttaggggaaccaaaaatccaacgccagaattaaagttcaggcttttagggaagttattcccgaaggattcggtctccccataaatttggggcgcatcggttcgggggggactcccccgaaaacaaaaaaaatcgatttttttcaagtgtccgtttggggtactcaaacaattatggggagcaaaaatccaacgcagaattaaagtacaggctatagggaagctattcccgaaggattcggtctccccataaatctgggcgcatcggttcggggggactgccccgaaaacaaaaaaatcgattttttcaagtgtccgtttggggtactcaaacaattatggggagcaaaaatccaacgcagaattaaagtacaggctatagggaagctattccggaaggattcggtctccccataaatctgggcgcatcggttcagggggactgccccgaaaacccaaaaaaaaattttttggataaaaattatttaaatgaactgactagataatatttaaaataggttatttctcttcctttcagtatccctgcaaagtttggtgcgcttctgatcagtttctgaaaaaaaagttaagcctaaactttttggcctgtttaaaaaggaattaaaaatttttaaaaattttattcatctccctttttgatagaaaaagcatcagagtgcctaaactaacatgtaaataaaatttggtgcgtttcagaaccctttctgaaaaaatatttaagaattaattttgcaaaaaataaataaaaacgaaagact

SEQ ID NO: 55899 - DNA, 860 bp, Heterodera glycines
atgactcaaccctccaacattcaattattgggactccacccaccagcattccaatctctgggactcaacccacagcatttcaatcactctgcgactcaatccacagcatttcaatcgccgggactcatgcaaccagcattccaatcactgggactcaacccaccagcattccaatcactgggactcaacccaccaacattccaatcaacaggactcaaccctccagcattcaatcaacaggactcaacccaccatcgttccaatcaccgggactcaacccaccagcattccaatcactgggactcaatccatcatcgttccaatcgccgggactcaacccaccagcattccaatcactgggactcaacccatagcatttcaatcgccaggactcaagcaaccatcgttccaatcgccgggactcaacccaccagcattccaatcactgggactcaaccctccagcattccaatcgccgggactcaacccaccagcattcaaatcactgggactcaacccacagcatttcaatcaaaaggactcaatccaccgcattcaatcactgggactcaacccaccaacattccaatcactgggacccaatccaccaacattccaatcagtgggactcaacccaccaacattccaatcaacaggactcaaccctccagcattcaatcactgggactcaacccaccaacattccaatcaacaggactcaactctccagcatttcaatcagtgggactcaatccaccaacattccaatcaacaggactcaaccctccagcattcaatcactgggactcaacccaccaacattccaatcaacaggactcaaccctccagcatttcaatca

SEQ ID NO: 55900 - DNA, 1142 bp, Heterodera glycines
accaaaagcaaaacgatataaccaaaatataaggaaaaccttcccaaaaaattttttctccatcttcctttttgatactaacagcatcagagtgctaaaattaagttgtaaataaaatttggtgcgctttagagcactttctgaaaaaaatatttatgaaacaaaaaaatcgattttttcaagtgtccgtttggggtactcaaacaattatggggagcaaaaatccaacgcagaattaaagtacaggctatagggaagctattcccgaaggattcggtctccccataaatctgggcgcatcggttcggggggactgccccgaaaacaaaaaaatcgattttttcaagtgtccgtttggggtactcaaacaattatggggagcaaaaatccaacgcagaattaaagtacaggctatagggaagctattccggaaggattcggtctccccataaatctgggcgcatcggttcggggggactgccccgaaaacaaaaaaatcgattttttcaagtgtccgtttggggtactcaaacaattatggggagcaaaaatccaacgcagaattaaagtacaggctatagggaagctattcccgaaggattcggtctccccataaatctgggcgcatcggttcggggggactgccccgaaaacaaaaaaatcgattttttcaagtgtccgtttggggtactcaaacatttatggggagcaaaaatccaacgcagaattaaagtacagactatagggaagctattcccgaaggattcggtctccccataaatctgggcgcatcggttcagggggactgccccgaaaacccaaaaaaaaattttttggataaaaattatttaaatgaactgactagataatatttaaaataggttatttctcttcctttcagtatccctgcaaagtttgttgcgcttctgatcagtttctgaaaaaaaagttaagcctaaactttttggcctgtttaaaaaggaattaaaaatttttaaaaattttattcatctccctttttgatagaaaaagcatcagagtgcctaaactaacatgtaaataaaatttggtgcgtttcagaaccctttctgaaaaaatatttaagaattaattttgcaaaaaataaataaaaacgaaagact

SEQ ID NO: 55901 - DNA, 501 bp, Heterodera glycines
atgacttgctgttcggacgagcgtcaggcggacgcggacgttggcgaccacttctcgcgctgctgtttcgaacattttgtggacggggaagtgagttggccatacggtagtgggcaaatgtgtcggtgtacagtattttgataacaaaggatccctgctgccccagggcatatgccgctgagcaatggcgttccgttcacgagctgtgcctgcccaacgtggagatggacttgaccggggtcaaagtgccgtcgccgctcgttggcaccactttaattgtcggttttttcggggaaaacttggcattttgcctgccaattagggttaaactctcggcttggccctctttttcagactgagttcgacttcagcaaaacggacagatggcgcttcgagtgccgttacggttcccacgtgcaacagtacagtttcttcgaagcatccgccagtgcagagaacagtgaccaacagcagcaacggaacgaagcggaggacgaataa

SEQ ID NO: 55902 - DNA, 809 bp, Heterodera glycines
atggtttacgtcaatggccaaaagggagtcgcgccggggacaccgaatgtgccgaacggagcgcgagccgagccgaagacaaactttggagagactctgctcaagtactatgaatactatgaatttgtgccgtccgttttaagttggtattcccattttagcactttgagtgtttgcaaagatttttcggttcatcacaaagcgttggaatactgcaaggaaacgaaggcatctggtgagcaacacaattcactgcttgaaaaactacgaaatccaaaatgcttaagccattggcgaggtgaagcaattgaacgaacggattttctcgtccgacagaattctccgcgaaacttcggaaaaaagcgcaaaatttatggcagcagcgcttttccacaaggcaaatgccggtgagaaaagggggctttgtaaaattaaaatggtaaaacttttcccaaaaaacagatgaaaagcttttcatgaaggcagccgaggagatcaacgaactgtgttcacttttggaagaggcaacgaaacgggtgaaagcgatggtcaaaaatgggaaaaaggaacatttttcttgggacgggatttaattgtgccgctgttttgtgcttaattaattgtctctgtttttggctctttattctcacccgctccgttttcagaaggcggccgaacgcgcgagggtcgaagcggcgactgcgacaatcgttggcctgcagaacgaattcgacgtgatgacttattgatgccccaaatgtttgctgcaatacttttgactacgaactgtagaaaccatacataataaa

SEQ ID NO: 55903 - DNA, 602 bp, Heterodera glycines
atgtcgggctacggtagcgggtacggctcaacgggttacggtcagcagcagtacagcccgtacagcagcaggtgagtaaatgcaaataaagttagctatcaattcccacacattctcagctacggttctggcggctacggtacttctgggtacggcggctacggtcaacaacagtacagcccctacggaagcaggtaattggacaaagaaaaggcagacactgtcagccaataaattatttgtccagtatgagtcgattggttaattaaccatgcttaaagggctaatgaactaattagccatcgttgcaccgtttcagtggttatggaagctcgggctacggtggatatggcagctcgggctacggtcagcaacagtacagtctgccatcatcgtacggagggtggggaaggatcaaagccatccgtcaaacatttggccattttgaacagttacggctcatcgggttacggtggctatggccaacaggcagcctacggtacatcgagcatttgctgagaaacggcgaaaagaagagagacagaggcaaaacgacacaaaagttataacttcgaattgaactgttctaatcaatcaataaa

SEQ ID NO: 55904 - DNA, 913 bp, Heterodera glycines
ggcaggacaagaaaagaatgaagttgatgcctcatgaaactcggaattggttatgttttgtcgaaaatatccttacataatactcataaaaaatacaaataattcaacccacctattctatgaccacattctgaaaaaaatcccagaaatacgaggaaagatatgcttggtcacaataaaataaaaaatggctagtatgtaaaaatttgcggtcacaaataaaataaaaaatggctaatatgtaaaattggcgtccagaaatttttagactaatccgaagcaaagcacgaatgaattaaagaggcgaaagaattcacagtatcgtttctaatagggaaatattgacagaatattcggctaaaaacgggtttgatcatttttagcgcatttttaggtatacatttgagacaattgggcaggacaagaaaagaatgaagttgatgcctcatgaaactcggaattggttatgttttgtcgaaaatattcttacataatactcataaaaaatacaaataattcaacccacctattctatgaccacattctgaaaaaaatcccagaaatacgaggaaagatatgcttggtcacaataaaataaaaaatggctagtatgtaaaaatttgcggtcacaaataaaataaaaaatggctaatatgtaaaattggcgtccagaaatttttagactaatccgaagcaaagcacgaatgaattaaagaggcgaaagaattcacagtatcgtttctaatagggaaatattgacaggatattcggctaaaaacgggtttgatcatttttagcgcatttttaggtatacatttgagacaattgggcaggacaagaaaagaatgaagttgatgcctcatgaaactcggaattggttatgttttgtcgaaaatatccttacataatactc
